United States Patent Application Publication US 2014/0004565 A1 - sequence listing, part 125

SEQ ID NO: 3141250 - RNA, 19 nt, Artificial Sequence
  Description of Artificial Sequence: Synthetic oligonucleotide
uuagaaaagggcuggagag

SEQ ID NO: 3141251 - RNA, 19 nt, Artificial Sequence
  Description of Artificial Sequence: Synthetic oligonucleotide
aaggcguacaugcagacag

SEQ ID NO: 3141252 - RNA, 19 nt, Artificial Sequence
  Description of Artificial Sequence: Synthetic oligonucleotide
uguuuuagcaugaaggcgu

SEQ ID NO: 3141253 - RNA, 19 nt, Artificial Sequence
  Description of Artificial Sequence: Synthetic oligonucleotide
uuaauuagaaaagggcugg

SEQ ID NO: 3141254 - RNA, 19 nt, Artificial Sequence
  Description of Artificial Sequence: Synthetic oligonucleotide
cuguaaugggauuugaugc

SEQ ID NO: 3141255 - RNA, 19 nt, Artificial Sequence
  Description of Artificial Sequence: Synthetic oligonucleotide
ucuguaaugggauuugaug

SEQ ID NO: 3141256 - RNA, 19 nt, Artificial Sequence
  Description of Artificial Sequence: Synthetic oligonucleotide
cuuguuuuagcaugaaggc

SEQ ID NO: 3141257 - RNA, 19 nt, Artificial Sequence
  Description of Artificial Sequence: Synthetic oligonucleotide
ucaauucucagcaaccaca

SEQ ID NO: 3141258 - RNA, 19 nt, Artificial Sequence
  Description of Artificial Sequence: Synthetic oligonucleotide
gaugccuuguuuuagcaug

SEQ ID NO: 3141259 - RNA, 19 nt, Artificial Sequence
  Description of Artificial Sequence: Synthetic oligonucleotide
ccuuguuuuagcaugaagg

SEQ ID NO: 3141260 - RNA, 19 nt, Artificial Sequence
  Description of Artificial Sequence: Synthetic oligonucleotide
ucagugguuaacuacuggc

SEQ ID NO: 3141261 - RNA, 19 nt, Artificial Sequence
  Description of Artificial Sequence: Synthetic oligonucleotide
uguaaugggauuugaugcc

SEQ ID NO: 3141262 - RNA, 19 nt, Artificial Sequence
  Description of Artificial Sequence: Synthetic oligonucleotide
auuagaaaagggcuggaga

SEQ ID NO: 3141263 - RNA, 19 nt, Artificial Sequence
  Description of Artificial Sequence: Synthetic oligonucleotide
auuaauuagaaaagggcug

SEQ ID NO: 3141264 - RNA, 19 nt, Artificial Sequence
  Description of Artificial Sequence: Synthetic oligonucleotide
aacuacuggcugcucuucc

SEQ ID NO: 3141265 - RNA, 19 nt, Artificial Sequence
  Description of Artificial Sequence: Synthetic oligonucleotide
ucacaagcaucuguaaugg

SEQ ID NO: 3141266 - RNA, 19 nt, Artificial Sequence
  Description of Artificial Sequence: Synthetic oligonucleotide
uuguuuuagcaugaaggcg

SEQ ID NO: 3141267 - RNA, 19 nt, Artificial Sequence
  Description of Artificial Sequence: Synthetic oligonucleotide
aauuagaaaagggcuggag

SEQ ID NO: 3141268 - RNA, 19 nt, Artificial Sequence
  Description of Artificial Sequence: Synthetic oligonucleotide
cucacaagcaucuguaaug

SEQ ID NO: 3141269 - RNA, 19 nt, Artificial Sequence
  Description of Artificial Sequence: Synthetic oligonucleotide
uuugaugccuuguuuuagc

SEQ ID NO: 3141270 - RNA, 19 nt, Artificial Sequence
  Description of Artificial Sequence: Synthetic oligonucleotide
cacauggugucucacaagc

SEQ ID NO: 3141271 - RNA, 19 nt, Artificial Sequence
  Description of Artificial Sequence: Synthetic oligonucleotide
agugguuaacuacuggcug

SEQ ID NO: 3141272 - RNA, 19 nt, Artificial Sequence
  Description of Artificial Sequence: Synthetic oligonucleotide
uuuagcaugaaggcguaca

SEQ ID NO: 3141273 - RNA, 19 nt, Artificial Sequence
  Description of Artificial Sequence: Synthetic oligonucleotide
aaugggauuugaugccuug

SEQ ID NO: 3141274 - RNA, 19 nt, Artificial Sequence
  Description of Artificial Sequence: Synthetic oligonucleotide
augcagacagagcacuccc

SEQ ID NO: 3141275 - RNA, 19 nt, Artificial Sequence
  Description of Artificial Sequence: Synthetic oligonucleotide
caugaaggcguacaugcag

SEQ ID NO: 3141276 - RNA, 19 nt, Artificial Sequence
  Description of Artificial Sequence: Synthetic oligonucleotide
uucaauucucagcaaccac

SEQ ID NO: 3141277 - RNA, 19 nt, Artificial Sequence
  Description of Artificial Sequence: Synthetic oligonucleotide
uggugucucacaagcaucu

SEQ ID NO: 3141278 - RNA, 19 nt, Artificial Sequence
  Description of Artificial Sequence: Synthetic oligonucleotide
ugucucacaagcaucugua

SEQ ID NO: 3141279 - RNA, 19 nt, Artificial Sequence
  Description of Artificial Sequence: Synthetic oligonucleotide
ucucacaagcaucuguaau

SEQ ID NO: 3141280 - RNA, 19 nt, Artificial Sequence
  Description of Artificial Sequence: Synthetic oligonucleotide
gugguuaacuacuggcugc

SEQ ID NO: 3141281 - RNA, 19 nt, Artificial Sequence
  Description of Artificial Sequence: Synthetic oligonucleotide
uuagcaugaaggcguacau

SEQ ID NO: 3141282 - RNA, 19 nt, Artificial Sequence
  Description of Artificial Sequence: Synthetic oligonucleotide
uccccaaguccuaaccucc

SEQ ID NO: 3141283 - RNA, 19 nt, Artificial Sequence
  Description of Artificial Sequence: Synthetic oligonucleotide
agacagagcacuccccaag

SEQ ID NO: 3141284 - RNA, 19 nt, Artificial Sequence
  Description of Artificial Sequence: Synthetic oligonucleotide
acaagcaucuguaauggga

SEQ ID NO: 3141285 - RNA, 19 nt, Artificial Sequence
  Description of Artificial Sequence: Synthetic oligonucleotide
uugaugccuuguuuuagca

SEQ ID NO: 3141286 - RNA, 19 nt, Artificial Sequence
  Description of Artificial Sequence: Synthetic oligonucleotide
aauucucagcaaccacaug

SEQ ID NO: 3141287 - RNA, 19 nt, Artificial Sequence
  Description of Artificial Sequence: Synthetic oligonucleotide
auuugaugccuuguuuuag

SEQ ID NO: 3141288 - RNA, 19 nt, Artificial Sequence
  Description of Artificial Sequence: Synthetic oligonucleotide
cucagugguuaacuacugg

SEQ ID NO: 3141289 - RNA, 19 nt, Artificial Sequence
  Description of Artificial Sequence: Synthetic oligonucleotide
uuaacuacuggcugcucuu

SEQ ID NO: 3141290 - RNA, 19 nt, Artificial Sequence
  Description of Artificial Sequence: Synthetic oligonucleotide
uacaugcagacagagcacu

SEQ ID NO: 3141291 - RNA, 19 nt, Artificial Sequence
  Description of Artificial Sequence: Synthetic oligonucleotide
ucucagcaaccacauggug

SEQ ID NO: 3141292 - RNA, 19 nt, Artificial Sequence
  Description of Artificial Sequence: Synthetic oligonucleotide
gauuugaugccuuguuuua

SEQ ID NO: 3141293 - RNA, 19 nt, Artificial Sequence
  Description of Artificial Sequence: Synthetic oligonucleotide
uagaaaagggcuggagaga

SEQ ID NO: 3141294 - RNA, 19 nt, Artificial Sequence
  Description of Artificial Sequence: Synthetic oligonucleotide
ugaaggcguacaugcagac

SEQ ID NO: 3141295 - RNA, 19 nt, Artificial Sequence
  Description of Artificial Sequence: Synthetic oligonucleotide
uggcucagugguuaacuac

SEQ ID NO: 3141296 - RNA, 19 nt, Artificial Sequence
  Description of Artificial Sequence: Synthetic oligonucleotide
ugcagacagagcacucccc

SEQ ID NO: 3141297 - RNA, 19 nt, Artificial Sequence
  Description of Artificial Sequence: Synthetic oligonucleotide
caugcagacagagcacucc

SEQ ID NO: 3141298 - RNA, 19 nt, Artificial Sequence
  Description of Artificial Sequence: Synthetic oligonucleotide
uaauuagaaaagggcugga

SEQ ID NO: 3141299 - RNA, 19 nt, Artificial Sequence
  Description of Artificial Sequence: Synthetic oligonucleotide
ugggauuugaugccuuguu

SEQ ID NO: 3141300 - RNA, 19 nt, Artificial Sequence
  Description of Artificial Sequence: Synthetic oligonucleotide
acuacuggcugcucuucca

SEQ ID NO: 3141301 - RNA, 19 nt, Artificial Sequence
  Description of Artificial Sequence: Synthetic oligonucleotide
auggugucucacaagcauc

SEQ ID NO: 3141302 - RNA, 19 nt, Artificial Sequence
  Description of Artificial Sequence: Synthetic oligonucleotide
cacaagcaucuguaauggg

SEQ ID NO: 3141303 - RNA, 19 nt, Artificial Sequence
  Description of Artificial Sequence: Synthetic oligonucleotide
ugaugccuuguuuuagcau

SEQ ID NO: 3141304 - RNA, 19 nt, Artificial Sequence
  Description of Artificial Sequence: Synthetic oligonucleotide
cguacaugcagacagagca

SEQ ID NO: 3141305 - RNA, 19 nt, Artificial Sequence
  Description of Artificial Sequence: Synthetic oligonucleotide
acuccccaaguccuaaccu

SEQ ID NO: 3141306 - RNA, 19 nt, Artificial Sequence
  Description of Artificial Sequence: Synthetic oligonucleotide
cacuccccaaguccuaacc

SEQ ID NO: 3141307 - RNA, 19 nt, Artificial Sequence
  Description of Artificial Sequence: Synthetic oligonucleotide
guuaacuacuggcugcucu

SEQ ID NO: 3141308 - RNA, 19 nt, Artificial Sequence
  Description of Artificial Sequence: Synthetic oligonucleotide
ugguuaacuacuggcugcu

SEQ ID NO: 3141309 - RNA, 19 nt, Artificial Sequence
  Description of Artificial Sequence: Synthetic oligonucleotide
cuacuggcugcucuuccag

SEQ ID NO: 3141310 - RNA, 19 nt, Artificial Sequence
  Description of Artificial Sequence: Synthetic oligonucleotide
uagcaugaaggcguacaug

SEQ ID NO: 3141311 - RNA, 19 nt, Artificial Sequence
  Description of Artificial Sequence: Synthetic oligonucleotide
cuccccaaguccuaaccuc

SEQ ID NO: 3141312 - RNA, 19 nt, Artificial Sequence
  Description of Artificial Sequence: Synthetic oligonucleotide
uaaugggauuugaugccuu

SEQ ID NO: 3141313 - RNA, 19 nt, Artificial Sequence
  Description of Artificial Sequence: Synthetic oligonucleotide
cucagcaaccacauggugu

SEQ ID NO: 3141314 - RNA, 19 nt, Artificial Sequence
  Description of Artificial Sequence: Synthetic oligonucleotide
agcaucuguaaugggauuu

SEQ ID NO: 3141315 - RNA, 19 nt, Artificial Sequence
  Description of Artificial Sequence: Synthetic oligonucleotide
augaaggcguacaugcaga

SEQ ID NO: 3141316 - RNA, 19 nt, Artificial Sequence
  Description of Artificial Sequence: Synthetic oligonucleotide
caagcaucuguaaugggau

SEQ ID NO: 3141317 - RNA, 19 nt, Artificial Sequence
  Description of Artificial Sequence: Synthetic oligonucleotide
acaugcagacagagcacuc

SEQ ID NO: 3141318 - RNA, 19 nt, Artificial Sequence
  Description of Artificial Sequence: Synthetic oligonucleotide
uuuuagcaugaaggcguac

SEQ ID NO: 3141319 - RNA, 19 nt, Artificial Sequence
  Description of Artificial Sequence: Synthetic oligonucleotide
gccuuguuuuagcaugaag

SEQ ID NO: 3141320 - RNA, 19 nt, Artificial Sequence
  Description of Artificial Sequence: Synthetic oligonucleotide
augggauuugaugccuugu

SEQ ID NO: 3141321 - RNA, 19 nt, Artificial Sequence
  Description of Artificial Sequence: Synthetic oligonucleotide
aucuguaaugggauuugau

SEQ ID NO: 3141322 - RNA, 19 nt, Artificial Sequence
  Description of Artificial Sequence: Synthetic oligonucleotide
auggcucagugguuaacua

SEQ ID NO: 3141323 - RNA, 19 nt, Artificial Sequence
  Description of Artificial Sequence: Synthetic oligonucleotide
gacagagcacuccccaagu

SEQ ID NO: 3141324 - RNA, 19 nt, Artificial Sequence
  Description of Artificial Sequence: Synthetic oligonucleotide
uaacuacuggcugcucuuc

SEQ ID NO: 3141325 - RNA, 19 nt, Artificial Sequence
  Description of Artificial Sequence: Synthetic oligonucleotide
cagugguuaacuacuggcu

SEQ ID NO: 3141326 - RNA, 19 nt, Artificial Sequence
  Description of Artificial Sequence: Synthetic oligonucleotide
gaaggcguacaugcagaca

SEQ ID NO: 3141327 - RNA, 19 nt, Artificial Sequence
  Description of Artificial Sequence: Synthetic oligonucleotide
ggcguacaugcagacagag

SEQ ID NO: 3141328 - RNA, 19 nt, Artificial Sequence
  Description of Artificial Sequence: Synthetic oligonucleotide
cauggugucucacaagcau

SEQ ID NO: 3141329 - RNA, 19 nt, Artificial Sequence
  Description of Artificial Sequence: Synthetic oligonucleotide
ggauuugaugccuuguuuu

SEQ ID NO: 3141330 - RNA, 19 nt, Artificial Sequence
  Description of Artificial Sequence: Synthetic oligonucleotide
caauucucagcaaccacau

SEQ ID NO: 3141331 - RNA, 19 nt, Artificial Sequence
  Description of Artificial Sequence: Synthetic oligonucleotide
gcagacagagcacucccca

SEQ ID NO: 3141332 - RNA, 19 nt, Artificial Sequence
  Description of Artificial Sequence: Synthetic oligonucleotide
gugucucacaagcaucugu

SEQ ID NO: 3141333 - RNA, 19 nt, Artificial Sequence
  Description of Artificial Sequence: Synthetic oligonucleotide
guaaugggauuugaugccu

SEQ ID NO: 3141334 - RNA, 19 nt, Artificial Sequence
  Description of Artificial Sequence: Synthetic oligonucleotide
gucucacaagcaucuguaa

SEQ ID NO: 3141335 - RNA, 19 nt, Artificial Sequence
  Description of Artificial Sequence: Synthetic oligonucleotide
acauggugucucacaagca

SEQ ID NO: 3141336 - RNA, 19 nt, Artificial Sequence
  Description of Artificial Sequence: Synthetic oligonucleotide
augccuuguuuuagcauga

SEQ ID NO: 3141337 - RNA, 19 nt, Artificial Sequence
  Description of Artificial Sequence: Synthetic oligonucleotide
caucuguaaugggauuuga

SEQ ID NO: 3141338 - RNA, 19 nt, Artificial Sequence
  Description of Artificial Sequence: Synthetic oligonucleotide
guuuuagcaugaaggcgua

SEQ ID NO: 3141339 - RNA, 19 nt, Artificial Sequence
  Description of Artificial Sequence: Synthetic oligonucleotide
ugccuuguuuuagcaugaa

SEQ ID NO: 3141340 - RNA, 19 nt, Artificial Sequence
  Description of Artificial Sequence: Synthetic oligonucleotide
cagacagagcacuccccaa

SEQ ID NO: 3141341 - RNA, 19 nt, Artificial Sequence
  Description of Artificial Sequence: Synthetic oligonucleotide
agcacuccccaaguccuaa

SEQ ID NO: 3141342 - RNA, 19 nt, Artificial Sequence
  Description of Artificial Sequence: Synthetic oligonucleotide
ggcucagugguuaacuacu

SEQ ID NO: 3141343 - RNA, 19 nt, Artificial Sequence
  Description of Artificial Sequence: Synthetic oligonucleotide
gcucagugguuaacuacug

SEQ ID NO: 3141344 - RNA, 19 nt, Artificial Sequence
  Description of Artificial Sequence: Synthetic oligonucleotide
gcguacaugcagacagagc

SEQ ID NO: 3141345 - RNA, 19 nt, Artificial Sequence
  Description of Artificial Sequence: Synthetic oligonucleotide
ggugucucacaagcaucug

SEQ ID NO: 3141346 - RNA, 19 nt, Artificial Sequence
  Description of Artificial Sequence: Synthetic oligonucleotide
ccccaaguccuaaccuccc

SEQ ID NO: 3141347 - RNA, 19 nt, Artificial Sequence
  Description of Artificial Sequence: Synthetic oligonucleotide
gggauuugaugccuuguuu

SEQ ID NO: 3141348 - RNA, 19 nt, Artificial Sequence
  Description of Artificial Sequence: Synthetic oligonucleotide
aggcguacaugcagacaga

SEQ ID NO: 3141349 - RNA, 19 nt, Artificial Sequence
  Description of Artificial Sequence: Synthetic oligonucleotide
gcaugaaggcguacaugca

SEQ ID NO: 3141350 - RNA, 19 nt, Artificial Sequence
  Description of Artificial Sequence: Synthetic oligonucleotide
gcacuccccaaguccuaac

SEQ ID NO: 3141351 - RNA, 19 nt, Artificial Sequence
  Description of Artificial Sequence: Synthetic oligonucleotide
gguuaacuacuggcugcuc

SEQ ID NO: 3141352 - RNA, 19 nt, Artificial Sequence
  Description of Artificial Sequence: Synthetic oligonucleotide
aauaaauugaaaggcacgc

SEQ ID NO: 3141353 - RNA, 19 nt, Artificial Sequence
  Description of Artificial Sequence: Synthetic oligonucleotide
aacuuaaguaauaauaagc

SEQ ID NO: 3141354 - RNA, 19 nt, Artificial Sequence
  Description of Artificial Sequence: Synthetic oligonucleotide
aagcuaaauaaauugaaag

SEQ ID NO: 3141355 - RNA, 19 nt, Artificial Sequence
  Description of Artificial Sequence: Synthetic oligonucleotide
uuaaguaauaauaagcuaa

SEQ ID NO: 3141356 - RNA, 19 nt, Artificial Sequence
  Description of Artificial Sequence: Synthetic oligonucleotide
uugguuacaaaguagacag

SEQ ID NO: 3141357 - RNA, 19 nt, Artificial Sequence
  Description of Artificial Sequence: Synthetic oligonucleotide
uuuaacuuaaguaauaaua

SEQ ID NO: 3141358 - RNA, 19 nt, Artificial Sequence
  Description of Artificial Sequence: Synthetic oligonucleotide
uaauaagcuaaauaaauug

SEQ ID NO: 3141359 - RNA, 19 nt, Artificial Sequence
  Description of Artificial Sequence: Synthetic oligonucleotide
guaauaauaagcuaaauaa

SEQ ID NO: 3141360 - RNA, 19 nt, Artificial Sequence
  Description of Artificial Sequence: Synthetic oligonucleotide
agcuaaauaaauugaaagg

SEQ ID NO: 3141361 - RNA, 19 nt, Artificial Sequence
  Description of Artificial Sequence: Synthetic oligonucleotide
uuaacuuaaguaauaauaa

SEQ ID NO: 3141362 - RNA, 19 nt, Artificial Sequence
  Description of Artificial Sequence: Synthetic oligonucleotide
auugcauuugguuacaaag

SEQ ID NO: 3141363 - RNA, 19 nt, Artificial Sequence
  Description of Artificial Sequence: Synthetic oligonucleotide
agaagaaacaauuuucaag

SEQ ID NO: 3141364 - RNA, 19 nt, Artificial Sequence
  Description of Artificial Sequence: Synthetic oligonucleotide
caauuuuaggaauaaagag

SEQ ID NO: 3141365 - RNA, 19 nt, Artificial Sequence
  Description of Artificial Sequence: Synthetic oligonucleotide
acaauuuucaagucaaaag

SEQ ID NO: 3141366 - RNA, 19 nt, Artificial Sequence
  Description of Artificial Sequence: Synthetic oligonucleotide
cacaauuuuaggaauaaag

SEQ ID NO: 3141367 - RNA, 19 nt, Artificial Sequence
  Description of Artificial Sequence: Synthetic oligonucleotide
uuaacuauucuacagcccu

SEQ ID NO: 3141368 - RNA, 19 nt, Artificial Sequence
  Description of Artificial Sequence: Synthetic oligonucleotide
aauaauaagcuaaauaaau

SEQ ID NO: 3141369 - RNA, 19 nt, Artificial Sequence
  Description of Artificial Sequence: Synthetic oligonucleotide
aaguagacagagaagaaac

SEQ ID NO: 3141370 - RNA, 19 nt, Artificial Sequence
  Description of Artificial Sequence: Synthetic oligonucleotide
uugaaaggcacgcugauug

SEQ ID NO: 3141371 - RNA, 19 nt, Artificial Sequence
  Description of Artificial Sequence: Synthetic oligonucleotide
gagaugagauuuuagcugg

SEQ ID NO: 3141372 - RNA, 19 nt, Artificial Sequence
  Description of Artificial Sequence: Synthetic oligonucleotide
aagucaaaaguauucugag

SEQ ID NO: 3141373 - RNA, 19 nt, Artificial Sequence
  Description of Artificial Sequence: Synthetic oligonucleotide
uaaauugaaaggcacgcug

SEQ ID NO: 3141374 - RNA, 19 nt, Artificial Sequence
  Description of Artificial Sequence: Synthetic oligonucleotide
cuuacuacacaauuuuagg

SEQ ID NO: 3141375 - RNA, 19 nt, Artificial Sequence
  Description of Artificial Sequence: Synthetic oligonucleotide
ucugagaugagauuuuagc

SEQ ID NO: 3141376 - RNA, 19 nt, Artificial Sequence
  Description of Artificial Sequence: Synthetic oligonucleotide
aaauaaauugaaaggcacg

SEQ ID NO: 3141377 - RNA, 19 nt, Artificial Sequence
  Description of Artificial Sequence: Synthetic oligonucleotide
ugagaugagauuuuagcug

SEQ ID NO: 3141378 - RNA, 19 nt, Artificial Sequence
  Description of Artificial Sequence: Synthetic oligonucleotide
cuaaguuuaacuuaaguaa

SEQ ID NO: 3141379 - RNA, 19 nt, Artificial Sequence
  Description of Artificial Sequence: Synthetic oligonucleotide
uaauaauaagcuaaauaaa

SEQ ID NO: 3141380 - RNA, 19 nt, Artificial Sequence
  Description of Artificial Sequence: Synthetic oligonucleotide
aguaauaauaagcuaaaua

SEQ ID NO: 3141381 - RNA, 19 nt, Artificial Sequence
  Description of Artificial Sequence: Synthetic oligonucleotide
aauaagcuaaauaaauuga

SEQ ID NO: 3141382 - RNA, 19 nt, Artificial Sequence
  Description of Artificial Sequence: Synthetic oligonucleotide
uauucuacagcccuaaguu

SEQ ID NO: 3141383 - RNA, 19 nt, Artificial Sequence
  Description of Artificial Sequence: Synthetic oligonucleotide
aagaaacaauuuucaaguc

SEQ ID NO: 3141384 - RNA, 19 nt, Artificial Sequence
  Description of Artificial Sequence: Synthetic oligonucleotide
uuucaagucaaaaguauuc

SEQ ID NO: 3141385 - RNA, 19 nt, Artificial Sequence
  Description of Artificial Sequence: Synthetic oligonucleotide
uuaggaauaaagaguaaaa

SEQ ID NO: 3141386 - RNA, 19 nt, Artificial Sequence
  Description of Artificial Sequence: Synthetic oligonucleotide
gauuuuagcuggcacaaug

SEQ ID NO: 3141387 - RNA, 19 nt, Artificial Sequence
  Description of Artificial Sequence: Synthetic oligonucleotide
uuuagcuggcacaaugucc

SEQ ID NO: 3141388 - RNA, 19 nt, Artificial Sequence
  Description of Artificial Sequence: Synthetic oligonucleotide
uuacuacacaauuuuagga

SEQ ID NO: 3141389 - RNA, 19 nt, Artificial Sequence
  Description of Artificial Sequence: Synthetic oligonucleotide
uuagcuggcacaauguccu

SEQ ID NO: 3141390 - RNA, 19 nt, Artificial Sequence
  Description of Artificial Sequence: Synthetic oligonucleotide
uaaguuuaacuuaaguaau

SEQ ID NO: 3141391 - RNA, 19 nt, Artificial Sequence
  Description of Artificial Sequence: Synthetic oligonucleotide
agaaacaauuuucaaguca

SEQ ID NO: 3141392 - RNA, 19 nt, Artificial Sequence
  Description of Artificial Sequence: Synthetic oligonucleotide
acuuaaguaauaauaagcu

SEQ ID NO: 3141393 - RNA, 19 nt, Artificial Sequence
  Description of Artificial Sequence: Synthetic oligonucleotide
uaagcuaaauaaauugaaa

SEQ ID NO: 3141394 - RNA, 19 nt, Artificial Sequence
  Description of Artificial Sequence: Synthetic oligonucleotide
uaaguaauaauaagcuaaa

SEQ ID NO: 3141395 - RNA, 19 nt, Artificial Sequence
  Description of Artificial Sequence: Synthetic oligonucleotide
ugagauuuuagcuggcaca

SEQ ID NO: 3141396 - RNA, 19 nt, Artificial Sequence
  Description of Artificial Sequence: Synthetic oligonucleotide
uacuacacaauuuuaggaa

SEQ ID NO: 3141397 - RNA, 19 nt, Artificial Sequence
  Description of Artificial Sequence: Synthetic oligonucleotide
uacaaaguagacagagaag

SEQ ID NO: 3141398 - RNA, 19 nt, Artificial Sequence
  Description of Artificial Sequence: Synthetic oligonucleotide
gcuaaauaaauugaaaggc

SEQ ID NO: 3141399 - RNA, 19 nt, Artificial Sequence
  Description of Artificial Sequence: Synthetic oligonucleotide
uuuaggaauaaagaguaaa

SEQ ID NO: 3141400 - RNA, 19 nt, Artificial Sequence
  Description of Artificial Sequence: Synthetic oligonucleotide
uuugguuacaaaguagaca

SEQ ID NO: 3141401 - RNA, 19 nt, Artificial Sequence
  Description of Artificial Sequence: Synthetic oligonucleotide
acaauuuuaggaauaaaga

SEQ ID NO: 3141402 - RNA, 19 nt, Artificial Sequence
  Description of Artificial Sequence: Synthetic oligonucleotide
augagauuuuagcuggcac

SEQ ID NO: 3141403 - RNA, 19 nt, Artificial Sequence
  Description of Artificial Sequence: Synthetic oligonucleotide
ucaagucaaaaguauucug

SEQ ID NO: 3141404 - RNA, 19 nt, Artificial Sequence
  Description of Artificial Sequence: Synthetic oligonucleotide
cagagaagaaacaauuuuc

SEQ ID NO: 3141405 - RNA, 19 nt, Artificial Sequence
  Description of Artificial Sequence: Synthetic oligonucleotide
aaaguauucugagaugaga

SEQ ID NO: 3141406 - RNA, 19 nt, Artificial Sequence
  Description of Artificial Sequence: Synthetic oligonucleotide
uugcauuugguuacaaagu

SEQ ID NO: 3141407 - RNA, 19 nt, Artificial Sequence
  Description of Artificial Sequence: Synthetic oligonucleotide
ucaaaaguauucugagaug

SEQ ID NO: 3141408 - RNA, 19 nt, Artificial Sequence
  Description of Artificial Sequence: Synthetic oligonucleotide
acuuacuacacaauuuuag

SEQ ID NO: 3141409 - RNA, 19 nt, Artificial Sequence
  Description of Artificial Sequence: Synthetic oligonucleotide
uugcccuuaacuauucuac

SEQ ID NO: 3141410 - RNA, 19 nt, Artificial Sequence
  Description of Artificial Sequence: Synthetic oligonucleotide
auuuuaggaauaaagagua

SEQ ID NO: 3141411 - RNA, 19 nt, Artificial Sequence
  Description of Artificial Sequence: Synthetic oligonucleotide
gaaacaauuuucaagucaa

SEQ ID NO: 3141412 - RNA, 19 nt, Artificial Sequence
  Description of Artificial Sequence: Synthetic oligonucleotide
cuuaacuauucuacagccc

SEQ ID NO: 3141413 - RNA, 19 nt, Artificial Sequence
  Description of Artificial Sequence: Synthetic oligonucleotide
uuuucaagucaaaaguauu

SEQ ID NO: 3141414 - RNA, 19 nt, Artificial Sequence
  Description of Artificial Sequence: Synthetic oligonucleotide
aauuuucaagucaaaagua

SEQ ID NO: 3141415 - RNA, 19 nt, Artificial Sequence
  Description of Artificial Sequence: Synthetic oligonucleotide
cauuugguuacaaaguaga

SEQ ID NO: 3141416 - RNA, 19 nt, Artificial Sequence
  Description of Artificial Sequence: Synthetic oligonucleotide
ugcauuugguuacaaagua

SEQ ID NO: 3141417 - RNA, 19 nt, Artificial Sequence
  Description of Artificial Sequence: Synthetic oligonucleotide
uguccuacacacuuacuac

SEQ ID NO: 3141418 - RNA, 19 nt, Artificial Sequence
  Description of Artificial Sequence: Synthetic oligonucleotide
caagucaaaaguauucuga

SEQ ID NO: 3141419 - RNA, 19 nt, Artificial Sequence
  Description of Artificial Sequence: Synthetic oligonucleotide
uucuacagcccuaaguuua

SEQ ID NO: 3141420 - RNA, 19 nt, Artificial Sequence
  Description of Artificial Sequence: Synthetic oligonucleotide
aaauugaaaggcacgcuga

SEQ ID NO: 3141421 - RNA, 19 nt, Artificial Sequence
  Description of Artificial Sequence: Synthetic oligonucleotide
aaguauucugagaugagau

SEQ ID NO: 3141422 - RNA, 19 nt, Artificial Sequence
  Description of Artificial Sequence: Synthetic oligonucleotide
aauugaaaggcacgcugau

SEQ ID NO: 3141423 - RNA, 19 nt, Artificial Sequence
  Description of Artificial Sequence: Synthetic oligonucleotide
gguuacaaaguagacagag

SEQ ID NO: 3141424 - RNA, 19 nt, Artificial Sequence
  Description of Artificial Sequence: Synthetic oligonucleotide
acuacacaauuuuaggaau

SEQ ID NO: 3141425 - RNA, 19 nt, Artificial Sequence
  Description of Artificial Sequence: Synthetic oligonucleotide
agagaagaaacaauuuuca

SEQ ID NO: 3141426 - RNA, 19 nt, Artificial Sequence
  Description of Artificial Sequence: Synthetic oligonucleotide
uucugagaugagauuuuag

SEQ ID NO: 3141427 - RNA, 19 nt, Artificial Sequence
  Description of Artificial Sequence: Synthetic oligonucleotide
caauuuucaagucaaaagu

SEQ ID NO: 3141428 - RNA, 19 nt, Artificial Sequence
  Description of Artificial Sequence: Synthetic oligonucleotide
aaaaguauucugagaugag

SEQ ID NO: 3141429 - RNA, 19 nt, Artificial Sequence
  Description of Artificial Sequence: Synthetic oligonucleotide
uuuuagcuggcacaauguc

SEQ ID NO: 3141430 - RNA, 19 nt, Artificial Sequence
  Description of Artificial Sequence: Synthetic oligonucleotide
acacuuacuacacaauuuu

SEQ ID NO: 3141431 - RNA, 19 nt, Artificial Sequence
  Description of Artificial Sequence: Synthetic oligonucleotide
caaaaguauucugagauga

SEQ ID NO: 3141432 - RNA, 19 nt, Artificial Sequence
  Description of Artificial Sequence: Synthetic oligonucleotide
gucaaaaguauucugagau

SEQ ID NO: 3141433 - RNA, 19 nt, Artificial Sequence
  Description of Artificial Sequence: Synthetic oligonucleotide
auuugguuacaaaguagac

SEQ ID NO: 3141434 - RNA, 19 nt, Artificial Sequence
  Description of Artificial Sequence: Synthetic oligonucleotide
uccuacacacuuacuacac

SEQ ID NO: 3141435 - RNA, 19 nt, Artificial Sequence
  Description of Artificial Sequence: Synthetic oligonucleotide
agucaaaaguauucugaga

SEQ ID NO: 3141436 - RNA, 19 nt, Artificial Sequence
  Description of Artificial Sequence: Synthetic oligonucleotide
auaagcuaaauaaauugaa

SEQ ID NO: 3141437 - RNA, 19 nt, Artificial Sequence
  Description of Artificial Sequence: Synthetic oligonucleotide
auguccuacacacuuacua

SEQ ID NO: 3141438 - RNA, 19 nt, Artificial Sequence
  Description of Artificial Sequence: Synthetic oligonucleotide
ccuuaacuauucuacagcc

SEQ ID NO: 3141439 - RNA, 19 nt, Artificial Sequence
  Description of Artificial Sequence: Synthetic oligonucleotide
aguuuaacuuaaguaauaa

SEQ ID NO: 3141440 - RNA, 19 nt, Artificial Sequence
  Description of Artificial Sequence: Synthetic oligonucleotide
uuuuaggaauaaagaguaa

SEQ ID NO: 3141441 - RNA, 19 nt, Artificial Sequence
  Description of Artificial Sequence: Synthetic oligonucleotide
cuuaaguaauaauaagcua

SEQ ID NO: 3141442 - RNA, 19 nt, Artificial Sequence
  Description of Artificial Sequence: Synthetic oligonucleotide
caauguccuacacacuuac

SEQ ID NO: 3141443 - RNA, 19 nt, Artificial Sequence
  Description of Artificial Sequence: Synthetic oligonucleotide
uacagcccuaaguuuaacu

SEQ ID NO: 3141444 - RNA, 19 nt, Artificial Sequence
  Description of Artificial Sequence: Synthetic oligonucleotide
acagcccuaaguuuaacuu

SEQ ID NO: 3141445 - RNA, 19 nt, Artificial Sequence
  Description of Artificial Sequence: Synthetic oligonucleotide
gagaagaaacaauuuucaa

SEQ ID NO: 3141446 - RNA, 19 nt, Artificial Sequence
  Description of Artificial Sequence: Synthetic oligonucleotide
acacacuuacuacacaauu

SEQ ID NO: 3141447 - RNA, 19 nt, Artificial Sequence
  Description of Artificial Sequence: Synthetic oligonucleotide
uacacaauuuuaggaauaa

SEQ ID NO: 3141448 - RNA, 19 nt, Artificial Sequence
  Description of Artificial Sequence: Synthetic oligonucleotide
ugaaaggcacgcugauugc

SEQ ID NO: 3141449 - RNA, 19 nt, Artificial Sequence
  Description of Artificial Sequence: Synthetic oligonucleotide
aaguaauaauaagcuaaau

SEQ ID NO: 3141450 - RNA, 19 nt, Artificial Sequence
  Description of Artificial Sequence: Synthetic oligonucleotide
auaaauugaaaggcacgcu

SEQ ID NO: 3141451 - RNA, 19 nt, Artificial Sequence
  Description of Artificial Sequence: Synthetic oligonucleotide
gcugauugcauuugguuac

SEQ ID NO: 3141452 - RNA, 19 nt, Artificial Sequence
  Description of Artificial Sequence: Synthetic oligonucleotide
aguauucugagaugagauu

SEQ ID NO: 3141453 - RNA, 19 nt, Artificial Sequence
  Description of Artificial Sequence: Synthetic oligonucleotide
cuacacacuuacuacacaa

SEQ ID NO: 3141454 - RNA, 19 nt, Artificial Sequence
  Description of Artificial Sequence: Synthetic oligonucleotide
aacuauucuacagcccuaa

SEQ ID NO: 3141455 - RNA, 19 nt, Artificial Sequence
  Description of Artificial Sequence: Synthetic oligonucleotide
uggcacaauguccuacaca

SEQ ID NO: 3141456 - RNA, 19 nt, Artificial Sequence
  Description of Artificial Sequence: Synthetic oligonucleotide
ugcccuuaacuauucuaca

SEQ ID NO: 3141457 - RNA, 19 nt, Artificial Sequence
  Description of Artificial Sequence: Synthetic oligonucleotide
aaguuuaacuuaaguaaua

SEQ ID NO: 3141458 - RNA, 19 nt, Artificial Sequence
  Description of Artificial Sequence: Synthetic oligonucleotide
uacacacuuacuacacaau

SEQ ID NO: 3141459 - RNA, 19 nt, Artificial Sequence
  Description of Artificial Sequence: Synthetic oligonucleotide
ucuacagcccuaaguuuaa

SEQ ID NO: 3141460 - RNA, 19 nt, Artificial Sequence
  Description of Artificial Sequence: Synthetic oligonucleotide
agacagagaagaaacaauu

SEQ ID NO: 3141461 - RNA, 19 nt, Artificial Sequence
  Description of Artificial Sequence: Synthetic oligonucleotide
auuuuagcuggcacaaugu

SEQ ID NO: 3141462 - RNA, 19 nt, Artificial Sequence
  Description of Artificial Sequence: Synthetic oligonucleotide
guagacagagaagaaacaa

SEQ ID NO: 3141463 - RNA, 19 nt, Artificial Sequence
  Description of Artificial Sequence: Synthetic oligonucleotide
gagauuuuagcuggcacaa

SEQ ID NO: 3141464 - RNA, 19 nt, Artificial Sequence
  Description of Artificial Sequence: Synthetic oligonucleotide
cugagaugagauuuuagcu

SEQ ID NO: 3141465 - RNA, 19 nt, Artificial Sequence
  Description of Artificial Sequence: Synthetic oligonucleotide
acuauucuacagcccuaag

SEQ ID NO: 3141466 - RNA, 19 nt, Artificial Sequence
  Description of Artificial Sequence: Synthetic oligonucleotide
gauugcauuugguuacaaa

SEQ ID NO: 3141467 - RNA, 19 nt, Artificial Sequence
  Description of Artificial Sequence: Synthetic oligonucleotide
agaugagauuuuagcuggc

SEQ ID NO: 3141468 - RNA, 19 nt, Artificial Sequence
  Description of Artificial Sequence: Synthetic oligonucleotide
guccuacacacuuacuaca

SEQ ID NO: 3141469 - RNA, 19 nt, Artificial Sequence
  Description of Artificial Sequence: Synthetic oligonucleotide
aguagacagagaagaaaca

SEQ ID NO: 3141470 - RNA, 19 nt, Artificial Sequence
  Description of Artificial Sequence: Synthetic oligonucleotide
ugguuacaaaguagacaga

SEQ ID NO: 3141471 - RNA, 19 nt, Artificial Sequence
  Description of Artificial Sequence: Synthetic oligonucleotide
uaacuauucuacagcccua

SEQ ID NO: 3141472 - RNA, 19 nt, Artificial Sequence
  Description of Artificial Sequence: Synthetic oligonucleotide
gaugagauuuuagcuggca

SEQ ID NO: 3141473 - RNA, 19 nt, Artificial Sequence
  Description of Artificial Sequence: Synthetic oligonucleotide
gcccuuaacuauucuacag

SEQ ID NO: 3141474 - RNA, 19 nt, Artificial Sequence
  Description of Artificial Sequence: Synthetic oligonucleotide
cccuuaacuauucuacagc

SEQ ID NO: 3141475 - RNA, 19 nt, Artificial Sequence
  Description of Artificial Sequence: Synthetic oligonucleotide
agcuggcacaauguccuac

SEQ ID NO: 3141476 - RNA, 19 nt, Artificial Sequence
  Description of Artificial Sequence: Synthetic oligonucleotide
aaacaauuuucaagucaaa

SEQ ID NO: 3141477 - RNA, 19 nt, Artificial Sequence
  Description of Artificial Sequence: Synthetic oligonucleotide
guuuaacuuaaguaauaau

SEQ ID NO: 3141478 - RNA, 19 nt, Artificial Sequence
  Description of Artificial Sequence: Synthetic oligonucleotide
aaaggcacgcugauugcau

SEQ ID NO: 3141479 - RNA, 19 nt, Artificial Sequence
  Description of Artificial Sequence: Synthetic oligonucleotide
gaaaggcacgcugauugca

SEQ ID NO: 3141480 - RNA, 19 nt, Artificial Sequence
  Description of Artificial Sequence: Synthetic oligonucleotide
cuauucuacagcccuaagu

SEQ ID NO: 3141481 - RNA, 19 nt, Artificial Sequence
  Description of Artificial Sequence: Synthetic oligonucleotide
cuacacaauuuuaggaaua

SEQ ID NO: 3141482 - RNA, 19 nt, Artificial Sequence
  Description of Artificial Sequence: Synthetic oligonucleotide
gcauuugguuacaaaguag

SEQ ID NO: 3141483 - RNA, 19 nt, Artificial Sequence
  Description of Artificial Sequence: Synthetic oligonucleotide
acgcugauugcauuugguu

SEQ ID NO: 3141484 - RNA, 19 nt, Artificial Sequence
  Description of Artificial Sequence: Synthetic oligonucleotide
aauguccuacacacuuacu

SEQ ID NO: 3141485 - RNA, 19 nt, Artificial Sequence
  Description of Artificial Sequence: Synthetic oligonucleotide
cuugcccuuaacuauucua

SEQ ID NO: 3141486 - RNA, 19 nt, Artificial Sequence
  Description of Artificial Sequence: Synthetic oligonucleotide
aaggcacgcugauugcauu

SEQ ID NO: 3141487 - RNA, 19 nt, Artificial Sequence
  Description of Artificial Sequence: Synthetic oligonucleotide
agcccuaaguuuaacuuaa

SEQ ID NO: 3141488 - RNA, 19 nt, Artificial Sequence
  Description of Artificial Sequence: Synthetic oligonucleotide
cacaauguccuacacacuu

SEQ ID NO: 3141489 - RNA, 19 nt, Artificial Sequence
  Description of Artificial Sequence: Synthetic oligonucleotide
acacaauuuuaggaauaaa

SEQ ID NO: 3141490 - RNA, 19 nt, Artificial Sequence
  Description of Artificial Sequence: Synthetic oligonucleotide
auucugagaugagauuuua

SEQ ID NO: 3141491 - RNA, 19 nt, Artificial Sequence
  Description of Artificial Sequence: Synthetic oligonucleotide
cuggcacaauguccuacac

SEQ ID NO: 3141492 - RNA, 19 nt, Artificial Sequence
  Description of Artificial Sequence: Synthetic oligonucleotide
auugaaaggcacgcugauu

SEQ ID NO: 3141493 - RNA, 19 nt, Artificial Sequence
  Description of Artificial Sequence: Synthetic oligonucleotide
cacuuacuacacaauuuua

SEQ ID NO: 3141494 - RNA, 19 nt, Artificial Sequence
  Description of Artificial Sequence: Synthetic oligonucleotide
cacacuuacuacacaauuu

SEQ ID NO: 3141495 - RNA, 19 nt, Artificial Sequence
  Description of Artificial Sequence: Synthetic oligonucleotide
gacagagaagaaacaauuu

SEQ ID NO: 3141496 - RNA, 19 nt, Artificial Sequence
  Description of Artificial Sequence: Synthetic oligonucleotide
ugauugcauuugguuacaa

SEQ ID NO: 3141497 - RNA, 19 nt, Artificial Sequence
  Description of Artificial Sequence: Synthetic oligonucleotide
cagcccuaaguuuaacuua

SEQ ID NO: 3141498 - RNA, 19 nt, Artificial Sequence
  Description of Artificial Sequence: Synthetic oligonucleotide
gcacgcugauugcauuugg

SEQ ID NO: 3141499 - RNA, 19 nt, Artificial Sequence
  Description of Artificial Sequence: Synthetic oligonucleotide
aggcacgcugauugcauuu

SEQ ID NO: 3141500 - RNA, 19 nt, Artificial Sequence
  Description of Artificial Sequence: Synthetic oligonucleotide
gcuggcacaauguccuaca

SEQ ID NO: 3141501 - RNA, 19 nt, Artificial Sequence
  Description of Artificial Sequence: Synthetic oligonucleotide
acaauguccuacacacuua

SEQ ID NO: 3141502 - RNA, 19 nt, Artificial Sequence
  Description of Artificial Sequence: Synthetic oligonucleotide
agauuuuagcuggcacaau

SEQ ID NO: 3141503 - RNA, 19 nt, Artificial Sequence
  Description of Artificial Sequence: Synthetic oligonucleotide
cuacagcccuaaguuuaac

SEQ ID NO: 3141504 - RNA, 19 nt, Artificial Sequence
  Description of Artificial Sequence: Synthetic oligonucleotide
cugauugcauuugguuaca

SEQ ID NO: 3141505 - RNA, 19 nt, Artificial Sequence
  Description of Artificial Sequence: Synthetic oligonucleotide
ggcacgcugauugcauuug

SEQ ID NO: 3141506 - RNA, 19 nt, Artificial Sequence
  Description of Artificial Sequence: Synthetic oligonucleotide
cacgcugauugcauuuggu

SEQ ID NO: 3141507 - RNA, 19 nt, Artificial Sequence
  Description of Artificial Sequence: Synthetic oligonucleotide
ccuacacacuuacuacaca

SEQ ID NO: 3141508 - RNA, 19 nt, Artificial Sequence
  Description of Artificial Sequence: Synthetic oligonucleotide
cgcugauugcauuugguua

SEQ ID NO: 3141509 - RNA, 19 nt, Artificial Sequence
  Description of Artificial Sequence: Synthetic oligonucleotide
cccuaaguuuaacuuaagu

SEQ ID NO: 3141510 - RNA, 19 nt, Artificial Sequence
  Description of Artificial Sequence: Synthetic oligonucleotide
gcccuaaguuuaacuuaag

SEQ ID NO: 3141511 - RNA, 19 nt, Artificial Sequence
  Description of Artificial Sequence: Synthetic oligonucleotide
gcacaauguccuacacacu

SEQ ID NO: 3141512 - RNA, 19 nt, Artificial Sequence
  Description of Artificial Sequence: Synthetic oligonucleotide
aaccuaaagguugagaacc

SEQ ID NO: 3141513 - RNA, 19 nt, Artificial Sequence
  Description of Artificial Sequence: Synthetic oligonucleotide
gaaagggucauucaacacc

SEQ ID NO: 3141514 - RNA, 19 nt, Artificial Sequence
  Description of Artificial Sequence: Synthetic oligonucleotide
uaaagguugagaaccacug

SEQ ID NO: 3141515 - RNA, 19 nt, Artificial Sequence
  Description of Artificial Sequence: Synthetic oligonucleotide
aaauuauucucguugcuau

SEQ ID NO: 3141516 - RNA, 19 nt, Artificial Sequence
  Description of Artificial Sequence: Synthetic oligonucleotide
cauucaacacccaaagggg

SEQ ID NO: 3141517 - RNA, 19 nt, Artificial Sequence
  Description of Artificial Sequence: Synthetic oligonucleotide
uaugucauaacuguaauuu

SEQ ID NO: 3141518 - RNA, 19 nt, Artificial Sequence
  Description of Artificial Sequence: Synthetic oligonucleotide
ucuuaggugaccccugucc

SEQ ID NO: 3141519 - RNA, 19 nt, Artificial Sequence
  Description of Artificial Sequence: Synthetic oligonucleotide
agccauaaaauuauucucg

SEQ ID NO: 3141520 - RNA, 19 nt, Artificial Sequence
  Description of Artificial Sequence: Synthetic oligonucleotide
guaaccuaaagguugagaa

SEQ ID NO: 3141521 - RNA, 19 nt, Artificial Sequence
  Description of Artificial Sequence: Synthetic oligonucleotide
aauuauucucguugcuaug

SEQ ID NO: 3141522 - RNA, 19 nt, Artificial Sequence
  Description of Artificial Sequence: Synthetic oligonucleotide
uuccuauggucuuagguga

SEQ ID NO: 3141523 - RNA, 19 nt, Artificial Sequence
  Description of Artificial Sequence: Synthetic oligonucleotide
ugcuaugucauaacuguaa

SEQ ID NO: 3141524 - RNA, 19 nt, Artificial Sequence
  Description of Artificial Sequence: Synthetic oligonucleotide
uucaacacccaaaggggcc

SEQ ID NO: 3141525 - RNA, 19 nt, Artificial Sequence
  Description of Artificial Sequence: Synthetic oligonucleotide
ucuguguuuuccuaugguc

SEQ ID NO: 3141526 - RNA, 19 nt, Artificial Sequence
  Description of Artificial Sequence: Synthetic oligonucleotide
uaaccuaaagguugagaac

SEQ ID NO: 3141527 - RNA, 19 nt, Artificial Sequence
  Description of Artificial Sequence: Synthetic oligonucleotide
gucguggugaccuccagcc

SEQ ID NO: 3141528 - RNA, 19 nt, Artificial Sequence
  Description of Artificial Sequence: Synthetic oligonucleotide
guugcuaugucauaacugu

SEQ ID NO: 3141529 - RNA, 19 nt, Artificial Sequence
  Description of Artificial Sequence: Synthetic oligonucleotide
uauucucguugcuauguca

SEQ ID NO: 3141530 - RNA, 19 nt, Artificial Sequence
  Description of Artificial Sequence: Synthetic oligonucleotide
auuauucucguugcuaugu

SEQ ID NO: 3141531 - RNA, 19 nt, Artificial Sequence
  Description of Artificial Sequence: Synthetic oligonucleotide
cuuaggugaccccuguccc

SEQ ID NO: 3141532 - RNA, 19 nt, Artificial Sequence
  Description of Artificial Sequence: Synthetic oligonucleotide
cagccauaaaauuauucuc

SEQ ID NO: 3141533 - RNA, 19 nt, Artificial Sequence
  Description of Artificial Sequence: Synthetic oligonucleotide
ucaacacccaaaggggccg

SEQ ID NO: 3141534 - RNA, 19 nt, Artificial Sequence
  Description of Artificial Sequence: Synthetic oligonucleotide
ugaaagggucauucaacac

SEQ ID NO: 3141535 - RNA, 19 nt, Artificial Sequence
  Description of Artificial Sequence: Synthetic oligonucleotide
ucguugcuaugucauaacu

SEQ ID NO: 3141536 - RNA, 19 nt, Artificial Sequence
  Description of Artificial Sequence: Synthetic oligonucleotide
uuauucucguugcuauguc

SEQ ID NO: 3141537 - RNA, 19 nt, Artificial Sequence
  Description of Artificial Sequence: Synthetic oligonucleotide
aggggccguaaccuaaagg

SEQ ID NO: 3141538 - RNA, 19 nt, Artificial Sequence
  Description of Artificial Sequence: Synthetic oligonucleotide
accccugucccugugaaag

SEQ ID NO: 3141539 - RNA, 19 nt, Artificial Sequence
  Description of Artificial Sequence: Synthetic oligonucleotide
ugucguggugaccuccagc

SEQ ID NO: 3141540 - RNA, 19 nt, Artificial Sequence
  Description of Artificial Sequence: Synthetic oligonucleotide
ucucguugcuaugucauaa

SEQ ID NO: 3141541 - RNA, 19 nt, Artificial Sequence
  Description of Artificial Sequence: Synthetic oligonucleotide
ugucccugugaaaggguca

SEQ ID NO: 3141542 - RNA, 19 nt, Artificial Sequence
  Description of Artificial Sequence: Synthetic oligonucleotide
uuaggugaccccugucccu

SEQ ID NO: 3141543 - RNA, 19 nt, Artificial Sequence
  Description of Artificial Sequence: Synthetic oligonucleotide
augucauaacuguaauuuu

SEQ ID NO: 3141544 - RNA, 19 nt, Artificial Sequence
  Description of Artificial Sequence: Synthetic oligonucleotide
aaggggccguaaccuaaag

SEQ ID NO: 3141545 - RNA, 19 nt, Artificial Sequence
  Description of Artificial Sequence: Synthetic oligonucleotide
cucguugcuaugucauaac

SEQ ID NO: 3141546 - RNA, 19 nt, Artificial Sequence
  Description of Artificial Sequence: Synthetic oligonucleotide
uccuauggucuuaggugac

SEQ ID NO: 3141547 - RNA, 19 nt, Artificial Sequence
  Description of Artificial Sequence: Synthetic oligonucleotide
uugcuaugucauaacugua

SEQ ID NO: 3141548 - RNA, 19 nt, Artificial Sequence
  Description of Artificial Sequence: Synthetic oligonucleotide
ucaugucguggugaccucc

SEQ ID NO: 3141549 - RNA, 19 nt, Artificial Sequence
  Description of Artificial Sequence: Synthetic oligonucleotide
cuaaagguugagaaccacu

SEQ ID NO: 3141550 - RNA, 19 nt, Artificial Sequence
  Description of Artificial Sequence: Synthetic oligonucleotide
auucucguugcuaugucau

SEQ ID NO: 3141551 - RNA, 19 nt, Artificial Sequence
  Description of Artificial Sequence: Synthetic oligonucleotide
cugucccugugaaaggguc

SEQ ID NO: 3141552 - RNA, 19 nt, Artificial Sequence
  Description of Artificial Sequence: Synthetic oligonucleotide
uaggugaccccugucccug

SEQ ID NO: 3141553 - RNA, 19 nt, Artificial Sequence
  Description of Artificial Sequence: Synthetic oligonucleotide
ggccguaaccuaaagguug

SEQ ID NO: 3141554 - RNA, 19 nt, Artificial Sequence
  Description of Artificial Sequence: Synthetic oligonucleotide
ugaccccugucccugugaa

SEQ ID NO: 3141555 - RNA, 19 nt, Artificial Sequence
  Description of Artificial Sequence: Synthetic oligonucleotide
ggggccguaaccuaaaggu

SEQ ID NO: 3141556 - RNA, 19 nt, Artificial Sequence
  Description of Artificial Sequence: Synthetic oligonucleotide
ccagccauaaaauuauucu

SEQ ID NO: 3141557 - RNA, 19 nt, Artificial Sequence
  Description of Artificial Sequence: Synthetic oligonucleotide
uucucguugcuaugucaua

SEQ ID NO: 3141558 - RNA, 19 nt, Artificial Sequence
  Description of Artificial Sequence: Synthetic oligonucleotide
caaaggggccguaaccuaa

SEQ ID NO: 3141559 - RNA, 19 nt, Artificial Sequence
  Description of Artificial Sequence: Synthetic oligonucleotide
ucguggugaccuccagcca

SEQ ID NO: 3141560 - RNA, 19 nt, Artificial Sequence
  Description of Artificial Sequence: Synthetic oligonucleotide
aaaggggccguaaccuaaa

SEQ ID NO: 3141561 - RNA, 19 nt, Artificial Sequence
  Description of Artificial Sequence: Synthetic oligonucleotide
accuaaagguugagaacca

SEQ ID NO: 3141562 - RNA, 19 nt, Artificial Sequence
  Description of Artificial Sequence: Synthetic oligonucleotide
augucguggugaccuccag

SEQ ID NO: 3141563 - RNA, 19 nt, Artificial Sequence
  Description of Artificial Sequence: Synthetic oligonucleotide
cacccaaaggggccguaac

SEQ ID NO: 3141564 - RNA, 19 nt, Artificial Sequence
  Description of Artificial Sequence: Synthetic oligonucleotide
caugucguggugaccucca

SEQ ID NO: 3141565 - RNA, 19 nt, Artificial Sequence
  Description of Artificial Sequence: Synthetic oligonucleotide
cucaugucguggugaccuc

SEQ ID NO: 3141566 - RNA, 19 nt, Artificial Sequence
  Description of Artificial Sequence: Synthetic oligonucleotide
gucuuaggugaccccuguc

SEQ ID NO: 3141567 - RNA, 19 nt, Artificial Sequence
  Description of Artificial Sequence: Synthetic oligonucleotide
gcuaugucauaacuguaau

SEQ ID NO: 3141568 - RNA, 19 nt, Artificial Sequence
  Description of Artificial Sequence: Synthetic oligonucleotide
ccuaaagguugagaaccac

SEQ ID NO: 3141569 - RNA, 19 nt, Artificial Sequence
  Description of Artificial Sequence: Synthetic oligonucleotide
cccugucccugugaaaggg

SEQ ID NO: 3141570 - RNA, 19 nt, Artificial Sequence
  Description of Artificial Sequence: Synthetic oligonucleotide
gugaccccugucccuguga

SEQ ID NO: 3141571 - RNA, 19 nt, Artificial Sequence
  Description of Artificial Sequence: Synthetic oligonucleotide
acacccaaaggggccguaa

SEQ ID NO: 3141572 - RNA, 19 nt, Artificial Sequence
  Description of Artificial Sequence: Synthetic oligonucleotide
gccguaaccuaaagguuga

SEQ ID NO: 3141573 - RNA, 19 nt, Artificial Sequence
  Description of Artificial Sequence: Synthetic oligonucleotide
aacacccaaaggggccgua

SEQ ID NO: 3141574 - RNA, 19 nt, Artificial Sequence
  Description of Artificial Sequence: Synthetic oligonucleotide
aggugaccccugucccugu

SEQ ID NO: 3141575 - RNA, 19 nt, Artificial Sequence
  Description of Artificial Sequence: Synthetic oligonucleotide
guguuuuccuauggucuua

SEQ ID NO: 3141576 - RNA, 19 nt, Artificial Sequence
  Description of Artificial Sequence: Synthetic oligonucleotide
ccccugucccugugaaagg

SEQ ID NO: 3141577 - RNA, 19 nt, Artificial Sequence
  Description of Artificial Sequence: Synthetic oligonucleotide
gaccccugucccugugaaa

SEQ ID NO: 3141578 - RNA, 19 nt, Artificial Sequence
  Description of Artificial Sequence: Synthetic oligonucleotide
ccucaugucguggugaccu

SEQ ID NO: 3141579 - RNA, 19 nt, Artificial Sequence
  Description of Artificial Sequence: Synthetic oligonucleotide
cguaaccuaaagguugaga

SEQ ID NO: 3141580 - RNA, 19 nt, Artificial Sequence
  Description of Artificial Sequence: Synthetic oligonucleotide
gucccugugaaagggucau

SEQ ID NO: 3141581 - RNA, 19 nt, Artificial Sequence
  Description of Artificial Sequence: Synthetic oligonucleotide
ccguaaccuaaagguugag

SEQ ID NO: 3141582 - RNA, 19 nt, Artificial Sequence
  Description of Artificial Sequence: Synthetic oligonucleotide
ccugucccugugaaagggu

SEQ ID NO: 3141583 - RNA, 19 nt, Artificial Sequence
  Description of Artificial Sequence: Synthetic oligonucleotide
gggccguaaccuaaagguu

SEQ ID NO: 3141584 - RNA, 19 nt, Artificial Sequence
  Description of Artificial Sequence: Synthetic oligonucleotide
caacacccaaaggggccgu

SEQ ID NO: 3141585 - RNA, 19 nt, Artificial Sequence
  Description of Artificial Sequence: Synthetic oligonucleotide
aauuuagaggggcaguggu

SEQ ID NO: 3141586 - RNA, 19 nt, Artificial Sequence
  Description of Artificial Sequence: Synthetic oligonucleotide
uuuagaggggcaguggugg

SEQ ID NO: 3141587 - RNA, 19 nt, Artificial Sequence
  Description of Artificial Sequence: Synthetic oligonucleotide
uuuuaauuuagaggggcag

SEQ ID NO: 3141588 - RNA, 19 nt, Artificial Sequence
  Description of Artificial Sequence: Synthetic oligonucleotide
uuaauuuagaggggcagug

SEQ ID NO: 3141589 - RNA, 19 nt, Artificial Sequence
  Description of Artificial Sequence: Synthetic oligonucleotide
uaauuuagaggggcagugg

SEQ ID NO: 3141590 - RNA, 19 nt, Artificial Sequence
  Description of Artificial Sequence: Synthetic oligonucleotide
uuuaauuuagaggggcagu

SEQ ID NO: 3141591 - RNA, 19 nt, Artificial Sequence
  Description of Artificial Sequence: Synthetic oligonucleotide
agaggggcagugguggugc

SEQ ID NO: 3141592 - RNA, 19 nt, Artificial Sequence
  Description of Artificial Sequence: Synthetic oligonucleotide
auuuagaggggcaguggug

SEQ ID NO: 3141593 - RNA, 19 nt, Artificial Sequence
  Description of Artificial Sequence: Synthetic oligonucleotide
gaggggcagugguggugca

SEQ ID NO: 3141594 - RNA, 19 nt, Artificial Sequence
  Description of Artificial Sequence: Synthetic oligonucleotide
gaagaaaccauucugagcg

SEQ ID NO: 3141595 - RNA, 19 nt, Artificial Sequence
  Description of Artificial Sequence: Synthetic oligonucleotide
uauuguaauagccagaaac

SEQ ID NO: 3141596 - RNA, 19 nt, Artificial Sequence
  Description of Artificial Sequence: Synthetic oligonucleotide
agaagaaaccauucugagc

SEQ ID NO: 3141597 - RNA, 19 nt, Artificial Sequence
  Description of Artificial Sequence: Synthetic oligonucleotide
aguucuacucagcagaaaa

SEQ ID NO: 3141598 - RNA, 19 nt, Artificial Sequence
  Description of Artificial Sequence: Synthetic oligonucleotide
uucauagcagcacuauugu

SEQ ID NO: 3141599 - RNA, 19 nt, Artificial Sequence
  Description of Artificial Sequence: Synthetic oligonucleotide
agcagcacuauuguaauag

SEQ ID NO: 3141600 - RNA, 19 nt, Artificial Sequence
  Description of Artificial Sequence: Synthetic oligonucleotide
auucugagcgagguaaccc

SEQ ID NO: 3141601 - RNA, 19 nt, Artificial Sequence
  Description of Artificial Sequence: Synthetic oligonucleotide
cauagcagcacuauuguaa

SEQ ID NO: 3141602 - RNA, 19 nt, Artificial Sequence
  Description of Artificial Sequence: Synthetic oligonucleotide
acuauuguaauagccagaa

SEQ ID NO: 3141603 - RNA, 19 nt, Artificial Sequence
  Description of Artificial Sequence: Synthetic oligonucleotide
cagcacuauuguaauagcc

SEQ ID NO: 3141604 - RNA, 19 nt, Artificial Sequence
  Description of Artificial Sequence: Synthetic oligonucleotide
aaaccauucugagcgaggu

SEQ ID NO: 3141605 - RNA, 19 nt, Artificial Sequence
  Description of Artificial Sequence: Synthetic oligonucleotide
uucugagcgagguaaccca

SEQ ID NO: 3141606 - RNA, 19 nt, Artificial Sequence
  Description of Artificial Sequence: Synthetic oligonucleotide
agcacuauuguaauagcca

SEQ ID NO: 3141607 - RNA, 19 nt, Artificial Sequence
  Description of Artificial Sequence: Synthetic oligonucleotide
auagcagcacuauuguaau

SEQ ID NO: 3141608 - RNA, 19 nt, Artificial Sequence
  Description of Artificial Sequence: Synthetic oligonucleotide
gaaaccauucugagcgagg

SEQ ID NO: 3141609 - RNA, 19 nt, Artificial Sequence
  Description of Artificial Sequence: Synthetic oligonucleotide
gcacuauuguaauagccag

SEQ ID NO: 3141610 - RNA, 19 nt, Artificial Sequence
  Description of Artificial Sequence: Synthetic oligonucleotide
aagaaaccauucugagcga

SEQ ID NO: 3141611 - RNA, 19 nt, Artificial Sequence
  Description of Artificial Sequence: Synthetic oligonucleotide
accauucugagcgagguaa

SEQ ID NO: 3141612 - RNA, 19 nt, Artificial Sequence
  Description of Artificial Sequence: Synthetic oligonucleotide
agaaaccauucugagcgag

SEQ ID NO: 3141613 - RNA, 19 nt, Artificial Sequence
  Description of Artificial Sequence: Synthetic oligonucleotide
cuagaugccccucaaccga

SEQ ID NO: 3141614 - RNA, 19 nt, Artificial Sequence
  Description of Artificial Sequence: Synthetic oligonucleotide
ccuagaugccccucaaccg

SEQ ID NO: 3141615 - RNA, 19 nt, Artificial Sequence
  Description of Artificial Sequence: Synthetic oligonucleotide
ucugagcgagguaacccaa

SEQ ID NO: 3141616 - RNA, 19 nt, Artificial Sequence
  Description of Artificial Sequence: Synthetic oligonucleotide
cauucugagcgagguaacc

SEQ ID NO: 3141617 - RNA, 19 nt, Artificial Sequence
  Description of Artificial Sequence: Synthetic oligonucleotide
ucauagcagcacuauugua

SEQ ID NO: 3141618 - RNA, 19 nt, Artificial Sequence
  Description of Artificial Sequence: Synthetic oligonucleotide
uagaugccccucaaccgaa

SEQ ID NO: 3141619 - RNA, 19 nt, Artificial Sequence
  Description of Artificial Sequence: Synthetic oligonucleotide
cauuuacacaauggaguuc

SEQ ID NO: 3141620 - RNA, 19 nt, Artificial Sequence
  Description of Artificial Sequence: Synthetic oligonucleotide
cacuauuguaauagccaga

SEQ ID NO: 3141621 - RNA, 19 nt, Artificial Sequence
  Description of Artificial Sequence: Synthetic oligonucleotide
gagguaacccaaucacaaa

SEQ ID NO: 3141622 - RNA, 19 nt, Artificial Sequence
  Description of Artificial Sequence: Synthetic oligonucleotide
ugccccucaaccgaagaau

SEQ ID NO: 3141623 - RNA, 19 nt, Artificial Sequence
  Description of Artificial Sequence: Synthetic oligonucleotide
gaugccccucaaccgaaga

SEQ ID NO: 3141624 - RNA, 19 nt, Artificial Sequence
  Description of Artificial Sequence: Synthetic oligonucleotide
aaccauucugagcgaggua

SEQ ID NO: 3141625 - RNA, 19 nt, Artificial Sequence
  Description of Artificial Sequence: Synthetic oligonucleotide
gcagcacuauuguaauagc

SEQ ID NO: 3141626 - RNA, 19 nt, Artificial Sequence
  Description of Artificial Sequence: Synthetic oligonucleotide
augccccucaaccgaagaa

SEQ ID NO: 3141627 - RNA, 19 nt, Artificial Sequence
  Description of Artificial Sequence: Synthetic oligonucleotide
uagcagcacuauuguaaua

SEQ ID NO: 3141628 - RNA, 19 nt, Artificial Sequence
  Description of Artificial Sequence: Synthetic oligonucleotide
cuauuguaauagccagaaa

SEQ ID NO: 3141629 - RNA, 19 nt, Artificial Sequence
  Description of Artificial Sequence: Synthetic oligonucleotide
cgagguaacccaaucacaa

SEQ ID NO: 3141630 - RNA, 19 nt, Artificial Sequence
  Description of Artificial Sequence: Synthetic oligonucleotide
gaguucuacucagcagaaa

SEQ ID NO: 3141631 - RNA, 19 nt, Artificial Sequence
  Description of Artificial Sequence: Synthetic oligonucleotide
agaugccccucaaccgaag

SEQ ID NO: 3141632 - RNA, 19 nt, Artificial Sequence
  Description of Artificial Sequence: Synthetic oligonucleotide
ccauucugagcgagguaac

SEQ ID NO: 3141633 - RNA, 19 nt, Artificial Sequence
  Description of Artificial Sequence: Synthetic oligonucleotide
gccccucaaccgaagaaug

SEQ ID NO: 3141634 - RNA, 19 nt, Artificial Sequence
  Description of Artificial Sequence: Synthetic oligonucleotide
ggaguucuacucagcagaa

SEQ ID NO: 3141635 - RNA, 19 nt, Artificial Sequence
  Description of Artificial Sequence: Synthetic oligonucleotide
cugagcgagguaacccaau

SEQ ID NO: 3141636 - RNA, 19 nt, Artificial Sequence
  Description of Artificial Sequence: Synthetic oligonucleotide
aguuuauuuauuuauuaug

SEQ ID NO: 3141637 - RNA, 19 nt, Artificial Sequence
  Description of Artificial Sequence: Synthetic oligonucleotide
ucuuauaacagaugguugu

SEQ ID NO: 3141638 - RNA, 19 nt, Artificial Sequence
  Description of Artificial Sequence: Synthetic oligonucleotide
uaagaguuuauuuauuuau

SEQ ID NO: 3141639 - RNA, 19 nt, Artificial Sequence
  Description of Artificial Sequence: Synthetic oligonucleotide
ucuagaagagcagucggcg

SEQ ID NO: 3141640 - RNA, 19 nt, Artificial Sequence
  Description of Artificial Sequence: Synthetic oligonucleotide
uuuaagaguuuauuuauuu

SEQ ID NO: 3141641 - RNA, 19 nt, Artificial Sequence
  Description of Artificial Sequence: Synthetic oligonucleotide
agaguuuauuuauuuauua

SEQ ID NO: 3141642 - RNA, 19 nt, Artificial Sequence
  Description of Artificial Sequence: Synthetic oligonucleotide
uuuuaagaguuuauuuauu

SEQ ID NO: 3141643 - RNA, 19 nt, Artificial Sequence
  Description of Artificial Sequence: Synthetic oligonucleotide
gguaccagaucuuauaaca

SEQ ID NO: 3141644 - RNA, 19 nt, Artificial Sequence
  Description of Artificial Sequence: Synthetic oligonucleotide
uagaagagcagucggcgcu

SEQ ID NO: 3141645 - RNA, 19 nt, Artificial Sequence
  Description of Artificial Sequence: Synthetic oligonucleotide
uuauaacagaugguuguga

SEQ ID NO: 3141646 - RNA, 19 nt, Artificial Sequence
  Description of Artificial Sequence: Synthetic oligonucleotide
cucuagaagagcagucggc

SEQ ID NO: 3141647 - RNA, 19 nt, Artificial Sequence
  Description of Artificial Sequence: Synthetic oligonucleotide
accucuagaagagcagucg

SEQ ID NO: 3141648 - RNA, 19 nt, Artificial Sequence
  Description of Artificial Sequence: Synthetic oligonucleotide
aagaguuuauuuauuuauu

SEQ ID NO: 3141649 - RNA, 19 nt, Artificial Sequence
  Description of Artificial Sequence: Synthetic oligonucleotide
cuuauaacagaugguugug

SEQ ID NO: 3141650 - RNA, 19 nt, Artificial Sequence
  Description of Artificial Sequence: Synthetic oligonucleotide
cuagaagagcagucggcgc

SEQ ID NO: 3141651 - RNA, 19 nt, Artificial Sequence
  Description of Artificial Sequence: Synthetic oligonucleotide
gaucuuauaacagaugguu

SEQ ID NO: 3141652 - RNA, 19 nt, Artificial Sequence
  Description of Artificial Sequence: Synthetic oligonucleotide
guaccagaucuuauaacag

SEQ ID NO: 3141653 - RNA, 19 nt, Artificial Sequence
  Description of Artificial Sequence: Synthetic oligonucleotide
aucuuauaacagaugguug

SEQ ID NO: 3141654 - RNA, 19 nt, Artificial Sequence
  Description of Artificial Sequence: Synthetic oligonucleotide
gaguuuauuuauuuauuau

SEQ ID NO: 3141655 - RNA, 19 nt, Artificial Sequence
  Description of Artificial Sequence: Synthetic oligonucleotide
aggguaccagaucuuauaa

SEQ ID NO: 3141656 - RNA, 19 nt, Artificial Sequence
  Description of Artificial Sequence: Synthetic oligonucleotide
agaucuuauaacagauggu

SEQ ID NO: 3141657 - RNA, 19 nt, Artificial Sequence
  Description of Artificial Sequence: Synthetic oligonucleotide
gcagucggcgcucuuaacc

SEQ ID NO: 3141658 - RNA, 19 nt, Artificial Sequence
  Description of Artificial Sequence: Synthetic oligonucleotide
gaggguaccagaucuuaua

SEQ ID NO: 3141659 - RNA, 19 nt, Artificial Sequence
  Description of Artificial Sequence: Synthetic oligonucleotide
aagaggguaccagaucuua

SEQ ID NO: 3141660 - RNA, 19 nt, Artificial Sequence
  Description of Artificial Sequence: Synthetic oligonucleotide
agucggcgcucuuaaccuc

SEQ ID NO: 3141661 - RNA, 19 nt, Artificial Sequence
  Description of Artificial Sequence: Synthetic oligonucleotide
ccucuagaagagcagucgg

SEQ ID NO: 3141662 - RNA, 19 nt, Artificial Sequence
  Description of Artificial Sequence: Synthetic oligonucleotide
gaccucuagaagagcaguc

SEQ ID NO: 3141663 - RNA, 19 nt, Artificial Sequence
  Description of Artificial Sequence: Synthetic oligonucleotide
ggguaccagaucuuauaac

SEQ ID NO: 3141664 - RNA, 19 nt, Artificial Sequence
  Description of Artificial Sequence: Synthetic oligonucleotide
ucggcgcucuuaaccucug

SEQ ID NO: 3141665 - RNA, 19 nt, Artificial Sequence
  Description of Artificial Sequence: Synthetic oligonucleotide
agaggguaccagaucuuau

SEQ ID NO: 3141666 - RNA, 19 nt, Artificial Sequence
  Description of Artificial Sequence: Synthetic oligonucleotide
cagucggcgcucuuaaccu

SEQ ID NO: 3141667 - RNA, 19 nt, Artificial Sequence
  Description of Artificial Sequence: Synthetic oligonucleotide
gaagaggguaccagaucuu

SEQ ID NO: 3141668 - RNA, 19 nt, Artificial Sequence
  Description of Artificial Sequence: Synthetic oligonucleotide
ggaccucuagaagagcagu

SEQ ID NO: 3141669 - RNA, 19 nt, Artificial Sequence
  Description of Artificial Sequence: Synthetic oligonucleotide
gucggcgcucuuaaccucu

SEQ ID NO: 3141670 - RNA, 19 nt, Artificial Sequence
  Description of Artificial Sequence: Synthetic oligonucleotide
cggcgcucuuaaccucuga

SEQ ID NO: 3141671 - RNA, 19 nt, Artificial Sequence
  Description of Artificial Sequence: Synthetic oligonucleotide
aaauauuugaggaauuccc

SEQ ID NO: 3141672 - RNA, 19 nt, Artificial Sequence
  Description of Artificial Sequence: Synthetic oligonucleotide
aaaauauuugaggaauucc

SEQ ID NO: 3141673 - RNA, 19 nt, Artificial Sequence
  Description of Artificial Sequence: Synthetic oligonucleotide
aguuccaaaauauuugagg

SEQ ID NO: 3141674 - RNA, 19 nt, Artificial Sequence
  Description of Artificial Sequence: Synthetic oligonucleotide
uuagaaguguuccauaggc

SEQ ID NO: 3141675 - RNA, 19 nt, Artificial Sequence
  Description of Artificial Sequence: Synthetic oligonucleotide
aaagagaugguggcaaugc

SEQ ID NO: 3141676 - RNA, 19 nt, Artificial Sequence
  Description of Artificial Sequence: Synthetic oligonucleotide
aaagagaaaggcuggcuuc

SEQ ID NO: 3141677 - RNA, 19 nt, Artificial Sequence
  Description of Artificial Sequence: Synthetic oligonucleotide
aaaguuccaaaauauuuga

SEQ ID NO: 3141678 - RNA, 19 nt, Artificial Sequence
  Description of Artificial Sequence: Synthetic oligonucleotide
gauaaagcugaguggaacg

SEQ ID NO: 3141679 - RNA, 19 nt, Artificial Sequence
  Description of Artificial Sequence: Synthetic oligonucleotide
aaaaguuccaaaauauuug

SEQ ID NO: 3141680 - RNA, 19 nt, Artificial Sequence
  Description of Artificial Sequence: Synthetic oligonucleotide
ugaagauaaagcugagugg

SEQ ID NO: 3141681 - RNA, 19 nt, Artificial Sequence
  Description of Artificial Sequence: Synthetic oligonucleotide
aauauuugaggaauucccg

SEQ ID NO: 3141682 - RNA, 19 nt, Artificial Sequence
  Description of Artificial Sequence: Synthetic oligonucleotide
gugaagauaaagcugagug

SEQ ID NO: 3141683 - RNA, 19 nt, Artificial Sequence
  Description of Artificial Sequence: Synthetic oligonucleotide
uagggaaagagaaaggcug

SEQ ID NO: 3141684 - RNA, 19 nt, Artificial Sequence
  Description of Artificial Sequence: Synthetic oligonucleotide
uaggugaagauaaagcuga

SEQ ID NO: 3141685 - RNA, 19 nt, Artificial Sequence
  Description of Artificial Sequence: Synthetic oligonucleotide
uguuagaaguguuccauag

SEQ ID NO: 3141686 - RNA, 19 nt, Artificial Sequence
  Description of Artificial Sequence: Synthetic oligonucleotide
gauagggaaagagaaaggc

SEQ ID NO: 3141687 - RNA, 19 nt, Artificial Sequence
  Description of Artificial Sequence: Synthetic oligonucleotide
uauuugaggaauucccgag

SEQ ID NO: 3141688 - RNA, 19 nt, Artificial Sequence
  Description of Artificial Sequence: Synthetic oligonucleotide
uucacuuucauucuuuguu

SEQ ID NO: 3141689 - RNA, 19 nt, Artificial Sequence
  Description of Artificial Sequence: Synthetic oligonucleotide
gaagauaaagcugagugga

SEQ ID NO: 3141690 - RNA, 19 nt, Artificial Sequence
  Description of Artificial Sequence: Synthetic oligonucleotide
agaaguguuccauaggccu

SEQ ID NO: 3141691 - RNA, 19 nt, Artificial Sequence
  Description of Artificial Sequence: Synthetic oligonucleotide
uuugcuuuauugcuccagc

SEQ ID NO: 3141692 - RNA, 19 nt, Artificial Sequence
  Description of Artificial Sequence: Synthetic oligonucleotide
ugaggaauucccgagacca

SEQ ID NO: 3141693 - RNA, 19 nt, Artificial Sequence
  Description of Artificial Sequence: Synthetic oligonucleotide
ucuuuguuagaaguguucc

SEQ ID NO: 3141694 - RNA, 19 nt, Artificial Sequence
  Description of Artificial Sequence: Synthetic oligonucleotide
acgauagggaaagagaaag

SEQ ID NO: 3141695 - RNA, 19 nt, Artificial Sequence
  Description of Artificial Sequence: Synthetic oligonucleotide
uaggccuaggucauacugg

SEQ ID NO: 3141696 - RNA, 19 nt, Artificial Sequence
  Description of Artificial Sequence: Synthetic oligonucleotide
uuugaggaauucccgagac

SEQ ID NO: 3141697 - RNA, 19 nt, Artificial Sequence
  Description of Artificial Sequence: Synthetic oligonucleotide
ugcuccagcugcuaaagag

SEQ ID NO: 3141698 - RNA, 19 nt, Artificial Sequence
  Description of Artificial Sequence: Synthetic oligonucleotide
uacugguaggugaagauaa

SEQ ID NO: 3141699 - RNA, 19 nt, Artificial Sequence
  Description of Artificial Sequence: Synthetic oligonucleotide
uccaaaauauuugaggaau

SEQ ID NO: 3141700 - RNA, 19 nt, Artificial Sequence
  Description of Artificial Sequence: Synthetic oligonucleotide
agauaaagcugaguggaac

SEQ ID NO: 3141701 - RNA, 19 nt, Artificial Sequence
  Description of Artificial Sequence: Synthetic oligonucleotide
uguuccauaggccuagguc

SEQ ID NO: 3141702 - RNA, 19 nt, Artificial Sequence
  Description of Artificial Sequence: Synthetic oligonucleotide
guuccauaggccuagguca

SEQ ID NO: 3141703 - RNA, 19 nt, Artificial Sequence
  Description of Artificial Sequence: Synthetic oligonucleotide
aguggaacgauagggaaag

SEQ ID NO: 3141704 - RNA, 19 nt, Artificial Sequence
  Description of Artificial Sequence: Synthetic oligonucleotide
auauuugaggaauucccga

SEQ ID NO: 3141705 - RNA, 19 nt, Artificial Sequence
  Description of Artificial Sequence: Synthetic oligonucleotide
guuagaaguguuccauagg

SEQ ID NO: 3141706 - RNA, 19 nt, Artificial Sequence
  Description of Artificial Sequence: Synthetic oligonucleotide
aauucccgagaccaggcga

SEQ ID NO: 3141707 - RNA, 19 nt, Artificial Sequence
  Description of Artificial Sequence: Synthetic oligonucleotide
uagaaguguuccauaggcc

SEQ ID NO: 3141708 - RNA, 19 nt, Artificial Sequence
  Description of Artificial Sequence: Synthetic oligonucleotide
auaggccuaggucauacug

SEQ ID NO: 3141709 - RNA, 19 nt, Artificial Sequence
  Description of Artificial Sequence: Synthetic oligonucleotide
uuuguuagaaguguuccau

SEQ ID NO: 3141710 - RNA, 19 nt, Artificial Sequence
  Description of Artificial Sequence: Synthetic oligonucleotide
uggaacgauagggaaagag

SEQ ID NO: 3141711 - RNA, 19 nt, Artificial Sequence
  Description of Artificial Sequence: Synthetic oligonucleotide
uucuuuguuagaaguguuc

SEQ ID NO: 3141712 - RNA, 19 nt, Artificial Sequence
  Description of Artificial Sequence: Synthetic oligonucleotide
uucuuuugcuuuauugcuc

SEQ ID NO: 3141713 - RNA, 19 nt, Artificial Sequence
  Description of Artificial Sequence: Synthetic oligonucleotide
uuuugcuuuauugcuccag

SEQ ID NO: 3141714 - RNA, 19 nt, Artificial Sequence
  Description of Artificial Sequence: Synthetic oligonucleotide
guaggugaagauaaagcug

SEQ ID NO: 3141715 - RNA, 19 nt, Artificial Sequence
  Description of Artificial Sequence: Synthetic oligonucleotide
gcugcuaaagagauggugg

SEQ ID NO: 3141716 - RNA, 19 nt, Artificial Sequence
  Description of Artificial Sequence: Synthetic oligonucleotide
aaguuccaaaauauuugag

SEQ ID NO: 3141717 - RNA, 19 nt, Artificial Sequence
  Description of Artificial Sequence: Synthetic oligonucleotide
uuccaaaauauuugaggaa

SEQ ID NO: 3141718 - RNA, 19 nt, Artificial Sequence
  Description of Artificial Sequence: Synthetic oligonucleotide
caaaauauuugaggaauuc

SEQ ID NO: 3141719 - RNA, 19 nt, Artificial Sequence
  Description of Artificial Sequence: Synthetic oligonucleotide
cugcuaaagagaugguggc

SEQ ID NO: 3141720 - RNA, 19 nt, Artificial Sequence
  Description of Artificial Sequence: Synthetic oligonucleotide
ugaguggaacgauagggaa

SEQ ID NO: 3141721 - RNA, 19 nt, Artificial Sequence
  Description of Artificial Sequence: Synthetic oligonucleotide
gaacgauagggaaagagaa

SEQ ID NO: 3141722 - RNA, 19 nt, Artificial Sequence
  Description of Artificial Sequence: Synthetic oligonucleotide
aggucauacugguagguga

SEQ ID NO: 3141723 - RNA, 19 nt, Artificial Sequence
  Description of Artificial Sequence: Synthetic oligonucleotide
ccagcugcuaaagagaugg

SEQ ID NO: 3141724 - RNA, 19 nt, Artificial Sequence
  Description of Artificial Sequence: Synthetic oligonucleotide
auuugaggaauucccgaga

SEQ ID NO: 3141725 - RNA, 19 nt, Artificial Sequence
  Description of Artificial Sequence: Synthetic oligonucleotide
ucacuuucauucuuuguua

SEQ ID NO: 3141726 - RNA, 19 nt, Artificial Sequence
  Description of Artificial Sequence: Synthetic oligonucleotide
gaauucccgagaccaggcg

SEQ ID NO: 3141727 - RNA, 19 nt, Artificial Sequence
  Description of Artificial Sequence: Synthetic oligonucleotide
gaaaggcuggcuucuuuug

SEQ ID NO: 3141728 - RNA, 19 nt, Artificial Sequence
  Description of Artificial Sequence: Synthetic oligonucleotide
aaguguuccauaggccuag

SEQ ID NO: 3141729 - RNA, 19 nt, Artificial Sequence
  Description of Artificial Sequence: Synthetic oligonucleotide
cacuuucauucuuuguuag

SEQ ID NO: 3141730 - RNA, 19 nt, Artificial Sequence
  Description of Artificial Sequence: Synthetic oligonucleotide
gcugaguggaacgauaggg

SEQ ID NO: 3141731 - RNA, 19 nt, Artificial Sequence
  Description of Artificial Sequence: Synthetic oligonucleotide
aagcugaguggaacgauag

SEQ ID NO: 3141732 - RNA, 19 nt, Artificial Sequence
  Description of Artificial Sequence: Synthetic oligonucleotide
uaaagagaugguggcaaug

SEQ ID NO: 3141733 - RNA, 19 nt, Artificial Sequence
  Description of Artificial Sequence: Synthetic oligonucleotide
gccuaggucauacugguag

SEQ ID NO: 3141734 - RNA, 19 nt, Artificial Sequence
  Description of Artificial Sequence: Synthetic oligonucleotide
aagagaaaggcuggcuucu

SEQ ID NO: 3141735 - RNA, 19 nt, Artificial Sequence
  Description of Artificial Sequence: Synthetic oligonucleotide
ucauacugguaggugaaga

SEQ ID NO: 3141736 - RNA, 19 nt, Artificial Sequence
  Description of Artificial Sequence: Synthetic oligonucleotide
uugaggaauucccgagacc

SEQ ID NO: 3141737 - RNA, 19 nt, Artificial Sequence
  Description of Artificial Sequence: Synthetic oligonucleotide
aggaauucccgagaccagg

SEQ ID NO: 3141738 - RNA, 19 nt, Artificial Sequence
  Description of Artificial Sequence: Synthetic oligonucleotide
acuuucauucuuuguuaga

SEQ ID NO: 3141739 - RNA, 19 nt, Artificial Sequence
  Description of Artificial Sequence: Synthetic oligonucleotide
uugcuuuauugcuccagcu

SEQ ID NO: 3141740 - RNA, 19 nt, Artificial Sequence
  Description of Artificial Sequence: Synthetic oligonucleotide
cuuucauucuuuguuagaa

SEQ ID NO: 3141741 - RNA, 19 nt, Artificial Sequence
  Description of Artificial Sequence: Synthetic oligonucleotide
uauugcuccagcugcuaaa

SEQ ID NO: 3141742 - RNA, 19 nt, Artificial Sequence
  Description of Artificial Sequence: Synthetic oligonucleotide
agggaaagagaaaggcugg

SEQ ID NO: 3141743 - RNA, 19 nt, Artificial Sequence
  Description of Artificial Sequence: Synthetic oligonucleotide
uuauugcuccagcugcuaa

SEQ ID NO: 3141744 - RNA, 19 nt, Artificial Sequence
  Description of Artificial Sequence: Synthetic oligonucleotide
gguaggugaagauaaagcu

SEQ ID NO: 3141745 - RNA, 19 nt, Artificial Sequence
  Description of Artificial Sequence: Synthetic oligonucleotide
agcugaguggaacgauagg

SEQ ID NO: 3141746 - RNA, 19 nt, Artificial Sequence
  Description of Artificial Sequence: Synthetic oligonucleotide
cugguaggugaagauaaag

SEQ ID NO: 3141747 - RNA, 19 nt, Artificial Sequence
  Description of Artificial Sequence: Synthetic oligonucleotide
cuuuguuagaaguguucca

SEQ ID NO: 3141748 - RNA, 19 nt, Artificial Sequence
  Description of Artificial Sequence: Synthetic oligonucleotide
agcugcuaaagagauggug

SEQ ID NO: 3141749 - RNA, 19 nt, Artificial Sequence
  Description of Artificial Sequence: Synthetic oligonucleotide
aggccuaggucauacuggu

SEQ ID NO: 3141750 - RNA, 19 nt, Artificial Sequence
  Description of Artificial Sequence: Synthetic oligonucleotide
uuguuagaaguguuccaua

SEQ ID NO: 3141751 - RNA, 19 nt, Artificial Sequence
  Description of Artificial Sequence: Synthetic oligonucleotide
cugaguggaacgauaggga

SEQ ID NO: 3141752 - RNA, 19 nt, Artificial Sequence
  Description of Artificial Sequence: Synthetic oligonucleotide
gaaagagaaaggcuggcuu

SEQ ID NO: 3141753 - RNA, 19 nt, Artificial Sequence
  Description of Artificial Sequence: Synthetic oligonucleotide
uaggucauacugguaggug

SEQ ID NO: 3141754 - RNA, 19 nt, Artificial Sequence
  Description of Artificial Sequence: Synthetic oligonucleotide
gaugguggcaaugccaaaa

SEQ ID NO: 3141755 - RNA, 19 nt, Artificial Sequence
  Description of Artificial Sequence: Synthetic oligonucleotide
aacgauagggaaagagaaa

SEQ ID NO: 3141756 - RNA, 19 nt, Artificial Sequence
  Description of Artificial Sequence: Synthetic oligonucleotide
ugcuaaagagaugguggca

SEQ ID NO: 3141757 - RNA, 19 nt, Artificial Sequence
  Description of Artificial Sequence: Synthetic oligonucleotide
aaagcugaguggaacgaua

SEQ ID NO: 3141758 - RNA, 19 nt, Artificial Sequence
  Description of Artificial Sequence: Synthetic oligonucleotide
uuccauaggccuaggucau

SEQ ID NO: 3141759 - RNA, 19 nt, Artificial Sequence
  Description of Artificial Sequence: Synthetic oligonucleotide
gagaugguggcaaugccaa

SEQ ID NO: 3141760 - RNA, 19 nt, Artificial Sequence
  Description of Artificial Sequence: Synthetic oligonucleotide
uccagcugcuaaagagaug

SEQ ID NO: 3141761 - RNA, 19 nt, Artificial Sequence
  Description of Artificial Sequence: Synthetic oligonucleotide
ggaacgauagggaaagaga

SEQ ID NO: 3141762 - RNA, 19 nt, Artificial Sequence
  Description of Artificial Sequence: Synthetic oligonucleotide
uaaagcugaguggaacgau

SEQ ID NO: 3141763 - RNA, 19 nt, Artificial Sequence
  Description of Artificial Sequence: Synthetic oligonucleotide
cauucuuuguuagaagugu

SEQ ID NO: 3141764 - RNA, 19 nt, Artificial Sequence
  Description of Artificial Sequence: Synthetic oligonucleotide
gaggaauucccgagaccag

SEQ ID NO: 3141765 - RNA, 19 nt, Artificial Sequence
  Description of Artificial Sequence: Synthetic oligonucleotide
uuuauugcuccagcugcua

SEQ ID NO: 3141766 - RNA, 19 nt, Artificial Sequence
  Description of Artificial Sequence: Synthetic oligonucleotide
ccuaggucauacugguagg

SEQ ID NO: 3141767 - RNA, 19 nt, Artificial Sequence
  Description of Artificial Sequence: Synthetic oligonucleotide
gcuucacuuucauucuuug

SEQ ID NO: 3141768 - RNA, 19 nt, Artificial Sequence
  Description of Artificial Sequence: Synthetic oligonucleotide
uugcuccagcugcuaaaga

SEQ ID NO: 3141769 - RNA, 19 nt, Artificial Sequence
  Description of Artificial Sequence: Synthetic oligonucleotide
gaguggaacgauagggaaa

SEQ ID NO: 3141770 - RNA, 19 nt, Artificial Sequence
  Description of Artificial Sequence: Synthetic oligonucleotide
auucuuuguuagaaguguu

SEQ ID NO: 3141771 - RNA, 19 nt, Artificial Sequence
  Description of Artificial Sequence: Synthetic oligonucleotide
cgauagggaaagagaaagg

SEQ ID NO: 3141772 - RNA, 19 nt, Artificial Sequence
  Description of Artificial Sequence: Synthetic oligonucleotide
gcuaaagagaugguggcaa

SEQ ID NO: 3141773 - RNA, 19 nt, Artificial Sequence
  Description of Artificial Sequence: Synthetic oligonucleotide
ggaauucccgagaccaggc

SEQ ID NO: 3141774 - RNA, 19 nt, Artificial Sequence
  Description of Artificial Sequence: Synthetic oligonucleotide
gaaguguuccauaggccua

SEQ ID NO: 3141775 - RNA, 19 nt, Artificial Sequence
  Description of Artificial Sequence: Synthetic oligonucleotide
cauacugguaggugaagau

SEQ ID NO: 3141776 - RNA, 19 nt, Artificial Sequence
  Description of Artificial Sequence: Synthetic oligonucleotide
aggugaagauaaagcugag

SEQ ID NO: 3141777 - RNA, 19 nt, Artificial Sequence
  Description of Artificial Sequence: Synthetic oligonucleotide
aguguuccauaggccuagg

SEQ ID NO: 3141778 - RNA, 19 nt, Artificial Sequence
  Description of Artificial Sequence: Synthetic oligonucleotide
auucccgagaccaggcgau

SEQ ID NO: 3141779 - RNA, 19 nt, Artificial Sequence
  Description of Artificial Sequence: Synthetic oligonucleotide
gggaaagagaaaggcuggc

SEQ ID NO: 3141780 - RNA, 19 nt, Artificial Sequence
  Description of Artificial Sequence: Synthetic oligonucleotide
cuucacuuucauucuuugu

SEQ ID NO: 3141781 - RNA, 19 nt, Artificial Sequence
  Description of Artificial Sequence: Synthetic oligonucleotide
ucccgagaccaggcgaucu

SEQ ID NO: 3141782 - RNA, 19 nt, Artificial Sequence
  Description of Artificial Sequence: Synthetic oligonucleotide
agaugguggcaaugccaaa

SEQ ID NO: 3141783 - RNA, 19 nt, Artificial Sequence
  Description of Artificial Sequence: Synthetic oligonucleotide
aggcuggcuucuuuugcuu

SEQ ID NO: 3141784 - RNA, 19 nt, Artificial Sequence
  Description of Artificial Sequence: Synthetic oligonucleotide
acugguaggugaagauaaa

SEQ ID NO: 3141785 - RNA, 19 nt, Artificial Sequence
  Description of Artificial Sequence: Synthetic oligonucleotide
cuaaagagaugguggcaau

SEQ ID NO: 3141786 - RNA, 19 nt, Artificial Sequence
  Description of Artificial Sequence: Synthetic oligonucleotide
ggucauacugguaggugaa

SEQ ID NO: 3141787 - RNA, 19 nt, Artificial Sequence
  Description of Artificial Sequence: Synthetic oligonucleotide
ccauaggccuaggucauac

SEQ ID NO: 3141788 - RNA, 19 nt, Artificial Sequence
  Description of Artificial Sequence: Synthetic oligonucleotide
gagaaaggcuggcuucuuu

SEQ ID NO: 3141789 - RNA, 19 nt, Artificial Sequence
  Description of Artificial Sequence: Synthetic oligonucleotide
cuaggucauacugguaggu

SEQ ID NO: 3141790 - RNA, 19 nt, Artificial Sequence
  Description of Artificial Sequence: Synthetic oligonucleotide
ggaaagagaaaggcuggcu

SEQ ID NO: 3141791 - RNA, 19 nt, Artificial Sequence
  Description of Artificial Sequence: Synthetic oligonucleotide
agagaaaggcuggcuucuu

SEQ ID NO: 3141792 - RNA, 19 nt, Artificial Sequence
  Description of Artificial Sequence: Synthetic oligonucleotide
ggugaagauaaagcugagu

SEQ ID NO: 3141793 - RNA, 19 nt, Artificial Sequence
  Description of Artificial Sequence: Synthetic oligonucleotide
uccauaggccuaggucaua

SEQ ID NO: 3141794 - RNA, 19 nt, Artificial Sequence
  Description of Artificial Sequence: Synthetic oligonucleotide
uucccgagaccaggcgauc

SEQ ID NO: 3141795 - RNA, 19 nt, Artificial Sequence
  Description of Artificial Sequence: Synthetic oligonucleotide
guguuccauaggccuaggu

SEQ ID NO: 3141796 - RNA, 19 nt, Artificial Sequence
  Description of Artificial Sequence: Synthetic oligonucleotide
cauaggccuaggucauacu

SEQ ID NO: 3141797 - RNA, 19 nt, Artificial Sequence
  Description of Artificial Sequence: Synthetic oligonucleotide
ccaaaauauuugaggaauu

SEQ ID NO: 3141798 - RNA, 19 nt, Artificial Sequence
  Description of Artificial Sequence: Synthetic oligonucleotide
guggaacgauagggaaaga

SEQ ID NO: 3141799 - RNA, 19 nt, Artificial Sequence
  Description of Artificial Sequence: Synthetic oligonucleotide
cagcugcuaaagagauggu

SEQ ID NO: 3141800 - RNA, 19 nt, Artificial Sequence
  Description of Artificial Sequence: Synthetic oligonucleotide
ggcuggcuucuuuugcuuu

SEQ ID NO: 3141801 - RNA, 19 nt, Artificial Sequence
  Description of Artificial Sequence: Synthetic oligonucleotide
ggccuaggucauacuggua

SEQ ID NO: 3141802 - RNA, 19 nt, Artificial Sequence
  Description of Artificial Sequence: Synthetic oligonucleotide
aaggacuucuucaucaucc

SEQ ID NO: 3141803 - RNA, 19 nt, Artificial Sequence
  Description of Artificial Sequence: Synthetic oligonucleotide
uucaucauccuucucagac

SEQ ID NO: 3141804 - RNA, 19 nt, Artificial Sequence
  Description of Artificial Sequence: Synthetic oligonucleotide
ucaaaggacuucuucauca

SEQ ID NO: 3141805 - RNA, 19 nt, Artificial Sequence
  Description of Artificial Sequence: Synthetic oligonucleotide
aaaggacuucuucaucauc

SEQ ID NO: 3141806 - RNA, 19 nt, Artificial Sequence
  Description of Artificial Sequence: Synthetic oligonucleotide
gacacagcugccucaaagg

SEQ ID NO: 3141807 - RNA, 19 nt, Artificial Sequence
  Description of Artificial Sequence: Synthetic oligonucleotide
auacagaugggccuggccu

SEQ ID NO: 3141808 - RNA, 19 nt, Artificial Sequence
  Description of Artificial Sequence: Synthetic oligonucleotide
ucauccuucucagacucgg

SEQ ID NO: 3141809 - RNA, 19 nt, Artificial Sequence
  Description of Artificial Sequence: Synthetic oligonucleotide
cauugggcaggguauacag

SEQ ID NO: 3141810 - RNA, 19 nt, Artificial Sequence
  Description of Artificial Sequence: Synthetic oligonucleotide
ggaaguuggugguagcugg

SEQ ID NO: 3141811 - RNA, 19 nt, Artificial Sequence
  Description of Artificial Sequence: Synthetic oligonucleotide
uauacagaugggccuggcc

SEQ ID NO: 3141812 - RNA, 19 nt, Artificial Sequence
  Description of Artificial Sequence: Synthetic oligonucleotide
uugggcaggguauacagau

SEQ ID NO: 3141813 - RNA, 19 nt, Artificial Sequence
  Description of Artificial Sequence: Synthetic oligonucleotide
gacuucuucaucauccuuc

SEQ ID NO: 3141814 - RNA, 19 nt, Artificial Sequence
  Description of Artificial Sequence: Synthetic oligonucleotide
aggguauacagaugggccu

SEQ ID NO: 3141815 - RNA, 19 nt, Artificial Sequence
  Description of Artificial Sequence: Synthetic oligonucleotide
uacagaugggccuggccug

SEQ ID NO: 3141816 - RNA, 19 nt, Artificial Sequence
  Description of Artificial Sequence: Synthetic oligonucleotide
ggcgcagggaaguuggugg

SEQ ID NO: 3141817 - RNA, 19 nt, Artificial Sequence
  Description of Artificial Sequence: Synthetic oligonucleotide
acacagcugccucaaagga

SEQ ID NO: 3141818 - RNA, 19 nt, Artificial Sequence
  Description of Artificial Sequence: Synthetic oligonucleotide
acagcugccucaaaggacu

SEQ ID NO: 3141819 - RNA, 19 nt, Artificial Sequence
  Description of Artificial Sequence: Synthetic oligonucleotide
cccagcacgugauagaggc

SEQ ID NO: 3141820 - RNA, 19 nt, Artificial Sequence
  Description of Artificial Sequence: Synthetic oligonucleotide
aaguuggugguagcuggag

SEQ ID NO: 3141821 - RNA, 19 nt, Artificial Sequence
  Description of Artificial Sequence: Synthetic oligonucleotide
agaggcgcagggaaguugg

SEQ ID NO: 3141822 - RNA, 19 nt, Artificial Sequence
  Description of Artificial Sequence: Synthetic oligonucleotide
auccuucucagacucgggu

SEQ ID NO: 3141823 - RNA, 19 nt, Artificial Sequence
  Description of Artificial Sequence: Synthetic oligonucleotide
ugccucaaaggacuucuuc

SEQ ID NO: 3141824 - RNA, 19 nt, Artificial Sequence
  Description of Artificial Sequence: Synthetic oligonucleotide
uggugguagcuggaguugg

SEQ ID NO: 3141825 - RNA, 19 nt, Artificial Sequence
  Description of Artificial Sequence: Synthetic oligonucleotide
cacagcugccucaaaggac

SEQ ID NO: 3141826 - RNA, 19 nt, Artificial Sequence
  Description of Artificial Sequence: Synthetic oligonucleotide
uccuucucagacucggguc

SEQ ID NO: 3141827 - RNA, 19 nt, Artificial Sequence
  Description of Artificial Sequence: Synthetic oligonucleotide
aguuggugguagcuggagu

SEQ ID NO: 3141828 - RNA, 19 nt, Artificial Sequence
  Description of Artificial Sequence: Synthetic oligonucleotide
caucugaggcggaggaccc

SEQ ID NO: 3141829 - RNA, 19 nt, Artificial Sequence
  Description of Artificial Sequence: Synthetic oligonucleotide
cucaaaggacuucuucauc

SEQ ID NO: 3141830 - RNA, 19 nt, Artificial Sequence
  Description of Artificial Sequence: Synthetic oligonucleotide
aggcggaggaccccagcac

SEQ ID NO: 3141831 - RNA, 19 nt, Artificial Sequence
  Description of Artificial Sequence: Synthetic oligonucleotide
cucggguccuccaucugag

SEQ ID NO: 3141832 - RNA, 19 nt, Artificial Sequence
  Description of Artificial Sequence: Synthetic oligonucleotide
acucggguccuccaucuga

SEQ ID NO: 3141833 - RNA, 19 nt, Artificial Sequence
  Description of Artificial Sequence: Synthetic oligonucleotide
agaugggccuggccugggc

SEQ ID NO: 3141834 - RNA, 19 nt, Artificial Sequence
  Description of Artificial Sequence: Synthetic oligonucleotide
agacucggguccuccaucu

SEQ ID NO: 3141835 - RNA, 19 nt, Artificial Sequence
  Description of Artificial Sequence: Synthetic oligonucleotide
agaggacacagcugccuca

SEQ ID NO: 3141836 - RNA, 19 nt, Artificial Sequence
  Description of Artificial Sequence: Synthetic oligonucleotide
uuggugguagcuggaguug

SEQ ID NO: 3141837 - RNA, 19 nt, Artificial Sequence
  Description of Artificial Sequence: Synthetic oligonucleotide
ggguccuccaucugaggcg

SEQ ID NO: 3141838 - RNA, 19 nt, Artificial Sequence
  Description of Artificial Sequence: Synthetic oligonucleotide
ugggcaggguauacagaug

SEQ ID NO: 3141839 - RNA, 19 nt, Artificial Sequence
  Description of Artificial Sequence: Synthetic oligonucleotide
cauccuucucagacucggg

SEQ ID NO: 3141840 - RNA, 19 nt, Artificial Sequence
  Description of Artificial Sequence: Synthetic oligonucleotide
ucagacucggguccuccau

SEQ ID NO: 3141841 - RNA, 19 nt, Artificial Sequence
  Description of Artificial Sequence: Synthetic oligonucleotide
guagcuggaguuggggagc

SEQ ID NO: 3141842 - RNA, 19 nt, Artificial Sequence
  Description of Artificial Sequence: Synthetic oligonucleotide
gugguagcuggaguugggg

SEQ ID NO: 3141843 - RNA, 19 nt, Artificial Sequence
  Description of Artificial Sequence: Synthetic oligonucleotide
accccagcacgugauagag

SEQ ID NO: 3141844 - RNA, 19 nt, Artificial Sequence
  Description of Artificial Sequence: Synthetic oligonucleotide
gccucaaaggacuucuuca

SEQ ID NO: 3141845 - RNA, 19 nt, Artificial Sequence
  Description of Artificial Sequence: Synthetic oligonucleotide
ucugaggcggaggacccca

SEQ ID NO: 3141846 - RNA, 19 nt, Artificial Sequence
  Description of Artificial Sequence: Synthetic oligonucleotide
ccuucucagacucgggucc

SEQ ID NO: 3141847 - RNA, 19 nt, Artificial Sequence
  Description of Artificial Sequence: Synthetic oligonucleotide
gaugggccuggccugggca

SEQ ID NO: 3141848 - RNA, 19 nt, Artificial Sequence
  Description of Artificial Sequence: Synthetic oligonucleotide
gacauccuggcccggggca

SEQ ID NO: 3141849 - RNA, 19 nt, Artificial Sequence
  Description of Artificial Sequence: Synthetic oligonucleotide
augggccuggccugggcag

SEQ ID NO: 3141850 - RNA, 19 nt, Artificial Sequence
  Description of Artificial Sequence: Synthetic oligonucleotide
ggcggaggaccccagcacg

SEQ ID NO: 3141851 - RNA, 19 nt, Artificial Sequence
  Description of Artificial Sequence: Synthetic oligonucleotide
gaggcggaggaccccagca

SEQ ID NO: 3141852 - RNA, 19 nt, Artificial Sequence
  Description of Artificial Sequence: Synthetic oligonucleotide
ucucagacucggguccucc

SEQ ID NO: 3141853 - RNA, 19 nt, Artificial Sequence
  Description of Artificial Sequence: Synthetic oligonucleotide
ucggguccuccaucugagg

SEQ ID NO: 3141854 - RNA, 19 nt, Artificial Sequence
  Description of Artificial Sequence: Synthetic oligonucleotide
ugaggcggaggaccccagc

SEQ ID NO: 3141855 - RNA, 19 nt, Artificial Sequence
  Description of Artificial Sequence: Synthetic oligonucleotide
uccuccaucugaggcggag

SEQ ID NO: 3141856 - RNA, 19 nt, Artificial Sequence
  Description of Artificial Sequence: Synthetic oligonucleotide
agggaaguuggugguagcu

SEQ ID NO: 3141857 - RNA, 19 nt, Artificial Sequence
  Description of Artificial Sequence: Synthetic oligonucleotide
cagaggacacagcugccuc

SEQ ID NO: 3141858 - RNA, 19 nt, Artificial Sequence
  Description of Artificial Sequence: Synthetic oligonucleotide
gguccuccaucugaggcgg

SEQ ID NO: 3141859 - RNA, 19 nt, Artificial Sequence
  Description of Artificial Sequence: Synthetic oligonucleotide
ccaucugaggcggaggacc

SEQ ID NO: 3141860 - RNA, 19 nt, Artificial Sequence
  Description of Artificial Sequence: Synthetic oligonucleotide
guuggugguagcuggaguu

SEQ ID NO: 3141861 - RNA, 19 nt, Artificial Sequence
  Description of Artificial Sequence: Synthetic oligonucleotide
cagggaaguuggugguagc

SEQ ID NO: 3141862 - RNA, 19 nt, Artificial Sequence
  Description of Artificial Sequence: Synthetic oligonucleotide
aucugaggcggaggacccc

SEQ ID NO: 3141863 - RNA, 19 nt, Artificial Sequence
  Description of Artificial Sequence: Synthetic oligonucleotide
gguauacagaugggccugg

SEQ ID NO: 3141864 - RNA, 19 nt, Artificial Sequence
  Description of Artificial Sequence: Synthetic oligonucleotide
gaaguuggugguagcugga

SEQ ID NO: 3141865 - RNA, 19 nt, Artificial Sequence
  Description of Artificial Sequence: Synthetic oligonucleotide
gaccccagcacgugauaga

SEQ ID NO: 3141866 - RNA, 19 nt, Artificial Sequence
  Description of Artificial Sequence: Synthetic oligonucleotide
cuccaucugaggcggagga

SEQ ID NO: 3141867 - RNA, 19 nt, Artificial Sequence
  Description of Artificial Sequence: Synthetic oligonucleotide
gcagggaaguuggugguag

SEQ ID NO: 3141868 - RNA, 19 nt, Artificial Sequence
  Description of Artificial Sequence: Synthetic oligonucleotide
ggguauacagaugggccug

SEQ ID NO: 3141869 - RNA, 19 nt, Artificial Sequence
  Description of Artificial Sequence: Synthetic oligonucleotide
cugggcagaggacacagcu

SEQ ID NO: 3141870 - RNA, 19 nt, Artificial Sequence
  Description of Artificial Sequence: Synthetic oligonucleotide
auugggcaggguauacaga

SEQ ID NO: 3141871 - RNA, 19 nt, Artificial Sequence
  Description of Artificial Sequence: Synthetic oligonucleotide
agcugccucaaaggacuuc

SEQ ID NO: 3141872 - RNA, 19 nt, Artificial Sequence
  Description of Artificial Sequence: Synthetic oligonucleotide
gggaaguuggugguagcug

SEQ ID NO: 3141873 - RNA, 19 nt, Artificial Sequence
  Description of Artificial Sequence: Synthetic oligonucleotide
cagacucggguccuccauc

SEQ ID NO: 3141874 - RNA, 19 nt, Artificial Sequence
  Description of Artificial Sequence: Synthetic oligonucleotide
guauacagaugggccuggc

SEQ ID NO: 3141875 - RNA, 19 nt, Artificial Sequence
  Description of Artificial Sequence: Synthetic oligonucleotide
uccaucugaggcggaggac

SEQ ID NO: 3141876 - RNA, 19 nt, Artificial Sequence
  Description of Artificial Sequence: Synthetic oligonucleotide
cuggccugggcagaggaca

SEQ ID NO: 3141877 - RNA, 19 nt, Artificial Sequence
  Description of Artificial Sequence: Synthetic oligonucleotide
gacucggguccuccaucug

SEQ ID NO: 3141878 - RNA, 19 nt, Artificial Sequence
  Description of Artificial Sequence: Synthetic oligonucleotide
ggaccccagcacgugauag

SEQ ID NO: 3141879 - RNA, 19 nt, Artificial Sequence
  Description of Artificial Sequence: Synthetic oligonucleotide
ggugguagcuggaguuggg

SEQ ID NO: 3141880 - RNA, 19 nt, Artificial Sequence
  Description of Artificial Sequence: Synthetic oligonucleotide
uagcuggaguuggggagca

SEQ ID NO: 3141881 - RNA, 19 nt, Artificial Sequence
  Description of Artificial Sequence: Synthetic oligonucleotide
gaggacacagcugccucaa

SEQ ID NO: 3141882 - RNA, 19 nt, Artificial Sequence
  Description of Artificial Sequence: Synthetic oligonucleotide
aggcgcagggaaguuggug

SEQ ID NO: 3141883 - RNA, 19 nt, Artificial Sequence
  Description of Artificial Sequence: Synthetic oligonucleotide
ggcaggguauacagauggg

SEQ ID NO: 3141884 - RNA, 19 nt, Artificial Sequence
  Description of Artificial Sequence: Synthetic oligonucleotide
cagaggcgcagggaaguug

SEQ ID NO: 3141885 - RNA, 19 nt, Artificial Sequence
  Description of Artificial Sequence: Synthetic oligonucleotide
ccuggcccggggcagaggc

SEQ ID NO: 3141886 - RNA, 19 nt, Artificial Sequence
  Description of Artificial Sequence: Synthetic oligonucleotide
ggacauccuggcccggggc

SEQ ID NO: 3141887 - RNA, 19 nt, Artificial Sequence
  Description of Artificial Sequence: Synthetic oligonucleotide
caaaggacuucuucaucau

SEQ ID NO: 3141888 - RNA, 19 nt, Artificial Sequence
  Description of Artificial Sequence: Synthetic oligonucleotide
cuggcccggggcagaggcg

SEQ ID NO: 3141889 - RNA, 19 nt, Artificial Sequence
  Description of Artificial Sequence: Synthetic oligonucleotide
cugaggcggaggaccccag

SEQ ID NO: 3141890 - RNA, 19 nt, Artificial Sequence
  Description of Artificial Sequence: Synthetic oligonucleotide
cucagacucggguccucca

SEQ ID NO: 3141891 - RNA, 19 nt, Artificial Sequence
  Description of Artificial Sequence: Synthetic oligonucleotide
cggguccuccaucugaggc

SEQ ID NO: 3141892 - RNA, 19 nt, Artificial Sequence
  Description of Artificial Sequence: Synthetic oligonucleotide
uucucagacucggguccuc

SEQ ID NO: 3141893 - RNA, 19 nt, Artificial Sequence
  Description of Artificial Sequence: Synthetic oligonucleotide
ggaggaccccagcacguga

SEQ ID NO: 3141894 - RNA, 19 nt, Artificial Sequence
  Description of Artificial Sequence: Synthetic oligonucleotide
ugggccuggccugggcaga

SEQ ID NO: 3141895 - RNA, 19 nt, Artificial Sequence
  Description of Artificial Sequence: Synthetic oligonucleotide
aggaccccagcacgugaua

SEQ ID NO: 3141896 - RNA, 19 nt, Artificial Sequence
  Description of Artificial Sequence: Synthetic oligonucleotide
gcugccucaaaggacuucu

SEQ ID NO: 3141897 - RNA, 19 nt, Artificial Sequence
  Description of Artificial Sequence: Synthetic oligonucleotide
cagaugggccuggccuggg

SEQ ID NO: 3141898 - RNA, 19 nt, Artificial Sequence
  Description of Artificial Sequence: Synthetic oligonucleotide
aggacacagcugccucaaa

SEQ ID NO: 3141899 - RNA, 19 nt, Artificial Sequence
  Description of Artificial Sequence: Synthetic oligonucleotide
uccuggcccggggcagagg

SEQ ID NO: 3141900 - RNA, 19 nt, Artificial Sequence
  Description of Artificial Sequence: Synthetic oligonucleotide
auccuggcccggggcagag

SEQ ID NO: 3141901 - RNA, 19 nt, Artificial Sequence
  Description of Artificial Sequence: Synthetic oligonucleotide
ccucaaaggacuucuucau

SEQ ID NO: 3141902 - RNA, 19 nt, Artificial Sequence
  Description of Artificial Sequence: Synthetic oligonucleotide
gggcagaggcgcagggaag

SEQ ID NO: 3141903 - RNA, 19 nt, Artificial Sequence
  Description of Artificial Sequence: Synthetic oligonucleotide
gaggaccccagcacgugau

SEQ ID NO: 3141904 - RNA, 19 nt, Artificial Sequence
  Description of Artificial Sequence: Synthetic oligonucleotide
ccuggccugggcagaggac

SEQ ID NO: 3141905 - RNA, 19 nt, Artificial Sequence
  Description of Artificial Sequence: Synthetic oligonucleotide
gcagaggacacagcugccu

SEQ ID NO: 3141906 - RNA, 19 nt, Artificial Sequence
  Description of Artificial Sequence: Synthetic oligonucleotide
ggcagaggcgcagggaagu

SEQ ID NO: 3141907 - RNA, 19 nt, Artificial Sequence
  Description of Artificial Sequence: Synthetic oligonucleotide
cuucucagacucggguccu

SEQ ID NO: 3141908 - RNA, 19 nt, Artificial Sequence
  Description of Artificial Sequence: Synthetic oligonucleotide
ggacuucuucaucauccuu

SEQ ID NO: 3141909 - RNA, 19 nt, Artificial Sequence
  Description of Artificial Sequence: Synthetic oligonucleotide
ggggcauugggcaggguau

SEQ ID NO: 3141910 - RNA, 19 nt, Artificial Sequence
  Description of Artificial Sequence: Synthetic oligonucleotide
cauccuggcccggggcaga

SEQ ID NO: 3141911 - RNA, 19 nt, Artificial Sequence
  Description of Artificial Sequence: Synthetic oligonucleotide
gcgcagggaaguugguggu

SEQ ID NO: 3141912 - RNA, 19 nt, Artificial Sequence
  Description of Artificial Sequence: Synthetic oligonucleotide
gaggcgcagggaaguuggu

SEQ ID NO: 3141913 - RNA, 19 nt, Artificial Sequence
  Description of Artificial Sequence: Synthetic oligonucleotide
gggcauugggcaggguaua

SEQ ID NO: 3141914 - RNA, 19 nt, Artificial Sequence
  Description of Artificial Sequence: Synthetic oligonucleotide
cggaggaccccagcacgug

SEQ ID NO: 3141915 - RNA, 19 nt, Artificial Sequence
  Description of Artificial Sequence: Synthetic oligonucleotide
gcggaggaccccagcacgu

SEQ ID NO: 3141916 - RNA, 19 nt, Artificial Sequence
  Description of Artificial Sequence: Synthetic oligonucleotide
ccagcacgugauagaggcu

SEQ ID NO: 3141917 - RNA, 19 nt, Artificial Sequence
  Description of Artificial Sequence: Synthetic oligonucleotide
cagcugccucaaaggacuu

SEQ ID NO: 3141918 - RNA, 19 nt, Artificial Sequence
  Description of Artificial Sequence: Synthetic oligonucleotide
gcagaggcgcagggaaguu

SEQ ID NO: 3141919 - RNA, 19 nt, Artificial Sequence
  Description of Artificial Sequence: Synthetic oligonucleotide
ggcccggggcagaggcgca

SEQ ID NO: 3141920 - RNA, 19 nt, Artificial Sequence
  Description of Artificial Sequence: Synthetic oligonucleotide
cgcagggaaguugguggua

SEQ ID NO: 3141921 - RNA, 19 nt, Artificial Sequence
  Description of Artificial Sequence: Synthetic oligonucleotide
cggggcagaggcgcaggga

SEQ ID NO: 3141922 - RNA, 19 nt, Artificial Sequence
  Description of Artificial Sequence: Synthetic oligonucleotide
uucuucuugaucuugacag

SEQ ID NO: 3141923 - RNA, 19 nt, Artificial Sequence
  Description of Artificial Sequence: Synthetic oligonucleotide
aauagucaaacgcagaagu

SEQ ID NO: 3141924 - RNA, 19 nt, Artificial Sequence
  Description of Artificial Sequence: Synthetic oligonucleotide
aaacgcagaagucugguuc

SEQ ID NO: 3141925 - RNA, 19 nt, Artificial Sequence
  Description of Artificial Sequence: Synthetic oligonucleotide
uuuuaauagucaaacgcag

SEQ ID NO: 3141926 - RNA, 19 nt, Artificial Sequence
  Description of Artificial Sequence: Synthetic oligonucleotide
aaagguaccugcugcagcg

SEQ ID NO: 3141927 - RNA, 19 nt, Artificial Sequence
  Description of Artificial Sequence: Synthetic oligonucleotide
acuguuucaacuucucagc

SEQ ID NO: 3141928 - RNA, 19 nt, Artificial Sequence
  Description of Artificial Sequence: Synthetic oligonucleotide
agaguguaaagguaccugc

SEQ ID NO: 3141929 - RNA, 19 nt, Artificial Sequence
  Description of Artificial Sequence: Synthetic oligonucleotide
uuaauagucaaacgcagaa

SEQ ID NO: 3141930 - RNA, 19 nt, Artificial Sequence
  Description of Artificial Sequence: Synthetic oligonucleotide
ucugguucauuucagcucc

SEQ ID NO: 3141931 - RNA, 19 nt, Artificial Sequence
  Description of Artificial Sequence: Synthetic oligonucleotide
uugucugugauaaccagag

SEQ ID NO: 3141932 - RNA, 19 nt, Artificial Sequence
  Description of Artificial Sequence: Synthetic oligonucleotide
gacuguuucaacuucucag

SEQ ID NO: 3141933 - RNA, 19 nt, Artificial Sequence
  Description of Artificial Sequence: Synthetic oligonucleotide
uucacauuauccuuguucu

SEQ ID NO: 3141934 - RNA, 19 nt, Artificial Sequence
  Description of Artificial Sequence: Synthetic oligonucleotide
uugaacuucacauuauccu

SEQ ID NO: 3141935 - RNA, 19 nt, Artificial Sequence
  Description of Artificial Sequence: Synthetic oligonucleotide
auaaccagaguguaaaggu

SEQ ID NO: 3141936 - RNA, 19 nt, Artificial Sequence
  Description of Artificial Sequence: Synthetic oligonucleotide
gauaaccagaguguaaagg

SEQ ID NO: 3141937 - RNA, 19 nt, Artificial Sequence
  Description of Artificial Sequence: Synthetic oligonucleotide
uucacugccaaaccagggg

SEQ ID NO: 3141938 - RNA, 19 nt, Artificial Sequence
  Description of Artificial Sequence: Synthetic oligonucleotide
ucugugauaaccagagugu

SEQ ID NO: 3141939 - RNA, 19 nt, Artificial Sequence
  Description of Artificial Sequence: Synthetic oligonucleotide
uuuaauagucaaacgcaga

SEQ ID NO: 3141940 - RNA, 19 nt, Artificial Sequence
  Description of Artificial Sequence: Synthetic oligonucleotide
cuugaacuucacauuaucc

SEQ ID NO: 3141941 - RNA, 19 nt, Artificial Sequence
  Description of Artificial Sequence: Synthetic oligonucleotide
aaccagaguguaaagguac

SEQ ID NO: 3141942 - RNA, 19 nt, Artificial Sequence
  Description of Artificial Sequence: Synthetic oligonucleotide
auuucagcuccuucacugc

SEQ ID NO: 3141943 - RNA, 19 nt, Artificial Sequence
  Description of Artificial Sequence: Synthetic oligonucleotide
cuucacauuauccuuguuc

SEQ ID NO: 3141944 - RNA, 19 nt, Artificial Sequence
  Description of Artificial Sequence: Synthetic oligonucleotide
uuugucugugauaaccaga

SEQ ID NO: 3141945 - RNA, 19 nt, Artificial Sequence
  Description of Artificial Sequence: Synthetic oligonucleotide
agaagucugguucauuuca

SEQ ID NO: 3141946 - RNA, 19 nt, Artificial Sequence
  Description of Artificial Sequence: Synthetic oligonucleotide
uccuucacugccaaaccag

SEQ ID NO: 3141947 - RNA, 19 nt, Artificial Sequence
  Description of Artificial Sequence: Synthetic oligonucleotide
aaccuugaacuucacauua

SEQ ID NO: 3141948 - RNA, 19 nt, Artificial Sequence
  Description of Artificial Sequence: Synthetic oligonucleotide
cucuuugucugugauaacc

SEQ ID NO: 3141949 - RNA, 19 nt, Artificial Sequence
  Description of Artificial Sequence: Synthetic oligonucleotide
uguaaagguaccugcugca

SEQ ID NO: 3141950 - RNA, 19 nt, Artificial Sequence
  Description of Artificial Sequence: Synthetic oligonucleotide
aacgcagaagucugguuca

SEQ ID NO: 3141951 - RNA, 19 nt, Artificial Sequence
  Description of Artificial Sequence: Synthetic oligonucleotide
uaauagucaaacgcagaag

SEQ ID NO: 3141952 - RNA, 19 nt, Artificial Sequence
  Description of Artificial Sequence: Synthetic oligonucleotide
uucauuucagcuccuucac

SEQ ID NO: 3141953 - RNA, 19 nt, Artificial Sequence
  Description of Artificial Sequence: Synthetic oligonucleotide
ugaacuucacauuauccuu

SEQ ID NO: 3141954 - RNA, 19 nt, Artificial Sequence
  Description of Artificial Sequence: Synthetic oligonucleotide
uagucaaacgcagaagucu

SEQ ID NO: 3141955 - RNA, 19 nt, Artificial Sequence
  Description of Artificial Sequence: Synthetic oligonucleotide
aguguaaagguaccugcug

SEQ ID NO: 3141956 - RNA, 19 nt, Artificial Sequence
  Description of Artificial Sequence: Synthetic oligonucleotide
guucauuucagcuccuuca

SEQ ID NO: 3141957 - RNA, 19 nt, Artificial Sequence
  Description of Artificial Sequence: Synthetic oligonucleotide
agcuccuucacugccaaac

SEQ ID NO: 3141958 - RNA, 19 nt, Artificial Sequence
  Description of Artificial Sequence: Synthetic oligonucleotide
aacuucacauuauccuugu

SEQ ID NO: 3141959 - RNA, 19 nt, Artificial Sequence
  Description of Artificial Sequence: Synthetic oligonucleotide
guguaaagguaccugcugc

SEQ ID NO: 3141960 - RNA, 19 nt, Artificial Sequence
  Description of Artificial Sequence: Synthetic oligonucleotide
ugauaaccagaguguaaag

SEQ ID NO: 3141961 - RNA, 19 nt, Artificial Sequence
  Description of Artificial Sequence: Synthetic oligonucleotide
agucugguucauuucagcu

SEQ ID NO: 3141962 - RNA, 19 nt, Artificial Sequence
  Description of Artificial Sequence: Synthetic oligonucleotide
uguuucaacuucucagccu

SEQ ID NO: 3141963 - RNA, 19 nt, Artificial Sequence
  Description of Artificial Sequence: Synthetic oligonucleotide
ugugauaaccagaguguaa

SEQ ID NO: 3141964 - RNA, 19 nt, Artificial Sequence
  Description of Artificial Sequence: Synthetic oligonucleotide
gaacuucacauuauccuug

SEQ ID NO: 3141965 - RNA, 19 nt, Artificial Sequence
  Description of Artificial Sequence: Synthetic oligonucleotide
uuguucuucuugaucuuga

SEQ ID NO: 3141966 - RNA, 19 nt, Artificial Sequence
  Description of Artificial Sequence: Synthetic oligonucleotide
acauuauccuuguucuucu

SEQ ID NO: 3141967 - RNA, 19 nt, Artificial Sequence
  Description of Artificial Sequence: Synthetic oligonucleotide
cuucacugccaaaccaggg

SEQ ID NO: 3141968 - RNA, 19 nt, Artificial Sequence
  Description of Artificial Sequence: Synthetic oligonucleotide
auagucaaacgcagaaguc

SEQ ID NO: 3141969 - RNA, 19 nt, Artificial Sequence
  Description of Artificial Sequence: Synthetic oligonucleotide
uaaccagaguguaaaggua

SEQ ID NO: 3141970 - RNA, 19 nt, Artificial Sequence
  Description of Artificial Sequence: Synthetic oligonucleotide
cacauuauccuuguucuuc

SEQ ID NO: 3141971 - RNA, 19 nt, Artificial Sequence
  Description of Artificial Sequence: Synthetic oligonucleotide
gaagucugguucauuucag

SEQ ID NO: 3141972 - RNA, 19 nt, Artificial Sequence
  Description of Artificial Sequence: Synthetic oligonucleotide
accagaguguaaagguacc

SEQ ID NO: 3141973 - RNA, 19 nt, Artificial Sequence
  Description of Artificial Sequence: Synthetic oligonucleotide
agucaaacgcagaagucug

SEQ ID NO: 3141974 - RNA, 19 nt, Artificial Sequence
  Description of Artificial Sequence: Synthetic oligonucleotide
ucaaacgcagaagucuggu

SEQ ID NO: 3141975 - RNA, 19 nt, Artificial Sequence
  Description of Artificial Sequence: Synthetic oligonucleotide
gugauaaccagaguguaaa

SEQ ID NO: 3141976 - RNA, 19 nt, Artificial Sequence
  Description of Artificial Sequence: Synthetic oligonucleotide
gucugguucauuucagcuc

SEQ ID NO: 3141977 - RNA, 19 nt, Artificial Sequence
  Description of Artificial Sequence: Synthetic oligonucleotide
guaaagguaccugcugcag

SEQ ID NO: 3141978 - RNA, 19 nt, Artificial Sequence
  Description of Artificial Sequence: Synthetic oligonucleotide
cagaguguaaagguaccug

SEQ ID NO: 3141979 - RNA, 19 nt, Artificial Sequence
  Description of Artificial Sequence: Synthetic oligonucleotide
guaccugcugcagcgaacc

SEQ ID NO: 3141980 - RNA, 19 nt, Artificial Sequence
  Description of Artificial Sequence: Synthetic oligonucleotide
ucagcuccuucacugccaa

SEQ ID NO: 3141981 - RNA, 19 nt, Artificial Sequence
  Description of Artificial Sequence: Synthetic oligonucleotide
cagaagucugguucauuuc

SEQ ID NO: 3141982 - RNA, 19 nt, Artificial Sequence
  Description of Artificial Sequence: Synthetic oligonucleotide
gcugcagcgaaccuugaac

SEQ ID NO: 3141983 - RNA, 19 nt, Artificial Sequence
  Description of Artificial Sequence: Synthetic oligonucleotide
gucaaacgcagaagucugg

SEQ ID NO: 3141984 - RNA, 19 nt, Artificial Sequence
  Description of Artificial Sequence: Synthetic oligonucleotide
ugucugugauaaccagagu

SEQ ID NO: 3141985 - RNA, 19 nt, Artificial Sequence
  Description of Artificial Sequence: Synthetic oligonucleotide
guuucaacuucucagccuu

SEQ ID NO: 3141986 - RNA, 19 nt, Artificial Sequence
  Description of Artificial Sequence: Synthetic oligonucleotide
uuucaacuucucagccuuc

SEQ ID NO: 3141987 - RNA, 19 nt, Artificial Sequence
  Description of Artificial Sequence: Synthetic oligonucleotide
ccuucacugccaaaccagg

SEQ ID NO: 3141988 - RNA, 19 nt, Artificial Sequence
  Description of Artificial Sequence: Synthetic oligonucleotide
ucacauuauccuuguucuu

SEQ ID NO: 3141989 - RNA, 19 nt, Artificial Sequence
  Description of Artificial Sequence: Synthetic oligonucleotide
ugcagcgaaccuugaacuu

SEQ ID NO: 3141990 - RNA, 19 nt, Artificial Sequence
  Description of Artificial Sequence: Synthetic oligonucleotide
ugcugcagcgaaccuugaa

SEQ ID NO: 3141991 - RNA, 19 nt, Artificial Sequence
  Description of Artificial Sequence: Synthetic oligonucleotide
gaaccuugaacuucacauu

SEQ ID NO: 3141992 - RNA, 19 nt, Artificial Sequence
  Description of Artificial Sequence: Synthetic oligonucleotide
cagggacuguuucaacuuc

SEQ ID NO: 3141993 - RNA, 19 nt, Artificial Sequence
  Description of Artificial Sequence: Synthetic oligonucleotide
gguucauuucagcuccuuc

SEQ ID NO: 3141994 - RNA, 19 nt, Artificial Sequence
  Description of Artificial Sequence: Synthetic oligonucleotide
cagcgaaccuugaacuuca

SEQ ID NO: 3141995 - RNA, 19 nt, Artificial Sequence
  Description of Artificial Sequence: Synthetic oligonucleotide
cuccuucacugccaaacca

SEQ ID NO: 3141996 - RNA, 19 nt, Artificial Sequence
  Description of Artificial Sequence: Synthetic oligonucleotide
agggacuguuucaacuucu

SEQ ID NO: 3141997 - RNA, 19 nt, Artificial Sequence
  Description of Artificial Sequence: Synthetic oligonucleotide
cugcagcgaaccuugaacu

SEQ ID NO: 3141998 - RNA, 19 nt, Artificial Sequence
  Description of Artificial Sequence: Synthetic oligonucleotide
caacuucucagccuucucu

SEQ ID NO: 3141999 - RNA, 19 nt, Artificial Sequence
  Description of Artificial Sequence: Synthetic oligonucleotide
gcuccuucacugccaaacc

SEQ ID NO: 3142000 - RNA, 19 nt, Artificial Sequence
  Description of Artificial Sequence: Synthetic oligonucleotide
gaguguaaagguaccugcu

SEQ ID NO: 3142001 - RNA, 19 nt, Artificial Sequence
  Description of Artificial Sequence: Synthetic oligonucleotide
ggacuguuucaacuucuca

SEQ ID NO: 3142002 - RNA, 19 nt, Artificial Sequence
  Description of Artificial Sequence: Synthetic oligonucleotide
aagguaccugcugcagcga

SEQ ID NO: 3142003 - RNA, 19 nt, Artificial Sequence
  Description of Artificial Sequence: Synthetic oligonucleotide
agguaccugcugcagcgaa

SEQ ID NO: 3142004 - RNA, 19 nt, Artificial Sequence
  Description of Artificial Sequence: Synthetic oligonucleotide
cgaaccuugaacuucacau

SEQ ID NO: 3142005 - RNA, 19 nt, Artificial Sequence
  Description of Artificial Sequence: Synthetic oligonucleotide
uaccugcugcagcgaaccu

SEQ ID NO: 3142006 - RNA, 19 nt, Artificial Sequence
  Description of Artificial Sequence: Synthetic oligonucleotide
accuugaacuucacauuau

SEQ ID NO: 3142007 - RNA, 19 nt, Artificial Sequence
  Description of Artificial Sequence: Synthetic oligonucleotide
acuucacauuauccuuguu

SEQ ID NO: 3142008 - RNA, 19 nt, Artificial Sequence
  Description of Artificial Sequence: Synthetic oligonucleotide
cugugauaaccagagugua

SEQ ID NO: 3142009 - RNA, 19 nt, Artificial Sequence
  Description of Artificial Sequence: Synthetic oligonucleotide
gcagcgaaccuugaacuuc

SEQ ID NO: 3142010 - RNA, 19 nt, Artificial Sequence
  Description of Artificial Sequence: Synthetic oligonucleotide
agcgaaccuugaacuucac

SEQ ID NO: 3142011 - RNA, 19 nt, Artificial Sequence
  Description of Artificial Sequence: Synthetic oligonucleotide
ugguucauuucagcuccuu

SEQ ID NO: 3142012 - RNA, 19 nt, Artificial Sequence
  Description of Artificial Sequence: Synthetic oligonucleotide
accugcugcagcgaaccuu

SEQ ID NO: 3142013 - RNA, 19 nt, Artificial Sequence
  Description of Artificial Sequence: Synthetic oligonucleotide
gcgaaccuugaacuucaca

SEQ ID NO: 3142014 - RNA, 19 nt, Artificial Sequence
  Description of Artificial Sequence: Synthetic oligonucleotide
gguaccugcugcagcgaac

SEQ ID NO: 3142015 - RNA, 19 nt, Artificial Sequence
  Description of Artificial Sequence: Synthetic oligonucleotide
gggacuguuucaacuucuc

SEQ ID NO: 3142016 - RNA, 19 nt, Artificial Sequence
  Description of Artificial Sequence: Synthetic oligonucleotide
caaacgcagaagucugguu

SEQ ID NO: 3142017 - RNA, 19 nt, Artificial Sequence
  Description of Artificial Sequence: Synthetic oligonucleotide
gcagggacuguuucaacuu

SEQ ID NO: 3142018 - RNA, 19 nt, Artificial Sequence
  Description of Artificial Sequence: Synthetic oligonucleotide
ggggcagggacuguuucaa

SEQ ID NO: 3142019 - RNA, 19 nt, Artificial Sequence
  Description of Artificial Sequence: Synthetic oligonucleotide
acgcagaagucugguucau

SEQ ID NO: 3142020 - RNA, 19 nt, Artificial Sequence
  Description of Artificial Sequence: Synthetic oligonucleotide
gccuucucuuugucuguga

SEQ ID NO: 3142021 - RNA, 19 nt, Artificial Sequence
  Description of Artificial Sequence: Synthetic oligonucleotide
gggcagggacuguuucaac

SEQ ID NO: 3142022 - RNA, 19 nt, Artificial Sequence
  Description of Artificial Sequence: Synthetic oligonucleotide
cauuauccuuguucuucuu

SEQ ID NO: 3142023 - RNA, 19 nt, Artificial Sequence
  Description of Artificial Sequence: Synthetic oligonucleotide
cugcugcagcgaaccuuga

SEQ ID NO: 3142024 - RNA, 19 nt, Artificial Sequence
  Description of Artificial Sequence: Synthetic oligonucleotide
cugguucauuucagcuccu

SEQ ID NO: 3142025 - RNA, 19 nt, Artificial Sequence
  Description of Artificial Sequence: Synthetic oligonucleotide
ccagaguguaaagguaccu

SEQ ID NO: 3142026 - RNA, 19 nt, Artificial Sequence
  Description of Artificial Sequence: Synthetic oligonucleotide
cagcuccuucacugccaaa

SEQ ID NO: 3142027 - RNA, 19 nt, Artificial Sequence
  Description of Artificial Sequence: Synthetic oligonucleotide
cgcagaagucugguucauu

SEQ ID NO: 3142028 - RNA, 19 nt, Artificial Sequence
  Description of Artificial Sequence: Synthetic oligonucleotide
uuuaguuuggcuaacuuac

SEQ ID NO: 3142029 - RNA, 19 nt, Artificial Sequence
  Description of Artificial Sequence: Synthetic oligonucleotide
uacaggaacagacuuaaag

SEQ ID NO: 3142030 - RNA, 19 nt, Artificial Sequence
  Description of Artificial Sequence: Synthetic oligonucleotide
uuagggguuacuuacagga

SEQ ID NO: 3142031 - RNA, 19 nt, Artificial Sequence
  Description of Artificial Sequence: Synthetic oligonucleotide
aagcugggaaaacugaagg

SEQ ID NO: 3142032 - RNA, 19 nt, Artificial Sequence
  Description of Artificial Sequence: Synthetic oligonucleotide
aaaacugaaggacacugca

SEQ ID NO: 3142033 - RNA, 19 nt, Artificial Sequence
  Description of Artificial Sequence: Synthetic oligonucleotide
ugacagcucacaaagcugg

SEQ ID NO: 3142034 - RNA, 19 nt, Artificial Sequence
  Description of Artificial Sequence: Synthetic oligonucleotide
uuggcuaacuuacaggagc

SEQ ID NO: 3142035 - RNA, 19 nt, Artificial Sequence
  Description of Artificial Sequence: Synthetic oligonucleotide
cagacuuaaagacagcugc

SEQ ID NO: 3142036 - RNA, 19 nt, Artificial Sequence
  Description of Artificial Sequence: Synthetic oligonucleotide
aacugaaggacacugcaca

SEQ ID NO: 3142037 - RNA, 19 nt, Artificial Sequence
  Description of Artificial Sequence: Synthetic oligonucleotide
aggagcaugaguuaggggu

SEQ ID NO: 3142038 - RNA, 19 nt, Artificial Sequence
  Description of Artificial Sequence: Synthetic oligonucleotide
aucaauuuuaguuuggcua

SEQ ID NO: 3142039 - RNA, 19 nt, Artificial Sequence
  Description of Artificial Sequence: Synthetic oligonucleotide
guuacuuacaggaacagac

SEQ ID NO: 3142040 - RNA, 19 nt, Artificial Sequence
  Description of Artificial Sequence: Synthetic oligonucleotide
ucaauuuuaguuuggcuaa

SEQ ID NO: 3142041 - RNA, 19 nt, Artificial Sequence
  Description of Artificial Sequence: Synthetic oligonucleotide
aaucaauuuuaguuuggcu

SEQ ID NO: 3142042 - RNA, 19 nt, Artificial Sequence
  Description of Artificial Sequence: Synthetic oligonucleotide
ugaguuagggguuacuuac

SEQ ID NO: 3142043 - RNA, 19 nt, Artificial Sequence
  Description of Artificial Sequence: Synthetic oligonucleotide
ugaaggacacugcacaggc

SEQ ID NO: 3142044 - RNA, 19 nt, Artificial Sequence
  Description of Artificial Sequence: Synthetic oligonucleotide
aguuuggcuaacuuacagg

SEQ ID NO: 3142045 - RNA, 19 nt, Artificial Sequence
  Description of Artificial Sequence: Synthetic oligonucleotide
agggguuacuuacaggaac

SEQ ID NO: 3142046 - RNA, 19 nt, Artificial Sequence
  Description of Artificial Sequence: Synthetic oligonucleotide
agugacagcucacaaagcu

SEQ ID NO: 3142047 - RNA, 19 nt, Artificial Sequence
  Description of Artificial Sequence: Synthetic oligonucleotide
cuuaaagacagcugcauca

SEQ ID NO: 3142048 - RNA, 19 nt, Artificial Sequence
  Description of Artificial Sequence: Synthetic oligonucleotide
uaguuuggcuaacuuacag

SEQ ID NO: 3142049 - RNA, 19 nt, Artificial Sequence
  Description of Artificial Sequence: Synthetic oligonucleotide
aacagacuuaaagacagcu

SEQ ID NO: 3142050 - RNA, 19 nt, Artificial Sequence
  Description of Artificial Sequence: Synthetic oligonucleotide
caggaacagacuuaaagac

SEQ ID NO: 3142051 - RNA, 19 nt, Artificial Sequence
  Description of Artificial Sequence: Synthetic oligonucleotide
uuuuaguuuggcuaacuua

SEQ ID NO: 3142052 - RNA, 19 nt, Artificial Sequence
  Description of Artificial Sequence: Synthetic oligonucleotide
acuuaaagacagcugcauc

SEQ ID NO: 3142053 - RNA, 19 nt, Artificial Sequence
  Description of Artificial Sequence: Synthetic oligonucleotide
cuaaucaauuuuaguuugg

SEQ ID NO: 3142054 - RNA, 19 nt, Artificial Sequence
  Description of Artificial Sequence: Synthetic oligonucleotide
guuuggcuaacuuacagga

SEQ ID NO: 3142055 - RNA, 19 nt, Artificial Sequence
  Description of Artificial Sequence: Synthetic oligonucleotide
uaaucaauuuuaguuuggc

SEQ ID NO: 3142056 - RNA, 19 nt, Artificial Sequence
  Description of Artificial Sequence: Synthetic oligonucleotide
aaagacagcugcaucacca

SEQ ID NO: 3142057 - RNA, 19 nt, Artificial Sequence
  Description of Artificial Sequence: Synthetic oligonucleotide
agcuaaucaauuuuaguuu

SEQ ID NO: 3142058 - RNA, 19 nt, Artificial Sequence
  Description of Artificial Sequence: Synthetic oligonucleotide
uuacuuacaggaacagacu

SEQ ID NO: 3142059 - RNA, 19 nt, Artificial Sequence
  Description of Artificial Sequence: Synthetic oligonucleotide
ugagcuaaucaauuuuagu

SEQ ID NO: 3142060 - RNA, 19 nt, Artificial Sequence
  Description of Artificial Sequence: Synthetic oligonucleotide
aaagcugggaaaacugaag

SEQ ID NO: 3142061 - RNA, 19 nt, Artificial Sequence
  Description of Artificial Sequence: Synthetic oligonucleotide
aaacugaaggacacugcac

SEQ ID NO: 3142062 - RNA, 19 nt, Artificial Sequence
  Description of Artificial Sequence: Synthetic oligonucleotide
aguuagggguuacuuacag

SEQ ID NO: 3142063 - RNA, 19 nt, Artificial Sequence
  Description of Artificial Sequence: Synthetic oligonucleotide
uuuggcuaacuuacaggag

SEQ ID NO: 3142064 - RNA, 19 nt, Artificial Sequence
  Description of Artificial Sequence: Synthetic oligonucleotide
ggaacagacuuaaagacag

SEQ ID NO: 3142065 - RNA, 19 nt, Artificial Sequence
  Description of Artificial Sequence: Synthetic oligonucleotide
cuaacuuacaggagcauga

SEQ ID NO: 3142066 - RNA, 19 nt, Artificial Sequence
  Description of Artificial Sequence: Synthetic oligonucleotide
ugaugagcuaaucaauuuu

SEQ ID NO: 3142067 - RNA, 19 nt, Artificial Sequence
  Description of Artificial Sequence: Synthetic oligonucleotide
ugggaaaacugaaggacac

SEQ ID NO: 3142068 - RNA, 19 nt, Artificial Sequence
  Description of Artificial Sequence: Synthetic oligonucleotide
aagacagcugcaucaccag

SEQ ID NO: 3142069 - RNA, 19 nt, Artificial Sequence
  Description of Artificial Sequence: Synthetic oligonucleotide
uacaggagcaugaguuagg

SEQ ID NO: 3142070 - RNA, 19 nt, Artificial Sequence
  Description of Artificial Sequence: Synthetic oligonucleotide
cacaaagcugggaaaacug

SEQ ID NO: 3142071 - RNA, 19 nt, Artificial Sequence
  Description of Artificial Sequence: Synthetic oligonucleotide
uuacaggagcaugaguuag

SEQ ID NO: 3142072 - RNA, 19 nt, Artificial Sequence
  Description of Artificial Sequence: Synthetic oligonucleotide
gagcuaaucaauuuuaguu

SEQ ID NO: 3142073 - RNA, 19 nt, Artificial Sequence
  Description of Artificial Sequence: Synthetic oligonucleotide
aauuuuaguuuggcuaacu

SEQ ID NO: 3142074 - RNA, 19 nt, Artificial Sequence
  Description of Artificial Sequence: Synthetic oligonucleotide
gcuaaucaauuuuaguuug

SEQ ID NO: 3142075 - RNA, 19 nt, Artificial Sequence
  Description of Artificial Sequence: Synthetic oligonucleotide
uacuuacaggaacagacuu

SEQ ID NO: 3142076 - RNA, 19 nt, Artificial Sequence
  Description of Artificial Sequence: Synthetic oligonucleotide
uuaguuuggcuaacuuaca

SEQ ID NO: 3142077 - RNA, 19 nt, Artificial Sequence
  Description of Artificial Sequence: Synthetic oligonucleotide
acuuacaggagcaugaguu

SEQ ID NO: 3142078 - RNA, 19 nt, Artificial Sequence
  Description of Artificial Sequence: Synthetic oligonucleotide
uaaagacagcugcaucacc

SEQ ID NO: 3142079 - RNA, 19 nt, Artificial Sequence
  Description of Artificial Sequence: Synthetic oligonucleotide
agcugcaucaccagagccc

SEQ ID NO: 3142080 - RNA, 19 nt, Artificial Sequence
  Description of Artificial Sequence: Synthetic oligonucleotide
acugaaggacacugcacag

SEQ ID NO: 3142081 - RNA, 19 nt, Artificial Sequence
  Description of Artificial Sequence: Synthetic oligonucleotide
aacuuacaggagcaugagu

SEQ ID NO: 3142082 - RNA, 19 nt, Artificial Sequence
  Description of Artificial Sequence: Synthetic oligonucleotide
guuagggguuacuuacagg

SEQ ID NO: 3142083 - RNA, 19 nt, Artificial Sequence
  Description of Artificial Sequence: Synthetic oligonucleotide
uuaaagacagcugcaucac

SEQ ID NO: 3142084 - RNA, 19 nt, Artificial Sequence
  Description of Artificial Sequence: Synthetic oligonucleotide
gaaaacugaaggacacugc

SEQ ID NO: 3142085 - RNA, 19 nt, Artificial Sequence
  Description of Artificial Sequence: Synthetic oligonucleotide
uggcuaacuuacaggagca

SEQ ID NO: 3142086 - RNA, 19 nt, Artificial Sequence
  Description of Artificial Sequence: Synthetic oligonucleotide
acaggagcaugaguuaggg

SEQ ID NO: 3142087 - RNA, 19 nt, Artificial Sequence
  Description of Artificial Sequence: Synthetic oligonucleotide
uugaugagcuaaucaauuu

SEQ ID NO: 3142088 - RNA, 19 nt, Artificial Sequence
  Description of Artificial Sequence: Synthetic oligonucleotide
agcagguuggacagugucc

SEQ ID NO: 3142089 - RNA, 19 nt, Artificial Sequence
  Description of Artificial Sequence: Synthetic oligonucleotide
uggacaguguccucucuug

SEQ ID NO: 3142090 - RNA, 19 nt, Artificial Sequence
  Description of Artificial Sequence: Synthetic oligonucleotide
auuuuaguuuggcuaacuu

SEQ ID NO: 3142091 - RNA, 19 nt, Artificial Sequence
  Description of Artificial Sequence: Synthetic oligonucleotide
acaggcugcaggcagcuca

SEQ ID NO: 3142092 - RNA, 19 nt, Artificial Sequence
  Description of Artificial Sequence: Synthetic oligonucleotide
uaacuuacaggagcaugag

SEQ ID NO: 3142093 - RNA, 19 nt, Artificial Sequence
  Description of Artificial Sequence: Synthetic oligonucleotide
ucacaaagcugggaaaacu

SEQ ID NO: 3142094 - RNA, 19 nt, Artificial Sequence
  Description of Artificial Sequence: Synthetic oligonucleotide
agcugggaaaacugaagga

SEQ ID NO: 3142095 - RNA, 19 nt, Artificial Sequence
  Description of Artificial Sequence: Synthetic oligonucleotide
gaugagcuaaucaauuuua

SEQ ID NO: 3142096 - RNA, 19 nt, Artificial Sequence
  Description of Artificial Sequence: Synthetic oligonucleotide
augagcuaaucaauuuuag

SEQ ID NO: 3142097 - RNA, 19 nt, Artificial Sequence
  Description of Artificial Sequence: Synthetic oligonucleotide
cacugcacaggcugcaggc

SEQ ID NO: 3142098 - RNA, 19 nt, Artificial Sequence
  Description of Artificial Sequence: Synthetic oligonucleotide
augagugacagcucacaaa

SEQ ID NO: 3142099 - RNA, 19 nt, Artificial Sequence
  Description of Artificial Sequence: Synthetic oligonucleotide
cugggaaaacugaaggaca

SEQ ID NO: 3142100 - RNA, 19 nt, Artificial Sequence
  Description of Artificial Sequence: Synthetic oligonucleotide
cuuacaggaacagacuuaa

SEQ ID NO: 3142101 - RNA, 19 nt, Artificial Sequence
  Description of Artificial Sequence: Synthetic oligonucleotide
augaguuagggguuacuua

SEQ ID NO: 3142102 - RNA, 19 nt, Artificial Sequence
  Description of Artificial Sequence: Synthetic oligonucleotide
acagacuuaaagacagcug

SEQ ID NO: 3142103 - RNA, 19 nt, Artificial Sequence
  Description of Artificial Sequence: Synthetic oligonucleotide
ugcaucaccagagcccacc

SEQ ID NO: 3142104 - RNA, 19 nt, Artificial Sequence
  Description of Artificial Sequence: Synthetic oligonucleotide
acaaagcugggaaaacuga

SEQ ID NO: 3142105 - RNA, 19 nt, Artificial Sequence
  Description of Artificial Sequence: Synthetic oligonucleotide
gcugggaaaacugaaggac

SEQ ID NO: 3142106 - RNA, 19 nt, Artificial Sequence
  Description of Artificial Sequence: Synthetic oligonucleotide
uagggguuacuuacaggaa

SEQ ID NO: 3142107 - RNA, 19 nt, Artificial Sequence
  Description of Artificial Sequence: Synthetic oligonucleotide
caaagcugggaaaacugaa

SEQ ID NO: 3142108 - RNA, 19 nt, Artificial Sequence
  Description of Artificial Sequence: Synthetic oligonucleotide
uuggacaguguccucucuu

SEQ ID NO: 3142109 - RNA, 19 nt, Artificial Sequence
  Description of Artificial Sequence: Synthetic oligonucleotide
gacagcucacaaagcuggg

SEQ ID NO: 3142110 - RNA, 19 nt, Artificial Sequence
  Description of Artificial Sequence: Synthetic oligonucleotide
agacuuaaagacagcugca

SEQ ID NO: 3142111 - RNA, 19 nt, Artificial Sequence
  Description of Artificial Sequence: Synthetic oligonucleotide
caggagcaugaguuagggg

SEQ ID NO: 3142112 - RNA, 19 nt, Artificial Sequence
  Description of Artificial Sequence: Synthetic oligonucleotide
cugcacaggcugcaggcag

SEQ ID NO: 3142113 - RNA, 19 nt, Artificial Sequence
  Description of Artificial Sequence: Synthetic oligonucleotide
gaacagacuuaaagacagc

SEQ ID NO: 3142114 - RNA, 19 nt, Artificial Sequence
  Description of Artificial Sequence: Synthetic oligonucleotide
gcuaacuuacaggagcaug

SEQ ID NO: 3142115 - RNA, 19 nt, Artificial Sequence
  Description of Artificial Sequence: Synthetic oligonucleotide
agacagcugcaucaccaga

SEQ ID NO: 3142116 - RNA, 19 nt, Artificial Sequence
  Description of Artificial Sequence: Synthetic oligonucleotide
caauuuuaguuuggcuaac

SEQ ID NO: 3142117 - RNA, 19 nt, Artificial Sequence
  Description of Artificial Sequence: Synthetic oligonucleotide
cucacaaagcugggaaaac

SEQ ID NO: 3142118 - RNA, 19 nt, Artificial Sequence
  Description of Artificial Sequence: Synthetic oligonucleotide
cuuacaggagcaugaguua

SEQ ID NO: 3142119 - RNA, 19 nt, Artificial Sequence
  Description of Artificial Sequence: Synthetic oligonucleotide
ggacaguguccucucuugg

SEQ ID NO: 3142120 - RNA, 19 nt, Artificial Sequence
  Description of Artificial Sequence: Synthetic oligonucleotide
agcucacaaagcugggaaa

SEQ ID NO: 3142121 - RNA, 19 nt, Artificial Sequence
  Description of Artificial Sequence: Synthetic oligonucleotide
agguuggacaguguccucu

SEQ ID NO: 3142122 - RNA, 19 nt, Artificial Sequence
  Description of Artificial Sequence: Synthetic oligonucleotide
agcaugagugacagcucac

SEQ ID NO: 3142123 - RNA, 19 nt, Artificial Sequence
  Description of Artificial Sequence: Synthetic oligonucleotide
agcaugaguuagggguuac

SEQ ID NO: 3142124 - RNA, 19 nt, Artificial Sequence
  Description of Artificial Sequence: Synthetic oligonucleotide
cagcaugagugacagcuca

SEQ ID NO: 3142125 - RNA, 19 nt, Artificial Sequence
  Description of Artificial Sequence: Synthetic oligonucleotide
cagcagguuggacaguguc

SEQ ID NO: 3142126 - RNA, 19 nt, Artificial Sequence
  Description of Artificial Sequence: Synthetic oligonucleotide
acuuacaggaacagacuua

SEQ ID NO: 3142127 - RNA, 19 nt, Artificial Sequence
  Description of Artificial Sequence: Synthetic oligonucleotide
gacacugcacaggcugcag

SEQ ID NO: 3142128 - RNA, 19 nt, Artificial Sequence
  Description of Artificial Sequence: Synthetic oligonucleotide
caugagugacagcucacaa

SEQ ID NO: 3142129 - RNA, 19 nt, Artificial Sequence
  Description of Artificial Sequence: Synthetic oligonucleotide
caucaccagagcccacccc

SEQ ID NO: 3142130 - RNA, 19 nt, Artificial Sequence
  Description of Artificial Sequence: Synthetic oligonucleotide
cagcucacaaagcugggaa

SEQ ID NO: 3142131 - RNA, 19 nt, Artificial Sequence
  Description of Artificial Sequence: Synthetic oligonucleotide
caggcugcaggcagcucag

SEQ ID NO: 3142132 - RNA, 19 nt, Artificial Sequence
  Description of Artificial Sequence: Synthetic oligonucleotide
aggcagcucagcagguugg

SEQ ID NO: 3142133 - RNA, 19 nt, Artificial Sequence
  Description of Artificial Sequence: Synthetic oligonucleotide
ugcaggcagcucagcaggu

SEQ ID NO: 3142134 - RNA, 19 nt, Artificial Sequence
  Description of Artificial Sequence: Synthetic oligonucleotide
gaguuagggguuacuuaca

SEQ ID NO: 3142135 - RNA, 19 nt, Artificial Sequence
  Description of Artificial Sequence: Synthetic oligonucleotide
gacuuaaagacagcugcau

SEQ ID NO: 3142136 - RNA, 19 nt, Artificial Sequence
  Description of Artificial Sequence: Synthetic oligonucleotide
gggguuacuuacaggaaca

SEQ ID NO: 3142137 - RNA, 19 nt, Artificial Sequence
  Description of Artificial Sequence: Synthetic oligonucleotide
ggguuacuuacaggaacag

SEQ ID NO: 3142138 - RNA, 19 nt, Artificial Sequence
  Description of Artificial Sequence: Synthetic oligonucleotide
gguuacuuacaggaacaga

SEQ ID NO: 3142139 - RNA, 19 nt, Artificial Sequence
  Description of Artificial Sequence: Synthetic oligonucleotide
acugcacaggcugcaggca

SEQ ID NO: 3142140 - RNA, 19 nt, Artificial Sequence
  Description of Artificial Sequence: Synthetic oligonucleotide
gcugcaucaccagagccca

SEQ ID NO: 3142141 - RNA, 19 nt, Artificial Sequence
  Description of Artificial Sequence: Synthetic oligonucleotide
gguuggacaguguccucuc

SEQ ID NO: 3142142 - RNA, 19 nt, Artificial Sequence
  Description of Artificial Sequence: Synthetic oligonucleotide
gcaucaccagagcccaccc

SEQ ID NO: 3142143 - RNA, 19 nt, Artificial Sequence
  Description of Artificial Sequence: Synthetic oligonucleotide
gcucacaaagcugggaaaa

SEQ ID NO: 3142144 - RNA, 19 nt, Artificial Sequence
  Description of Artificial Sequence: Synthetic oligonucleotide
caugaguuagggguuacuu

SEQ ID NO: 3142145 - RNA, 19 nt, Artificial Sequence
  Description of Artificial Sequence: Synthetic oligonucleotide
cccagcaugagugacagcu

SEQ ID NO: 3142146 - RNA, 19 nt, Artificial Sequence
  Description of Artificial Sequence: Synthetic oligonucleotide
gcaugagugacagcucaca

SEQ ID NO: 3142147 - RNA, 19 nt, Artificial Sequence
  Description of Artificial Sequence: Synthetic oligonucleotide
cagguuggacaguguccuc

SEQ ID NO: 3142148 - RNA, 19 nt, Artificial Sequence
  Description of Artificial Sequence: Synthetic oligonucleotide
gagcaugaguuagggguua

SEQ ID NO: 3142149 - RNA, 19 nt, Artificial Sequence
  Description of Artificial Sequence: Synthetic oligonucleotide
gcagguuggacaguguccu

SEQ ID NO: 3142150 - RNA, 19 nt, Artificial Sequence
  Description of Artificial Sequence: Synthetic oligonucleotide
ccagcaugagugacagcuc

SEQ ID NO: 3142151 - RNA, 19 nt, Artificial Sequence
  Description of Artificial Sequence: Synthetic oligonucleotide
guuggacaguguccucucu

SEQ ID NO: 3142152 - RNA, 19 nt, Artificial Sequence
  Description of Artificial Sequence: Synthetic oligonucleotide
gaaggacacugcacaggcu

SEQ ID NO: 3142153 - RNA, 19 nt, Artificial Sequence
  Description of Artificial Sequence: Synthetic oligonucleotide
cugcaucaccagagcccac

SEQ ID NO: 3142154 - RNA, 19 nt, Artificial Sequence
  Description of Artificial Sequence: Synthetic oligonucleotide
ggacacugcacaggcugca

SEQ ID NO: 3142155 - RNA, 19 nt, Artificial Sequence
  Description of Artificial Sequence: Synthetic oligonucleotide
gcagcucagcagguuggac

SEQ ID NO: 3142156 - RNA, 19 nt, Artificial Sequence
  Description of Artificial Sequence: Synthetic oligonucleotide
ggagcaugaguuagggguu

SEQ ID NO: 3142157 - RNA, 19 nt, Artificial Sequence
  Description of Artificial Sequence: Synthetic oligonucleotide
ggcagcucagcagguugga

SEQ ID NO: 3142158 - RNA, 19 nt, Artificial Sequence
  Description of Artificial Sequence: Synthetic oligonucleotide
cacaggcugcaggcagcuc

SEQ ID NO: 3142159 - RNA, 19 nt, Artificial Sequence
  Description of Artificial Sequence: Synthetic oligonucleotide
gcaugaguuagggguuacu

SEQ ID NO: 3142160 - RNA, 19 nt, Artificial Sequence
  Description of Artificial Sequence: Synthetic oligonucleotide
ggcuaacuuacaggagcau

SEQ ID NO: 3142161 - RNA, 19 nt, Artificial Sequence
  Description of Artificial Sequence: Synthetic oligonucleotide
gcacaggcugcaggcagcu

SEQ ID NO: 3142162 - RNA, 19 nt, Artificial Sequence
  Description of Artificial Sequence: Synthetic oligonucleotide
uucucuucuuucuagcagg

SEQ ID NO: 3142163 - RNA, 19 nt, Artificial Sequence
  Description of Artificial Sequence: Synthetic oligonucleotide
uccaucucugaccacgggg

SEQ ID NO: 3142164 - RNA, 19 nt, Artificial Sequence
  Description of Artificial Sequence: Synthetic oligonucleotide
uuuauuuccuggcucugug

SEQ ID NO: 3142165 - RNA, 19 nt, Artificial Sequence
  Description of Artificial Sequence: Synthetic oligonucleotide
cuuucuagcaggcuccucc

SEQ ID NO: 3142166 - RNA, 19 nt, Artificial Sequence
  Description of Artificial Sequence: Synthetic oligonucleotide
aggggcaacaggcagauca

SEQ ID NO: 3142167 - RNA, 19 nt, Artificial Sequence
  Description of Artificial Sequence: Synthetic oligonucleotide
cuucuuucuagcaggcucc

SEQ ID NO: 3142168 - RNA, 19 nt, Artificial Sequence
  Description of Artificial Sequence: Synthetic oligonucleotide
ugggccgagccucuuaggg

SEQ ID NO: 3142169 - RNA, 19 nt, Artificial Sequence
  Description of Artificial Sequence: Synthetic oligonucleotide
caacaggcagaucaagggg

SEQ ID NO: 3142170 - RNA, 19 nt, Artificial Sequence
  Description of Artificial Sequence: Synthetic oligonucleotide
ucuagcaggcuccuccuca

SEQ ID NO: 3142171 - RNA, 19 nt, Artificial Sequence
  Description of Artificial Sequence: Synthetic oligonucleotide
gcaacaggcagaucaaggg

SEQ ID NO: 3142172 - RNA, 19 nt, Artificial Sequence
  Description of Artificial Sequence: Synthetic oligonucleotide
cuucucuucuuucuagcag

SEQ ID NO: 3142173 - RNA, 19 nt, Artificial Sequence
  Description of Artificial Sequence: Synthetic oligonucleotide
ugggugacucgggagaugg

SEQ ID NO: 3142174 - RNA, 19 nt, Artificial Sequence
  Description of Artificial Sequence: Synthetic oligonucleotide
ucucuucuuucuagcaggc

SEQ ID NO: 3142175 - RNA, 19 nt, Artificial Sequence
  Description of Artificial Sequence: Synthetic oligonucleotide
ucugggccgagccucuuag

SEQ ID NO: 3142176 - RNA, 19 nt, Artificial Sequence
  Description of Artificial Sequence: Synthetic oligonucleotide
ugcuucucuucuuucuagc

SEQ ID NO: 3142177 - RNA, 19 nt, Artificial Sequence
  Description of Artificial Sequence: Synthetic oligonucleotide
accacggggcuuuuauuuc

SEQ ID NO: 3142178 - RNA, 19 nt, Artificial Sequence
  Description of Artificial Sequence: Synthetic oligonucleotide
ucugugacaggggcaacag

SEQ ID NO: 3142179 - RNA, 19 nt, Artificial Sequence
  Description of Artificial Sequence: Synthetic oligonucleotide
gacuccuuccaucucugac

SEQ ID NO: 3142180 - RNA, 19 nt, Artificial Sequence
  Description of Artificial Sequence: Synthetic oligonucleotide
cuuccaucucugaccacgg

SEQ ID NO: 3142181 - RNA, 19 nt, Artificial Sequence
  Description of Artificial Sequence: Synthetic oligonucleotide
uuccaucucugaccacggg

SEQ ID NO: 3142182 - RNA, 19 nt, Artificial Sequence
  Description of Artificial Sequence: Synthetic oligonucleotide
gaguccucugggccgagcc

SEQ ID NO: 3142183 - RNA, 19 nt, Artificial Sequence
  Description of Artificial Sequence: Synthetic oligonucleotide
ggggcuuuuauuuccuggc

SEQ ID NO: 3142184 - RNA, 19 nt, Artificial Sequence
  Description of Artificial Sequence: Synthetic oligonucleotide
auaugccugcuucucuucu

SEQ ID NO: 3142185 - RNA, 19 nt, Artificial Sequence
  Description of Artificial Sequence: Synthetic oligonucleotide
uggucauaugccugcuucu

SEQ ID NO: 3142186 - RNA, 19 nt, Artificial Sequence
  Description of Artificial Sequence: Synthetic oligonucleotide
uccucaggggacuccuucc

SEQ ID NO: 3142187 - RNA, 19 nt, Artificial Sequence
  Description of Artificial Sequence: Synthetic oligonucleotide
ggugacucgggagaugggg

SEQ ID NO: 3142188 - RNA, 19 nt, Artificial Sequence
  Description of Artificial Sequence: Synthetic oligonucleotide
auuuccuggcucugugaca

SEQ ID NO: 3142189 - RNA, 19 nt, Artificial Sequence
  Description of Artificial Sequence: Synthetic oligonucleotide
cuagcaggcuccuccucag

SEQ ID NO: 3142190 - RNA, 19 nt, Artificial Sequence
  Description of Artificial Sequence: Synthetic oligonucleotide
ucaggggacuccuuccauc

SEQ ID NO: 3142191 - RNA, 19 nt, Artificial Sequence
  Description of Artificial Sequence: Synthetic oligonucleotide
ccaucucugaccacggggc

SEQ ID NO: 3142192 - RNA, 19 nt, Artificial Sequence
  Description of Artificial Sequence: Synthetic oligonucleotide
ccuuccaucucugaccacg

SEQ ID NO: 3142193 - RNA, 19 nt, Artificial Sequence
  Description of Artificial Sequence: Synthetic oligonucleotide
cauaugccugcuucucuuc

SEQ ID NO: 3142194 - RNA, 19 nt, Artificial Sequence
  Description of Artificial Sequence: Synthetic oligonucleotide
ggccgagccucuuagggag

SEQ ID NO: 3142195 - RNA, 19 nt, Artificial Sequence
  Description of Artificial Sequence: Synthetic oligonucleotide
uuuuggucauaugccugcu

SEQ ID NO: 3142196 - RNA, 19 nt, Artificial Sequence
  Description of Artificial Sequence: Synthetic oligonucleotide
uuuggucauaugccugcuu

SEQ ID NO: 3142197 - RNA, 19 nt, Artificial Sequence
  Description of Artificial Sequence: Synthetic oligonucleotide
cuccuuccaucucugacca

SEQ ID NO: 3142198 - RNA, 19 nt, Artificial Sequence
  Description of Artificial Sequence: Synthetic oligonucleotide
ggcuuuuauuuccuggcuc

SEQ ID NO: 3142199 - RNA, 19 nt, Artificial Sequence
  Description of Artificial Sequence: Synthetic oligonucleotide
cugugacaggggcaacagg

SEQ ID NO: 3142200 - RNA, 19 nt, Artificial Sequence
  Description of Artificial Sequence: Synthetic oligonucleotide
ggcggaguccucugggccg

SEQ ID NO: 3142201 - RNA, 19 nt, Artificial Sequence
  Description of Artificial Sequence: Synthetic oligonucleotide
gcuuuuauuuccuggcucu

SEQ ID NO: 3142202 - RNA, 19 nt, Artificial Sequence
  Description of Artificial Sequence: Synthetic oligonucleotide
uucuagcaggcuccuccuc

SEQ ID NO: 3142203 - RNA, 19 nt, Artificial Sequence
  Description of Artificial Sequence: Synthetic oligonucleotide
aggggacuccuuccaucuc

SEQ ID NO: 3142204 - RNA, 19 nt, Artificial Sequence
  Description of Artificial Sequence: Synthetic oligonucleotide
gaccacggggcuuuuauuu

SEQ ID NO: 3142205 - RNA, 19 nt, Artificial Sequence
  Description of Artificial Sequence: Synthetic oligonucleotide
uucuuucuagcaggcuccu

SEQ ID NO: 3142206 - RNA, 19 nt, Artificial Sequence
  Description of Artificial Sequence: Synthetic oligonucleotide
gcuucucuucuuucuagca

SEQ ID NO: 3142207 - RNA, 19 nt, Artificial Sequence
  Description of Artificial Sequence: Synthetic oligonucleotide
aguccucugggccgagccu

SEQ ID NO: 3142208 - RNA, 19 nt, Artificial Sequence
  Description of Artificial Sequence: Synthetic oligonucleotide
ucucugaccacggggcuuu

SEQ ID NO: 3142209 - RNA, 19 nt, Artificial Sequence
  Description of Artificial Sequence: Synthetic oligonucleotide
acggggcuuuuauuuccug

SEQ ID NO: 3142210 - RNA, 19 nt, Artificial Sequence
  Description of Artificial Sequence: Synthetic oligonucleotide
ccacggggcuuuuauuucc

SEQ ID NO: 3142211 - RNA, 19 nt, Artificial Sequence
  Description of Artificial Sequence: Synthetic oligonucleotide
gucauaugccugcuucucu

SEQ ID NO: 3142212 - RNA, 19 nt, Artificial Sequence
  Description of Artificial Sequence: Synthetic oligonucleotide
ugaccacggggcuuuuauu

SEQ ID NO: 3142213 - RNA, 19 nt, Artificial Sequence
  Description of Artificial Sequence: Synthetic oligonucleotide
cugggccgagccucuuagg

SEQ ID NO: 3142214 - RNA, 19 nt, Artificial Sequence
  Description of Artificial Sequence: Synthetic oligonucleotide
ugccugcuucucuucuuuc

SEQ ID NO: 3142215 - RNA, 19 nt, Artificial Sequence
  Description of Artificial Sequence: Synthetic oligonucleotide
caggcuccuccucagggga

SEQ ID NO: 3142216 - RNA, 19 nt, Artificial Sequence
  Description of Artificial Sequence: Synthetic oligonucleotide
cucugugacaggggcaaca

SEQ ID NO: 3142217 - RNA, 19 nt, Artificial Sequence
  Description of Artificial Sequence: Synthetic oligonucleotide
ggucauaugccugcuucuc

SEQ ID NO: 3142218 - RNA, 19 nt, Artificial Sequence
  Description of Artificial Sequence: Synthetic oligonucleotide
cggggcuuuuauuuccugg

SEQ ID NO: 3142219 - RNA, 19 nt, Artificial Sequence
  Description of Artificial Sequence: Synthetic oligonucleotide
ucuuucuagcaggcuccuc

SEQ ID NO: 3142220 - RNA, 19 nt, Artificial Sequence
  Description of Artificial Sequence: Synthetic oligonucleotide
gggcggaguccucugggcc

SEQ ID NO: 3142221 - RNA, 19 nt, Artificial Sequence
  Description of Artificial Sequence: Synthetic oligonucleotide
guccucugggccgagccuc

SEQ ID NO: 3142222 - RNA, 19 nt, Artificial Sequence
  Description of Artificial Sequence: Synthetic oligonucleotide
aucucugaccacggggcuu

SEQ ID NO: 3142223 - RNA, 19 nt, Artificial Sequence
  Description of Artificial Sequence: Synthetic oligonucleotide
ggggcggaguccucugggc

SEQ ID NO: 3142224 - RNA, 19 nt, Artificial Sequence
  Description of Artificial Sequence: Synthetic oligonucleotide
gggcaacaggcagaucaag

SEQ ID NO: 3142225 - RNA, 19 nt, Artificial Sequence
  Description of Artificial Sequence: Synthetic oligonucleotide
ggcucugugacaggggcaa

SEQ ID NO: 3142226 - RNA, 19 nt, Artificial Sequence
  Description of Artificial Sequence: Synthetic oligonucleotide
cugaccacggggcuuuuau

SEQ ID NO: 3142227 - RNA, 19 nt, Artificial Sequence
  Description of Artificial Sequence: Synthetic oligonucleotide
ggggacuccuuccaucucu

SEQ ID NO: 3142228 - RNA, 19 nt, Artificial Sequence
  Description of Artificial Sequence: Synthetic oligonucleotide
gggccgagccucuuaggga

SEQ ID NO: 3142229 - RNA, 19 nt, Artificial Sequence
  Description of Artificial Sequence: Synthetic oligonucleotide
gagccucuuagggagggau

SEQ ID NO: 3142230 - RNA, 19 nt, Artificial Sequence
  Description of Artificial Sequence: Synthetic oligonucleotide
ucugaccacggggcuuuua

SEQ ID NO: 3142231 - RNA, 19 nt, Artificial Sequence
  Description of Artificial Sequence: Synthetic oligonucleotide
gggcuuuuauuuccuggcu

SEQ ID NO: 3142232 - RNA, 19 nt, Artificial Sequence
  Description of Artificial Sequence: Synthetic oligonucleotide
cacggggcuuuuauuuccu

SEQ ID NO: 3142233 - RNA, 19 nt, Artificial Sequence
  Description of Artificial Sequence: Synthetic oligonucleotide
caucucugaccacggggcu

SEQ ID NO: 3142234 - RNA, 19 nt, Artificial Sequence
  Description of Artificial Sequence: Synthetic oligonucleotide
ccgagccucuuagggaggg

SEQ ID NO: 3142235 - RNA, 19 nt, Artificial Sequence
  Description of Artificial Sequence: Synthetic oligonucleotide
ggacuccuuccaucucuga

SEQ ID NO: 3142236 - RNA, 19 nt, Artificial Sequence
  Description of Artificial Sequence: Synthetic oligonucleotide
gggugacucgggagauggg

SEQ ID NO: 3142237 - RNA, 19 nt, Artificial Sequence
  Description of Artificial Sequence: Synthetic oligonucleotide
ccucaggggacuccuucca

SEQ ID NO: 3142238 - RNA, 19 nt, Artificial Sequence
  Description of Artificial Sequence: Synthetic oligonucleotide
gccgagccucuuagggagg

SEQ ID NO: 3142239 - RNA, 19 nt, Artificial Sequence
  Description of Artificial Sequence: Synthetic oligonucleotide
ggggcaacaggcagaucaa

SEQ ID NO: 3142240 - RNA, 19 nt, Artificial Sequence
  Description of Artificial Sequence: Synthetic oligonucleotide
cucaggggacuccuuccau

SEQ ID NO: 3142241 - RNA, 19 nt, Artificial Sequence
  Description of Artificial Sequence: Synthetic oligonucleotide
cucugggccgagccucuua

SEQ ID NO: 3142242 - RNA, 19 nt, Artificial Sequence
  Description of Artificial Sequence: Synthetic oligonucleotide
ggaguccucugggccgagc

SEQ ID NO: 3142243 - RNA, 19 nt, Artificial Sequence
  Description of Artificial Sequence: Synthetic oligonucleotide
gcggaguccucugggccga

SEQ ID NO: 3142244 - RNA, 19 nt, Artificial Sequence
  Description of Artificial Sequence: Synthetic oligonucleotide
gcucugugacaggggcaac

SEQ ID NO: 3142245 - RNA, 19 nt, Artificial Sequence
  Description of Artificial Sequence: Synthetic oligonucleotide
caggggcaacaggcagauc

SEQ ID NO: 3142246 - RNA, 19 nt, Artificial Sequence
  Description of Artificial Sequence: Synthetic oligonucleotide
cgagccucuuagggaggga

SEQ ID NO: 3142247 - RNA, 19 nt, Artificial Sequence
  Description of Artificial Sequence: Synthetic oligonucleotide
cggaguccucugggccgag

SEQ ID NO: 3142248 - RNA, 19 nt, Artificial Sequence
  Description of Artificial Sequence: Synthetic oligonucleotide
cucugaccacggggcuuuu

SEQ ID NO: 3142249 - RNA, 19 nt, Artificial Sequence
  Description of Artificial Sequence: Synthetic oligonucleotide
aaauaaucaauaaugcugc

SEQ ID NO: 3142250 - RNA, 19 nt, Artificial Sequence
  Description of Artificial Sequence: Synthetic oligonucleotide
agaaaauaaacacucauuc

SEQ ID NO: 3142251 - RNA, 19 nt, Artificial Sequence
  Description of Artificial Sequence: Synthetic oligonucleotide
aaaauaaucaauaaugcug

SEQ ID NO: 3142252 - RNA, 19 nt, Artificial Sequence
  Description of Artificial Sequence: Synthetic oligonucleotide
uuauuaauagaaaauaaac

SEQ ID NO: 3142253 - RNA, 19 nt, Artificial Sequence
  Description of Artificial Sequence: Synthetic oligonucleotide
uauuaauagaaaauaaaca

SEQ ID NO: 3142254 - RNA, 19 nt, Artificial Sequence
  Description of Artificial Sequence: Synthetic oligonucleotide
aauaaacacucauucauuc

SEQ ID NO: 3142255 - RNA, 19 nt, Artificial Sequence
  Description of Artificial Sequence: Synthetic oligonucleotide
aaaauaaacacucauucau

SEQ ID NO: 3142256 - RNA, 19 nt, Artificial Sequence
  Description of Artificial Sequence: Synthetic oligonucleotide
aacuaagacaguuaaaacu

SEQ ID NO: 3142257 - RNA, 19 nt, Artificial Sequence
  Description of Artificial Sequence: Synthetic oligonucleotide
aaugaauuuaaaauaauca

SEQ ID NO: 3142258 - RNA, 19 nt, Artificial Sequence
  Description of Artificial Sequence: Synthetic oligonucleotide
uuaauagaaaauaaacacu

SEQ ID NO: 3142259 - RNA, 19 nt, Artificial Sequence
  Description of Artificial Sequence: Synthetic oligonucleotide
auucauuccaguuucaaag

SEQ ID NO: 3142260 - RNA, 19 nt, Artificial Sequence
  Description of Artificial Sequence: Synthetic oligonucleotide
uuuauuaauagaaaauaaa

SEQ ID NO: 3142261 - RNA, 19 nt, Artificial Sequence
  Description of Artificial Sequence: Synthetic oligonucleotide
agacaguuaaaacuguggc

SEQ ID NO: 3142262 - RNA, 19 nt, Artificial Sequence
  Description of Artificial Sequence: Synthetic oligonucleotide
aauaaugcugcuuuaacua

SEQ ID NO: 3142263 - RNA, 19 nt, Artificial Sequence
  Description of Artificial Sequence: Synthetic oligonucleotide
ugaauuuaaaauaaucaau

SEQ ID NO: 3142264 - RNA, 19 nt, Artificial Sequence
  Description of Artificial Sequence: Synthetic oligonucleotide
aaguauucagcaccauugc

SEQ ID NO: 3142265 - RNA, 19 nt, Artificial Sequence
  Description of Artificial Sequence: Synthetic oligonucleotide
auaaacacucauucauucc

SEQ ID NO: 3142266 - RNA, 19 nt, Artificial Sequence
  Description of Artificial Sequence: Synthetic oligonucleotide
uaaacacucauucauucca

SEQ ID NO: 3142267 - RNA, 19 nt, Artificial Sequence
  Description of Artificial Sequence: Synthetic oligonucleotide
uucaaaguugcuauacuug

SEQ ID NO: 3142268 - RNA, 19 nt, Artificial Sequence
  Description of Artificial Sequence: Synthetic oligonucleotide
uaaucaauaaugcugcuuu

SEQ ID NO: 3142269 - RNA, 19 nt, Artificial Sequence
  Description of Artificial Sequence: Synthetic oligonucleotide
gcugcuuuaacuaagacag

SEQ ID NO: 3142270 - RNA, 19 nt, Artificial Sequence
  Description of Artificial Sequence: Synthetic oligonucleotide
acucauucauuccaguuuc

SEQ ID NO: 3142271 - RNA, 19 nt, Artificial Sequence
  Description of Artificial Sequence: Synthetic oligonucleotide
ucaaaguugcuauacuuga

SEQ ID NO: 3142272 - RNA, 19 nt, Artificial Sequence
  Description of Artificial Sequence: Synthetic oligonucleotide
aaaguugcuauacuugaaa

SEQ ID NO: 3142273 - RNA, 19 nt, Artificial Sequence
  Description of Artificial Sequence: Synthetic oligonucleotide
aagacaguuaaaacugugg

SEQ ID NO: 3142274 - RNA, 19 nt, Artificial Sequence
  Description of Artificial Sequence: Synthetic oligonucleotide
gaauuuaaaauaaucaaua

SEQ ID NO: 3142275 - RNA, 19 nt, Artificial Sequence
  Description of Artificial Sequence: Synthetic oligonucleotide
auagaaaauaaacacucau

SEQ ID NO: 3142276 - RNA, 19 nt, Artificial Sequence
  Description of Artificial Sequence: Synthetic oligonucleotide
aguuucaaaguugcuauac

SEQ ID NO: 3142277 - RNA, 19 nt, Artificial Sequence
  Description of Artificial Sequence: Synthetic oligonucleotide
auuccaguuucaaaguugc

SEQ ID NO: 3142278 - RNA, 19 nt, Artificial Sequence
  Description of Artificial Sequence: Synthetic oligonucleotide
ucaauaaugcugcuuuaac

SEQ ID NO: 3142279 - RNA, 19 nt, Artificial Sequence
  Description of Artificial Sequence: Synthetic oligonucleotide
guugcuauacuugaaauuc

SEQ ID NO: 3142280 - RNA, 19 nt, Artificial Sequence
  Description of Artificial Sequence: Synthetic oligonucleotide
agcaccauugcucuuaggu

SEQ ID NO: 3142281 - RNA, 19 nt, Artificial Sequence
  Description of Artificial Sequence: Synthetic oligonucleotide
uaagacaguuaaaacugug

SEQ ID NO: 3142282 - RNA, 19 nt, Artificial Sequence
  Description of Artificial Sequence: Synthetic oligonucleotide
ugcugcuuuaacuaagaca

SEQ ID NO: 3142283 - RNA, 19 nt, Artificial Sequence
  Description of Artificial Sequence: Synthetic oligonucleotide
uauucagcaccauugcucu

SEQ ID NO: 3142284 - RNA, 19 nt, Artificial Sequence
  Description of Artificial Sequence: Synthetic oligonucleotide
uagaaaauaaacacucauu

SEQ ID NO: 3142285 - RNA, 19 nt, Artificial Sequence
  Description of Artificial Sequence: Synthetic oligonucleotide
uaaugcugcuuuaacuaag

SEQ ID NO: 3142286 - RNA, 19 nt, Artificial Sequence
  Description of Artificial Sequence: Synthetic oligonucleotide
aauagaaaauaaacacuca

SEQ ID NO: 3142287 - RNA, 19 nt, Artificial Sequence
  Description of Artificial Sequence: Synthetic oligonucleotide
uaacuaagacaguuaaaac

SEQ ID NO: 3142288 - RNA, 19 nt, Artificial Sequence
  Description of Artificial Sequence: Synthetic oligonucleotide
aauaaucaauaaugcugcu

SEQ ID NO: 3142289 - RNA, 19 nt, Artificial Sequence
  Description of Artificial Sequence: Synthetic oligonucleotide
aaguugcuauacuugaaau

SEQ ID NO: 3142290 - RNA, 19 nt, Artificial Sequence
  Description of Artificial Sequence: Synthetic oligonucleotide
uuucaaaguugcuauacuu

SEQ ID NO: 3142291 - RNA, 19 nt, Artificial Sequence
  Description of Artificial Sequence: Synthetic oligonucleotide
uuuaacuaagacaguuaaa

SEQ ID NO: 3142292 - RNA, 19 nt, Artificial Sequence
  Description of Artificial Sequence: Synthetic oligonucleotide
ugcuauacuugaaauuccu

SEQ ID NO: 3142293 - RNA, 19 nt, Artificial Sequence
  Description of Artificial Sequence: Synthetic oligonucleotide
uacuugaaauuccuaauuu

SEQ ID NO: 3142294 - RNA, 19 nt, Artificial Sequence
  Description of Artificial Sequence: Synthetic oligonucleotide
aaaaugaauuuaaaauaau

SEQ ID NO: 3142295 - RNA, 19 nt, Artificial Sequence
  Description of Artificial Sequence: Synthetic oligonucleotide
uugcuauacuugaaauucc

SEQ ID NO: 3142296 - RNA, 19 nt, Artificial Sequence
  Description of Artificial Sequence: Synthetic oligonucleotide
cuauacuugaaauuccuaa

SEQ ID NO: 3142297 - RNA, 19 nt, Artificial Sequence
  Description of Artificial Sequence: Synthetic oligonucleotide
cauuccaguuucaaaguug

SEQ ID NO: 3142298 - RNA, 19 nt, Artificial Sequence
  Description of Artificial Sequence: Synthetic oligonucleotide
acaguuaaaacuguggcuu

SEQ ID NO: 3142299 - RNA, 19 nt, Artificial Sequence
  Description of Artificial Sequence: Synthetic oligonucleotide
uucauuccaguuucaaagu

SEQ ID NO: 3142300 - RNA, 19 nt, Artificial Sequence
  Description of Artificial Sequence: Synthetic oligonucleotide
cuuuaacuaagacaguuaa

SEQ ID NO: 3142301 - RNA, 19 nt, Artificial Sequence
  Description of Artificial Sequence: Synthetic oligonucleotide
ugcucuuaggucuuucaac

SEQ ID NO: 3142302 - RNA, 19 nt, Artificial Sequence
  Description of Artificial Sequence: Synthetic oligonucleotide
auacuugaaauuccuaauu

SEQ ID NO: 3142303 - RNA, 19 nt, Artificial Sequence
  Description of Artificial Sequence: Synthetic oligonucleotide
acuugaaauuccuaauuuu

SEQ ID NO: 3142304 - RNA, 19 nt, Artificial Sequence
  Description of Artificial Sequence: Synthetic oligonucleotide
aaauaaacacucauucauu

SEQ ID NO: 3142305 - RNA, 19 nt, Artificial Sequence
  Description of Artificial Sequence: Synthetic oligonucleotide
aacacucauucauuccagu

SEQ ID NO: 3142306 - RNA, 19 nt, Artificial Sequence
  Description of Artificial Sequence: Synthetic oligonucleotide
aguauucagcaccauugcu

SEQ ID NO: 3142307 - RNA, 19 nt, Artificial Sequence
  Description of Artificial Sequence: Synthetic oligonucleotide
aaacacucauucauuccag

SEQ ID NO: 3142308 - RNA, 19 nt, Artificial Sequence
  Description of Artificial Sequence: Synthetic oligonucleotide
uaggucuuucaacauuugu

SEQ ID NO: 3142309 - RNA, 19 nt, Artificial Sequence
  Description of Artificial Sequence: Synthetic oligonucleotide
ggucuuucaacauuuguuc

SEQ ID NO: 3142310 - RNA, 19 nt, Artificial Sequence
  Description of Artificial Sequence: Synthetic oligonucleotide
auaaugcugcuuuaacuaa

SEQ ID NO: 3142311 - RNA, 19 nt, Artificial Sequence
  Description of Artificial Sequence: Synthetic oligonucleotide
ucuuaggucuuucaacauu

SEQ ID NO: 3142312 - RNA, 19 nt, Artificial Sequence
  Description of Artificial Sequence: Synthetic oligonucleotide
ucuuucaacauuuguucuu

SEQ ID NO: 3142313 - RNA, 19 nt, Artificial Sequence
  Description of Artificial Sequence: Synthetic oligonucleotide
aaugcugcuuuaacuaaga

SEQ ID NO: 3142314 - RNA, 19 nt, Artificial Sequence
  Description of Artificial Sequence: Synthetic oligonucleotide
aguugcuauacuugaaauu

SEQ ID NO: 3142315 - RNA, 19 nt, Artificial Sequence
  Description of Artificial Sequence: Synthetic oligonucleotide
uccaguuucaaaguugcua

SEQ ID NO: 3142316 - RNA, 19 nt, Artificial Sequence
  Description of Artificial Sequence: Synthetic oligonucleotide
ugcuuuaacuaagacaguu

SEQ ID NO: 3142317 - RNA, 19 nt, Artificial Sequence
  Description of Artificial Sequence: Synthetic oligonucleotide
aaucaauaaugcugcuuua

SEQ ID NO: 3142318 - RNA, 19 nt, Artificial Sequence
  Description of Artificial Sequence: Synthetic oligonucleotide
uuaggucuuucaacauuug

SEQ ID NO: 3142319 - RNA, 19 nt, Artificial Sequence
  Description of Artificial Sequence: Synthetic oligonucleotide
guauucagcaccauugcuc

SEQ ID NO: 3142320 - RNA, 19 nt, Artificial Sequence
  Description of Artificial Sequence: Synthetic oligonucleotide
ucauuccaguuucaaaguu

SEQ ID NO: 3142321 - RNA, 19 nt, Artificial Sequence
  Description of Artificial Sequence: Synthetic oligonucleotide
auugcucuuaggucuuuca

SEQ ID NO: 3142322 - RNA, 19 nt, Artificial Sequence
  Description of Artificial Sequence: Synthetic oligonucleotide
gacaguuaaaacuguggcu

SEQ ID NO: 3142323 - RNA, 19 nt, Artificial Sequence
  Description of Artificial Sequence: Synthetic oligonucleotide
ucagcaccauugcucuuag

SEQ ID NO: 3142324 - RNA, 19 nt, Artificial Sequence
  Description of Artificial Sequence: Synthetic oligonucleotide
uugcucuuaggucuuucaa

SEQ ID NO: 3142325 - RNA, 19 nt, Artificial Sequence
  Description of Artificial Sequence: Synthetic oligonucleotide
caauaaugcugcuuuaacu

SEQ ID NO: 3142326 - RNA, 19 nt, Artificial Sequence
  Description of Artificial Sequence: Synthetic oligonucleotide
auaaucaauaaugcugcuu

SEQ ID NO: 3142327 - RNA, 19 nt, Artificial Sequence
  Description of Artificial Sequence: Synthetic oligonucleotide
aucaauaaugcugcuuuaa

SEQ ID NO: 3142328 - RNA, 19 nt, Artificial Sequence
  Description of Artificial Sequence: Synthetic oligonucleotide
gcucuuaggucuuucaaca

SEQ ID NO: 3142329 - RNA, 19 nt, Artificial Sequence
  Description of Artificial Sequence: Synthetic oligonucleotide
aggucuuucaacauuuguu

SEQ ID NO: 3142330 - RNA, 19 nt, Artificial Sequence
  Description of Artificial Sequence: Synthetic oligonucleotide
cauucauuccaguuucaaa

SEQ ID NO: 3142331 - RNA, 19 nt, Artificial Sequence
  Description of Artificial Sequence: Synthetic oligonucleotide
uuucaacauuuguucuuaa

SEQ ID NO: 3142332 - RNA, 19 nt, Artificial Sequence
  Description of Artificial Sequence: Synthetic oligonucleotide
uucagcaccauugcucuua

SEQ ID NO: 3142333 - RNA, 19 nt, Artificial Sequence
  Description of Artificial Sequence: Synthetic oligonucleotide
cuuaggucuuucaacauuu

SEQ ID NO: 3142334 - RNA, 19 nt, Artificial Sequence
  Description of Artificial Sequence: Synthetic oligonucleotide
caccauugcucuuaggucu

SEQ ID NO: 3142335 - RNA, 19 nt, Artificial Sequence
  Description of Artificial Sequence: Synthetic oligonucleotide
aguuaaaacuguggcuuaa

SEQ ID NO: 3142336 - RNA, 19 nt, Artificial Sequence
  Description of Artificial Sequence: Synthetic oligonucleotide
caaaguugcuauacuugaa

SEQ ID NO: 3142337 - RNA, 19 nt, Artificial Sequence
  Description of Artificial Sequence: Synthetic oligonucleotide
cuuucaacauuuguucuua

SEQ ID NO: 3142338 - RNA, 19 nt, Artificial Sequence
  Description of Artificial Sequence: Synthetic oligonucleotide
gucuuucaacauuuguucu

SEQ ID NO: 3142339 - RNA, 19 nt, Artificial Sequence
  Description of Artificial Sequence: Synthetic oligonucleotide
cuaagacaguuaaaacugu

SEQ ID NO: 3142340 - RNA, 19 nt, Artificial Sequence
  Description of Artificial Sequence: Synthetic oligonucleotide
guuaaaacuguggcuuaaa

SEQ ID NO: 3142341 - RNA, 19 nt, Artificial Sequence
  Description of Artificial Sequence: Synthetic oligonucleotide
gcaccauugcucuuagguc

SEQ ID NO: 3142342 - RNA, 19 nt, Artificial Sequence
  Description of Artificial Sequence: Synthetic oligonucleotide
cacucauucauuccaguuu

SEQ ID NO: 3142343 - RNA, 19 nt, Artificial Sequence
  Description of Artificial Sequence: Synthetic oligonucleotide
caguuaaaacuguggcuua

SEQ ID NO: 3142344 - RNA, 19 nt, Artificial Sequence
  Description of Artificial Sequence: Synthetic oligonucleotide
cauugcucuuaggucuuuc

SEQ ID NO: 3142345 - RNA, 19 nt, Artificial Sequence
  Description of Artificial Sequence: Synthetic oligonucleotide
gcuuuaacuaagacaguua

SEQ ID NO: 3142346 - RNA, 19 nt, Artificial Sequence
  Description of Artificial Sequence: Synthetic oligonucleotide
cagcaccauugcucuuagg

SEQ ID NO: 3142347 - RNA, 19 nt, Artificial Sequence
  Description of Artificial Sequence: Synthetic oligonucleotide
caguuucaaaguugcuaua

SEQ ID NO: 3142348 - RNA, 19 nt, Artificial Sequence
  Description of Artificial Sequence: Synthetic oligonucleotide
auucagcaccauugcucuu

SEQ ID NO: 3142349 - RNA, 19 nt, Artificial Sequence
  Description of Artificial Sequence: Synthetic oligonucleotide
accauugcucuuaggucuu

SEQ ID NO: 3142350 - RNA, 19 nt, Artificial Sequence
  Description of Artificial Sequence: Synthetic oligonucleotide
cucuuaggucuuucaacau

SEQ ID NO: 3142351 - RNA, 19 nt, Artificial Sequence
  Description of Artificial Sequence: Synthetic oligonucleotide
gcuauacuugaaauuccua

SEQ ID NO: 3142352 - RNA, 19 nt, Artificial Sequence
  Description of Artificial Sequence: Synthetic oligonucleotide
cugcuuuaacuaagacagu

SEQ ID NO: 3142353 - RNA, 19 nt, Artificial Sequence
  Description of Artificial Sequence: Synthetic oligonucleotide
ccauugcucuuaggucuuu

SEQ ID NO: 3142354 - RNA, 19 nt, Artificial Sequence
  Description of Artificial Sequence: Synthetic oligonucleotide
acaagaaccacacuguguc

SEQ ID NO: 3142355 - RNA, 19 nt, Artificial Sequence
  Description of Artificial Sequence: Synthetic oligonucleotide
auacccagcaauuacaucu

SEQ ID NO: 3142356 - RNA, 19 nt, Artificial Sequence
  Description of Artificial Sequence: Synthetic oligonucleotide
auuacaucuguccuucuag

SEQ ID NO: 3142357 - RNA, 19 nt, Artificial Sequence
  Description of Artificial Sequence: Synthetic oligonucleotide
aauacccagcaauuacauc

SEQ ID NO: 3142358 - RNA, 19 nt, Artificial Sequence
  Description of Artificial Sequence: Synthetic oligonucleotide
uuacaucuguccuucuagg

SEQ ID NO: 3142359 - RNA, 19 nt, Artificial Sequence
  Description of Artificial Sequence: Synthetic oligonucleotide
ccaaccaaaacaaacaaac

SEQ ID NO: 3142360 - RNA, 19 nt, Artificial Sequence
  Description of Artificial Sequence: Synthetic oligonucleotide
aaaauacccagcaauuaca

SEQ ID NO: 3142361 - RNA, 19 nt, Artificial Sequence
  Description of Artificial Sequence: Synthetic oligonucleotide
caaccaaccaaccaaaaca

SEQ ID NO: 3142362 - RNA, 19 nt, Artificial Sequence
  Description of Artificial Sequence: Synthetic oligonucleotide
aaccaaccaaaacaaacaa

SEQ ID NO: 3142363 - RNA, 19 nt, Artificial Sequence
  Description of Artificial Sequence: Synthetic oligonucleotide
cacacugugucccugauuc

SEQ ID NO: 3142364 - RNA, 19 nt, Artificial Sequence
  Description of Artificial Sequence: Synthetic oligonucleotide
aauuacaucuguccuucua

SEQ ID NO: 3142365 - RNA, 19 nt, Artificial Sequence
  Description of Artificial Sequence: Synthetic oligonucleotide
ccagcaauuacaucugucc

SEQ ID NO: 3142366 - RNA, 19 nt, Artificial Sequence
  Description of Artificial Sequence: Synthetic oligonucleotide
caaaaccaaccaaccaacc

SEQ ID NO: 3142367 - RNA, 19 nt, Artificial Sequence
  Description of Artificial Sequence: Synthetic oligonucleotide
aaauacccagcaauuacau

SEQ ID NO: 3142368 - RNA, 19 nt, Artificial Sequence
  Description of Artificial Sequence: Synthetic oligonucleotide
ccaaccaaccaaaacaaac

SEQ ID NO: 3142369 - RNA, 19 nt, Artificial Sequence
  Description of Artificial Sequence: Synthetic oligonucleotide
uacccagcaauuacaucug

SEQ ID NO: 3142370 - RNA, 19 nt, Artificial Sequence
  Description of Artificial Sequence: Synthetic oligonucleotide
agcaauuacaucuguccuu

SEQ ID NO: 3142371 - RNA, 19 nt, Artificial Sequence
  Description of Artificial Sequence: Synthetic oligonucleotide
caagaaccacacugugucc

SEQ ID NO: 3142372 - RNA, 19 nt, Artificial Sequence
  Description of Artificial Sequence: Synthetic oligonucleotide
aaccacacugugucccuga

SEQ ID NO: 3142373 - RNA, 19 nt, Artificial Sequence
  Description of Artificial Sequence: Synthetic oligonucleotide
acugugucccugauucuuc

SEQ ID NO: 3142374 - RNA, 19 nt, Artificial Sequence
  Description of Artificial Sequence: Synthetic oligonucleotide
agaaccacacugugucccu

SEQ ID NO: 3142375 - RNA, 19 nt, Artificial Sequence
  Description of Artificial Sequence: Synthetic oligonucleotide
gcaauuacaucuguccuuc

SEQ ID NO: 3142376 - RNA, 19 nt, Artificial Sequence
  Description of Artificial Sequence: Synthetic oligonucleotide
ugugucccugauucuucac

SEQ ID NO: 3142377 - RNA, 19 nt, Artificial Sequence
  Description of Artificial Sequence: Synthetic oligonucleotide
acccagcaauuacaucugu

SEQ ID NO: 3142378 - RNA, 19 nt, Artificial Sequence
  Description of Artificial Sequence: Synthetic oligonucleotide
acacugugucccugauucu

SEQ ID NO: 3142379 - RNA, 19 nt, Artificial Sequence
  Description of Artificial Sequence: Synthetic oligonucleotide
cagcaauuacaucuguccu

SEQ ID NO: 3142380 - RNA, 19 nt, Artificial Sequence
  Description of Artificial Sequence: Synthetic oligonucleotide
gaaccacacugugucccug

SEQ ID NO: 3142381 - RNA, 19 nt, Artificial Sequence
  Description of Artificial Sequence: Synthetic oligonucleotide
cugugucccugauucuuca

SEQ ID NO: 3142382 - RNA, 19 nt, Artificial Sequence
  Description of Artificial Sequence: Synthetic oligonucleotide
accacacugugucccugau

SEQ ID NO: 3142383 - RNA, 19 nt, Artificial Sequence
  Description of Artificial Sequence: Synthetic oligonucleotide
cccagcaauuacaucuguc

SEQ ID NO: 3142384 - RNA, 19 nt, Artificial Sequence
  Description of Artificial Sequence: Synthetic oligonucleotide
accaaccaaccaaaacaaa

SEQ ID NO: 3142385 - RNA, 19 nt, Artificial Sequence
  Description of Artificial Sequence: Synthetic oligonucleotide
caauuacaucuguccuucu

SEQ ID NO: 3142386 - RNA, 19 nt, Artificial Sequence
  Description of Artificial Sequence: Synthetic oligonucleotide
cacugugucccugauucuu

SEQ ID NO: 3142387 - RNA, 19 nt, Artificial Sequence
  Description of Artificial Sequence: Synthetic oligonucleotide
  modified_base (3)..(3): a, c, u, g, unknown or other
uanccaaaguccaugagcu

SEQ ID NO: 3142388 - RNA, 19 nt, Artificial Sequence
  Description of Artificial Sequence: Synthetic oligonucleotide
  modified_base (4)..(4): a, c, u, g, unknown or other
guanccaaaguccaugagc

SEQ ID NO: 3142389 - RNA, 19 nt, Artificial Sequence
  Description of Artificial Sequence: Synthetic oligonucleotide
uggaugacgaaguuguccc

SEQ ID NO: 3142390 - RNA, 19 nt, Artificial Sequence
  Description of Artificial Sequence: Synthetic oligonucleotide
auggaugacgaaguugucc

SEQ ID NO: 3142391 - RNA, 19 nt, Artificial Sequence
  Description of Artificial Sequence: Synthetic oligonucleotide
ucguagauggaugacgaag

SEQ ID NO: 3142392 - RNA, 19 nt, Artificial Sequence
  Description of Artificial Sequence: Synthetic oligonucleotide
agauggaugacgaaguugu

SEQ ID NO: 3142393 - RNA, 19 nt, Artificial Sequence
  Description of Artificial Sequence: Synthetic oligonucleotide
  modified_base (2)..(2): a, c, u, g, unknown or other
anccaaaguccaugagcuc

SEQ ID NO: 3142394 - RNA, 19 nt, Artificial Sequence
  Description of Artificial Sequence: Synthetic oligonucleotide
agcucguagauggaugacg

SEQ ID NO: 3142395 - RNA, 19 nt, Artificial Sequence
  Description of Artificial Sequence: Synthetic oligonucleotide
  modified_base (5)..(5): a, c, u, g, unknown or other
gguanccaaaguccaugag

SEQ ID NO: 3142396 - RNA, 19 nt, Artificial Sequence
  Description of Artificial Sequence: Synthetic oligonucleotide
  modified_base (7)..(7): a, c, u, g, unknown or other
gggguanccaaaguccaug

SEQ ID NO: 3142397 - RNA, 19 nt, Artificial Sequence
  Description of Artificial Sequence: Synthetic oligonucleotide
agcagcucguagauggaug

SEQ ID NO: 3142398 - RNA, 19 nt, Artificial Sequence
  Description of Artificial Sequence: Synthetic oligonucleotide
  modified_base (6)..(6): a, c, u, g, unknown or other
ggguanccaaaguccauga

SEQ ID NO: 3142399 - RNA, 19 nt, Artificial Sequence
  Description of Artificial Sequence: Synthetic oligonucleotide
gcagcucguagauggauga

SEQ ID NO: 3142400 - RNA, 19 nt, Artificial Sequence
  Description of Artificial Sequence: Synthetic oligonucleotide
gauggaugacgaaguuguc

SEQ ID NO: 3142401 - RNA, 19 nt, Artificial Sequence
  Description of Artificial Sequence: Synthetic oligonucleotide
gcucguagauggaugacga

SEQ ID NO: 3142402 - RNA, 19 nt, Artificial Sequence
  Description of Artificial Sequence: Synthetic oligonucleotide
guagauggaugacgaaguu

SEQ ID NO: 3142403 - RNA, 19 nt, Artificial Sequence
  Description of Artificial Sequence: Synthetic oligonucleotide
cucguagauggaugacgaa

SEQ ID NO: 3142404 - RNA, 19 nt, Artificial Sequence
  Description of Artificial Sequence: Synthetic oligonucleotide
cagcucguagauggaugac

SEQ ID NO: 3142405 - RNA, 19 nt, Artificial Sequence
  Description of Artificial Sequence: Synthetic oligonucleotide
cguagauggaugacgaagu

SEQ ID NO: 3142406 - RNA, 19 nt, Artificial Sequence
  Description of Artificial Sequence: Synthetic oligonucleotide
cagcagcucguagauggau

SEQ ID NO: 3142407 - RNA, 19 nt, Artificial Sequence
  Description of Artificial Sequence: Synthetic oligonucleotide
auuucaacaaacuacuagc

SEQ ID NO: 3142408 - RNA, 19 nt, Artificial Sequence
  Description of Artificial Sequence: Synthetic oligonucleotide
uauuucaacaaacuacuag

SEQ ID NO: 3142409 - RNA, 19 nt, Artificial Sequence
  Description of Artificial Sequence: Synthetic oligonucleotide
gacuucaucgugcagaugg

SEQ ID NO: 3142410 - RNA, 19 nt, Artificial Sequence
  Description of Artificial Sequence: Synthetic oligonucleotide
ucuauuucaacaaacuacu

SEQ ID NO: 3142411 - RNA, 19 nt, Artificial Sequence
  Description of Artificial Sequence: Synthetic oligonucleotide
uucuauuucaacaaacuac

SEQ ID NO: 3142412 - RNA, 19 nt, Artificial Sequence
  Description of Artificial Sequence: Synthetic oligonucleotide
acaaugacaagaaugaccg

SEQ ID NO: 3142413 - RNA, 19 nt, Artificial Sequence
  Description of Artificial Sequence: Synthetic oligonucleotide
aagaagaagacaguggaag

SEQ ID NO: 3142414 - RNA, 19 nt, Artificial Sequence
  Description of Artificial Sequence: Synthetic oligonucleotide
aaugacaagaaugaccgug

SEQ ID NO: 3142415 - RNA, 19 nt, Artificial Sequence
  Description of Artificial Sequence: Synthetic oligonucleotide
uguaaugcuguguccaugg

SEQ ID NO: 3142416 - RNA, 19 nt, Artificial Sequence
  Description of Artificial Sequence: Synthetic oligonucleotide
ucaacaaacuacuagccac

SEQ ID NO: 3142417 - RNA, 19 nt, Artificial Sequence
  Description of Artificial Sequence: Synthetic oligonucleotide
cacaacaaugacaagaaug

SEQ ID NO: 3142418 - RNA, 19 nt, Artificial Sequence
  Description of Artificial Sequence: Synthetic oligonucleotide
aagugagcuucugaaaucc

SEQ ID NO: 3142419 - RNA, 19 nt, Artificial Sequence
  Description of Artificial Sequence: Synthetic oligonucleotide
aaagugagcuucugaaauc

SEQ ID NO: 3142420 - RNA, 19 nt, Artificial Sequence
  Description of Artificial Sequence: Synthetic oligonucleotide
aaauccagaagaagaagac

SEQ ID NO: 3142421 - RNA, 19 nt, Artificial Sequence
  Description of Artificial Sequence: Synthetic oligonucleotide
agaagaagaagacagugga

SEQ ID NO: 3142422 - RNA, 19 nt, Artificial Sequence
  Description of Artificial Sequence: Synthetic oligonucleotide
uuucaacaaacuacuagcc

SEQ ID NO: 3142423 - RNA, 19 nt, Artificial Sequence
  Description of Artificial Sequence: Synthetic oligonucleotide
uaaagugagcuucugaaau

SEQ ID NO: 3142424 - RNA, 19 nt, Artificial Sequence
  Description of Artificial Sequence: Synthetic oligonucleotide
acaguggaagucaugagcc

SEQ ID NO: 3142425 - RNA, 19 nt, Artificial Sequence
  Description of Artificial Sequence: Synthetic oligonucleotide
gaagucaugagccacaugu

SEQ ID NO: 3142426 - RNA, 19 nt, Artificial Sequence
  Description of Artificial Sequence: Synthetic oligonucleotide
uggguucaggacuucaucg

SEQ ID NO: 3142427 - RNA, 19 nt, Artificial Sequence
  Description of Artificial Sequence: Synthetic oligonucleotide
acaagaaugaccgugcaug

SEQ ID NO: 3142428 - RNA, 19 nt, Artificial Sequence
  Description of Artificial Sequence: Synthetic oligonucleotide
gacaguggaagucaugagc

SEQ ID NO: 3142429 - RNA, 19 nt, Artificial Sequence
  Description of Artificial Sequence: Synthetic oligonucleotide
acuaaagugagcuucugaa

SEQ ID NO: 3142430 - RNA, 19 nt, Artificial Sequence
  Description of Artificial Sequence: Synthetic oligonucleotide
agaaugaccgugcaugcag

SEQ ID NO: 3142431 - RNA, 19 nt, Artificial Sequence
  Description of Artificial Sequence: Synthetic oligonucleotide
acaacaaugacaagaauga

SEQ ID NO: 3142432 - RNA, 19 nt, Artificial Sequence
  Description of Artificial Sequence: Synthetic oligonucleotide
aagacaguggaagucauga

SEQ ID NO: 3142433 - RNA, 19 nt, Artificial Sequence
  Description of Artificial Sequence: Synthetic oligonucleotide
uucaacaaacuacuagcca

SEQ ID NO: 3142434 - RNA, 19 nt, Artificial Sequence
  Description of Artificial Sequence: Synthetic oligonucleotide
ucaugagccacauguaaug

SEQ ID NO: 3142435 - RNA, 19 nt, Artificial Sequence
  Description of Artificial Sequence: Synthetic oligonucleotide
ugagccacauguaaugcug

SEQ ID NO: 3142436 - RNA, 19 nt, Artificial Sequence
  Description of Artificial Sequence: Synthetic oligonucleotide
uucuucuauuucaacaaac

SEQ ID NO: 3142437 - RNA, 19 nt, Artificial Sequence
  Description of Artificial Sequence: Synthetic oligonucleotide
cuagccacacuaaagugag

SEQ ID NO: 3142438 - RNA, 19 nt, Artificial Sequence
  Description of Artificial Sequence: Synthetic oligonucleotide
uguccauggguucaggacu

SEQ ID NO: 3142439 - RNA, 19 nt, Artificial Sequence
  Description of Artificial Sequence: Synthetic oligonucleotide
gaugagagcagcgaucuug

SEQ ID NO: 3142440 - RNA, 19 nt, Artificial Sequence
  Description of Artificial Sequence: Synthetic oligonucleotide
ugaaauccagaagaagaag

SEQ ID NO: 3142441 - RNA, 19 nt, Artificial Sequence
  Description of Artificial Sequence: Synthetic oligonucleotide
aagaagacaguggaaguca

SEQ ID NO: 3142442 - RNA, 19 nt, Artificial Sequence
  Description of Artificial Sequence: Synthetic oligonucleotide
augacaagaaugaccgugc

SEQ ID NO: 3142443 - RNA, 19 nt, Artificial Sequence
  Description of Artificial Sequence: Synthetic oligonucleotide
ugagcuucugaaauccaga

SEQ ID NO: 3142444 - RNA, 19 nt, Artificial Sequence
  Description of Artificial Sequence: Synthetic oligonucleotide
aacaaacuacuagccacac

SEQ ID NO: 3142445 - RNA, 19 nt, Artificial Sequence
  Description of Artificial Sequence: Synthetic oligonucleotide
caaacuacuagccacacua

SEQ ID NO: 3142446 - RNA, 19 nt, Artificial Sequence
  Description of Artificial Sequence: Synthetic oligonucleotide
uucaucgugcagaugggca

SEQ ID NO: 3142447 - RNA, 19 nt, Artificial Sequence
  Description of Artificial Sequence: Synthetic oligonucleotide
aauccagaagaagaagaca

SEQ ID NO: 3142448 - RNA, 19 nt, Artificial Sequence
  Description of Artificial Sequence: Synthetic oligonucleotide
agaagaagacaguggaagu

SEQ ID NO: 3142449 - RNA, 19 nt, Artificial Sequence
  Description of Artificial Sequence: Synthetic oligonucleotide
ugaccgugcaugcagcagc

SEQ ID NO: 3142450 - RNA, 19 nt, Artificial Sequence
  Description of Artificial Sequence: Synthetic oligonucleotide
acuacuagccacacuaaag

SEQ ID NO: 3142451 - RNA, 19 nt, Artificial Sequence
  Description of Artificial Sequence: Synthetic oligonucleotide
agaugggcacaacaaugac

SEQ ID NO: 3142452 - RNA, 19 nt, Artificial Sequence
  Description of Artificial Sequence: Synthetic oligonucleotide
aaugcuguguccauggguu

SEQ ID NO: 3142453 - RNA, 19 nt, Artificial Sequence
  Description of Artificial Sequence: Synthetic oligonucleotide
uaaugcuguguccaugggu

SEQ ID NO: 3142454 - RNA, 19 nt, Artificial Sequence
  Description of Artificial Sequence: Synthetic oligonucleotide
uacuagccacacuaaagug

SEQ ID NO: 3142455 - RNA, 19 nt, Artificial Sequence
  Description of Artificial Sequence: Synthetic oligonucleotide
aguggaagucaugagccac

SEQ ID NO: 3142456 - RNA, 19 nt, Artificial Sequence
  Description of Artificial Sequence: Synthetic oligonucleotide
uucugaaauccagaagaag

SEQ ID NO: 3142457 - RNA, 19 nt, Artificial Sequence
  Description of Artificial Sequence: Synthetic oligonucleotide
uuucuucuauuucaacaaa

SEQ ID NO: 3142458 - RNA, 19 nt, Artificial Sequence
  Description of Artificial Sequence: Synthetic oligonucleotide
aacuacuagccacacuaaa

SEQ ID NO: 3142459 - RNA, 19 nt, Artificial Sequence
  Description of Artificial Sequence: Synthetic oligonucleotide
caagaaugaccgugcaugc

SEQ ID NO: 3142460 - RNA, 19 nt, Artificial Sequence
  Description of Artificial Sequence: Synthetic oligonucleotide
augagagcagcgaucuugc

SEQ ID NO: 3142461 - RNA, 19 nt, Artificial Sequence
  Description of Artificial Sequence: Synthetic oligonucleotide
aaugaccgugcaugcagca

SEQ ID NO: 3142462 - RNA, 19 nt, Artificial Sequence
  Description of Artificial Sequence: Synthetic oligonucleotide
acauguaaugcugugucca

SEQ ID NO: 3142463 - RNA, 19 nt, Artificial Sequence
  Description of Artificial Sequence: Synthetic oligonucleotide
gaagaagacaguggaaguc

SEQ ID NO: 3142464 - RNA, 19 nt, Artificial Sequence
  Description of Artificial Sequence: Synthetic oligonucleotide
ugcagcagcagugaugaga

SEQ ID NO: 3142465 - RNA, 19 nt, Artificial Sequence
  Description of Artificial Sequence: Synthetic oligonucleotide
agucaugagccacauguaa

SEQ ID NO: 3142466 - RNA, 19 nt, Artificial Sequence
  Description of Artificial Sequence: Synthetic oligonucleotide
augggcacaacaaugacaa

SEQ ID NO: 3142467 - RNA, 19 nt, Artificial Sequence
  Description of Artificial Sequence: Synthetic oligonucleotide
uucaggacuucaucgugca

SEQ ID NO: 3142468 - RNA, 19 nt, Artificial Sequence
  Description of Artificial Sequence: Synthetic oligonucleotide
agugaugagagcagcgauc

SEQ ID NO: 3142469 - RNA, 19 nt, Artificial Sequence
  Description of Artificial Sequence: Synthetic oligonucleotide
ucaucgugcagaugggcac

SEQ ID NO: 3142470 - RNA, 19 nt, Artificial Sequence
  Description of Artificial Sequence: Synthetic oligonucleotide
agccacacuaaagugagcu

SEQ ID NO: 3142471 - RNA, 19 nt, Artificial Sequence
  Description of Artificial Sequence: Synthetic oligonucleotide
acuagccacacuaaaguga

SEQ ID NO: 3142472 - RNA, 19 nt, Artificial Sequence
  Description of Artificial Sequence: Synthetic oligonucleotide
ugcagaugggcacaacaau

SEQ ID NO: 3142473 - RNA, 19 nt, Artificial Sequence
  Description of Artificial Sequence: Synthetic oligonucleotide
cacauguaaugcugugucc

SEQ ID NO: 3142474 - RNA, 19 nt, Artificial Sequence
  Description of Artificial Sequence: Synthetic oligonucleotide
cugaaauccagaagaagaa

SEQ ID NO: 3142475 - RNA, 19 nt, Artificial Sequence
  Description of Artificial Sequence: Synthetic oligonucleotide
ugacaagaaugaccgugca

SEQ ID NO: 3142476 - RNA, 19 nt, Artificial Sequence
  Description of Artificial Sequence: Synthetic oligonucleotide
uguguccauggguucagga

SEQ ID NO: 3142477 - RNA, 19 nt, Artificial Sequence
  Description of Artificial Sequence: Synthetic oligonucleotide
gaugggcacaacaaugaca

SEQ ID NO: 3142478 - RNA, 19 nt, Artificial Sequence
  Description of Artificial Sequence: Synthetic oligonucleotide
augagccacauguaaugcu

SEQ ID NO: 3142479 - RNA, 19 nt, Artificial Sequence
  Description of Artificial Sequence: Synthetic oligonucleotide
guaaugcuguguccauggg

SEQ ID NO: 3142480 - RNA, 19 nt, Artificial Sequence
  Description of Artificial Sequence: Synthetic oligonucleotide
cagaugggcacaacaauga

SEQ ID NO: 3142481 - RNA, 19 nt, Artificial Sequence
  Description of Artificial Sequence: Synthetic oligonucleotide
cuucuauuucaacaaacua

SEQ ID NO: 3142482 - RNA, 19 nt, Artificial Sequence
  Description of Artificial Sequence: Synthetic oligonucleotide
caacaaacuacuagccaca

SEQ ID NO: 3142483 - RNA, 19 nt, Artificial Sequence
  Description of Artificial Sequence: Synthetic oligonucleotide
aagaaugaccgugcaugca

SEQ ID NO: 3142484 - RNA, 19 nt, Artificial Sequence
  Description of Artificial Sequence: Synthetic oligonucleotide
guguccauggguucaggac

SEQ ID NO: 3142485 - RNA, 19 nt, Artificial Sequence
  Description of Artificial Sequence: Synthetic oligonucleotide
cuaaagugagcuucugaaa

SEQ ID NO: 3142486 - RNA, 19 nt, Artificial Sequence
  Description of Artificial Sequence: Synthetic oligonucleotide
guucaggacuucaucgugc

SEQ ID NO: 3142487 - RNA, 19 nt, Artificial Sequence
  Description of Artificial Sequence: Synthetic oligonucleotide
cuacuagccacacuaaagu

SEQ ID NO: 3142488 - RNA, 19 nt, Artificial Sequence
  Description of Artificial Sequence: Synthetic oligonucleotide
gaaugaccgugcaugcagc

SEQ ID NO: 3142489 - RNA, 19 nt, Artificial Sequence
  Description of Artificial Sequence: Synthetic oligonucleotide
acaaacuacuagccacacu

SEQ ID NO: 3142490 - RNA, 19 nt, Artificial Sequence
  Description of Artificial Sequence: Synthetic oligonucleotide
ucaggacuucaucgugcag

SEQ ID NO: 3142491 - RNA, 19 nt, Artificial Sequence
  Description of Artificial Sequence: Synthetic oligonucleotide
aggacuucaucgugcagau

SEQ ID NO: 3142492 - RNA, 19 nt, Artificial Sequence
  Description of Artificial Sequence: Synthetic oligonucleotide
cuucugaaauccagaagaa

SEQ ID NO: 3142493 - RNA, 19 nt, Artificial Sequence
  Description of Artificial Sequence: Synthetic oligonucleotide
gguucaggacuucaucgug

SEQ ID NO: 3142494 - RNA, 19 nt, Artificial Sequence
  Description of Artificial Sequence: Synthetic oligonucleotide
caacaaugacaagaaugac

SEQ ID NO: 3142495 - RNA, 19 nt, Artificial Sequence
  Description of Artificial Sequence: Synthetic oligonucleotide
gaagacaguggaagucaug

SEQ ID NO: 3142496 - RNA, 19 nt, Artificial Sequence
  Description of Artificial Sequence: Synthetic oligonucleotide
augcuguguccauggguuc

SEQ ID NO: 3142497 - RNA, 19 nt, Artificial Sequence
  Description of Artificial Sequence: Synthetic oligonucleotide
gaagaagaagacaguggaa

SEQ ID NO: 3142498 - RNA, 19 nt, Artificial Sequence
  Description of Artificial Sequence: Synthetic oligonucleotide
cuucaucgugcagaugggc

SEQ ID NO: 3142499 - RNA, 19 nt, Artificial Sequence
  Description of Artificial Sequence: Synthetic oligonucleotide
acuucaucgugcagauggg

SEQ ID NO: 3142500 - RNA, 19 nt, Artificial Sequence
  Description of Artificial Sequence: Synthetic oligonucleotide
gcagaugggcacaacaaug

SEQ ID NO: 3142501 - RNA, 19 nt, Artificial Sequence
  Description of Artificial Sequence: Synthetic oligonucleotide
ccagaagaagaagacagug

SEQ ID NO: 3142502 - RNA, 19 nt, Artificial Sequence
  Description of Artificial Sequence: Synthetic oligonucleotide
caggacuucaucgugcaga

SEQ ID NO: 3142503 - RNA, 19 nt, Artificial Sequence
  Description of Artificial Sequence: Synthetic oligonucleotide
aaacuacuagccacacuaa

SEQ ID NO: 3142504 - RNA, 19 nt, Artificial Sequence
  Description of Artificial Sequence: Synthetic oligonucleotide
gggcacaacaaugacaaga

SEQ ID NO: 3142505 - RNA, 19 nt, Artificial Sequence
  Description of Artificial Sequence: Synthetic oligonucleotide
ugcuguguccauggguuca

SEQ ID NO: 3142506 - RNA, 19 nt, Artificial Sequence
  Description of Artificial Sequence: Synthetic oligonucleotide
auguaaugcuguguccaug

SEQ ID NO: 3142507 - RNA, 19 nt, Artificial Sequence
  Description of Artificial Sequence: Synthetic oligonucleotide
ccacauguaaugcuguguc

SEQ ID NO: 3142508 - RNA, 19 nt, Artificial Sequence
  Description of Artificial Sequence: Synthetic oligonucleotide
cacuaaagugagcuucuga

SEQ ID NO: 3142509 - RNA, 19 nt, Artificial Sequence
  Description of Artificial Sequence: Synthetic oligonucleotide
ugcaugcagcagcagugau

SEQ ID NO: 3142510 - RNA, 19 nt, Artificial Sequence
  Description of Artificial Sequence: Synthetic oligonucleotide
ugagagcagcgaucuugca

SEQ ID NO: 3142511 - RNA, 19 nt, Artificial Sequence
  Description of Artificial Sequence: Synthetic oligonucleotide
augaccgugcaugcagcag

SEQ ID NO: 3142512 - RNA, 19 nt, Artificial Sequence
  Description of Artificial Sequence: Synthetic oligonucleotide
cuauuucaacaaacuacua

SEQ ID NO: 3142513 - RNA, 19 nt, Artificial Sequence
  Description of Artificial Sequence: Synthetic oligonucleotide
uagccacacuaaagugagc

SEQ ID NO: 3142514 - RNA, 19 nt, Artificial Sequence
  Description of Artificial Sequence: Synthetic oligonucleotide
ugggcacaacaaugacaag

SEQ ID NO: 3142515 - RNA, 19 nt, Artificial Sequence
  Description of Artificial Sequence: Synthetic oligonucleotide
gugaugagagcagcgaucu

SEQ ID NO: 3142516 - RNA, 19 nt, Artificial Sequence
  Description of Artificial Sequence: Synthetic oligonucleotide
aagucaugagccacaugua

SEQ ID NO: 3142517 - RNA, 19 nt, Artificial Sequence
  Description of Artificial Sequence: Synthetic oligonucleotide
ggcacaacaaugacaagaa

SEQ ID NO: 3142518 - RNA, 19 nt, Artificial Sequence
  Description of Artificial Sequence: Synthetic oligonucleotide
uggaagucaugagccacau

SEQ ID NO: 3142519 - RNA, 19 nt, Artificial Sequence
  Description of Artificial Sequence: Synthetic oligonucleotide
ccacacuaaagugagcuuc

SEQ ID NO: 3142520 - RNA, 19 nt, Artificial Sequence
  Description of Artificial Sequence: Synthetic oligonucleotide
acacuaaagugagcuucug

SEQ ID NO: 3142521 - RNA, 19 nt, Artificial Sequence
  Description of Artificial Sequence: Synthetic oligonucleotide
cagcagugaugagagcagc

SEQ ID NO: 3142522 - RNA, 19 nt, Artificial Sequence
  Description of Artificial Sequence: Synthetic oligonucleotide
gacaagaaugaccgugcau

SEQ ID NO: 3142523 - RNA, 19 nt, Artificial Sequence
  Description of Artificial Sequence: Synthetic oligonucleotide
cacacuaaagugagcuucu

SEQ ID NO: 3142524 - RNA, 19 nt, Artificial Sequence
  Description of Artificial Sequence: Synthetic oligonucleotide
agaagacaguggaagucau

SEQ ID NO: 3142525 - RNA, 19 nt, Artificial Sequence
  Description of Artificial Sequence: Synthetic oligonucleotide
gcagcagugaugagagcag

SEQ ID NO: 3142526 - RNA, 19 nt, Artificial Sequence
  Description of Artificial Sequence: Synthetic oligonucleotide
guggaagucaugagccaca

SEQ ID NO: 3142527 - RNA, 19 nt, Artificial Sequence
  Description of Artificial Sequence: Synthetic oligonucleotide
gugcagaugggcacaacaa

SEQ ID NO: 3142528 - RNA, 19 nt, Artificial Sequence
  Description of Artificial Sequence: Synthetic oligonucleotide
agugagcuucugaaaucca

SEQ ID NO: 3142529 - RNA, 19 nt, Artificial Sequence
  Description of Artificial Sequence: Synthetic oligonucleotide
caguggaagucaugagcca

SEQ ID NO: 3142530 - RNA, 19 nt, Artificial Sequence
  Description of Artificial Sequence: Synthetic oligonucleotide
ugaugagagcagcgaucuu

SEQ ID NO: 3142531 - RNA, 19 nt, Artificial Sequence
  Description of Artificial Sequence: Synthetic oligonucleotide
gaccgugcaugcagcagca

SEQ ID NO: 3142532 - RNA, 19 nt, Artificial Sequence
  Description of Artificial Sequence: Synthetic oligonucleotide
gcaugcagcagcagugaug

SEQ ID NO: 3142533 - RNA, 19 nt, Artificial Sequence
  Description of Artificial Sequence: Synthetic oligonucleotide
gucaugagccacauguaau

SEQ ID NO: 3142534 - RNA, 19 nt, Artificial Sequence
  Description of Artificial Sequence: Synthetic oligonucleotide
gcagugaugagagcagcga

SEQ ID NO: 3142535 - RNA, 19 nt, Artificial Sequence
  Description of Artificial Sequence: Synthetic oligonucleotide
cuguguccauggguucagg

SEQ ID NO: 3142536 - RNA, 19 nt, Artificial Sequence
  Description of Artificial Sequence: Synthetic oligonucleotide
ggaagucaugagccacaug

SEQ ID NO: 3142537 - RNA, 19 nt, Artificial Sequence
  Description of Artificial Sequence: Synthetic oligonucleotide
cauguaaugcuguguccau

SEQ ID NO: 3142538 - RNA, 19 nt, Artificial Sequence
  Description of Artificial Sequence: Synthetic oligonucleotide
gugcaugcagcagcaguga

SEQ ID NO: 3142539 - RNA, 19 nt, Artificial Sequence
  Description of Artificial Sequence: Synthetic oligonucleotide
caucgugcagaugggcaca

SEQ ID NO: 3142540 - RNA, 19 nt, Artificial Sequence
  Description of Artificial Sequence: Synthetic oligonucleotide
cauggguucaggacuucau

SEQ ID NO: 3142541 - RNA, 19 nt, Artificial Sequence
  Description of Artificial Sequence: Synthetic oligonucleotide
cagcagcagugaugagagc

SEQ ID NO: 3142542 - RNA, 19 nt, Artificial Sequence
  Description of Artificial Sequence: Synthetic oligonucleotide
ggguucaggacuucaucgu

SEQ ID NO: 3142543 - RNA, 19 nt, Artificial Sequence
  Description of Artificial Sequence: Synthetic oligonucleotide
cgugcagaugggcacaaca

SEQ ID NO: 3142544 - RNA, 19 nt, Artificial Sequence
  Description of Artificial Sequence: Synthetic oligonucleotide
aucgugcagaugggcacaa

SEQ ID NO: 3142545 - RNA, 19 nt, Artificial Sequence
  Description of Artificial Sequence: Synthetic oligonucleotide
uccauggguucaggacuuc

SEQ ID NO: 3142546 - RNA, 19 nt, Artificial Sequence
  Description of Artificial Sequence: Synthetic oligonucleotide
caaugacaagaaugaccgu

SEQ ID NO: 3142547 - RNA, 19 nt, Artificial Sequence
  Description of Artificial Sequence: Synthetic oligonucleotide
ucgugcagaugggcacaac

SEQ ID NO: 3142548 - RNA, 19 nt, Artificial Sequence
  Description of Artificial Sequence: Synthetic oligonucleotide
gccacauguaaugcugugu

SEQ ID NO: 3142549 - RNA, 19 nt, Artificial Sequence
  Description of Artificial Sequence: Synthetic oligonucleotide
ggacuucaucgugcagaug

SEQ ID NO: 3142550 - RNA, 19 nt, Artificial Sequence
  Description of Artificial Sequence: Synthetic oligonucleotide
gcacaacaaugacaagaau

SEQ ID NO: 3142551 - RNA, 19 nt, Artificial Sequence
  Description of Artificial Sequence: Synthetic oligonucleotide
ccauggguucaggacuuca

SEQ ID NO: 3142552 - RNA, 19 nt, Artificial Sequence
  Description of Artificial Sequence: Synthetic oligonucleotide
gccacacuaaagugagcuu

SEQ ID NO: 3142553 - RNA, 19 nt, Artificial Sequence
  Description of Artificial Sequence: Synthetic oligonucleotide
ccgugcaugcagcagcagu

SEQ ID NO: 3142554 - RNA, 19 nt, Artificial Sequence
  Description of Artificial Sequence: Synthetic oligonucleotide
uucaguggcagccagagca

SEQ ID NO: 3142555 - RNA, 19 nt, Artificial Sequence
  Description of Artificial Sequence: Synthetic oligonucleotide
uucuucucaagguaguugg

SEQ ID NO: 3142556 - RNA, 19 nt, Artificial Sequence
  Description of Artificial Sequence: Synthetic oligonucleotide
uuaguucuucuucucaagg

SEQ ID NO: 3142557 - RNA, 19 nt, Artificial Sequence
  Description of Artificial Sequence: Synthetic oligonucleotide
ucuggaaggacccagugcu

SEQ ID NO: 3142558 - RNA, 19 nt, Artificial Sequence
  Description of Artificial Sequence: Synthetic oligonucleotide
auugggauuccucuccagc

SEQ ID NO: 3142559 - RNA, 19 nt, Artificial Sequence
  Description of Artificial Sequence: Synthetic oligonucleotide
agcacacugagucuggaag

SEQ ID NO: 3142560 - RNA, 19 nt, Artificial Sequence
  Description of Artificial Sequence: Synthetic oligonucleotide
uccaggaucuggcaguacc

SEQ ID NO: 3142561 - RNA, 19 nt, Artificial Sequence
  Description of Artificial Sequence: Synthetic oligonucleotide
cagagcagcacacugaguc

SEQ ID NO: 3142562 - RNA, 19 nt, Artificial Sequence
  Description of Artificial Sequence: Synthetic oligonucleotide
aagggcuucaccucaucca

SEQ ID NO: 3142563 - RNA, 19 nt, Artificial Sequence
  Description of Artificial Sequence: Synthetic oligonucleotide
uguuaguucuucuucucaa

SEQ ID NO: 3142564 - RNA, 19 nt, Artificial Sequence
  Description of Artificial Sequence: Synthetic oligonucleotide
guuaguucuucuucucaag

SEQ ID NO: 3142565 - RNA, 19 nt, Artificial Sequence
  Description of Artificial Sequence: Synthetic oligonucleotide
uuggagggcacccagcccu

SEQ ID NO: 3142566 - RNA, 19 nt, Artificial Sequence
  Description of Artificial Sequence: Synthetic oligonucleotide
aagguaguuggagggcacc

SEQ ID NO: 3142567 - RNA, 19 nt, Artificial Sequence
  Description of Artificial Sequence: Synthetic oligonucleotide
uugggauuccucuccagca

SEQ ID NO: 3142568 - RNA, 19 nt, Artificial Sequence
  Description of Artificial Sequence: Synthetic oligonucleotide
uuggaagccaagcugucuc

SEQ ID NO: 3142569 - RNA, 19 nt, Artificial Sequence
  Description of Artificial Sequence: Synthetic oligonucleotide
cacugagucuggaaggacc

SEQ ID NO: 3142570 - RNA, 19 nt, Artificial Sequence
  Description of Artificial Sequence: Synthetic oligonucleotide
ugcuguuaguucuucuucu

SEQ ID NO: 3142571 - RNA, 19 nt, Artificial Sequence
  Description of Artificial Sequence: Synthetic oligonucleotide
cuucaccucauccaggauc

SEQ ID NO: 3142572 - RNA, 19 nt, Artificial Sequence
  Description of Artificial Sequence: Synthetic oligonucleotide
agggcuucaccucauccag

SEQ ID NO: 3142573 - RNA, 19 nt, Artificial Sequence
  Description of Artificial Sequence: Synthetic oligonucleotide
ucaagguaguuggagggca

SEQ ID NO: 3142574 - RNA, 19 nt, Artificial Sequence
  Description of Artificial Sequence: Synthetic oligonucleotide
cauucaguggcagccagag

SEQ ID NO: 3142575 - RNA, 19 nt, Artificial Sequence
  Description of Artificial Sequence: Synthetic oligonucleotide
cuucucaagguaguuggag

SEQ ID NO: 3142576 - RNA, 19 nt, Artificial Sequence
  Description of Artificial Sequence: Synthetic oligonucleotide
agguaguuggagggcaccc

SEQ ID NO: 3142577 - RNA, 19 nt, Artificial Sequence
  Description of Artificial Sequence: Synthetic oligonucleotide
ugggauuccucuccagcac

SEQ ID NO: 3142578 - RNA, 19 nt, Artificial Sequence
  Description of Artificial Sequence: Synthetic oligonucleotide
ucuucucaagguaguugga

SEQ ID NO: 3142579 - RNA, 19 nt, Artificial Sequence
  Description of Artificial Sequence: Synthetic oligonucleotide
agccauugggauuccucuc

SEQ ID NO: 3142580 - RNA, 19 nt, Artificial Sequence
  Description of Artificial Sequence: Synthetic oligonucleotide
acccagugcuguuaguucu

SEQ ID NO: 3142581 - RNA, 19 nt, Artificial Sequence
  Description of Artificial Sequence: Synthetic oligonucleotide
agucuggaaggacccagug

SEQ ID NO: 3142582 - RNA, 19 nt, Artificial Sequence
  Description of Artificial Sequence: Synthetic oligonucleotide
gcacacugagucuggaagg

SEQ ID NO: 3142583 - RNA, 19 nt, Artificial Sequence
  Description of Artificial Sequence: Synthetic oligonucleotide
agagcagcacacugagucu

SEQ ID NO: 3142584 - RNA, 19 nt, Artificial Sequence
  Description of Artificial Sequence: Synthetic oligonucleotide
cuugaagggcuucaccuca

SEQ ID NO: 3142585 - RNA, 19 nt, Artificial Sequence
  Description of Artificial Sequence: Synthetic oligonucleotide
ucauucaguggcagccaga

SEQ ID NO: 3142586 - RNA, 19 nt, Artificial Sequence
  Description of Artificial Sequence: Synthetic oligonucleotide
gucuggaaggacccagugc

SEQ ID NO: 3142587 - RNA, 19 nt, Artificial Sequence
  Description of Artificial Sequence: Synthetic oligonucleotide
gaucuggcaguaccaccag

SEQ ID NO: 3142588 - RNA, 19 nt, Artificial Sequence
  Description of Artificial Sequence: Synthetic oligonucleotide
ucuuggaagccaagcuguc

SEQ ID NO: 3142589 - RNA, 19 nt, Artificial Sequence
  Description of Artificial Sequence: Synthetic oligonucleotide
cucaagguaguuggagggc

SEQ ID NO: 3142590 - RNA, 19 nt, Artificial Sequence
  Description of Artificial Sequence: Synthetic oligonucleotide
gagcagcacacugagucug

SEQ ID NO: 3142591 - RNA, 19 nt, Artificial Sequence
  Description of Artificial Sequence: Synthetic oligonucleotide
uggaaggacccagugcugu

SEQ ID NO: 3142592 - RNA, 19 nt, Artificial Sequence
  Description of Artificial Sequence: Synthetic oligonucleotide
gugcuguuaguucuucuuc

SEQ ID NO: 3142593 - RNA, 19 nt, Artificial Sequence
  Description of Artificial Sequence: Synthetic oligonucleotide
gacccagugcuguuaguuc

SEQ ID NO: 3142594 - RNA, 19 nt, Artificial Sequence
  Description of Artificial Sequence: Synthetic oligonucleotide
uggcaguaccaccagccau

SEQ ID NO: 3142595 - RNA, 19 nt, Artificial Sequence
  Description of Artificial Sequence: Synthetic oligonucleotide
caccucauccaggaucugg

SEQ ID NO: 3142596 - RNA, 19 nt, Artificial Sequence
  Description of Artificial Sequence: Synthetic oligonucleotide
cauugggauuccucuccag

SEQ ID NO: 3142597 - RNA, 19 nt, Artificial Sequence
  Description of Artificial Sequence: Synthetic oligonucleotide
caagguaguuggagggcac

SEQ ID NO: 3142598 - RNA, 19 nt, Artificial Sequence
  Description of Artificial Sequence: Synthetic oligonucleotide
cuguuaguucuucuucuca

SEQ ID NO: 3142599 - RNA, 19 nt, Artificial Sequence
  Description of Artificial Sequence: Synthetic oligonucleotide
acacugagucuggaaggac

SEQ ID NO: 3142600 - RNA, 19 nt, Artificial Sequence
  Description of Artificial Sequence: Synthetic oligonucleotide
gccauugggauuccucucc

SEQ ID NO: 3142601 - RNA, 19 nt, Artificial Sequence
  Description of Artificial Sequence: Synthetic oligonucleotide
cucuuggaagccaagcugu

SEQ ID NO: 3142602 - RNA, 19 nt, Artificial Sequence
  Description of Artificial Sequence: Synthetic oligonucleotide
gcacccagcccuugaaggg

SEQ ID NO: 3142603 - RNA, 19 nt, Artificial Sequence
  Description of Artificial Sequence: Synthetic oligonucleotide
guuggagggcacccagccc

SEQ ID NO: 3142604 - RNA, 19 nt, Artificial Sequence
  Description of Artificial Sequence: Synthetic oligonucleotide
ucuucuucucaagguaguu

SEQ ID NO: 3142605 - RNA, 19 nt, Artificial Sequence
  Description of Artificial Sequence: Synthetic oligonucleotide
uugaagggcuucaccucau

SEQ ID NO: 3142606 - RNA, 19 nt, Artificial Sequence
  Description of Artificial Sequence: Synthetic oligonucleotide
ggaucuggcaguaccacca

SEQ ID NO: 3142607 - RNA, 19 nt, Artificial Sequence
  Description of Artificial Sequence: Synthetic oligonucleotide
gggauuccucuccagcacc

SEQ ID NO: 3142608 - RNA, 19 nt, Artificial Sequence
  Description of Artificial Sequence: Synthetic oligonucleotide
accaccagccauugggauu

SEQ ID NO: 3142609 - RNA, 19 nt, Artificial Sequence
  Description of Artificial Sequence: Synthetic oligonucleotide
uaccaccagccauugggau

SEQ ID NO: 3142610 - RNA, 19 nt, Artificial Sequence
  Description of Artificial Sequence: Synthetic oligonucleotide
cuggaaggacccagugcug

SEQ ID NO: 3142611 - RNA, 19 nt, Artificial Sequence
  Description of Artificial Sequence: Synthetic oligonucleotide
ggcuucaccucauccagga

SEQ ID NO: 3142612 - RNA, 19 nt, Artificial Sequence
  Description of Artificial Sequence: Synthetic oligonucleotide
agcagcacacugagucugg

SEQ ID NO: 3142613 - RNA, 19 nt, Artificial Sequence
  Description of Artificial Sequence: Synthetic oligonucleotide
cacccagcccuugaagggc

SEQ ID NO: 3142614 - RNA, 19 nt, Artificial Sequence
  Description of Artificial Sequence: Synthetic oligonucleotide
gcuguuaguucuucuucuc

SEQ ID NO: 3142615 - RNA, 19 nt, Artificial Sequence
  Description of Artificial Sequence: Synthetic oligonucleotide
cacacugagucuggaagga

SEQ ID NO: 3142616 - RNA, 19 nt, Artificial Sequence
  Description of Artificial Sequence: Synthetic oligonucleotide
cuccagcaccuccauggac

SEQ ID NO: 3142617 - RNA, 19 nt, Artificial Sequence
  Description of Artificial Sequence: Synthetic oligonucleotide
guaccaccagccauuggga

SEQ ID NO: 3142618 - RNA, 19 nt, Artificial Sequence
  Description of Artificial Sequence: Synthetic oligonucleotide
ccuugaagggcuucaccuc

SEQ ID NO: 3142619 - RNA, 19 nt, Artificial Sequence
  Description of Artificial Sequence: Synthetic oligonucleotide
cagccauugggauuccucu

SEQ ID NO: 3142620 - RNA, 19 nt, Artificial Sequence
  Description of Artificial Sequence: Synthetic oligonucleotide
cuggcaguaccaccagcca

SEQ ID NO: 3142621 - RNA, 19 nt, Artificial Sequence
  Description of Artificial Sequence: Synthetic oligonucleotide
gaaggacccagugcuguua

SEQ ID NO: 3142622 - RNA, 19 nt, Artificial Sequence
  Description of Artificial Sequence: Synthetic oligonucleotide
gauuccucuccagcaccuc

SEQ ID NO: 3142623 - RNA, 19 nt, Artificial Sequence
  Description of Artificial Sequence: Synthetic oligonucleotide
auccaggaucuggcaguac

SEQ ID NO: 3142624 - RNA, 19 nt, Artificial Sequence
  Description of Artificial Sequence: Synthetic oligonucleotide
ccaccagccauugggauuc

SEQ ID NO: 3142625 - RNA, 19 nt, Artificial Sequence
  Description of Artificial Sequence: Synthetic oligonucleotide
gagggcacccagcccuuga

SEQ ID NO: 3142626 - RNA, 19 nt, Artificial Sequence
  Description of Artificial Sequence: Synthetic oligonucleotide
agggcacccagcccuugaa

SEQ ID NO: 3142627 - RNA, 19 nt, Artificial Sequence
  Description of Artificial Sequence: Synthetic oligonucleotide
gcccuugaagggcuucacc

SEQ ID NO: 3142628 - RNA, 19 nt, Artificial Sequence
  Description of Artificial Sequence: Synthetic oligonucleotide
aggacccagugcuguuagu

SEQ ID NO: 3142629 - RNA, 19 nt, Artificial Sequence
  Description of Artificial Sequence: Synthetic oligonucleotide
ccaggaucuggcaguacca

SEQ ID NO: 3142630 - RNA, 19 nt, Artificial Sequence
  Description of Artificial Sequence: Synthetic oligonucleotide
uggagggcacccagcccuu

SEQ ID NO: 3142631 - RNA, 19 nt, Artificial Sequence
  Description of Artificial Sequence: Synthetic oligonucleotide
cuuggaagccaagcugucu

SEQ ID NO: 3142632 - RNA, 19 nt, Artificial Sequence
  Description of Artificial Sequence: Synthetic oligonucleotide
cagcacacugagucuggaa

SEQ ID NO: 3142633 - RNA, 19 nt, Artificial Sequence
  Description of Artificial Sequence: Synthetic oligonucleotide
acccagcccuugaagggcu

SEQ ID NO: 3142634 - RNA, 19 nt, Artificial Sequence
  Description of Artificial Sequence: Synthetic oligonucleotide
gagucuggaaggacccagu

SEQ ID NO: 3142635 - RNA, 19 nt, Artificial Sequence
  Description of Artificial Sequence: Synthetic oligonucleotide
ccccucuuggaagccaagc

SEQ ID NO: 3142636 - RNA, 19 nt, Artificial Sequence
  Description of Artificial Sequence: Synthetic oligonucleotide
cugagucuggaaggaccca

SEQ ID NO: 3142637 - RNA, 19 nt, Artificial Sequence
  Description of Artificial Sequence: Synthetic oligonucleotide
cagugcuguuaguucuucu

SEQ ID NO: 3142638 - RNA, 19 nt, Artificial Sequence
  Description of Artificial Sequence: Synthetic oligonucleotide
accagccauugggauuccu

SEQ ID NO: 3142639 - RNA, 19 nt, Artificial Sequence
  Description of Artificial Sequence: Synthetic oligonucleotide
ccauugggauuccucucca

SEQ ID NO: 3142640 - RNA, 19 nt, Artificial Sequence
  Description of Artificial Sequence: Synthetic oligonucleotide
ccucauccaggaucuggca

SEQ ID NO: 3142641 - RNA, 19 nt, Artificial Sequence
  Description of Artificial Sequence: Synthetic oligonucleotide
ggcaguaccaccagccauu

SEQ ID NO: 3142642 - RNA, 19 nt, Artificial Sequence
  Description of Artificial Sequence: Synthetic oligonucleotide
ggacccagugcuguuaguu

SEQ ID NO: 3142643 - RNA, 19 nt, Artificial Sequence
  Description of Artificial Sequence: Synthetic oligonucleotide
ggauuccucuccagcaccu

SEQ ID NO: 3142644 - RNA, 19 nt, Artificial Sequence
  Description of Artificial Sequence: Synthetic oligonucleotide
cccucuuggaagccaagcu

SEQ ID NO: 3142645 - RNA, 19 nt, Artificial Sequence
  Description of Artificial Sequence: Synthetic oligonucleotide
caccagccauugggauucc

SEQ ID NO: 3142646 - RNA, 19 nt, Artificial Sequence
  Description of Artificial Sequence: Synthetic oligonucleotide
gcagcacacugagucugga

SEQ ID NO: 3142647 - RNA, 19 nt, Artificial Sequence
  Description of Artificial Sequence: Synthetic oligonucleotide
ggagggcacccagcccuug

SEQ ID NO: 3142648 - RNA, 19 nt, Artificial Sequence
  Description of Artificial Sequence: Synthetic oligonucleotide
gcuucaccucauccaggau

SEQ ID NO: 3142649 - RNA, 19 nt, Artificial Sequence
  Description of Artificial Sequence: Synthetic oligonucleotide
cccagugcuguuaguucuu

SEQ ID NO: 3142650 - RNA, 19 nt, Artificial Sequence
  Description of Artificial Sequence: Synthetic oligonucleotide
cccagcccuugaagggcuu

SEQ ID NO: 3142651 - RNA, 19 nt, Artificial Sequence
  Description of Artificial Sequence: Synthetic oligonucleotide
aaaguuugaacaaauaugc

SEQ ID NO: 3142652 - RNA, 19 nt, Artificial Sequence
  Description of Artificial Sequence: Synthetic oligonucleotide
aaaaucagaauacauaaca

SEQ ID NO: 3142653 - RNA, 19 nt, Artificial Sequence
  Description of Artificial Sequence: Synthetic oligonucleotide
aacaaauaugcacacauag

SEQ ID NO: 3142654 - RNA, 19 nt, Artificial Sequence
  Description of Artificial Sequence: Synthetic oligonucleotide
aauaugcacacauagaaca

SEQ ID NO: 3142655 - RNA, 19 nt, Artificial Sequence
  Description of Artificial Sequence: Synthetic oligonucleotide
uacauaacagaaaagagca

SEQ ID NO: 3142656 - RNA, 19 nt, Artificial Sequence
  Description of Artificial Sequence: Synthetic oligonucleotide
uaaaguuugaacaaauaug

SEQ ID NO: 3142657 - RNA, 19 nt, Artificial Sequence
  Description of Artificial Sequence: Synthetic oligonucleotide
aguuugaacaaauaugcac

SEQ ID NO: 3142658 - RNA, 19 nt, Artificial Sequence
  Description of Artificial Sequence: Synthetic oligonucleotide
aaaguaauccuugaaaauc

SEQ ID NO: 3142659 - RNA, 19 nt, Artificial Sequence
  Description of Artificial Sequence: Synthetic oligonucleotide
uuaaacaucuguaugaaau

SEQ ID NO: 3142660 - RNA, 19 nt, Artificial Sequence
  Description of Artificial Sequence: Synthetic oligonucleotide
ugaaaaucagaauacauaa

SEQ ID NO: 3142661 - RNA, 19 nt, Artificial Sequence
  Description of Artificial Sequence: Synthetic oligonucleotide
auaacuuaaguauuaaaca

SEQ ID NO: 3142662 - RNA, 19 nt, Artificial Sequence
  Description of Artificial Sequence: Synthetic oligonucleotide
auacauaacagaaaagagc

SEQ ID NO: 3142663 - RNA, 19 nt, Artificial Sequence
  Description of Artificial Sequence: Synthetic oligonucleotide
aaaacaaaacaaacaaaac

SEQ ID NO: 3142664 - RNA, 19 nt, Artificial Sequence
  Description of Artificial Sequence: Synthetic oligonucleotide
aaucagaauacauaacaga

SEQ ID NO: 3142665 - RNA, 19 nt, Artificial Sequence
  Description of Artificial Sequence: Synthetic oligonucleotide
aucuguaugaaauaacuug

SEQ ID NO: 3142666 - RNA, 19 nt, Artificial Sequence
  Description of Artificial Sequence: Synthetic oligonucleotide
agcacaauaacuuaaguau

SEQ ID NO: 3142667 - RNA, 19 nt, Artificial Sequence
  Description of Artificial Sequence: Synthetic oligonucleotide
ucuguaugaaauaacuuga

SEQ ID NO: 3142668 - RNA, 19 nt, Artificial Sequence
  Description of Artificial Sequence: Synthetic oligonucleotide
uaauccuugaaaaucagaa

SEQ ID NO: 3142669 - RNA, 19 nt, Artificial Sequence
  Description of Artificial Sequence: Synthetic oligonucleotide
aauaacuugacuaaaguuu

SEQ ID NO: 3142670 - RNA, 19 nt, Artificial Sequence
  Description of Artificial Sequence: Synthetic oligonucleotide
aguauuaaacaucuguaug

SEQ ID NO: 3142671 - RNA, 19 nt, Artificial Sequence
  Description of Artificial Sequence: Synthetic oligonucleotide
cacacauagaacauguacg

SEQ ID NO: 3142672 - RNA, 19 nt, Artificial Sequence
  Description of Artificial Sequence: Synthetic oligonucleotide
ugaacaaauaugcacacau

SEQ ID NO: 3142673 - RNA, 19 nt, Artificial Sequence
  Description of Artificial Sequence: Synthetic oligonucleotide
uaugaaauaacuugacuaa

SEQ ID NO: 3142674 - RNA, 19 nt, Artificial Sequence
  Description of Artificial Sequence: Synthetic oligonucleotide
acacauagaacauguacgg

SEQ ID NO: 3142675 - RNA, 19 nt, Artificial Sequence
  Description of Artificial Sequence: Synthetic oligonucleotide
cuugacuaaaguuugaaca

SEQ ID NO: 3142676 - RNA, 19 nt, Artificial Sequence
  Description of Artificial Sequence: Synthetic oligonucleotide
aaauaacuugacuaaaguu

SEQ ID NO: 3142677 - RNA, 19 nt, Artificial Sequence
  Description of Artificial Sequence: Synthetic oligonucleotide
aacuuaaguauuaaacauc

SEQ ID NO: 3142678 - RNA, 19 nt, Artificial Sequence
  Description of Artificial Sequence: Synthetic oligonucleotide
aaauaugcacacauagaac

SEQ ID NO: 3142679 - RNA, 19 nt, Artificial Sequence
  Description of Artificial Sequence: Synthetic oligonucleotide
uugaaaaucagaauacaua

SEQ ID NO: 3142680 - RNA, 19 nt, Artificial Sequence
  Description of Artificial Sequence: Synthetic oligonucleotide
uaacuuaaguauuaaacau

SEQ ID NO: 3142681 - RNA, 19 nt, Artificial Sequence
  Description of Artificial Sequence: Synthetic oligonucleotide
aaaucagaauacauaacag

SEQ ID NO: 3142682 - RNA, 19 nt, Artificial Sequence
  Description of Artificial Sequence: Synthetic oligonucleotide
uaaguauuaaacaucugua

SEQ ID NO: 3142683 - RNA, 19 nt, Artificial Sequence
  Description of Artificial Sequence: Synthetic oligonucleotide
aaguauuaaacaucuguau

SEQ ID NO: 3142684 - RNA, 19 nt, Artificial Sequence
  Description of Artificial Sequence: Synthetic oligonucleotide
aacagaaaagagcacaaua

SEQ ID NO: 3142685 - RNA, 19 nt, Artificial Sequence
  Description of Artificial Sequence: Synthetic oligonucleotide
uguaugaaauaacuugacu

SEQ ID NO: 3142686 - RNA, 19 nt, Artificial Sequence
  Description of Artificial Sequence: Synthetic oligonucleotide
acuugacuaaaguuugaac

SEQ ID NO: 3142687 - RNA, 19 nt, Artificial Sequence
  Description of Artificial Sequence: Synthetic oligonucleotide
guaugaaauaacuugacua

SEQ ID NO: 3142688 - RNA, 19 nt, Artificial Sequence
  Description of Artificial Sequence: Synthetic oligonucleotide
uccuugaaaaucagaauac

SEQ ID NO: 3142689 - RNA, 19 nt, Artificial Sequence
  Description of Artificial Sequence: Synthetic oligonucleotide
uugacuaaaguuugaacaa

SEQ ID NO: 3142690 - RNA, 19 nt, Artificial Sequence
  Description of Artificial Sequence: Synthetic oligonucleotide
aacauguacgguuaauuua

SEQ ID NO: 3142691 - RNA, 19 nt, Artificial Sequence
  Description of Artificial Sequence: Synthetic oligonucleotide
aacaucuguaugaaauaac

SEQ ID NO: 3142692 - RNA, 19 nt, Artificial Sequence
  Description of Artificial Sequence: Synthetic oligonucleotide
aaaagagcacaauaacuua

SEQ ID NO: 3142693 - RNA, 19 nt, Artificial Sequence
  Description of Artificial Sequence: Synthetic oligonucleotide
auccuugaaaaucagaaua

SEQ ID NO: 3142694 - RNA, 19 nt, Artificial Sequence
  Description of Artificial Sequence: Synthetic oligonucleotide
caaauaugcacacauagaa

SEQ ID NO: 3142695 - RNA, 19 nt, Artificial Sequence
  Description of Artificial Sequence: Synthetic oligonucleotide
acuuaaguauuaaacaucu

SEQ ID NO: 3142696 - RNA, 19 nt, Artificial Sequence
  Description of Artificial Sequence: Synthetic oligonucleotide
ucagaauacauaacagaaa

SEQ ID NO: 3142697 - RNA, 19 nt, Artificial Sequence
  Description of Artificial Sequence: Synthetic oligonucleotide
aaguaauccuugaaaauca

SEQ ID NO: 3142698 - RNA, 19 nt, Artificial Sequence
  Description of Artificial Sequence: Synthetic oligonucleotide
guuugaacaaauaugcaca

SEQ ID NO: 3142699 - RNA, 19 nt, Artificial Sequence
  Description of Artificial Sequence: Synthetic oligonucleotide
auaacuugacuaaaguuug

SEQ ID NO: 3142700 - RNA, 19 nt, Artificial Sequence
  Description of Artificial Sequence: Synthetic oligonucleotide
agaaaagagcacaauaacu

SEQ ID NO: 3142701 - RNA, 19 nt, Artificial Sequence
  Description of Artificial Sequence: Synthetic oligonucleotide
cagaauacauaacagaaaa

SEQ ID NO: 3142702 - RNA, 19 nt, Artificial Sequence
  Description of Artificial Sequence: Synthetic oligonucleotide
acauagaacauguacgguu

SEQ ID NO: 3142703 - RNA, 19 nt, Artificial Sequence
  Description of Artificial Sequence: Synthetic oligonucleotide
cagaaaagagcacaauaac

SEQ ID NO: 3142704 - RNA, 19 nt, Artificial Sequence
  Description of Artificial Sequence: Synthetic oligonucleotide
aaacaucuguaugaaauaa

SEQ ID NO: 3142705 - RNA, 19 nt, Artificial Sequence
  Description of Artificial Sequence: Synthetic oligonucleotide
aucagaauacauaacagaa

SEQ ID NO: 3142706 - RNA, 19 nt, Artificial Sequence
  Description of Artificial Sequence: Synthetic oligonucleotide
aagagcacaauaacuuaag

SEQ ID NO: 3142707 - RNA, 19 nt, Artificial Sequence
  Description of Artificial Sequence: Synthetic oligonucleotide
uaaacaucuguaugaaaua

SEQ ID NO: 3142708 - RNA, 19 nt, Artificial Sequence
  Description of Artificial Sequence: Synthetic oligonucleotide
uauuaaacaucuguaugaa

SEQ ID NO: 3142709 - RNA, 19 nt, Artificial Sequence
  Description of Artificial Sequence: Synthetic oligonucleotide
acaucuguaugaaauaacu

SEQ ID NO: 3142710 - RNA, 19 nt, Artificial Sequence
  Description of Artificial Sequence: Synthetic oligonucleotide
aaagagcacaauaacuuaa

SEQ ID NO: 3142711 - RNA, 19 nt, Artificial Sequence
  Description of Artificial Sequence: Synthetic oligonucleotide
gaaaaucagaauacauaac

SEQ ID NO: 3142712 - RNA, 19 nt, Artificial Sequence
  Description of Artificial Sequence: Synthetic oligonucleotide
acagaaaagagcacaauaa

SEQ ID NO: 3142713 - RNA, 19 nt, Artificial Sequence
  Description of Artificial Sequence: Synthetic oligonucleotide
gagcacaauaacuuaagua

SEQ ID NO: 3142714 - RNA, 19 nt, Artificial Sequence
  Description of Artificial Sequence: Synthetic oligonucleotide
ugcuaaguucaaauguuau

SEQ ID NO: 3142715 - RNA, 19 nt, Artificial Sequence
  Description of Artificial Sequence: Synthetic oligonucleotide
uaugcacacauagaacaug

SEQ ID NO: 3142716 - RNA, 19 nt, Artificial Sequence
  Description of Artificial Sequence: Synthetic oligonucleotide
cuguaugaaauaacuugac

SEQ ID NO: 3142717 - RNA, 19 nt, Artificial Sequence
  Description of Artificial Sequence: Synthetic oligonucleotide
agaauacauaacagaaaag

SEQ ID NO: 3142718 - RNA, 19 nt, Artificial Sequence
  Description of Artificial Sequence: Synthetic oligonucleotide
uaaguucaaauguuauuuu

SEQ ID NO: 3142719 - RNA, 19 nt, Artificial Sequence
  Description of Artificial Sequence: Synthetic oligonucleotide
gaaaagagcacaauaacuu

SEQ ID NO: 3142720 - RNA, 19 nt, Artificial Sequence
  Description of Artificial Sequence: Synthetic oligonucleotide
agagcacaauaacuuaagu

SEQ ID NO: 3142721 - RNA, 19 nt, Artificial Sequence
  Description of Artificial Sequence: Synthetic oligonucleotide
cuuaaguauuaaacaucug

SEQ ID NO: 3142722 - RNA, 19 nt, Artificial Sequence
  Description of Artificial Sequence: Synthetic oligonucleotide
aacuugacuaaaguuugaa

SEQ ID NO: 3142723 - RNA, 19 nt, Artificial Sequence
  Description of Artificial Sequence: Synthetic oligonucleotide
uaacuugacuaaaguuuga

SEQ ID NO: 3142724 - RNA, 19 nt, Artificial Sequence
  Description of Artificial Sequence: Synthetic oligonucleotide
acauguacgguuaauuuaa

SEQ ID NO: 3142725 - RNA, 19 nt, Artificial Sequence
  Description of Artificial Sequence: Synthetic oligonucleotide
aaguuugaacaaauaugca

SEQ ID NO: 3142726 - RNA, 19 nt, Artificial Sequence
  Description of Artificial Sequence: Synthetic oligonucleotide
auuaaacaucuguaugaaa

SEQ ID NO: 3142727 - RNA, 19 nt, Artificial Sequence
  Description of Artificial Sequence: Synthetic oligonucleotide
acaaauaugcacacauaga

SEQ ID NO: 3142728 - RNA, 19 nt, Artificial Sequence
  Description of Artificial Sequence: Synthetic oligonucleotide
acauaacagaaaagagcac

SEQ ID NO: 3142729 - RNA, 19 nt, Artificial Sequence
  Description of Artificial Sequence: Synthetic oligonucleotide
ugacuaaaguuugaacaaa

SEQ ID NO: 3142730 - RNA, 19 nt, Artificial Sequence
  Description of Artificial Sequence: Synthetic oligonucleotide
cacaauaacuuaaguauua

SEQ ID NO: 3142731 - RNA, 19 nt, Artificial Sequence
  Description of Artificial Sequence: Synthetic oligonucleotide
agaacauguacgguuaauu

SEQ ID NO: 3142732 - RNA, 19 nt, Artificial Sequence
  Description of Artificial Sequence: Synthetic oligonucleotide
cauagaacauguacgguua

SEQ ID NO: 3142733 - RNA, 19 nt, Artificial Sequence
  Description of Artificial Sequence: Synthetic oligonucleotide
uugaacaaauaugcacaca

SEQ ID NO: 3142734 - RNA, 19 nt, Artificial Sequence
  Description of Artificial Sequence: Synthetic oligonucleotide
acaauaacuuaaguauuaa

SEQ ID NO: 3142735 - RNA, 19 nt, Artificial Sequence
  Description of Artificial Sequence: Synthetic oligonucleotide
cuugaaaaucagaauacau

SEQ ID NO: 3142736 - RNA, 19 nt, Artificial Sequence
  Description of Artificial Sequence: Synthetic oligonucleotide
auguacgguuaauuuaaaa

SEQ ID NO: 3142737 - RNA, 19 nt, Artificial Sequence
  Description of Artificial Sequence: Synthetic oligonucleotide
cuaaguucaaauguuauuu

SEQ ID NO: 3142738 - RNA, 19 nt, Artificial Sequence
  Description of Artificial Sequence: Synthetic oligonucleotide
augaaauaacuugacuaaa

SEQ ID NO: 3142739 - RNA, 19 nt, Artificial Sequence
  Description of Artificial Sequence: Synthetic oligonucleotide
gaacauguacgguuaauuu

SEQ ID NO: 3142740 - RNA, 19 nt, Artificial Sequence
  Description of Artificial Sequence: Synthetic oligonucleotide
uaacagaaaagagcacaau

SEQ ID NO: 3142741 - RNA, 19 nt, Artificial Sequence
  Description of Artificial Sequence: Synthetic oligonucleotide
auagaacauguacgguuaa

SEQ ID NO: 3142742 - RNA, 19 nt, Artificial Sequence
  Description of Artificial Sequence: Synthetic oligonucleotide
acuaaaguuugaacaaaua

SEQ ID NO: 3142743 - RNA, 19 nt, Artificial Sequence
  Description of Artificial Sequence: Synthetic oligonucleotide
guaauccuugaaaaucaga

SEQ ID NO: 3142744 - RNA, 19 nt, Artificial Sequence
  Description of Artificial Sequence: Synthetic oligonucleotide
auaugcacacauagaacau

SEQ ID NO: 3142745 - RNA, 19 nt, Artificial Sequence
  Description of Artificial Sequence: Synthetic oligonucleotide
ugcacacauagaacaugua

SEQ ID NO: 3142746 - RNA, 19 nt, Artificial Sequence
  Description of Artificial Sequence: Synthetic oligonucleotide
uagaacauguacgguuaau

SEQ ID NO: 3142747 - RNA, 19 nt, Artificial Sequence
  Description of Artificial Sequence: Synthetic oligonucleotide
gaacaaauaugcacacaua

SEQ ID NO: 3142748 - RNA, 19 nt, Artificial Sequence
  Description of Artificial Sequence: Synthetic oligonucleotide
gacuaaaguuugaacaaau

SEQ ID NO: 3142749 - RNA, 19 nt, Artificial Sequence
  Description of Artificial Sequence: Synthetic oligonucleotide
augcuaaguucaaauguua

SEQ ID NO: 3142750 - RNA, 19 nt, Artificial Sequence
  Description of Artificial Sequence: Synthetic oligonucleotide
caucuguaugaaauaacuu

SEQ ID NO: 3142751 - RNA, 19 nt, Artificial Sequence
  Description of Artificial Sequence: Synthetic oligonucleotide
cauguacgguuaauuuaaa

SEQ ID NO: 3142752 - RNA, 19 nt, Artificial Sequence
  Description of Artificial Sequence: Synthetic oligonucleotide
gcuaaguucaaauguuauu

SEQ ID NO: 3142753 - RNA, 19 nt, Artificial Sequence
  Description of Artificial Sequence: Synthetic oligonucleotide
cacauagaacauguacggu

SEQ ID NO: 3142754 - RNA, 19 nt, Artificial Sequence
  Description of Artificial Sequence: Synthetic oligonucleotide
gcacaauaacuuaaguauu

SEQ ID NO: 3142755 - RNA, 19 nt, Artificial Sequence
  Description of Artificial Sequence: Synthetic oligonucleotide
uauuaauugguuuugagac

SEQ ID NO: 3142756 - RNA, 19 nt, Artificial Sequence
  Description of Artificial Sequence: Synthetic oligonucleotide
aaaguuauuaauugguuuu

SEQ ID NO: 3142757 - RNA, 19 nt, Artificial Sequence
  Description of Artificial Sequence: Synthetic oligonucleotide
uuauuaauugguuuugaga

SEQ ID NO: 3142758 - RNA, 19 nt, Artificial Sequence
  Description of Artificial Sequence: Synthetic oligonucleotide
uuaauugguuuugagacag

SEQ ID NO: 3142759 - RNA, 19 nt, Artificial Sequence
  Description of Artificial Sequence: Synthetic oligonucleotide
aauugguuuugagacaggg

SEQ ID NO: 3142760 - RNA, 19 nt, Artificial Sequence
  Description of Artificial Sequence: Synthetic oligonucleotide
uagccucaaacucacagag

SEQ ID NO: 3142761 - RNA, 19 nt, Artificial Sequence
  Description of Artificial Sequence: Synthetic oligonucleotide
agauccaccugcuugucac

SEQ ID NO: 3142762 - RNA, 19 nt, Artificial Sequence
  Description of Artificial Sequence: Synthetic oligonucleotide
guuauuaauugguuuugag

SEQ ID NO: 3142763 - RNA, 19 nt, Artificial Sequence
  Description of Artificial Sequence: Synthetic oligonucleotide
uugucacacacacacacac

SEQ ID NO: 3142764 - RNA, 19 nt, Artificial Sequence
  Description of Artificial Sequence: Synthetic oligonucleotide
  modified_base (5)..(5): a, c, u, g, unknown or other
aauunuuuguugaaagaaa

SEQ ID NO: 3142765 - RNA, 19 nt, Artificial Sequence
  Description of Artificial Sequence: Synthetic oligonucleotide
accugcuugucacacacac

SEQ ID NO: 3142766 - RNA, 19 nt, Artificial Sequence
  Description of Artificial Sequence: Synthetic oligonucleotide
cugcuugucacacacacac

SEQ ID NO: 3142767 - RNA, 19 nt, Artificial Sequence
  Description of Artificial Sequence: Synthetic oligonucleotide
cacacacacacacacacgc

SEQ ID NO: 3142768 - RNA, 19 nt, Artificial Sequence
  Description of Artificial Sequence: Synthetic oligonucleotide
aaguuauuaauugguuuug

SEQ ID NO: 3142769 - RNA, 19 nt, Artificial Sequence
  Description of Artificial Sequence: Synthetic oligonucleotide
  modified_base (4)..(4): a, c, u, g, unknown or other
auunuuuguugaaagaaaa

SEQ ID NO: 3142770 - RNA, 19 nt, Artificial Sequence
  Description of Artificial Sequence: Synthetic oligonucleotide
agcauauccuggcacucgc

SEQ ID NO: 3142771 - RNA, 19 nt, Artificial Sequence
  Description of Artificial Sequence: Synthetic oligonucleotide
cacacacacacacacacac

SEQ ID NO: 3142772 - RNA, 19 nt, Artificial Sequence
  Description of Artificial Sequence: Synthetic oligonucleotide
gucacacacacacacacac

SEQ ID NO: 3142773 - RNA, 19 nt, Artificial Sequence
  Description of Artificial Sequence: Synthetic oligonucleotide
uaauugguuuugagacagg

SEQ ID NO: 3142774 - RNA, 19 nt, Artificial Sequence
  Description of Artificial Sequence: Synthetic oligonucleotide
uggagcauauccuggcacu

SEQ ID NO: 3142775 - RNA, 19 nt, Artificial Sequence
  Description of Artificial Sequence: Synthetic oligonucleotide
ugucacacacacacacaca

SEQ ID NO: 3142776 - RNA, 19 nt, Artificial Sequence
  Description of Artificial Sequence: Synthetic oligonucleotide
aguuauuaauugguuuuga

SEQ ID NO: 3142777 - RNA, 19 nt, Artificial Sequence
  Description of Artificial Sequence: Synthetic oligonucleotide
gcuugucacacacacacac

SEQ ID NO: 3142778 - RNA, 19 nt, Artificial Sequence
  Description of Artificial Sequence: Synthetic oligonucleotide
ucacacacacacacacaca

SEQ ID NO: 3142779 - RNA, 19 nt, Artificial Sequence
  Description of Artificial Sequence: Synthetic oligonucleotide
ugcuugucacacacacaca

SEQ ID NO: 3142780 - RNA, 19 nt, Artificial Sequence
  Description of Artificial Sequence: Synthetic oligonucleotide
auccaccugcuugucacac

SEQ ID NO: 3142781 - RNA, 19 nt, Artificial Sequence
  Description of Artificial Sequence: Synthetic oligonucleotide
cacacacacacacgcauca

SEQ ID NO: 3142782 - RNA, 19 nt, Artificial Sequence
  Description of Artificial Sequence: Synthetic oligonucleotide
acacacacacacacgcauc

SEQ ID NO: 3142783 - RNA, 19 nt, Artificial Sequence
  Description of Artificial Sequence: Synthetic oligonucleotide
cuugucacacacacacaca

SEQ ID NO: 3142784 - RNA, 19 nt, Artificial Sequence
  Description of Artificial Sequence: Synthetic oligonucleotide
acacacacacacacacacg

SEQ ID NO: 3142785 - RNA, 19 nt, Artificial Sequence
  Description of Artificial Sequence: Synthetic oligonucleotide
acacacacacacgcaucac

SEQ ID NO: 3142786 - RNA, 19 nt, Artificial Sequence
  Description of Artificial Sequence: Synthetic oligonucleotide
gagauccaccugcuuguca

SEQ ID NO: 3142787 - RNA, 19 nt, Artificial Sequence
  Description of Artificial Sequence: Synthetic oligonucleotide
uccaccugcuugucacaca

SEQ ID NO: 3142788 - RNA, 19 nt, Artificial Sequence
  Description of Artificial Sequence: Synthetic oligonucleotide
gauccaccugcuugucaca

SEQ ID NO: 3142789 - RNA, 19 nt, Artificial Sequence
  Description of Artificial Sequence: Synthetic oligonucleotide
ccaccugcuugucacacac

SEQ ID NO: 3142790 - RNA, 19 nt, Artificial Sequence
  Description of Artificial Sequence: Synthetic oligonucleotide
acacacacacacacacaca

SEQ ID NO: 3142791 - RNA, 19 nt, Artificial Sequence
  Description of Artificial Sequence: Synthetic oligonucleotide
acacacacacacacacgca

SEQ ID NO: 3142792 - RNA, 19 nt, Artificial Sequence
  Description of Artificial Sequence: Synthetic oligonucleotide
cacacacacacacacgcau

SEQ ID NO: 3142793 - RNA, 19 nt, Artificial Sequence
  Description of Artificial Sequence: Synthetic oligonucleotide
ggagcauauccuggcacuc

SEQ ID NO: 3142794 - RNA, 19 nt, Artificial Sequence
  Description of Artificial Sequence: Synthetic oligonucleotide
caccugcuugucacacaca

SEQ ID NO: 3142795 - RNA, 19 nt, Artificial Sequence
  Description of Artificial Sequence: Synthetic oligonucleotide
ccugcuugucacacacaca

SEQ ID NO: 3142796 - RNA, 19 nt, Artificial Sequence
  Description of Artificial Sequence: Synthetic oligonucleotide
aggaaauucauuuucuuuc

SEQ ID NO: 3142797 - RNA, 19 nt, Artificial Sequence
  Description of Artificial Sequence: Synthetic oligonucleotide
aucaguucacucuucagcc

SEQ ID NO: 3142798 - RNA, 19 nt, Artificial Sequence
  Description of Artificial Sequence: Synthetic oligonucleotide
gaaggcuuggcaaacagag

SEQ ID NO: 3142799 - RNA, 19 nt, Artificial Sequence
  Description of Artificial Sequence: Synthetic oligonucleotide
acagagaagagccuggcug

SEQ ID NO: 3142800 - RNA, 19 nt, Artificial Sequence
  Description of Artificial Sequence: Synthetic oligonucleotide
ucuucagccucuccaaacc

SEQ ID NO: 3142801 - RNA, 19 nt, Artificial Sequence
  Description of Artificial Sequence: Synthetic oligonucleotide
agcugggucaaugugcucc

SEQ ID NO: 3142802 - RNA, 19 nt, Artificial Sequence
  Description of Artificial Sequence: Synthetic oligonucleotide
aggcuuggcaaacagagcu

SEQ ID NO: 3142803 - RNA, 19 nt, Artificial Sequence
  Description of Artificial Sequence: Synthetic oligonucleotide
agccucuccaaacccagcc

SEQ ID NO: 3142804 - RNA, 19 nt, Artificial Sequence
  Description of Artificial Sequence: Synthetic oligonucleotide
aaacccagccgacuccaac

SEQ ID NO: 3142805 - RNA, 19 nt, Artificial Sequence
  Description of Artificial Sequence: Synthetic oligonucleotide
uugaaggcuuggcaaacag

SEQ ID NO: 3142806 - RNA, 19 nt, Artificial Sequence
  Description of Artificial Sequence: Synthetic oligonucleotide
ucaaugugcuccuuugcca

SEQ ID NO: 3142807 - RNA, 19 nt, Artificial Sequence
  Description of Artificial Sequence: Synthetic oligonucleotide
aaugugcuccuuugccacg

SEQ ID NO: 3142808 - RNA, 19 nt, Artificial Sequence
  Description of Artificial Sequence: Synthetic oligonucleotide
uccaagggccaucaguuca

SEQ ID NO: 3142809 - RNA, 19 nt, Artificial Sequence
  Description of Artificial Sequence: Synthetic oligonucleotide
agaagagccuggcugcacg

SEQ ID NO: 3142810 - RNA, 19 nt, Artificial Sequence
  Description of Artificial Sequence: Synthetic oligonucleotide
uuugccacggccccugaca

SEQ ID NO: 3142811 - RNA, 19 nt, Artificial Sequence
  Description of Artificial Sequence: Synthetic oligonucleotide
ucagccucuccaaacccag

SEQ ID NO: 3142812 - RNA, 19 nt, Artificial Sequence
  Description of Artificial Sequence: Synthetic oligonucleotide
aacccagccgacuccaacu

SEQ ID NO: 3142813 - RNA, 19 nt, Artificial Sequence
  Description of Artificial Sequence: Synthetic oligonucleotide
aaggcuuggcaaacagagc

SEQ ID NO: 3142814 - RNA, 19 nt, Artificial Sequence
  Description of Artificial Sequence: Synthetic oligonucleotide
ugcuccuuugccacggccc

SEQ ID NO: 3142815 - RNA, 19 nt, Artificial Sequence
  Description of Artificial Sequence: Synthetic oligonucleotide
agggccaucaguucacucu

SEQ ID NO: 3142816 - RNA, 19 nt, Artificial Sequence
  Description of Artificial Sequence: Synthetic oligonucleotide
ugaaggcuuggcaaacaga

SEQ ID NO: 3142817 - RNA, 19 nt, Artificial Sequence
  Description of Artificial Sequence: Synthetic oligonucleotide
cugacagagaagagccugg

SEQ ID NO: 3142818 - RNA, 19 nt, Artificial Sequence
  Description of Artificial Sequence: Synthetic oligonucleotide
caaugugcuccuuugccac

SEQ ID NO: 3142819 - RNA, 19 nt, Artificial Sequence
  Description of Artificial Sequence: Synthetic oligonucleotide
uucagccucuccaaaccca

SEQ ID NO: 3142820 - RNA, 19 nt, Artificial Sequence
  Description of Artificial Sequence: Synthetic oligonucleotide
aagggccaucaguucacuc

SEQ ID NO: 3142821 - RNA, 19 nt, Artificial Sequence
  Description of Artificial Sequence: Synthetic oligonucleotide
acagagcugggucaaugug

SEQ ID NO: 3142822 - RNA, 19 nt, Artificial Sequence
  Description of Artificial Sequence: Synthetic oligonucleotide
uccaaacccagccgacucc

SEQ ID NO: 3142823 - RNA, 19 nt, Artificial Sequence
  Description of Artificial Sequence: Synthetic oligonucleotide
uuuugaaggcuuggcaaac

SEQ ID NO: 3142824 - RNA, 19 nt, Artificial Sequence
  Description of Artificial Sequence: Synthetic oligonucleotide
caccuucaguccaagggcc

SEQ ID NO: 3142825 - RNA, 19 nt, Artificial Sequence
  Description of Artificial Sequence: Synthetic oligonucleotide
uugccacggccccugacag

SEQ ID NO: 3142826 - RNA, 19 nt, Artificial Sequence
  Description of Artificial Sequence: Synthetic oligonucleotide
ugcacgcuccugcagggug

SEQ ID NO: 3142827 - RNA, 19 nt, Artificial Sequence
  Description of Artificial Sequence: Synthetic oligonucleotide
cuucagccucuccaaaccc

SEQ ID NO: 3142828 - RNA, 19 nt, Artificial Sequence
  Description of Artificial Sequence: Synthetic oligonucleotide
uucccuuuugaaggcuugg

SEQ ID NO: 3142829 - RNA, 19 nt, Artificial Sequence
  Description of Artificial Sequence: Synthetic oligonucleotide
ucaguucacucuucagccu

SEQ ID NO: 3142830 - RNA, 19 nt, Artificial Sequence
  Description of Artificial Sequence: Synthetic oligonucleotide
cuuggcaaacagagcuggg

SEQ ID NO: 3142831 - RNA, 19 nt, Artificial Sequence
  Description of Artificial Sequence: Synthetic oligonucleotide
uucuuucuucccuuuugaa

SEQ ID NO: 3142832 - RNA, 19 nt, Artificial Sequence
  Description of Artificial Sequence: Synthetic oligonucleotide
agagccuggcugcacgcuc

SEQ ID NO: 3142833 - RNA, 19 nt, Artificial Sequence
  Description of Artificial Sequence: Synthetic oligonucleotide
cuuuugaaggcuuggcaaa

SEQ ID NO: 3142834 - RNA, 19 nt, Artificial Sequence
  Description of Artificial Sequence: Synthetic oligonucleotide
uuugaaggcuuggcaaaca

SEQ ID NO: 3142835 - RNA, 19 nt, Artificial Sequence
  Description of Artificial Sequence: Synthetic oligonucleotide
gaagagccuggcugcacgc

SEQ ID NO: 3142836 - RNA, 19 nt, Artificial Sequence
  Description of Artificial Sequence: Synthetic oligonucleotide
uucacucuucagccucucc

SEQ ID NO: 3142837 - RNA, 19 nt, Artificial Sequence
  Description of Artificial Sequence: Synthetic oligonucleotide
uucaguccaagggccauca

SEQ ID NO: 3142838 - RNA, 19 nt, Artificial Sequence
  Description of Artificial Sequence: Synthetic oligonucleotide
gcaccuucaguccaagggc

SEQ ID NO: 3142839 - RNA, 19 nt, Artificial Sequence
  Description of Artificial Sequence: Synthetic oligonucleotide
caguucacucuucagccuc

SEQ ID NO: 3142840 - RNA, 19 nt, Artificial Sequence
  Description of Artificial Sequence: Synthetic oligonucleotide
ugacagagaagagccuggc

SEQ ID NO: 3142841 - RNA, 19 nt, Artificial Sequence
  Description of Artificial Sequence: Synthetic oligonucleotide
acccagccgacuccaacuc

SEQ ID NO: 3142842 - RNA, 19 nt, Artificial Sequence
  Description of Artificial Sequence: Synthetic oligonucleotide
ucuucccuuuugaaggcuu

SEQ ID NO: 3142843 - RNA, 19 nt, Artificial Sequence
  Description of Artificial Sequence: Synthetic oligonucleotide
ucccuuuugaaggcuuggc

SEQ ID NO: 3142844 - RNA, 19 nt, Artificial Sequence
  Description of Artificial Sequence: Synthetic oligonucleotide
agagcugggucaaugugcu

SEQ ID NO: 3142845 - RNA, 19 nt, Artificial Sequence
  Description of Artificial Sequence: Synthetic oligonucleotide
augugcuccuuugccacgg

SEQ ID NO: 3142846 - RNA, 19 nt, Artificial Sequence
  Description of Artificial Sequence: Synthetic oligonucleotide
ccgacuccaacucugcugc

SEQ ID NO: 3142847 - RNA, 19 nt, Artificial Sequence
  Description of Artificial Sequence: Synthetic oligonucleotide
cuccaaacccagccgacuc

SEQ ID NO: 3142848 - RNA, 19 nt, Artificial Sequence
  Description of Artificial Sequence: Synthetic oligonucleotide
cgcaccuucaguccaaggg

SEQ ID NO: 3142849 - RNA, 19 nt, Artificial Sequence
  Description of Artificial Sequence: Synthetic oligonucleotide
ggaaauucauuuucuuucu

SEQ ID NO: 3142850 - RNA, 19 nt, Artificial Sequence
  Description of Artificial Sequence: Synthetic oligonucleotide
ggcugcacgcuccugcagg

SEQ ID NO: 3142851 - RNA, 19 nt, Artificial Sequence
  Description of Artificial Sequence: Synthetic oligonucleotide
ugggucaaugugcuccuuu

SEQ ID NO: 3142852 - RNA, 19 nt, Artificial Sequence
  Description of Artificial Sequence: Synthetic oligonucleotide
ucuccaaacccagccgacu

SEQ ID NO: 3142853 - RNA, 19 nt, Artificial Sequence
  Description of Artificial Sequence: Synthetic oligonucleotide
gggucaaugugcuccuuug

SEQ ID NO: 3142854 - RNA, 19 nt, Artificial Sequence
  Description of Artificial Sequence: Synthetic oligonucleotide
ggucaaugugcuccuuugc

SEQ ID NO: 3142855 - RNA, 19 nt, Artificial Sequence
  Description of Artificial Sequence: Synthetic oligonucleotide
ucaguccaagggccaucag

SEQ ID NO: 3142856 - RNA, 19 nt, Artificial Sequence
  Description of Artificial Sequence: Synthetic oligonucleotide
ggcaaacagagcuggguca

SEQ ID NO: 3142857 - RNA, 19 nt, Artificial Sequence
  Description of Artificial Sequence: Synthetic oligonucleotide
ugugcuccuuugccacggc

SEQ ID NO: 3142858 - RNA, 19 nt, Artificial Sequence
  Description of Artificial Sequence: Synthetic oligonucleotide
uccuuugccacggccccug

SEQ ID NO: 3142859 - RNA, 19 nt, Artificial Sequence
  Description of Artificial Sequence: Synthetic oligonucleotide
ccuuuugaaggcuuggcaa

SEQ ID NO: 3142860 - RNA, 19 nt, Artificial Sequence
  Description of Artificial Sequence: Synthetic oligonucleotide
uucuucccuuuugaaggcu

SEQ ID NO: 3142861 - RNA, 19 nt, Artificial Sequence
  Description of Artificial Sequence: Synthetic oligonucleotide
acucuucagccucuccaaa

SEQ ID NO: 3142862 - RNA, 19 nt, Artificial Sequence
  Description of Artificial Sequence: Synthetic oligonucleotide
gccgacuccaacucugcug

SEQ ID NO: 3142863 - RNA, 19 nt, Artificial Sequence
  Description of Artificial Sequence: Synthetic oligonucleotide
uggcugcacgcuccugcag

SEQ ID NO: 3142864 - RNA, 19 nt, Artificial Sequence
  Description of Artificial Sequence: Synthetic oligonucleotide
cagccgacuccaacucugc

SEQ ID NO: 3142865 - RNA, 19 nt, Artificial Sequence
  Description of Artificial Sequence: Synthetic oligonucleotide
gccucuccaaacccagccg

SEQ ID NO: 3142866 - RNA, 19 nt, Artificial Sequence
  Description of Artificial Sequence: Synthetic oligonucleotide
gcugcacgcuccugcaggg

SEQ ID NO: 3142867 - RNA, 19 nt, Artificial Sequence
  Description of Artificial Sequence: Synthetic oligonucleotide
cacucuucagccucuccaa

SEQ ID NO: 3142868 - RNA, 19 nt, Artificial Sequence
  Description of Artificial Sequence: Synthetic oligonucleotide
agagaagagccuggcugca

SEQ ID NO: 3142869 - RNA, 19 nt, Artificial Sequence
  Description of Artificial Sequence: Synthetic oligonucleotide
gugcuccuuugccacggcc

SEQ ID NO: 3142870 - RNA, 19 nt, Artificial Sequence
  Description of Artificial Sequence: Synthetic oligonucleotide
gcuccuuugccacggcccc

SEQ ID NO: 3142871 - RNA, 19 nt, Artificial Sequence
  Description of Artificial Sequence: Synthetic oligonucleotide
aguucacucuucagccucu

SEQ ID NO: 3142872 - RNA, 19 nt, Artificial Sequence
  Description of Artificial Sequence: Synthetic oligonucleotide
ccaucaguucacucuucag

SEQ ID NO: 3142873 - RNA, 19 nt, Artificial Sequence
  Description of Artificial Sequence: Synthetic oligonucleotide
gccacggccccugacagag

SEQ ID NO: 3142874 - RNA, 19 nt, Artificial Sequence
  Description of Artificial Sequence: Synthetic oligonucleotide
agccgacuccaacucugcu

SEQ ID NO: 3142875 - RNA, 19 nt, Artificial Sequence
  Description of Artificial Sequence: Synthetic oligonucleotide
ccagccgacuccaacucug

SEQ ID NO: 3142876 - RNA, 19 nt, Artificial Sequence
  Description of Artificial Sequence: Synthetic oligonucleotide
guccaagggccaucaguuc

SEQ ID NO: 3142877 - RNA, 19 nt, Artificial Sequence
  Description of Artificial Sequence: Synthetic oligonucleotide
cagccucuccaaacccagc

SEQ ID NO: 3142878 - RNA, 19 nt, Artificial Sequence
  Description of Artificial Sequence: Synthetic oligonucleotide
gccccugacagagaagagc

SEQ ID NO: 3142879 - RNA, 19 nt, Artificial Sequence
  Description of Artificial Sequence: Synthetic oligonucleotide
cuuugccacggccccugac

SEQ ID NO: 3142880 - RNA, 19 nt, Artificial Sequence
  Description of Artificial Sequence: Synthetic oligonucleotide
cuucaguccaagggccauc

SEQ ID NO: 3142881 - RNA, 19 nt, Artificial Sequence
  Description of Artificial Sequence: Synthetic oligonucleotide
caguccaagggccaucagu

SEQ ID NO: 3142882 - RNA, 19 nt, Artificial Sequence
  Description of Artificial Sequence: Synthetic oligonucleotide
cacgcuccugcagggugcg

SEQ ID NO: 3142883 - RNA, 19 nt, Artificial Sequence
  Description of Artificial Sequence: Synthetic oligonucleotide
cuggcugcacgcuccugca

SEQ ID NO: 3142884 - RNA, 19 nt, Artificial Sequence
  Description of Artificial Sequence: Synthetic oligonucleotide
ggcuuggcaaacagagcug

SEQ ID NO: 3142885 - RNA, 19 nt, Artificial Sequence
  Description of Artificial Sequence: Synthetic oligonucleotide
cacggccccugacagagaa

SEQ ID NO: 3142886 - RNA, 19 nt, Artificial Sequence
  Description of Artificial Sequence: Synthetic oligonucleotide
ugccacggccccugacaga

SEQ ID NO: 3142887 - RNA, 19 nt, Artificial Sequence
  Description of Artificial Sequence: Synthetic oligonucleotide
cccuuuugaaggcuuggca

SEQ ID NO: 3142888 - RNA, 19 nt, Artificial Sequence
  Description of Artificial Sequence: Synthetic oligonucleotide
cauuuucuuucuucccuuu

SEQ ID NO: 3142889 - RNA, 19 nt, Artificial Sequence
  Description of Artificial Sequence: Synthetic oligonucleotide
gcuccugcagggugcgccc

SEQ ID NO: 3142890 - RNA, 19 nt, Artificial Sequence
  Description of Artificial Sequence: Synthetic oligonucleotide
gagcugggucaaugugcuc

SEQ ID NO: 3142891 - RNA, 19 nt, Artificial Sequence
  Description of Artificial Sequence: Synthetic oligonucleotide
guucacucuucagccucuc

SEQ ID NO: 3142892 - RNA, 19 nt, Artificial Sequence
  Description of Artificial Sequence: Synthetic oligonucleotide
gcacgcuccugcagggugc

SEQ ID NO: 3142893 - RNA, 19 nt, Artificial Sequence
  Description of Artificial Sequence: Synthetic oligonucleotide
caaacccagccgacuccaa

SEQ ID NO: 3142894 - RNA, 19 nt, Artificial Sequence
  Description of Artificial Sequence: Synthetic oligonucleotide
acggccccugacagagaag

SEQ ID NO: 3142895 - RNA, 19 nt, Artificial Sequence
  Description of Artificial Sequence: Synthetic oligonucleotide
acgcuccugcagggugcgc

SEQ ID NO: 3142896 - RNA, 19 nt, Artificial Sequence
  Description of Artificial Sequence: Synthetic oligonucleotide
ccgcaccuucaguccaagg

SEQ ID NO: 3142897 - RNA, 19 nt, Artificial Sequence
  Description of Artificial Sequence: Synthetic oligonucleotide
gcugggucaaugugcuccu

SEQ ID NO: 3142898 - RNA, 19 nt, Artificial Sequence
  Description of Artificial Sequence: Synthetic oligonucleotide
ccaaacccagccgacucca

SEQ ID NO: 3142899 - RNA, 19 nt, Artificial Sequence
  Description of Artificial Sequence: Synthetic oligonucleotide
ggccccugacagagaagag

SEQ ID NO: 3142900 - RNA, 19 nt, Artificial Sequence
  Description of Artificial Sequence: Synthetic oligonucleotide
cgcuccugcagggugcgcc

SEQ ID NO: 3142901 - RNA, 19 nt, Artificial Sequence
  Description of Artificial Sequence: Synthetic oligonucleotide
cggccccugacagagaaga

SEQ ID NO: 3142902 - RNA, 19 nt, Artificial Sequence
  Description of Artificial Sequence: Synthetic oligonucleotide
caagggccaucaguucacu

SEQ ID NO: 3142903 - RNA, 19 nt, Artificial Sequence
  Description of Artificial Sequence: Synthetic oligonucleotide
cccgcaccuucaguccaag

SEQ ID NO: 3142904 - RNA, 19 nt, Artificial Sequence
  Description of Artificial Sequence: Synthetic oligonucleotide
cuccuuugccacggccccu

SEQ ID NO: 3142905 - RNA, 19 nt, Artificial Sequence
  Description of Artificial Sequence: Synthetic oligonucleotide
cccugacagagaagagccu

SEQ ID NO: 3142906 - RNA, 19 nt, Artificial Sequence
  Description of Artificial Sequence: Synthetic oligonucleotide
cugcacgcuccugcagggu

SEQ ID NO: 3142907 - RNA, 19 nt, Artificial Sequence
  Description of Artificial Sequence: Synthetic oligonucleotide
ccuucaguccaagggccau

SEQ ID NO: 3142908 - RNA, 19 nt, Artificial Sequence
  Description of Artificial Sequence: Synthetic oligonucleotide
cccagccgacuccaacucu

SEQ ID NO: 3142909 - RNA, 19 nt, Artificial Sequence
  Description of Artificial Sequence: Synthetic oligonucleotide
cugggucaaugugcuccuu

SEQ ID NO: 3142910 - RNA, 19 nt, Artificial Sequence
  Description of Artificial Sequence: Synthetic oligonucleotide
ccacggccccugacagaga

SEQ ID NO: 3142911 - RNA, 19 nt, Artificial Sequence
  Description of Artificial Sequence: Synthetic oligonucleotide
gaagaugaagugcugugcg

SEQ ID NO: 3142912 - RNA, 19 nt, Artificial Sequence
  Description of Artificial Sequence: Synthetic oligonucleotide
aacugcuugccgcagcgcg

SEQ ID NO: 3142913 - RNA, 19 nt, Artificial Sequence
  Description of Artificial Sequence: Synthetic oligonucleotide
ugaacugcuugccgcagcg

SEQ ID NO: 3142914 - RNA, 19 nt, Artificial Sequence
  Description of Artificial Sequence: Synthetic oligonucleotide
acgagugcgacuugacgcc

SEQ ID NO: 3142915 - RNA, 19 nt, Artificial Sequence
  Description of Artificial Sequence: Synthetic oligonucleotide
ugcagcguggacuucugcg

SEQ ID NO: 3142916 - RNA, 19 nt, Artificial Sequence
  Description of Artificial Sequence: Synthetic oligonucleotide
cacgagugcgacuugacgc

SEQ ID NO: 3142917 - RNA, 19 nt, Artificial Sequence
  Description of Artificial Sequence: Synthetic oligonucleotide
agaugaagugcugugcgcg

SEQ ID NO: 3142918 - RNA, 19 nt, Artificial Sequence
  Description of Artificial Sequence: Synthetic oligonucleotide
augaagaugaagugcugug

SEQ ID NO: 3142919 - RNA, 19 nt, Artificial Sequence
  Description of Artificial Sequence: Synthetic oligonucleotide
ugaagaugaagugcugugc

SEQ ID NO: 3142920 - RNA, 19 nt, Artificial Sequence
  Description of Artificial Sequence: Synthetic oligonucleotide
aagcacuugccgcagcgca

SEQ ID NO: 3142921 - RNA, 19 nt, Artificial Sequence
  Description of Artificial Sequence: Synthetic oligonucleotide
uggacuucugcgugaagca

SEQ ID NO: 3142922 - RNA, 19 nt, Artificial Sequence
  Description of Artificial Sequence: Synthetic oligonucleotide
cugugguugaacugcuugc

SEQ ID NO: 3142923 - RNA, 19 nt, Artificial Sequence
  Description of Artificial Sequence: Synthetic oligonucleotide
uggcgguugagguugcugc

SEQ ID NO: 3142924 - RNA, 19 nt, Artificial Sequence
  Description of Artificial Sequence: Synthetic oligonucleotide
uugagguggucgugcagcg

SEQ ID NO: 3142925 - RNA, 19 nt, Artificial Sequence
  Description of Artificial Sequence: Synthetic oligonucleotide
gaugaagugcugugcgcgc

SEQ ID NO: 3142926 - RNA, 19 nt, Artificial Sequence
  Description of Artificial Sequence: Synthetic oligonucleotide
uugagguugcugcuguggu

SEQ ID NO: 3142927 - RNA, 19 nt, Artificial Sequence
  Description of Artificial Sequence: Synthetic oligonucleotide
ugcacguucauguggcggu

SEQ ID NO: 3142928 - RNA, 19 nt, Artificial Sequence
  Description of Artificial Sequence: Synthetic oligonucleotide
gagguggucgugcagcgug

SEQ ID NO: 3142929 - RNA, 19 nt, Artificial Sequence
  Description of Artificial Sequence: Synthetic oligonucleotide
cauguggcgguugagguug

SEQ ID NO: 3142930 - RNA, 19 nt, Artificial Sequence
  Description of Artificial Sequence: Synthetic oligonucleotide
guggacuucugcgugaagc

SEQ ID NO: 3142931 - RNA, 19 nt, Artificial Sequence
  Description of Artificial Sequence: Synthetic oligonucleotide
guugagguugcugcugugg

SEQ ID NO: 3142932 - RNA, 19 nt, Artificial Sequence
  Description of Artificial Sequence: Synthetic oligonucleotide
ugcgacuugacgccgcggu

SEQ ID NO: 3142933 - RNA, 19 nt, Artificial Sequence
  Description of Artificial Sequence: Synthetic oligonucleotide
cacaugaagaugaagugcu

SEQ ID NO: 3142934 - RNA, 19 nt, Artificial Sequence
  Description of Artificial Sequence: Synthetic oligonucleotide
ugcugugcgcgcaugugga

SEQ ID NO: 3142935 - RNA, 19 nt, Artificial Sequence
  Description of Artificial Sequence: Synthetic oligonucleotide
uugaacugcuugccgcagc

SEQ ID NO: 3142936 - RNA, 19 nt, Artificial Sequence
  Description of Artificial Sequence: Synthetic oligonucleotide
cuugacgccgcggugcacg

SEQ ID NO: 3142937 - RNA, 19 nt, Artificial Sequence
  Description of Artificial Sequence: Synthetic oligonucleotide
ugugcgcgcauguggaaga

SEQ ID NO: 3142938 - RNA, 19 nt, Artificial Sequence
  Description of Artificial Sequence: Synthetic oligonucleotide
ugcagguugagguggucgu

SEQ ID NO: 3142939 - RNA, 19 nt, Artificial Sequence
  Description of Artificial Sequence: Synthetic oligonucleotide
gugcugugcgcgcaugugg

SEQ ID NO: 3142940 - RNA, 19 nt, Artificial Sequence
  Description of Artificial Sequence: Synthetic oligonucleotide
agugcgacuugacgccgcg

SEQ ID NO: 3142941 - RNA, 19 nt, Artificial Sequence
  Description of Artificial Sequence: Synthetic oligonucleotide
aagugcugugcgcgcaugu

SEQ ID NO: 3142942 - RNA, 19 nt, Artificial Sequence
  Description of Artificial Sequence: Synthetic oligonucleotide
uggucgugcagcguggacu

SEQ ID NO: 3142943 - RNA, 19 nt, Artificial Sequence
  Description of Artificial Sequence: Synthetic oligonucleotide
gcugugguugaacugcuug

SEQ ID NO: 3142944 - RNA, 19 nt, Artificial Sequence
  Description of Artificial Sequence: Synthetic oligonucleotide
gcacaugaagaugaagugc

SEQ ID NO: 3142945 - RNA, 19 nt, Artificial Sequence
  Description of Artificial Sequence: Synthetic oligonucleotide
cagguugagguggucgugc

SEQ ID NO: 3142946 - RNA, 19 nt, Artificial Sequence
  Description of Artificial Sequence: Synthetic oligonucleotide
agcgcgggcacaugaagau

SEQ ID NO: 3142947 - RNA, 19 nt, Artificial Sequence
  Description of Artificial Sequence: Synthetic oligonucleotide
gugcacguucauguggcgg

SEQ ID NO: 3142948 - RNA, 19 nt, Artificial Sequence
  Description of Artificial Sequence: Synthetic oligonucleotide
auguggaagaccagcuucu

SEQ ID NO: 3142949 - RNA, 19 nt, Artificial Sequence
  Description of Artificial Sequence: Synthetic oligonucleotide
ugaagugcugugcgcgcau

SEQ ID NO: 3142950 - RNA, 19 nt, Artificial Sequence
  Description of Artificial Sequence: Synthetic oligonucleotide
gacgccgcggugcacguuc

SEQ ID NO: 3142951 - RNA, 19 nt, Artificial Sequence
  Description of Artificial Sequence: Synthetic oligonucleotide
ugccgcagcgcacgagugc

SEQ ID NO: 3142952 - RNA, 19 nt, Artificial Sequence
  Description of Artificial Sequence: Synthetic oligonucleotide
gcacgagugcgacuugacg

SEQ ID NO: 3142953 - RNA, 19 nt, Artificial Sequence
  Description of Artificial Sequence: Synthetic oligonucleotide
acguucauguggcgguuga

SEQ ID NO: 3142954 - RNA, 19 nt, Artificial Sequence
  Description of Artificial Sequence: Synthetic oligonucleotide
uugccgcagcgcacgagug

SEQ ID NO: 3142955 - RNA, 19 nt, Artificial Sequence
  Description of Artificial Sequence: Synthetic oligonucleotide
agcacuugccgcagcgcac

SEQ ID NO: 3142956 - RNA, 19 nt, Artificial Sequence
  Description of Artificial Sequence: Synthetic oligonucleotide
acugcuugccgcagcgcgg

SEQ ID NO: 3142957 - RNA, 19 nt, Artificial Sequence
  Description of Artificial Sequence: Synthetic oligonucleotide
ugagguugcugcugugguu

SEQ ID NO: 3142958 - RNA, 19 nt, Artificial Sequence
  Description of Artificial Sequence: Synthetic oligonucleotide
ucgugcagcguggacuucu

SEQ ID NO: 3142959 - RNA, 19 nt, Artificial Sequence
  Description of Artificial Sequence: Synthetic oligonucleotide
gcggugcacguucaugugg

SEQ ID NO: 3142960 - RNA, 19 nt, Artificial Sequence
  Description of Artificial Sequence: Synthetic oligonucleotide
acaugaagaugaagugcug

SEQ ID NO: 3142961 - RNA, 19 nt, Artificial Sequence
  Description of Artificial Sequence: Synthetic oligonucleotide
agguugagguggucgugca

SEQ ID NO: 3142962 - RNA, 19 nt, Artificial Sequence
  Description of Artificial Sequence: Synthetic oligonucleotide
agugcugugcgcgcaugug

SEQ ID NO: 3142963 - RNA, 19 nt, Artificial Sequence
  Description of Artificial Sequence: Synthetic oligonucleotide
cugugcgcgcauguggaag

SEQ ID NO: 3142964 - RNA, 19 nt, Artificial Sequence
  Description of Artificial Sequence: Synthetic oligonucleotide
uguggaagaccagcuucuc

SEQ ID NO: 3142965 - RNA, 19 nt, Artificial Sequence
  Description of Artificial Sequence: Synthetic oligonucleotide
gacuugacgccgcggugca

SEQ ID NO: 3142966 - RNA, 19 nt, Artificial Sequence
  Description of Artificial Sequence: Synthetic oligonucleotide
cugcuugccgcagcgcggg

SEQ ID NO: 3142967 - RNA, 19 nt, Artificial Sequence
  Description of Artificial Sequence: Synthetic oligonucleotide
caugaagaugaagugcugu

SEQ ID NO: 3142968 - RNA, 19 nt, Artificial Sequence
  Description of Artificial Sequence: Synthetic oligonucleotide
augaagugcugugcgcgca

SEQ ID NO: 3142969 - RNA, 19 nt, Artificial Sequence
  Description of Artificial Sequence: Synthetic oligonucleotide
gacuucugcgugaagcacu

SEQ ID NO: 3142970 - RNA, 19 nt, Artificial Sequence
  Description of Artificial Sequence: Synthetic oligonucleotide
gaagugcugugcgcgcaug

SEQ ID NO: 3142971 - RNA, 19 nt, Artificial Sequence
  Description of Artificial Sequence: Synthetic oligonucleotide
ggugcacguucauguggcg

SEQ ID NO: 3142972 - RNA, 19 nt, Artificial Sequence
  Description of Artificial Sequence: Synthetic oligonucleotide
agugcagguugaggugguc

SEQ ID NO: 3142973 - RNA, 19 nt, Artificial Sequence
  Description of Artificial Sequence: Synthetic oligonucleotide
gaacugcuugccgcagcgc

SEQ ID NO: 3142974 - RNA, 19 nt, Artificial Sequence
  Description of Artificial Sequence: Synthetic oligonucleotide
ugcgcgcauguggaagacc

SEQ ID NO: 3142975 - RNA, 19 nt, Artificial Sequence
  Description of Artificial Sequence: Synthetic oligonucleotide
cagcgcgggcacaugaaga

SEQ ID NO: 3142976 - RNA, 19 nt, Artificial Sequence
  Description of Artificial Sequence: Synthetic oligonucleotide
agguggucgugcagcgugg

SEQ ID NO: 3142977 - RNA, 19 nt, Artificial Sequence
  Description of Artificial Sequence: Synthetic oligonucleotide
gcagcgcgggcacaugaag

SEQ ID NO: 3142978 - RNA, 19 nt, Artificial Sequence
  Description of Artificial Sequence: Synthetic oligonucleotide
gagugcgacuugacgccgc

SEQ ID NO: 3142979 - RNA, 19 nt, Artificial Sequence
  Description of Artificial Sequence: Synthetic oligonucleotide
gcacuugccgcagcgcacg

SEQ ID NO: 3142980 - RNA, 19 nt, Artificial Sequence
  Description of Artificial Sequence: Synthetic oligonucleotide
gccgcagcgcacgagugcg

SEQ ID NO: 3142981 - RNA, 19 nt, Artificial Sequence
  Description of Artificial Sequence: Synthetic oligonucleotide
uugacgccgcggugcacgu

SEQ ID NO: 3142982 - RNA, 19 nt, Artificial Sequence
  Description of Artificial Sequence: Synthetic oligonucleotide
guggcgguugagguugcug

SEQ ID NO: 3142983 - RNA, 19 nt, Artificial Sequence
  Description of Artificial Sequence: Synthetic oligonucleotide
ugcugugguugaacugcuu

SEQ ID NO: 3142984 - RNA, 19 nt, Artificial Sequence
  Description of Artificial Sequence: Synthetic oligonucleotide
cuugccgcagcgcacgagu

SEQ ID NO: 3142985 - RNA, 19 nt, Artificial Sequence
  Description of Artificial Sequence: Synthetic oligonucleotide
gcgcauguggaagaccagc

SEQ ID NO: 3142986 - RNA, 19 nt, Artificial Sequence
  Description of Artificial Sequence: Synthetic oligonucleotide
cggugcacguucauguggc

SEQ ID NO: 3142987 - RNA, 19 nt, Artificial Sequence
  Description of Artificial Sequence: Synthetic oligonucleotide
acuugccgcagcgcacgag

SEQ ID NO: 3142988 - RNA, 19 nt, Artificial Sequence
  Description of Artificial Sequence: Synthetic oligonucleotide
gguugagguugcugcugug

SEQ ID NO: 3142989 - RNA, 19 nt, Artificial Sequence
  Description of Artificial Sequence: Synthetic oligonucleotide
cacguucauguggcgguug

SEQ ID NO: 3142990 - RNA, 19 nt, Artificial Sequence
  Description of Artificial Sequence: Synthetic oligonucleotide
auguggcgguugagguugc

SEQ ID NO: 3142991 - RNA, 19 nt, Artificial Sequence
  Description of Artificial Sequence: Synthetic oligonucleotide
acuugacgccgcggugcac

SEQ ID NO: 3142992 - RNA, 19 nt, Artificial Sequence
  Description of Artificial Sequence: Synthetic oligonucleotide
ggacuucugcgugaagcac

SEQ ID NO: 3142993 - RNA, 19 nt, Artificial Sequence
  Description of Artificial Sequence: Synthetic oligonucleotide
guggucgugcagcguggac

SEQ ID NO: 3142994 - RNA, 19 nt, Artificial Sequence
  Description of Artificial Sequence: Synthetic oligonucleotide
agcgcacgagugcgacuug

SEQ ID NO: 3142995 - RNA, 19 nt, Artificial Sequence
  Description of Artificial Sequence: Synthetic oligonucleotide
gcgcgcauguggaagacca

SEQ ID NO: 3142996 - RNA, 19 nt, Artificial Sequence
  Description of Artificial Sequence: Synthetic oligonucleotide
ugcuugccgcagcgcgggc

SEQ ID NO: 3142997 - RNA, 19 nt, Artificial Sequence
  Description of Artificial Sequence: Synthetic oligonucleotide
gugcgacuugacgccgcgg

SEQ ID NO: 3142998 - RNA, 19 nt, Artificial Sequence
  Description of Artificial Sequence: Synthetic oligonucleotide
gcagcguggacuucugcgu

SEQ ID NO: 3142999 - RNA, 19 nt, Artificial Sequence
  Description of Artificial Sequence: Synthetic oligonucleotide
gcgacuugacgccgcggug

SEQ ID NO: 3143000 - RNA, 19 nt, Artificial Sequence
  Description of Artificial Sequence: Synthetic oligonucleotide
cgcgggcacaugaagauga

SEQ ID NO: 3143001 - RNA, 19 nt, Artificial Sequence
  Description of Artificial Sequence: Synthetic oligonucleotide
cgacuugacgccgcggugc

SEQ ID NO: 3143002 - RNA, 19 nt, Artificial Sequence
  Description of Artificial Sequence: Synthetic oligonucleotide
uguggcgguugagguugcu

SEQ ID NO: 3143003 - RNA, 19 nt, Artificial Sequence
  Description of Artificial Sequence: Synthetic oligonucleotide
ugccgcagcgcgggcacau

SEQ ID NO: 3143004 - RNA, 19 nt, Artificial Sequence
  Description of Artificial Sequence: Synthetic oligonucleotide
gugcgcgcauguggaagac

SEQ ID NO: 3143005 - RNA, 19 nt, Artificial Sequence
  Description of Artificial Sequence: Synthetic oligonucleotide
ggucgugcagcguggacuu

SEQ ID NO: 3143006 - RNA, 19 nt, Artificial Sequence
  Description of Artificial Sequence: Synthetic oligonucleotide
gagugcagguugagguggu

SEQ ID NO: 3143007 - RNA, 19 nt, Artificial Sequence
  Description of Artificial Sequence: Synthetic oligonucleotide
gccgcggugcacguucaug

SEQ ID NO: 3143008 - RNA, 19 nt, Artificial Sequence
  Description of Artificial Sequence: Synthetic oligonucleotide
ggcgguugagguugcugcu

SEQ ID NO: 3143009 - RNA, 19 nt, Artificial Sequence
  Description of Artificial Sequence: Synthetic oligonucleotide
cgagugcgacuugacgccg

SEQ ID NO: 3143010 - RNA, 19 nt, Artificial Sequence
  Description of Artificial Sequence: Synthetic oligonucleotide
cgcacgagugcgacuugac

SEQ ID NO: 3143011 - RNA, 19 nt, Artificial Sequence
  Description of Artificial Sequence: Synthetic oligonucleotide
uugccgcagcgcgggcaca

SEQ ID NO: 3143012 - RNA, 19 nt, Artificial Sequence
  Description of Artificial Sequence: Synthetic oligonucleotide
cagcgcacgagugcgacuu

SEQ ID NO: 3143013 - RNA, 19 nt, Artificial Sequence
  Description of Artificial Sequence: Synthetic oligonucleotide
gcgcgggcacaugaagaug

SEQ ID NO: 3143014 - RNA, 19 nt, Artificial Sequence
  Description of Artificial Sequence: Synthetic oligonucleotide
cacuugccgcagcgcacga

SEQ ID NO: 3143015 - RNA, 19 nt, Artificial Sequence
  Description of Artificial Sequence: Synthetic oligonucleotide
cgggcacaugaagaugaag

SEQ ID NO: 3143016 - RNA, 19 nt, Artificial Sequence
  Description of Artificial Sequence: Synthetic oligonucleotide
ccgcggugcacguucaugu

SEQ ID NO: 3143017 - RNA, 19 nt, Artificial Sequence
  Description of Artificial Sequence: Synthetic oligonucleotide
cgugcagcguggacuucug

SEQ ID NO: 3143018 - RNA, 19 nt, Artificial Sequence
  Description of Artificial Sequence: Synthetic oligonucleotide
gcugugcgcgcauguggaa

SEQ ID NO: 3143019 - RNA, 19 nt, Artificial Sequence
  Description of Artificial Sequence: Synthetic oligonucleotide
cgcggugcacguucaugug

SEQ ID NO: 3143020 - RNA, 19 nt, Artificial Sequence
  Description of Artificial Sequence: Synthetic oligonucleotide
cgcgcauguggaagaccag

SEQ ID NO: 3143021 - RNA, 19 nt, Artificial Sequence
  Description of Artificial Sequence: Synthetic oligonucleotide
cguucauguggcgguugag

SEQ ID NO: 3143022 - RNA, 19 nt, Artificial Sequence
  Description of Artificial Sequence: Synthetic oligonucleotide
cgcauguggaagaccagcu

SEQ ID NO: 3143023 - RNA, 19 nt, Artificial Sequence
  Description of Artificial Sequence: Synthetic oligonucleotide
gcgcacgagugcgacuuga

SEQ ID NO: 3143024 - RNA, 19 nt, Artificial Sequence
  Description of Artificial Sequence: Synthetic oligonucleotide
gucgugcagcguggacuuc

SEQ ID NO: 3143025 - RNA, 19 nt, Artificial Sequence
  Description of Artificial Sequence: Synthetic oligonucleotide
cguggacuucugcgugaag

SEQ ID NO: 3143026 - RNA, 19 nt, Artificial Sequence
  Description of Artificial Sequence: Synthetic oligonucleotide
ugacgccgcggugcacguu

SEQ ID NO: 3143027 - RNA, 19 nt, Artificial Sequence
  Description of Artificial Sequence: Synthetic oligonucleotide
acgccgcggugcacguuca

SEQ ID NO: 3143028 - RNA, 19 nt, Artificial Sequence
  Description of Artificial Sequence: Synthetic oligonucleotide
gcguggacuucugcgugaa

SEQ ID NO: 3143029 - RNA, 19 nt, Artificial Sequence
  Description of Artificial Sequence: Synthetic oligonucleotide
cgcagcgcacgagugcgac

SEQ ID NO: 3143030 - RNA, 19 nt, Artificial Sequence
  Description of Artificial Sequence: Synthetic oligonucleotide
ccgcagcgcgggcacauga

SEQ ID NO: 3143031 - RNA, 19 nt, Artificial Sequence
  Description of Artificial Sequence: Synthetic oligonucleotide
gcagcgcacgagugcgacu

SEQ ID NO: 3143032 - RNA, 19 nt, Artificial Sequence
  Description of Artificial Sequence: Synthetic oligonucleotide
gcgggcacaugaagaugaa

SEQ ID NO: 3143033 - RNA, 19 nt, Artificial Sequence
  Description of Artificial Sequence: Synthetic oligonucleotide
cgguugagguugcugcugu

SEQ ID NO: 3143034 - RNA, 19 nt, Artificial Sequence
  Description of Artificial Sequence: Synthetic oligonucleotide
gccgcagcgcgggcacaug

SEQ ID NO: 3143035 - RNA, 19 nt, Artificial Sequence
  Description of Artificial Sequence: Synthetic oligonucleotide
cgcagcgcgggcacaugaa

SEQ ID NO: 3143036 - RNA, 19 nt, Artificial Sequence
  Description of Artificial Sequence: Synthetic oligonucleotide
ccgcagcgcacgagugcga

SEQ ID NO: 3143037 - RNA, 19 nt, Artificial Sequence
  Description of Artificial Sequence: Synthetic oligonucleotide
gcacguucauguggcgguu

SEQ ID NO: 3143038 - RNA, 19 nt, Artificial Sequence
  Description of Artificial Sequence: Synthetic oligonucleotide
cgccgcggugcacguucau

SEQ ID NO: 3143039 - RNA, 19 nt, Artificial Sequence
  Description of Artificial Sequence: Synthetic oligonucleotide
aacacagauacuuacauca

SEQ ID NO: 3143040 - RNA, 19 nt, Artificial Sequence
  Description of Artificial Sequence: Synthetic oligonucleotide
acaggggucaccuacagcc

SEQ ID NO: 3143041 - RNA, 19 nt, Artificial Sequence
  Description of Artificial Sequence: Synthetic oligonucleotide
aaauaauuuuaaugguugg

SEQ ID NO: 3143042 - RNA, 19 nt, Artificial Sequence
  Description of Artificial Sequence: Synthetic oligonucleotide
aacuguacuaaagaguccc

SEQ ID NO: 3143043 - RNA, 19 nt, Artificial Sequence
  Description of Artificial Sequence: Synthetic oligonucleotide
aaaauaauuuuaaugguug

SEQ ID NO: 3143044 - RNA, 19 nt, Artificial Sequence
  Description of Artificial Sequence: Synthetic oligonucleotide
aaaacacagauacuuacau

SEQ ID NO: 3143045 - RNA, 19 nt, Artificial Sequence
  Description of Artificial Sequence: Synthetic oligonucleotide
aaacacagauacuuacauc

SEQ ID NO: 3143046 - RNA, 19 nt, Artificial Sequence
  Description of Artificial Sequence: Synthetic oligonucleotide
agucccagcauuugugugc

SEQ ID NO: 3143047 - RNA, 19 nt, Artificial Sequence
  Description of Artificial Sequence: Synthetic oligonucleotide
gaggaacuguacuaaagag

SEQ ID NO: 3143048 - RNA, 19 nt, Artificial Sequence
  Description of Artificial Sequence: Synthetic oligonucleotide
uguacuaaagagucccagc

SEQ ID NO: 3143049 - RNA, 19 nt, Artificial Sequence
  Description of Artificial Sequence: Synthetic oligonucleotide
cauuugugugcacaggugc

SEQ ID NO: 3143050 - RNA, 19 nt, Artificial Sequence
  Description of Artificial Sequence: Synthetic oligonucleotide
uuggaaaacacagauacuu

SEQ ID NO: 3143051 - RNA, 19 nt, Artificial Sequence
  Description of Artificial Sequence: Synthetic oligonucleotide
aaagagucccagcauuugu

SEQ ID NO: 3143052 - RNA, 19 nt, Artificial Sequence
  Description of Artificial Sequence: Synthetic oligonucleotide
cagccauuggaaaacacag

SEQ ID NO: 3143053 - RNA, 19 nt, Artificial Sequence
  Description of Artificial Sequence: Synthetic oligonucleotide
ucaccuacagccauuggaa

SEQ ID NO: 3143054 - RNA, 19 nt, Artificial Sequence
  Description of Artificial Sequence: Synthetic oligonucleotide
cacagauacuuacaucacg

SEQ ID NO: 3143055 - RNA, 19 nt, Artificial Sequence
  Description of Artificial Sequence: Synthetic oligonucleotide
auuugugugcacaggugcc

SEQ ID NO: 3143056 - RNA, 19 nt, Artificial Sequence
  Description of Artificial Sequence: Synthetic oligonucleotide
guacuaaagagucccagca

SEQ ID NO: 3143057 - RNA, 19 nt, Artificial Sequence
  Description of Artificial Sequence: Synthetic oligonucleotide
agcauuugugugcacaggu

SEQ ID NO: 3143058 - RNA, 19 nt, Artificial Sequence
  Description of Artificial Sequence: Synthetic oligonucleotide
acuaaagagucccagcauu

SEQ ID NO: 3143059 - RNA, 19 nt, Artificial Sequence
  Description of Artificial Sequence: Synthetic oligonucleotide
ggaaaacacagauacuuac

SEQ ID NO: 3143060 - RNA, 19 nt, Artificial Sequence
  Description of Artificial Sequence: Synthetic oligonucleotide
acagauacuuacaucacga

SEQ ID NO: 3143061 - RNA, 19 nt, Artificial Sequence
  Description of Artificial Sequence: Synthetic oligonucleotide
gaaaacacagauacuuaca

SEQ ID NO: 3143062 - RNA, 19 nt, Artificial Sequence
  Description of Artificial Sequence: Synthetic oligonucleotide
agauacuuacaucacgauu

SEQ ID NO: 3143063 - RNA, 19 nt, Artificial Sequence
  Description of Artificial Sequence: Synthetic oligonucleotide
uggaaaacacagauacuua

SEQ ID NO: 3143064 - RNA, 19 nt, Artificial Sequence
  Description of Artificial Sequence: Synthetic oligonucleotide
aagagucccagcauuugug

SEQ ID NO: 3143065 - RNA, 19 nt, Artificial Sequence
  Description of Artificial Sequence: Synthetic oligonucleotide
ugugcacaggugccugugg

SEQ ID NO: 3143066 - RNA, 19 nt, Artificial Sequence
  Description of Artificial Sequence: Synthetic oligonucleotide
gucaccuacagccauugga

SEQ ID NO: 3143067 - RNA, 19 nt, Artificial Sequence
  Description of Artificial Sequence: Synthetic oligonucleotide
uacuaaagagucccagcau

SEQ ID NO: 3143068 - RNA, 19 nt, Artificial Sequence
  Description of Artificial Sequence: Synthetic oligonucleotide
uaaagagucccagcauuug

SEQ ID NO: 3143069 - RNA, 19 nt, Artificial Sequence
  Description of Artificial Sequence: Synthetic oligonucleotide
agagucccagcauuugugu

SEQ ID NO: 3143070 - RNA, 19 nt, Artificial Sequence
  Description of Artificial Sequence: Synthetic oligonucleotide
ucacaggggucaccuacag

SEQ ID NO: 3143071 - RNA, 19 nt, Artificial Sequence
  Description of Artificial Sequence: Synthetic oligonucleotide
ugcacaggugccuguggag

SEQ ID NO: 3143072 - RNA, 19 nt, Artificial Sequence
  Description of Artificial Sequence: Synthetic oligonucleotide
acagccauuggaaaacaca

SEQ ID NO: 3143073 - RNA, 19 nt, Artificial Sequence
  Description of Artificial Sequence: Synthetic oligonucleotide
accacaugaggaacuguac

SEQ ID NO: 3143074 - RNA, 19 nt, Artificial Sequence
  Description of Artificial Sequence: Synthetic oligonucleotide
cuguacuaaagagucccag

SEQ ID NO: 3143075 - RNA, 19 nt, Artificial Sequence
  Description of Artificial Sequence: Synthetic oligonucleotide
uacagccauuggaaaacac

SEQ ID NO: 3143076 - RNA, 19 nt, Artificial Sequence
  Description of Artificial Sequence: Synthetic oligonucleotide
uuugugugcacaggugccu

SEQ ID NO: 3143077 - RNA, 19 nt, Artificial Sequence
  Description of Artificial Sequence: Synthetic oligonucleotide
gaacuguacuaaagagucc

SEQ ID NO: 3143078 - RNA, 19 nt, Artificial Sequence
  Description of Artificial Sequence: Synthetic oligonucleotide
gagucccagcauuugugug

SEQ ID NO: 3143079 - RNA, 19 nt, Artificial Sequence
  Description of Artificial Sequence: Synthetic oligonucleotide
cacaggugccuguggaggc

SEQ ID NO: 3143080 - RNA, 19 nt, Artificial Sequence
  Description of Artificial Sequence: Synthetic oligonucleotide
auuggaaaacacagauacu

SEQ ID NO: 3143081 - RNA, 19 nt, Artificial Sequence
  Description of Artificial Sequence: Synthetic oligonucleotide
ucaccaccacaugaggaac

SEQ ID NO: 3143082 - RNA, 19 nt, Artificial Sequence
  Description of Artificial Sequence: Synthetic oligonucleotide
uugugugcacaggugccug

SEQ ID NO: 3143083 - RNA, 19 nt, Artificial Sequence
  Description of Artificial Sequence: Synthetic oligonucleotide
ugugugcacaggugccugu

SEQ ID NO: 3143084 - RNA, 19 nt, Artificial Sequence
  Description of Artificial Sequence: Synthetic oligonucleotide
ccagcauuugugugcacag

SEQ ID NO: 3143085 - RNA, 19 nt, Artificial Sequence
  Description of Artificial Sequence: Synthetic oligonucleotide
caccacaugaggaacugua

SEQ ID NO: 3143086 - RNA, 19 nt, Artificial Sequence
  Description of Artificial Sequence: Synthetic oligonucleotide
ccuacagccauuggaaaac

SEQ ID NO: 3143087 - RNA, 19 nt, Artificial Sequence
  Description of Artificial Sequence: Synthetic oligonucleotide
cagcauuugugugcacagg

SEQ ID NO: 3143088 - RNA, 19 nt, Artificial Sequence
  Description of Artificial Sequence: Synthetic oligonucleotide
accaccacaugaggaacug

SEQ ID NO: 3143089 - RNA, 19 nt, Artificial Sequence
  Description of Artificial Sequence: Synthetic oligonucleotide
gccauuggaaaacacagau

SEQ ID NO: 3143090 - RNA, 19 nt, Artificial Sequence
  Description of Artificial Sequence: Synthetic oligonucleotide
gcacaggugccuguggagg

SEQ ID NO: 3143091 - RNA, 19 nt, Artificial Sequence
  Description of Artificial Sequence: Synthetic oligonucleotide
cacaggggucaccuacagc

SEQ ID NO: 3143092 - RNA, 19 nt, Artificial Sequence
  Description of Artificial Sequence: Synthetic oligonucleotide
acuguacuaaagaguccca

SEQ ID NO: 3143093 - RNA, 19 nt, Artificial Sequence
  Description of Artificial Sequence: Synthetic oligonucleotide
agccauuggaaaacacaga

SEQ ID NO: 3143094 - RNA, 19 nt, Artificial Sequence
  Description of Artificial Sequence: Synthetic oligonucleotide
aggggucaccuacagccau

SEQ ID NO: 3143095 - RNA, 19 nt, Artificial Sequence
  Description of Artificial Sequence: Synthetic oligonucleotide
gugcacaggugccugugga

SEQ ID NO: 3143096 - RNA, 19 nt, Artificial Sequence
  Description of Artificial Sequence: Synthetic oligonucleotide
cuaaagagucccagcauuu

SEQ ID NO: 3143097 - RNA, 19 nt, Artificial Sequence
  Description of Artificial Sequence: Synthetic oligonucleotide
gcauuugugugcacaggug

SEQ ID NO: 3143098 - RNA, 19 nt, Artificial Sequence
  Description of Artificial Sequence: Synthetic oligonucleotide
gucccagcauuugugugca

SEQ ID NO: 3143099 - RNA, 19 nt, Artificial Sequence
  Description of Artificial Sequence: Synthetic oligonucleotide
gugugcacaggugccugug

SEQ ID NO: 3143100 - RNA, 19 nt, Artificial Sequence
  Description of Artificial Sequence: Synthetic oligonucleotide
ggucaccuacagccauugg

SEQ ID NO: 3143101 - RNA, 19 nt, Artificial Sequence
  Description of Artificial Sequence: Synthetic oligonucleotide
cuacagccauuggaaaaca

SEQ ID NO: 3143102 - RNA, 19 nt, Artificial Sequence
  Description of Artificial Sequence: Synthetic oligonucleotide
caccuacagccauuggaaa

SEQ ID NO: 3143103 - RNA, 19 nt, Artificial Sequence
  Description of Artificial Sequence: Synthetic oligonucleotide
caggggucaccuacagcca

SEQ ID NO: 3143104 - RNA, 19 nt, Artificial Sequence
  Description of Artificial Sequence: Synthetic oligonucleotide
gggucaccuacagccauug

SEQ ID NO: 3143105 - RNA, 19 nt, Artificial Sequence
  Description of Artificial Sequence: Synthetic oligonucleotide
cagauacuuacaucacgau

SEQ ID NO: 3143106 - RNA, 19 nt, Artificial Sequence
  Description of Artificial Sequence: Synthetic oligonucleotide
ccauuggaaaacacagaua

SEQ ID NO: 3143107 - RNA, 19 nt, Artificial Sequence
  Description of Artificial Sequence: Synthetic oligonucleotide
caccaccacaugaggaacu

SEQ ID NO: 3143108 - RNA, 19 nt, Artificial Sequence
  Description of Artificial Sequence: Synthetic oligonucleotide
ccacaugaggaacuguacu

SEQ ID NO: 3143109 - RNA, 19 nt, Artificial Sequence
  Description of Artificial Sequence: Synthetic oligonucleotide
ucccagcauuugugugcac

SEQ ID NO: 3143110 - RNA, 19 nt, Artificial Sequence
  Description of Artificial Sequence: Synthetic oligonucleotide
cccagcauuugugugcaca

SEQ ID NO: 3143111 - RNA, 19 nt, Artificial Sequence
  Description of Artificial Sequence: Synthetic oligonucleotide
ggggucaccuacagccauu

SEQ ID NO: 3143112 - RNA, 19 nt, Artificial Sequence
  Description of Artificial Sequence: Synthetic oligonucleotide
ccaccacaugaggaacugu

SEQ ID NO: 3143113 - RNA, 19 nt, Artificial Sequence
  Description of Artificial Sequence: Synthetic oligonucleotide
gaaagauucggacacugcc

SEQ ID NO: 3143114 - RNA, 19 nt, Artificial Sequence
  Description of Artificial Sequence: Synthetic oligonucleotide
aaagauucggacacugccc

SEQ ID NO: 3143115 - RNA, 19 nt, Artificial Sequence
  Description of Artificial Sequence: Synthetic oligonucleotide
aaaccacagccucagguuc

SEQ ID NO: 3143116 - RNA, 19 nt, Artificial Sequence
  Description of Artificial Sequence: Synthetic oligonucleotide
gaguacggaaaccacagcc

SEQ ID NO: 3143117 - RNA, 19 nt, Artificial Sequence
  Description of Artificial Sequence: Synthetic oligonucleotide
uccucuagaaguuucucug

SEQ ID NO: 3143118 - RNA, 19 nt, Artificial Sequence
  Description of Artificial Sequence: Synthetic oligonucleotide
aagauucggacacugccca

SEQ ID NO: 3143119 - RNA, 19 nt, Artificial Sequence
  Description of Artificial Sequence: Synthetic oligonucleotide
caagaaauccucuagaagu

SEQ ID NO: 3143120 - RNA, 19 nt, Artificial Sequence
  Description of Artificial Sequence: Synthetic oligonucleotide
agaaguuucucugcuuccc

SEQ ID NO: 3143121 - RNA, 19 nt, Artificial Sequence
  Description of Artificial Sequence: Synthetic oligonucleotide
agcccagaaagauucggac

SEQ ID NO: 3143122 - RNA, 19 nt, Artificial Sequence
  Description of Artificial Sequence: Synthetic oligonucleotide
aguuucucugcuucccugg

SEQ ID NO: 3143123 - RNA, 19 nt, Artificial Sequence
  Description of Artificial Sequence: Synthetic oligonucleotide
uccaagaaauccucuagaa

SEQ ID NO: 3143124 - RNA, 19 nt, Artificial Sequence
  Description of Artificial Sequence: Synthetic oligonucleotide
cuagaaguuucucugcuuc

SEQ ID NO: 3143125 - RNA, 19 nt, Artificial Sequence
  Description of Artificial Sequence: Synthetic oligonucleotide
aauccucuagaaguuucuc

SEQ ID NO: 3143126 - RNA, 19 nt, Artificial Sequence
  Description of Artificial Sequence: Synthetic oligonucleotide
gaagccacgaaccgaguac

SEQ ID NO: 3143127 - RNA, 19 nt, Artificial Sequence
  Description of Artificial Sequence: Synthetic oligonucleotide
aaguuucucugcuucccug

SEQ ID NO: 3143128 - RNA, 19 nt, Artificial Sequence
  Description of Artificial Sequence: Synthetic oligonucleotide
cucgaagccacgaaccgag

SEQ ID NO: 3143129 - RNA, 19 nt, Artificial Sequence
  Description of Artificial Sequence: Synthetic oligonucleotide
aagccacgaaccgaguacg

SEQ ID NO: 3143130 - RNA, 19 nt, Artificial Sequence
  Description of Artificial Sequence: Synthetic oligonucleotide
agaaagauucggacacugc

SEQ ID NO: 3143131 - RNA, 19 nt, Artificial Sequence
  Description of Artificial Sequence: Synthetic oligonucleotide
uagaaguuucucugcuucc

SEQ ID NO: 3143132 - RNA, 19 nt, Artificial Sequence
  Description of Artificial Sequence: Synthetic oligonucleotide
gauucggacacugcccagg

SEQ ID NO: 3143133 - RNA, 19 nt, Artificial Sequence
  Description of Artificial Sequence: Synthetic oligonucleotide
gaucccggaaguccugcgg

SEQ ID NO: 3143134 - RNA, 19 nt, Artificial Sequence
  Description of Artificial Sequence: Synthetic oligonucleotide
auccucuagaaguuucucu

SEQ ID NO: 3143135 - RNA, 19 nt, Artificial Sequence
  Description of Artificial Sequence: Synthetic oligonucleotide
aucccggaaguccugcggg

SEQ ID NO: 3143136 - RNA, 19 nt, Artificial Sequence
  Description of Artificial Sequence: Synthetic oligonucleotide
gucucgaagccacgaaccg

SEQ ID NO: 3143137 - RNA, 19 nt, Artificial Sequence
  Description of Artificial Sequence: Synthetic oligonucleotide
aaauccucuagaaguuucu

SEQ ID NO: 3143138 - RNA, 19 nt, Artificial Sequence
  Description of Artificial Sequence: Synthetic oligonucleotide
acgaaccgaguacggaaac

SEQ ID NO: 3143139 - RNA, 19 nt, Artificial Sequence
  Description of Artificial Sequence: Synthetic oligonucleotide
gaaauccucuagaaguuuc

SEQ ID NO: 3143140 - RNA, 19 nt, Artificial Sequence
  Description of Artificial Sequence: Synthetic oligonucleotide
aagaaauccucuagaaguu

SEQ ID NO: 3143141 - RNA, 19 nt, Artificial Sequence
  Description of Artificial Sequence: Synthetic oligonucleotide
aaguccugcggguggucuc

SEQ ID NO: 3143142 - RNA, 19 nt, Artificial Sequence
  Description of Artificial Sequence: Synthetic oligonucleotide
uggucucgaagccacgaac

SEQ ID NO: 3143143 - RNA, 19 nt, Artificial Sequence
  Description of Artificial Sequence: Synthetic oligonucleotide
uccucugccuccuccaaga

SEQ ID NO: 3143144 - RNA, 19 nt, Artificial Sequence
  Description of Artificial Sequence: Synthetic oligonucleotide
uacggaaaccacagccuca

SEQ ID NO: 3143145 - RNA, 19 nt, Artificial Sequence
  Description of Artificial Sequence: Synthetic oligonucleotide
gaaccgaguacggaaacca

SEQ ID NO: 3143146 - RNA, 19 nt, Artificial Sequence
  Description of Artificial Sequence: Synthetic oligonucleotide
aaccgaguacggaaaccac

SEQ ID NO: 3143147 - RNA, 19 nt, Artificial Sequence
  Description of Artificial Sequence: Synthetic oligonucleotide
aguacggaaaccacagccu

SEQ ID NO: 3143148 - RNA, 19 nt, Artificial Sequence
  Description of Artificial Sequence: Synthetic oligonucleotide
ucuagaaguuucucugcuu

SEQ ID NO: 3143149 - RNA, 19 nt, Artificial Sequence
  Description of Artificial Sequence: Synthetic oligonucleotide
cccagaaagauucggacac

SEQ ID NO: 3143150 - RNA, 19 nt, Artificial Sequence
  Description of Artificial Sequence: Synthetic oligonucleotide
ccaagaaauccucuagaag

SEQ ID NO: 3143151 - RNA, 19 nt, Artificial Sequence
  Description of Artificial Sequence: Synthetic oligonucleotide
guacggaaaccacagccuc

SEQ ID NO: 3143152 - RNA, 19 nt, Artificial Sequence
  Description of Artificial Sequence: Synthetic oligonucleotide
cagaaagauucggacacug

SEQ ID NO: 3143153 - RNA, 19 nt, Artificial Sequence
  Description of Artificial Sequence: Synthetic oligonucleotide
acggaaaccacagccucag

SEQ ID NO: 3143154 - RNA, 19 nt, Artificial Sequence
  Description of Artificial Sequence: Synthetic oligonucleotide
gcuucugaccuccuggggc

SEQ ID NO: 3143155 - RNA, 19 nt, Artificial Sequence
  Description of Artificial Sequence: Synthetic oligonucleotide
ugcggguggucucgaagcc

SEQ ID NO: 3143156 - RNA, 19 nt, Artificial Sequence
  Description of Artificial Sequence: Synthetic oligonucleotide
cuccaagaaauccucuaga

SEQ ID NO: 3143157 - RNA, 19 nt, Artificial Sequence
  Description of Artificial Sequence: Synthetic oligonucleotide
ucucgaagccacgaaccga

SEQ ID NO: 3143158 - RNA, 19 nt, Artificial Sequence
  Description of Artificial Sequence: Synthetic oligonucleotide
ccgaguacggaaaccacag

SEQ ID NO: 3143159 - RNA, 19 nt, Artificial Sequence
  Description of Artificial Sequence: Synthetic oligonucleotide
auucggacacugcccaggu

SEQ ID NO: 3143160 - RNA, 19 nt, Artificial Sequence
  Description of Artificial Sequence: Synthetic oligonucleotide
gaaaccacagccucagguu

SEQ ID NO: 3143161 - RNA, 19 nt, Artificial Sequence
  Description of Artificial Sequence: Synthetic oligonucleotide
agauucggacacugcccag

SEQ ID NO: 3143162 - RNA, 19 nt, Artificial Sequence
  Description of Artificial Sequence: Synthetic oligonucleotide
cagguucugaugggcaggg

SEQ ID NO: 3143163 - RNA, 19 nt, Artificial Sequence
  Description of Artificial Sequence: Synthetic oligonucleotide
ggucucgaagccacgaacc

SEQ ID NO: 3143164 - RNA, 19 nt, Artificial Sequence
  Description of Artificial Sequence: Synthetic oligonucleotide
aaccacagccucagguucu

SEQ ID NO: 3143165 - RNA, 19 nt, Artificial Sequence
  Description of Artificial Sequence: Synthetic oligonucleotide
aguccugcggguggucucg

SEQ ID NO: 3143166 - RNA, 19 nt, Artificial Sequence
  Description of Artificial Sequence: Synthetic oligonucleotide
ccuccaagaaauccucuag

SEQ ID NO: 3143167 - RNA, 19 nt, Artificial Sequence
  Description of Artificial Sequence: Synthetic oligonucleotide
gaaguuucucugcuucccu

SEQ ID NO: 3143168 - RNA, 19 nt, Artificial Sequence
  Description of Artificial Sequence: Synthetic oligonucleotide
accgaguacggaaaccaca

SEQ ID NO: 3143169 - RNA, 19 nt, Artificial Sequence
  Description of Artificial Sequence: Synthetic oligonucleotide
agaaauccucuagaaguuu

SEQ ID NO: 3143170 - RNA, 19 nt, Artificial Sequence
  Description of Artificial Sequence: Synthetic oligonucleotide
ccucuagaaguuucucugc

SEQ ID NO: 3143171 - RNA, 19 nt, Artificial Sequence
  Description of Artificial Sequence: Synthetic oligonucleotide
ggaaaccacagccucaggu

SEQ ID NO: 3143172 - RNA, 19 nt, Artificial Sequence
  Description of Artificial Sequence: Synthetic oligonucleotide
ugcccagguucugaugggc

SEQ ID NO: 3143173 - RNA, 19 nt, Artificial Sequence
  Description of Artificial Sequence: Synthetic oligonucleotide
ucccuggcuucugaccucc

SEQ ID NO: 3143174 - RNA, 19 nt, Artificial Sequence
  Description of Artificial Sequence: Synthetic oligonucleotide
cagcccagaaagauucgga

SEQ ID NO: 3143175 - RNA, 19 nt, Artificial Sequence
  Description of Artificial Sequence: Synthetic oligonucleotide
cuucccuggcuucugaccu

SEQ ID NO: 3143176 - RNA, 19 nt, Artificial Sequence
  Description of Artificial Sequence: Synthetic oligonucleotide
ugcccagcccagaaagauu

SEQ ID NO: 3143177 - RNA, 19 nt, Artificial Sequence
  Description of Artificial Sequence: Synthetic oligonucleotide
cucuagaaguuucucugcu

SEQ ID NO: 3143178 - RNA, 19 nt, Artificial Sequence
  Description of Artificial Sequence: Synthetic oligonucleotide
cacgaaccgaguacggaaa

SEQ ID NO: 3143179 - RNA, 19 nt, Artificial Sequence
  Description of Artificial Sequence: Synthetic oligonucleotide
ggcuucugaccuccugggg

SEQ ID NO: 3143180 - RNA, 19 nt, Artificial Sequence
  Description of Artificial Sequence: Synthetic oligonucleotide
ucgaagccacgaaccgagu

SEQ ID NO: 3143181 - RNA, 19 nt, Artificial Sequence
  Description of Artificial Sequence: Synthetic oligonucleotide
ucccggaaguccugcgggu

SEQ ID NO: 3143182 - RNA, 19 nt, Artificial Sequence
  Description of Artificial Sequence: Synthetic oligonucleotide
ggaucccggaaguccugcg

SEQ ID NO: 3143183 - RNA, 19 nt, Artificial Sequence
  Description of Artificial Sequence: Synthetic oligonucleotide
acacugcccagguucugau

SEQ ID NO: 3143184 - RNA, 19 nt, Artificial Sequence
  Description of Artificial Sequence: Synthetic oligonucleotide
ucugaccuccuggggcugc

SEQ ID NO: 3143185 - RNA, 19 nt, Artificial Sequence
  Description of Artificial Sequence: Synthetic oligonucleotide
cuucugaccuccuggggcu

SEQ ID NO: 3143186 - RNA, 19 nt, Artificial Sequence
  Description of Artificial Sequence: Synthetic oligonucleotide
agccacgaaccgaguacgg

SEQ ID NO: 3143187 - RNA, 19 nt, Artificial Sequence
  Description of Artificial Sequence: Synthetic oligonucleotide
uucccuggcuucugaccuc

SEQ ID NO: 3143188 - RNA, 19 nt, Artificial Sequence
  Description of Artificial Sequence: Synthetic oligonucleotide
cacugcccagguucugaug

SEQ ID NO: 3143189 - RNA, 19 nt, Artificial Sequence
  Description of Artificial Sequence: Synthetic oligonucleotide
cccagguucugaugggcag

SEQ ID NO: 3143190 - RNA, 19 nt, Artificial Sequence
  Description of Artificial Sequence: Synthetic oligonucleotide
ccagcccagaaagauucgg

SEQ ID NO: 3143191 - RNA, 19 nt, Artificial Sequence
  Description of Artificial Sequence: Synthetic oligonucleotide
gcccagcccagaaagauuc

SEQ ID NO: 3143192 - RNA, 19 nt, Artificial Sequence
  Description of Artificial Sequence: Synthetic oligonucleotide
agguucugaugggcagggg

SEQ ID NO: 3143193 - RNA, 19 nt, Artificial Sequence
  Description of Artificial Sequence: Synthetic oligonucleotide
uucugaccuccuggggcug

SEQ ID NO: 3143194 - RNA, 19 nt, Artificial Sequence
  Description of Artificial Sequence: Synthetic oligonucleotide
ccagguucugaugggcagg

SEQ ID NO: 3143195 - RNA, 19 nt, Artificial Sequence
  Description of Artificial Sequence: Synthetic oligonucleotide
uucggacacugcccagguu

SEQ ID NO: 3143196 - RNA, 19 nt, Artificial Sequence
  Description of Artificial Sequence: Synthetic oligonucleotide
guggucucgaagccacgaa

SEQ ID NO: 3143197 - RNA, 19 nt, Artificial Sequence
  Description of Artificial Sequence: Synthetic oligonucleotide
cuccuggggcugcccagcc

SEQ ID NO: 3143198 - RNA, 19 nt, Artificial Sequence
  Description of Artificial Sequence: Synthetic oligonucleotide
ccggaaguccugcgggugg

SEQ ID NO: 3143199 - RNA, 19 nt, Artificial Sequence
  Description of Artificial Sequence: Synthetic oligonucleotide
ccugcggguggucucgaag

SEQ ID NO: 3143200 - RNA, 19 nt, Artificial Sequence
  Description of Artificial Sequence: Synthetic oligonucleotide
gaaguccugcggguggucu

SEQ ID NO: 3143201 - RNA, 19 nt, Artificial Sequence
  Description of Artificial Sequence: Synthetic oligonucleotide
gguggucucgaagccacga

SEQ ID NO: 3143202 - RNA, 19 nt, Artificial Sequence
  Description of Artificial Sequence: Synthetic oligonucleotide
ccacgaaccgaguacggaa

SEQ ID NO: 3143203 - RNA, 19 nt, Artificial Sequence
  Description of Artificial Sequence: Synthetic oligonucleotide
ugaccuccuggggcugccc

SEQ ID NO: 3143204 - RNA, 19 nt, Artificial Sequence
  Description of Artificial Sequence: Synthetic oligonucleotide
cugaccuccuggggcugcc

SEQ ID NO: 3143205 - RNA, 19 nt, Artificial Sequence
  Description of Artificial Sequence: Synthetic oligonucleotide
cccagcccagaaagauucg

SEQ ID NO: 3143206 - RNA, 19 nt, Artificial Sequence
  Description of Artificial Sequence: Synthetic oligonucleotide
gggaucccggaaguccugc

SEQ ID NO: 3143207 - RNA, 19 nt, Artificial Sequence
  Description of Artificial Sequence: Synthetic oligonucleotide
cgaaccgaguacggaaacc

SEQ ID NO: 3143208 - RNA, 19 nt, Artificial Sequence
  Description of Artificial Sequence: Synthetic oligonucleotide
cuccuccaagaaauccucu

SEQ ID NO: 3143209 - RNA, 19 nt, Artificial Sequence
  Description of Artificial Sequence: Synthetic oligonucleotide
cggguggucucgaagccac

SEQ ID NO: 3143210 - RNA, 19 nt, Artificial Sequence
  Description of Artificial Sequence: Synthetic oligonucleotide
uccugcggguggucucgaa

SEQ ID NO: 3143211 - RNA, 19 nt, Artificial Sequence
  Description of Artificial Sequence: Synthetic oligonucleotide
cgaguacggaaaccacagc

SEQ ID NO: 3143212 - RNA, 19 nt, Artificial Sequence
  Description of Artificial Sequence: Synthetic oligonucleotide
cugcuucccuggcuucuga

SEQ ID NO: 3143213 - RNA, 19 nt, Artificial Sequence
  Description of Artificial Sequence: Synthetic oligonucleotide
gccacgaaccgaguacgga

SEQ ID NO: 3143214 - RNA, 19 nt, Artificial Sequence
  Description of Artificial Sequence: Synthetic oligonucleotide
cugcccagcccagaaagau

SEQ ID NO: 3143215 - RNA, 19 nt, Artificial Sequence
  Description of Artificial Sequence: Synthetic oligonucleotide
ggguggucucgaagccacg

SEQ ID NO: 3143216 - RNA, 19 nt, Artificial Sequence
  Description of Artificial Sequence: Synthetic oligonucleotide
ccuccuggggcugcccagc

SEQ ID NO: 3143217 - RNA, 19 nt, Artificial Sequence
  Description of Artificial Sequence: Synthetic oligonucleotide
gcccagguucugaugggca

SEQ ID NO: 3143218 - RNA, 19 nt, Artificial Sequence
  Description of Artificial Sequence: Synthetic oligonucleotide
ggggaucccggaaguccug

SEQ ID NO: 3143219 - RNA, 19 nt, Artificial Sequence
  Description of Artificial Sequence: Synthetic oligonucleotide
cccggaaguccugcgggug

SEQ ID NO: 3143220 - RNA, 19 nt, Artificial Sequence
  Description of Artificial Sequence: Synthetic oligonucleotide
gcugcccagcccagaaaga

SEQ ID NO: 3143221 - RNA, 19 nt, Artificial Sequence
  Description of Artificial Sequence: Synthetic oligonucleotide
ggaaguccugcgggugguc

SEQ ID NO: 3143222 - RNA, 19 nt, Artificial Sequence
  Description of Artificial Sequence: Synthetic oligonucleotide
cggaaaccacagccucagg

SEQ ID NO: 3143223 - RNA, 19 nt, Artificial Sequence
  Description of Artificial Sequence: Synthetic oligonucleotide
gcggguggucucgaagcca

SEQ ID NO: 3143224 - RNA, 19 nt, Artificial Sequence
  Description of Artificial Sequence: Synthetic oligonucleotide
cgaagccacgaaccgagua

SEQ ID NO: 3143225 - RNA, 19 nt, Artificial Sequence
  Description of Artificial Sequence: Synthetic oligonucleotide
guccugcggguggucucga

SEQ ID NO: 3143226 - RNA, 19 nt, Artificial Sequence
  Description of Artificial Sequence: Synthetic oligonucleotide
ccagaaagauucggacacu

SEQ ID NO: 3143227 - RNA, 19 nt, Artificial Sequence
  Description of Artificial Sequence: Synthetic oligonucleotide
ccucugccuccuccaagaa

SEQ ID NO: 3143228 - RNA, 19 nt, Artificial Sequence
  Description of Artificial Sequence: Synthetic oligonucleotide
cccuggcuucugaccuccu

SEQ ID NO: 3143229 - RNA, 19 nt, Artificial Sequence
  Description of Artificial Sequence: Synthetic oligonucleotide
ugaacuaagggguagagga

SEQ ID NO: 3143230 - RNA, 19 nt, Artificial Sequence
  Description of Artificial Sequence: Synthetic oligonucleotide
gagcuuugaagccagaggg

SEQ ID NO: 3143231 - RNA, 19 nt, Artificial Sequence
  Description of Artificial Sequence: Synthetic oligonucleotide
caaggugugaacuaagggg

SEQ ID NO: 3143232 - RNA, 19 nt, Artificial Sequence
  Description of Artificial Sequence: Synthetic oligonucleotide
uuugccugagcuuugaagc

SEQ ID NO: 3143233 - RNA, 19 nt, Artificial Sequence
  Description of Artificial Sequence: Synthetic oligonucleotide
uggagugaaaucaaggugu

SEQ ID NO: 3143234 - RNA, 19 nt, Artificial Sequence
  Description of Artificial Sequence: Synthetic oligonucleotide
ugagcuuugaagccagagg

SEQ ID NO: 3143235 - RNA, 19 nt, Artificial Sequence
  Description of Artificial Sequence: Synthetic oligonucleotide
uuugaagccagaggggugg

SEQ ID NO: 3143236 - RNA, 19 nt, Artificial Sequence
  Description of Artificial Sequence: Synthetic oligonucleotide
ugaaaucaaggugugaacu

SEQ ID NO: 3143237 - RNA, 19 nt, Artificial Sequence
  Description of Artificial Sequence: Synthetic oligonucleotide
agaaggggaagcuggcccc

SEQ ID NO: 3143238 - RNA, 19 nt, Artificial Sequence
  Description of Artificial Sequence: Synthetic oligonucleotide
agagcugagaaggggaagc

SEQ ID NO: 3143239 - RNA, 19 nt, Artificial Sequence
  Description of Artificial Sequence: Synthetic oligonucleotide
aaggugugaacuaaggggu

SEQ ID NO: 3143240 - RNA, 19 nt, Artificial Sequence
  Description of Artificial Sequence: Synthetic oligonucleotide
uccauucacacugagguga

SEQ ID NO: 3143241 - RNA, 19 nt, Artificial Sequence
  Description of Artificial Sequence: Synthetic oligonucleotide
uaagggguagaggagaggc

SEQ ID NO: 3143242 - RNA, 19 nt, Artificial Sequence
  Description of Artificial Sequence: Synthetic oligonucleotide
gaccacuugaaugagggug

SEQ ID NO: 3143243 - RNA, 19 nt, Artificial Sequence
  Description of Artificial Sequence: Synthetic oligonucleotide
ugaggugagagcugagaag

SEQ ID NO: 3143244 - RNA, 19 nt, Artificial Sequence
  Description of Artificial Sequence: Synthetic oligonucleotide
agugaaaucaaggugugaa

SEQ ID NO: 3143245 - RNA, 19 nt, Artificial Sequence
  Description of Artificial Sequence: Synthetic oligonucleotide
cuuugccugagcuuugaag

SEQ ID NO: 3143246 - RNA, 19 nt, Artificial Sequence
  Description of Artificial Sequence: Synthetic oligonucleotide
gagaaggggaagcuggccc

SEQ ID NO: 3143247 - RNA, 19 nt, Artificial Sequence
  Description of Artificial Sequence: Synthetic oligonucleotide
auucacacugaggugagag

SEQ ID NO: 3143248 - RNA, 19 nt, Artificial Sequence
  Description of Artificial Sequence: Synthetic oligonucleotide
guggagugaaaucaaggug

SEQ ID NO: 3143249 - RNA, 19 nt, Artificial Sequence
  Description of Artificial Sequence: Synthetic oligonucleotide
guagaggagaggcccaagg

SEQ ID NO: 3143250 - RNA, 19 nt, Artificial Sequence
  Description of Artificial Sequence: Synthetic oligonucleotide
gauucugagcagcuuugcc

SEQ ID NO: 3143251 - RNA, 19 nt, Artificial Sequence
  Description of Artificial Sequence: Synthetic oligonucleotide
uagaggagaggcccaaggc

SEQ ID NO: 3143252 - RNA, 19 nt, Artificial Sequence
  Description of Artificial Sequence: Synthetic oligonucleotide
aacuaagggguagaggaga

SEQ ID NO: 3143253 - RNA, 19 nt, Artificial Sequence
  Description of Artificial Sequence: Synthetic oligonucleotide
aaaucaaggugugaacuaa

SEQ ID NO: 3143254 - RNA, 19 nt, Artificial Sequence
  Description of Artificial Sequence: Synthetic oligonucleotide
agaggagaggcccaaggca

SEQ ID NO: 3143255 - RNA, 19 nt, Artificial Sequence
  Description of Artificial Sequence: Synthetic oligonucleotide
uggauucugagcagcuuug

SEQ ID NO: 3143256 - RNA, 19 nt, Artificial Sequence
  Description of Artificial Sequence: Synthetic oligonucleotide
aaucaaggugugaacuaag

SEQ ID NO: 3143257 - RNA, 19 nt, Artificial Sequence
  Description of Artificial Sequence: Synthetic oligonucleotide
agagggguggagugaaauc

SEQ ID NO: 3143258 - RNA, 19 nt, Artificial Sequence
  Description of Artificial Sequence: Synthetic oligonucleotide
ugugaacuaagggguagag

SEQ ID NO: 3143259 - RNA, 19 nt, Artificial Sequence
  Description of Artificial Sequence: Synthetic oligonucleotide
aagccagagggguggagug

SEQ ID NO: 3143260 - RNA, 19 nt, Artificial Sequence
  Description of Artificial Sequence: Synthetic oligonucleotide
aucaaggugugaacuaagg

SEQ ID NO: 3143261 - RNA, 19 nt, Artificial Sequence
  Description of Artificial Sequence: Synthetic oligonucleotide
accacuugaaugagggugg

SEQ ID NO: 3143262 - RNA, 19 nt, Artificial Sequence
  Description of Artificial Sequence: Synthetic oligonucleotide
gaaaucaaggugugaacua

SEQ ID NO: 3143263 - RNA, 19 nt, Artificial Sequence
  Description of Artificial Sequence: Synthetic oligonucleotide
aggggcgaccacuugaaug

SEQ ID NO: 3143264 - RNA, 19 nt, Artificial Sequence
  Description of Artificial Sequence: Synthetic oligonucleotide
cuugaaugaggguggcuac

SEQ ID NO: 3143265 - RNA, 19 nt, Artificial Sequence
  Description of Artificial Sequence: Synthetic oligonucleotide
uugccugagcuuugaagcc

SEQ ID NO: 3143266 - RNA, 19 nt, Artificial Sequence
  Description of Artificial Sequence: Synthetic oligonucleotide
ggaagcuggccccagcugg

SEQ ID NO: 3143267 - RNA, 19 nt, Artificial Sequence
  Description of Artificial Sequence: Synthetic oligonucleotide
gugaaaucaaggugugaac

SEQ ID NO: 3143268 - RNA, 19 nt, Artificial Sequence
  Description of Artificial Sequence: Synthetic oligonucleotide
gagggguggagugaaauca

SEQ ID NO: 3143269 - RNA, 19 nt, Artificial Sequence
  Description of Artificial Sequence: Synthetic oligonucleotide
gaacuaagggguagaggag

SEQ ID NO: 3143270 - RNA, 19 nt, Artificial Sequence
  Description of Artificial Sequence: Synthetic oligonucleotide
gcugagaaggggaagcugg

SEQ ID NO: 3143271 - RNA, 19 nt, Artificial Sequence
  Description of Artificial Sequence: Synthetic oligonucleotide
gugaacuaagggguagagg

SEQ ID NO: 3143272 - RNA, 19 nt, Artificial Sequence
  Description of Artificial Sequence: Synthetic oligonucleotide
agaggcccaaggcagccag

SEQ ID NO: 3143273 - RNA, 19 nt, Artificial Sequence
  Description of Artificial Sequence: Synthetic oligonucleotide
uugaaugaggguggcuacc

SEQ ID NO: 3143274 - RNA, 19 nt, Artificial Sequence
  Description of Artificial Sequence: Synthetic oligonucleotide
cugagaaggggaagcuggc

SEQ ID NO: 3143275 - RNA, 19 nt, Artificial Sequence
  Description of Artificial Sequence: Synthetic oligonucleotide
caaggcagccaguuuggug

SEQ ID NO: 3143276 - RNA, 19 nt, Artificial Sequence
  Description of Artificial Sequence: Synthetic oligonucleotide
agcuuugaagccagagggg

SEQ ID NO: 3143277 - RNA, 19 nt, Artificial Sequence
  Description of Artificial Sequence: Synthetic oligonucleotide
gcgaccacuugaaugaggg

SEQ ID NO: 3143278 - RNA, 19 nt, Artificial Sequence
  Description of Artificial Sequence: Synthetic oligonucleotide
ugagaaggggaagcuggcc

SEQ ID NO: 3143279 - RNA, 19 nt, Artificial Sequence
  Description of Artificial Sequence: Synthetic oligonucleotide
acuaagggguagaggagag

SEQ ID NO: 3143280 - RNA, 19 nt, Artificial Sequence
  Description of Artificial Sequence: Synthetic oligonucleotide
cugagcuuugaagccagag

SEQ ID NO: 3143281 - RNA, 19 nt, Artificial Sequence
  Description of Artificial Sequence: Synthetic oligonucleotide
ugagcagcuuugccugagc

SEQ ID NO: 3143282 - RNA, 19 nt, Artificial Sequence
  Description of Artificial Sequence: Synthetic oligonucleotide
ggugagagcugagaagggg

SEQ ID NO: 3143283 - RNA, 19 nt, Artificial Sequence
  Description of Artificial Sequence: Synthetic oligonucleotide
ggguggagugaaaucaagg

SEQ ID NO: 3143284 - RNA, 19 nt, Artificial Sequence
  Description of Artificial Sequence: Synthetic oligonucleotide
cuccauucacacugaggug

SEQ ID NO: 3143285 - RNA, 19 nt, Artificial Sequence
  Description of Artificial Sequence: Synthetic oligonucleotide
gagagcugagaaggggaag

SEQ ID NO: 3143286 - RNA, 19 nt, Artificial Sequence
  Description of Artificial Sequence: Synthetic oligonucleotide
gguggagugaaaucaaggu

SEQ ID NO: 3143287 - RNA, 19 nt, Artificial Sequence
  Description of Artificial Sequence: Synthetic oligonucleotide
acugaggugagagcugaga

SEQ ID NO: 3143288 - RNA, 19 nt, Artificial Sequence
  Description of Artificial Sequence: Synthetic oligonucleotide
cacacugaggugagagcug

SEQ ID NO: 3143289 - RNA, 19 nt, Artificial Sequence
  Description of Artificial Sequence: Synthetic oligonucleotide
cuaagggguagaggagagg

SEQ ID NO: 3143290 - RNA, 19 nt, Artificial Sequence
  Description of Artificial Sequence: Synthetic oligonucleotide
aggggaagcuggccccagc

SEQ ID NO: 3143291 - RNA, 19 nt, Artificial Sequence
  Description of Artificial Sequence: Synthetic oligonucleotide
ugccugagcuuugaagcca

SEQ ID NO: 3143292 - RNA, 19 nt, Artificial Sequence
  Description of Artificial Sequence: Synthetic oligonucleotide
cugaggugagagcugagaa

SEQ ID NO: 3143293 - RNA, 19 nt, Artificial Sequence
  Description of Artificial Sequence: Synthetic oligonucleotide
ggugugaacuaagggguag

SEQ ID NO: 3143294 - RNA, 19 nt, Artificial Sequence
  Description of Artificial Sequence: Synthetic oligonucleotide
gcccaaggcagccaguuug

SEQ ID NO: 3143295 - RNA, 19 nt, Artificial Sequence
  Description of Artificial Sequence: Synthetic oligonucleotide
gugagagcugagaagggga

SEQ ID NO: 3143296 - RNA, 19 nt, Artificial Sequence
  Description of Artificial Sequence: Synthetic oligonucleotide
ccuccauucacacugaggu

SEQ ID NO: 3143297 - RNA, 19 nt, Artificial Sequence
  Description of Artificial Sequence: Synthetic oligonucleotide
agcagcuuugccugagcuu

SEQ ID NO: 3143298 - RNA, 19 nt, Artificial Sequence
  Description of Artificial Sequence: Synthetic oligonucleotide
ggagugaaaucaaggugug

SEQ ID NO: 3143299 - RNA, 19 nt, Artificial Sequence
  Description of Artificial Sequence: Synthetic oligonucleotide
aggugagagcugagaaggg

SEQ ID NO: 3143300 - RNA, 19 nt, Artificial Sequence
  Description of Artificial Sequence: Synthetic oligonucleotide
gagugaaaucaagguguga

SEQ ID NO: 3143301 - RNA, 19 nt, Artificial Sequence
  Description of Artificial Sequence: Synthetic oligonucleotide
aaggggaagcuggccccag

SEQ ID NO: 3143302 - RNA, 19 nt, Artificial Sequence
  Description of Artificial Sequence: Synthetic oligonucleotide
gaagccagagggguggagu

SEQ ID NO: 3143303 - RNA, 19 nt, Artificial Sequence
  Description of Artificial Sequence: Synthetic oligonucleotide
cugagcagcuuugccugag

SEQ ID NO: 3143304 - RNA, 19 nt, Artificial Sequence
  Description of Artificial Sequence: Synthetic oligonucleotide
gagcagcuuugccugagcu

SEQ ID NO: 3143305 - RNA, 19 nt, Artificial Sequence
  Description of Artificial Sequence: Synthetic oligonucleotide
ccauucacacugaggugag

SEQ ID NO: 3143306 - RNA, 19 nt, Artificial Sequence
  Description of Artificial Sequence: Synthetic oligonucleotide
ggauucugagcagcuuugc

SEQ ID NO: 3143307 - RNA, 19 nt, Artificial Sequence
  Description of Artificial Sequence: Synthetic oligonucleotide
gcuggccccagcuggauuc

SEQ ID NO: 3143308 - RNA, 19 nt, Artificial Sequence
  Description of Artificial Sequence: Synthetic oligonucleotide
gaagcuggccccagcugga

SEQ ID NO: 3143309 - RNA, 19 nt, Artificial Sequence
  Description of Artificial Sequence: Synthetic oligonucleotide
gugugaacuaagggguaga

SEQ ID NO: 3143310 - RNA, 19 nt, Artificial Sequence
  Description of Artificial Sequence: Synthetic oligonucleotide
cacugaggugagagcugag

SEQ ID NO: 3143311 - RNA, 19 nt, Artificial Sequence
  Description of Artificial Sequence: Synthetic oligonucleotide
agcuggauucugagcagcu

SEQ ID NO: 3143312 - RNA, 19 nt, Artificial Sequence
  Description of Artificial Sequence: Synthetic oligonucleotide
agcuuugccugagcuuuga

SEQ ID NO: 3143313 - RNA, 19 nt, Artificial Sequence
  Description of Artificial Sequence: Synthetic oligonucleotide
gaaggggaagcuggcccca

SEQ ID NO: 3143314 - RNA, 19 nt, Artificial Sequence
  Description of Artificial Sequence: Synthetic oligonucleotide
cuggauucugagcagcuuu

SEQ ID NO: 3143315 - RNA, 19 nt, Artificial Sequence
  Description of Artificial Sequence: Synthetic oligonucleotide
cagcuuugccugagcuuug

SEQ ID NO: 3143316 - RNA, 19 nt, Artificial Sequence
  Description of Artificial Sequence: Synthetic oligonucleotide
ggcgaccacuugaaugagg

SEQ ID NO: 3143317 - RNA, 19 nt, Artificial Sequence
  Description of Artificial Sequence: Synthetic oligonucleotide
gggaggggcgaccacuuga

SEQ ID NO: 3143318 - RNA, 19 nt, Artificial Sequence
  Description of Artificial Sequence: Synthetic oligonucleotide
gccccagcuggauucugag

SEQ ID NO: 3143319 - RNA, 19 nt, Artificial Sequence
  Description of Artificial Sequence: Synthetic oligonucleotide
agggguggagugaaaucaa

SEQ ID NO: 3143320 - RNA, 19 nt, Artificial Sequence
  Description of Artificial Sequence: Synthetic oligonucleotide
ggagaggcccaaggcagcc

SEQ ID NO: 3143321 - RNA, 19 nt, Artificial Sequence
  Description of Artificial Sequence: Synthetic oligonucleotide
gcuuugaagccagaggggu

SEQ ID NO: 3143322 - RNA, 19 nt, Artificial Sequence
  Description of Artificial Sequence: Synthetic oligonucleotide
gguagaggagaggcccaag

SEQ ID NO: 3143323 - RNA, 19 nt, Artificial Sequence
  Description of Artificial Sequence: Synthetic oligonucleotide
agccagagggguggaguga

SEQ ID NO: 3143324 - RNA, 19 nt, Artificial Sequence
  Description of Artificial Sequence: Synthetic oligonucleotide
aggcccaaggcagccaguu

SEQ ID NO: 3143325 - RNA, 19 nt, Artificial Sequence
  Description of Artificial Sequence: Synthetic oligonucleotide
aggugugaacuaaggggua

SEQ ID NO: 3143326 - RNA, 19 nt, Artificial Sequence
  Description of Artificial Sequence: Synthetic oligonucleotide
gagcugagaaggggaagcu

SEQ ID NO: 3143327 - RNA, 19 nt, Artificial Sequence
  Description of Artificial Sequence: Synthetic oligonucleotide
gcagcuuugccugagcuuu

SEQ ID NO: 3143328 - RNA, 19 nt, Artificial Sequence
  Description of Artificial Sequence: Synthetic oligonucleotide
gagaggcccaaggcagcca

SEQ ID NO: 3143329 - RNA, 19 nt, Artificial Sequence
  Description of Artificial Sequence: Synthetic oligonucleotide
agcuggccccagcuggauu

SEQ ID NO: 3143330 - RNA, 19 nt, Artificial Sequence
  Description of Artificial Sequence: Synthetic oligonucleotide
ccccagcuggauucugagc

SEQ ID NO: 3143331 - RNA, 19 nt, Artificial Sequence
  Description of Artificial Sequence: Synthetic oligonucleotide
cauucacacugaggugaga

SEQ ID NO: 3143332 - RNA, 19 nt, Artificial Sequence
  Description of Artificial Sequence: Synthetic oligonucleotide
ccacuugaaugaggguggc

SEQ ID NO: 3143333 - RNA, 19 nt, Artificial Sequence
  Description of Artificial Sequence: Synthetic oligonucleotide
ggaggggcgaccacuugaa

SEQ ID NO: 3143334 - RNA, 19 nt, Artificial Sequence
  Description of Artificial Sequence: Synthetic oligonucleotide
cagagggguggagugaaau

SEQ ID NO: 3143335 - RNA, 19 nt, Artificial Sequence
  Description of Artificial Sequence: Synthetic oligonucleotide
gggcgaccacuugaaugag

SEQ ID NO: 3143336 - RNA, 19 nt, Artificial Sequence
  Description of Artificial Sequence: Synthetic oligonucleotide
ggggaggggcgaccacuug

SEQ ID NO: 3143337 - RNA, 19 nt, Artificial Sequence
  Description of Artificial Sequence: Synthetic oligonucleotide
gggguagaggagaggccca

SEQ ID NO: 3143338 - RNA, 19 nt, Artificial Sequence
  Description of Artificial Sequence: Synthetic oligonucleotide
gccagagggguggagugaa

SEQ ID NO: 3143339 - RNA, 19 nt, Artificial Sequence
  Description of Artificial Sequence: Synthetic oligonucleotide
gcuuugccugagcuuugaa

SEQ ID NO: 3143340 - RNA, 19 nt, Artificial Sequence
  Description of Artificial Sequence: Synthetic oligonucleotide
gaggggcgaccacuugaau

SEQ ID NO: 3143341 - RNA, 19 nt, Artificial Sequence
  Description of Artificial Sequence: Synthetic oligonucleotide
cacuugaaugaggguggcu

SEQ ID NO: 3143342 - RNA, 19 nt, Artificial Sequence
  Description of Artificial Sequence: Synthetic oligonucleotide
ggguagaggagaggcccaa

SEQ ID NO: 3143343 - RNA, 19 nt, Artificial Sequence
  Description of Artificial Sequence: Synthetic oligonucleotide
ccugagcuuugaagccaga

SEQ ID NO: 3143344 - RNA, 19 nt, Artificial Sequence
  Description of Artificial Sequence: Synthetic oligonucleotide
gaggcccaaggcagccagu

SEQ ID NO: 3143345 - RNA, 19 nt, Artificial Sequence
  Description of Artificial Sequence: Synthetic oligonucleotide
gcuggauucugagcagcuu

SEQ ID NO: 3143346 - RNA, 19 nt, Artificial Sequence
  Description of Artificial Sequence: Synthetic oligonucleotide
ccagagggguggagugaaa

SEQ ID NO: 3143347 - RNA, 19 nt, Artificial Sequence
  Description of Artificial Sequence: Synthetic oligonucleotide
cuggccccagcuggauucu

SEQ ID NO: 3143348 - RNA, 19 nt, Artificial Sequence
  Description of Artificial Sequence: Synthetic oligonucleotide
ggcccaaggcagccaguuu

SEQ ID NO: 3143349 - RNA, 19 nt, Artificial Sequence
  Description of Artificial Sequence: Synthetic oligonucleotide
cgaccacuugaaugagggu

SEQ ID NO: 3143350 - RNA, 19 nt, Artificial Sequence
  Description of Artificial Sequence: Synthetic oligonucleotide
ccaaggcagccaguuuggu

SEQ ID NO: 3143351 - RNA, 19 nt, Artificial Sequence
  Description of Artificial Sequence: Synthetic oligonucleotide
  modified_base (10)..(10): a, c, u, g, unknown or other
aguacaaacncucaagucc

SEQ ID NO: 3143352 - RNA, 19 nt, Artificial Sequence
  Description of Artificial Sequence: Synthetic oligonucleotide
aauaggacgauuuugcuuc

SEQ ID NO: 3143353 - RNA, 19 nt, Artificial Sequence
  Description of Artificial Sequence: Synthetic oligonucleotide
  modified_base (10)..(10): a, c, u, g, unknown or other
uuuugcuucnguuucuugg

SEQ ID NO: 3143354 - RNA, 19 nt, Artificial Sequence
  Description of Artificial Sequence: Synthetic oligonucleotide
uugaucaugauucaguaca

SEQ ID NO: 3143355 - RNA, 19 nt, Artificial Sequence
  Description of Artificial Sequence: Synthetic oligonucleotide
uguaugaauccuuacaggc

SEQ ID NO: 3143356 - RNA, 19 nt, Artificial Sequence
  Description of Artificial Sequence: Synthetic oligonucleotide
auuguaugaauccuuacag

SEQ ID NO: 3143357 - RNA, 19 nt, Artificial Sequence
  Description of Artificial Sequence: Synthetic oligonucleotide
uccacugaggaauaggacg

SEQ ID NO: 3143358 - RNA, 19 nt, Artificial Sequence
  Description of Artificial Sequence: Synthetic oligonucleotide
uaugaauccuuacaggccc

SEQ ID NO: 3143359 - RNA, 19 nt, Artificial Sequence
  Description of Artificial Sequence: Synthetic oligonucleotide
aucaugauucaguacaaac

SEQ ID NO: 3143360 - RNA, 19 nt, Artificial Sequence
  Description of Artificial Sequence: Synthetic oligonucleotide
  modified_base (19)..(19): a, c, u, g, unknown or other
ucaugauucaguacaaacn

SEQ ID NO: 3143361 - RNA, 19 nt, Artificial Sequence
  Description of Artificial Sequence: Synthetic oligonucleotide
  modified_base (14)..(14): a, c, u, g, unknown or other
acgauuuugcuucnguuuc

SEQ ID NO: 3143362 - RNA, 19 nt, Artificial Sequence
  Description of Artificial Sequence: Synthetic oligonucleotide
  modified_base (16)..(16): a, c, u, g, unknown or other
ugauucaguacaaacncuc

SEQ ID NO: 3143363 - RNA, 19 nt, Artificial Sequence
  Description of Artificial Sequence: Synthetic oligonucleotide
  modified_base (13)..(13): a, c, u, g, unknown or other
uucaguacaaacncucaag

SEQ ID NO: 3143364 - RNA, 19 nt, Artificial Sequence
  Description of Artificial Sequence: Synthetic oligonucleotide
uuuguaccgguuuucaucc

SEQ ID NO: 3143365 - RNA, 19 nt, Artificial Sequence
  Description of Artificial Sequence: Synthetic oligonucleotide
  modified_base (18)..(18): a, c, u, g, unknown or other
caugauucaguacaaacnc

SEQ ID NO: 3143366 - RNA, 19 nt, Artificial Sequence
  Description of Artificial Sequence: Synthetic oligonucleotide
uuuucauccgaauccacug

SEQ ID NO: 3143367 - RNA, 19 nt, Artificial Sequence
  Description of Artificial Sequence: Synthetic oligonucleotide
uuguaugaauccuuacagg

SEQ ID NO: 3143368 - RNA, 19 nt, Artificial Sequence
  Description of Artificial Sequence: Synthetic oligonucleotide
aggaauaggacgauuuugc

SEQ ID NO: 3143369 - RNA, 19 nt, Artificial Sequence
  Description of Artificial Sequence: Synthetic oligonucleotide
uguaccugauuuuguaccg

SEQ ID NO: 3143370 - RNA, 19 nt, Artificial Sequence
  Description of Artificial Sequence: Synthetic oligonucleotide
  modified_base (12)..(12): a, c, u, g, unknown or other
ucaguacaaacncucaagu

SEQ ID NO: 3143371 - RNA, 19 nt, Artificial Sequence
  Description of Artificial Sequence: Synthetic oligonucleotide
gauuguaugaauccuuaca

SEQ ID NO: 3143372 - RNA, 19 nt, Artificial Sequence
  Description of Artificial Sequence: Synthetic oligonucleotide
aauccuuacaggcccagcu

SEQ ID NO: 3143373 - RNA, 19 nt, Artificial Sequence
  Description of Artificial Sequence: Synthetic oligonucleotide
  modified_base (9)..(9): a, c, u, g, unknown or other
uuugcuucnguuucuuggc

SEQ ID NO: 3143374 - RNA, 19 nt, Artificial Sequence
  Description of Artificial Sequence: Synthetic oligonucleotide
uuguaccugauuuuguacc

SEQ ID NO: 3143375 - RNA, 19 nt, Artificial Sequence
  Description of Artificial Sequence: Synthetic oligonucleotide
auugaucaugauucaguac

SEQ ID NO: 3143376 - RNA, 19 nt, Artificial Sequence
  Description of Artificial Sequence: Synthetic oligonucleotide
uuuuguaccgguuuucauc

SEQ ID NO: 3143377 - RNA, 19 nt, Artificial Sequence
  Description of Artificial Sequence: Synthetic oligonucleotide
  modified_base (5)..(5): a, c, u, g, unknown or other
aaacncucaaguccugcca

SEQ ID NO: 3143378 - RNA, 19 nt, Artificial Sequence
  Description of Artificial Sequence: Synthetic oligonucleotide
uuggaguuguaccugauuu

SEQ ID NO: 3143379 - RNA, 19 nt, Artificial Sequence
  Description of Artificial Sequence: Synthetic oligonucleotide
  modified_base (7)..(7): a, c, u, g, unknown or other
acaaacncucaaguccugc

SEQ ID NO: 3143380 - RNA, 19 nt, Artificial Sequence
  Description of Artificial Sequence: Synthetic oligonucleotide
uucucuuggaguuguaccu

SEQ ID NO: 3143381 - RNA, 19 nt, Artificial Sequence
  Description of Artificial Sequence: Synthetic oligonucleotide
uucauccgaauccacugag

SEQ ID NO: 3143382 - RNA, 19 nt, Artificial Sequence
  Description of Artificial Sequence: Synthetic oligonucleotide
aauccacugaggaauagga

SEQ ID NO: 3143383 - RNA, 19 nt, Artificial Sequence
  Description of Artificial Sequence: Synthetic oligonucleotide
  modified_base (14)..(14): a, c, u, g, unknown or other
auucaguacaaacncucaa

SEQ ID NO: 3143384 - RNA, 19 nt, Artificial Sequence
  Description of Artificial Sequence: Synthetic oligonucleotide
accgguuuucauccgaauc

SEQ ID NO: 3143385 - RNA, 19 nt, Artificial Sequence
  Description of Artificial Sequence: Synthetic oligonucleotide
caaguccugccauugauug

SEQ ID NO: 3143386 - RNA, 19 nt, Artificial Sequence
  Description of Artificial Sequence: Synthetic oligonucleotide
  modified_base (4)..(4): a, c, u, g, unknown or other
aacncucaaguccugccau

SEQ ID NO: 3143387 - RNA, 19 nt, Artificial Sequence
  Description of Artificial Sequence: Synthetic oligonucleotide
ucauccgaauccacugagg

SEQ ID NO: 3143388 - RNA, 19 nt, Artificial Sequence
  Description of Artificial Sequence: Synthetic oligonucleotide
uugauuguaugaauccuua

SEQ ID NO: 3143389 - RNA, 19 nt, Artificial Sequence
  Description of Artificial Sequence: Synthetic oligonucleotide
  modified_base (6)..(6): a, c, u, g, unknown or other
caaacncucaaguccugcc

SEQ ID NO: 3143390 - RNA, 19 nt, Artificial Sequence
  Description of Artificial Sequence: Synthetic oligonucleotide
gaauccacugaggaauagg

SEQ ID NO: 3143391 - RNA, 19 nt, Artificial Sequence
  Description of Artificial Sequence: Synthetic oligonucleotide
uccuuacaggcccagcuug

SEQ ID NO: 3143392 - RNA, 19 nt, Artificial Sequence
  Description of Artificial Sequence: Synthetic oligonucleotide
uccgaauccacugaggaau

SEQ ID NO: 3143393 - RNA, 19 nt, Artificial Sequence
  Description of Artificial Sequence: Synthetic oligonucleotide
uuucauccgaauccacuga

SEQ ID NO: 3143394 - RNA, 19 nt, Artificial Sequence
  Description of Artificial Sequence: Synthetic oligonucleotide
gaggaauaggacgauuuug

SEQ ID NO: 3143395 - RNA, 19 nt, Artificial Sequence
  Description of Artificial Sequence: Synthetic oligonucleotide
  modified_base (7)..(7): a, c, u, g, unknown or other
ugcuucnguuucuuggcca

SEQ ID NO: 3143396 - RNA, 19 nt, Artificial Sequence
  Description of Artificial Sequence: Synthetic oligonucleotide
uucuuggccaggaaucgcu

SEQ ID NO: 3143397 - RNA, 19 nt, Artificial Sequence
  Description of Artificial Sequence: Synthetic oligonucleotide
uguaccgguuuucauccga

SEQ ID NO: 3143398 - RNA, 19 nt, Artificial Sequence
  Description of Artificial Sequence: Synthetic oligonucleotide
ugaucaugauucaguacaa

SEQ ID NO: 3143399 - RNA, 19 nt, Artificial Sequence
  Description of Artificial Sequence: Synthetic oligonucleotide
guaugaauccuuacaggcc

SEQ ID NO: 3143400 - RNA, 19 nt, Artificial Sequence
  Description of Artificial Sequence: Synthetic oligonucleotide
guuguaccugauuuuguac

SEQ ID NO: 3143401 - RNA, 19 nt, Artificial Sequence
  Description of Artificial Sequence: Synthetic oligonucleotide
guuucuuggccaggaaucg

SEQ ID NO: 3143402 - RNA, 19 nt, Artificial Sequence
  Description of Artificial Sequence: Synthetic oligonucleotide
ugauuguaugaauccuuac

SEQ ID NO: 3143403 - RNA, 19 nt, Artificial Sequence
  Description of Artificial Sequence: Synthetic oligonucleotide
uacaggcccagcuugguuc

SEQ ID NO: 3143404 - RNA, 19 nt, Artificial Sequence
  Description of Artificial Sequence: Synthetic oligonucleotide
aguuguaccugauuuugua

SEQ ID NO: 3143405 - RNA, 19 nt, Artificial Sequence
  Description of Artificial Sequence: Synthetic oligonucleotide
ccauugauuguaugaaucc

SEQ ID NO: 3143406 - RNA, 19 nt, Artificial Sequence
  Description of Artificial Sequence: Synthetic oligonucleotide
  modified_base (11)..(11): a, c, u, g, unknown or other
caguacaaacncucaaguc

SEQ ID NO: 3143407 - RNA, 19 nt, Artificial Sequence
  Description of Artificial Sequence: Synthetic oligonucleotide
  modified_base (8)..(8): a, c, u, g, unknown or other
uugcuucnguuucuuggcc

SEQ ID NO: 3143408 - RNA, 19 nt, Artificial Sequence
  Description of Artificial Sequence: Synthetic oligonucleotide
  modified_base (4)..(4): a, c, u, g, unknown or other
uucnguuucuuggccagga

SEQ ID NO: 3143409 - RNA, 19 nt, Artificial Sequence
  Description of Artificial Sequence: Synthetic oligonucleotide
ugaggaauaggacgauuuu

SEQ ID NO: 3143410 - RNA, 19 nt, Artificial Sequence
  Description of Artificial Sequence: Synthetic oligonucleotide
gauuuuguaccgguuuuca

SEQ ID NO: 3143411 - RNA, 19 nt, Artificial Sequence
  Description of Artificial Sequence: Synthetic oligonucleotide
  modified_base (11)..(11): a, c, u, g, unknown or other
auuuugcuucnguuucuug

SEQ ID NO: 3143412 - RNA, 19 nt, Artificial Sequence
  Description of Artificial Sequence: Synthetic oligonucleotide
ccgguuuucauccgaaucc

SEQ ID NO: 3143413 - RNA, 19 nt, Artificial Sequence
  Description of Artificial Sequence: Synthetic oligonucleotide
  modified_base (15)..(15): a, c, u, g, unknown or other
gauucaguacaaacncuca

SEQ ID NO: 3143414 - RNA, 19 nt, Artificial Sequence
  Description of Artificial Sequence: Synthetic oligonucleotide
ucaaguccugccauugauu

SEQ ID NO: 3143415 - RNA, 19 nt, Artificial Sequence
  Description of Artificial Sequence: Synthetic oligonucleotide
  modified_base (8)..(8): a, c, u, g, unknown or other
uacaaacncucaaguccug

SEQ ID NO: 3143416 - RNA, 19 nt, Artificial Sequence
  Description of Artificial Sequence: Synthetic oligonucleotide
uaccugauuuuguaccggu

SEQ ID NO: 3143417 - RNA, 19 nt, Artificial Sequence
  Description of Artificial Sequence: Synthetic oligonucleotide
cauccgaauccacugagga

SEQ ID NO: 3143418 - RNA, 19 nt, Artificial Sequence
  Description of Artificial Sequence: Synthetic oligonucleotide
aaguccugccauugauugu

SEQ ID NO: 3143419 - RNA, 19 nt, Artificial Sequence
  Description of Artificial Sequence: Synthetic oligonucleotide
auuuuguaccgguuuucau

SEQ ID NO: 3143420 - RNA, 19 nt, Artificial Sequence
  Description of Artificial Sequence: Synthetic oligonucleotide
  modified_base (17)..(17): a, c, u, g, unknown or other
aggacgauuuugcuucngu

SEQ ID NO: 3143421 - RNA, 19 nt, Artificial Sequence
  Description of Artificial Sequence: Synthetic oligonucleotide
ucucuuggaguuguaccug

SEQ ID NO: 3143422 - RNA, 19 nt, Artificial Sequence
  Description of Artificial Sequence: Synthetic oligonucleotide
auugauuguaugaauccuu

SEQ ID NO: 3143423 - RNA, 19 nt, Artificial Sequence
  Description of Artificial Sequence: Synthetic oligonucleotide
ugauuuuguaccgguuuuc

SEQ ID NO: 3143424 - RNA, 19 nt, Artificial Sequence
  Description of Artificial Sequence: Synthetic oligonucleotide
ggaguuguaccugauuuug

SEQ ID NO: 3143425 - RNA, 19 nt, Artificial Sequence
  Description of Artificial Sequence: Synthetic oligonucleotide
auccacugaggaauaggac

SEQ ID NO: 3143426 - RNA, 19 nt, Artificial Sequence
  Description of Artificial Sequence: Synthetic oligonucleotide
ugccauugauuguaugaau

SEQ ID NO: 3143427 - RNA, 19 nt, Artificial Sequence
  Description of Artificial Sequence: Synthetic oligonucleotide
uggaguuguaccugauuuu

SEQ ID NO: 3143428 - RNA, 19 nt, Artificial Sequence
  Description of Artificial Sequence: Synthetic oligonucleotide
guaccugauuuuguaccgg

SEQ ID NO: 3143429 - RNA, 19 nt, Artificial Sequence
  Description of Artificial Sequence: Synthetic oligonucleotide
ugucuucucuuggaguugu

SEQ ID NO: 3143430 - RNA, 19 nt, Artificial Sequence
  Description of Artificial Sequence: Synthetic oligonucleotide
gaauaggacgauuuugcuu

SEQ ID NO: 3143431 - RNA, 19 nt, Artificial Sequence
  Description of Artificial Sequence: Synthetic oligonucleotide
uuucuuggccaggaaucgc

SEQ ID NO: 3143432 - RNA, 19 nt, Artificial Sequence
  Description of Artificial Sequence: Synthetic oligonucleotide
uuguaccgguuuucauccg

SEQ ID NO: 3143433 - RNA, 19 nt, Artificial Sequence
  Description of Artificial Sequence: Synthetic oligonucleotide
ugguucuccuccagugucu

SEQ ID NO: 3143434 - RNA, 19 nt, Artificial Sequence
  Description of Artificial Sequence: Synthetic oligonucleotide
  modified_base (3)..(3): a, c, u, g, unknown or other
ucnguuucuuggccaggaa

SEQ ID NO: 3143435 - RNA, 19 nt, Artificial Sequence
  Description of Artificial Sequence: Synthetic oligonucleotide
  modified_base (15)..(15): a, c, u, g, unknown or other
gacgauuuugcuucnguuu

SEQ ID NO: 3143436 - RNA, 19 nt, Artificial Sequence
  Description of Artificial Sequence: Synthetic oligonucleotide
  modified_base (9)..(9): a, c, u, g, unknown or other
guacaaacncucaaguccu

SEQ ID NO: 3143437 - RNA, 19 nt, Artificial Sequence
  Description of Artificial Sequence: Synthetic oligonucleotide
  modified_base (17)..(17): a, c, u, g, unknown or other
augauucaguacaaacncu

SEQ ID NO: 3143438 - RNA, 19 nt, Artificial Sequence
  Description of Artificial Sequence: Synthetic oligonucleotide
cuccagugucuucucuugg

SEQ ID NO: 3143439 - RNA, 19 nt, Artificial Sequence
  Description of Artificial Sequence: Synthetic oligonucleotide
  modified_base (6)..(6): a, c, u, g, unknown or other
gcuucnguuucuuggccag

SEQ ID NO: 3143440 - RNA, 19 nt, Artificial Sequence
  Description of Artificial Sequence: Synthetic oligonucleotide
gccaggaaucgcuugauuc

SEQ ID NO: 3143441 - RNA, 19 nt, Artificial Sequence
  Description of Artificial Sequence: Synthetic oligonucleotide
aguccugccauugauugua

SEQ ID NO: 3143442 - RNA, 19 nt, Artificial Sequence
  Description of Artificial Sequence: Synthetic oligonucleotide
  modified_base (2)..(2): a, c, u, g, unknown or other
cncucaaguccugccauug

SEQ ID NO: 3143443 - RNA, 19 nt, Artificial Sequence
  Description of Artificial Sequence: Synthetic oligonucleotide
  modified_base (19)..(19): a, c, u, g, unknown or other
auaggacgauuuugcuucn

SEQ ID NO: 3143444 - RNA, 19 nt, Artificial Sequence
  Description of Artificial Sequence: Synthetic oligonucleotide
auccgaauccacugaggaa

SEQ ID NO: 3143445 - RNA, 19 nt, Artificial Sequence
  Description of Artificial Sequence: Synthetic oligonucleotide
ucuuggaguuguaccugau

SEQ ID NO: 3143446 - RNA, 19 nt, Artificial Sequence
  Description of Artificial Sequence: Synthetic oligonucleotide
uccugccauugauuguaug

SEQ ID NO: 3143447 - RNA, 19 nt, Artificial Sequence
  Description of Artificial Sequence: Synthetic oligonucleotide
acaggcccagcuugguucu

SEQ ID NO: 3143448 - RNA, 19 nt, Artificial Sequence
  Description of Artificial Sequence: Synthetic oligonucleotide
  modified_base (5)..(5): a, c, u, g, unknown or other
cuucnguuucuuggccagg

SEQ ID NO: 3143449 - RNA, 19 nt, Artificial Sequence
  Description of Artificial Sequence: Synthetic oligonucleotide
agcuugguucuccuccagu

SEQ ID NO: 3143450 - RNA, 19 nt, Artificial Sequence
  Description of Artificial Sequence: Synthetic oligonucleotide
gaauccuuacaggcccagc

SEQ ID NO: 3143451 - RNA, 19 nt, Artificial Sequence
  Description of Artificial Sequence: Synthetic oligonucleotide
gccauugauuguaugaauc

SEQ ID NO: 3143452 - RNA, 19 nt, Artificial Sequence
  Description of Artificial Sequence: Synthetic oligonucleotide
uuacaggcccagcuugguu

SEQ ID NO: 3143453 - RNA, 19 nt, Artificial Sequence
  Description of Artificial Sequence: Synthetic oligonucleotide
ccugccauugauuguauga

SEQ ID NO: 3143454 - RNA, 19 nt, Artificial Sequence
  Description of Artificial Sequence: Synthetic oligonucleotide
cccagcuugguucuccucc

SEQ ID NO: 3143455 - RNA, 19 nt, Artificial Sequence
  Description of Artificial Sequence: Synthetic oligonucleotide
aggcccagcuugguucucc

SEQ ID NO: 3143456 - RNA, 19 nt, Artificial Sequence
  Description of Artificial Sequence: Synthetic oligonucleotide
gaucaugauucaguacaaa

SEQ ID NO: 3143457 - RNA, 19 nt, Artificial Sequence
  Description of Artificial Sequence: Synthetic oligonucleotide
auccuuacaggcccagcuu

SEQ ID NO: 3143458 - RNA, 19 nt, Artificial Sequence
  Description of Artificial Sequence: Synthetic oligonucleotide
guuuucauccgaauccacu

SEQ ID NO: 3143459 - RNA, 19 nt, Artificial Sequence
  Description of Artificial Sequence: Synthetic oligonucleotide
ucuuggccaggaaucgcuu

SEQ ID NO: 3143460 - RNA, 19 nt, Artificial Sequence
  Description of Artificial Sequence: Synthetic oligonucleotide
cucuuggaguuguaccuga

SEQ ID NO: 3143461 - RNA, 19 nt, Artificial Sequence
  Description of Artificial Sequence: Synthetic oligonucleotide
  modified_base (18)..(18): a, c, u, g, unknown or other
uaggacgauuuugcuucng

SEQ ID NO: 3143462 - RNA, 19 nt, Artificial Sequence
  Description of Artificial Sequence: Synthetic oligonucleotide
cauugauuguaugaauccu

SEQ ID NO: 3143463 - RNA, 19 nt, Artificial Sequence
  Description of Artificial Sequence: Synthetic oligonucleotide
ccuuacaggcccagcuugg

SEQ ID NO: 3143464 - RNA, 19 nt, Artificial Sequence
  Description of Artificial Sequence: Synthetic oligonucleotide
cugaggaauaggacgauuu

SEQ ID NO: 3143465 - RNA, 19 nt, Artificial Sequence
  Description of Artificial Sequence: Synthetic oligonucleotide
cugccauugauuguaugaa

SEQ ID NO: 3143466 - RNA, 19 nt, Artificial Sequence
  Description of Artificial Sequence: Synthetic oligonucleotide
ccagugucuucucuuggag

SEQ ID NO: 3143467 - RNA, 19 nt, Artificial Sequence
  Description of Artificial Sequence: Synthetic oligonucleotide
  modified_base (3)..(3): a, c, u, g, unknown or other
acncucaaguccugccauu

SEQ ID NO: 3143468 - RNA, 19 nt, Artificial Sequence
  Description of Artificial Sequence: Synthetic oligonucleotide
uaccgguuuucauccgaau

SEQ ID NO: 3143469 - RNA, 19 nt, Artificial Sequence
  Description of Artificial Sequence: Synthetic oligonucleotide
ccacugaggaauaggacga

SEQ ID NO: 3143470 - RNA, 19 nt, Artificial Sequence
  Description of Artificial Sequence: Synthetic oligonucleotide
acugaggaauaggacgauu

SEQ ID NO: 3143471 - RNA, 19 nt, Artificial Sequence
  Description of Artificial Sequence: Synthetic oligonucleotide
ggaauaggacgauuuugcu

SEQ ID NO: 3143472 - RNA, 19 nt, Artificial Sequence
  Description of Artificial Sequence: Synthetic oligonucleotide
ggaaucgcuugauucugaa

SEQ ID NO: 3143473 - RNA, 19 nt, Artificial Sequence
  Description of Artificial Sequence: Synthetic oligonucleotide
ccuccagugucuucucuug

SEQ ID NO: 3143474 - RNA, 19 nt, Artificial Sequence
  Description of Artificial Sequence: Synthetic oligonucleotide
aggaaucgcuugauucuga

SEQ ID NO: 3143475 - RNA, 19 nt, Artificial Sequence
  Description of Artificial Sequence: Synthetic oligonucleotide
augaauccuuacaggccca

SEQ ID NO: 3143476 - RNA, 19 nt, Artificial Sequence
  Description of Artificial Sequence: Synthetic oligonucleotide
  modified_base (12)..(12): a, c, u, g, unknown or other
gauuuugcuucnguuucuu

SEQ ID NO: 3143477 - RNA, 19 nt, Artificial Sequence
  Description of Artificial Sequence: Synthetic oligonucleotide
cugauuuuguaccgguuuu

SEQ ID NO: 3143478 - RNA, 19 nt, Artificial Sequence
  Description of Artificial Sequence: Synthetic oligonucleotide
  modified_base (2)..(2): a, c, u, g, unknown or other
cnguuucuuggccaggaau

SEQ ID NO: 3143479 - RNA, 19 nt, Artificial Sequence
  Description of Artificial Sequence: Synthetic oligonucleotide
cucaaguccugccauugau

SEQ ID NO: 3143480 - RNA, 19 nt, Artificial Sequence
  Description of Artificial Sequence: Synthetic oligonucleotide
  modified_base (16)..(16): a, c, u, g, unknown or other
ggacgauuuugcuucnguu

SEQ ID NO: 3143481 - RNA, 19 nt, Artificial Sequence
  Description of Artificial Sequence: Synthetic oligonucleotide
gguuuucauccgaauccac

SEQ ID NO: 3143482 - RNA, 19 nt, Artificial Sequence
  Description of Artificial Sequence: Synthetic oligonucleotide
cagugucuucucuuggagu

SEQ ID NO: 3143483 - RNA, 19 nt, Artificial Sequence
  Description of Artificial Sequence: Synthetic oligonucleotide
guaccgguuuucauccgaa

SEQ ID NO: 3143484 - RNA, 19 nt, Artificial Sequence
  Description of Artificial Sequence: Synthetic oligonucleotide
uggccaggaaucgcuugau

SEQ ID NO: 3143485 - RNA, 19 nt, Artificial Sequence
  Description of Artificial Sequence: Synthetic oligonucleotide
ccaggaaucgcuugauucu

SEQ ID NO: 3143486 - RNA, 19 nt, Artificial Sequence
  Description of Artificial Sequence: Synthetic oligonucleotide
accugauuuuguaccgguu

SEQ ID NO: 3143487 - RNA, 19 nt, Artificial Sequence
  Description of Artificial Sequence: Synthetic oligonucleotide
cuuggaguuguaccugauu

SEQ ID NO: 3143488 - RNA, 19 nt, Artificial Sequence
  Description of Artificial Sequence: Synthetic oligonucleotide
ccugauuuuguaccgguuu

SEQ ID NO: 3143489 - RNA, 19 nt, Artificial Sequence
  Description of Artificial Sequence: Synthetic oligonucleotide
cuuacaggcccagcuuggu

SEQ ID NO: 3143490 - RNA, 19 nt, Artificial Sequence
  Description of Artificial Sequence: Synthetic oligonucleotide
cgaauccacugaggaauag

SEQ ID NO: 3143491 - RNA, 19 nt, Artificial Sequence
  Description of Artificial Sequence: Synthetic oligonucleotide
cgguuuucauccgaaucca

SEQ ID NO: 3143492 - RNA, 19 nt, Artificial Sequence
  Description of Artificial Sequence: Synthetic oligonucleotide
ccgaauccacugaggaaua

SEQ ID NO: 3143493 - RNA, 19 nt, Artificial Sequence
  Description of Artificial Sequence: Synthetic oligonucleotide
  modified_base (13)..(13): a, c, u, g, unknown or other
cgauuuugcuucnguuucu

SEQ ID NO: 3143494 - RNA, 19 nt, Artificial Sequence
  Description of Artificial Sequence: Synthetic oligonucleotide
gcccagcuugguucuccuc

SEQ ID NO: 3143495 - RNA, 19 nt, Artificial Sequence
  Description of Artificial Sequence: Synthetic oligonucleotide
cacugaggaauaggacgau

SEQ ID NO: 3143496 - RNA, 19 nt, Artificial Sequence
  Description of Artificial Sequence: Synthetic oligonucleotide
caggcccagcuugguucuc

SEQ ID NO: 3143497 - RNA, 19 nt, Artificial Sequence
  Description of Artificial Sequence: Synthetic oligonucleotide
gguucuccuccagugucuu

SEQ ID NO: 3143498 - RNA, 19 nt, Artificial Sequence
  Description of Artificial Sequence: Synthetic oligonucleotide
guccugccauugauuguau

SEQ ID NO: 3143499 - RNA, 19 nt, Artificial Sequence
  Description of Artificial Sequence: Synthetic oligonucleotide
  modified_base (1)..(1): a, c, u, g, unknown or other
nguuucuuggccaggaauc

SEQ ID NO: 3143500 - RNA, 19 nt, Artificial Sequence
  Description of Artificial Sequence: Synthetic oligonucleotide
  modified_base (1)..(1): a, c, u, g, unknown or other
ncucaaguccugccauuga

SEQ ID NO: 3143501 - RNA, 19 nt, Artificial Sequence
  Description of Artificial Sequence: Synthetic oligonucleotide
ucagcuuugaagaacuggg

SEQ ID NO: 3143502 - RNA, 19 nt, Artificial Sequence
  Description of Artificial Sequence: Synthetic oligonucleotide
ugaugaucagcuuugaaga

SEQ ID NO: 3143503 - RNA, 19 nt, Artificial Sequence
  Description of Artificial Sequence: Synthetic oligonucleotide
cuugacaagaagagaagcg

SEQ ID NO: 3143504 - RNA, 19 nt, Artificial Sequence
  Description of Artificial Sequence: Synthetic oligonucleotide
cugaugaucagcuuugaag

SEQ ID NO: 3143505 - RNA, 19 nt, Artificial Sequence
  Description of Artificial Sequence: Synthetic oligonucleotide
aagaagagaagcgggaagg

SEQ ID NO: 3143506 - RNA, 19 nt, Artificial Sequence
  Description of Artificial Sequence: Synthetic oligonucleotide
ugacaagaagagaagcggg

SEQ ID NO: 3143507 - RNA, 19 nt, Artificial Sequence
  Description of Artificial Sequence: Synthetic oligonucleotide
uugacaagaagagaagcgg

SEQ ID NO: 3143508 - RNA, 19 nt, Artificial Sequence
  Description of Artificial Sequence: Synthetic oligonucleotide
uguuggucacuucugauga

SEQ ID NO: 3143509 - RNA, 19 nt, Artificial Sequence
  Description of Artificial Sequence: Synthetic oligonucleotide
ugaucagcuuugaagaacu

SEQ ID NO: 3143510 - RNA, 19 nt, Artificial Sequence
  Description of Artificial Sequence: Synthetic oligonucleotide
ucuacauccaccuguccca

SEQ ID NO: 3143511 - RNA, 19 nt, Artificial Sequence
  Description of Artificial Sequence: Synthetic oligonucleotide
ucacuucugaugaucagcu

SEQ ID NO: 3143512 - RNA, 19 nt, Artificial Sequence
  Description of Artificial Sequence: Synthetic oligonucleotide
ucuugacaagaagagaagc

SEQ ID NO: 3143513 - RNA, 19 nt, Artificial Sequence
  Description of Artificial Sequence: Synthetic oligonucleotide
agagaagcgggaaggaggc

SEQ ID NO: 3143514 - RNA, 19 nt, Artificial Sequence
  Description of Artificial Sequence: Synthetic oligonucleotide
cucuacauccaccuguccc

SEQ ID NO: 3143515 - RNA, 19 nt, Artificial Sequence
  Description of Artificial Sequence: Synthetic oligonucleotide
agcaucuuguguuggucac

SEQ ID NO: 3143516 - RNA, 19 nt, Artificial Sequence
  Description of Artificial Sequence: Synthetic oligonucleotide
augaucagcuuugaagaac

SEQ ID NO: 3143517 - RNA, 19 nt, Artificial Sequence
  Description of Artificial Sequence: Synthetic oligonucleotide
uuuaucuugccguccuccc

SEQ ID NO: 3143518 - RNA, 19 nt, Artificial Sequence
  Description of Artificial Sequence: Synthetic oligonucleotide
uaucuugccguccucccug

SEQ ID NO: 3143519 - RNA, 19 nt, Artificial Sequence
  Description of Artificial Sequence: Synthetic oligonucleotide
cuucugaugaucagcuuug

SEQ ID NO: 3143520 - RNA, 19 nt, Artificial Sequence
  Description of Artificial Sequence: Synthetic oligonucleotide
aucagcuuugaagaacugg

SEQ ID NO: 3143521 - RNA, 19 nt, Artificial Sequence
  Description of Artificial Sequence: Synthetic oligonucleotide
acuucugaugaucagcuuu

SEQ ID NO: 3143522 - RNA, 19 nt, Artificial Sequence
  Description of Artificial Sequence: Synthetic oligonucleotide
uuguguuggucacuucuga

SEQ ID NO: 3143523 - RNA, 19 nt, Artificial Sequence
  Description of Artificial Sequence: Synthetic oligonucleotide
acacccacaaggcuggacu

SEQ ID NO: 3143524 - RNA, 19 nt, Artificial Sequence
  Description of Artificial Sequence: Synthetic oligonucleotide
guguuggucacuucugaug

SEQ ID NO: 3143525 - RNA, 19 nt, Artificial Sequence
  Description of Artificial Sequence: Synthetic oligonucleotide
caaggcuggacucugcuuc

SEQ ID NO: 3143526 - RNA, 19 nt, Artificial Sequence
  Description of Artificial Sequence: Synthetic oligonucleotide
cuuuaucuugccguccucc

SEQ ID NO: 3143527 - RNA, 19 nt, Artificial Sequence
  Description of Artificial Sequence: Synthetic oligonucleotide
cuuguguuggucacuucug

SEQ ID NO: 3143528 - RNA, 19 nt, Artificial Sequence
  Description of Artificial Sequence: Synthetic oligonucleotide
cugcagcuucucuacaucc

SEQ ID NO: 3143529 - RNA, 19 nt, Artificial Sequence
  Description of Artificial Sequence: Synthetic oligonucleotide
gucacuucugaugaucagc

SEQ ID NO: 3143530 - RNA, 19 nt, Artificial Sequence
  Description of Artificial Sequence: Synthetic oligonucleotide
ucugaugaucagcuuugaa

SEQ ID NO: 3143531 - RNA, 19 nt, Artificial Sequence
  Description of Artificial Sequence: Synthetic oligonucleotide
uuaucuugccguccucccu

SEQ ID NO: 3143532 - RNA, 19 nt, Artificial Sequence
  Description of Artificial Sequence: Synthetic oligonucleotide
uccuuucucugcagcaucu

SEQ ID NO: 3143533 - RNA, 19 nt, Artificial Sequence
  Description of Artificial Sequence: Synthetic oligonucleotide
cugccuuuccuuucucugc

SEQ ID NO: 3143534 - RNA, 19 nt, Artificial Sequence
  Description of Artificial Sequence: Synthetic oligonucleotide
cuuucucugcagcaucuug

SEQ ID NO: 3143535 - RNA, 19 nt, Artificial Sequence
  Description of Artificial Sequence: Synthetic oligonucleotide
gaugaucagcuuugaagaa

SEQ ID NO: 3143536 - RNA, 19 nt, Artificial Sequence
  Description of Artificial Sequence: Synthetic oligonucleotide
uugccguccucccugcagc

SEQ ID NO: 3143537 - RNA, 19 nt, Artificial Sequence
  Description of Artificial Sequence: Synthetic oligonucleotide
acuuuaucuugccguccuc

SEQ ID NO: 3143538 - RNA, 19 nt, Artificial Sequence
  Description of Artificial Sequence: Synthetic oligonucleotide
uguguuggucacuucugau

SEQ ID NO: 3143539 - RNA, 19 nt, Artificial Sequence
  Description of Artificial Sequence: Synthetic oligonucleotide
ucuccugccuuuccuuucu

SEQ ID NO: 3143540 - RNA, 19 nt, Artificial Sequence
  Description of Artificial Sequence: Synthetic oligonucleotide
uuccuuucucugcagcauc

SEQ ID NO: 3143541 - RNA, 19 nt, Artificial Sequence
  Description of Artificial Sequence: Synthetic oligonucleotide
agaagcgggaaggaggcca

SEQ ID NO: 3143542 - RNA, 19 nt, Artificial Sequence
  Description of Artificial Sequence: Synthetic oligonucleotide
gaggccacacccacaaggc

SEQ ID NO: 3143543 - RNA, 19 nt, Artificial Sequence
  Description of Artificial Sequence: Synthetic oligonucleotide
aucuugccguccucccugc

SEQ ID NO: 3143544 - RNA, 19 nt, Artificial Sequence
  Description of Artificial Sequence: Synthetic oligonucleotide
uuggucacuucugaugauc

SEQ ID NO: 3143545 - RNA, 19 nt, Artificial Sequence
  Description of Artificial Sequence: Synthetic oligonucleotide
uccaccugucccacuuugc

SEQ ID NO: 3143546 - RNA, 19 nt, Artificial Sequence
  Description of Artificial Sequence: Synthetic oligonucleotide
ucucuacauccaccugucc

SEQ ID NO: 3143547 - RNA, 19 nt, Artificial Sequence
  Description of Artificial Sequence: Synthetic oligonucleotide
ucucugcagcaucuugugu

SEQ ID NO: 3143548 - RNA, 19 nt, Artificial Sequence
  Description of Artificial Sequence: Synthetic oligonucleotide
uuuccuuucucugcagcau

SEQ ID NO: 3143549 - RNA, 19 nt, Artificial Sequence
  Description of Artificial Sequence: Synthetic oligonucleotide
ugcagcaucuuguguuggu

SEQ ID NO: 3143550 - RNA, 19 nt, Artificial Sequence
  Description of Artificial Sequence: Synthetic oligonucleotide
cuugccguccucccugcag

SEQ ID NO: 3143551 - RNA, 19 nt, Artificial Sequence
  Description of Artificial Sequence: Synthetic oligonucleotide
ucccacuuugccuccucug

SEQ ID NO: 3143552 - RNA, 19 nt, Artificial Sequence
  Description of Artificial Sequence: Synthetic oligonucleotide
acauccaccugucccacuu

SEQ ID NO: 3143553 - RNA, 19 nt, Artificial Sequence
  Description of Artificial Sequence: Synthetic oligonucleotide
cuucucuacauccaccugu

SEQ ID NO: 3143554 - RNA, 19 nt, Artificial Sequence
  Description of Artificial Sequence: Synthetic oligonucleotide
gacuuuaucuugccguccu

SEQ ID NO: 3143555 - RNA, 19 nt, Artificial Sequence
  Description of Artificial Sequence: Synthetic oligonucleotide
aucuuguguuggucacuuc

SEQ ID NO: 3143556 - RNA, 19 nt, Artificial Sequence
  Description of Artificial Sequence: Synthetic oligonucleotide
agcgggaaggaggccacac

SEQ ID NO: 3143557 - RNA, 19 nt, Artificial Sequence
  Description of Artificial Sequence: Synthetic oligonucleotide
uucuccugccuuuccuuuc

SEQ ID NO: 3143558 - RNA, 19 nt, Artificial Sequence
  Description of Artificial Sequence: Synthetic oligonucleotide
cagcaucuuguguugguca

SEQ ID NO: 3143559 - RNA, 19 nt, Artificial Sequence
  Description of Artificial Sequence: Synthetic oligonucleotide
uucugaugaucagcuuuga

SEQ ID NO: 3143560 - RNA, 19 nt, Artificial Sequence
  Description of Artificial Sequence: Synthetic oligonucleotide
gaucagcuuugaagaacug

SEQ ID NO: 3143561 - RNA, 19 nt, Artificial Sequence
  Description of Artificial Sequence: Synthetic oligonucleotide
ggucacuucugaugaucag

SEQ ID NO: 3143562 - RNA, 19 nt, Artificial Sequence
  Description of Artificial Sequence: Synthetic oligonucleotide
gggacuuuaucuugccguc

SEQ ID NO: 3143563 - RNA, 19 nt, Artificial Sequence
  Description of Artificial Sequence: Synthetic oligonucleotide
ggggacuuuaucuugccgu

SEQ ID NO: 3143564 - RNA, 19 nt, Artificial Sequence
  Description of Artificial Sequence: Synthetic oligonucleotide
uccucccugcagcuucucu

SEQ ID NO: 3143565 - RNA, 19 nt, Artificial Sequence
  Description of Artificial Sequence: Synthetic oligonucleotide
gaagcgggaaggaggccac

SEQ ID NO: 3143566 - RNA, 19 nt, Artificial Sequence
  Description of Artificial Sequence: Synthetic oligonucleotide
aggccacacccacaaggcu

SEQ ID NO: 3143567 - RNA, 19 nt, Artificial Sequence
  Description of Artificial Sequence: Synthetic oligonucleotide
ccaccugucccacuuugcc

SEQ ID NO: 3143568 - RNA, 19 nt, Artificial Sequence
  Description of Artificial Sequence: Synthetic oligonucleotide
ucccugcagcuucucuaca

SEQ ID NO: 3143569 - RNA, 19 nt, Artificial Sequence
  Description of Artificial Sequence: Synthetic oligonucleotide
cugcagcaucuuguguugg

SEQ ID NO: 3143570 - RNA, 19 nt, Artificial Sequence
  Description of Artificial Sequence: Synthetic oligonucleotide
cuacauccaccugucccac

SEQ ID NO: 3143571 - RNA, 19 nt, Artificial Sequence
  Description of Artificial Sequence: Synthetic oligonucleotide
ugucccacuuugccuccuc

SEQ ID NO: 3143572 - RNA, 19 nt, Artificial Sequence
  Description of Artificial Sequence: Synthetic oligonucleotide
ggacuuuaucuugccgucc

SEQ ID NO: 3143573 - RNA, 19 nt, Artificial Sequence
  Description of Artificial Sequence: Synthetic oligonucleotide
cgggaaggaggccacaccc

SEQ ID NO: 3143574 - RNA, 19 nt, Artificial Sequence
  Description of Artificial Sequence: Synthetic oligonucleotide
ucuugccguccucccugca

SEQ ID NO: 3143575 - RNA, 19 nt, Artificial Sequence
  Description of Artificial Sequence: Synthetic oligonucleotide
gaaggaggccacacccaca

SEQ ID NO: 3143576 - RNA, 19 nt, Artificial Sequence
  Description of Artificial Sequence: Synthetic oligonucleotide
ggacucugcuucuccugcc

SEQ ID NO: 3143577 - RNA, 19 nt, Artificial Sequence
  Description of Artificial Sequence: Synthetic oligonucleotide
gagaagcgggaaggaggcc

SEQ ID NO: 3143578 - RNA, 19 nt, Artificial Sequence
  Description of Artificial Sequence: Synthetic oligonucleotide
gcuucucuacauccaccug

SEQ ID NO: 3143579 - RNA, 19 nt, Artificial Sequence
  Description of Artificial Sequence: Synthetic oligonucleotide
acccacaaggcuggacucu

SEQ ID NO: 3143580 - RNA, 19 nt, Artificial Sequence
  Description of Artificial Sequence: Synthetic oligonucleotide
ugccguccucccugcagcu

SEQ ID NO: 3143581 - RNA, 19 nt, Artificial Sequence
  Description of Artificial Sequence: Synthetic oligonucleotide
ccugcagcuucucuacauc

SEQ ID NO: 3143582 - RNA, 19 nt, Artificial Sequence
  Description of Artificial Sequence: Synthetic oligonucleotide
cacacccacaaggcuggac

SEQ ID NO: 3143583 - RNA, 19 nt, Artificial Sequence
  Description of Artificial Sequence: Synthetic oligonucleotide
gcgggaaggaggccacacc

SEQ ID NO: 3143584 - RNA, 19 nt, Artificial Sequence
  Description of Artificial Sequence: Synthetic oligonucleotide
caccugucccacuuugccu

SEQ ID NO: 3143585 - RNA, 19 nt, Artificial Sequence
  Description of Artificial Sequence: Synthetic oligonucleotide
ccugucccacuuugccucc

SEQ ID NO: 3143586 - RNA, 19 nt, Artificial Sequence
  Description of Artificial Sequence: Synthetic oligonucleotide
ccacaaggcuggacucugc

SEQ ID NO: 3143587 - RNA, 19 nt, Artificial Sequence
  Description of Artificial Sequence: Synthetic oligonucleotide
caucuuguguuggucacuu

SEQ ID NO: 3143588 - RNA, 19 nt, Artificial Sequence
  Description of Artificial Sequence: Synthetic oligonucleotide
gggaaggaggccacaccca

SEQ ID NO: 3143589 - RNA, 19 nt, Artificial Sequence
  Description of Artificial Sequence: Synthetic oligonucleotide
cccacaaggcuggacucug

SEQ ID NO: 3143590 - RNA, 19 nt, Artificial Sequence
  Description of Artificial Sequence: Synthetic oligonucleotide
gucccacuuugccuccucu

SEQ ID NO: 3143591 - RNA, 19 nt, Artificial Sequence
  Description of Artificial Sequence: Synthetic oligonucleotide
ccucccugcagcuucucua

SEQ ID NO: 3143592 - RNA, 19 nt, Artificial Sequence
  Description of Artificial Sequence: Synthetic oligonucleotide
cacuucugaugaucagcuu

SEQ ID NO: 3143593 - RNA, 19 nt, Artificial Sequence
  Description of Artificial Sequence: Synthetic oligonucleotide
gcaucuuguguuggucacu

SEQ ID NO: 3143594 - RNA, 19 nt, Artificial Sequence
  Description of Artificial Sequence: Synthetic oligonucleotide
cauccaccugucccacuuu

SEQ ID NO: 3143595 - RNA, 19 nt, Artificial Sequence
  Description of Artificial Sequence: Synthetic oligonucleotide
guccucccugcagcuucuc

SEQ ID NO: 3143596 - RNA, 19 nt, Artificial Sequence
  Description of Artificial Sequence: Synthetic oligonucleotide
cugucccacuuugccuccu

SEQ ID NO: 3143597 - RNA, 19 nt, Artificial Sequence
  Description of Artificial Sequence: Synthetic oligonucleotide
ccuuucucugcagcaucuu

SEQ ID NO: 3143598 - RNA, 19 nt, Artificial Sequence
  Description of Artificial Sequence: Synthetic oligonucleotide
ccacacccacaaggcugga

SEQ ID NO: 3143599 - RNA, 19 nt, Artificial Sequence
  Description of Artificial Sequence: Synthetic oligonucleotide
gccguccucccugcagcuu

SEQ ID NO: 3143600 - RNA, 19 nt, Artificial Sequence
  Description of Artificial Sequence: Synthetic oligonucleotide
aacaucuuuacacacacac

SEQ ID NO: 3143601 - RNA, 19 nt, Artificial Sequence
  Description of Artificial Sequence: Synthetic oligonucleotide
auaacaucuuuacacacac

SEQ ID NO: 3143602 - RNA, 19 nt, Artificial Sequence
  Description of Artificial Sequence: Synthetic oligonucleotide
uuuacacacacacacacac

SEQ ID NO: 3143603 - RNA, 19 nt, Artificial Sequence
  Description of Artificial Sequence: Synthetic oligonucleotide
aaauguugcagugaaagcu

SEQ ID NO: 3143604 - RNA, 19 nt, Artificial Sequence
  Description of Artificial Sequence: Synthetic oligonucleotide
uguaauuauuuuauuuucu

SEQ ID NO: 3143605 - RNA, 19 nt, Artificial Sequence
  Description of Artificial Sequence: Synthetic oligonucleotide
ucuuuacacacacacacac

SEQ ID NO: 3143606 - RNA, 19 nt, Artificial Sequence
  Description of Artificial Sequence: Synthetic oligonucleotide
caucuuuacacacacacac

SEQ ID NO: 3143607 - RNA, 19 nt, Artificial Sequence
  Description of Artificial Sequence: Synthetic oligonucleotide
ugcagugaaagcuugagau

SEQ ID NO: 3143608 - RNA, 19 nt, Artificial Sequence
  Description of Artificial Sequence: Synthetic oligonucleotide
uacacacacacacacacac

SEQ ID NO: 3143609 - RNA, 19 nt, Artificial Sequence
  Description of Artificial Sequence: Synthetic oligonucleotide
uuguaauuauuuuauuuuc

SEQ ID NO: 3143610 - RNA, 19 nt, Artificial Sequence
  Description of Artificial Sequence: Synthetic oligonucleotide
uuuuccaacucaagcaugu

SEQ ID NO: 3143611 - RNA, 19 nt, Artificial Sequence
  Description of Artificial Sequence: Synthetic oligonucleotide
gaaauguugcagugaaagc

SEQ ID NO: 3143612 - RNA, 19 nt, Artificial Sequence
  Description of Artificial Sequence: Synthetic oligonucleotide
aauaacaucuuuacacaca

SEQ ID NO: 3143613 - RNA, 19 nt, Artificial Sequence
  Description of Artificial Sequence: Synthetic oligonucleotide
ugaaagcuugagauguugc

SEQ ID NO: 3143614 - RNA, 19 nt, Artificial Sequence
  Description of Artificial Sequence: Synthetic oligonucleotide
ggaaauguugcagugaaag

SEQ ID NO: 3143615 - RNA, 19 nt, Artificial Sequence
  Description of Artificial Sequence: Synthetic oligonucleotide
ucuuuccaggaaauguugc

SEQ ID NO: 3143616 - RNA, 19 nt, Artificial Sequence
  Description of Artificial Sequence: Synthetic oligonucleotide
uuuccaggaaauguugcag

SEQ ID NO: 3143617 - RNA, 19 nt, Artificial Sequence
  Description of Artificial Sequence: Synthetic oligonucleotide
cacacacacacacacacac

SEQ ID NO: 3143618 - RNA, 19 nt, Artificial Sequence
  Description of Artificial Sequence: Synthetic oligonucleotide
uccaacucaagcauguguu

SEQ ID NO: 3143619 - RNA, 19 nt, Artificial Sequence
  Description of Artificial Sequence: Synthetic oligonucleotide
gaaagcuugagauguugca

SEQ ID NO: 3143620 - RNA, 19 nt, Artificial Sequence
  Description of Artificial Sequence: Synthetic oligonucleotide
uuccaacucaagcaugugu

SEQ ID NO: 3143621 - RNA, 19 nt, Artificial Sequence
  Description of Artificial Sequence: Synthetic oligonucleotide
gagguugcugucuuuccag

SEQ ID NO: 3143622 - RNA, 19 nt, Artificial Sequence
  Description of Artificial Sequence: Synthetic oligonucleotide
aaagcuugagauguugcau

SEQ ID NO: 3143623 - RNA, 19 nt, Artificial Sequence
  Description of Artificial Sequence: Synthetic oligonucleotide
aagcuugagauguugcauu

SEQ ID NO: 3143624 - RNA, 19 nt, Artificial Sequence
  Description of Artificial Sequence: Synthetic oligonucleotide
ugucuuuccaggaaauguu

SEQ ID NO: 3143625 - RNA, 19 nt, Artificial Sequence
  Description of Artificial Sequence: Synthetic oligonucleotide
uuacacacacacacacaca

SEQ ID NO: 3143626 - RNA, 19 nt, Artificial Sequence
  Description of Artificial Sequence: Synthetic oligonucleotide
uugcagugaaagcuugaga

SEQ ID NO: 3143627 - RNA, 19 nt, Artificial Sequence
  Description of Artificial Sequence: Synthetic oligonucleotide
guugcagugaaagcuugag

SEQ ID NO: 3143628 - RNA, 19 nt, Artificial Sequence
  Description of Artificial Sequence: Synthetic oligonucleotide
uguugcagugaaagcuuga

SEQ ID NO: 3143629 - RNA, 19 nt, Artificial Sequence
  Description of Artificial Sequence: Synthetic oligonucleotide
agguugcugucuuuccagg

SEQ ID NO: 3143630 - RNA, 19 nt, Artificial Sequence
  Description of Artificial Sequence: Synthetic oligonucleotide
uugcugucuuuccaggaaa

SEQ ID NO: 3143631 - RNA, 19 nt, Artificial Sequence
  Description of Artificial Sequence: Synthetic oligonucleotide
uaacaucuuuacacacaca

SEQ ID NO: 3143632 - RNA, 19 nt, Artificial Sequence
  Description of Artificial Sequence: Synthetic oligonucleotide
guaauuauuuuauuuucuu

SEQ ID NO: 3143633 - RNA, 19 nt, Artificial Sequence
  Description of Artificial Sequence: Synthetic oligonucleotide
cuuuccaggaaauguugca

SEQ ID NO: 3143634 - RNA, 19 nt, Artificial Sequence
  Description of Artificial Sequence: Synthetic oligonucleotide
cuuuacacacacacacaca

SEQ ID NO: 3143635 - RNA, 19 nt, Artificial Sequence
  Description of Artificial Sequence: Synthetic oligonucleotide
agggaggggagguugcugu

SEQ ID NO: 3143636 - RNA, 19 nt, Artificial Sequence
  Description of Artificial Sequence: Synthetic oligonucleotide
gugaaagcuugagauguug

SEQ ID NO: 3143637 - RNA, 19 nt, Artificial Sequence
  Description of Artificial Sequence: Synthetic oligonucleotide
gucuuuccaggaaauguug

SEQ ID NO: 3143638 - RNA, 19 nt, Artificial Sequence
  Description of Artificial Sequence: Synthetic oligonucleotide
caggaaauguugcagugaa

SEQ ID NO: 3143639 - RNA, 19 nt, Artificial Sequence
  Description of Artificial Sequence: Synthetic oligonucleotide
ugcugucuuuccaggaaau

SEQ ID NO: 3143640 - RNA, 19 nt, Artificial Sequence
  Description of Artificial Sequence: Synthetic oligonucleotide
gcagugaaagcuugagaug

SEQ ID NO: 3143641 - RNA, 19 nt, Artificial Sequence
  Description of Artificial Sequence: Synthetic oligonucleotide
guugcugucuuuccaggaa

SEQ ID NO: 3143642 - RNA, 19 nt, Artificial Sequence
  Description of Artificial Sequence: Synthetic oligonucleotide
uuuccaacucaagcaugug

SEQ ID NO: 3143643 - RNA, 19 nt, Artificial Sequence
  Description of Artificial Sequence: Synthetic oligonucleotide
agcuugagauguugcauuu

SEQ ID NO: 3143644 - RNA, 19 nt, Artificial Sequence
  Description of Artificial Sequence: Synthetic oligonucleotide
aucuuuacacacacacaca

SEQ ID NO: 3143645 - RNA, 19 nt, Artificial Sequence
  Description of Artificial Sequence: Synthetic oligonucleotide
cagugaaagcuugagaugu

SEQ ID NO: 3143646 - RNA, 19 nt, Artificial Sequence
  Description of Artificial Sequence: Synthetic oligonucleotide
auguugcagugaaagcuug

SEQ ID NO: 3143647 - RNA, 19 nt, Artificial Sequence
  Description of Artificial Sequence: Synthetic oligonucleotide
cugucuuuccaggaaaugu

SEQ ID NO: 3143648 - RNA, 19 nt, Artificial Sequence
  Description of Artificial Sequence: Synthetic oligonucleotide
cacacacacacacacacuu

SEQ ID NO: 3143649 - RNA, 19 nt, Artificial Sequence
  Description of Artificial Sequence: Synthetic oligonucleotide
gggagguugcugucuuucc

SEQ ID NO: 3143650 - RNA, 19 nt, Artificial Sequence
  Description of Artificial Sequence: Synthetic oligonucleotide
gguugcugucuuuccagga

SEQ ID NO: 3143651 - RNA, 19 nt, Artificial Sequence
  Description of Artificial Sequence: Synthetic oligonucleotide
acacacacacacacacaca

SEQ ID NO: 3143652 - RNA, 19 nt, Artificial Sequence
  Description of Artificial Sequence: Synthetic oligonucleotide
acacacacacacacacacu

SEQ ID NO: 3143653 - RNA, 19 nt, Artificial Sequence
  Description of Artificial Sequence: Synthetic oligonucleotide
cacacacacacacacuuuu

SEQ ID NO: 3143654 - RNA, 19 nt, Artificial Sequence
  Description of Artificial Sequence: Synthetic oligonucleotide
gcugucuuuccaggaaaug

SEQ ID NO: 3143655 - RNA, 19 nt, Artificial Sequence
  Description of Artificial Sequence: Synthetic oligonucleotide
agugaaagcuugagauguu

SEQ ID NO: 3143656 - RNA, 19 nt, Artificial Sequence
  Description of Artificial Sequence: Synthetic oligonucleotide
aggaaauguugcagugaaa

SEQ ID NO: 3143657 - RNA, 19 nt, Artificial Sequence
  Description of Artificial Sequence: Synthetic oligonucleotide
acacacacacacacacuuu

SEQ ID NO: 3143658 - RNA, 19 nt, Artificial Sequence
  Description of Artificial Sequence: Synthetic oligonucleotide
ggggagguugcugucuuuc

SEQ ID NO: 3143659 - RNA, 19 nt, Artificial Sequence
  Description of Artificial Sequence: Synthetic oligonucleotide
caacucaagcauguguuuu

SEQ ID NO: 3143660 - RNA, 19 nt, Artificial Sequence
  Description of Artificial Sequence: Synthetic oligonucleotide
cccagggaggggagguugc

SEQ ID NO: 3143661 - RNA, 19 nt, Artificial Sequence
  Description of Artificial Sequence: Synthetic oligonucleotide
gaggggagguugcugucuu

SEQ ID NO: 3143662 - RNA, 19 nt, Artificial Sequence
  Description of Artificial Sequence: Synthetic oligonucleotide
aggggagguugcugucuuu

SEQ ID NO: 3143663 - RNA, 19 nt, Artificial Sequence
  Description of Artificial Sequence: Synthetic oligonucleotide
ccaggaaauguugcaguga

SEQ ID NO: 3143664 - RNA, 19 nt, Artificial Sequence
  Description of Artificial Sequence: Synthetic oligonucleotide
ggccgggccccagggaggg

SEQ ID NO: 3143665 - RNA, 19 nt, Artificial Sequence
  Description of Artificial Sequence: Synthetic oligonucleotide
gggccgggccccagggagg

SEQ ID NO: 3143666 - RNA, 19 nt, Artificial Sequence
  Description of Artificial Sequence: Synthetic oligonucleotide
ccccagggaggggagguug

SEQ ID NO: 3143667 - RNA, 19 nt, Artificial Sequence
  Description of Artificial Sequence: Synthetic oligonucleotide
ggaggggagguugcugucu

SEQ ID NO: 3143668 - RNA, 19 nt, Artificial Sequence
  Description of Artificial Sequence: Synthetic oligonucleotide
ccaacucaagcauguguuu

SEQ ID NO: 3143669 - RNA, 19 nt, Artificial Sequence
  Description of Artificial Sequence: Synthetic oligonucleotide
gcuugagauguugcauuuu

SEQ ID NO: 3143670 - RNA, 19 nt, Artificial Sequence
  Description of Artificial Sequence: Synthetic oligonucleotide
ggccccagggaggggaggu

SEQ ID NO: 3143671 - RNA, 19 nt, Artificial Sequence
  Description of Artificial Sequence: Synthetic oligonucleotide
ccgggccccagggagggga

SEQ ID NO: 3143672 - RNA, 19 nt, Artificial Sequence
  Description of Artificial Sequence: Synthetic oligonucleotide
gccgggccccagggagggg

SEQ ID NO: 3143673 - RNA, 19 nt, Artificial Sequence
  Description of Artificial Sequence: Synthetic oligonucleotide
ccagggaggggagguugcu

SEQ ID NO: 3143674 - RNA, 19 nt, Artificial Sequence
  Description of Artificial Sequence: Synthetic oligonucleotide
gccccagggaggggagguu

SEQ ID NO: 3143675 - RNA, 19 nt, Artificial Sequence
  Description of Artificial Sequence: Synthetic oligonucleotide
aauaauuaaagauacaauc

SEQ ID NO: 3143676 - RNA, 19 nt, Artificial Sequence
  Description of Artificial Sequence: Synthetic oligonucleotide
aauguaucuacucaauugc

SEQ ID NO: 3143677 - RNA, 19 nt, Artificial Sequence
  Description of Artificial Sequence: Synthetic oligonucleotide
uuuaaauaauuaaagauac

SEQ ID NO: 3143678 - RNA, 19 nt, Artificial Sequence
  Description of Artificial Sequence: Synthetic oligonucleotide
aaugaaucauaucuuugcc

SEQ ID NO: 3143679 - RNA, 19 nt, Artificial Sequence
  Description of Artificial Sequence: Synthetic oligonucleotide
uaaagauacaaucaaaacu

SEQ ID NO: 3143680 - RNA, 19 nt, Artificial Sequence
  Description of Artificial Sequence: Synthetic oligonucleotide
ucaauugcaauuuaaauaa

SEQ ID NO: 3143681 - RNA, 19 nt, Artificial Sequence
  Description of Artificial Sequence: Synthetic oligonucleotide
ugcaauuuaaauaauuaaa

SEQ ID NO: 3143682 - RNA, 19 nt, Artificial Sequence
  Description of Artificial Sequence: Synthetic oligonucleotide
aaagauacaaucaaaacuu

SEQ ID NO: 3143683 - RNA, 19 nt, Artificial Sequence
  Description of Artificial Sequence: Synthetic oligonucleotide
uugauuaagucaaugaauc

SEQ ID NO: 3143684 - RNA, 19 nt, Artificial Sequence
  Description of Artificial Sequence: Synthetic oligonucleotide
aucaaaacuugauuaaguc

SEQ ID NO: 3143685 - RNA, 19 nt, Artificial Sequence
  Description of Artificial Sequence: Synthetic oligonucleotide
uaauuaaagauacaaucaa

SEQ ID NO: 3143686 - RNA, 19 nt, Artificial Sequence
  Description of Artificial Sequence: Synthetic oligonucleotide
auaucuuugccucuuaaug

SEQ ID NO: 3143687 - RNA, 19 nt, Artificial Sequence
  Description of Artificial Sequence: Synthetic oligonucleotide
aaugcagaggagcacacug

SEQ ID NO: 3143688 - RNA, 19 nt, Artificial Sequence
  Description of Artificial Sequence: Synthetic oligonucleotide
uuaaagauacaaucaaaac

SEQ ID NO: 3143689 - RNA, 19 nt, Artificial Sequence
  Description of Artificial Sequence: Synthetic oligonucleotide
aacuugauuaagucaauga

SEQ ID NO: 3143690 - RNA, 19 nt, Artificial Sequence
  Description of Artificial Sequence: Synthetic oligonucleotide
ucaaaacuugauuaaguca

SEQ ID NO: 3143691 - RNA, 19 nt, Artificial Sequence
  Description of Artificial Sequence: Synthetic oligonucleotide
caaugaaucauaucuuugc

SEQ ID NO: 3143692 - RNA, 19 nt, Artificial Sequence
  Description of Artificial Sequence: Synthetic oligonucleotide
ucagggagggcaauguucg

SEQ ID NO: 3143693 - RNA, 19 nt, Artificial Sequence
  Description of Artificial Sequence: Synthetic oligonucleotide
uaucuuugccucuuaaugc

SEQ ID NO: 3143694 - RNA, 19 nt, Artificial Sequence
  Description of Artificial Sequence: Synthetic oligonucleotide
auaauuaaagauacaauca

SEQ ID NO: 3143695 - RNA, 19 nt, Artificial Sequence
  Description of Artificial Sequence: Synthetic oligonucleotide
ugaaucauaucuuugccuc

SEQ ID NO: 3143696 - RNA, 19 nt, Artificial Sequence
  Description of Artificial Sequence: Synthetic oligonucleotide
caauguaucuacucaauug

SEQ ID NO: 3143697 - RNA, 19 nt, Artificial Sequence
  Description of Artificial Sequence: Synthetic oligonucleotide
ucaaugaaucauaucuuug

SEQ ID NO: 3143698 - RNA, 19 nt, Artificial Sequence
  Description of Artificial Sequence: Synthetic oligonucleotide
auuuaaauaauuaaagaua

SEQ ID NO: 3143699 - RNA, 19 nt, Artificial Sequence
  Description of Artificial Sequence: Synthetic oligonucleotide
uuaaauaauuaaagauaca

SEQ ID NO: 3143700 - RNA, 19 nt, Artificial Sequence
  Description of Artificial Sequence: Synthetic oligonucleotide
ugccucuuaaugcagagga

SEQ ID NO: 3143701 - RNA, 19 nt, Artificial Sequence
  Description of Artificial Sequence: Synthetic oligonucleotide
caaaacuugauuaagucaa

SEQ ID NO: 3143702 - RNA, 19 nt, Artificial Sequence
  Description of Artificial Sequence: Synthetic oligonucleotide
caauuuaaauaauuaaaga

SEQ ID NO: 3143703 - RNA, 19 nt, Artificial Sequence
  Description of Artificial Sequence: Synthetic oligonucleotide
gcaauuuaaauaauuaaag

SEQ ID NO: 3143704 - RNA, 19 nt, Artificial Sequence
  Description of Artificial Sequence: Synthetic oligonucleotide
aaauaauuaaagauacaau

SEQ ID NO: 3143705 - RNA, 19 nt, Artificial Sequence
  Description of Artificial Sequence: Synthetic oligonucleotide
uugcaauuuaaauaauuaa

SEQ ID NO: 3143706 - RNA, 19 nt, Artificial Sequence
  Description of Artificial Sequence: Synthetic oligonucleotide
acuugauuaagucaaugaa

SEQ ID NO: 3143707 - RNA, 19 nt, Artificial Sequence
  Description of Artificial Sequence: Synthetic oligonucleotide
auuaaagauacaaucaaaa

SEQ ID NO: 3143708 - RNA, 19 nt, Artificial Sequence
  Description of Artificial Sequence: Synthetic oligonucleotide
aaucaaaacuugauuaagu

SEQ ID NO: 3143709 - RNA, 19 nt, Artificial Sequence
  Description of Artificial Sequence: Synthetic oligonucleotide
cacacugugagcuggaaug

SEQ ID NO: 3143710 - RNA, 19 nt, Artificial Sequence
  Description of Artificial Sequence: Synthetic oligonucleotide
uuaagucaaugaaucauau

SEQ ID NO: 3143711 - RNA, 19 nt, Artificial Sequence
  Description of Artificial Sequence: Synthetic oligonucleotide
agcaccaauguaucuacuc

SEQ ID NO: 3143712 - RNA, 19 nt, Artificial Sequence
  Description of Artificial Sequence: Synthetic oligonucleotide
cacacacucacacaguagc

SEQ ID NO: 3143713 - RNA, 19 nt, Artificial Sequence
  Description of Artificial Sequence: Synthetic oligonucleotide
aauguggcugcuccucagg

SEQ ID NO: 3143714 - RNA, 19 nt, Artificial Sequence
  Description of Artificial Sequence: Synthetic oligonucleotide
aauuaaagauacaaucaaa

SEQ ID NO: 3143715 - RNA, 19 nt, Artificial Sequence
  Description of Artificial Sequence: Synthetic oligonucleotide
uguaucuacucaauugcaa

SEQ ID NO: 3143716 - RNA, 19 nt, Artificial Sequence
  Description of Artificial Sequence: Synthetic oligonucleotide
ugauuaagucaaugaauca

SEQ ID NO: 3143717 - RNA, 19 nt, Artificial Sequence
  Description of Artificial Sequence: Synthetic oligonucleotide
uacucaauugcaauuuaaa

SEQ ID NO: 3143718 - RNA, 19 nt, Artificial Sequence
  Description of Artificial Sequence: Synthetic oligonucleotide
acaaucaaaacuugauuaa

SEQ ID NO: 3143719 - RNA, 19 nt, Artificial Sequence
  Description of Artificial Sequence: Synthetic oligonucleotide
cucaauugcaauuuaaaua

SEQ ID NO: 3143720 - RNA, 19 nt, Artificial Sequence
  Description of Artificial Sequence: Synthetic oligonucleotide
acucaauugcaauuuaaau

SEQ ID NO: 3143721 - RNA, 19 nt, Artificial Sequence
  Description of Artificial Sequence: Synthetic oligonucleotide
augaaucauaucuuugccu

SEQ ID NO: 3143722 - RNA, 19 nt, Artificial Sequence
  Description of Artificial Sequence: Synthetic oligonucleotide
cacaguagcagcaccaaug

SEQ ID NO: 3143723 - RNA, 19 nt, Artificial Sequence
  Description of Artificial Sequence: Synthetic oligonucleotide
aaacuugauuaagucaaug

SEQ ID NO: 3143724 - RNA, 19 nt, Artificial Sequence
  Description of Artificial Sequence: Synthetic oligonucleotide
uuugccucuuaaugcagag

SEQ ID NO: 3143725 - RNA, 19 nt, Artificial Sequence
  Description of Artificial Sequence: Synthetic oligonucleotide
aauugcaauuuaaauaauu

SEQ ID NO: 3143726 - RNA, 19 nt, Artificial Sequence
  Description of Artificial Sequence: Synthetic oligonucleotide
aucuuugccucuuaaugca

SEQ ID NO: 3143727 - RNA, 19 nt, Artificial Sequence
  Description of Artificial Sequence: Synthetic oligonucleotide
auacaaucaaaacuugauu

SEQ ID NO: 3143728 - RNA, 19 nt, Artificial Sequence
  Description of Artificial Sequence: Synthetic oligonucleotide
cagaggagcacacugugag

SEQ ID NO: 3143729 - RNA, 19 nt, Artificial Sequence
  Description of Artificial Sequence: Synthetic oligonucleotide
caaucaaaacuugauuaag

SEQ ID NO: 3143730 - RNA, 19 nt, Artificial Sequence
  Description of Artificial Sequence: Synthetic oligonucleotide
ugagcuggaauguggcugc

SEQ ID NO: 3143731 - RNA, 19 nt, Artificial Sequence
  Description of Artificial Sequence: Synthetic oligonucleotide
auugcaauuuaaauaauua

SEQ ID NO: 3143732 - RNA, 19 nt, Artificial Sequence
  Description of Artificial Sequence: Synthetic oligonucleotide
aguagcagcaccaauguau

SEQ ID NO: 3143733 - RNA, 19 nt, Artificial Sequence
  Description of Artificial Sequence: Synthetic oligonucleotide
ucacacaguagcagcacca

SEQ ID NO: 3143734 - RNA, 19 nt, Artificial Sequence
  Description of Artificial Sequence: Synthetic oligonucleotide
agaggagcacacugugagc

SEQ ID NO: 3143735 - RNA, 19 nt, Artificial Sequence
  Description of Artificial Sequence: Synthetic oligonucleotide
ugcagaggagcacacugug

SEQ ID NO: 3143736 - RNA, 19 nt, Artificial Sequence
  Description of Artificial Sequence: Synthetic oligonucleotide
aagauacaaucaaaacuug

SEQ ID NO: 3143737 - RNA, 19 nt, Artificial Sequence
  Description of Artificial Sequence: Synthetic oligonucleotide
uuaaugcagaggagcacac

SEQ ID NO: 3143738 - RNA, 19 nt, Artificial Sequence
  Description of Artificial Sequence: Synthetic oligonucleotide
uaucuacucaauugcaauu

SEQ ID NO: 3143739 - RNA, 19 nt, Artificial Sequence
  Description of Artificial Sequence: Synthetic oligonucleotide
gauacaaucaaaacuugau

SEQ ID NO: 3143740 - RNA, 19 nt, Artificial Sequence
  Description of Artificial Sequence: Synthetic oligonucleotide
ucauaucuuugccucuuaa

SEQ ID NO: 3143741 - RNA, 19 nt, Artificial Sequence
  Description of Artificial Sequence: Synthetic oligonucleotide
gauuaagucaaugaaucau

SEQ ID NO: 3143742 - RNA, 19 nt, Artificial Sequence
  Description of Artificial Sequence: Synthetic oligonucleotide
acugugagcuggaaugugg

SEQ ID NO: 3143743 - RNA, 19 nt, Artificial Sequence
  Description of Artificial Sequence: Synthetic oligonucleotide
ucuacucaauugcaauuua

SEQ ID NO: 3143744 - RNA, 19 nt, Artificial Sequence
  Description of Artificial Sequence: Synthetic oligonucleotide
guggcugcuccucagggag

SEQ ID NO: 3143745 - RNA, 19 nt, Artificial Sequence
  Description of Artificial Sequence: Synthetic oligonucleotide
auuaagucaaugaaucaua

SEQ ID NO: 3143746 - RNA, 19 nt, Artificial Sequence
  Description of Artificial Sequence: Synthetic oligonucleotide
cuugauuaagucaaugaau

SEQ ID NO: 3143747 - RNA, 19 nt, Artificial Sequence
  Description of Artificial Sequence: Synthetic oligonucleotide
auguggcugcuccucaggg

SEQ ID NO: 3143748 - RNA, 19 nt, Artificial Sequence
  Description of Artificial Sequence: Synthetic oligonucleotide
cugugagcuggaauguggc

SEQ ID NO: 3143749 - RNA, 19 nt, Artificial Sequence
  Description of Artificial Sequence: Synthetic oligonucleotide
cuuaaugcagaggagcaca

SEQ ID NO: 3143750 - RNA, 19 nt, Artificial Sequence
  Description of Artificial Sequence: Synthetic oligonucleotide
agauacaaucaaaacuuga

SEQ ID NO: 3143751 - RNA, 19 nt, Artificial Sequence
  Description of Artificial Sequence: Synthetic oligonucleotide
cucuuaaugcagaggagca

SEQ ID NO: 3143752 - RNA, 19 nt, Artificial Sequence
  Description of Artificial Sequence: Synthetic oligonucleotide
gaauguggcugcuccucag

SEQ ID NO: 3143753 - RNA, 19 nt, Artificial Sequence
  Description of Artificial Sequence: Synthetic oligonucleotide
aaucauaucuuugccucuu

SEQ ID NO: 3143754 - RNA, 19 nt, Artificial Sequence
  Description of Artificial Sequence: Synthetic oligonucleotide
cucacacaguagcagcacc

SEQ ID NO: 3143755 - RNA, 19 nt, Artificial Sequence
  Description of Artificial Sequence: Synthetic oligonucleotide
aaaacuugauuaagucaau

SEQ ID NO: 3143756 - RNA, 19 nt, Artificial Sequence
  Description of Artificial Sequence: Synthetic oligonucleotide
uugccucuuaaugcagagg

SEQ ID NO: 3143757 - RNA, 19 nt, Artificial Sequence
  Description of Artificial Sequence: Synthetic oligonucleotide
gcuggaauguggcugcucc

SEQ ID NO: 3143758 - RNA, 19 nt, Artificial Sequence
  Description of Artificial Sequence: Synthetic oligonucleotide
uguggcugcuccucaggga

SEQ ID NO: 3143759 - RNA, 19 nt, Artificial Sequence
  Description of Artificial Sequence: Synthetic oligonucleotide
ccucuuaaugcagaggagc

SEQ ID NO: 3143760 - RNA, 19 nt, Artificial Sequence
  Description of Artificial Sequence: Synthetic oligonucleotide
guaucuacucaauugcaau

SEQ ID NO: 3143761 - RNA, 19 nt, Artificial Sequence
  Description of Artificial Sequence: Synthetic oligonucleotide
cuacucaauugcaauuuaa

SEQ ID NO: 3143762 - RNA, 19 nt, Artificial Sequence
  Description of Artificial Sequence: Synthetic oligonucleotide
auguaucuacucaauugca

SEQ ID NO: 3143763 - RNA, 19 nt, Artificial Sequence
  Description of Artificial Sequence: Synthetic oligonucleotide
guagcagcaccaauguauc

SEQ ID NO: 3143764 - RNA, 19 nt, Artificial Sequence
  Description of Artificial Sequence: Synthetic oligonucleotide
gucaaugaaucauaucuuu

SEQ ID NO: 3143765 - RNA, 19 nt, Artificial Sequence
  Description of Artificial Sequence: Synthetic oligonucleotide
cuuugccucuuaaugcaga

SEQ ID NO: 3143766 - RNA, 19 nt, Artificial Sequence
  Description of Artificial Sequence: Synthetic oligonucleotide
gaaucauaucuuugccucu

SEQ ID NO: 3143767 - RNA, 19 nt, Artificial Sequence
  Description of Artificial Sequence: Synthetic oligonucleotide
caccaauguaucuacucaa

SEQ ID NO: 3143768 - RNA, 19 nt, Artificial Sequence
  Description of Artificial Sequence: Synthetic oligonucleotide
gaggagcacacugugagcu

SEQ ID NO: 3143769 - RNA, 19 nt, Artificial Sequence
  Description of Artificial Sequence: Synthetic oligonucleotide
gcaccaauguaucuacuca

SEQ ID NO: 3143770 - RNA, 19 nt, Artificial Sequence
  Description of Artificial Sequence: Synthetic oligonucleotide
ggagcacacugugagcugg

SEQ ID NO: 3143771 - RNA, 19 nt, Artificial Sequence
  Description of Artificial Sequence: Synthetic oligonucleotide
cacucacacaguagcagca

SEQ ID NO: 3143772 - RNA, 19 nt, Artificial Sequence
  Description of Artificial Sequence: Synthetic oligonucleotide
gcagcaccaauguaucuac

SEQ ID NO: 3143773 - RNA, 19 nt, Artificial Sequence
  Description of Artificial Sequence: Synthetic oligonucleotide
uaaugcagaggagcacacu

SEQ ID NO: 3143774 - RNA, 19 nt, Artificial Sequence
  Description of Artificial Sequence: Synthetic oligonucleotide
uccucagggagggcaaugu

SEQ ID NO: 3143775 - RNA, 19 nt, Artificial Sequence
  Description of Artificial Sequence: Synthetic oligonucleotide
aggagcacacugugagcug

SEQ ID NO: 3143776 - RNA, 19 nt, Artificial Sequence
  Description of Artificial Sequence: Synthetic oligonucleotide
uagcagcaccaauguaucu

SEQ ID NO: 3143777 - RNA, 19 nt, Artificial Sequence
  Description of Artificial Sequence: Synthetic oligonucleotide
accaauguaucuacucaau

SEQ ID NO: 3143778 - RNA, 19 nt, Artificial Sequence
  Description of Artificial Sequence: Synthetic oligonucleotide
acacugugagcuggaaugu

SEQ ID NO: 3143779 - RNA, 19 nt, Artificial Sequence
  Description of Artificial Sequence: Synthetic oligonucleotide
ugcuccucagggagggcaa

SEQ ID NO: 3143780 - RNA, 19 nt, Artificial Sequence
  Description of Artificial Sequence: Synthetic oligonucleotide
agggagggcaauguucgga

SEQ ID NO: 3143781 - RNA, 19 nt, Artificial Sequence
  Description of Artificial Sequence: Synthetic oligonucleotide
cauaucuuugccucuuaau

SEQ ID NO: 3143782 - RNA, 19 nt, Artificial Sequence
  Description of Artificial Sequence: Synthetic oligonucleotide
cagggagggcaauguucgg

SEQ ID NO: 3143783 - RNA, 19 nt, Artificial Sequence
  Description of Artificial Sequence: Synthetic oligonucleotide
agcuggaauguggcugcuc

SEQ ID NO: 3143784 - RNA, 19 nt, Artificial Sequence
  Description of Artificial Sequence: Synthetic oligonucleotide
cacugugagcuggaaugug

SEQ ID NO: 3143785 - RNA, 19 nt, Artificial Sequence
  Description of Artificial Sequence: Synthetic oligonucleotide
ggaauguggcugcuccuca

SEQ ID NO: 3143786 - RNA, 19 nt, Artificial Sequence
  Description of Artificial Sequence: Synthetic oligonucleotide
caauugcaauuuaaauaau

SEQ ID NO: 3143787 - RNA, 19 nt, Artificial Sequence
  Description of Artificial Sequence: Synthetic oligonucleotide
gccucuuaaugcagaggag

SEQ ID NO: 3143788 - RNA, 19 nt, Artificial Sequence
  Description of Artificial Sequence: Synthetic oligonucleotide
acacacacauacacacaua

SEQ ID NO: 3143789 - RNA, 19 nt, Artificial Sequence
  Description of Artificial Sequence: Synthetic oligonucleotide
cugcuccucagggagggca

SEQ ID NO: 3143790 - RNA, 19 nt, Artificial Sequence
  Description of Artificial Sequence: Synthetic oligonucleotide
cacacaguagcagcaccaa

SEQ ID NO: 3143791 - RNA, 19 nt, Artificial Sequence
  Description of Artificial Sequence: Synthetic oligonucleotide
gagcacacugugagcugga

SEQ ID NO: 3143792 - RNA, 19 nt, Artificial Sequence
  Description of Artificial Sequence: Synthetic oligonucleotide
agcacacugugagcuggaa

SEQ ID NO: 3143793 - RNA, 19 nt, Artificial Sequence
  Description of Artificial Sequence: Synthetic oligonucleotide
ccaauguaucuacucaauu

SEQ ID NO: 3143794 - RNA, 19 nt, Artificial Sequence
  Description of Artificial Sequence: Synthetic oligonucleotide
cagcaccaauguaucuacu

SEQ ID NO: 3143795 - RNA, 19 nt, Artificial Sequence
  Description of Artificial Sequence: Synthetic oligonucleotide
gcacacugugagcuggaau

SEQ ID NO: 3143796 - RNA, 19 nt, Artificial Sequence
  Description of Artificial Sequence: Synthetic oligonucleotide
gagcuggaauguggcugcu

SEQ ID NO: 3143797 - RNA, 19 nt, Artificial Sequence
  Description of Artificial Sequence: Synthetic oligonucleotide
gcugcuccucagggagggc

SEQ ID NO: 3143798 - RNA, 19 nt, Artificial Sequence
  Description of Artificial Sequence: Synthetic oligonucleotide
aaaucugccugccucugcc

SEQ ID NO: 3143799 - RNA, 19 nt, Artificial Sequence
  Description of Artificial Sequence: Synthetic oligonucleotide
aacucagaaaucugccugc

SEQ ID NO: 3143800 - RNA, 19 nt, Artificial Sequence
  Description of Artificial Sequence: Synthetic oligonucleotide
uuuuguuuuguuuuguuuu

SEQ ID NO: 3143801 - RNA, 19 nt, Artificial Sequence
  Description of Artificial Sequence: Synthetic oligonucleotide
uuuguuuuguuuuguuuug

SEQ ID NO: 3143802 - RNA, 19 nt, Artificial Sequence
  Description of Artificial Sequence: Synthetic oligonucleotide
ucagaaaucugccugccuc

SEQ ID NO: 3143803 - RNA, 19 nt, Artificial Sequence
  Description of Artificial Sequence: Synthetic oligonucleotide
acucagaaaucugccugcc

SEQ ID NO: 3143804 - RNA, 19 nt, Artificial Sequence
  Description of Artificial Sequence: Synthetic oligonucleotide
gaaaucugccugccucugc

SEQ ID NO: 3143805 - RNA, 19 nt, Artificial Sequence
  Description of Artificial Sequence: Synthetic oligonucleotide
guuuuguuuuguuuuguuu

SEQ ID NO: 3143806 - RNA, 19 nt, Artificial Sequence
  Description of Artificial Sequence: Synthetic oligonucleotide
agaaaucugccugccucug

SEQ ID NO: 3143807 - RNA, 19 nt, Artificial Sequence
  Description of Artificial Sequence: Synthetic oligonucleotide
cagaaaucugccugccucu

SEQ ID NO: 3143808 - RNA, 19 nt, Artificial Sequence
  Description of Artificial Sequence: Synthetic oligonucleotide
cucagaaaucugccugccu

SEQ ID NO: 3143809 - RNA, 19 nt, Artificial Sequence
  Description of Artificial Sequence: Synthetic oligonucleotide
uguugcauaggccagguag

SEQ ID NO: 3143810 - RNA, 19 nt, Artificial Sequence
  Description of Artificial Sequence: Synthetic oligonucleotide
gauccuuugauccagcuug

SEQ ID NO: 3143811 - RNA, 19 nt, Artificial Sequence
  Description of Artificial Sequence: Synthetic oligonucleotide
uuaggauugugcuucaugc

SEQ ID NO: 3143812 - RNA, 19 nt, Artificial Sequence
  Description of Artificial Sequence: Synthetic oligonucleotide
cacaaagauccuuugaucc

SEQ ID NO: 3143813 - RNA, 19 nt, Artificial Sequence
  Description of Artificial Sequence: Synthetic oligonucleotide
aagcagguaaccauugucc

SEQ ID NO: 3143814 - RNA, 19 nt, Artificial Sequence
  Description of Artificial Sequence: Synthetic oligonucleotide
accugcuccacaaagaucc

SEQ ID NO: 3143815 - RNA, 19 nt, Artificial Sequence
  Description of Artificial Sequence: Synthetic oligonucleotide
uggagaaagcagcagagcc

SEQ ID NO: 3143816 - RNA, 19 nt, Artificial Sequence
  Description of Artificial Sequence: Synthetic oligonucleotide
gagccaaucuucuuggagg

SEQ ID NO: 3143817 - RNA, 19 nt, Artificial Sequence
  Description of Artificial Sequence: Synthetic oligonucleotide
guaaccauuguccaugcag

SEQ ID NO: 3143818 - RNA, 19 nt, Artificial Sequence
  Description of Artificial Sequence: Synthetic oligonucleotide
auaaugugauucuugccuc

SEQ ID NO: 3143819 - RNA, 19 nt, Artificial Sequence
  Description of Artificial Sequence: Synthetic oligonucleotide
aaucuucuuggagggaagc

SEQ ID NO: 3143820 - RNA, 19 nt, Artificial Sequence
  Description of Artificial Sequence: Synthetic oligonucleotide
aaugugauucuugccucgc

SEQ ID NO: 3143821 - RNA, 19 nt, Artificial Sequence
  Description of Artificial Sequence: Synthetic oligonucleotide
aaagcagcagagccaaucu

SEQ ID NO: 3143822 - RNA, 19 nt, Artificial Sequence
  Description of Artificial Sequence: Synthetic oligonucleotide
uccacaaagauccuuugau

SEQ ID NO: 3143823 - RNA, 19 nt, Artificial Sequence
  Description of Artificial Sequence: Synthetic oligonucleotide
ucacguguugcauaggcca

SEQ ID NO: 3143824 - RNA, 19 nt, Artificial Sequence
  Description of Artificial Sequence: Synthetic oligonucleotide
ugccucgcaagucagagga

SEQ ID NO: 3143825 - RNA, 19 nt, Artificial Sequence
  Description of Artificial Sequence: Synthetic oligonucleotide
uaaccauuguccaugcagu

SEQ ID NO: 3143826 - RNA, 19 nt, Artificial Sequence
  Description of Artificial Sequence: Synthetic oligonucleotide
uaaugugauucuugccucg

SEQ ID NO: 3143827 - RNA, 19 nt, Artificial Sequence
  Description of Artificial Sequence: Synthetic oligonucleotide
aaccauuguccaugcaguc

SEQ ID NO: 3143828 - RNA, 19 nt, Artificial Sequence
  Description of Artificial Sequence: Synthetic oligonucleotide
ucgaaccugcuccacaaag

SEQ ID NO: 3143829 - RNA, 19 nt, Artificial Sequence
  Description of Artificial Sequence: Synthetic oligonucleotide
uaggauugugcuucaugcg

SEQ ID NO: 3143830 - RNA, 19 nt, Artificial Sequence
  Description of Artificial Sequence: Synthetic oligonucleotide
caugcagucucgaaccugc

SEQ ID NO: 3143831 - RNA, 19 nt, Artificial Sequence
  Description of Artificial Sequence: Synthetic oligonucleotide
cuucuuggagggaagcagg

SEQ ID NO: 3143832 - RNA, 19 nt, Artificial Sequence
  Description of Artificial Sequence: Synthetic oligonucleotide
ucuucuuggagggaagcag

SEQ ID NO: 3143833 - RNA, 19 nt, Artificial Sequence
  Description of Artificial Sequence: Synthetic oligonucleotide
agccaaucuucuuggaggg

SEQ ID NO: 3143834 - RNA, 19 nt, Artificial Sequence
  Description of Artificial Sequence: Synthetic oligonucleotide
gauagcuuaggauugugcu

SEQ ID NO: 3143835 - RNA, 19 nt, Artificial Sequence
  Description of Artificial Sequence: Synthetic oligonucleotide
agagccaaucuucuuggag

SEQ ID NO: 3143836 - RNA, 19 nt, Artificial Sequence
  Description of Artificial Sequence: Synthetic oligonucleotide
ugugcuucaugcguucacg

SEQ ID NO: 3143837 - RNA, 19 nt, Artificial Sequence
  Description of Artificial Sequence: Synthetic oligonucleotide
agacccuggagaaagcagc

SEQ ID NO: 3143838 - RNA, 19 nt, Artificial Sequence
  Description of Artificial Sequence: Synthetic oligonucleotide
gaagcagguaaccauuguc

SEQ ID NO: 3143839 - RNA, 19 nt, Artificial Sequence
  Description of Artificial Sequence: Synthetic oligonucleotide
aggauugugcuucaugcgu

SEQ ID NO: 3143840 - RNA, 19 nt, Artificial Sequence
  Description of Artificial Sequence: Synthetic oligonucleotide
ugauucuugccucgcaagu

SEQ ID NO: 3143841 - RNA, 19 nt, Artificial Sequence
  Description of Artificial Sequence: Synthetic oligonucleotide
cauaaugugauucuugccu

SEQ ID NO: 3143842 - RNA, 19 nt, Artificial Sequence
  Description of Artificial Sequence: Synthetic oligonucleotide
acaaagauccuuugaucca

SEQ ID NO: 3143843 - RNA, 19 nt, Artificial Sequence
  Description of Artificial Sequence: Synthetic oligonucleotide
gcauaggccagguagaccc

SEQ ID NO: 3143844 - RNA, 19 nt, Artificial Sequence
  Description of Artificial Sequence: Synthetic oligonucleotide
guucacguguugcauaggc

SEQ ID NO: 3143845 - RNA, 19 nt, Artificial Sequence
  Description of Artificial Sequence: Synthetic oligonucleotide
guccaugcagucucgaacc

SEQ ID NO: 3143846 - RNA, 19 nt, Artificial Sequence
  Description of Artificial Sequence: Synthetic oligonucleotide
ucagaggauagcuuaggau

SEQ ID NO: 3143847 - RNA, 19 nt, Artificial Sequence
  Description of Artificial Sequence: Synthetic oligonucleotide
cuuaggauugugcuucaug

SEQ ID NO: 3143848 - RNA, 19 nt, Artificial Sequence
  Description of Artificial Sequence: Synthetic oligonucleotide
uucacguguugcauaggcc

SEQ ID NO: 3143849 - RNA, 19 nt, Artificial Sequence
  Description of Artificial Sequence: Synthetic oligonucleotide
ugugauucuugccucgcaa

SEQ ID NO: 3143850 - RNA, 19 nt, Artificial Sequence
  Description of Artificial Sequence: Synthetic oligonucleotide
agguaaccauuguccaugc

SEQ ID NO: 3143851 - RNA, 19 nt, Artificial Sequence
  Description of Artificial Sequence: Synthetic oligonucleotide
auucuugccucgcaaguca

SEQ ID NO: 3143852 - RNA, 19 nt, Artificial Sequence
  Description of Artificial Sequence: Synthetic oligonucleotide
aagauccuuugauccagcu

SEQ ID NO: 3143853 - RNA, 19 nt, Artificial Sequence
  Description of Artificial Sequence: Synthetic oligonucleotide
uagcuuaggauugugcuuc

SEQ ID NO: 3143854 - RNA, 19 nt, Artificial Sequence
  Description of Artificial Sequence: Synthetic oligonucleotide
caaagauccuuugauccag

SEQ ID NO: 3143855 - RNA, 19 nt, Artificial Sequence
  Description of Artificial Sequence: Synthetic oligonucleotide
agguagacccuggagaaag

SEQ ID NO: 3143856 - RNA, 19 nt, Artificial Sequence
  Description of Artificial Sequence: Synthetic oligonucleotide
agcagguaaccauugucca

SEQ ID NO: 3143857 - RNA, 19 nt, Artificial Sequence
  Description of Artificial Sequence: Synthetic oligonucleotide
gaaagcagcagagccaauc

SEQ ID NO: 3143858 - RNA, 19 nt, Artificial Sequence
  Description of Artificial Sequence: Synthetic oligonucleotide
agaggauagcuuaggauug

SEQ ID NO: 3143859 - RNA, 19 nt, Artificial Sequence
  Description of Artificial Sequence: Synthetic oligonucleotide
caccauaaugugauucuug

SEQ ID NO: 3143860 - RNA, 19 nt, Artificial Sequence
  Description of Artificial Sequence: Synthetic oligonucleotide
gugauucuugccucgcaag

SEQ ID NO: 3143861 - RNA, 19 nt, Artificial Sequence
  Description of Artificial Sequence: Synthetic oligonucleotide
gcagucucgaaccugcucc

SEQ ID NO: 3143862 - RNA, 19 nt, Artificial Sequence
  Description of Artificial Sequence: Synthetic oligonucleotide
cucgcaagucagaggauag

SEQ ID NO: 3143863 - RNA, 19 nt, Artificial Sequence
  Description of Artificial Sequence: Synthetic oligonucleotide
aagucagaggauagcuuag

SEQ ID NO: 3143864 - RNA, 19 nt, Artificial Sequence
  Description of Artificial Sequence: Synthetic oligonucleotide
ugcuccacaaagauccuuu

SEQ ID NO: 3143865 - RNA, 19 nt, Artificial Sequence
  Description of Artificial Sequence: Synthetic oligonucleotide
ucucgaaccugcuccacaa

SEQ ID NO: 3143866 - RNA, 19 nt, Artificial Sequence
  Description of Artificial Sequence: Synthetic oligonucleotide
uucuugccucgcaagucag

SEQ ID NO: 3143867 - RNA, 19 nt, Artificial Sequence
  Description of Artificial Sequence: Synthetic oligonucleotide
cagguaaccauuguccaug

SEQ ID NO: 3143868 - RNA, 19 nt, Artificial Sequence
  Description of Artificial Sequence: Synthetic oligonucleotide
ugcuucaugcguucacgug

SEQ ID NO: 3143869 - RNA, 19 nt, Artificial Sequence
  Description of Artificial Sequence: Synthetic oligonucleotide
uucuuggagggaagcaggu

SEQ ID NO: 3143870 - RNA, 19 nt, Artificial Sequence
  Description of Artificial Sequence: Synthetic oligonucleotide
ucaugcguucacguguugc

SEQ ID NO: 3143871 - RNA, 19 nt, Artificial Sequence
  Description of Artificial Sequence: Synthetic oligonucleotide
cuugccucgcaagucagag

SEQ ID NO: 3143872 - RNA, 19 nt, Artificial Sequence
  Description of Artificial Sequence: Synthetic oligonucleotide
caagucagaggauagcuua

SEQ ID NO: 3143873 - RNA, 19 nt, Artificial Sequence
  Description of Artificial Sequence: Synthetic oligonucleotide
caaucuucuuggagggaag

SEQ ID NO: 3143874 - RNA, 19 nt, Artificial Sequence
  Description of Artificial Sequence: Synthetic oligonucleotide
cuuggagggaagcagguaa

SEQ ID NO: 3143875 - RNA, 19 nt, Artificial Sequence
  Description of Artificial Sequence: Synthetic oligonucleotide
gauugugcuucaugcguuc

SEQ ID NO: 3143876 - RNA, 19 nt, Artificial Sequence
  Description of Artificial Sequence: Synthetic oligonucleotide
gagaaagcagcagagccaa

SEQ ID NO: 3143877 - RNA, 19 nt, Artificial Sequence
  Description of Artificial Sequence: Synthetic oligonucleotide
gauucuugccucgcaaguc

SEQ ID NO: 3143878 - RNA, 19 nt, Artificial Sequence
  Description of Artificial Sequence: Synthetic oligonucleotide
cauuguccaugcagucucg

SEQ ID NO: 3143879 - RNA, 19 nt, Artificial Sequence
  Description of Artificial Sequence: Synthetic oligonucleotide
uugccucgcaagucagagg

SEQ ID NO: 3143880 - RNA, 19 nt, Artificial Sequence
  Description of Artificial Sequence: Synthetic oligonucleotide
cacguguugcauaggccag

SEQ ID NO: 3143881 - RNA, 19 nt, Artificial Sequence
  Description of Artificial Sequence: Synthetic oligonucleotide
auccuuugauccagcuugc

SEQ ID NO: 3143882 - RNA, 19 nt, Artificial Sequence
  Description of Artificial Sequence: Synthetic oligonucleotide
cagaggauagcuuaggauu

SEQ ID NO: 3143883 - RNA, 19 nt, Artificial Sequence
  Description of Artificial Sequence: Synthetic oligonucleotide
caugcguucacguguugca

SEQ ID NO: 3143884 - RNA, 19 nt, Artificial Sequence
  Description of Artificial Sequence: Synthetic oligonucleotide
ccuggagaaagcagcagag

SEQ ID NO: 3143885 - RNA, 19 nt, Artificial Sequence
  Description of Artificial Sequence: Synthetic oligonucleotide
aagcagcagagccaaucuu

SEQ ID NO: 3143886 - RNA, 19 nt, Artificial Sequence
  Description of Artificial Sequence: Synthetic oligonucleotide
gucagaggauagcuuagga

SEQ ID NO: 3143887 - RNA, 19 nt, Artificial Sequence
  Description of Artificial Sequence: Synthetic oligonucleotide
uccaugcagucucgaaccu

SEQ ID NO: 3143888 - RNA, 19 nt, Artificial Sequence
  Description of Artificial Sequence: Synthetic oligonucleotide
cuggagaaagcagcagagc

SEQ ID NO: 3143889 - RNA, 19 nt, Artificial Sequence
  Description of Artificial Sequence: Synthetic oligonucleotide
agauccuuugauccagcuu

SEQ ID NO: 3143890 - RNA, 19 nt, Artificial Sequence
  Description of Artificial Sequence: Synthetic oligonucleotide
ugcagucucgaaccugcuc

SEQ ID NO: 3143891 - RNA, 19 nt, Artificial Sequence
  Description of Artificial Sequence: Synthetic oligonucleotide
ucuugccucgcaagucaga

SEQ ID NO: 3143892 - RNA, 19 nt, Artificial Sequence
  Description of Artificial Sequence: Synthetic oligonucleotide
accauuguccaugcagucu

SEQ ID NO: 3143893 - RNA, 19 nt, Artificial Sequence
  Description of Artificial Sequence: Synthetic oligonucleotide
guugcauaggccagguaga

SEQ ID NO: 3143894 - RNA, 19 nt, Artificial Sequence
  Description of Artificial Sequence: Synthetic oligonucleotide
gaaccugcuccacaaagau

SEQ ID NO: 3143895 - RNA, 19 nt, Artificial Sequence
  Description of Artificial Sequence: Synthetic oligonucleotide
ccauaaugugauucuugcc

SEQ ID NO: 3143896 - RNA, 19 nt, Artificial Sequence
  Description of Artificial Sequence: Synthetic oligonucleotide
uuguccaugcagucucgaa

SEQ ID NO: 3143897 - RNA, 19 nt, Artificial Sequence
  Description of Artificial Sequence: Synthetic oligonucleotide
ugcguucacguguugcaua

SEQ ID NO: 3143898 - RNA, 19 nt, Artificial Sequence
  Description of Artificial Sequence: Synthetic oligonucleotide
augugauucuugccucgca

SEQ ID NO: 3143899 - RNA, 19 nt, Artificial Sequence
  Description of Artificial Sequence: Synthetic oligonucleotide
ucgcaagucagaggauagc

SEQ ID NO: 3143900 - RNA, 19 nt, Artificial Sequence
  Description of Artificial Sequence: Synthetic oligonucleotide
gccagguagacccuggaga

SEQ ID NO: 3143901 - RNA, 19 nt, Artificial Sequence
  Description of Artificial Sequence: Synthetic oligonucleotide
acguguugcauaggccagg

SEQ ID NO: 3143902 - RNA, 19 nt, Artificial Sequence
  Description of Artificial Sequence: Synthetic oligonucleotide
gcguucacguguugcauag

SEQ ID NO: 3143903 - RNA, 19 nt, Artificial Sequence
  Description of Artificial Sequence: Synthetic oligonucleotide
ggauagcuuaggauugugc

SEQ ID NO: 3143904 - RNA, 19 nt, Artificial Sequence
  Description of Artificial Sequence: Synthetic oligonucleotide
gagggaagcagguaaccau

SEQ ID NO: 3143905 - RNA, 19 nt, Artificial Sequence
  Description of Artificial Sequence: Synthetic oligonucleotide
uucaugcguucacguguug

SEQ ID NO: 3143906 - RNA, 19 nt, Artificial Sequence
  Description of Artificial Sequence: Synthetic oligonucleotide
ccauuguccaugcagucuc

SEQ ID NO: 3143907 - RNA, 19 nt, Artificial Sequence
  Description of Artificial Sequence: Synthetic oligonucleotide
ccacaaagauccuuugauc

SEQ ID NO: 3143908 - RNA, 19 nt, Artificial Sequence
  Description of Artificial Sequence: Synthetic oligonucleotide
aggauagcuuaggauugug

SEQ ID NO: 3143909 - RNA, 19 nt, Artificial Sequence
  Description of Artificial Sequence: Synthetic oligonucleotide
cuccacaaagauccuuuga

SEQ ID NO: 3143910 - RNA, 19 nt, Artificial Sequence
  Description of Artificial Sequence: Synthetic oligonucleotide
agucucgaaccugcuccac

SEQ ID NO: 3143911 - RNA, 19 nt, Artificial Sequence
  Description of Artificial Sequence: Synthetic oligonucleotide
ggagaaagcagcagagcca

SEQ ID NO: 3143912 - RNA, 19 nt, Artificial Sequence
  Description of Artificial Sequence: Synthetic oligonucleotide
auugugcuucaugcguuca

SEQ ID NO: 3143913 - RNA, 19 nt, Artificial Sequence
  Description of Artificial Sequence: Synthetic oligonucleotide
agcuuaggauugugcuuca

SEQ ID NO: 3143914 - RNA, 19 nt, Artificial Sequence
  Description of Artificial Sequence: Synthetic oligonucleotide
gacccuggagaaagcagca

SEQ ID NO: 3143915 - RNA, 19 nt, Artificial Sequence
  Description of Artificial Sequence: Synthetic oligonucleotide
gucucgaaccugcuccaca

SEQ ID NO: 3143916 - RNA, 19 nt, Artificial Sequence
  Description of Artificial Sequence: Synthetic oligonucleotide
gcuucaugcguucacgugu

SEQ ID NO: 3143917 - RNA, 19 nt, Artificial Sequence
  Description of Artificial Sequence: Synthetic oligonucleotide
ucuuggagggaagcaggua

SEQ ID NO: 3143918 - RNA, 19 nt, Artificial Sequence
  Description of Artificial Sequence: Synthetic oligonucleotide
auuguccaugcagucucga

SEQ ID NO: 3143919 - RNA, 19 nt, Artificial Sequence
  Description of Artificial Sequence: Synthetic oligonucleotide
agggaagcagguaaccauu

SEQ ID NO: 3143920 - RNA, 19 nt, Artificial Sequence
  Description of Artificial Sequence: Synthetic oligonucleotide
acccuggagaaagcagcag

SEQ ID NO: 3143921 - RNA, 19 nt, Artificial Sequence
  Description of Artificial Sequence: Synthetic oligonucleotide
ggccagguagacccuggag

SEQ ID NO: 3143922 - RNA, 19 nt, Artificial Sequence
  Description of Artificial Sequence: Synthetic oligonucleotide
gggaagcagguaaccauug

SEQ ID NO: 3143923 - RNA, 19 nt, Artificial Sequence
  Description of Artificial Sequence: Synthetic oligonucleotide
ggagggaagcagguaacca

SEQ ID NO: 3143924 - RNA, 19 nt, Artificial Sequence
  Description of Artificial Sequence: Synthetic oligonucleotide
cagucucgaaccugcucca

SEQ ID NO: 3143925 - RNA, 19 nt, Artificial Sequence
  Description of Artificial Sequence: Synthetic oligonucleotide
ccagguagacccuggagaa

SEQ ID NO: 3143926 - RNA, 19 nt, Artificial Sequence
  Description of Artificial Sequence: Synthetic oligonucleotide
augcguucacguguugcau

SEQ ID NO: 3143927 - RNA, 19 nt, Artificial Sequence
  Description of Artificial Sequence: Synthetic oligonucleotide
gaggauagcuuaggauugu

SEQ ID NO: 3143928 - RNA, 19 nt, Artificial Sequence
  Description of Artificial Sequence: Synthetic oligonucleotide
gugcuucaugcguucacgu

SEQ ID NO: 3143929 - RNA, 19 nt, Artificial Sequence
  Description of Artificial Sequence: Synthetic oligonucleotide
gguagacccuggagaaagc

SEQ ID NO: 3143930 - RNA, 19 nt, Artificial Sequence
  Description of Artificial Sequence: Synthetic oligonucleotide
cagagccaaucuucuugga

SEQ ID NO: 3143931 - RNA, 19 nt, Artificial Sequence
  Description of Artificial Sequence: Synthetic oligonucleotide
cccuggagaaagcagcaga

SEQ ID NO: 3143932 - RNA, 19 nt, Artificial Sequence
  Description of Artificial Sequence: Synthetic oligonucleotide
ccaaucuucuuggagggaa

SEQ ID NO: 3143933 - RNA, 19 nt, Artificial Sequence
  Description of Artificial Sequence: Synthetic oligonucleotide
gguaaccauuguccaugca

SEQ ID NO: 3143934 - RNA, 19 nt, Artificial Sequence
  Description of Artificial Sequence: Synthetic oligonucleotide
cuucaugcguucacguguu

SEQ ID NO: 3143935 - RNA, 19 nt, Artificial Sequence
  Description of Artificial Sequence: Synthetic oligonucleotide
ggaagcagguaaccauugu

SEQ ID NO: 3143936 - RNA, 19 nt, Artificial Sequence
  Description of Artificial Sequence: Synthetic oligonucleotide
cgaaccugcuccacaaaga

SEQ ID NO: 3143937 - RNA, 19 nt, Artificial Sequence
  Description of Artificial Sequence: Synthetic oligonucleotide
cucgaaccugcuccacaaa

SEQ ID NO: 3143938 - RNA, 19 nt, Artificial Sequence
  Description of Artificial Sequence: Synthetic oligonucleotide
ccaugcagucucgaaccug

SEQ ID NO: 3143939 - RNA, 19 nt, Artificial Sequence
  Description of Artificial Sequence: Synthetic oligonucleotide
augcagucucgaaccugcu

SEQ ID NO: 3143940 - RNA, 19 nt, Artificial Sequence
  Description of Artificial Sequence: Synthetic oligonucleotide
agaaagcagcagagccaau

SEQ ID NO: 3143941 - RNA, 19 nt, Artificial Sequence
  Description of Artificial Sequence: Synthetic oligonucleotide
guguugcauaggccaggua

SEQ ID NO: 3143942 - RNA, 19 nt, Artificial Sequence
  Description of Artificial Sequence: Synthetic oligonucleotide
cagguagacccuggagaaa

SEQ ID NO: 3143943 - RNA, 19 nt, Artificial Sequence
  Description of Artificial Sequence: Synthetic oligonucleotide
ggauugugcuucaugcguu

SEQ ID NO: 3143944 - RNA, 19 nt, Artificial Sequence
  Description of Artificial Sequence: Synthetic oligonucleotide
ccucgcaagucagaggaua

SEQ ID NO: 3143945 - RNA, 19 nt, Artificial Sequence
  Description of Artificial Sequence: Synthetic oligonucleotide
gcaagucagaggauagcuu

SEQ ID NO: 3143946 - RNA, 19 nt, Artificial Sequence
  Description of Artificial Sequence: Synthetic oligonucleotide
cguucacguguugcauagg

SEQ ID NO: 3143947 - RNA, 19 nt, Artificial Sequence
  Description of Artificial Sequence: Synthetic oligonucleotide
cgcaagucagaggauagcu

SEQ ID NO: 3143948 - RNA, 19 nt, Artificial Sequence
  Description of Artificial Sequence: Synthetic oligonucleotide
cugcuccacaaagauccuu

SEQ ID NO: 3143949 - RNA, 19 nt, Artificial Sequence
  Description of Artificial Sequence: Synthetic oligonucleotide
gcuuaggauugugcuucau

SEQ ID NO: 3143950 - RNA, 19 nt, Artificial Sequence
  Description of Artificial Sequence: Synthetic oligonucleotide
cguguugcauaggccaggu

SEQ ID NO: 3143951 - RNA, 19 nt, Artificial Sequence
  Description of Artificial Sequence: Synthetic oligonucleotide
gccucgcaagucagaggau

SEQ ID NO: 3143952 - RNA, 19 nt, Artificial Sequence
  Description of Artificial Sequence: Synthetic oligonucleotide
uuuuguuuuguuuuguuug

SEQ ID NO: 3143953 - RNA, 19 nt, Artificial Sequence
  Description of Artificial Sequence: Synthetic oligonucleotide
acuuaugccuccugaguac

SEQ ID NO: 3143954 - RNA, 19 nt, Artificial Sequence
  Description of Artificial Sequence: Synthetic oligonucleotide
cugaguacugggauuaaag

SEQ ID NO: 3143955 - RNA, 19 nt, Artificial Sequence
  Description of Artificial Sequence: Synthetic oligonucleotide
uucuuuguuguuguuuggg

SEQ ID NO: 3143956 - RNA, 19 nt, Artificial Sequence
  Description of Artificial Sequence: Synthetic oligonucleotide
uuucuuuguuguuguuugg

SEQ ID NO: 3143957 - RNA, 19 nt, Artificial Sequence
  Description of Artificial Sequence: Synthetic oligonucleotide
uacuuaugccuccugagua

SEQ ID NO: 3143958 - RNA, 19 nt, Artificial Sequence
  Description of Artificial Sequence: Synthetic oligonucleotide
ucuuuguuguuguuugggu

SEQ ID NO: 3143959 - RNA, 19 nt, Artificial Sequence
  Description of Artificial Sequence: Synthetic oligonucleotide
uuguuuucuuuguuguugu

SEQ ID NO: 3143960 - RNA, 19 nt, Artificial Sequence
  Description of Artificial Sequence: Synthetic oligonucleotide
uaugccuccugaguacugg

SEQ ID NO: 3143961 - RNA, 19 nt, Artificial Sequence
  Description of Artificial Sequence: Synthetic oligonucleotide
uccaccuacuuaugccucc

SEQ ID NO: 3143962 - RNA, 19 nt, Artificial Sequence
  Description of Artificial Sequence: Synthetic oligonucleotide
accuacuuaugccuccuga

SEQ ID NO: 3143963 - RNA, 19 nt, Artificial Sequence
  Description of Artificial Sequence: Synthetic oligonucleotide
uuaugccuccugaguacug

SEQ ID NO: 3143964 - RNA, 19 nt, Artificial Sequence
  Description of Artificial Sequence: Synthetic oligonucleotide
uguuugguuugguuugguu

SEQ ID NO: 3143965 - RNA, 19 nt, Artificial Sequence
  Description of Artificial Sequence: Synthetic oligonucleotide
cagagauccaccuacuuau

SEQ ID NO: 3143966 - RNA, 19 nt, Artificial Sequence
  Description of Artificial Sequence: Synthetic oligonucleotide
ccuacuuaugccuccugag

SEQ ID NO: 3143967 - RNA, 19 nt, Artificial Sequence
  Description of Artificial Sequence: Synthetic oligonucleotide
auccaccuacuuaugccuc

SEQ ID NO: 3143968 - RNA, 19 nt, Artificial Sequence
  Description of Artificial Sequence: Synthetic oligonucleotide
cuacuuaugccuccugagu

SEQ ID NO: 3143969 - RNA, 19 nt, Artificial Sequence
  Description of Artificial Sequence: Synthetic oligonucleotide
caccuacuuaugccuccug

SEQ ID NO: 3143970 - RNA, 19 nt, Artificial Sequence
  Description of Artificial Sequence: Synthetic oligonucleotide
cuuaugccuccugaguacu

SEQ ID NO: 3143971 - RNA, 19 nt, Artificial Sequence
  Description of Artificial Sequence: Synthetic oligonucleotide
ccugaguacugggauuaaa

SEQ ID NO: 3143972 - RNA, 19 nt, Artificial Sequence
  Description of Artificial Sequence: Synthetic oligonucleotide
ccaccuacuuaugccuccu

SEQ ID NO: 3143973 - RNA, 19 nt, Artificial Sequence
  Description of Artificial Sequence: Synthetic oligonucleotide
uuuguaaucaaugucaucc

SEQ ID NO: 3143974 - RNA, 19 nt, Artificial Sequence
  Description of Artificial Sequence: Synthetic oligonucleotide
aaauccaggcuuuugcagc

SEQ ID NO: 3143975 - RNA, 19 nt, Artificial Sequence
  Description of Artificial Sequence: Synthetic oligonucleotide
uaaucaaugucauccaugg

SEQ ID NO: 3143976 - RNA, 19 nt, Artificial Sequence
  Description of Artificial Sequence: Synthetic oligonucleotide
ucauccauggaucugagaa

SEQ ID NO: 3143977 - RNA, 19 nt, Artificial Sequence
  Description of Artificial Sequence: Synthetic oligonucleotide
aucacuuucauagaaauaa

SEQ ID NO: 3143978 - RNA, 19 nt, Artificial Sequence
  Description of Artificial Sequence: Synthetic oligonucleotide
aguaaggagccuucacucc

SEQ ID NO: 3143979 - RNA, 19 nt, Artificial Sequence
  Description of Artificial Sequence: Synthetic oligonucleotide
ucucaccugaguaaggagc

SEQ ID NO: 3143980 - RNA, 19 nt, Artificial Sequence
  Description of Artificial Sequence: Synthetic oligonucleotide
gagaaauccaggcuuuugc

SEQ ID NO: 3143981 - RNA, 19 nt, Artificial Sequence
  Description of Artificial Sequence: Synthetic oligonucleotide
ugaguaaggagccuucacu

SEQ ID NO: 3143982 - RNA, 19 nt, Artificial Sequence
  Description of Artificial Sequence: Synthetic oligonucleotide
cuucacuccugcuucaacg

SEQ ID NO: 3143983 - RNA, 19 nt, Artificial Sequence
  Description of Artificial Sequence: Synthetic oligonucleotide
cacuuucauagaaauaagc

SEQ ID NO: 3143984 - RNA, 19 nt, Artificial Sequence
  Description of Artificial Sequence: Synthetic oligonucleotide
gaaauccaggcuuuugcag

SEQ ID NO: 3143985 - RNA, 19 nt, Artificial Sequence
  Description of Artificial Sequence: Synthetic oligonucleotide
acuuucauagaaauaagca

SEQ ID NO: 3143986 - RNA, 19 nt, Artificial Sequence
  Description of Artificial Sequence: Synthetic oligonucleotide
uggaucugagaaauccagg

SEQ ID NO: 3143987 - RNA, 19 nt, Artificial Sequence
  Description of Artificial Sequence: Synthetic oligonucleotide
uucacuccugcuucaacgg

SEQ ID NO: 3143988 - RNA, 19 nt, Artificial Sequence
  Description of Artificial Sequence: Synthetic oligonucleotide
ucacuuucauagaaauaag

SEQ ID NO: 3143989 - RNA, 19 nt, Artificial Sequence
  Description of Artificial Sequence: Synthetic oligonucleotide
ucaucacuuucauagaaau

SEQ ID NO: 3143990 - RNA, 19 nt, Artificial Sequence
  Description of Artificial Sequence: Synthetic oligonucleotide
uagguuuguaaucaauguc

SEQ ID NO: 3143991 - RNA, 19 nt, Artificial Sequence
  Description of Artificial Sequence: Synthetic oligonucleotide
uccaggaucucucccagca

SEQ ID NO: 3143992 - RNA, 19 nt, Artificial Sequence
  Description of Artificial Sequence: Synthetic oligonucleotide
agguuuguaaucaauguca

SEQ ID NO: 3143993 - RNA, 19 nt, Artificial Sequence
  Description of Artificial Sequence: Synthetic oligonucleotide
uuugcagcuguccagcuuu

SEQ ID NO: 3143994 - RNA, 19 nt, Artificial Sequence
  Description of Artificial Sequence: Synthetic oligonucleotide
aauccaggcuuuugcagcu

SEQ ID NO: 3143995 - RNA, 19 nt, Artificial Sequence
  Description of Artificial Sequence: Synthetic oligonucleotide
gaguaaggagccuucacuc

SEQ ID NO: 3143996 - RNA, 19 nt, Artificial Sequence
  Description of Artificial Sequence: Synthetic oligonucleotide
cucaccugaguaaggagcc

SEQ ID NO: 3143997 - RNA, 19 nt, Artificial Sequence
  Description of Artificial Sequence: Synthetic oligonucleotide
aaggagccuucacuccugc

SEQ ID NO: 3143998 - RNA, 19 nt, Artificial Sequence
  Description of Artificial Sequence: Synthetic oligonucleotide
ggaucugagaaauccaggc

SEQ ID NO: 3143999 - RNA, 19 nt, Artificial Sequence
  Description of Artificial Sequence: Synthetic oligonucleotide
ugugcucagcguauccagg

SEQ ID NO: 3144000 - RNA, 19 nt, Artificial Sequence
  Description of Artificial Sequence: Synthetic oligonucleotide
agaaauccaggcuuuugca

SEQ ID NO: 3144001 - RNA, 19 nt, Artificial Sequence
  Description of Artificial Sequence: Synthetic oligonucleotide
uuguaaucaaugucaucca

SEQ ID NO: 3144002 - RNA, 19 nt, Artificial Sequence
  Description of Artificial Sequence: Synthetic oligonucleotide
uguaaucaaugucauccau

SEQ ID NO: 3144003 - RNA, 19 nt, Artificial Sequence
  Description of Artificial Sequence: Synthetic oligonucleotide
ucucccagcaaguccaucu

SEQ ID NO: 3144004 - RNA, 19 nt, Artificial Sequence
  Description of Artificial Sequence: Synthetic oligonucleotide
aucugagaaauccaggcuu

SEQ ID NO: 3144005 - RNA, 19 nt, Artificial Sequence
  Description of Artificial Sequence: Synthetic oligonucleotide
ugcuucaacggagucauca

SEQ ID NO: 3144006 - RNA, 19 nt, Artificial Sequence
  Description of Artificial Sequence: Synthetic oligonucleotide
aaguccaucucaccugagu

SEQ ID NO: 3144007 - RNA, 19 nt, Artificial Sequence
  Description of Artificial Sequence: Synthetic oligonucleotide
uauccaggaucucucccag

SEQ ID NO: 3144008 - RNA, 19 nt, Artificial Sequence
  Description of Artificial Sequence: Synthetic oligonucleotide
uccaucucaccugaguaag

SEQ ID NO: 3144009 - RNA, 19 nt, Artificial Sequence
  Description of Artificial Sequence: Synthetic oligonucleotide
uucaacggagucaucacuu

SEQ ID NO: 3144010 - RNA, 19 nt, Artificial Sequence
  Description of Artificial Sequence: Synthetic oligonucleotide
gaucucucccagcaagucc

SEQ ID NO: 3144011 - RNA, 19 nt, Artificial Sequence
  Description of Artificial Sequence: Synthetic oligonucleotide
guaaucaaugucauccaug

SEQ ID NO: 3144012 - RNA, 19 nt, Artificial Sequence
  Description of Artificial Sequence: Synthetic oligonucleotide
agcaaguccaucucaccug

SEQ ID NO: 3144013 - RNA, 19 nt, Artificial Sequence
  Description of Artificial Sequence: Synthetic oligonucleotide
aaugucauccauggaucug

SEQ ID NO: 3144014 - RNA, 19 nt, Artificial Sequence
  Description of Artificial Sequence: Synthetic oligonucleotide
aacggagucaucacuuuca

SEQ ID NO: 3144015 - RNA, 19 nt, Artificial Sequence
  Description of Artificial Sequence: Synthetic oligonucleotide
aaucaaugucauccaugga

SEQ ID NO: 3144016 - RNA, 19 nt, Artificial Sequence
  Description of Artificial Sequence: Synthetic oligonucleotide
ucugagaaauccaggcuuu

SEQ ID NO: 3144017 - RNA, 19 nt, Artificial Sequence
  Description of Artificial Sequence: Synthetic oligonucleotide
auggaucugagaaauccag

SEQ ID NO: 3144018 - RNA, 19 nt, Artificial Sequence
  Description of Artificial Sequence: Synthetic oligonucleotide
gagcugugugugcucagcg

SEQ ID NO: 3144019 - RNA, 19 nt, Artificial Sequence
  Description of Artificial Sequence: Synthetic oligonucleotide
caggaucucucccagcaag

SEQ ID NO: 3144020 - RNA, 19 nt, Artificial Sequence
  Description of Artificial Sequence: Synthetic oligonucleotide
uugaucggagcugugugug

SEQ ID NO: 3144021 - RNA, 19 nt, Artificial Sequence
  Description of Artificial Sequence: Synthetic oligonucleotide
ugagaaauccaggcuuuug

SEQ ID NO: 3144022 - RNA, 19 nt, Artificial Sequence
  Description of Artificial Sequence: Synthetic oligonucleotide
aguccaucucaccugagua

SEQ ID NO: 3144023 - RNA, 19 nt, Artificial Sequence
  Description of Artificial Sequence: Synthetic oligonucleotide
aucucaccugaguaaggag

SEQ ID NO: 3144024 - RNA, 19 nt, Artificial Sequence
  Description of Artificial Sequence: Synthetic oligonucleotide
uaaggagccuucacuccug

SEQ ID NO: 3144025 - RNA, 19 nt, Artificial Sequence
  Description of Artificial Sequence: Synthetic oligonucleotide
guagguuuguaaucaaugu

SEQ ID NO: 3144026 - RNA, 19 nt, Artificial Sequence
  Description of Artificial Sequence: Synthetic oligonucleotide
cacuccugcuucaacggag

SEQ ID NO: 3144027 - RNA, 19 nt, Artificial Sequence
  Description of Artificial Sequence: Synthetic oligonucleotide
uuucccuugaucggagcug

SEQ ID NO: 3144028 - RNA, 19 nt, Artificial Sequence
  Description of Artificial Sequence: Synthetic oligonucleotide
guauccaggaucucuccca

SEQ ID NO: 3144029 - RNA, 19 nt, Artificial Sequence
  Description of Artificial Sequence: Synthetic oligonucleotide
gugugcucagcguauccag

SEQ ID NO: 3144030 - RNA, 19 nt, Artificial Sequence
  Description of Artificial Sequence: Synthetic oligonucleotide
ugugugcucagcguaucca

SEQ ID NO: 3144031 - RNA, 19 nt, Artificial Sequence
  Description of Artificial Sequence: Synthetic oligonucleotide
agcguauccaggaucucuc

SEQ ID NO: 3144032 - RNA, 19 nt, Artificial Sequence
  Description of Artificial Sequence: Synthetic oligonucleotide
auccauggaucugagaaau

SEQ ID NO: 3144033 - RNA, 19 nt, Artificial Sequence
  Description of Artificial Sequence: Synthetic oligonucleotide
ccauggaucugagaaaucc

SEQ ID NO: 3144034 - RNA, 19 nt, Artificial Sequence
  Description of Artificial Sequence: Synthetic oligonucleotide
cauggaucugagaaaucca

SEQ ID NO: 3144035 - RNA, 19 nt, Artificial Sequence
  Description of Artificial Sequence: Synthetic oligonucleotide
guuuguaaucaaugucauc

SEQ ID NO: 3144036 - RNA, 19 nt, Artificial Sequence
  Description of Artificial Sequence: Synthetic oligonucleotide
ucacuccugcuucaacgga

SEQ ID NO: 3144037 - RNA, 19 nt, Artificial Sequence
  Description of Artificial Sequence: Synthetic oligonucleotide
aucucucccagcaagucca

SEQ ID NO: 3144038 - RNA, 19 nt, Artificial Sequence
  Description of Artificial Sequence: Synthetic oligonucleotide
gaucugagaaauccaggcu

SEQ ID NO: 3144039 - RNA, 19 nt, Artificial Sequence
  Description of Artificial Sequence: Synthetic oligonucleotide
auccaggaucucucccagc

SEQ ID NO: 3144040 - RNA, 19 nt, Artificial Sequence
  Description of Artificial Sequence: Synthetic oligonucleotide
aggcuuuugcagcugucca

SEQ ID NO: 3144041 - RNA, 19 nt, Artificial Sequence
  Description of Artificial Sequence: Synthetic oligonucleotide
uccugcuucaacggaguca

SEQ ID NO: 3144042 - RNA, 19 nt, Artificial Sequence
  Description of Artificial Sequence: Synthetic oligonucleotide
cugaguaaggagccuucac

SEQ ID NO: 3144043 - RNA, 19 nt, Artificial Sequence
  Description of Artificial Sequence: Synthetic oligonucleotide
cguagguuuguaaucaaug

SEQ ID NO: 3144044 - RNA, 19 nt, Artificial Sequence
  Description of Artificial Sequence: Synthetic oligonucleotide
gagucaucacuuucauaga

SEQ ID NO: 3144045 - RNA, 19 nt, Artificial Sequence
  Description of Artificial Sequence: Synthetic oligonucleotide
ugaucggagcugugugugc

SEQ ID NO: 3144046 - RNA, 19 nt, Artificial Sequence
  Description of Artificial Sequence: Synthetic oligonucleotide
uccaggcuuuugcagcugu

SEQ ID NO: 3144047 - RNA, 19 nt, Artificial Sequence
  Description of Artificial Sequence: Synthetic oligonucleotide
uuuugcagcuguccagcuu

SEQ ID NO: 3144048 - RNA, 19 nt, Artificial Sequence
  Description of Artificial Sequence: Synthetic oligonucleotide
ucaacggagucaucacuuu

SEQ ID NO: 3144049 - RNA, 19 nt, Artificial Sequence
  Description of Artificial Sequence: Synthetic oligonucleotide
uucccuugaucggagcugu

SEQ ID NO: 3144050 - RNA, 19 nt, Artificial Sequence
  Description of Artificial Sequence: Synthetic oligonucleotide
agcugugugugcucagcgu

SEQ ID NO: 3144051 - RNA, 19 nt, Artificial Sequence
  Description of Artificial Sequence: Synthetic oligonucleotide
aucggagcugugugugcuc

SEQ ID NO: 3144052 - RNA, 19 nt, Artificial Sequence
  Description of Artificial Sequence: Synthetic oligonucleotide
caacggagucaucacuuuc

SEQ ID NO: 3144053 - RNA, 19 nt, Artificial Sequence
  Description of Artificial Sequence: Synthetic oligonucleotide
guaaggagccuucacuccu

SEQ ID NO: 3144054 - RNA, 19 nt, Artificial Sequence
  Description of Artificial Sequence: Synthetic oligonucleotide
uccauggaucugagaaauc

SEQ ID NO: 3144055 - RNA, 19 nt, Artificial Sequence
  Description of Artificial Sequence: Synthetic oligonucleotide
gugugugcucagcguaucc

SEQ ID NO: 3144056 - RNA, 19 nt, Artificial Sequence
  Description of Artificial Sequence: Synthetic oligonucleotide
ugcucagcguauccaggau

SEQ ID NO: 3144057 - RNA, 19 nt, Artificial Sequence
  Description of Artificial Sequence: Synthetic oligonucleotide
cucagcguauccaggaucu

SEQ ID NO: 3144058 - RNA, 19 nt, Artificial Sequence
  Description of Artificial Sequence: Synthetic oligonucleotide
gugcucagcguauccagga

SEQ ID NO: 3144059 - RNA, 19 nt, Artificial Sequence
  Description of Artificial Sequence: Synthetic oligonucleotide
accugaguaaggagccuuc

SEQ ID NO: 3144060 - RNA, 19 nt, Artificial Sequence
  Description of Artificial Sequence: Synthetic oligonucleotide
caucucaccugaguaagga

SEQ ID NO: 3144061 - RNA, 19 nt, Artificial Sequence
  Description of Artificial Sequence: Synthetic oligonucleotide
acggagucaucacuuucau

SEQ ID NO: 3144062 - RNA, 19 nt, Artificial Sequence
  Description of Artificial Sequence: Synthetic oligonucleotide
cauccauggaucugagaaa

SEQ ID NO: 3144063 - RNA, 19 nt, Artificial Sequence
  Description of Artificial Sequence: Synthetic oligonucleotide
gcuuuugcagcuguccagc

SEQ ID NO: 3144064 - RNA, 19 nt, Artificial Sequence
  Description of Artificial Sequence: Synthetic oligonucleotide
guccaucucaccugaguaa

SEQ ID NO: 3144065 - RNA, 19 nt, Artificial Sequence
  Description of Artificial Sequence: Synthetic oligonucleotide
gucaucacuuucauagaaa

SEQ ID NO: 3144066 - RNA, 19 nt, Artificial Sequence
  Description of Artificial Sequence: Synthetic oligonucleotide
ucggagcugugugugcuca

SEQ ID NO: 3144067 - RNA, 19 nt, Artificial Sequence
  Description of Artificial Sequence: Synthetic oligonucleotide
gcagcuguccagcuuuccc

SEQ ID NO: 3144068 - RNA, 19 nt, Artificial Sequence
  Description of Artificial Sequence: Synthetic oligonucleotide
caucacuuucauagaaaua

SEQ ID NO: 3144069 - RNA, 19 nt, Artificial Sequence
  Description of Artificial Sequence: Synthetic oligonucleotide
gcuucaacggagucaucac

SEQ ID NO: 3144070 - RNA, 19 nt, Artificial Sequence
  Description of Artificial Sequence: Synthetic oligonucleotide
ugugugugcucagcguauc

SEQ ID NO: 3144071 - RNA, 19 nt, Artificial Sequence
  Description of Artificial Sequence: Synthetic oligonucleotide
ccuugaucggagcugugug

SEQ ID NO: 3144072 - RNA, 19 nt, Artificial Sequence
  Description of Artificial Sequence: Synthetic oligonucleotide
agcuguccagcuuucccuu

SEQ ID NO: 3144073 - RNA, 19 nt, Artificial Sequence
  Description of Artificial Sequence: Synthetic oligonucleotide
caaguccaucucaccugag

SEQ ID NO: 3144074 - RNA, 19 nt, Artificial Sequence
  Description of Artificial Sequence: Synthetic oligonucleotide
gcaaguccaucucaccuga

SEQ ID NO: 3144075 - RNA, 19 nt, Artificial Sequence
  Description of Artificial Sequence: Synthetic oligonucleotide
agcuuucccuugaucggag

SEQ ID NO: 3144076 - RNA, 19 nt, Artificial Sequence
  Description of Artificial Sequence: Synthetic oligonucleotide
cuugaucggagcugugugu

SEQ ID NO: 3144077 - RNA, 19 nt, Artificial Sequence
  Description of Artificial Sequence: Synthetic oligonucleotide
cagcaaguccaucucaccu

SEQ ID NO: 3144078 - RNA, 19 nt, Artificial Sequence
  Description of Artificial Sequence: Synthetic oligonucleotide
ucaccugaguaaggagccu

SEQ ID NO: 3144079 - RNA, 19 nt, Artificial Sequence
  Description of Artificial Sequence: Synthetic oligonucleotide
ugcagcuguccagcuuucc

SEQ ID NO: 3144080 - RNA, 19 nt, Artificial Sequence
  Description of Artificial Sequence: Synthetic oligonucleotide
aggaucucucccagcaagu

SEQ ID NO: 3144081 - RNA, 19 nt, Artificial Sequence
  Description of Artificial Sequence: Synthetic oligonucleotide
cuucaacggagucaucacu

SEQ ID NO: 3144082 - RNA, 19 nt, Artificial Sequence
  Description of Artificial Sequence: Synthetic oligonucleotide
cuuucccuugaucggagcu

SEQ ID NO: 3144083 - RNA, 19 nt, Artificial Sequence
  Description of Artificial Sequence: Synthetic oligonucleotide
cccagcaaguccaucucac

SEQ ID NO: 3144084 - RNA, 19 nt, Artificial Sequence
  Description of Artificial Sequence: Synthetic oligonucleotide
ccaucucaccugaguaagg

SEQ ID NO: 3144085 - RNA, 19 nt, Artificial Sequence
  Description of Artificial Sequence: Synthetic oligonucleotide
uugcagcuguccagcuuuc

SEQ ID NO: 3144086 - RNA, 19 nt, Artificial Sequence
  Description of Artificial Sequence: Synthetic oligonucleotide
gucauccauggaucugaga

SEQ ID NO: 3144087 - RNA, 19 nt, Artificial Sequence
  Description of Artificial Sequence: Synthetic oligonucleotide
gaucggagcugugugugcu

SEQ ID NO: 3144088 - RNA, 19 nt, Artificial Sequence
  Description of Artificial Sequence: Synthetic oligonucleotide
ucccuugaucggagcugug

SEQ ID NO: 3144089 - RNA, 19 nt, Artificial Sequence
  Description of Artificial Sequence: Synthetic oligonucleotide
gcucagcguauccaggauc

SEQ ID NO: 3144090 - RNA, 19 nt, Artificial Sequence
  Description of Artificial Sequence: Synthetic oligonucleotide
aggagccuucacuccugcu

SEQ ID NO: 3144091 - RNA, 19 nt, Artificial Sequence
  Description of Artificial Sequence: Synthetic oligonucleotide
gcugugugugcucagcgua

SEQ ID NO: 3144092 - RNA, 19 nt, Artificial Sequence
  Description of Artificial Sequence: Synthetic oligonucleotide
cguauccaggaucucuccc

SEQ ID NO: 3144093 - RNA, 19 nt, Artificial Sequence
  Description of Artificial Sequence: Synthetic oligonucleotide
ggagcugugugugcucagc

SEQ ID NO: 3144094 - RNA, 19 nt, Artificial Sequence
  Description of Artificial Sequence: Synthetic oligonucleotide
gcguauccaggaucucucc

SEQ ID NO: 3144095 - RNA, 19 nt, Artificial Sequence
  Description of Artificial Sequence: Synthetic oligonucleotide
cagcuuucccuugaucgga

SEQ ID NO: 3144096 - RNA, 19 nt, Artificial Sequence
  Description of Artificial Sequence: Synthetic oligonucleotide
cagcuguccagcuuucccu

SEQ ID NO: 3144097 - RNA, 19 nt, Artificial Sequence
  Description of Artificial Sequence: Synthetic oligonucleotide
gcuuucccuugaucggagc

SEQ ID NO: 3144098 - RNA, 19 nt, Artificial Sequence
  Description of Artificial Sequence: Synthetic oligonucleotide
ucagcguauccaggaucuc

SEQ ID NO: 3144099 - RNA, 19 nt, Artificial Sequence
  Description of Artificial Sequence: Synthetic oligonucleotide
ggaucucucccagcaaguc

SEQ ID NO: 3144100 - RNA, 19 nt, Artificial Sequence
  Description of Artificial Sequence: Synthetic oligonucleotide
gguuuguaaucaaugucau

SEQ ID NO: 3144101 - RNA, 19 nt, Artificial Sequence
  Description of Artificial Sequence: Synthetic oligonucleotide
cuuuugcagcuguccagcu

SEQ ID NO: 3144102 - RNA, 19 nt, Artificial Sequence
  Description of Artificial Sequence: Synthetic oligonucleotide
auccaggcuuuugcagcug

SEQ ID NO: 3144103 - RNA, 19 nt, Artificial Sequence
  Description of Artificial Sequence: Synthetic oligonucleotide
ccuucacuccugcuucaac

SEQ ID NO: 3144104 - RNA, 19 nt, Artificial Sequence
  Description of Artificial Sequence: Synthetic oligonucleotide
cugugugugcucagcguau

SEQ ID NO: 3144105 - RNA, 19 nt, Artificial Sequence
  Description of Artificial Sequence: Synthetic oligonucleotide
cagcguauccaggaucucu

SEQ ID NO: 3144106 - RNA, 19 nt, Artificial Sequence
  Description of Artificial Sequence: Synthetic oligonucleotide
cucucccagcaaguccauc

SEQ ID NO: 3144107 - RNA, 19 nt, Artificial Sequence
  Description of Artificial Sequence: Synthetic oligonucleotide
cugcuucaacggagucauc

SEQ ID NO: 3144108 - RNA, 19 nt, Artificial Sequence
  Description of Artificial Sequence: Synthetic oligonucleotide
ccaggcuuuugcagcuguc

SEQ ID NO: 3144109 - RNA, 19 nt, Artificial Sequence
  Description of Artificial Sequence: Synthetic oligonucleotide
ccugcuucaacggagucau

SEQ ID NO: 3144110 - RNA, 19 nt, Artificial Sequence
  Description of Artificial Sequence: Synthetic oligonucleotide
ccugaguaaggagccuuca

SEQ ID NO: 3144111 - RNA, 19 nt, Artificial Sequence
  Description of Artificial Sequence: Synthetic oligonucleotide
cugagaaauccaggcuuuu

SEQ ID NO: 3144112 - RNA, 19 nt, Artificial Sequence
  Description of Artificial Sequence: Synthetic oligonucleotide
gccuucacuccugcuucaa

SEQ ID NO: 3144113 - RNA, 19 nt, Artificial Sequence
  Description of Artificial Sequence: Synthetic oligonucleotide
cccuugaucggagcugugu

SEQ ID NO: 3144114 - RNA, 19 nt, Artificial Sequence
  Description of Artificial Sequence: Synthetic oligonucleotide
cggagucaucacuuucaua

SEQ ID NO: 3144115 - RNA, 19 nt, Artificial Sequence
  Description of Artificial Sequence: Synthetic oligonucleotide
cuuucgugcagaaugaggg

SEQ ID NO: 3144116 - RNA, 19 nt, Artificial Sequence
  Description of Artificial Sequence: Synthetic oligonucleotide
aaaguaauggcuucucuga

SEQ ID NO: 3144117 - RNA, 19 nt, Artificial Sequence
  Description of Artificial Sequence: Synthetic oligonucleotide
ugcagaaugagggauaugc

SEQ ID NO: 3144118 - RNA, 19 nt, Artificial Sequence
  Description of Artificial Sequence: Synthetic oligonucleotide
ucuuucgugcagaaugagg

SEQ ID NO: 3144119 - RNA, 19 nt, Artificial Sequence
  Description of Artificial Sequence: Synthetic oligonucleotide
cagaaugagggauaugcgc

SEQ ID NO: 3144120 - RNA, 19 nt, Artificial Sequence
  Description of Artificial Sequence: Synthetic oligonucleotide
uacgguuucuccaaaguaa

SEQ ID NO: 3144121 - RNA, 19 nt, Artificial Sequence
  Description of Artificial Sequence: Synthetic oligonucleotide
caaaguaauggcuucucug

SEQ ID NO: 3144122 - RNA, 19 nt, Artificial Sequence
  Description of Artificial Sequence: Synthetic oligonucleotide
uuucuccaaaguaauggcu

SEQ ID NO: 3144123 - RNA, 19 nt, Artificial Sequence
  Description of Artificial Sequence: Synthetic oligonucleotide
gguuucuccaaaguaaugg

SEQ ID NO: 3144124 - RNA, 19 nt, Artificial Sequence
  Description of Artificial Sequence: Synthetic oligonucleotide
cugaugucggaugaggucg

SEQ ID NO: 3144125 - RNA, 19 nt, Artificial Sequence
  Description of Artificial Sequence: Synthetic oligonucleotide
gcuucuuucgugcagaaug

SEQ ID NO: 3144126 - RNA, 19 nt, Artificial Sequence
  Description of Artificial Sequence: Synthetic oligonucleotide
guuucuccaaaguaauggc

SEQ ID NO: 3144127 - RNA, 19 nt, Artificial Sequence
  Description of Artificial Sequence: Synthetic oligonucleotide
aaugagggauaugcgcugg

SEQ ID NO: 3144128 - RNA, 19 nt, Artificial Sequence
  Description of Artificial Sequence: Synthetic oligonucleotide
ugucggaugaggucggagc

SEQ ID NO: 3144129 - RNA, 19 nt, Artificial Sequence
  Description of Artificial Sequence: Synthetic oligonucleotide
uucuccaaaguaauggcuu

SEQ ID NO: 3144130 - RNA, 19 nt, Artificial Sequence
  Description of Artificial Sequence: Synthetic oligonucleotide
ucggagccacuacugaagg

SEQ ID NO: 3144131 - RNA, 19 nt, Artificial Sequence
  Description of Artificial Sequence: Synthetic oligonucleotide
ugggugaaggacuucuuac

SEQ ID NO: 3144132 - RNA, 19 nt, Artificial Sequence
  Description of Artificial Sequence: Synthetic oligonucleotide
uguggcuucuuucgugcag

SEQ ID NO: 3144133 - RNA, 19 nt, Artificial Sequence
  Description of Artificial Sequence: Synthetic oligonucleotide
gaaugagggauaugcgcug

SEQ ID NO: 3144134 - RNA, 19 nt, Artificial Sequence
  Description of Artificial Sequence: Synthetic oligonucleotide
agaaugagggauaugcgcu

SEQ ID NO: 3144135 - RNA, 19 nt, Artificial Sequence
  Description of Artificial Sequence: Synthetic oligonucleotide
aaguaauggcuucucugau

SEQ ID NO: 3144136 - RNA, 19 nt, Artificial Sequence
  Description of Artificial Sequence: Synthetic oligonucleotide
ucugaugucggaugagguc

SEQ ID NO: 3144137 - RNA, 19 nt, Artificial Sequence
  Description of Artificial Sequence: Synthetic oligonucleotide
agggauaugcgcuggguga

SEQ ID NO: 3144138 - RNA, 19 nt, Artificial Sequence
  Description of Artificial Sequence: Synthetic oligonucleotide
ugaugucggaugaggucgg

SEQ ID NO: 3144139 - RNA, 19 nt, Artificial Sequence
  Description of Artificial Sequence: Synthetic oligonucleotide
gauaugcgcugggugaagg

SEQ ID NO: 3144140 - RNA, 19 nt, Artificial Sequence
  Description of Artificial Sequence: Synthetic oligonucleotide
gagggauaugcgcugggug

SEQ ID NO: 3144141 - RNA, 19 nt, Artificial Sequence
  Description of Artificial Sequence: Synthetic oligonucleotide
ugaggucggagccacuacu

SEQ ID NO: 3144142 - RNA, 19 nt, Artificial Sequence
  Description of Artificial Sequence: Synthetic oligonucleotide
ucuccaaaguaauggcuuc

SEQ ID NO: 3144143 - RNA, 19 nt, Artificial Sequence
  Description of Artificial Sequence: Synthetic oligonucleotide
uuucgugcagaaugaggga

SEQ ID NO: 3144144 - RNA, 19 nt, Artificial Sequence
  Description of Artificial Sequence: Synthetic oligonucleotide
guaauggcuucucugaugu

SEQ ID NO: 3144145 - RNA, 19 nt, Artificial Sequence
  Description of Artificial Sequence: Synthetic oligonucleotide
gucggaugaggucggagcc

SEQ ID NO: 3144146 - RNA, 19 nt, Artificial Sequence
  Description of Artificial Sequence: Synthetic oligonucleotide
auucguacgguuucuccaa

SEQ ID NO: 3144147 - RNA, 19 nt, Artificial Sequence
  Description of Artificial Sequence: Synthetic oligonucleotide
cauucguacgguuucucca

SEQ ID NO: 3144148 - RNA, 19 nt, Artificial Sequence
  Description of Artificial Sequence: Synthetic oligonucleotide
augaggucggagccacuac

SEQ ID NO: 3144149 - RNA, 19 nt, Artificial Sequence
  Description of Artificial Sequence: Synthetic oligonucleotide
ggagccacuacugaaggcc

SEQ ID NO: 3144150 - RNA, 19 nt, Artificial Sequence
  Description of Artificial Sequence: Synthetic oligonucleotide
ucguacgguuucuccaaag

SEQ ID NO: 3144151 - RNA, 19 nt, Artificial Sequence
  Description of Artificial Sequence: Synthetic oligonucleotide
cuucuuucgugcagaauga

SEQ ID NO: 3144152 - RNA, 19 nt, Artificial Sequence
  Description of Artificial Sequence: Synthetic oligonucleotide
uucuuucgugcagaaugag

SEQ ID NO: 3144153 - RNA, 19 nt, Artificial Sequence
  Description of Artificial Sequence: Synthetic oligonucleotide
uaugcgcugggugaaggac

SEQ ID NO: 3144154 - RNA, 19 nt, Artificial Sequence
  Description of Artificial Sequence: Synthetic oligonucleotide
augagggauaugcgcuggg

SEQ ID NO: 3144155 - RNA, 19 nt, Artificial Sequence
  Description of Artificial Sequence: Synthetic oligonucleotide
uucgugcagaaugagggau

SEQ ID NO: 3144156 - RNA, 19 nt, Artificial Sequence
  Description of Artificial Sequence: Synthetic oligonucleotide
auggcuucucugaugucgg

SEQ ID NO: 3144157 - RNA, 19 nt, Artificial Sequence
  Description of Artificial Sequence: Synthetic oligonucleotide
gucggagccacuacugaag

SEQ ID NO: 3144158 - RNA, 19 nt, Artificial Sequence
  Description of Artificial Sequence: Synthetic oligonucleotide
auaugcgcugggugaagga

SEQ ID NO: 3144159 - RNA, 19 nt, Artificial Sequence
  Description of Artificial Sequence: Synthetic oligonucleotide
gcuucucugaugucggaug

SEQ ID NO: 3144160 - RNA, 19 nt, Artificial Sequence
  Description of Artificial Sequence: Synthetic oligonucleotide
ucgugcagaaugagggaua

SEQ ID NO: 3144161 - RNA, 19 nt, Artificial Sequence
  Description of Artificial Sequence: Synthetic oligonucleotide
guacgguuucuccaaagua

SEQ ID NO: 3144162 - RNA, 19 nt, Artificial Sequence
  Description of Artificial Sequence: Synthetic oligonucleotide
gaggucggagccacuacug

SEQ ID NO: 3144163 - RNA, 19 nt, Artificial Sequence
  Description of Artificial Sequence: Synthetic oligonucleotide
cacuacugaaggccuuccc

SEQ ID NO: 3144164 - RNA, 19 nt, Artificial Sequence
  Description of Artificial Sequence: Synthetic oligonucleotide
gcagaaugagggauaugcg

SEQ ID NO: 3144165 - RNA, 19 nt, Artificial Sequence
  Description of Artificial Sequence: Synthetic oligonucleotide
ugagggauaugcgcugggu

SEQ ID NO: 3144166 - RNA, 19 nt, Artificial Sequence
  Description of Artificial Sequence: Synthetic oligonucleotide
uucguacgguuucuccaaa

SEQ ID NO: 3144167 - RNA, 19 nt, Artificial Sequence
  Description of Artificial Sequence: Synthetic oligonucleotide
aggucggagccacuacuga

SEQ ID NO: 3144168 - RNA, 19 nt, Artificial Sequence
  Description of Artificial Sequence: Synthetic oligonucleotide
ugcgcugggugaaggacuu

SEQ ID NO: 3144169 - RNA, 19 nt, Artificial Sequence
  Description of Artificial Sequence: Synthetic oligonucleotide
acgguuucuccaaaguaau

SEQ ID NO: 3144170 - RNA, 19 nt, Artificial Sequence
  Description of Artificial Sequence: Synthetic oligonucleotide
gaugaggucggagccacua

SEQ ID NO: 3144171 - RNA, 19 nt, Artificial Sequence
  Description of Artificial Sequence: Synthetic oligonucleotide
augucggaugaggucggag

SEQ ID NO: 3144172 - RNA, 19 nt, Artificial Sequence
  Description of Artificial Sequence: Synthetic oligonucleotide
ccccguguggcuucuuucg

SEQ ID NO: 3144173 - RNA, 19 nt, Artificial Sequence
  Description of Artificial Sequence: Synthetic oligonucleotide
guggcuucuuucgugcaga

SEQ ID NO: 3144174 - RNA, 19 nt, Artificial Sequence
  Description of Artificial Sequence: Synthetic oligonucleotide
uggcuucuuucgugcagaa

SEQ ID NO: 3144175 - RNA, 19 nt, Artificial Sequence
  Description of Artificial Sequence: Synthetic oligonucleotide
augcgcugggugaaggacu

SEQ ID NO: 3144176 - RNA, 19 nt, Artificial Sequence
  Description of Artificial Sequence: Synthetic oligonucleotide
uggcuucucugaugucgga

SEQ ID NO: 3144177 - RNA, 19 nt, Artificial Sequence
  Description of Artificial Sequence: Synthetic oligonucleotide
cugggugaaggacuucuua

SEQ ID NO: 3144178 - RNA, 19 nt, Artificial Sequence
  Description of Artificial Sequence: Synthetic oligonucleotide
ggucggagccacuacugaa

SEQ ID NO: 3144179 - RNA, 19 nt, Artificial Sequence
  Description of Artificial Sequence: Synthetic oligonucleotide
guguggcuucuuucgugca

SEQ ID NO: 3144180 - RNA, 19 nt, Artificial Sequence
  Description of Artificial Sequence: Synthetic oligonucleotide
ggauaugcgcugggugaag

SEQ ID NO: 3144181 - RNA, 19 nt, Artificial Sequence
  Description of Artificial Sequence: Synthetic oligonucleotide
gaugucggaugaggucgga

SEQ ID NO: 3144182 - RNA, 19 nt, Artificial Sequence
  Description of Artificial Sequence: Synthetic oligonucleotide
ccguguggcuucuuucgug

SEQ ID NO: 3144183 - RNA, 19 nt, Artificial Sequence
  Description of Artificial Sequence: Synthetic oligonucleotide
gagccacuacugaaggccu

SEQ ID NO: 3144184 - RNA, 19 nt, Artificial Sequence
  Description of Artificial Sequence: Synthetic oligonucleotide
gugcagaaugagggauaug

SEQ ID NO: 3144185 - RNA, 19 nt, Artificial Sequence
  Description of Artificial Sequence: Synthetic oligonucleotide
cuccaaaguaauggcuucu

SEQ ID NO: 3144186 - RNA, 19 nt, Artificial Sequence
  Description of Artificial Sequence: Synthetic oligonucleotide
cgguuucuccaaaguaaug

SEQ ID NO: 3144187 - RNA, 19 nt, Artificial Sequence
  Description of Artificial Sequence: Synthetic oligonucleotide
gggauaugcgcugggugaa

SEQ ID NO: 3144188 - RNA, 19 nt, Artificial Sequence
  Description of Artificial Sequence: Synthetic oligonucleotide
ccaaaguaauggcuucucu

SEQ ID NO: 3144189 - RNA, 19 nt, Artificial Sequence
  Description of Artificial Sequence: Synthetic oligonucleotide
cggagccacuacugaaggc

SEQ ID NO: 3144190 - RNA, 19 nt, Artificial Sequence
  Description of Artificial Sequence: Synthetic oligonucleotide
agccacuacugaaggccuu

SEQ ID NO: 3144191 - RNA, 19 nt, Artificial Sequence
  Description of Artificial Sequence: Synthetic oligonucleotide
cggaugaggucggagccac

SEQ ID NO: 3144192 - RNA, 19 nt, Artificial Sequence
  Description of Artificial Sequence: Synthetic oligonucleotide
cguacgguuucuccaaagu

SEQ ID NO: 3144193 - RNA, 19 nt, Artificial Sequence
  Description of Artificial Sequence: Synthetic oligonucleotide
ccugucucugaaauccuuu

SEQ ID NO: 3144194 - RNA, 19 nt, Artificial Sequence
  Description of Artificial Sequence: Synthetic oligonucleotide
ggcuucucugaugucggau

SEQ ID NO: 3144195 - RNA, 19 nt, Artificial Sequence
  Description of Artificial Sequence: Synthetic oligonucleotide
ggcuucuuucgugcagaau

SEQ ID NO: 3144196 - RNA, 19 nt, Artificial Sequence
  Description of Artificial Sequence: Synthetic oligonucleotide
cgugcagaaugagggauau

SEQ ID NO: 3144197 - RNA, 19 nt, Artificial Sequence
  Description of Artificial Sequence: Synthetic oligonucleotide
cccguguggcuucuuucgu

SEQ ID NO: 3144198 - RNA, 19 nt, Artificial Sequence
  Description of Artificial Sequence: Synthetic oligonucleotide
cgcugggugaaggacuucu

SEQ ID NO: 3144199 - RNA, 19 nt, Artificial Sequence
  Description of Artificial Sequence: Synthetic oligonucleotide
gcgcugggugaaggacuuc

SEQ ID NO: 3144200 - RNA, 19 nt, Artificial Sequence
  Description of Artificial Sequence: Synthetic oligonucleotide
uuuuguuuuguuuuguuuu

SEQ ID NO: 3144201 - RNA, 19 nt, Artificial Sequence
  Description of Artificial Sequence: Synthetic oligonucleotide
uuuguuuuguuuuguuuug

SEQ ID NO: 3144202 - RNA, 19 nt, Artificial Sequence
  Description of Artificial Sequence: Synthetic oligonucleotide
aucaaaggcgugcaccacc

SEQ ID NO: 3144203 - RNA, 19 nt, Artificial Sequence
  Description of Artificial Sequence: Synthetic oligonucleotide
guaguuuuggagccuaucc

SEQ ID NO: 3144204 - RNA, 19 nt, Artificial Sequence
  Description of Artificial Sequence: Synthetic oligonucleotide
agauccgucugccucugcc

SEQ ID NO: 3144205 - RNA, 19 nt, Artificial Sequence
  Description of Artificial Sequence: Synthetic oligonucleotide
uaguuuuggagccuauccu

SEQ ID NO: 3144206 - RNA, 19 nt, Artificial Sequence
  Description of Artificial Sequence: Synthetic oligonucleotide
ucaaaggcgugcaccacca

SEQ ID NO: 3144207 - RNA, 19 nt, Artificial Sequence
  Description of Artificial Sequence: Synthetic oligonucleotide
uguaguuuuggagccuauc

SEQ ID NO: 3144208 - RNA, 19 nt, Artificial Sequence
  Description of Artificial Sequence: Synthetic oligonucleotide
uguguaguuuuggagccua

SEQ ID NO: 3144209 - RNA, 19 nt, Artificial Sequence
  Description of Artificial Sequence: Synthetic oligonucleotide
ggaucaaaggcgugcacca

SEQ ID NO: 3144210 - RNA, 19 nt, Artificial Sequence
  Description of Artificial Sequence: Synthetic oligonucleotide
gggaucaaaggcgugcacc

SEQ ID NO: 3144211 - RNA, 19 nt, Artificial Sequence
  Description of Artificial Sequence: Synthetic oligonucleotide
guuuuguuuuguuuuguuu

SEQ ID NO: 3144212 - RNA, 19 nt, Artificial Sequence
  Description of Artificial Sequence: Synthetic oligonucleotide
ugggaucaaaggcgugcac

SEQ ID NO: 3144213 - RNA, 19 nt, Artificial Sequence
  Description of Artificial Sequence: Synthetic oligonucleotide
uccgucugccucugccucc

SEQ ID NO: 3144214 - RNA, 19 nt, Artificial Sequence
  Description of Artificial Sequence: Synthetic oligonucleotide
gaucaaaggcgugcaccac

SEQ ID NO: 3144215 - RNA, 19 nt, Artificial Sequence
  Description of Artificial Sequence: Synthetic oligonucleotide
gcugggaucaaaggcgugc

SEQ ID NO: 3144216 - RNA, 19 nt, Artificial Sequence
  Description of Artificial Sequence: Synthetic oligonucleotide
gauccgucugccucugccu

SEQ ID NO: 3144217 - RNA, 19 nt, Artificial Sequence
  Description of Artificial Sequence: Synthetic oligonucleotide
cugggaucaaaggcgugca

SEQ ID NO: 3144218 - RNA, 19 nt, Artificial Sequence
  Description of Artificial Sequence: Synthetic oligonucleotide
gagauccgucugccucugc

SEQ ID NO: 3144219 - RNA, 19 nt, Artificial Sequence
  Description of Artificial Sequence: Synthetic oligonucleotide
cuguguaguuuuggagccu

SEQ ID NO: 3144220 - RNA, 19 nt, Artificial Sequence
  Description of Artificial Sequence: Synthetic oligonucleotide
ccgucugccucugccuccc

SEQ ID NO: 3144221 - RNA, 19 nt, Artificial Sequence
  Description of Artificial Sequence: Synthetic oligonucleotide
guguaguuuuggagccuau

SEQ ID NO: 3144222 - RNA, 19 nt, Artificial Sequence
  Description of Artificial Sequence: Synthetic oligonucleotide
aagccagcaaaguagaaac

SEQ ID NO: 3144223 - RNA, 19 nt, Artificial Sequence
  Description of Artificial Sequence: Synthetic oligonucleotide
aguagaaacauucauuucu

SEQ ID NO: 3144224 - RNA, 19 nt, Artificial Sequence
  Description of Artificial Sequence: Synthetic oligonucleotide
auucacaucaugucagucc

SEQ ID NO: 3144225 - RNA, 19 nt, Artificial Sequence
  Description of Artificial Sequence: Synthetic oligonucleotide
agcaccacacacuacaugg

SEQ ID NO: 3144226 - RNA, 19 nt, Artificial Sequence
  Description of Artificial Sequence: Synthetic oligonucleotide
acaaaugcacagcuugucc

SEQ ID NO: 3144227 - RNA, 19 nt, Artificial Sequence
  Description of Artificial Sequence: Synthetic oligonucleotide
gaaacauucauuucucuuc

SEQ ID NO: 3144228 - RNA, 19 nt, Artificial Sequence
  Description of Artificial Sequence: Synthetic oligonucleotide
aucaugucaguccacguac

SEQ ID NO: 3144229 - RNA, 19 nt, Artificial Sequence
  Description of Artificial Sequence: Synthetic oligonucleotide
cuuguaaacagccugugug

SEQ ID NO: 3144230 - RNA, 19 nt, Artificial Sequence
  Description of Artificial Sequence: Synthetic oligonucleotide
aaacauucauuucucuucu

SEQ ID NO: 3144231 - RNA, 19 nt, Artificial Sequence
  Description of Artificial Sequence: Synthetic oligonucleotide
uucacaucaugucagucca

SEQ ID NO: 3144232 - RNA, 19 nt, Artificial Sequence
  Description of Artificial Sequence: Synthetic oligonucleotide
cuagcacuuguaaacagcc

SEQ ID NO: 3144233 - RNA, 19 nt, Artificial Sequence
  Description of Artificial Sequence: Synthetic oligonucleotide
agacuuucgagcuagcacu

SEQ ID NO: 3144234 - RNA, 19 nt, Artificial Sequence
  Description of Artificial Sequence: Synthetic oligonucleotide
auucauuucucuucucuag

SEQ ID NO: 3144235 - RNA, 19 nt, Artificial Sequence
  Description of Artificial Sequence: Synthetic oligonucleotide
uguguguaagccagcaaag

SEQ ID NO: 3144236 - RNA, 19 nt, Artificial Sequence
  Description of Artificial Sequence: Synthetic oligonucleotide
ucaguccacguacaaaugc

SEQ ID NO: 3144237 - RNA, 19 nt, Artificial Sequence
  Description of Artificial Sequence: Synthetic oligonucleotide
uccacguacaaaugcacag

SEQ ID NO: 3144238 - RNA, 19 nt, Artificial Sequence
  Description of Artificial Sequence: Synthetic oligonucleotide
uguaagccagcaaaguaga

SEQ ID NO: 3144239 - RNA, 19 nt, Artificial Sequence
  Description of Artificial Sequence: Synthetic oligonucleotide
aacagccuguguguaagcc

SEQ ID NO: 3144240 - RNA, 19 nt, Artificial Sequence
  Description of Artificial Sequence: Synthetic oligonucleotide
uagacagagcaccacacac

SEQ ID NO: 3144241 - RNA, 19 nt, Artificial Sequence
  Description of Artificial Sequence: Synthetic oligonucleotide
ugucaguccacguacaaau

SEQ ID NO: 3144242 - RNA, 19 nt, Artificial Sequence
  Description of Artificial Sequence: Synthetic oligonucleotide
aaagcugagacaagugcag

SEQ ID NO: 3144243 - RNA, 19 nt, Artificial Sequence
  Description of Artificial Sequence: Synthetic oligonucleotide
aaacagccuguguguaagc

SEQ ID NO: 3144244 - RNA, 19 nt, Artificial Sequence
  Description of Artificial Sequence: Synthetic oligonucleotide
uguguaagccagcaaagua

SEQ ID NO: 3144245 - RNA, 19 nt, Artificial Sequence
  Description of Artificial Sequence: Synthetic oligonucleotide
uaaacagccuguguguaag

SEQ ID NO: 3144246 - RNA, 19 nt, Artificial Sequence
  Description of Artificial Sequence: Synthetic oligonucleotide
uucauuucucuucucuaga

SEQ ID NO: 3144247 - RNA, 19 nt, Artificial Sequence
  Description of Artificial Sequence: Synthetic oligonucleotide
agcugagacaagugcagac

SEQ ID NO: 3144248 - RNA, 19 nt, Artificial Sequence
  Description of Artificial Sequence: Synthetic oligonucleotide
uuguaaacagccugugugu

SEQ ID NO: 3144249 - RNA, 19 nt, Artificial Sequence
  Description of Artificial Sequence: Synthetic oligonucleotide
ucuagacagagcaccacac

SEQ ID NO: 3144250 - RNA, 19 nt, Artificial Sequence
  Description of Artificial Sequence: Synthetic oligonucleotide
guguaagccagcaaaguag

SEQ ID NO: 3144251 - RNA, 19 nt, Artificial Sequence
  Description of Artificial Sequence: Synthetic oligonucleotide
cuucucuagacagagcacc

SEQ ID NO: 3144252 - RNA, 19 nt, Artificial Sequence
  Description of Artificial Sequence: Synthetic oligonucleotide
aacauucauuucucuucuc

SEQ ID NO: 3144253 - RNA, 19 nt, Artificial Sequence
  Description of Artificial Sequence: Synthetic oligonucleotide
ucauuucucuucucuagac

SEQ ID NO: 3144254 - RNA, 19 nt, Artificial Sequence
  Description of Artificial Sequence: Synthetic oligonucleotide
agaaacauucauuucucuu

SEQ ID NO: 3144255 - RNA, 19 nt, Artificial Sequence
  Description of Artificial Sequence: Synthetic oligonucleotide
aaaugcacagcuuguccaa

SEQ ID NO: 3144256 - RNA, 19 nt, Artificial Sequence
  Description of Artificial Sequence: Synthetic oligonucleotide
cucuucucuagacagagca

SEQ ID NO: 3144257 - RNA, 19 nt, Artificial Sequence
  Description of Artificial Sequence: Synthetic oligonucleotide
caaagcugagacaagugca

SEQ ID NO: 3144258 - RNA, 19 nt, Artificial Sequence
  Description of Artificial Sequence: Synthetic oligonucleotide
uaagccagcaaaguagaaa

SEQ ID NO: 3144259 - RNA, 19 nt, Artificial Sequence
  Description of Artificial Sequence: Synthetic oligonucleotide
uucucuagacagagcacca

SEQ ID NO: 3144260 - RNA, 19 nt, Artificial Sequence
  Description of Artificial Sequence: Synthetic oligonucleotide
cagacuuucgagcuagcac

SEQ ID NO: 3144261 - RNA, 19 nt, Artificial Sequence
  Description of Artificial Sequence: Synthetic oligonucleotide
gacaagugcagacuuucga

SEQ ID NO: 3144262 - RNA, 19 nt, Artificial Sequence
  Description of Artificial Sequence: Synthetic oligonucleotide
uagaaacauucauuucucu

SEQ ID NO: 3144263 - RNA, 19 nt, Artificial Sequence
  Description of Artificial Sequence: Synthetic oligonucleotide
cacaucaugucaguccacg

SEQ ID NO: 3144264 - RNA, 19 nt, Artificial Sequence
  Description of Artificial Sequence: Synthetic oligonucleotide
ucuucucuagacagagcac

SEQ ID NO: 3144265 - RNA, 19 nt, Artificial Sequence
  Description of Artificial Sequence: Synthetic oligonucleotide
agcuagcacuuguaaacag

SEQ ID NO: 3144266 - RNA, 19 nt, Artificial Sequence
  Description of Artificial Sequence: Synthetic oligonucleotide
gcaaagcugagacaagugc

SEQ ID NO: 3144267 - RNA, 19 nt, Artificial Sequence
  Description of Artificial Sequence: Synthetic oligonucleotide
caaaugcacagcuugucca

SEQ ID NO: 3144268 - RNA, 19 nt, Artificial Sequence
  Description of Artificial Sequence: Synthetic oligonucleotide
uucgagcuagcacuuguaa

SEQ ID NO: 3144269 - RNA, 19 nt, Artificial Sequence
  Description of Artificial Sequence: Synthetic oligonucleotide
cagccuguguguaagccag

SEQ ID NO: 3144270 - RNA, 19 nt, Artificial Sequence
  Description of Artificial Sequence: Synthetic oligonucleotide
cacacuacaugggacgggg

SEQ ID NO: 3144271 - RNA, 19 nt, Artificial Sequence
  Description of Artificial Sequence: Synthetic oligonucleotide
guagaaacauucauuucuc

SEQ ID NO: 3144272 - RNA, 19 nt, Artificial Sequence
  Description of Artificial Sequence: Synthetic oligonucleotide
ucgagcuagcacuuguaaa

SEQ ID NO: 3144273 - RNA, 19 nt, Artificial Sequence
  Description of Artificial Sequence: Synthetic oligonucleotide
gagacaagugcagacuuuc

SEQ ID NO: 3144274 - RNA, 19 nt, Artificial Sequence
  Description of Artificial Sequence: Synthetic oligonucleotide
aguccacguacaaaugcac

SEQ ID NO: 3144275 - RNA, 19 nt, Artificial Sequence
  Description of Artificial Sequence: Synthetic oligonucleotide
cagagcaccacacacuaca

SEQ ID NO: 3144276 - RNA, 19 nt, Artificial Sequence
  Description of Artificial Sequence: Synthetic oligonucleotide
ucaugucaguccacguaca

SEQ ID NO: 3144277 - RNA, 19 nt, Artificial Sequence
  Description of Artificial Sequence: Synthetic oligonucleotide
accacacacuacaugggac

SEQ ID NO: 3144278 - RNA, 19 nt, Artificial Sequence
  Description of Artificial Sequence: Synthetic oligonucleotide
cuguguguaagccagcaaa

SEQ ID NO: 3144279 - RNA, 19 nt, Artificial Sequence
  Description of Artificial Sequence: Synthetic oligonucleotide
gacagagcaccacacacua

SEQ ID NO: 3144280 - RNA, 19 nt, Artificial Sequence
  Description of Artificial Sequence: Synthetic oligonucleotide
cguacaaaugcacagcuug

SEQ ID NO: 3144281 - RNA, 19 nt, Artificial Sequence
  Description of Artificial Sequence: Synthetic oligonucleotide
uacaaaugcacagcuuguc

SEQ ID NO: 3144282 - RNA, 19 nt, Artificial Sequence
  Description of Artificial Sequence: Synthetic oligonucleotide
acagccuguguguaagcca

SEQ ID NO: 3144283 - RNA, 19 nt, Artificial Sequence
  Description of Artificial Sequence: Synthetic oligonucleotide
ggcauucacaucaugucag

SEQ ID NO: 3144284 - RNA, 19 nt, Artificial Sequence
  Description of Artificial Sequence: Synthetic oligonucleotide
agcaaaguagaaacauuca

SEQ ID NO: 3144285 - RNA, 19 nt, Artificial Sequence
  Description of Artificial Sequence: Synthetic oligonucleotide
ccacacacuacaugggacg

SEQ ID NO: 3144286 - RNA, 19 nt, Artificial Sequence
  Description of Artificial Sequence: Synthetic oligonucleotide
uagcacuuguaaacagccu

SEQ ID NO: 3144287 - RNA, 19 nt, Artificial Sequence
  Description of Artificial Sequence: Synthetic oligonucleotide
caaaguagaaacauucauu

SEQ ID NO: 3144288 - RNA, 19 nt, Artificial Sequence
  Description of Artificial Sequence: Synthetic oligonucleotide
cacacacuacaugggacgg

SEQ ID NO: 3144289 - RNA, 19 nt, Artificial Sequence
  Description of Artificial Sequence: Synthetic oligonucleotide
uguaaacagccugugugua

SEQ ID NO: 3144290 - RNA, 19 nt, Artificial Sequence
  Description of Artificial Sequence: Synthetic oligonucleotide
cauuucucuucucuagaca

SEQ ID NO: 3144291 - RNA, 19 nt, Artificial Sequence
  Description of Artificial Sequence: Synthetic oligonucleotide
uuucgagcuagcacuugua

SEQ ID NO: 3144292 - RNA, 19 nt, Artificial Sequence
  Description of Artificial Sequence: Synthetic oligonucleotide
gagcaccacacacuacaug

SEQ ID NO: 3144293 - RNA, 19 nt, Artificial Sequence
  Description of Artificial Sequence: Synthetic oligonucleotide
cgagcuagcacuuguaaac

SEQ ID NO: 3144294 - RNA, 19 nt, Artificial Sequence
  Description of Artificial Sequence: Synthetic oligonucleotide
ugagacaagugcagacuuu

SEQ ID NO: 3144295 - RNA, 19 nt, Artificial Sequence
  Description of Artificial Sequence: Synthetic oligonucleotide
aacgcaaagcugagacaag

SEQ ID NO: 3144296 - RNA, 19 nt, Artificial Sequence
  Description of Artificial Sequence: Synthetic oligonucleotide
agacaagugcagacuuucg

SEQ ID NO: 3144297 - RNA, 19 nt, Artificial Sequence
  Description of Artificial Sequence: Synthetic oligonucleotide
gugcagacuuucgagcuag

SEQ ID NO: 3144298 - RNA, 19 nt, Artificial Sequence
  Description of Artificial Sequence: Synthetic oligonucleotide
caguccacguacaaaugca

SEQ ID NO: 3144299 - RNA, 19 nt, Artificial Sequence
  Description of Artificial Sequence: Synthetic oligonucleotide
aagcugagacaagugcaga

SEQ ID NO: 3144300 - RNA, 19 nt, Artificial Sequence
  Description of Artificial Sequence: Synthetic oligonucleotide
cauucauuucucuucucua

SEQ ID NO: 3144301 - RNA, 19 nt, Artificial Sequence
  Description of Artificial Sequence: Synthetic oligonucleotide
cucuagacagagcaccaca

SEQ ID NO: 3144302 - RNA, 19 nt, Artificial Sequence
  Description of Artificial Sequence: Synthetic oligonucleotide
acgcaaagcugagacaagu

SEQ ID NO: 3144303 - RNA, 19 nt, Artificial Sequence
  Description of Artificial Sequence: Synthetic oligonucleotide
aaugcacagcuuguccaaa

SEQ ID NO: 3144304 - RNA, 19 nt, Artificial Sequence
  Description of Artificial Sequence: Synthetic oligonucleotide
gagcuagcacuuguaaaca

SEQ ID NO: 3144305 - RNA, 19 nt, Artificial Sequence
  Description of Artificial Sequence: Synthetic oligonucleotide
ucucuagacagagcaccac

SEQ ID NO: 3144306 - RNA, 19 nt, Artificial Sequence
  Description of Artificial Sequence: Synthetic oligonucleotide
guaaacagccuguguguaa

SEQ ID NO: 3144307 - RNA, 19 nt, Artificial Sequence
  Description of Artificial Sequence: Synthetic oligonucleotide
cuagacagagcaccacaca

SEQ ID NO: 3144308 - RNA, 19 nt, Artificial Sequence
  Description of Artificial Sequence: Synthetic oligonucleotide
cauucacaucaugucaguc

SEQ ID NO: 3144309 - RNA, 19 nt, Artificial Sequence
  Description of Artificial Sequence: Synthetic oligonucleotide
agacagagcaccacacacu

SEQ ID NO: 3144310 - RNA, 19 nt, Artificial Sequence
  Description of Artificial Sequence: Synthetic oligonucleotide
acacacuacaugggacggg

SEQ ID NO: 3144311 - RNA, 19 nt, Artificial Sequence
  Description of Artificial Sequence: Synthetic oligonucleotide
ucacaucaugucaguccac

SEQ ID NO: 3144312 - RNA, 19 nt, Artificial Sequence
  Description of Artificial Sequence: Synthetic oligonucleotide
ggggcauucacaucauguc

SEQ ID NO: 3144313 - RNA, 19 nt, Artificial Sequence
  Description of Artificial Sequence: Synthetic oligonucleotide
gcuagcacuuguaaacagc

SEQ ID NO: 3144314 - RNA, 19 nt, Artificial Sequence
  Description of Artificial Sequence: Synthetic oligonucleotide
gggcauucacaucauguca

SEQ ID NO: 3144315 - RNA, 19 nt, Artificial Sequence
  Description of Artificial Sequence: Synthetic oligonucleotide
caucaugucaguccacgua

SEQ ID NO: 3144316 - RNA, 19 nt, Artificial Sequence
  Description of Artificial Sequence: Synthetic oligonucleotide
agugcagacuuucgagcua

SEQ ID NO: 3144317 - RNA, 19 nt, Artificial Sequence
  Description of Artificial Sequence: Synthetic oligonucleotide
augcacagcuuguccaaaa

SEQ ID NO: 3144318 - RNA, 19 nt, Artificial Sequence
  Description of Artificial Sequence: Synthetic oligonucleotide
ugcagacuuucgagcuagc

SEQ ID NO: 3144319 - RNA, 19 nt, Artificial Sequence
  Description of Artificial Sequence: Synthetic oligonucleotide
caccacacacuacauggga

SEQ ID NO: 3144320 - RNA, 19 nt, Artificial Sequence
  Description of Artificial Sequence: Synthetic oligonucleotide
gcaaaguagaaacauucau

SEQ ID NO: 3144321 - RNA, 19 nt, Artificial Sequence
  Description of Artificial Sequence: Synthetic oligonucleotide
gucaguccacguacaaaug

SEQ ID NO: 3144322 - RNA, 19 nt, Artificial Sequence
  Description of Artificial Sequence: Synthetic oligonucleotide
acagagcaccacacacuac

SEQ ID NO: 3144323 - RNA, 19 nt, Artificial Sequence
  Description of Artificial Sequence: Synthetic oligonucleotide
cacguacaaaugcacagcu

SEQ ID NO: 3144324 - RNA, 19 nt, Artificial Sequence
  Description of Artificial Sequence: Synthetic oligonucleotide
guccacguacaaaugcaca

SEQ ID NO: 3144325 - RNA, 19 nt, Artificial Sequence
  Description of Artificial Sequence: Synthetic oligonucleotide
augucaguccacguacaaa

SEQ ID NO: 3144326 - RNA, 19 nt, Artificial Sequence
  Description of Artificial Sequence: Synthetic oligonucleotide
acuuucgagcuagcacuug

SEQ ID NO: 3144327 - RNA, 19 nt, Artificial Sequence
  Description of Artificial Sequence: Synthetic oligonucleotide
cuuucgagcuagcacuugu

SEQ ID NO: 3144328 - RNA, 19 nt, Artificial Sequence
  Description of Artificial Sequence: Synthetic oligonucleotide
caugucaguccacguacaa

SEQ ID NO: 3144329 - RNA, 19 nt, Artificial Sequence
  Description of Artificial Sequence: Synthetic oligonucleotide
ccacguacaaaugcacagc

SEQ ID NO: 3144330 - RNA, 19 nt, Artificial Sequence
  Description of Artificial Sequence: Synthetic oligonucleotide
gcaccacacacuacauggg

SEQ ID NO: 3144331 - RNA, 19 nt, Artificial Sequence
  Description of Artificial Sequence: Synthetic oligonucleotide
guacaaaugcacagcuugu

SEQ ID NO: 3144332 - RNA, 19 nt, Artificial Sequence
  Description of Artificial Sequence: Synthetic oligonucleotide
agccuguguguaagccagc

SEQ ID NO: 3144333 - RNA, 19 nt, Artificial Sequence
  Description of Artificial Sequence: Synthetic oligonucleotide
agagcaccacacacuacau

SEQ ID NO: 3144334 - RNA, 19 nt, Artificial Sequence
  Description of Artificial Sequence: Synthetic oligonucleotide
cugagacaagugcagacuu

SEQ ID NO: 3144335 - RNA, 19 nt, Artificial Sequence
  Description of Artificial Sequence: Synthetic oligonucleotide
guguguaagccagcaaagu

SEQ ID NO: 3144336 - RNA, 19 nt, Artificial Sequence
  Description of Artificial Sequence: Synthetic oligonucleotide
cgcaaagcugagacaagug

SEQ ID NO: 3144337 - RNA, 19 nt, Artificial Sequence
  Description of Artificial Sequence: Synthetic oligonucleotide
guaagccagcaaaguagaa

SEQ ID NO: 3144338 - RNA, 19 nt, Artificial Sequence
  Description of Artificial Sequence: Synthetic oligonucleotide
acguacaaaugcacagcuu

SEQ ID NO: 3144339 - RNA, 19 nt, Artificial Sequence
  Description of Artificial Sequence: Synthetic oligonucleotide
gcagacuuucgagcuagca

SEQ ID NO: 3144340 - RNA, 19 nt, Artificial Sequence
  Description of Artificial Sequence: Synthetic oligonucleotide
gccagcaaaguagaaacau

SEQ ID NO: 3144341 - RNA, 19 nt, Artificial Sequence
  Description of Artificial Sequence: Synthetic oligonucleotide
gcugagacaagugcagacu

SEQ ID NO: 3144342 - RNA, 19 nt, Artificial Sequence
  Description of Artificial Sequence: Synthetic oligonucleotide
gcauucacaucaugucagu

SEQ ID NO: 3144343 - RNA, 19 nt, Artificial Sequence
  Description of Artificial Sequence: Synthetic oligonucleotide
gacuuucgagcuagcacuu

SEQ ID NO: 3144344 - RNA, 19 nt, Artificial Sequence
  Description of Artificial Sequence: Synthetic oligonucleotide
gccuguguguaagccagca

SEQ ID NO: 3144345 - RNA, 19 nt, Artificial Sequence
  Description of Artificial Sequence: Synthetic oligonucleotide
ccagcaaaguagaaacauu

SEQ ID NO: 3144346 - RNA, 19 nt, Artificial Sequence
  Description of Artificial Sequence: Synthetic oligonucleotide
aguauaacgacacaaucgc

SEQ ID NO: 3144347 - RNA, 19 nt, Artificial Sequence
  Description of Artificial Sequence: Synthetic oligonucleotide
aacaagagagaguauaacg

SEQ ID NO: 3144348 - RNA, 19 nt, Artificial Sequence
  Description of Artificial Sequence: Synthetic oligonucleotide
auuauuucaaacaagagag

SEQ ID NO: 3144349 - RNA, 19 nt, Artificial Sequence
  Description of Artificial Sequence: Synthetic oligonucleotide
aauuucugaauugucaagc

SEQ ID NO: 3144350 - RNA, 19 nt, Artificial Sequence
  Description of Artificial Sequence: Synthetic oligonucleotide
gaagauuacaaauauuugc

SEQ ID NO: 3144351 - RNA, 19 nt, Artificial Sequence
  Description of Artificial Sequence: Synthetic oligonucleotide
aaaacaaucguaaggacag

SEQ ID NO: 3144352 - RNA, 19 nt, Artificial Sequence
  Description of Artificial Sequence: Synthetic oligonucleotide
aaagggaaaacugugcgac

SEQ ID NO: 3144353 - RNA, 19 nt, Artificial Sequence
  Description of Artificial Sequence: Synthetic oligonucleotide
aagacaaccaucacauucc

SEQ ID NO: 3144354 - RNA, 19 nt, Artificial Sequence
  Description of Artificial Sequence: Synthetic oligonucleotide
aauugucaagcauuauuuc

SEQ ID NO: 3144355 - RNA, 19 nt, Artificial Sequence
  Description of Artificial Sequence: Synthetic oligonucleotide
uaugaagacaaccaucaca

SEQ ID NO: 3144356 - RNA, 19 nt, Artificial Sequence
  Description of Artificial Sequence: Synthetic oligonucleotide
uauaacgacacaaucgcca

SEQ ID NO: 3144357 - RNA, 19 nt, Artificial Sequence
  Description of Artificial Sequence: Synthetic oligonucleotide
uauuucaaacaagagagag

SEQ ID NO: 3144358 - RNA, 19 nt, Artificial Sequence
  Description of Artificial Sequence: Synthetic oligonucleotide
aaacugugcgacuauauga

SEQ ID NO: 3144359 - RNA, 19 nt, Artificial Sequence
  Description of Artificial Sequence: Synthetic oligonucleotide
gaguauaacgacacaaucg

SEQ ID NO: 3144360 - RNA, 19 nt, Artificial Sequence
  Description of Artificial Sequence: Synthetic oligonucleotide
aagauuacaaauauuugca

SEQ ID NO: 3144361 - RNA, 19 nt, Artificial Sequence
  Description of Artificial Sequence: Synthetic oligonucleotide
ugcaagaugaagauuacaa

SEQ ID NO: 3144362 - RNA, 19 nt, Artificial Sequence
  Description of Artificial Sequence: Synthetic oligonucleotide
agaguauaacgacacaauc

SEQ ID NO: 3144363 - RNA, 19 nt, Artificial Sequence
  Description of Artificial Sequence: Synthetic oligonucleotide
ugugugugcaagaugaaga

SEQ ID NO: 3144364 - RNA, 19 nt, Artificial Sequence
  Description of Artificial Sequence: Synthetic oligonucleotide
aaaacugugcgacuauaug

SEQ ID NO: 3144365 - RNA, 19 nt, Artificial Sequence
  Description of Artificial Sequence: Synthetic oligonucleotide
acaaccaucacauuccaca

SEQ ID NO: 3144366 - RNA, 19 nt, Artificial Sequence
  Description of Artificial Sequence: Synthetic oligonucleotide
caaucguaaggacagaacc

SEQ ID NO: 3144367 - RNA, 19 nt, Artificial Sequence
  Description of Artificial Sequence: Synthetic oligonucleotide
gaagacaaccaucacauuc

SEQ ID NO: 3144368 - RNA, 19 nt, Artificial Sequence
  Description of Artificial Sequence: Synthetic oligonucleotide
uuaauuucugaauugucaa

SEQ ID NO: 3144369 - RNA, 19 nt, Artificial Sequence
  Description of Artificial Sequence: Synthetic oligonucleotide
uuucaaacaagagagagua

SEQ ID NO: 3144370 - RNA, 19 nt, Artificial Sequence
  Description of Artificial Sequence: Synthetic oligonucleotide
aaacaagagagaguauaac

SEQ ID NO: 3144371 - RNA, 19 nt, Artificial Sequence
  Description of Artificial Sequence: Synthetic oligonucleotide
cauuauuucaaacaagaga

SEQ ID NO: 3144372 - RNA, 19 nt, Artificial Sequence
  Description of Artificial Sequence: Synthetic oligonucleotide
auugucaagcauuauuuca

SEQ ID NO: 3144373 - RNA, 19 nt, Artificial Sequence
  Description of Artificial Sequence: Synthetic oligonucleotide
gacaaaacaaucguaagga

SEQ ID NO: 3144374 - RNA, 19 nt, Artificial Sequence
  Description of Artificial Sequence: Synthetic oligonucleotide
auaacgacacaaucgccac

SEQ ID NO: 3144375 - RNA, 19 nt, Artificial Sequence
  Description of Artificial Sequence: Synthetic oligonucleotide
acaaaacaaucguaaggac

SEQ ID NO: 3144376 - RNA, 19 nt, Artificial Sequence
  Description of Artificial Sequence: Synthetic oligonucleotide
ugaauugucaagcauuauu

SEQ ID NO: 3144377 - RNA, 19 nt, Artificial Sequence
  Description of Artificial Sequence: Synthetic oligonucleotide
aaaagggaaaacugugcga

SEQ ID NO: 3144378 - RNA, 19 nt, Artificial Sequence
  Description of Artificial Sequence: Synthetic oligonucleotide
ugcgacuauaugaagacaa

SEQ ID NO: 3144379 - RNA, 19 nt, Artificial Sequence
  Description of Artificial Sequence: Synthetic oligonucleotide
uaauuucugaauugucaag

SEQ ID NO: 3144380 - RNA, 19 nt, Artificial Sequence
  Description of Artificial Sequence: Synthetic oligonucleotide
auugguuaauuucugaauu

SEQ ID NO: 3144381 - RNA, 19 nt, Artificial Sequence
  Description of Artificial Sequence: Synthetic oligonucleotide
agagagaguauaacgacac

SEQ ID NO: 3144382 - RNA, 19 nt, Artificial Sequence
  Description of Artificial Sequence: Synthetic oligonucleotide
uugguuaauuucugaauug

SEQ ID NO: 3144383 - RNA, 19 nt, Artificial Sequence
  Description of Artificial Sequence: Synthetic oligonucleotide
agaugaagauuacaaauau

SEQ ID NO: 3144384 - RNA, 19 nt, Artificial Sequence
  Description of Artificial Sequence: Synthetic oligonucleotide
uugucaagcauuauuucaa

SEQ ID NO: 3144385 - RNA, 19 nt, Artificial Sequence
  Description of Artificial Sequence: Synthetic oligonucleotide
cuauaugaagacaaccauc

SEQ ID NO: 3144386 - RNA, 19 nt, Artificial Sequence
  Description of Artificial Sequence: Synthetic oligonucleotide
uuccacagcacaucauugg

SEQ ID NO: 3144387 - RNA, 19 nt, Artificial Sequence
  Description of Artificial Sequence: Synthetic oligonucleotide
ugugcgacuauaugaagac

SEQ ID NO: 3144388 - RNA, 19 nt, Artificial Sequence
  Description of Artificial Sequence: Synthetic oligonucleotide
ucaaacaagagagaguaua

SEQ ID NO: 3144389 - RNA, 19 nt, Artificial Sequence
  Description of Artificial Sequence: Synthetic oligonucleotide
agcauuauuucaaacaaga

SEQ ID NO: 3144390 - RNA, 19 nt, Artificial Sequence
  Description of Artificial Sequence: Synthetic oligonucleotide
uucugaauugucaagcauu

SEQ ID NO: 3144391 - RNA, 19 nt, Artificial Sequence
  Description of Artificial Sequence: Synthetic oligonucleotide
cacaucauugguuaauuuc

SEQ ID NO: 3144392 - RNA, 19 nt, Artificial Sequence
  Description of Artificial Sequence: Synthetic oligonucleotide
uuauuucaaacaagagaga

SEQ ID NO: 3144393 - RNA, 19 nt, Artificial Sequence
  Description of Artificial Sequence: Synthetic oligonucleotide
ucauugguuaauuucugaa

SEQ ID NO: 3144394 - RNA, 19 nt, Artificial Sequence
  Description of Artificial Sequence: Synthetic oligonucleotide
guuaauuucugaauuguca

SEQ ID NO: 3144395 - RNA, 19 nt, Artificial Sequence
  Description of Artificial Sequence: Synthetic oligonucleotide
caaaacaaucguaaggaca

SEQ ID NO: 3144396 - RNA, 19 nt, Artificial Sequence
  Description of Artificial Sequence: Synthetic oligonucleotide
ucugaauugucaagcauua

SEQ ID NO: 3144397 - RNA, 19 nt, Artificial Sequence
  Description of Artificial Sequence: Synthetic oligonucleotide
caagagagaguauaacgac

SEQ ID NO: 3144398 - RNA, 19 nt, Artificial Sequence
  Description of Artificial Sequence: Synthetic oligonucleotide
gauuacaaauauuugcaua

SEQ ID NO: 3144399 - RNA, 19 nt, Artificial Sequence
  Description of Artificial Sequence: Synthetic oligonucleotide
gacuauaugaagacaacca

SEQ ID NO: 3144400 - RNA, 19 nt, Artificial Sequence
  Description of Artificial Sequence: Synthetic oligonucleotide
acaagagagaguauaacga

SEQ ID NO: 3144401 - RNA, 19 nt, Artificial Sequence
  Description of Artificial Sequence: Synthetic oligonucleotide
aagaugaagauuacaaaua

SEQ ID NO: 3144402 - RNA, 19 nt, Artificial Sequence
  Description of Artificial Sequence: Synthetic oligonucleotide
acgacaaaacaaucguaag

SEQ ID NO: 3144403 - RNA, 19 nt, Artificial Sequence
  Description of Artificial Sequence: Synthetic oligonucleotide
aaucguaaggacagaacca

SEQ ID NO: 3144404 - RNA, 19 nt, Artificial Sequence
  Description of Artificial Sequence: Synthetic oligonucleotide
auaugaagacaaccaucac

SEQ ID NO: 3144405 - RNA, 19 nt, Artificial Sequence
  Description of Artificial Sequence: Synthetic oligonucleotide
augaagacaaccaucacau

SEQ ID NO: 3144406 - RNA, 19 nt, Artificial Sequence
  Description of Artificial Sequence: Synthetic oligonucleotide
aacgacacaaucgccacga

SEQ ID NO: 3144407 - RNA, 19 nt, Artificial Sequence
  Description of Artificial Sequence: Synthetic oligonucleotide
gacacaaucgccacgacaa

SEQ ID NO: 3144408 - RNA, 19 nt, Artificial Sequence
  Description of Artificial Sequence: Synthetic oligonucleotide
acaaucgccacgacaaaac

SEQ ID NO: 3144409 - RNA, 19 nt, Artificial Sequence
  Description of Artificial Sequence: Synthetic oligonucleotide
aagcauuauuucaaacaag

SEQ ID NO: 3144410 - RNA, 19 nt, Artificial Sequence
  Description of Artificial Sequence: Synthetic oligonucleotide
aagagagaguauaacgaca

SEQ ID NO: 3144411 - RNA, 19 nt, Artificial Sequence
  Description of Artificial Sequence: Synthetic oligonucleotide
agauuacaaauauuugcau

SEQ ID NO: 3144412 - RNA, 19 nt, Artificial Sequence
  Description of Artificial Sequence: Synthetic oligonucleotide
uuucugaauugucaagcau

SEQ ID NO: 3144413 - RNA, 19 nt, Artificial Sequence
  Description of Artificial Sequence: Synthetic oligonucleotide
agagaguauaacgacacaa

SEQ ID NO: 3144414 - RNA, 19 nt, Artificial Sequence
  Description of Artificial Sequence: Synthetic oligonucleotide
ugguuaauuucugaauugu

SEQ ID NO: 3144415 - RNA, 19 nt, Artificial Sequence
  Description of Artificial Sequence: Synthetic oligonucleotide
uaacgacacaaucgccacg

SEQ ID NO: 3144416 - RNA, 19 nt, Artificial Sequence
  Description of Artificial Sequence: Synthetic oligonucleotide
acaaucguaaggacagaac

SEQ ID NO: 3144417 - RNA, 19 nt, Artificial Sequence
  Description of Artificial Sequence: Synthetic oligonucleotide
caaccaucacauuccacag

SEQ ID NO: 3144418 - RNA, 19 nt, Artificial Sequence
  Description of Artificial Sequence: Synthetic oligonucleotide
aacaaucguaaggacagaa

SEQ ID NO: 3144419 - RNA, 19 nt, Artificial Sequence
  Description of Artificial Sequence: Synthetic oligonucleotide
aucauugguuaauuucuga

SEQ ID NO: 3144420 - RNA, 19 nt, Artificial Sequence
  Description of Artificial Sequence: Synthetic oligonucleotide
caagaugaagauuacaaau

SEQ ID NO: 3144421 - RNA, 19 nt, Artificial Sequence
  Description of Artificial Sequence: Synthetic oligonucleotide
aacugugcgacuauaugaa

SEQ ID NO: 3144422 - RNA, 19 nt, Artificial Sequence
  Description of Artificial Sequence: Synthetic oligonucleotide
cacgacaaaacaaucguaa

SEQ ID NO: 3144423 - RNA, 19 nt, Artificial Sequence
  Description of Artificial Sequence: Synthetic oligonucleotide
ugugcaagaugaagauuac

SEQ ID NO: 3144424 - RNA, 19 nt, Artificial Sequence
  Description of Artificial Sequence: Synthetic oligonucleotide
caucauugguuaauuucug

SEQ ID NO: 3144425 - RNA, 19 nt, Artificial Sequence
  Description of Artificial Sequence: Synthetic oligonucleotide
ugucaagcauuauuucaaa

SEQ ID NO: 3144426 - RNA, 19 nt, Artificial Sequence
  Description of Artificial Sequence: Synthetic oligonucleotide
aagggaaaacugugcgacu

SEQ ID NO: 3144427 - RNA, 19 nt, Artificial Sequence
  Description of Artificial Sequence: Synthetic oligonucleotide
caaacaagagagaguauaa

SEQ ID NO: 3144428 - RNA, 19 nt, Artificial Sequence
  Description of Artificial Sequence: Synthetic oligonucleotide
acugugcgacuauaugaag

SEQ ID NO: 3144429 - RNA, 19 nt, Artificial Sequence
  Description of Artificial Sequence: Synthetic oligonucleotide
gaauugucaagcauuauuu

SEQ ID NO: 3144430 - RNA, 19 nt, Artificial Sequence
  Description of Artificial Sequence: Synthetic oligonucleotide
caucacauuccacagcaca

SEQ ID NO: 3144431 - RNA, 19 nt, Artificial Sequence
  Description of Artificial Sequence: Synthetic oligonucleotide
gugugcaagaugaagauua

SEQ ID NO: 3144432 - RNA, 19 nt, Artificial Sequence
  Description of Artificial Sequence: Synthetic oligonucleotide
cgacaaaacaaucguaagg

SEQ ID NO: 3144433 - RNA, 19 nt, Artificial Sequence
  Description of Artificial Sequence: Synthetic oligonucleotide
cugugcgacuauaugaaga

SEQ ID NO: 3144434 - RNA, 19 nt, Artificial Sequence
  Description of Artificial Sequence: Synthetic oligonucleotide
aaucgccacgacaaaacaa

SEQ ID NO: 3144435 - RNA, 19 nt, Artificial Sequence
  Description of Artificial Sequence: Synthetic oligonucleotide
aucguaaggacagaaccaa

SEQ ID NO: 3144436 - RNA, 19 nt, Artificial Sequence
  Description of Artificial Sequence: Synthetic oligonucleotide
guauaacgacacaaucgcc

SEQ ID NO: 3144437 - RNA, 19 nt, Artificial Sequence
  Description of Artificial Sequence: Synthetic oligonucleotide
auuccacagcacaucauug

SEQ ID NO: 3144438 - RNA, 19 nt, Artificial Sequence
  Description of Artificial Sequence: Synthetic oligonucleotide
uucaaacaagagagaguau

SEQ ID NO: 3144439 - RNA, 19 nt, Artificial Sequence
  Description of Artificial Sequence: Synthetic oligonucleotide
aucgccacgacaaaacaau

SEQ ID NO: 3144440 - RNA, 19 nt, Artificial Sequence
  Description of Artificial Sequence: Synthetic oligonucleotide
agacaaccaucacauucca

SEQ ID NO: 3144441 - RNA, 19 nt, Artificial Sequence
  Description of Artificial Sequence: Synthetic oligonucleotide
cacagcacaucauugguua

SEQ ID NO: 3144442 - RNA, 19 nt, Artificial Sequence
  Description of Artificial Sequence: Synthetic oligonucleotide
ucacauuccacagcacauc

SEQ ID NO: 3144443 - RNA, 19 nt, Artificial Sequence
  Description of Artificial Sequence: Synthetic oligonucleotide
gcauuauuucaaacaagag

SEQ ID NO: 3144444 - RNA, 19 nt, Artificial Sequence
  Description of Artificial Sequence: Synthetic oligonucleotide
cacauuccacagcacauca

SEQ ID NO: 3144445 - RNA, 19 nt, Artificial Sequence
  Description of Artificial Sequence: Synthetic oligonucleotide
aaacaaucguaaggacaga

SEQ ID NO: 3144446 - RNA, 19 nt, Artificial Sequence
  Description of Artificial Sequence: Synthetic oligonucleotide
gagagaguauaacgacaca

SEQ ID NO: 3144447 - RNA, 19 nt, Artificial Sequence
  Description of Artificial Sequence: Synthetic oligonucleotide
gcaagaugaagauuacaaa

SEQ ID NO: 3144448 - RNA, 19 nt, Artificial Sequence
  Description of Artificial Sequence: Synthetic oligonucleotide
cauugguuaauuucugaau

SEQ ID NO: 3144449 - RNA, 19 nt, Artificial Sequence
  Description of Artificial Sequence: Synthetic oligonucleotide
ucgccacgacaaaacaauc

SEQ ID NO: 3144450 - RNA, 19 nt, Artificial Sequence
  Description of Artificial Sequence: Synthetic oligonucleotide
gguuaauuucugaauuguc

SEQ ID NO: 3144451 - RNA, 19 nt, Artificial Sequence
  Description of Artificial Sequence: Synthetic oligonucleotide
agggaaaacugugcgacua

SEQ ID NO: 3144452 - RNA, 19 nt, Artificial Sequence
  Description of Artificial Sequence: Synthetic oligonucleotide
gagaguauaacgacacaau

SEQ ID NO: 3144453 - RNA, 19 nt, Artificial Sequence
  Description of Artificial Sequence: Synthetic oligonucleotide
acgacacaaucgccacgac

SEQ ID NO: 3144454 - RNA, 19 nt, Artificial Sequence
  Description of Artificial Sequence: Synthetic oligonucleotide
caaucgccacgacaaaaca

SEQ ID NO: 3144455 - RNA, 19 nt, Artificial Sequence
  Description of Artificial Sequence: Synthetic oligonucleotide
agcacaucauugguuaauu

SEQ ID NO: 3144456 - RNA, 19 nt, Artificial Sequence
  Description of Artificial Sequence: Synthetic oligonucleotide
gaaaacugugcgacuauau

SEQ ID NO: 3144457 - RNA, 19 nt, Artificial Sequence
  Description of Artificial Sequence: Synthetic oligonucleotide
cgccacgacaaaacaaucg

SEQ ID NO: 3144458 - RNA, 19 nt, Artificial Sequence
  Description of Artificial Sequence: Synthetic oligonucleotide
acagcacaucauugguuaa

SEQ ID NO: 3144459 - RNA, 19 nt, Artificial Sequence
  Description of Artificial Sequence: Synthetic oligonucleotide
gacaaccaucacauuccac

SEQ ID NO: 3144460 - RNA, 19 nt, Artificial Sequence
  Description of Artificial Sequence: Synthetic oligonucleotide
cgacuauaugaagacaacc

SEQ ID NO: 3144461 - RNA, 19 nt, Artificial Sequence
  Description of Artificial Sequence: Synthetic oligonucleotide
acacaaucgccacgacaaa

SEQ ID NO: 3144462 - RNA, 19 nt, Artificial Sequence
  Description of Artificial Sequence: Synthetic oligonucleotide
cauuccacagcacaucauu

SEQ ID NO: 3144463 - RNA, 19 nt, Artificial Sequence
  Description of Artificial Sequence: Synthetic oligonucleotide
gccacgacaaaacaaucgu

SEQ ID NO: 3144464 - RNA, 19 nt, Artificial Sequence
  Description of Artificial Sequence: Synthetic oligonucleotide
gugcaagaugaagauuaca

SEQ ID NO: 3144465 - RNA, 19 nt, Artificial Sequence
  Description of Artificial Sequence: Synthetic oligonucleotide
gcgacuauaugaagacaac

SEQ ID NO: 3144466 - RNA, 19 nt, Artificial Sequence
  Description of Artificial Sequence: Synthetic oligonucleotide
gugcgacuauaugaagaca

SEQ ID NO: 3144467 - RNA, 19 nt, Artificial Sequence
  Description of Artificial Sequence: Synthetic oligonucleotide
acauuccacagcacaucau

SEQ ID NO: 3144468 - RNA, 19 nt, Artificial Sequence
  Description of Artificial Sequence: Synthetic oligonucleotide
ggaaaacugugcgacuaua

SEQ ID NO: 3144469 - RNA, 19 nt, Artificial Sequence
  Description of Artificial Sequence: Synthetic oligonucleotide
ccaucacauuccacagcac

SEQ ID NO: 3144470 - RNA, 19 nt, Artificial Sequence
  Description of Artificial Sequence: Synthetic oligonucleotide
ccacgacaaaacaaucgua

SEQ ID NO: 3144471 - RNA, 19 nt, Artificial Sequence
  Description of Artificial Sequence: Synthetic oligonucleotide
cgacacaaucgccacgaca

SEQ ID NO: 3144472 - RNA, 19 nt, Artificial Sequence
  Description of Artificial Sequence: Synthetic oligonucleotide
gggaaaacugugcgacuau

SEQ ID NO: 3144473 - RNA, 19 nt, Artificial Sequence
  Description of Artificial Sequence: Synthetic oligonucleotide
cagcacaucauugguuaau

SEQ ID NO: 3144474 - RNA, 19 nt, Artificial Sequence
  Description of Artificial Sequence: Synthetic oligonucleotide
cugaauugucaagcauuau

SEQ ID NO: 3144475 - RNA, 19 nt, Artificial Sequence
  Description of Artificial Sequence: Synthetic oligonucleotide
gcacaucauugguuaauuu

SEQ ID NO: 3144476 - RNA, 19 nt, Artificial Sequence
  Description of Artificial Sequence: Synthetic oligonucleotide
  modified_base (6)..(6): a, c, u, g, unknown or other
uuuuangaaaccuaggacc

SEQ ID NO: 3144477 - RNA, 19 nt, Artificial Sequence
  Description of Artificial Sequence: Synthetic oligonucleotide
  modified_base (5)..(5): a, c, u, g, unknown or other
uuuangaaaccuaggacca

SEQ ID NO: 3144478 - RNA, 19 nt, Artificial Sequence
  Description of Artificial Sequence: Synthetic oligonucleotide
aaaccuaggaccaccagcc

SEQ ID NO: 3144479 - RNA, 19 nt, Artificial Sequence
  Description of Artificial Sequence: Synthetic oligonucleotide
ugauguagaggccauggag

SEQ ID NO: 3144480 - RNA, 19 nt, Artificial Sequence
  Description of Artificial Sequence: Synthetic oligonucleotide
uuacacuuccauaucacug

SEQ ID NO: 3144481 - RNA, 19 nt, Artificial Sequence
  Description of Artificial Sequence: Synthetic oligonucleotide
agggcaggaacauggagcc

SEQ ID NO: 3144482 - RNA, 19 nt, Artificial Sequence
  Description of Artificial Sequence: Synthetic oligonucleotide
cauaucacuguucacaauc

SEQ ID NO: 3144483 - RNA, 19 nt, Artificial Sequence
  Description of Artificial Sequence: Synthetic oligonucleotide
agggcagcaacucacacag

SEQ ID NO: 3144484 - RNA, 19 nt, Artificial Sequence
  Description of Artificial Sequence: Synthetic oligonucleotide
gaaaccuaggaccaccagc

SEQ ID NO: 3144485 - RNA, 19 nt, Artificial Sequence
  Description of Artificial Sequence: Synthetic oligonucleotide
uuggcuuacacuuccauau

SEQ ID NO: 3144486 - RNA, 19 nt, Artificial Sequence
  Description of Artificial Sequence: Synthetic oligonucleotide
acuuccauaucacuguuca

SEQ ID NO: 3144487 - RNA, 19 nt, Artificial Sequence
  Description of Artificial Sequence: Synthetic oligonucleotide
uuccauaucacuguucaca

SEQ ID NO: 3144488 - RNA, 19 nt, Artificial Sequence
  Description of Artificial Sequence: Synthetic oligonucleotide
cuuacuggcuugcacaccc

SEQ ID NO: 3144489 - RNA, 19 nt, Artificial Sequence
  Description of Artificial Sequence: Synthetic oligonucleotide
uacacuuccauaucacugu

SEQ ID NO: 3144490 - RNA, 19 nt, Artificial Sequence
  Description of Artificial Sequence: Synthetic oligonucleotide
ggaacauggagccaggagc

SEQ ID NO: 3144491 - RNA, 19 nt, Artificial Sequence
  Description of Artificial Sequence: Synthetic oligonucleotide
aggggagcugcuuacuggc

SEQ ID NO: 3144492 - RNA, 19 nt, Artificial Sequence
  Description of Artificial Sequence: Synthetic oligonucleotide
uguucacaaucgcaggcag

SEQ ID NO: 3144493 - RNA, 19 nt, Artificial Sequence
  Description of Artificial Sequence: Synthetic oligonucleotide
guuuauuuggcuuacacuu

SEQ ID NO: 3144494 - RNA, 19 nt, Artificial Sequence
  Description of Artificial Sequence: Synthetic oligonucleotide
aaucgcaggcagucagggc

SEQ ID NO: 3144495 - RNA, 19 nt, Artificial Sequence
  Description of Artificial Sequence: Synthetic oligonucleotide
uuuauuuggcuuacacuuc

SEQ ID NO: 3144496 - RNA, 19 nt, Artificial Sequence
  Description of Artificial Sequence: Synthetic oligonucleotide
  modified_base (3)..(3): a, c, u, g, unknown or other
uangaaaccuaggaccacc

SEQ ID NO: 3144497 - RNA, 19 nt, Artificial Sequence
  Description of Artificial Sequence: Synthetic oligonucleotide
aucgcaggcagucagggca

SEQ ID NO: 3144498 - RNA, 19 nt, Artificial Sequence
  Description of Artificial Sequence: Synthetic oligonucleotide
ggcagcaacucacacaggg

SEQ ID NO: 3144499 - RNA, 19 nt, Artificial Sequence
  Description of Artificial Sequence: Synthetic oligonucleotide
uaucacuguucacaaucgc

SEQ ID NO: 3144500 - RNA, 19 nt, Artificial Sequence
  Description of Artificial Sequence: Synthetic oligonucleotide
auaucacuguucacaaucg

SEQ ID NO: 3144501 - RNA, 19 nt, Artificial Sequence
  Description of Artificial Sequence: Synthetic oligonucleotide
uccauaucacuguucacaa

SEQ ID NO: 3144502 - RNA, 19 nt, Artificial Sequence
  Description of Artificial Sequence: Synthetic oligonucleotide
gaggggagcugcuuacugg

SEQ ID NO: 3144503 - RNA, 19 nt, Artificial Sequence
  Description of Artificial Sequence: Synthetic oligonucleotide
uucacaaucgcaggcaguc

SEQ ID NO: 3144504 - RNA, 19 nt, Artificial Sequence
  Description of Artificial Sequence: Synthetic oligonucleotide
acacagggcaggaacaugg

SEQ ID NO: 3144505 - RNA, 19 nt, Artificial Sequence
  Description of Artificial Sequence: Synthetic oligonucleotide
uuuggcuuacacuuccaua

SEQ ID NO: 3144506 - RNA, 19 nt, Artificial Sequence
  Description of Artificial Sequence: Synthetic oligonucleotide
cacuguucacaaucgcagg

SEQ ID NO: 3144507 - RNA, 19 nt, Artificial Sequence
  Description of Artificial Sequence: Synthetic oligonucleotide
cacaaucgcaggcagucag

SEQ ID NO: 3144508 - RNA, 19 nt, Artificial Sequence
  Description of Artificial Sequence: Synthetic oligonucleotide
accuaggaccaccagccag

SEQ ID NO: 3144509 - RNA, 19 nt, Artificial Sequence
  Description of Artificial Sequence: Synthetic oligonucleotide
aggcagucagggcagcaac

SEQ ID NO: 3144510 - RNA, 19 nt, Artificial Sequence
  Description of Artificial Sequence: Synthetic oligonucleotide
agucagggcagcaacucac

SEQ ID NO: 3144511 - RNA, 19 nt, Artificial Sequence
  Description of Artificial Sequence: Synthetic oligonucleotide
uggagccaggagcugaugu

SEQ ID NO: 3144512 - RNA, 19 nt, Artificial Sequence
  Description of Artificial Sequence: Synthetic oligonucleotide
ugcuuacuggcuugcacac

SEQ ID NO: 3144513 - RNA, 19 nt, Artificial Sequence
  Description of Artificial Sequence: Synthetic oligonucleotide
uauuuggcuuacacuucca

SEQ ID NO: 3144514 - RNA, 19 nt, Artificial Sequence
  Description of Artificial Sequence: Synthetic oligonucleotide
  modified_base (4)..(4): a, c, u, g, unknown or other
uuangaaaccuaggaccac

SEQ ID NO: 3144515 - RNA, 19 nt, Artificial Sequence
  Description of Artificial Sequence: Synthetic oligonucleotide
  modified_base (2)..(2): a, c, u, g, unknown or other
angaaaccuaggaccacca

SEQ ID NO: 3144516 - RNA, 19 nt, Artificial Sequence
  Description of Artificial Sequence: Synthetic oligonucleotide
uguagaggccauggagggg

SEQ ID NO: 3144517 - RNA, 19 nt, Artificial Sequence
  Description of Artificial Sequence: Synthetic oligonucleotide
caaucgcaggcagucaggg

SEQ ID NO: 3144518 - RNA, 19 nt, Artificial Sequence
  Description of Artificial Sequence: Synthetic oligonucleotide
auuuggcuuacacuuccau

SEQ ID NO: 3144519 - RNA, 19 nt, Artificial Sequence
  Description of Artificial Sequence: Synthetic oligonucleotide
acuggcuugcacacccugc

SEQ ID NO: 3144520 - RNA, 19 nt, Artificial Sequence
  Description of Artificial Sequence: Synthetic oligonucleotide
gcugauguagaggccaugg

SEQ ID NO: 3144521 - RNA, 19 nt, Artificial Sequence
  Description of Artificial Sequence: Synthetic oligonucleotide
uacuggcuugcacacccug

SEQ ID NO: 3144522 - RNA, 19 nt, Artificial Sequence
  Description of Artificial Sequence: Synthetic oligonucleotide
cagcaacucacacagggca

SEQ ID NO: 3144523 - RNA, 19 nt, Artificial Sequence
  Description of Artificial Sequence: Synthetic oligonucleotide
cugcuuacuggcuugcaca

SEQ ID NO: 3144524 - RNA, 19 nt, Artificial Sequence
  Description of Artificial Sequence: Synthetic oligonucleotide
guagaggccauggagggga

SEQ ID NO: 3144525 - RNA, 19 nt, Artificial Sequence
  Description of Artificial Sequence: Synthetic oligonucleotide
ccuaggaccaccagccagg

SEQ ID NO: 3144526 - RNA, 19 nt, Artificial Sequence
  Description of Artificial Sequence: Synthetic oligonucleotide
aaccuaggaccaccagcca

SEQ ID NO: 3144527 - RNA, 19 nt, Artificial Sequence
  Description of Artificial Sequence: Synthetic oligonucleotide
cuuccauaucacuguucac

SEQ ID NO: 3144528 - RNA, 19 nt, Artificial Sequence
  Description of Artificial Sequence: Synthetic oligonucleotide
acaaucgcaggcagucagg

SEQ ID NO: 3144529 - RNA, 19 nt, Artificial Sequence
  Description of Artificial Sequence: Synthetic oligonucleotide
uggcuuacacuuccauauc

SEQ ID NO: 3144530 - RNA, 19 nt, Artificial Sequence
  Description of Artificial Sequence: Synthetic oligonucleotide
agcaacucacacagggcag

SEQ ID NO: 3144531 - RNA, 19 nt, Artificial Sequence
  Description of Artificial Sequence: Synthetic oligonucleotide
gaacauggagccaggagcu

SEQ ID NO: 3144532 - RNA, 19 nt, Artificial Sequence
  Description of Artificial Sequence: Synthetic oligonucleotide
cuuacacuuccauaucacu

SEQ ID NO: 3144533 - RNA, 19 nt, Artificial Sequence
  Description of Artificial Sequence: Synthetic oligonucleotide
gguuuauuuggcuuacacu

SEQ ID NO: 3144534 - RNA, 19 nt, Artificial Sequence
  Description of Artificial Sequence: Synthetic oligonucleotide
aacauggagccaggagcug

SEQ ID NO: 3144535 - RNA, 19 nt, Artificial Sequence
  Description of Artificial Sequence: Synthetic oligonucleotide
ggcuuacacuuccauauca

SEQ ID NO: 3144536 - RNA, 19 nt, Artificial Sequence
  Description of Artificial Sequence: Synthetic oligonucleotide
acauggagccaggagcuga

SEQ ID NO: 3144537 - RNA, 19 nt, Artificial Sequence
  Description of Artificial Sequence: Synthetic oligonucleotide
cacuuccauaucacuguuc

SEQ ID NO: 3144538 - RNA, 19 nt, Artificial Sequence
  Description of Artificial Sequence: Synthetic oligonucleotide
cuaggaccaccagccaggg

SEQ ID NO: 3144539 - RNA, 19 nt, Artificial Sequence
  Description of Artificial Sequence: Synthetic oligonucleotide
ggagcugcuuacuggcuug

SEQ ID NO: 3144540 - RNA, 19 nt, Artificial Sequence
  Description of Artificial Sequence: Synthetic oligonucleotide
uuacuggcuugcacacccu

SEQ ID NO: 3144541 - RNA, 19 nt, Artificial Sequence
  Description of Artificial Sequence: Synthetic oligonucleotide
gcaacucacacagggcagg

SEQ ID NO: 3144542 - RNA, 19 nt, Artificial Sequence
  Description of Artificial Sequence: Synthetic oligonucleotide
uagaggccauggaggggag

SEQ ID NO: 3144543 - RNA, 19 nt, Artificial Sequence
  Description of Artificial Sequence: Synthetic oligonucleotide
ucacaaucgcaggcaguca

SEQ ID NO: 3144544 - RNA, 19 nt, Artificial Sequence
  Description of Artificial Sequence: Synthetic oligonucleotide
acacuuccauaucacuguu

SEQ ID NO: 3144545 - RNA, 19 nt, Artificial Sequence
  Description of Artificial Sequence: Synthetic oligonucleotide
cuguucacaaucgcaggca

SEQ ID NO: 3144546 - RNA, 19 nt, Artificial Sequence
  Description of Artificial Sequence: Synthetic oligonucleotide
gccaggagcugauguagag

SEQ ID NO: 3144547 - RNA, 19 nt, Artificial Sequence
  Description of Artificial Sequence: Synthetic oligonucleotide
ggaggggagcugcuuacug

SEQ ID NO: 3144548 - RNA, 19 nt, Artificial Sequence
  Description of Artificial Sequence: Synthetic oligonucleotide
gcuuacacuuccauaucac

SEQ ID NO: 3144549 - RNA, 19 nt, Artificial Sequence
  Description of Artificial Sequence: Synthetic oligonucleotide
cugauguagaggccaugga

SEQ ID NO: 3144550 - RNA, 19 nt, Artificial Sequence
  Description of Artificial Sequence: Synthetic oligonucleotide
aacucacacagggcaggaa

SEQ ID NO: 3144551 - RNA, 19 nt, Artificial Sequence
  Description of Artificial Sequence: Synthetic oligonucleotide
cacacagggcaggaacaug

SEQ ID NO: 3144552 - RNA, 19 nt, Artificial Sequence
  Description of Artificial Sequence: Synthetic oligonucleotide
gagcugcuuacuggcuugc

SEQ ID NO: 3144553 - RNA, 19 nt, Artificial Sequence
  Description of Artificial Sequence: Synthetic oligonucleotide
gcagcaacucacacagggc

SEQ ID NO: 3144554 - RNA, 19 nt, Artificial Sequence
  Description of Artificial Sequence: Synthetic oligonucleotide
uggaggggagcugcuuacu

SEQ ID NO: 3144555 - RNA, 19 nt, Artificial Sequence
  Description of Artificial Sequence: Synthetic oligonucleotide
agcugauguagaggccaug

SEQ ID NO: 3144556 - RNA, 19 nt, Artificial Sequence
  Description of Artificial Sequence: Synthetic oligonucleotide
cagucagggcagcaacuca

SEQ ID NO: 3144557 - RNA, 19 nt, Artificial Sequence
  Description of Artificial Sequence: Synthetic oligonucleotide
uggcuugcacacccugcuu

SEQ ID NO: 3144558 - RNA, 19 nt, Artificial Sequence
  Description of Artificial Sequence: Synthetic oligonucleotide
gucagggcagcaacucaca

SEQ ID NO: 3144559 - RNA, 19 nt, Artificial Sequence
  Description of Artificial Sequence: Synthetic oligonucleotide
ggagccaggagcugaugua

SEQ ID NO: 3144560 - RNA, 19 nt, Artificial Sequence
  Description of Artificial Sequence: Synthetic oligonucleotide
auggagccaggagcugaug

SEQ ID NO: 3144561 - RNA, 19 nt, Artificial Sequence
  Description of Artificial Sequence: Synthetic oligonucleotide
caacucacacagggcagga

SEQ ID NO: 3144562 - RNA, 19 nt, Artificial Sequence
  Description of Artificial Sequence: Synthetic oligonucleotide
gcuuacuggcuugcacacc

SEQ ID NO: 3144563 - RNA, 19 nt, Artificial Sequence
  Description of Artificial Sequence: Synthetic oligonucleotide
guucacaaucgcaggcagu

SEQ ID NO: 3144564 - RNA, 19 nt, Artificial Sequence
  Description of Artificial Sequence: Synthetic oligonucleotide
cauggagccaggagcugau

SEQ ID NO: 3144565 - RNA, 19 nt, Artificial Sequence
  Description of Artificial Sequence: Synthetic oligonucleotide
caggcagucagggcagcaa

SEQ ID NO: 3144566 - RNA, 19 nt, Artificial Sequence
  Description of Artificial Sequence: Synthetic oligonucleotide
ggcuugcacacccugcuuu

SEQ ID NO: 3144567 - RNA, 19 nt, Artificial Sequence
  Description of Artificial Sequence: Synthetic oligonucleotide
gggagcugcuuacuggcuu

SEQ ID NO: 3144568 - RNA, 19 nt, Artificial Sequence
  Description of Artificial Sequence: Synthetic oligonucleotide
ccaccagccaggggauggc

SEQ ID NO: 3144569 - RNA, 19 nt, Artificial Sequence
  Description of Artificial Sequence: Synthetic oligonucleotide
ggcagucagggcagcaacu

SEQ ID NO: 3144570 - RNA, 19 nt, Artificial Sequence
  Description of Artificial Sequence: Synthetic oligonucleotide
gcuugcacacccugcuuuu

SEQ ID NO: 3144571 - RNA, 19 nt, Artificial Sequence
  Description of Artificial Sequence: Synthetic oligonucleotide
gcaggcagucagggcagca

SEQ ID NO: 3144572 - RNA, 19 nt, Artificial Sequence
  Description of Artificial Sequence: Synthetic oligonucleotide
ccauaucacuguucacaau

SEQ ID NO: 3144573 - RNA, 19 nt, Artificial Sequence
  Description of Artificial Sequence: Synthetic oligonucleotide
ggggagcugcuuacuggcu

SEQ ID NO: 3144574 - RNA, 19 nt, Artificial Sequence
  Description of Artificial Sequence: Synthetic oligonucleotide
  modified_base (1)..(1): a, c, u, g, unknown or other
ngaaaccuaggaccaccag

SEQ ID NO: 3144575 - RNA, 19 nt, Artificial Sequence
  Description of Artificial Sequence: Synthetic oligonucleotide
gacacagaggcucuugacg

SEQ ID NO: 3144576 - RNA, 19 nt, Artificial Sequence
  Description of Artificial Sequence: Synthetic oligonucleotide
acacagaggcucuugacgg

SEQ ID NO: 3144577 - RNA, 19 nt, Artificial Sequence
  Description of Artificial Sequence: Synthetic oligonucleotide
cuugacggcuuguaggucc

SEQ ID NO: 3144578 - RNA, 19 nt, Artificial Sequence
  Description of Artificial Sequence: Synthetic oligonucleotide
gcucuugacggcuuguagg

SEQ ID NO: 3144579 - RNA, 19 nt, Artificial Sequence
  Description of Artificial Sequence: Synthetic oligonucleotide
gacggcuuguagguccugg

SEQ ID NO: 3144580 - RNA, 19 nt, Artificial Sequence
  Description of Artificial Sequence: Synthetic oligonucleotide
uugacggcuuguagguccu

SEQ ID NO: 3144581 - RNA, 19 nt, Artificial Sequence
  Description of Artificial Sequence: Synthetic oligonucleotide
cacagaggcucuugacggc

SEQ ID NO: 3144582 - RNA, 19 nt, Artificial Sequence
  Description of Artificial Sequence: Synthetic oligonucleotide
agaggcucuugacggcuug

SEQ ID NO: 3144583 - RNA, 19 nt, Artificial Sequence
  Description of Artificial Sequence: Synthetic oligonucleotide
acagaggcucuugacggcu

SEQ ID NO: 3144584 - RNA, 19 nt, Artificial Sequence
  Description of Artificial Sequence: Synthetic oligonucleotide
ggcucuugacggcuuguag

SEQ ID NO: 3144585 - RNA, 19 nt, Artificial Sequence
  Description of Artificial Sequence: Synthetic oligonucleotide
ugacggcuuguagguccug

SEQ ID NO: 3144586 - RNA, 19 nt, Artificial Sequence
  Description of Artificial Sequence: Synthetic oligonucleotide
aggcucuugacggcuugua

SEQ ID NO: 3144587 - RNA, 19 nt, Artificial Sequence
  Description of Artificial Sequence: Synthetic oligonucleotide
gaggcucuugacggcuugu

SEQ ID NO: 3144588 - RNA, 19 nt, Artificial Sequence
  Description of Artificial Sequence: Synthetic oligonucleotide
cagaggcucuugacggcuu

SEQ ID NO: 3144589 - RNA, 19 nt, Artificial Sequence
  Description of Artificial Sequence: Synthetic oligonucleotide
ugggcucuuacuaagaucc

SEQ ID NO: 3144590 - RNA, 19 nt, Artificial Sequence
  Description of Artificial Sequence: Synthetic oligonucleotide
uuuucauagucuuugggcu

SEQ ID NO: 3144591 - RNA, 19 nt, Artificial Sequence
  Description of Artificial Sequence: Synthetic oligonucleotide
gaucugugcaucuucuucg

SEQ ID NO: 3144592 - RNA, 19 nt, Artificial Sequence
  Description of Artificial Sequence: Synthetic oligonucleotide
ugugcaucuucuucgagag

SEQ ID NO: 3144593 - RNA, 19 nt, Artificial Sequence
  Description of Artificial Sequence: Synthetic oligonucleotide
aagguuuccguucaggcuu

SEQ ID NO: 3144594 - RNA, 19 nt, Artificial Sequence
  Description of Artificial Sequence: Synthetic oligonucleotide
ugaagguuuccguucaggc

SEQ ID NO: 3144595 - RNA, 19 nt, Artificial Sequence
  Description of Artificial Sequence: Synthetic oligonucleotide
aaacucccucgucugaagg

SEQ ID NO: 3144596 - RNA, 19 nt, Artificial Sequence
  Description of Artificial Sequence: Synthetic oligonucleotide
auagucuuugggcucuuac

SEQ ID NO: 3144597 - RNA, 19 nt, Artificial Sequence
  Description of Artificial Sequence: Synthetic oligonucleotide
uuuccguucaggcuugcgc

SEQ ID NO: 3144598 - RNA, 19 nt, Artificial Sequence
  Description of Artificial Sequence: Synthetic oligonucleotide
uucgaugaccuucaggauc

SEQ ID NO: 3144599 - RNA, 19 nt, Artificial Sequence
  Description of Artificial Sequence: Synthetic oligonucleotide
ugugcucuugcgcacagca

SEQ ID NO: 3144600 - RNA, 19 nt, Artificial Sequence
  Description of Artificial Sequence: Synthetic oligonucleotide
uucgcacuugugcaguacg

SEQ ID NO: 3144601 - RNA, 19 nt, Artificial Sequence
  Description of Artificial Sequence: Synthetic oligonucleotide
ucgaugaccuucaggaucu

SEQ ID NO: 3144602 - RNA, 19 nt, Artificial Sequence
  Description of Artificial Sequence: Synthetic oligonucleotide
ucuuugggcucuuacuaag

SEQ ID NO: 3144603 - RNA, 19 nt, Artificial Sequence
  Description of Artificial Sequence: Synthetic oligonucleotide
agagcagcugugcucuugc

SEQ ID NO: 3144604 - RNA, 19 nt, Artificial Sequence
  Description of Artificial Sequence: Synthetic oligonucleotide
acagcaaacucccucgucu

SEQ ID NO: 3144605 - RNA, 19 nt, Artificial Sequence
  Description of Artificial Sequence: Synthetic oligonucleotide
agcagcugugcucuugcgc

SEQ ID NO: 3144606 - RNA, 19 nt, Artificial Sequence
  Description of Artificial Sequence: Synthetic oligonucleotide
gcuucgaugaccuucagga

SEQ ID NO: 3144607 - RNA, 19 nt, Artificial Sequence
  Description of Artificial Sequence: Synthetic oligonucleotide
cucgucuucgcacuugugc

SEQ ID NO: 3144608 - RNA, 19 nt, Artificial Sequence
  Description of Artificial Sequence: Synthetic oligonucleotide
ugcucuugcgcacagcaaa

SEQ ID NO: 3144609 - RNA, 19 nt, Artificial Sequence
  Description of Artificial Sequence: Synthetic oligonucleotide
ucgucuucgcacuugugca

SEQ ID NO: 3144610 - RNA, 19 nt, Artificial Sequence
  Description of Artificial Sequence: Synthetic oligonucleotide
uacgcuucgaugaccuuca

SEQ ID NO: 3144611 - RNA, 19 nt, Artificial Sequence
  Description of Artificial Sequence: Synthetic oligonucleotide
uucagggucugccucgucu

SEQ ID NO: 3144612 - RNA, 19 nt, Artificial Sequence
  Description of Artificial Sequence: Synthetic oligonucleotide
agucuuugggcucuuacua

SEQ ID NO: 3144613 - RNA, 19 nt, Artificial Sequence
  Description of Artificial Sequence: Synthetic oligonucleotide
uuucauagucuuugggcuc

SEQ ID NO: 3144614 - RNA, 19 nt, Artificial Sequence
  Description of Artificial Sequence: Synthetic oligonucleotide
uuccguucaggcuugcgcu

SEQ ID NO: 3144615 - RNA, 19 nt, Artificial Sequence
  Description of Artificial Sequence: Synthetic oligonucleotide
uagucuuugggcucuuacu

SEQ ID NO: 3144616 - RNA, 19 nt, Artificial Sequence
  Description of Artificial Sequence: Synthetic oligonucleotide
uuugggcucuuacuaagau

SEQ ID NO: 3144617 - RNA, 19 nt, Artificial Sequence
  Description of Artificial Sequence: Synthetic oligonucleotide
ucaggcuugcgcuucggca

SEQ ID NO: 3144618 - RNA, 19 nt, Artificial Sequence
  Description of Artificial Sequence: Synthetic oligonucleotide
aacucccucgucugaaggu

SEQ ID NO: 3144619 - RNA, 19 nt, Artificial Sequence
  Description of Artificial Sequence: Synthetic oligonucleotide
ucaggaucugugcaucuuc

SEQ ID NO: 3144620 - RNA, 19 nt, Artificial Sequence
  Description of Artificial Sequence: Synthetic oligonucleotide
ucuucuucgagagcagcug

SEQ ID NO: 3144621 - RNA, 19 nt, Artificial Sequence
  Description of Artificial Sequence: Synthetic oligonucleotide
ucuugcgcacagcaaacuc

SEQ ID NO: 3144622 - RNA, 19 nt, Artificial Sequence
  Description of Artificial Sequence: Synthetic oligonucleotide
uucuucgagagcagcugug

SEQ ID NO: 3144623 - RNA, 19 nt, Artificial Sequence
  Description of Artificial Sequence: Synthetic oligonucleotide
caggcuugcgcuucggcag

SEQ ID NO: 3144624 - RNA, 19 nt, Artificial Sequence
  Description of Artificial Sequence: Synthetic oligonucleotide
ucugccucgucuucgcacu

SEQ ID NO: 3144625 - RNA, 19 nt, Artificial Sequence
  Description of Artificial Sequence: Synthetic oligonucleotide
gugcaguacgcuucgauga

SEQ ID NO: 3144626 - RNA, 19 nt, Artificial Sequence
  Description of Artificial Sequence: Synthetic oligonucleotide
ucgagagcagcugugcucu

SEQ ID NO: 3144627 - RNA, 19 nt, Artificial Sequence
  Description of Artificial Sequence: Synthetic oligonucleotide
ucugaagguuuccguucag

SEQ ID NO: 3144628 - RNA, 19 nt, Artificial Sequence
  Description of Artificial Sequence: Synthetic oligonucleotide
ugcaguacgcuucgaugac

SEQ ID NO: 3144629 - RNA, 19 nt, Artificial Sequence
  Description of Artificial Sequence: Synthetic oligonucleotide
uucgagagcagcugugcuc

SEQ ID NO: 3144630 - RNA, 19 nt, Artificial Sequence
  Description of Artificial Sequence: Synthetic oligonucleotide
augaccuucaggaucugug

SEQ ID NO: 3144631 - RNA, 19 nt, Artificial Sequence
  Description of Artificial Sequence: Synthetic oligonucleotide
ucgcacuugugcaguacgc

SEQ ID NO: 3144632 - RNA, 19 nt, Artificial Sequence
  Description of Artificial Sequence: Synthetic oligonucleotide
uugggcucuuacuaagauc

SEQ ID NO: 3144633 - RNA, 19 nt, Artificial Sequence
  Description of Artificial Sequence: Synthetic oligonucleotide
cacuugugcaguacgcuuc

SEQ ID NO: 3144634 - RNA, 19 nt, Artificial Sequence
  Description of Artificial Sequence: Synthetic oligonucleotide
cugaagguuuccguucagg

SEQ ID NO: 3144635 - RNA, 19 nt, Artificial Sequence
  Description of Artificial Sequence: Synthetic oligonucleotide
uugcgcuucggcagcagcu

SEQ ID NO: 3144636 - RNA, 19 nt, Artificial Sequence
  Description of Artificial Sequence: Synthetic oligonucleotide
aggcuugcgcuucggcagc

SEQ ID NO: 3144637 - RNA, 19 nt, Artificial Sequence
  Description of Artificial Sequence: Synthetic oligonucleotide
gaagguuuccguucaggcu

SEQ ID NO: 3144638 - RNA, 19 nt, Artificial Sequence
  Description of Artificial Sequence: Synthetic oligonucleotide
cugugcaucuucuucgaga

SEQ ID NO: 3144639 - RNA, 19 nt, Artificial Sequence
  Description of Artificial Sequence: Synthetic oligonucleotide
uucaggcuugcgcuucggc

SEQ ID NO: 3144640 - RNA, 19 nt, Artificial Sequence
  Description of Artificial Sequence: Synthetic oligonucleotide
caaacucccucgucugaag

SEQ ID NO: 3144641 - RNA, 19 nt, Artificial Sequence
  Description of Artificial Sequence: Synthetic oligonucleotide
ucgucugaagguuuccguu

SEQ ID NO: 3144642 - RNA, 19 nt, Artificial Sequence
  Description of Artificial Sequence: Synthetic oligonucleotide
gaccuucaggaucugugca

SEQ ID NO: 3144643 - RNA, 19 nt, Artificial Sequence
  Description of Artificial Sequence: Synthetic oligonucleotide
aucugugcaucuucuucga

SEQ ID NO: 3144644 - RNA, 19 nt, Artificial Sequence
  Description of Artificial Sequence: Synthetic oligonucleotide
accuucaggaucugugcau

SEQ ID NO: 3144645 - RNA, 19 nt, Artificial Sequence
  Description of Artificial Sequence: Synthetic oligonucleotide
gucugaagguuuccguuca

SEQ ID NO: 3144646 - RNA, 19 nt, Artificial Sequence
  Description of Artificial Sequence: Synthetic oligonucleotide
caucuucuucgagagcagc

SEQ ID NO: 3144647 - RNA, 19 nt, Artificial Sequence
  Description of Artificial Sequence: Synthetic oligonucleotide
cagcaaacucccucgucug

SEQ ID NO: 3144648 - RNA, 19 nt, Artificial Sequence
  Description of Artificial Sequence: Synthetic oligonucleotide
cuugcgcuucggcagcagc

SEQ ID NO: 3144649 - RNA, 19 nt, Artificial Sequence
  Description of Artificial Sequence: Synthetic oligonucleotide
guacgcuucgaugaccuuc

SEQ ID NO: 3144650 - RNA, 19 nt, Artificial Sequence
  Description of Artificial Sequence: Synthetic oligonucleotide
agcaaacucccucgucuga

SEQ ID NO: 3144651 - RNA, 19 nt, Artificial Sequence
  Description of Artificial Sequence: Synthetic oligonucleotide
cuuugggcucuuacuaaga

SEQ ID NO: 3144652 - RNA, 19 nt, Artificial Sequence
  Description of Artificial Sequence: Synthetic oligonucleotide
gagcagcugugcucuugcg

SEQ ID NO: 3144653 - RNA, 19 nt, Artificial Sequence
  Description of Artificial Sequence: Synthetic oligonucleotide
gcagcugugcucuugcgca

SEQ ID NO: 3144654 - RNA, 19 nt, Artificial Sequence
  Description of Artificial Sequence: Synthetic oligonucleotide
agggucugccucgucuucg

SEQ ID NO: 3144655 - RNA, 19 nt, Artificial Sequence
  Description of Artificial Sequence: Synthetic oligonucleotide
gucugccucgucuucgcac

SEQ ID NO: 3144656 - RNA, 19 nt, Artificial Sequence
  Description of Artificial Sequence: Synthetic oligonucleotide
ucagggucugccucgucuu

SEQ ID NO: 3144657 - RNA, 19 nt, Artificial Sequence
  Description of Artificial Sequence: Synthetic oligonucleotide
gucuuugggcucuuacuaa

SEQ ID NO: 3144658 - RNA, 19 nt, Artificial Sequence
  Description of Artificial Sequence: Synthetic oligonucleotide
cgcacagcaaacucccucg

SEQ ID NO: 3144659 - RNA, 19 nt, Artificial Sequence
  Description of Artificial Sequence: Synthetic oligonucleotide
ucccucgucugaagguuuc

SEQ ID NO: 3144660 - RNA, 19 nt, Artificial Sequence
  Description of Artificial Sequence: Synthetic oligonucleotide
gagagcagcugugcucuug

SEQ ID NO: 3144661 - RNA, 19 nt, Artificial Sequence
  Description of Artificial Sequence: Synthetic oligonucleotide
guuuccguucaggcuugcg

SEQ ID NO: 3144662 - RNA, 19 nt, Artificial Sequence
  Description of Artificial Sequence: Synthetic oligonucleotide
uucaggaucugugcaucuu

SEQ ID NO: 3144663 - RNA, 19 nt, Artificial Sequence
  Description of Artificial Sequence: Synthetic oligonucleotide
ucuucgcacuugugcagua

SEQ ID NO: 3144664 - RNA, 19 nt, Artificial Sequence
  Description of Artificial Sequence: Synthetic oligonucleotide
cuucgcacuugugcaguac

SEQ ID NO: 3144665 - RNA, 19 nt, Artificial Sequence
  Description of Artificial Sequence: Synthetic oligonucleotide
ugcgcacagcaaacucccu

SEQ ID NO: 3144666 - RNA, 19 nt, Artificial Sequence
  Description of Artificial Sequence: Synthetic oligonucleotide
caguacgcuucgaugaccu

SEQ ID NO: 3144667 - RNA, 19 nt, Artificial Sequence
  Description of Artificial Sequence: Synthetic oligonucleotide
uccguucaggcuugcgcuu

SEQ ID NO: 3144668 - RNA, 19 nt, Artificial Sequence
  Description of Artificial Sequence: Synthetic oligonucleotide
acucccucgucugaagguu

SEQ ID NO: 3144669 - RNA, 19 nt, Artificial Sequence
  Description of Artificial Sequence: Synthetic oligonucleotide
aguucagggucugccucgu

SEQ ID NO: 3144670 - RNA, 19 nt, Artificial Sequence
  Description of Artificial Sequence: Synthetic oligonucleotide
ugccucgucuucgcacuug

SEQ ID NO: 3144671 - RNA, 19 nt, Artificial Sequence
  Description of Artificial Sequence: Synthetic oligonucleotide
guucaggcuugcgcuucgg

SEQ ID NO: 3144672 - RNA, 19 nt, Artificial Sequence
  Description of Artificial Sequence: Synthetic oligonucleotide
cagcugugcucuugcgcac

SEQ ID NO: 3144673 - RNA, 19 nt, Artificial Sequence
  Description of Artificial Sequence: Synthetic oligonucleotide
cuucuucgagagcagcugu

SEQ ID NO: 3144674 - RNA, 19 nt, Artificial Sequence
  Description of Artificial Sequence: Synthetic oligonucleotide
cucgucugaagguuuccgu

SEQ ID NO: 3144675 - RNA, 19 nt, Artificial Sequence
  Description of Artificial Sequence: Synthetic oligonucleotide
ugcgcuucggcagcagcuu

SEQ ID NO: 3144676 - RNA, 19 nt, Artificial Sequence
  Description of Artificial Sequence: Synthetic oligonucleotide
agguuuccguucaggcuug

SEQ ID NO: 3144677 - RNA, 19 nt, Artificial Sequence
  Description of Artificial Sequence: Synthetic oligonucleotide
aguacgcuucgaugaccuu

SEQ ID NO: 3144678 - RNA, 19 nt, Artificial Sequence
  Description of Artificial Sequence: Synthetic oligonucleotide
ccucgucugaagguuuccg

SEQ ID NO: 3144679 - RNA, 19 nt, Artificial Sequence
  Description of Artificial Sequence: Synthetic oligonucleotide
agcugugcucuugcgcaca

SEQ ID NO: 3144680 - RNA, 19 nt, Artificial Sequence
  Description of Artificial Sequence: Synthetic oligonucleotide
cgucugaagguuuccguuc

SEQ ID NO: 3144681 - RNA, 19 nt, Artificial Sequence
  Description of Artificial Sequence: Synthetic oligonucleotide
gcaguacgcuucgaugacc

SEQ ID NO: 3144682 - RNA, 19 nt, Artificial Sequence
  Description of Artificial Sequence: Synthetic oligonucleotide
gaugaccuucaggaucugu

SEQ ID NO: 3144683 - RNA, 19 nt, Artificial Sequence
  Description of Artificial Sequence: Synthetic oligonucleotide
gcgcacagcaaacucccuc

SEQ ID NO: 3144684 - RNA, 19 nt, Artificial Sequence
  Description of Artificial Sequence: Synthetic oligonucleotide
gggucugccucgucuucgc

SEQ ID NO: 3144685 - RNA, 19 nt, Artificial Sequence
  Description of Artificial Sequence: Synthetic oligonucleotide
cuucaggaucugugcaucu

SEQ ID NO: 3144686 - RNA, 19 nt, Artificial Sequence
  Description of Artificial Sequence: Synthetic oligonucleotide
acgcuucgaugaccuucag

SEQ ID NO: 3144687 - RNA, 19 nt, Artificial Sequence
  Description of Artificial Sequence: Synthetic oligonucleotide
cuucgagagcagcugugcu

SEQ ID NO: 3144688 - RNA, 19 nt, Artificial Sequence
  Description of Artificial Sequence: Synthetic oligonucleotide
cagggucugccucgucuuc

SEQ ID NO: 3144689 - RNA, 19 nt, Artificial Sequence
  Description of Artificial Sequence: Synthetic oligonucleotide
ccuucaggaucugugcauc

SEQ ID NO: 3144690 - RNA, 19 nt, Artificial Sequence
  Description of Artificial Sequence: Synthetic oligonucleotide
gcucuugcgcacagcaaac

SEQ ID NO: 3144691 - RNA, 19 nt, Artificial Sequence
  Description of Artificial Sequence: Synthetic oligonucleotide
cgucuucgcacuugugcag

SEQ ID NO: 3144692 - RNA, 19 nt, Artificial Sequence
  Description of Artificial Sequence: Synthetic oligonucleotide
cuucgaugaccuucaggau

SEQ ID NO: 3144693 - RNA, 19 nt, Artificial Sequence
  Description of Artificial Sequence: Synthetic oligonucleotide
cugugcucuugcgcacagc

SEQ ID NO: 3144694 - RNA, 19 nt, Artificial Sequence
  Description of Artificial Sequence: Synthetic oligonucleotide
gcaaacucccucgucugaa

SEQ ID NO: 3144695 - RNA, 19 nt, Artificial Sequence
  Description of Artificial Sequence: Synthetic oligonucleotide
gucuucgcacuugugcagu

SEQ ID NO: 3144696 - RNA, 19 nt, Artificial Sequence
  Description of Artificial Sequence: Synthetic oligonucleotide
ucauagucuuugggcucuu

SEQ ID NO: 3144697 - RNA, 19 nt, Artificial Sequence
  Description of Artificial Sequence: Synthetic oligonucleotide
guucagggucugccucguc

SEQ ID NO: 3144698 - RNA, 19 nt, Artificial Sequence
  Description of Artificial Sequence: Synthetic oligonucleotide
cguucaggcuugcgcuucg

SEQ ID NO: 3144699 - RNA, 19 nt, Artificial Sequence
  Description of Artificial Sequence: Synthetic oligonucleotide
gcacuugugcaguacgcuu

SEQ ID NO: 3144700 - RNA, 19 nt, Artificial Sequence
  Description of Artificial Sequence: Synthetic oligonucleotide
cucuugcgcacagcaaacu

SEQ ID NO: 3144701 - RNA, 19 nt, Artificial Sequence
  Description of Artificial Sequence: Synthetic oligonucleotide
gugcucuugcgcacagcaa

SEQ ID NO: 3144702 - RNA, 19 nt, Artificial Sequence
  Description of Artificial Sequence: Synthetic oligonucleotide
ggucugccucgucuucgca

SEQ ID NO: 3144703 - RNA, 19 nt, Artificial Sequence
  Description of Artificial Sequence: Synthetic oligonucleotide
ccucgucuucgcacuugug

SEQ ID NO: 3144704 - RNA, 19 nt, Artificial Sequence
  Description of Artificial Sequence: Synthetic oligonucleotide
cauagucuuugggcucuua

SEQ ID NO: 3144705 - RNA, 19 nt, Artificial Sequence
  Description of Artificial Sequence: Synthetic oligonucleotide
gguuuccguucaggcuugc

SEQ ID NO: 3144706 - RNA, 19 nt, Artificial Sequence
  Description of Artificial Sequence: Synthetic oligonucleotide
gcuugcgcuucggcagcag

SEQ ID NO: 3144707 - RNA, 19 nt, Artificial Sequence
  Description of Artificial Sequence: Synthetic oligonucleotide
gccucgucuucgcacuugu

SEQ ID NO: 3144708 - RNA, 19 nt, Artificial Sequence
  Description of Artificial Sequence: Synthetic oligonucleotide
gcacagcaaacucccucgu

SEQ ID NO: 3144709 - RNA, 19 nt, Artificial Sequence
  Description of Artificial Sequence: Synthetic oligonucleotide
cucccucgucugaagguuu

SEQ ID NO: 3144710 - RNA, 19 nt, Artificial Sequence
  Description of Artificial Sequence: Synthetic oligonucleotide
ccguucaggcuugcgcuuc

SEQ ID NO: 3144711 - RNA, 19 nt, Artificial Sequence
  Description of Artificial Sequence: Synthetic oligonucleotide
ggcuugcgcuucggcagca

SEQ ID NO: 3144712 - RNA, 19 nt, Artificial Sequence
  Description of Artificial Sequence: Synthetic oligonucleotide
cgcacuugugcaguacgcu

SEQ ID NO: 3144713 - RNA, 19 nt, Artificial Sequence
  Description of Artificial Sequence: Synthetic oligonucleotide
cugccucgucuucgcacuu

SEQ ID NO: 3144714 - RNA, 19 nt, Artificial Sequence
  Description of Artificial Sequence: Synthetic oligonucleotide
cgaugaccuucaggaucug

SEQ ID NO: 3144715 - RNA, 19 nt, Artificial Sequence
  Description of Artificial Sequence: Synthetic oligonucleotide
gcgcuucggcagcagcuuu

SEQ ID NO: 3144716 - RNA, 19 nt, Artificial Sequence
  Description of Artificial Sequence: Synthetic oligonucleotide
cgagagcagcugugcucuu

SEQ ID NO: 3144717 - RNA, 19 nt, Artificial Sequence
  Description of Artificial Sequence: Synthetic oligonucleotide
uguaggaugagcuccacca

SEQ ID NO: 3144718 - RNA, 19 nt, Artificial Sequence
  Description of Artificial Sequence: Synthetic oligonucleotide
uccacagucagugaggcgg

SEQ ID NO: 3144719 - RNA, 19 nt, Artificial Sequence
  Description of Artificial Sequence: Synthetic oligonucleotide
gaagucacagugcagcggg

SEQ ID NO: 3144720 - RNA, 19 nt, Artificial Sequence
  Description of Artificial Sequence: Synthetic oligonucleotide
aggagguccagccucaugg

SEQ ID NO: 3144721 - RNA, 19 nt, Artificial Sequence
  Description of Artificial Sequence: Synthetic oligonucleotide
ugaggcgggaagauguccg

SEQ ID NO: 3144722 - RNA, 19 nt, Artificial Sequence
  Description of Artificial Sequence: Synthetic oligonucleotide
agagccucagaggaggucc

SEQ ID NO: 3144723 - RNA, 19 nt, Artificial Sequence
  Description of Artificial Sequence: Synthetic oligonucleotide
gagguggagagccucagag

SEQ ID NO: 3144724 - RNA, 19 nt, Artificial Sequence
  Description of Artificial Sequence: Synthetic oligonucleotide
gaugagcuccaccaccugg

SEQ ID NO: 3144725 - RNA, 19 nt, Artificial Sequence
  Description of Artificial Sequence: Synthetic oligonucleotide
aagauguccgugcacugcu

SEQ ID NO: 3144726 - RNA, 19 nt, Artificial Sequence
  Description of Artificial Sequence: Synthetic oligonucleotide
uaggaugagcuccaccacc

SEQ ID NO: 3144727 - RNA, 19 nt, Artificial Sequence
  Description of Artificial Sequence: Synthetic oligonucleotide
acugcuguaggaugagcuc

SEQ ID NO: 3144728 - RNA, 19 nt, Artificial Sequence
  Description of Artificial Sequence: Synthetic oligonucleotide
gguggcagaagucacagug

SEQ ID NO: 3144729 - RNA, 19 nt, Artificial Sequence
  Description of Artificial Sequence: Synthetic oligonucleotide
uggagagccucagaggagg

SEQ ID NO: 3144730 - RNA, 19 nt, Artificial Sequence
  Description of Artificial Sequence: Synthetic oligonucleotide
uggcagaagucacagugca

SEQ ID NO: 3144731 - RNA, 19 nt, Artificial Sequence
  Description of Artificial Sequence: Synthetic oligonucleotide
ucagaggagguccagccuc

SEQ ID NO: 3144732 - RNA, 19 nt, Artificial Sequence
  Description of Artificial Sequence: Synthetic oligonucleotide
uacccucccgaaucgaggg

SEQ ID NO: 3144733 - RNA, 19 nt, Artificial Sequence
  Description of Artificial Sequence: Synthetic oligonucleotide
gaucguacccucccgaauc

SEQ ID NO: 3144734 - RNA, 19 nt, Artificial Sequence
  Description of Artificial Sequence: Synthetic oligonucleotide
aggguccacagucagugag

SEQ ID NO: 3144735 - RNA, 19 nt, Artificial Sequence
  Description of Artificial Sequence: Synthetic oligonucleotide
cagaagucacagugcagcg

SEQ ID NO: 3144736 - RNA, 19 nt, Artificial Sequence
  Description of Artificial Sequence: Synthetic oligonucleotide
agugcagcggggugggagg

SEQ ID NO: 3144737 - RNA, 19 nt, Artificial Sequence
  Description of Artificial Sequence: Synthetic oligonucleotide
aucguacccucccgaaucg

SEQ ID NO: 3144738 - RNA, 19 nt, Artificial Sequence
  Description of Artificial Sequence: Synthetic oligonucleotide
agguggagagccucagagg

SEQ ID NO: 3144739 - RNA, 19 nt, Artificial Sequence
  Description of Artificial Sequence: Synthetic oligonucleotide
agaagucacagugcagcgg

SEQ ID NO: 3144740 - RNA, 19 nt, Artificial Sequence
  Description of Artificial Sequence: Synthetic oligonucleotide
gaagauguccgugcacugc

SEQ ID NO: 3144741 - RNA, 19 nt, Artificial Sequence
  Description of Artificial Sequence: Synthetic oligonucleotide
gguggagagccucagagga

SEQ ID NO: 3144742 - RNA, 19 nt, Artificial Sequence
  Description of Artificial Sequence: Synthetic oligonucleotide
uguccgugcacugcuguag

SEQ ID NO: 3144743 - RNA, 19 nt, Artificial Sequence
  Description of Artificial Sequence: Synthetic oligonucleotide
cauggccucagccacccag

SEQ ID NO: 3144744 - RNA, 19 nt, Artificial Sequence
  Description of Artificial Sequence: Synthetic oligonucleotide
aucgagggguggcagaagu

SEQ ID NO: 3144745 - RNA, 19 nt, Artificial Sequence
  Description of Artificial Sequence: Synthetic oligonucleotide
gagguccagccucauggcc

SEQ ID NO: 3144746 - RNA, 19 nt, Artificial Sequence
  Description of Artificial Sequence: Synthetic oligonucleotide
cagucagugaggcgggaag

SEQ ID NO: 3144747 - RNA, 19 nt, Artificial Sequence
  Description of Artificial Sequence: Synthetic oligonucleotide
ucagugaggcgggaagaug

SEQ ID NO: 3144748 - RNA, 19 nt, Artificial Sequence
  Description of Artificial Sequence: Synthetic oligonucleotide
guaggaugagcuccaccac

SEQ ID NO: 3144749 - RNA, 19 nt, Artificial Sequence
  Description of Artificial Sequence: Synthetic oligonucleotide
guacccucccgaaucgagg

SEQ ID NO: 3144750 - RNA, 19 nt, Artificial Sequence
  Description of Artificial Sequence: Synthetic oligonucleotide
guccgugcacugcuguagg

SEQ ID NO: 3144751 - RNA, 19 nt, Artificial Sequence
  Description of Artificial Sequence: Synthetic oligonucleotide
cuguaggaugagcuccacc

SEQ ID NO: 3144752 - RNA, 19 nt, Artificial Sequence
  Description of Artificial Sequence: Synthetic oligonucleotide
aaucgagggguggcagaag

SEQ ID NO: 3144753 - RNA, 19 nt, Artificial Sequence
  Description of Artificial Sequence: Synthetic oligonucleotide
gucacagugcagcggggug

SEQ ID NO: 3144754 - RNA, 19 nt, Artificial Sequence
  Description of Artificial Sequence: Synthetic oligonucleotide
caccaccugguucuggaac

SEQ ID NO: 3144755 - RNA, 19 nt, Artificial Sequence
  Description of Artificial Sequence: Synthetic oligonucleotide
ugggagguggagagccuca

SEQ ID NO: 3144756 - RNA, 19 nt, Artificial Sequence
  Description of Artificial Sequence: Synthetic oligonucleotide
ugcacugcuguaggaugag

SEQ ID NO: 3144757 - RNA, 19 nt, Artificial Sequence
  Description of Artificial Sequence: Synthetic oligonucleotide
ucgaucguacccucccgaa

SEQ ID NO: 3144758 - RNA, 19 nt, Artificial Sequence
  Description of Artificial Sequence: Synthetic oligonucleotide
gccucagccacccaggguc

SEQ ID NO: 3144759 - RNA, 19 nt, Artificial Sequence
  Description of Artificial Sequence: Synthetic oligonucleotide
cucauggccucagccaccc

SEQ ID NO: 3144760 - RNA, 19 nt, Artificial Sequence
  Description of Artificial Sequence: Synthetic oligonucleotide
ccucagaggagguccagcc

SEQ ID NO: 3144761 - RNA, 19 nt, Artificial Sequence
  Description of Artificial Sequence: Synthetic oligonucleotide
aggaugagcuccaccaccu

SEQ ID NO: 3144762 - RNA, 19 nt, Artificial Sequence
  Description of Artificial Sequence: Synthetic oligonucleotide
ggcgggaagauguccgugc

SEQ ID NO: 3144763 - RNA, 19 nt, Artificial Sequence
  Description of Artificial Sequence: Synthetic oligonucleotide
augagcuccaccaccuggu

SEQ ID NO: 3144764 - RNA, 19 nt, Artificial Sequence
  Description of Artificial Sequence: Synthetic oligonucleotide
agugaggcgggaagauguc

SEQ ID NO: 3144765 - RNA, 19 nt, Artificial Sequence
  Description of Artificial Sequence: Synthetic oligonucleotide
gaaucgagggguggcagaa

SEQ ID NO: 3144766 - RNA, 19 nt, Artificial Sequence
  Description of Artificial Sequence: Synthetic oligonucleotide
auggccucagccacccagg

SEQ ID NO: 3144767 - RNA, 19 nt, Artificial Sequence
  Description of Artificial Sequence: Synthetic oligonucleotide
ggaagauguccgugcacug

SEQ ID NO: 3144768 - RNA, 19 nt, Artificial Sequence
  Description of Artificial Sequence: Synthetic oligonucleotide
ucgagggguggcagaaguc

SEQ ID NO: 3144769 - RNA, 19 nt, Artificial Sequence
  Description of Artificial Sequence: Synthetic oligonucleotide
ucccgaaucgagggguggc

SEQ ID NO: 3144770 - RNA, 19 nt, Artificial Sequence
  Description of Artificial Sequence: Synthetic oligonucleotide
acccucccgaaucgagggg

SEQ ID NO: 3144771 - RNA, 19 nt, Artificial Sequence
  Description of Artificial Sequence: Synthetic oligonucleotide
agguccagccucauggccu

SEQ ID NO: 3144772 - RNA, 19 nt, Artificial Sequence
  Description of Artificial Sequence: Synthetic oligonucleotide
cacagugcagcgggguggg

SEQ ID NO: 3144773 - RNA, 19 nt, Artificial Sequence
  Description of Artificial Sequence: Synthetic oligonucleotide
cagugaggcgggaagaugu

SEQ ID NO: 3144774 - RNA, 19 nt, Artificial Sequence
  Description of Artificial Sequence: Synthetic oligonucleotide
guccacagucagugaggcg

SEQ ID NO: 3144775 - RNA, 19 nt, Artificial Sequence
  Description of Artificial Sequence: Synthetic oligonucleotide
uccgugcacugcuguagga

SEQ ID NO: 3144776 - RNA, 19 nt, Artificial Sequence
  Description of Artificial Sequence: Synthetic oligonucleotide
gaggagguccagccucaug

SEQ ID NO: 3144777 - RNA, 19 nt, Artificial Sequence
  Description of Artificial Sequence: Synthetic oligonucleotide
agucacagugcagcggggu

SEQ ID NO: 3144778 - RNA, 19 nt, Artificial Sequence
  Description of Artificial Sequence: Synthetic oligonucleotide
gucgaucguacccucccga

SEQ ID NO: 3144779 - RNA, 19 nt, Artificial Sequence
  Description of Artificial Sequence: Synthetic oligonucleotide
ggucgaucguacccucccg

SEQ ID NO: 3144780 - RNA, 19 nt, Artificial Sequence
  Description of Artificial Sequence: Synthetic oligonucleotide
gggucgaucguacccuccc

SEQ ID NO: 3144781 - RNA, 19 nt, Artificial Sequence
  Description of Artificial Sequence: Synthetic oligonucleotide
gauguccgugcacugcugu

SEQ ID NO: 3144782 - RNA, 19 nt, Artificial Sequence
  Description of Artificial Sequence: Synthetic oligonucleotide
gguccacagucagugaggc

SEQ ID NO: 3144783 - RNA, 19 nt, Artificial Sequence
  Description of Artificial Sequence: Synthetic oligonucleotide
ccaggguccacagucagug

SEQ ID NO: 3144784 - RNA, 19 nt, Artificial Sequence
  Description of Artificial Sequence: Synthetic oligonucleotide
cagugcagcggggugggag

SEQ ID NO: 3144785 - RNA, 19 nt, Artificial Sequence
  Description of Artificial Sequence: Synthetic oligonucleotide
gugaggcgggaagaugucc

SEQ ID NO: 3144786 - RNA, 19 nt, Artificial Sequence
  Description of Artificial Sequence: Synthetic oligonucleotide
gagggguggcagaagucac

SEQ ID NO: 3144787 - RNA, 19 nt, Artificial Sequence
  Description of Artificial Sequence: Synthetic oligonucleotide
guggagagccucagaggag

SEQ ID NO: 3144788 - RNA, 19 nt, Artificial Sequence
  Description of Artificial Sequence: Synthetic oligonucleotide
gggugggagguggagagcc

SEQ ID NO: 3144789 - RNA, 19 nt, Artificial Sequence
  Description of Artificial Sequence: Synthetic oligonucleotide
ggguccacagucagugagg

SEQ ID NO: 3144790 - RNA, 19 nt, Artificial Sequence
  Description of Artificial Sequence: Synthetic oligonucleotide
gggguggcagaagucacag

SEQ ID NO: 3144791 - RNA, 19 nt, Artificial Sequence
  Description of Artificial Sequence: Synthetic oligonucleotide
ccacccaggguccacaguc

SEQ ID NO: 3144792 - RNA, 19 nt, Artificial Sequence
  Description of Artificial Sequence: Synthetic oligonucleotide
ggagguccagccucauggc

SEQ ID NO: 3144793 - RNA, 19 nt, Artificial Sequence
  Description of Artificial Sequence: Synthetic oligonucleotide
agccacccaggguccacag

SEQ ID NO: 3144794 - RNA, 19 nt, Artificial Sequence
  Description of Artificial Sequence: Synthetic oligonucleotide
gccucauggccucagccac

SEQ ID NO: 3144795 - RNA, 19 nt, Artificial Sequence
  Description of Artificial Sequence: Synthetic oligonucleotide
cucccgaaucgaggggugg

SEQ ID NO: 3144796 - RNA, 19 nt, Artificial Sequence
  Description of Artificial Sequence: Synthetic oligonucleotide
gugcacugcuguaggauga

SEQ ID NO: 3144797 - RNA, 19 nt, Artificial Sequence
  Description of Artificial Sequence: Synthetic oligonucleotide
cagaggagguccagccuca

SEQ ID NO: 3144798 - RNA, 19 nt, Artificial Sequence
  Description of Artificial Sequence: Synthetic oligonucleotide
auguccgugcacugcugua

SEQ ID NO: 3144799 - RNA, 19 nt, Artificial Sequence
  Description of Artificial Sequence: Synthetic oligonucleotide
gagagccucagaggagguc

SEQ ID NO: 3144800 - RNA, 19 nt, Artificial Sequence
  Description of Artificial Sequence: Synthetic oligonucleotide
cgugcacugcuguaggaug

SEQ ID NO: 3144801 - RNA, 19 nt, Artificial Sequence
  Description of Artificial Sequence: Synthetic oligonucleotide
caccugguucuggaacacc

SEQ ID NO: 3144802 - RNA, 19 nt, Artificial Sequence
  Description of Artificial Sequence: Synthetic oligonucleotide
agauguccgugcacugcug

SEQ ID NO: 3144803 - RNA, 19 nt, Artificial Sequence
  Description of Artificial Sequence: Synthetic oligonucleotide
ggcagaagucacagugcag

SEQ ID NO: 3144804 - RNA, 19 nt, Artificial Sequence
  Description of Artificial Sequence: Synthetic oligonucleotide
ucguacccucccgaaucga

SEQ ID NO: 3144805 - RNA, 19 nt, Artificial Sequence
  Description of Artificial Sequence: Synthetic oligonucleotide
gcagcggggugggaggugg

SEQ ID NO: 3144806 - RNA, 19 nt, Artificial Sequence
  Description of Artificial Sequence: Synthetic oligonucleotide
aggcgggaagauguccgug

SEQ ID NO: 3144807 - RNA, 19 nt, Artificial Sequence
  Description of Artificial Sequence: Synthetic oligonucleotide
agggguggcagaagucaca

SEQ ID NO: 3144808 - RNA, 19 nt, Artificial Sequence
  Description of Artificial Sequence: Synthetic oligonucleotide
ucagccacccaggguccac

SEQ ID NO: 3144809 - RNA, 19 nt, Artificial Sequence
  Description of Artificial Sequence: Synthetic oligonucleotide
ggaugagcuccaccaccug

SEQ ID NO: 3144810 - RNA, 19 nt, Artificial Sequence
  Description of Artificial Sequence: Synthetic oligonucleotide
gugggagguggagagccuc

SEQ ID NO: 3144811 - RNA, 19 nt, Artificial Sequence
  Description of Artificial Sequence: Synthetic oligonucleotide
cguacccucccgaaucgag

SEQ ID NO: 3144812 - RNA, 19 nt, Artificial Sequence
  Description of Artificial Sequence: Synthetic oligonucleotide
cacccaggguccacaguca

SEQ ID NO: 3144813 - RNA, 19 nt, Artificial Sequence
  Description of Artificial Sequence: Synthetic oligonucleotide
gguccagccucauggccuc

SEQ ID NO: 3144814 - RNA, 19 nt, Artificial Sequence
  Description of Artificial Sequence: Synthetic oligonucleotide
gaggcgggaagauguccgu

SEQ ID NO: 3144815 - RNA, 19 nt, Artificial Sequence
  Description of Artificial Sequence: Synthetic oligonucleotide
agccucagaggagguccag

SEQ ID NO: 3144816 - RNA, 19 nt, Artificial Sequence
  Description of Artificial Sequence: Synthetic oligonucleotide
ccucauggccucagccacc

SEQ ID NO: 3144817 - RNA, 19 nt, Artificial Sequence
  Description of Artificial Sequence: Synthetic oligonucleotide
ugcagcggggugggaggug

SEQ ID NO: 3144818 - RNA, 19 nt, Artificial Sequence
  Description of Artificial Sequence: Synthetic oligonucleotide
ccucagccacccagggucc

SEQ ID NO: 3144819 - RNA, 19 nt, Artificial Sequence
  Description of Artificial Sequence: Synthetic oligonucleotide
gggagguggagagccucag

SEQ ID NO: 3144820 - RNA, 19 nt, Artificial Sequence
  Description of Artificial Sequence: Synthetic oligonucleotide
cucagaggagguccagccu

SEQ ID NO: 3144821 - RNA, 19 nt, Artificial Sequence
  Description of Artificial Sequence: Synthetic oligonucleotide
gcgggaagauguccgugca

SEQ ID NO: 3144822 - RNA, 19 nt, Artificial Sequence
  Description of Artificial Sequence: Synthetic oligonucleotide
ggagguggagagccucaga

SEQ ID NO: 3144823 - RNA, 19 nt, Artificial Sequence
  Description of Artificial Sequence: Synthetic oligonucleotide
caggguccacagucaguga

SEQ ID NO: 3144824 - RNA, 19 nt, Artificial Sequence
  Description of Artificial Sequence: Synthetic oligonucleotide
gccucagaggagguccagc

SEQ ID NO: 3144825 - RNA, 19 nt, Artificial Sequence
  Description of Artificial Sequence: Synthetic oligonucleotide
ccgaaucgagggguggcag

SEQ ID NO: 3144826 - RNA, 19 nt, Artificial Sequence
  Description of Artificial Sequence: Synthetic oligonucleotide
gucagugaggcgggaagau

SEQ ID NO: 3144827 - RNA, 19 nt, Artificial Sequence
  Description of Artificial Sequence: Synthetic oligonucleotide
gcacugcuguaggaugagc

SEQ ID NO: 3144828 - RNA, 19 nt, Artificial Sequence
  Description of Artificial Sequence: Synthetic oligonucleotide
ccucccgaaucgaggggug

SEQ ID NO: 3144829 - RNA, 19 nt, Artificial Sequence
  Description of Artificial Sequence: Synthetic oligonucleotide
agaggagguccagccucau

SEQ ID NO: 3144830 - RNA, 19 nt, Artificial Sequence
  Description of Artificial Sequence: Synthetic oligonucleotide
ggggucgaucguacccucc

SEQ ID NO: 3144831 - RNA, 19 nt, Artificial Sequence
  Description of Artificial Sequence: Synthetic oligonucleotide
cgagggguggcagaaguca

SEQ ID NO: 3144832 - RNA, 19 nt, Artificial Sequence
  Description of Artificial Sequence: Synthetic oligonucleotide
gcuguaggaugagcuccac

SEQ ID NO: 3144833 - RNA, 19 nt, Artificial Sequence
  Description of Artificial Sequence: Synthetic oligonucleotide
ccaccugguucuggaacac

SEQ ID NO: 3144834 - RNA, 19 nt, Artificial Sequence
  Description of Artificial Sequence: Synthetic oligonucleotide
ggggugggagguggagagc

SEQ ID NO: 3144835 - RNA, 19 nt, Artificial Sequence
  Description of Artificial Sequence: Synthetic oligonucleotide
cgaaucgagggguggcaga

SEQ ID NO: 3144836 - RNA, 19 nt, Artificial Sequence
  Description of Artificial Sequence: Synthetic oligonucleotide
cgggaagauguccgugcac

SEQ ID NO: 3144837 - RNA, 19 nt, Artificial Sequence
  Description of Artificial Sequence: Synthetic oligonucleotide
cucagccacccagggucca

SEQ ID NO: 3144838 - RNA, 19 nt, Artificial Sequence
  Description of Artificial Sequence: Synthetic oligonucleotide
acagugcagcgggguggga

SEQ ID NO: 3144839 - RNA, 19 nt, Artificial Sequence
  Description of Artificial Sequence: Synthetic oligonucleotide
gcggggugggagguggaga

SEQ ID NO: 3144840 - RNA, 19 nt, Artificial Sequence
  Description of Artificial Sequence: Synthetic oligonucleotide
cccgaaucgagggguggca

SEQ ID NO: 3144841 - RNA, 19 nt, Artificial Sequence
  Description of Artificial Sequence: Synthetic oligonucleotide
ggccucagccacccagggu

SEQ ID NO: 3144842 - RNA, 19 nt, Artificial Sequence
  Description of Artificial Sequence: Synthetic oligonucleotide
ggguggcagaagucacagu

SEQ ID NO: 3144843 - RNA, 19 nt, Artificial Sequence
  Description of Artificial Sequence: Synthetic oligonucleotide
ggagagccucagaggaggu

SEQ ID NO: 3144844 - RNA, 19 nt, Artificial Sequence
  Description of Artificial Sequence: Synthetic oligonucleotide
ccaccaccugguucuggaa

SEQ ID NO: 3144845 - RNA, 19 nt, Artificial Sequence
  Description of Artificial Sequence: Synthetic oligonucleotide
gugcagcggggugggaggu

SEQ ID NO: 3144846 - RNA, 19 nt, Artificial Sequence
  Description of Artificial Sequence: Synthetic oligonucleotide
guccagccucauggccuca

SEQ ID NO: 3144847 - RNA, 19 nt, Artificial Sequence
  Description of Artificial Sequence: Synthetic oligonucleotide
ggugggagguggagagccu

SEQ ID NO: 3144848 - RNA, 19 nt, Artificial Sequence
  Description of Artificial Sequence: Synthetic oligonucleotide
cccucccgaaucgaggggu

SEQ ID NO: 3144849 - RNA, 19 nt, Artificial Sequence
  Description of Artificial Sequence: Synthetic oligonucleotide
gccacccaggguccacagu

SEQ ID NO: 3144850 - RNA, 19 nt, Artificial Sequence
  Description of Artificial Sequence: Synthetic oligonucleotide
cccaggguccacagucagu

SEQ ID NO: 3144851 - RNA, 19 nt, Artificial Sequence
  Description of Artificial Sequence: Synthetic oligonucleotide
ccgugcacugcuguaggau

SEQ ID NO: 3144852 - RNA, 19 nt, Artificial Sequence
  Description of Artificial Sequence: Synthetic oligonucleotide
cgaucguacccucccgaau

SEQ ID NO: 3144853 - RNA, 19 nt, Artificial Sequence
  Description of Artificial Sequence: Synthetic oligonucleotide
uuuggaaaugucuucgugg

SEQ ID NO: 3144854 - RNA, 19 nt, Artificial Sequence
  Description of Artificial Sequence: Synthetic oligonucleotide
aaugucuucgugguggcac

SEQ ID NO: 3144855 - RNA, 19 nt, Artificial Sequence
  Description of Artificial Sequence: Synthetic oligonucleotide
gaguuuggaaaugucuucg

SEQ ID NO: 3144856 - RNA, 19 nt, Artificial Sequence
  Description of Artificial Sequence: Synthetic oligonucleotide
uuggaaaugucuucguggu

SEQ ID NO: 3144857 - RNA, 19 nt, Artificial Sequence
  Description of Artificial Sequence: Synthetic oligonucleotide
ggaaaugucuucguggugg

SEQ ID NO: 3144858 - RNA, 19 nt, Artificial Sequence
  Description of Artificial Sequence: Synthetic oligonucleotide
aaagugaguuuggaaaugu

SEQ ID NO: 3144859 - RNA, 19 nt, Artificial Sequence
  Description of Artificial Sequence: Synthetic oligonucleotide
ucuucgugguggcacacgc

SEQ ID NO: 3144860 - RNA, 19 nt, Artificial Sequence
  Description of Artificial Sequence: Synthetic oligonucleotide
uucgugguggcacacgccu

SEQ ID NO: 3144861 - RNA, 19 nt, Artificial Sequence
  Description of Artificial Sequence: Synthetic oligonucleotide
uaaagugaguuuggaaaug

SEQ ID NO: 3144862 - RNA, 19 nt, Artificial Sequence
  Description of Artificial Sequence: Synthetic oligonucleotide
ccaaaagccacagagaaac

SEQ ID NO: 3144863 - RNA, 19 nt, Artificial Sequence
  Description of Artificial Sequence: Synthetic oligonucleotide
gccuccaaaagccacagag

SEQ ID NO: 3144864 - RNA, 19 nt, Artificial Sequence
  Description of Artificial Sequence: Synthetic oligonucleotide
agugaguuuggaaaugucu

SEQ ID NO: 3144865 - RNA, 19 nt, Artificial Sequence
  Description of Artificial Sequence: Synthetic oligonucleotide
guuuggaaaugucuucgug

SEQ ID NO: 3144866 - RNA, 19 nt, Artificial Sequence
  Description of Artificial Sequence: Synthetic oligonucleotide
gaaaugucuucgugguggc

SEQ ID NO: 3144867 - RNA, 19 nt, Artificial Sequence
  Description of Artificial Sequence: Synthetic oligonucleotide
aagugaguuuggaaauguc

SEQ ID NO: 3144868 - RNA, 19 nt, Artificial Sequence
  Description of Artificial Sequence: Synthetic oligonucleotide
cuccaaaagccacagagaa

SEQ ID NO: 3144869 - RNA, 19 nt, Artificial Sequence
  Description of Artificial Sequence: Synthetic oligonucleotide
uccaaaagccacagagaaa

SEQ ID NO: 3144870 - RNA, 19 nt, Artificial Sequence
  Description of Artificial Sequence: Synthetic oligonucleotide
uggaaaugucuucguggug

SEQ ID NO: 3144871 - RNA, 19 nt, Artificial Sequence
  Description of Artificial Sequence: Synthetic oligonucleotide
caaaagccacagagaaacc

SEQ ID NO: 3144872 - RNA, 19 nt, Artificial Sequence
  Description of Artificial Sequence: Synthetic oligonucleotide
gacagccuccaaaagccac

SEQ ID NO: 3144873 - RNA, 19 nt, Artificial Sequence
  Description of Artificial Sequence: Synthetic oligonucleotide
cuucgugguggcacacgcc

SEQ ID NO: 3144874 - RNA, 19 nt, Artificial Sequence
  Description of Artificial Sequence: Synthetic oligonucleotide
augucuucgugguggcaca

SEQ ID NO: 3144875 - RNA, 19 nt, Artificial Sequence
  Description of Artificial Sequence: Synthetic oligonucleotide
aaaugucuucgugguggca

SEQ ID NO: 3144876 - RNA, 19 nt, Artificial Sequence
  Description of Artificial Sequence: Synthetic oligonucleotide
aggcuggcggaucucugug

SEQ ID NO: 3144877 - RNA, 19 nt, Artificial Sequence
  Description of Artificial Sequence: Synthetic oligonucleotide
gcuggcggaucucugugag

SEQ ID NO: 3144878 - RNA, 19 nt, Artificial Sequence
  Description of Artificial Sequence: Synthetic oligonucleotide
acagccuccaaaagccaca

SEQ ID NO: 3144879 - RNA, 19 nt, Artificial Sequence
  Description of Artificial Sequence: Synthetic oligonucleotide
gucuucgugguggcacacg

SEQ ID NO: 3144880 - RNA, 19 nt, Artificial Sequence
  Description of Artificial Sequence: Synthetic oligonucleotide
cagccuccaaaagccacag

SEQ ID NO: 3144881 - RNA, 19 nt, Artificial Sequence
  Description of Artificial Sequence: Synthetic oligonucleotide
ugucuucgugguggcacac

SEQ ID NO: 3144882 - RNA, 19 nt, Artificial Sequence
  Description of Artificial Sequence: Synthetic oligonucleotide
gaggcuggcggaucucugu

SEQ ID NO: 3144883 - RNA, 19 nt, Artificial Sequence
  Description of Artificial Sequence: Synthetic oligonucleotide
ccuccaaaagccacagaga

SEQ ID NO: 3144884 - RNA, 19 nt, Artificial Sequence
  Description of Artificial Sequence: Synthetic oligonucleotide
agccuccaaaagccacaga

SEQ ID NO: 3144885 - RNA, 19 nt, Artificial Sequence
  Description of Artificial Sequence: Synthetic oligonucleotide
ggcuggcggaucucuguga

SEQ ID NO: 3144886 - RNA, 19 nt, Artificial Sequence
  Description of Artificial Sequence: Synthetic oligonucleotide
cuggcggaucucugugagu

SEQ ID NO: 3144887 - RNA, 19 nt, Artificial Sequence
  Description of Artificial Sequence: Synthetic oligonucleotide
ucuacgaagaaaacaaaga

SEQ ID NO: 3144888 - RNA, 19 nt, Artificial Sequence
  Description of Artificial Sequence: Synthetic oligonucleotide
cucugugugauuucgaggc

SEQ ID NO: 3144889 - RNA, 19 nt, Artificial Sequence
  Description of Artificial Sequence: Synthetic oligonucleotide
ucucugugugauuucgagg

SEQ ID NO: 3144890 - RNA, 19 nt, Artificial Sequence
  Description of Artificial Sequence: Synthetic oligonucleotide
ugugauuucgaggccagcc

SEQ ID NO: 3144891 - RNA, 19 nt, Artificial Sequence
  Description of Artificial Sequence: Synthetic oligonucleotide
cuccaaugcacagagaaac

SEQ ID NO: 3144892 - RNA, 19 nt, Artificial Sequence
  Description of Artificial Sequence: Synthetic oligonucleotide
gucuacgaagaaaacaaag

SEQ ID NO: 3144893 - RNA, 19 nt, Artificial Sequence
  Description of Artificial Sequence: Synthetic oligonucleotide
aaugcacagagaaacccug

SEQ ID NO: 3144894 - RNA, 19 nt, Artificial Sequence
  Description of Artificial Sequence: Synthetic oligonucleotide
ugauuucgaggccagccug

SEQ ID NO: 3144895 - RNA, 19 nt, Artificial Sequence
  Description of Artificial Sequence: Synthetic oligonucleotide
cugucuacgaagaaaacaa

SEQ ID NO: 3144896 - RNA, 19 nt, Artificial Sequence
  Description of Artificial Sequence: Synthetic oligonucleotide
ugugugauuucgaggccag

SEQ ID NO: 3144897 - RNA, 19 nt, Artificial Sequence
  Description of Artificial Sequence: Synthetic oligonucleotide
cuacgaagaaaacaaagaa

SEQ ID NO: 3144898 - RNA, 19 nt, Artificial Sequence
  Description of Artificial Sequence: Synthetic oligonucleotide
gauagccuccaaugcacag

SEQ ID NO: 3144899 - RNA, 19 nt, Artificial Sequence
  Description of Artificial Sequence: Synthetic oligonucleotide
aggauagccuccaaugcac

SEQ ID NO: 3144900 - RNA, 19 nt, Artificial Sequence
  Description of Artificial Sequence: Synthetic oligonucleotide
gauuucgaggccagccugg

SEQ ID NO: 3144901 - RNA, 19 nt, Artificial Sequence
  Description of Artificial Sequence: Synthetic oligonucleotide
ucugugugauuucgaggcc

SEQ ID NO: 3144902 - RNA, 19 nt, Artificial Sequence
  Description of Artificial Sequence: Synthetic oligonucleotide
ugucuacgaagaaaacaaa

SEQ ID NO: 3144903 - RNA, 19 nt, Artificial Sequence
  Description of Artificial Sequence: Synthetic oligonucleotide
gaaacccugucuacgaaga

SEQ ID NO: 3144904 - RNA, 19 nt, Artificial Sequence
  Description of Artificial Sequence: Synthetic oligonucleotide
aacccugucuacgaagaaa

SEQ ID NO: 3144905 - RNA, 19 nt, Artificial Sequence
  Description of Artificial Sequence: Synthetic oligonucleotide
ggaucucugugugauuucg

SEQ ID NO: 3144906 - RNA, 19 nt, Artificial Sequence
  Description of Artificial Sequence: Synthetic oligonucleotide
caggauagccuccaaugca

SEQ ID NO: 3144907 - RNA, 19 nt, Artificial Sequence
  Description of Artificial Sequence: Synthetic oligonucleotide
auagccuccaaugcacaga

SEQ ID NO: 3144908 - RNA, 19 nt, Artificial Sequence
  Description of Artificial Sequence: Synthetic oligonucleotide
ccaaugcacagagaaaccc

SEQ ID NO: 3144909 - RNA, 19 nt, Artificial Sequence
  Description of Artificial Sequence: Synthetic oligonucleotide
acccugucuacgaagaaaa

SEQ ID NO: 3144910 - RNA, 19 nt, Artificial Sequence
  Description of Artificial Sequence: Synthetic oligonucleotide
gccuccaaugcacagagaa

SEQ ID NO: 3144911 - RNA, 19 nt, Artificial Sequence
  Description of Artificial Sequence: Synthetic oligonucleotide
caaugcacagagaaacccu

SEQ ID NO: 3144912 - RNA, 19 nt, Artificial Sequence
  Description of Artificial Sequence: Synthetic oligonucleotide
gaucucugugugauuucga

SEQ ID NO: 3144913 - RNA, 19 nt, Artificial Sequence
  Description of Artificial Sequence: Synthetic oligonucleotide
cugugugauuucgaggcca

SEQ ID NO: 3144914 - RNA, 19 nt, Artificial Sequence
  Description of Artificial Sequence: Synthetic oligonucleotide
gugauuucgaggccagccu

SEQ ID NO: 3144915 - RNA, 19 nt, Artificial Sequence
  Description of Artificial Sequence: Synthetic oligonucleotide
ccugucuacgaagaaaaca

SEQ ID NO: 3144916 - RNA, 19 nt, Artificial Sequence
  Description of Artificial Sequence: Synthetic oligonucleotide
auuucgaggccagccuggu

SEQ ID NO: 3144917 - RNA, 19 nt, Artificial Sequence
  Description of Artificial Sequence: Synthetic oligonucleotide
aggcggaucucugugugau

SEQ ID NO: 3144918 - RNA, 19 nt, Artificial Sequence
  Description of Artificial Sequence: Synthetic oligonucleotide
gugugauuucgaggccagc

SEQ ID NO: 3144919 - RNA, 19 nt, Artificial Sequence
  Description of Artificial Sequence: Synthetic oligonucleotide
caggcggaucucuguguga

SEQ ID NO: 3144920 - RNA, 19 nt, Artificial Sequence
  Description of Artificial Sequence: Synthetic oligonucleotide
cccugucuacgaagaaaac

SEQ ID NO: 3144921 - RNA, 19 nt, Artificial Sequence
  Description of Artificial Sequence: Synthetic oligonucleotide
ggauagccuccaaugcaca

SEQ ID NO: 3144922 - RNA, 19 nt, Artificial Sequence
  Description of Artificial Sequence: Synthetic oligonucleotide
ccuccaaugcacagagaaa

SEQ ID NO: 3144923 - RNA, 19 nt, Artificial Sequence
  Description of Artificial Sequence: Synthetic oligonucleotide
cggaucucugugugauuuc

SEQ ID NO: 3144924 - RNA, 19 nt, Artificial Sequence
  Description of Artificial Sequence: Synthetic oligonucleotide
aagaggaugaggaaagcac

SEQ ID NO: 3144925 - RNA, 19 nt, Artificial Sequence
  Description of Artificial Sequence: Synthetic oligonucleotide
gaaagcaccaaugaacuug

SEQ ID NO: 3144926 - RNA, 19 nt, Artificial Sequence
  Description of Artificial Sequence: Synthetic oligonucleotide
aaagcaccaaugaacuugg

SEQ ID NO: 3144927 - RNA, 19 nt, Artificial Sequence
  Description of Artificial Sequence: Synthetic oligonucleotide
gaugaggaaagcaccaaug

SEQ ID NO: 3144928 - RNA, 19 nt, Artificial Sequence
  Description of Artificial Sequence: Synthetic oligonucleotide
aggaaagcaccaaugaacu

SEQ ID NO: 3144929 - RNA, 19 nt, Artificial Sequence
  Description of Artificial Sequence: Synthetic oligonucleotide
aggaugaggaaagcaccaa

SEQ ID NO: 3144930 - RNA, 19 nt, Artificial Sequence
  Description of Artificial Sequence: Synthetic oligonucleotide
ggaaagcaccaaugaacuu

SEQ ID NO: 3144931 - RNA, 19 nt, Artificial Sequence
  Description of Artificial Sequence: Synthetic oligonucleotide
uaauugaagacuacugugg

SEQ ID NO: 3144932 - RNA, 19 nt, Artificial Sequence
  Description of Artificial Sequence: Synthetic oligonucleotide
uguaauugaagacuacugu

SEQ ID NO: 3144933 - RNA, 19 nt, Artificial Sequence
  Description of Artificial Sequence: Synthetic oligonucleotide
acugugguaagacuuuacc

SEQ ID NO: 3144934 - RNA, 19 nt, Artificial Sequence
  Description of Artificial Sequence: Synthetic oligonucleotide
uuuccuacgguaucuaucc

SEQ ID NO: 3144935 - RNA, 19 nt, Artificial Sequence
  Description of Artificial Sequence: Synthetic oligonucleotide
ugugguaagacuuuaccac

SEQ ID NO: 3144936 - RNA, 19 nt, Artificial Sequence
  Description of Artificial Sequence: Synthetic oligonucleotide
uuuauguaauugaagacua

SEQ ID NO: 3144937 - RNA, 19 nt, Artificial Sequence
  Description of Artificial Sequence: Synthetic oligonucleotide
uuuugaagagugcugugcc

SEQ ID NO: 3144938 - RNA, 19 nt, Artificial Sequence
  Description of Artificial Sequence: Synthetic oligonucleotide
guaauugaagacuacugug

SEQ ID NO: 3144939 - RNA, 19 nt, Artificial Sequence
  Description of Artificial Sequence: Synthetic oligonucleotide
aauugaagacuacuguggu

SEQ ID NO: 3144940 - RNA, 19 nt, Artificial Sequence
  Description of Artificial Sequence: Synthetic oligonucleotide
uguccuuuuauguaauuga

SEQ ID NO: 3144941 - RNA, 19 nt, Artificial Sequence
  Description of Artificial Sequence: Synthetic oligonucleotide
ucuaugcuuuugaagagug

SEQ ID NO: 3144942 - RNA, 19 nt, Artificial Sequence
  Description of Artificial Sequence: Synthetic oligonucleotide
uaugcuuuugaagagugcu

SEQ ID NO: 3144943 - RNA, 19 nt, Artificial Sequence
  Description of Artificial Sequence: Synthetic oligonucleotide
uuugaagagugcugugccg

SEQ ID NO: 3144944 - RNA, 19 nt, Artificial Sequence
  Description of Artificial Sequence: Synthetic oligonucleotide
uugaagacuacugugguaa

SEQ ID NO: 3144945 - RNA, 19 nt, Artificial Sequence
  Description of Artificial Sequence: Synthetic oligonucleotide
  modified_base (11)..(11): a, c, u, g, unknown or other
ugcugugccgngcaaaggc

SEQ ID NO: 3144946 - RNA, 19 nt, Artificial Sequence
  Description of Artificial Sequence: Synthetic oligonucleotide
uccuucuaugcuuuugaag

SEQ ID NO: 3144947 - RNA, 19 nt, Artificial Sequence
  Description of Artificial Sequence: Synthetic oligonucleotide
  modified_base (16)..(16): a, c, u, g, unknown or other
aagagugcugugccgngca

SEQ ID NO: 3144948 - RNA, 19 nt, Artificial Sequence
  Description of Artificial Sequence: Synthetic oligonucleotide
uguccuucuaugcuuuuga

SEQ ID NO: 3144949 - RNA, 19 nt, Artificial Sequence
  Description of Artificial Sequence: Synthetic oligonucleotide
guaagacuuuaccacacug

SEQ ID NO: 3144950 - RNA, 19 nt, Artificial Sequence
  Description of Artificial Sequence: Synthetic oligonucleotide
cuuuugaagagugcugugc

SEQ ID NO: 3144951 - RNA, 19 nt, Artificial Sequence
  Description of Artificial Sequence: Synthetic oligonucleotide
acgguaucuauccauuaug

SEQ ID NO: 3144952 - RNA, 19 nt, Artificial Sequence
  Description of Artificial Sequence: Synthetic oligonucleotide
cuucuaugcuuuugaagag

SEQ ID NO: 3144953 - RNA, 19 nt, Artificial Sequence
  Description of Artificial Sequence: Synthetic oligonucleotide
ugcuuuugaagagugcugu

SEQ ID NO: 3144954 - RNA, 19 nt, Artificial Sequence
  Description of Artificial Sequence: Synthetic oligonucleotide
cuuuccuacgguaucuauc

SEQ ID NO: 3144955 - RNA, 19 nt, Artificial Sequence
  Description of Artificial Sequence: Synthetic oligonucleotide
uauguguccuucuaugcuu

SEQ ID NO: 3144956 - RNA, 19 nt, Artificial Sequence
  Description of Artificial Sequence: Synthetic oligonucleotide
  modified_base (19)..(19): a, c, u, g, unknown or other
uugaagagugcugugccgn

SEQ ID NO: 3144957 - RNA, 19 nt, Artificial Sequence
  Description of Artificial Sequence: Synthetic oligonucleotide
ccuucuaugcuuuugaaga

SEQ ID NO: 3144958 - RNA, 19 nt, Artificial Sequence
  Description of Artificial Sequence: Synthetic oligonucleotide
uacgguaucuauccauuau

SEQ ID NO: 3144959 - RNA, 19 nt, Artificial Sequence
  Description of Artificial Sequence: Synthetic oligonucleotide
  modified_base (18)..(18): a, c, u, g, unknown or other
ugaagagugcugugccgng

SEQ ID NO: 3144960 - RNA, 19 nt, Artificial Sequence
  Description of Artificial Sequence: Synthetic oligonucleotide
cuaugcuuuugaagagugc

SEQ ID NO: 3144961 - RNA, 19 nt, Artificial Sequence
  Description of Artificial Sequence: Synthetic oligonucleotide
ugaagacuacugugguaag

SEQ ID NO: 3144962 - RNA, 19 nt, Artificial Sequence
  Description of Artificial Sequence: Synthetic oligonucleotide
cugugguaagacuuuacca

SEQ ID NO: 3144963 - RNA, 19 nt, Artificial Sequence
  Description of Artificial Sequence: Synthetic oligonucleotide
uucuaugcuuuugaagagu

SEQ ID NO: 3144964 - RNA, 19 nt, Artificial Sequence
  Description of Artificial Sequence: Synthetic oligonucleotide
gugguaagacuuuaccaca

SEQ ID NO: 3144965 - RNA, 19 nt, Artificial Sequence
  Description of Artificial Sequence: Synthetic oligonucleotide
guguccuuuuauguaauug

SEQ ID NO: 3144966 - RNA, 19 nt, Artificial Sequence
  Description of Artificial Sequence: Synthetic oligonucleotide
uccuacgguaucuauccau

SEQ ID NO: 3144967 - RNA, 19 nt, Artificial Sequence
  Description of Artificial Sequence: Synthetic oligonucleotide
uacugugguaagacuuuac

SEQ ID NO: 3144968 - RNA, 19 nt, Artificial Sequence
  Description of Artificial Sequence: Synthetic oligonucleotide
  modified_base (13)..(13): a, c, u, g, unknown or other
agugcugugccgngcaaag

SEQ ID NO: 3144969 - RNA, 19 nt, Artificial Sequence
  Description of Artificial Sequence: Synthetic oligonucleotide
gaagacuacugugguaaga

SEQ ID NO: 3144970 - RNA, 19 nt, Artificial Sequence
  Description of Artificial Sequence: Synthetic oligonucleotide
  modified_base (17)..(17): a, c, u, g, unknown or other
gaagagugcugugccgngc

SEQ ID NO: 3144971 - RNA, 19 nt, Artificial Sequence
  Description of Artificial Sequence: Synthetic oligonucleotide
  modified_base (2)..(2): a, c, u, g, unknown or other
gngcaaaggcuuucccaca

SEQ ID NO: 3144972 - RNA, 19 nt, Artificial Sequence
  Description of Artificial Sequence: Synthetic oligonucleotide
uuccuacgguaucuaucca

SEQ ID NO: 3144973 - RNA, 19 nt, Artificial Sequence
  Description of Artificial Sequence: Synthetic oligonucleotide
  modified_base (8)..(8): a, c, u, g, unknown or other
ugugccgngcaaaggcuuu

SEQ ID NO: 3144974 - RNA, 19 nt, Artificial Sequence
  Description of Artificial Sequence: Synthetic oligonucleotide
  modified_base (3)..(3): a, c, u, g, unknown or other
cgngcaaaggcuuucccac

SEQ ID NO: 3144975 - RNA, 19 nt, Artificial Sequence
  Description of Artificial Sequence: Synthetic oligonucleotide
uguguccuuuuauguaauu

SEQ ID NO: 3144976 - RNA, 19 nt, Artificial Sequence
  Description of Artificial Sequence: Synthetic oligonucleotide
  modified_base (6)..(6): a, c, u, g, unknown or other
ugccgngcaaaggcuuucc

SEQ ID NO: 3144977 - RNA, 19 nt, Artificial Sequence
  Description of Artificial Sequence: Synthetic oligonucleotide
  modified_base (14)..(14): a, c, u, g, unknown or other
gagugcugugccgngcaaa

SEQ ID NO: 3144978 - RNA, 19 nt, Artificial Sequence
  Description of Artificial Sequence: Synthetic oligonucleotide
  modified_base (12)..(12): a, c, u, g, unknown or other
gugcugugccgngcaaagg

SEQ ID NO: 3144979 - RNA, 19 nt, Artificial Sequence
  Description of Artificial Sequence: Synthetic oligonucleotide
guccuucuaugcuuuugaa

SEQ ID NO: 3144980 - RNA, 19 nt, Artificial Sequence
  Description of Artificial Sequence: Synthetic oligonucleotide
cuacgguaucuauccauua

SEQ ID NO: 3144981 - RNA, 19 nt, Artificial Sequence
  Description of Artificial Sequence: Synthetic oligonucleotide
  modified_base (15)..(15): a, c, u, g, unknown or other
agagugcugugccgngcaa

SEQ ID NO: 3144982 - RNA, 19 nt, Artificial Sequence
  Description of Artificial Sequence: Synthetic oligonucleotide
  modified_base (4)..(4): a, c, u, g, unknown or other
ccgngcaaaggcuuuccca

SEQ ID NO: 3144983 - RNA, 19 nt, Artificial Sequence
  Description of Artificial Sequence: Synthetic oligonucleotide
gguaagacuuuaccacacu

SEQ ID NO: 3144984 - RNA, 19 nt, Artificial Sequence
  Description of Artificial Sequence: Synthetic oligonucleotide
  modified_base (5)..(5): a, c, u, g, unknown or other
gccgngcaaaggcuuuccc

SEQ ID NO: 3144985 - RNA, 19 nt, Artificial Sequence
  Description of Artificial Sequence: Synthetic oligonucleotide
  modified_base (7)..(7): a, c, u, g, unknown or other
gugccgngcaaaggcuuuc

SEQ ID NO: 3144986 - RNA, 19 nt, Artificial Sequence
  Description of Artificial Sequence: Synthetic oligonucleotide
cuacugugguaagacuuua

SEQ ID NO: 3144987 - RNA, 19 nt, Artificial Sequence
  Description of Artificial Sequence: Synthetic oligonucleotide
  modified_base (9)..(9): a, c, u, g, unknown or other
cugugccgngcaaaggcuu

SEQ ID NO: 3144988 - RNA, 19 nt, Artificial Sequence
  Description of Artificial Sequence: Synthetic oligonucleotide
ccuacgguaucuauccauu

SEQ ID NO: 3144989 - RNA, 19 nt, Artificial Sequence
  Description of Artificial Sequence: Synthetic oligonucleotide
aguaggaauagccauccac

SEQ ID NO: 3144990 - RNA, 19 nt, Artificial Sequence
  Description of Artificial Sequence: Synthetic oligonucleotide
gguacuaugccuaagaccc

SEQ ID NO: 3144991 - RNA, 19 nt, Artificial Sequence
  Description of Artificial Sequence: Synthetic oligonucleotide
agagcucacauccacacag

SEQ ID NO: 3144992 - RNA, 19 nt, Artificial Sequence
  Description of Artificial Sequence: Synthetic oligonucleotide
ggaauagccauccacagag

SEQ ID NO: 3144993 - RNA, 19 nt, Artificial Sequence
  Description of Artificial Sequence: Synthetic oligonucleotide
aauagccauccacagagcu

SEQ ID NO: 3144994 - RNA, 19 nt, Artificial Sequence
  Description of Artificial Sequence: Synthetic oligonucleotide
acagagcucacauccacac

SEQ ID NO: 3144995 - RNA, 19 nt, Artificial Sequence
  Description of Artificial Sequence: Synthetic oligonucleotide
ucugguacuaugccuaaga

SEQ ID NO: 3144996 - RNA, 19 nt, Artificial Sequence
  Description of Artificial Sequence: Synthetic oligonucleotide
aacaaaggcucugggaagg

SEQ ID NO: 3144997 - RNA, 19 nt, Artificial Sequence
  Description of Artificial Sequence: Synthetic oligonucleotide
aaggaguaggaauagccau

SEQ ID NO: 3144998 - RNA, 19 nt, Artificial Sequence
  Description of Artificial Sequence: Synthetic oligonucleotide
ugguacuaugccuaagacc

SEQ ID NO: 3144999 - RNA, 19 nt, Artificial Sequence
  Description of Artificial Sequence: Synthetic oligonucleotide
uaagacccuacucugggga

SEQ ID NO: 3145000 - RNA, 19 nt, Artificial Sequence
  Description of Artificial Sequence: Synthetic oligonucleotide
uguucugguacuaugccua

SEQ ID NO: 3145001 - RNA, 19 nt, Artificial Sequence
  Description of Artificial Sequence: Synthetic oligonucleotide
ucugggaaggcuguucugg

SEQ ID NO: 3145002 - RNA, 19 nt, Artificial Sequence
  Description of Artificial Sequence: Synthetic oligonucleotide
uaggaauagccauccacag

SEQ ID NO: 3145003 - RNA, 19 nt, Artificial Sequence
  Description of Artificial Sequence: Synthetic oligonucleotide
uacaggcacaccaaggagu

SEQ ID NO: 3145004 - RNA, 19 nt, Artificial Sequence
  Description of Artificial Sequence: Synthetic oligonucleotide
aagacccuacucuggggac

SEQ ID NO: 3145005 - RNA, 19 nt, Artificial Sequence
  Description of Artificial Sequence: Synthetic oligonucleotide
augccuaagacccuacucu

SEQ ID NO: 3145006 - RNA, 19 nt, Artificial Sequence
  Description of Artificial Sequence: Synthetic oligonucleotide
ucacauccacacaggaagg

SEQ ID NO: 3145007 - RNA, 19 nt, Artificial Sequence
  Description of Artificial Sequence: Synthetic oligonucleotide
cuggaggaaaucugaaacc

SEQ ID NO: 3145008 - RNA, 19 nt, Artificial Sequence
  Description of Artificial Sequence: Synthetic oligonucleotide
uaugccuaagacccuacuc

SEQ ID NO: 3145009 - RNA, 19 nt, Artificial Sequence
  Description of Artificial Sequence: Synthetic oligonucleotide
uggaggaaaucugaaaccu

SEQ ID NO: 3145010 - RNA, 19 nt, Artificial Sequence
  Description of Artificial Sequence: Synthetic oligonucleotide
uagccauccacagagcuca

SEQ ID NO: 3145011 - RNA, 19 nt, Artificial Sequence
  Description of Artificial Sequence: Synthetic oligonucleotide
uggaacaaaggcucuggga

SEQ ID NO: 3145012 - RNA, 19 nt, Artificial Sequence
  Description of Artificial Sequence: Synthetic oligonucleotide
gucgggguggaacaaaggc

SEQ ID NO: 3145013 - RNA, 19 nt, Artificial Sequence
  Description of Artificial Sequence: Synthetic oligonucleotide
ucgggguggaacaaaggcu

SEQ ID NO: 3145014 - RNA, 19 nt, Artificial Sequence
  Description of Artificial Sequence: Synthetic oligonucleotide
gcuggaggaaaucugaaac

SEQ ID NO: 3145015 - RNA, 19 nt, Artificial Sequence
  Description of Artificial Sequence: Synthetic oligonucleotide
aaaggcucugggaaggcug

SEQ ID NO: 3145016 - RNA, 19 nt, Artificial Sequence
  Description of Artificial Sequence: Synthetic oligonucleotide
ggaacaaaggcucugggaa

SEQ ID NO: 3145017 - RNA, 19 nt, Artificial Sequence
  Description of Artificial Sequence: Synthetic oligonucleotide
ucucuaggggugaaggguc

SEQ ID NO: 3145018 - RNA, 19 nt, Artificial Sequence
  Description of Artificial Sequence: Synthetic oligonucleotide
ugccuaagacccuacucug

SEQ ID NO: 3145019 - RNA, 19 nt, Artificial Sequence
  Description of Artificial Sequence: Synthetic oligonucleotide
guaggaauagccauccaca

SEQ ID NO: 3145020 - RNA, 19 nt, Artificial Sequence
  Description of Artificial Sequence: Synthetic oligonucleotide
aggcacaccaaggaguagg

SEQ ID NO: 3145021 - RNA, 19 nt, Artificial Sequence
  Description of Artificial Sequence: Synthetic oligonucleotide
cauccacacaggaaggcug

SEQ ID NO: 3145022 - RNA, 19 nt, Artificial Sequence
  Description of Artificial Sequence: Synthetic oligonucleotide
cuaagacccuacucugggg

SEQ ID NO: 3145023 - RNA, 19 nt, Artificial Sequence
  Description of Artificial Sequence: Synthetic oligonucleotide
ucuggggacgcuacaggca

SEQ ID NO: 3145024 - RNA, 19 nt, Artificial Sequence
  Description of Artificial Sequence: Synthetic oligonucleotide
acucuggggacgcuacagg

SEQ ID NO: 3145025 - RNA, 19 nt, Artificial Sequence
  Description of Artificial Sequence: Synthetic oligonucleotide
aaggcuggaggaaaucuga

SEQ ID NO: 3145026 - RNA, 19 nt, Artificial Sequence
  Description of Artificial Sequence: Synthetic oligonucleotide
caaggaguaggaauagcca

SEQ ID NO: 3145027 - RNA, 19 nt, Artificial Sequence
  Description of Artificial Sequence: Synthetic oligonucleotide
cucuggggacgcuacaggc

SEQ ID NO: 3145028 - RNA, 19 nt, Artificial Sequence
  Description of Artificial Sequence: Synthetic oligonucleotide
acacaggaaggcuggagga

SEQ ID NO: 3145029 - RNA, 19 nt, Artificial Sequence
  Description of Artificial Sequence: Synthetic oligonucleotide
cuacaggcacaccaaggag

SEQ ID NO: 3145030 - RNA, 19 nt, Artificial Sequence
  Description of Artificial Sequence: Synthetic oligonucleotide
aggaguaggaauagccauc

SEQ ID NO: 3145031 - RNA, 19 nt, Artificial Sequence
  Description of Artificial Sequence: Synthetic oligonucleotide
cugguacuaugccuaagac

SEQ ID NO: 3145032 - RNA, 19 nt, Artificial Sequence
  Description of Artificial Sequence: Synthetic oligonucleotide
aggaauagccauccacaga

SEQ ID NO: 3145033 - RNA, 19 nt, Artificial Sequence
  Description of Artificial Sequence: Synthetic oligonucleotide
gaagggucgggguggaaca

SEQ ID NO: 3145034 - RNA, 19 nt, Artificial Sequence
  Description of Artificial Sequence: Synthetic oligonucleotide
auagccauccacagagcuc

SEQ ID NO: 3145035 - RNA, 19 nt, Artificial Sequence
  Description of Artificial Sequence: Synthetic oligonucleotide
uacucuggggacgcuacag

SEQ ID NO: 3145036 - RNA, 19 nt, Artificial Sequence
  Description of Artificial Sequence: Synthetic oligonucleotide
ugaagggucgggguggaac

SEQ ID NO: 3145037 - RNA, 19 nt, Artificial Sequence
  Description of Artificial Sequence: Synthetic oligonucleotide
uccacagagcucacaucca

SEQ ID NO: 3145038 - RNA, 19 nt, Artificial Sequence
  Description of Artificial Sequence: Synthetic oligonucleotide
cucuaggggugaagggucg

SEQ ID NO: 3145039 - RNA, 19 nt, Artificial Sequence
  Description of Artificial Sequence: Synthetic oligonucleotide
acaaaggcucugggaaggc

SEQ ID NO: 3145040 - RNA, 19 nt, Artificial Sequence
  Description of Artificial Sequence: Synthetic oligonucleotide
ccuaagacccuacucuggg

SEQ ID NO: 3145041 - RNA, 19 nt, Artificial Sequence
  Description of Artificial Sequence: Synthetic oligonucleotide
guggccacggccucucuag

SEQ ID NO: 3145042 - RNA, 19 nt, Artificial Sequence
  Description of Artificial Sequence: Synthetic oligonucleotide
cuggggacgcuacaggcac

SEQ ID NO: 3145043 - RNA, 19 nt, Artificial Sequence
  Description of Artificial Sequence: Synthetic oligonucleotide
ggaguaggaauagccaucc

SEQ ID NO: 3145044 - RNA, 19 nt, Artificial Sequence
  Description of Artificial Sequence: Synthetic oligonucleotide
uaggggugaagggucgggg

SEQ ID NO: 3145045 - RNA, 19 nt, Artificial Sequence
  Description of Artificial Sequence: Synthetic oligonucleotide
auccacacaggaaggcugg

SEQ ID NO: 3145046 - RNA, 19 nt, Artificial Sequence
  Description of Artificial Sequence: Synthetic oligonucleotide
gguggaacaaaggcucugg

SEQ ID NO: 3145047 - RNA, 19 nt, Artificial Sequence
  Description of Artificial Sequence: Synthetic oligonucleotide
aggaaaucugaaaccuaag

SEQ ID NO: 3145048 - RNA, 19 nt, Artificial Sequence
  Description of Artificial Sequence: Synthetic oligonucleotide
ucuaggggugaagggucgg

SEQ ID NO: 3145049 - RNA, 19 nt, Artificial Sequence
  Description of Artificial Sequence: Synthetic oligonucleotide
aggcuguucugguacuaug

SEQ ID NO: 3145050 - RNA, 19 nt, Artificial Sequence
  Description of Artificial Sequence: Synthetic oligonucleotide
gcuacaggcacaccaagga

SEQ ID NO: 3145051 - RNA, 19 nt, Artificial Sequence
  Description of Artificial Sequence: Synthetic oligonucleotide
gggaaggcuguucugguac

SEQ ID NO: 3145052 - RNA, 19 nt, Artificial Sequence
  Description of Artificial Sequence: Synthetic oligonucleotide
ggaaaucugaaaccuaagu

SEQ ID NO: 3145053 - RNA, 19 nt, Artificial Sequence
  Description of Artificial Sequence: Synthetic oligonucleotide
gcuguucugguacuaugcc

SEQ ID NO: 3145054 - RNA, 19 nt, Artificial Sequence
  Description of Artificial Sequence: Synthetic oligonucleotide
agacccuacucuggggacg

SEQ ID NO: 3145055 - RNA, 19 nt, Artificial Sequence
  Description of Artificial Sequence: Synthetic oligonucleotide
gagcucacauccacacagg

SEQ ID NO: 3145056 - RNA, 19 nt, Artificial Sequence
  Description of Artificial Sequence: Synthetic oligonucleotide
acuaugccuaagacccuac

SEQ ID NO: 3145057 - RNA, 19 nt, Artificial Sequence
  Description of Artificial Sequence: Synthetic oligonucleotide
acauccacacaggaaggcu

SEQ ID NO: 3145058 - RNA, 19 nt, Artificial Sequence
  Description of Artificial Sequence: Synthetic oligonucleotide
acgcuacaggcacaccaag

SEQ ID NO: 3145059 - RNA, 19 nt, Artificial Sequence
  Description of Artificial Sequence: Synthetic oligonucleotide
gaauagccauccacagagc

SEQ ID NO: 3145060 - RNA, 19 nt, Artificial Sequence
  Description of Artificial Sequence: Synthetic oligonucleotide
uacuaugccuaagacccua

SEQ ID NO: 3145061 - RNA, 19 nt, Artificial Sequence
  Description of Artificial Sequence: Synthetic oligonucleotide
uucugguacuaugccuaag

SEQ ID NO: 3145062 - RNA, 19 nt, Artificial Sequence
  Description of Artificial Sequence: Synthetic oligonucleotide
aggaaggcuggaggaaauc

SEQ ID NO: 3145063 - RNA, 19 nt, Artificial Sequence
  Description of Artificial Sequence: Synthetic oligonucleotide
ggacgcuacaggcacacca

SEQ ID NO: 3145064 - RNA, 19 nt, Artificial Sequence
  Description of Artificial Sequence: Synthetic oligonucleotide
cacaccaaggaguaggaau

SEQ ID NO: 3145065 - RNA, 19 nt, Artificial Sequence
  Description of Artificial Sequence: Synthetic oligonucleotide
aggggugaagggucggggu

SEQ ID NO: 3145066 - RNA, 19 nt, Artificial Sequence
  Description of Artificial Sequence: Synthetic oligonucleotide
aaggcuguucugguacuau

SEQ ID NO: 3145067 - RNA, 19 nt, Artificial Sequence
  Description of Artificial Sequence: Synthetic oligonucleotide
uggccacggccucucuagg

SEQ ID NO: 3145068 - RNA, 19 nt, Artificial Sequence
  Description of Artificial Sequence: Synthetic oligonucleotide
cuaggggugaagggucggg

SEQ ID NO: 3145069 - RNA, 19 nt, Artificial Sequence
  Description of Artificial Sequence: Synthetic oligonucleotide
ggcuguucugguacuaugc

SEQ ID NO: 3145070 - RNA, 19 nt, Artificial Sequence
  Description of Artificial Sequence: Synthetic oligonucleotide
acaggaaggcuggaggaaa

SEQ ID NO: 3145071 - RNA, 19 nt, Artificial Sequence
  Description of Artificial Sequence: Synthetic oligonucleotide
cauccacagagcucacauc

SEQ ID NO: 3145072 - RNA, 19 nt, Artificial Sequence
  Description of Artificial Sequence: Synthetic oligonucleotide
gccacggccucucuagggg

SEQ ID NO: 3145073 - RNA, 19 nt, Artificial Sequence
  Description of Artificial Sequence: Synthetic oligonucleotide
gacccuacucuggggacgc

SEQ ID NO: 3145074 - RNA, 19 nt, Artificial Sequence
  Description of Artificial Sequence: Synthetic oligonucleotide
gccucucuaggggugaagg

SEQ ID NO: 3145075 - RNA, 19 nt, Artificial Sequence
  Description of Artificial Sequence: Synthetic oligonucleotide
cacagagcucacauccaca

SEQ ID NO: 3145076 - RNA, 19 nt, Artificial Sequence
  Description of Artificial Sequence: Synthetic oligonucleotide
gacgcuacaggcacaccaa

SEQ ID NO: 3145077 - RNA, 19 nt, Artificial Sequence
  Description of Artificial Sequence: Synthetic oligonucleotide
cucugggaaggcuguucug

SEQ ID NO: 3145078 - RNA, 19 nt, Artificial Sequence
  Description of Artificial Sequence: Synthetic oligonucleotide
acaggcacaccaaggagua

SEQ ID NO: 3145079 - RNA, 19 nt, Artificial Sequence
  Description of Artificial Sequence: Synthetic oligonucleotide
ccucucuaggggugaaggg

SEQ ID NO: 3145080 - RNA, 19 nt, Artificial Sequence
  Description of Artificial Sequence: Synthetic oligonucleotide
ggggugaagggucggggug

SEQ ID NO: 3145081 - RNA, 19 nt, Artificial Sequence
  Description of Artificial Sequence: Synthetic oligonucleotide
gaguaggaauagccaucca

SEQ ID NO: 3145082 - RNA, 19 nt, Artificial Sequence
  Description of Artificial Sequence: Synthetic oligonucleotide
cuguucugguacuaugccu

SEQ ID NO: 3145083 - RNA, 19 nt, Artificial Sequence
  Description of Artificial Sequence: Synthetic oligonucleotide
ggccacggccucucuaggg

SEQ ID NO: 3145084 - RNA, 19 nt, Artificial Sequence
  Description of Artificial Sequence: Synthetic oligonucleotide
gccuaagacccuacucugg

SEQ ID NO: 3145085 - RNA, 19 nt, Artificial Sequence
  Description of Artificial Sequence: Synthetic oligonucleotide
ccuacucuggggacgcuac

SEQ ID NO: 3145086 - RNA, 19 nt, Artificial Sequence
  Description of Artificial Sequence: Synthetic oligonucleotide
cacggccucucuaggggug

SEQ ID NO: 3145087 - RNA, 19 nt, Artificial Sequence
  Description of Artificial Sequence: Synthetic oligonucleotide
guucugguacuaugccuaa

SEQ ID NO: 3145088 - RNA, 19 nt, Artificial Sequence
  Description of Artificial Sequence: Synthetic oligonucleotide
uggggacgcuacaggcaca

SEQ ID NO: 3145089 - RNA, 19 nt, Artificial Sequence
  Description of Artificial Sequence: Synthetic oligonucleotide
cgggguggaacaaaggcuc

SEQ ID NO: 3145090 - RNA, 19 nt, Artificial Sequence
  Description of Artificial Sequence: Synthetic oligonucleotide
cucucuaggggugaagggu

SEQ ID NO: 3145091 - RNA, 19 nt, Artificial Sequence
  Description of Artificial Sequence: Synthetic oligonucleotide
cgcuacaggcacaccaagg

SEQ ID NO: 3145092 - RNA, 19 nt, Artificial Sequence
  Description of Artificial Sequence: Synthetic oligonucleotide
aagggucgggguggaacaa

SEQ ID NO: 3145093 - RNA, 19 nt, Artificial Sequence
  Description of Artificial Sequence: Synthetic oligonucleotide
aguggccacggccucucua

SEQ ID NO: 3145094 - RNA, 19 nt, Artificial Sequence
  Description of Artificial Sequence: Synthetic oligonucleotide
uccacacaggaaggcugga

SEQ ID NO: 3145095 - RNA, 19 nt, Artificial Sequence
  Description of Artificial Sequence: Synthetic oligonucleotide
ggucgggguggaacaaagg

SEQ ID NO: 3145096 - RNA, 19 nt, Artificial Sequence
  Description of Artificial Sequence: Synthetic oligonucleotide
gggucgggguggaacaaag

SEQ ID NO: 3145097 - RNA, 19 nt, Artificial Sequence
  Description of Artificial Sequence: Synthetic oligonucleotide
gaaggcuguucugguacua

SEQ ID NO: 3145098 - RNA, 19 nt, Artificial Sequence
  Description of Artificial Sequence: Synthetic oligonucleotide
ggguggaacaaaggcucug

SEQ ID NO: 3145099 - RNA, 19 nt, Artificial Sequence
  Description of Artificial Sequence: Synthetic oligonucleotide
cuaugccuaagacccuacu

SEQ ID NO: 3145100 - RNA, 19 nt, Artificial Sequence
  Description of Artificial Sequence: Synthetic oligonucleotide
cuacucuggggacgcuaca

SEQ ID NO: 3145101 - RNA, 19 nt, Artificial Sequence
  Description of Artificial Sequence: Synthetic oligonucleotide
cacaggaaggcuggaggaa

SEQ ID NO: 3145102 - RNA, 19 nt, Artificial Sequence
  Description of Artificial Sequence: Synthetic oligonucleotide
aggcuggaggaaaucugaa

SEQ ID NO: 3145103 - RNA, 19 nt, Artificial Sequence
  Description of Artificial Sequence: Synthetic oligonucleotide
caggcacaccaaggaguag

SEQ ID NO: 3145104 - RNA, 19 nt, Artificial Sequence
  Description of Artificial Sequence: Synthetic oligonucleotide
ggaggaaaucugaaaccua

SEQ ID NO: 3145105 - RNA, 19 nt, Artificial Sequence
  Description of Artificial Sequence: Synthetic oligonucleotide
ggggacgcuacaggcacac

SEQ ID NO: 3145106 - RNA, 19 nt, Artificial Sequence
  Description of Artificial Sequence: Synthetic oligonucleotide
ggcacaccaaggaguagga

SEQ ID NO: 3145107 - RNA, 19 nt, Artificial Sequence
  Description of Artificial Sequence: Synthetic oligonucleotide
acggccucucuagggguga

SEQ ID NO: 3145108 - RNA, 19 nt, Artificial Sequence
  Description of Artificial Sequence: Synthetic oligonucleotide
gcucugggaaggcuguucu

SEQ ID NO: 3145109 - RNA, 19 nt, Artificial Sequence
  Description of Artificial Sequence: Synthetic oligonucleotide
agccauccacagagcucac

SEQ ID NO: 3145110 - RNA, 19 nt, Artificial Sequence
  Description of Artificial Sequence: Synthetic oligonucleotide
agggucgggguggaacaaa

SEQ ID NO: 3145111 - RNA, 19 nt, Artificial Sequence
  Description of Artificial Sequence: Synthetic oligonucleotide
gcucacauccacacaggaa

SEQ ID NO: 3145112 - RNA, 19 nt, Artificial Sequence
  Description of Artificial Sequence: Synthetic oligonucleotide
ggcucugggaaggcuguuc

SEQ ID NO: 3145113 - RNA, 19 nt, Artificial Sequence
  Description of Artificial Sequence: Synthetic oligonucleotide
caggaaggcuggaggaaau

SEQ ID NO: 3145114 - RNA, 19 nt, Artificial Sequence
  Description of Artificial Sequence: Synthetic oligonucleotide
caaaggcucugggaaggcu

SEQ ID NO: 3145115 - RNA, 19 nt, Artificial Sequence
  Description of Artificial Sequence: Synthetic oligonucleotide
guacuaugccuaagacccu

SEQ ID NO: 3145116 - RNA, 19 nt, Artificial Sequence
  Description of Artificial Sequence: Synthetic oligonucleotide
ggccucucuaggggugaag

SEQ ID NO: 3145117 - RNA, 19 nt, Artificial Sequence
  Description of Artificial Sequence: Synthetic oligonucleotide
gccauccacagagcucaca

SEQ ID NO: 3145118 - RNA, 19 nt, Artificial Sequence
  Description of Artificial Sequence: Synthetic oligonucleotide
gggacgcuacaggcacacc

SEQ ID NO: 3145119 - RNA, 19 nt, Artificial Sequence
  Description of Artificial Sequence: Synthetic oligonucleotide
gcacaccaaggaguaggaa

SEQ ID NO: 3145120 - RNA, 19 nt, Artificial Sequence
  Description of Artificial Sequence: Synthetic oligonucleotide
aggcucugggaaggcuguu

SEQ ID NO: 3145121 - RNA, 19 nt, Artificial Sequence
  Description of Artificial Sequence: Synthetic oligonucleotide
acccuacucuggggacgcu

SEQ ID NO: 3145122 - RNA, 19 nt, Artificial Sequence
  Description of Artificial Sequence: Synthetic oligonucleotide
gggguggaacaaaggcucu

SEQ ID NO: 3145123 - RNA, 19 nt, Artificial Sequence
  Description of Artificial Sequence: Synthetic oligonucleotide
gugaagggucgggguggaa

SEQ ID NO: 3145124 - RNA, 19 nt, Artificial Sequence
  Description of Artificial Sequence: Synthetic oligonucleotide
ccacggccucucuaggggu

SEQ ID NO: 3145125 - RNA, 19 nt, Artificial Sequence
  Description of Artificial Sequence: Synthetic oligonucleotide
cccuacucuggggacgcua

SEQ ID NO: 3145126 - RNA, 19 nt, Artificial Sequence
  Description of Artificial Sequence: Synthetic oligonucleotide
cggccucucuaggggugaa

SEQ ID NO: 3145127 - RNA, 19 nt, Artificial Sequence
  Description of Artificial Sequence: Synthetic oligonucleotide
uucaaaagcacaccugugg

SEQ ID NO: 3145128 - RNA, 19 nt, Artificial Sequence
  Description of Artificial Sequence: Synthetic oligonucleotide
auacagagaugacagaagc

SEQ ID NO: 3145129 - RNA, 19 nt, Artificial Sequence
  Description of Artificial Sequence: Synthetic oligonucleotide
aaaagcacaccuguggcac

SEQ ID NO: 3145130 - RNA, 19 nt, Artificial Sequence
  Description of Artificial Sequence: Synthetic oligonucleotide
ucaaaagcacaccuguggc

SEQ ID NO: 3145131 - RNA, 19 nt, Artificial Sequence
  Description of Artificial Sequence: Synthetic oligonucleotide
ugcuguugguuucaaaagc

SEQ ID NO: 3145132 - RNA, 19 nt, Artificial Sequence
  Description of Artificial Sequence: Synthetic oligonucleotide
ucacaagccacccuugccc

SEQ ID NO: 3145133 - RNA, 19 nt, Artificial Sequence
  Description of Artificial Sequence: Synthetic oligonucleotide
acccuugcccuucaaaccc

SEQ ID NO: 3145134 - RNA, 19 nt, Artificial Sequence
  Description of Artificial Sequence: Synthetic oligonucleotide
uguugguuucaaaagcaca

SEQ ID NO: 3145135 - RNA, 19 nt, Artificial Sequence
  Description of Artificial Sequence: Synthetic oligonucleotide
uugcccuucaaacccaaag

SEQ ID NO: 3145136 - RNA, 19 nt, Artificial Sequence
  Description of Artificial Sequence: Synthetic oligonucleotide
aaagcacaccuguggcacc

SEQ ID NO: 3145137 - RNA, 19 nt, Artificial Sequence
  Description of Artificial Sequence: Synthetic oligonucleotide
ugcccuucaaacccaaagc

SEQ ID NO: 3145138 - RNA, 19 nt, Artificial Sequence
  Description of Artificial Sequence: Synthetic oligonucleotide
ugguuucaaaagcacaccu

SEQ ID NO: 3145139 - RNA, 19 nt, Artificial Sequence
  Description of Artificial Sequence: Synthetic oligonucleotide
ggagauacagagaugacag

SEQ ID NO: 3145140 - RNA, 19 nt, Artificial Sequence
  Description of Artificial Sequence: Synthetic oligonucleotide
gauacagagaugacagaag

SEQ ID NO: 3145141 - RNA, 19 nt, Artificial Sequence
  Description of Artificial Sequence: Synthetic oligonucleotide
uuucaaaagcacaccugug

SEQ ID NO: 3145142 - RNA, 19 nt, Artificial Sequence
  Description of Artificial Sequence: Synthetic oligonucleotide
agacuccaaacccaugggg

SEQ ID NO: 3145143 - RNA, 19 nt, Artificial Sequence
  Description of Artificial Sequence: Synthetic oligonucleotide
aaacccauggggcugggaa

SEQ ID NO: 3145144 - RNA, 19 nt, Artificial Sequence
  Description of Artificial Sequence: Synthetic oligonucleotide
aaagccagaccauguguca

SEQ ID NO: 3145145 - RNA, 19 nt, Artificial Sequence
  Description of Artificial Sequence: Synthetic oligonucleotide
ggcaccuucacccagucag

SEQ ID NO: 3145146 - RNA, 19 nt, Artificial Sequence
  Description of Artificial Sequence: Synthetic oligonucleotide
guugguuucaaaagcacac

SEQ ID NO: 3145147 - RNA, 19 nt, Artificial Sequence
  Description of Artificial Sequence: Synthetic oligonucleotide
cuggaugugcucacaagcc

SEQ ID NO: 3145148 - RNA, 19 nt, Artificial Sequence
  Description of Artificial Sequence: Synthetic oligonucleotide
cagagaugacagaagcggg

SEQ ID NO: 3145149 - RNA, 19 nt, Artificial Sequence
  Description of Artificial Sequence: Synthetic oligonucleotide
agauacagagaugacagaa

SEQ ID NO: 3145150 - RNA, 19 nt, Artificial Sequence
  Description of Artificial Sequence: Synthetic oligonucleotide
acccagucagacuccaaac

SEQ ID NO: 3145151 - RNA, 19 nt, Artificial Sequence
  Description of Artificial Sequence: Synthetic oligonucleotide
aggggagauacagagauga

SEQ ID NO: 3145152 - RNA, 19 nt, Artificial Sequence
  Description of Artificial Sequence: Synthetic oligonucleotide
gacuccaaacccauggggc

SEQ ID NO: 3145153 - RNA, 19 nt, Artificial Sequence
  Description of Artificial Sequence: Synthetic oligonucleotide
uggaugugcucacaagcca

SEQ ID NO: 3145154 - RNA, 19 nt, Artificial Sequence
  Description of Artificial Sequence: Synthetic oligonucleotide
caugugucaggaaucaaca

SEQ ID NO: 3145155 - RNA, 19 nt, Artificial Sequence
  Description of Artificial Sequence: Synthetic oligonucleotide
aacccauggggcugggaag

SEQ ID NO: 3145156 - RNA, 19 nt, Artificial Sequence
  Description of Artificial Sequence: Synthetic oligonucleotide
ucaaacccaaagccagacc

SEQ ID NO: 3145157 - RNA, 19 nt, Artificial Sequence
  Description of Artificial Sequence: Synthetic oligonucleotide
agagaugacagaagcgggg

SEQ ID NO: 3145158 - RNA, 19 nt, Artificial Sequence
  Description of Artificial Sequence: Synthetic oligonucleotide
guuucaaaagcacaccugu

SEQ ID NO: 3145159 - RNA, 19 nt, Artificial Sequence
  Description of Artificial Sequence: Synthetic oligonucleotide
gugcuguugguuucaaaag

SEQ ID NO: 3145160 - RNA, 19 nt, Artificial Sequence
  Description of Artificial Sequence: Synthetic oligonucleotide
acagaagcggggucugacg

SEQ ID NO: 3145161 - RNA, 19 nt, Artificial Sequence
  Description of Artificial Sequence: Synthetic oligonucleotide
agaagcggggucugacggc

SEQ ID NO: 3145162 - RNA, 19 nt, Artificial Sequence
  Description of Artificial Sequence: Synthetic oligonucleotide
uugguuucaaaagcacacc

SEQ ID NO: 3145163 - RNA, 19 nt, Artificial Sequence
  Description of Artificial Sequence: Synthetic oligonucleotide
ugggaagcaggggagauac

SEQ ID NO: 3145164 - RNA, 19 nt, Artificial Sequence
  Description of Artificial Sequence: Synthetic oligonucleotide
cagaagcggggucugacgg

SEQ ID NO: 3145165 - RNA, 19 nt, Artificial Sequence
  Description of Artificial Sequence: Synthetic oligonucleotide
ccuucaaacccaaagccag

SEQ ID NO: 3145166 - RNA, 19 nt, Artificial Sequence
  Description of Artificial Sequence: Synthetic oligonucleotide
uucaaacccaaagccagac

SEQ ID NO: 3145167 - RNA, 19 nt, Artificial Sequence
  Description of Artificial Sequence: Synthetic oligonucleotide
cuguugguuucaaaagcac

SEQ ID NO: 3145168 - RNA, 19 nt, Artificial Sequence
  Description of Artificial Sequence: Synthetic oligonucleotide
acuccaaacccauggggcu

SEQ ID NO: 3145169 - RNA, 19 nt, Artificial Sequence
  Description of Artificial Sequence: Synthetic oligonucleotide
aacccaaagccagaccaug

SEQ ID NO: 3145170 - RNA, 19 nt, Artificial Sequence
  Description of Artificial Sequence: Synthetic oligonucleotide
agaugacagaagcgggguc

SEQ ID NO: 3145171 - RNA, 19 nt, Artificial Sequence
  Description of Artificial Sequence: Synthetic oligonucleotide
gcuggaugugcucacaagc

SEQ ID NO: 3145172 - RNA, 19 nt, Artificial Sequence
  Description of Artificial Sequence: Synthetic oligonucleotide
aagccagaccaugugucag

SEQ ID NO: 3145173 - RNA, 19 nt, Artificial Sequence
  Description of Artificial Sequence: Synthetic oligonucleotide
agccagaccaugugucagg

SEQ ID NO: 3145174 - RNA, 19 nt, Artificial Sequence
  Description of Artificial Sequence: Synthetic oligonucleotide
cacccuugcccuucaaacc

SEQ ID NO: 3145175 - RNA, 19 nt, Artificial Sequence
  Description of Artificial Sequence: Synthetic oligonucleotide
ucugacggcuggaugugcu

SEQ ID NO: 3145176 - RNA, 19 nt, Artificial Sequence
  Description of Artificial Sequence: Synthetic oligonucleotide
ggugcuguugguuucaaaa

SEQ ID NO: 3145177 - RNA, 19 nt, Artificial Sequence
  Description of Artificial Sequence: Synthetic oligonucleotide
acccauggggcugggaagc

SEQ ID NO: 3145178 - RNA, 19 nt, Artificial Sequence
  Description of Artificial Sequence: Synthetic oligonucleotide
agaccaugugucaggaauc

SEQ ID NO: 3145179 - RNA, 19 nt, Artificial Sequence
  Description of Artificial Sequence: Synthetic oligonucleotide
cucacaagccacccuugcc

SEQ ID NO: 3145180 - RNA, 19 nt, Artificial Sequence
  Description of Artificial Sequence: Synthetic oligonucleotide
gaugugcucacaagccacc

SEQ ID NO: 3145181 - RNA, 19 nt, Artificial Sequence
  Description of Artificial Sequence: Synthetic oligonucleotide
augugcucacaagccaccc

SEQ ID NO: 3145182 - RNA, 19 nt, Artificial Sequence
  Description of Artificial Sequence: Synthetic oligonucleotide
uccaaacccauggggcugg

SEQ ID NO: 3145183 - RNA, 19 nt, Artificial Sequence
  Description of Artificial Sequence: Synthetic oligonucleotide
uguggcaccuucacccagu

SEQ ID NO: 3145184 - RNA, 19 nt, Artificial Sequence
  Description of Artificial Sequence: Synthetic oligonucleotide
ugugcucacaagccacccu

SEQ ID NO: 3145185 - RNA, 19 nt, Artificial Sequence
  Description of Artificial Sequence: Synthetic oligonucleotide
ccagucagacuccaaaccc

SEQ ID NO: 3145186 - RNA, 19 nt, Artificial Sequence
  Description of Artificial Sequence: Synthetic oligonucleotide
gcccuucaaacccaaagcc

SEQ ID NO: 3145187 - RNA, 19 nt, Artificial Sequence
  Description of Artificial Sequence: Synthetic oligonucleotide
ccaugugucaggaaucaac

SEQ ID NO: 3145188 - RNA, 19 nt, Artificial Sequence
  Description of Artificial Sequence: Synthetic oligonucleotide
caaaagcacaccuguggca

SEQ ID NO: 3145189 - RNA, 19 nt, Artificial Sequence
  Description of Artificial Sequence: Synthetic oligonucleotide
ccuucacccagucagacuc

SEQ ID NO: 3145190 - RNA, 19 nt, Artificial Sequence
  Description of Artificial Sequence: Synthetic oligonucleotide
ugcucacaagccacccuug

SEQ ID NO: 3145191 - RNA, 19 nt, Artificial Sequence
  Description of Artificial Sequence: Synthetic oligonucleotide
gagauacagagaugacaga

SEQ ID NO: 3145192 - RNA, 19 nt, Artificial Sequence
  Description of Artificial Sequence: Synthetic oligonucleotide
gaugacagaagcggggucu

SEQ ID NO: 3145193 - RNA, 19 nt, Artificial Sequence
  Description of Artificial Sequence: Synthetic oligonucleotide
gguuucaaaagcacaccug

SEQ ID NO: 3145194 - RNA, 19 nt, Artificial Sequence
  Description of Artificial Sequence: Synthetic oligonucleotide
agcggggucugacggcugg

SEQ ID NO: 3145195 - RNA, 19 nt, Artificial Sequence
  Description of Artificial Sequence: Synthetic oligonucleotide
cagucagacuccaaaccca

SEQ ID NO: 3145196 - RNA, 19 nt, Artificial Sequence
  Description of Artificial Sequence: Synthetic oligonucleotide
aagcacaccuguggcaccu

SEQ ID NO: 3145197 - RNA, 19 nt, Artificial Sequence
  Description of Artificial Sequence: Synthetic oligonucleotide
cuucacccagucagacucc

SEQ ID NO: 3145198 - RNA, 19 nt, Artificial Sequence
  Description of Artificial Sequence: Synthetic oligonucleotide
gaccaugugucaggaauca

SEQ ID NO: 3145199 - RNA, 19 nt, Artificial Sequence
  Description of Artificial Sequence: Synthetic oligonucleotide
gacagaagcggggucugac

SEQ ID NO: 3145200 - RNA, 19 nt, Artificial Sequence
  Description of Artificial Sequence: Synthetic oligonucleotide
ugacggcuggaugugcuca

SEQ ID NO: 3145201 - RNA, 19 nt, Artificial Sequence
  Description of Artificial Sequence: Synthetic oligonucleotide
gaagcaggggagauacaga

SEQ ID NO: 3145202 - RNA, 19 nt, Artificial Sequence
  Description of Artificial Sequence: Synthetic oligonucleotide
cuucaaacccaaagccaga

SEQ ID NO: 3145203 - RNA, 19 nt, Artificial Sequence
  Description of Artificial Sequence: Synthetic oligonucleotide
gggagauacagagaugaca

SEQ ID NO: 3145204 - RNA, 19 nt, Artificial Sequence
  Description of Artificial Sequence: Synthetic oligonucleotide
cccagucagacuccaaacc

SEQ ID NO: 3145205 - RNA, 19 nt, Artificial Sequence
  Description of Artificial Sequence: Synthetic oligonucleotide
accuucacccagucagacu

SEQ ID NO: 3145206 - RNA, 19 nt, Artificial Sequence
  Description of Artificial Sequence: Synthetic oligonucleotide
uucacccagucagacucca

SEQ ID NO: 3145207 - RNA, 19 nt, Artificial Sequence
  Description of Artificial Sequence: Synthetic oligonucleotide
gcuguugguuucaaaagca

SEQ ID NO: 3145208 - RNA, 19 nt, Artificial Sequence
  Description of Artificial Sequence: Synthetic oligonucleotide
cagaccaugugucaggaau

SEQ ID NO: 3145209 - RNA, 19 nt, Artificial Sequence
  Description of Artificial Sequence: Synthetic oligonucleotide
augacagaagcggggucug

SEQ ID NO: 3145210 - RNA, 19 nt, Artificial Sequence
  Description of Artificial Sequence: Synthetic oligonucleotide
gacggcuggaugugcucac

SEQ ID NO: 3145211 - RNA, 19 nt, Artificial Sequence
  Description of Artificial Sequence: Synthetic oligonucleotide
ggaugugcucacaagccac

SEQ ID NO: 3145212 - RNA, 19 nt, Artificial Sequence
  Description of Artificial Sequence: Synthetic oligonucleotide
caccuguggcaccuucacc

SEQ ID NO: 3145213 - RNA, 19 nt, Artificial Sequence
  Description of Artificial Sequence: Synthetic oligonucleotide
gcaggggagauacagagau

SEQ ID NO: 3145214 - RNA, 19 nt, Artificial Sequence
  Description of Artificial Sequence: Synthetic oligonucleotide
ggcuggaugugcucacaag

SEQ ID NO: 3145215 - RNA, 19 nt, Artificial Sequence
  Description of Artificial Sequence: Synthetic oligonucleotide
caggggagauacagagaug

SEQ ID NO: 3145216 - RNA, 19 nt, Artificial Sequence
  Description of Artificial Sequence: Synthetic oligonucleotide
gagaugacagaagcggggu

SEQ ID NO: 3145217 - RNA, 19 nt, Artificial Sequence
  Description of Artificial Sequence: Synthetic oligonucleotide
cuccaaacccauggggcug

SEQ ID NO: 3145218 - RNA, 19 nt, Artificial Sequence
  Description of Artificial Sequence: Synthetic oligonucleotide
cuguggcaccuucacccag

SEQ ID NO: 3145219 - RNA, 19 nt, Artificial Sequence
  Description of Artificial Sequence: Synthetic oligonucleotide
auggggcugggaagcaggg

SEQ ID NO: 3145220 - RNA, 19 nt, Artificial Sequence
  Description of Artificial Sequence: Synthetic oligonucleotide
cacccagucagacuccaaa

SEQ ID NO: 3145221 - RNA, 19 nt, Artificial Sequence
  Description of Artificial Sequence: Synthetic oligonucleotide
caccuucacccagucagac

SEQ ID NO: 3145222 - RNA, 19 nt, Artificial Sequence
  Description of Artificial Sequence: Synthetic oligonucleotide
cugacggcuggaugugcuc

SEQ ID NO: 3145223 - RNA, 19 nt, Artificial Sequence
  Description of Artificial Sequence: Synthetic oligonucleotide
gcucacaagccacccuugc

SEQ ID NO: 3145224 - RNA, 19 nt, Artificial Sequence
  Description of Artificial Sequence: Synthetic oligonucleotide
uggcaccuucacccaguca

SEQ ID NO: 3145225 - RNA, 19 nt, Artificial Sequence
  Description of Artificial Sequence: Synthetic oligonucleotide
acccaaagccagaccaugu

SEQ ID NO: 3145226 - RNA, 19 nt, Artificial Sequence
  Description of Artificial Sequence: Synthetic oligonucleotide
aagccacccuugcccuuca

SEQ ID NO: 3145227 - RNA, 19 nt, Artificial Sequence
  Description of Artificial Sequence: Synthetic oligonucleotide
caagccacccuugcccuuc

SEQ ID NO: 3145228 - RNA, 19 nt, Artificial Sequence
  Description of Artificial Sequence: Synthetic oligonucleotide
gcuaggugcuguugguuuc

SEQ ID NO: 3145229 - RNA, 19 nt, Artificial Sequence
  Description of Artificial Sequence: Synthetic oligonucleotide
cccaaagccagaccaugug

SEQ ID NO: 3145230 - RNA, 19 nt, Artificial Sequence
  Description of Artificial Sequence: Synthetic oligonucleotide
gggucugacggcuggaugu

SEQ ID NO: 3145231 - RNA, 19 nt, Artificial Sequence
  Description of Artificial Sequence: Synthetic oligonucleotide
ucacccagucagacuccaa

SEQ ID NO: 3145232 - RNA, 19 nt, Artificial Sequence
  Description of Artificial Sequence: Synthetic oligonucleotide
ugacagaagcggggucuga

SEQ ID NO: 3145233 - RNA, 19 nt, Artificial Sequence
  Description of Artificial Sequence: Synthetic oligonucleotide
gaagcggggucugacggcu

SEQ ID NO: 3145234 - RNA, 19 nt, Artificial Sequence
  Description of Artificial Sequence: Synthetic oligonucleotide
cuaggugcuguugguuuca

SEQ ID NO: 3145235 - RNA, 19 nt, Artificial Sequence
  Description of Artificial Sequence: Synthetic oligonucleotide
agcaggggagauacagaga

SEQ ID NO: 3145236 - RNA, 19 nt, Artificial Sequence
  Description of Artificial Sequence: Synthetic oligonucleotide
aggugcuguugguuucaaa

SEQ ID NO: 3145237 - RNA, 19 nt, Artificial Sequence
  Description of Artificial Sequence: Synthetic oligonucleotide
ggggucugacggcuggaug

SEQ ID NO: 3145238 - RNA, 19 nt, Artificial Sequence
  Description of Artificial Sequence: Synthetic oligonucleotide
guggcaccuucacccaguc

SEQ ID NO: 3145239 - RNA, 19 nt, Artificial Sequence
  Description of Artificial Sequence: Synthetic oligonucleotide
gugcucacaagccacccuu

SEQ ID NO: 3145240 - RNA, 19 nt, Artificial Sequence
  Description of Artificial Sequence: Synthetic oligonucleotide
gucugacggcuggaugugc

SEQ ID NO: 3145241 - RNA, 19 nt, Artificial Sequence
  Description of Artificial Sequence: Synthetic oligonucleotide
cacaagccacccuugcccu

SEQ ID NO: 3145242 - RNA, 19 nt, Artificial Sequence
  Description of Artificial Sequence: Synthetic oligonucleotide
ggucugacggcuggaugug

SEQ ID NO: 3145243 - RNA, 19 nt, Artificial Sequence
  Description of Artificial Sequence: Synthetic oligonucleotide
acaagccacccuugcccuu

SEQ ID NO: 3145244 - RNA, 19 nt, Artificial Sequence
  Description of Artificial Sequence: Synthetic oligonucleotide
accaugugucaggaaucaa

SEQ ID NO: 3145245 - RNA, 19 nt, Artificial Sequence
  Description of Artificial Sequence: Synthetic oligonucleotide
cuugcccuucaaacccaaa

SEQ ID NO: 3145246 - RNA, 19 nt, Artificial Sequence
  Description of Artificial Sequence: Synthetic oligonucleotide
gggcugggaagcaggggag

SEQ ID NO: 3145247 - RNA, 19 nt, Artificial Sequence
  Description of Artificial Sequence: Synthetic oligonucleotide
aagcggggucugacggcug

SEQ ID NO: 3145248 - RNA, 19 nt, Artificial Sequence
  Description of Artificial Sequence: Synthetic oligonucleotide
acggcuggaugugcucaca

SEQ ID NO: 3145249 - RNA, 19 nt, Artificial Sequence
  Description of Artificial Sequence: Synthetic oligonucleotide
ggggagauacagagaugac

SEQ ID NO: 3145250 - RNA, 19 nt, Artificial Sequence
  Description of Artificial Sequence: Synthetic oligonucleotide
gccagaccaugugucagga

SEQ ID NO: 3145251 - RNA, 19 nt, Artificial Sequence
  Description of Artificial Sequence: Synthetic oligonucleotide
gcacaccuguggcaccuuc

SEQ ID NO: 3145252 - RNA, 19 nt, Artificial Sequence
  Description of Artificial Sequence: Synthetic oligonucleotide
gccacccuugcccuucaaa

SEQ ID NO: 3145253 - RNA, 19 nt, Artificial Sequence
  Description of Artificial Sequence: Synthetic oligonucleotide
ccuguggcaccuucaccca

SEQ ID NO: 3145254 - RNA, 19 nt, Artificial Sequence
  Description of Artificial Sequence: Synthetic oligonucleotide
cugggaagcaggggagaua

SEQ ID NO: 3145255 - RNA, 19 nt, Artificial Sequence
  Description of Artificial Sequence: Synthetic oligonucleotide
caaacccauggggcuggga

SEQ ID NO: 3145256 - RNA, 19 nt, Artificial Sequence
  Description of Artificial Sequence: Synthetic oligonucleotide
ggcugggaagcaggggaga

SEQ ID NO: 3145257 - RNA, 19 nt, Artificial Sequence
  Description of Artificial Sequence: Synthetic oligonucleotide
cccuugcccuucaaaccca

SEQ ID NO: 3145258 - RNA, 19 nt, Artificial Sequence
  Description of Artificial Sequence: Synthetic oligonucleotide
agccacccuugcccuucaa

SEQ ID NO: 3145259 - RNA, 19 nt, Artificial Sequence
  Description of Artificial Sequence: Synthetic oligonucleotide
ccuugcccuucaaacccaa

SEQ ID NO: 3145260 - RNA, 19 nt, Artificial Sequence
  Description of Artificial Sequence: Synthetic oligonucleotide
agcacaccuguggcaccuu

SEQ ID NO: 3145261 - RNA, 19 nt, Artificial Sequence
  Description of Artificial Sequence: Synthetic oligonucleotide
ccaaacccauggggcuggg

SEQ ID NO: 3145262 - RNA, 19 nt, Artificial Sequence
  Description of Artificial Sequence: Synthetic oligonucleotide
gggaagcaggggagauaca

SEQ ID NO: 3145263 - RNA, 19 nt, Artificial Sequence
  Description of Artificial Sequence: Synthetic oligonucleotide
ccagaccaugugucaggaa

SEQ ID NO: 3145264 - RNA, 19 nt, Artificial Sequence
  Description of Artificial Sequence: Synthetic oligonucleotide
cggcuggaugugcucacaa

SEQ ID NO: 3145265 - RNA, 19 nt, Artificial Sequence
  Description of Artificial Sequence: Synthetic oligonucleotide
gcggggucugacggcugga

SEQ ID NO: 3145266 - RNA, 19 nt, Artificial Sequence
  Description of Artificial Sequence: Synthetic oligonucleotide
cggggucugacggcuggau

SEQ ID NO: 3145267 - RNA, 19 nt, Artificial Sequence
  Description of Artificial Sequence: Synthetic oligonucleotide
aguucuccccuccauagcc

SEQ ID NO: 3145268 - RNA, 19 nt, Artificial Sequence
  Description of Artificial Sequence: Synthetic oligonucleotide
accaucuuccugcaagucc

SEQ ID NO: 3145269 - RNA, 19 nt, Artificial Sequence
  Description of Artificial Sequence: Synthetic oligonucleotide
ugagcuuugcucaccaucu

SEQ ID NO: 3145270 - RNA, 19 nt, Artificial Sequence
  Description of Artificial Sequence: Synthetic oligonucleotide
aagacucuugacugaguuc

SEQ ID NO: 3145271 - RNA, 19 nt, Artificial Sequence
  Description of Artificial Sequence: Synthetic oligonucleotide
augagcuuugcucaccauc

SEQ ID NO: 3145272 - RNA, 19 nt, Artificial Sequence
  Description of Artificial Sequence: Synthetic oligonucleotide
uugcucaccaucuuccugc

SEQ ID NO: 3145273 - RNA, 19 nt, Artificial Sequence
  Description of Artificial Sequence: Synthetic oligonucleotide
ugaguucuccccuccauag

SEQ ID NO: 3145274 - RNA, 19 nt, Artificial Sequence
  Description of Artificial Sequence: Synthetic oligonucleotide
cucaccaucuuccugcaag

SEQ ID NO: 3145275 - RNA, 19 nt, Artificial Sequence
  Description of Artificial Sequence: Synthetic oligonucleotide
uccccaacucucaugagcu

SEQ ID NO: 3145276 - RNA, 19 nt, Artificial Sequence
  Description of Artificial Sequence: Synthetic oligonucleotide
uggccaauuccucugggug

SEQ ID NO: 3145277 - RNA, 19 nt, Artificial Sequence
  Description of Artificial Sequence: Synthetic oligonucleotide
ucuuccugcaaguccagga

SEQ ID NO: 3145278 - RNA, 19 nt, Artificial Sequence
  Description of Artificial Sequence: Synthetic oligonucleotide
ugguucuuccgcuugugcc

SEQ ID NO: 3145279 - RNA, 19 nt, Artificial Sequence
  Description of Artificial Sequence: Synthetic oligonucleotide
uugcccuuuggccaauucc

SEQ ID NO: 3145280 - RNA, 19 nt, Artificial Sequence
  Description of Artificial Sequence: Synthetic oligonucleotide
uuuggccaauuccucuggg

SEQ ID NO: 3145281 - RNA, 19 nt, Artificial Sequence
  Description of Artificial Sequence: Synthetic oligonucleotide
ucuugacugaguucucccc

SEQ ID NO: 3145282 - RNA, 19 nt, Artificial Sequence
  Description of Artificial Sequence: Synthetic oligonucleotide
acucuugacugaguucucc

SEQ ID NO: 3145283 - RNA, 19 nt, Artificial Sequence
  Description of Artificial Sequence: Synthetic oligonucleotide
aauuccucuggguggccug

SEQ ID NO: 3145284 - RNA, 19 nt, Artificial Sequence
  Description of Artificial Sequence: Synthetic oligonucleotide
uuccugcaaguccaggacc

SEQ ID NO: 3145285 - RNA, 19 nt, Artificial Sequence
  Description of Artificial Sequence: Synthetic oligonucleotide
ugugccucuugcccuuugg

SEQ ID NO: 3145286 - RNA, 19 nt, Artificial Sequence
  Description of Artificial Sequence: Synthetic oligonucleotide
cucucaugagcuuugcuca

SEQ ID NO: 3145287 - RNA, 19 nt, Artificial Sequence
  Description of Artificial Sequence: Synthetic oligonucleotide
uccugcaaguccaggaccu

SEQ ID NO: 3145288 - RNA, 19 nt, Artificial Sequence
  Description of Artificial Sequence: Synthetic oligonucleotide
cucuugacugaguucuccc

SEQ ID NO: 3145289 - RNA, 19 nt, Artificial Sequence
  Description of Artificial Sequence: Synthetic oligonucleotide
aguccaggaccuccugccc

SEQ ID NO: 3145290 - RNA, 19 nt, Artificial Sequence
  Description of Artificial Sequence: Synthetic oligonucleotide
cuccccaacucucaugagc

SEQ ID NO: 3145291 - RNA, 19 nt, Artificial Sequence
  Description of Artificial Sequence: Synthetic oligonucleotide
cuuuggccaauuccucugg

SEQ ID NO: 3145292 - RNA, 19 nt, Artificial Sequence
  Description of Artificial Sequence: Synthetic oligonucleotide
acagaagacucuugacuga

SEQ ID NO: 3145293 - RNA, 19 nt, Artificial Sequence
  Description of Artificial Sequence: Synthetic oligonucleotide
aacucucaugagcuuugcu

SEQ ID NO: 3145294 - RNA, 19 nt, Artificial Sequence
  Description of Artificial Sequence: Synthetic oligonucleotide
cuuccugcaaguccaggac

SEQ ID NO: 3145295 - RNA, 19 nt, Artificial Sequence
  Description of Artificial Sequence: Synthetic oligonucleotide
uuccgcuugugccucuugc

SEQ ID NO: 3145296 - RNA, 19 nt, Artificial Sequence
  Description of Artificial Sequence: Synthetic oligonucleotide
ucaccaucuuccugcaagu

SEQ ID NO: 3145297 - RNA, 19 nt, Artificial Sequence
  Description of Artificial Sequence: Synthetic oligonucleotide
uggguggccugcuucucgg

SEQ ID NO: 3145298 - RNA, 19 nt, Artificial Sequence
  Description of Artificial Sequence: Synthetic oligonucleotide
ugacugaguucuccccucc

SEQ ID NO: 3145299 - RNA, 19 nt, Artificial Sequence
  Description of Artificial Sequence: Synthetic oligonucleotide
uccgcuugugccucuugcc

SEQ ID NO: 3145300 - RNA, 19 nt, Artificial Sequence
  Description of Artificial Sequence: Synthetic oligonucleotide
cagaagacucuugacugag

SEQ ID NO: 3145301 - RNA, 19 nt, Artificial Sequence
  Description of Artificial Sequence: Synthetic oligonucleotide
auagccuggcuccccaacu

SEQ ID NO: 3145302 - RNA, 19 nt, Artificial Sequence
  Description of Artificial Sequence: Synthetic oligonucleotide
uuggccaauuccucugggu

SEQ ID NO: 3145303 - RNA, 19 nt, Artificial Sequence
  Description of Artificial Sequence: Synthetic oligonucleotide
caaguccaggaccuccugc

SEQ ID NO: 3145304 - RNA, 19 nt, Artificial Sequence
  Description of Artificial Sequence: Synthetic oligonucleotide
ucucaugagcuuugcucac

SEQ ID NO: 3145305 - RNA, 19 nt, Artificial Sequence
  Description of Artificial Sequence: Synthetic oligonucleotide
ucuccccuccauagccugg

SEQ ID NO: 3145306 - RNA, 19 nt, Artificial Sequence
  Description of Artificial Sequence: Synthetic oligonucleotide
uucuccccuccauagccug

SEQ ID NO: 3145307 - RNA, 19 nt, Artificial Sequence
  Description of Artificial Sequence: Synthetic oligonucleotide
auuccucuggguggccugc

SEQ ID NO: 3145308 - RNA, 19 nt, Artificial Sequence
  Description of Artificial Sequence: Synthetic oligonucleotide
gaguucuccccuccauagc

SEQ ID NO: 3145309 - RNA, 19 nt, Artificial Sequence
  Description of Artificial Sequence: Synthetic oligonucleotide
gaagacucuugacugaguu

SEQ ID NO: 3145310 - RNA, 19 nt, Artificial Sequence
  Description of Artificial Sequence: Synthetic oligonucleotide
uucucggugccagacucug

SEQ ID NO: 3145311 - RNA, 19 nt, Artificial Sequence
  Description of Artificial Sequence: Synthetic oligonucleotide
uccaggaccuccugcccug

SEQ ID NO: 3145312 - RNA, 19 nt, Artificial Sequence
  Description of Artificial Sequence: Synthetic oligonucleotide
acugaguucuccccuccau

SEQ ID NO: 3145313 - RNA, 19 nt, Artificial Sequence
  Description of Artificial Sequence: Synthetic oligonucleotide
guggccugcuucucggugc

SEQ ID NO: 3145314 - RNA, 19 nt, Artificial Sequence
  Description of Artificial Sequence: Synthetic oligonucleotide
cuggguggccugcuucucg

SEQ ID NO: 3145315 - RNA, 19 nt, Artificial Sequence
  Description of Artificial Sequence: Synthetic oligonucleotide
uggccugcuucucggugcc

SEQ ID NO: 3145316 - RNA, 19 nt, Artificial Sequence
  Description of Artificial Sequence: Synthetic oligonucleotide
cucaugagcuuugcucacc

SEQ ID NO: 3145317 - RNA, 19 nt, Artificial Sequence
  Description of Artificial Sequence: Synthetic oligonucleotide
cccuccauagccuggcucc

SEQ ID NO: 3145318 - RNA, 19 nt, Artificial Sequence
  Description of Artificial Sequence: Synthetic oligonucleotide
cugcaaguccaggaccucc

SEQ ID NO: 3145319 - RNA, 19 nt, Artificial Sequence
  Description of Artificial Sequence: Synthetic oligonucleotide
cauagccuggcuccccaac

SEQ ID NO: 3145320 - RNA, 19 nt, Artificial Sequence
  Description of Artificial Sequence: Synthetic oligonucleotide
ggugccagacucugcuggg

SEQ ID NO: 3145321 - RNA, 19 nt, Artificial Sequence
  Description of Artificial Sequence: Synthetic oligonucleotide
ugcucaccaucuuccugca

SEQ ID NO: 3145322 - RNA, 19 nt, Artificial Sequence
  Description of Artificial Sequence: Synthetic oligonucleotide
ucucggugccagacucugc

SEQ ID NO: 3145323 - RNA, 19 nt, Artificial Sequence
  Description of Artificial Sequence: Synthetic oligonucleotide
uccugcccugguucuuccg

SEQ ID NO: 3145324 - RNA, 19 nt, Artificial Sequence
  Description of Artificial Sequence: Synthetic oligonucleotide
caucuuccugcaaguccag

SEQ ID NO: 3145325 - RNA, 19 nt, Artificial Sequence
  Description of Artificial Sequence: Synthetic oligonucleotide
ccaucuuccugcaagucca

SEQ ID NO: 3145326 - RNA, 19 nt, Artificial Sequence
  Description of Artificial Sequence: Synthetic oligonucleotide
gcuucucggugccagacuc

SEQ ID NO: 3145327 - RNA, 19 nt, Artificial Sequence
  Description of Artificial Sequence: Synthetic oligonucleotide
cuugacugaguucuccccu

SEQ ID NO: 3145328 - RNA, 19 nt, Artificial Sequence
  Description of Artificial Sequence: Synthetic oligonucleotide
ucggugccagacucugcug

SEQ ID NO: 3145329 - RNA, 19 nt, Artificial Sequence
  Description of Artificial Sequence: Synthetic oligonucleotide
gccucuugcccuuuggcca

SEQ ID NO: 3145330 - RNA, 19 nt, Artificial Sequence
  Description of Artificial Sequence: Synthetic oligonucleotide
uggcuccccaacucucaug

SEQ ID NO: 3145331 - RNA, 19 nt, Artificial Sequence
  Description of Artificial Sequence: Synthetic oligonucleotide
gacugaguucuccccucca

SEQ ID NO: 3145332 - RNA, 19 nt, Artificial Sequence
  Description of Artificial Sequence: Synthetic oligonucleotide
ccaacucucaugagcuuug

SEQ ID NO: 3145333 - RNA, 19 nt, Artificial Sequence
  Description of Artificial Sequence: Synthetic oligonucleotide
uugugccucuugcccuuug

SEQ ID NO: 3145334 - RNA, 19 nt, Artificial Sequence
  Description of Artificial Sequence: Synthetic oligonucleotide
cuugcccuuuggccaauuc

SEQ ID NO: 3145335 - RNA, 19 nt, Artificial Sequence
  Description of Artificial Sequence: Synthetic oligonucleotide
caacucucaugagcuuugc

SEQ ID NO: 3145336 - RNA, 19 nt, Artificial Sequence
  Description of Artificial Sequence: Synthetic oligonucleotide
gguucuuccgcuugugccu

SEQ ID NO: 3145337 - RNA, 19 nt, Artificial Sequence
  Description of Artificial Sequence: Synthetic oligonucleotide
cugcuucucggugccagac

SEQ ID NO: 3145338 - RNA, 19 nt, Artificial Sequence
  Description of Artificial Sequence: Synthetic oligonucleotide
agaagacucuugacugagu

SEQ ID NO: 3145339 - RNA, 19 nt, Artificial Sequence
  Description of Artificial Sequence: Synthetic oligonucleotide
cuccccuccauagccuggc

SEQ ID NO: 3145340 - RNA, 19 nt, Artificial Sequence
  Description of Artificial Sequence: Synthetic oligonucleotide
gguggccugcuucucggug

SEQ ID NO: 3145341 - RNA, 19 nt, Artificial Sequence
  Description of Artificial Sequence: Synthetic oligonucleotide
gccaauuccucuggguggc

SEQ ID NO: 3145342 - RNA, 19 nt, Artificial Sequence
  Description of Artificial Sequence: Synthetic oligonucleotide
cucggugccagacucugcu

SEQ ID NO: 3145343 - RNA, 19 nt, Artificial Sequence
  Description of Artificial Sequence: Synthetic oligonucleotide
ccgcuugugccucuugccc

SEQ ID NO: 3145344 - RNA, 19 nt, Artificial Sequence
  Description of Artificial Sequence: Synthetic oligonucleotide
ccacacagaagacucuuga

SEQ ID NO: 3145345 - RNA, 19 nt, Artificial Sequence
  Description of Artificial Sequence: Synthetic oligonucleotide
cugaguucuccccuccaua

SEQ ID NO: 3145346 - RNA, 19 nt, Artificial Sequence
  Description of Artificial Sequence: Synthetic oligonucleotide
guucuuccgcuugugccuc

SEQ ID NO: 3145347 - RNA, 19 nt, Artificial Sequence
  Description of Artificial Sequence: Synthetic oligonucleotide
ccugcccugguucuuccgc

SEQ ID NO: 3145348 - RNA, 19 nt, Artificial Sequence
  Description of Artificial Sequence: Synthetic oligonucleotide
cuuugcucaccaucuuccu

SEQ ID NO: 3145349 - RNA, 19 nt, Artificial Sequence
  Description of Artificial Sequence: Synthetic oligonucleotide
gacucuugacugaguucuc

SEQ ID NO: 3145350 - RNA, 19 nt, Artificial Sequence
  Description of Artificial Sequence: Synthetic oligonucleotide
caccaucuuccugcaaguc

SEQ ID NO: 3145351 - RNA, 19 nt, Artificial Sequence
  Description of Artificial Sequence: Synthetic oligonucleotide
gugccagacucugcugggc

SEQ ID NO: 3145352 - RNA, 19 nt, Artificial Sequence
  Description of Artificial Sequence: Synthetic oligonucleotide
cggugccagacucugcugg

SEQ ID NO: 3145353 - RNA, 19 nt, Artificial Sequence
  Description of Artificial Sequence: Synthetic oligonucleotide
uccccuccauagccuggcu

SEQ ID NO: 3145354 - RNA, 19 nt, Artificial Sequence
  Description of Artificial Sequence: Synthetic oligonucleotide
ugcccugguucuuccgcuu

SEQ ID NO: 3145355 - RNA, 19 nt, Artificial Sequence
  Description of Artificial Sequence: Synthetic oligonucleotide
guccaggaccuccugcccu

SEQ ID NO: 3145356 - RNA, 19 nt, Artificial Sequence
  Description of Artificial Sequence: Synthetic oligonucleotide
cucuggguggccugcuucu

SEQ ID NO: 3145357 - RNA, 19 nt, Artificial Sequence
  Description of Artificial Sequence: Synthetic oligonucleotide
gaccuccugcccugguucu

SEQ ID NO: 3145358 - RNA, 19 nt, Artificial Sequence
  Description of Artificial Sequence: Synthetic oligonucleotide
uuccucuggguggccugcu

SEQ ID NO: 3145359 - RNA, 19 nt, Artificial Sequence
  Description of Artificial Sequence: Synthetic oligonucleotide
ucuuccgcuugugccucuu

SEQ ID NO: 3145360 - RNA, 19 nt, Artificial Sequence
  Description of Artificial Sequence: Synthetic oligonucleotide
gcuccccaacucucaugag

SEQ ID NO: 3145361 - RNA, 19 nt, Artificial Sequence
  Description of Artificial Sequence: Synthetic oligonucleotide
ccucuggguggccugcuuc

SEQ ID NO: 3145362 - RNA, 19 nt, Artificial Sequence
  Description of Artificial Sequence: Synthetic oligonucleotide
cuucucggugccagacucu

SEQ ID NO: 3145363 - RNA, 19 nt, Artificial Sequence
  Description of Artificial Sequence: Synthetic oligonucleotide
guucuccccuccauagccu

SEQ ID NO: 3145364 - RNA, 19 nt, Artificial Sequence
  Description of Artificial Sequence: Synthetic oligonucleotide
ucuugcccuuuggccaauu

SEQ ID NO: 3145365 - RNA, 19 nt, Artificial Sequence
  Description of Artificial Sequence: Synthetic oligonucleotide
cugcccugguucuuccgcu

SEQ ID NO: 3145366 - RNA, 19 nt, Artificial Sequence
  Description of Artificial Sequence: Synthetic oligonucleotide
ccuggcuccccaacucuca

SEQ ID NO: 3145367 - RNA, 19 nt, Artificial Sequence
  Description of Artificial Sequence: Synthetic oligonucleotide
caauuccucuggguggccu

SEQ ID NO: 3145368 - RNA, 19 nt, Artificial Sequence
  Description of Artificial Sequence: Synthetic oligonucleotide
ccccuccauagccuggcuc

SEQ ID NO: 3145369 - RNA, 19 nt, Artificial Sequence
  Description of Artificial Sequence: Synthetic oligonucleotide
gcccuuuggccaauuccuc

SEQ ID NO: 3145370 - RNA, 19 nt, Artificial Sequence
  Description of Artificial Sequence: Synthetic oligonucleotide
ccucuugcccuuuggccaa

SEQ ID NO: 3145371 - RNA, 19 nt, Artificial Sequence
  Description of Artificial Sequence: Synthetic oligonucleotide
cccuuuggccaauuccucu

SEQ ID NO: 3145372 - RNA, 19 nt, Artificial Sequence
  Description of Artificial Sequence: Synthetic oligonucleotide
ccaauuccucuggguggcc

SEQ ID NO: 3145373 - RNA, 19 nt, Artificial Sequence
  Description of Artificial Sequence: Synthetic oligonucleotide
ccuccugcccugguucuuc

SEQ ID NO: 3145374 - RNA, 19 nt, Artificial Sequence
  Description of Artificial Sequence: Synthetic oligonucleotide
accuccugcccugguucuu

SEQ ID NO: 3145375 - RNA, 19 nt, Artificial Sequence
  Description of Artificial Sequence: Synthetic oligonucleotide
cuggcuccccaacucucau

SEQ ID NO: 3145376 - RNA, 19 nt, Artificial Sequence
  Description of Artificial Sequence: Synthetic oligonucleotide
ccugcaaguccaggaccuc

SEQ ID NO: 3145377 - RNA, 19 nt, Artificial Sequence
  Description of Artificial Sequence: Synthetic oligonucleotide
gcuugugccucuugcccuu

SEQ ID NO: 3145378 - RNA, 19 nt, Artificial Sequence
  Description of Artificial Sequence: Synthetic oligonucleotide
gcucaccaucuuccugcaa

SEQ ID NO: 3145379 - RNA, 19 nt, Artificial Sequence
  Description of Artificial Sequence: Synthetic oligonucleotide
cccaacucucaugagcuuu

SEQ ID NO: 3145380 - RNA, 19 nt, Artificial Sequence
  Description of Artificial Sequence: Synthetic oligonucleotide
cgcuugugccucuugcccu

SEQ ID NO: 3145381 - RNA, 19 nt, Artificial Sequence
  Description of Artificial Sequence: Synthetic oligonucleotide
caggaccuccugcccuggu

SEQ ID NO: 3145382 - RNA, 19 nt, Artificial Sequence
  Description of Artificial Sequence: Synthetic oligonucleotide
ggguggccugcuucucggu

SEQ ID NO: 3145383 - RNA, 19 nt, Artificial Sequence
  Description of Artificial Sequence: Synthetic oligonucleotide
cccugguucuuccgcuugu

SEQ ID NO: 3145384 - RNA, 19 nt, Artificial Sequence
  Description of Artificial Sequence: Synthetic oligonucleotide
cuugugccucuugcccuuu

SEQ ID NO: 3145385 - RNA, 19 nt, Artificial Sequence
  Description of Artificial Sequence: Synthetic oligonucleotide
cucuugcccuuuggccaau

SEQ ID NO: 3145386 - RNA, 19 nt, Artificial Sequence
  Description of Artificial Sequence: Synthetic oligonucleotide
ccccaacucucaugagcuu

SEQ ID NO: 3145387 - RNA, 19 nt, Artificial Sequence
  Description of Artificial Sequence: Synthetic oligonucleotide
uugacguccacacagaugc

SEQ ID NO: 3145388 - RNA, 19 nt, Artificial Sequence
  Description of Artificial Sequence: Synthetic oligonucleotide
ucauuuaacacuuccacga

SEQ ID NO: 3145389 - RNA, 19 nt, Artificial Sequence
  Description of Artificial Sequence: Synthetic oligonucleotide
auacucauuuaacacuucc

SEQ ID NO: 3145390 - RNA, 19 nt, Artificial Sequence
  Description of Artificial Sequence: Synthetic oligonucleotide
gaaguugaacaccaggucc

SEQ ID NO: 3145391 - RNA, 19 nt, Artificial Sequence
  Description of Artificial Sequence: Synthetic oligonucleotide
uguggaaauacucauuuaa

SEQ ID NO: 3145392 - RNA, 19 nt, Artificial Sequence
  Description of Artificial Sequence: Synthetic oligonucleotide
uuuaacacuuccacgaagu

SEQ ID NO: 3145393 - RNA, 19 nt, Artificial Sequence
  Description of Artificial Sequence: Synthetic oligonucleotide
uaaaccuuguagaaguuga

SEQ ID NO: 3145394 - RNA, 19 nt, Artificial Sequence
  Description of Artificial Sequence: Synthetic oligonucleotide
uggaaauacucauuuaaca

SEQ ID NO: 3145395 - RNA, 19 nt, Artificial Sequence
  Description of Artificial Sequence: Synthetic oligonucleotide
ucuaccaccguguaaaccu

SEQ ID NO: 3145396 - RNA, 19 nt, Artificial Sequence
  Description of Artificial Sequence: Synthetic oligonucleotide
uuauggauggccucgaggu

SEQ ID NO: 3145397 - RNA, 19 nt, Artificial Sequence
  Description of Artificial Sequence: Synthetic oligonucleotide
uccacgaaguuauggaugg

SEQ ID NO: 3145398 - RNA, 19 nt, Artificial Sequence
  Description of Artificial Sequence: Synthetic oligonucleotide
uagaaguugaacaccaggu

SEQ ID NO: 3145399 - RNA, 19 nt, Artificial Sequence
  Description of Artificial Sequence: Synthetic oligonucleotide
agauuguugucauugacgu

SEQ ID NO: 3145400 - RNA, 19 nt, Artificial Sequence
  Description of Artificial Sequence: Synthetic oligonucleotide
guagaaguugaacaccagg

SEQ ID NO: 3145401 - RNA, 19 nt, Artificial Sequence
  Description of Artificial Sequence: Synthetic oligonucleotide
agaaguugaacaccagguc

SEQ ID NO: 3145402 - RNA, 19 nt, Artificial Sequence
  Description of Artificial Sequence: Synthetic oligonucleotide
cucauuuaacacuuccacg

SEQ ID NO: 3145403 - RNA, 19 nt, Artificial Sequence
  Description of Artificial Sequence: Synthetic oligonucleotide
aacacuuccacgaaguuau

SEQ ID NO: 3145404 - RNA, 19 nt, Artificial Sequence
  Description of Artificial Sequence: Synthetic oligonucleotide
gaaguuauggauggccucg

SEQ ID NO: 3145405 - RNA, 19 nt, Artificial Sequence
  Description of Artificial Sequence: Synthetic oligonucleotide
aaccuuguagaaguugaac

SEQ ID NO: 3145406 - RNA, 19 nt, Artificial Sequence
  Description of Artificial Sequence: Synthetic oligonucleotide
accuuguagaaguugaaca

SEQ ID NO: 3145407 - RNA, 19 nt, Artificial Sequence
  Description of Artificial Sequence: Synthetic oligonucleotide
uccacacagaugcagaagu

SEQ ID NO: 3145408 - RNA, 19 nt, Artificial Sequence
  Description of Artificial Sequence: Synthetic oligonucleotide
cagaugcagaaguagaggc

SEQ ID NO: 3145409 - RNA, 19 nt, Artificial Sequence
  Description of Artificial Sequence: Synthetic oligonucleotide
auuguggaaauacucauuu

SEQ ID NO: 3145410 - RNA, 19 nt, Artificial Sequence
  Description of Artificial Sequence: Synthetic oligonucleotide
cucgagguaggccagauug

SEQ ID NO: 3145411 - RNA, 19 nt, Artificial Sequence
  Description of Artificial Sequence: Synthetic oligonucleotide
gaugcagaaguagaggccc

SEQ ID NO: 3145412 - RNA, 19 nt, Artificial Sequence
  Description of Artificial Sequence: Synthetic oligonucleotide
gaaauacucauuuaacacu

SEQ ID NO: 3145413 - RNA, 19 nt, Artificial Sequence
  Description of Artificial Sequence: Synthetic oligonucleotide
auuuaacacuuccacgaag

SEQ ID NO: 3145414 - RNA, 19 nt, Artificial Sequence
  Description of Artificial Sequence: Synthetic oligonucleotide
ucaucuaccaccguguaaa

SEQ ID NO: 3145415 - RNA, 19 nt, Artificial Sequence
  Description of Artificial Sequence: Synthetic oligonucleotide
uacucauuuaacacuucca

SEQ ID NO: 3145416 - RNA, 19 nt, Artificial Sequence
  Description of Artificial Sequence: Synthetic oligonucleotide
uuccacgaaguuauggaug

SEQ ID NO: 3145417 - RNA, 19 nt, Artificial Sequence
  Description of Artificial Sequence: Synthetic oligonucleotide
aaauacucauuuaacacuu

SEQ ID NO: 3145418 - RNA, 19 nt, Artificial Sequence
  Description of Artificial Sequence: Synthetic oligonucleotide
guuauggauggccucgagg

SEQ ID NO: 3145419 - RNA, 19 nt, Artificial Sequence
  Description of Artificial Sequence: Synthetic oligonucleotide
accguguaaaccuuguaga

SEQ ID NO: 3145420 - RNA, 19 nt, Artificial Sequence
  Description of Artificial Sequence: Synthetic oligonucleotide
agacauuguggaaauacuc

SEQ ID NO: 3145421 - RNA, 19 nt, Artificial Sequence
  Description of Artificial Sequence: Synthetic oligonucleotide
cacagaugcagaaguagag

SEQ ID NO: 3145422 - RNA, 19 nt, Artificial Sequence
  Description of Artificial Sequence: Synthetic oligonucleotide
acagaugcagaaguagagg

SEQ ID NO: 3145423 - RNA, 19 nt, Artificial Sequence
  Description of Artificial Sequence: Synthetic oligonucleotide
uguagaaguugaacaccag

SEQ ID NO: 3145424 - RNA, 19 nt, Artificial Sequence
  Description of Artificial Sequence: Synthetic oligonucleotide
caccguguaaaccuuguag

SEQ ID NO: 3145425 - RNA, 19 nt, Artificial Sequence
  Description of Artificial Sequence: Synthetic oligonucleotide
aaguagaggcccgcguacc

SEQ ID NO: 3145426 - RNA, 19 nt, Artificial Sequence
  Description of Artificial Sequence: Synthetic oligonucleotide
agaugcagaaguagaggcc

SEQ ID NO: 3145427 - RNA, 19 nt, Artificial Sequence
  Description of Artificial Sequence: Synthetic oligonucleotide
gacauuguggaaauacuca

SEQ ID NO: 3145428 - RNA, 19 nt, Artificial Sequence
  Description of Artificial Sequence: Synthetic oligonucleotide
agguaggccagauuguugu

SEQ ID NO: 3145429 - RNA, 19 nt, Artificial Sequence
  Description of Artificial Sequence: Synthetic oligonucleotide
acauuguggaaauacucau

SEQ ID NO: 3145430 - RNA, 19 nt, Artificial Sequence
  Description of Artificial Sequence: Synthetic oligonucleotide
aauacucauuuaacacuuc

SEQ ID NO: 3145431 - RNA, 19 nt, Artificial Sequence
  Description of Artificial Sequence: Synthetic oligonucleotide
aaguugaacaccaggucca

SEQ ID NO: 3145432 - RNA, 19 nt, Artificial Sequence
  Description of Artificial Sequence: Synthetic oligonucleotide
uugaacaccagguccaguu

SEQ ID NO: 3145433 - RNA, 19 nt, Artificial Sequence
  Description of Artificial Sequence: Synthetic oligonucleotide
guguaaaccuuguagaagu

SEQ ID NO: 3145434 - RNA, 19 nt, Artificial Sequence
  Description of Artificial Sequence: Synthetic oligonucleotide
aguagaggcccgcguaccg

SEQ ID NO: 3145435 - RNA, 19 nt, Artificial Sequence
  Description of Artificial Sequence: Synthetic oligonucleotide
cacgaaguuauggauggcc

SEQ ID NO: 3145436 - RNA, 19 nt, Artificial Sequence
  Description of Artificial Sequence: Synthetic oligonucleotide
ucauugacguccacacaga

SEQ ID NO: 3145437 - RNA, 19 nt, Artificial Sequence
  Description of Artificial Sequence: Synthetic oligonucleotide
aucuaccaccguguaaacc

SEQ ID NO: 3145438 - RNA, 19 nt, Artificial Sequence
  Description of Artificial Sequence: Synthetic oligonucleotide
gaaguagaggcccgcguac

SEQ ID NO: 3145439 - RNA, 19 nt, Artificial Sequence
  Description of Artificial Sequence: Synthetic oligonucleotide
auggauggccucgagguag

SEQ ID NO: 3145440 - RNA, 19 nt, Artificial Sequence
  Description of Artificial Sequence: Synthetic oligonucleotide
guaaaccuuguagaaguug

SEQ ID NO: 3145441 - RNA, 19 nt, Artificial Sequence
  Description of Artificial Sequence: Synthetic oligonucleotide
aacaccagguccaguucac

SEQ ID NO: 3145442 - RNA, 19 nt, Artificial Sequence
  Description of Artificial Sequence: Synthetic oligonucleotide
agguccaguucacagacau

SEQ ID NO: 3145443 - RNA, 19 nt, Artificial Sequence
  Description of Artificial Sequence: Synthetic oligonucleotide
gaacaccagguccaguuca

SEQ ID NO: 3145444 - RNA, 19 nt, Artificial Sequence
  Description of Artificial Sequence: Synthetic oligonucleotide
guggaaauacucauuuaac

SEQ ID NO: 3145445 - RNA, 19 nt, Artificial Sequence
  Description of Artificial Sequence: Synthetic oligonucleotide
ccuuguagaaguugaacac

SEQ ID NO: 3145446 - RNA, 19 nt, Artificial Sequence
  Description of Artificial Sequence: Synthetic oligonucleotide
ugucauugacguccacaca

SEQ ID NO: 3145447 - RNA, 19 nt, Artificial Sequence
  Description of Artificial Sequence: Synthetic oligonucleotide
uuaacacuuccacgaaguu

SEQ ID NO: 3145448 - RNA, 19 nt, Artificial Sequence
  Description of Artificial Sequence: Synthetic oligonucleotide
uaacacuuccacgaaguua

SEQ ID NO: 3145449 - RNA, 19 nt, Artificial Sequence
  Description of Artificial Sequence: Synthetic oligonucleotide
gacguccacacagaugcag

SEQ ID NO: 3145450 - RNA, 19 nt, Artificial Sequence
  Description of Artificial Sequence: Synthetic oligonucleotide
agaaguagaggcccgcgua

SEQ ID NO: 3145451 - RNA, 19 nt, Artificial Sequence
  Description of Artificial Sequence: Synthetic oligonucleotide
cacuuccacgaaguuaugg

SEQ ID NO: 3145452 - RNA, 19 nt, Artificial Sequence
  Description of Artificial Sequence: Synthetic oligonucleotide
caccagguccaguucacag

SEQ ID NO: 3145453 - RNA, 19 nt, Artificial Sequence
  Description of Artificial Sequence: Synthetic oligonucleotide
uguaaaccuuguagaaguu

SEQ ID NO: 3145454 - RNA, 19 nt, Artificial Sequence
  Description of Artificial Sequence: Synthetic oligonucleotide
uuguugucauugacgucca

SEQ ID NO: 3145455 - RNA, 19 nt, Artificial Sequence
  Description of Artificial Sequence: Synthetic oligonucleotide
uaccgucgguagaugaucu

SEQ ID NO: 3145456 - RNA, 19 nt, Artificial Sequence
  Description of Artificial Sequence: Synthetic oligonucleotide
aguuauggauggccucgag

SEQ ID NO: 3145457 - RNA, 19 nt, Artificial Sequence
  Description of Artificial Sequence: Synthetic oligonucleotide
accagguccaguucacaga

SEQ ID NO: 3145458 - RNA, 19 nt, Artificial Sequence
  Description of Artificial Sequence: Synthetic oligonucleotide
ucgagguaggccagauugu

SEQ ID NO: 3145459 - RNA, 19 nt, Artificial Sequence
  Description of Artificial Sequence: Synthetic oligonucleotide
uuguggaaauacucauuua

SEQ ID NO: 3145460 - RNA, 19 nt, Artificial Sequence
  Description of Artificial Sequence: Synthetic oligonucleotide
auugacguccacacagaug

SEQ ID NO: 3145461 - RNA, 19 nt, Artificial Sequence
  Description of Artificial Sequence: Synthetic oligonucleotide
uaggccagauuguugucau

SEQ ID NO: 3145462 - RNA, 19 nt, Artificial Sequence
  Description of Artificial Sequence: Synthetic oligonucleotide
uaccaccguguaaaccuug

SEQ ID NO: 3145463 - RNA, 19 nt, Artificial Sequence
  Description of Artificial Sequence: Synthetic oligonucleotide
acgaaguuauggauggccu

SEQ ID NO: 3145464 - RNA, 19 nt, Artificial Sequence
  Description of Artificial Sequence: Synthetic oligonucleotide
uauggauggccucgaggua

SEQ ID NO: 3145465 - RNA, 19 nt, Artificial Sequence
  Description of Artificial Sequence: Synthetic oligonucleotide
aaguuauggauggccucga

SEQ ID NO: 3145466 - RNA, 19 nt, Artificial Sequence
  Description of Artificial Sequence: Synthetic oligonucleotide
aaaccuuguagaaguugaa

SEQ ID NO: 3145467 - RNA, 19 nt, Artificial Sequence
  Description of Artificial Sequence: Synthetic oligonucleotide
ggccagauuguugucauug

SEQ ID NO: 3145468 - RNA, 19 nt, Artificial Sequence
  Description of Artificial Sequence: Synthetic oligonucleotide
aguugaacaccagguccag

SEQ ID NO: 3145469 - RNA, 19 nt, Artificial Sequence
  Description of Artificial Sequence: Synthetic oligonucleotide
gagguaggccagauuguug

SEQ ID NO: 3145470 - RNA, 19 nt, Artificial Sequence
  Description of Artificial Sequence: Synthetic oligonucleotide
gauggccucgagguaggcc

SEQ ID NO: 3145471 - RNA, 19 nt, Artificial Sequence
  Description of Artificial Sequence: Synthetic oligonucleotide
ugcagaaguagaggcccgc

SEQ ID NO: 3145472 - RNA, 19 nt, Artificial Sequence
  Description of Artificial Sequence: Synthetic oligonucleotide
cauuuaacacuuccacgaa

SEQ ID NO: 3145473 - RNA, 19 nt, Artificial Sequence
  Description of Artificial Sequence: Synthetic oligonucleotide
guaggccagauuguuguca

SEQ ID NO: 3145474 - RNA, 19 nt, Artificial Sequence
  Description of Artificial Sequence: Synthetic oligonucleotide
ccagguccaguucacagac

SEQ ID NO: 3145475 - RNA, 19 nt, Artificial Sequence
  Description of Artificial Sequence: Synthetic oligonucleotide
guccacacagaugcagaag

SEQ ID NO: 3145476 - RNA, 19 nt, Artificial Sequence
  Description of Artificial Sequence: Synthetic oligonucleotide
caucuaccaccguguaaac

SEQ ID NO: 3145477 - RNA, 19 nt, Artificial Sequence
  Description of Artificial Sequence: Synthetic oligonucleotide
ccagauuguugucauugac

SEQ ID NO: 3145478 - RNA, 19 nt, Artificial Sequence
  Description of Artificial Sequence: Synthetic oligonucleotide
uagaggcccgcguaccguc

SEQ ID NO: 3145479 - RNA, 19 nt, Artificial Sequence
  Description of Artificial Sequence: Synthetic oligonucleotide
guaccgucgguagaugauc

SEQ ID NO: 3145480 - RNA, 19 nt, Artificial Sequence
  Description of Artificial Sequence: Synthetic oligonucleotide
augcagaaguagaggcccg

SEQ ID NO: 3145481 - RNA, 19 nt, Artificial Sequence
  Description of Artificial Sequence: Synthetic oligonucleotide
gaggcccgcguaccgucgg

SEQ ID NO: 3145482 - RNA, 19 nt, Artificial Sequence
  Description of Artificial Sequence: Synthetic oligonucleotide
ugacguccacacagaugca

SEQ ID NO: 3145483 - RNA, 19 nt, Artificial Sequence
  Description of Artificial Sequence: Synthetic oligonucleotide
cuuccacgaaguuauggau

SEQ ID NO: 3145484 - RNA, 19 nt, Artificial Sequence
  Description of Artificial Sequence: Synthetic oligonucleotide
acguccacacagaugcaga

SEQ ID NO: 3145485 - RNA, 19 nt, Artificial Sequence
  Description of Artificial Sequence: Synthetic oligonucleotide
gcagaaguagaggcccgcg

SEQ ID NO: 3145486 - RNA, 19 nt, Artificial Sequence
  Description of Artificial Sequence: Synthetic oligonucleotide
accaccguguaaaccuugu

SEQ ID NO: 3145487 - RNA, 19 nt, Artificial Sequence
  Description of Artificial Sequence: Synthetic oligonucleotide
cauuguggaaauacucauu

SEQ ID NO: 3145488 - RNA, 19 nt, Artificial Sequence
  Description of Artificial Sequence: Synthetic oligonucleotide
agaggcccgcguaccgucg

SEQ ID NO: 3145489 - RNA, 19 nt, Artificial Sequence
  Description of Artificial Sequence: Synthetic oligonucleotide
gccagauuguugucauuga

SEQ ID NO: 3145490 - RNA, 19 nt, Artificial Sequence
  Description of Artificial Sequence: Synthetic oligonucleotide
gguaggccagauuguuguc

SEQ ID NO: 3145491 - RNA, 19 nt, Artificial Sequence
  Description of Artificial Sequence: Synthetic oligonucleotide
ccguguaaaccuuguagaa

SEQ ID NO: 3145492 - RNA, 19 nt, Artificial Sequence
  Description of Artificial Sequence: Synthetic oligonucleotide
accgucgguagaugaucuu

SEQ ID NO: 3145493 - RNA, 19 nt, Artificial Sequence
  Description of Artificial Sequence: Synthetic oligonucleotide
cauugacguccacacagau

SEQ ID NO: 3145494 - RNA, 19 nt, Artificial Sequence
  Description of Artificial Sequence: Synthetic oligonucleotide
cagaaguagaggcccgcgu

SEQ ID NO: 3145495 - RNA, 19 nt, Artificial Sequence
  Description of Artificial Sequence: Synthetic oligonucleotide
gcguaccgucgguagauga

SEQ ID NO: 3145496 - RNA, 19 nt, Artificial Sequence
  Description of Artificial Sequence: Synthetic oligonucleotide
gcccgcguaccgucgguag

SEQ ID NO: 3145497 - RNA, 19 nt, Artificial Sequence
  Description of Artificial Sequence: Synthetic oligonucleotide
cagguccaguucacagaca

SEQ ID NO: 3145498 - RNA, 19 nt, Artificial Sequence
  Description of Artificial Sequence: Synthetic oligonucleotide
acacuuccacgaaguuaug

SEQ ID NO: 3145499 - RNA, 19 nt, Artificial Sequence
  Description of Artificial Sequence: Synthetic oligonucleotide
aggccagauuguugucauu

SEQ ID NO: 3145500 - RNA, 19 nt, Artificial Sequence
  Description of Artificial Sequence: Synthetic oligonucleotide
aggcccgcguaccgucggu

SEQ ID NO: 3145501 - RNA, 19 nt, Artificial Sequence
  Description of Artificial Sequence: Synthetic oligonucleotide
guugaacaccagguccagu

SEQ ID NO: 3145502 - RNA, 19 nt, Artificial Sequence
  Description of Artificial Sequence: Synthetic oligonucleotide
guagaggcccgcguaccgu

SEQ ID NO: 3145503 - RNA, 19 nt, Artificial Sequence
  Description of Artificial Sequence: Synthetic oligonucleotide
cuaccaccguguaaaccuu

SEQ ID NO: 3145504 - RNA, 19 nt, Artificial Sequence
  Description of Artificial Sequence: Synthetic oligonucleotide
ccacgaaguuauggauggc

SEQ ID NO: 3145505 - RNA, 19 nt, Artificial Sequence
  Description of Artificial Sequence: Synthetic oligonucleotide
ccacacagaugcagaagua

SEQ ID NO: 3145506 - RNA, 19 nt, Artificial Sequence
  Description of Artificial Sequence: Synthetic oligonucleotide
cguccacacagaugcagaa

SEQ ID NO: 3145507 - RNA, 19 nt, Artificial Sequence
  Description of Artificial Sequence: Synthetic oligonucleotide
cccgcguaccgucgguaga

SEQ ID NO: 3145508 - RNA, 19 nt, Artificial Sequence
  Description of Artificial Sequence: Synthetic oligonucleotide
ccaccguguaaaccuugua

SEQ ID NO: 3145509 - RNA, 19 nt, Artificial Sequence
  Description of Artificial Sequence: Synthetic oligonucleotide
cguaccgucgguagaugau

SEQ ID NO: 3145510 - RNA, 19 nt, Artificial Sequence
  Description of Artificial Sequence: Synthetic oligonucleotide
gguccaguucacagacauu

SEQ ID NO: 3145511 - RNA, 19 nt, Artificial Sequence
  Description of Artificial Sequence: Synthetic oligonucleotide
cgcguaccgucgguagaug

SEQ ID NO: 3145512 - RNA, 19 nt, Artificial Sequence
  Description of Artificial Sequence: Synthetic oligonucleotide
ggcccgcguaccgucggua

SEQ ID NO: 3145513 - RNA, 19 nt, Artificial Sequence
  Description of Artificial Sequence: Synthetic oligonucleotide
cgagguaggccagauuguu

SEQ ID NO: 3145514 - RNA, 19 nt, Artificial Sequence
  Description of Artificial Sequence: Synthetic oligonucleotide
gccucgagguaggccagau

SEQ ID NO: 3145515 - RNA, 19 nt, Artificial Sequence
  Description of Artificial Sequence: Synthetic oligonucleotide
ccgcguaccgucgguagau

SEQ ID NO: 3145516 - RNA, 19 nt, Artificial Sequence
  Description of Artificial Sequence: Synthetic oligonucleotide
ccucgagguaggccagauu

SEQ ID NO: 3145517 - RNA, 19 nt, Artificial Sequence
  Description of Artificial Sequence: Synthetic oligonucleotide
uguguaucaacccagaaag

SEQ ID NO: 3145518 - RNA, 19 nt, Artificial Sequence
  Description of Artificial Sequence: Synthetic oligonucleotide
aaaaccgcaagcuuuuggc

SEQ ID NO: 3145519 - RNA, 19 nt, Artificial Sequence
  Description of Artificial Sequence: Synthetic oligonucleotide
aacggcgucauauuccacc

SEQ ID NO: 3145520 - RNA, 19 nt, Artificial Sequence
  Description of Artificial Sequence: Synthetic oligonucleotide
aaacccaaacuccgcaccc

SEQ ID NO: 3145521 - RNA, 19 nt, Artificial Sequence
  Description of Artificial Sequence: Synthetic oligonucleotide
caagcuuuuggcaacggcg

SEQ ID NO: 3145522 - RNA, 19 nt, Artificial Sequence
  Description of Artificial Sequence: Synthetic oligonucleotide
uauuccaccccgcaaaccc

SEQ ID NO: 3145523 - RNA, 19 nt, Artificial Sequence
  Description of Artificial Sequence: Synthetic oligonucleotide
uguaucaacccagaaaggc

SEQ ID NO: 3145524 - RNA, 19 nt, Artificial Sequence
  Description of Artificial Sequence: Synthetic oligonucleotide
gagcguguaauccagauca

SEQ ID NO: 3145525 - RNA, 19 nt, Artificial Sequence
  Description of Artificial Sequence: Synthetic oligonucleotide
aaacuccgcacccagagca

SEQ ID NO: 3145526 - RNA, 19 nt, Artificial Sequence
  Description of Artificial Sequence: Synthetic oligonucleotide
uaucaacccagaaaggcca

SEQ ID NO: 3145527 - RNA, 19 nt, Artificial Sequence
  Description of Artificial Sequence: Synthetic oligonucleotide
ucauauuccaccccgcaaa

SEQ ID NO: 3145528 - RNA, 19 nt, Artificial Sequence
  Description of Artificial Sequence: Synthetic oligonucleotide
aaggccagagcguguaauc

SEQ ID NO: 3145529 - RNA, 19 nt, Artificial Sequence
  Description of Artificial Sequence: Synthetic oligonucleotide
aucccguauagucccaucg

SEQ ID NO: 3145530 - RNA, 19 nt, Artificial Sequence
  Description of Artificial Sequence: Synthetic oligonucleotide
caccccaacucuauggugg

SEQ ID NO: 3145531 - RNA, 19 nt, Artificial Sequence
  Description of Artificial Sequence: Synthetic oligonucleotide
acggcgucauauuccaccc

SEQ ID NO: 3145532 - RNA, 19 nt, Artificial Sequence
  Description of Artificial Sequence: Synthetic oligonucleotide
ugcucuuguggaacggagg

SEQ ID NO: 3145533 - RNA, 19 nt, Artificial Sequence
  Description of Artificial Sequence: Synthetic oligonucleotide
aaaccgcaagcuuuuggca

SEQ ID NO: 3145534 - RNA, 19 nt, Artificial Sequence
  Description of Artificial Sequence: Synthetic oligonucleotide
gagcaccccaacucuaugg

SEQ ID NO: 3145535 - RNA, 19 nt, Artificial Sequence
  Description of Artificial Sequence: Synthetic oligonucleotide
uuuggcaacggcgucauau

SEQ ID NO: 3145536 - RNA, 19 nt, Artificial Sequence
  Description of Artificial Sequence: Synthetic oligonucleotide
agagcguguaauccagauc

SEQ ID NO: 3145537 - RNA, 19 nt, Artificial Sequence
  Description of Artificial Sequence: Synthetic oligonucleotide
guaucaacccagaaaggcc

SEQ ID NO: 3145538 - RNA, 19 nt, Artificial Sequence
  Description of Artificial Sequence: Synthetic oligonucleotide
aaccgcaagcuuuuggcaa

SEQ ID NO: 3145539 - RNA, 19 nt, Artificial Sequence
  Description of Artificial Sequence: Synthetic oligonucleotide
acccagagcaccccaacuc

SEQ ID NO: 3145540 - RNA, 19 nt, Artificial Sequence
  Description of Artificial Sequence: Synthetic oligonucleotide
caaacccaaacuccgcacc

SEQ ID NO: 3145541 - RNA, 19 nt, Artificial Sequence
  Description of Artificial Sequence: Synthetic oligonucleotide
accgcaagcuuuuggcaac

SEQ ID NO: 3145542 - RNA, 19 nt, Artificial Sequence
  Description of Artificial Sequence: Synthetic oligonucleotide
uccacguguguaucaaccc

SEQ ID NO: 3145543 - RNA, 19 nt, Artificial Sequence
  Description of Artificial Sequence: Synthetic oligonucleotide
accccgcaaacccaaacuc

SEQ ID NO: 3145544 - RNA, 19 nt, Artificial Sequence
  Description of Artificial Sequence: Synthetic oligonucleotide
ucuuguggaacggaggguc

SEQ ID NO: 3145545 - RNA, 19 nt, Artificial Sequence
  Description of Artificial Sequence: Synthetic oligonucleotide
cacguguguaucaacccag

SEQ ID NO: 3145546 - RNA, 19 nt, Artificial Sequence
  Description of Artificial Sequence: Synthetic oligonucleotide
ucccguauagucccaucgc

SEQ ID NO: 3145547 - RNA, 19 nt, Artificial Sequence
  Description of Artificial Sequence: Synthetic oligonucleotide
aggccagagcguguaaucc

SEQ ID NO: 3145548 - RNA, 19 nt, Artificial Sequence
  Description of Artificial Sequence: Synthetic oligonucleotide
gcucuuguggaacggaggg

SEQ ID NO: 3145549 - RNA, 19 nt, Artificial Sequence
  Description of Artificial Sequence: Synthetic oligonucleotide
accccaacucuaugguggc

SEQ ID NO: 3145550 - RNA, 19 nt, Artificial Sequence
  Description of Artificial Sequence: Synthetic oligonucleotide
aagcuuuuggcaacggcgu

SEQ ID NO: 3145551 - RNA, 19 nt, Artificial Sequence
  Description of Artificial Sequence: Synthetic oligonucleotide
auauuccaccccgcaaacc

SEQ ID NO: 3145552 - RNA, 19 nt, Artificial Sequence
  Description of Artificial Sequence: Synthetic oligonucleotide
aucgcugcucuuguggaac

SEQ ID NO: 3145553 - RNA, 19 nt, Artificial Sequence
  Description of Artificial Sequence: Synthetic oligonucleotide
ggcgucauauuccaccccg

SEQ ID NO: 3145554 - RNA, 19 nt, Artificial Sequence
  Description of Artificial Sequence: Synthetic oligonucleotide
guguguaucaacccagaaa

SEQ ID NO: 3145555 - RNA, 19 nt, Artificial Sequence
  Description of Artificial Sequence: Synthetic oligonucleotide
cuuguggaacggagggucc

SEQ ID NO: 3145556 - RNA, 19 nt, Artificial Sequence
  Description of Artificial Sequence: Synthetic oligonucleotide
cauauuccaccccgcaaac

SEQ ID NO: 3145557 - RNA, 19 nt, Artificial Sequence
  Description of Artificial Sequence: Synthetic oligonucleotide
agcuuuuggcaacggcguc

SEQ ID NO: 3145558 - RNA, 19 nt, Artificial Sequence
  Description of Artificial Sequence: Synthetic oligonucleotide
agcaccccaacucuauggu

SEQ ID NO: 3145559 - RNA, 19 nt, Artificial Sequence
  Description of Artificial Sequence: Synthetic oligonucleotide
guccacguguguaucaacc

SEQ ID NO: 3145560 - RNA, 19 nt, Artificial Sequence
  Description of Artificial Sequence: Synthetic oligonucleotide
aaaggccagagcguguaau

SEQ ID NO: 3145561 - RNA, 19 nt, Artificial Sequence
  Description of Artificial Sequence: Synthetic oligonucleotide
cugcucuuguggaacggag

SEQ ID NO: 3145562 - RNA, 19 nt, Artificial Sequence
  Description of Artificial Sequence: Synthetic oligonucleotide
guguaucaacccagaaagg

SEQ ID NO: 3145563 - RNA, 19 nt, Artificial Sequence
  Description of Artificial Sequence: Synthetic oligonucleotide
ucgcugcucuuguggaacg

SEQ ID NO: 3145564 - RNA, 19 nt, Artificial Sequence
  Description of Artificial Sequence: Synthetic oligonucleotide
auagucccaucgcugcucu

SEQ ID NO: 3145565 - RNA, 19 nt, Artificial Sequence
  Description of Artificial Sequence: Synthetic oligonucleotide
acccaaacuccgcacccag

SEQ ID NO: 3145566 - RNA, 19 nt, Artificial Sequence
  Description of Artificial Sequence: Synthetic oligonucleotide
aacuccgcacccagagcac

SEQ ID NO: 3145567 - RNA, 19 nt, Artificial Sequence
  Description of Artificial Sequence: Synthetic oligonucleotide
cccgcaaacccaaacuccg

SEQ ID NO: 3145568 - RNA, 19 nt, Artificial Sequence
  Description of Artificial Sequence: Synthetic oligonucleotide
uggcaacggcgucauauuc

SEQ ID NO: 3145569 - RNA, 19 nt, Artificial Sequence
  Description of Artificial Sequence: Synthetic oligonucleotide
agucccaucgcugcucuug

SEQ ID NO: 3145570 - RNA, 19 nt, Artificial Sequence
  Description of Artificial Sequence: Synthetic oligonucleotide
acuccgcacccagagcacc

SEQ ID NO: 3145571 - RNA, 19 nt, Artificial Sequence
  Description of Artificial Sequence: Synthetic oligonucleotide
caaacuccgcacccagagc

SEQ ID NO: 3145572 - RNA, 19 nt, Artificial Sequence
  Description of Artificial Sequence: Synthetic oligonucleotide
agagcaccccaacucuaug

SEQ ID NO: 3145573 - RNA, 19 nt, Artificial Sequence
  Description of Artificial Sequence: Synthetic oligonucleotide
gccuaucccguauaguccc

SEQ ID NO: 3145574 - RNA, 19 nt, Artificial Sequence
  Description of Artificial Sequence: Synthetic oligonucleotide
ccaaacuccgcacccagag

SEQ ID NO: 3145575 - RNA, 19 nt, Artificial Sequence
  Description of Artificial Sequence: Synthetic oligonucleotide
uggaacggaggguccacgu

SEQ ID NO: 3145576 - RNA, 19 nt, Artificial Sequence
  Description of Artificial Sequence: Synthetic oligonucleotide
cguauagucccaucgcugc

SEQ ID NO: 3145577 - RNA, 19 nt, Artificial Sequence
  Description of Artificial Sequence: Synthetic oligonucleotide
gaacggaggguccacgugu

SEQ ID NO: 3145578 - RNA, 19 nt, Artificial Sequence
  Description of Artificial Sequence: Synthetic oligonucleotide
aacccaaacuccgcaccca

SEQ ID NO: 3145579 - RNA, 19 nt, Artificial Sequence
  Description of Artificial Sequence: Synthetic oligonucleotide
uuggcaacggcgucauauu

SEQ ID NO: 3145580 - RNA, 19 nt, Artificial Sequence
  Description of Artificial Sequence: Synthetic oligonucleotide
aacggaggguccacgugug

SEQ ID NO: 3145581 - RNA, 19 nt, Artificial Sequence
  Description of Artificial Sequence: Synthetic oligonucleotide
gucauauuccaccccgcaa

SEQ ID NO: 3145582 - RNA, 19 nt, Artificial Sequence
  Description of Artificial Sequence: Synthetic oligonucleotide
uuccaccccgcaaacccaa

SEQ ID NO: 3145583 - RNA, 19 nt, Artificial Sequence
  Description of Artificial Sequence: Synthetic oligonucleotide
uuguggaacggagggucca

SEQ ID NO: 3145584 - RNA, 19 nt, Artificial Sequence
  Description of Artificial Sequence: Synthetic oligonucleotide
agaaaggccagagcgugua

SEQ ID NO: 3145585 - RNA, 19 nt, Artificial Sequence
  Description of Artificial Sequence: Synthetic oligonucleotide
cccaucgcugcucuugugg

SEQ ID NO: 3145586 - RNA, 19 nt, Artificial Sequence
  Description of Artificial Sequence: Synthetic oligonucleotide
gcaagcuuuuggcaacggc

SEQ ID NO: 3145587 - RNA, 19 nt, Artificial Sequence
  Description of Artificial Sequence: Synthetic oligonucleotide
uaucccguauagucccauc

SEQ ID NO: 3145588 - RNA, 19 nt, Artificial Sequence
  Description of Artificial Sequence: Synthetic oligonucleotide
ggcaacggcgucauauucc

SEQ ID NO: 3145589 - RNA, 19 nt, Artificial Sequence
  Description of Artificial Sequence: Synthetic oligonucleotide
ucaacccagaaaggccaga

SEQ ID NO: 3145590 - RNA, 19 nt, Artificial Sequence
  Description of Artificial Sequence: Synthetic oligonucleotide
cuccgcacccagagcaccc

SEQ ID NO: 3145591 - RNA, 19 nt, Artificial Sequence
  Description of Artificial Sequence: Synthetic oligonucleotide
aggguccacguguguauca

SEQ ID NO: 3145592 - RNA, 19 nt, Artificial Sequence
  Description of Artificial Sequence: Synthetic oligonucleotide
gcaacggcgucauauucca

SEQ ID NO: 3145593 - RNA, 19 nt, Artificial Sequence
  Description of Artificial Sequence: Synthetic oligonucleotide
gcaaacccaaacuccgcac

SEQ ID NO: 3145594 - RNA, 19 nt, Artificial Sequence
  Description of Artificial Sequence: Synthetic oligonucleotide
uguggaacggaggguccac

SEQ ID NO: 3145595 - RNA, 19 nt, Artificial Sequence
  Description of Artificial Sequence: Synthetic oligonucleotide
aucaacccagaaaggccag

SEQ ID NO: 3145596 - RNA, 19 nt, Artificial Sequence
  Description of Artificial Sequence: Synthetic oligonucleotide
guggaacggaggguccacg

SEQ ID NO: 3145597 - RNA, 19 nt, Artificial Sequence
  Description of Artificial Sequence: Synthetic oligonucleotide
ggaacggaggguccacgug

SEQ ID NO: 3145598 - RNA, 19 nt, Artificial Sequence
  Description of Artificial Sequence: Synthetic oligonucleotide
ccagaaaggccagagcgug

SEQ ID NO: 3145599 - RNA, 19 nt, Artificial Sequence
  Description of Artificial Sequence: Synthetic oligonucleotide
ccguauagucccaucgcug

SEQ ID NO: 3145600 - RNA, 19 nt, Artificial Sequence
  Description of Artificial Sequence: Synthetic oligonucleotide
ccccgcaaacccaaacucc

SEQ ID NO: 3145601 - RNA, 19 nt, Artificial Sequence
  Description of Artificial Sequence: Synthetic oligonucleotide
cguguaauccagaucaaaa

SEQ ID NO: 3145602 - RNA, 19 nt, Artificial Sequence
  Description of Artificial Sequence: Synthetic oligonucleotide
gaaaggccagagcguguaa

SEQ ID NO: 3145603 - RNA, 19 nt, Artificial Sequence
  Description of Artificial Sequence: Synthetic oligonucleotide
gccagagcguguaauccag

SEQ ID NO: 3145604 - RNA, 19 nt, Artificial Sequence
  Description of Artificial Sequence: Synthetic oligonucleotide
auuccaccccgcaaaccca

SEQ ID NO: 3145605 - RNA, 19 nt, Artificial Sequence
  Description of Artificial Sequence: Synthetic oligonucleotide
ucccaucgcugcucuugug

SEQ ID NO: 3145606 - RNA, 19 nt, Artificial Sequence
  Description of Artificial Sequence: Synthetic oligonucleotide
uccgcacccagagcacccc

SEQ ID NO: 3145607 - RNA, 19 nt, Artificial Sequence
  Description of Artificial Sequence: Synthetic oligonucleotide
caacucuaugguggccaag

SEQ ID NO: 3145608 - RNA, 19 nt, Artificial Sequence
  Description of Artificial Sequence: Synthetic oligonucleotide
ggccagagcguguaaucca

SEQ ID NO: 3145609 - RNA, 19 nt, Artificial Sequence
  Description of Artificial Sequence: Synthetic oligonucleotide
acguguguaucaacccaga

SEQ ID NO: 3145610 - RNA, 19 nt, Artificial Sequence
  Description of Artificial Sequence: Synthetic oligonucleotide
guauagucccaucgcugcu

SEQ ID NO: 3145611 - RNA, 19 nt, Artificial Sequence
  Description of Artificial Sequence: Synthetic oligonucleotide
gaggguccacguguguauc

SEQ ID NO: 3145612 - RNA, 19 nt, Artificial Sequence
  Description of Artificial Sequence: Synthetic oligonucleotide
gcaccccaacucuauggug

SEQ ID NO: 3145613 - RNA, 19 nt, Artificial Sequence
  Description of Artificial Sequence: Synthetic oligonucleotide
gcuuuuggcaacggcguca

SEQ ID NO: 3145614 - RNA, 19 nt, Artificial Sequence
  Description of Artificial Sequence: Synthetic oligonucleotide
caacggcgucauauuccac

SEQ ID NO: 3145615 - RNA, 19 nt, Artificial Sequence
  Description of Artificial Sequence: Synthetic oligonucleotide
uccaccccgcaaacccaaa

SEQ ID NO: 3145616 - RNA, 19 nt, Artificial Sequence
  Description of Artificial Sequence: Synthetic oligonucleotide
gguccacguguguaucaac

SEQ ID NO: 3145617 - RNA, 19 nt, Artificial Sequence
  Description of Artificial Sequence: Synthetic oligonucleotide
cagagcguguaauccagau

SEQ ID NO: 3145618 - RNA, 19 nt, Artificial Sequence
  Description of Artificial Sequence: Synthetic oligonucleotide
acggaggguccacgugugu

SEQ ID NO: 3145619 - RNA, 19 nt, Artificial Sequence
  Description of Artificial Sequence: Synthetic oligonucleotide
ccacguguguaucaaccca

SEQ ID NO: 3145620 - RNA, 19 nt, Artificial Sequence
  Description of Artificial Sequence: Synthetic oligonucleotide
caucgcugcucuuguggaa

SEQ ID NO: 3145621 - RNA, 19 nt, Artificial Sequence
  Description of Artificial Sequence: Synthetic oligonucleotide
ccgcaaacccaaacuccgc

SEQ ID NO: 3145622 - RNA, 19 nt, Artificial Sequence
  Description of Artificial Sequence: Synthetic oligonucleotide
caccccgcaaacccaaacu

SEQ ID NO: 3145623 - RNA, 19 nt, Artificial Sequence
  Description of Artificial Sequence: Synthetic oligonucleotide
agcguguaauccagaucaa

SEQ ID NO: 3145624 - RNA, 19 nt, Artificial Sequence
  Description of Artificial Sequence: Synthetic oligonucleotide
ccaucgcugcucuugugga

SEQ ID NO: 3145625 - RNA, 19 nt, Artificial Sequence
  Description of Artificial Sequence: Synthetic oligonucleotide
gcacccagagcaccccaac

SEQ ID NO: 3145626 - RNA, 19 nt, Artificial Sequence
  Description of Artificial Sequence: Synthetic oligonucleotide
cccaacucuaugguggcca

SEQ ID NO: 3145627 - RNA, 19 nt, Artificial Sequence
  Description of Artificial Sequence: Synthetic oligonucleotide
gucccaucgcugcucuugu

SEQ ID NO: 3145628 - RNA, 19 nt, Artificial Sequence
  Description of Artificial Sequence: Synthetic oligonucleotide
cagagcaccccaacucuau

SEQ ID NO: 3145629 - RNA, 19 nt, Artificial Sequence
  Description of Artificial Sequence: Synthetic oligonucleotide
ggaggguccacguguguau

SEQ ID NO: 3145630 - RNA, 19 nt, Artificial Sequence
  Description of Artificial Sequence: Synthetic oligonucleotide
cagaaaggccagagcgugu

SEQ ID NO: 3145631 - RNA, 19 nt, Artificial Sequence
  Description of Artificial Sequence: Synthetic oligonucleotide
cuuuuggcaacggcgucau

SEQ ID NO: 3145632 - RNA, 19 nt, Artificial Sequence
  Description of Artificial Sequence: Synthetic oligonucleotide
ccaccccgcaaacccaaac

SEQ ID NO: 3145633 - RNA, 19 nt, Artificial Sequence
  Description of Artificial Sequence: Synthetic oligonucleotide
gcugcucuuguggaacgga

SEQ ID NO: 3145634 - RNA, 19 nt, Artificial Sequence
  Description of Artificial Sequence: Synthetic oligonucleotide
gcgucauauuccaccccgc

SEQ ID NO: 3145635 - RNA, 19 nt, Artificial Sequence
  Description of Artificial Sequence: Synthetic oligonucleotide
gcguguaauccagaucaaa

SEQ ID NO: 3145636 - RNA, 19 nt, Artificial Sequence
  Description of Artificial Sequence: Synthetic oligonucleotide
cgcaaacccaaacuccgca

SEQ ID NO: 3145637 - RNA, 19 nt, Artificial Sequence
  Description of Artificial Sequence: Synthetic oligonucleotide
ccgcaagcuuuuggcaacg

SEQ ID NO: 3145638 - RNA, 19 nt, Artificial Sequence
  Description of Artificial Sequence: Synthetic oligonucleotide
cacccagagcaccccaacu

SEQ ID NO: 3145639 - RNA, 19 nt, Artificial Sequence
  Description of Artificial Sequence: Synthetic oligonucleotide
cgucauauuccaccccgca

SEQ ID NO: 3145640 - RNA, 19 nt, Artificial Sequence
  Description of Artificial Sequence: Synthetic oligonucleotide
cucuuguggaacggagggu

SEQ ID NO: 3145641 - RNA, 19 nt, Artificial Sequence
  Description of Artificial Sequence: Synthetic oligonucleotide
uagucccaucgcugcucuu

SEQ ID NO: 3145642 - RNA, 19 nt, Artificial Sequence
  Description of Artificial Sequence: Synthetic oligonucleotide
cccguauagucccaucgcu

SEQ ID NO: 3145643 - RNA, 19 nt, Artificial Sequence
  Description of Artificial Sequence: Synthetic oligonucleotide
cccagaaaggccagagcgu

SEQ ID NO: 3145644 - RNA, 19 nt, Artificial Sequence
  Description of Artificial Sequence: Synthetic oligonucleotide
ccagagcguguaauccaga

SEQ ID NO: 3145645 - RNA, 19 nt, Artificial Sequence
  Description of Artificial Sequence: Synthetic oligonucleotide
ccaacucuaugguggccaa

SEQ ID NO: 3145646 - RNA, 19 nt, Artificial Sequence
  Description of Artificial Sequence: Synthetic oligonucleotide
ccuaucccguauaguccca

SEQ ID NO: 3145647 - RNA, 19 nt, Artificial Sequence
  Description of Artificial Sequence: Synthetic oligonucleotide
cguguguaucaacccagaa

SEQ ID NO: 3145648 - RNA, 19 nt, Artificial Sequence
  Description of Artificial Sequence: Synthetic oligonucleotide
ccagagcaccccaacucua

SEQ ID NO: 3145649 - RNA, 19 nt, Artificial Sequence
  Description of Artificial Sequence: Synthetic oligonucleotide
cuaucccguauagucccau

SEQ ID NO: 3145650 - RNA, 19 nt, Artificial Sequence
  Description of Artificial Sequence: Synthetic oligonucleotide
cgcaagcuuuuggcaacgg

SEQ ID NO: 3145651 - RNA, 19 nt, Artificial Sequence
  Description of Artificial Sequence: Synthetic oligonucleotide
ccccaacucuaugguggcc

SEQ ID NO: 3145652 - RNA, 19 nt, Artificial Sequence
  Description of Artificial Sequence: Synthetic oligonucleotide
cgcugcucuuguggaacgg

SEQ ID NO: 3145653 - RNA, 19 nt, Artificial Sequence
  Description of Artificial Sequence: Synthetic oligonucleotide
cggcgucauauuccacccc

SEQ ID NO: 3145654 - RNA, 19 nt, Artificial Sequence
  Description of Artificial Sequence: Synthetic oligonucleotide
ccgcacccagagcacccca

SEQ ID NO: 3145655 - RNA, 19 nt, Artificial Sequence
  Description of Artificial Sequence: Synthetic oligonucleotide
cgcacccagagcaccccaa

SEQ ID NO: 3145656 - RNA, 19 nt, Artificial Sequence
  Description of Artificial Sequence: Synthetic oligonucleotide
cggaggguccacgugugua

SEQ ID NO: 3145657 - RNA, 19 nt, Artificial Sequence
  Description of Artificial Sequence: Synthetic oligonucleotide
aaaacacugacacaguaac

SEQ ID NO: 3145658 - RNA, 19 nt, Artificial Sequence
  Description of Artificial Sequence: Synthetic oligonucleotide
aaucaaaucaaagaaagag

SEQ ID NO: 3145659 - RNA, 19 nt, Artificial Sequence
  Description of Artificial Sequence: Synthetic oligonucleotide
ucaaagaaagagaagacca

SEQ ID NO: 3145660 - RNA, 19 nt, Artificial Sequence
  Description of Artificial Sequence: Synthetic oligonucleotide
aauauauucgucaacgaag

SEQ ID NO: 3145661 - RNA, 19 nt, Artificial Sequence
  Description of Artificial Sequence: Synthetic oligonucleotide
acaguaacgaaucaaauca

SEQ ID NO: 3145662 - RNA, 19 nt, Artificial Sequence
  Description of Artificial Sequence: Synthetic oligonucleotide
uacaauauauucgucaacg

SEQ ID NO: 3145663 - RNA, 19 nt, Artificial Sequence
  Description of Artificial Sequence: Synthetic oligonucleotide
aacgaaucaaaucaaagaa

SEQ ID NO: 3145664 - RNA, 19 nt, Artificial Sequence
  Description of Artificial Sequence: Synthetic oligonucleotide
ucaaaucaaagaaagagaa

SEQ ID NO: 3145665 - RNA, 19 nt, Artificial Sequence
  Description of Artificial Sequence: Synthetic oligonucleotide
gauugcaaaacacugacac

SEQ ID NO: 3145666 - RNA, 19 nt, Artificial Sequence
  Description of Artificial Sequence: Synthetic oligonucleotide
aaguacaauauauucguca

SEQ ID NO: 3145667 - RNA, 19 nt, Artificial Sequence
  Description of Artificial Sequence: Synthetic oligonucleotide
aacgaagcuguuaaaauac

SEQ ID NO: 3145668 - RNA, 19 nt, Artificial Sequence
  Description of Artificial Sequence: Synthetic oligonucleotide
aucaaagaaagagaagacc

SEQ ID NO: 3145669 - RNA, 19 nt, Artificial Sequence
  Description of Artificial Sequence: Synthetic oligonucleotide
agaaagagaagaccagggc

SEQ ID NO: 3145670 - RNA, 19 nt, Artificial Sequence
  Description of Artificial Sequence: Synthetic oligonucleotide
uaacgaaucaaaucaaaga

SEQ ID NO: 3145671 - RNA, 19 nt, Artificial Sequence
  Description of Artificial Sequence: Synthetic oligonucleotide
gaagcuguuaaaauacugg

SEQ ID NO: 3145672 - RNA, 19 nt, Artificial Sequence
  Description of Artificial Sequence: Synthetic oligonucleotide
uugcaaaacacugacacag

SEQ ID NO: 3145673 - RNA, 19 nt, Artificial Sequence
  Description of Artificial Sequence: Synthetic oligonucleotide
gaagacauguauaugcagg

SEQ ID NO: 3145674 - RNA, 19 nt, Artificial Sequence
  Description of Artificial Sequence: Synthetic oligonucleotide
aaucaaagaaagagaagac

SEQ ID NO: 3145675 - RNA, 19 nt, Artificial Sequence
  Description of Artificial Sequence: Synthetic oligonucleotide
auauauucgucaacgaagc

SEQ ID NO: 3145676 - RNA, 19 nt, Artificial Sequence
  Description of Artificial Sequence: Synthetic oligonucleotide
uauucgucaacgaagcugu

SEQ ID NO: 3145677 - RNA, 19 nt, Artificial Sequence
  Description of Artificial Sequence: Synthetic oligonucleotide
uccaaaguacaauauauuc

SEQ ID NO: 3145678 - RNA, 19 nt, Artificial Sequence
  Description of Artificial Sequence: Synthetic oligonucleotide
aacacugacacaguaacga

SEQ ID NO: 3145679 - RNA, 19 nt, Artificial Sequence
  Description of Artificial Sequence: Synthetic oligonucleotide
aagaaagagaagaccaggg

SEQ ID NO: 3145680 - RNA, 19 nt, Artificial Sequence
  Description of Artificial Sequence: Synthetic oligonucleotide
aagcuguuaaaauacuggu

SEQ ID NO: 3145681 - RNA, 19 nt, Artificial Sequence
  Description of Artificial Sequence: Synthetic oligonucleotide
gcuguuaaaauacuggucc

SEQ ID NO: 3145682 - RNA, 19 nt, Artificial Sequence
  Description of Artificial Sequence: Synthetic oligonucleotide
uguauaugcaggugagagg

SEQ ID NO: 3145683 - RNA, 19 nt, Artificial Sequence
  Description of Artificial Sequence: Synthetic oligonucleotide
aagacauguauaugcaggu

SEQ ID NO: 3145684 - RNA, 19 nt, Artificial Sequence
  Description of Artificial Sequence: Synthetic oligonucleotide
aauccaaaguacaauauau

SEQ ID NO: 3145685 - RNA, 19 nt, Artificial Sequence
  Description of Artificial Sequence: Synthetic oligonucleotide
guauaugcaggugagaggc

SEQ ID NO: 3145686 - RNA, 19 nt, Artificial Sequence
  Description of Artificial Sequence: Synthetic oligonucleotide
ucugauugcaaaacacuga

SEQ ID NO: 3145687 - RNA, 19 nt, Artificial Sequence
  Description of Artificial Sequence: Synthetic oligonucleotide
uaugaaugcugugucaugc

SEQ ID NO: 3145688 - RNA, 19 nt, Artificial Sequence
  Description of Artificial Sequence: Synthetic oligonucleotide
agugcuuggaccuaugaau

SEQ ID NO: 3145689 - RNA, 19 nt, Artificial Sequence
  Description of Artificial Sequence: Synthetic oligonucleotide
ccaaaguacaauauauucg

SEQ ID NO: 3145690 - RNA, 19 nt, Artificial Sequence
  Description of Artificial Sequence: Synthetic oligonucleotide
aguacaauauauucgucaa

SEQ ID NO: 3145691 - RNA, 19 nt, Artificial Sequence
  Description of Artificial Sequence: Synthetic oligonucleotide
auguauaugcaggugagag

SEQ ID NO: 3145692 - RNA, 19 nt, Artificial Sequence
  Description of Artificial Sequence: Synthetic oligonucleotide
ugaagacauguauaugcag

SEQ ID NO: 3145693 - RNA, 19 nt, Artificial Sequence
  Description of Artificial Sequence: Synthetic oligonucleotide
caaucugauugcaaaacac

SEQ ID NO: 3145694 - RNA, 19 nt, Artificial Sequence
  Description of Artificial Sequence: Synthetic oligonucleotide
caaaucaaagaaagagaag

SEQ ID NO: 3145695 - RNA, 19 nt, Artificial Sequence
  Description of Artificial Sequence: Synthetic oligonucleotide
guaacgaaucaaaucaaag

SEQ ID NO: 3145696 - RNA, 19 nt, Artificial Sequence
  Description of Artificial Sequence: Synthetic oligonucleotide
cugauugcaaaacacugac

SEQ ID NO: 3145697 - RNA, 19 nt, Artificial Sequence
  Description of Artificial Sequence: Synthetic oligonucleotide
aaucugauugcaaaacacu

SEQ ID NO: 3145698 - RNA, 19 nt, Artificial Sequence
  Description of Artificial Sequence: Synthetic oligonucleotide
uguuaaaauacugguccag

SEQ ID NO: 3145699 - RNA, 19 nt, Artificial Sequence
  Description of Artificial Sequence: Synthetic oligonucleotide
acugacacaguaacgaauc

SEQ ID NO: 3145700 - RNA, 19 nt, Artificial Sequence
  Description of Artificial Sequence: Synthetic oligonucleotide
auauucgucaacgaagcug

SEQ ID NO: 3145701 - RNA, 19 nt, Artificial Sequence
  Description of Artificial Sequence: Synthetic oligonucleotide
ucgucaacgaagcuguuaa

SEQ ID NO: 3145702 - RNA, 19 nt, Artificial Sequence
  Description of Artificial Sequence: Synthetic oligonucleotide
cacaguaacgaaucaaauc

SEQ ID NO: 3145703 - RNA, 19 nt, Artificial Sequence
  Description of Artificial Sequence: Synthetic oligonucleotide
ucaacgaagcuguuaaaau

SEQ ID NO: 3145704 - RNA, 19 nt, Artificial Sequence
  Description of Artificial Sequence: Synthetic oligonucleotide
aauacugguccagaaacaa

SEQ ID NO: 3145705 - RNA, 19 nt, Artificial Sequence
  Description of Artificial Sequence: Synthetic oligonucleotide
aaaguacaauauauucguc

SEQ ID NO: 3145706 - RNA, 19 nt, Artificial Sequence
  Description of Artificial Sequence: Synthetic oligonucleotide
ugagaggcaaucugauugc

SEQ ID NO: 3145707 - RNA, 19 nt, Artificial Sequence
  Description of Artificial Sequence: Synthetic oligonucleotide
cgaaucaaaucaaagaaag

SEQ ID NO: 3145708 - RNA, 19 nt, Artificial Sequence
  Description of Artificial Sequence: Synthetic oligonucleotide
aucaaaucaaagaaagaga

SEQ ID NO: 3145709 - RNA, 19 nt, Artificial Sequence
  Description of Artificial Sequence: Synthetic oligonucleotide
caaaguacaauauauucgu

SEQ ID NO: 3145710 - RNA, 19 nt, Artificial Sequence
  Description of Artificial Sequence: Synthetic oligonucleotide
aaagugcuuggaccuauga

SEQ ID NO: 3145711 - RNA, 19 nt, Artificial Sequence
  Description of Artificial Sequence: Synthetic oligonucleotide
aaacacugacacaguaacg

SEQ ID NO: 3145712 - RNA, 19 nt, Artificial Sequence
  Description of Artificial Sequence: Synthetic oligonucleotide
gagaagaccagggcaaucc

SEQ ID NO: 3145713 - RNA, 19 nt, Artificial Sequence
  Description of Artificial Sequence: Synthetic oligonucleotide
acaauauauucgucaacga

SEQ ID NO: 3145714 - RNA, 19 nt, Artificial Sequence
  Description of Artificial Sequence: Synthetic oligonucleotide
aucugauugcaaaacacug

SEQ ID NO: 3145715 - RNA, 19 nt, Artificial Sequence
  Description of Artificial Sequence: Synthetic oligonucleotide
auugcaaaacacugacaca

SEQ ID NO: 3145716 - RNA, 19 nt, Artificial Sequence
  Description of Artificial Sequence: Synthetic oligonucleotide
aagugcuuggaccuaugaa

SEQ ID NO: 3145717 - RNA, 19 nt, Artificial Sequence
  Description of Artificial Sequence: Synthetic oligonucleotide
ugauugcaaaacacugaca

SEQ ID NO: 3145718 - RNA, 19 nt, Artificial Sequence
  Description of Artificial Sequence: Synthetic oligonucleotide
gaggcaaucugauugcaaa

SEQ ID NO: 3145719 - RNA, 19 nt, Artificial Sequence
  Description of Artificial Sequence: Synthetic oligonucleotide
agcuguuaaaauacugguc

SEQ ID NO: 3145720 - RNA, 19 nt, Artificial Sequence
  Description of Artificial Sequence: Synthetic oligonucleotide
aaauacugguccagaaaca

SEQ ID NO: 3145721 - RNA, 19 nt, Artificial Sequence
  Description of Artificial Sequence: Synthetic oligonucleotide
accagggcaauccaaagua

SEQ ID NO: 3145722 - RNA, 19 nt, Artificial Sequence
  Description of Artificial Sequence: Synthetic oligonucleotide
uauauucgucaacgaagcu

SEQ ID NO: 3145723 - RNA, 19 nt, Artificial Sequence
  Description of Artificial Sequence: Synthetic oligonucleotide
caauauauucgucaacgaa

SEQ ID NO: 3145724 - RNA, 19 nt, Artificial Sequence
  Description of Artificial Sequence: Synthetic oligonucleotide
acauguauaugcaggugag

SEQ ID NO: 3145725 - RNA, 19 nt, Artificial Sequence
  Description of Artificial Sequence: Synthetic oligonucleotide
cuuggaccuaugaaugcug

SEQ ID NO: 3145726 - RNA, 19 nt, Artificial Sequence
  Description of Artificial Sequence: Synthetic oligonucleotide
gaaucaaaucaaagaaaga

SEQ ID NO: 3145727 - RNA, 19 nt, Artificial Sequence
  Description of Artificial Sequence: Synthetic oligonucleotide
ugcuuggaccuaugaaugc

SEQ ID NO: 3145728 - RNA, 19 nt, Artificial Sequence
  Description of Artificial Sequence: Synthetic oligonucleotide
uuggaccuaugaaugcugu

SEQ ID NO: 3145729 - RNA, 19 nt, Artificial Sequence
  Description of Artificial Sequence: Synthetic oligonucleotide
gaccuaugaaugcuguguc

SEQ ID NO: 3145730 - RNA, 19 nt, Artificial Sequence
  Description of Artificial Sequence: Synthetic oligonucleotide
ugcaaaacacugacacagu

SEQ ID NO: 3145731 - RNA, 19 nt, Artificial Sequence
  Description of Artificial Sequence: Synthetic oligonucleotide
guuaaaauacugguccaga

SEQ ID NO: 3145732 - RNA, 19 nt, Artificial Sequence
  Description of Artificial Sequence: Synthetic oligonucleotide
guacaauauauucgucaac

SEQ ID NO: 3145733 - RNA, 19 nt, Artificial Sequence
  Description of Artificial Sequence: Synthetic oligonucleotide
cugaagacauguauaugca

SEQ ID NO: 3145734 - RNA, 19 nt, Artificial Sequence
  Description of Artificial Sequence: Synthetic oligonucleotide
cuaugaaugcugugucaug

SEQ ID NO: 3145735 - RNA, 19 nt, Artificial Sequence
  Description of Artificial Sequence: Synthetic oligonucleotide
caaaacacugacacaguaa

SEQ ID NO: 3145736 - RNA, 19 nt, Artificial Sequence
  Description of Artificial Sequence: Synthetic oligonucleotide
uauaugcaggugagaggca

SEQ ID NO: 3145737 - RNA, 19 nt, Artificial Sequence
  Description of Artificial Sequence: Synthetic oligonucleotide
gugcuuggaccuaugaaug

SEQ ID NO: 3145738 - RNA, 19 nt, Artificial Sequence
  Description of Artificial Sequence: Synthetic oligonucleotide
acgaaucaaaucaaagaaa

SEQ ID NO: 3145739 - RNA, 19 nt, Artificial Sequence
  Description of Artificial Sequence: Synthetic oligonucleotide
aagaccagggcaauccaaa

SEQ ID NO: 3145740 - RNA, 19 nt, Artificial Sequence
  Description of Artificial Sequence: Synthetic oligonucleotide
aguaacgaaucaaaucaaa

SEQ ID NO: 3145741 - RNA, 19 nt, Artificial Sequence
  Description of Artificial Sequence: Synthetic oligonucleotide
caacgaagcuguuaaaaua

SEQ ID NO: 3145742 - RNA, 19 nt, Artificial Sequence
  Description of Artificial Sequence: Synthetic oligonucleotide
accuaugaaugcuguguca

SEQ ID NO: 3145743 - RNA, 19 nt, Artificial Sequence
  Description of Artificial Sequence: Synthetic oligonucleotide
cuguuaaaauacuggucca

SEQ ID NO: 3145744 - RNA, 19 nt, Artificial Sequence
  Description of Artificial Sequence: Synthetic oligonucleotide
uggaccuaugaaugcugug

SEQ ID NO: 3145745 - RNA, 19 nt, Artificial Sequence
  Description of Artificial Sequence: Synthetic oligonucleotide
agaagaccagggcaaucca

SEQ ID NO: 3145746 - RNA, 19 nt, Artificial Sequence
  Description of Artificial Sequence: Synthetic oligonucleotide
gucaacgaagcuguuaaaa

SEQ ID NO: 3145747 - RNA, 19 nt, Artificial Sequence
  Description of Artificial Sequence: Synthetic oligonucleotide
augcaggugagaggcaauc

SEQ ID NO: 3145748 - RNA, 19 nt, Artificial Sequence
  Description of Artificial Sequence: Synthetic oligonucleotide
aaaagugcuuggaccuaug

SEQ ID NO: 3145749 - RNA, 19 nt, Artificial Sequence
  Description of Artificial Sequence: Synthetic oligonucleotide
agagaagaccagggcaauc

SEQ ID NO: 3145750 - RNA, 19 nt, Artificial Sequence
  Description of Artificial Sequence: Synthetic oligonucleotide
acacugacacaguaacgaa

SEQ ID NO: 3145751 - RNA, 19 nt, Artificial Sequence
  Description of Artificial Sequence: Synthetic oligonucleotide
aggcaaucugauugcaaaa

SEQ ID NO: 3145752 - RNA, 19 nt, Artificial Sequence
  Description of Artificial Sequence: Synthetic oligonucleotide
caggugagaggcaaucuga

SEQ ID NO: 3145753 - RNA, 19 nt, Artificial Sequence
  Description of Artificial Sequence: Synthetic oligonucleotide
ggcaauccaaaguacaaua

SEQ ID NO: 3145754 - RNA, 19 nt, Artificial Sequence
  Description of Artificial Sequence: Synthetic oligonucleotide
cagggcaauccaaaguaca

SEQ ID NO: 3145755 - RNA, 19 nt, Artificial Sequence
  Description of Artificial Sequence: Synthetic oligonucleotide
auaugcaggugagaggcaa

SEQ ID NO: 3145756 - RNA, 19 nt, Artificial Sequence
  Description of Artificial Sequence: Synthetic oligonucleotide
gcaaucugauugcaaaaca

SEQ ID NO: 3145757 - RNA, 19 nt, Artificial Sequence
  Description of Artificial Sequence: Synthetic oligonucleotide
uaugcaggugagaggcaau

SEQ ID NO: 3145758 - RNA, 19 nt, Artificial Sequence
  Description of Artificial Sequence: Synthetic oligonucleotide
ggcaaucugauugcaaaac

SEQ ID NO: 3145759 - RNA, 19 nt, Artificial Sequence
  Description of Artificial Sequence: Synthetic oligonucleotide
aagagaagaccagggcaau

SEQ ID NO: 3145760 - RNA, 19 nt, Artificial Sequence
  Description of Artificial Sequence: Synthetic oligonucleotide
gcaggugagaggcaaucug

SEQ ID NO: 3145761 - RNA, 19 nt, Artificial Sequence
  Description of Artificial Sequence: Synthetic oligonucleotide
uucgucaacgaagcuguua

SEQ ID NO: 3145762 - RNA, 19 nt, Artificial Sequence
  Description of Artificial Sequence: Synthetic oligonucleotide
auccaaaguacaauauauu

SEQ ID NO: 3145763 - RNA, 19 nt, Artificial Sequence
  Description of Artificial Sequence: Synthetic oligonucleotide
caguaacgaaucaaaucaa

SEQ ID NO: 3145764 - RNA, 19 nt, Artificial Sequence
  Description of Artificial Sequence: Synthetic oligonucleotide
acacaguaacgaaucaaau

SEQ ID NO: 3145765 - RNA, 19 nt, Artificial Sequence
  Description of Artificial Sequence: Synthetic oligonucleotide
agggcaauccaaaguacaa

SEQ ID NO: 3145766 - RNA, 19 nt, Artificial Sequence
  Description of Artificial Sequence: Synthetic oligonucleotide
cgaagcuguuaaaauacug

SEQ ID NO: 3145767 - RNA, 19 nt, Artificial Sequence
  Description of Artificial Sequence: Synthetic oligonucleotide
gaccagggcaauccaaagu

SEQ ID NO: 3145768 - RNA, 19 nt, Artificial Sequence
  Description of Artificial Sequence: Synthetic oligonucleotide
acgaagcuguuaaaauacu

SEQ ID NO: 3145769 - RNA, 19 nt, Artificial Sequence
  Description of Artificial Sequence: Synthetic oligonucleotide
gaagaccagggcaauccaa

SEQ ID NO: 3145770 - RNA, 19 nt, Artificial Sequence
  Description of Artificial Sequence: Synthetic oligonucleotide
cugacacaguaacgaauca

SEQ ID NO: 3145771 - RNA, 19 nt, Artificial Sequence
  Description of Artificial Sequence: Synthetic oligonucleotide
gcaaaacacugacacagua

SEQ ID NO: 3145772 - RNA, 19 nt, Artificial Sequence
  Description of Artificial Sequence: Synthetic oligonucleotide
gagaggcaaucugauugca

SEQ ID NO: 3145773 - RNA, 19 nt, Artificial Sequence
  Description of Artificial Sequence: Synthetic oligonucleotide
cauguauaugcaggugaga

SEQ ID NO: 3145774 - RNA, 19 nt, Artificial Sequence
  Description of Artificial Sequence: Synthetic oligonucleotide
auacugguccagaaacaaa

SEQ ID NO: 3145775 - RNA, 19 nt, Artificial Sequence
  Description of Artificial Sequence: Synthetic oligonucleotide
aggugagaggcaaucugau

SEQ ID NO: 3145776 - RNA, 19 nt, Artificial Sequence
  Description of Artificial Sequence: Synthetic oligonucleotide
agaggcaaucugauugcaa

SEQ ID NO: 3145777 - RNA, 19 nt, Artificial Sequence
  Description of Artificial Sequence: Synthetic oligonucleotide
ggaccuaugaaugcugugu

SEQ ID NO: 3145778 - RNA, 19 nt, Artificial Sequence
  Description of Artificial Sequence: Synthetic oligonucleotide
ccagggcaauccaaaguac

SEQ ID NO: 3145779 - RNA, 19 nt, Artificial Sequence
  Description of Artificial Sequence: Synthetic oligonucleotide
gcaauccaaaguacaauau

SEQ ID NO: 3145780 - RNA, 19 nt, Artificial Sequence
  Description of Artificial Sequence: Synthetic oligonucleotide
gcuuggaccuaugaaugcu

SEQ ID NO: 3145781 - RNA, 19 nt, Artificial Sequence
  Description of Artificial Sequence: Synthetic oligonucleotide
ccuaugaaugcugugucau

SEQ ID NO: 3145782 - RNA, 19 nt, Artificial Sequence
  Description of Artificial Sequence: Synthetic oligonucleotide
ggugagaggcaaucugauu

SEQ ID NO: 3145783 - RNA, 19 nt, Artificial Sequence
  Description of Artificial Sequence: Synthetic oligonucleotide
gggcaauccaaaguacaau

SEQ ID NO: 3145784 - RNA, 19 nt, Artificial Sequence
  Description of Artificial Sequence: Synthetic oligonucleotide
auucgucaacgaagcuguu

SEQ ID NO: 3145785 - RNA, 19 nt, Artificial Sequence
  Description of Artificial Sequence: Synthetic oligonucleotide
cgucaacgaagcuguuaaa

SEQ ID NO: 3145786 - RNA, 19 nt, Artificial Sequence
  Description of Artificial Sequence: Synthetic oligonucleotide
aucagcaaaauucugcucc

SEQ ID NO: 3145787 - RNA, 19 nt, Artificial Sequence
  Description of Artificial Sequence: Synthetic oligonucleotide
aaaauucugcuccuggcgc

SEQ ID NO: 3145788 - RNA, 19 nt, Artificial Sequence
  Description of Artificial Sequence: Synthetic oligonucleotide
uagucuagaacucaggugc

SEQ ID NO: 3145789 - RNA, 19 nt, Artificial Sequence
  Description of Artificial Sequence: Synthetic oligonucleotide
gaagcgaucagcaaaauuc

SEQ ID NO: 3145790 - RNA, 19 nt, Artificial Sequence
  Description of Artificial Sequence: Synthetic oligonucleotide
uuuagucuagaacucaggu

SEQ ID NO: 3145791 - RNA, 19 nt, Artificial Sequence
  Description of Artificial Sequence: Synthetic oligonucleotide
agaacucaggugcaggagg

SEQ ID NO: 3145792 - RNA, 19 nt, Artificial Sequence
  Description of Artificial Sequence: Synthetic oligonucleotide
uuagucuagaacucaggug

SEQ ID NO: 3145793 - RNA, 19 nt, Artificial Sequence
  Description of Artificial Sequence: Synthetic oligonucleotide
caaaauucugcuccuggcg

SEQ ID NO: 3145794 - RNA, 19 nt, Artificial Sequence
  Description of Artificial Sequence: Synthetic oligonucleotide
agcaaaauucugcuccugg

SEQ ID NO: 3145795 - RNA, 19 nt, Artificial Sequence
  Description of Artificial Sequence: Synthetic oligonucleotide
ucuagaacucaggugcagg

SEQ ID NO: 3145796 - RNA, 19 nt, Artificial Sequence
  Description of Artificial Sequence: Synthetic oligonucleotide
aaauucugcuccuggcgca

SEQ ID NO: 3145797 - RNA, 19 nt, Artificial Sequence
  Description of Artificial Sequence: Synthetic oligonucleotide
ucaucagggaggaagcgau

SEQ ID NO: 3145798 - RNA, 19 nt, Artificial Sequence
  Description of Artificial Sequence: Synthetic oligonucleotide
cucgucaucagggaggaag

SEQ ID NO: 3145799 - RNA, 19 nt, Artificial Sequence
  Description of Artificial Sequence: Synthetic oligonucleotide
ucgucaucagggaggaagc

SEQ ID NO: 3145800 - RNA, 19 nt, Artificial Sequence
  Description of Artificial Sequence: Synthetic oligonucleotide
aggugcaggaggcuucggc

SEQ ID NO: 3145801 - RNA, 19 nt, Artificial Sequence
  Description of Artificial Sequence: Synthetic oligonucleotide
cuugcccagugcuugggcg

SEQ ID NO: 3145802 - RNA, 19 nt, Artificial Sequence
  Description of Artificial Sequence: Synthetic oligonucleotide
guuuagucuagaacucagg

SEQ ID NO: 3145803 - RNA, 19 nt, Artificial Sequence
  Description of Artificial Sequence: Synthetic oligonucleotide
ucagcaaaauucugcuccu

SEQ ID NO: 3145804 - RNA, 19 nt, Artificial Sequence
  Description of Artificial Sequence: Synthetic oligonucleotide
accagcgcgucccagcagg

SEQ ID NO: 3145805 - RNA, 19 nt, Artificial Sequence
  Description of Artificial Sequence: Synthetic oligonucleotide
uugcccagugcuugggcgg

SEQ ID NO: 3145806 - RNA, 19 nt, Artificial Sequence
  Description of Artificial Sequence: Synthetic oligonucleotide
ggugcaggaggcuucggcg

SEQ ID NO: 3145807 - RNA, 19 nt, Artificial Sequence
  Description of Artificial Sequence: Synthetic oligonucleotide
ggugauguucugcaccagg

SEQ ID NO: 3145808 - RNA, 19 nt, Artificial Sequence
  Description of Artificial Sequence: Synthetic oligonucleotide
ucagggaggaagcgaucag

SEQ ID NO: 3145809 - RNA, 19 nt, Artificial Sequence
  Description of Artificial Sequence: Synthetic oligonucleotide
aauucugcuccuggcgcag

SEQ ID NO: 3145810 - RNA, 19 nt, Artificial Sequence
  Description of Artificial Sequence: Synthetic oligonucleotide
uagaacucaggugcaggag

SEQ ID NO: 3145811 - RNA, 19 nt, Artificial Sequence
  Description of Artificial Sequence: Synthetic oligonucleotide
gaucagcaaaauucugcuc

SEQ ID NO: 3145812 - RNA, 19 nt, Artificial Sequence
  Description of Artificial Sequence: Synthetic oligonucleotide
gcaaaauucugcuccuggc

SEQ ID NO: 3145813 - RNA, 19 nt, Artificial Sequence
  Description of Artificial Sequence: Synthetic oligonucleotide
uccucugcuauguccuggc

SEQ ID NO: 3145814 - RNA, 19 nt, Artificial Sequence
  Description of Artificial Sequence: Synthetic oligonucleotide
cuagaacucaggugcagga

SEQ ID NO: 3145815 - RNA, 19 nt, Artificial Sequence
  Description of Artificial Sequence: Synthetic oligonucleotide
ugaccagcgcgucccagca

SEQ ID NO: 3145816 - RNA, 19 nt, Artificial Sequence
  Description of Artificial Sequence: Synthetic oligonucleotide
ucaggugcaggaggcuucg

SEQ ID NO: 3145817 - RNA, 19 nt, Artificial Sequence
  Description of Artificial Sequence: Synthetic oligonucleotide
aucagggaggaagcgauca

SEQ ID NO: 3145818 - RNA, 19 nt, Artificial Sequence
  Description of Artificial Sequence: Synthetic oligonucleotide
agcgcgucccagcaggucu

SEQ ID NO: 3145819 - RNA, 19 nt, Artificial Sequence
  Description of Artificial Sequence: Synthetic oligonucleotide
uucggcgauccucugcuau

SEQ ID NO: 3145820 - RNA, 19 nt, Artificial Sequence
  Description of Artificial Sequence: Synthetic oligonucleotide
ggaggaagcgaucagcaaa

SEQ ID NO: 3145821 - RNA, 19 nt, Artificial Sequence
  Description of Artificial Sequence: Synthetic oligonucleotide
ucggcgauccucugcuaug

SEQ ID NO: 3145822 - RNA, 19 nt, Artificial Sequence
  Description of Artificial Sequence: Synthetic oligonucleotide
gcgaucagcaaaauucugc

SEQ ID NO: 3145823 - RNA, 19 nt, Artificial Sequence
  Description of Artificial Sequence: Synthetic oligonucleotide
gaggaagcgaucagcaaaa

SEQ ID NO: 3145824 - RNA, 19 nt, Artificial Sequence
  Description of Artificial Sequence: Synthetic oligonucleotide
gagaggugauguucugcac

SEQ ID NO: 3145825 - RNA, 19 nt, Artificial Sequence
  Description of Artificial Sequence: Synthetic oligonucleotide
cugaccagcgcgucccagc

SEQ ID NO: 3145826 - RNA, 19 nt, Artificial Sequence
  Description of Artificial Sequence: Synthetic oligonucleotide
cagggaggaagcgaucagc

SEQ ID NO: 3145827 - RNA, 19 nt, Artificial Sequence
  Description of Artificial Sequence: Synthetic oligonucleotide
agggaggaagcgaucagca

SEQ ID NO: 3145828 - RNA, 19 nt, Artificial Sequence
  Description of Artificial Sequence: Synthetic oligonucleotide
cucaggugcaggaggcuuc

SEQ ID NO: 3145829 - RNA, 19 nt, Artificial Sequence
  Description of Artificial Sequence: Synthetic oligonucleotide
uugggcggccucgucauca

SEQ ID NO: 3145830 - RNA, 19 nt, Artificial Sequence
  Description of Artificial Sequence: Synthetic oligonucleotide
gcgauccucugcuaugucc

SEQ ID NO: 3145831 - RNA, 19 nt, Artificial Sequence
  Description of Artificial Sequence: Synthetic oligonucleotide
gucuagaacucaggugcag

SEQ ID NO: 3145832 - RNA, 19 nt, Artificial Sequence
  Description of Artificial Sequence: Synthetic oligonucleotide
cguuuagucuagaacucag

SEQ ID NO: 3145833 - RNA, 19 nt, Artificial Sequence
  Description of Artificial Sequence: Synthetic oligonucleotide
ugcaggaggcuucggcgau

SEQ ID NO: 3145834 - RNA, 19 nt, Artificial Sequence
  Description of Artificial Sequence: Synthetic oligonucleotide
aacucaggugcaggaggcu

SEQ ID NO: 3145835 - RNA, 19 nt, Artificial Sequence
  Description of Artificial Sequence: Synthetic oligonucleotide
agcgaucagcaaaauucug

SEQ ID NO: 3145836 - RNA, 19 nt, Artificial Sequence
  Description of Artificial Sequence: Synthetic oligonucleotide
ugcuccuggcgcagagccc

SEQ ID NO: 3145837 - RNA, 19 nt, Artificial Sequence
  Description of Artificial Sequence: Synthetic oligonucleotide
ggccucgucaucagggagg

SEQ ID NO: 3145838 - RNA, 19 nt, Artificial Sequence
  Description of Artificial Sequence: Synthetic oligonucleotide
ggcggccucgucaucaggg

SEQ ID NO: 3145839 - RNA, 19 nt, Artificial Sequence
  Description of Artificial Sequence: Synthetic oligonucleotide
agucuagaacucaggugca

SEQ ID NO: 3145840 - RNA, 19 nt, Artificial Sequence
  Description of Artificial Sequence: Synthetic oligonucleotide
uggcgcagagccccguuua

SEQ ID NO: 3145841 - RNA, 19 nt, Artificial Sequence
  Description of Artificial Sequence: Synthetic oligonucleotide
gugcaggaggcuucggcga

SEQ ID NO: 3145842 - RNA, 19 nt, Artificial Sequence
  Description of Artificial Sequence: Synthetic oligonucleotide
ucugcuccuggcgcagagc

SEQ ID NO: 3145843 - RNA, 19 nt, Artificial Sequence
  Description of Artificial Sequence: Synthetic oligonucleotide
ugggcggccucgucaucag

SEQ ID NO: 3145844 - RNA, 19 nt, Artificial Sequence
  Description of Artificial Sequence: Synthetic oligonucleotide
caucagggaggaagcgauc

SEQ ID NO: 3145845 - RNA, 19 nt, Artificial Sequence
  Description of Artificial Sequence: Synthetic oligonucleotide
ccccguuuagucuagaacu

SEQ ID NO: 3145846 - RNA, 19 nt, Artificial Sequence
  Description of Artificial Sequence: Synthetic oligonucleotide
gucuugcccagugcuuggg

SEQ ID NO: 3145847 - RNA, 19 nt, Artificial Sequence
  Description of Artificial Sequence: Synthetic oligonucleotide
gccccguuuagucuagaac

SEQ ID NO: 3145848 - RNA, 19 nt, Artificial Sequence
  Description of Artificial Sequence: Synthetic oligonucleotide
cagugcuugggcggccucg

SEQ ID NO: 3145849 - RNA, 19 nt, Artificial Sequence
  Description of Artificial Sequence: Synthetic oligonucleotide
cagcaggucuugcccagug

SEQ ID NO: 3145850 - RNA, 19 nt, Artificial Sequence
  Description of Artificial Sequence: Synthetic oligonucleotide
cccguuuagucuagaacuc

SEQ ID NO: 3145851 - RNA, 19 nt, Artificial Sequence
  Description of Artificial Sequence: Synthetic oligonucleotide
gaggcuucggcgauccucu

SEQ ID NO: 3145852 - RNA, 19 nt, Artificial Sequence
  Description of Artificial Sequence: Synthetic oligonucleotide
ugcccagugcuugggcggc

SEQ ID NO: 3145853 - RNA, 19 nt, Artificial Sequence
  Description of Artificial Sequence: Synthetic oligonucleotide
cagagccccguuuagucua

SEQ ID NO: 3145854 - RNA, 19 nt, Artificial Sequence
  Description of Artificial Sequence: Synthetic oligonucleotide
agccccguuuagucuagaa

SEQ ID NO: 3145855 - RNA, 19 nt, Artificial Sequence
  Description of Artificial Sequence: Synthetic oligonucleotide
gaccagcgcgucccagcag

SEQ ID NO: 3145856 - RNA, 19 nt, Artificial Sequence
  Description of Artificial Sequence: Synthetic oligonucleotide
cagcaaaauucugcuccug

SEQ ID NO: 3145857 - RNA, 19 nt, Artificial Sequence
  Description of Artificial Sequence: Synthetic oligonucleotide
agugcuugggcggccucgu

SEQ ID NO: 3145858 - RNA, 19 nt, Artificial Sequence
  Description of Artificial Sequence: Synthetic oligonucleotide
aggugauguucugcaccag

SEQ ID NO: 3145859 - RNA, 19 nt, Artificial Sequence
  Description of Artificial Sequence: Synthetic oligonucleotide
ggaggcuucggcgauccuc

SEQ ID NO: 3145860 - RNA, 19 nt, Artificial Sequence
  Description of Artificial Sequence: Synthetic oligonucleotide
ggcuucggcgauccucugc

SEQ ID NO: 3145861 - RNA, 19 nt, Artificial Sequence
  Description of Artificial Sequence: Synthetic oligonucleotide
ggcgcagagccccguuuag

SEQ ID NO: 3145862 - RNA, 19 nt, Artificial Sequence
  Description of Artificial Sequence: Synthetic oligonucleotide
agagccccguuuagucuag

SEQ ID NO: 3145863 - RNA, 19 nt, Artificial Sequence
  Description of Artificial Sequence: Synthetic oligonucleotide
gcuucggcgauccucugcu

SEQ ID NO: 3145864 - RNA, 19 nt, Artificial Sequence
  Description of Artificial Sequence: Synthetic oligonucleotide
cuccuggcgcagagccccg

SEQ ID NO: 3145865 - RNA, 19 nt, Artificial Sequence
  Description of Artificial Sequence: Synthetic oligonucleotide
gggcugaccagcgcguccc

SEQ ID NO: 3145866 - RNA, 19 nt, Artificial Sequence
  Description of Artificial Sequence: Synthetic oligonucleotide
aggaagcgaucagcaaaau

SEQ ID NO: 3145867 - RNA, 19 nt, Artificial Sequence
  Description of Artificial Sequence: Synthetic oligonucleotide
ggggcugaccagcgcgucc

SEQ ID NO: 3145868 - RNA, 19 nt, Artificial Sequence
  Description of Artificial Sequence: Synthetic oligonucleotide
ggaagcgaucagcaaaauu

SEQ ID NO: 3145869 - RNA, 19 nt, Artificial Sequence
  Description of Artificial Sequence: Synthetic oligonucleotide
aggcuucggcgauccucug

SEQ ID NO: 3145870 - RNA, 19 nt, Artificial Sequence
  Description of Artificial Sequence: Synthetic oligonucleotide
gggaggaagcgaucagcaa

SEQ ID NO: 3145871 - RNA, 19 nt, Artificial Sequence
  Description of Artificial Sequence: Synthetic oligonucleotide
auucugcuccuggcgcaga

SEQ ID NO: 3145872 - RNA, 19 nt, Artificial Sequence
  Description of Artificial Sequence: Synthetic oligonucleotide
caggugcaggaggcuucgg

SEQ ID NO: 3145873 - RNA, 19 nt, Artificial Sequence
  Description of Artificial Sequence: Synthetic oligonucleotide
cuugggcggccucgucauc

SEQ ID NO: 3145874 - RNA, 19 nt, Artificial Sequence
  Description of Artificial Sequence: Synthetic oligonucleotide
cgucaucagggaggaagcg

SEQ ID NO: 3145875 - RNA, 19 nt, Artificial Sequence
  Description of Artificial Sequence: Synthetic oligonucleotide
ccguuuagucuagaacuca

SEQ ID NO: 3145876 - RNA, 19 nt, Artificial Sequence
  Description of Artificial Sequence: Synthetic oligonucleotide
gcagagccccguuuagucu

SEQ ID NO: 3145877 - RNA, 19 nt, Artificial Sequence
  Description of Artificial Sequence: Synthetic oligonucleotide
gggcggccucgucaucagg

SEQ ID NO: 3145878 - RNA, 19 nt, Artificial Sequence
  Description of Artificial Sequence: Synthetic oligonucleotide
aggaggcuucggcgauccu

SEQ ID NO: 3145879 - RNA, 19 nt, Artificial Sequence
  Description of Artificial Sequence: Synthetic oligonucleotide
gccucgucaucagggagga

SEQ ID NO: 3145880 - RNA, 19 nt, Artificial Sequence
  Description of Artificial Sequence: Synthetic oligonucleotide
ggcgauccucugcuauguc

SEQ ID NO: 3145881 - RNA, 19 nt, Artificial Sequence
  Description of Artificial Sequence: Synthetic oligonucleotide
cgauccucugcuauguccu

SEQ ID NO: 3145882 - RNA, 19 nt, Artificial Sequence
  Description of Artificial Sequence: Synthetic oligonucleotide
gcggccucgucaucaggga

SEQ ID NO: 3145883 - RNA, 19 nt, Artificial Sequence
  Description of Artificial Sequence: Synthetic oligonucleotide
gcugaccagcgcgucccag

SEQ ID NO: 3145884 - RNA, 19 nt, Artificial Sequence
  Description of Artificial Sequence: Synthetic oligonucleotide
uccuggcgcagagccccgu

SEQ ID NO: 3145885 - RNA, 19 nt, Artificial Sequence
  Description of Artificial Sequence: Synthetic oligonucleotide
cagcgcgucccagcagguc

SEQ ID NO: 3145886 - RNA, 19 nt, Artificial Sequence
  Description of Artificial Sequence: Synthetic oligonucleotide
cuucggcgauccucugcua

SEQ ID NO: 3145887 - RNA, 19 nt, Artificial Sequence
  Description of Artificial Sequence: Synthetic oligonucleotide
gcuugggcggccucgucau

SEQ ID NO: 3145888 - RNA, 19 nt, Artificial Sequence
  Description of Artificial Sequence: Synthetic oligonucleotide
cggccucgucaucagggag

SEQ ID NO: 3145889 - RNA, 19 nt, Artificial Sequence
  Description of Artificial Sequence: Synthetic oligonucleotide
gagccccguuuagucuaga

SEQ ID NO: 3145890 - RNA, 19 nt, Artificial Sequence
  Description of Artificial Sequence: Synthetic oligonucleotide
gcaggaggcuucggcgauc

SEQ ID NO: 3145891 - RNA, 19 nt, Artificial Sequence
  Description of Artificial Sequence: Synthetic oligonucleotide
ggcugaccagcgcguccca

SEQ ID NO: 3145892 - RNA, 19 nt, Artificial Sequence
  Description of Artificial Sequence: Synthetic oligonucleotide
cuggcgcagagccccguuu

SEQ ID NO: 3145893 - RNA, 19 nt, Artificial Sequence
  Description of Artificial Sequence: Synthetic oligonucleotide
gcgucccagcaggucuugc

SEQ ID NO: 3145894 - RNA, 19 nt, Artificial Sequence
  Description of Artificial Sequence: Synthetic oligonucleotide
ccagugcuugggcggccuc

SEQ ID NO: 3145895 - RNA, 19 nt, Artificial Sequence
  Description of Artificial Sequence: Synthetic oligonucleotide
gcccagugcuugggcggcc

SEQ ID NO: 3145896 - RNA, 19 nt, Artificial Sequence
  Description of Artificial Sequence: Synthetic oligonucleotide
gcgcagagccccguuuagu

SEQ ID NO: 3145897 - RNA, 19 nt, Artificial Sequence
  Description of Artificial Sequence: Synthetic oligonucleotide
ccagcgcgucccagcaggu

SEQ ID NO: 3145898 - RNA, 19 nt, Artificial Sequence
  Description of Artificial Sequence: Synthetic oligonucleotide
cgcgucccagcaggucuug

SEQ ID NO: 3145899 - RNA, 19 nt, Artificial Sequence
  Description of Artificial Sequence: Synthetic oligonucleotide
cggcgauccucugcuaugu

SEQ ID NO: 3145900 - RNA, 19 nt, Artificial Sequence
  Description of Artificial Sequence: Synthetic oligonucleotide
ccagcaggucuugcccagu

SEQ ID NO: 3145901 - RNA, 19 nt, Artificial Sequence
  Description of Artificial Sequence: Synthetic oligonucleotide
cccagugcuugggcggccu

SEQ ID NO: 3145902 - RNA, 19 nt, Artificial Sequence
  Description of Artificial Sequence: Synthetic oligonucleotide
gcgcgucccagcaggucuu

SEQ ID NO: 3145903 - RNA, 19 nt, Artificial Sequence
  Description of Artificial Sequence: Synthetic oligonucleotide
ccuggcgcagagccccguu

SEQ ID NO: 3145904 - RNA, 19 nt, Artificial Sequence
  Description of Artificial Sequence: Synthetic oligonucleotide
ccucgucaucagggaggaa

SEQ ID NO: 3145905 - RNA, 19 nt, Artificial Sequence
  Description of Artificial Sequence: Synthetic oligonucleotide
aaauauuaaaacuagaagu

SEQ ID NO: 3145906 - RNA, 19 nt, Artificial Sequence
  Description of Artificial Sequence: Synthetic oligonucleotide
aguacugaaauauuaaaac

SEQ ID NO: 3145907 - RNA, 19 nt, Artificial Sequence
  Description of Artificial Sequence: Synthetic oligonucleotide
aagauauacagccagcuag

SEQ ID NO: 3145908 - RNA, 19 nt, Artificial Sequence
  Description of Artificial Sequence: Synthetic oligonucleotide
uaaaacuagaaguaaaacc

SEQ ID NO: 3145909 - RNA, 19 nt, Artificial Sequence
  Description of Artificial Sequence: Synthetic oligonucleotide
aaguaaaaccacuaugugg

SEQ ID NO: 3145910 - RNA, 19 nt, Artificial Sequence
  Description of Artificial Sequence: Synthetic oligonucleotide
gaaauauuaaaacuagaag

SEQ ID NO: 3145911 - RNA, 19 nt, Artificial Sequence
  Description of Artificial Sequence: Synthetic oligonucleotide
aauaguacuaaccaccugu

SEQ ID NO: 3145912 - RNA, 19 nt, Artificial Sequence
  Description of Artificial Sequence: Synthetic oligonucleotide
aaaacuagaaguaaaacca

SEQ ID NO: 3145913 - RNA, 19 nt, Artificial Sequence
  Description of Artificial Sequence: Synthetic oligonucleotide
uuuagggaaagauauacag

SEQ ID NO: 3145914 - RNA, 19 nt, Artificial Sequence
  Description of Artificial Sequence: Synthetic oligonucleotide
ugaaauauuaaaacuagaa

SEQ ID NO: 3145915 - RNA, 19 nt, Artificial Sequence
  Description of Artificial Sequence: Synthetic oligonucleotide
uagggaaagauauacagcc

SEQ ID NO: 3145916 - RNA, 19 nt, Artificial Sequence
  Description of Artificial Sequence: Synthetic oligonucleotide
acuucaaacacccuugcac

SEQ ID NO: 3145917 - RNA, 19 nt, Artificial Sequence
  Description of Artificial Sequence: Synthetic oligonucleotide
aaaaccacuaugugguaac

SEQ ID NO: 3145918 - RNA, 19 nt, Artificial Sequence
  Description of Artificial Sequence: Synthetic oligonucleotide
uaugugguaacaauggacu

SEQ ID NO: 3145919 - RNA, 19 nt, Artificial Sequence
  Description of Artificial Sequence: Synthetic oligonucleotide
aguccuaagcacuucaaac

SEQ ID NO: 3145920 - RNA, 19 nt, Artificial Sequence
  Description of Artificial Sequence: Synthetic oligonucleotide
cacaauaguacuaaccacc

SEQ ID NO: 3145921 - RNA, 19 nt, Artificial Sequence
  Description of Artificial Sequence: Synthetic oligonucleotide
aauauuaaaacuagaagua

SEQ ID NO: 3145922 - RNA, 19 nt, Artificial Sequence
  Description of Artificial Sequence: Synthetic oligonucleotide
uguuacuuaguacugaaau

SEQ ID NO: 3145923 - RNA, 19 nt, Artificial Sequence
  Description of Artificial Sequence: Synthetic oligonucleotide
aacauuuuaauguuacuua

SEQ ID NO: 3145924 - RNA, 19 nt, Artificial Sequence
  Description of Artificial Sequence: Synthetic oligonucleotide
uagaaguaaaaccacuaug

SEQ ID NO: 3145925 - RNA, 19 nt, Artificial Sequence
  Description of Artificial Sequence: Synthetic oligonucleotide
gacacaauaguacuaacca

SEQ ID NO: 3145926 - RNA, 19 nt, Artificial Sequence
  Description of Artificial Sequence: Synthetic oligonucleotide
acauuuuaauguuacuuag

SEQ ID NO: 3145927 - RNA, 19 nt, Artificial Sequence
  Description of Artificial Sequence: Synthetic oligonucleotide
cuaagcacuucaaacaccc

SEQ ID NO: 3145928 - RNA, 19 nt, Artificial Sequence
  Description of Artificial Sequence: Synthetic oligonucleotide
ugauacacgacacaauagu

SEQ ID NO: 3145929 - RNA, 19 nt, Artificial Sequence
  Description of Artificial Sequence: Synthetic oligonucleotide
uuaauguuacuuaguacug

SEQ ID NO: 3145930 - RNA, 19 nt, Artificial Sequence
  Description of Artificial Sequence: Synthetic oligonucleotide
aguaaaaccacuauguggu

SEQ ID NO: 3145931 - RNA, 19 nt, Artificial Sequence
  Description of Artificial Sequence: Synthetic oligonucleotide
ucaguuucagugauacacg

SEQ ID NO: 3145932 - RNA, 19 nt, Artificial Sequence
  Description of Artificial Sequence: Synthetic oligonucleotide
uuagggaaagauauacagc

SEQ ID NO: 3145933 - RNA, 19 nt, Artificial Sequence
  Description of Artificial Sequence: Synthetic oligonucleotide
aauggacugguuuagggaa

SEQ ID NO: 3145934 - RNA, 19 nt, Artificial Sequence
  Description of Artificial Sequence: Synthetic oligonucleotide
cacaguaaacauuuuaaug

SEQ ID NO: 3145935 - RNA, 19 nt, Artificial Sequence
  Description of Artificial Sequence: Synthetic oligonucleotide
cacuaugugguaacaaugg

SEQ ID NO: 3145936 - RNA, 19 nt, Artificial Sequence
  Description of Artificial Sequence: Synthetic oligonucleotide
uaguacugaaauauuaaaa

SEQ ID NO: 3145937 - RNA, 19 nt, Artificial Sequence
  Description of Artificial Sequence: Synthetic oligonucleotide
auuuuaauguuacuuagua

SEQ ID NO: 3145938 - RNA, 19 nt, Artificial Sequence
  Description of Artificial Sequence: Synthetic oligonucleotide
aaacauuuuaauguuacuu

SEQ ID NO: 3145939 - RNA, 19 nt, Artificial Sequence
  Description of Artificial Sequence: Synthetic oligonucleotide
aaacuagaaguaaaaccac

SEQ ID NO: 3145940 - RNA, 19 nt, Artificial Sequence
  Description of Artificial Sequence: Synthetic oligonucleotide
uuacuuaguacugaaauau

SEQ ID NO: 3145941 - RNA, 19 nt, Artificial Sequence
  Description of Artificial Sequence: Synthetic oligonucleotide
aguacuaaccaccuguagu

SEQ ID NO: 3145942 - RNA, 19 nt, Artificial Sequence
  Description of Artificial Sequence: Synthetic oligonucleotide
aauguuacuuaguacugaa

SEQ ID NO: 3145943 - RNA, 19 nt, Artificial Sequence
  Description of Artificial Sequence: Synthetic oligonucleotide
agaaguaaaaccacuaugu

SEQ ID NO: 3145944 - RNA, 19 nt, Artificial Sequence
  Description of Artificial Sequence: Synthetic oligonucleotide
acugaaauauuaaaacuag

SEQ ID NO: 3145945 - RNA, 19 nt, Artificial Sequence
  Description of Artificial Sequence: Synthetic oligonucleotide
acaauggacugguuuaggg

SEQ ID NO: 3145946 - RNA, 19 nt, Artificial Sequence
  Description of Artificial Sequence: Synthetic oligonucleotide
gaaguaaaaccacuaugug

SEQ ID NO: 3145947 - RNA, 19 nt, Artificial Sequence
  Description of Artificial Sequence: Synthetic oligonucleotide
uuaaaacuagaaguaaaac

SEQ ID NO: 3145948 - RNA, 19 nt, Artificial Sequence
  Description of Artificial Sequence: Synthetic oligonucleotide
ugugguaacaauggacugg

SEQ ID NO: 3145949 - RNA, 19 nt, Artificial Sequence
  Description of Artificial Sequence: Synthetic oligonucleotide
uuaguacugaaauauuaaa

SEQ ID NO: 3145950 - RNA, 19 nt, Artificial Sequence
  Description of Artificial Sequence: Synthetic oligonucleotide
uacacgacacaauaguacu

SEQ ID NO: 3145951 - RNA, 19 nt, Artificial Sequence
  Description of Artificial Sequence: Synthetic oligonucleotide
cuaugugguaacaauggac

SEQ ID NO: 3145952 - RNA, 19 nt, Artificial Sequence
  Description of Artificial Sequence: Synthetic oligonucleotide
accaccuguaguccuaagc

SEQ ID NO: 3145953 - RNA, 19 nt, Artificial Sequence
  Description of Artificial Sequence: Synthetic oligonucleotide
guuucagugauacacgaca

SEQ ID NO: 3145954 - RNA, 19 nt, Artificial Sequence
  Description of Artificial Sequence: Synthetic oligonucleotide
auacacgacacaauaguac

SEQ ID NO: 3145955 - RNA, 19 nt, Artificial Sequence
  Description of Artificial Sequence: Synthetic oligonucleotide
uccuaagcacuucaaacac

SEQ ID NO: 3145956 - RNA, 19 nt, Artificial Sequence
  Description of Artificial Sequence: Synthetic oligonucleotide
agugauacacgacacaaua

SEQ ID NO: 3145957 - RNA, 19 nt, Artificial Sequence
  Description of Artificial Sequence: Synthetic oligonucleotide
guaaacauuuuaauguuac

SEQ ID NO: 3145958 - RNA, 19 nt, Artificial Sequence
  Description of Artificial Sequence: Synthetic oligonucleotide
agauauacagccagcuagc

SEQ ID NO: 3145959 - RNA, 19 nt, Artificial Sequence
  Description of Artificial Sequence: Synthetic oligonucleotide
uguaguccuaagcacuuca

SEQ ID NO: 3145960 - RNA, 19 nt, Artificial Sequence
  Description of Artificial Sequence: Synthetic oligonucleotide
uugcacacaguaaacauuu

SEQ ID NO: 3145961 - RNA, 19 nt, Artificial Sequence
  Description of Artificial Sequence: Synthetic oligonucleotide
uuucagugauacacgacac

SEQ ID NO: 3145962 - RNA, 19 nt, Artificial Sequence
  Description of Artificial Sequence: Synthetic oligonucleotide
aaagauauacagccagcua

SEQ ID NO: 3145963 - RNA, 19 nt, Artificial Sequence
  Description of Artificial Sequence: Synthetic oligonucleotide
ucagugauacacgacacaa

SEQ ID NO: 3145964 - RNA, 19 nt, Artificial Sequence
  Description of Artificial Sequence: Synthetic oligonucleotide
aagcacuucaaacacccuu

SEQ ID NO: 3145965 - RNA, 19 nt, Artificial Sequence
  Description of Artificial Sequence: Synthetic oligonucleotide
gggaaagauauacagccag

SEQ ID NO: 3145966 - RNA, 19 nt, Artificial Sequence
  Description of Artificial Sequence: Synthetic oligonucleotide
aacaauggacugguuuagg

SEQ ID NO: 3145967 - RNA, 19 nt, Artificial Sequence
  Description of Artificial Sequence: Synthetic oligonucleotide
aacuagaaguaaaaccacu

SEQ ID NO: 3145968 - RNA, 19 nt, Artificial Sequence
  Description of Artificial Sequence: Synthetic oligonucleotide
aacacccuugcacacagua

SEQ ID NO: 3145969 - RNA, 19 nt, Artificial Sequence
  Description of Artificial Sequence: Synthetic oligonucleotide
uaguacuaaccaccuguag

SEQ ID NO: 3145970 - RNA, 19 nt, Artificial Sequence
  Description of Artificial Sequence: Synthetic oligonucleotide
uucagugauacacgacaca

SEQ ID NO: 3145971 - RNA, 19 nt, Artificial Sequence
  Description of Artificial Sequence: Synthetic oligonucleotide
guaacaauggacugguuua

SEQ ID NO: 3145972 - RNA, 19 nt, Artificial Sequence
  Description of Artificial Sequence: Synthetic oligonucleotide
cuucaaacacccuugcaca

SEQ ID NO: 3145973 - RNA, 19 nt, Artificial Sequence
  Description of Artificial Sequence: Synthetic oligonucleotide
acacaguaaacauuuuaau

SEQ ID NO: 3145974 - RNA, 19 nt, Artificial Sequence
  Description of Artificial Sequence: Synthetic oligonucleotide
uaauguuacuuaguacuga

SEQ ID NO: 3145975 - RNA, 19 nt, Artificial Sequence
  Description of Artificial Sequence: Synthetic oligonucleotide
uaacaauggacugguuuag

SEQ ID NO: 3145976 - RNA, 19 nt, Artificial Sequence
  Description of Artificial Sequence: Synthetic oligonucleotide
cacacaguaaacauuuuaa

SEQ ID NO: 3145977 - RNA, 19 nt, Artificial Sequence
  Description of Artificial Sequence: Synthetic oligonucleotide
acuaugugguaacaaugga

SEQ ID NO: 3145978 - RNA, 19 nt, Artificial Sequence
  Description of Artificial Sequence: Synthetic oligonucleotide
guccuaagcacuucaaaca

SEQ ID NO: 3145979 - RNA, 19 nt, Artificial Sequence
  Description of Artificial Sequence: Synthetic oligonucleotide
gguuuagggaaagauauac

SEQ ID NO: 3145980 - RNA, 19 nt, Artificial Sequence
  Description of Artificial Sequence: Synthetic oligonucleotide
accacuaugugguaacaau

SEQ ID NO: 3145981 - RNA, 19 nt, Artificial Sequence
  Description of Artificial Sequence: Synthetic oligonucleotide
acgacacaauaguacuaac

SEQ ID NO: 3145982 - RNA, 19 nt, Artificial Sequence
  Description of Artificial Sequence: Synthetic oligonucleotide
uucaaacacccuugcacac

SEQ ID NO: 3145983 - RNA, 19 nt, Artificial Sequence
  Description of Artificial Sequence: Synthetic oligonucleotide
augugguaacaauggacug

SEQ ID NO: 3145984 - RNA, 19 nt, Artificial Sequence
  Description of Artificial Sequence: Synthetic oligonucleotide
guuacuuaguacugaaaua

SEQ ID NO: 3145985 - RNA, 19 nt, Artificial Sequence
  Description of Artificial Sequence: Synthetic oligonucleotide
uaaaaccacuaugugguaa

SEQ ID NO: 3145986 - RNA, 19 nt, Artificial Sequence
  Description of Artificial Sequence: Synthetic oligonucleotide
cugaaauauuaaaacuaga

SEQ ID NO: 3145987 - RNA, 19 nt, Artificial Sequence
  Description of Artificial Sequence: Synthetic oligonucleotide
acuaaccaccuguaguccu

SEQ ID NO: 3145988 - RNA, 19 nt, Artificial Sequence
  Description of Artificial Sequence: Synthetic oligonucleotide
uaguccuaagcacuucaaa

SEQ ID NO: 3145989 - RNA, 19 nt, Artificial Sequence
  Description of Artificial Sequence: Synthetic oligonucleotide
acaauaguacuaaccaccu

SEQ ID NO: 3145990 - RNA, 19 nt, Artificial Sequence
  Description of Artificial Sequence: Synthetic oligonucleotide
aguuucagugauacacgac

SEQ ID NO: 3145991 - RNA, 19 nt, Artificial Sequence
  Description of Artificial Sequence: Synthetic oligonucleotide
cugguuuagggaaagauau

SEQ ID NO: 3145992 - RNA, 19 nt, Artificial Sequence
  Description of Artificial Sequence: Synthetic oligonucleotide
acuuaguacugaaauauua

SEQ ID NO: 3145993 - RNA, 19 nt, Artificial Sequence
  Description of Artificial Sequence: Synthetic oligonucleotide
agcacuucaaacacccuug

SEQ ID NO: 3145994 - RNA, 19 nt, Artificial Sequence
  Description of Artificial Sequence: Synthetic oligonucleotide
gaaagauauacagccagcu

SEQ ID NO: 3145995 - RNA, 19 nt, Artificial Sequence
  Description of Artificial Sequence: Synthetic oligonucleotide
gugauacacgacacaauag

SEQ ID NO: 3145996 - RNA, 19 nt, Artificial Sequence
  Description of Artificial Sequence: Synthetic oligonucleotide
uacuuaguacugaaauauu

SEQ ID NO: 3145997 - RNA, 19 nt, Artificial Sequence
  Description of Artificial Sequence: Synthetic oligonucleotide
caauggacugguuuaggga

SEQ ID NO: 3145998 - RNA, 19 nt, Artificial Sequence
  Description of Artificial Sequence: Synthetic oligonucleotide
acuagaaguaaaaccacua

SEQ ID NO: 3145999 - RNA, 19 nt, Artificial Sequence
  Description of Artificial Sequence: Synthetic oligonucleotide
uacuaaccaccuguagucc

SEQ ID NO: 3146000 - RNA, 19 nt, Artificial Sequence
  Description of Artificial Sequence: Synthetic oligonucleotide
uggacugguuuagggaaag

SEQ ID NO: 3146001 - RNA, 19 nt, Artificial Sequence
  Description of Artificial Sequence: Synthetic oligonucleotide
gauacacgacacaauagua

SEQ ID NO: 3146002 - RNA, 19 nt, Artificial Sequence
  Description of Artificial Sequence: Synthetic oligonucleotide
caccuguaguccuaagcac

SEQ ID NO: 3146003 - RNA, 19 nt, Artificial Sequence
  Description of Artificial Sequence: Synthetic oligonucleotide
aaaccacuaugugguaaca

SEQ ID NO: 3146004 - RNA, 19 nt, Artificial Sequence
  Description of Artificial Sequence: Synthetic oligonucleotide
guuuagggaaagauauaca

SEQ ID NO: 3146005 - RNA, 19 nt, Artificial Sequence
  Description of Artificial Sequence: Synthetic oligonucleotide
ugguuuagggaaagauaua

SEQ ID NO: 3146006 - RNA, 19 nt, Artificial Sequence
  Description of Artificial Sequence: Synthetic oligonucleotide
aguaaacauuuuaauguua

SEQ ID NO: 3146007 - RNA, 19 nt, Artificial Sequence
  Description of Artificial Sequence: Synthetic oligonucleotide
caauaguacuaaccaccug

SEQ ID NO: 3146008 - RNA, 19 nt, Artificial Sequence
  Description of Artificial Sequence: Synthetic oligonucleotide
uaagcacuucaaacacccu

SEQ ID NO: 3146009 - RNA, 19 nt, Artificial Sequence
  Description of Artificial Sequence: Synthetic oligonucleotide
ccacuaugugguaacaaug

SEQ ID NO: 3146010 - RNA, 19 nt, Artificial Sequence
  Description of Artificial Sequence: Synthetic oligonucleotide
aaccacuaugugguaacaa

SEQ ID NO: 3146011 - RNA, 19 nt, Artificial Sequence
  Description of Artificial Sequence: Synthetic oligonucleotide
caguuucagugauacacga

SEQ ID NO: 3146012 - RNA, 19 nt, Artificial Sequence
  Description of Artificial Sequence: Synthetic oligonucleotide
accuguaguccuaagcacu

SEQ ID NO: 3146013 - RNA, 19 nt, Artificial Sequence
  Description of Artificial Sequence: Synthetic oligonucleotide
cgacacaauaguacuaacc

SEQ ID NO: 3146014 - RNA, 19 nt, Artificial Sequence
  Description of Artificial Sequence: Synthetic oligonucleotide
acugguuuagggaaagaua

SEQ ID NO: 3146015 - RNA, 19 nt, Artificial Sequence
  Description of Artificial Sequence: Synthetic oligonucleotide
ggaaagauauacagccagc

SEQ ID NO: 3146016 - RNA, 19 nt, Artificial Sequence
  Description of Artificial Sequence: Synthetic oligonucleotide
aaccaccuguaguccuaag

SEQ ID NO: 3146017 - RNA, 19 nt, Artificial Sequence
  Description of Artificial Sequence: Synthetic oligonucleotide
cacccuugcacacaguaaa

SEQ ID NO: 3146018 - RNA, 19 nt, Artificial Sequence
  Description of Artificial Sequence: Synthetic oligonucleotide
ccuaagcacuucaaacacc

SEQ ID NO: 3146019 - RNA, 19 nt, Artificial Sequence
  Description of Artificial Sequence: Synthetic oligonucleotide
acccuugcacacaguaaac

SEQ ID NO: 3146020 - RNA, 19 nt, Artificial Sequence
  Description of Artificial Sequence: Synthetic oligonucleotide
cuagaaguaaaaccacuau

SEQ ID NO: 3146021 - RNA, 19 nt, Artificial Sequence
  Description of Artificial Sequence: Synthetic oligonucleotide
gguaacaauggacugguuu

SEQ ID NO: 3146022 - RNA, 19 nt, Artificial Sequence
  Description of Artificial Sequence: Synthetic oligonucleotide
agggaaagauauacagcca

SEQ ID NO: 3146023 - RNA, 19 nt, Artificial Sequence
  Description of Artificial Sequence: Synthetic oligonucleotide
cacgacacaauaguacuaa

SEQ ID NO: 3146024 - RNA, 19 nt, Artificial Sequence
  Description of Artificial Sequence: Synthetic oligonucleotide
auaguacuaaccaccugua

SEQ ID NO: 3146025 - RNA, 19 nt, Artificial Sequence
  Description of Artificial Sequence: Synthetic oligonucleotide
gacugguuuagggaaagau

SEQ ID NO: 3146026 - RNA, 19 nt, Artificial Sequence
  Description of Artificial Sequence: Synthetic oligonucleotide
ccaccuguaguccuaagca

SEQ ID NO: 3146027 - RNA, 19 nt, Artificial Sequence
  Description of Artificial Sequence: Synthetic oligonucleotide
gauauacagccagcuagcu

SEQ ID NO: 3146028 - RNA, 19 nt, Artificial Sequence
  Description of Artificial Sequence: Synthetic oligonucleotide
ugcacacaguaaacauuuu

SEQ ID NO: 3146029 - RNA, 19 nt, Artificial Sequence
  Description of Artificial Sequence: Synthetic oligonucleotide
cuugcacacaguaaacauu

SEQ ID NO: 3146030 - RNA, 19 nt, Artificial Sequence
  Description of Artificial Sequence: Synthetic oligonucleotide
gugguaacaauggacuggu

SEQ ID NO: 3146031 - RNA, 19 nt, Artificial Sequence
  Description of Artificial Sequence: Synthetic oligonucleotide
guaaaaccacuauguggua

SEQ ID NO: 3146032 - RNA, 19 nt, Artificial Sequence
  Description of Artificial Sequence: Synthetic oligonucleotide
gcacacaguaaacauuuua

SEQ ID NO: 3146033 - RNA, 19 nt, Artificial Sequence
  Description of Artificial Sequence: Synthetic oligonucleotide
cuaaccaccuguaguccua

SEQ ID NO: 3146034 - RNA, 19 nt, Artificial Sequence
  Description of Artificial Sequence: Synthetic oligonucleotide
auguuacuuaguacugaaa

SEQ ID NO: 3146035 - RNA, 19 nt, Artificial Sequence
  Description of Artificial Sequence: Synthetic oligonucleotide
uaaccaccuguaguccuaa

SEQ ID NO: 3146036 - RNA, 19 nt, Artificial Sequence
  Description of Artificial Sequence: Synthetic oligonucleotide
cacuucaaacacccuugca

SEQ ID NO: 3146037 - RNA, 19 nt, Artificial Sequence
  Description of Artificial Sequence: Synthetic oligonucleotide
guaguccuaagcacuucaa

SEQ ID NO: 3146038 - RNA, 19 nt, Artificial Sequence
  Description of Artificial Sequence: Synthetic oligonucleotide
acacgacacaauaguacua

SEQ ID NO: 3146039 - RNA, 19 nt, Artificial Sequence
  Description of Artificial Sequence: Synthetic oligonucleotide
cuguaguccuaagcacuuc

SEQ ID NO: 3146040 - RNA, 19 nt, Artificial Sequence
  Description of Artificial Sequence: Synthetic oligonucleotide
acacccuugcacacaguaa

SEQ ID NO: 3146041 - RNA, 19 nt, Artificial Sequence
  Description of Artificial Sequence: Synthetic oligonucleotide
ugguaacaauggacugguu

SEQ ID NO: 3146042 - RNA, 19 nt, Artificial Sequence
  Description of Artificial Sequence: Synthetic oligonucleotide
auggacugguuuagggaaa

SEQ ID NO: 3146043 - RNA, 19 nt, Artificial Sequence
  Description of Artificial Sequence: Synthetic oligonucleotide
aaacacccuugcacacagu

SEQ ID NO: 3146044 - RNA, 19 nt, Artificial Sequence
  Description of Artificial Sequence: Synthetic oligonucleotide
cagugauacacgacacaau

SEQ ID NO: 3146045 - RNA, 19 nt, Artificial Sequence
  Description of Artificial Sequence: Synthetic oligonucleotide
ccuugcacacaguaaacau

SEQ ID NO: 3146046 - RNA, 19 nt, Artificial Sequence
  Description of Artificial Sequence: Synthetic oligonucleotide
cccuugcacacaguaaaca

SEQ ID NO: 3146047 - RNA, 19 nt, Artificial Sequence
  Description of Artificial Sequence: Synthetic oligonucleotide
ggacugguuuagggaaaga

SEQ ID NO: 3146048 - RNA, 19 nt, Artificial Sequence
  Description of Artificial Sequence: Synthetic oligonucleotide
aaaagugggauauagcuca

SEQ ID NO: 3146049 - RNA, 19 nt, Artificial Sequence
  Description of Artificial Sequence: Synthetic oligonucleotide
uauagagugaguuccagga

SEQ ID NO: 3146050 - RNA, 19 nt, Artificial Sequence
  Description of Artificial Sequence: Synthetic oligonucleotide
uugaggguuagccuggucu

SEQ ID NO: 3146051 - RNA, 19 nt, Artificial Sequence
  Description of Artificial Sequence: Synthetic oligonucleotide
gaguuugaggguuagccug

SEQ ID NO: 3146052 - RNA, 19 nt, Artificial Sequence
  Description of Artificial Sequence: Synthetic oligonucleotide
cuauagagugaguuccagg

SEQ ID NO: 3146053 - RNA, 19 nt, Artificial Sequence
  Description of Artificial Sequence: Synthetic oligonucleotide
gugaguuugaggguuagcc

SEQ ID NO: 3146054 - RNA, 19 nt, Artificial Sequence
  Description of Artificial Sequence: Synthetic oligonucleotide
ugucucggaaccacgaaaa

SEQ ID NO: 3146055 - RNA, 19 nt, Artificial Sequence
  Description of Artificial Sequence: Synthetic oligonucleotide
ugaguuugaggguuagccu

SEQ ID NO: 3146056 - RNA, 19 nt, Artificial Sequence
  Description of Artificial Sequence: Synthetic oligonucleotide
aacccugucucggaaccac

SEQ ID NO: 3146057 - RNA, 19 nt, Artificial Sequence
  Description of Artificial Sequence: Synthetic oligonucleotide
aguuugaggguuagccugg

SEQ ID NO: 3146058 - RNA, 19 nt, Artificial Sequence
  Description of Artificial Sequence: Synthetic oligonucleotide
ugaggguuagccuggucua

SEQ ID NO: 3146059 - RNA, 19 nt, Artificial Sequence
  Description of Artificial Sequence: Synthetic oligonucleotide
ugugaguuugaggguuagc

SEQ ID NO: 3146060 - RNA, 19 nt, Artificial Sequence
  Description of Artificial Sequence: Synthetic oligonucleotide
uuugaggguuagccugguc

SEQ ID NO: 3146061 - RNA, 19 nt, Artificial Sequence
  Description of Artificial Sequence: Synthetic oligonucleotide
aagugggauauagcucagu

SEQ ID NO: 3146062 - RNA, 19 nt, Artificial Sequence
  Description of Artificial Sequence: Synthetic oligonucleotide
ggguuagccuggucuauag

SEQ ID NO: 3146063 - RNA, 19 nt, Artificial Sequence
  Description of Artificial Sequence: Synthetic oligonucleotide
cugucucggaaccacgaaa

SEQ ID NO: 3146064 - RNA, 19 nt, Artificial Sequence
  Description of Artificial Sequence: Synthetic oligonucleotide
cugugaguuugaggguuag

SEQ ID NO: 3146065 - RNA, 19 nt, Artificial Sequence
  Description of Artificial Sequence: Synthetic oligonucleotide
acccugucucggaaccacg

SEQ ID NO: 3146066 - RNA, 19 nt, Artificial Sequence
  Description of Artificial Sequence: Synthetic oligonucleotide
gguuagccuggucuauaga

SEQ ID NO: 3146067 - RNA, 19 nt, Artificial Sequence
  Description of Artificial Sequence: Synthetic oligonucleotide
aggguuagccuggucuaua

SEQ ID NO: 3146068 - RNA, 19 nt, Artificial Sequence
  Description of Artificial Sequence: Synthetic oligonucleotide
gaggguuagccuggucuau

SEQ ID NO: 3146069 - RNA, 19 nt, Artificial Sequence
  Description of Artificial Sequence: Synthetic oligonucleotide
cccugucucggaaccacga

SEQ ID NO: 3146070 - RNA, 19 nt, Artificial Sequence
  Description of Artificial Sequence: Synthetic oligonucleotide
guuugaggguuagccuggu

SEQ ID NO: 3146071 - RNA, 19 nt, Artificial Sequence
  Description of Artificial Sequence: Synthetic oligonucleotide
ccugucucggaaccacgaa

SEQ ID NO: 3146072 - RNA, 19 nt, Artificial Sequence
  Description of Artificial Sequence: Synthetic oligonucleotide
uucuaaaccuuccuaaugc

SEQ ID NO: 3146073 - RNA, 19 nt, Artificial Sequence
  Description of Artificial Sequence: Synthetic oligonucleotide
uaaaccuuccuaaugcugu

SEQ ID NO: 3146074 - RNA, 19 nt, Artificial Sequence
  Description of Artificial Sequence: Synthetic oligonucleotide
ugaaucguaauguaaguau

SEQ ID NO: 3146075 - RNA, 19 nt, Artificial Sequence
  Description of Artificial Sequence: Synthetic oligonucleotide
uuuuaggugaccccuguga

SEQ ID NO: 3146076 - RNA, 19 nt, Artificial Sequence
  Description of Artificial Sequence: Synthetic oligonucleotide
ugcuauuucauaacuguaa

SEQ ID NO: 3146077 - RNA, 19 nt, Artificial Sequence
  Description of Artificial Sequence: Synthetic oligonucleotide
aaucguaauguaaguaucu

SEQ ID NO: 3146078 - RNA, 19 nt, Artificial Sequence
  Description of Artificial Sequence: Synthetic oligonucleotide
gaugguuuuaggugacccc

SEQ ID NO: 3146079 - RNA, 19 nt, Artificial Sequence
  Description of Artificial Sequence: Synthetic oligonucleotide
uguuuucugaugguuuuag

SEQ ID NO: 3146080 - RNA, 19 nt, Artificial Sequence
  Description of Artificial Sequence: Synthetic oligonucleotide
ucguaauguaaguaucugu

SEQ ID NO: 3146081 - RNA, 19 nt, Artificial Sequence
  Description of Artificial Sequence: Synthetic oligonucleotide
ucuaaaccuuccuaaugcu

SEQ ID NO: 3146082 - RNA, 19 nt, Artificial Sequence
  Description of Artificial Sequence: Synthetic oligonucleotide
uuuaggugaccccugugaa

SEQ ID NO: 3146083 - RNA, 19 nt, Artificial Sequence
  Description of Artificial Sequence: Synthetic oligonucleotide
ugguucuaaaccuuccuaa

SEQ ID NO: 3146084 - RNA, 19 nt, Artificial Sequence
  Description of Artificial Sequence: Synthetic oligonucleotide
guucuaaaccuuccuaaug

SEQ ID NO: 3146085 - RNA, 19 nt, Artificial Sequence
  Description of Artificial Sequence: Synthetic oligonucleotide
cuaaaccuuccuaaugcug

SEQ ID NO: 3146086 - RNA, 19 nt, Artificial Sequence
  Description of Artificial Sequence: Synthetic oligonucleotide
ugaugguuuuaggugaccc

SEQ ID NO: 3146087 - RNA, 19 nt, Artificial Sequence
  Description of Artificial Sequence: Synthetic oligonucleotide
guugcuauuucauaacugu

SEQ ID NO: 3146088 - RNA, 19 nt, Artificial Sequence
  Description of Artificial Sequence: Synthetic oligonucleotide
gaaucguaauguaaguauc

SEQ ID NO: 3146089 - RNA, 19 nt, Artificial Sequence
  Description of Artificial Sequence: Synthetic oligonucleotide
uugcuauuucauaacugua

SEQ ID NO: 3146090 - RNA, 19 nt, Artificial Sequence
  Description of Artificial Sequence: Synthetic oligonucleotide
aucguaauguaaguaucug

SEQ ID NO: 3146091 - RNA, 19 nt, Artificial Sequence
  Description of Artificial Sequence: Synthetic oligonucleotide
augguuuuaggugaccccu

SEQ ID NO: 3146092 - RNA, 19 nt, Artificial Sequence
  Description of Artificial Sequence: Synthetic oligonucleotide
ugguuuuaggugaccccug

SEQ ID NO: 3146093 - RNA, 19 nt, Artificial Sequence
  Description of Artificial Sequence: Synthetic oligonucleotide
guuuuaggugaccccugug

SEQ ID NO: 3146094 - RNA, 19 nt, Artificial Sequence
  Description of Artificial Sequence: Synthetic oligonucleotide
gugguucuaaaccuuccua

SEQ ID NO: 3146095 - RNA, 19 nt, Artificial Sequence
  Description of Artificial Sequence: Synthetic oligonucleotide
cugaugguuuuaggugacc

SEQ ID NO: 3146096 - RNA, 19 nt, Artificial Sequence
  Description of Artificial Sequence: Synthetic oligonucleotide
gcuauuucauaacuguaau

SEQ ID NO: 3146097 - RNA, 19 nt, Artificial Sequence
  Description of Artificial Sequence: Synthetic oligonucleotide
cuauuucauaacuguaauu

SEQ ID NO: 3146098 - RNA, 19 nt, Artificial Sequence
  Description of Artificial Sequence: Synthetic oligonucleotide
gguucuaaaccuuccuaau

SEQ ID NO: 3146099 - RNA, 19 nt, Artificial Sequence
  Description of Artificial Sequence: Synthetic oligonucleotide
aaauauuuuauccacugcu

SEQ ID NO: 3146100 - RNA, 19 nt, Artificial Sequence
  Description of Artificial Sequence: Synthetic oligonucleotide
aaaauauuuuauccacugc

SEQ ID NO: 3146101 - RNA, 19 nt, Artificial Sequence
  Description of Artificial Sequence: Synthetic oligonucleotide
uugucaaaauauuuuaucc

SEQ ID NO: 3146102 - RNA, 19 nt, Artificial Sequence
  Description of Artificial Sequence: Synthetic oligonucleotide
ucuucuuuugucaaaauau

SEQ ID NO: 3146103 - RNA, 19 nt, Artificial Sequence
  Description of Artificial Sequence: Synthetic oligonucleotide
auauuuuauccacugcugg

SEQ ID NO: 3146104 - RNA, 19 nt, Artificial Sequence
  Description of Artificial Sequence: Synthetic oligonucleotide
uauuuuauccacugcuggg

SEQ ID NO: 3146105 - RNA, 19 nt, Artificial Sequence
  Description of Artificial Sequence: Synthetic oligonucleotide
ugucaaaauauuuuaucca

SEQ ID NO: 3146106 - RNA, 19 nt, Artificial Sequence
  Description of Artificial Sequence: Synthetic oligonucleotide
caaaauauuuuauccacug

SEQ ID NO: 3146107 - RNA, 19 nt, Artificial Sequence
  Description of Artificial Sequence: Synthetic oligonucleotide
ucuuuugucaaaauauuuu

SEQ ID NO: 3146108 - RNA, 19 nt, Artificial Sequence
  Description of Artificial Sequence: Synthetic oligonucleotide
gucaaaauauuuuauccac

SEQ ID NO: 3146109 - RNA, 19 nt, Artificial Sequence
  Description of Artificial Sequence: Synthetic oligonucleotide
aauauuuuauccacugcug

SEQ ID NO: 3146110 - RNA, 19 nt, Artificial Sequence
  Description of Artificial Sequence: Synthetic oligonucleotide
ucaaaauauuuuauccacu

SEQ ID NO: 3146111 - RNA, 19 nt, Artificial Sequence
  Description of Artificial Sequence: Synthetic oligonucleotide
ugccuuuccuucauggacg

SEQ ID NO: 3146112 - RNA, 19 nt, Artificial Sequence
  Description of Artificial Sequence: Synthetic oligonucleotide
uuuugucaaaauauuuuau

SEQ ID NO: 3146113 - RNA, 19 nt, Artificial Sequence
  Description of Artificial Sequence: Synthetic oligonucleotide
auuuuauccacugcugggg

SEQ ID NO: 3146114 - RNA, 19 nt, Artificial Sequence
  Description of Artificial Sequence: Synthetic oligonucleotide
cuuuccuucauggacgggg

SEQ ID NO: 3146115 - RNA, 19 nt, Artificial Sequence
  Description of Artificial Sequence: Synthetic oligonucleotide
uugucgucgagacaccgcc

SEQ ID NO: 3146116 - RNA, 19 nt, Artificial Sequence
  Description of Artificial Sequence: Synthetic oligonucleotide
uucuuuugucaaaauauuu

SEQ ID NO: 3146117 - RNA, 19 nt, Artificial Sequence
  Description of Artificial Sequence: Synthetic oligonucleotide
gaacgagcuccucagcugc

SEQ ID NO: 3146118 - RNA, 19 nt, Artificial Sequence
  Description of Artificial Sequence: Synthetic oligonucleotide
ucgaacgagcuccucagcu

SEQ ID NO: 3146119 - RNA, 19 nt, Artificial Sequence
  Description of Artificial Sequence: Synthetic oligonucleotide
uuuccuucauggacggggc

SEQ ID NO: 3146120 - RNA, 19 nt, Artificial Sequence
  Description of Artificial Sequence: Synthetic oligonucleotide
cuggccucgaacgagcucc

SEQ ID NO: 3146121 - RNA, 19 nt, Artificial Sequence
  Description of Artificial Sequence: Synthetic oligonucleotide
ucagcugccggcaccgagc

SEQ ID NO: 3146122 - RNA, 19 nt, Artificial Sequence
  Description of Artificial Sequence: Synthetic oligonucleotide
cugccuuuccuucauggac

SEQ ID NO: 3146123 - RNA, 19 nt, Artificial Sequence
  Description of Artificial Sequence: Synthetic oligonucleotide
ucauggacggggcagccau

SEQ ID NO: 3146124 - RNA, 19 nt, Artificial Sequence
  Description of Artificial Sequence: Synthetic oligonucleotide
aguacaggucucgcgcgcc

SEQ ID NO: 3146125 - RNA, 19 nt, Artificial Sequence
  Description of Artificial Sequence: Synthetic oligonucleotide
uccgcguugucgucgagac

SEQ ID NO: 3146126 - RNA, 19 nt, Artificial Sequence
  Description of Artificial Sequence: Synthetic oligonucleotide
uccuucauggacggggcag

SEQ ID NO: 3146127 - RNA, 19 nt, Artificial Sequence
  Description of Artificial Sequence: Synthetic oligonucleotide
ucgagacaccgccaguaca

SEQ ID NO: 3146128 - RNA, 19 nt, Artificial Sequence
  Description of Artificial Sequence: Synthetic oligonucleotide
ucucgcgcgccccagcaca

SEQ ID NO: 3146129 - RNA, 19 nt, Artificial Sequence
  Description of Artificial Sequence: Synthetic oligonucleotide
gucgucgagacaccgccag

SEQ ID NO: 3146130 - RNA, 19 nt, Artificial Sequence
  Description of Artificial Sequence: Synthetic oligonucleotide
acaccgccaguacaggucu

SEQ ID NO: 3146131 - RNA, 19 nt, Artificial Sequence
  Description of Artificial Sequence: Synthetic oligonucleotide
aacgagcuccucagcugcc

SEQ ID NO: 3146132 - RNA, 19 nt, Artificial Sequence
  Description of Artificial Sequence: Synthetic oligonucleotide
uccucagcugccggcaccg

SEQ ID NO: 3146133 - RNA, 19 nt, Artificial Sequence
  Description of Artificial Sequence: Synthetic oligonucleotide
gccaguacaggucucgcgc

SEQ ID NO: 3146134 - RNA, 19 nt, Artificial Sequence
  Description of Artificial Sequence: Synthetic oligonucleotide
gagacaccgccaguacagg

SEQ ID NO: 3146135 - RNA, 19 nt, Artificial Sequence
  Description of Artificial Sequence: Synthetic oligonucleotide
ucucuucuuuugucaaaau

SEQ ID NO: 3146136 - RNA, 19 nt, Artificial Sequence
  Description of Artificial Sequence: Synthetic oligonucleotide
gacaccgccaguacagguc

SEQ ID NO: 3146137 - RNA, 19 nt, Artificial Sequence
  Description of Artificial Sequence: Synthetic oligonucleotide
agacaccgccaguacaggu

SEQ ID NO: 3146138 - RNA, 19 nt, Artificial Sequence
  Description of Artificial Sequence: Synthetic oligonucleotide
gggcagcuggccucgaacg

SEQ ID NO: 3146139 - RNA, 19 nt, Artificial Sequence
  Description of Artificial Sequence: Synthetic oligonucleotide
uuccuucauggacggggca

SEQ ID NO: 3146140 - RNA, 19 nt, Artificial Sequence
  Description of Artificial Sequence: Synthetic oligonucleotide
ugucgucgagacaccgcca

SEQ ID NO: 3146141 - RNA, 19 nt, Artificial Sequence
  Description of Artificial Sequence: Synthetic oligonucleotide
accgccaguacaggucucg

SEQ ID NO: 3146142 - RNA, 19 nt, Artificial Sequence
  Description of Artificial Sequence: Synthetic oligonucleotide
caguacaggucucgcgcgc

SEQ ID NO: 3146143 - RNA, 19 nt, Artificial Sequence
  Description of Artificial Sequence: Synthetic oligonucleotide
guugucgucgagacaccgc

SEQ ID NO: 3146144 - RNA, 19 nt, Artificial Sequence
  Description of Artificial Sequence: Synthetic oligonucleotide
cagcuggccucgaacgagc

SEQ ID NO: 3146145 - RNA, 19 nt, Artificial Sequence
  Description of Artificial Sequence: Synthetic oligonucleotide
gccuuuccuucauggacgg

SEQ ID NO: 3146146 - RNA, 19 nt, Artificial Sequence
  Description of Artificial Sequence: Synthetic oligonucleotide
cgagacaccgccaguacag

SEQ ID NO: 3146147 - RNA, 19 nt, Artificial Sequence
  Description of Artificial Sequence: Synthetic oligonucleotide
gucgagacaccgccaguac

SEQ ID NO: 3146148 - RNA, 19 nt, Artificial Sequence
  Description of Artificial Sequence: Synthetic oligonucleotide
gagcuccucagcugccggc

SEQ ID NO: 3146149 - RNA, 19 nt, Artificial Sequence
  Description of Artificial Sequence: Synthetic oligonucleotide
cucgaacgagcuccucagc

SEQ ID NO: 3146150 - RNA, 19 nt, Artificial Sequence
  Description of Artificial Sequence: Synthetic oligonucleotide
cucagcugccggcaccgag

SEQ ID NO: 3146151 - RNA, 19 nt, Artificial Sequence
  Description of Artificial Sequence: Synthetic oligonucleotide
aggucucgcgcgccccagc

SEQ ID NO: 3146152 - RNA, 19 nt, Artificial Sequence
  Description of Artificial Sequence: Synthetic oligonucleotide
uggacggggcagccauucc

SEQ ID NO: 3146153 - RNA, 19 nt, Artificial Sequence
  Description of Artificial Sequence: Synthetic oligonucleotide
ccaguacaggucucgcgcg

SEQ ID NO: 3146154 - RNA, 19 nt, Artificial Sequence
  Description of Artificial Sequence: Synthetic oligonucleotide
ccucgaacgagcuccucag

SEQ ID NO: 3146155 - RNA, 19 nt, Artificial Sequence
  Description of Artificial Sequence: Synthetic oligonucleotide
agcacaccugccuuuccuu

SEQ ID NO: 3146156 - RNA, 19 nt, Artificial Sequence
  Description of Artificial Sequence: Synthetic oligonucleotide
guacaggucucgcgcgccc

SEQ ID NO: 3146157 - RNA, 19 nt, Artificial Sequence
  Description of Artificial Sequence: Synthetic oligonucleotide
uucauggacggggcagcca

SEQ ID NO: 3146158 - RNA, 19 nt, Artificial Sequence
  Description of Artificial Sequence: Synthetic oligonucleotide
cuucauggacggggcagcc

SEQ ID NO: 3146159 - RNA, 19 nt, Artificial Sequence
  Description of Artificial Sequence: Synthetic oligonucleotide
cagcugccggcaccgagcc

SEQ ID NO: 3146160 - RNA, 19 nt, Artificial Sequence
  Description of Artificial Sequence: Synthetic oligonucleotide
cgcguugucgucgagacac

SEQ ID NO: 3146161 - RNA, 19 nt, Artificial Sequence
  Description of Artificial Sequence: Synthetic oligonucleotide
cacaccugccuuuccuuca

SEQ ID NO: 3146162 - RNA, 19 nt, Artificial Sequence
  Description of Artificial Sequence: Synthetic oligonucleotide
uccuccgcguugucgucga

SEQ ID NO: 3146163 - RNA, 19 nt, Artificial Sequence
  Description of Artificial Sequence: Synthetic oligonucleotide
ucgucgagacaccgccagu

SEQ ID NO: 3146164 - RNA, 19 nt, Artificial Sequence
  Description of Artificial Sequence: Synthetic oligonucleotide
acaccugccuuuccuucau

SEQ ID NO: 3146165 - RNA, 19 nt, Artificial Sequence
  Description of Artificial Sequence: Synthetic oligonucleotide
caccgagccgcguccuccg

SEQ ID NO: 3146166 - RNA, 19 nt, Artificial Sequence
  Description of Artificial Sequence: Synthetic oligonucleotide
uacaggucucgcgcgcccc

SEQ ID NO: 3146167 - RNA, 19 nt, Artificial Sequence
  Description of Artificial Sequence: Synthetic oligonucleotide
cuccucagcugccggcacc

SEQ ID NO: 3146168 - RNA, 19 nt, Artificial Sequence
  Description of Artificial Sequence: Synthetic oligonucleotide
gcugccggcaccgagccgc

SEQ ID NO: 3146169 - RNA, 19 nt, Artificial Sequence
  Description of Artificial Sequence: Synthetic oligonucleotide
accgagccgcguccuccgc

SEQ ID NO: 3146170 - RNA, 19 nt, Artificial Sequence
  Description of Artificial Sequence: Synthetic oligonucleotide
guccuccgcguugucgucg

SEQ ID NO: 3146171 - RNA, 19 nt, Artificial Sequence
  Description of Artificial Sequence: Synthetic oligonucleotide
acaggucucgcgcgcccca

SEQ ID NO: 3146172 - RNA, 19 nt, Artificial Sequence
  Description of Artificial Sequence: Synthetic oligonucleotide
agcuccucagcugccggca

SEQ ID NO: 3146173 - RNA, 19 nt, Artificial Sequence
  Description of Artificial Sequence: Synthetic oligonucleotide
gcagcuggccucgaacgag

SEQ ID NO: 3146174 - RNA, 19 nt, Artificial Sequence
  Description of Artificial Sequence: Synthetic oligonucleotide
uggccucgaacgagcuccu

SEQ ID NO: 3146175 - RNA, 19 nt, Artificial Sequence
  Description of Artificial Sequence: Synthetic oligonucleotide
agccgcguccuccgcguug

SEQ ID NO: 3146176 - RNA, 19 nt, Artificial Sequence
  Description of Artificial Sequence: Synthetic oligonucleotide
gccucgaacgagcuccuca

SEQ ID NO: 3146177 - RNA, 19 nt, Artificial Sequence
  Description of Artificial Sequence: Synthetic oligonucleotide
cgaacgagcuccucagcug

SEQ ID NO: 3146178 - RNA, 19 nt, Artificial Sequence
  Description of Artificial Sequence: Synthetic oligonucleotide
ccuucauggacggggcagc

SEQ ID NO: 3146179 - RNA, 19 nt, Artificial Sequence
  Description of Artificial Sequence: Synthetic oligonucleotide
agcugccggcaccgagccg

SEQ ID NO: 3146180 - RNA, 19 nt, Artificial Sequence
  Description of Artificial Sequence: Synthetic oligonucleotide
gcacaccugccuuuccuuc

SEQ ID NO: 3146181 - RNA, 19 nt, Artificial Sequence
  Description of Artificial Sequence: Synthetic oligonucleotide
cucgcgcgccccagcacac

SEQ ID NO: 3146182 - RNA, 19 nt, Artificial Sequence
  Description of Artificial Sequence: Synthetic oligonucleotide
cugccggcaccgagccgcg

SEQ ID NO: 3146183 - RNA, 19 nt, Artificial Sequence
  Description of Artificial Sequence: Synthetic oligonucleotide
ggcagcuggccucgaacga

SEQ ID NO: 3146184 - RNA, 19 nt, Artificial Sequence
  Description of Artificial Sequence: Synthetic oligonucleotide
caccugccuuuccuucaug

SEQ ID NO: 3146185 - RNA, 19 nt, Artificial Sequence
  Description of Artificial Sequence: Synthetic oligonucleotide
ccugccuuuccuucaugga

SEQ ID NO: 3146186 - RNA, 19 nt, Artificial Sequence
  Description of Artificial Sequence: Synthetic oligonucleotide
cgccaguacaggucucgcg

SEQ ID NO: 3146187 - RNA, 19 nt, Artificial Sequence
  Description of Artificial Sequence: Synthetic oligonucleotide
gucucgcgcgccccagcac

SEQ ID NO: 3146188 - RNA, 19 nt, Artificial Sequence
  Description of Artificial Sequence: Synthetic oligonucleotide
cguugucgucgagacaccg

SEQ ID NO: 3146189 - RNA, 19 nt, Artificial Sequence
  Description of Artificial Sequence: Synthetic oligonucleotide
ggucucgcgcgccccagca

SEQ ID NO: 3146190 - RNA, 19 nt, Artificial Sequence
  Description of Artificial Sequence: Synthetic oligonucleotide
cuccgcguugucgucgaga

SEQ ID NO: 3146191 - RNA, 19 nt, Artificial Sequence
  Description of Artificial Sequence: Synthetic oligonucleotide
agcuggccucgaacgagcu

SEQ ID NO: 3146192 - RNA, 19 nt, Artificial Sequence
  Description of Artificial Sequence: Synthetic oligonucleotide
cagcacaccugccuuuccu

SEQ ID NO: 3146193 - RNA, 19 nt, Artificial Sequence
  Description of Artificial Sequence: Synthetic oligonucleotide
caggucucgcgcgccccag

SEQ ID NO: 3146194 - RNA, 19 nt, Artificial Sequence
  Description of Artificial Sequence: Synthetic oligonucleotide
cgagcuccucagcugccgg

SEQ ID NO: 3146195 - RNA, 19 nt, Artificial Sequence
  Description of Artificial Sequence: Synthetic oligonucleotide
caccgccaguacaggucuc

SEQ ID NO: 3146196 - RNA, 19 nt, Artificial Sequence
  Description of Artificial Sequence: Synthetic oligonucleotide
ccgagccgcguccuccgcg

SEQ ID NO: 3146197 - RNA, 19 nt, Artificial Sequence
  Description of Artificial Sequence: Synthetic oligonucleotide
ucgcgcgccccagcacacc

SEQ ID NO: 3146198 - RNA, 19 nt, Artificial Sequence
  Description of Artificial Sequence: Synthetic oligonucleotide
ccggcaccgagccgcgucc

SEQ ID NO: 3146199 - RNA, 19 nt, Artificial Sequence
  Description of Artificial Sequence: Synthetic oligonucleotide
gcuggccucgaacgagcuc

SEQ ID NO: 3146200 - RNA, 19 nt, Artificial Sequence
  Description of Artificial Sequence: Synthetic oligonucleotide
ccuuuccuucauggacggg

SEQ ID NO: 3146201 - RNA, 19 nt, Artificial Sequence
  Description of Artificial Sequence: Synthetic oligonucleotide
gcuccucagcugccggcac

SEQ ID NO: 3146202 - RNA, 19 nt, Artificial Sequence
  Description of Artificial Sequence: Synthetic oligonucleotide
gccggcaccgagccgcguc

SEQ ID NO: 3146203 - RNA, 19 nt, Artificial Sequence
  Description of Artificial Sequence: Synthetic oligonucleotide
cgcgccccagcacaccugc

SEQ ID NO: 3146204 - RNA, 19 nt, Artificial Sequence
  Description of Artificial Sequence: Synthetic oligonucleotide
gcguugucgucgagacacc

SEQ ID NO: 3146205 - RNA, 19 nt, Artificial Sequence
  Description of Artificial Sequence: Synthetic oligonucleotide
ccgccaguacaggucucgc

SEQ ID NO: 3146206 - RNA, 19 nt, Artificial Sequence
  Description of Artificial Sequence: Synthetic oligonucleotide
ggcaccgagccgcguccuc

SEQ ID NO: 3146207 - RNA, 19 nt, Artificial Sequence
  Description of Artificial Sequence: Synthetic oligonucleotide
cgucgagacaccgccagua

SEQ ID NO: 3146208 - RNA, 19 nt, Artificial Sequence
  Description of Artificial Sequence: Synthetic oligonucleotide
ugccggcaccgagccgcgu

SEQ ID NO: 3146209 - RNA, 19 nt, Artificial Sequence
  Description of Artificial Sequence: Synthetic oligonucleotide
cauggacggggcagccauu

SEQ ID NO: 3146210 - RNA, 19 nt, Artificial Sequence
  Description of Artificial Sequence: Synthetic oligonucleotide
cguccuccgcguugucguc

SEQ ID NO: 3146211 - RNA, 19 nt, Artificial Sequence
  Description of Artificial Sequence: Synthetic oligonucleotide
gccccagcacaccugccuu

SEQ ID NO: 3146212 - RNA, 19 nt, Artificial Sequence
  Description of Artificial Sequence: Synthetic oligonucleotide
ccuccgcguugucgucgag

SEQ ID NO: 3146213 - RNA, 19 nt, Artificial Sequence
  Description of Artificial Sequence: Synthetic oligonucleotide
gcgcgccccagcacaccug

SEQ ID NO: 3146214 - RNA, 19 nt, Artificial Sequence
  Description of Artificial Sequence: Synthetic oligonucleotide
ggccucgaacgagcuccuc

SEQ ID NO: 3146215 - RNA, 19 nt, Artificial Sequence
  Description of Artificial Sequence: Synthetic oligonucleotide
ccgcguugucgucgagaca

SEQ ID NO: 3146216 - RNA, 19 nt, Artificial Sequence
  Description of Artificial Sequence: Synthetic oligonucleotide
gcgccccagcacaccugcc

SEQ ID NO: 3146217 - RNA, 19 nt, Artificial Sequence
  Description of Artificial Sequence: Synthetic oligonucleotide
gagccgcguccuccgcguu

SEQ ID NO: 3146218 - RNA, 19 nt, Artificial Sequence
  Description of Artificial Sequence: Synthetic oligonucleotide
cgccccagcacaccugccu

SEQ ID NO: 3146219 - RNA, 19 nt, Artificial Sequence
  Description of Artificial Sequence: Synthetic oligonucleotide
cgagccgcguccuccgcgu

SEQ ID NO: 3146220 - RNA, 19 nt, Artificial Sequence
  Description of Artificial Sequence: Synthetic oligonucleotide
cgcgcgccccagcacaccu

SEQ ID NO: 3146221 - RNA, 19 nt, Artificial Sequence
  Description of Artificial Sequence: Synthetic oligonucleotide
ccucagcugccggcaccga

SEQ ID NO: 3146222 - RNA, 19 nt, Artificial Sequence
  Description of Artificial Sequence: Synthetic oligonucleotide
cggcaccgagccgcguccu

SEQ ID NO: 3146223 - RNA, 19 nt, Artificial Sequence
  Description of Artificial Sequence: Synthetic oligonucleotide
uguguuuccaauuacagag

SEQ ID NO: 3146224 - RNA, 19 nt, Artificial Sequence
  Description of Artificial Sequence: Synthetic oligonucleotide
uuuccaauuacagagaagg

SEQ ID NO: 3146225 - RNA, 19 nt, Artificial Sequence
  Description of Artificial Sequence: Synthetic oligonucleotide
aauugcuucgucucuacac

SEQ ID NO: 3146226 - RNA, 19 nt, Artificial Sequence
  Description of Artificial Sequence: Synthetic oligonucleotide
aaaauguggacagacuugc

SEQ ID NO: 3146227 - RNA, 19 nt, Artificial Sequence
  Description of Artificial Sequence: Synthetic oligonucleotide
accacauucauccacauug

SEQ ID NO: 3146228 - RNA, 19 nt, Artificial Sequence
  Description of Artificial Sequence: Synthetic oligonucleotide
ugaguuaugcggcugauug

SEQ ID NO: 3146229 - RNA, 19 nt, Artificial Sequence
  Description of Artificial Sequence: Synthetic oligonucleotide
auugcuucgucucuacacc

SEQ ID NO: 3146230 - RNA, 19 nt, Artificial Sequence
  Description of Artificial Sequence: Synthetic oligonucleotide
uccaauuacagagaagggg

SEQ ID NO: 3146231 - RNA, 19 nt, Artificial Sequence
  Description of Artificial Sequence: Synthetic oligonucleotide
uugcaaaccauucugcuga

SEQ ID NO: 3146232 - RNA, 19 nt, Artificial Sequence
  Description of Artificial Sequence: Synthetic oligonucleotide
uuuaccacauucauccaca

SEQ ID NO: 3146233 - RNA, 19 nt, Artificial Sequence
  Description of Artificial Sequence: Synthetic oligonucleotide
auucugcugaguuaugcgg

SEQ ID NO: 3146234 - RNA, 19 nt, Artificial Sequence
  Description of Artificial Sequence: Synthetic oligonucleotide
uuuuaccacauucauccac

SEQ ID NO: 3146235 - RNA, 19 nt, Artificial Sequence
  Description of Artificial Sequence: Synthetic oligonucleotide
acauucauccacauugccc

SEQ ID NO: 3146236 - RNA, 19 nt, Artificial Sequence
  Description of Artificial Sequence: Synthetic oligonucleotide
aauguggacagacuugcaa

SEQ ID NO: 3146237 - RNA, 19 nt, Artificial Sequence
  Description of Artificial Sequence: Synthetic oligonucleotide
ucccaugucccacaaaaug

SEQ ID NO: 3146238 - RNA, 19 nt, Artificial Sequence
  Description of Artificial Sequence: Synthetic oligonucleotide
acaaaauguggacagacuu

SEQ ID NO: 3146239 - RNA, 19 nt, Artificial Sequence
  Description of Artificial Sequence: Synthetic oligonucleotide
uggacaaccucuacuaacu

SEQ ID NO: 3146240 - RNA, 19 nt, Artificial Sequence
  Description of Artificial Sequence: Synthetic oligonucleotide
uuccaauuacagagaaggg

SEQ ID NO: 3146241 - RNA, 19 nt, Artificial Sequence
  Description of Artificial Sequence: Synthetic oligonucleotide
agacuugcaaaccauucug

SEQ ID NO: 3146242 - RNA, 19 nt, Artificial Sequence
  Description of Artificial Sequence: Synthetic oligonucleotide
ucccacaaaauguggacag

SEQ ID NO: 3146243 - RNA, 19 nt, Artificial Sequence
  Description of Artificial Sequence: Synthetic oligonucleotide
cauucauccacauugccca

SEQ ID NO: 3146244 - RNA, 19 nt, Artificial Sequence
  Description of Artificial Sequence: Synthetic oligonucleotide
ucugcaagcugcaauugcu

SEQ ID NO: 3146245 - RNA, 19 nt, Artificial Sequence
  Description of Artificial Sequence: Synthetic oligonucleotide
uguuuccaauuacagagaa

SEQ ID NO: 3146246 - RNA, 19 nt, Artificial Sequence
  Description of Artificial Sequence: Synthetic oligonucleotide
uggacagacuugcaaacca

SEQ ID NO: 3146247 - RNA, 19 nt, Artificial Sequence
  Description of Artificial Sequence: Synthetic oligonucleotide
cauucugcugaguuaugcg

SEQ ID NO: 3146248 - RNA, 19 nt, Artificial Sequence
  Description of Artificial Sequence: Synthetic oligonucleotide
auuguguuuccaauuacag

SEQ ID NO: 3146249 - RNA, 19 nt, Artificial Sequence
  Description of Artificial Sequence: Synthetic oligonucleotide
uucugcugaguuaugcggc

SEQ ID NO: 3146250 - RNA, 19 nt, Artificial Sequence
  Description of Artificial Sequence: Synthetic oligonucleotide
uuguguuuccaauuacaga

SEQ ID NO: 3146251 - RNA, 19 nt, Artificial Sequence
  Description of Artificial Sequence: Synthetic oligonucleotide
cuugcaaaccauucugcug

SEQ ID NO: 3146252 - RNA, 19 nt, Artificial Sequence
  Description of Artificial Sequence: Synthetic oligonucleotide
ucgucucuacaccuucugg

SEQ ID NO: 3146253 - RNA, 19 nt, Artificial Sequence
  Description of Artificial Sequence: Synthetic oligonucleotide
ugauuguguuuccaauuac

SEQ ID NO: 3146254 - RNA, 19 nt, Artificial Sequence
  Description of Artificial Sequence: Synthetic oligonucleotide
uucuggacaaccucuacua

SEQ ID NO: 3146255 - RNA, 19 nt, Artificial Sequence
  Description of Artificial Sequence: Synthetic oligonucleotide
uguggacagacuugcaaac

SEQ ID NO: 3146256 - RNA, 19 nt, Artificial Sequence
  Description of Artificial Sequence: Synthetic oligonucleotide
caugucccacaaaaugugg

SEQ ID NO: 3146257 - RNA, 19 nt, Artificial Sequence
  Description of Artificial Sequence: Synthetic oligonucleotide
aguuaugcggcugauugug

SEQ ID NO: 3146258 - RNA, 19 nt, Artificial Sequence
  Description of Artificial Sequence: Synthetic oligonucleotide
aaccauucugcugaguuau

SEQ ID NO: 3146259 - RNA, 19 nt, Artificial Sequence
  Description of Artificial Sequence: Synthetic oligonucleotide
acuugcaaaccauucugcu

SEQ ID NO: 3146260 - RNA, 19 nt, Artificial Sequence
  Description of Artificial Sequence: Synthetic oligonucleotide
ugucccacaaaauguggac

SEQ ID NO: 3146261 - RNA, 19 nt, Artificial Sequence
  Description of Artificial Sequence: Synthetic oligonucleotide
gauuguguuuccaauuaca

SEQ ID NO: 3146262 - RNA, 19 nt, Artificial Sequence
  Description of Artificial Sequence: Synthetic oligonucleotide
cuggacaaccucuacuaac

SEQ ID NO: 3146263 - RNA, 19 nt, Artificial Sequence
  Description of Artificial Sequence: Synthetic oligonucleotide
ucucuacaccuucuggaca

SEQ ID NO: 3146264 - RNA, 19 nt, Artificial Sequence
  Description of Artificial Sequence: Synthetic oligonucleotide
uacaccuucuggacaaccu

SEQ ID NO: 3146265 - RNA, 19 nt, Artificial Sequence
  Description of Artificial Sequence: Synthetic oligonucleotide
aaaccauucugcugaguua

SEQ ID NO: 3146266 - RNA, 19 nt, Artificial Sequence
  Description of Artificial Sequence: Synthetic oligonucleotide
uucgucucuacaccuucug

SEQ ID NO: 3146267 - RNA, 19 nt, Artificial Sequence
  Description of Artificial Sequence: Synthetic oligonucleotide
auguggacagacuugcaaa

SEQ ID NO: 3146268 - RNA, 19 nt, Artificial Sequence
  Description of Artificial Sequence: Synthetic oligonucleotide
gacuugcaaaccauucugc

SEQ ID NO: 3146269 - RNA, 19 nt, Artificial Sequence
  Description of Artificial Sequence: Synthetic oligonucleotide
gcaagcugcaauugcuucg

SEQ ID NO: 3146270 - RNA, 19 nt, Artificial Sequence
  Description of Artificial Sequence: Synthetic oligonucleotide
ugcugaguuaugcggcuga

SEQ ID NO: 3146271 - RNA, 19 nt, Artificial Sequence
  Description of Artificial Sequence: Synthetic oligonucleotide
gucucuacaccuucuggac

SEQ ID NO: 3146272 - RNA, 19 nt, Artificial Sequence
  Description of Artificial Sequence: Synthetic oligonucleotide
ugcaagcugcaauugcuuc

SEQ ID NO: 3146273 - RNA, 19 nt, Artificial Sequence
  Description of Artificial Sequence: Synthetic oligonucleotide
cacauucauccacauugcc

SEQ ID NO: 3146274 - RNA, 19 nt, Artificial Sequence
  Description of Artificial Sequence: Synthetic oligonucleotide
ucugcugaguuaugcggcu

SEQ ID NO: 3146275 - RNA, 19 nt, Artificial Sequence
  Description of Artificial Sequence: Synthetic oligonucleotide
agcugcaauugcuucgucu

SEQ ID NO: 3146276 - RNA, 19 nt, Artificial Sequence
  Description of Artificial Sequence: Synthetic oligonucleotide
acaaccucuacuaacuuuu

SEQ ID NO: 3146277 - RNA, 19 nt, Artificial Sequence
  Description of Artificial Sequence: Synthetic oligonucleotide
cucugcaagcugcaauugc

SEQ ID NO: 3146278 - RNA, 19 nt, Artificial Sequence
  Description of Artificial Sequence: Synthetic oligonucleotide
ucuggacaaccucuacuaa

SEQ ID NO: 3146279 - RNA, 19 nt, Artificial Sequence
  Description of Artificial Sequence: Synthetic oligonucleotide
agcucugcaagcugcaauu

SEQ ID NO: 3146280 - RNA, 19 nt, Artificial Sequence
  Description of Artificial Sequence: Synthetic oligonucleotide
guuuccaauuacagagaag

SEQ ID NO: 3146281 - RNA, 19 nt, Artificial Sequence
  Description of Artificial Sequence: Synthetic oligonucleotide
uugcuucgucucuacaccu

SEQ ID NO: 3146282 - RNA, 19 nt, Artificial Sequence
  Description of Artificial Sequence: Synthetic oligonucleotide
ugcaaaccauucugcugag

SEQ ID NO: 3146283 - RNA, 19 nt, Artificial Sequence
  Description of Artificial Sequence: Synthetic oligonucleotide
uuaugcggcugauuguguu

SEQ ID NO: 3146284 - RNA, 19 nt, Artificial Sequence
  Description of Artificial Sequence: Synthetic oligonucleotide
aagcugcaauugcuucguc

SEQ ID NO: 3146285 - RNA, 19 nt, Artificial Sequence
  Description of Artificial Sequence: Synthetic oligonucleotide
augcggcugauuguguuuc

SEQ ID NO: 3146286 - RNA, 19 nt, Artificial Sequence
  Description of Artificial Sequence: Synthetic oligonucleotide
cugauuguguuuccaauua

SEQ ID NO: 3146287 - RNA, 19 nt, Artificial Sequence
  Description of Artificial Sequence: Synthetic oligonucleotide
cucuacaccuucuggacaa

SEQ ID NO: 3146288 - RNA, 19 nt, Artificial Sequence
  Description of Artificial Sequence: Synthetic oligonucleotide
uaugcggcugauuguguuu

SEQ ID NO: 3146289 - RNA, 19 nt, Artificial Sequence
  Description of Artificial Sequence: Synthetic oligonucleotide
uuaccacauucauccacau

SEQ ID NO: 3146290 - RNA, 19 nt, Artificial Sequence
  Description of Artificial Sequence: Synthetic oligonucleotide
guggacagacuugcaaacc

SEQ ID NO: 3146291 - RNA, 19 nt, Artificial Sequence
  Description of Artificial Sequence: Synthetic oligonucleotide
ccaugucccacaaaaugug

SEQ ID NO: 3146292 - RNA, 19 nt, Artificial Sequence
  Description of Artificial Sequence: Synthetic oligonucleotide
aaauguggacagacuugca

SEQ ID NO: 3146293 - RNA, 19 nt, Artificial Sequence
  Description of Artificial Sequence: Synthetic oligonucleotide
cuacaccuucuggacaacc

SEQ ID NO: 3146294 - RNA, 19 nt, Artificial Sequence
  Description of Artificial Sequence: Synthetic oligonucleotide
ugcaauugcuucgucucua

SEQ ID NO: 3146295 - RNA, 19 nt, Artificial Sequence
  Description of Artificial Sequence: Synthetic oligonucleotide
augucccacaaaaugugga

SEQ ID NO: 3146296 - RNA, 19 nt, Artificial Sequence
  Description of Artificial Sequence: Synthetic oligonucleotide
caaaccauucugcugaguu

SEQ ID NO: 3146297 - RNA, 19 nt, Artificial Sequence
  Description of Artificial Sequence: Synthetic oligonucleotide
ccacauucauccacauugc

SEQ ID NO: 3146298 - RNA, 19 nt, Artificial Sequence
  Description of Artificial Sequence: Synthetic oligonucleotide
gacaaccucuacuaacuuu

SEQ ID NO: 3146299 - RNA, 19 nt, Artificial Sequence
  Description of Artificial Sequence: Synthetic oligonucleotide
ccacaaaauguggacagac

SEQ ID NO: 3146300 - RNA, 19 nt, Artificial Sequence
  Description of Artificial Sequence: Synthetic oligonucleotide
ugcuucgucucuacaccuu

SEQ ID NO: 3146301 - RNA, 19 nt, Artificial Sequence
  Description of Artificial Sequence: Synthetic oligonucleotide
gucccacaaaauguggaca

SEQ ID NO: 3146302 - RNA, 19 nt, Artificial Sequence
  Description of Artificial Sequence: Synthetic oligonucleotide
ugcggcugauuguguuucc

SEQ ID NO: 3146303 - RNA, 19 nt, Artificial Sequence
  Description of Artificial Sequence: Synthetic oligonucleotide
cacaaaauguggacagacu

SEQ ID NO: 3146304 - RNA, 19 nt, Artificial Sequence
  Description of Artificial Sequence: Synthetic oligonucleotide
cuucuggacaaccucuacu

SEQ ID NO: 3146305 - RNA, 19 nt, Artificial Sequence
  Description of Artificial Sequence: Synthetic oligonucleotide
guguuuccaauuacagaga

SEQ ID NO: 3146306 - RNA, 19 nt, Artificial Sequence
  Description of Artificial Sequence: Synthetic oligonucleotide
ccauucugcugaguuaugc

SEQ ID NO: 3146307 - RNA, 19 nt, Artificial Sequence
  Description of Artificial Sequence: Synthetic oligonucleotide
cagacuugcaaaccauucu

SEQ ID NO: 3146308 - RNA, 19 nt, Artificial Sequence
  Description of Artificial Sequence: Synthetic oligonucleotide
gaguuaugcggcugauugu

SEQ ID NO: 3146309 - RNA, 19 nt, Artificial Sequence
  Description of Artificial Sequence: Synthetic oligonucleotide
gcaauugcuucgucucuac

SEQ ID NO: 3146310 - RNA, 19 nt, Artificial Sequence
  Description of Artificial Sequence: Synthetic oligonucleotide
ucuacaccuucuggacaac

SEQ ID NO: 3146311 - RNA, 19 nt, Artificial Sequence
  Description of Artificial Sequence: Synthetic oligonucleotide
caauugcuucgucucuaca

SEQ ID NO: 3146312 - RNA, 19 nt, Artificial Sequence
  Description of Artificial Sequence: Synthetic oligonucleotide
gcuucgucucuacaccuuc

SEQ ID NO: 3146313 - RNA, 19 nt, Artificial Sequence
  Description of Artificial Sequence: Synthetic oligonucleotide
ggggccccagcucugcaag

SEQ ID NO: 3146314 - RNA, 19 nt, Artificial Sequence
  Description of Artificial Sequence: Synthetic oligonucleotide
cccaugucccacaaaaugu

SEQ ID NO: 3146315 - RNA, 19 nt, Artificial Sequence
  Description of Artificial Sequence: Synthetic oligonucleotide
cgucucuacaccuucugga

SEQ ID NO: 3146316 - RNA, 19 nt, Artificial Sequence
  Description of Artificial Sequence: Synthetic oligonucleotide
gcugauuguguuuccaauu

SEQ ID NO: 3146317 - RNA, 19 nt, Artificial Sequence
  Description of Artificial Sequence: Synthetic oligonucleotide
cugcugaguuaugcggcug

SEQ ID NO: 3146318 - RNA, 19 nt, Artificial Sequence
  Description of Artificial Sequence: Synthetic oligonucleotide
caagcugcaauugcuucgu

SEQ ID NO: 3146319 - RNA, 19 nt, Artificial Sequence
  Description of Artificial Sequence: Synthetic oligonucleotide
accauucugcugaguuaug

SEQ ID NO: 3146320 - RNA, 19 nt, Artificial Sequence
  Description of Artificial Sequence: Synthetic oligonucleotide
cuucgucucuacaccuucu

SEQ ID NO: 3146321 - RNA, 19 nt, Artificial Sequence
  Description of Artificial Sequence: Synthetic oligonucleotide
gcucugcaagcugcaauug

SEQ ID NO: 3146322 - RNA, 19 nt, Artificial Sequence
  Description of Artificial Sequence: Synthetic oligonucleotide
ggcugauuguguuuccaau

SEQ ID NO: 3146323 - RNA, 19 nt, Artificial Sequence
  Description of Artificial Sequence: Synthetic oligonucleotide
cugcaauugcuucgucucu

SEQ ID NO: 3146324 - RNA, 19 nt, Artificial Sequence
  Description of Artificial Sequence: Synthetic oligonucleotide
guuaugcggcugauugugu

SEQ ID NO: 3146325 - RNA, 19 nt, Artificial Sequence
  Description of Artificial Sequence: Synthetic oligonucleotide
cugcaagcugcaauugcuu

SEQ ID NO: 3146326 - RNA, 19 nt, Artificial Sequence
  Description of Artificial Sequence: Synthetic oligonucleotide
gccccagcucugcaagcug

SEQ ID NO: 3146327 - RNA, 19 nt, Artificial Sequence
  Description of Artificial Sequence: Synthetic oligonucleotide
gggccccagcucugcaagc

SEQ ID NO: 3146328 - RNA, 19 nt, Artificial Sequence
  Description of Artificial Sequence: Synthetic oligonucleotide
ggacagacuugcaaaccau

SEQ ID NO: 3146329 - RNA, 19 nt, Artificial Sequence
  Description of Artificial Sequence: Synthetic oligonucleotide
gcggcugauuguguuucca

SEQ ID NO: 3146330 - RNA, 19 nt, Artificial Sequence
  Description of Artificial Sequence: Synthetic oligonucleotide
ggacaaccucuacuaacuu

SEQ ID NO: 3146331 - RNA, 19 nt, Artificial Sequence
  Description of Artificial Sequence: Synthetic oligonucleotide
cccagcucugcaagcugca

SEQ ID NO: 3146332 - RNA, 19 nt, Artificial Sequence
  Description of Artificial Sequence: Synthetic oligonucleotide
cccacaaaauguggacaga

SEQ ID NO: 3146333 - RNA, 19 nt, Artificial Sequence
  Description of Artificial Sequence: Synthetic oligonucleotide
cugaguuaugcggcugauu

SEQ ID NO: 3146334 - RNA, 19 nt, Artificial Sequence
  Description of Artificial Sequence: Synthetic oligonucleotide
cggcugauuguguuuccaa

SEQ ID NO: 3146335 - RNA, 19 nt, Artificial Sequence
  Description of Artificial Sequence: Synthetic oligonucleotide
ggccccagcucugcaagcu

SEQ ID NO: 3146336 - RNA, 19 nt, Artificial Sequence
  Description of Artificial Sequence: Synthetic oligonucleotide
gcaaaccauucugcugagu

SEQ ID NO: 3146337 - RNA, 19 nt, Artificial Sequence
  Description of Artificial Sequence: Synthetic oligonucleotide
gcugaguuaugcggcugau

SEQ ID NO: 3146338 - RNA, 19 nt, Artificial Sequence
  Description of Artificial Sequence: Synthetic oligonucleotide
acuguguccccucagagac

SEQ ID NO: 3146339 - RNA, 19 nt, Artificial Sequence
  Description of Artificial Sequence: Synthetic oligonucleotide
ucuuccucaggacugagcc

SEQ ID NO: 3146340 - RNA, 19 nt, Artificial Sequence
  Description of Artificial Sequence: Synthetic oligonucleotide
cugagauagaucuggaacc

SEQ ID NO: 3146341 - RNA, 19 nt, Artificial Sequence
  Description of Artificial Sequence: Synthetic oligonucleotide
gaaccguucagggagaagg

SEQ ID NO: 3146342 - RNA, 19 nt, Artificial Sequence
  Description of Artificial Sequence: Synthetic oligonucleotide
ugagauagaucuggaaccg

SEQ ID NO: 3146343 - RNA, 19 nt, Artificial Sequence
  Description of Artificial Sequence: Synthetic oligonucleotide
gaucuggaaccguucaggg

SEQ ID NO: 3146344 - RNA, 19 nt, Artificial Sequence
  Description of Artificial Sequence: Synthetic oligonucleotide
ucagggagaaggcugaguc

SEQ ID NO: 3146345 - RNA, 19 nt, Artificial Sequence
  Description of Artificial Sequence: Synthetic oligonucleotide
aguccugggagaugagugc

SEQ ID NO: 3146346 - RNA, 19 nt, Artificial Sequence
  Description of Artificial Sequence: Synthetic oligonucleotide
gaaggcugaguccugggag

SEQ ID NO: 3146347 - RNA, 19 nt, Artificial Sequence
  Description of Artificial Sequence: Synthetic oligonucleotide
uggaucaggagccccgggg

SEQ ID NO: 3146348 - RNA, 19 nt, Artificial Sequence
  Description of Artificial Sequence: Synthetic oligonucleotide
uguccccucagagacaggg

SEQ ID NO: 3146349 - RNA, 19 nt, Artificial Sequence
  Description of Artificial Sequence: Synthetic oligonucleotide
agaucuggaaccguucagg

SEQ ID NO: 3146350 - RNA, 19 nt, Artificial Sequence
  Description of Artificial Sequence: Synthetic oligonucleotide
auagaucuggaaccguuca

SEQ ID NO: 3146351 - RNA, 19 nt, Artificial Sequence
  Description of Artificial Sequence: Synthetic oligonucleotide
uagaucuggaaccguucag

SEQ ID NO: 3146352 - RNA, 19 nt, Artificial Sequence
  Description of Artificial Sequence: Synthetic oligonucleotide
gaugagugcagccccugcc

SEQ ID NO: 3146353 - RNA, 19 nt, Artificial Sequence
  Description of Artificial Sequence: Synthetic oligonucleotide
uccccucagagacaggggc

SEQ ID NO: 3146354 - RNA, 19 nt, Artificial Sequence
  Description of Artificial Sequence: Synthetic oligonucleotide
aaccguucagggagaaggc

SEQ ID NO: 3146355 - RNA, 19 nt, Artificial Sequence
  Description of Artificial Sequence: Synthetic oligonucleotide
agaugagugcagccccugc

SEQ ID NO: 3146356 - RNA, 19 nt, Artificial Sequence
  Description of Artificial Sequence: Synthetic oligonucleotide
agugcagccccugccaggc

SEQ ID NO: 3146357 - RNA, 19 nt, Artificial Sequence
  Description of Artificial Sequence: Synthetic oligonucleotide
gaguccugggagaugagug

SEQ ID NO: 3146358 - RNA, 19 nt, Artificial Sequence
  Description of Artificial Sequence: Synthetic oligonucleotide
ugagugcagccccugccag

SEQ ID NO: 3146359 - RNA, 19 nt, Artificial Sequence
  Description of Artificial Sequence: Synthetic oligonucleotide
gauagaucuggaaccguuc

SEQ ID NO: 3146360 - RNA, 19 nt, Artificial Sequence
  Description of Artificial Sequence: Synthetic oligonucleotide
agggagaaggcugaguccu

SEQ ID NO: 3146361 - RNA, 19 nt, Artificial Sequence
  Description of Artificial Sequence: Synthetic oligonucleotide
cucaggacugagcccagcc

SEQ ID NO: 3146362 - RNA, 19 nt, Artificial Sequence
  Description of Artificial Sequence: Synthetic oligonucleotide
agaaggcugaguccuggga

SEQ ID NO: 3146363 - RNA, 19 nt, Artificial Sequence
  Description of Artificial Sequence: Synthetic oligonucleotide
augagugcagccccugcca

SEQ ID NO: 3146364 - RNA, 19 nt, Artificial Sequence
  Description of Artificial Sequence: Synthetic oligonucleotide
gaucaggagccccggggcc

SEQ ID NO: 3146365 - RNA, 19 nt, Artificial Sequence
  Description of Artificial Sequence: Synthetic oligonucleotide
uccugggagaugagugcag

SEQ ID NO: 3146366 - RNA, 19 nt, Artificial Sequence
  Description of Artificial Sequence: Synthetic oligonucleotide
uccugagauagaucuggaa

SEQ ID NO: 3146367 - RNA, 19 nt, Artificial Sequence
  Description of Artificial Sequence: Synthetic oligonucleotide
cagggagaaggcugagucc

SEQ ID NO: 3146368 - RNA, 19 nt, Artificial Sequence
  Description of Artificial Sequence: Synthetic oligonucleotide
cugggagaugagugcagcc

SEQ ID NO: 3146369 - RNA, 19 nt, Artificial Sequence
  Description of Artificial Sequence: Synthetic oligonucleotide
gagggucucuucuuccuca

SEQ ID NO: 3146370 - RNA, 19 nt, Artificial Sequence
  Description of Artificial Sequence: Synthetic oligonucleotide
aucuggaaccguucaggga

SEQ ID NO: 3146371 - RNA, 19 nt, Artificial Sequence
  Description of Artificial Sequence: Synthetic oligonucleotide
gagugcagccccugccagg

SEQ ID NO: 3146372 - RNA, 19 nt, Artificial Sequence
  Description of Artificial Sequence: Synthetic oligonucleotide
ccaggcuggaucaggagcc

SEQ ID NO: 3146373 - RNA, 19 nt, Artificial Sequence
  Description of Artificial Sequence: Synthetic oligonucleotide
ggucucuucuuccucagga

SEQ ID NO: 3146374 - RNA, 19 nt, Artificial Sequence
  Description of Artificial Sequence: Synthetic oligonucleotide
acaggggcgugaccccagc

SEQ ID NO: 3146375 - RNA, 19 nt, Artificial Sequence
  Description of Artificial Sequence: Synthetic oligonucleotide
uucucuccgcccuccugag

SEQ ID NO: 3146376 - RNA, 19 nt, Artificial Sequence
  Description of Artificial Sequence: Synthetic oligonucleotide
aggggcgugaccccagcug

SEQ ID NO: 3146377 - RNA, 19 nt, Artificial Sequence
  Description of Artificial Sequence: Synthetic oligonucleotide
ccuccugagauagaucugg

SEQ ID NO: 3146378 - RNA, 19 nt, Artificial Sequence
  Description of Artificial Sequence: Synthetic oligonucleotide
ucagagacaggggcgugac

SEQ ID NO: 3146379 - RNA, 19 nt, Artificial Sequence
  Description of Artificial Sequence: Synthetic oligonucleotide
agauagaucuggaaccguu

SEQ ID NO: 3146380 - RNA, 19 nt, Artificial Sequence
  Description of Artificial Sequence: Synthetic oligonucleotide
ggaucaggagccccggggc

SEQ ID NO: 3146381 - RNA, 19 nt, Artificial Sequence
  Description of Artificial Sequence: Synthetic oligonucleotide
ugccaggcuggaucaggag

SEQ ID NO: 3146382 - RNA, 19 nt, Artificial Sequence
  Description of Artificial Sequence: Synthetic oligonucleotide
uucagggagaaggcugagu

SEQ ID NO: 3146383 - RNA, 19 nt, Artificial Sequence
  Description of Artificial Sequence: Synthetic oligonucleotide
aggcuggaucaggagcccc

SEQ ID NO: 3146384 - RNA, 19 nt, Artificial Sequence
  Description of Artificial Sequence: Synthetic oligonucleotide
gagaugagugcagccccug

SEQ ID NO: 3146385 - RNA, 19 nt, Artificial Sequence
  Description of Artificial Sequence: Synthetic oligonucleotide
cacuguguccccucagaga

SEQ ID NO: 3146386 - RNA, 19 nt, Artificial Sequence
  Description of Artificial Sequence: Synthetic oligonucleotide
uccucaggacugagcccag

SEQ ID NO: 3146387 - RNA, 19 nt, Artificial Sequence
  Description of Artificial Sequence: Synthetic oligonucleotide
cuggaucaggagccccggg

SEQ ID NO: 3146388 - RNA, 19 nt, Artificial Sequence
  Description of Artificial Sequence: Synthetic oligonucleotide
gcugaguccugggagauga

SEQ ID NO: 3146389 - RNA, 19 nt, Artificial Sequence
  Description of Artificial Sequence: Synthetic oligonucleotide
cuccgcccuccugagauag

SEQ ID NO: 3146390 - RNA, 19 nt, Artificial Sequence
  Description of Artificial Sequence: Synthetic oligonucleotide
ccguucagggagaaggcug

SEQ ID NO: 3146391 - RNA, 19 nt, Artificial Sequence
  Description of Artificial Sequence: Synthetic oligonucleotide
gugaccccagcugaggguc

SEQ ID NO: 3146392 - RNA, 19 nt, Artificial Sequence
  Description of Artificial Sequence: Synthetic oligonucleotide
gcgugaccccagcugaggg

SEQ ID NO: 3146393 - RNA, 19 nt, Artificial Sequence
  Description of Artificial Sequence: Synthetic oligonucleotide
gcccuccugagauagaucu

SEQ ID NO: 3146394 - RNA, 19 nt, Artificial Sequence
  Description of Artificial Sequence: Synthetic oligonucleotide
ggcuggaucaggagccccg

SEQ ID NO: 3146395 - RNA, 19 nt, Artificial Sequence
  Description of Artificial Sequence: Synthetic oligonucleotide
guccccucagagacagggg

SEQ ID NO: 3146396 - RNA, 19 nt, Artificial Sequence
  Description of Artificial Sequence: Synthetic oligonucleotide
ugaccccagcugagggucu

SEQ ID NO: 3146397 - RNA, 19 nt, Artificial Sequence
  Description of Artificial Sequence: Synthetic oligonucleotide
cugaguccugggagaugag

SEQ ID NO: 3146398 - RNA, 19 nt, Artificial Sequence
  Description of Artificial Sequence: Synthetic oligonucleotide
aucaggagccccggggcca

SEQ ID NO: 3146399 - RNA, 19 nt, Artificial Sequence
  Description of Artificial Sequence: Synthetic oligonucleotide
guccugggagaugagugca

SEQ ID NO: 3146400 - RNA, 19 nt, Artificial Sequence
  Description of Artificial Sequence: Synthetic oligonucleotide
cuccugagauagaucugga

SEQ ID NO: 3146401 - RNA, 19 nt, Artificial Sequence
  Description of Artificial Sequence: Synthetic oligonucleotide
gacaggggcgugaccccag

SEQ ID NO: 3146402 - RNA, 19 nt, Artificial Sequence
  Description of Artificial Sequence: Synthetic oligonucleotide
guucagggagaaggcugag

SEQ ID NO: 3146403 - RNA, 19 nt, Artificial Sequence
  Description of Artificial Sequence: Synthetic oligonucleotide
cugccaggcuggaucagga

SEQ ID NO: 3146404 - RNA, 19 nt, Artificial Sequence
  Description of Artificial Sequence: Synthetic oligonucleotide
ccccucagagacaggggcg

SEQ ID NO: 3146405 - RNA, 19 nt, Artificial Sequence
  Description of Artificial Sequence: Synthetic oligonucleotide
gggucucuucuuccucagg

SEQ ID NO: 3146406 - RNA, 19 nt, Artificial Sequence
  Description of Artificial Sequence: Synthetic oligonucleotide
gagccccggggccacugug

SEQ ID NO: 3146407 - RNA, 19 nt, Artificial Sequence
  Description of Artificial Sequence: Synthetic oligonucleotide
uggaaccguucagggagaa

SEQ ID NO: 3146408 - RNA, 19 nt, Artificial Sequence
  Description of Artificial Sequence: Synthetic oligonucleotide
ggggcgugaccccagcuga

SEQ ID NO: 3146409 - RNA, 19 nt, Artificial Sequence
  Description of Artificial Sequence: Synthetic oligonucleotide
agacaggggcgugacccca

SEQ ID NO: 3146410 - RNA, 19 nt, Artificial Sequence
  Description of Artificial Sequence: Synthetic oligonucleotide
caggcuggaucaggagccc

SEQ ID NO: 3146411 - RNA, 19 nt, Artificial Sequence
  Description of Artificial Sequence: Synthetic oligonucleotide
gcuggaucaggagccccgg

SEQ ID NO: 3146412 - RNA, 19 nt, Artificial Sequence
  Description of Artificial Sequence: Synthetic oligonucleotide
gagauagaucuggaaccgu

SEQ ID NO: 3146413 - RNA, 19 nt, Artificial Sequence
  Description of Artificial Sequence: Synthetic oligonucleotide
cucagagacaggggcguga

SEQ ID NO: 3146414 - RNA, 19 nt, Artificial Sequence
  Description of Artificial Sequence: Synthetic oligonucleotide
ggcgugaccccagcugagg

SEQ ID NO: 3146415 - RNA, 19 nt, Artificial Sequence
  Description of Artificial Sequence: Synthetic oligonucleotide
cucuccgcccuccugagau

SEQ ID NO: 3146416 - RNA, 19 nt, Artificial Sequence
  Description of Artificial Sequence: Synthetic oligonucleotide
uccgcccuccugagauaga

SEQ ID NO: 3146417 - RNA, 19 nt, Artificial Sequence
  Description of Artificial Sequence: Synthetic oligonucleotide
ucaggagccccggggccac

SEQ ID NO: 3146418 - RNA, 19 nt, Artificial Sequence
  Description of Artificial Sequence: Synthetic oligonucleotide
gccccugccaggcuggauc

SEQ ID NO: 3146419 - RNA, 19 nt, Artificial Sequence
  Description of Artificial Sequence: Synthetic oligonucleotide
cccggggccacuguguccc

SEQ ID NO: 3146420 - RNA, 19 nt, Artificial Sequence
  Description of Artificial Sequence: Synthetic oligonucleotide
ccugccaggcuggaucagg

SEQ ID NO: 3146421 - RNA, 19 nt, Artificial Sequence
  Description of Artificial Sequence: Synthetic oligonucleotide
ucuccgcccuccugagaua

SEQ ID NO: 3146422 - RNA, 19 nt, Artificial Sequence
  Description of Artificial Sequence: Synthetic oligonucleotide
aggcugaguccugggagau

SEQ ID NO: 3146423 - RNA, 19 nt, Artificial Sequence
  Description of Artificial Sequence: Synthetic oligonucleotide
ggaaccguucagggagaag

SEQ ID NO: 3146424 - RNA, 19 nt, Artificial Sequence
  Description of Artificial Sequence: Synthetic oligonucleotide
cuguguccccucagagaca

SEQ ID NO: 3146425 - RNA, 19 nt, Artificial Sequence
  Description of Artificial Sequence: Synthetic oligonucleotide
cguucagggagaaggcuga

SEQ ID NO: 3146426 - RNA, 19 nt, Artificial Sequence
  Description of Artificial Sequence: Synthetic oligonucleotide
gcagccccugccaggcugg

SEQ ID NO: 3146427 - RNA, 19 nt, Artificial Sequence
  Description of Artificial Sequence: Synthetic oligonucleotide
cccuccugagauagaucug

SEQ ID NO: 3146428 - RNA, 19 nt, Artificial Sequence
  Description of Artificial Sequence: Synthetic oligonucleotide
gaccccagcugagggucuc

SEQ ID NO: 3146429 - RNA, 19 nt, Artificial Sequence
  Description of Artificial Sequence: Synthetic oligonucleotide
ccagcugagggucucuucu

SEQ ID NO: 3146430 - RNA, 19 nt, Artificial Sequence
  Description of Artificial Sequence: Synthetic oligonucleotide
aggagccccggggccacug

SEQ ID NO: 3146431 - RNA, 19 nt, Artificial Sequence
  Description of Artificial Sequence: Synthetic oligonucleotide
agccccggggccacugugu

SEQ ID NO: 3146432 - RNA, 19 nt, Artificial Sequence
  Description of Artificial Sequence: Synthetic oligonucleotide
guguccccucagagacagg

SEQ ID NO: 3146433 - RNA, 19 nt, Artificial Sequence
  Description of Artificial Sequence: Synthetic oligonucleotide
ggcugaguccugggagaug

SEQ ID NO: 3146434 - RNA, 19 nt, Artificial Sequence
  Description of Artificial Sequence: Synthetic oligonucleotide
gggcgugaccccagcugag

SEQ ID NO: 3146435 - RNA, 19 nt, Artificial Sequence
  Description of Artificial Sequence: Synthetic oligonucleotide
accccagcugagggucucu

SEQ ID NO: 3146436 - RNA, 19 nt, Artificial Sequence
  Description of Artificial Sequence: Synthetic oligonucleotide
ccccugccaggcuggauca

SEQ ID NO: 3146437 - RNA, 19 nt, Artificial Sequence
  Description of Artificial Sequence: Synthetic oligonucleotide
gccccggggccacuguguc

SEQ ID NO: 3146438 - RNA, 19 nt, Artificial Sequence
  Description of Artificial Sequence: Synthetic oligonucleotide
cagcugagggucucuucuu

SEQ ID NO: 3146439 - RNA, 19 nt, Artificial Sequence
  Description of Artificial Sequence: Synthetic oligonucleotide
ccccggggccacugugucc

SEQ ID NO: 3146440 - RNA, 19 nt, Artificial Sequence
  Description of Artificial Sequence: Synthetic oligonucleotide
ccucagagacaggggcgug

SEQ ID NO: 3146441 - RNA, 19 nt, Artificial Sequence
  Description of Artificial Sequence: Synthetic oligonucleotide
agccccugccaggcuggau

SEQ ID NO: 3146442 - RNA, 19 nt, Artificial Sequence
  Description of Artificial Sequence: Synthetic oligonucleotide
caggggcgugaccccagcu

SEQ ID NO: 3146443 - RNA, 19 nt, Artificial Sequence
  Description of Artificial Sequence: Synthetic oligonucleotide
cgcccuccugagauagauc

SEQ ID NO: 3146444 - RNA, 19 nt, Artificial Sequence
  Description of Artificial Sequence: Synthetic oligonucleotide
cccucagagacaggggcgu

SEQ ID NO: 3146445 - RNA, 19 nt, Artificial Sequence
  Description of Artificial Sequence: Synthetic oligonucleotide
cgugaccccagcugagggu

SEQ ID NO: 3146446 - RNA, 19 nt, Artificial Sequence
  Description of Artificial Sequence: Synthetic oligonucleotide
cccugccaggcuggaucag

SEQ ID NO: 3146447 - RNA, 19 nt, Artificial Sequence
  Description of Artificial Sequence: Synthetic oligonucleotide
gugcagccccugccaggcu

SEQ ID NO: 3146448 - RNA, 19 nt, Artificial Sequence
  Description of Artificial Sequence: Synthetic oligonucleotide
ggagccccggggccacugu

SEQ ID NO: 3146449 - RNA, 19 nt, Artificial Sequence
  Description of Artificial Sequence: Synthetic oligonucleotide
ccggggccacugugucccc

SEQ ID NO: 3146450 - RNA, 19 nt, Artificial Sequence
  Description of Artificial Sequence: Synthetic oligonucleotide
ccgcccuccugagauagau

SEQ ID NO: 3146451 - RNA, 19 nt, Artificial Sequence
  Description of Artificial Sequence: Synthetic oligonucleotide
caggagccccggggccacu

SEQ ID NO: 3146452 - RNA, 19 nt, Artificial Sequence
  Description of Artificial Sequence: Synthetic oligonucleotide
aauccaaugauuugcucgc

SEQ ID NO: 3146453 - RNA, 19 nt, Artificial Sequence
  Description of Artificial Sequence: Synthetic oligonucleotide
gaauccaaugauuugcucg

SEQ ID NO: 3146454 - RNA, 19 nt, Artificial Sequence
  Description of Artificial Sequence: Synthetic oligonucleotide
aaugauuugcucgcugugc

SEQ ID NO: 3146455 - RNA, 19 nt, Artificial Sequence
  Description of Artificial Sequence: Synthetic oligonucleotide
ugaagggagaauccaauga

SEQ ID NO: 3146456 - RNA, 19 nt, Artificial Sequence
  Description of Artificial Sequence: Synthetic oligonucleotide
cuuuugguagugaagggag

SEQ ID NO: 3146457 - RNA, 19 nt, Artificial Sequence
  Description of Artificial Sequence: Synthetic oligonucleotide
ugccuuuugguagugaagg

SEQ ID NO: 3146458 - RNA, 19 nt, Artificial Sequence
  Description of Artificial Sequence: Synthetic oligonucleotide
agcggagcugcucagcggc

SEQ ID NO: 3146459 - RNA, 19 nt, Artificial Sequence
  Description of Artificial Sequence: Synthetic oligonucleotide
uccccuugccuuuugguag

SEQ ID NO: 3146460 - RNA, 19 nt, Artificial Sequence
  Description of Artificial Sequence: Synthetic oligonucleotide
accagcacagcggagcugc

SEQ ID NO: 3146461 - RNA, 19 nt, Artificial Sequence
  Description of Artificial Sequence: Synthetic oligonucleotide
agaauccaaugauuugcuc

SEQ ID NO: 3146462 - RNA, 19 nt, Artificial Sequence
  Description of Artificial Sequence: Synthetic oligonucleotide
agcggcguggccgugaccc

SEQ ID NO: 3146463 - RNA, 19 nt, Artificial Sequence
  Description of Artificial Sequence: Synthetic oligonucleotide
ggagaauccaaugauuugc

SEQ ID NO: 3146464 - RNA, 19 nt, Artificial Sequence
  Description of Artificial Sequence: Synthetic oligonucleotide
uugccuuuugguagugaag

SEQ ID NO: 3146465 - RNA, 19 nt, Artificial Sequence
  Description of Artificial Sequence: Synthetic oligonucleotide
uuuugguagugaagggaga

SEQ ID NO: 3146466 - RNA, 19 nt, Artificial Sequence
  Description of Artificial Sequence: Synthetic oligonucleotide
acagcggagcugcucagcg

SEQ ID NO: 3146467 - RNA, 19 nt, Artificial Sequence
  Description of Artificial Sequence: Synthetic oligonucleotide
uccaaugauuugcucgcug

SEQ ID NO: 3146468 - RNA, 19 nt, Artificial Sequence
  Description of Artificial Sequence: Synthetic oligonucleotide
uuugguagugaagggagaa

SEQ ID NO: 3146469 - RNA, 19 nt, Artificial Sequence
  Description of Artificial Sequence: Synthetic oligonucleotide
gauuugcucgcugugcagc

SEQ ID NO: 3146470 - RNA, 19 nt, Artificial Sequence
  Description of Artificial Sequence: Synthetic oligonucleotide
ugcagcucaggccucuccc

SEQ ID NO: 3146471 - RNA, 19 nt, Artificial Sequence
  Description of Artificial Sequence: Synthetic oligonucleotide
ugguagugaagggagaauc

SEQ ID NO: 3146472 - RNA, 19 nt, Artificial Sequence
  Description of Artificial Sequence: Synthetic oligonucleotide
cucgcugugcagcucaggc

SEQ ID NO: 3146473 - RNA, 19 nt, Artificial Sequence
  Description of Artificial Sequence: Synthetic oligonucleotide
uagugaagggagaauccaa

SEQ ID NO: 3146474 - RNA, 19 nt, Artificial Sequence
  Description of Artificial Sequence: Synthetic oligonucleotide
gugaagggagaauccaaug

SEQ ID NO: 3146475 - RNA, 19 nt, Artificial Sequence
  Description of Artificial Sequence: Synthetic oligonucleotide
ugauuugcucgcugugcag

SEQ ID NO: 3146476 - RNA, 19 nt, Artificial Sequence
  Description of Artificial Sequence: Synthetic oligonucleotide
caggccaccagcacagcgg

SEQ ID NO: 3146477 - RNA, 19 nt, Artificial Sequence
  Description of Artificial Sequence: Synthetic oligonucleotide
guggccgugacccgagugg

SEQ ID NO: 3146478 - RNA, 19 nt, Artificial Sequence
  Description of Artificial Sequence: Synthetic oligonucleotide
gaagggagaauccaaugau

SEQ ID NO: 3146479 - RNA, 19 nt, Artificial Sequence
  Description of Artificial Sequence: Synthetic oligonucleotide
acguuguccacuccccuug

SEQ ID NO: 3146480 - RNA, 19 nt, Artificial Sequence
  Description of Artificial Sequence: Synthetic oligonucleotide
caaugauuugcucgcugug

SEQ ID NO: 3146481 - RNA, 19 nt, Artificial Sequence
  Description of Artificial Sequence: Synthetic oligonucleotide
auuugcucgcugugcagcu

SEQ ID NO: 3146482 - RNA, 19 nt, Artificial Sequence
  Description of Artificial Sequence: Synthetic oligonucleotide
ucgcgcaccaccaccgcca

SEQ ID NO: 3146483 - RNA, 19 nt, Artificial Sequence
  Description of Artificial Sequence: Synthetic oligonucleotide
guagugaagggagaaucca

SEQ ID NO: 3146484 - RNA, 19 nt, Artificial Sequence
  Description of Artificial Sequence: Synthetic oligonucleotide
cuugccuuuugguagugaa

SEQ ID NO: 3146485 - RNA, 19 nt, Artificial Sequence
  Description of Artificial Sequence: Synthetic oligonucleotide
gguagugaagggagaaucc

SEQ ID NO: 3146486 - RNA, 19 nt, Artificial Sequence
  Description of Artificial Sequence: Synthetic oligonucleotide
ucgcugugcagcucaggcc

SEQ ID NO: 3146487 - RNA, 19 nt, Artificial Sequence
  Description of Artificial Sequence: Synthetic oligonucleotide
agggagaauccaaugauuu

SEQ ID NO: 3146488 - RNA, 19 nt, Artificial Sequence
  Description of Artificial Sequence: Synthetic oligonucleotide
gggagaauccaaugauuug

SEQ ID NO: 3146489 - RNA, 19 nt, Artificial Sequence
  Description of Artificial Sequence: Synthetic oligonucleotide
agugaagggagaauccaau

SEQ ID NO: 3146490 - RNA, 19 nt, Artificial Sequence
  Description of Artificial Sequence: Synthetic oligonucleotide
agcucaggccucucccagg

SEQ ID NO: 3146491 - RNA, 19 nt, Artificial Sequence
  Description of Artificial Sequence: Synthetic oligonucleotide
uggccgugacccgaguggg

SEQ ID NO: 3146492 - RNA, 19 nt, Artificial Sequence
  Description of Artificial Sequence: Synthetic oligonucleotide
cugcucagcggcguggccg

SEQ ID NO: 3146493 - RNA, 19 nt, Artificial Sequence
  Description of Artificial Sequence: Synthetic oligonucleotide
uguccacuccccuugccuu

SEQ ID NO: 3146494 - RNA, 19 nt, Artificial Sequence
  Description of Artificial Sequence: Synthetic oligonucleotide
acuccccuugccuuuuggu

SEQ ID NO: 3146495 - RNA, 19 nt, Artificial Sequence
  Description of Artificial Sequence: Synthetic oligonucleotide
gccuuuugguagugaaggg

SEQ ID NO: 3146496 - RNA, 19 nt, Artificial Sequence
  Description of Artificial Sequence: Synthetic oligonucleotide
ugggcagucccucgcgcac

SEQ ID NO: 3146497 - RNA, 19 nt, Artificial Sequence
  Description of Artificial Sequence: Synthetic oligonucleotide
agcugcucagcggcguggc

SEQ ID NO: 3146498 - RNA, 19 nt, Artificial Sequence
  Description of Artificial Sequence: Synthetic oligonucleotide
aggccaccagcacagcgga

SEQ ID NO: 3146499 - RNA, 19 nt, Artificial Sequence
  Description of Artificial Sequence: Synthetic oligonucleotide
uugguagugaagggagaau

SEQ ID NO: 3146500 - RNA, 19 nt, Artificial Sequence
  Description of Artificial Sequence: Synthetic oligonucleotide
guuguccacuccccuugcc

SEQ ID NO: 3146501 - RNA, 19 nt, Artificial Sequence
  Description of Artificial Sequence: Synthetic oligonucleotide
cagucccucgcgcaccacc

SEQ ID NO: 3146502 - RNA, 19 nt, Artificial Sequence
  Description of Artificial Sequence: Synthetic oligonucleotide
ugcucagcggcguggccgu

SEQ ID NO: 3146503 - RNA, 19 nt, Artificial Sequence
  Description of Artificial Sequence: Synthetic oligonucleotide
cagcucaggccucucccag

SEQ ID NO: 3146504 - RNA, 19 nt, Artificial Sequence
  Description of Artificial Sequence: Synthetic oligonucleotide
ucagcggcguggccgugac

SEQ ID NO: 3146505 - RNA, 19 nt, Artificial Sequence
  Description of Artificial Sequence: Synthetic oligonucleotide
cacuccccuugccuuuugg

SEQ ID NO: 3146506 - RNA, 19 nt, Artificial Sequence
  Description of Artificial Sequence: Synthetic oligonucleotide
cucgcgcaccaccaccgcc

SEQ ID NO: 3146507 - RNA, 19 nt, Artificial Sequence
  Description of Artificial Sequence: Synthetic oligonucleotide
cagcggagcugcucagcgg

SEQ ID NO: 3146508 - RNA, 19 nt, Artificial Sequence
  Description of Artificial Sequence: Synthetic oligonucleotide
ugcucgcugugcagcucag

SEQ ID NO: 3146509 - RNA, 19 nt, Artificial Sequence
  Description of Artificial Sequence: Synthetic oligonucleotide
gcucaggccucucccaggc

SEQ ID NO: 3146510 - RNA, 19 nt, Artificial Sequence
  Description of Artificial Sequence: Synthetic oligonucleotide
cucucccaggccaccagca

SEQ ID NO: 3146511 - RNA, 19 nt, Artificial Sequence
  Description of Artificial Sequence: Synthetic oligonucleotide
cuccccuugccuuuuggua

SEQ ID NO: 3146512 - RNA, 19 nt, Artificial Sequence
  Description of Artificial Sequence: Synthetic oligonucleotide
gugcagcucaggccucucc

SEQ ID NO: 3146513 - RNA, 19 nt, Artificial Sequence
  Description of Artificial Sequence: Synthetic oligonucleotide
auccaaugauuugcucgcu

SEQ ID NO: 3146514 - RNA, 19 nt, Artificial Sequence
  Description of Artificial Sequence: Synthetic oligonucleotide
uuugcucgcugugcagcuc

SEQ ID NO: 3146515 - RNA, 19 nt, Artificial Sequence
  Description of Artificial Sequence: Synthetic oligonucleotide
agucccucgcgcaccacca

SEQ ID NO: 3146516 - RNA, 19 nt, Artificial Sequence
  Description of Artificial Sequence: Synthetic oligonucleotide
caggccucucccaggccac

SEQ ID NO: 3146517 - RNA, 19 nt, Artificial Sequence
  Description of Artificial Sequence: Synthetic oligonucleotide
cacagcggagcugcucagc

SEQ ID NO: 3146518 - RNA, 19 nt, Artificial Sequence
  Description of Artificial Sequence: Synthetic oligonucleotide
ccaggccaccagcacagcg

SEQ ID NO: 3146519 - RNA, 19 nt, Artificial Sequence
  Description of Artificial Sequence: Synthetic oligonucleotide
ccuuuugguagugaaggga

SEQ ID NO: 3146520 - RNA, 19 nt, Artificial Sequence
  Description of Artificial Sequence: Synthetic oligonucleotide
cccucgcgcaccaccaccg

SEQ ID NO: 3146521 - RNA, 19 nt, Artificial Sequence
  Description of Artificial Sequence: Synthetic oligonucleotide
ggcgcugggcagucccucg

SEQ ID NO: 3146522 - RNA, 19 nt, Artificial Sequence
  Description of Artificial Sequence: Synthetic oligonucleotide
cucaggccucucccaggcc

SEQ ID NO: 3146523 - RNA, 19 nt, Artificial Sequence
  Description of Artificial Sequence: Synthetic oligonucleotide
aggccucucccaggccacc

SEQ ID NO: 3146524 - RNA, 19 nt, Artificial Sequence
  Description of Artificial Sequence: Synthetic oligonucleotide
cugggcagucccucgcgca

SEQ ID NO: 3146525 - RNA, 19 nt, Artificial Sequence
  Description of Artificial Sequence: Synthetic oligonucleotide
ccaaugauuugcucgcugu

SEQ ID NO: 3146526 - RNA, 19 nt, Artificial Sequence
  Description of Artificial Sequence: Synthetic oligonucleotide
gcugggcagucccucgcgc

SEQ ID NO: 3146527 - RNA, 19 nt, Artificial Sequence
  Description of Artificial Sequence: Synthetic oligonucleotide
ugugcagcucaggccucuc

SEQ ID NO: 3146528 - RNA, 19 nt, Artificial Sequence
  Description of Artificial Sequence: Synthetic oligonucleotide
uccacuccccuugccuuuu

SEQ ID NO: 3146529 - RNA, 19 nt, Artificial Sequence
  Description of Artificial Sequence: Synthetic oligonucleotide
cagcacagcggagcugcuc

SEQ ID NO: 3146530 - RNA, 19 nt, Artificial Sequence
  Description of Artificial Sequence: Synthetic oligonucleotide
gucccucgcgcaccaccac

SEQ ID NO: 3146531 - RNA, 19 nt, Artificial Sequence
  Description of Artificial Sequence: Synthetic oligonucleotide
ggcagucccucgcgcacca

SEQ ID NO: 3146532 - RNA, 19 nt, Artificial Sequence
  Description of Artificial Sequence: Synthetic oligonucleotide
gcucgcugugcagcucagg

SEQ ID NO: 3146533 - RNA, 19 nt, Artificial Sequence
  Description of Artificial Sequence: Synthetic oligonucleotide
cacguuguccacuccccuu

SEQ ID NO: 3146534 - RNA, 19 nt, Artificial Sequence
  Description of Artificial Sequence: Synthetic oligonucleotide
gcugcucagcggcguggcc

SEQ ID NO: 3146535 - RNA, 19 nt, Artificial Sequence
  Description of Artificial Sequence: Synthetic oligonucleotide
ggccgugacccgagugggg

SEQ ID NO: 3146536 - RNA, 19 nt, Artificial Sequence
  Description of Artificial Sequence: Synthetic oligonucleotide
cguuguccacuccccuugc

SEQ ID NO: 3146537 - RNA, 19 nt, Artificial Sequence
  Description of Artificial Sequence: Synthetic oligonucleotide
gcgcugggcagucccucgc

SEQ ID NO: 3146538 - RNA, 19 nt, Artificial Sequence
  Description of Artificial Sequence: Synthetic oligonucleotide
ggcguggccgugacccgag

SEQ ID NO: 3146539 - RNA, 19 nt, Artificial Sequence
  Description of Artificial Sequence: Synthetic oligonucleotide
cucagcggcguggccguga

SEQ ID NO: 3146540 - RNA, 19 nt, Artificial Sequence
  Description of Artificial Sequence: Synthetic oligonucleotide
gcggcguggccgugacccg

SEQ ID NO: 3146541 - RNA, 19 nt, Artificial Sequence
  Description of Artificial Sequence: Synthetic oligonucleotide
gggcagucccucgcgcacc

SEQ ID NO: 3146542 - RNA, 19 nt, Artificial Sequence
  Description of Artificial Sequence: Synthetic oligonucleotide
gcggagcugcucagcggcg

SEQ ID NO: 3146543 - RNA, 19 nt, Artificial Sequence
  Description of Artificial Sequence: Synthetic oligonucleotide
guccacuccccuugccuuu

SEQ ID NO: 3146544 - RNA, 19 nt, Artificial Sequence
  Description of Artificial Sequence: Synthetic oligonucleotide
cguggccgugacccgagug

SEQ ID NO: 3146545 - RNA, 19 nt, Artificial Sequence
  Description of Artificial Sequence: Synthetic oligonucleotide
cgcugggcagucccucgcg

SEQ ID NO: 3146546 - RNA, 19 nt, Artificial Sequence
  Description of Artificial Sequence: Synthetic oligonucleotide
cagcggcguggccgugacc

SEQ ID NO: 3146547 - RNA, 19 nt, Artificial Sequence
  Description of Artificial Sequence: Synthetic oligonucleotide
ccucgcgcaccaccaccgc

SEQ ID NO: 3146548 - RNA, 19 nt, Artificial Sequence
  Description of Artificial Sequence: Synthetic oligonucleotide
ggccaccagcacagcggag

SEQ ID NO: 3146549 - RNA, 19 nt, Artificial Sequence
  Description of Artificial Sequence: Synthetic oligonucleotide
gcugugcagcucaggccuc

SEQ ID NO: 3146550 - RNA, 19 nt, Artificial Sequence
  Description of Artificial Sequence: Synthetic oligonucleotide
cugugcagcucaggccucu

SEQ ID NO: 3146551 - RNA, 19 nt, Artificial Sequence
  Description of Artificial Sequence: Synthetic oligonucleotide
ccuugccuuuugguaguga

SEQ ID NO: 3146552 - RNA, 19 nt, Artificial Sequence
  Description of Artificial Sequence: Synthetic oligonucleotide
cccuugccuuuugguagug

SEQ ID NO: 3146553 - RNA, 19 nt, Artificial Sequence
  Description of Artificial Sequence: Synthetic oligonucleotide
ccaccagcacagcggagcu

SEQ ID NO: 3146554 - RNA, 19 nt, Artificial Sequence
  Description of Artificial Sequence: Synthetic oligonucleotide
ccaccaccgccaggggcgc

SEQ ID NO: 3146555 - RNA, 19 nt, Artificial Sequence
  Description of Artificial Sequence: Synthetic oligonucleotide
ccccuugccuuuugguagu

SEQ ID NO: 3146556 - RNA, 19 nt, Artificial Sequence
  Description of Artificial Sequence: Synthetic oligonucleotide
ccacguuguccacuccccu

SEQ ID NO: 3146557 - RNA, 19 nt, Artificial Sequence
  Description of Artificial Sequence: Synthetic oligonucleotide
gcucagcggcguggccgug

SEQ ID NO: 3146558 - RNA, 19 nt, Artificial Sequence
  Description of Artificial Sequence: Synthetic oligonucleotide
ggggcgcugggcagucccu

SEQ ID NO: 3146559 - RNA, 19 nt, Artificial Sequence
  Description of Artificial Sequence: Synthetic oligonucleotide
ccagcacagcggagcugcu

SEQ ID NO: 3146560 - RNA, 19 nt, Artificial Sequence
  Description of Artificial Sequence: Synthetic oligonucleotide
gcguggccgugacccgagu

SEQ ID NO: 3146561 - RNA, 19 nt, Artificial Sequence
  Description of Artificial Sequence: Synthetic oligonucleotide
cggcguggccgugacccga

SEQ ID NO: 3146562 - RNA, 19 nt, Artificial Sequence
  Description of Artificial Sequence: Synthetic oligonucleotide
cggagcugcucagcggcgu

SEQ ID NO: 3146563 - RNA, 19 nt, Artificial Sequence
  Description of Artificial Sequence: Synthetic oligonucleotide
uauaaaaguauucuuagug

SEQ ID NO: 3146564 - RNA, 19 nt, Artificial Sequence
  Description of Artificial Sequence: Synthetic oligonucleotide
uguagaaacuauauuacag

SEQ ID NO: 3146565 - RNA, 19 nt, Artificial Sequence
  Description of Artificial Sequence: Synthetic oligonucleotide
ucuauaaaaguauucuuag

SEQ ID NO: 3146566 - RNA, 19 nt, Artificial Sequence
  Description of Artificial Sequence: Synthetic oligonucleotide
cuuaagucgauguagaaac

SEQ ID NO: 3146567 - RNA, 19 nt, Artificial Sequence
  Description of Artificial Sequence: Synthetic oligonucleotide
uuagugauauguuuagacg

SEQ ID NO: 3146568 - RNA, 19 nt, Artificial Sequence
  Description of Artificial Sequence: Synthetic oligonucleotide
ugaaaugggagccuguuga

SEQ ID NO: 3146569 - RNA, 19 nt, Artificial Sequence
  Description of Artificial Sequence: Synthetic oligonucleotide
auaaaaguauucuuaguga

SEQ ID NO: 3146570 - RNA, 19 nt, Artificial Sequence
  Description of Artificial Sequence: Synthetic oligonucleotide
cuuagugauauguuuagac

SEQ ID NO: 3146571 - RNA, 19 nt, Artificial Sequence
  Description of Artificial Sequence: Synthetic oligonucleotide
uagugauauguuuagacga

SEQ ID NO: 3146572 - RNA, 19 nt, Artificial Sequence
  Description of Artificial Sequence: Synthetic oligonucleotide
ugcuccuaggcuuaagucg

SEQ ID NO: 3146573 - RNA, 19 nt, Artificial Sequence
  Description of Artificial Sequence: Synthetic oligonucleotide
ugccuuaguacauaggagc

SEQ ID NO: 3146574 - RNA, 19 nt, Artificial Sequence
  Description of Artificial Sequence: Synthetic oligonucleotide
ugauauguuuagacgaucu

SEQ ID NO: 3146575 - RNA, 19 nt, Artificial Sequence
  Description of Artificial Sequence: Synthetic oligonucleotide
ucauucacucuauaaaagu

SEQ ID NO: 3146576 - RNA, 19 nt, Artificial Sequence
  Description of Artificial Sequence: Synthetic oligonucleotide
cuuaguacauaggagcugg

SEQ ID NO: 3146577 - RNA, 19 nt, Artificial Sequence
  Description of Artificial Sequence: Synthetic oligonucleotide
aguauucuuagugauaugu

SEQ ID NO: 3146578 - RNA, 19 nt, Artificial Sequence
  Description of Artificial Sequence: Synthetic oligonucleotide
uucuuagugauauguuuag

SEQ ID NO: 3146579 - RNA, 19 nt, Artificial Sequence
  Description of Artificial Sequence: Synthetic oligonucleotide
aaugggagccuguugacaa

SEQ ID NO: 3146580 - RNA, 19 nt, Artificial Sequence
  Description of Artificial Sequence: Synthetic oligonucleotide
uaagcccuggguuacacug

SEQ ID NO: 3146581 - RNA, 19 nt, Artificial Sequence
  Description of Artificial Sequence: Synthetic oligonucleotide
cucauucacucuauaaaag

SEQ ID NO: 3146582 - RNA, 19 nt, Artificial Sequence
  Description of Artificial Sequence: Synthetic oligonucleotide
uauguuuagacgaucuguu

SEQ ID NO: 3146583 - RNA, 19 nt, Artificial Sequence
  Description of Artificial Sequence: Synthetic oligonucleotide
uauucuuagugauauguuu

SEQ ID NO: 3146584 - RNA, 19 nt, Artificial Sequence
  Description of Artificial Sequence: Synthetic oligonucleotide
uguuuagacgaucuguuuu

SEQ ID NO: 3146585 - RNA, 19 nt, Artificial Sequence
  Description of Artificial Sequence: Synthetic oligonucleotide
uaggcuuaagucgauguag

SEQ ID NO: 3146586 - RNA, 19 nt, Artificial Sequence
  Description of Artificial Sequence: Synthetic oligonucleotide
guacauaggagcuggguug

SEQ ID NO: 3146587 - RNA, 19 nt, Artificial Sequence
  Description of Artificial Sequence: Synthetic oligonucleotide
gauauguuuagacgaucug

SEQ ID NO: 3146588 - RNA, 19 nt, Artificial Sequence
  Description of Artificial Sequence: Synthetic oligonucleotide
auauguuuagacgaucugu

SEQ ID NO: 3146589 - RNA, 19 nt, Artificial Sequence
  Description of Artificial Sequence: Synthetic oligonucleotide
auguagaaacuauauuaca

SEQ ID NO: 3146590 - RNA, 19 nt, Artificial Sequence
  Description of Artificial Sequence: Synthetic oligonucleotide
acacuggcugccuuaguac

SEQ ID NO: 3146591 - RNA, 19 nt, Artificial Sequence
  Description of Artificial Sequence: Synthetic oligonucleotide
aggagcuggguugaaaugg

SEQ ID NO: 3146592 - RNA, 19 nt, Artificial Sequence
  Description of Artificial Sequence: Synthetic oligonucleotide
cucuauaaaaguauucuua

SEQ ID NO: 3146593 - RNA, 19 nt, Artificial Sequence
  Description of Artificial Sequence: Synthetic oligonucleotide
uucacucuauaaaaguauu

SEQ ID NO: 3146594 - RNA, 19 nt, Artificial Sequence
  Description of Artificial Sequence: Synthetic oligonucleotide
ucugcuccuaggcuuaagu

SEQ ID NO: 3146595 - RNA, 19 nt, Artificial Sequence
  Description of Artificial Sequence: Synthetic oligonucleotide
uugaaaugggagccuguug

SEQ ID NO: 3146596 - RNA, 19 nt, Artificial Sequence
  Description of Artificial Sequence: Synthetic oligonucleotide
aguacauaggagcuggguu

SEQ ID NO: 3146597 - RNA, 19 nt, Artificial Sequence
  Description of Artificial Sequence: Synthetic oligonucleotide
uuaguacauaggagcuggg

SEQ ID NO: 3146598 - RNA, 19 nt, Artificial Sequence
  Description of Artificial Sequence: Synthetic oligonucleotide
auaggagcuggguugaaau

SEQ ID NO: 3146599 - RNA, 19 nt, Artificial Sequence
  Description of Artificial Sequence: Synthetic oligonucleotide
uuaagucgauguagaaacu

SEQ ID NO: 3146600 - RNA, 19 nt, Artificial Sequence
  Description of Artificial Sequence: Synthetic oligonucleotide
acucuauaaaaguauucuu

SEQ ID NO: 3146601 - RNA, 19 nt, Artificial Sequence
  Description of Artificial Sequence: Synthetic oligonucleotide
uacacuggcugccuuagua

SEQ ID NO: 3146602 - RNA, 19 nt, Artificial Sequence
  Description of Artificial Sequence: Synthetic oligonucleotide
aaguauucuuagugauaug

SEQ ID NO: 3146603 - RNA, 19 nt, Artificial Sequence
  Description of Artificial Sequence: Synthetic oligonucleotide
ucgauguagaaacuauauu

SEQ ID NO: 3146604 - RNA, 19 nt, Artificial Sequence
  Description of Artificial Sequence: Synthetic oligonucleotide
cuggguugaaaugggagcc

SEQ ID NO: 3146605 - RNA, 19 nt, Artificial Sequence
  Description of Artificial Sequence: Synthetic oligonucleotide
aaaaguauucuuagugaua

SEQ ID NO: 3146606 - RNA, 19 nt, Artificial Sequence
  Description of Artificial Sequence: Synthetic oligonucleotide
cugccuuaguacauaggag

SEQ ID NO: 3146607 - RNA, 19 nt, Artificial Sequence
  Description of Artificial Sequence: Synthetic oligonucleotide
gagccuguugacaaugggc

SEQ ID NO: 3146608 - RNA, 19 nt, Artificial Sequence
  Description of Artificial Sequence: Synthetic oligonucleotide
uugacaaugggcugcccuc

SEQ ID NO: 3146609 - RNA, 19 nt, Artificial Sequence
  Description of Artificial Sequence: Synthetic oligonucleotide
gaaaugggagccuguugac

SEQ ID NO: 3146610 - RNA, 19 nt, Artificial Sequence
  Description of Artificial Sequence: Synthetic oligonucleotide
cucucauucacucuauaaa

SEQ ID NO: 3146611 - RNA, 19 nt, Artificial Sequence
  Description of Artificial Sequence: Synthetic oligonucleotide
aaaugggagccuguugaca

SEQ ID NO: 3146612 - RNA, 19 nt, Artificial Sequence
  Description of Artificial Sequence: Synthetic oligonucleotide
uaagucgauguagaaacua

SEQ ID NO: 3146613 - RNA, 19 nt, Artificial Sequence
  Description of Artificial Sequence: Synthetic oligonucleotide
ucuuagugauauguuuaga

SEQ ID NO: 3146614 - RNA, 19 nt, Artificial Sequence
  Description of Artificial Sequence: Synthetic oligonucleotide
aagucgauguagaaacuau

SEQ ID NO: 3146615 - RNA, 19 nt, Artificial Sequence
  Description of Artificial Sequence: Synthetic oligonucleotide
gcugccuuaguacauagga

SEQ ID NO: 3146616 - RNA, 19 nt, Artificial Sequence
  Description of Artificial Sequence: Synthetic oligonucleotide
auucuuagugauauguuua

SEQ ID NO: 3146617 - RNA, 19 nt, Artificial Sequence
  Description of Artificial Sequence: Synthetic oligonucleotide
uaggagcuggguugaaaug

SEQ ID NO: 3146618 - RNA, 19 nt, Artificial Sequence
  Description of Artificial Sequence: Synthetic oligonucleotide
agccuguugacaaugggcu

SEQ ID NO: 3146619 - RNA, 19 nt, Artificial Sequence
  Description of Artificial Sequence: Synthetic oligonucleotide
gcuggguugaaaugggagc

SEQ ID NO: 3146620 - RNA, 19 nt, Artificial Sequence
  Description of Artificial Sequence: Synthetic oligonucleotide
uacauaggagcuggguuga

SEQ ID NO: 3146621 - RNA, 19 nt, Artificial Sequence
  Description of Artificial Sequence: Synthetic oligonucleotide
guuacacuggcugccuuag

SEQ ID NO: 3146622 - RNA, 19 nt, Artificial Sequence
  Description of Artificial Sequence: Synthetic oligonucleotide
uuuaagcccuggguuacac

SEQ ID NO: 3146623 - RNA, 19 nt, Artificial Sequence
  Description of Artificial Sequence: Synthetic oligonucleotide
agcuggguugaaaugggag

SEQ ID NO: 3146624 - RNA, 19 nt, Artificial Sequence
  Description of Artificial Sequence: Synthetic oligonucleotide
agugauauguuuagacgau

SEQ ID NO: 3146625 - RNA, 19 nt, Artificial Sequence
  Description of Artificial Sequence: Synthetic oligonucleotide
uggcugccuuaguacauag

SEQ ID NO: 3146626 - RNA, 19 nt, Artificial Sequence
  Description of Artificial Sequence: Synthetic oligonucleotide
aagcccuggguuacacugg

SEQ ID NO: 3146627 - RNA, 19 nt, Artificial Sequence
  Description of Artificial Sequence: Synthetic oligonucleotide
auguuuagacgaucuguuu

SEQ ID NO: 3146628 - RNA, 19 nt, Artificial Sequence
  Description of Artificial Sequence: Synthetic oligonucleotide
cuauaaaaguauucuuagu

SEQ ID NO: 3146629 - RNA, 19 nt, Artificial Sequence
  Description of Artificial Sequence: Synthetic oligonucleotide
uuaagcccuggguuacacu

SEQ ID NO: 3146630 - RNA, 19 nt, Artificial Sequence
  Description of Artificial Sequence: Synthetic oligonucleotide
cgauguagaaacuauauua

SEQ ID NO: 3146631 - RNA, 19 nt, Artificial Sequence
  Description of Artificial Sequence: Synthetic oligonucleotide
cacucuauaaaaguauucu

SEQ ID NO: 3146632 - RNA, 19 nt, Artificial Sequence
  Description of Artificial Sequence: Synthetic oligonucleotide
cuggguuacacuggcugcc

SEQ ID NO: 3146633 - RNA, 19 nt, Artificial Sequence
  Description of Artificial Sequence: Synthetic oligonucleotide
cugcuccuaggcuuaaguc

SEQ ID NO: 3146634 - RNA, 19 nt, Artificial Sequence
  Description of Artificial Sequence: Synthetic oligonucleotide
ugggagccuguugacaaug

SEQ ID NO: 3146635 - RNA, 19 nt, Artificial Sequence
  Description of Artificial Sequence: Synthetic oligonucleotide
ggagccuguugacaauggg

SEQ ID NO: 3146636 - RNA, 19 nt, Artificial Sequence
  Description of Artificial Sequence: Synthetic oligonucleotide
cugcccucugcuccuaggc

SEQ ID NO: 3146637 - RNA, 19 nt, Artificial Sequence
  Description of Artificial Sequence: Synthetic oligonucleotide
ugacaaugggcugcccucu

SEQ ID NO: 3146638 - RNA, 19 nt, Artificial Sequence
  Description of Artificial Sequence: Synthetic oligonucleotide
guugacaaugggcugcccu

SEQ ID NO: 3146639 - RNA, 19 nt, Artificial Sequence
  Description of Artificial Sequence: Synthetic oligonucleotide
gacaaugggcugcccucug

SEQ ID NO: 3146640 - RNA, 19 nt, Artificial Sequence
  Description of Artificial Sequence: Synthetic oligonucleotide
uuuuaagcccuggguuaca

SEQ ID NO: 3146641 - RNA, 19 nt, Artificial Sequence
  Description of Artificial Sequence: Synthetic oligonucleotide
ggagcuggguugaaauggg

SEQ ID NO: 3146642 - RNA, 19 nt, Artificial Sequence
  Description of Artificial Sequence: Synthetic oligonucleotide
aggcuuaagucgauguaga

SEQ ID NO: 3146643 - RNA, 19 nt, Artificial Sequence
  Description of Artificial Sequence: Synthetic oligonucleotide
gugauauguuuagacgauc

SEQ ID NO: 3146644 - RNA, 19 nt, Artificial Sequence
  Description of Artificial Sequence: Synthetic oligonucleotide
cuguugacaaugggcugcc

SEQ ID NO: 3146645 - RNA, 19 nt, Artificial Sequence
  Description of Artificial Sequence: Synthetic oligonucleotide
uccuaggcuuaagucgaug

SEQ ID NO: 3146646 - RNA, 19 nt, Artificial Sequence
  Description of Artificial Sequence: Synthetic oligonucleotide
uggguugaaaugggagccu

SEQ ID NO: 3146647 - RNA, 19 nt, Artificial Sequence
  Description of Artificial Sequence: Synthetic oligonucleotide
uuacacuggcugccuuagu

SEQ ID NO: 3146648 - RNA, 19 nt, Artificial Sequence
  Description of Artificial Sequence: Synthetic oligonucleotide
cacuggcugccuuaguaca

SEQ ID NO: 3146649 - RNA, 19 nt, Artificial Sequence
  Description of Artificial Sequence: Synthetic oligonucleotide
gucgauguagaaacuauau

SEQ ID NO: 3146650 - RNA, 19 nt, Artificial Sequence
  Description of Artificial Sequence: Synthetic oligonucleotide
agucgauguagaaacuaua

SEQ ID NO: 3146651 - RNA, 19 nt, Artificial Sequence
  Description of Artificial Sequence: Synthetic oligonucleotide
ccuggguuacacuggcugc

SEQ ID NO: 3146652 - RNA, 19 nt, Artificial Sequence
  Description of Artificial Sequence: Synthetic oligonucleotide
cuaggcuuaagucgaugua

SEQ ID NO: 3146653 - RNA, 19 nt, Artificial Sequence
  Description of Artificial Sequence: Synthetic oligonucleotide
ugccucucauucacucuau

SEQ ID NO: 3146654 - RNA, 19 nt, Artificial Sequence
  Description of Artificial Sequence: Synthetic oligonucleotide
gcuuaagucgauguagaaa

SEQ ID NO: 3146655 - RNA, 19 nt, Artificial Sequence
  Description of Artificial Sequence: Synthetic oligonucleotide
uggguuacacuggcugccu

SEQ ID NO: 3146656 - RNA, 19 nt, Artificial Sequence
  Description of Artificial Sequence: Synthetic oligonucleotide
ugggcugcccucugcuccu

SEQ ID NO: 3146657 - RNA, 19 nt, Artificial Sequence
  Description of Artificial Sequence: Synthetic oligonucleotide
gcuccuaggcuuaagucga

SEQ ID NO: 3146658 - RNA, 19 nt, Artificial Sequence
  Description of Artificial Sequence: Synthetic oligonucleotide
uguugacaaugggcugccc

SEQ ID NO: 3146659 - RNA, 19 nt, Artificial Sequence
  Description of Artificial Sequence: Synthetic oligonucleotide
augggagccuguugacaau

SEQ ID NO: 3146660 - RNA, 19 nt, Artificial Sequence
  Description of Artificial Sequence: Synthetic oligonucleotide
ggguugaaaugggagccug

SEQ ID NO: 3146661 - RNA, 19 nt, Artificial Sequence
  Description of Artificial Sequence: Synthetic oligonucleotide
guauucuuagugauauguu

SEQ ID NO: 3146662 - RNA, 19 nt, Artificial Sequence
  Description of Artificial Sequence: Synthetic oligonucleotide
gccuguugacaaugggcug

SEQ ID NO: 3146663 - RNA, 19 nt, Artificial Sequence
  Description of Artificial Sequence: Synthetic oligonucleotide
ccuuaguacauaggagcug

SEQ ID NO: 3146664 - RNA, 19 nt, Artificial Sequence
  Description of Artificial Sequence: Synthetic oligonucleotide
gggagccuguugacaaugg

SEQ ID NO: 3146665 - RNA, 19 nt, Artificial Sequence
  Description of Artificial Sequence: Synthetic oligonucleotide
acuggcugccuuaguacau

SEQ ID NO: 3146666 - RNA, 19 nt, Artificial Sequence
  Description of Artificial Sequence: Synthetic oligonucleotide
ggcuuaagucgauguagaa

SEQ ID NO: 3146667 - RNA, 19 nt, Artificial Sequence
  Description of Artificial Sequence: Synthetic oligonucleotide
ccucucauucacucuauaa

SEQ ID NO: 3146668 - RNA, 19 nt, Artificial Sequence
  Description of Artificial Sequence: Synthetic oligonucleotide
gguuacacuggcugccuua

SEQ ID NO: 3146669 - RNA, 19 nt, Artificial Sequence
  Description of Artificial Sequence: Synthetic oligonucleotide
gagcuggguugaaauggga

SEQ ID NO: 3146670 - RNA, 19 nt, Artificial Sequence
  Description of Artificial Sequence: Synthetic oligonucleotide
cauaggagcuggguugaaa

SEQ ID NO: 3146671 - RNA, 19 nt, Artificial Sequence
  Description of Artificial Sequence: Synthetic oligonucleotide
ggcugccuuaguacauagg

SEQ ID NO: 3146672 - RNA, 19 nt, Artificial Sequence
  Description of Artificial Sequence: Synthetic oligonucleotide
guugaaaugggagccuguu

SEQ ID NO: 3146673 - RNA, 19 nt, Artificial Sequence
  Description of Artificial Sequence: Synthetic oligonucleotide
cucugcuccuaggcuuaag

SEQ ID NO: 3146674 - RNA, 19 nt, Artificial Sequence
  Description of Artificial Sequence: Synthetic oligonucleotide
ccuaggcuuaagucgaugu

SEQ ID NO: 3146675 - RNA, 19 nt, Artificial Sequence
  Description of Artificial Sequence: Synthetic oligonucleotide
gccuuaguacauaggagcu

SEQ ID NO: 3146676 - RNA, 19 nt, Artificial Sequence
  Description of Artificial Sequence: Synthetic oligonucleotide
acauaggagcuggguugaa

SEQ ID NO: 3146677 - RNA, 19 nt, Artificial Sequence
  Description of Artificial Sequence: Synthetic oligonucleotide
cuggcugccuuaguacaua

SEQ ID NO: 3146678 - RNA, 19 nt, Artificial Sequence
  Description of Artificial Sequence: Synthetic oligonucleotide
gguugaaaugggagccugu

SEQ ID NO: 3146679 - RNA, 19 nt, Artificial Sequence
  Description of Artificial Sequence: Synthetic oligonucleotide
gccucucauucacucuaua

SEQ ID NO: 3146680 - RNA, 19 nt, Artificial Sequence
  Description of Artificial Sequence: Synthetic oligonucleotide
cuccuaggcuuaagucgau

SEQ ID NO: 3146681 - RNA, 19 nt, Artificial Sequence
  Description of Artificial Sequence: Synthetic oligonucleotide
ggguuacacuggcugccuu

SEQ ID NO: 3146682 - RNA, 19 nt, Artificial Sequence
  Description of Artificial Sequence: Synthetic oligonucleotide
ccucugcuccuaggcuuaa

SEQ ID NO: 3146683 - RNA, 19 nt, Artificial Sequence
  Description of Artificial Sequence: Synthetic oligonucleotide
gcccuggguuacacuggcu

SEQ ID NO: 3146684 - RNA, 19 nt, Artificial Sequence
  Description of Artificial Sequence: Synthetic oligonucleotide
gggcugcccucugcuccua

SEQ ID NO: 3146685 - RNA, 19 nt, Artificial Sequence
  Description of Artificial Sequence: Synthetic oligonucleotide
ugugagagagagagagugg

SEQ ID NO: 3146686 - RNA, 19 nt, Artificial Sequence
  Description of Artificial Sequence: Synthetic oligonucleotide
agccgaugcucuuaacugc

SEQ ID NO: 3146687 - RNA, 19 nt, Artificial Sequence
  Description of Artificial Sequence: Synthetic oligonucleotide
gugugugagagagagagag

SEQ ID NO: 3146688 - RNA, 19 nt, Artificial Sequence
  Description of Artificial Sequence: Synthetic oligonucleotide
uagccgaugcucuuaacug

SEQ ID NO: 3146689 - RNA, 19 nt, Artificial Sequence
  Description of Artificial Sequence: Synthetic oligonucleotide
cuggaaaaguagccgaugc

SEQ ID NO: 3146690 - RNA, 19 nt, Artificial Sequence
  Description of Artificial Sequence: Synthetic oligonucleotide
agagagagagaguggaacu

SEQ ID NO: 3146691 - RNA, 19 nt, Artificial Sequence
  Description of Artificial Sequence: Synthetic oligonucleotide
aguggaacuggaguuacag

SEQ ID NO: 3146692 - RNA, 19 nt, Artificial Sequence
  Description of Artificial Sequence: Synthetic oligonucleotide
gugugugugugugagagag

SEQ ID NO: 3146693 - RNA, 19 nt, Artificial Sequence
  Description of Artificial Sequence: Synthetic oligonucleotide
gugugagagagagagagug

SEQ ID NO: 3146694 - RNA, 19 nt, Artificial Sequence
  Description of Artificial Sequence: Synthetic oligonucleotide
agagagagaguggaacugg

SEQ ID NO: 3146695 - RNA, 19 nt, Artificial Sequence
  Description of Artificial Sequence: Synthetic oligonucleotide
agagaguggaacuggaguu

SEQ ID NO: 3146696 - RNA, 19 nt, Artificial Sequence
  Description of Artificial Sequence: Synthetic oligonucleotide
guuuguuugugugugugug

SEQ ID NO: 3146697 - RNA, 19 nt, Artificial Sequence
  Description of Artificial Sequence: Synthetic oligonucleotide
uggaaaaguagccgaugcu

SEQ ID NO: 3146698 - RNA, 19 nt, Artificial Sequence
  Description of Artificial Sequence: Synthetic oligonucleotide
uuguuugugugugugugug

SEQ ID NO: 3146699 - RNA, 19 nt, Artificial Sequence
  Description of Artificial Sequence: Synthetic oligonucleotide
gagagagagagaguggaac

SEQ ID NO: 3146700 - RNA, 19 nt, Artificial Sequence
  Description of Artificial Sequence: Synthetic oligonucleotide
uuuguuugugugugugugu

SEQ ID NO: 3146701 - RNA, 19 nt, Artificial Sequence
  Description of Artificial Sequence: Synthetic oligonucleotide
gugugugugugugugagag

SEQ ID NO: 3146702 - RNA, 19 nt, Artificial Sequence
  Description of Artificial Sequence: Synthetic oligonucleotide
aaaaguagccgaugcucuu

SEQ ID NO: 3146703 - RNA, 19 nt, Artificial Sequence
  Description of Artificial Sequence: Synthetic oligonucleotide
agaguggaacuggaguuac

SEQ ID NO: 3146704 - RNA, 19 nt, Artificial Sequence
  Description of Artificial Sequence: Synthetic oligonucleotide
ucuggaaaaguagccgaug

SEQ ID NO: 3146705 - RNA, 19 nt, Artificial Sequence
  Description of Artificial Sequence: Synthetic oligonucleotide
guuugugugugugugugug

SEQ ID NO: 3146706 - RNA, 19 nt, Artificial Sequence
  Description of Artificial Sequence: Synthetic oligonucleotide
uugugugugugugugugug

SEQ ID NO: 3146707 - RNA, 19 nt, Artificial Sequence
  Description of Artificial Sequence: Synthetic oligonucleotide
uuggaccuggguccucugg

SEQ ID NO: 3146708 - RNA, 19 nt, Artificial Sequence
  Description of Artificial Sequence: Synthetic oligonucleotide
ugugugagagagagagagu

SEQ ID NO: 3146709 - RNA, 19 nt, Artificial Sequence
  Description of Artificial Sequence: Synthetic oligonucleotide
aaguagccgaugcucuuaa

SEQ ID NO: 3146710 - RNA, 19 nt, Artificial Sequence
  Description of Artificial Sequence: Synthetic oligonucleotide
ugagagagagagaguggaa

SEQ ID NO: 3146711 - RNA, 19 nt, Artificial Sequence
  Description of Artificial Sequence: Synthetic oligonucleotide
ugugugugagagagagaga

SEQ ID NO: 3146712 - RNA, 19 nt, Artificial Sequence
  Description of Artificial Sequence: Synthetic oligonucleotide
uuugugugugugugugugu

SEQ ID NO: 3146713 - RNA, 19 nt, Artificial Sequence
  Description of Artificial Sequence: Synthetic oligonucleotide
ggaaaaguagccgaugcuc

SEQ ID NO: 3146714 - RNA, 19 nt, Artificial Sequence
  Description of Artificial Sequence: Synthetic oligonucleotide
gugagagagagagagugga

SEQ ID NO: 3146715 - RNA, 19 nt, Artificial Sequence
  Description of Artificial Sequence: Synthetic oligonucleotide
gaaaaguagccgaugcucu

SEQ ID NO: 3146716 - RNA, 19 nt, Artificial Sequence
  Description of Artificial Sequence: Synthetic oligonucleotide
aguagccgaugcucuuaac

SEQ ID NO: 3146717 - RNA, 19 nt, Artificial Sequence
  Description of Artificial Sequence: Synthetic oligonucleotide
gugugugugugugugugag

SEQ ID NO: 3146718 - RNA, 19 nt, Artificial Sequence
  Description of Artificial Sequence: Synthetic oligonucleotide
uguuugugugugugugugu

SEQ ID NO: 3146719 - RNA, 19 nt, Artificial Sequence
  Description of Artificial Sequence: Synthetic oligonucleotide
uguguguguguguguguga

SEQ ID NO: 3146720 - RNA, 19 nt, Artificial Sequence
  Description of Artificial Sequence: Synthetic oligonucleotide
aaaguagccgaugcucuua

SEQ ID NO: 3146721 - RNA, 19 nt, Artificial Sequence
  Description of Artificial Sequence: Synthetic oligonucleotide
ugugugugugugagagaga

SEQ ID NO: 3146722 - RNA, 19 nt, Artificial Sequence
  Description of Artificial Sequence: Synthetic oligonucleotide
guagccgaugcucuuaacu

SEQ ID NO: 3146723 - RNA, 19 nt, Artificial Sequence
  Description of Artificial Sequence: Synthetic oligonucleotide
ugugugugugugugugugu

SEQ ID NO: 3146724 - RNA, 19 nt, Artificial Sequence
  Description of Artificial Sequence: Synthetic oligonucleotide
ugugugugugugugugaga

SEQ ID NO: 3146725 - RNA, 19 nt, Artificial Sequence
  Description of Artificial Sequence: Synthetic oligonucleotide
ugugugugugugugagaga

SEQ ID NO: 3146726 - RNA, 19 nt, Artificial Sequence
  Description of Artificial Sequence: Synthetic oligonucleotide
agagagaguggaacuggag

SEQ ID NO: 3146727 - RNA, 19 nt, Artificial Sequence
  Description of Artificial Sequence: Synthetic oligonucleotide
gugugugugugugugugug

SEQ ID NO: 3146728 - RNA, 19 nt, Artificial Sequence
  Description of Artificial Sequence: Synthetic oligonucleotide
gagagagaguggaacugga

SEQ ID NO: 3146729 - RNA, 19 nt, Artificial Sequence
  Description of Artificial Sequence: Synthetic oligonucleotide
aguuggaccuggguccucu

SEQ ID NO: 3146730 - RNA, 19 nt, Artificial Sequence
  Description of Artificial Sequence: Synthetic oligonucleotide
gagaguggaacuggaguua

SEQ ID NO: 3146731 - RNA, 19 nt, Artificial Sequence
  Description of Artificial Sequence: Synthetic oligonucleotide
ccucuggaaaaguagccga

SEQ ID NO: 3146732 - RNA, 19 nt, Artificial Sequence
  Description of Artificial Sequence: Synthetic oligonucleotide
guuggaccuggguccucug

SEQ ID NO: 3146733 - RNA, 19 nt, Artificial Sequence
  Description of Artificial Sequence: Synthetic oligonucleotide
cucuggaaaaguagccgau

SEQ ID NO: 3146734 - RNA, 19 nt, Artificial Sequence
  Description of Artificial Sequence: Synthetic oligonucleotide
gaguggaacuggaguuaca

SEQ ID NO: 3146735 - RNA, 19 nt, Artificial Sequence
  Description of Artificial Sequence: Synthetic oligonucleotide
ccgaugcucuuaacugcug

SEQ ID NO: 3146736 - RNA, 19 nt, Artificial Sequence
  Description of Artificial Sequence: Synthetic oligonucleotide
gccgaugcucuuaacugcu

SEQ ID NO: 3146737 - RNA, 19 nt, Artificial Sequence
  Description of Artificial Sequence: Synthetic oligonucleotide
agagaagagacucuguguc

SEQ ID NO: 3146738 - RNA, 19 nt, Artificial Sequence
  Description of Artificial Sequence: Synthetic oligonucleotide
gauucucugaguucgaagc

SEQ ID NO: 3146739 - RNA, 19 nt, Artificial Sequence
  Description of Artificial Sequence: Synthetic oligonucleotide
ucuuaaucccagcacuuag

SEQ ID NO: 3146740 - RNA, 19 nt, Artificial Sequence
  Description of Artificial Sequence: Synthetic oligonucleotide
auucucugaguucgaagcc

SEQ ID NO: 3146741 - RNA, 19 nt, Artificial Sequence
  Description of Artificial Sequence: Synthetic oligonucleotide
ggcacauacgucuuaaucc

SEQ ID NO: 3146742 - RNA, 19 nt, Artificial Sequence
  Description of Artificial Sequence: Synthetic oligonucleotide
gcacuuaggagguagaggc

SEQ ID NO: 3146743 - RNA, 19 nt, Artificial Sequence
  Description of Artificial Sequence: Synthetic oligonucleotide
gagacucugugucuaaaac

SEQ ID NO: 3146744 - RNA, 19 nt, Artificial Sequence
  Description of Artificial Sequence: Synthetic oligonucleotide
uacgucuuaaucccagcac

SEQ ID NO: 3146745 - RNA, 19 nt, Artificial Sequence
  Description of Artificial Sequence: Synthetic oligonucleotide
acgucuuaaucccagcacu

SEQ ID NO: 3146746 - RNA, 19 nt, Artificial Sequence
  Description of Artificial Sequence: Synthetic oligonucleotide
uggcacauacgucuuaauc

SEQ ID NO: 3146747 - RNA, 19 nt, Artificial Sequence
  Description of Artificial Sequence: Synthetic oligonucleotide
auacgucuuaaucccagca

SEQ ID NO: 3146748 - RNA, 19 nt, Artificial Sequence
  Description of Artificial Sequence: Synthetic oligonucleotide
agcacuuaggagguagagg

SEQ ID NO: 3146749 - RNA, 19 nt, Artificial Sequence
  Description of Artificial Sequence: Synthetic oligonucleotide
gcacauacgucuuaauccc

SEQ ID NO: 3146750 - RNA, 19 nt, Artificial Sequence
  Description of Artificial Sequence: Synthetic oligonucleotide
cucugugucuaaaacaaaa

SEQ ID NO: 3146751 - RNA, 19 nt, Artificial Sequence
  Description of Artificial Sequence: Synthetic oligonucleotide
cauacgucuuaaucccagc

SEQ ID NO: 3146752 - RNA, 19 nt, Artificial Sequence
  Description of Artificial Sequence: Synthetic oligonucleotide
ggcggauucucugaguucg

SEQ ID NO: 3146753 - RNA, 19 nt, Artificial Sequence
  Description of Artificial Sequence: Synthetic oligonucleotide
uuaggagguagaggcaggc

SEQ ID NO: 3146754 - RNA, 19 nt, Artificial Sequence
  Description of Artificial Sequence: Synthetic oligonucleotide
acauacgucuuaaucccag

SEQ ID NO: 3146755 - RNA, 19 nt, Artificial Sequence
  Description of Artificial Sequence: Synthetic oligonucleotide
agagacucugugucuaaaa

SEQ ID NO: 3146756 - RNA, 19 nt, Artificial Sequence
  Description of Artificial Sequence: Synthetic oligonucleotide
ggauucucugaguucgaag

SEQ ID NO: 3146757 - RNA, 19 nt, Artificial Sequence
  Description of Artificial Sequence: Synthetic oligonucleotide
aggcggauucucugaguuc

SEQ ID NO: 3146758 - RNA, 19 nt, Artificial Sequence
  Description of Artificial Sequence: Synthetic oligonucleotide
gguagaggcaggcggauuc

SEQ ID NO: 3146759 - RNA, 19 nt, Artificial Sequence
  Description of Artificial Sequence: Synthetic oligonucleotide
agaagagacucugugucua

SEQ ID NO: 3146760 - RNA, 19 nt, Artificial Sequence
  Description of Artificial Sequence: Synthetic oligonucleotide
aagagacucugugucuaaa

SEQ ID NO: 3146761 - RNA, 19 nt, Artificial Sequence
  Description of Artificial Sequence: Synthetic oligonucleotide
gagaagagacucugugucu

SEQ ID NO: 3146762 - RNA, 19 nt, Artificial Sequence
  Description of Artificial Sequence: Synthetic oligonucleotide
gaagagacucugugucuaa

SEQ ID NO: 3146763 - RNA, 19 nt, Artificial Sequence
  Description of Artificial Sequence: Synthetic oligonucleotide
cagcacuuaggagguagag

SEQ ID NO: 3146764 - RNA, 19 nt, Artificial Sequence
  Description of Artificial Sequence: Synthetic oligonucleotide
aggcaggcggauucucuga

SEQ ID NO: 3146765 - RNA, 19 nt, Artificial Sequence
  Description of Artificial Sequence: Synthetic oligonucleotide
cacauacgucuuaauccca

SEQ ID NO: 3146766 - RNA, 19 nt, Artificial Sequence
  Description of Artificial Sequence: Synthetic oligonucleotide
cacuuaggagguagaggca

SEQ ID NO: 3146767 - RNA, 19 nt, Artificial Sequence
  Description of Artificial Sequence: Synthetic oligonucleotide
ggcaggcggauucucugag

SEQ ID NO: 3146768 - RNA, 19 nt, Artificial Sequence
  Description of Artificial Sequence: Synthetic oligonucleotide
ugguggcacauacgucuua

SEQ ID NO: 3146769 - RNA, 19 nt, Artificial Sequence
  Description of Artificial Sequence: Synthetic oligonucleotide
gucuuaaucccagcacuua

SEQ ID NO: 3146770 - RNA, 19 nt, Artificial Sequence
  Description of Artificial Sequence: Synthetic oligonucleotide
acucugugucuaaaacaaa

SEQ ID NO: 3146771 - RNA, 19 nt, Artificial Sequence
  Description of Artificial Sequence: Synthetic oligonucleotide
gguggcacauacgucuuaa

SEQ ID NO: 3146772 - RNA, 19 nt, Artificial Sequence
  Description of Artificial Sequence: Synthetic oligonucleotide
caggcggauucucugaguu

SEQ ID NO: 3146773 - RNA, 19 nt, Artificial Sequence
  Description of Artificial Sequence: Synthetic oligonucleotide
guagaggcaggcggauucu

SEQ ID NO: 3146774 - RNA, 19 nt, Artificial Sequence
  Description of Artificial Sequence: Synthetic oligonucleotide
guggcacauacgucuuaau

SEQ ID NO: 3146775 - RNA, 19 nt, Artificial Sequence
  Description of Artificial Sequence: Synthetic oligonucleotide
gcaggcggauucucugagu

SEQ ID NO: 3146776 - RNA, 19 nt, Artificial Sequence
  Description of Artificial Sequence: Synthetic oligonucleotide
gcggauucucugaguucga

SEQ ID NO: 3146777 - RNA, 19 nt, Artificial Sequence
  Description of Artificial Sequence: Synthetic oligonucleotide
cgucuuaaucccagcacuu

SEQ ID NO: 3146778 - RNA, 19 nt, Artificial Sequence
  Description of Artificial Sequence: Synthetic oligonucleotide
cggauucucugaguucgaa

SEQ ID NO: 3146779 - RNA, 19 nt, Artificial Sequence
  Description of Artificial Sequence: Synthetic oligonucleotide
agugcacacaccuuuaauc

SEQ ID NO: 3146780 - RNA, 19 nt, Artificial Sequence
  Description of Artificial Sequence: Synthetic oligonucleotide
cuaaagagcaaguuccagg

SEQ ID NO: 3146781 - RNA, 19 nt, Artificial Sequence
  Description of Artificial Sequence: Synthetic oligonucleotide
uaaagagcaaguuccagga

SEQ ID NO: 3146782 - RNA, 19 nt, Artificial Sequence
  Description of Artificial Sequence: Synthetic oligonucleotide
agugguagugcacacaccu

SEQ ID NO: 3146783 - RNA, 19 nt, Artificial Sequence
  Description of Artificial Sequence: Synthetic oligonucleotide
aaagagcaaguuccaggac

SEQ ID NO: 3146784 - RNA, 19 nt, Artificial Sequence
  Description of Artificial Sequence: Synthetic oligonucleotide
uggucuaaagagcaaguuc

SEQ ID NO: 3146785 - RNA, 19 nt, Artificial Sequence
  Description of Artificial Sequence: Synthetic oligonucleotide
gugcacacaccuuuaaucc

SEQ ID NO: 3146786 - RNA, 19 nt, Artificial Sequence
  Description of Artificial Sequence: Synthetic oligonucleotide
ggucuaaagagcaaguucc

SEQ ID NO: 3146787 - RNA, 19 nt, Artificial Sequence
  Description of Artificial Sequence: Synthetic oligonucleotide
ucuaaagagcaaguuccag

SEQ ID NO: 3146788 - RNA, 19 nt, Artificial Sequence
  Description of Artificial Sequence: Synthetic oligonucleotide
ugguagugcacacaccuuu

SEQ ID NO: 3146789 - RNA, 19 nt, Artificial Sequence
  Description of Artificial Sequence: Synthetic oligonucleotide
uagugcacacaccuuuaau

SEQ ID NO: 3146790 - RNA, 19 nt, Artificial Sequence
  Description of Artificial Sequence: Synthetic oligonucleotide
aggcggguggaucucugag

SEQ ID NO: 3146791 - RNA, 19 nt, Artificial Sequence
  Description of Artificial Sequence: Synthetic oligonucleotide
cagugguagugcacacacc

SEQ ID NO: 3146792 - RNA, 19 nt, Artificial Sequence
  Description of Artificial Sequence: Synthetic oligonucleotide
gucuaaagagcaaguucca

SEQ ID NO: 3146793 - RNA, 19 nt, Artificial Sequence
  Description of Artificial Sequence: Synthetic oligonucleotide
acagucagggcuacacaga

SEQ ID NO: 3146794 - RNA, 19 nt, Artificial Sequence
  Description of Artificial Sequence: Synthetic oligonucleotide
guagugcacacaccuuuaa

SEQ ID NO: 3146795 - RNA, 19 nt, Artificial Sequence
  Description of Artificial Sequence: Synthetic oligonucleotide
gaggcggguggaucucuga

SEQ ID NO: 3146796 - RNA, 19 nt, Artificial Sequence
  Description of Artificial Sequence: Synthetic oligonucleotide
agucagggcuacacagaga

SEQ ID NO: 3146797 - RNA, 19 nt, Artificial Sequence
  Description of Artificial Sequence: Synthetic oligonucleotide
agaggcggguggaucucug

SEQ ID NO: 3146798 - RNA, 19 nt, Artificial Sequence
  Description of Artificial Sequence: Synthetic oligonucleotide
gguagugcacacaccuuua

SEQ ID NO: 3146799 - RNA, 19 nt, Artificial Sequence
  Description of Artificial Sequence: Synthetic oligonucleotide
cuggucuaaagagcaaguu

SEQ ID NO: 3146800 - RNA, 19 nt, Artificial Sequence
  Description of Artificial Sequence: Synthetic oligonucleotide
ggcagugguagugcacaca

SEQ ID NO: 3146801 - RNA, 19 nt, Artificial Sequence
  Description of Artificial Sequence: Synthetic oligonucleotide
gcggguggaucucugaguu

SEQ ID NO: 3146802 - RNA, 19 nt, Artificial Sequence
  Description of Artificial Sequence: Synthetic oligonucleotide
ggcggguggaucucugagu

SEQ ID NO: 3146803 - RNA, 19 nt, Artificial Sequence
  Description of Artificial Sequence: Synthetic oligonucleotide
gugguagugcacacaccuu

SEQ ID NO: 3146804 - RNA, 19 nt, Artificial Sequence
  Description of Artificial Sequence: Synthetic oligonucleotide
gcagaggcggguggaucuc

SEQ ID NO: 3146805 - RNA, 19 nt, Artificial Sequence
  Description of Artificial Sequence: Synthetic oligonucleotide
cggguggaucucugaguuc

SEQ ID NO: 3146806 - RNA, 19 nt, Artificial Sequence
  Description of Artificial Sequence: Synthetic oligonucleotide
cagaggcggguggaucucu

SEQ ID NO: 3146807 - RNA, 19 nt, Artificial Sequence
  Description of Artificial Sequence: Synthetic oligonucleotide
aaaagaaagaaaagaaaag

SEQ ID NO: 3146808 - RNA, 19 nt, Artificial Sequence
  Description of Artificial Sequence: Synthetic oligonucleotide
uccaaaaccacagagaaac

SEQ ID NO: 3146809 - RNA, 19 nt, Artificial Sequence
  Description of Artificial Sequence: Synthetic oligonucleotide
gaaagaaaagaaaagaaaa

SEQ ID NO: 3146810 - RNA, 19 nt, Artificial Sequence
  Description of Artificial Sequence: Synthetic oligonucleotide
ugucacacgccuuuaaucc

SEQ ID NO: 3146811 - RNA, 19 nt, Artificial Sequence
  Description of Artificial Sequence: Synthetic oligonucleotide
acaagagugaguuccagga

SEQ ID NO: 3146812 - RNA, 19 nt, Artificial Sequence
  Description of Artificial Sequence: Synthetic oligonucleotide
aaaaccacagagaaacccu

SEQ ID NO: 3146813 - RNA, 19 nt, Artificial Sequence
  Description of Artificial Sequence: Synthetic oligonucleotide
caaaaccacagagaaaccc

SEQ ID NO: 3146814 - RNA, 19 nt, Artificial Sequence
  Description of Artificial Sequence: Synthetic oligonucleotide
auuggugucacacgccuuu

SEQ ID NO: 3146815 - RNA, 19 nt, Artificial Sequence
  Description of Artificial Sequence: Synthetic oligonucleotide
gugucacacgccuuuaauc

SEQ ID NO: 3146816 - RNA, 19 nt, Artificial Sequence
  Description of Artificial Sequence: Synthetic oligonucleotide
gucacacgccuuuaauccc

SEQ ID NO: 3146817 - RNA, 19 nt, Artificial Sequence
  Description of Artificial Sequence: Synthetic oligonucleotide
caagagugaguuccaggac

SEQ ID NO: 3146818 - RNA, 19 nt, Artificial Sequence
  Description of Artificial Sequence: Synthetic oligonucleotide
uggugucacacgccuuuaa

SEQ ID NO: 3146819 - RNA, 19 nt, Artificial Sequence
  Description of Artificial Sequence: Synthetic oligonucleotide
ccuccaaaaccacagagaa

SEQ ID NO: 3146820 - RNA, 19 nt, Artificial Sequence
  Description of Artificial Sequence: Synthetic oligonucleotide
ccaaaaccacagagaaacc

SEQ ID NO: 3146821 - RNA, 19 nt, Artificial Sequence
  Description of Artificial Sequence: Synthetic oligonucleotide
cuccaaaaccacagagaaa

SEQ ID NO: 3146822 - RNA, 19 nt, Artificial Sequence
  Description of Artificial Sequence: Synthetic oligonucleotide
uuggugucacacgccuuua

SEQ ID NO: 3146823 - RNA, 19 nt, Artificial Sequence
  Description of Artificial Sequence: Synthetic oligonucleotide
ggugucacacgccuuuaau

SEQ ID NO: 3146824 - RNA, 19 nt, Artificial Sequence
  Description of Artificial Sequence: Synthetic oligonucleotide
cauuggugucacacgccuu

SEQ ID NO: 3146825 - RNA, 19 nt, Artificial Sequence
  Description of Artificial Sequence: Synthetic oligonucleotide
aauuccauguucucacccg

SEQ ID NO: 3146826 - RNA, 19 nt, Artificial Sequence
  Description of Artificial Sequence: Synthetic oligonucleotide
auaaauguagccauaguuc

SEQ ID NO: 3146827 - RNA, 19 nt, Artificial Sequence
  Description of Artificial Sequence: Synthetic oligonucleotide
acagcaugaaggcaauucc

SEQ ID NO: 3146828 - RNA, 19 nt, Artificial Sequence
  Description of Artificial Sequence: Synthetic oligonucleotide
uaaauguagccauaguucu

SEQ ID NO: 3146829 - RNA, 19 nt, Artificial Sequence
  Description of Artificial Sequence: Synthetic oligonucleotide
aauguagccauaguucuug

SEQ ID NO: 3146830 - RNA, 19 nt, Artificial Sequence
  Description of Artificial Sequence: Synthetic oligonucleotide
aguaccaccagcgcguugc

SEQ ID NO: 3146831 - RNA, 19 nt, Artificial Sequence
  Description of Artificial Sequence: Synthetic oligonucleotide
ucuggaugccuccaggacc

SEQ ID NO: 3146832 - RNA, 19 nt, Artificial Sequence
  Description of Artificial Sequence: Synthetic oligonucleotide
guagccauaguucuuggug

SEQ ID NO: 3146833 - RNA, 19 nt, Artificial Sequence
  Description of Artificial Sequence: Synthetic oligonucleotide
accaccagcgcguugcccc

SEQ ID NO: 3146834 - RNA, 19 nt, Artificial Sequence
  Description of Artificial Sequence: Synthetic oligonucleotide
uccuacagcaugaaggcaa

SEQ ID NO: 3146835 - RNA, 19 nt, Artificial Sequence
  Description of Artificial Sequence: Synthetic oligonucleotide
uagccauaguucuuggugc

SEQ ID NO: 3146836 - RNA, 19 nt, Artificial Sequence
  Description of Artificial Sequence: Synthetic oligonucleotide
uagaaggugaggccuggcc

SEQ ID NO: 3146837 - RNA, 19 nt, Artificial Sequence
  Description of Artificial Sequence: Synthetic oligonucleotide
uccauguucucacccgugc

SEQ ID NO: 3146838 - RNA, 19 nt, Artificial Sequence
  Description of Artificial Sequence: Synthetic oligonucleotide
aucuggaugccuccaggac

SEQ ID NO: 3146839 - RNA, 19 nt, Artificial Sequence
  Description of Artificial Sequence: Synthetic oligonucleotide
cacauaaauguagccauag

SEQ ID NO: 3146840 - RNA, 19 nt, Artificial Sequence
  Description of Artificial Sequence: Synthetic oligonucleotide
  modified_base (3)..(3): a, c, u, g, unknown or other
cunuccaucuggaugccuc

SEQ ID NO: 3146841 - RNA, 19 nt, Artificial Sequence
  Description of Artificial Sequence: Synthetic oligonucleotide
caauuccauguucucaccc

SEQ ID NO: 3146842 - RNA, 19 nt, Artificial Sequence
  Description of Artificial Sequence: Synthetic oligonucleotide
agccauaguucuuggugcg

SEQ ID NO: 3146843 - RNA, 19 nt, Artificial Sequence
  Description of Artificial Sequence: Synthetic oligonucleotide
cccuccuacagcaugaagg

SEQ ID NO: 3146844 - RNA, 19 nt, Artificial Sequence
  Description of Artificial Sequence: Synthetic oligonucleotide
uaguucuuggugcggggag

SEQ ID NO: 3146845 - RNA, 19 nt, Artificial Sequence
  Description of Artificial Sequence: Synthetic oligonucleotide
cauguucucacccgugccc

SEQ ID NO: 3146846 - RNA, 19 nt, Artificial Sequence
  Description of Artificial Sequence: Synthetic oligonucleotide
uacagcaugaaggcaauuc

SEQ ID NO: 3146847 - RNA, 19 nt, Artificial Sequence
  Description of Artificial Sequence: Synthetic oligonucleotide
  modified_base (2)..(2): a, c, u, g, unknown or other
unuccaucuggaugccucc

SEQ ID NO: 3146848 - RNA, 19 nt, Artificial Sequence
  Description of Artificial Sequence: Synthetic oligonucleotide
ugaaggcaauuccauguuc

SEQ ID NO: 3146849 - RNA, 19 nt, Artificial Sequence
  Description of Artificial Sequence: Synthetic oligonucleotide
cugcgcaguaccaccagcg

SEQ ID NO: 3146850 - RNA, 19 nt, Artificial Sequence
  Description of Artificial Sequence: Synthetic oligonucleotide
acauaaauguagccauagu

SEQ ID NO: 3146851 - RNA, 19 nt, Artificial Sequence
  Description of Artificial Sequence: Synthetic oligonucleotide
cauaguucuuggugcgggg

SEQ ID NO: 3146852 - RNA, 19 nt, Artificial Sequence
  Description of Artificial Sequence: Synthetic oligonucleotide
aguucuuggugcggggagc

SEQ ID NO: 3146853 - RNA, 19 nt, Artificial Sequence
  Description of Artificial Sequence: Synthetic oligonucleotide
ggcaauuccauguucucac

SEQ ID NO: 3146854 - RNA, 19 nt, Artificial Sequence
  Description of Artificial Sequence: Synthetic oligonucleotide
cauaaauguagccauaguu

SEQ ID NO: 3146855 - RNA, 19 nt, Artificial Sequence
  Description of Artificial Sequence: Synthetic oligonucleotide
caugaaggcaauuccaugu

SEQ ID NO: 3146856 - RNA, 19 nt, Artificial Sequence
  Description of Artificial Sequence: Synthetic oligonucleotide
auuccauguucucacccgu

SEQ ID NO: 3146857 - RNA, 19 nt, Artificial Sequence
  Description of Artificial Sequence: Synthetic oligonucleotide
cagacugccccuccuacag

SEQ ID NO: 3146858 - RNA, 19 nt, Artificial Sequence
  Description of Artificial Sequence: Synthetic oligonucleotide
ugguagaaggugaggccug

SEQ ID NO: 3146859 - RNA, 19 nt, Artificial Sequence
  Description of Artificial Sequence: Synthetic oligonucleotide
ugcccacauaaauguagcc

SEQ ID NO: 3146860 - RNA, 19 nt, Artificial Sequence
  Description of Artificial Sequence: Synthetic oligonucleotide
auguagccauaguucuugg

SEQ ID NO: 3146861 - RNA, 19 nt, Artificial Sequence
  Description of Artificial Sequence: Synthetic oligonucleotide
cuuggugcggggagcgugg

SEQ ID NO: 3146862 - RNA, 19 nt, Artificial Sequence
  Description of Artificial Sequence: Synthetic oligonucleotide
uguagccauaguucuuggu

SEQ ID NO: 3146863 - RNA, 19 nt, Artificial Sequence
  Description of Artificial Sequence: Synthetic oligonucleotide
ugcgcaguaccaccagcgc

SEQ ID NO: 3146864 - RNA, 19 nt, Artificial Sequence
  Description of Artificial Sequence: Synthetic oligonucleotide
  modified_base (6)..(6): a, c, u, g, unknown or other
ccccunuccaucuggaugc

SEQ ID NO: 3146865 - RNA, 19 nt, Artificial Sequence
  Description of Artificial Sequence: Synthetic oligonucleotide
uuccauguucucacccgug

SEQ ID NO: 3146866 - RNA, 19 nt, Artificial Sequence
  Description of Artificial Sequence: Synthetic oligonucleotide
ccuccuacagcaugaaggc

SEQ ID NO: 3146867 - RNA, 19 nt, Artificial Sequence
  Description of Artificial Sequence: Synthetic oligonucleotide
agacugccccuccuacagc

SEQ ID NO: 3146868 - RNA, 19 nt, Artificial Sequence
  Description of Artificial Sequence: Synthetic oligonucleotide
gacugccccuccuacagca

SEQ ID NO: 3146869 - RNA, 19 nt, Artificial Sequence
  Description of Artificial Sequence: Synthetic oligonucleotide
augaaggcaauuccauguu

SEQ ID NO: 3146870 - RNA, 19 nt, Artificial Sequence
  Description of Artificial Sequence: Synthetic oligonucleotide
gaaggcaauuccauguucu

SEQ ID NO: 3146871 - RNA, 19 nt, Artificial Sequence
  Description of Artificial Sequence: Synthetic oligonucleotide
guucuuggugcggggagcg

SEQ ID NO: 3146872 - RNA, 19 nt, Artificial Sequence
  Description of Artificial Sequence: Synthetic oligonucleotide
gaggccuggccagagcggg

SEQ ID NO: 3146873 - RNA, 19 nt, Artificial Sequence
  Description of Artificial Sequence: Synthetic oligonucleotide
ucuuggugcggggagcgug

SEQ ID NO: 3146874 - RNA, 19 nt, Artificial Sequence
  Description of Artificial Sequence: Synthetic oligonucleotide
ugccccuccuacagcauga

SEQ ID NO: 3146875 - RNA, 19 nt, Artificial Sequence
  Description of Artificial Sequence: Synthetic oligonucleotide
cagcaugaaggcaauucca

SEQ ID NO: 3146876 - RNA, 19 nt, Artificial Sequence
  Description of Artificial Sequence: Synthetic oligonucleotide
aaauguagccauaguucuu

SEQ ID NO: 3146877 - RNA, 19 nt, Artificial Sequence
  Description of Artificial Sequence: Synthetic oligonucleotide
agcaugaaggcaauuccau

SEQ ID NO: 3146878 - RNA, 19 nt, Artificial Sequence
  Description of Artificial Sequence: Synthetic oligonucleotide
gugcccacauaaauguagc

SEQ ID NO: 3146879 - RNA, 19 nt, Artificial Sequence
  Description of Artificial Sequence: Synthetic oligonucleotide
aggcaauuccauguucuca

SEQ ID NO: 3146880 - RNA, 19 nt, Artificial Sequence
  Description of Artificial Sequence: Synthetic oligonucleotide
auaguucuuggugcgggga

SEQ ID NO: 3146881 - RNA, 19 nt, Artificial Sequence
  Description of Artificial Sequence: Synthetic oligonucleotide
gcaugaaggcaauuccaug

SEQ ID NO: 3146882 - RNA, 19 nt, Artificial Sequence
  Description of Artificial Sequence: Synthetic oligonucleotide
ggugcggggagcgugguag

SEQ ID NO: 3146883 - RNA, 19 nt, Artificial Sequence
  Description of Artificial Sequence: Synthetic oligonucleotide
agcgugguagaaggugagg

SEQ ID NO: 3146884 - RNA, 19 nt, Artificial Sequence
  Description of Artificial Sequence: Synthetic oligonucleotide
cgugcccacauaaauguag

SEQ ID NO: 3146885 - RNA, 19 nt, Artificial Sequence
  Description of Artificial Sequence: Synthetic oligonucleotide
auguucucacccgugccca

SEQ ID NO: 3146886 - RNA, 19 nt, Artificial Sequence
  Description of Artificial Sequence: Synthetic oligonucleotide
gagcgugguagaaggugag

SEQ ID NO: 3146887 - RNA, 19 nt, Artificial Sequence
  Description of Artificial Sequence: Synthetic oligonucleotide
gcgcaguaccaccagcgcg

SEQ ID NO: 3146888 - RNA, 19 nt, Artificial Sequence
  Description of Artificial Sequence: Synthetic oligonucleotide
ucacccgugcccacauaaa

SEQ ID NO: 3146889 - RNA, 19 nt, Artificial Sequence
  Description of Artificial Sequence: Synthetic oligonucleotide
acccgugcccacauaaaug

SEQ ID NO: 3146890 - RNA, 19 nt, Artificial Sequence
  Description of Artificial Sequence: Synthetic oligonucleotide
uucucacccgugcccacau

SEQ ID NO: 3146891 - RNA, 19 nt, Artificial Sequence
  Description of Artificial Sequence: Synthetic oligonucleotide
gcgugguagaaggugaggc

SEQ ID NO: 3146892 - RNA, 19 nt, Artificial Sequence
  Description of Artificial Sequence: Synthetic oligonucleotide
gcaauuccauguucucacc

SEQ ID NO: 3146893 - RNA, 19 nt, Artificial Sequence
  Description of Artificial Sequence: Synthetic oligonucleotide
gguagaaggugaggccugg

SEQ ID NO: 3146894 - RNA, 19 nt, Artificial Sequence
  Description of Artificial Sequence: Synthetic oligonucleotide
ccauaguucuuggugcggg

SEQ ID NO: 3146895 - RNA, 19 nt, Artificial Sequence
  Description of Artificial Sequence: Synthetic oligonucleotide
agagcgggcugcgcaguac

SEQ ID NO: 3146896 - RNA, 19 nt, Artificial Sequence
  Description of Artificial Sequence: Synthetic oligonucleotide
uguucucacccgugcccac

SEQ ID NO: 3146897 - RNA, 19 nt, Artificial Sequence
  Description of Artificial Sequence: Synthetic oligonucleotide
cucacccgugcccacauaa

SEQ ID NO: 3146898 - RNA, 19 nt, Artificial Sequence
  Description of Artificial Sequence: Synthetic oligonucleotide
cgugguagaaggugaggcc

SEQ ID NO: 3146899 - RNA, 19 nt, Artificial Sequence
  Description of Artificial Sequence: Synthetic oligonucleotide
ccaucuggaugccuccagg

SEQ ID NO: 3146900 - RNA, 19 nt, Artificial Sequence
  Description of Artificial Sequence: Synthetic oligonucleotide
gugguagaaggugaggccu

SEQ ID NO: 3146901 - RNA, 19 nt, Artificial Sequence
  Description of Artificial Sequence: Synthetic oligonucleotide
gcccacauaaauguagcca

SEQ ID NO: 3146902 - RNA, 19 nt, Artificial Sequence
  Description of Artificial Sequence: Synthetic oligonucleotide
gggagcgugguagaaggug

SEQ ID NO: 3146903 - RNA, 19 nt, Artificial Sequence
  Description of Artificial Sequence: Synthetic oligonucleotide
cugccccuccuacagcaug

SEQ ID NO: 3146904 - RNA, 19 nt, Artificial Sequence
  Description of Artificial Sequence: Synthetic oligonucleotide
cggggagcgugguagaagg

SEQ ID NO: 3146905 - RNA, 19 nt, Artificial Sequence
  Description of Artificial Sequence: Synthetic oligonucleotide
ccauguucucacccgugcc

SEQ ID NO: 3146906 - RNA, 19 nt, Artificial Sequence
  Description of Artificial Sequence: Synthetic oligonucleotide
guagaaggugaggccuggc

SEQ ID NO: 3146907 - RNA, 19 nt, Artificial Sequence
  Description of Artificial Sequence: Synthetic oligonucleotide
ggagcgugguagaagguga

SEQ ID NO: 3146908 - RNA, 19 nt, Artificial Sequence
  Description of Artificial Sequence: Synthetic oligonucleotide
guaccaccagcgcguugcc

SEQ ID NO: 3146909 - RNA, 19 nt, Artificial Sequence
  Description of Artificial Sequence: Synthetic oligonucleotide
gccauaguucuuggugcgg

SEQ ID NO: 3146910 - RNA, 19 nt, Artificial Sequence
  Description of Artificial Sequence: Synthetic oligonucleotide
uaccaccagcgcguugccc

SEQ ID NO: 3146911 - RNA, 19 nt, Artificial Sequence
  Description of Artificial Sequence: Synthetic oligonucleotide
gcugcgcaguaccaccagc

SEQ ID NO: 3146912 - RNA, 19 nt, Artificial Sequence
  Description of Artificial Sequence: Synthetic oligonucleotide
cuggccagagcgggcugcg

SEQ ID NO: 3146913 - RNA, 19 nt, Artificial Sequence
  Description of Artificial Sequence: Synthetic oligonucleotide
cccacauaaauguagccau

SEQ ID NO: 3146914 - RNA, 19 nt, Artificial Sequence
  Description of Artificial Sequence: Synthetic oligonucleotide
gccagagcgggcugcgcag

SEQ ID NO: 3146915 - RNA, 19 nt, Artificial Sequence
  Description of Artificial Sequence: Synthetic oligonucleotide
aggccuggccagagcgggc

SEQ ID NO: 3146916 - RNA, 19 nt, Artificial Sequence
  Description of Artificial Sequence: Synthetic oligonucleotide
guucucacccgugcccaca

SEQ ID NO: 3146917 - RNA, 19 nt, Artificial Sequence
  Description of Artificial Sequence: Synthetic oligonucleotide
ggcugcgcaguaccaccag

SEQ ID NO: 3146918 - RNA, 19 nt, Artificial Sequence
  Description of Artificial Sequence: Synthetic oligonucleotide
ugcggggagcgugguagaa

SEQ ID NO: 3146919 - RNA, 19 nt, Artificial Sequence
  Description of Artificial Sequence: Synthetic oligonucleotide
uucuuggugcggggagcgu

SEQ ID NO: 3146920 - RNA, 19 nt, Artificial Sequence
  Description of Artificial Sequence: Synthetic oligonucleotide
ucucacccgugcccacaua

SEQ ID NO: 3146921 - RNA, 19 nt, Artificial Sequence
  Description of Artificial Sequence: Synthetic oligonucleotide
cccgugcccacauaaaugu

SEQ ID NO: 3146922 - RNA, 19 nt, Artificial Sequence
  Description of Artificial Sequence: Synthetic oligonucleotide
ggccagagcgggcugcgca

SEQ ID NO: 3146923 - RNA, 19 nt, Artificial Sequence
  Description of Artificial Sequence: Synthetic oligonucleotide
caguaccaccagcgcguug

SEQ ID NO: 3146924 - RNA, 19 nt, Artificial Sequence
  Description of Artificial Sequence: Synthetic oligonucleotide
uggugcggggagcguggua

SEQ ID NO: 3146925 - RNA, 19 nt, Artificial Sequence
  Description of Artificial Sequence: Synthetic oligonucleotide
uuggugcggggagcguggu

SEQ ID NO: 3146926 - RNA, 19 nt, Artificial Sequence
  Description of Artificial Sequence: Synthetic oligonucleotide
cgggcugcgcaguaccacc

SEQ ID NO: 3146927 - RNA, 19 nt, Artificial Sequence
  Description of Artificial Sequence: Synthetic oligonucleotide
cacccgugcccacauaaau

SEQ ID NO: 3146928 - RNA, 19 nt, Artificial Sequence
  Description of Artificial Sequence: Synthetic oligonucleotide
gcggggagcgugguagaag

SEQ ID NO: 3146929 - RNA, 19 nt, Artificial Sequence
  Description of Artificial Sequence: Synthetic oligonucleotide
uggccagagcgggcugcgc

SEQ ID NO: 3146930 - RNA, 19 nt, Artificial Sequence
  Description of Artificial Sequence: Synthetic oligonucleotide
gugcggggagcgugguaga

SEQ ID NO: 3146931 - RNA, 19 nt, Artificial Sequence
  Description of Artificial Sequence: Synthetic oligonucleotide
ccagacugccccuccuaca

SEQ ID NO: 3146932 - RNA, 19 nt, Artificial Sequence
  Description of Artificial Sequence: Synthetic oligonucleotide
ccccuccuacagcaugaag

SEQ ID NO: 3146933 - RNA, 19 nt, Artificial Sequence
  Description of Artificial Sequence: Synthetic oligonucleotide
acugccccuccuacagcau

SEQ ID NO: 3146934 - RNA, 19 nt, Artificial Sequence
  Description of Artificial Sequence: Synthetic oligonucleotide
ccuggccagagcgggcugc

SEQ ID NO: 3146935 - RNA, 19 nt, Artificial Sequence
  Description of Artificial Sequence: Synthetic oligonucleotide
  modified_base (5)..(5): a, c, u, g, unknown or other
cccunuccaucuggaugcc

SEQ ID NO: 3146936 - RNA, 19 nt, Artificial Sequence
  Description of Artificial Sequence: Synthetic oligonucleotide
cgcaguaccaccagcgcgu

SEQ ID NO: 3146937 - RNA, 19 nt, Artificial Sequence
  Description of Artificial Sequence: Synthetic oligonucleotide
gggcugcgcaguaccacca

SEQ ID NO: 3146938 - RNA, 19 nt, Artificial Sequence
  Description of Artificial Sequence: Synthetic oligonucleotide
gcgggcugcgcaguaccac

SEQ ID NO: 3146939 - RNA, 19 nt, Artificial Sequence
  Description of Artificial Sequence: Synthetic oligonucleotide
ccuacagcaugaaggcaau

SEQ ID NO: 3146940 - RNA, 19 nt, Artificial Sequence
  Description of Artificial Sequence: Synthetic oligonucleotide
cagagcgggcugcgcagua

SEQ ID NO: 3146941 - RNA, 19 nt, Artificial Sequence
  Description of Artificial Sequence: Synthetic oligonucleotide
gccuggccagagcgggcug

SEQ ID NO: 3146942 - RNA, 19 nt, Artificial Sequence
  Description of Artificial Sequence: Synthetic oligonucleotide
cuacagcaugaaggcaauu

SEQ ID NO: 3146943 - RNA, 19 nt, Artificial Sequence
  Description of Artificial Sequence: Synthetic oligonucleotide
ccgugcccacauaaaugua

SEQ ID NO: 3146944 - RNA, 19 nt, Artificial Sequence
  Description of Artificial Sequence: Synthetic oligonucleotide
  modified_base (4)..(4): a, c, u, g, unknown or other
ccunuccaucuggaugccu

SEQ ID NO: 3146945 - RNA, 19 nt, Artificial Sequence
  Description of Artificial Sequence: Synthetic oligonucleotide
ggggagcgugguagaaggu

SEQ ID NO: 3146946 - RNA, 19 nt, Artificial Sequence
  Description of Artificial Sequence: Synthetic oligonucleotide
gccccuccuacagcaugaa

SEQ ID NO: 3146947 - RNA, 19 nt, Artificial Sequence
  Description of Artificial Sequence: Synthetic oligonucleotide
gcaguaccaccagcgcguu

SEQ ID NO: 3146948 - RNA, 19 nt, Artificial Sequence
  Description of Artificial Sequence: Synthetic oligonucleotide
ccagagcgggcugcgcagu

SEQ ID NO: 3146949 - RNA, 19 nt, Artificial Sequence
  Description of Artificial Sequence: Synthetic oligonucleotide
  modified_base (1)..(1): a, c, u, g, unknown or other
nuccaucuggaugccucca

SEQ ID NO: 3146950 - RNA, 19 nt, Artificial Sequence
  Description of Artificial Sequence: Synthetic oligonucleotide
aaugaaagucacuugaugg

SEQ ID NO: 3146951 - RNA, 19 nt, Artificial Sequence
  Description of Artificial Sequence: Synthetic oligonucleotide
ucaguuaucagauauccug

SEQ ID NO: 3146952 - RNA, 19 nt, Artificial Sequence
  Description of Artificial Sequence: Synthetic oligonucleotide
uaccucaugauucauagca

SEQ ID NO: 3146953 - RNA, 19 nt, Artificial Sequence
  Description of Artificial Sequence: Synthetic oligonucleotide
gauaauuaccucaugauuc

SEQ ID NO: 3146954 - RNA, 19 nt, Artificial Sequence
  Description of Artificial Sequence: Synthetic oligonucleotide
uguauuaaagggucaaagc

SEQ ID NO: 3146955 - RNA, 19 nt, Artificial Sequence
  Description of Artificial Sequence: Synthetic oligonucleotide
auuaccucaugauucauag

SEQ ID NO: 3146956 - RNA, 19 nt, Artificial Sequence
  Description of Artificial Sequence: Synthetic oligonucleotide
auuacaguuaugaagucac

SEQ ID NO: 3146957 - RNA, 19 nt, Artificial Sequence
  Description of Artificial Sequence: Synthetic oligonucleotide
caaagcauuaggaagguug

SEQ ID NO: 3146958 - RNA, 19 nt, Artificial Sequence
  Description of Artificial Sequence: Synthetic oligonucleotide
aaagucacuugaugguugg

SEQ ID NO: 3146959 - RNA, 19 nt, Artificial Sequence
  Description of Artificial Sequence: Synthetic oligonucleotide
guauuaaagggucaaagca

SEQ ID NO: 3146960 - RNA, 19 nt, Artificial Sequence
  Description of Artificial Sequence: Synthetic oligonucleotide
uauuaaagggucaaagcau

SEQ ID NO: 3146961 - RNA, 19 nt, Artificial Sequence
  Description of Artificial Sequence: Synthetic oligonucleotide
auagcagauaauuaccuca

SEQ ID NO: 3146962 - RNA, 19 nt, Artificial Sequence
  Description of Artificial Sequence: Synthetic oligonucleotide
ugcauagcagauaauuacc

SEQ ID NO: 3146963 - RNA, 19 nt, Artificial Sequence
  Description of Artificial Sequence: Synthetic oligonucleotide
aagguugagaacuacuguu

SEQ ID NO: 3146964 - RNA, 19 nt, Artificial Sequence
  Description of Artificial Sequence: Synthetic oligonucleotide
auaauuaccucaugauuca

SEQ ID NO: 3146965 - RNA, 19 nt, Artificial Sequence
  Description of Artificial Sequence: Synthetic oligonucleotide
auagcagcagcaaaauuac

SEQ ID NO: 3146966 - RNA, 19 nt, Artificial Sequence
  Description of Artificial Sequence: Synthetic oligonucleotide
cugcauagcagauaauuac

SEQ ID NO: 3146967 - RNA, 19 nt, Artificial Sequence
  Description of Artificial Sequence: Synthetic oligonucleotide
ugaagucacaaugaaaguc

SEQ ID NO: 3146968 - RNA, 19 nt, Artificial Sequence
  Description of Artificial Sequence: Synthetic oligonucleotide
gaagucacaaugaaaguca

SEQ ID NO: 3146969 - RNA, 19 nt, Artificial Sequence
  Description of Artificial Sequence: Synthetic oligonucleotide
augaaagucacuugauggu

SEQ ID NO: 3146970 - RNA, 19 nt, Artificial Sequence
  Description of Artificial Sequence: Synthetic oligonucleotide
cauagcagcagcaaaauua

SEQ ID NO: 3146971 - RNA, 19 nt, Artificial Sequence
  Description of Artificial Sequence: Synthetic oligonucleotide
caguuaucagauauccugc

SEQ ID NO: 3146972 - RNA, 19 nt, Artificial Sequence
  Description of Artificial Sequence: Synthetic oligonucleotide
agauaauuaccucaugauu

SEQ ID NO: 3146973 - RNA, 19 nt, Artificial Sequence
  Description of Artificial Sequence: Synthetic oligonucleotide
agcagcagcaaaauuacag

SEQ ID NO: 3146974 - RNA, 19 nt, Artificial Sequence
  Description of Artificial Sequence: Synthetic oligonucleotide
uaaagggucaaagcauuag

SEQ ID NO: 3146975 - RNA, 19 nt, Artificial Sequence
  Description of Artificial Sequence: Synthetic oligonucleotide
ggucaaagcauuaggaagg

SEQ ID NO: 3146976 - RNA, 19 nt, Artificial Sequence
  Description of Artificial Sequence: Synthetic oligonucleotide
ucaugauucauagcagcag

SEQ ID NO: 3146977 - RNA, 19 nt, Artificial Sequence
  Description of Artificial Sequence: Synthetic oligonucleotide
cuguauuaaagggucaaag

SEQ ID NO: 3146978 - RNA, 19 nt, Artificial Sequence
  Description of Artificial Sequence: Synthetic oligonucleotide
aaagcauuaggaagguuga

SEQ ID NO: 3146979 - RNA, 19 nt, Artificial Sequence
  Description of Artificial Sequence: Synthetic oligonucleotide
cacaaugaaagucacuuga

SEQ ID NO: 3146980 - RNA, 19 nt, Artificial Sequence
  Description of Artificial Sequence: Synthetic oligonucleotide
caaugaaagucacuugaug

SEQ ID NO: 3146981 - RNA, 19 nt, Artificial Sequence
  Description of Artificial Sequence: Synthetic oligonucleotide
gggucaaagcauuaggaag

SEQ ID NO: 3146982 - RNA, 19 nt, Artificial Sequence
  Description of Artificial Sequence: Synthetic oligonucleotide
aagucacaaugaaagucac

SEQ ID NO: 3146983 - RNA, 19 nt, Artificial Sequence
  Description of Artificial Sequence: Synthetic oligonucleotide
agucacuugaugguugggg

SEQ ID NO: 3146984 - RNA, 19 nt, Artificial Sequence
  Description of Artificial Sequence: Synthetic oligonucleotide
ucacaaugaaagucacuug

SEQ ID NO: 3146985 - RNA, 19 nt, Artificial Sequence
  Description of Artificial Sequence: Synthetic oligonucleotide
aguuaucagauauccugca

SEQ ID NO: 3146986 - RNA, 19 nt, Artificial Sequence
  Description of Artificial Sequence: Synthetic oligonucleotide
gaaagucacuugaugguug

SEQ ID NO: 3146987 - RNA, 19 nt, Artificial Sequence
  Description of Artificial Sequence: Synthetic oligonucleotide
cauagcagauaauuaccuc

SEQ ID NO: 3146988 - RNA, 19 nt, Artificial Sequence
  Description of Artificial Sequence: Synthetic oligonucleotide
uagcagauaauuaccucau

SEQ ID NO: 3146989 - RNA, 19 nt, Artificial Sequence
  Description of Artificial Sequence: Synthetic oligonucleotide
gauucauagcagcagcaaa

SEQ ID NO: 3146990 - RNA, 19 nt, Artificial Sequence
  Description of Artificial Sequence: Synthetic oligonucleotide
augaagucacaaugaaagu

SEQ ID NO: 3146991 - RNA, 19 nt, Artificial Sequence
  Description of Artificial Sequence: Synthetic oligonucleotide
uuacaguuaugaagucaca

SEQ ID NO: 3146992 - RNA, 19 nt, Artificial Sequence
  Description of Artificial Sequence: Synthetic oligonucleotide
agguugagaacuacuguuc

SEQ ID NO: 3146993 - RNA, 19 nt, Artificial Sequence
  Description of Artificial Sequence: Synthetic oligonucleotide
gcagauaauuaccucauga

SEQ ID NO: 3146994 - RNA, 19 nt, Artificial Sequence
  Description of Artificial Sequence: Synthetic oligonucleotide
uuaaagggucaaagcauua

SEQ ID NO: 3146995 - RNA, 19 nt, Artificial Sequence
  Description of Artificial Sequence: Synthetic oligonucleotide
gagaacuacuguucuagaa

SEQ ID NO: 3146996 - RNA, 19 nt, Artificial Sequence
  Description of Artificial Sequence: Synthetic oligonucleotide
guugggguucaccacaaca

SEQ ID NO: 3146997 - RNA, 19 nt, Artificial Sequence
  Description of Artificial Sequence: Synthetic oligonucleotide
ugagaacuacuguucuaga

SEQ ID NO: 3146998 - RNA, 19 nt, Artificial Sequence
  Description of Artificial Sequence: Synthetic oligonucleotide
cucaugauucauagcagca

SEQ ID NO: 3146999 - RNA, 19 nt, Artificial Sequence
  Description of Artificial Sequence: Synthetic oligonucleotide
auuaaagggucaaagcauu

SEQ ID NO: 3147000 - RNA, 19 nt, Artificial Sequence
  Description of Artificial Sequence: Synthetic oligonucleotide
uuaccucaugauucauagc

SEQ ID NO: 3147001 - RNA, 19 nt, Artificial Sequence
  Description of Artificial Sequence: Synthetic oligonucleotide
ugaaagucacuugaugguu

SEQ ID NO: 3147002 - RNA, 19 nt, Artificial Sequence
  Description of Artificial Sequence: Synthetic oligonucleotide
aauuaccucaugauucaua

SEQ ID NO: 3147003 - RNA, 19 nt, Artificial Sequence
  Description of Artificial Sequence: Synthetic oligonucleotide
agcagauaauuaccucaug

SEQ ID NO: 3147004 - RNA, 19 nt, Artificial Sequence
  Description of Artificial Sequence: Synthetic oligonucleotide
ccucaugauucauagcagc

SEQ ID NO: 3147005 - RNA, 19 nt, Artificial Sequence
  Description of Artificial Sequence: Synthetic oligonucleotide
aagucacuugaugguuggg

SEQ ID NO: 3147006 - RNA, 19 nt, Artificial Sequence
  Description of Artificial Sequence: Synthetic oligonucleotide
ucauagcagcagcaaaauu

SEQ ID NO: 3147007 - RNA, 19 nt, Artificial Sequence
  Description of Artificial Sequence: Synthetic oligonucleotide
accucaugauucauagcag

SEQ ID NO: 3147008 - RNA, 19 nt, Artificial Sequence
  Description of Artificial Sequence: Synthetic oligonucleotide
ucacuugaugguugggguu

SEQ ID NO: 3147009 - RNA, 19 nt, Artificial Sequence
  Description of Artificial Sequence: Synthetic oligonucleotide
acaaugaaagucacuugau

SEQ ID NO: 3147010 - RNA, 19 nt, Artificial Sequence
  Description of Artificial Sequence: Synthetic oligonucleotide
uagcagcagcaaaauuaca

SEQ ID NO: 3147011 - RNA, 19 nt, Artificial Sequence
  Description of Artificial Sequence: Synthetic oligonucleotide
agcagcaaaauuacaguua

SEQ ID NO: 3147012 - RNA, 19 nt, Artificial Sequence
  Description of Artificial Sequence: Synthetic oligonucleotide
cacuugaugguugggguuc

SEQ ID NO: 3147013 - RNA, 19 nt, Artificial Sequence
  Description of Artificial Sequence: Synthetic oligonucleotide
cagauaauuaccucaugau

SEQ ID NO: 3147014 - RNA, 19 nt, Artificial Sequence
  Description of Artificial Sequence: Synthetic oligonucleotide
acuguauuaaagggucaaa

SEQ ID NO: 3147015 - RNA, 19 nt, Artificial Sequence
  Description of Artificial Sequence: Synthetic oligonucleotide
gucacuugaugguuggggu

SEQ ID NO: 3147016 - RNA, 19 nt, Artificial Sequence
  Description of Artificial Sequence: Synthetic oligonucleotide
uaauuaccucaugauucau

SEQ ID NO: 3147017 - RNA, 19 nt, Artificial Sequence
  Description of Artificial Sequence: Synthetic oligonucleotide
agucacaaugaaagucacu

SEQ ID NO: 3147018 - RNA, 19 nt, Artificial Sequence
  Description of Artificial Sequence: Synthetic oligonucleotide
guuaucagauauccugcau

SEQ ID NO: 3147019 - RNA, 19 nt, Artificial Sequence
  Description of Artificial Sequence: Synthetic oligonucleotide
gguugagaacuacuguucu

SEQ ID NO: 3147020 - RNA, 19 nt, Artificial Sequence
  Description of Artificial Sequence: Synthetic oligonucleotide
gcagcagcaaaauuacagu

SEQ ID NO: 3147021 - RNA, 19 nt, Artificial Sequence
  Description of Artificial Sequence: Synthetic oligonucleotide
ucaaagcauuaggaagguu

SEQ ID NO: 3147022 - RNA, 19 nt, Artificial Sequence
  Description of Artificial Sequence: Synthetic oligonucleotide
acuugaugguugggguuca

SEQ ID NO: 3147023 - RNA, 19 nt, Artificial Sequence
  Description of Artificial Sequence: Synthetic oligonucleotide
ccugcauagcagauaauua

SEQ ID NO: 3147024 - RNA, 19 nt, Artificial Sequence
  Description of Artificial Sequence: Synthetic oligonucleotide
gcauagcagauaauuaccu

SEQ ID NO: 3147025 - RNA, 19 nt, Artificial Sequence
  Description of Artificial Sequence: Synthetic oligonucleotide
gucaaagcauuaggaaggu

SEQ ID NO: 3147026 - RNA, 19 nt, Artificial Sequence
  Description of Artificial Sequence: Synthetic oligonucleotide
cuugaugguugggguucac

SEQ ID NO: 3147027 - RNA, 19 nt, Artificial Sequence
  Description of Artificial Sequence: Synthetic oligonucleotide
gguugggguucaccacaac

SEQ ID NO: 3147028 - RNA, 19 nt, Artificial Sequence
  Description of Artificial Sequence: Synthetic oligonucleotide
auccugcauagcagauaau

SEQ ID NO: 3147029 - RNA, 19 nt, Artificial Sequence
  Description of Artificial Sequence: Synthetic oligonucleotide
uauauauauauauauaucu

SEQ ID NO: 3147030 - RNA, 19 nt, Artificial Sequence
  Description of Artificial Sequence: Synthetic oligonucleotide
auauauauaucucagcuuc

SEQ ID NO: 3147031 - RNA, 19 nt, Artificial Sequence
  Description of Artificial Sequence: Synthetic oligonucleotide
uauauauauauauauauau

SEQ ID NO: 3147032 - RNA, 19 nt, Artificial Sequence
  Description of Artificial Sequence: Synthetic oligonucleotide
uauauauauauauaucuca

SEQ ID NO: 3147033 - RNA, 19 nt, Artificial Sequence
  Description of Artificial Sequence: Synthetic oligonucleotide
ugaauauccauauauauau

SEQ ID NO: 3147034 - RNA, 19 nt, Artificial Sequence
  Description of Artificial Sequence: Synthetic oligonucleotide
auauauauauaucucagcu

SEQ ID NO: 3147035 - RNA, 19 nt, Artificial Sequence
  Description of Artificial Sequence: Synthetic oligonucleotide
aauauccauauauauauau

SEQ ID NO: 3147036 - RNA, 19 nt, Artificial Sequence
  Description of Artificial Sequence: Synthetic oligonucleotide
auauaucucagcuuccugg

SEQ ID NO: 3147037 - RNA, 19 nt, Artificial Sequence
  Description of Artificial Sequence: Synthetic oligonucleotide
uccauauauauauauauau

SEQ ID NO: 3147038 - RNA, 19 nt, Artificial Sequence
  Description of Artificial Sequence: Synthetic oligonucleotide
uauccauauauauauauau

SEQ ID NO: 3147039 - RNA, 19 nt, Artificial Sequence
  Description of Artificial Sequence: Synthetic oligonucleotide
uauauauauauaucucagc

SEQ ID NO: 3147040 - RNA, 19 nt, Artificial Sequence
  Description of Artificial Sequence: Synthetic oligonucleotide
auauauauauauauauauc

SEQ ID NO: 3147041 - RNA, 19 nt, Artificial Sequence
  Description of Artificial Sequence: Synthetic oligonucleotide
auugaauauccauauauau

SEQ ID NO: 3147042 - RNA, 19 nt, Artificial Sequence
  Description of Artificial Sequence: Synthetic oligonucleotide
auauauauauauauaucuc

SEQ ID NO: 3147043 - RNA, 19 nt, Artificial Sequence
  Description of Artificial Sequence: Synthetic oligonucleotide
ugauaguggaucuuguucu

SEQ ID NO: 3147044 - RNA, 19 nt, Artificial Sequence
  Description of Artificial Sequence: Synthetic oligonucleotide
auauauauauauaucucag

SEQ ID NO: 3147045 - RNA, 19 nt, Artificial Sequence
  Description of Artificial Sequence: Synthetic oligonucleotide
uugaauauccauauauaua

SEQ ID NO: 3147046 - RNA, 19 nt, Artificial Sequence
  Description of Artificial Sequence: Synthetic oligonucleotide
uauugaauauccauauaua

SEQ ID NO: 3147047 - RNA, 19 nt, Artificial Sequence
  Description of Artificial Sequence: Synthetic oligonucleotide
uauauauaucucagcuucc

SEQ ID NO: 3147048 - RNA, 19 nt, Artificial Sequence
  Description of Artificial Sequence: Synthetic oligonucleotide
uaucucagcuuccuggacc

SEQ ID NO: 3147049 - RNA, 19 nt, Artificial Sequence
  Description of Artificial Sequence: Synthetic oligonucleotide
cauauauauauauauauau

SEQ ID NO: 3147050 - RNA, 19 nt, Artificial Sequence
  Description of Artificial Sequence: Synthetic oligonucleotide
uauaucucagcuuccugga

SEQ ID NO: 3147051 - RNA, 19 nt, Artificial Sequence
  Description of Artificial Sequence: Synthetic oligonucleotide
ucuguucucgcugaugucc

SEQ ID NO: 3147052 - RNA, 19 nt, Artificial Sequence
  Description of Artificial Sequence: Synthetic oligonucleotide
uauauaucucagcuuccug

SEQ ID NO: 3147053 - RNA, 19 nt, Artificial Sequence
  Description of Artificial Sequence: Synthetic oligonucleotide
gugauaguggaucuuguuc

SEQ ID NO: 3147054 - RNA, 19 nt, Artificial Sequence
  Description of Artificial Sequence: Synthetic oligonucleotide
auaguggaucuuguucucc

SEQ ID NO: 3147055 - RNA, 19 nt, Artificial Sequence
  Description of Artificial Sequence: Synthetic oligonucleotide
auauauauauauauauaua

SEQ ID NO: 3147056 - RNA, 19 nt, Artificial Sequence
  Description of Artificial Sequence: Synthetic oligonucleotide
uuggugauaguggaucuug

SEQ ID NO: 3147057 - RNA, 19 nt, Artificial Sequence
  Description of Artificial Sequence: Synthetic oligonucleotide
auaucucagcuuccuggac

SEQ ID NO: 3147058 - RNA, 19 nt, Artificial Sequence
  Description of Artificial Sequence: Synthetic oligonucleotide
auauauaucucagcuuccu

SEQ ID NO: 3147059 - RNA, 19 nt, Artificial Sequence
  Description of Artificial Sequence: Synthetic oligonucleotide
gauaguggaucuuguucuc

SEQ ID NO: 3147060 - RNA, 19 nt, Artificial Sequence
  Description of Artificial Sequence: Synthetic oligonucleotide
uaguggaucuuguucuccu

SEQ ID NO: 3147061 - RNA, 19 nt, Artificial Sequence
  Description of Artificial Sequence: Synthetic oligonucleotide
ucguuggugauaguggauc

SEQ ID NO: 3147062 - RNA, 19 nt, Artificial Sequence
  Description of Artificial Sequence: Synthetic oligonucleotide
auauccauauauauauaua

SEQ ID NO: 3147063 - RNA, 19 nt, Artificial Sequence
  Description of Artificial Sequence: Synthetic oligonucleotide
uggugauaguggaucuugu

SEQ ID NO: 3147064 - RNA, 19 nt, Artificial Sequence
  Description of Artificial Sequence: Synthetic oligonucleotide
ugccugugcucuguucucg

SEQ ID NO: 3147065 - RNA, 19 nt, Artificial Sequence
  Description of Artificial Sequence: Synthetic oligonucleotide
auccauauauauauauaua

SEQ ID NO: 3147066 - RNA, 19 nt, Artificial Sequence
  Description of Artificial Sequence: Synthetic oligonucleotide
cugugcucuguucucgcug

SEQ ID NO: 3147067 - RNA, 19 nt, Artificial Sequence
  Description of Artificial Sequence: Synthetic oligonucleotide
gaauauccauauauauaua

SEQ ID NO: 3147068 - RNA, 19 nt, Artificial Sequence
  Description of Artificial Sequence: Synthetic oligonucleotide
ccauauauauauauauaua

SEQ ID NO: 3147069 - RNA, 19 nt, Artificial Sequence
  Description of Artificial Sequence: Synthetic oligonucleotide
ugcucuguucucgcugaug

SEQ ID NO: 3147070 - RNA, 19 nt, Artificial Sequence
  Description of Artificial Sequence: Synthetic oligonucleotide
aguggaucuuguucuccuu

SEQ ID NO: 3147071 - RNA, 19 nt, Artificial Sequence
  Description of Artificial Sequence: Synthetic oligonucleotide
cucuguucucgcugauguc

SEQ ID NO: 3147072 - RNA, 19 nt, Artificial Sequence
  Description of Artificial Sequence: Synthetic oligonucleotide
gcucuguucucgcugaugu

SEQ ID NO: 3147073 - RNA, 19 nt, Artificial Sequence
  Description of Artificial Sequence: Synthetic oligonucleotide
uccuugccugugcucuguu

SEQ ID NO: 3147074 - RNA, 19 nt, Artificial Sequence
  Description of Artificial Sequence: Synthetic oligonucleotide
gccugugcucuguucucgc

SEQ ID NO: 3147075 - RNA, 19 nt, Artificial Sequence
  Description of Artificial Sequence: Synthetic oligonucleotide
ggugauaguggaucuuguu

SEQ ID NO: 3147076 - RNA, 19 nt, Artificial Sequence
  Description of Artificial Sequence: Synthetic oligonucleotide
ccuugccugugcucuguuc

SEQ ID NO: 3147077 - RNA, 19 nt, Artificial Sequence
  Description of Artificial Sequence: Synthetic oligonucleotide
guuggugauaguggaucuu

SEQ ID NO: 3147078 - RNA, 19 nt, Artificial Sequence
  Description of Artificial Sequence: Synthetic oligonucleotide
gucguuggugauaguggau

SEQ ID NO: 3147079 - RNA, 19 nt, Artificial Sequence
  Description of Artificial Sequence: Synthetic oligonucleotide
cguuggugauaguggaucu

SEQ ID NO: 3147080 - RNA, 19 nt, Artificial Sequence
  Description of Artificial Sequence: Synthetic oligonucleotide
ccugugcucuguucucgcu

SEQ ID NO: 3147081 - RNA, 19 nt, Artificial Sequence
  Description of Artificial Sequence: Synthetic oligonucleotide
gauagccaaagcuacacag

SEQ ID NO: 3147082 - RNA, 19 nt, Artificial Sequence
  Description of Artificial Sequence: Synthetic oligonucleotide
acaaaacaaccaaccaacc

SEQ ID NO: 3147083 - RNA, 19 nt, Artificial Sequence
  Description of Artificial Sequence: Synthetic oligonucleotide
uggcgcacuccuuuaaucc

SEQ ID NO: 3147084 - RNA, 19 nt, Artificial Sequence
  Description of Artificial Sequence: Synthetic oligonucleotide
aacaaccaaccaaccaaac

SEQ ID NO: 3147085 - RNA, 19 nt, Artificial Sequence
  Description of Artificial Sequence: Synthetic oligonucleotide
auagccaaagcuacacaga

SEQ ID NO: 3147086 - RNA, 19 nt, Artificial Sequence
  Description of Artificial Sequence: Synthetic oligonucleotide
ggcgcacuccuuuaauccc

SEQ ID NO: 3147087 - RNA, 19 nt, Artificial Sequence
  Description of Artificial Sequence: Synthetic oligonucleotide
cgcacuccuuuaaucccag

SEQ ID NO: 3147088 - RNA, 19 nt, Artificial Sequence
  Description of Artificial Sequence: Synthetic oligonucleotide
gcgcacuccuuuaauccca

SEQ ID NO: 3147089 - RNA, 19 nt, Artificial Sequence
  Description of Artificial Sequence: Synthetic oligonucleotide
ggcggugguggcgcacucc

SEQ ID NO: 3147090 - RNA, 19 nt, Artificial Sequence
  Description of Artificial Sequence: Synthetic oligonucleotide
gcggugguggcgcacuccu

SEQ ID NO: 3147091 - RNA, 19 nt, Artificial Sequence
  Description of Artificial Sequence: Synthetic oligonucleotide
uuagaaaucaucuuuacaa

SEQ ID NO: 3147092 - RNA, 19 nt, Artificial Sequence
  Description of Artificial Sequence: Synthetic oligonucleotide
uuugaaaccaguauuagaa

SEQ ID NO: 3147093 - RNA, 19 nt, Artificial Sequence
  Description of Artificial Sequence: Synthetic oligonucleotide
auugccuugcauuugaaac

SEQ ID NO: 3147094 - RNA, 19 nt, Artificial Sequence
  Description of Artificial Sequence: Synthetic oligonucleotide
uuuaauaucucaauuaauu

SEQ ID NO: 3147095 - RNA, 19 nt, Artificial Sequence
  Description of Artificial Sequence: Synthetic oligonucleotide
aacauaauuauugccuugc

SEQ ID NO: 3147096 - RNA, 19 nt, Artificial Sequence
  Description of Artificial Sequence: Synthetic oligonucleotide
uucauuuacacgaaccugc

SEQ ID NO: 3147097 - RNA, 19 nt, Artificial Sequence
  Description of Artificial Sequence: Synthetic oligonucleotide
ugcaacauaauuauugccu

SEQ ID NO: 3147098 - RNA, 19 nt, Artificial Sequence
  Description of Artificial Sequence: Synthetic oligonucleotide
aaaggguuaaugcacaaaa

SEQ ID NO: 3147099 - RNA, 19 nt, Artificial Sequence
  Description of Artificial Sequence: Synthetic oligonucleotide
gaugcaacauaauuauugc

SEQ ID NO: 3147100 - RNA, 19 nt, Artificial Sequence
  Description of Artificial Sequence: Synthetic oligonucleotide
aguauuagaaaucaucuuu

SEQ ID NO: 3147101 - RNA, 19 nt, Artificial Sequence
  Description of Artificial Sequence: Synthetic oligonucleotide
auaauuauugccuugcauu

SEQ ID NO: 3147102 - RNA, 19 nt, Artificial Sequence
  Description of Artificial Sequence: Synthetic oligonucleotide
aauguucacagaugcaaca

SEQ ID NO: 3147103 - RNA, 19 nt, Artificial Sequence
  Description of Artificial Sequence: Synthetic oligonucleotide
guuuugagaagcuucacac

SEQ ID NO: 3147104 - RNA, 19 nt, Artificial Sequence
  Description of Artificial Sequence: Synthetic oligonucleotide
uaauaucucaauuaauuuu

SEQ ID NO: 3147105 - RNA, 19 nt, Artificial Sequence
  Description of Artificial Sequence: Synthetic oligonucleotide
augcaacauaauuauugcc

SEQ ID NO: 3147106 - RNA, 19 nt, Artificial Sequence
  Description of Artificial Sequence: Synthetic oligonucleotide
uuaauaucucaauuaauuu

SEQ ID NO: 3147107 - RNA, 19 nt, Artificial Sequence
  Description of Artificial Sequence: Synthetic oligonucleotide
uuugagaagcuucacacuu

SEQ ID NO: 3147108 - RNA, 19 nt, Artificial Sequence
  Description of Artificial Sequence: Synthetic oligonucleotide
aaaccaguauuagaaauca

SEQ ID NO: 3147109 - RNA, 19 nt, Artificial Sequence
  Description of Artificial Sequence: Synthetic oligonucleotide
agaugcaacauaauuauug

SEQ ID NO: 3147110 - RNA, 19 nt, Artificial Sequence
  Description of Artificial Sequence: Synthetic oligonucleotide
aggguuaaugcacaaaacu

SEQ ID NO: 3147111 - RNA, 19 nt, Artificial Sequence
  Description of Artificial Sequence: Synthetic oligonucleotide
acagaugcaacauaauuau

SEQ ID NO: 3147112 - RNA, 19 nt, Artificial Sequence
  Description of Artificial Sequence: Synthetic oligonucleotide
uguuuugagaagcuucaca

SEQ ID NO: 3147113 - RNA, 19 nt, Artificial Sequence
  Description of Artificial Sequence: Synthetic oligonucleotide
auuuacacgaaccugccaa

SEQ ID NO: 3147114 - RNA, 19 nt, Artificial Sequence
  Description of Artificial Sequence: Synthetic oligonucleotide
ugccaauguucacagaugc

SEQ ID NO: 3147115 - RNA, 19 nt, Artificial Sequence
  Description of Artificial Sequence: Synthetic oligonucleotide
ugcauuugaaaccaguauu

SEQ ID NO: 3147116 - RNA, 19 nt, Artificial Sequence
  Description of Artificial Sequence: Synthetic oligonucleotide
agcuucacacuucauuuac

SEQ ID NO: 3147117 - RNA, 19 nt, Artificial Sequence
  Description of Artificial Sequence: Synthetic oligonucleotide
ugaaaccaguauuagaaau

SEQ ID NO: 3147118 - RNA, 19 nt, Artificial Sequence
  Description of Artificial Sequence: Synthetic oligonucleotide
acuucauuuacacgaaccu

SEQ ID NO: 3147119 - RNA, 19 nt, Artificial Sequence
  Description of Artificial Sequence: Synthetic oligonucleotide
ucaguuauugcuguuuuga

SEQ ID NO: 3147120 - RNA, 19 nt, Artificial Sequence
  Description of Artificial Sequence: Synthetic oligonucleotide
accaguauuagaaaucauc

SEQ ID NO: 3147121 - RNA, 19 nt, Artificial Sequence
  Description of Artificial Sequence: Synthetic oligonucleotide
gguuaaugcacaaaacugg

SEQ ID NO: 3147122 - RNA, 19 nt, Artificial Sequence
  Description of Artificial Sequence: Synthetic oligonucleotide
uucacacuucauuuacacg

SEQ ID NO: 3147123 - RNA, 19 nt, Artificial Sequence
  Description of Artificial Sequence: Synthetic oligonucleotide
uugccuugcauuugaaacc

SEQ ID NO: 3147124 - RNA, 19 nt, Artificial Sequence
  Description of Artificial Sequence: Synthetic oligonucleotide
auuauugccuugcauuuga

SEQ ID NO: 3147125 - RNA, 19 nt, Artificial Sequence
  Description of Artificial Sequence: Synthetic oligonucleotide
uauugcuguuuugagaagc

SEQ ID NO: 3147126 - RNA, 19 nt, Artificial Sequence
  Description of Artificial Sequence: Synthetic oligonucleotide
auuugaaaccaguauuaga

SEQ ID NO: 3147127 - RNA, 19 nt, Artificial Sequence
  Description of Artificial Sequence: Synthetic oligonucleotide
aguuauugcuguuuugaga

SEQ ID NO: 3147128 - RNA, 19 nt, Artificial Sequence
  Description of Artificial Sequence: Synthetic oligonucleotide
cuucacacuucauuuacac

SEQ ID NO: 3147129 - RNA, 19 nt, Artificial Sequence
  Description of Artificial Sequence: Synthetic oligonucleotide
ugagaagcuucacacuuca

SEQ ID NO: 3147130 - RNA, 19 nt, Artificial Sequence
  Description of Artificial Sequence: Synthetic oligonucleotide
agaaaucaucuuuacaaaa

SEQ ID NO: 3147131 - RNA, 19 nt, Artificial Sequence
  Description of Artificial Sequence: Synthetic oligonucleotide
aaggguuaaugcacaaaac

SEQ ID NO: 3147132 - RNA, 19 nt, Artificial Sequence
  Description of Artificial Sequence: Synthetic oligonucleotide
ucauuuacacgaaccugcc

SEQ ID NO: 3147133 - RNA, 19 nt, Artificial Sequence
  Description of Artificial Sequence: Synthetic oligonucleotide
uaauuauugccuugcauuu

SEQ ID NO: 3147134 - RNA, 19 nt, Artificial Sequence
  Description of Artificial Sequence: Synthetic oligonucleotide
ucacagaugcaacauaauu

SEQ ID NO: 3147135 - RNA, 19 nt, Artificial Sequence
  Description of Artificial Sequence: Synthetic oligonucleotide
aaccugccaauguucacag

SEQ ID NO: 3147136 - RNA, 19 nt, Artificial Sequence
  Description of Artificial Sequence: Synthetic oligonucleotide
uagaaaucaucuuuacaaa

SEQ ID NO: 3147137 - RNA, 19 nt, Artificial Sequence
  Description of Artificial Sequence: Synthetic oligonucleotide
ugcuguuuugagaagcuuc

SEQ ID NO: 3147138 - RNA, 19 nt, Artificial Sequence
  Description of Artificial Sequence: Synthetic oligonucleotide
uuuugagaagcuucacacu

SEQ ID NO: 3147139 - RNA, 19 nt, Artificial Sequence
  Description of Artificial Sequence: Synthetic oligonucleotide
uugcauuugaaaccaguau

SEQ ID NO: 3147140 - RNA, 19 nt, Artificial Sequence
  Description of Artificial Sequence: Synthetic oligonucleotide
aauuauugccuugcauuug

SEQ ID NO: 3147141 - RNA, 19 nt, Artificial Sequence
  Description of Artificial Sequence: Synthetic oligonucleotide
agaagcuucacacuucauu

SEQ ID NO: 3147142 - RNA, 19 nt, Artificial Sequence
  Description of Artificial Sequence: Synthetic oligonucleotide
uacacgaaccugccaaugu

SEQ ID NO: 3147143 - RNA, 19 nt, Artificial Sequence
  Description of Artificial Sequence: Synthetic oligonucleotide
caauguucacagaugcaac

SEQ ID NO: 3147144 - RNA, 19 nt, Artificial Sequence
  Description of Artificial Sequence: Synthetic oligonucleotide
uuucaguuauugcuguuuu

SEQ ID NO: 3147145 - RNA, 19 nt, Artificial Sequence
  Description of Artificial Sequence: Synthetic oligonucleotide
uugaaaccaguauuagaaa

SEQ ID NO: 3147146 - RNA, 19 nt, Artificial Sequence
  Description of Artificial Sequence: Synthetic oligonucleotide
acacuucauuuacacgaac

SEQ ID NO: 3147147 - RNA, 19 nt, Artificial Sequence
  Description of Artificial Sequence: Synthetic oligonucleotide
cacagaugcaacauaauua

SEQ ID NO: 3147148 - RNA, 19 nt, Artificial Sequence
  Description of Artificial Sequence: Synthetic oligonucleotide
cauuugaaaccaguauuag

SEQ ID NO: 3147149 - RNA, 19 nt, Artificial Sequence
  Description of Artificial Sequence: Synthetic oligonucleotide
uuauugcuguuuugagaag

SEQ ID NO: 3147150 - RNA, 19 nt, Artificial Sequence
  Description of Artificial Sequence: Synthetic oligonucleotide
uucaguuauugcuguuuug

SEQ ID NO: 3147151 - RNA, 19 nt, Artificial Sequence
  Description of Artificial Sequence: Synthetic oligonucleotide
caacauaauuauugccuug

SEQ ID NO: 3147152 - RNA, 19 nt, Artificial Sequence
  Description of Artificial Sequence: Synthetic oligonucleotide
cuucauuuacacgaaccug

SEQ ID NO: 3147153 - RNA, 19 nt, Artificial Sequence
  Description of Artificial Sequence: Synthetic oligonucleotide
ggguuaaugcacaaaacug

SEQ ID NO: 3147154 - RNA, 19 nt, Artificial Sequence
  Description of Artificial Sequence: Synthetic oligonucleotide
gaagcuucacacuucauuu

SEQ ID NO: 3147155 - RNA, 19 nt, Artificial Sequence
  Description of Artificial Sequence: Synthetic oligonucleotide
uuuucaguuauugcuguuu

SEQ ID NO: 3147156 - RNA, 19 nt, Artificial Sequence
  Description of Artificial Sequence: Synthetic oligonucleotide
aaaaggguuaaugcacaaa

SEQ ID NO: 3147157 - RNA, 19 nt, Artificial Sequence
  Description of Artificial Sequence: Synthetic oligonucleotide
uauugccuugcauuugaaa

SEQ ID NO: 3147158 - RNA, 19 nt, Artificial Sequence
  Description of Artificial Sequence: Synthetic oligonucleotide
acauaauuauugccuugca

SEQ ID NO: 3147159 - RNA, 19 nt, Artificial Sequence
  Description of Artificial Sequence: Synthetic oligonucleotide
uugagaagcuucacacuuc

SEQ ID NO: 3147160 - RNA, 19 nt, Artificial Sequence
  Description of Artificial Sequence: Synthetic oligonucleotide
ugccuugcauuugaaacca

SEQ ID NO: 3147161 - RNA, 19 nt, Artificial Sequence
  Description of Artificial Sequence: Synthetic oligonucleotide
uuuacacgaaccugccaau

SEQ ID NO: 3147162 - RNA, 19 nt, Artificial Sequence
  Description of Artificial Sequence: Synthetic oligonucleotide
aagcuucacacuucauuua

SEQ ID NO: 3147163 - RNA, 19 nt, Artificial Sequence
  Description of Artificial Sequence: Synthetic oligonucleotide
gaaccugccaauguucaca

SEQ ID NO: 3147164 - RNA, 19 nt, Artificial Sequence
  Description of Artificial Sequence: Synthetic oligonucleotide
cuugcauuugaaaccagua

SEQ ID NO: 3147165 - RNA, 19 nt, Artificial Sequence
  Description of Artificial Sequence: Synthetic oligonucleotide
uucacagaugcaacauaau

SEQ ID NO: 3147166 - RNA, 19 nt, Artificial Sequence
  Description of Artificial Sequence: Synthetic oligonucleotide
guauuagaaaucaucuuua

SEQ ID NO: 3147167 - RNA, 19 nt, Artificial Sequence
  Description of Artificial Sequence: Synthetic oligonucleotide
uuacacgaaccugccaaug

SEQ ID NO: 3147168 - RNA, 19 nt, Artificial Sequence
  Description of Artificial Sequence: Synthetic oligonucleotide
guucacagaugcaacauaa

SEQ ID NO: 3147169 - RNA, 19 nt, Artificial Sequence
  Description of Artificial Sequence: Synthetic oligonucleotide
cugccaauguucacagaug

SEQ ID NO: 3147170 - RNA, 19 nt, Artificial Sequence
  Description of Artificial Sequence: Synthetic oligonucleotide
cacgaaccugccaauguuc

SEQ ID NO: 3147171 - RNA, 19 nt, Artificial Sequence
  Description of Artificial Sequence: Synthetic oligonucleotide
auugcuguuuugagaagcu

SEQ ID NO: 3147172 - RNA, 19 nt, Artificial Sequence
  Description of Artificial Sequence: Synthetic oligonucleotide
uuauugccuugcauuugaa

SEQ ID NO: 3147173 - RNA, 19 nt, Artificial Sequence
  Description of Artificial Sequence: Synthetic oligonucleotide
acacgaaccugccaauguu

SEQ ID NO: 3147174 - RNA, 19 nt, Artificial Sequence
  Description of Artificial Sequence: Synthetic oligonucleotide
ccaguauuagaaaucaucu

SEQ ID NO: 3147175 - RNA, 19 nt, Artificial Sequence
  Description of Artificial Sequence: Synthetic oligonucleotide
auguucacagaugcaacau

SEQ ID NO: 3147176 - RNA, 19 nt, Artificial Sequence
  Description of Artificial Sequence: Synthetic oligonucleotide
cauaauuauugccuugcau

SEQ ID NO: 3147177 - RNA, 19 nt, Artificial Sequence
  Description of Artificial Sequence: Synthetic oligonucleotide
acgaaccugccaauguuca

SEQ ID NO: 3147178 - RNA, 19 nt, Artificial Sequence
  Description of Artificial Sequence: Synthetic oligonucleotide
gcuguuuugagaagcuuca

SEQ ID NO: 3147179 - RNA, 19 nt, Artificial Sequence
  Description of Artificial Sequence: Synthetic oligonucleotide
aaccaguauuagaaaucau

SEQ ID NO: 3147180 - RNA, 19 nt, Artificial Sequence
  Description of Artificial Sequence: Synthetic oligonucleotide
gcauuugaaaccaguauua

SEQ ID NO: 3147181 - RNA, 19 nt, Artificial Sequence
  Description of Artificial Sequence: Synthetic oligonucleotide
cauuuacacgaaccugcca

SEQ ID NO: 3147182 - RNA, 19 nt, Artificial Sequence
  Description of Artificial Sequence: Synthetic oligonucleotide
cuguuuugagaagcuucac

SEQ ID NO: 3147183 - RNA, 19 nt, Artificial Sequence
  Description of Artificial Sequence: Synthetic oligonucleotide
ccaauguucacagaugcaa

SEQ ID NO: 3147184 - RNA, 19 nt, Artificial Sequence
  Description of Artificial Sequence: Synthetic oligonucleotide
caguauuagaaaucaucuu

SEQ ID NO: 3147185 - RNA, 19 nt, Artificial Sequence
  Description of Artificial Sequence: Synthetic oligonucleotide
gcaacauaauuauugccuu

SEQ ID NO: 3147186 - RNA, 19 nt, Artificial Sequence
  Description of Artificial Sequence: Synthetic oligonucleotide
ccugccaauguucacagau

SEQ ID NO: 3147187 - RNA, 19 nt, Artificial Sequence
  Description of Artificial Sequence: Synthetic oligonucleotide
gcuucacacuucauuuaca

SEQ ID NO: 3147188 - RNA, 19 nt, Artificial Sequence
  Description of Artificial Sequence: Synthetic oligonucleotide
ccuugcauuugaaaccagu

SEQ ID NO: 3147189 - RNA, 19 nt, Artificial Sequence
  Description of Artificial Sequence: Synthetic oligonucleotide
gccaauguucacagaugca

SEQ ID NO: 3147190 - RNA, 19 nt, Artificial Sequence
  Description of Artificial Sequence: Synthetic oligonucleotide
cagaugcaacauaauuauu

SEQ ID NO: 3147191 - RNA, 19 nt, Artificial Sequence
  Description of Artificial Sequence: Synthetic oligonucleotide
cgaaccugccaauguucac

SEQ ID NO: 3147192 - RNA, 19 nt, Artificial Sequence
  Description of Artificial Sequence: Synthetic oligonucleotide
gccuugcauuugaaaccag

SEQ ID NO: 3147193 - RNA, 19 nt, Artificial Sequence
  Description of Artificial Sequence: Synthetic oligonucleotide
gagaagcuucacacuucau

SEQ ID NO: 3147194 - RNA, 19 nt, Artificial Sequence
  Description of Artificial Sequence: Synthetic oligonucleotide
ggggauucuaggcaggggc

SEQ ID NO: 3147195 - RNA, 19 nt, Artificial Sequence
  Description of Artificial Sequence: Synthetic oligonucleotide
ugagccacgccccggcccc

SEQ ID NO: 3147196 - RNA, 19 nt, Artificial Sequence
  Description of Artificial Sequence: Synthetic oligonucleotide
gauucuaggcaggggcucc

SEQ ID NO: 3147197 - RNA, 19 nt, Artificial Sequence
  Description of Artificial Sequence: Synthetic oligonucleotide
ucuaggcaggggcucuacc

SEQ ID NO: 3147198 - RNA, 19 nt, Artificial Sequence
  Description of Artificial Sequence: Synthetic oligonucleotide
gggucuaccacugagccac

SEQ ID NO: 3147199 - RNA, 19 nt, Artificial Sequence
  Description of Artificial Sequence: Synthetic oligonucleotide
uccaccacugagccacgcc

SEQ ID NO: 3147200 - RNA, 19 nt, Artificial Sequence
  Description of Artificial Sequence: Synthetic oligonucleotide
ucuaggcaggggcuccacc

SEQ ID NO: 3147201 - RNA, 19 nt, Artificial Sequence
  Description of Artificial Sequence: Synthetic oligonucleotide
cuaggcaggggcucuacca

SEQ ID NO: 3147202 - RNA, 19 nt, Artificial Sequence
  Description of Artificial Sequence: Synthetic oligonucleotide
cuaggcaggggcuccacca

SEQ ID NO: 3147203 - RNA, 19 nt, Artificial Sequence
  Description of Artificial Sequence: Synthetic oligonucleotide
ggcuccaccacugagccac

SEQ ID NO: 3147204 - RNA, 19 nt, Artificial Sequence
  Description of Artificial Sequence: Synthetic oligonucleotide
ccaccacugagccacgccc

SEQ ID NO: 3147205 - RNA, 19 nt, Artificial Sequence
  Description of Artificial Sequence: Synthetic oligonucleotide
gauucuaggcaggggcucu

SEQ ID NO: 3147206 - RNA, 19 nt, Artificial Sequence
  Description of Artificial Sequence: Synthetic oligonucleotide
uucuaggcaggggcucuac

SEQ ID NO: 3147207 - RNA, 19 nt, Artificial Sequence
  Description of Artificial Sequence: Synthetic oligonucleotide
acgccccggccccucauug

SEQ ID NO: 3147208 - RNA, 19 nt, Artificial Sequence
  Description of Artificial Sequence: Synthetic oligonucleotide
auucuaggcaggggcucca

SEQ ID NO: 3147209 - RNA, 19 nt, Artificial Sequence
  Description of Artificial Sequence: Synthetic oligonucleotide
uucuaggcaggggcuccac

SEQ ID NO: 3147210 - RNA, 19 nt, Artificial Sequence
  Description of Artificial Sequence: Synthetic oligonucleotide
gccccggccccucauuggg

SEQ ID NO: 3147211 - RNA, 19 nt, Artificial Sequence
  Description of Artificial Sequence: Synthetic oligonucleotide
ggauucuaggcaggggcuc

SEQ ID NO: 3147212 - RNA, 19 nt, Artificial Sequence
  Description of Artificial Sequence: Synthetic oligonucleotide
cuccaccacugagccacgc

SEQ ID NO: 3147213 - RNA, 19 nt, Artificial Sequence
  Description of Artificial Sequence: Synthetic oligonucleotide
ggggucuaccacugagcca

SEQ ID NO: 3147214 - RNA, 19 nt, Artificial Sequence
  Description of Artificial Sequence: Synthetic oligonucleotide
auucuaggcaggggcucua

SEQ ID NO: 3147215 - RNA, 19 nt, Artificial Sequence
  Description of Artificial Sequence: Synthetic oligonucleotide
ggucuaccacugagccacg

SEQ ID NO: 3147216 - RNA, 19 nt, Artificial Sequence
  Description of Artificial Sequence: Synthetic oligonucleotide
gggauucuaggcaggggcu

SEQ ID NO: 3147217 - RNA, 19 nt, Artificial Sequence
  Description of Artificial Sequence: Synthetic oligonucleotide
agccacgccccggccccuc

SEQ ID NO: 3147218 - RNA, 19 nt, Artificial Sequence
  Description of Artificial Sequence: Synthetic oligonucleotide
ccccggccccucauugggg

SEQ ID NO: 3147219 - RNA, 19 nt, Artificial Sequence
  Description of Artificial Sequence: Synthetic oligonucleotide
ccacugagccacgccccgg

SEQ ID NO: 3147220 - RNA, 19 nt, Artificial Sequence
  Description of Artificial Sequence: Synthetic oligonucleotide
gcuccaccacugagccacg

SEQ ID NO: 3147221 - RNA, 19 nt, Artificial Sequence
  Description of Artificial Sequence: Synthetic oligonucleotide
cgccccggccccucauugg

SEQ ID NO: 3147222 - RNA, 19 nt, Artificial Sequence
  Description of Artificial Sequence: Synthetic oligonucleotide
gggcuccaccacugagcca

SEQ ID NO: 3147223 - RNA, 19 nt, Artificial Sequence
  Description of Artificial Sequence: Synthetic oligonucleotide
gccacgccccggccccuca

SEQ ID NO: 3147224 - RNA, 19 nt, Artificial Sequence
  Description of Artificial Sequence: Synthetic oligonucleotide
cacgccccggccccucauu

SEQ ID NO: 3147225 - RNA, 19 nt, Artificial Sequence
  Description of Artificial Sequence: Synthetic oligonucleotide
gagccacgccccggccccu

SEQ ID NO: 3147226 - RNA, 19 nt, Artificial Sequence
  Description of Artificial Sequence: Synthetic oligonucleotide
ccacgccccggccccucau

SEQ ID NO: 3147227 - RNA, 19 nt, Artificial Sequence
  Description of Artificial Sequence: Synthetic oligonucleotide
acuacuaguccuugaaagc

SEQ ID NO: 3147228 - RNA, 19 nt, Artificial Sequence
  Description of Artificial Sequence: Synthetic oligonucleotide
auccacuuuccuuugaggc

SEQ ID NO: 3147229 - RNA, 19 nt, Artificial Sequence
  Description of Artificial Sequence: Synthetic oligonucleotide
auuuaguggagacaguguc

SEQ ID NO: 3147230 - RNA, 19 nt, Artificial Sequence
  Description of Artificial Sequence: Synthetic oligonucleotide
ugaucgauacuucgaaugg

SEQ ID NO: 3147231 - RNA, 19 nt, Artificial Sequence
  Description of Artificial Sequence: Synthetic oligonucleotide
ucacuuacaucacuguccg

SEQ ID NO: 3147232 - RNA, 19 nt, Artificial Sequence
  Description of Artificial Sequence: Synthetic oligonucleotide
uacuacuaguccuugaaag

SEQ ID NO: 3147233 - RNA, 19 nt, Artificial Sequence
  Description of Artificial Sequence: Synthetic oligonucleotide
gaggauuuaguggagacag

SEQ ID NO: 3147234 - RNA, 19 nt, Artificial Sequence
  Description of Artificial Sequence: Synthetic oligonucleotide
uguccgaggauuuagugga

SEQ ID NO: 3147235 - RNA, 19 nt, Artificial Sequence
  Description of Artificial Sequence: Synthetic oligonucleotide
cuucgaaugguaaucuugc

SEQ ID NO: 3147236 - RNA, 19 nt, Artificial Sequence
  Description of Artificial Sequence: Synthetic oligonucleotide
aaacgagagguacuacuag

SEQ ID NO: 3147237 - RNA, 19 nt, Artificial Sequence
  Description of Artificial Sequence: Synthetic oligonucleotide
guggcucccauccugaucg

SEQ ID NO: 3147238 - RNA, 19 nt, Artificial Sequence
  Description of Artificial Sequence: Synthetic oligonucleotide
acuuacaucacuguccgag

SEQ ID NO: 3147239 - RNA, 19 nt, Artificial Sequence
  Description of Artificial Sequence: Synthetic oligonucleotide
uccacuuuccuuugaggcg

SEQ ID NO: 3147240 - RNA, 19 nt, Artificial Sequence
  Description of Artificial Sequence: Synthetic oligonucleotide
ugaaacgagagguacuacu

SEQ ID NO: 3147241 - RNA, 19 nt, Artificial Sequence
  Description of Artificial Sequence: Synthetic oligonucleotide
cucuauguggcucccaucc

SEQ ID NO: 3147242 - RNA, 19 nt, Artificial Sequence
  Description of Artificial Sequence: Synthetic oligonucleotide
cugaucgauacuucgaaug

SEQ ID NO: 3147243 - RNA, 19 nt, Artificial Sequence
  Description of Artificial Sequence: Synthetic oligonucleotide
cuacuaguccuugaaagcg

SEQ ID NO: 3147244 - RNA, 19 nt, Artificial Sequence
  Description of Artificial Sequence: Synthetic oligonucleotide
aguggagacagugucugcc

SEQ ID NO: 3147245 - RNA, 19 nt, Artificial Sequence
  Description of Artificial Sequence: Synthetic oligonucleotide
aacgagagguacuacuagu

SEQ ID NO: 3147246 - RNA, 19 nt, Artificial Sequence
  Description of Artificial Sequence: Synthetic oligonucleotide
gauacuucgaaugguaauc

SEQ ID NO: 3147247 - RNA, 19 nt, Artificial Sequence
  Description of Artificial Sequence: Synthetic oligonucleotide
uuuaguggagacagugucu

SEQ ID NO: 3147248 - RNA, 19 nt, Artificial Sequence
  Description of Artificial Sequence: Synthetic oligonucleotide
ggaugcgucacuuacauca

SEQ ID NO: 3147249 - RNA, 19 nt, Artificial Sequence
  Description of Artificial Sequence: Synthetic oligonucleotide
ucuugcuccagucugggau

SEQ ID NO: 3147250 - RNA, 19 nt, Artificial Sequence
  Description of Artificial Sequence: Synthetic oligonucleotide
ugauccacuuuccuuugag

SEQ ID NO: 3147251 - RNA, 19 nt, Artificial Sequence
  Description of Artificial Sequence: Synthetic oligonucleotide
gauccacuuuccuuugagg

SEQ ID NO: 3147252 - RNA, 19 nt, Artificial Sequence
  Description of Artificial Sequence: Synthetic oligonucleotide
ugcgucacuuacaucacug

SEQ ID NO: 3147253 - RNA, 19 nt, Artificial Sequence
  Description of Artificial Sequence: Synthetic oligonucleotide
ucgaaugguaaucuugcuc

SEQ ID NO: 3147254 - RNA, 19 nt, Artificial Sequence
  Description of Artificial Sequence: Synthetic oligonucleotide
uuaguggagacagugucug

SEQ ID NO: 3147255 - RNA, 19 nt, Artificial Sequence
  Description of Artificial Sequence: Synthetic oligonucleotide
cauccugaucgauacuucg

SEQ ID NO: 3147256 - RNA, 19 nt, Artificial Sequence
  Description of Artificial Sequence: Synthetic oligonucleotide
cuuacaucacuguccgagg

SEQ ID NO: 3147257 - RNA, 19 nt, Artificial Sequence
  Description of Artificial Sequence: Synthetic oligonucleotide
gucacuuacaucacugucc

SEQ ID NO: 3147258 - RNA, 19 nt, Artificial Sequence
  Description of Artificial Sequence: Synthetic oligonucleotide
ugggaucugauccacuuuc

SEQ ID NO: 3147259 - RNA, 19 nt, Artificial Sequence
  Description of Artificial Sequence: Synthetic oligonucleotide
uacuaguccuugaaagcgc

SEQ ID NO: 3147260 - RNA, 19 nt, Artificial Sequence
  Description of Artificial Sequence: Synthetic oligonucleotide
uuacaucacuguccgagga

SEQ ID NO: 3147261 - RNA, 19 nt, Artificial Sequence
  Description of Artificial Sequence: Synthetic oligonucleotide
aaucuugcuccagucuggg

SEQ ID NO: 3147262 - RNA, 19 nt, Artificial Sequence
  Description of Artificial Sequence: Synthetic oligonucleotide
aucugauccacuuuccuuu

SEQ ID NO: 3147263 - RNA, 19 nt, Artificial Sequence
  Description of Artificial Sequence: Synthetic oligonucleotide
ugucugccccucuaugugg

SEQ ID NO: 3147264 - RNA, 19 nt, Artificial Sequence
  Description of Artificial Sequence: Synthetic oligonucleotide
uccugaucgauacuucgaa

SEQ ID NO: 3147265 - RNA, 19 nt, Artificial Sequence
  Description of Artificial Sequence: Synthetic oligonucleotide
uauguggcucccauccuga

SEQ ID NO: 3147266 - RNA, 19 nt, Artificial Sequence
  Description of Artificial Sequence: Synthetic oligonucleotide
acuucgaaugguaaucuug

SEQ ID NO: 3147267 - RNA, 19 nt, Artificial Sequence
  Description of Artificial Sequence: Synthetic oligonucleotide
agugucugccccucuaugu

SEQ ID NO: 3147268 - RNA, 19 nt, Artificial Sequence
  Description of Artificial Sequence: Synthetic oligonucleotide
ucgauacuucgaaugguaa

SEQ ID NO: 3147269 - RNA, 19 nt, Artificial Sequence
  Description of Artificial Sequence: Synthetic oligonucleotide
acuaguccuugaaagcgcg

SEQ ID NO: 3147270 - RNA, 19 nt, Artificial Sequence
  Description of Artificial Sequence: Synthetic oligonucleotide
ccagucugggaucugaucc

SEQ ID NO: 3147271 - RNA, 19 nt, Artificial Sequence
  Description of Artificial Sequence: Synthetic oligonucleotide
ucugauccacuuuccuuug

SEQ ID NO: 3147272 - RNA, 19 nt, Artificial Sequence
  Description of Artificial Sequence: Synthetic oligonucleotide
cucccauccugaucgauac

SEQ ID NO: 3147273 - RNA, 19 nt, Artificial Sequence
  Description of Artificial Sequence: Synthetic oligonucleotide
ggauuuaguggagacagug

SEQ ID NO: 3147274 - RNA, 19 nt, Artificial Sequence
  Description of Artificial Sequence: Synthetic oligonucleotide
uugaaagcgcggaugcguc

SEQ ID NO: 3147275 - RNA, 19 nt, Artificial Sequence
  Description of Artificial Sequence: Synthetic oligonucleotide
acgagagguacuacuaguc

SEQ ID NO: 3147276 - RNA, 19 nt, Artificial Sequence
  Description of Artificial Sequence: Synthetic oligonucleotide
ucugggaucugauccacuu

SEQ ID NO: 3147277 - RNA, 19 nt, Artificial Sequence
  Description of Artificial Sequence: Synthetic oligonucleotide
uggagacagugucugcccc

SEQ ID NO: 3147278 - RNA, 19 nt, Artificial Sequence
  Description of Artificial Sequence: Synthetic oligonucleotide
cuauguggcucccauccug

SEQ ID NO: 3147279 - RNA, 19 nt, Artificial Sequence
  Description of Artificial Sequence: Synthetic oligonucleotide
uucgaaugguaaucuugcu

SEQ ID NO: 3147280 - RNA, 19 nt, Artificial Sequence
  Description of Artificial Sequence: Synthetic oligonucleotide
auacuucgaaugguaaucu

SEQ ID NO: 3147281 - RNA, 19 nt, Artificial Sequence
  Description of Artificial Sequence: Synthetic oligonucleotide
gagagguacuacuaguccu

SEQ ID NO: 3147282 - RNA, 19 nt, Artificial Sequence
  Description of Artificial Sequence: Synthetic oligonucleotide
uaguccuugaaagcgcgga

SEQ ID NO: 3147283 - RNA, 19 nt, Artificial Sequence
  Description of Artificial Sequence: Synthetic oligonucleotide
ucuauguggcucccauccu

SEQ ID NO: 3147284 - RNA, 19 nt, Artificial Sequence
  Description of Artificial Sequence: Synthetic oligonucleotide
gaaacgagagguacuacua

SEQ ID NO: 3147285 - RNA, 19 nt, Artificial Sequence
  Description of Artificial Sequence: Synthetic oligonucleotide
cuaguccuugaaagcgcgg

SEQ ID NO: 3147286 - RNA, 19 nt, Artificial Sequence
  Description of Artificial Sequence: Synthetic oligonucleotide
cuugcuccagucugggauc

SEQ ID NO: 3147287 - RNA, 19 nt, Artificial Sequence
  Description of Artificial Sequence: Synthetic oligonucleotide
guggagacagugucugccc

SEQ ID NO: 3147288 - RNA, 19 nt, Artificial Sequence
  Description of Artificial Sequence: Synthetic oligonucleotide
ugaaagcgcggaugcguca

SEQ ID NO: 3147289 - RNA, 19 nt, Artificial Sequence
  Description of Artificial Sequence: Synthetic oligonucleotide
gugucugccccucuaugug

SEQ ID NO: 3147290 - RNA, 19 nt, Artificial Sequence
  Description of Artificial Sequence: Synthetic oligonucleotide
agucugggaucugauccac

SEQ ID NO: 3147291 - RNA, 19 nt, Artificial Sequence
  Description of Artificial Sequence: Synthetic oligonucleotide
gguacuacuaguccuugaa

SEQ ID NO: 3147292 - RNA, 19 nt, Artificial Sequence
  Description of Artificial Sequence: Synthetic oligonucleotide
ugccccucuauguggcucc

SEQ ID NO: 3147293 - RNA, 19 nt, Artificial Sequence
  Description of Artificial Sequence: Synthetic oligonucleotide
uguggcucccauccugauc

SEQ ID NO: 3147294 - RNA, 19 nt, Artificial Sequence
  Description of Artificial Sequence: Synthetic oligonucleotide
gaaagcgcggaugcgucac

SEQ ID NO: 3147295 - RNA, 19 nt, Artificial Sequence
  Description of Artificial Sequence: Synthetic oligonucleotide
uccagucugggaucugauc

SEQ ID NO: 3147296 - RNA, 19 nt, Artificial Sequence
  Description of Artificial Sequence: Synthetic oligonucleotide
gaugcgucacuuacaucac

SEQ ID NO: 3147297 - RNA, 19 nt, Artificial Sequence
  Description of Artificial Sequence: Synthetic oligonucleotide
uccgaggauuuaguggaga

SEQ ID NO: 3147298 - RNA, 19 nt, Artificial Sequence
  Description of Artificial Sequence: Synthetic oligonucleotide
aaagcgcggaugcgucacu

SEQ ID NO: 3147299 - RNA, 19 nt, Artificial Sequence
  Description of Artificial Sequence: Synthetic oligonucleotide
guacuacuaguccuugaaa

SEQ ID NO: 3147300 - RNA, 19 nt, Artificial Sequence
  Description of Artificial Sequence: Synthetic oligonucleotide
ccacuuuccuuugaggcgg

SEQ ID NO: 3147301 - RNA, 19 nt, Artificial Sequence
  Description of Artificial Sequence: Synthetic oligonucleotide
aguccuugaaagcgcggau

SEQ ID NO: 3147302 - RNA, 19 nt, Artificial Sequence
  Description of Artificial Sequence: Synthetic oligonucleotide
gauuuaguggagacagugu

SEQ ID NO: 3147303 - RNA, 19 nt, Artificial Sequence
  Description of Artificial Sequence: Synthetic oligonucleotide
uaguggagacagugucugc

SEQ ID NO: 3147304 - RNA, 19 nt, Artificial Sequence
  Description of Artificial Sequence: Synthetic oligonucleotide
guccuugaaagcgcggaug

SEQ ID NO: 3147305 - RNA, 19 nt, Artificial Sequence
  Description of Artificial Sequence: Synthetic oligonucleotide
aucgauacuucgaauggua

SEQ ID NO: 3147306 - RNA, 19 nt, Artificial Sequence
  Description of Artificial Sequence: Synthetic oligonucleotide
gaucugauccacuuuccuu

SEQ ID NO: 3147307 - RNA, 19 nt, Artificial Sequence
  Description of Artificial Sequence: Synthetic oligonucleotide
agguacuacuaguccuuga

SEQ ID NO: 3147308 - RNA, 19 nt, Artificial Sequence
  Description of Artificial Sequence: Synthetic oligonucleotide
uacuucgaaugguaaucuu

SEQ ID NO: 3147309 - RNA, 19 nt, Artificial Sequence
  Description of Artificial Sequence: Synthetic oligonucleotide
gagguacuacuaguccuug

SEQ ID NO: 3147310 - RNA, 19 nt, Artificial Sequence
  Description of Artificial Sequence: Synthetic oligonucleotide
augcgucacuuacaucacu

SEQ ID NO: 3147311 - RNA, 19 nt, Artificial Sequence
  Description of Artificial Sequence: Synthetic oligonucleotide
agagguacuacuaguccuu

SEQ ID NO: 3147312 - RNA, 19 nt, Artificial Sequence
  Description of Artificial Sequence: Synthetic oligonucleotide
auccugaucgauacuucga

SEQ ID NO: 3147313 - RNA, 19 nt, Artificial Sequence
  Description of Artificial Sequence: Synthetic oligonucleotide
gaucgauacuucgaauggu

SEQ ID NO: 3147314 - RNA, 19 nt, Artificial Sequence
  Description of Artificial Sequence: Synthetic oligonucleotide
cagugucugccccucuaug

SEQ ID NO: 3147315 - RNA, 19 nt, Artificial Sequence
  Description of Artificial Sequence: Synthetic oligonucleotide
cgagagguacuacuagucc

SEQ ID NO: 3147316 - RNA, 19 nt, Artificial Sequence
  Description of Artificial Sequence: Synthetic oligonucleotide
cagucugggaucugaucca

SEQ ID NO: 3147317 - RNA, 19 nt, Artificial Sequence
  Description of Artificial Sequence: Synthetic oligonucleotide
cuugaaagcgcggaugcgu

SEQ ID NO: 3147318 - RNA, 19 nt, Artificial Sequence
  Description of Artificial Sequence: Synthetic oligonucleotide
gagacagugucugccccuc

SEQ ID NO: 3147319 - RNA, 19 nt, Artificial Sequence
  Description of Artificial Sequence: Synthetic oligonucleotide
ccgaggauuuaguggagac

SEQ ID NO: 3147320 - RNA, 19 nt, Artificial Sequence
  Description of Artificial Sequence: Synthetic oligonucleotide
gacagugucugccccucua

SEQ ID NO: 3147321 - RNA, 19 nt, Artificial Sequence
  Description of Artificial Sequence: Synthetic oligonucleotide
ucccauccugaucgauacu

SEQ ID NO: 3147322 - RNA, 19 nt, Artificial Sequence
  Description of Artificial Sequence: Synthetic oligonucleotide
gucugccccucuauguggc

SEQ ID NO: 3147323 - RNA, 19 nt, Artificial Sequence
  Description of Artificial Sequence: Synthetic oligonucleotide
uugcuccagucugggaucu

SEQ ID NO: 3147324 - RNA, 19 nt, Artificial Sequence
  Description of Artificial Sequence: Synthetic oligonucleotide
aucuugcuccagucuggga

SEQ ID NO: 3147325 - RNA, 19 nt, Artificial Sequence
  Description of Artificial Sequence: Synthetic oligonucleotide
ucugccccucuauguggcu

SEQ ID NO: 3147326 - RNA, 19 nt, Artificial Sequence
  Description of Artificial Sequence: Synthetic oligonucleotide
gggaucugauccacuuucc

SEQ ID NO: 3147327 - RNA, 19 nt, Artificial Sequence
  Description of Artificial Sequence: Synthetic oligonucleotide
aggauuuaguggagacagu

SEQ ID NO: 3147328 - RNA, 19 nt, Artificial Sequence
  Description of Artificial Sequence: Synthetic oligonucleotide
agacagugucugccccucu

SEQ ID NO: 3147329 - RNA, 19 nt, Artificial Sequence
  Description of Artificial Sequence: Synthetic oligonucleotide
aucacuguccgaggauuua

SEQ ID NO: 3147330 - RNA, 19 nt, Artificial Sequence
  Description of Artificial Sequence: Synthetic oligonucleotide
aagcgcggaugcgucacuu

SEQ ID NO: 3147331 - RNA, 19 nt, Artificial Sequence
  Description of Artificial Sequence: Synthetic oligonucleotide
cgucacuuacaucacuguc

SEQ ID NO: 3147332 - RNA, 19 nt, Artificial Sequence
  Description of Artificial Sequence: Synthetic oligonucleotide
guccgaggauuuaguggag

SEQ ID NO: 3147333 - RNA, 19 nt, Artificial Sequence
  Description of Artificial Sequence: Synthetic oligonucleotide
gcgcggaugcgucacuuac

SEQ ID NO: 3147334 - RNA, 19 nt, Artificial Sequence
  Description of Artificial Sequence: Synthetic oligonucleotide
ccauccugaucgauacuuc

SEQ ID NO: 3147335 - RNA, 19 nt, Artificial Sequence
  Description of Artificial Sequence: Synthetic oligonucleotide
cugauccacuuuccuuuga

SEQ ID NO: 3147336 - RNA, 19 nt, Artificial Sequence
  Description of Artificial Sequence: Synthetic oligonucleotide
ggaucugauccacuuuccu

SEQ ID NO: 3147337 - RNA, 19 nt, Artificial Sequence
  Description of Artificial Sequence: Synthetic oligonucleotide
auguggcucccauccugau

SEQ ID NO: 3147338 - RNA, 19 nt, Artificial Sequence
  Description of Artificial Sequence: Synthetic oligonucleotide
ccuugaaagcgcggaugcg

SEQ ID NO: 3147339 - RNA, 19 nt, Artificial Sequence
  Description of Artificial Sequence: Synthetic oligonucleotide
agcgcggaugcgucacuua

SEQ ID NO: 3147340 - RNA, 19 nt, Artificial Sequence
  Description of Artificial Sequence: Synthetic oligonucleotide
cugccccucuauguggcuc

SEQ ID NO: 3147341 - RNA, 19 nt, Artificial Sequence
  Description of Artificial Sequence: Synthetic oligonucleotide
uggcucccauccugaucga

SEQ ID NO: 3147342 - RNA, 19 nt, Artificial Sequence
  Description of Artificial Sequence: Synthetic oligonucleotide
cacuguccgaggauuuagu

SEQ ID NO: 3147343 - RNA, 19 nt, Artificial Sequence
  Description of Artificial Sequence: Synthetic oligonucleotide
ugcuccagucugggaucug

SEQ ID NO: 3147344 - RNA, 19 nt, Artificial Sequence
  Description of Artificial Sequence: Synthetic oligonucleotide
cacuuacaucacuguccga

SEQ ID NO: 3147345 - RNA, 19 nt, Artificial Sequence
  Description of Artificial Sequence: Synthetic oligonucleotide
gcggaugcgucacuuacau

SEQ ID NO: 3147346 - RNA, 19 nt, Artificial Sequence
  Description of Artificial Sequence: Synthetic oligonucleotide
cacuuuccuuugaggcgga

SEQ ID NO: 3147347 - RNA, 19 nt, Artificial Sequence
  Description of Artificial Sequence: Synthetic oligonucleotide
ggagacagugucugccccu

SEQ ID NO: 3147348 - RNA, 19 nt, Artificial Sequence
  Description of Artificial Sequence: Synthetic oligonucleotide
ccucuauguggcucccauc

SEQ ID NO: 3147349 - RNA, 19 nt, Artificial Sequence
  Description of Artificial Sequence: Synthetic oligonucleotide
caucacuguccgaggauuu

SEQ ID NO: 3147350 - RNA, 19 nt, Artificial Sequence
  Description of Artificial Sequence: Synthetic oligonucleotide
gcgucacuuacaucacugu

SEQ ID NO: 3147351 - RNA, 19 nt, Artificial Sequence
  Description of Artificial Sequence: Synthetic oligonucleotide
gcucccauccugaucgaua

SEQ ID NO: 3147352 - RNA, 19 nt, Artificial Sequence
  Description of Artificial Sequence: Synthetic oligonucleotide
cugggaucugauccacuuu

SEQ ID NO: 3147353 - RNA, 19 nt, Artificial Sequence
  Description of Artificial Sequence: Synthetic oligonucleotide
cuccagucugggaucugau

SEQ ID NO: 3147354 - RNA, 19 nt, Artificial Sequence
  Description of Artificial Sequence: Synthetic oligonucleotide
cgaggauuuaguggagaca

SEQ ID NO: 3147355 - RNA, 19 nt, Artificial Sequence
  Description of Artificial Sequence: Synthetic oligonucleotide
cgauacuucgaaugguaau

SEQ ID NO: 3147356 - RNA, 19 nt, Artificial Sequence
  Description of Artificial Sequence: Synthetic oligonucleotide
ccugaucgauacuucgaau

SEQ ID NO: 3147357 - RNA, 19 nt, Artificial Sequence
  Description of Artificial Sequence: Synthetic oligonucleotide
gucugggaucugauccacu

SEQ ID NO: 3147358 - RNA, 19 nt, Artificial Sequence
  Description of Artificial Sequence: Synthetic oligonucleotide
cccauccugaucgauacuu

SEQ ID NO: 3147359 - RNA, 19 nt, Artificial Sequence
  Description of Artificial Sequence: Synthetic oligonucleotide
cgcggaugcgucacuuaca

SEQ ID NO: 3147360 - RNA, 19 nt, Artificial Sequence
  Description of Artificial Sequence: Synthetic oligonucleotide
cggaugcgucacuuacauc

SEQ ID NO: 3147361 - RNA, 19 nt, Artificial Sequence
  Description of Artificial Sequence: Synthetic oligonucleotide
cccucuauguggcucccau

SEQ ID NO: 3147362 - RNA, 19 nt, Artificial Sequence
  Description of Artificial Sequence: Synthetic oligonucleotide
gccccucuauguggcuccc

SEQ ID NO: 3147363 - RNA, 19 nt, Artificial Sequence
  Description of Artificial Sequence: Synthetic oligonucleotide
ggcucccauccugaucgau

SEQ ID NO: 3147364 - RNA, 19 nt, Artificial Sequence
  Description of Artificial Sequence: Synthetic oligonucleotide
ccccucuauguggcuccca

SEQ ID NO: 3147365 - RNA, 19 nt, Artificial Sequence
  Description of Artificial Sequence: Synthetic oligonucleotide
aaguuauauccauacaagg

SEQ ID NO: 3147366 - RNA, 19 nt, Artificial Sequence
  Description of Artificial Sequence: Synthetic oligonucleotide
acguggagaaguuauaucc

SEQ ID NO: 3147367 - RNA, 19 nt, Artificial Sequence
  Description of Artificial Sequence: Synthetic oligonucleotide
aaacaauuuucucaggacu

SEQ ID NO: 3147368 - RNA, 19 nt, Artificial Sequence
  Description of Artificial Sequence: Synthetic oligonucleotide
aguuauauccauacaaggc

SEQ ID NO: 3147369 - RNA, 19 nt, Artificial Sequence
  Description of Artificial Sequence: Synthetic oligonucleotide
agaaguuauauccauacaa

SEQ ID NO: 3147370 - RNA, 19 nt, Artificial Sequence
  Description of Artificial Sequence: Synthetic oligonucleotide
gaaguuauauccauacaag

SEQ ID NO: 3147371 - RNA, 19 nt, Artificial Sequence
  Description of Artificial Sequence: Synthetic oligonucleotide
guuauauccauacaaggca

SEQ ID NO: 3147372 - RNA, 19 nt, Artificial Sequence
  Description of Artificial Sequence: Synthetic oligonucleotide
agaaacaauuuucucagga

SEQ ID NO: 3147373 - RNA, 19 nt, Artificial Sequence
  Description of Artificial Sequence: Synthetic oligonucleotide
uuauauccauacaaggcac

SEQ ID NO: 3147374 - RNA, 19 nt, Artificial Sequence
  Description of Artificial Sequence: Synthetic oligonucleotide
auuuucucaggacuggcag

SEQ ID NO: 3147375 - RNA, 19 nt, Artificial Sequence
  Description of Artificial Sequence: Synthetic oligonucleotide
uugggaagaaacaauuuuc

SEQ ID NO: 3147376 - RNA, 19 nt, Artificial Sequence
  Description of Artificial Sequence: Synthetic oligonucleotide
gaaacaauuuucucaggac

SEQ ID NO: 3147377 - RNA, 19 nt, Artificial Sequence
  Description of Artificial Sequence: Synthetic oligonucleotide
  modified_base (5)..(5): a, c, u, g, unknown or other
uuuunuuucuuucuuucuu

SEQ ID NO: 3147378 - RNA, 19 nt, Artificial Sequence
  Description of Artificial Sequence: Synthetic oligonucleotide
ugggaagaaacaauuuucu

SEQ ID NO: 3147379 - RNA, 19 nt, Artificial Sequence
  Description of Artificial Sequence: Synthetic oligonucleotide
aacaauuuucucaggacug

SEQ ID NO: 3147380 - RNA, 19 nt, Artificial Sequence
  Description of Artificial Sequence: Synthetic oligonucleotide
uucuuucuaucagucaugg

SEQ ID NO: 3147381 - RNA, 19 nt, Artificial Sequence
  Description of Artificial Sequence: Synthetic oligonucleotide
aagaaacuuccuugggaag

SEQ ID NO: 3147382 - RNA, 19 nt, Artificial Sequence
  Description of Artificial Sequence: Synthetic oligonucleotide
  modified_base (4)..(4): a, c, u, g, unknown or other
uuunuuucuuucuuucuuu

SEQ ID NO: 3147383 - RNA, 19 nt, Artificial Sequence
  Description of Artificial Sequence: Synthetic oligonucleotide
aacuuccuugggaagaaac

SEQ ID NO: 3147384 - RNA, 19 nt, Artificial Sequence
  Description of Artificial Sequence: Synthetic oligonucleotide
uuucuuucuaucagucaug

SEQ ID NO: 3147385 - RNA, 19 nt, Artificial Sequence
  Description of Artificial Sequence: Synthetic oligonucleotide
ucagucauggucccacuug

SEQ ID NO: 3147386 - RNA, 19 nt, Artificial Sequence
  Description of Artificial Sequence: Synthetic oligonucleotide
uuucuuucuuucuaucagu

SEQ ID NO: 3147387 - RNA, 19 nt, Artificial Sequence
  Description of Artificial Sequence: Synthetic oligonucleotide
ucauggucccacuugguga

SEQ ID NO: 3147388 - RNA, 19 nt, Artificial Sequence
  Description of Artificial Sequence: Synthetic oligonucleotide
  modified_base (3)..(3): a, c, u, g, unknown or other
uunuuucuuucuuucuuuc

SEQ ID NO: 3147389 - RNA, 19 nt, Artificial Sequence
  Description of Artificial Sequence: Synthetic oligonucleotide
uauauccauacaaggcaca

SEQ ID NO: 3147390 - RNA, 19 nt, Artificial Sequence
  Description of Artificial Sequence: Synthetic oligonucleotide
ggagaaguuauauccauac

SEQ ID NO: 3147391 - RNA, 19 nt, Artificial Sequence
  Description of Artificial Sequence: Synthetic oligonucleotide
accccaagaaacuuccuug

SEQ ID NO: 3147392 - RNA, 19 nt, Artificial Sequence
  Description of Artificial Sequence: Synthetic oligonucleotide
ucuuucuuucuaucaguca

SEQ ID NO: 3147393 - RNA, 19 nt, Artificial Sequence
  Description of Artificial Sequence: Synthetic oligonucleotide
acaauuuucucaggacugg

SEQ ID NO: 3147394 - RNA, 19 nt, Artificial Sequence
  Description of Artificial Sequence: Synthetic oligonucleotide
uuggugaggaccccaagaa

SEQ ID NO: 3147395 - RNA, 19 nt, Artificial Sequence
  Description of Artificial Sequence: Synthetic oligonucleotide
uccuugggaagaaacaauu

SEQ ID NO: 3147396 - RNA, 19 nt, Artificial Sequence
  Description of Artificial Sequence: Synthetic oligonucleotide
caagaaacuuccuugggaa

SEQ ID NO: 3147397 - RNA, 19 nt, Artificial Sequence
  Description of Artificial Sequence: Synthetic oligonucleotide
aauuuucucaggacuggca

SEQ ID NO: 3147398 - RNA, 19 nt, Artificial Sequence
  Description of Artificial Sequence: Synthetic oligonucleotide
aggaccccaagaaacuucc

SEQ ID NO: 3147399 - RNA, 19 nt, Artificial Sequence
  Description of Artificial Sequence: Synthetic oligonucleotide
agaaacuuccuugggaaga

SEQ ID NO: 3147400 - RNA, 19 nt, Artificial Sequence
  Description of Artificial Sequence: Synthetic oligonucleotide
cauggucccacuuggugag

SEQ ID NO: 3147401 - RNA, 19 nt, Artificial Sequence
  Description of Artificial Sequence: Synthetic oligonucleotide
ucccacuuggugaggaccc

SEQ ID NO: 3147402 - RNA, 19 nt, Artificial Sequence
  Description of Artificial Sequence: Synthetic oligonucleotide
cagucauggucccacuugg

SEQ ID NO: 3147403 - RNA, 19 nt, Artificial Sequence
  Description of Artificial Sequence: Synthetic oligonucleotide
gagaaguuauauccauaca

SEQ ID NO: 3147404 - RNA, 19 nt, Artificial Sequence
  Description of Artificial Sequence: Synthetic oligonucleotide
uucuaucagucaugguccc

SEQ ID NO: 3147405 - RNA, 19 nt, Artificial Sequence
  Description of Artificial Sequence: Synthetic oligonucleotide
uuccuugggaagaaacaau

SEQ ID NO: 3147406 - RNA, 19 nt, Artificial Sequence
  Description of Artificial Sequence: Synthetic oligonucleotide
gucauggucccacuuggug

SEQ ID NO: 3147407 - RNA, 19 nt, Artificial Sequence
  Description of Artificial Sequence: Synthetic oligonucleotide
gacguggagaaguuauauc

SEQ ID NO: 3147408 - RNA, 19 nt, Artificial Sequence
  Description of Artificial Sequence: Synthetic oligonucleotide
cuaucagucauggucccac

SEQ ID NO: 3147409 - RNA, 19 nt, Artificial Sequence
  Description of Artificial Sequence: Synthetic oligonucleotide
uggagaaguuauauccaua

SEQ ID NO: 3147410 - RNA, 19 nt, Artificial Sequence
  Description of Artificial Sequence: Synthetic oligonucleotide
ggugaggaccccaagaaac

SEQ ID NO: 3147411 - RNA, 19 nt, Artificial Sequence
  Description of Artificial Sequence: Synthetic oligonucleotide
cuuucuuucuaucagucau

SEQ ID NO: 3147412 - RNA, 19 nt, Artificial Sequence
  Description of Artificial Sequence: Synthetic oligonucleotide
caauuuucucaggacuggc

SEQ ID NO: 3147413 - RNA, 19 nt, Artificial Sequence
  Description of Artificial Sequence: Synthetic oligonucleotide
uccuuucuuucuuucuauc

SEQ ID NO: 3147414 - RNA, 19 nt, Artificial Sequence
  Description of Artificial Sequence: Synthetic oligonucleotide
cuuggugaggaccccaaga

SEQ ID NO: 3147415 - RNA, 19 nt, Artificial Sequence
  Description of Artificial Sequence: Synthetic oligonucleotide
uggugaggaccccaagaaa

SEQ ID NO: 3147416 - RNA, 19 nt, Artificial Sequence
  Description of Artificial Sequence: Synthetic oligonucleotide
ucuuucuaucagucauggu

SEQ ID NO: 3147417 - RNA, 19 nt, Artificial Sequence
  Description of Artificial Sequence: Synthetic oligonucleotide
gggaagaaacaauuuucuc

SEQ ID NO: 3147418 - RNA, 19 nt, Artificial Sequence
  Description of Artificial Sequence: Synthetic oligonucleotide
gaaacuuccuugggaagaa

SEQ ID NO: 3147419 - RNA, 19 nt, Artificial Sequence
  Description of Artificial Sequence: Synthetic oligonucleotide
cuuccuugggaagaaacaa

SEQ ID NO: 3147420 - RNA, 19 nt, Artificial Sequence
  Description of Artificial Sequence: Synthetic oligonucleotide
ccccaagaaacuuccuugg

SEQ ID NO: 3147421 - RNA, 19 nt, Artificial Sequence
  Description of Artificial Sequence: Synthetic oligonucleotide
uaucagucauggucccacu

SEQ ID NO: 3147422 - RNA, 19 nt, Artificial Sequence
  Description of Artificial Sequence: Synthetic oligonucleotide
ucuaucagucaugguccca

SEQ ID NO: 3147423 - RNA, 19 nt, Artificial Sequence
  Description of Artificial Sequence: Synthetic oligonucleotide
gaggaccccaagaaacuuc

SEQ ID NO: 3147424 - RNA, 19 nt, Artificial Sequence
  Description of Artificial Sequence: Synthetic oligonucleotide
gucccacuuggugaggacc

SEQ ID NO: 3147425 - RNA, 19 nt, Artificial Sequence
  Description of Artificial Sequence: Synthetic oligonucleotide
aucagucauggucccacuu

SEQ ID NO: 3147426 - RNA, 19 nt, Artificial Sequence
  Description of Artificial Sequence: Synthetic oligonucleotide
ugaggaccccaagaaacuu

SEQ ID NO: 3147427 - RNA, 19 nt, Artificial Sequence
  Description of Artificial Sequence: Synthetic oligonucleotide
ccaagaaacuuccuuggga

SEQ ID NO: 3147428 - RNA, 19 nt, Artificial Sequence
  Description of Artificial Sequence: Synthetic oligonucleotide
cccaagaaacuuccuuggg

SEQ ID NO: 3147429 - RNA, 19 nt, Artificial Sequence
  Description of Artificial Sequence: Synthetic oligonucleotide
aaacuuccuugggaagaaa

SEQ ID NO: 3147430 - RNA, 19 nt, Artificial Sequence
  Description of Artificial Sequence: Synthetic oligonucleotide
guggagaaguuauauccau

SEQ ID NO: 3147431 - RNA, 19 nt, Artificial Sequence
  Description of Artificial Sequence: Synthetic oligonucleotide
gacuggcagccaguuuggg

SEQ ID NO: 3147432 - RNA, 19 nt, Artificial Sequence
  Description of Artificial Sequence: Synthetic oligonucleotide
gaccccaagaaacuuccuu

SEQ ID NO: 3147433 - RNA, 19 nt, Artificial Sequence
  Description of Artificial Sequence: Synthetic oligonucleotide
agucauggucccacuuggu

SEQ ID NO: 3147434 - RNA, 19 nt, Artificial Sequence
  Description of Artificial Sequence: Synthetic oligonucleotide
gugaggaccccaagaaacu

SEQ ID NO: 3147435 - RNA, 19 nt, Artificial Sequence
  Description of Artificial Sequence: Synthetic oligonucleotide
cguggagaaguuauaucca

SEQ ID NO: 3147436 - RNA, 19 nt, Artificial Sequence
  Description of Artificial Sequence: Synthetic oligonucleotide
cacuuggugaggaccccaa

SEQ ID NO: 3147437 - RNA, 19 nt, Artificial Sequence
  Description of Artificial Sequence: Synthetic oligonucleotide
ggucccacuuggugaggac

SEQ ID NO: 3147438 - RNA, 19 nt, Artificial Sequence
  Description of Artificial Sequence: Synthetic oligonucleotide
cucaggacuggcagccagu

SEQ ID NO: 3147439 - RNA, 19 nt, Artificial Sequence
  Description of Artificial Sequence: Synthetic oligonucleotide
ggacguggagaaguuauau

SEQ ID NO: 3147440 - RNA, 19 nt, Artificial Sequence
  Description of Artificial Sequence: Synthetic oligonucleotide
gggacguggagaaguuaua

SEQ ID NO: 3147441 - RNA, 19 nt, Artificial Sequence
  Description of Artificial Sequence: Synthetic oligonucleotide
ccacuuggugaggacccca

SEQ ID NO: 3147442 - RNA, 19 nt, Artificial Sequence
  Description of Artificial Sequence: Synthetic oligonucleotide
ggaccccaagaaacuuccu

SEQ ID NO: 3147443 - RNA, 19 nt, Artificial Sequence
  Description of Artificial Sequence: Synthetic oligonucleotide
acaguauucugccugcaug

SEQ ID NO: 3147444 - RNA, 19 nt, Artificial Sequence
  Description of Artificial Sequence: Synthetic oligonucleotide
ucugccugcauguaugccu

SEQ ID NO: 3147445 - RNA, 19 nt, Artificial Sequence
  Description of Artificial Sequence: Synthetic oligonucleotide
ugcauguaugccugcaggc

SEQ ID NO: 3147446 - RNA, 19 nt, Artificial Sequence
  Description of Artificial Sequence: Synthetic oligonucleotide
ccugcaggccagaagaggg

SEQ ID NO: 3147447 - RNA, 19 nt, Artificial Sequence
  Description of Artificial Sequence: Synthetic oligonucleotide
uacaguauucugccugcau

SEQ ID NO: 3147448 - RNA, 19 nt, Artificial Sequence
  Description of Artificial Sequence: Synthetic oligonucleotide
cugccugcauguaugccug

SEQ ID NO: 3147449 - RNA, 19 nt, Artificial Sequence
  Description of Artificial Sequence: Synthetic oligonucleotide
ugccugcaggccagaagag

SEQ ID NO: 3147450 - RNA, 19 nt, Artificial Sequence
  Description of Artificial Sequence: Synthetic oligonucleotide
ugcaggccagaagagggca

SEQ ID NO: 3147451 - RNA, 19 nt, Artificial Sequence
  Description of Artificial Sequence: Synthetic oligonucleotide
caguauucugccugcaugu

SEQ ID NO: 3147452 - RNA, 19 nt, Artificial Sequence
  Description of Artificial Sequence: Synthetic oligonucleotide
uucugccugcauguaugcc

SEQ ID NO: 3147453 - RNA, 19 nt, Artificial Sequence
  Description of Artificial Sequence: Synthetic oligonucleotide
aguauucugccugcaugua

SEQ ID NO: 3147454 - RNA, 19 nt, Artificial Sequence
  Description of Artificial Sequence: Synthetic oligonucleotide
ugccugcauguaugccugc

SEQ ID NO: 3147455 - RNA, 19 nt, Artificial Sequence
  Description of Artificial Sequence: Synthetic oligonucleotide
gccugcaggccagaagagg

SEQ ID NO: 3147456 - RNA, 19 nt, Artificial Sequence
  Description of Artificial Sequence: Synthetic oligonucleotide
gcaggccagaagagggcac

SEQ ID NO: 3147457 - RNA, 19 nt, Artificial Sequence
  Description of Artificial Sequence: Synthetic oligonucleotide
accaccaggacucggaagc

SEQ ID NO: 3147458 - RNA, 19 nt, Artificial Sequence
  Description of Artificial Sequence: Synthetic oligonucleotide
auggucugccuccaggucc

SEQ ID NO: 3147459 - RNA, 19 nt, Artificial Sequence
  Description of Artificial Sequence: Synthetic oligonucleotide
uuagccgacaccaccagga

SEQ ID NO: 3147460 - RNA, 19 nt, Artificial Sequence
  Description of Artificial Sequence: Synthetic oligonucleotide
ucgaacuuagccgacacca

SEQ ID NO: 3147461 - RNA, 19 nt, Artificial Sequence
  Description of Artificial Sequence: Synthetic oligonucleotide
acgguugagagucgugucc

SEQ ID NO: 3147462 - RNA, 19 nt, Artificial Sequence
  Description of Artificial Sequence: Synthetic oligonucleotide
aacgguugagagucguguc

SEQ ID NO: 3147463 - RNA, 19 nt, Artificial Sequence
  Description of Artificial Sequence: Synthetic oligonucleotide
aggacucggaagcuggucg

SEQ ID NO: 3147464 - RNA, 19 nt, Artificial Sequence
  Description of Artificial Sequence: Synthetic oligonucleotide
gaacuuagccgacaccacc

SEQ ID NO: 3147465 - RNA, 19 nt, Artificial Sequence
  Description of Artificial Sequence: Synthetic oligonucleotide
uccaccaccacauggucug

SEQ ID NO: 3147466 - RNA, 19 nt, Artificial Sequence
  Description of Artificial Sequence: Synthetic oligonucleotide
ucggcgcugaguuccaugg

SEQ ID NO: 3147467 - RNA, 19 nt, Artificial Sequence
  Description of Artificial Sequence: Synthetic oligonucleotide
agagucguguccuccacca

SEQ ID NO: 3147468 - RNA, 19 nt, Artificial Sequence
  Description of Artificial Sequence: Synthetic oligonucleotide
aacuuagccgacaccacca

SEQ ID NO: 3147469 - RNA, 19 nt, Artificial Sequence
  Description of Artificial Sequence: Synthetic oligonucleotide
uccuccaccaccacauggu

SEQ ID NO: 3147470 - RNA, 19 nt, Artificial Sequence
  Description of Artificial Sequence: Synthetic oligonucleotide
guagucggcgcugaguucc

SEQ ID NO: 3147471 - RNA, 19 nt, Artificial Sequence
  Description of Artificial Sequence: Synthetic oligonucleotide
aagcuggucgcgcaacggu

SEQ ID NO: 3147472 - RNA, 19 nt, Artificial Sequence
  Description of Artificial Sequence: Synthetic oligonucleotide
cacauggucugccuccagg

SEQ ID NO: 3147473 - RNA, 19 nt, Artificial Sequence
  Description of Artificial Sequence: Synthetic oligonucleotide
acauggucugccuccaggu

SEQ ID NO: 3147474 - RNA, 19 nt, Artificial Sequence
  Description of Artificial Sequence: Synthetic oligonucleotide
gacagggucgacaggcccg

SEQ ID NO: 3147475 - RNA, 19 nt, Artificial Sequence
  Description of Artificial Sequence: Synthetic oligonucleotide
uugagagucguguccucca

SEQ ID NO: 3147476 - RNA, 19 nt, Artificial Sequence
  Description of Artificial Sequence: Synthetic oligonucleotide
uggccagagcccgacaggg

SEQ ID NO: 3147477 - RNA, 19 nt, Artificial Sequence
  Description of Artificial Sequence: Synthetic oligonucleotide
guuccauggccagagcccg

SEQ ID NO: 3147478 - RNA, 19 nt, Artificial Sequence
  Description of Artificial Sequence: Synthetic oligonucleotide
caccacauggucugccucc

SEQ ID NO: 3147479 - RNA, 19 nt, Artificial Sequence
  Description of Artificial Sequence: Synthetic oligonucleotide
guccuccaccaccacaugg

SEQ ID NO: 3147480 - RNA, 19 nt, Artificial Sequence
  Description of Artificial Sequence: Synthetic oligonucleotide
agcccgacagggucgacag

SEQ ID NO: 3147481 - RNA, 19 nt, Artificial Sequence
  Description of Artificial Sequence: Synthetic oligonucleotide
uggucugccuccagguccc

SEQ ID NO: 3147482 - RNA, 19 nt, Artificial Sequence
  Description of Artificial Sequence: Synthetic oligonucleotide
cuuagccgacaccaccagg

SEQ ID NO: 3147483 - RNA, 19 nt, Artificial Sequence
  Description of Artificial Sequence: Synthetic oligonucleotide
acuuagccgacaccaccag

SEQ ID NO: 3147484 - RNA, 19 nt, Artificial Sequence
  Description of Artificial Sequence: Synthetic oligonucleotide
agguagucggcgcugaguu

SEQ ID NO: 3147485 - RNA, 19 nt, Artificial Sequence
  Description of Artificial Sequence: Synthetic oligonucleotide
gaagcuggucgcgcaacgg

SEQ ID NO: 3147486 - RNA, 19 nt, Artificial Sequence
  Description of Artificial Sequence: Synthetic oligonucleotide
auggccagagcccgacagg

SEQ ID NO: 3147487 - RNA, 19 nt, Artificial Sequence
  Description of Artificial Sequence: Synthetic oligonucleotide
accaggacucggaagcugg

SEQ ID NO: 3147488 - RNA, 19 nt, Artificial Sequence
  Description of Artificial Sequence: Synthetic oligonucleotide
ugagagucguguccuccac

SEQ ID NO: 3147489 - RNA, 19 nt, Artificial Sequence
  Description of Artificial Sequence: Synthetic oligonucleotide
gagagucguguccuccacc

SEQ ID NO: 3147490 - RNA, 19 nt, Artificial Sequence
  Description of Artificial Sequence: Synthetic oligonucleotide
cuucucgcggagguagucg

SEQ ID NO: 3147491 - RNA, 19 nt, Artificial Sequence
  Description of Artificial Sequence: Synthetic oligonucleotide
acagggucgacaggcccgc

SEQ ID NO: 3147492 - RNA, 19 nt, Artificial Sequence
  Description of Artificial Sequence: Synthetic oligonucleotide
gucgcgcaacgguugagag

SEQ ID NO: 3147493 - RNA, 19 nt, Artificial Sequence
  Description of Artificial Sequence: Synthetic oligonucleotide
cucgaacuuagccgacacc

SEQ ID NO: 3147494 - RNA, 19 nt, Artificial Sequence
  Description of Artificial Sequence: Synthetic oligonucleotide
ugaguuccauggccagagc

SEQ ID NO: 3147495 - RNA, 19 nt, Artificial Sequence
  Description of Artificial Sequence: Synthetic oligonucleotide
ggcgcugaguuccauggcc

SEQ ID NO: 3147496 - RNA, 19 nt, Artificial Sequence
  Description of Artificial Sequence: Synthetic oligonucleotide
gacucggaagcuggucgcg

SEQ ID NO: 3147497 - RNA, 19 nt, Artificial Sequence
  Description of Artificial Sequence: Synthetic oligonucleotide
cucgcggagguagucggcg

SEQ ID NO: 3147498 - RNA, 19 nt, Artificial Sequence
  Description of Artificial Sequence: Synthetic oligonucleotide
cagcuucucgcggagguag

SEQ ID NO: 3147499 - RNA, 19 nt, Artificial Sequence
  Description of Artificial Sequence: Synthetic oligonucleotide
ggaagcuggucgcgcaacg

SEQ ID NO: 3147500 - RNA, 19 nt, Artificial Sequence
  Description of Artificial Sequence: Synthetic oligonucleotide
accaccacauggucugccu

SEQ ID NO: 3147501 - RNA, 19 nt, Artificial Sequence
  Description of Artificial Sequence: Synthetic oligonucleotide
uagccgacaccaccaggac

SEQ ID NO: 3147502 - RNA, 19 nt, Artificial Sequence
  Description of Artificial Sequence: Synthetic oligonucleotide
gacaccaccaggacucgga

SEQ ID NO: 3147503 - RNA, 19 nt, Artificial Sequence
  Description of Artificial Sequence: Synthetic oligonucleotide
ucucgcggagguagucggc

SEQ ID NO: 3147504 - RNA, 19 nt, Artificial Sequence
  Description of Artificial Sequence: Synthetic oligonucleotide
agccgacaccaccaggacu

SEQ ID NO: 3147505 - RNA, 19 nt, Artificial Sequence
  Description of Artificial Sequence: Synthetic oligonucleotide
ucgcgcaacgguugagagu

SEQ ID NO: 3147506 - RNA, 19 nt, Artificial Sequence
  Description of Artificial Sequence: Synthetic oligonucleotide
caccaccaggacucggaag

SEQ ID NO: 3147507 - RNA, 19 nt, Artificial Sequence
  Description of Artificial Sequence: Synthetic oligonucleotide
ucggaagcuggucgcgcaa

SEQ ID NO: 3147508 - RNA, 19 nt, Artificial Sequence
  Description of Artificial Sequence: Synthetic oligonucleotide
uccauggccagagcccgac

SEQ ID NO: 3147509 - RNA, 19 nt, Artificial Sequence
  Description of Artificial Sequence: Synthetic oligonucleotide
ggacucggaagcuggucgc

SEQ ID NO: 3147510 - RNA, 19 nt, Artificial Sequence
  Description of Artificial Sequence: Synthetic oligonucleotide
gucggcgcugaguuccaug

SEQ ID NO: 3147511 - RNA, 19 nt, Artificial Sequence
  Description of Artificial Sequence: Synthetic oligonucleotide
ucgcggagguagucggcgc

SEQ ID NO: 3147512 - RNA, 19 nt, Artificial Sequence
  Description of Artificial Sequence: Synthetic oligonucleotide
gccgacaccaccaggacuc

SEQ ID NO: 3147513 - RNA, 19 nt, Artificial Sequence
  Description of Artificial Sequence: Synthetic oligonucleotide
ccagagcccgacagggucg

SEQ ID NO: 3147514 - RNA, 19 nt, Artificial Sequence
  Description of Artificial Sequence: Synthetic oligonucleotide
gucccgcugcagcuucucg

SEQ ID NO: 3147515 - RNA, 19 nt, Artificial Sequence
  Description of Artificial Sequence: Synthetic oligonucleotide
agggucgacaggcccgcgu

SEQ ID NO: 3147516 - RNA, 19 nt, Artificial Sequence
  Description of Artificial Sequence: Synthetic oligonucleotide
gucguguccuccaccacca

SEQ ID NO: 3147517 - RNA, 19 nt, Artificial Sequence
  Description of Artificial Sequence: Synthetic oligonucleotide
gagucguguccuccaccac

SEQ ID NO: 3147518 - RNA, 19 nt, Artificial Sequence
  Description of Artificial Sequence: Synthetic oligonucleotide
cgcgcaacgguugagaguc

SEQ ID NO: 3147519 - RNA, 19 nt, Artificial Sequence
  Description of Artificial Sequence: Synthetic oligonucleotide
uagucggcgcugaguucca

SEQ ID NO: 3147520 - RNA, 19 nt, Artificial Sequence
  Description of Artificial Sequence: Synthetic oligonucleotide
gccagagcccgacaggguc

SEQ ID NO: 3147521 - RNA, 19 nt, Artificial Sequence
  Description of Artificial Sequence: Synthetic oligonucleotide
gcugcagcuucucgcggag

SEQ ID NO: 3147522 - RNA, 19 nt, Artificial Sequence
  Description of Artificial Sequence: Synthetic oligonucleotide
accacauggucugccucca

SEQ ID NO: 3147523 - RNA, 19 nt, Artificial Sequence
  Description of Artificial Sequence: Synthetic oligonucleotide
caccaccacauggucugcc

SEQ ID NO: 3147524 - RNA, 19 nt, Artificial Sequence
  Description of Artificial Sequence: Synthetic oligonucleotide
ccucgaacuuagccgacac

SEQ ID NO: 3147525 - RNA, 19 nt, Artificial Sequence
  Description of Artificial Sequence: Synthetic oligonucleotide
caacgguugagagucgugu

SEQ ID NO: 3147526 - RNA, 19 nt, Artificial Sequence
  Description of Artificial Sequence: Synthetic oligonucleotide
gagcccgacagggucgaca

SEQ ID NO: 3147527 - RNA, 19 nt, Artificial Sequence
  Description of Artificial Sequence: Synthetic oligonucleotide
uggucgcgcaacgguugag

SEQ ID NO: 3147528 - RNA, 19 nt, Artificial Sequence
  Description of Artificial Sequence: Synthetic oligonucleotide
caccaggacucggaagcug

SEQ ID NO: 3147529 - RNA, 19 nt, Artificial Sequence
  Description of Artificial Sequence: Synthetic oligonucleotide
ucguguccuccaccaccac

SEQ ID NO: 3147530 - RNA, 19 nt, Artificial Sequence
  Description of Artificial Sequence: Synthetic oligonucleotide
caggacucggaagcugguc

SEQ ID NO: 3147531 - RNA, 19 nt, Artificial Sequence
  Description of Artificial Sequence: Synthetic oligonucleotide
guguccuccaccaccacau

SEQ ID NO: 3147532 - RNA, 19 nt, Artificial Sequence
  Description of Artificial Sequence: Synthetic oligonucleotide
gagguagucggcgcugagu

SEQ ID NO: 3147533 - RNA, 19 nt, Artificial Sequence
  Description of Artificial Sequence: Synthetic oligonucleotide
gguagucggcgcugaguuc

SEQ ID NO: 3147534 - RNA, 19 nt, Artificial Sequence
  Description of Artificial Sequence: Synthetic oligonucleotide
cgaacuuagccgacaccac

SEQ ID NO: 3147535 - RNA, 19 nt, Artificial Sequence
  Description of Artificial Sequence: Synthetic oligonucleotide
cuccaccaccacauggucu

SEQ ID NO: 3147536 - RNA, 19 nt, Artificial Sequence
  Description of Artificial Sequence: Synthetic oligonucleotide
cuggucgcgcaacgguuga

SEQ ID NO: 3147537 - RNA, 19 nt, Artificial Sequence
  Description of Artificial Sequence: Synthetic oligonucleotide
agcuggucgcgcaacgguu

SEQ ID NO: 3147538 - RNA, 19 nt, Artificial Sequence
  Description of Artificial Sequence: Synthetic oligonucleotide
gcaacgguugagagucgug

SEQ ID NO: 3147539 - RNA, 19 nt, Artificial Sequence
  Description of Artificial Sequence: Synthetic oligonucleotide
ccgacagggucgacaggcc

SEQ ID NO: 3147540 - RNA, 19 nt, Artificial Sequence
  Description of Artificial Sequence: Synthetic oligonucleotide
ggucgcgcaacgguugaga

SEQ ID NO: 3147541 - RNA, 19 nt, Artificial Sequence
  Description of Artificial Sequence: Synthetic oligonucleotide
cgacagggucgacaggccc

SEQ ID NO: 3147542 - RNA, 19 nt, Artificial Sequence
  Description of Artificial Sequence: Synthetic oligonucleotide
agcuucucgcggagguagu

SEQ ID NO: 3147543 - RNA, 19 nt, Artificial Sequence
  Description of Artificial Sequence: Synthetic oligonucleotide
ccuccaccaccacaugguc

SEQ ID NO: 3147544 - RNA, 19 nt, Artificial Sequence
  Description of Artificial Sequence: Synthetic oligonucleotide
agagcccgacagggucgac

SEQ ID NO: 3147545 - RNA, 19 nt, Artificial Sequence
  Description of Artificial Sequence: Synthetic oligonucleotide
cgcugaguuccauggccag

SEQ ID NO: 3147546 - RNA, 19 nt, Artificial Sequence
  Description of Artificial Sequence: Synthetic oligonucleotide
gcgcugaguuccauggcca

SEQ ID NO: 3147547 - RNA, 19 nt, Artificial Sequence
  Description of Artificial Sequence: Synthetic oligonucleotide
cagagcccgacagggucga

SEQ ID NO: 3147548 - RNA, 19 nt, Artificial Sequence
  Description of Artificial Sequence: Synthetic oligonucleotide
gcuucucgcggagguaguc

SEQ ID NO: 3147549 - RNA, 19 nt, Artificial Sequence
  Description of Artificial Sequence: Synthetic oligonucleotide
gcggagguagucggcgcug

SEQ ID NO: 3147550 - RNA, 19 nt, Artificial Sequence
  Description of Artificial Sequence: Synthetic oligonucleotide
cagggucgacaggcccgcg

SEQ ID NO: 3147551 - RNA, 19 nt, Artificial Sequence
  Description of Artificial Sequence: Synthetic oligonucleotide
gcccgacagggucgacagg

SEQ ID NO: 3147552 - RNA, 19 nt, Artificial Sequence
  Description of Artificial Sequence: Synthetic oligonucleotide
ccgcugcagcuucucgcgg

SEQ ID NO: 3147553 - RNA, 19 nt, Artificial Sequence
  Description of Artificial Sequence: Synthetic oligonucleotide
ccacauggucugccuccag

SEQ ID NO: 3147554 - RNA, 19 nt, Artificial Sequence
  Description of Artificial Sequence: Synthetic oligonucleotide
cguguccuccaccaccaca

SEQ ID NO: 3147555 - RNA, 19 nt, Artificial Sequence
  Description of Artificial Sequence: Synthetic oligonucleotide
ccgacaccaccaggacucg

SEQ ID NO: 3147556 - RNA, 19 nt, Artificial Sequence
  Description of Artificial Sequence: Synthetic oligonucleotide
agucggcgcugaguuccau

SEQ ID NO: 3147557 - RNA, 19 nt, Artificial Sequence
  Description of Artificial Sequence: Synthetic oligonucleotide
aggucccgcugcagcuucu

SEQ ID NO: 3147558 - RNA, 19 nt, Artificial Sequence
  Description of Artificial Sequence: Synthetic oligonucleotide
gcgcaacgguugagagucg

SEQ ID NO: 3147559 - RNA, 19 nt, Artificial Sequence
  Description of Artificial Sequence: Synthetic oligonucleotide
ggucugccuccaggucccg

SEQ ID NO: 3147560 - RNA, 19 nt, Artificial Sequence
  Description of Artificial Sequence: Synthetic oligonucleotide
ggucccgcugcagcuucuc

SEQ ID NO: 3147561 - RNA, 19 nt, Artificial Sequence
  Description of Artificial Sequence: Synthetic oligonucleotide
ccaccaccacauggucugc

SEQ ID NO: 3147562 - RNA, 19 nt, Artificial Sequence
  Description of Artificial Sequence: Synthetic oligonucleotide
cgcugcagcuucucgcgga

SEQ ID NO: 3147563 - RNA, 19 nt, Artificial Sequence
  Description of Artificial Sequence: Synthetic oligonucleotide
cccucgaacuuagccgaca

SEQ ID NO: 3147564 - RNA, 19 nt, Artificial Sequence
  Description of Artificial Sequence: Synthetic oligonucleotide
cggcgcugaguuccauggc

SEQ ID NO: 3147565 - RNA, 19 nt, Artificial Sequence
  Description of Artificial Sequence: Synthetic oligonucleotide
cggaagcuggucgcgcaac

SEQ ID NO: 3147566 - RNA, 19 nt, Artificial Sequence
  Description of Artificial Sequence: Synthetic oligonucleotide
cgacaccaccaggacucgg

SEQ ID NO: 3147567 - RNA, 19 nt, Artificial Sequence
  Description of Artificial Sequence: Synthetic oligonucleotide
gcagcuucucgcggaggua

SEQ ID NO: 3147568 - RNA, 19 nt, Artificial Sequence
  Description of Artificial Sequence: Synthetic oligonucleotide
ccaggacucggaagcuggu

SEQ ID NO: 3147569 - RNA, 19 nt, Artificial Sequence
  Description of Artificial Sequence: Synthetic oligonucleotide
ggccagagcccgacagggu

SEQ ID NO: 3147570 - RNA, 19 nt, Artificial Sequence
  Description of Artificial Sequence: Synthetic oligonucleotide
cggagguagucggcgcuga

SEQ ID NO: 3147571 - RNA, 19 nt, Artificial Sequence
  Description of Artificial Sequence: Synthetic oligonucleotide
ccaccaggacucggaagcu

SEQ ID NO: 3147572 - RNA, 19 nt, Artificial Sequence
  Description of Artificial Sequence: Synthetic oligonucleotide
cgcaacgguugagagucgu

SEQ ID NO: 3147573 - RNA, 19 nt, Artificial Sequence
  Description of Artificial Sequence: Synthetic oligonucleotide
cgcggagguagucggcgcu

SEQ ID NO: 3147574 - RNA, 19 nt, Artificial Sequence
  Description of Artificial Sequence: Synthetic oligonucleotide
ccaggucccgcugcagcuu

SEQ ID NO: 3147575 - RNA, 19 nt, Artificial Sequence
  Description of Artificial Sequence: Synthetic oligonucleotide
agugccaucaucucggggc

SEQ ID NO: 3147576 - RNA, 19 nt, Artificial Sequence
  Description of Artificial Sequence: Synthetic oligonucleotide
ucaaucacagcauaggagu

SEQ ID NO: 3147577 - RNA, 19 nt, Artificial Sequence
  Description of Artificial Sequence: Synthetic oligonucleotide
aucaucucggggcaaagcc

SEQ ID NO: 3147578 - RNA, 19 nt, Artificial Sequence
  Description of Artificial Sequence: Synthetic oligonucleotide
uucuugaggucaaucacag

SEQ ID NO: 3147579 - RNA, 19 nt, Artificial Sequence
  Description of Artificial Sequence: Synthetic oligonucleotide
ugagcuucgaacagggugu

SEQ ID NO: 3147580 - RNA, 19 nt, Artificial Sequence
  Description of Artificial Sequence: Synthetic oligonucleotide
aggagucugagcuucgaac

SEQ ID NO: 3147581 - RNA, 19 nt, Artificial Sequence
  Description of Artificial Sequence: Synthetic oligonucleotide
uagucuuccugacagugcc

SEQ ID NO: 3147582 - RNA, 19 nt, Artificial Sequence
  Description of Artificial Sequence: Synthetic oligonucleotide
ugacagugccaucaucucg

SEQ ID NO: 3147583 - RNA, 19 nt, Artificial Sequence
  Description of Artificial Sequence: Synthetic oligonucleotide
ugcagguuggacauggcca

SEQ ID NO: 3147584 - RNA, 19 nt, Artificial Sequence
  Description of Artificial Sequence: Synthetic oligonucleotide
uuggacauggccacggucu

SEQ ID NO: 3147585 - RNA, 19 nt, Artificial Sequence
  Description of Artificial Sequence: Synthetic oligonucleotide
gacagugccaucaucucgg

SEQ ID NO: 3147586 - RNA, 19 nt, Artificial Sequence
  Description of Artificial Sequence: Synthetic oligonucleotide
acagcauaggagucugagc

SEQ ID NO: 3147587 - RNA, 19 nt, Artificial Sequence
  Description of Artificial Sequence: Synthetic oligonucleotide
cugagcuucgaacagggug

SEQ ID NO: 3147588 - RNA, 19 nt, Artificial Sequence
  Description of Artificial Sequence: Synthetic oligonucleotide
ucuagucuuccugacagug

SEQ ID NO: 3147589 - RNA, 19 nt, Artificial Sequence
  Description of Artificial Sequence: Synthetic oligonucleotide
ucaucucggggcaaagccc

SEQ ID NO: 3147590 - RNA, 19 nt, Artificial Sequence
  Description of Artificial Sequence: Synthetic oligonucleotide
aggucaaucacagcauagg

SEQ ID NO: 3147591 - RNA, 19 nt, Artificial Sequence
  Description of Artificial Sequence: Synthetic oligonucleotide
gaggaccagcucuacagag

SEQ ID NO: 3147592 - RNA, 19 nt, Artificial Sequence
  Description of Artificial Sequence: Synthetic oligonucleotide
guugugucuagucuuccug

SEQ ID NO: 3147593 - RNA, 19 nt, Artificial Sequence
  Description of Artificial Sequence: Synthetic oligonucleotide
gucaaucacagcauaggag

SEQ ID NO: 3147594 - RNA, 19 nt, Artificial Sequence
  Description of Artificial Sequence: Synthetic oligonucleotide
cagggugugggguaggccc

SEQ ID NO: 3147595 - RNA, 19 nt, Artificial Sequence
  Description of Artificial Sequence: Synthetic oligonucleotide
uugugucuagucuuccuga

SEQ ID NO: 3147596 - RNA, 19 nt, Artificial Sequence
  Description of Artificial Sequence: Synthetic oligonucleotide
aacagggugugggguaggc

SEQ ID NO: 3147597 - RNA, 19 nt, Artificial Sequence
  Description of Artificial Sequence: Synthetic oligonucleotide
gagucugagcuucgaacag

SEQ ID NO: 3147598 - RNA, 19 nt, Artificial Sequence
  Description of Artificial Sequence: Synthetic oligonucleotide
ugugggguaggcccaggag

SEQ ID NO: 3147599 - RNA, 19 nt, Artificial Sequence
  Description of Artificial Sequence: Synthetic oligonucleotide
cucuacagaggcagguccg

SEQ ID NO: 3147600 - RNA, 19 nt, Artificial Sequence
  Description of Artificial Sequence: Synthetic oligonucleotide
cuagucuuccugacagugc

SEQ ID NO: 3147601 - RNA, 19 nt, Artificial Sequence
  Description of Artificial Sequence: Synthetic oligonucleotide
cuucuugaggucaaucaca

SEQ ID NO: 3147602 - RNA, 19 nt, Artificial Sequence
  Description of Artificial Sequence: Synthetic oligonucleotide
agguccguacuguuguguc

SEQ ID NO: 3147603 - RNA, 19 nt, Artificial Sequence
  Description of Artificial Sequence: Synthetic oligonucleotide
uacuguugugucuagucuu

SEQ ID NO: 3147604 - RNA, 19 nt, Artificial Sequence
  Description of Artificial Sequence: Synthetic oligonucleotide
cuucgaacagggugugggg

SEQ ID NO: 3147605 - RNA, 19 nt, Artificial Sequence
  Description of Artificial Sequence: Synthetic oligonucleotide
ugugucuagucuuccugac

SEQ ID NO: 3147606 - RNA, 19 nt, Artificial Sequence
  Description of Artificial Sequence: Synthetic oligonucleotide
gaggucaaucacagcauag

SEQ ID NO: 3147607 - RNA, 19 nt, Artificial Sequence
  Description of Artificial Sequence: Synthetic oligonucleotide
aaagcccucugcagguugg

SEQ ID NO: 3147608 - RNA, 19 nt, Artificial Sequence
  Description of Artificial Sequence: Synthetic oligonucleotide
ugaggucaaucacagcaua

SEQ ID NO: 3147609 - RNA, 19 nt, Artificial Sequence
  Description of Artificial Sequence: Synthetic oligonucleotide
uguugugucuagucuuccu

SEQ ID NO: 3147610 - RNA, 19 nt, Artificial Sequence
  Description of Artificial Sequence: Synthetic oligonucleotide
acuguugugucuagucuuc

SEQ ID NO: 3147611 - RNA, 19 nt, Artificial Sequence
  Description of Artificial Sequence: Synthetic oligonucleotide
agucugagcuucgaacagg

SEQ ID NO: 3147612 - RNA, 19 nt, Artificial Sequence
  Description of Artificial Sequence: Synthetic oligonucleotide
uacagaggcagguccguac

SEQ ID NO: 3147613 - RNA, 19 nt, Artificial Sequence
  Description of Artificial Sequence: Synthetic oligonucleotide
cauaggagucugagcuucg

SEQ ID NO: 3147614 - RNA, 19 nt, Artificial Sequence
  Description of Artificial Sequence: Synthetic oligonucleotide
cacagcauaggagucugag

SEQ ID NO: 3147615 - RNA, 19 nt, Artificial Sequence
  Description of Artificial Sequence: Synthetic oligonucleotide
caaucacagcauaggaguc

SEQ ID NO: 3147616 - RNA, 19 nt, Artificial Sequence
  Description of Artificial Sequence: Synthetic oligonucleotide
ggaccagcucuacagaggc

SEQ ID NO: 3147617 - RNA, 19 nt, Artificial Sequence
  Description of Artificial Sequence: Synthetic oligonucleotide
cagcauaggagucugagcu

SEQ ID NO: 3147618 - RNA, 19 nt, Artificial Sequence
  Description of Artificial Sequence: Synthetic oligonucleotide
ggagucugagcuucgaaca

SEQ ID NO: 3147619 - RNA, 19 nt, Artificial Sequence
  Description of Artificial Sequence: Synthetic oligonucleotide
gcuucgaacaggguguggg

SEQ ID NO: 3147620 - RNA, 19 nt, Artificial Sequence
  Description of Artificial Sequence: Synthetic oligonucleotide
ucuugaggucaaucacagc

SEQ ID NO: 3147621 - RNA, 19 nt, Artificial Sequence
  Description of Artificial Sequence: Synthetic oligonucleotide
gggcaaagcccucugcagg

SEQ ID NO: 3147622 - RNA, 19 nt, Artificial Sequence
  Description of Artificial Sequence: Synthetic oligonucleotide
uucgaacaggguguggggu

SEQ ID NO: 3147623 - RNA, 19 nt, Artificial Sequence
  Description of Artificial Sequence: Synthetic oligonucleotide
agguuggacauggccacgg

SEQ ID NO: 3147624 - RNA, 19 nt, Artificial Sequence
  Description of Artificial Sequence: Synthetic oligonucleotide
ggucaaucacagcauagga

SEQ ID NO: 3147625 - RNA, 19 nt, Artificial Sequence
  Description of Artificial Sequence: Synthetic oligonucleotide
aggaccagcucuacagagg

SEQ ID NO: 3147626 - RNA, 19 nt, Artificial Sequence
  Description of Artificial Sequence: Synthetic oligonucleotide
uaggagucugagcuucgaa

SEQ ID NO: 3147627 - RNA, 19 nt, Artificial Sequence
  Description of Artificial Sequence: Synthetic oligonucleotide
acagugccaucaucucggg

SEQ ID NO: 3147628 - RNA, 19 nt, Artificial Sequence
  Description of Artificial Sequence: Synthetic oligonucleotide
gcucuacagaggcaggucc

SEQ ID NO: 3147629 - RNA, 19 nt, Artificial Sequence
  Description of Artificial Sequence: Synthetic oligonucleotide
agcucuacagaggcagguc

SEQ ID NO: 3147630 - RNA, 19 nt, Artificial Sequence
  Description of Artificial Sequence: Synthetic oligonucleotide
acagggugugggguaggcc

SEQ ID NO: 3147631 - RNA, 19 nt, Artificial Sequence
  Description of Artificial Sequence: Synthetic oligonucleotide
ucgaacaggguguggggua

SEQ ID NO: 3147632 - RNA, 19 nt, Artificial Sequence
  Description of Artificial Sequence: Synthetic oligonucleotide
ucuacagaggcagguccgu

SEQ ID NO: 3147633 - RNA, 19 nt, Artificial Sequence
  Description of Artificial Sequence: Synthetic oligonucleotide
caaagcccucugcagguug

SEQ ID NO: 3147634 - RNA, 19 nt, Artificial Sequence
  Description of Artificial Sequence: Synthetic oligonucleotide
guuggacauggccacgguc

SEQ ID NO: 3147635 - RNA, 19 nt, Artificial Sequence
  Description of Artificial Sequence: Synthetic oligonucleotide
cauggccacggucuucuug

SEQ ID NO: 3147636 - RNA, 19 nt, Artificial Sequence
  Description of Artificial Sequence: Synthetic oligonucleotide
ucugagcuucgaacagggu

SEQ ID NO: 3147637 - RNA, 19 nt, Artificial Sequence
  Description of Artificial Sequence: Synthetic oligonucleotide
uccguacuguugugucuag

SEQ ID NO: 3147638 - RNA, 19 nt, Artificial Sequence
  Description of Artificial Sequence: Synthetic oligonucleotide
caucaucucggggcaaagc

SEQ ID NO: 3147639 - RNA, 19 nt, Artificial Sequence
  Description of Artificial Sequence: Synthetic oligonucleotide
guacuguugugucuagucu

SEQ ID NO: 3147640 - RNA, 19 nt, Artificial Sequence
  Description of Artificial Sequence: Synthetic oligonucleotide
ucggggcaaagcccucugc

SEQ ID NO: 3147641 - RNA, 19 nt, Artificial Sequence
  Description of Artificial Sequence: Synthetic oligonucleotide
agcauaggagucugagcuu

SEQ ID NO: 3147642 - RNA, 19 nt, Artificial Sequence
  Description of Artificial Sequence: Synthetic oligonucleotide
uccugacagugccaucauc

SEQ ID NO: 3147643 - RNA, 19 nt, Artificial Sequence
  Description of Artificial Sequence: Synthetic oligonucleotide
agaggcagguccguacugu

SEQ ID NO: 3147644 - RNA, 19 nt, Artificial Sequence
  Description of Artificial Sequence: Synthetic oligonucleotide
gugucuagucuuccugaca

SEQ ID NO: 3147645 - RNA, 19 nt, Artificial Sequence
  Description of Artificial Sequence: Synthetic oligonucleotide
cuguugugucuagucuucc

SEQ ID NO: 3147646 - RNA, 19 nt, Artificial Sequence
  Description of Artificial Sequence: Synthetic oligonucleotide
uuccugacagugccaucau

SEQ ID NO: 3147647 - RNA, 19 nt, Artificial Sequence
  Description of Artificial Sequence: Synthetic oligonucleotide
uggacauggccacggucuu

SEQ ID NO: 3147648 - RNA, 19 nt, Artificial Sequence
  Description of Artificial Sequence: Synthetic oligonucleotide
gaacagggugugggguagg

SEQ ID NO: 3147649 - RNA, 19 nt, Artificial Sequence
  Description of Artificial Sequence: Synthetic oligonucleotide
cagugccaucaucucgggg

SEQ ID NO: 3147650 - RNA, 19 nt, Artificial Sequence
  Description of Artificial Sequence: Synthetic oligonucleotide
auaggagucugagcuucga

SEQ ID NO: 3147651 - RNA, 19 nt, Artificial Sequence
  Description of Artificial Sequence: Synthetic oligonucleotide
gacauggccacggucuucu

SEQ ID NO: 3147652 - RNA, 19 nt, Artificial Sequence
  Description of Artificial Sequence: Synthetic oligonucleotide
gccacggucuucuugaggu

SEQ ID NO: 3147653 - RNA, 19 nt, Artificial Sequence
  Description of Artificial Sequence: Synthetic oligonucleotide
ucuuccugacagugccauc

SEQ ID NO: 3147654 - RNA, 19 nt, Artificial Sequence
  Description of Artificial Sequence: Synthetic oligonucleotide
gugccaucaucucggggca

SEQ ID NO: 3147655 - RNA, 19 nt, Artificial Sequence
  Description of Artificial Sequence: Synthetic oligonucleotide
gcauaggagucugagcuuc

SEQ ID NO: 3147656 - RNA, 19 nt, Artificial Sequence
  Description of Artificial Sequence: Synthetic oligonucleotide
gagcuucgaacagggugug

SEQ ID NO: 3147657 - RNA, 19 nt, Artificial Sequence
  Description of Artificial Sequence: Synthetic oligonucleotide
cagaggcagguccguacug

SEQ ID NO: 3147658 - RNA, 19 nt, Artificial Sequence
  Description of Artificial Sequence: Synthetic oligonucleotide
cacggucuucuugagguca

SEQ ID NO: 3147659 - RNA, 19 nt, Artificial Sequence
  Description of Artificial Sequence: Synthetic oligonucleotide
caucucggggcaaagcccu

SEQ ID NO: 3147660 - RNA, 19 nt, Artificial Sequence
  Description of Artificial Sequence: Synthetic oligonucleotide
ucucggggcaaagcccucu

SEQ ID NO: 3147661 - RNA, 19 nt, Artificial Sequence
  Description of Artificial Sequence: Synthetic oligonucleotide
agcccucugcagguuggac

SEQ ID NO: 3147662 - RNA, 19 nt, Artificial Sequence
  Description of Artificial Sequence: Synthetic oligonucleotide
uggccacggucuucuugag

SEQ ID NO: 3147663 - RNA, 19 nt, Artificial Sequence
  Description of Artificial Sequence: Synthetic oligonucleotide
agcuucgaacagggugugg

SEQ ID NO: 3147664 - RNA, 19 nt, Artificial Sequence
  Description of Artificial Sequence: Synthetic oligonucleotide
cagguuggacauggccacg

SEQ ID NO: 3147665 - RNA, 19 nt, Artificial Sequence
  Description of Artificial Sequence: Synthetic oligonucleotide
ggccacggucuucuugagg

SEQ ID NO: 3147666 - RNA, 19 nt, Artificial Sequence
  Description of Artificial Sequence: Synthetic oligonucleotide
cucggggcaaagcccucug

SEQ ID NO: 3147667 - RNA, 19 nt, Artificial Sequence
  Description of Artificial Sequence: Synthetic oligonucleotide
ggcagguccguacuguugu

SEQ ID NO: 3147668 - RNA, 19 nt, Artificial Sequence
  Description of Artificial Sequence: Synthetic oligonucleotide
guccguacuguugugucua

SEQ ID NO: 3147669 - RNA, 19 nt, Artificial Sequence
  Description of Artificial Sequence: Synthetic oligonucleotide
aagcccucugcagguugga

SEQ ID NO: 3147670 - RNA, 19 nt, Artificial Sequence
  Description of Artificial Sequence: Synthetic oligonucleotide
aggcagguccguacuguug

SEQ ID NO: 3147671 - RNA, 19 nt, Artificial Sequence
  Description of Artificial Sequence: Synthetic oligonucleotide
ccagcucuacagaggcagg

SEQ ID NO: 3147672 - RNA, 19 nt, Artificial Sequence
  Description of Artificial Sequence: Synthetic oligonucleotide
ggucuucuugaggucaauc

SEQ ID NO: 3147673 - RNA, 19 nt, Artificial Sequence
  Description of Artificial Sequence: Synthetic oligonucleotide
gcccucugcagguuggaca

SEQ ID NO: 3147674 - RNA, 19 nt, Artificial Sequence
  Description of Artificial Sequence: Synthetic oligonucleotide
agucuuccugacagugcca

SEQ ID NO: 3147675 - RNA, 19 nt, Artificial Sequence
  Description of Artificial Sequence: Synthetic oligonucleotide
ggcaaagcccucugcaggu

SEQ ID NO: 3147676 - RNA, 19 nt, Artificial Sequence
  Description of Artificial Sequence: Synthetic oligonucleotide
agggugugggguaggccca

SEQ ID NO: 3147677 - RNA, 19 nt, Artificial Sequence
  Description of Artificial Sequence: Synthetic oligonucleotide
aucucggggcaaagcccuc

SEQ ID NO: 3147678 - RNA, 19 nt, Artificial Sequence
  Description of Artificial Sequence: Synthetic oligonucleotide
gucuagucuuccugacagu

SEQ ID NO: 3147679 - RNA, 19 nt, Artificial Sequence
  Description of Artificial Sequence: Synthetic oligonucleotide
gucuuccugacagugccau

SEQ ID NO: 3147680 - RNA, 19 nt, Artificial Sequence
  Description of Artificial Sequence: Synthetic oligonucleotide
gcagguccguacuguugug

SEQ ID NO: 3147681 - RNA, 19 nt, Artificial Sequence
  Description of Artificial Sequence: Synthetic oligonucleotide
acggucuucuugaggucaa

SEQ ID NO: 3147682 - RNA, 19 nt, Artificial Sequence
  Description of Artificial Sequence: Synthetic oligonucleotide
gaggcagguccguacuguu

SEQ ID NO: 3147683 - RNA, 19 nt, Artificial Sequence
  Description of Artificial Sequence: Synthetic oligonucleotide
gguccguacuguugugucu

SEQ ID NO: 3147684 - RNA, 19 nt, Artificial Sequence
  Description of Artificial Sequence: Synthetic oligonucleotide
ugccaucaucucggggcaa

SEQ ID NO: 3147685 - RNA, 19 nt, Artificial Sequence
  Description of Artificial Sequence: Synthetic oligonucleotide
cgaacagggugugggguag

SEQ ID NO: 3147686 - RNA, 19 nt, Artificial Sequence
  Description of Artificial Sequence: Synthetic oligonucleotide
ccaucaucucggggcaaag

SEQ ID NO: 3147687 - RNA, 19 nt, Artificial Sequence
  Description of Artificial Sequence: Synthetic oligonucleotide
cagcucuacagaggcaggu

SEQ ID NO: 3147688 - RNA, 19 nt, Artificial Sequence
  Description of Artificial Sequence: Synthetic oligonucleotide
cuacagaggcagguccgua

SEQ ID NO: 3147689 - RNA, 19 nt, Artificial Sequence
  Description of Artificial Sequence: Synthetic oligonucleotide
ccacggucuucuugagguc

SEQ ID NO: 3147690 - RNA, 19 nt, Artificial Sequence
  Description of Artificial Sequence: Synthetic oligonucleotide
cagguccguacuguugugu

SEQ ID NO: 3147691 - RNA, 19 nt, Artificial Sequence
  Description of Artificial Sequence: Synthetic oligonucleotide
gggugugggguaggcccag

SEQ ID NO: 3147692 - RNA, 19 nt, Artificial Sequence
  Description of Artificial Sequence: Synthetic oligonucleotide
ggacauggccacggucuuc

SEQ ID NO: 3147693 - RNA, 19 nt, Artificial Sequence
  Description of Artificial Sequence: Synthetic oligonucleotide
gguuggacauggccacggu

SEQ ID NO: 3147694 - RNA, 19 nt, Artificial Sequence
  Description of Artificial Sequence: Synthetic oligonucleotide
gccaucaucucggggcaaa

SEQ ID NO: 3147695 - RNA, 19 nt, Artificial Sequence
  Description of Artificial Sequence: Synthetic oligonucleotide
cggggcaaagcccucugca

SEQ ID NO: 3147696 - RNA, 19 nt, Artificial Sequence
  Description of Artificial Sequence: Synthetic oligonucleotide
ccucugcagguuggacaug

SEQ ID NO: 3147697 - RNA, 19 nt, Artificial Sequence
  Description of Artificial Sequence: Synthetic oligonucleotide
gcaaagcccucugcagguu

SEQ ID NO: 3147698 - RNA, 19 nt, Artificial Sequence
  Description of Artificial Sequence: Synthetic oligonucleotide
ccguacuguugugucuagu

SEQ ID NO: 3147699 - RNA, 19 nt, Artificial Sequence
  Description of Artificial Sequence: Synthetic oligonucleotide
aaguugcccacuuugaagg

SEQ ID NO: 3147700 - RNA, 19 nt, Artificial Sequence
  Description of Artificial Sequence: Synthetic oligonucleotide
gaaggugcgaccauucugg

SEQ ID NO: 3147701 - RNA, 19 nt, Artificial Sequence
  Description of Artificial Sequence: Synthetic oligonucleotide
gaaguugcccacuuugaag

SEQ ID NO: 3147702 - RNA, 19 nt, Artificial Sequence
  Description of Artificial Sequence: Synthetic oligonucleotide
ugaaggugcgaccauucug

SEQ ID NO: 3147703 - RNA, 19 nt, Artificial Sequence
  Description of Artificial Sequence: Synthetic oligonucleotide
agugucacugcugaagccg

SEQ ID NO: 3147704 - RNA, 19 nt, Artificial Sequence
  Description of Artificial Sequence: Synthetic oligonucleotide
aagucugguagugucacug

SEQ ID NO: 3147705 - RNA, 19 nt, Artificial Sequence
  Description of Artificial Sequence: Synthetic oligonucleotide
ggugcgaccauucuggccc

SEQ ID NO: 3147706 - RNA, 19 nt, Artificial Sequence
  Description of Artificial Sequence: Synthetic oligonucleotide
agucugguagugucacugc

SEQ ID NO: 3147707 - RNA, 19 nt, Artificial Sequence
  Description of Artificial Sequence: Synthetic oligonucleotide
aaggugcgaccauucuggc

SEQ ID NO: 3147708 - RNA, 19 nt, Artificial Sequence
  Description of Artificial Sequence: Synthetic oligonucleotide
ucugguagugucacugcug

SEQ ID NO: 3147709 - RNA, 19 nt, Artificial Sequence
  Description of Artificial Sequence: Synthetic oligonucleotide
uuugaaggugcgaccauuc

SEQ ID NO: 3147710 - RNA, 19 nt, Artificial Sequence
  Description of Artificial Sequence: Synthetic oligonucleotide
uugcccacuuugaaggugc

SEQ ID NO: 3147711 - RNA, 19 nt, Artificial Sequence
  Description of Artificial Sequence: Synthetic oligonucleotide
cucggaaucugucuccccg

SEQ ID NO: 3147712 - RNA, 19 nt, Artificial Sequence
  Description of Artificial Sequence: Synthetic oligonucleotide
gaaucugucuccccgggca

SEQ ID NO: 3147713 - RNA, 19 nt, Artificial Sequence
  Description of Artificial Sequence: Synthetic oligonucleotide
aaucugucuccccgggcag

SEQ ID NO: 3147714 - RNA, 19 nt, Artificial Sequence
  Description of Artificial Sequence: Synthetic oligonucleotide
uucuggcccuuccagguag

SEQ ID NO: 3147715 - RNA, 19 nt, Artificial Sequence
  Description of Artificial Sequence: Synthetic oligonucleotide
accauucuggcccuuccag

SEQ ID NO: 3147716 - RNA, 19 nt, Artificial Sequence
  Description of Artificial Sequence: Synthetic oligonucleotide
uaugcuuccucggaaucug

SEQ ID NO: 3147717 - RNA, 19 nt, Artificial Sequence
  Description of Artificial Sequence: Synthetic oligonucleotide
ucggaaucugucuccccgg

SEQ ID NO: 3147718 - RNA, 19 nt, Artificial Sequence
  Description of Artificial Sequence: Synthetic oligonucleotide
uggcgaagccccaagucug

SEQ ID NO: 3147719 - RNA, 19 nt, Artificial Sequence
  Description of Artificial Sequence: Synthetic oligonucleotide
ucuaugcuuccucggaauc

SEQ ID NO: 3147720 - RNA, 19 nt, Artificial Sequence
  Description of Artificial Sequence: Synthetic oligonucleotide
acagguggcuggcgaagcc

SEQ ID NO: 3147721 - RNA, 19 nt, Artificial Sequence
  Description of Artificial Sequence: Synthetic oligonucleotide
aagccgggaaguugcccac

SEQ ID NO: 3147722 - RNA, 19 nt, Artificial Sequence
  Description of Artificial Sequence: Synthetic oligonucleotide
gaagccgggaaguugccca

SEQ ID NO: 3147723 - RNA, 19 nt, Artificial Sequence
  Description of Artificial Sequence: Synthetic oligonucleotide
aggugcgaccauucuggcc

SEQ ID NO: 3147724 - RNA, 19 nt, Artificial Sequence
  Description of Artificial Sequence: Synthetic oligonucleotide
gguagugucacugcugaag

SEQ ID NO: 3147725 - RNA, 19 nt, Artificial Sequence
  Description of Artificial Sequence: Synthetic oligonucleotide
agguaguggugucagggcu

SEQ ID NO: 3147726 - RNA, 19 nt, Artificial Sequence
  Description of Artificial Sequence: Synthetic oligonucleotide
uugaaggugcgaccauucu

SEQ ID NO: 3147727 - RNA, 19 nt, Artificial Sequence
  Description of Artificial Sequence: Synthetic oligonucleotide
acugcugaagccgggaagu

SEQ ID NO: 3147728 - RNA, 19 nt, Artificial Sequence
  Description of Artificial Sequence: Synthetic oligonucleotide
uuccucggaaucugucucc

SEQ ID NO: 3147729 - RNA, 19 nt, Artificial Sequence
  Description of Artificial Sequence: Synthetic oligonucleotide
ugucacugcugaagccggg

SEQ ID NO: 3147730 - RNA, 19 nt, Artificial Sequence
  Description of Artificial Sequence: Synthetic oligonucleotide
aucuaugcuuccucggaau

SEQ ID NO: 3147731 - RNA, 19 nt, Artificial Sequence
  Description of Artificial Sequence: Synthetic oligonucleotide
cagguaguggugucagggc

SEQ ID NO: 3147732 - RNA, 19 nt, Artificial Sequence
  Description of Artificial Sequence: Synthetic oligonucleotide
gccuccaugggcuggacag

SEQ ID NO: 3147733 - RNA, 19 nt, Artificial Sequence
  Description of Artificial Sequence: Synthetic oligonucleotide
ggcaggggagccuccaugg

SEQ ID NO: 3147734 - RNA, 19 nt, Artificial Sequence
  Description of Artificial Sequence: Synthetic oligonucleotide
ugucuccccgggcagggga

SEQ ID NO: 3147735 - RNA, 19 nt, Artificial Sequence
  Description of Artificial Sequence: Synthetic oligonucleotide
uccagguaguggugucagg

SEQ ID NO: 3147736 - RNA, 19 nt, Artificial Sequence
  Description of Artificial Sequence: Synthetic oligonucleotide
caugggcuggacagguggc

SEQ ID NO: 3147737 - RNA, 19 nt, Artificial Sequence
  Description of Artificial Sequence: Synthetic oligonucleotide
ugcugaagccgggaaguug

SEQ ID NO: 3147738 - RNA, 19 nt, Artificial Sequence
  Description of Artificial Sequence: Synthetic oligonucleotide
ugcccacuuugaaggugcg

SEQ ID NO: 3147739 - RNA, 19 nt, Artificial Sequence
  Description of Artificial Sequence: Synthetic oligonucleotide
agguggcuggcgaagcccc

SEQ ID NO: 3147740 - RNA, 19 nt, Artificial Sequence
  Description of Artificial Sequence: Synthetic oligonucleotide
uggcccuuccagguagugg

SEQ ID NO: 3147741 - RNA, 19 nt, Artificial Sequence
  Description of Artificial Sequence: Synthetic oligonucleotide
ucacugcugaagccgggaa

SEQ ID NO: 3147742 - RNA, 19 nt, Artificial Sequence
  Description of Artificial Sequence: Synthetic oligonucleotide
gcugaagccgggaaguugc

SEQ ID NO: 3147743 - RNA, 19 nt, Artificial Sequence
  Description of Artificial Sequence: Synthetic oligonucleotide
gugucacugcugaagccgg

SEQ ID NO: 3147744 - RNA, 19 nt, Artificial Sequence
  Description of Artificial Sequence: Synthetic oligonucleotide
aguugcccacuuugaaggu

SEQ ID NO: 3147745 - RNA, 19 nt, Artificial Sequence
  Description of Artificial Sequence: Synthetic oligonucleotide
ccagguaguggugucaggg

SEQ ID NO: 3147746 - RNA, 19 nt, Artificial Sequence
  Description of Artificial Sequence: Synthetic oligonucleotide
ugaagccgggaaguugccc

SEQ ID NO: 3147747 - RNA, 19 nt, Artificial Sequence
  Description of Artificial Sequence: Synthetic oligonucleotide
uccucggaaucugucuccc

SEQ ID NO: 3147748 - RNA, 19 nt, Artificial Sequence
  Description of Artificial Sequence: Synthetic oligonucleotide
ccaugggcuggacaggugg

SEQ ID NO: 3147749 - RNA, 19 nt, Artificial Sequence
  Description of Artificial Sequence: Synthetic oligonucleotide
aagccccaagucugguagu

SEQ ID NO: 3147750 - RNA, 19 nt, Artificial Sequence
  Description of Artificial Sequence: Synthetic oligonucleotide
cacuuugaaggugcgacca

SEQ ID NO: 3147751 - RNA, 19 nt, Artificial Sequence
  Description of Artificial Sequence: Synthetic oligonucleotide
guugcccacuuugaaggug

SEQ ID NO: 3147752 - RNA, 19 nt, Artificial Sequence
  Description of Artificial Sequence: Synthetic oligonucleotide
acuuugaaggugcgaccau

SEQ ID NO: 3147753 - RNA, 19 nt, Artificial Sequence
  Description of Artificial Sequence: Synthetic oligonucleotide
uccaugggcuggacaggug

SEQ ID NO: 3147754 - RNA, 19 nt, Artificial Sequence
  Description of Artificial Sequence: Synthetic oligonucleotide
uggcuggcgaagccccaag

SEQ ID NO: 3147755 - RNA, 19 nt, Artificial Sequence
  Description of Artificial Sequence: Synthetic oligonucleotide
gaccauucuggcccuucca

SEQ ID NO: 3147756 - RNA, 19 nt, Artificial Sequence
  Description of Artificial Sequence: Synthetic oligonucleotide
ccauucuggcccuuccagg

SEQ ID NO: 3147757 - RNA, 19 nt, Artificial Sequence
  Description of Artificial Sequence: Synthetic oligonucleotide
cugaagccgggaaguugcc

SEQ ID NO: 3147758 - RNA, 19 nt, Artificial Sequence
  Description of Artificial Sequence: Synthetic oligonucleotide
cccacuuugaaggugcgac

SEQ ID NO: 3147759 - RNA, 19 nt, Artificial Sequence
  Description of Artificial Sequence: Synthetic oligonucleotide
cauucuggcccuuccaggu

SEQ ID NO: 3147760 - RNA, 19 nt, Artificial Sequence
  Description of Artificial Sequence: Synthetic oligonucleotide
cccaucuaugcuuccucgg

SEQ ID NO: 3147761 - RNA, 19 nt, Artificial Sequence
  Description of Artificial Sequence: Synthetic oligonucleotide
caucuaugcuuccucggaa

SEQ ID NO: 3147762 - RNA, 19 nt, Artificial Sequence
  Description of Artificial Sequence: Synthetic oligonucleotide
aucugucuccccgggcagg

SEQ ID NO: 3147763 - RNA, 19 nt, Artificial Sequence
  Description of Artificial Sequence: Synthetic oligonucleotide
cagguggcuggcgaagccc

SEQ ID NO: 3147764 - RNA, 19 nt, Artificial Sequence
  Description of Artificial Sequence: Synthetic oligonucleotide
gguaguggugucagggcug

SEQ ID NO: 3147765 - RNA, 19 nt, Artificial Sequence
  Description of Artificial Sequence: Synthetic oligonucleotide
ucuggcccuuccagguagu

SEQ ID NO: 3147766 - RNA, 19 nt, Artificial Sequence
  Description of Artificial Sequence: Synthetic oligonucleotide
agccccaagucugguagug

SEQ ID NO: 3147767 - RNA, 19 nt, Artificial Sequence
  Description of Artificial Sequence: Synthetic oligonucleotide
ccacuuugaaggugcgacc

SEQ ID NO: 3147768 - RNA, 19 nt, Artificial Sequence
  Description of Artificial Sequence: Synthetic oligonucleotide
ggaaucugucuccccgggc

SEQ ID NO: 3147769 - RNA, 19 nt, Artificial Sequence
  Description of Artificial Sequence: Synthetic oligonucleotide
ccccaucuaugcuuccucg

SEQ ID NO: 3147770 - RNA, 19 nt, Artificial Sequence
  Description of Artificial Sequence: Synthetic oligonucleotide
cuggcgaagccccaagucu

SEQ ID NO: 3147771 - RNA, 19 nt, Artificial Sequence
  Description of Artificial Sequence: Synthetic oligonucleotide
auucuggcccuuccaggua

SEQ ID NO: 3147772 - RNA, 19 nt, Artificial Sequence
  Description of Artificial Sequence: Synthetic oligonucleotide
ccaagucugguagugucac

SEQ ID NO: 3147773 - RNA, 19 nt, Artificial Sequence
  Description of Artificial Sequence: Synthetic oligonucleotide
gucugguagugucacugcu

SEQ ID NO: 3147774 - RNA, 19 nt, Artificial Sequence
  Description of Artificial Sequence: Synthetic oligonucleotide
gcuggcgaagccccaaguc

SEQ ID NO: 3147775 - RNA, 19 nt, Artificial Sequence
  Description of Artificial Sequence: Synthetic oligonucleotide
ggcccuuccagguaguggu

SEQ ID NO: 3147776 - RNA, 19 nt, Artificial Sequence
  Description of Artificial Sequence: Synthetic oligonucleotide
cgggaaguugcccacuuug

SEQ ID NO: 3147777 - RNA, 19 nt, Artificial Sequence
  Description of Artificial Sequence: Synthetic oligonucleotide
cuuccagguagugguguca

SEQ ID NO: 3147778 - RNA, 19 nt, Artificial Sequence
  Description of Artificial Sequence: Synthetic oligonucleotide
agccuccaugggcuggaca

SEQ ID NO: 3147779 - RNA, 19 nt, Artificial Sequence
  Description of Artificial Sequence: Synthetic oligonucleotide
ggcgaagccccaagucugg

SEQ ID NO: 3147780 - RNA, 19 nt, Artificial Sequence
  Description of Artificial Sequence: Synthetic oligonucleotide
gucacugcugaagccggga

SEQ ID NO: 3147781 - RNA, 19 nt, Artificial Sequence
  Description of Artificial Sequence: Synthetic oligonucleotide
cuaugcuuccucggaaucu

SEQ ID NO: 3147782 - RNA, 19 nt, Artificial Sequence
  Description of Artificial Sequence: Synthetic oligonucleotide
ccccaagucugguaguguc

SEQ ID NO: 3147783 - RNA, 19 nt, Artificial Sequence
  Description of Artificial Sequence: Synthetic oligonucleotide
ccaucuaugcuuccucgga

SEQ ID NO: 3147784 - RNA, 19 nt, Artificial Sequence
  Description of Artificial Sequence: Synthetic oligonucleotide
gggaaguugcccacuuuga

SEQ ID NO: 3147785 - RNA, 19 nt, Artificial Sequence
  Description of Artificial Sequence: Synthetic oligonucleotide
gggcaggggagccuccaug

SEQ ID NO: 3147786 - RNA, 19 nt, Artificial Sequence
  Description of Artificial Sequence: Synthetic oligonucleotide
gucuccccgggcaggggag

SEQ ID NO: 3147787 - RNA, 19 nt, Artificial Sequence
  Description of Artificial Sequence: Synthetic oligonucleotide
ccuuccagguagugguguc

SEQ ID NO: 3147788 - RNA, 19 nt, Artificial Sequence
  Description of Artificial Sequence: Synthetic oligonucleotide
cccaagucugguaguguca

SEQ ID NO: 3147789 - RNA, 19 nt, Artificial Sequence
  Description of Artificial Sequence: Synthetic oligonucleotide
cggaaucugucuccccggg

SEQ ID NO: 3147790 - RNA, 19 nt, Artificial Sequence
  Description of Artificial Sequence: Synthetic oligonucleotide
augcuuccucggaaucugu

SEQ ID NO: 3147791 - RNA, 19 nt, Artificial Sequence
  Description of Artificial Sequence: Synthetic oligonucleotide
cuggcccuuccagguagug

SEQ ID NO: 3147792 - RNA, 19 nt, Artificial Sequence
  Description of Artificial Sequence: Synthetic oligonucleotide
cuuugaaggugcgaccauu

SEQ ID NO: 3147793 - RNA, 19 nt, Artificial Sequence
  Description of Artificial Sequence: Synthetic oligonucleotide
ccucggaaucugucucccc

SEQ ID NO: 3147794 - RNA, 19 nt, Artificial Sequence
  Description of Artificial Sequence: Synthetic oligonucleotide
ccuccaugggcuggacagg

SEQ ID NO: 3147795 - RNA, 19 nt, Artificial Sequence
  Description of Artificial Sequence: Synthetic oligonucleotide
cgaccauucuggcccuucc

SEQ ID NO: 3147796 - RNA, 19 nt, Artificial Sequence
  Description of Artificial Sequence: Synthetic oligonucleotide
caagucugguagugucacu

SEQ ID NO: 3147797 - RNA, 19 nt, Artificial Sequence
  Description of Artificial Sequence: Synthetic oligonucleotide
agccgggaaguugcccacu

SEQ ID NO: 3147798 - RNA, 19 nt, Artificial Sequence
  Description of Artificial Sequence: Synthetic oligonucleotide
cuccaugggcuggacaggu

SEQ ID NO: 3147799 - RNA, 19 nt, Artificial Sequence
  Description of Artificial Sequence: Synthetic oligonucleotide
ggggagccuccaugggcug

SEQ ID NO: 3147800 - RNA, 19 nt, Artificial Sequence
  Description of Artificial Sequence: Synthetic oligonucleotide
ggagccuccaugggcugga

SEQ ID NO: 3147801 - RNA, 19 nt, Artificial Sequence
  Description of Artificial Sequence: Synthetic oligonucleotide
guggcuggcgaagccccaa

SEQ ID NO: 3147802 - RNA, 19 nt, Artificial Sequence
  Description of Artificial Sequence: Synthetic oligonucleotide
gagccuccaugggcuggac

SEQ ID NO: 3147803 - RNA, 19 nt, Artificial Sequence
  Description of Artificial Sequence: Synthetic oligonucleotide
gugcgaccauucuggcccu

SEQ ID NO: 3147804 - RNA, 19 nt, Artificial Sequence
  Description of Artificial Sequence: Synthetic oligonucleotide
gcccuuccagguaguggug

SEQ ID NO: 3147805 - RNA, 19 nt, Artificial Sequence
  Description of Artificial Sequence: Synthetic oligonucleotide
gcgaccauucuggcccuuc

SEQ ID NO: 3147806 - RNA, 19 nt, Artificial Sequence
  Description of Artificial Sequence: Synthetic oligonucleotide
ggcuggcgaagccccaagu

SEQ ID NO: 3147807 - RNA, 19 nt, Artificial Sequence
  Description of Artificial Sequence: Synthetic oligonucleotide
ugcgaccauucuggcccuu

SEQ ID NO: 3147808 - RNA, 19 nt, Artificial Sequence
  Description of Artificial Sequence: Synthetic oligonucleotide
gcccacuuugaaggugcga

SEQ ID NO: 3147809 - RNA, 19 nt, Artificial Sequence
  Description of Artificial Sequence: Synthetic oligonucleotide
gguggcuggcgaagcccca

SEQ ID NO: 3147810 - RNA, 19 nt, Artificial Sequence
  Description of Artificial Sequence: Synthetic oligonucleotide
cccgggcaggggagccucc

SEQ ID NO: 3147811 - RNA, 19 nt, Artificial Sequence
  Description of Artificial Sequence: Synthetic oligonucleotide
gccgggaaguugcccacuu

SEQ ID NO: 3147812 - RNA, 19 nt, Artificial Sequence
  Description of Artificial Sequence: Synthetic oligonucleotide
cugcugaagccgggaaguu

SEQ ID NO: 3147813 - RNA, 19 nt, Artificial Sequence
  Description of Artificial Sequence: Synthetic oligonucleotide
gccccaagucugguagugu

SEQ ID NO: 3147814 - RNA, 19 nt, Artificial Sequence
  Description of Artificial Sequence: Synthetic oligonucleotide
cccuuccagguaguggugu

SEQ ID NO: 3147815 - RNA, 19 nt, Artificial Sequence
  Description of Artificial Sequence: Synthetic oligonucleotide
ccccgggcaggggagccuc

SEQ ID NO: 3147816 - RNA, 19 nt, Artificial Sequence
  Description of Artificial Sequence: Synthetic oligonucleotide
gcgaagccccaagucuggu

SEQ ID NO: 3147817 - RNA, 19 nt, Artificial Sequence
  Description of Artificial Sequence: Synthetic oligonucleotide
ccgggcaggggagccucca

SEQ ID NO: 3147818 - RNA, 19 nt, Artificial Sequence
  Description of Artificial Sequence: Synthetic oligonucleotide
ccgggaaguugcccacuuu

SEQ ID NO: 3147819 - RNA, 19 nt, Artificial Sequence
  Description of Artificial Sequence: Synthetic oligonucleotide
cgggcaggggagccuccau

SEQ ID NO: 3147820 - RNA, 19 nt, Artificial Sequence
  Description of Artificial Sequence: Synthetic oligonucleotide
agugcaauuagcuagcuuc

SEQ ID NO: 3147821 - RNA, 19 nt, Artificial Sequence
  Description of Artificial Sequence: Synthetic oligonucleotide
uaaguggucauuauuagcu

SEQ ID NO: 3147822 - RNA, 19 nt, Artificial Sequence
  Description of Artificial Sequence: Synthetic oligonucleotide
uguacgguuguuaugagcu

SEQ ID NO: 3147823 - RNA, 19 nt, Artificial Sequence
  Description of Artificial Sequence: Synthetic oligonucleotide
ucauuauuagcucucccag

SEQ ID NO: 3147824 - RNA, 19 nt, Artificial Sequence
  Description of Artificial Sequence: Synthetic oligonucleotide
gaugaagucucccuaagug

SEQ ID NO: 3147825 - RNA, 19 nt, Artificial Sequence
  Description of Artificial Sequence: Synthetic oligonucleotide
guucagugcaauuagcuag

SEQ ID NO: 3147826 - RNA, 19 nt, Artificial Sequence
  Description of Artificial Sequence: Synthetic oligonucleotide
uaugguucagugcaauuag

SEQ ID NO: 3147827 - RNA, 19 nt, Artificial Sequence
  Description of Artificial Sequence: Synthetic oligonucleotide
cuaaguaugguucagugca

SEQ ID NO: 3147828 - RNA, 19 nt, Artificial Sequence
  Description of Artificial Sequence: Synthetic oligonucleotide
auuauuagcucucccagca

SEQ ID NO: 3147829 - RNA, 19 nt, Artificial Sequence
  Description of Artificial Sequence: Synthetic oligonucleotide
uacgaacuagcccuguacg

SEQ ID NO: 3147830 - RNA, 19 nt, Artificial Sequence
  Description of Artificial Sequence: Synthetic oligonucleotide
augaagucucccuaagugg

SEQ ID NO: 3147831 - RNA, 19 nt, Artificial Sequence
  Description of Artificial Sequence: Synthetic oligonucleotide
augagcucuccuuacacgg

SEQ ID NO: 3147832 - RNA, 19 nt, Artificial Sequence
  Description of Artificial Sequence: Synthetic oligonucleotide
uacacggccacgaugaagu

SEQ ID NO: 3147833 - RNA, 19 nt, Artificial Sequence
  Description of Artificial Sequence: Synthetic oligonucleotide
uuagcuagcuucuccaugu

SEQ ID NO: 3147834 - RNA, 19 nt, Artificial Sequence
  Description of Artificial Sequence: Synthetic oligonucleotide
aaguggucauuauuagcuc

SEQ ID NO: 3147835 - RNA, 19 nt, Artificial Sequence
  Description of Artificial Sequence: Synthetic oligonucleotide
ugaagucucccuaaguggu

SEQ ID NO: 3147836 - RNA, 19 nt, Artificial Sequence
  Description of Artificial Sequence: Synthetic oligonucleotide
uaugagcucuccuuacacg

SEQ ID NO: 3147837 - RNA, 19 nt, Artificial Sequence
  Description of Artificial Sequence: Synthetic oligonucleotide
uauuagcucucccagcaug

SEQ ID NO: 3147838 - RNA, 19 nt, Artificial Sequence
  Description of Artificial Sequence: Synthetic oligonucleotide
cuaaguggucauuauuagc

SEQ ID NO: 3147839 - RNA, 19 nt, Artificial Sequence
  Description of Artificial Sequence: Synthetic oligonucleotide
auguacgguuguuaugagc

SEQ ID NO: 3147840 - RNA, 19 nt, Artificial Sequence
  Description of Artificial Sequence: Synthetic oligonucleotide
uucagugcaauuagcuagc

SEQ ID NO: 3147841 - RNA, 19 nt, Artificial Sequence
  Description of Artificial Sequence: Synthetic oligonucleotide
uccuaaguaugguucagug

SEQ ID NO: 3147842 - RNA, 19 nt, Artificial Sequence
  Description of Artificial Sequence: Synthetic oligonucleotide
uuaugagcucuccuuacac

SEQ ID NO: 3147843 - RNA, 19 nt, Artificial Sequence
  Description of Artificial Sequence: Synthetic oligonucleotide
auggcuguuacgaacuagc

SEQ ID NO: 3147844 - RNA, 19 nt, Artificial Sequence
  Description of Artificial Sequence: Synthetic oligonucleotide
uguacgguugggacgagcu

SEQ ID NO: 3147845 - RNA, 19 nt, Artificial Sequence
  Description of Artificial Sequence: Synthetic oligonucleotide
uuacgaacuagcccuguac

SEQ ID NO: 3147846 - RNA, 19 nt, Artificial Sequence
  Description of Artificial Sequence: Synthetic oligonucleotide
auuagcuagcuucuccaug

SEQ ID NO: 3147847 - RNA, 19 nt, Artificial Sequence
  Description of Artificial Sequence: Synthetic oligonucleotide
cauuauuagcucucccagc

SEQ ID NO: 3147848 - RNA, 19 nt, Artificial Sequence
  Description of Artificial Sequence: Synthetic oligonucleotide
acgaacuagcccuguacgg

SEQ ID NO: 3147849 - RNA, 19 nt, Artificial Sequence
  Description of Artificial Sequence: Synthetic oligonucleotide
gucauuauuagcucuccca

SEQ ID NO: 3147850 - RNA, 19 nt, Artificial Sequence
  Description of Artificial Sequence: Synthetic oligonucleotide
aguggucauuauuagcucu

SEQ ID NO: 3147851 - RNA, 19 nt, Artificial Sequence
  Description of Artificial Sequence: Synthetic oligonucleotide
uguuaugagcucuccuuac

SEQ ID NO: 3147852 - RNA, 19 nt, Artificial Sequence
  Description of Artificial Sequence: Synthetic oligonucleotide
agcccuguacgguugggac

SEQ ID NO: 3147853 - RNA, 19 nt, Artificial Sequence
  Description of Artificial Sequence: Synthetic oligonucleotide
agcuagcuucuccauguac

SEQ ID NO: 3147854 - RNA, 19 nt, Artificial Sequence
  Description of Artificial Sequence: Synthetic oligonucleotide
ugcuccuaaguaugguuca

SEQ ID NO: 3147855 - RNA, 19 nt, Artificial Sequence
  Description of Artificial Sequence: Synthetic oligonucleotide
uccuuacacggccacgaug

SEQ ID NO: 3147856 - RNA, 19 nt, Artificial Sequence
  Description of Artificial Sequence: Synthetic oligonucleotide
caauuagcuagcuucucca

SEQ ID NO: 3147857 - RNA, 19 nt, Artificial Sequence
  Description of Artificial Sequence: Synthetic oligonucleotide
gcuagcuucuccauguacg

SEQ ID NO: 3147858 - RNA, 19 nt, Artificial Sequence
  Description of Artificial Sequence: Synthetic oligonucleotide
uggcuguuacgaacuagcc

SEQ ID NO: 3147859 - RNA, 19 nt, Artificial Sequence
  Description of Artificial Sequence: Synthetic oligonucleotide
uccauguacgguuguuaug

SEQ ID NO: 3147860 - RNA, 19 nt, Artificial Sequence
  Description of Artificial Sequence: Synthetic oligonucleotide
uacgguugggacgagcucu

SEQ ID NO: 3147861 - RNA, 19 nt, Artificial Sequence
  Description of Artificial Sequence: Synthetic oligonucleotide
ucuccuuacacggccacga

SEQ ID NO: 3147862 - RNA, 19 nt, Artificial Sequence
  Description of Artificial Sequence: Synthetic oligonucleotide
ugagcucuccuuacacggc

SEQ ID NO: 3147863 - RNA, 19 nt, Artificial Sequence
  Description of Artificial Sequence: Synthetic oligonucleotide
acgaugaagucucccuaag

SEQ ID NO: 3147864 - RNA, 19 nt, Artificial Sequence
  Description of Artificial Sequence: Synthetic oligonucleotide
gcuguuacgaacuagcccu

SEQ ID NO: 3147865 - RNA, 19 nt, Artificial Sequence
  Description of Artificial Sequence: Synthetic oligonucleotide
acggccacgaugaagucuc

SEQ ID NO: 3147866 - RNA, 19 nt, Artificial Sequence
  Description of Artificial Sequence: Synthetic oligonucleotide
augguucagugcaauuagc

SEQ ID NO: 3147867 - RNA, 19 nt, Artificial Sequence
  Description of Artificial Sequence: Synthetic oligonucleotide
gcaauuagcuagcuucucc

SEQ ID NO: 3147868 - RNA, 19 nt, Artificial Sequence
  Description of Artificial Sequence: Synthetic oligonucleotide
uaaguaugguucagugcaa

SEQ ID NO: 3147869 - RNA, 19 nt, Artificial Sequence
  Description of Artificial Sequence: Synthetic oligonucleotide
uacgguuguuaugagcucu

SEQ ID NO: 3147870 - RNA, 19 nt, Artificial Sequence
  Description of Artificial Sequence: Synthetic oligonucleotide
aagucucccuaagugguca

SEQ ID NO: 3147871 - RNA, 19 nt, Artificial Sequence
  Description of Artificial Sequence: Synthetic oligonucleotide
uuacacggccacgaugaag

SEQ ID NO: 3147872 - RNA, 19 nt, Artificial Sequence
  Description of Artificial Sequence: Synthetic oligonucleotide
agcuucuccauguacgguu

SEQ ID NO: 3147873 - RNA, 19 nt, Artificial Sequence
  Description of Artificial Sequence: Synthetic oligonucleotide
guuaugagcucuccuuaca

SEQ ID NO: 3147874 - RNA, 19 nt, Artificial Sequence
  Description of Artificial Sequence: Synthetic oligonucleotide
acuagcccuguacgguugg

SEQ ID NO: 3147875 - RNA, 19 nt, Artificial Sequence
  Description of Artificial Sequence: Synthetic oligonucleotide
acgagcucucccucuuugg

SEQ ID NO: 3147876 - RNA, 19 nt, Artificial Sequence
  Description of Artificial Sequence: Synthetic oligonucleotide
ccuaaguggucauuauuag

SEQ ID NO: 3147877 - RNA, 19 nt, Artificial Sequence
  Description of Artificial Sequence: Synthetic oligonucleotide
gacgagcucucccucuuug

SEQ ID NO: 3147878 - RNA, 19 nt, Artificial Sequence
  Description of Artificial Sequence: Synthetic oligonucleotide
ccuaaguaugguucagugc

SEQ ID NO: 3147879 - RNA, 19 nt, Artificial Sequence
  Description of Artificial Sequence: Synthetic oligonucleotide
ggcuguuacgaacuagccc

SEQ ID NO: 3147880 - RNA, 19 nt, Artificial Sequence
  Description of Artificial Sequence: Synthetic oligonucleotide
uuauuagcucucccagcau

SEQ ID NO: 3147881 - RNA, 19 nt, Artificial Sequence
  Description of Artificial Sequence: Synthetic oligonucleotide
uggucauuauuagcucucc

SEQ ID NO: 3147882 - RNA, 19 nt, Artificial Sequence
  Description of Artificial Sequence: Synthetic oligonucleotide
cagcauggcuguuacgaac

SEQ ID NO: 3147883 - RNA, 19 nt, Artificial Sequence
  Description of Artificial Sequence: Synthetic oligonucleotide
aaguaugguucagugcaau

SEQ ID NO: 3147884 - RNA, 19 nt, Artificial Sequence
  Description of Artificial Sequence: Synthetic oligonucleotide
guuguuaugagcucuccuu

SEQ ID NO: 3147885 - RNA, 19 nt, Artificial Sequence
  Description of Artificial Sequence: Synthetic oligonucleotide
cauguacgguuguuaugag

SEQ ID NO: 3147886 - RNA, 19 nt, Artificial Sequence
  Description of Artificial Sequence: Synthetic oligonucleotide
ucccuaaguggucauuauu

SEQ ID NO: 3147887 - RNA, 19 nt, Artificial Sequence
  Description of Artificial Sequence: Synthetic oligonucleotide
agcauggcuguuacgaacu

SEQ ID NO: 3147888 - RNA, 19 nt, Artificial Sequence
  Description of Artificial Sequence: Synthetic oligonucleotide
aguaugguucagugcaauu

SEQ ID NO: 3147889 - RNA, 19 nt, Artificial Sequence
  Description of Artificial Sequence: Synthetic oligonucleotide
guaugguucagugcaauua

SEQ ID NO: 3147890 - RNA, 19 nt, Artificial Sequence
  Description of Artificial Sequence: Synthetic oligonucleotide
ucucccuaaguggucauua

SEQ ID NO: 3147891 - RNA, 19 nt, Artificial Sequence
  Description of Artificial Sequence: Synthetic oligonucleotide
ccuuacacggccacgauga

SEQ ID NO: 3147892 - RNA, 19 nt, Artificial Sequence
  Description of Artificial Sequence: Synthetic oligonucleotide
agcucucccagcauggcug

SEQ ID NO: 3147893 - RNA, 19 nt, Artificial Sequence
  Description of Artificial Sequence: Synthetic oligonucleotide
cauggcuguuacgaacuag

SEQ ID NO: 3147894 - RNA, 19 nt, Artificial Sequence
  Description of Artificial Sequence: Synthetic oligonucleotide
aacuagcccuguacgguug

SEQ ID NO: 3147895 - RNA, 19 nt, Artificial Sequence
  Description of Artificial Sequence: Synthetic oligonucleotide
uuagcucucccagcauggc

SEQ ID NO: 3147896 - RNA, 19 nt, Artificial Sequence
  Description of Artificial Sequence: Synthetic oligonucleotide
ggucauuauuagcucuccc

SEQ ID NO: 3147897 - RNA, 19 nt, Artificial Sequence
  Description of Artificial Sequence: Synthetic oligonucleotide
ucuccauguacgguuguua

SEQ ID NO: 3147898 - RNA, 19 nt, Artificial Sequence
  Description of Artificial Sequence: Synthetic oligonucleotide
ugcaauuagcuagcuucuc

SEQ ID NO: 3147899 - RNA, 19 nt, Artificial Sequence
  Description of Artificial Sequence: Synthetic oligonucleotide
cuguuacgaacuagcccug

SEQ ID NO: 3147900 - RNA, 19 nt, Artificial Sequence
  Description of Artificial Sequence: Synthetic oligonucleotide
uguuacgaacuagcccugu

SEQ ID NO: 3147901 - RNA, 19 nt, Artificial Sequence
  Description of Artificial Sequence: Synthetic oligonucleotide
acgguuguuaugagcucuc

SEQ ID NO: 3147902 - RNA, 19 nt, Artificial Sequence
  Description of Artificial Sequence: Synthetic oligonucleotide
guggucauuauuagcucuc

SEQ ID NO: 3147903 - RNA, 19 nt, Artificial Sequence
  Description of Artificial Sequence: Synthetic oligonucleotide
uugggacgagcucucccuc

SEQ ID NO: 3147904 - RNA, 19 nt, Artificial Sequence
  Description of Artificial Sequence: Synthetic oligonucleotide
ccauguacgguuguuauga

SEQ ID NO: 3147905 - RNA, 19 nt, Artificial Sequence
  Description of Artificial Sequence: Synthetic oligonucleotide
ucagugcaauuagcuagcu

SEQ ID NO: 3147906 - RNA, 19 nt, Artificial Sequence
  Description of Artificial Sequence: Synthetic oligonucleotide
ugggacgagcucucccucu

SEQ ID NO: 3147907 - RNA, 19 nt, Artificial Sequence
  Description of Artificial Sequence: Synthetic oligonucleotide
cucccagcauggcuguuac

SEQ ID NO: 3147908 - RNA, 19 nt, Artificial Sequence
  Description of Artificial Sequence: Synthetic oligonucleotide
gaagucucccuaagugguc

SEQ ID NO: 3147909 - RNA, 19 nt, Artificial Sequence
  Description of Artificial Sequence: Synthetic oligonucleotide
guugggacgagcucucccu

SEQ ID NO: 3147910 - RNA, 19 nt, Artificial Sequence
  Description of Artificial Sequence: Synthetic oligonucleotide
gguucagugcaauuagcua

SEQ ID NO: 3147911 - RNA, 19 nt, Artificial Sequence
  Description of Artificial Sequence: Synthetic oligonucleotide
acacggccacgaugaaguc

SEQ ID NO: 3147912 - RNA, 19 nt, Artificial Sequence
  Description of Artificial Sequence: Synthetic oligonucleotide
gguugggacgagcucuccc

SEQ ID NO: 3147913 - RNA, 19 nt, Artificial Sequence
  Description of Artificial Sequence: Synthetic oligonucleotide
guacgguuguuaugagcuc

SEQ ID NO: 3147914 - RNA, 19 nt, Artificial Sequence
  Description of Artificial Sequence: Synthetic oligonucleotide
ucccagcauggcuguuacg

SEQ ID NO: 3147915 - RNA, 19 nt, Artificial Sequence
  Description of Artificial Sequence: Synthetic oligonucleotide
cucuccuuacacggccacg

SEQ ID NO: 3147916 - RNA, 19 nt, Artificial Sequence
  Description of Artificial Sequence: Synthetic oligonucleotide
gcccuguacgguugggacg

SEQ ID NO: 3147917 - RNA, 19 nt, Artificial Sequence
  Description of Artificial Sequence: Synthetic oligonucleotide
cccuaaguggucauuauua

SEQ ID NO: 3147918 - RNA, 19 nt, Artificial Sequence
  Description of Artificial Sequence: Synthetic oligonucleotide
uagcccuguacgguuggga

SEQ ID NO: 3147919 - RNA, 19 nt, Artificial Sequence
  Description of Artificial Sequence: Synthetic oligonucleotide
guuacgaacuagcccugua

SEQ ID NO: 3147920 - RNA, 19 nt, Artificial Sequence
  Description of Artificial Sequence: Synthetic oligonucleotide
uagcuucuccauguacggu

SEQ ID NO: 3147921 - RNA, 19 nt, Artificial Sequence
  Description of Artificial Sequence: Synthetic oligonucleotide
ucucccagcauggcuguua

SEQ ID NO: 3147922 - RNA, 19 nt, Artificial Sequence
  Description of Artificial Sequence: Synthetic oligonucleotide
uagcuagcuucuccaugua

SEQ ID NO: 3147923 - RNA, 19 nt, Artificial Sequence
  Description of Artificial Sequence: Synthetic oligonucleotide
gaacuagcccuguacgguu

SEQ ID NO: 3147924 - RNA, 19 nt, Artificial Sequence
  Description of Artificial Sequence: Synthetic oligonucleotide
guacgguugggacgagcuc

SEQ ID NO: 3147925 - RNA, 19 nt, Artificial Sequence
  Description of Artificial Sequence: Synthetic oligonucleotide
acgguugggacgagcucuc

SEQ ID NO: 3147926 - RNA, 19 nt, Artificial Sequence
  Description of Artificial Sequence: Synthetic oligonucleotide
uucuccauguacgguuguu

SEQ ID NO: 3147927 - RNA, 19 nt, Artificial Sequence
  Description of Artificial Sequence: Synthetic oligonucleotide
cuagcccuguacgguuggg

SEQ ID NO: 3147928 - RNA, 19 nt, Artificial Sequence
  Description of Artificial Sequence: Synthetic oligonucleotide
agucucccuaaguggucau

SEQ ID NO: 3147929 - RNA, 19 nt, Artificial Sequence
  Description of Artificial Sequence: Synthetic oligonucleotide
cuguacgguugggacgagc

SEQ ID NO: 3147930 - RNA, 19 nt, Artificial Sequence
  Description of Artificial Sequence: Synthetic oligonucleotide
cccagcauggcuguuacga

SEQ ID NO: 3147931 - RNA, 19 nt, Artificial Sequence
  Description of Artificial Sequence: Synthetic oligonucleotide
cuccauguacgguuguuau

SEQ ID NO: 3147932 - RNA, 19 nt, Artificial Sequence
  Description of Artificial Sequence: Synthetic oligonucleotide
gcuucuccauguacgguug

SEQ ID NO: 3147933 - RNA, 19 nt, Artificial Sequence
  Description of Artificial Sequence: Synthetic oligonucleotide
gguuguuaugagcucuccu

SEQ ID NO: 3147934 - RNA, 19 nt, Artificial Sequence
  Description of Artificial Sequence: Synthetic oligonucleotide
gugcaauuagcuagcuucu

SEQ ID NO: 3147935 - RNA, 19 nt, Artificial Sequence
  Description of Artificial Sequence: Synthetic oligonucleotide
gcuccuaaguaugguucag

SEQ ID NO: 3147936 - RNA, 19 nt, Artificial Sequence
  Description of Artificial Sequence: Synthetic oligonucleotide
agcucuccuuacacggcca

SEQ ID NO: 3147937 - RNA, 19 nt, Artificial Sequence
  Description of Artificial Sequence: Synthetic oligonucleotide
gccacgaugaagucucccu

SEQ ID NO: 3147938 - RNA, 19 nt, Artificial Sequence
  Description of Artificial Sequence: Synthetic oligonucleotide
gcucuccuuacacggccac

SEQ ID NO: 3147939 - RNA, 19 nt, Artificial Sequence
  Description of Artificial Sequence: Synthetic oligonucleotide
cuuacacggccacgaugaa

SEQ ID NO: 3147940 - RNA, 19 nt, Artificial Sequence
  Description of Artificial Sequence: Synthetic oligonucleotide
ggccacgaugaagucuccc

SEQ ID NO: 3147941 - RNA, 19 nt, Artificial Sequence
  Description of Artificial Sequence: Synthetic oligonucleotide
cuccuaaguaugguucagu

SEQ ID NO: 3147942 - RNA, 19 nt, Artificial Sequence
  Description of Artificial Sequence: Synthetic oligonucleotide
cccuguacgguugggacga

SEQ ID NO: 3147943 - RNA, 19 nt, Artificial Sequence
  Description of Artificial Sequence: Synthetic oligonucleotide
cucccuaaguggucauuau

SEQ ID NO: 3147944 - RNA, 19 nt, Artificial Sequence
  Description of Artificial Sequence: Synthetic oligonucleotide
ccagcauggcuguuacgaa

SEQ ID NO: 3147945 - RNA, 19 nt, Artificial Sequence
  Description of Artificial Sequence: Synthetic oligonucleotide
cacggccacgaugaagucu

SEQ ID NO: 3147946 - RNA, 19 nt, Artificial Sequence
  Description of Artificial Sequence: Synthetic oligonucleotide
cagugcaauuagcuagcuu

SEQ ID NO: 3147947 - RNA, 19 nt, Artificial Sequence
  Description of Artificial Sequence: Synthetic oligonucleotide
cgguuguuaugagcucucc

SEQ ID NO: 3147948 - RNA, 19 nt, Artificial Sequence
  Description of Artificial Sequence: Synthetic oligonucleotide
gcauggcuguuacgaacua

SEQ ID NO: 3147949 - RNA, 19 nt, Artificial Sequence
  Description of Artificial Sequence: Synthetic oligonucleotide
cuccuuacacggccacgau

SEQ ID NO: 3147950 - RNA, 19 nt, Artificial Sequence
  Description of Artificial Sequence: Synthetic oligonucleotide
gcucucccagcauggcugu

SEQ ID NO: 3147951 - RNA, 19 nt, Artificial Sequence
  Description of Artificial Sequence: Synthetic oligonucleotide
cgaacuagcccuguacggu

SEQ ID NO: 3147952 - RNA, 19 nt, Artificial Sequence
  Description of Artificial Sequence: Synthetic oligonucleotide
cgaugaagucucccuaagu

SEQ ID NO: 3147953 - RNA, 19 nt, Artificial Sequence
  Description of Artificial Sequence: Synthetic oligonucleotide
gggacgagcucucccucuu

SEQ ID NO: 3147954 - RNA, 19 nt, Artificial Sequence
  Description of Artificial Sequence: Synthetic oligonucleotide
gucucccuaaguggucauu

SEQ ID NO: 3147955 - RNA, 19 nt, Artificial Sequence
  Description of Artificial Sequence: Synthetic oligonucleotide
ccuguacgguugggacgag

SEQ ID NO: 3147956 - RNA, 19 nt, Artificial Sequence
  Description of Artificial Sequence: Synthetic oligonucleotide
ggacgagcucucccucuuu

SEQ ID NO: 3147957 - RNA, 19 nt, Artificial Sequence
  Description of Artificial Sequence: Synthetic oligonucleotide
cggccacgaugaagucucc

SEQ ID NO: 3147958 - RNA, 19 nt, Artificial Sequence
  Description of Artificial Sequence: Synthetic oligonucleotide
cgguugggacgagcucucc

SEQ ID NO: 3147959 - RNA, 19 nt, Artificial Sequence
  Description of Artificial Sequence: Synthetic oligonucleotide
cucucccagcauggcuguu

SEQ ID NO: 3147960 - RNA, 19 nt, Artificial Sequence
  Description of Artificial Sequence: Synthetic oligonucleotide
ugauauacaaaacauaugg

SEQ ID NO: 3147961 - RNA, 19 nt, Artificial Sequence
  Description of Artificial Sequence: Synthetic oligonucleotide
aaacauaugguauaguauc

SEQ ID NO: 3147962 - RNA, 19 nt, Artificial Sequence
  Description of Artificial Sequence: Synthetic oligonucleotide
uuuaaugauauacaaaaca

SEQ ID NO: 3147963 - RNA, 19 nt, Artificial Sequence
  Description of Artificial Sequence: Synthetic oligonucleotide
aacacuauuaaacagcuca

SEQ ID NO: 3147964 - RNA, 19 nt, Artificial Sequence
  Description of Artificial Sequence: Synthetic oligonucleotide
ucuuuuaaagauuuaauga

SEQ ID NO: 3147965 - RNA, 19 nt, Artificial Sequence
  Description of Artificial Sequence: Synthetic oligonucleotide
uuaaacacuauuaaacagc

SEQ ID NO: 3147966 - RNA, 19 nt, Artificial Sequence
  Description of Artificial Sequence: Synthetic oligonucleotide
gauuuaaugauauacaaaa

SEQ ID NO: 3147967 - RNA, 19 nt, Artificial Sequence
  Description of Artificial Sequence: Synthetic oligonucleotide
acauuaaacacuauuaaac

SEQ ID NO: 3147968 - RNA, 19 nt, Artificial Sequence
  Description of Artificial Sequence: Synthetic oligonucleotide
uauuaaacagcucauuucu

SEQ ID NO: 3147969 - RNA, 19 nt, Artificial Sequence
  Description of Artificial Sequence: Synthetic oligonucleotide
uaaagauuuaaugauauac

SEQ ID NO: 3147970 - RNA, 19 nt, Artificial Sequence
  Description of Artificial Sequence: Synthetic oligonucleotide
uucuuuuaaagauuuaaug

SEQ ID NO: 3147971 - RNA, 19 nt, Artificial Sequence
  Description of Artificial Sequence: Synthetic oligonucleotide
uuaaugauauacaaaacau

SEQ ID NO: 3147972 - RNA, 19 nt, Artificial Sequence
  Description of Artificial Sequence: Synthetic oligonucleotide
uauaguaucuuuaaguaau

SEQ ID NO: 3147973 - RNA, 19 nt, Artificial Sequence
  Description of Artificial Sequence: Synthetic oligonucleotide
aaugauauacaaaacauau

SEQ ID NO: 3147974 - RNA, 19 nt, Artificial Sequence
  Description of Artificial Sequence: Synthetic oligonucleotide
auuaaacacuauuaaacag

SEQ ID NO: 3147975 - RNA, 19 nt, Artificial Sequence
  Description of Artificial Sequence: Synthetic oligonucleotide
uuuaaagauuuaaugauau

SEQ ID NO: 3147976 - RNA, 19 nt, Artificial Sequence
  Description of Artificial Sequence: Synthetic oligonucleotide
ugcacaucaacauuaaaca

SEQ ID NO: 3147977 - RNA, 19 nt, Artificial Sequence
  Description of Artificial Sequence: Synthetic oligonucleotide
guaucuuuaaguaauacac

SEQ ID NO: 3147978 - RNA, 19 nt, Artificial Sequence
  Description of Artificial Sequence: Synthetic oligonucleotide
uaaacacuauuaaacagcu

SEQ ID NO: 3147979 - RNA, 19 nt, Artificial Sequence
  Description of Artificial Sequence: Synthetic oligonucleotide
ugguauaguaucuuuaagu

SEQ ID NO: 3147980 - RNA, 19 nt, Artificial Sequence
  Description of Artificial Sequence: Synthetic oligonucleotide
aaagauuuaaugauauaca

SEQ ID NO: 3147981 - RNA, 19 nt, Artificial Sequence
  Description of Artificial Sequence: Synthetic oligonucleotide
ugagauacacuauugaaua

SEQ ID NO: 3147982 - RNA, 19 nt, Artificial Sequence
  Description of Artificial Sequence: Synthetic oligonucleotide
auaaauuuaauuucuuuua

SEQ ID NO: 3147983 - RNA, 19 nt, Artificial Sequence
  Description of Artificial Sequence: Synthetic oligonucleotide
uaaauuuaauuucuuuuaa

SEQ ID NO: 3147984 - RNA, 19 nt, Artificial Sequence
  Description of Artificial Sequence: Synthetic oligonucleotide
aaauuuaauuucuuuuaaa

SEQ ID NO: 3147985 - RNA, 19 nt, Artificial Sequence
  Description of Artificial Sequence: Synthetic oligonucleotide
guaucuaugagauacacua

SEQ ID NO: 3147986 - RNA, 19 nt, Artificial Sequence
  Description of Artificial Sequence: Synthetic oligonucleotide
ucuaugagauacacuauug

SEQ ID NO: 3147987 - RNA, 19 nt, Artificial Sequence
  Description of Artificial Sequence: Synthetic oligonucleotide
uuuuaaagauuuaaugaua

SEQ ID NO: 3147988 - RNA, 19 nt, Artificial Sequence
  Description of Artificial Sequence: Synthetic oligonucleotide
aguaucuuuaaguaauaca

SEQ ID NO: 3147989 - RNA, 19 nt, Artificial Sequence
  Description of Artificial Sequence: Synthetic oligonucleotide
uugucuguaucuaugagau

SEQ ID NO: 3147990 - RNA, 19 nt, Artificial Sequence
  Description of Artificial Sequence: Synthetic oligonucleotide
cugcacaucaacauuaaac

SEQ ID NO: 3147991 - RNA, 19 nt, Artificial Sequence
  Description of Artificial Sequence: Synthetic oligonucleotide
uuuucucugcacaucaaca

SEQ ID NO: 3147992 - RNA, 19 nt, Artificial Sequence
  Description of Artificial Sequence: Synthetic oligonucleotide
uaugagauacacuauugaa

SEQ ID NO: 3147993 - RNA, 19 nt, Artificial Sequence
  Description of Artificial Sequence: Synthetic oligonucleotide
aacagcucauuucugcuug

SEQ ID NO: 3147994 - RNA, 19 nt, Artificial Sequence
  Description of Artificial Sequence: Synthetic oligonucleotide
uuucuuuuaaagauuuaau

SEQ ID NO: 3147995 - RNA, 19 nt, Artificial Sequence
  Description of Artificial Sequence: Synthetic oligonucleotide
uaucuuuaaguaauacacu

SEQ ID NO: 3147996 - RNA, 19 nt, Artificial Sequence
  Description of Artificial Sequence: Synthetic oligonucleotide
uaaugauauacaaaacaua

SEQ ID NO: 3147997 - RNA, 19 nt, Artificial Sequence
  Description of Artificial Sequence: Synthetic oligonucleotide
cauuaaacacuauuaaaca

SEQ ID NO: 3147998 - RNA, 19 nt, Artificial Sequence
  Description of Artificial Sequence: Synthetic oligonucleotide
uaugguauaguaucuuuaa

SEQ ID NO: 3147999 - RNA, 19 nt, Artificial Sequence
  Description of Artificial Sequence: Synthetic oligonucleotide
uacaaaacauaugguauag

SEQ ID NO: 3148000 - RNA, 19 nt, Artificial Sequence
  Description of Artificial Sequence: Synthetic oligonucleotide
cuauuaaacagcucauuuc

SEQ ID NO: 3148001 - RNA, 19 nt, Artificial Sequence
  Description of Artificial Sequence: Synthetic oligonucleotide
gucuguaucuaugagauac

SEQ ID NO: 3148002 - RNA, 19 nt, Artificial Sequence
  Description of Artificial Sequence: Synthetic oligonucleotide
acuauuaaacagcucauuu

SEQ ID NO: 3148003 - RNA, 19 nt, Artificial Sequence
  Description of Artificial Sequence: Synthetic oligonucleotide
aucuuuaaguaauacacuu

SEQ ID NO: 3148004 - RNA, 19 nt, Artificial Sequence
  Description of Artificial Sequence: Synthetic oligonucleotide
aaaacauaugguauaguau

SEQ ID NO: 3148005 - RNA, 19 nt, Artificial Sequence
  Description of Artificial Sequence: Synthetic oligonucleotide
aucaacauuaaacacuauu

SEQ ID NO: 3148006 - RNA, 19 nt, Artificial Sequence
  Description of Artificial Sequence: Synthetic oligonucleotide
uguaucuaugagauacacu

SEQ ID NO: 3148007 - RNA, 19 nt, Artificial Sequence
  Description of Artificial Sequence: Synthetic oligonucleotide
ucuuuaaguaauacacuuu

SEQ ID NO: 3148008 - RNA, 19 nt, Artificial Sequence
  Description of Artificial Sequence: Synthetic oligonucleotide
augguauaguaucuuuaag

SEQ ID NO: 3148009 - RNA, 19 nt, Artificial Sequence
  Description of Artificial Sequence: Synthetic oligonucleotide
ucucugcacaucaacauua

SEQ ID NO: 3148010 - RNA, 19 nt, Artificial Sequence
  Description of Artificial Sequence: Synthetic oligonucleotide
caaaacauaugguauagua

SEQ ID NO: 3148011 - RNA, 19 nt, Artificial Sequence
  Description of Artificial Sequence: Synthetic oligonucleotide
auacaaaacauaugguaua

SEQ ID NO: 3148012 - RNA, 19 nt, Artificial Sequence
  Description of Artificial Sequence: Synthetic oligonucleotide
aacauaugguauaguaucu

SEQ ID NO: 3148013 - RNA, 19 nt, Artificial Sequence
  Description of Artificial Sequence: Synthetic oligonucleotide
uuucucugcacaucaacau

SEQ ID NO: 3148014 - RNA, 19 nt, Artificial Sequence
  Description of Artificial Sequence: Synthetic oligonucleotide
cuugucuguaucuaugaga

SEQ ID NO: 3148015 - RNA, 19 nt, Artificial Sequence
  Description of Artificial Sequence: Synthetic oligonucleotide
ucuguaucuaugagauaca

SEQ ID NO: 3148016 - RNA, 19 nt, Artificial Sequence
  Description of Artificial Sequence: Synthetic oligonucleotide
aucuaugagauacacuauu

SEQ ID NO: 3148017 - RNA, 19 nt, Artificial Sequence
  Description of Artificial Sequence: Synthetic oligonucleotide
uuaaagauuuaaugauaua

SEQ ID NO: 3148018 - RNA, 19 nt, Artificial Sequence
  Description of Artificial Sequence: Synthetic oligonucleotide
uuucugcuugccuugucug

SEQ ID NO: 3148019 - RNA, 19 nt, Artificial Sequence
  Description of Artificial Sequence: Synthetic oligonucleotide
gagauacacuauugaauac

SEQ ID NO: 3148020 - RNA, 19 nt, Artificial Sequence
  Description of Artificial Sequence: Synthetic oligonucleotide
gguauaguaucuuuaagua

SEQ ID NO: 3148021 - RNA, 19 nt, Artificial Sequence
  Description of Artificial Sequence: Synthetic oligonucleotide
guauaguaucuuuaaguaa

SEQ ID NO: 3148022 - RNA, 19 nt, Artificial Sequence
  Description of Artificial Sequence: Synthetic oligonucleotide
ugccuugucuguaucuaug

SEQ ID NO: 3148023 - RNA, 19 nt, Artificial Sequence
  Description of Artificial Sequence: Synthetic oligonucleotide
gaauaaauuuaauuucuuu

SEQ ID NO: 3148024 - RNA, 19 nt, Artificial Sequence
  Description of Artificial Sequence: Synthetic oligonucleotide
augagauacacuauugaau

SEQ ID NO: 3148025 - RNA, 19 nt, Artificial Sequence
  Description of Artificial Sequence: Synthetic oligonucleotide
caacauuaaacacuauuaa

SEQ ID NO: 3148026 - RNA, 19 nt, Artificial Sequence
  Description of Artificial Sequence: Synthetic oligonucleotide
aaacagcucauuucugcuu

SEQ ID NO: 3148027 - RNA, 19 nt, Artificial Sequence
  Description of Artificial Sequence: Synthetic oligonucleotide
uaucuaugagauacacuau

SEQ ID NO: 3148028 - RNA, 19 nt, Artificial Sequence
  Description of Artificial Sequence: Synthetic oligonucleotide
cuaugagauacacuauuga

SEQ ID NO: 3148029 - RNA, 19 nt, Artificial Sequence
  Description of Artificial Sequence: Synthetic oligonucleotide
acagcucauuucugcuugc

SEQ ID NO: 3148030 - RNA, 19 nt, Artificial Sequence
  Description of Artificial Sequence: Synthetic oligonucleotide
cacaucaacauuaaacacu

SEQ ID NO: 3148031 - RNA, 19 nt, Artificial Sequence
  Description of Artificial Sequence: Synthetic oligonucleotide
agauuuaaugauauacaaa

SEQ ID NO: 3148032 - RNA, 19 nt, Artificial Sequence
  Description of Artificial Sequence: Synthetic oligonucleotide
uaguaucuuuaaguaauac

SEQ ID NO: 3148033 - RNA, 19 nt, Artificial Sequence
  Description of Artificial Sequence: Synthetic oligonucleotide
aaacacuauuaaacagcuc

SEQ ID NO: 3148034 - RNA, 19 nt, Artificial Sequence
  Description of Artificial Sequence: Synthetic oligonucleotide
acaucaacauuaaacacua

SEQ ID NO: 3148035 - RNA, 19 nt, Artificial Sequence
  Description of Artificial Sequence: Synthetic oligonucleotide
aaacaagaauaaauuuaau

SEQ ID NO: 3148036 - RNA, 19 nt, Artificial Sequence
  Description of Artificial Sequence: Synthetic oligonucleotide
gauauacaaaacauauggu

SEQ ID NO: 3148037 - RNA, 19 nt, Artificial Sequence
  Description of Artificial Sequence: Synthetic oligonucleotide
uucucugcacaucaacauu

SEQ ID NO: 3148038 - RNA, 19 nt, Artificial Sequence
  Description of Artificial Sequence: Synthetic oligonucleotide
cuuuaaguaauacacuuuu

SEQ ID NO: 3148039 - RNA, 19 nt, Artificial Sequence
  Description of Artificial Sequence: Synthetic oligonucleotide
auuaaacagcucauuucug

SEQ ID NO: 3148040 - RNA, 19 nt, Artificial Sequence
  Description of Artificial Sequence: Synthetic oligonucleotide
cuguaucuaugagauacac

SEQ ID NO: 3148041 - RNA, 19 nt, Artificial Sequence
  Description of Artificial Sequence: Synthetic oligonucleotide
ucugcacaucaacauuaaa

SEQ ID NO: 3148042 - RNA, 19 nt, Artificial Sequence
  Description of Artificial Sequence: Synthetic oligonucleotide
uucugcuugccuugucugu

SEQ ID NO: 3148043 - RNA, 19 nt, Artificial Sequence
  Description of Artificial Sequence: Synthetic oligonucleotide
agcucauuucugcuugccu

SEQ ID NO: 3148044 - RNA, 19 nt, Artificial Sequence
  Description of Artificial Sequence: Synthetic oligonucleotide
gcacaucaacauuaaacac

SEQ ID NO: 3148045 - RNA, 19 nt, Artificial Sequence
  Description of Artificial Sequence: Synthetic oligonucleotide
auaugguauaguaucuuua

SEQ ID NO: 3148046 - RNA, 19 nt, Artificial Sequence
  Description of Artificial Sequence: Synthetic oligonucleotide
acaaaacauaugguauagu

SEQ ID NO: 3148047 - RNA, 19 nt, Artificial Sequence
  Description of Artificial Sequence: Synthetic oligonucleotide
acauaugguauaguaucuu

SEQ ID NO: 3148048 - RNA, 19 nt, Artificial Sequence
  Description of Artificial Sequence: Synthetic oligonucleotide
uugccuugucuguaucuau

SEQ ID NO: 3148049 - RNA, 19 nt, Artificial Sequence
  Description of Artificial Sequence: Synthetic oligonucleotide
ucugcuugccuugucugua

SEQ ID NO: 3148050 - RNA, 19 nt, Artificial Sequence
  Description of Artificial Sequence: Synthetic oligonucleotide
acacuauuaaacagcucau

SEQ ID NO: 3148051 - RNA, 19 nt, Artificial Sequence
  Description of Artificial Sequence: Synthetic oligonucleotide
auaguaucuuuaaguaaua

SEQ ID NO: 3148052 - RNA, 19 nt, Artificial Sequence
  Description of Artificial Sequence: Synthetic oligonucleotide
cauaugguauaguaucuuu

SEQ ID NO: 3148053 - RNA, 19 nt, Artificial Sequence
  Description of Artificial Sequence: Synthetic oligonucleotide
ugcuugccuugucuguauc

SEQ ID NO: 3148054 - RNA, 19 nt, Artificial Sequence
  Description of Artificial Sequence: Synthetic oligonucleotide
ugucuguaucuaugagaua

SEQ ID NO: 3148055 - RNA, 19 nt, Artificial Sequence
  Description of Artificial Sequence: Synthetic oligonucleotide
ccuugucuguaucuaugag

SEQ ID NO: 3148056 - RNA, 19 nt, Artificial Sequence
  Description of Artificial Sequence: Synthetic oligonucleotide
cagcucauuucugcuugcc

SEQ ID NO: 3148057 - RNA, 19 nt, Artificial Sequence
  Description of Artificial Sequence: Synthetic oligonucleotide
gccuugucuguaucuauga

SEQ ID NO: 3148058 - RNA, 19 nt, Artificial Sequence
  Description of Artificial Sequence: Synthetic oligonucleotide
cuugccuugucuguaucua

SEQ ID NO: 3148059 - RNA, 19 nt, Artificial Sequence
  Description of Artificial Sequence: Synthetic oligonucleotide
gcucauuucugcuugccuu

SEQ ID NO: 3148060 - RNA, 19 nt, Artificial Sequence
  Description of Artificial Sequence: Synthetic oligonucleotide
cacuauuaaacagcucauu

SEQ ID NO: 3148061 - RNA, 19 nt, Artificial Sequence
  Description of Artificial Sequence: Synthetic oligonucleotide
gcuugccuugucuguaucu

SEQ ID NO: 3148062 - RNA, 19 nt, Artificial Sequence
  Description of Artificial Sequence: Synthetic oligonucleotide
caucaacauuaaacacuau

SEQ ID NO: 3148063 - RNA, 19 nt, Artificial Sequence
  Description of Artificial Sequence: Synthetic oligonucleotide
cugcuugccuugucuguau

SEQ ID NO: 3148064 - RNA, 19 nt, Artificial Sequence
  Description of Artificial Sequence: Synthetic oligonucleotide
aauuguauuaaaugguugc

SEQ ID NO: 3148065 - RNA, 19 nt, Artificial Sequence
  Description of Artificial Sequence: Synthetic oligonucleotide
aaugaaauaauuuuauggu

SEQ ID NO: 3148066 - RNA, 19 nt, Artificial Sequence
  Description of Artificial Sequence: Synthetic oligonucleotide
caaugaaauaauuuuaugg

SEQ ID NO: 3148067 - RNA, 19 nt, Artificial Sequence
  Description of Artificial Sequence: Synthetic oligonucleotide
gaggaauuguauuaaaugg

SEQ ID NO: 3148068 - RNA, 19 nt, Artificial Sequence
  Description of Artificial Sequence: Synthetic oligonucleotide
uacauuauguuucauaaca

SEQ ID NO: 3148069 - RNA, 19 nt, Artificial Sequence
  Description of Artificial Sequence: Synthetic oligonucleotide
caaaaugacaguuaugaag

SEQ ID NO: 3148070 - RNA, 19 nt, Artificial Sequence
  Description of Artificial Sequence: Synthetic oligonucleotide
uuauguuucauaacaguag

SEQ ID NO: 3148071 - RNA, 19 nt, Artificial Sequence
  Description of Artificial Sequence: Synthetic oligonucleotide
aaaaugacaguuaugaagu

SEQ ID NO: 3148072 - RNA, 19 nt, Artificial Sequence
  Description of Artificial Sequence: Synthetic oligonucleotide
ugaggaauuguauuaaaug

SEQ ID NO: 3148073 - RNA, 19 nt, Artificial Sequence
  Description of Artificial Sequence: Synthetic oligonucleotide
uauguuucauaacaguagc

SEQ ID NO: 3148074 - RNA, 19 nt, Artificial Sequence
  Description of Artificial Sequence: Synthetic oligonucleotide
agcaaaaugacaguuauga

SEQ ID NO: 3148075 - RNA, 19 nt, Artificial Sequence
  Description of Artificial Sequence: Synthetic oligonucleotide
aaaugguugcagcauuagg

SEQ ID NO: 3148076 - RNA, 19 nt, Artificial Sequence
  Description of Artificial Sequence: Synthetic oligonucleotide
aaugguugcagcauuagga

SEQ ID NO: 3148077 - RNA, 19 nt, Artificial Sequence
  Description of Artificial Sequence: Synthetic oligonucleotide
augacaguuaugaaguagc

SEQ ID NO: 3148078 - RNA, 19 nt, Artificial Sequence
  Description of Artificial Sequence: Synthetic oligonucleotide
aaugacaguuaugaaguag

SEQ ID NO: 3148079 - RNA, 19 nt, Artificial Sequence
  Description of Artificial Sequence: Synthetic oligonucleotide
agauauuuacauuauguuu

SEQ ID NO: 3148080 - RNA, 19 nt, Artificial Sequence
  Description of Artificial Sequence: Synthetic oligonucleotide
uguuucauaacaguagcaa

SEQ ID NO: 3148081 - RNA, 19 nt, Artificial Sequence
  Description of Artificial Sequence: Synthetic oligonucleotide
gaauuguauuaaaugguug

SEQ ID NO: 3148082 - RNA, 19 nt, Artificial Sequence
  Description of Artificial Sequence: Synthetic oligonucleotide
uagcaaugaaauaauuuua

SEQ ID NO: 3148083 - RNA, 19 nt, Artificial Sequence
  Description of Artificial Sequence: Synthetic oligonucleotide
uuaugguugggguugucac

SEQ ID NO: 3148084 - RNA, 19 nt, Artificial Sequence
  Description of Artificial Sequence: Synthetic oligonucleotide
ugggguugucacaacauga

SEQ ID NO: 3148085 - RNA, 19 nt, Artificial Sequence
  Description of Artificial Sequence: Synthetic oligonucleotide
guauuaaaugguugcagca

SEQ ID NO: 3148086 - RNA, 19 nt, Artificial Sequence
  Description of Artificial Sequence: Synthetic oligonucleotide
ugucacaacaugaggaauu

SEQ ID NO: 3148087 - RNA, 19 nt, Artificial Sequence
  Description of Artificial Sequence: Synthetic oligonucleotide
ugacaguuaugaaguagca

SEQ ID NO: 3148088 - RNA, 19 nt, Artificial Sequence
  Description of Artificial Sequence: Synthetic oligonucleotide
gguugcauaucagauaucc

SEQ ID NO: 3148089 - RNA, 19 nt, Artificial Sequence
  Description of Artificial Sequence: Synthetic oligonucleotide
uuaaaugguugcagcauua

SEQ ID NO: 3148090 - RNA, 19 nt, Artificial Sequence
  Description of Artificial Sequence: Synthetic oligonucleotide
guagcaaugaaauaauuuu

SEQ ID NO: 3148091 - RNA, 19 nt, Artificial Sequence
  Description of Artificial Sequence: Synthetic oligonucleotide
uauuaaaugguugcagcau

SEQ ID NO: 3148092 - RNA, 19 nt, Artificial Sequence
  Description of Artificial Sequence: Synthetic oligonucleotide
auuauguuucauaacagua

SEQ ID NO: 3148093 - RNA, 19 nt, Artificial Sequence
  Description of Artificial Sequence: Synthetic oligonucleotide
auuaaaugguugcagcauu

SEQ ID NO: 3148094 - RNA, 19 nt, Artificial Sequence
  Description of Artificial Sequence: Synthetic oligonucleotide
auuguauuaaaugguugca

SEQ ID NO: 3148095 - RNA, 19 nt, Artificial Sequence
  Description of Artificial Sequence: Synthetic oligonucleotide
uugggguugucacaacaug

SEQ ID NO: 3148096 - RNA, 19 nt, Artificial Sequence
  Description of Artificial Sequence: Synthetic oligonucleotide
acauuauguuucauaacag

SEQ ID NO: 3148097 - RNA, 19 nt, Artificial Sequence
  Description of Artificial Sequence: Synthetic oligonucleotide
uuuaugguugggguuguca

SEQ ID NO: 3148098 - RNA, 19 nt, Artificial Sequence
  Description of Artificial Sequence: Synthetic oligonucleotide
uaaaugguugcagcauuag

SEQ ID NO: 3148099 - RNA, 19 nt, Artificial Sequence
  Description of Artificial Sequence: Synthetic oligonucleotide
aggaauuguauuaaauggu

SEQ ID NO: 3148100 - RNA, 19 nt, Artificial Sequence
  Description of Artificial Sequence: Synthetic oligonucleotide
aguagcaaugaaauaauuu

SEQ ID NO: 3148101 - RNA, 19 nt, Artificial Sequence
  Description of Artificial Sequence: Synthetic oligonucleotide
agcaaugaaauaauuuuau

SEQ ID NO: 3148102 - RNA, 19 nt, Artificial Sequence
  Description of Artificial Sequence: Synthetic oligonucleotide
uaugguugggguugucaca

SEQ ID NO: 3148103 - RNA, 19 nt, Artificial Sequence
  Description of Artificial Sequence: Synthetic oligonucleotide
guuucauaacaguagcaaa

SEQ ID NO: 3148104 - RNA, 19 nt, Artificial Sequence
  Description of Artificial Sequence: Synthetic oligonucleotide
augguugcagcauuaggaa

SEQ ID NO: 3148105 - RNA, 19 nt, Artificial Sequence
  Description of Artificial Sequence: Synthetic oligonucleotide
gcaaugaaauaauuuuaug

SEQ ID NO: 3148106 - RNA, 19 nt, Artificial Sequence
  Description of Artificial Sequence: Synthetic oligonucleotide
guugucacaacaugaggaa

SEQ ID NO: 3148107 - RNA, 19 nt, Artificial Sequence
  Description of Artificial Sequence: Synthetic oligonucleotide
gguugucacaacaugagga

SEQ ID NO: 3148108 - RNA, 19 nt, Artificial Sequence
  Description of Artificial Sequence: Synthetic oligonucleotide
cauuauguuucauaacagu

SEQ ID NO: 3148109 - RNA, 19 nt, Artificial Sequence
  Description of Artificial Sequence: Synthetic oligonucleotide
gucacaacaugaggaauug

SEQ ID NO: 3148110 - RNA, 19 nt, Artificial Sequence
  Description of Artificial Sequence: Synthetic oligonucleotide
ggguugucacaacaugagg

SEQ ID NO: 3148111 - RNA, 19 nt, Artificial Sequence
  Description of Artificial Sequence: Synthetic oligonucleotide
augaggaauuguauuaaau

SEQ ID NO: 3148112 - RNA, 19 nt, Artificial Sequence
  Description of Artificial Sequence: Synthetic oligonucleotide
aaguagcaaugaaauaauu

SEQ ID NO: 3148113 - RNA, 19 nt, Artificial Sequence
  Description of Artificial Sequence: Synthetic oligonucleotide
auguuucauaacaguagca

SEQ ID NO: 3148114 - RNA, 19 nt, Artificial Sequence
  Description of Artificial Sequence: Synthetic oligonucleotide
cagauauuuacauuauguu

SEQ ID NO: 3148115 - RNA, 19 nt, Artificial Sequence
  Description of Artificial Sequence: Synthetic oligonucleotide
augguugggguugucacaa

SEQ ID NO: 3148116 - RNA, 19 nt, Artificial Sequence
  Description of Artificial Sequence: Synthetic oligonucleotide
uugucacaacaugaggaau

SEQ ID NO: 3148117 - RNA, 19 nt, Artificial Sequence
  Description of Artificial Sequence: Synthetic oligonucleotide
gggguugucacaacaugag

SEQ ID NO: 3148118 - RNA, 19 nt, Artificial Sequence
  Description of Artificial Sequence: Synthetic oligonucleotide
auuuuaugguugggguugu

SEQ ID NO: 3148119 - RNA, 19 nt, Artificial Sequence
  Description of Artificial Sequence: Synthetic oligonucleotide
gggguugcauaucagauau

SEQ ID NO: 3148120 - RNA, 19 nt, Artificial Sequence
  Description of Artificial Sequence: Synthetic oligonucleotide
gguugggguugucacaaca

SEQ ID NO: 3148121 - RNA, 19 nt, Artificial Sequence
  Description of Artificial Sequence: Synthetic oligonucleotide
gcaaaaugacaguuaugaa

SEQ ID NO: 3148122 - RNA, 19 nt, Artificial Sequence
  Description of Artificial Sequence: Synthetic oligonucleotide
ggaauuguauuaaaugguu

SEQ ID NO: 3148123 - RNA, 19 nt, Artificial Sequence
  Description of Artificial Sequence: Synthetic oligonucleotide
uuuuaugguugggguuguc

SEQ ID NO: 3148124 - RNA, 19 nt, Artificial Sequence
  Description of Artificial Sequence: Synthetic oligonucleotide
ugguugggguugucacaac

SEQ ID NO: 3148125 - RNA, 19 nt, Artificial Sequence
  Description of Artificial Sequence: Synthetic oligonucleotide
guugggguugucacaacau

SEQ ID NO: 3148126 - RNA, 19 nt, Artificial Sequence
  Description of Artificial Sequence: Synthetic oligonucleotide
ggguugcauaucagauauc

SEQ ID NO: 3148127 - RNA, 19 nt, Artificial Sequence
  Description of Artificial Sequence: Synthetic oligonucleotide
uccggagcgagugccagga

SEQ ID NO: 3148128 - RNA, 19 nt, Artificial Sequence
  Description of Artificial Sequence: Synthetic oligonucleotide
ucuccggagcgagugccag

SEQ ID NO: 3148129 - RNA, 19 nt, Artificial Sequence
  Description of Artificial Sequence: Synthetic oligonucleotide
uggucuccggagcgagugc

SEQ ID NO: 3148130 - RNA, 19 nt, Artificial Sequence
  Description of Artificial Sequence: Synthetic oligonucleotide
cuccggagcgagugccagg

SEQ ID NO: 3148131 - RNA, 19 nt, Artificial Sequence
  Description of Artificial Sequence: Synthetic oligonucleotide
ggucuccggagcgagugcc

SEQ ID NO: 3148132 - RNA, 19 nt, Artificial Sequence
  Description of Artificial Sequence: Synthetic oligonucleotide
gucuccggagcgagugcca

SEQ ID NO: 3148133 - RNA, 19 nt, Artificial Sequence
  Description of Artificial Sequence: Synthetic oligonucleotide
cggagcgagugccaggaua

SEQ ID NO: 3148134 - RNA, 19 nt, Artificial Sequence
  Description of Artificial Sequence: Synthetic oligonucleotide
ccggagcgagugccaggau

SEQ ID NO: 3148135 - RNA, 19 nt, Artificial Sequence
  Description of Artificial Sequence: Synthetic oligonucleotide
aaaauuaggguucuagagc

SEQ ID NO: 3148136 - RNA, 19 nt, Artificial Sequence
  Description of Artificial Sequence: Synthetic oligonucleotide
aaccaaccaaacuaaaacc

SEQ ID NO: 3148137 - RNA, 19 nt, Artificial Sequence
  Description of Artificial Sequence: Synthetic oligonucleotide
cauaauaaaaguuaauaug

SEQ ID NO: 3148138 - RNA, 19 nt, Artificial Sequence
  Description of Artificial Sequence: Synthetic oligonucleotide
acuaaaaccaaaauuaggg

SEQ ID NO: 3148139 - RNA, 19 nt, Artificial Sequence
  Description of Artificial Sequence: Synthetic oligonucleotide
aaauuaggguucuagagcu

SEQ ID NO: 3148140 - RNA, 19 nt, Artificial Sequence
  Description of Artificial Sequence: Synthetic oligonucleotide
acaggaaugaaauucguuc

SEQ ID NO: 3148141 - RNA, 19 nt, Artificial Sequence
  Description of Artificial Sequence: Synthetic oligonucleotide
aaaaccaaaauuaggguuc

SEQ ID NO: 3148142 - RNA, 19 nt, Artificial Sequence
  Description of Artificial Sequence: Synthetic oligonucleotide
aaguuaauauguuauaaaa

SEQ ID NO: 3148143 - RNA, 19 nt, Artificial Sequence
  Description of Artificial Sequence: Synthetic oligonucleotide
aauaaaaguuaauauguua

SEQ ID NO: 3148144 - RNA, 19 nt, Artificial Sequence
  Description of Artificial Sequence: Synthetic oligonucleotide
aacuuuguacacgaaaagg

SEQ ID NO: 3148145 - RNA, 19 nt, Artificial Sequence
  Description of Artificial Sequence: Synthetic oligonucleotide
uagacaggaaugaaauucg

SEQ ID NO: 3148146 - RNA, 19 nt, Artificial Sequence
  Description of Artificial Sequence: Synthetic oligonucleotide
aaaguuaauauguuauaaa

SEQ ID NO: 3148147 - RNA, 19 nt, Artificial Sequence
  Description of Artificial Sequence: Synthetic oligonucleotide
caaaauuaggguucuagag

SEQ ID NO: 3148148 - RNA, 19 nt, Artificial Sequence
  Description of Artificial Sequence: Synthetic oligonucleotide
acgaaaaggucacaugacc

SEQ ID NO: 3148149 - RNA, 19 nt, Artificial Sequence
  Description of Artificial Sequence: Synthetic oligonucleotide
aaacuuuguacacgaaaag

SEQ ID NO: 3148150 - RNA, 19 nt, Artificial Sequence
  Description of Artificial Sequence: Synthetic oligonucleotide
uuuguacacgaaaagguca

SEQ ID NO: 3148151 - RNA, 19 nt, Artificial Sequence
  Description of Artificial Sequence: Synthetic oligonucleotide
aacuaaaaccaaaauuagg

SEQ ID NO: 3148152 - RNA, 19 nt, Artificial Sequence
  Description of Artificial Sequence: Synthetic oligonucleotide
uuagacaggaaugaaauuc

SEQ ID NO: 3148153 - RNA, 19 nt, Artificial Sequence
  Description of Artificial Sequence: Synthetic oligonucleotide
aaacuaaaaccaaaauuag

SEQ ID NO: 3148154 - RNA, 19 nt, Artificial Sequence
  Description of Artificial Sequence: Synthetic oligonucleotide
uaauaaucauauaaauaaa

SEQ ID NO: 3148155 - RNA, 19 nt, Artificial Sequence
  Description of Artificial Sequence: Synthetic oligonucleotide
uaaaaccaaaauuaggguu

SEQ ID NO: 3148156 - RNA, 19 nt, Artificial Sequence
  Description of Artificial Sequence: Synthetic oligonucleotide
agagcuaagccacuagcgg

SEQ ID NO: 3148157 - RNA, 19 nt, Artificial Sequence
  Description of Artificial Sequence: Synthetic oligonucleotide
auaaaaguuaauauguuau

SEQ ID NO: 3148158 - RNA, 19 nt, Artificial Sequence
  Description of Artificial Sequence: Synthetic oligonucleotide
acacgaaaaggucacauga

SEQ ID NO: 3148159 - RNA, 19 nt, Artificial Sequence
  Description of Artificial Sequence: Synthetic oligonucleotide
ucacaugaccauaauaaaa

SEQ ID NO: 3148160 - RNA, 19 nt, Artificial Sequence
  Description of Artificial Sequence: Synthetic oligonucleotide
aggguucuagagcuaagcc

SEQ ID NO: 3148161 - RNA, 19 nt, Artificial Sequence
  Description of Artificial Sequence: Synthetic oligonucleotide
guuccaaauaauaauaauc

SEQ ID NO: 3148162 - RNA, 19 nt, Artificial Sequence
  Description of Artificial Sequence: Synthetic oligonucleotide
ugaccauaauaaaaguuaa

SEQ ID NO: 3148163 - RNA, 19 nt, Artificial Sequence
  Description of Artificial Sequence: Synthetic oligonucleotide
uaauaaaaguuaauauguu

SEQ ID NO: 3148164 - RNA, 19 nt, Artificial Sequence
  Description of Artificial Sequence: Synthetic oligonucleotide
cuuuguacacgaaaagguc

SEQ ID NO: 3148165 - RNA, 19 nt, Artificial Sequence
  Description of Artificial Sequence: Synthetic oligonucleotide
auuuagacaggaaugaaau

SEQ ID NO: 3148166 - RNA, 19 nt, Artificial Sequence
  Description of Artificial Sequence: Synthetic oligonucleotide
ucuagagcuaagccacuag

SEQ ID NO: 3148167 - RNA, 19 nt, Artificial Sequence
  Description of Artificial Sequence: Synthetic oligonucleotide
accauaauaaaaguuaaua

SEQ ID NO: 3148168 - RNA, 19 nt, Artificial Sequence
  Description of Artificial Sequence: Synthetic oligonucleotide
acuuuguacacgaaaaggu

SEQ ID NO: 3148169 - RNA, 19 nt, Artificial Sequence
  Description of Artificial Sequence: Synthetic oligonucleotide
gaaugaaauucguucaaaa

SEQ ID NO: 3148170 - RNA, 19 nt, Artificial Sequence
  Description of Artificial Sequence: Synthetic oligonucleotide
accaaaauuaggguucuag

SEQ ID NO: 3148171 - RNA, 19 nt, Artificial Sequence
  Description of Artificial Sequence: Synthetic oligonucleotide
cuagagcuaagccacuagc

SEQ ID NO: 3148172 - RNA, 19 nt, Artificial Sequence
  Description of Artificial Sequence: Synthetic oligonucleotide
augaccauaauaaaaguua

SEQ ID NO: 3148173 - RNA, 19 nt, Artificial Sequence
  Description of Artificial Sequence: Synthetic oligonucleotide
uacacgaaaaggucacaug

SEQ ID NO: 3148174 - RNA, 19 nt, Artificial Sequence
  Description of Artificial Sequence: Synthetic oligonucleotide
agcgguuccaaauaauaau

SEQ ID NO: 3148175 - RNA, 19 nt, Artificial Sequence
  Description of Artificial Sequence: Synthetic oligonucleotide
gauuuagacaggaaugaaa

SEQ ID NO: 3148176 - RNA, 19 nt, Artificial Sequence
  Description of Artificial Sequence: Synthetic oligonucleotide
accaaacuaaaaccaaaau

SEQ ID NO: 3148177 - RNA, 19 nt, Artificial Sequence
  Description of Artificial Sequence: Synthetic oligonucleotide
accaaccaaacuaaaacca

SEQ ID NO: 3148178 - RNA, 19 nt, Artificial Sequence
  Description of Artificial Sequence: Synthetic oligonucleotide
uagcgguuccaaauaauaa

SEQ ID NO: 3148179 - RNA, 19 nt, Artificial Sequence
  Description of Artificial Sequence: Synthetic oligonucleotide
aaaccaaaauuaggguucu

SEQ ID NO: 3148180 - RNA, 19 nt, Artificial Sequence
  Description of Artificial Sequence: Synthetic oligonucleotide
uuaggguucuagagcuaag

SEQ ID NO: 3148181 - RNA, 19 nt, Artificial Sequence
  Description of Artificial Sequence: Synthetic oligonucleotide
gguucuagagcuaagccac

SEQ ID NO: 3148182 - RNA, 19 nt, Artificial Sequence
  Description of Artificial Sequence: Synthetic oligonucleotide
caggaaugaaauucguuca

SEQ ID NO: 3148183 - RNA, 19 nt, Artificial Sequence
  Description of Artificial Sequence: Synthetic oligonucleotide
cacgaaaaggucacaugac

SEQ ID NO: 3148184 - RNA, 19 nt, Artificial Sequence
  Description of Artificial Sequence: Synthetic oligonucleotide
ggucacaugaccauaauaa

SEQ ID NO: 3148185 - RNA, 19 nt, Artificial Sequence
  Description of Artificial Sequence: Synthetic oligonucleotide
uuuagacaggaaugaaauu

SEQ ID NO: 3148186 - RNA, 19 nt, Artificial Sequence
  Description of Artificial Sequence: Synthetic oligonucleotide
aaaggucacaugaccauaa

SEQ ID NO: 3148187 - RNA, 19 nt, Artificial Sequence
  Description of Artificial Sequence: Synthetic oligonucleotide
aggaaugaaauucguucaa

SEQ ID NO: 3148188 - RNA, 19 nt, Artificial Sequence
  Description of Artificial Sequence: Synthetic oligonucleotide
cuaaaaccaaaauuagggu

SEQ ID NO: 3148189 - RNA, 19 nt, Artificial Sequence
  Description of Artificial Sequence: Synthetic oligonucleotide
auuaggguucuagagcuaa

SEQ ID NO: 3148190 - RNA, 19 nt, Artificial Sequence
  Description of Artificial Sequence: Synthetic oligonucleotide
gaaaaggucacaugaccau

SEQ ID NO: 3148191 - RNA, 19 nt, Artificial Sequence
  Description of Artificial Sequence: Synthetic oligonucleotide
cuagcgguuccaaauaaua

SEQ ID NO: 3148192 - RNA, 19 nt, Artificial Sequence
  Description of Artificial Sequence: Synthetic oligonucleotide
gucacaugaccauaauaaa

SEQ ID NO: 3148193 - RNA, 19 nt, Artificial Sequence
  Description of Artificial Sequence: Synthetic oligonucleotide
aaggucacaugaccauaau

SEQ ID NO: 3148194 - RNA, 19 nt, Artificial Sequence
  Description of Artificial Sequence: Synthetic oligonucleotide
uaagccacuagcgguucca

SEQ ID NO: 3148195 - RNA, 19 nt, Artificial Sequence
  Description of Artificial Sequence: Synthetic oligonucleotide
ggguucuagagcuaagcca

SEQ ID NO: 3148196 - RNA, 19 nt, Artificial Sequence
  Description of Artificial Sequence: Synthetic oligonucleotide
aggucacaugaccauaaua

SEQ ID NO: 3148197 - RNA, 19 nt, Artificial Sequence
  Description of Artificial Sequence: Synthetic oligonucleotide
uguacacgaaaaggucaca

SEQ ID NO: 3148198 - RNA, 19 nt, Artificial Sequence
  Description of Artificial Sequence: Synthetic oligonucleotide
gagcuaagccacuagcggu

SEQ ID NO: 3148199 - RNA, 19 nt, Artificial Sequence
  Description of Artificial Sequence: Synthetic oligonucleotide
caugaccauaauaaaaguu

SEQ ID NO: 3148200 - RNA, 19 nt, Artificial Sequence
  Description of Artificial Sequence: Synthetic oligonucleotide
ccaaaauuaggguucuaga

SEQ ID NO: 3148201 - RNA, 19 nt, Artificial Sequence
  Description of Artificial Sequence: Synthetic oligonucleotide
cuaagccacuagcgguucc

SEQ ID NO: 3148202 - RNA, 19 nt, Artificial Sequence
  Description of Artificial Sequence: Synthetic oligonucleotide
ccauaauaaaaguuaauau

SEQ ID NO: 3148203 - RNA, 19 nt, Artificial Sequence
  Description of Artificial Sequence: Synthetic oligonucleotide
uucuagagcuaagccacua

SEQ ID NO: 3148204 - RNA, 19 nt, Artificial Sequence
  Description of Artificial Sequence: Synthetic oligonucleotide
agacaggaaugaaauucgu

SEQ ID NO: 3148205 - RNA, 19 nt, Artificial Sequence
  Description of Artificial Sequence: Synthetic oligonucleotide
ccaaacuaaaaccaaaauu

SEQ ID NO: 3148206 - RNA, 19 nt, Artificial Sequence
  Description of Artificial Sequence: Synthetic oligonucleotide
aauuaggguucuagagcua

SEQ ID NO: 3148207 - RNA, 19 nt, Artificial Sequence
  Description of Artificial Sequence: Synthetic oligonucleotide
gguuccaaauaauaauaau

SEQ ID NO: 3148208 - RNA, 19 nt, Artificial Sequence
  Description of Artificial Sequence: Synthetic oligonucleotide
cgaaaaggucacaugacca

SEQ ID NO: 3148209 - RNA, 19 nt, Artificial Sequence
  Description of Artificial Sequence: Synthetic oligonucleotide
acuagcgguuccaaauaau

SEQ ID NO: 3148210 - RNA, 19 nt, Artificial Sequence
  Description of Artificial Sequence: Synthetic oligonucleotide
ggaaugaaauucguucaaa

SEQ ID NO: 3148211 - RNA, 19 nt, Artificial Sequence
  Description of Artificial Sequence: Synthetic oligonucleotide
agcuaagccacuagcgguu

SEQ ID NO: 3148212 - RNA, 19 nt, Artificial Sequence
  Description of Artificial Sequence: Synthetic oligonucleotide
ccaaccaaacuaaaaccaa

SEQ ID NO: 3148213 - RNA, 19 nt, Artificial Sequence
  Description of Artificial Sequence: Synthetic oligonucleotide
cacuagcgguuccaaauaa

SEQ ID NO: 3148214 - RNA, 19 nt, Artificial Sequence
  Description of Artificial Sequence: Synthetic oligonucleotide
gaccauaauaaaaguuaau

SEQ ID NO: 3148215 - RNA, 19 nt, Artificial Sequence
  Description of Artificial Sequence: Synthetic oligonucleotide
gacaggaaugaaauucguu

SEQ ID NO: 3148216 - RNA, 19 nt, Artificial Sequence
  Description of Artificial Sequence: Synthetic oligonucleotide
guacacgaaaaggucacau

SEQ ID NO: 3148217 - RNA, 19 nt, Artificial Sequence
  Description of Artificial Sequence: Synthetic oligonucleotide
aagccacuagcgguuccaa

SEQ ID NO: 3148218 - RNA, 19 nt, Artificial Sequence
  Description of Artificial Sequence: Synthetic oligonucleotide
gcgguuccaaauaauaaua

SEQ ID NO: 3148219 - RNA, 19 nt, Artificial Sequence
  Description of Artificial Sequence: Synthetic oligonucleotide
agccacuagcgguuccaaa

SEQ ID NO: 3148220 - RNA, 19 nt, Artificial Sequence
  Description of Artificial Sequence: Synthetic oligonucleotide
aaccaaaauuaggguucua

SEQ ID NO: 3148221 - RNA, 19 nt, Artificial Sequence
  Description of Artificial Sequence: Synthetic oligonucleotide
gccacuagcgguuccaaau

SEQ ID NO: 3148222 - RNA, 19 nt, Artificial Sequence
  Description of Artificial Sequence: Synthetic oligonucleotide
cgguuccaaauaauaauaa

SEQ ID NO: 3148223 - RNA, 19 nt, Artificial Sequence
  Description of Artificial Sequence: Synthetic oligonucleotide
gcuaagccacuagcgguuc

SEQ ID NO: 3148224 - RNA, 19 nt, Artificial Sequence
  Description of Artificial Sequence: Synthetic oligonucleotide
guucuagagcuaagccacu

SEQ ID NO: 3148225 - RNA, 19 nt, Artificial Sequence
  Description of Artificial Sequence: Synthetic oligonucleotide
ccacuagcgguuccaaaua

SEQ ID NO: 3148226 - RNA, 19 nt, Artificial Sequence
  Description of Artificial Sequence: Synthetic oligonucleotide
uccaaugacggacauagcc

SEQ ID NO: 3148227 - RNA, 19 nt, Artificial Sequence
  Description of Artificial Sequence: Synthetic oligonucleotide
ucuccaaugacggacauag

SEQ ID NO: 3148228 - RNA, 19 nt, Artificial Sequence
  Description of Artificial Sequence: Synthetic oligonucleotide
agcagcaccacugucaugc

SEQ ID NO: 3148229 - RNA, 19 nt, Artificial Sequence
  Description of Artificial Sequence: Synthetic oligonucleotide
auagucagugacccgcucc

SEQ ID NO: 3148230 - RNA, 19 nt, Artificial Sequence
  Description of Artificial Sequence: Synthetic oligonucleotide
acugucaugcuuccguggc

SEQ ID NO: 3148231 - RNA, 19 nt, Artificial Sequence
  Description of Artificial Sequence: Synthetic oligonucleotide
uucuccuccgcauagucag

SEQ ID NO: 3148232 - RNA, 19 nt, Artificial Sequence
  Description of Artificial Sequence: Synthetic oligonucleotide
cuguuuugccuuuugcucc

SEQ ID NO: 3148233 - RNA, 19 nt, Artificial Sequence
  Description of Artificial Sequence: Synthetic oligonucleotide
uccagauucgaacucugga

SEQ ID NO: 3148234 - RNA, 19 nt, Artificial Sequence
  Description of Artificial Sequence: Synthetic oligonucleotide
uuugccuuuugcucccugg

SEQ ID NO: 3148235 - RNA, 19 nt, Artificial Sequence
  Description of Artificial Sequence: Synthetic oligonucleotide
ucugucuccaaugacggac

SEQ ID NO: 3148236 - RNA, 19 nt, Artificial Sequence
  Description of Artificial Sequence: Synthetic oligonucleotide
uccuguuuugccuuuugcu

SEQ ID NO: 3148237 - RNA, 19 nt, Artificial Sequence
  Description of Artificial Sequence: Synthetic oligonucleotide
agauucgaacucuggaucu

SEQ ID NO: 3148238 - RNA, 19 nt, Artificial Sequence
  Description of Artificial Sequence: Synthetic oligonucleotide
aacucuggaucuccuucuc

SEQ ID NO: 3148239 - RNA, 19 nt, Artificial Sequence
  Description of Artificial Sequence: Synthetic oligonucleotide
uccgcauagucagugaccc

SEQ ID NO: 3148240 - RNA, 19 nt, Artificial Sequence
  Description of Artificial Sequence: Synthetic oligonucleotide
auucgaacucuggaucucc

SEQ ID NO: 3148241 - RNA, 19 nt, Artificial Sequence
  Description of Artificial Sequence: Synthetic oligonucleotide
accacugucaugcuuccgu

SEQ ID NO: 3148242 - RNA, 19 nt, Artificial Sequence
  Description of Artificial Sequence: Synthetic oligonucleotide
agcaccacugucaugcuuc

SEQ ID NO: 3148243 - RNA, 19 nt, Artificial Sequence
  Description of Artificial Sequence: Synthetic oligonucleotide
ccaaugacggacauagccg

SEQ ID NO: 3148244 - RNA, 19 nt, Artificial Sequence
  Description of Artificial Sequence: Synthetic oligonucleotide
uggaucuccuucuccuccg

SEQ ID NO: 3148245 - RNA, 19 nt, Artificial Sequence
  Description of Artificial Sequence: Synthetic oligonucleotide
uagucagugacccgcucca

SEQ ID NO: 3148246 - RNA, 19 nt, Artificial Sequence
  Description of Artificial Sequence: Synthetic oligonucleotide
cagauucgaacucuggauc

SEQ ID NO: 3148247 - RNA, 19 nt, Artificial Sequence
  Description of Artificial Sequence: Synthetic oligonucleotide
gcuuccguggcuuuucggg

SEQ ID NO: 3148248 - RNA, 19 nt, Artificial Sequence
  Description of Artificial Sequence: Synthetic oligonucleotide
ucuccagauucgaacucug

SEQ ID NO: 3148249 - RNA, 19 nt, Artificial Sequence
  Description of Artificial Sequence: Synthetic oligonucleotide
ucagcagcaccacugucau

SEQ ID NO: 3148250 - RNA, 19 nt, Artificial Sequence
  Description of Artificial Sequence: Synthetic oligonucleotide
uugccuuuugcucccugga

SEQ ID NO: 3148251 - RNA, 19 nt, Artificial Sequence
  Description of Artificial Sequence: Synthetic oligonucleotide
accgucugucuccaaugac

SEQ ID NO: 3148252 - RNA, 19 nt, Artificial Sequence
  Description of Artificial Sequence: Synthetic oligonucleotide
uuccguggcuuuucgggag

SEQ ID NO: 3148253 - RNA, 19 nt, Artificial Sequence
  Description of Artificial Sequence: Synthetic oligonucleotide
cauagccgucuccagauuc

SEQ ID NO: 3148254 - RNA, 19 nt, Artificial Sequence
  Description of Artificial Sequence: Synthetic oligonucleotide
aaugacggacauagccguc

SEQ ID NO: 3148255 - RNA, 19 nt, Artificial Sequence
  Description of Artificial Sequence: Synthetic oligonucleotide
uccguggcuuuucgggagg

SEQ ID NO: 3148256 - RNA, 19 nt, Artificial Sequence
  Description of Artificial Sequence: Synthetic oligonucleotide
guggcuuuucgggaggccg

SEQ ID NO: 3148257 - RNA, 19 nt, Artificial Sequence
  Description of Artificial Sequence: Synthetic oligonucleotide
cuccgcauagucagugacc

SEQ ID NO: 3148258 - RNA, 19 nt, Artificial Sequence
  Description of Artificial Sequence: Synthetic oligonucleotide
cuccagauucgaacucugg

SEQ ID NO: 3148259 - RNA, 19 nt, Artificial Sequence
  Description of Artificial Sequence: Synthetic oligonucleotide
auagccgucuccagauucg

SEQ ID NO: 3148260 - RNA, 19 nt, Artificial Sequence
  Description of Artificial Sequence: Synthetic oligonucleotide
ccgucugucuccaaugacg

SEQ ID NO: 3148261 - RNA, 19 nt, Artificial Sequence
  Description of Artificial Sequence: Synthetic oligonucleotide
cacugucaugcuuccgugg

SEQ ID NO: 3148262 - RNA, 19 nt, Artificial Sequence
  Description of Artificial Sequence: Synthetic oligonucleotide
ccuuuugcucccuggaccg

SEQ ID NO: 3148263 - RNA, 19 nt, Artificial Sequence
  Description of Artificial Sequence: Synthetic oligonucleotide
uggcuuuucgggaggccgc

SEQ ID NO: 3148264 - RNA, 19 nt, Artificial Sequence
  Description of Artificial Sequence: Synthetic oligonucleotide
ugccuuuugcucccuggac

SEQ ID NO: 3148265 - RNA, 19 nt, Artificial Sequence
  Description of Artificial Sequence: Synthetic oligonucleotide
uucgaacucuggaucuccu

SEQ ID NO: 3148266 - RNA, 19 nt, Artificial Sequence
  Description of Artificial Sequence: Synthetic oligonucleotide
ccuguuuugccuuuugcuc

SEQ ID NO: 3148267 - RNA, 19 nt, Artificial Sequence
  Description of Artificial Sequence: Synthetic oligonucleotide
uuuugccuuuugcucccug

SEQ ID NO: 3148268 - RNA, 19 nt, Artificial Sequence
  Description of Artificial Sequence: Synthetic oligonucleotide
cuccuguuuugccuuuugc

SEQ ID NO: 3148269 - RNA, 19 nt, Artificial Sequence
  Description of Artificial Sequence: Synthetic oligonucleotide
uggaccgucugucuccaau

SEQ ID NO: 3148270 - RNA, 19 nt, Artificial Sequence
  Description of Artificial Sequence: Synthetic oligonucleotide
ugcuuccguggcuuuucgg

SEQ ID NO: 3148271 - RNA, 19 nt, Artificial Sequence
  Description of Artificial Sequence: Synthetic oligonucleotide
uuugcucccuggaccgucu

SEQ ID NO: 3148272 - RNA, 19 nt, Artificial Sequence
  Description of Artificial Sequence: Synthetic oligonucleotide
gacauagccgucuccagau

SEQ ID NO: 3148273 - RNA, 19 nt, Artificial Sequence
  Description of Artificial Sequence: Synthetic oligonucleotide
acggacauagccgucucca

SEQ ID NO: 3148274 - RNA, 19 nt, Artificial Sequence
  Description of Artificial Sequence: Synthetic oligonucleotide
gccuuuugcucccuggacc

SEQ ID NO: 3148275 - RNA, 19 nt, Artificial Sequence
  Description of Artificial Sequence: Synthetic oligonucleotide
gucagcagcaccacuguca

SEQ ID NO: 3148276 - RNA, 19 nt, Artificial Sequence
  Description of Artificial Sequence: Synthetic oligonucleotide
augcuuccguggcuuuucg

SEQ ID NO: 3148277 - RNA, 19 nt, Artificial Sequence
  Description of Artificial Sequence: Synthetic oligonucleotide
augacggacauagccgucu

SEQ ID NO: 3148278 - RNA, 19 nt, Artificial Sequence
  Description of Artificial Sequence: Synthetic oligonucleotide
gacggacauagccgucucc

SEQ ID NO: 3148279 - RNA, 19 nt, Artificial Sequence
  Description of Artificial Sequence: Synthetic oligonucleotide
cuccaggucagcagcacca

SEQ ID NO: 3148280 - RNA, 19 nt, Artificial Sequence
  Description of Artificial Sequence: Synthetic oligonucleotide
gaccgucugucuccaauga

SEQ ID NO: 3148281 - RNA, 19 nt, Artificial Sequence
  Description of Artificial Sequence: Synthetic oligonucleotide
cuccuucuccuccgcauag

SEQ ID NO: 3148282 - RNA, 19 nt, Artificial Sequence
  Description of Artificial Sequence: Synthetic oligonucleotide
gauucgaacucuggaucuc

SEQ ID NO: 3148283 - RNA, 19 nt, Artificial Sequence
  Description of Artificial Sequence: Synthetic oligonucleotide
cgucugucuccaaugacgg

SEQ ID NO: 3148284 - RNA, 19 nt, Artificial Sequence
  Description of Artificial Sequence: Synthetic oligonucleotide
ugucaugcuuccguggcuu

SEQ ID NO: 3148285 - RNA, 19 nt, Artificial Sequence
  Description of Artificial Sequence: Synthetic oligonucleotide
caaugacggacauagccgu

SEQ ID NO: 3148286 - RNA, 19 nt, Artificial Sequence
  Description of Artificial Sequence: Synthetic oligonucleotide
uuuugcucccuggaccguc

SEQ ID NO: 3148287 - RNA, 19 nt, Artificial Sequence
  Description of Artificial Sequence: Synthetic oligonucleotide
ugucuccaaugacggacau

SEQ ID NO: 3148288 - RNA, 19 nt, Artificial Sequence
  Description of Artificial Sequence: Synthetic oligonucleotide
cuuccguggcuuuucggga

SEQ ID NO: 3148289 - RNA, 19 nt, Artificial Sequence
  Description of Artificial Sequence: Synthetic oligonucleotide
gccgucuccagauucgaac

SEQ ID NO: 3148290 - RNA, 19 nt, Artificial Sequence
  Description of Artificial Sequence: Synthetic oligonucleotide
ugacggacauagccgucuc

SEQ ID NO: 3148291 - RNA, 19 nt, Artificial Sequence
  Description of Artificial Sequence: Synthetic oligonucleotide
uccuccgcauagucaguga

SEQ ID NO: 3148292 - RNA, 19 nt, Artificial Sequence
  Description of Artificial Sequence: Synthetic oligonucleotide
cuucuccuccgcauaguca

SEQ ID NO: 3148293 - RNA, 19 nt, Artificial Sequence
  Description of Artificial Sequence: Synthetic oligonucleotide
ggaccgucugucuccaaug

SEQ ID NO: 3148294 - RNA, 19 nt, Artificial Sequence
  Description of Artificial Sequence: Synthetic oligonucleotide
cugucuccaaugacggaca

SEQ ID NO: 3148295 - RNA, 19 nt, Artificial Sequence
  Description of Artificial Sequence: Synthetic oligonucleotide
caugcuuccguggcuuuuc

SEQ ID NO: 3148296 - RNA, 19 nt, Artificial Sequence
  Description of Artificial Sequence: Synthetic oligonucleotide
cuccaaugacggacauagc

SEQ ID NO: 3148297 - RNA, 19 nt, Artificial Sequence
  Description of Artificial Sequence: Synthetic oligonucleotide
ucgaacucuggaucuccuu

SEQ ID NO: 3148298 - RNA, 19 nt, Artificial Sequence
  Description of Artificial Sequence: Synthetic oligonucleotide
cauagucagugacccgcuc

SEQ ID NO: 3148299 - RNA, 19 nt, Artificial Sequence
  Description of Artificial Sequence: Synthetic oligonucleotide
ggacauagccgucuccaga

SEQ ID NO: 3148300 - RNA, 19 nt, Artificial Sequence
  Description of Artificial Sequence: Synthetic oligonucleotide
ucuccuccgcauagucagu

SEQ ID NO: 3148301 - RNA, 19 nt, Artificial Sequence
  Description of Artificial Sequence: Synthetic oligonucleotide
ugcucccuggaccgucugu

SEQ ID NO: 3148302 - RNA, 19 nt, Artificial Sequence
  Description of Artificial Sequence: Synthetic oligonucleotide
cgcauagucagugacccgc

SEQ ID NO: 3148303 - RNA, 19 nt, Artificial Sequence
  Description of Artificial Sequence: Synthetic oligonucleotide
cuccuccgcauagucagug

SEQ ID NO: 3148304 - RNA, 19 nt, Artificial Sequence
  Description of Artificial Sequence: Synthetic oligonucleotide
uagccgucuccagauucga

SEQ ID NO: 3148305 - RNA, 19 nt, Artificial Sequence
  Description of Artificial Sequence: Synthetic oligonucleotide
uugcucccuggaccgucug

SEQ ID NO: 3148306 - RNA, 19 nt, Artificial Sequence
  Description of Artificial Sequence: Synthetic oligonucleotide
agucagugacccgcuccag

SEQ ID NO: 3148307 - RNA, 19 nt, Artificial Sequence
  Description of Artificial Sequence: Synthetic oligonucleotide
uccuucuccuccgcauagu

SEQ ID NO: 3148308 - RNA, 19 nt, Artificial Sequence
  Description of Artificial Sequence: Synthetic oligonucleotide
cgaacucuggaucuccuuc

SEQ ID NO: 3148309 - RNA, 19 nt, Artificial Sequence
  Description of Artificial Sequence: Synthetic oligonucleotide
gcuccaggucagcagcacc

SEQ ID NO: 3148310 - RNA, 19 nt, Artificial Sequence
  Description of Artificial Sequence: Synthetic oligonucleotide
acauagccgucuccagauu

SEQ ID NO: 3148311 - RNA, 19 nt, Artificial Sequence
  Description of Artificial Sequence: Synthetic oligonucleotide
ccuccgcauagucagugac

SEQ ID NO: 3148312 - RNA, 19 nt, Artificial Sequence
  Description of Artificial Sequence: Synthetic oligonucleotide
cccuggaccgucugucucc

SEQ ID NO: 3148313 - RNA, 19 nt, Artificial Sequence
  Description of Artificial Sequence: Synthetic oligonucleotide
gucugucuccaaugacgga

SEQ ID NO: 3148314 - RNA, 19 nt, Artificial Sequence
  Description of Artificial Sequence: Synthetic oligonucleotide
ggaucuccuucuccuccgc

SEQ ID NO: 3148315 - RNA, 19 nt, Artificial Sequence
  Description of Artificial Sequence: Synthetic oligonucleotide
gucuccagauucgaacucu

SEQ ID NO: 3148316 - RNA, 19 nt, Artificial Sequence
  Description of Artificial Sequence: Synthetic oligonucleotide
ccuucuccuccgcauaguc

SEQ ID NO: 3148317 - RNA, 19 nt, Artificial Sequence
  Description of Artificial Sequence: Synthetic oligonucleotide
cagugacccgcuccagguc

SEQ ID NO: 3148318 - RNA, 19 nt, Artificial Sequence
  Description of Artificial Sequence: Synthetic oligonucleotide
gcuccuguuuugccuuuug

SEQ ID NO: 3148319 - RNA, 19 nt, Artificial Sequence
  Description of Artificial Sequence: Synthetic oligonucleotide
gcaccacugucaugcuucc

SEQ ID NO: 3148320 - RNA, 19 nt, Artificial Sequence
  Description of Artificial Sequence: Synthetic oligonucleotide
caccacugucaugcuuccg

SEQ ID NO: 3148321 - RNA, 19 nt, Artificial Sequence
  Description of Artificial Sequence: Synthetic oligonucleotide
ccagauucgaacucuggau

SEQ ID NO: 3148322 - RNA, 19 nt, Artificial Sequence
  Description of Artificial Sequence: Synthetic oligonucleotide
gacccgcuccaggucagca

SEQ ID NO: 3148323 - RNA, 19 nt, Artificial Sequence
  Description of Artificial Sequence: Synthetic oligonucleotide
cagcagcaccacugucaug

SEQ ID NO: 3148324 - RNA, 19 nt, Artificial Sequence
  Description of Artificial Sequence: Synthetic oligonucleotide
gcucccuggaccgucuguc

SEQ ID NO: 3148325 - RNA, 19 nt, Artificial Sequence
  Description of Artificial Sequence: Synthetic oligonucleotide
ccgcauagucagugacccg

SEQ ID NO: 3148326 - RNA, 19 nt, Artificial Sequence
  Description of Artificial Sequence: Synthetic oligonucleotide
cugucaugcuuccguggcu

SEQ ID NO: 3148327 - RNA, 19 nt, Artificial Sequence
  Description of Artificial Sequence: Synthetic oligonucleotide
cggacauagccgucuccag

SEQ ID NO: 3148328 - RNA, 19 nt, Artificial Sequence
  Description of Artificial Sequence: Synthetic oligonucleotide
gucuccaaugacggacaua

SEQ ID NO: 3148329 - RNA, 19 nt, Artificial Sequence
  Description of Artificial Sequence: Synthetic oligonucleotide
cgucuccagauucgaacuc

SEQ ID NO: 3148330 - RNA, 19 nt, Artificial Sequence
  Description of Artificial Sequence: Synthetic oligonucleotide
ccgucuccagauucgaacu

SEQ ID NO: 3148331 - RNA, 19 nt, Artificial Sequence
  Description of Artificial Sequence: Synthetic oligonucleotide
agccgucuccagauucgaa

SEQ ID NO: 3148332 - RNA, 19 nt, Artificial Sequence
  Description of Artificial Sequence: Synthetic oligonucleotide
gucaugcuuccguggcuuu

SEQ ID NO: 3148333 - RNA, 19 nt, Artificial Sequence
  Description of Artificial Sequence: Synthetic oligonucleotide
ccguggcuuuucgggaggc

SEQ ID NO: 3148334 - RNA, 19 nt, Artificial Sequence
  Description of Artificial Sequence: Synthetic oligonucleotide
guuuugccuuuugcucccu

SEQ ID NO: 3148335 - RNA, 19 nt, Artificial Sequence
  Description of Artificial Sequence: Synthetic oligonucleotide
gcauagucagugacccgcu

SEQ ID NO: 3148336 - RNA, 19 nt, Artificial Sequence
  Description of Artificial Sequence: Synthetic oligonucleotide
cuuuugcucccuggaccgu

SEQ ID NO: 3148337 - RNA, 19 nt, Artificial Sequence
  Description of Artificial Sequence: Synthetic oligonucleotide
cguggcuuuucgggaggcc

SEQ ID NO: 3148338 - RNA, 19 nt, Artificial Sequence
  Description of Artificial Sequence: Synthetic oligonucleotide
gcuuuucgggaggccgcuc

SEQ ID NO: 3148339 - RNA, 19 nt, Artificial Sequence
  Description of Artificial Sequence: Synthetic oligonucleotide
ggcuuuucgggaggccgcu

SEQ ID NO: 3148340 - RNA, 19 nt, Artificial Sequence
  Description of Artificial Sequence: Synthetic oligonucleotide
ccuggaccgucugucucca

SEQ ID NO: 3148341 - RNA, 19 nt, Artificial Sequence
  Description of Artificial Sequence: Synthetic oligonucleotide
cuggaccgucugucuccaa

SEQ ID NO: 3148342 - RNA, 19 nt, Artificial Sequence
  Description of Artificial Sequence: Synthetic oligonucleotide
gcagcaccacugucaugcu

SEQ ID NO: 3148343 - RNA, 19 nt, Artificial Sequence
  Description of Artificial Sequence: Synthetic oligonucleotide
ccgcuccaggucagcagca

SEQ ID NO: 3148344 - RNA, 19 nt, Artificial Sequence
  Description of Artificial Sequence: Synthetic oligonucleotide
cgcuccaggucagcagcac

SEQ ID NO: 3148345 - RNA, 19 nt, Artificial Sequence
  Description of Artificial Sequence: Synthetic oligonucleotide
ccgcuccuguuuugccuuu

SEQ ID NO: 3148346 - RNA, 19 nt, Artificial Sequence
  Description of Artificial Sequence: Synthetic oligonucleotide
cgcuccuguuuugccuuuu

SEQ ID NO: 3148347 - RNA, 19 nt, Artificial Sequence
  Description of Artificial Sequence: Synthetic oligonucleotide
gaagcugcuccccagcacc

SEQ ID NO: 3148348 - RNA, 19 nt, Artificial Sequence
  Description of Artificial Sequence: Synthetic oligonucleotide
aguuccuccucgaagcugc

SEQ ID NO: 3148349 - RNA, 19 nt, Artificial Sequence
  Description of Artificial Sequence: Synthetic oligonucleotide
uguccggccccucugcugg

SEQ ID NO: 3148350 - RNA, 19 nt, Artificial Sequence
  Description of Artificial Sequence: Synthetic oligonucleotide
ugcccugccucccugcugg

SEQ ID NO: 3148351 - RNA, 19 nt, Artificial Sequence
  Description of Artificial Sequence: Synthetic oligonucleotide
auguccggccuacaccugc

SEQ ID NO: 3148352 - RNA, 19 nt, Artificial Sequence
  Description of Artificial Sequence: Synthetic oligonucleotide
aguccuccgagagggaccc

SEQ ID NO: 3148353 - RNA, 19 nt, Artificial Sequence
  Description of Artificial Sequence: Synthetic oligonucleotide
ucgaagcugcuccccagca

SEQ ID NO: 3148354 - RNA, 19 nt, Artificial Sequence
  Description of Artificial Sequence: Synthetic oligonucleotide
agccucgggauguccggcc

SEQ ID NO: 3148355 - RNA, 19 nt, Artificial Sequence
  Description of Artificial Sequence: Synthetic oligonucleotide
uccgagagggacccaggcu

SEQ ID NO: 3148356 - RNA, 19 nt, Artificial Sequence
  Description of Artificial Sequence: Synthetic oligonucleotide
uccucgaagcugcucccca

SEQ ID NO: 3148357 - RNA, 19 nt, Artificial Sequence
  Description of Artificial Sequence: Synthetic oligonucleotide
cugcuccccagcaccaucc

SEQ ID NO: 3148358 - RNA, 19 nt, Artificial Sequence
  Description of Artificial Sequence: Synthetic oligonucleotide
agucccaggaguccuccga

SEQ ID NO: 3148359 - RNA, 19 nt, Artificial Sequence
  Description of Artificial Sequence: Synthetic oligonucleotide
uguccggccuacaccugcc

SEQ ID NO: 3148360 - RNA, 19 nt, Artificial Sequence
  Description of Artificial Sequence: Synthetic oligonucleotide
cucgaagcugcuccccagc

SEQ ID NO: 3148361 - RNA, 19 nt, Artificial Sequence
  Description of Artificial Sequence: Synthetic oligonucleotide
uccuccgagagggacccag

SEQ ID NO: 3148362 - RNA, 19 nt, Artificial Sequence
  Description of Artificial Sequence: Synthetic oligonucleotide
cuccgagagggacccaggc

SEQ ID NO: 3148363 - RNA, 19 nt, Artificial Sequence
  Description of Artificial Sequence: Synthetic oligonucleotide
gucccaggaguccuccgag

SEQ ID NO: 3148364 - RNA, 19 nt, Artificial Sequence
  Description of Artificial Sequence: Synthetic oligonucleotide
gaguccuccgagagggacc

SEQ ID NO: 3148365 - RNA, 19 nt, Artificial Sequence
  Description of Artificial Sequence: Synthetic oligonucleotide
gggauguccggccuacacc

SEQ ID NO: 3148366 - RNA, 19 nt, Artificial Sequence
  Description of Artificial Sequence: Synthetic oligonucleotide
uguguccggccccucugcu

SEQ ID NO: 3148367 - RNA, 19 nt, Artificial Sequence
  Description of Artificial Sequence: Synthetic oligonucleotide
gagucccaggaguccuccg

SEQ ID NO: 3148368 - RNA, 19 nt, Artificial Sequence
  Description of Artificial Sequence: Synthetic oligonucleotide
cuacaccugcccugccucc

SEQ ID NO: 3148369 - RNA, 19 nt, Artificial Sequence
  Description of Artificial Sequence: Synthetic oligonucleotide
uccggccuacaccugcccu

SEQ ID NO: 3148370 - RNA, 19 nt, Artificial Sequence
  Description of Artificial Sequence: Synthetic oligonucleotide
uccccagcaccauccuccc

SEQ ID NO: 3148371 - RNA, 19 nt, Artificial Sequence
  Description of Artificial Sequence: Synthetic oligonucleotide
uacaccugcccugccuccc

SEQ ID NO: 3148372 - RNA, 19 nt, Artificial Sequence
  Description of Artificial Sequence: Synthetic oligonucleotide
ucccaggaguccuccgaga

SEQ ID NO: 3148373 - RNA, 19 nt, Artificial Sequence
  Description of Artificial Sequence: Synthetic oligonucleotide
ggauguccggccuacaccu

SEQ ID NO: 3148374 - RNA, 19 nt, Artificial Sequence
  Description of Artificial Sequence: Synthetic oligonucleotide
guguguccggccccucugc

SEQ ID NO: 3148375 - RNA, 19 nt, Artificial Sequence
  Description of Artificial Sequence: Synthetic oligonucleotide
uccuccccagccucgggau

SEQ ID NO: 3148376 - RNA, 19 nt, Artificial Sequence
  Description of Artificial Sequence: Synthetic oligonucleotide
ugcuccccagcaccauccu

SEQ ID NO: 3148377 - RNA, 19 nt, Artificial Sequence
  Description of Artificial Sequence: Synthetic oligonucleotide
aagcugcuccccagcacca

SEQ ID NO: 3148378 - RNA, 19 nt, Artificial Sequence
  Description of Artificial Sequence: Synthetic oligonucleotide
gguguguccggccccucug

SEQ ID NO: 3148379 - RNA, 19 nt, Artificial Sequence
  Description of Artificial Sequence: Synthetic oligonucleotide
caguuccuccucgaagcug

SEQ ID NO: 3148380 - RNA, 19 nt, Artificial Sequence
  Description of Artificial Sequence: Synthetic oligonucleotide
guguccggccccucugcug

SEQ ID NO: 3148381 - RNA, 19 nt, Artificial Sequence
  Description of Artificial Sequence: Synthetic oligonucleotide
gauguccggccuacaccug

SEQ ID NO: 3148382 - RNA, 19 nt, Artificial Sequence
  Description of Artificial Sequence: Synthetic oligonucleotide
cucgggauguccggccuac

SEQ ID NO: 3148383 - RNA, 19 nt, Artificial Sequence
  Description of Artificial Sequence: Synthetic oligonucleotide
cauccuccccagccucggg

SEQ ID NO: 3148384 - RNA, 19 nt, Artificial Sequence
  Description of Artificial Sequence: Synthetic oligonucleotide
acaccugcccugccucccu

SEQ ID NO: 3148385 - RNA, 19 nt, Artificial Sequence
  Description of Artificial Sequence: Synthetic oligonucleotide
ccuacaccugcccugccuc

SEQ ID NO: 3148386 - RNA, 19 nt, Artificial Sequence
  Description of Artificial Sequence: Synthetic oligonucleotide
ggaguccuccgagagggac

SEQ ID NO: 3148387 - RNA, 19 nt, Artificial Sequence
  Description of Artificial Sequence: Synthetic oligonucleotide
ccagccucgggauguccgg

SEQ ID NO: 3148388 - RNA, 19 nt, Artificial Sequence
  Description of Artificial Sequence: Synthetic oligonucleotide
ccccaguuccuccucgaag

SEQ ID NO: 3148389 - RNA, 19 nt, Artificial Sequence
  Description of Artificial Sequence: Synthetic oligonucleotide
cccagcaccauccucccca

SEQ ID NO: 3148390 - RNA, 19 nt, Artificial Sequence
  Description of Artificial Sequence: Synthetic oligonucleotide
guccggccuacaccugccc

SEQ ID NO: 3148391 - RNA, 19 nt, Artificial Sequence
  Description of Artificial Sequence: Synthetic oligonucleotide
ggagucccaggaguccucc

SEQ ID NO: 3148392 - RNA, 19 nt, Artificial Sequence
  Description of Artificial Sequence: Synthetic oligonucleotide
cagccucgggauguccggc

SEQ ID NO: 3148393 - RNA, 19 nt, Artificial Sequence
  Description of Artificial Sequence: Synthetic oligonucleotide
ccucgaagcugcuccccag

SEQ ID NO: 3148394 - RNA, 19 nt, Artificial Sequence
  Description of Artificial Sequence: Synthetic oligonucleotide
ccuccgagagggacccagg

SEQ ID NO: 3148395 - RNA, 19 nt, Artificial Sequence
  Description of Artificial Sequence: Synthetic oligonucleotide
cugcccugccucccugcug

SEQ ID NO: 3148396 - RNA, 19 nt, Artificial Sequence
  Description of Artificial Sequence: Synthetic oligonucleotide
ccggccuacaccugcccug

SEQ ID NO: 3148397 - RNA, 19 nt, Artificial Sequence
  Description of Artificial Sequence: Synthetic oligonucleotide
ccucugcuggucccugggg

SEQ ID NO: 3148398 - RNA, 19 nt, Artificial Sequence
  Description of Artificial Sequence: Synthetic oligonucleotide
ccagcaccauccuccccag

SEQ ID NO: 3148399 - RNA, 19 nt, Artificial Sequence
  Description of Artificial Sequence: Synthetic oligonucleotide
ggggccggggagucccagg

SEQ ID NO: 3148400 - RNA, 19 nt, Artificial Sequence
  Description of Artificial Sequence: Synthetic oligonucleotide
gcugcuccccagcaccauc

SEQ ID NO: 3148401 - RNA, 19 nt, Artificial Sequence
  Description of Artificial Sequence: Synthetic oligonucleotide
ucgggauguccggccuaca

SEQ ID NO: 3148402 - RNA, 19 nt, Artificial Sequence
  Description of Artificial Sequence: Synthetic oligonucleotide
caccugcccugccucccug

SEQ ID NO: 3148403 - RNA, 19 nt, Artificial Sequence
  Description of Artificial Sequence: Synthetic oligonucleotide
gggccggggagucccagga

SEQ ID NO: 3148404 - RNA, 19 nt, Artificial Sequence
  Description of Artificial Sequence: Synthetic oligonucleotide
ccggggagucccaggaguc

SEQ ID NO: 3148405 - RNA, 19 nt, Artificial Sequence
  Description of Artificial Sequence: Synthetic oligonucleotide
ggccggggagucccaggag

SEQ ID NO: 3148406 - RNA, 19 nt, Artificial Sequence
  Description of Artificial Sequence: Synthetic oligonucleotide
ccauccuccccagccucgg

SEQ ID NO: 3148407 - RNA, 19 nt, Artificial Sequence
  Description of Artificial Sequence: Synthetic oligonucleotide
cgggauguccggccuacac

SEQ ID NO: 3148408 - RNA, 19 nt, Artificial Sequence
  Description of Artificial Sequence: Synthetic oligonucleotide
cgaagcugcuccccagcac

SEQ ID NO: 3148409 - RNA, 19 nt, Artificial Sequence
  Description of Artificial Sequence: Synthetic oligonucleotide
agcugcuccccagcaccau

SEQ ID NO: 3148410 - RNA, 19 nt, Artificial Sequence
  Description of Artificial Sequence: Synthetic oligonucleotide
gccggggagucccaggagu

SEQ ID NO: 3148411 - RNA, 19 nt, Artificial Sequence
  Description of Artificial Sequence: Synthetic oligonucleotide
ccccucugcuggucccugg

SEQ ID NO: 3148412 - RNA, 19 nt, Artificial Sequence
  Description of Artificial Sequence: Synthetic oligonucleotide
ccggccccucugcuggucc

SEQ ID NO: 3148413 - RNA, 19 nt, Artificial Sequence
  Description of Artificial Sequence: Synthetic oligonucleotide
gccuacaccugcccugccu

SEQ ID NO: 3148414 - RNA, 19 nt, Artificial Sequence
  Description of Artificial Sequence: Synthetic oligonucleotide
ggccuacaccugcccugcc

SEQ ID NO: 3148415 - RNA, 19 nt, Artificial Sequence
  Description of Artificial Sequence: Synthetic oligonucleotide
cggccuacaccugcccugc

SEQ ID NO: 3148416 - RNA, 19 nt, Artificial Sequence
  Description of Artificial Sequence: Synthetic oligonucleotide
gcccugccucccugcuggg

SEQ ID NO: 3148417 - RNA, 19 nt, Artificial Sequence
  Description of Artificial Sequence: Synthetic oligonucleotide
cggggagucccaggagucc

SEQ ID NO: 3148418 - RNA, 19 nt, Artificial Sequence
  Description of Artificial Sequence: Synthetic oligonucleotide
ggguguguccggccccucu

SEQ ID NO: 3148419 - RNA, 19 nt, Artificial Sequence
  Description of Artificial Sequence: Synthetic oligonucleotide
ccccagcaccauccucccc

SEQ ID NO: 3148420 - RNA, 19 nt, Artificial Sequence
  Description of Artificial Sequence: Synthetic oligonucleotide
gagagggacccaggcucuu

SEQ ID NO: 3148421 - RNA, 19 nt, Artificial Sequence
  Description of Artificial Sequence: Synthetic oligonucleotide
gccucgggauguccggccu

SEQ ID NO: 3148422 - RNA, 19 nt, Artificial Sequence
  Description of Artificial Sequence: Synthetic oligonucleotide
cggccccucugcugguccc

SEQ ID NO: 3148423 - RNA, 19 nt, Artificial Sequence
  Description of Artificial Sequence: Synthetic oligonucleotide
ccccagccucgggaugucc

SEQ ID NO: 3148424 - RNA, 19 nt, Artificial Sequence
  Description of Artificial Sequence: Synthetic oligonucleotide
guccggccccucugcuggu

SEQ ID NO: 3148425 - RNA, 19 nt, Artificial Sequence
  Description of Artificial Sequence: Synthetic oligonucleotide
guccuccgagagggaccca

SEQ ID NO: 3148426 - RNA, 19 nt, Artificial Sequence
  Description of Artificial Sequence: Synthetic oligonucleotide
ccucgggauguccggccua

SEQ ID NO: 3148427 - RNA, 19 nt, Artificial Sequence
  Description of Artificial Sequence: Synthetic oligonucleotide
gggguguguccggccccuc

SEQ ID NO: 3148428 - RNA, 19 nt, Artificial Sequence
  Description of Artificial Sequence: Synthetic oligonucleotide
ggccccucugcuggucccu

SEQ ID NO: 3148429 - RNA, 19 nt, Artificial Sequence
  Description of Artificial Sequence: Synthetic oligonucleotide
aaaacucacagagaaaccc

SEQ ID NO: 3148430 - RNA, 19 nt, Artificial Sequence
  Description of Artificial Sequence: Synthetic oligonucleotide
aaacucacagagaaacccu

SEQ ID NO: 3148431 - RNA, 19 nt, Artificial Sequence
  Description of Artificial Sequence: Synthetic oligonucleotide
aacucacagagaaacccug

SEQ ID NO: 3148432 - RNA, 19 nt, Artificial Sequence
  Description of Artificial Sequence: Synthetic oligonucleotide
aggcagacggaucucugug

SEQ ID NO: 3148433 - RNA, 19 nt, Artificial Sequence
  Description of Artificial Sequence: Synthetic oligonucleotide
agacggaucucugugaguu

SEQ ID NO: 3148434 - RNA, 19 nt, Artificial Sequence
  Description of Artificial Sequence: Synthetic oligonucleotide
gcagacggaucucugugag

SEQ ID NO: 3148435 - RNA, 19 nt, Artificial Sequence
  Description of Artificial Sequence: Synthetic oligonucleotide
acucacagagaaacccugu

SEQ ID NO: 3148436 - RNA, 19 nt, Artificial Sequence
  Description of Artificial Sequence: Synthetic oligonucleotide
gacggaucucugugaguuc

SEQ ID NO: 3148437 - RNA, 19 nt, Artificial Sequence
  Description of Artificial Sequence: Synthetic oligonucleotide
gaggcagacggaucucugu

SEQ ID NO: 3148438 - RNA, 19 nt, Artificial Sequence
  Description of Artificial Sequence: Synthetic oligonucleotide
ggcagacggaucucuguga

SEQ ID NO: 3148439 - RNA, 19 nt, Artificial Sequence
  Description of Artificial Sequence: Synthetic oligonucleotide
cagacggaucucugugagu

SEQ ID NO: 3148440 - RNA, 19 nt, Artificial Sequence
  Description of Artificial Sequence: Synthetic oligonucleotide
aauacuuugauuuguaaac

SEQ ID NO: 3148441 - RNA, 19 nt, Artificial Sequence
  Description of Artificial Sequence: Synthetic oligonucleotide
uugaagaauacuuugauuu

SEQ ID NO: 3148442 - RNA, 19 nt, Artificial Sequence
  Description of Artificial Sequence: Synthetic oligonucleotide
uaaacgacuuuccacacug

SEQ ID NO: 3148443 - RNA, 19 nt, Artificial Sequence
  Description of Artificial Sequence: Synthetic oligonucleotide
uuguaaacgacuuuccaca

SEQ ID NO: 3148444 - RNA, 19 nt, Artificial Sequence
  Description of Artificial Sequence: Synthetic oligonucleotide
uuuguaaacgacuuuccac

SEQ ID NO: 3148445 - RNA, 19 nt, Artificial Sequence
  Description of Artificial Sequence: Synthetic oligonucleotide
uuugauuuguaaacgacuu

SEQ ID NO: 3148446 - RNA, 19 nt, Artificial Sequence
  Description of Artificial Sequence: Synthetic oligonucleotide
ugauuuguaaacgacuuuc

SEQ ID NO: 3148447 - RNA, 19 nt, Artificial Sequence
  Description of Artificial Sequence: Synthetic oligonucleotide
auacuuugauuuguaaacg

SEQ ID NO: 3148448 - RNA, 19 nt, Artificial Sequence
  Description of Artificial Sequence: Synthetic oligonucleotide
acuuugauuuguaaacgac

SEQ ID NO: 3148449 - RNA, 19 nt, Artificial Sequence
  Description of Artificial Sequence: Synthetic oligonucleotide
auuuguaaacgacuuucca

SEQ ID NO: 3148450 - RNA, 19 nt, Artificial Sequence
  Description of Artificial Sequence: Synthetic oligonucleotide
gauuuguaaacgacuuucc

SEQ ID NO: 3148451 - RNA, 19 nt, Artificial Sequence
  Description of Artificial Sequence: Synthetic oligonucleotide
uuugaagaauacuuugauu

SEQ ID NO: 3148452 - RNA, 19 nt, Artificial Sequence
  Description of Artificial Sequence: Synthetic oligonucleotide
uuaugcauuugaagaguac

SEQ ID NO: 3148453 - RNA, 19 nt, Artificial Sequence
  Description of Artificial Sequence: Synthetic oligonucleotide
aacgacuuuccacacugau

SEQ ID NO: 3148454 - RNA, 19 nt, Artificial Sequence
  Description of Artificial Sequence: Synthetic oligonucleotide
uguaaacgacuuuccacac

SEQ ID NO: 3148455 - RNA, 19 nt, Artificial Sequence
  Description of Artificial Sequence: Synthetic oligonucleotide
agaauacuuugauuuguaa

SEQ ID NO: 3148456 - RNA, 19 nt, Artificial Sequence
  Description of Artificial Sequence: Synthetic oligonucleotide
uugauuuguaaacgacuuu

SEQ ID NO: 3148457 - RNA, 19 nt, Artificial Sequence
  Description of Artificial Sequence: Synthetic oligonucleotide
cuuugauuuguaaacgacu

SEQ ID NO: 3148458 - RNA, 19 nt, Artificial Sequence
  Description of Artificial Sequence: Synthetic oligonucleotide
aagaauacuuugauuugua

SEQ ID NO: 3148459 - RNA, 19 nt, Artificial Sequence
  Description of Artificial Sequence: Synthetic oligonucleotide
gaagaauacuuugauuugu

SEQ ID NO: 3148460 - RNA, 19 nt, Artificial Sequence
  Description of Artificial Sequence: Synthetic oligonucleotide
aaacgacuuuccacacuga

SEQ ID NO: 3148461 - RNA, 19 nt, Artificial Sequence
  Description of Artificial Sequence: Synthetic oligonucleotide
guaaacgacuuuccacacu

SEQ ID NO: 3148462 - RNA, 19 nt, Artificial Sequence
  Description of Artificial Sequence: Synthetic oligonucleotide
acgacuuuccacacugauu

SEQ ID NO: 3148463 - RNA, 19 nt, Artificial Sequence
  Description of Artificial Sequence: Synthetic oligonucleotide
aucucuaugaguucuagac

SEQ ID NO: 3148464 - RNA, 19 nt, Artificial Sequence
  Description of Artificial Sequence: Synthetic oligonucleotide
aaacaaaacaaaacaaaac

SEQ ID NO: 3148465 - RNA, 19 nt, Artificial Sequence
  Description of Artificial Sequence: Synthetic oligonucleotide
cuucaaagcacagagaaag

SEQ ID NO: 3148466 - RNA, 19 nt, Artificial Sequence
  Description of Artificial Sequence: Synthetic oligonucleotide
aaaacaaaacaaaacaaaa

SEQ ID NO: 3148467 - RNA, 19 nt, Artificial Sequence
  Description of Artificial Sequence: Synthetic oligonucleotide
ucaaagcacagagaaagcc

SEQ ID NO: 3148468 - RNA, 19 nt, Artificial Sequence
  Description of Artificial Sequence: Synthetic oligonucleotide
caaaacaaaacaaaacaaa

SEQ ID NO: 3148469 - RNA, 19 nt, Artificial Sequence
  Description of Artificial Sequence: Synthetic oligonucleotide
ugcagagugaguuccagga

SEQ ID NO: 3148470 - RNA, 19 nt, Artificial Sequence
  Description of Artificial Sequence: Synthetic oligonucleotide
caggcuucaaagcacagag

SEQ ID NO: 3148471 - RNA, 19 nt, Artificial Sequence
  Description of Artificial Sequence: Synthetic oligonucleotide
uucaaagcacagagaaagc

SEQ ID NO: 3148472 - RNA, 19 nt, Artificial Sequence
  Description of Artificial Sequence: Synthetic oligonucleotide
aggacaggcuucaaagcac

SEQ ID NO: 3148473 - RNA, 19 nt, Artificial Sequence
  Description of Artificial Sequence: Synthetic oligonucleotide
ggcuucaaagcacagagaa

SEQ ID NO: 3148474 - RNA, 19 nt, Artificial Sequence
  Description of Artificial Sequence: Synthetic oligonucleotide
cugcagagugaguuccagg

SEQ ID NO: 3148475 - RNA, 19 nt, Artificial Sequence
  Description of Artificial Sequence: Synthetic oligonucleotide
agccagaucucuaugaguu

SEQ ID NO: 3148476 - RNA, 19 nt, Artificial Sequence
  Description of Artificial Sequence: Synthetic oligonucleotide
caaagcacagagaaagccu

SEQ ID NO: 3148477 - RNA, 19 nt, Artificial Sequence
  Description of Artificial Sequence: Synthetic oligonucleotide
gcagccagaucucuaugag

SEQ ID NO: 3148478 - RNA, 19 nt, Artificial Sequence
  Description of Artificial Sequence: Synthetic oligonucleotide
acaggcuucaaagcacaga

SEQ ID NO: 3148479 - RNA, 19 nt, Artificial Sequence
  Description of Artificial Sequence: Synthetic oligonucleotide
gacaggcuucaaagcacag

SEQ ID NO: 3148480 - RNA, 19 nt, Artificial Sequence
  Description of Artificial Sequence: Synthetic oligonucleotide
ggcagccagaucucuauga

SEQ ID NO: 3148481 - RNA, 19 nt, Artificial Sequence
  Description of Artificial Sequence: Synthetic oligonucleotide
aggcagccagaucucuaug

SEQ ID NO: 3148482 - RNA, 19 nt, Artificial Sequence
  Description of Artificial Sequence: Synthetic oligonucleotide
gaggcagccagaucucuau

SEQ ID NO: 3148483 - RNA, 19 nt, Artificial Sequence
  Description of Artificial Sequence: Synthetic oligonucleotide
aggcuucaaagcacagaga

SEQ ID NO: 3148484 - RNA, 19 nt, Artificial Sequence
  Description of Artificial Sequence: Synthetic oligonucleotide
ggacaggcuucaaagcaca

SEQ ID NO: 3148485 - RNA, 19 nt, Artificial Sequence
  Description of Artificial Sequence: Synthetic oligonucleotide
gccagaucucuaugaguuc

SEQ ID NO: 3148486 - RNA, 19 nt, Artificial Sequence
  Description of Artificial Sequence: Synthetic oligonucleotide
cagccagaucucuaugagu

SEQ ID NO: 3148487 - RNA, 19 nt, Artificial Sequence
  Description of Artificial Sequence: Synthetic oligonucleotide
agaggcagccagaucucua

SEQ ID NO: 3148488 - RNA, 19 nt, Artificial Sequence
  Description of Artificial Sequence: Synthetic oligonucleotide
gcuucaaagcacagagaaa

SEQ ID NO: 3148489 - RNA, 19 nt, Artificial Sequence
  Description of Artificial Sequence: Synthetic oligonucleotide
ccuggucugcagagugagu

SEQ ID NO: 3148490 - RNA, 19 nt, Artificial Sequence
  Description of Artificial Sequence: Synthetic oligonucleotide
ucucgaauaaccaaaacca

SEQ ID NO: 3148491 - RNA, 19 nt, Artificial Sequence
  Description of Artificial Sequence: Synthetic oligonucleotide
aauaaccaaaaccaaacca

SEQ ID NO: 3148492 - RNA, 19 nt, Artificial Sequence
  Description of Artificial Sequence: Synthetic oligonucleotide
aaaccaaauuaacaacaac

SEQ ID NO: 3148493 - RNA, 19 nt, Artificial Sequence
  Description of Artificial Sequence: Synthetic oligonucleotide
aucuacagaguguaguucc

SEQ ID NO: 3148494 - RNA, 19 nt, Artificial Sequence
  Description of Artificial Sequence: Synthetic oligonucleotide
aaccaaaccaaauuaacaa

SEQ ID NO: 3148495 - RNA, 19 nt, Artificial Sequence
  Description of Artificial Sequence: Synthetic oligonucleotide
aaccaaauuaacaacaaca

SEQ ID NO: 3148496 - RNA, 19 nt, Artificial Sequence
  Description of Artificial Sequence: Synthetic oligonucleotide
aucccuaguacucaggagg

SEQ ID NO: 3148497 - RNA, 19 nt, Artificial Sequence
  Description of Artificial Sequence: Synthetic oligonucleotide
accaaauuaacaacaacac

SEQ ID NO: 3148498 - RNA, 19 nt, Artificial Sequence
  Description of Artificial Sequence: Synthetic oligonucleotide
gucucgaauaaccaaaacc

SEQ ID NO: 3148499 - RNA, 19 nt, Artificial Sequence
  Description of Artificial Sequence: Synthetic oligonucleotide
auaccugucucgaauaacc

SEQ ID NO: 3148500 - RNA, 19 nt, Artificial Sequence
  Description of Artificial Sequence: Synthetic oligonucleotide
uuuaaucccuaguacucag

SEQ ID NO: 3148501 - RNA, 19 nt, Artificial Sequence
  Description of Artificial Sequence: Synthetic oligonucleotide
aaaccaaaccaaauuaaca

SEQ ID NO: 3148502 - RNA, 19 nt, Artificial Sequence
  Description of Artificial Sequence: Synthetic oligonucleotide
aauaccugucucgaauaac

SEQ ID NO: 3148503 - RNA, 19 nt, Artificial Sequence
  Description of Artificial Sequence: Synthetic oligonucleotide
ucgaauaaccaaaaccaaa

SEQ ID NO: 3148504 - RNA, 19 nt, Artificial Sequence
  Description of Artificial Sequence: Synthetic oligonucleotide
guacucaggaggcagaggc

SEQ ID NO: 3148505 - RNA, 19 nt, Artificial Sequence
  Description of Artificial Sequence: Synthetic oligonucleotide
uaaucccuaguacucagga

SEQ ID NO: 3148506 - RNA, 19 nt, Artificial Sequence
  Description of Artificial Sequence: Synthetic oligonucleotide
agaaauaccugucucgaau

SEQ ID NO: 3148507 - RNA, 19 nt, Artificial Sequence
  Description of Artificial Sequence: Synthetic oligonucleotide
uuaaucccuaguacucagg

SEQ ID NO: 3148508 - RNA, 19 nt, Artificial Sequence
  Description of Artificial Sequence: Synthetic oligonucleotide
uguaguuccaggacagcca

SEQ ID NO: 3148509 - RNA, 19 nt, Artificial Sequence
  Description of Artificial Sequence: Synthetic oligonucleotide
uacagaguguaguuccagg

SEQ ID NO: 3148510 - RNA, 19 nt, Artificial Sequence
  Description of Artificial Sequence: Synthetic oligonucleotide
aaucccuaguacucaggag

SEQ ID NO: 3148511 - RNA, 19 nt, Artificial Sequence
  Description of Artificial Sequence: Synthetic oligonucleotide
auaaccaaaaccaaaccaa

SEQ ID NO: 3148512 - RNA, 19 nt, Artificial Sequence
  Description of Artificial Sequence: Synthetic oligonucleotide
agaguguaguuccaggaca

SEQ ID NO: 3148513 - RNA, 19 nt, Artificial Sequence
  Description of Artificial Sequence: Synthetic oligonucleotide
accaaaaccaaaccaaauu

SEQ ID NO: 3148514 - RNA, 19 nt, Artificial Sequence
  Description of Artificial Sequence: Synthetic oligonucleotide
aaauaccugucucgaauaa

SEQ ID NO: 3148515 - RNA, 19 nt, Artificial Sequence
  Description of Artificial Sequence: Synthetic oligonucleotide
ucccuaguacucaggaggc

SEQ ID NO: 3148516 - RNA, 19 nt, Artificial Sequence
  Description of Artificial Sequence: Synthetic oligonucleotide
ucuacagaguguaguucca

SEQ ID NO: 3148517 - RNA, 19 nt, Artificial Sequence
  Description of Artificial Sequence: Synthetic oligonucleotide
agagaaauaccugucucga

SEQ ID NO: 3148518 - RNA, 19 nt, Artificial Sequence
  Description of Artificial Sequence: Synthetic oligonucleotide
uggaucuacagaguguagu

SEQ ID NO: 3148519 - RNA, 19 nt, Artificial Sequence
  Description of Artificial Sequence: Synthetic oligonucleotide
gaguguaguuccaggacag

SEQ ID NO: 3148520 - RNA, 19 nt, Artificial Sequence
  Description of Artificial Sequence: Synthetic oligonucleotide
cgaauaaccaaaaccaaac

SEQ ID NO: 3148521 - RNA, 19 nt, Artificial Sequence
  Description of Artificial Sequence: Synthetic oligonucleotide
agccagggcguacacagag

SEQ ID NO: 3148522 - RNA, 19 nt, Artificial Sequence
  Description of Artificial Sequence: Synthetic oligonucleotide
gaaauaccugucucgaaua

SEQ ID NO: 3148523 - RNA, 19 nt, Artificial Sequence
  Description of Artificial Sequence: Synthetic oligonucleotide
agggcguacacagagaaau

SEQ ID NO: 3148524 - RNA, 19 nt, Artificial Sequence
  Description of Artificial Sequence: Synthetic oligonucleotide
uaccugucucgaauaacca

SEQ ID NO: 3148525 - RNA, 19 nt, Artificial Sequence
  Description of Artificial Sequence: Synthetic oligonucleotide
agccuggaucuacagagug

SEQ ID NO: 3148526 - RNA, 19 nt, Artificial Sequence
  Description of Artificial Sequence: Synthetic oligonucleotide
cagaguguaguuccaggac

SEQ ID NO: 3148527 - RNA, 19 nt, Artificial Sequence
  Description of Artificial Sequence: Synthetic oligonucleotide
guguaguuccaggacagcc

SEQ ID NO: 3148528 - RNA, 19 nt, Artificial Sequence
  Description of Artificial Sequence: Synthetic oligonucleotide
aguguaguuccaggacagc

SEQ ID NO: 3148529 - RNA, 19 nt, Artificial Sequence
  Description of Artificial Sequence: Synthetic oligonucleotide
gaucuacagaguguaguuc

SEQ ID NO: 3148530 - RNA, 19 nt, Artificial Sequence
  Description of Artificial Sequence: Synthetic oligonucleotide
cucgaauaaccaaaaccaa

SEQ ID NO: 3148531 - RNA, 19 nt, Artificial Sequence
  Description of Artificial Sequence: Synthetic oligonucleotide
cuuuaaucccuaguacuca

SEQ ID NO: 3148532 - RNA, 19 nt, Artificial Sequence
  Description of Artificial Sequence: Synthetic oligonucleotide
cuacagaguguaguuccag

SEQ ID NO: 3148533 - RNA, 19 nt, Artificial Sequence
  Description of Artificial Sequence: Synthetic oligonucleotide
gagaaauaccugucucgaa

SEQ ID NO: 3148534 - RNA, 19 nt, Artificial Sequence
  Description of Artificial Sequence: Synthetic oligonucleotide
gcaggcaggucucugugag

SEQ ID NO: 3148535 - RNA, 19 nt, Artificial Sequence
  Description of Artificial Sequence: Synthetic oligonucleotide
cuggaucuacagaguguag

SEQ ID NO: 3148536 - RNA, 19 nt, Artificial Sequence
  Description of Artificial Sequence: Synthetic oligonucleotide
cuaguacucaggaggcaga

SEQ ID NO: 3148537 - RNA, 19 nt, Artificial Sequence
  Description of Artificial Sequence: Synthetic oligonucleotide
ggcguacacagagaaauac

SEQ ID NO: 3148538 - RNA, 19 nt, Artificial Sequence
  Description of Artificial Sequence: Synthetic oligonucleotide
ccuaguacucaggaggcag

SEQ ID NO: 3148539 - RNA, 19 nt, Artificial Sequence
  Description of Artificial Sequence: Synthetic oligonucleotide
gcguacacagagaaauacc

SEQ ID NO: 3148540 - RNA, 19 nt, Artificial Sequence
  Description of Artificial Sequence: Synthetic oligonucleotide
aggcaggucucugugaguu

SEQ ID NO: 3148541 - RNA, 19 nt, Artificial Sequence
  Description of Artificial Sequence: Synthetic oligonucleotide
gcaggucucugugaguucc

SEQ ID NO: 3148542 - RNA, 19 nt, Artificial Sequence
  Description of Artificial Sequence: Synthetic oligonucleotide
aggacagccagggcguaca

SEQ ID NO: 3148543 - RNA, 19 nt, Artificial Sequence
  Description of Artificial Sequence: Synthetic oligonucleotide
ggaucuacagaguguaguu

SEQ ID NO: 3148544 - RNA, 19 nt, Artificial Sequence
  Description of Artificial Sequence: Synthetic oligonucleotide
cguacacagagaaauaccu

SEQ ID NO: 3148545 - RNA, 19 nt, Artificial Sequence
  Description of Artificial Sequence: Synthetic oligonucleotide
ccuggaucuacagagugua

SEQ ID NO: 3148546 - RNA, 19 nt, Artificial Sequence
  Description of Artificial Sequence: Synthetic oligonucleotide
ccagggcguacacagagaa

SEQ ID NO: 3148547 - RNA, 19 nt, Artificial Sequence
  Description of Artificial Sequence: Synthetic oligonucleotide
caggucucugugaguucca

SEQ ID NO: 3148548 - RNA, 19 nt, Artificial Sequence
  Description of Artificial Sequence: Synthetic oligonucleotide
caggacagccagggcguac

SEQ ID NO: 3148549 - RNA, 19 nt, Artificial Sequence
  Description of Artificial Sequence: Synthetic oligonucleotide
cagggcguacacagagaaa

SEQ ID NO: 3148550 - RNA, 19 nt, Artificial Sequence
  Description of Artificial Sequence: Synthetic oligonucleotide
ggcaggucucugugaguuc

SEQ ID NO: 3148551 - RNA, 19 nt, Artificial Sequence
  Description of Artificial Sequence: Synthetic oligonucleotide
cagccuggaucuacagagu

SEQ ID NO: 3148552 - RNA, 19 nt, Artificial Sequence
  Description of Artificial Sequence: Synthetic oligonucleotide
cagccagggcguacacaga

SEQ ID NO: 3148553 - RNA, 19 nt, Artificial Sequence
  Description of Artificial Sequence: Synthetic oligonucleotide
caggcaggucucugugagu

SEQ ID NO: 3148554 - RNA, 19 nt, Artificial Sequence
  Description of Artificial Sequence: Synthetic oligonucleotide
gccuggaucuacagagugu

SEQ ID NO: 3148555 - RNA, 19 nt, Artificial Sequence
  Description of Artificial Sequence: Synthetic oligonucleotide
gggcguacacagagaaaua

SEQ ID NO: 3148556 - RNA, 19 nt, Artificial Sequence
  Description of Artificial Sequence: Synthetic oligonucleotide
gccagggcguacacagaga

SEQ ID NO: 3148557 - RNA, 19 nt, Artificial Sequence
  Description of Artificial Sequence: Synthetic oligonucleotide
cccuaguacucaggaggca

SEQ ID NO: 3148558 - RNA, 19 nt, Artificial Sequence
  Description of Artificial Sequence: Synthetic oligonucleotide
ccaggacagccagggcgua

SEQ ID NO: 3148559 - RNA, 19 nt, Artificial Sequence
  Description of Artificial Sequence: Synthetic oligonucleotide
ccaggccagccuggaucua

SEQ ID NO: 3148560 - RNA, 19 nt, Artificial Sequence
  Description of Artificial Sequence: Synthetic oligonucleotide
aaacaaaacaaaacaaaac

SEQ ID NO: 3148561 - RNA, 19 nt, Artificial Sequence
  Description of Artificial Sequence: Synthetic oligonucleotide
uucaaagccagccuggucu

SEQ ID NO: 3148562 - RNA, 19 nt, Artificial Sequence
  Description of Artificial Sequence: Synthetic oligonucleotide
aaaacaaaacaaaacaaaa

SEQ ID NO: 3148563 - RNA, 19 nt, Artificial Sequence
  Description of Artificial Sequence: Synthetic oligonucleotide
agagcuaggugcuaggaca

SEQ ID NO: 3148564 - RNA, 19 nt, Artificial Sequence
  Description of Artificial Sequence: Synthetic oligonucleotide
caaaacaaaacaaaacaaa

SEQ ID NO: 3148565 - RNA, 19 nt, Artificial Sequence
  Description of Artificial Sequence: Synthetic oligonucleotide
uacagagauacccugucuc

SEQ ID NO: 3148566 - RNA, 19 nt, Artificial Sequence
  Description of Artificial Sequence: Synthetic oligonucleotide
ugcuaggacagccagcgcu

SEQ ID NO: 3148567 - RNA, 19 nt, Artificial Sequence
  Description of Artificial Sequence: Synthetic oligonucleotide
uggucuacagagcuaggug

SEQ ID NO: 3148568 - RNA, 19 nt, Artificial Sequence
  Description of Artificial Sequence: Synthetic oligonucleotide
uaggugcuaggacagccag

SEQ ID NO: 3148569 - RNA, 19 nt, Artificial Sequence
  Description of Artificial Sequence: Synthetic oligonucleotide
ggucuacagagcuaggugc

SEQ ID NO: 3148570 - RNA, 19 nt, Artificial Sequence
  Description of Artificial Sequence: Synthetic oligonucleotide
ggugcuaggacagccagcg

SEQ ID NO: 3148571 - RNA, 19 nt, Artificial Sequence
  Description of Artificial Sequence: Synthetic oligonucleotide
acagagauacccugucuca

SEQ ID NO: 3148572 - RNA, 19 nt, Artificial Sequence
  Description of Artificial Sequence: Synthetic oligonucleotide
uacagagcuaggugcuagg

SEQ ID NO: 3148573 - RNA, 19 nt, Artificial Sequence
  Description of Artificial Sequence: Synthetic oligonucleotide
cagcgcuauacagagauac

SEQ ID NO: 3148574 - RNA, 19 nt, Artificial Sequence
  Description of Artificial Sequence: Synthetic oligonucleotide
cagccagcgcuauacagag

SEQ ID NO: 3148575 - RNA, 19 nt, Artificial Sequence
  Description of Artificial Sequence: Synthetic oligonucleotide
agcgcuauacagagauacc

SEQ ID NO: 3148576 - RNA, 19 nt, Artificial Sequence
  Description of Artificial Sequence: Synthetic oligonucleotide
agagauacccugucucaaa

SEQ ID NO: 3148577 - RNA, 19 nt, Artificial Sequence
  Description of Artificial Sequence: Synthetic oligonucleotide
gagauacccugucucaaaa

SEQ ID NO: 3148578 - RNA, 19 nt, Artificial Sequence
  Description of Artificial Sequence: Synthetic oligonucleotide
gagcuaggugcuaggacag

SEQ ID NO: 3148579 - RNA, 19 nt, Artificial Sequence
  Description of Artificial Sequence: Synthetic oligonucleotide
cuacagagcuaggugcuag

SEQ ID NO: 3148580 - RNA, 19 nt, Artificial Sequence
  Description of Artificial Sequence: Synthetic oligonucleotide
cagagcuaggugcuaggac

SEQ ID NO: 3148581 - RNA, 19 nt, Artificial Sequence
  Description of Artificial Sequence: Synthetic oligonucleotide
acagccagcgcuauacaga

SEQ ID NO: 3148582 - RNA, 19 nt, Artificial Sequence
  Description of Artificial Sequence: Synthetic oligonucleotide
gcgcuauacagagauaccc

SEQ ID NO: 3148583 - RNA, 19 nt, Artificial Sequence
  Description of Artificial Sequence: Synthetic oligonucleotide
cuaggugcuaggacagcca

SEQ ID NO: 3148584 - RNA, 19 nt, Artificial Sequence
  Description of Artificial Sequence: Synthetic oligonucleotide
agcuaggugcuaggacagc

SEQ ID NO: 3148585 - RNA, 19 nt, Artificial Sequence
  Description of Artificial Sequence: Synthetic oligonucleotide
aggugcuaggacagccagc

SEQ ID NO: 3148586 - RNA, 19 nt, Artificial Sequence
  Description of Artificial Sequence: Synthetic oligonucleotide
acagagcuaggugcuagga

SEQ ID NO: 3148587 - RNA, 19 nt, Artificial Sequence
  Description of Artificial Sequence: Synthetic oligonucleotide
guucaaagccagccugguc

SEQ ID NO: 3148588 - RNA, 19 nt, Artificial Sequence
  Description of Artificial Sequence: Synthetic oligonucleotide
gcuaggugcuaggacagcc

SEQ ID NO: 3148589 - RNA, 19 nt, Artificial Sequence
  Description of Artificial Sequence: Synthetic oligonucleotide
ucuacagagcuaggugcua

SEQ ID NO: 3148590 - RNA, 19 nt, Artificial Sequence
  Description of Artificial Sequence: Synthetic oligonucleotide
gccagcgcuauacagagau

SEQ ID NO: 3148591 - RNA, 19 nt, Artificial Sequence
  Description of Artificial Sequence: Synthetic oligonucleotide
cagagauacccugucucaa

SEQ ID NO: 3148592 - RNA, 19 nt, Artificial Sequence
  Description of Artificial Sequence: Synthetic oligonucleotide
gugcuaggacagccagcgc

SEQ ID NO: 3148593 - RNA, 19 nt, Artificial Sequence
  Description of Artificial Sequence: Synthetic oligonucleotide
caaagccagccuggucuac

SEQ ID NO: 3148594 - RNA, 19 nt, Artificial Sequence
  Description of Artificial Sequence: Synthetic oligonucleotide
agccagcgcuauacagaga

SEQ ID NO: 3148595 - RNA, 19 nt, Artificial Sequence
  Description of Artificial Sequence: Synthetic oligonucleotide
cuaggacagccagcgcuau

SEQ ID NO: 3148596 - RNA, 19 nt, Artificial Sequence
  Description of Artificial Sequence: Synthetic oligonucleotide
ccagcgcuauacagagaua

SEQ ID NO: 3148597 - RNA, 19 nt, Artificial Sequence
  Description of Artificial Sequence: Synthetic oligonucleotide
ugaauuugagaccagccug

SEQ ID NO: 3148598 - RNA, 19 nt, Artificial Sequence
  Description of Artificial Sequence: Synthetic oligonucleotide
uuugaauuugagaccagcc

SEQ ID NO: 3148599 - RNA, 19 nt, Artificial Sequence
  Description of Artificial Sequence: Synthetic oligonucleotide
uagcauaccccuuuuaucc

SEQ ID NO: 3148600 - RNA, 19 nt, Artificial Sequence
  Description of Artificial Sequence: Synthetic oligonucleotide
uugaauuugagaccagccu

SEQ ID NO: 3148601 - RNA, 19 nt, Artificial Sequence
  Description of Artificial Sequence: Synthetic oligonucleotide
uuuuaucccagcacucggg

SEQ ID NO: 3148602 - RNA, 19 nt, Artificial Sequence
  Description of Artificial Sequence: Synthetic oligonucleotide
auagcauaccccuuuuauc

SEQ ID NO: 3148603 - RNA, 19 nt, Artificial Sequence
  Description of Artificial Sequence: Synthetic oligonucleotide
agcauaccccuuuuauccc

SEQ ID NO: 3148604 - RNA, 19 nt, Artificial Sequence
  Description of Artificial Sequence: Synthetic oligonucleotide
aucuuugaauuugagacca

SEQ ID NO: 3148605 - RNA, 19 nt, Artificial Sequence
  Description of Artificial Sequence: Synthetic oligonucleotide
cuuuuaucccagcacucgg

SEQ ID NO: 3148606 - RNA, 19 nt, Artificial Sequence
  Description of Artificial Sequence: Synthetic oligonucleotide
uuuaucccagcacucggga

SEQ ID NO: 3148607 - RNA, 19 nt, Artificial Sequence
  Description of Artificial Sequence: Synthetic oligonucleotide
accccuuuuaucccagcac

SEQ ID NO: 3148608 - RNA, 19 nt, Artificial Sequence
  Description of Artificial Sequence: Synthetic oligonucleotide
cuuugaauuugagaccagc

SEQ ID NO: 3148609 - RNA, 19 nt, Artificial Sequence
  Description of Artificial Sequence: Synthetic oligonucleotide
ucuuugaauuugagaccag

SEQ ID NO: 3148610 - RNA, 19 nt, Artificial Sequence
  Description of Artificial Sequence: Synthetic oligonucleotide
gauagcauaccccuuuuau

SEQ ID NO: 3148611 - RNA, 19 nt, Artificial Sequence
  Description of Artificial Sequence: Synthetic oligonucleotide
uaccccuuuuaucccagca

SEQ ID NO: 3148612 - RNA, 19 nt, Artificial Sequence
  Description of Artificial Sequence: Synthetic oligonucleotide
auaccccuuuuaucccagc

SEQ ID NO: 3148613 - RNA, 19 nt, Artificial Sequence
  Description of Artificial Sequence: Synthetic oligonucleotide
aauuugagaccagccuggu

SEQ ID NO: 3148614 - RNA, 19 nt, Artificial Sequence
  Description of Artificial Sequence: Synthetic oligonucleotide
ugauagcauaccccuuuua

SEQ ID NO: 3148615 - RNA, 19 nt, Artificial Sequence
  Description of Artificial Sequence: Synthetic oligonucleotide
agacaggcagaucuuugaa

SEQ ID NO: 3148616 - RNA, 19 nt, Artificial Sequence
  Description of Artificial Sequence: Synthetic oligonucleotide
ccuuuuaucccagcacucg

SEQ ID NO: 3148617 - RNA, 19 nt, Artificial Sequence
  Description of Artificial Sequence: Synthetic oligonucleotide
augauagcauaccccuuuu

SEQ ID NO: 3148618 - RNA, 19 nt, Artificial Sequence
  Description of Artificial Sequence: Synthetic oligonucleotide
gggccaugauagcauaccc

SEQ ID NO: 3148619 - RNA, 19 nt, Artificial Sequence
  Description of Artificial Sequence: Synthetic oligonucleotide
gacaggcagaucuuugaau

SEQ ID NO: 3148620 - RNA, 19 nt, Artificial Sequence
  Description of Artificial Sequence: Synthetic oligonucleotide
gccaugauagcauaccccu

SEQ ID NO: 3148621 - RNA, 19 nt, Artificial Sequence
  Description of Artificial Sequence: Synthetic oligonucleotide
uagagacaggcagaucuuu

SEQ ID NO: 3148622 - RNA, 19 nt, Artificial Sequence
  Description of Artificial Sequence: Synthetic oligonucleotide
ggccaugauagcauacccc

SEQ ID NO: 3148623 - RNA, 19 nt, Artificial Sequence
  Description of Artificial Sequence: Synthetic oligonucleotide
caugauagcauaccccuuu

SEQ ID NO: 3148624 - RNA, 19 nt, Artificial Sequence
  Description of Artificial Sequence: Synthetic oligonucleotide
gcauaccccuuuuauccca

SEQ ID NO: 3148625 - RNA, 19 nt, Artificial Sequence
  Description of Artificial Sequence: Synthetic oligonucleotide
cccuuuuaucccagcacuc

SEQ ID NO: 3148626 - RNA, 19 nt, Artificial Sequence
  Description of Artificial Sequence: Synthetic oligonucleotide
cagccgggccaugauagca

SEQ ID NO: 3148627 - RNA, 19 nt, Artificial Sequence
  Description of Artificial Sequence: Synthetic oligonucleotide
agccgggccaugauagcau

SEQ ID NO: 3148628 - RNA, 19 nt, Artificial Sequence
  Description of Artificial Sequence: Synthetic oligonucleotide
cgggccaugauagcauacc

SEQ ID NO: 3148629 - RNA, 19 nt, Artificial Sequence
  Description of Artificial Sequence: Synthetic oligonucleotide
ccccuuuuaucccagcacu

SEQ ID NO: 3148630 - RNA, 19 nt, Artificial Sequence
  Description of Artificial Sequence: Synthetic oligonucleotide
ccgggccaugauagcauac

SEQ ID NO: 3148631 - RNA, 19 nt, Artificial Sequence
  Description of Artificial Sequence: Synthetic oligonucleotide
gccgggccaugauagcaua

SEQ ID NO: 3148632 - RNA, 19 nt, Artificial Sequence
  Description of Artificial Sequence: Synthetic oligonucleotide
ccaugauagcauaccccuu

SEQ ID NO: 3148633 - RNA, 19 nt, Artificial Sequence
  Description of Artificial Sequence: Synthetic oligonucleotide
acaacuauaacuccuguuc

SEQ ID NO: 3148634 - RNA, 19 nt, Artificial Sequence
  Description of Artificial Sequence: Synthetic oligonucleotide
aggucuaacacagaaaccc

SEQ ID NO: 3148635 - RNA, 19 nt, Artificial Sequence
  Description of Artificial Sequence: Synthetic oligonucleotide
uuagcucacaacuauaacu

SEQ ID NO: 3148636 - RNA, 19 nt, Artificial Sequence
  Description of Artificial Sequence: Synthetic oligonucleotide
uaacacagaaacccuaucu

SEQ ID NO: 3148637 - RNA, 19 nt, Artificial Sequence
  Description of Artificial Sequence: Synthetic oligonucleotide
uccaggaggucuaacacag

SEQ ID NO: 3148638 - RNA, 19 nt, Artificial Sequence
  Description of Artificial Sequence: Synthetic oligonucleotide
uauaacuccuguuccagga

SEQ ID NO: 3148639 - RNA, 19 nt, Artificial Sequence
  Description of Artificial Sequence: Synthetic oligonucleotide
uagcucacaacuauaacuc

SEQ ID NO: 3148640 - RNA, 19 nt, Artificial Sequence
  Description of Artificial Sequence: Synthetic oligonucleotide
ugaguucggaccaagguuc

SEQ ID NO: 3148641 - RNA, 19 nt, Artificial Sequence
  Description of Artificial Sequence: Synthetic oligonucleotide
aacuauaacuccuguucca

SEQ ID NO: 3148642 - RNA, 19 nt, Artificial Sequence
  Description of Artificial Sequence: Synthetic oligonucleotide
uguuagcucacaacuauaa

SEQ ID NO: 3148643 - RNA, 19 nt, Artificial Sequence
  Description of Artificial Sequence: Synthetic oligonucleotide
uaacuccuguuccaggagg

SEQ ID NO: 3148644 - RNA, 19 nt, Artificial Sequence
  Description of Artificial Sequence: Synthetic oligonucleotide
agcucacaacuauaacucc

SEQ ID NO: 3148645 - RNA, 19 nt, Artificial Sequence
  Description of Artificial Sequence: Synthetic oligonucleotide
uguuccaggaggucuaaca

SEQ ID NO: 3148646 - RNA, 19 nt, Artificial Sequence
  Description of Artificial Sequence: Synthetic oligonucleotide
uagaaugugugccuggcau

SEQ ID NO: 3148647 - RNA, 19 nt, Artificial Sequence
  Description of Artificial Sequence: Synthetic oligonucleotide
caacuauaacuccuguucc

SEQ ID NO: 3148648 - RNA, 19 nt, Artificial Sequence
  Description of Artificial Sequence: Synthetic oligonucleotide
ggaggucuaacacagaaac

SEQ ID NO: 3148649 - RNA, 19 nt, Artificial Sequence
  Description of Artificial Sequence: Synthetic oligonucleotide
ucuaacacagaaacccuau

SEQ ID NO: 3148650 - RNA, 19 nt, Artificial Sequence
  Description of Artificial Sequence: Synthetic oligonucleotide
ucagugguagaaugugugc

SEQ ID NO: 3148651 - RNA, 19 nt, Artificial Sequence
  Description of Artificial Sequence: Synthetic oligonucleotide
acacagaaacccuaucuga

SEQ ID NO: 3148652 - RNA, 19 nt, Artificial Sequence
  Description of Artificial Sequence: Synthetic oligonucleotide
cucagugguagaaugugug

SEQ ID NO: 3148653 - RNA, 19 nt, Artificial Sequence
  Description of Artificial Sequence: Synthetic oligonucleotide
cucacaacuauaacuccug

SEQ ID NO: 3148654 - RNA, 19 nt, Artificial Sequence
  Description of Artificial Sequence: Synthetic oligonucleotide
cuauaacuccuguuccagg

SEQ ID NO: 3148655 - RNA, 19 nt, Artificial Sequence
  Description of Artificial Sequence: Synthetic oligonucleotide
acuauaacuccuguuccag

SEQ ID NO: 3148656 - RNA, 19 nt, Artificial Sequence
  Description of Artificial Sequence: Synthetic oligonucleotide
agugguagaaugugugccu

SEQ ID NO: 3148657 - RNA, 19 nt, Artificial Sequence
  Description of Artificial Sequence: Synthetic oligonucleotide
auaacuccuguuccaggag

SEQ ID NO: 3148658 - RNA, 19 nt, Artificial Sequence
  Description of Artificial Sequence: Synthetic oligonucleotide
augugugaggcccugaguu

SEQ ID NO: 3148659 - RNA, 19 nt, Artificial Sequence
  Description of Artificial Sequence: Synthetic oligonucleotide
ugguagaaugugugccugg

SEQ ID NO: 3148660 - RNA, 19 nt, Artificial Sequence
  Description of Artificial Sequence: Synthetic oligonucleotide
agaaugugugccuggcaug

SEQ ID NO: 3148661 - RNA, 19 nt, Artificial Sequence
  Description of Artificial Sequence: Synthetic oligonucleotide
guuccaggaggucuaacac

SEQ ID NO: 3148662 - RNA, 19 nt, Artificial Sequence
  Description of Artificial Sequence: Synthetic oligonucleotide
ucacaacuauaacuccugu

SEQ ID NO: 3148663 - RNA, 19 nt, Artificial Sequence
  Description of Artificial Sequence: Synthetic oligonucleotide
gaggcccugaguucggacc

SEQ ID NO: 3148664 - RNA, 19 nt, Artificial Sequence
  Description of Artificial Sequence: Synthetic oligonucleotide
cagugguagaaugugugcc

SEQ ID NO: 3148665 - RNA, 19 nt, Artificial Sequence
  Description of Artificial Sequence: Synthetic oligonucleotide
ugugugccuggcaugugug

SEQ ID NO: 3148666 - RNA, 19 nt, Artificial Sequence
  Description of Artificial Sequence: Synthetic oligonucleotide
cacauguuagcucacaacu

SEQ ID NO: 3148667 - RNA, 19 nt, Artificial Sequence
  Description of Artificial Sequence: Synthetic oligonucleotide
acagaaacccuaucugaaa

SEQ ID NO: 3148668 - RNA, 19 nt, Artificial Sequence
  Description of Artificial Sequence: Synthetic oligonucleotide
ugugccuggcaugugugag

SEQ ID NO: 3148669 - RNA, 19 nt, Artificial Sequence
  Description of Artificial Sequence: Synthetic oligonucleotide
gugugaggcccugaguucg

SEQ ID NO: 3148670 - RNA, 19 nt, Artificial Sequence
  Description of Artificial Sequence: Synthetic oligonucleotide
ugugaggcccugaguucgg

SEQ ID NO: 3148671 - RNA, 19 nt, Artificial Sequence
  Description of Artificial Sequence: Synthetic oligonucleotide
gaggucuaacacagaaacc

SEQ ID NO: 3148672 - RNA, 19 nt, Artificial Sequence
  Description of Artificial Sequence: Synthetic oligonucleotide
cuaacacagaaacccuauc

SEQ ID NO: 3148673 - RNA, 19 nt, Artificial Sequence
  Description of Artificial Sequence: Synthetic oligonucleotide
augugugccuggcaugugu

SEQ ID NO: 3148674 - RNA, 19 nt, Artificial Sequence
  Description of Artificial Sequence: Synthetic oligonucleotide
uucggaccaagguucaauu

SEQ ID NO: 3148675 - RNA, 19 nt, Artificial Sequence
  Description of Artificial Sequence: Synthetic oligonucleotide
cacagaaacccuaucugaa

SEQ ID NO: 3148676 - RNA, 19 nt, Artificial Sequence
  Description of Artificial Sequence: Synthetic oligonucleotide
aacuccuguuccaggaggu

SEQ ID NO: 3148677 - RNA, 19 nt, Artificial Sequence
  Description of Artificial Sequence: Synthetic oligonucleotide
ucggaccaagguucaauuc

SEQ ID NO: 3148678 - RNA, 19 nt, Artificial Sequence
  Description of Artificial Sequence: Synthetic oligonucleotide
uccuguuccaggaggucua

SEQ ID NO: 3148679 - RNA, 19 nt, Artificial Sequence
  Description of Artificial Sequence: Synthetic oligonucleotide
caggaggucuaacacagaa

SEQ ID NO: 3148680 - RNA, 19 nt, Artificial Sequence
  Description of Artificial Sequence: Synthetic oligonucleotide
cccagcacccacauguuag

SEQ ID NO: 3148681 - RNA, 19 nt, Artificial Sequence
  Description of Artificial Sequence: Synthetic oligonucleotide
cauguuagcucacaacuau

SEQ ID NO: 3148682 - RNA, 19 nt, Artificial Sequence
  Description of Artificial Sequence: Synthetic oligonucleotide
gguagaaugugugccuggc

SEQ ID NO: 3148683 - RNA, 19 nt, Artificial Sequence
  Description of Artificial Sequence: Synthetic oligonucleotide
aaugugugccuggcaugug

SEQ ID NO: 3148684 - RNA, 19 nt, Artificial Sequence
  Description of Artificial Sequence: Synthetic oligonucleotide
gugguagaaugugugccug

SEQ ID NO: 3148685 - RNA, 19 nt, Artificial Sequence
  Description of Artificial Sequence: Synthetic oligonucleotide
aggcccugaguucggacca

SEQ ID NO: 3148686 - RNA, 19 nt, Artificial Sequence
  Description of Artificial Sequence: Synthetic oligonucleotide
guagaaugugugccuggca

SEQ ID NO: 3148687 - RNA, 19 nt, Artificial Sequence
  Description of Artificial Sequence: Synthetic oligonucleotide
gaaugugugccuggcaugu

SEQ ID NO: 3148688 - RNA, 19 nt, Artificial Sequence
  Description of Artificial Sequence: Synthetic oligonucleotide
gcaugugugaggcccugag

SEQ ID NO: 3148689 - RNA, 19 nt, Artificial Sequence
  Description of Artificial Sequence: Synthetic oligonucleotide
ugaggcccugaguucggac

SEQ ID NO: 3148690 - RNA, 19 nt, Artificial Sequence
  Description of Artificial Sequence: Synthetic oligonucleotide
acauguuagcucacaacua

SEQ ID NO: 3148691 - RNA, 19 nt, Artificial Sequence
  Description of Artificial Sequence: Synthetic oligonucleotide
ccacauguuagcucacaac

SEQ ID NO: 3148692 - RNA, 19 nt, Artificial Sequence
  Description of Artificial Sequence: Synthetic oligonucleotide
acuccuguuccaggagguc

SEQ ID NO: 3148693 - RNA, 19 nt, Artificial Sequence
  Description of Artificial Sequence: Synthetic oligonucleotide
ucccagcacccacauguua

SEQ ID NO: 3148694 - RNA, 19 nt, Artificial Sequence
  Description of Artificial Sequence: Synthetic oligonucleotide
gucuaacacagaaacccua

SEQ ID NO: 3148695 - RNA, 19 nt, Artificial Sequence
  Description of Artificial Sequence: Synthetic oligonucleotide
aggaggucuaacacagaaa

SEQ ID NO: 3148696 - RNA, 19 nt, Artificial Sequence
  Description of Artificial Sequence: Synthetic oligonucleotide
cugaguucggaccaagguu

SEQ ID NO: 3148697 - RNA, 19 nt, Artificial Sequence
  Description of Artificial Sequence: Synthetic oligonucleotide
auguuagcucacaacuaua

SEQ ID NO: 3148698 - RNA, 19 nt, Artificial Sequence
  Description of Artificial Sequence: Synthetic oligonucleotide
gaguucggaccaagguuca

SEQ ID NO: 3148699 - RNA, 19 nt, Artificial Sequence
  Description of Artificial Sequence: Synthetic oligonucleotide
gugugccuggcauguguga

SEQ ID NO: 3148700 - RNA, 19 nt, Artificial Sequence
  Description of Artificial Sequence: Synthetic oligonucleotide
cacaacuauaacuccuguu

SEQ ID NO: 3148701 - RNA, 19 nt, Artificial Sequence
  Description of Artificial Sequence: Synthetic oligonucleotide
cccugaguucggaccaagg

SEQ ID NO: 3148702 - RNA, 19 nt, Artificial Sequence
  Description of Artificial Sequence: Synthetic oligonucleotide
uggcaugugugaggcccug

SEQ ID NO: 3148703 - RNA, 19 nt, Artificial Sequence
  Description of Artificial Sequence: Synthetic oligonucleotide
gcucacaacuauaacuccu

SEQ ID NO: 3148704 - RNA, 19 nt, Artificial Sequence
  Description of Artificial Sequence: Synthetic oligonucleotide
caugugugaggcccugagu

SEQ ID NO: 3148705 - RNA, 19 nt, Artificial Sequence
  Description of Artificial Sequence: Synthetic oligonucleotide
ggucuaacacagaaacccu

SEQ ID NO: 3148706 - RNA, 19 nt, Artificial Sequence
  Description of Artificial Sequence: Synthetic oligonucleotide
guucggaccaagguucaau

SEQ ID NO: 3148707 - RNA, 19 nt, Artificial Sequence
  Description of Artificial Sequence: Synthetic oligonucleotide
aguucggaccaagguucaa

SEQ ID NO: 3148708 - RNA, 19 nt, Artificial Sequence
  Description of Artificial Sequence: Synthetic oligonucleotide
ccugaguucggaccaaggu

SEQ ID NO: 3148709 - RNA, 19 nt, Artificial Sequence
  Description of Artificial Sequence: Synthetic oligonucleotide
cccacauguuagcucacaa

SEQ ID NO: 3148710 - RNA, 19 nt, Artificial Sequence
  Description of Artificial Sequence: Synthetic oligonucleotide
gugaggcccugaguucgga

SEQ ID NO: 3148711 - RNA, 19 nt, Artificial Sequence
  Description of Artificial Sequence: Synthetic oligonucleotide
gcucagugguagaaugugu

SEQ ID NO: 3148712 - RNA, 19 nt, Artificial Sequence
  Description of Artificial Sequence: Synthetic oligonucleotide
gcccugaguucggaccaag

SEQ ID NO: 3148713 - RNA, 19 nt, Artificial Sequence
  Description of Artificial Sequence: Synthetic oligonucleotide
ggcaugugugaggcccuga

SEQ ID NO: 3148714 - RNA, 19 nt, Artificial Sequence
  Description of Artificial Sequence: Synthetic oligonucleotide
ccuguuccaggaggucuaa

SEQ ID NO: 3148715 - RNA, 19 nt, Artificial Sequence
  Description of Artificial Sequence: Synthetic oligonucleotide
ggcccugaguucggaccaa

SEQ ID NO: 3148716 - RNA, 19 nt, Artificial Sequence
  Description of Artificial Sequence: Synthetic oligonucleotide
aaauauuucacucuaaaug

SEQ ID NO: 3148717 - RNA, 19 nt, Artificial Sequence
  Description of Artificial Sequence: Synthetic oligonucleotide
aagaaugucacuaauacac

SEQ ID NO: 3148718 - RNA, 19 nt, Artificial Sequence
  Description of Artificial Sequence: Synthetic oligonucleotide
aauauuucacucuaaaugu

SEQ ID NO: 3148719 - RNA, 19 nt, Artificial Sequence
  Description of Artificial Sequence: Synthetic oligonucleotide
accuuuguaauguaaaucc

SEQ ID NO: 3148720 - RNA, 19 nt, Artificial Sequence
  Description of Artificial Sequence: Synthetic oligonucleotide
aaaggaaccacaagaaugc

SEQ ID NO: 3148721 - RNA, 19 nt, Artificial Sequence
  Description of Artificial Sequence: Synthetic oligonucleotide
uaaaggaaccacaagaaug

SEQ ID NO: 3148722 - RNA, 19 nt, Artificial Sequence
  Description of Artificial Sequence: Synthetic oligonucleotide
auuuaaaggaaccacaaga

SEQ ID NO: 3148723 - RNA, 19 nt, Artificial Sequence
  Description of Artificial Sequence: Synthetic oligonucleotide
uguaauguaaauccaugcc

SEQ ID NO: 3148724 - RNA, 19 nt, Artificial Sequence
  Description of Artificial Sequence: Synthetic oligonucleotide
acuaauacacuguggacac

SEQ ID NO: 3148725 - RNA, 19 nt, Artificial Sequence
  Description of Artificial Sequence: Synthetic oligonucleotide
aaaggcauuuaaaggaacc

SEQ ID NO: 3148726 - RNA, 19 nt, Artificial Sequence
  Description of Artificial Sequence: Synthetic oligonucleotide
uuuguaauguaaauccaug

SEQ ID NO: 3148727 - RNA, 19 nt, Artificial Sequence
  Description of Artificial Sequence: Synthetic oligonucleotide
uuuaaaggaaccacaagaa

SEQ ID NO: 3148728 - RNA, 19 nt, Artificial Sequence
  Description of Artificial Sequence: Synthetic oligonucleotide
guaauguaaauccaugccc

SEQ ID NO: 3148729 - RNA, 19 nt, Artificial Sequence
  Description of Artificial Sequence: Synthetic oligonucleotide
aaaauauuucacucuaaau

SEQ ID NO: 3148730 - RNA, 19 nt, Artificial Sequence
  Description of Artificial Sequence: Synthetic oligonucleotide
uaaaauauuucacucuaaa

SEQ ID NO: 3148731 - RNA, 19 nt, Artificial Sequence
  Description of Artificial Sequence: Synthetic oligonucleotide
cucuaaaugucaauggaag

SEQ ID NO: 3148732 - RNA, 19 nt, Artificial Sequence
  Description of Artificial Sequence: Synthetic oligonucleotide
aagaaugccaacaauauuu

SEQ ID NO: 3148733 - RNA, 19 nt, Artificial Sequence
  Description of Artificial Sequence: Synthetic oligonucleotide
uauuucacucuaaauguca

SEQ ID NO: 3148734 - RNA, 19 nt, Artificial Sequence
  Description of Artificial Sequence: Synthetic oligonucleotide
ucacucuaaaugucaaugg

SEQ ID NO: 3148735 - RNA, 19 nt, Artificial Sequence
  Description of Artificial Sequence: Synthetic oligonucleotide
ugucaauggaagaauguca

SEQ ID NO: 3148736 - RNA, 19 nt, Artificial Sequence
  Description of Artificial Sequence: Synthetic oligonucleotide
aacaauauuuaaaugcccu

SEQ ID NO: 3148737 - RNA, 19 nt, Artificial Sequence
  Description of Artificial Sequence: Synthetic oligonucleotide
gccaacaauauuuaaaugc

SEQ ID NO: 3148738 - RNA, 19 nt, Artificial Sequence
  Description of Artificial Sequence: Synthetic oligonucleotide
uucacucuaaaugucaaug

SEQ ID NO: 3148739 - RNA, 19 nt, Artificial Sequence
  Description of Artificial Sequence: Synthetic oligonucleotide
gaaugucacuaauacacug

SEQ ID NO: 3148740 - RNA, 19 nt, Artificial Sequence
  Description of Artificial Sequence: Synthetic oligonucleotide
ucuaaaugucaauggaaga

SEQ ID NO: 3148741 - RNA, 19 nt, Artificial Sequence
  Description of Artificial Sequence: Synthetic oligonucleotide
aaugccaacaauauuuaaa

SEQ ID NO: 3148742 - RNA, 19 nt, Artificial Sequence
  Description of Artificial Sequence: Synthetic oligonucleotide
aauggaagaaugucacuaa

SEQ ID NO: 3148743 - RNA, 19 nt, Artificial Sequence
  Description of Artificial Sequence: Synthetic oligonucleotide
ggaagaaugucacuaauac

SEQ ID NO: 3148744 - RNA, 19 nt, Artificial Sequence
  Description of Artificial Sequence: Synthetic oligonucleotide
ugucacuaauacacugugg

SEQ ID NO: 3148745 - RNA, 19 nt, Artificial Sequence
  Description of Artificial Sequence: Synthetic oligonucleotide
gucacuaauacacugugga

SEQ ID NO: 3148746 - RNA, 19 nt, Artificial Sequence
  Description of Artificial Sequence: Synthetic oligonucleotide
uuaaaggaaccacaagaau

SEQ ID NO: 3148747 - RNA, 19 nt, Artificial Sequence
  Description of Artificial Sequence: Synthetic oligonucleotide
caacaauauuuaaaugccc

SEQ ID NO: 3148748 - RNA, 19 nt, Artificial Sequence
  Description of Artificial Sequence: Synthetic oligonucleotide
ccaacaauauuuaaaugcc

SEQ ID NO: 3148749 - RNA, 19 nt, Artificial Sequence
  Description of Artificial Sequence: Synthetic oligonucleotide
uuaaaauauuucacucuaa

SEQ ID NO: 3148750 - RNA, 19 nt, Artificial Sequence
  Description of Artificial Sequence: Synthetic oligonucleotide
uacacuguggacaccuuug

SEQ ID NO: 3148751 - RNA, 19 nt, Artificial Sequence
  Description of Artificial Sequence: Synthetic oligonucleotide
augucaauggaagaauguc

SEQ ID NO: 3148752 - RNA, 19 nt, Artificial Sequence
  Description of Artificial Sequence: Synthetic oligonucleotide
aaugucacuaauacacugu

SEQ ID NO: 3148753 - RNA, 19 nt, Artificial Sequence
  Description of Artificial Sequence: Synthetic oligonucleotide
aaugucaauggaagaaugu

SEQ ID NO: 3148754 - RNA, 19 nt, Artificial Sequence
  Description of Artificial Sequence: Synthetic oligonucleotide
uaauacacuguggacaccu

SEQ ID NO: 3148755 - RNA, 19 nt, Artificial Sequence
  Description of Artificial Sequence: Synthetic oligonucleotide
cuuaaaauauuucacucua

SEQ ID NO: 3148756 - RNA, 19 nt, Artificial Sequence
  Description of Artificial Sequence: Synthetic oligonucleotide
gaagaaugucacuaauaca

SEQ ID NO: 3148757 - RNA, 19 nt, Artificial Sequence
  Description of Artificial Sequence: Synthetic oligonucleotide
aaggaaccacaagaaugcc

SEQ ID NO: 3148758 - RNA, 19 nt, Artificial Sequence
  Description of Artificial Sequence: Synthetic oligonucleotide
cauuuaaaggaaccacaag

SEQ ID NO: 3148759 - RNA, 19 nt, Artificial Sequence
  Description of Artificial Sequence: Synthetic oligonucleotide
augucacuaauacacugug

SEQ ID NO: 3148760 - RNA, 19 nt, Artificial Sequence
  Description of Artificial Sequence: Synthetic oligonucleotide
aaccacaagaaugccaaca

SEQ ID NO: 3148761 - RNA, 19 nt, Artificial Sequence
  Description of Artificial Sequence: Synthetic oligonucleotide
aaggcauuuaaaggaacca

SEQ ID NO: 3148762 - RNA, 19 nt, Artificial Sequence
  Description of Artificial Sequence: Synthetic oligonucleotide
aggcauuuaaaggaaccac

SEQ ID NO: 3148763 - RNA, 19 nt, Artificial Sequence
  Description of Artificial Sequence: Synthetic oligonucleotide
uaaaugucaauggaagaau

SEQ ID NO: 3148764 - RNA, 19 nt, Artificial Sequence
  Description of Artificial Sequence: Synthetic oligonucleotide
auauuucacucuaaauguc

SEQ ID NO: 3148765 - RNA, 19 nt, Artificial Sequence
  Description of Artificial Sequence: Synthetic oligonucleotide
uggaagaaugucacuaaua

SEQ ID NO: 3148766 - RNA, 19 nt, Artificial Sequence
  Description of Artificial Sequence: Synthetic oligonucleotide
ucacuaauacacuguggac

SEQ ID NO: 3148767 - RNA, 19 nt, Artificial Sequence
  Description of Artificial Sequence: Synthetic oligonucleotide
gucaauggaagaaugucac

SEQ ID NO: 3148768 - RNA, 19 nt, Artificial Sequence
  Description of Artificial Sequence: Synthetic oligonucleotide
cuaaaugucaauggaagaa

SEQ ID NO: 3148769 - RNA, 19 nt, Artificial Sequence
  Description of Artificial Sequence: Synthetic oligonucleotide
acaauauuuaaaugcccuu

SEQ ID NO: 3148770 - RNA, 19 nt, Artificial Sequence
  Description of Artificial Sequence: Synthetic oligonucleotide
cacaagaaugccaacaaua

SEQ ID NO: 3148771 - RNA, 19 nt, Artificial Sequence
  Description of Artificial Sequence: Synthetic oligonucleotide
auauuuaaaugcccuuaaa

SEQ ID NO: 3148772 - RNA, 19 nt, Artificial Sequence
  Description of Artificial Sequence: Synthetic oligonucleotide
ucaauggaagaaugucacu

SEQ ID NO: 3148773 - RNA, 19 nt, Artificial Sequence
  Description of Artificial Sequence: Synthetic oligonucleotide
cacuaauacacuguggaca

SEQ ID NO: 3148774 - RNA, 19 nt, Artificial Sequence
  Description of Artificial Sequence: Synthetic oligonucleotide
acaagaaugccaacaauau

SEQ ID NO: 3148775 - RNA, 19 nt, Artificial Sequence
  Description of Artificial Sequence: Synthetic oligonucleotide
caaaggcauuuaaaggaac

SEQ ID NO: 3148776 - RNA, 19 nt, Artificial Sequence
  Description of Artificial Sequence: Synthetic oligonucleotide
accacaagaaugccaacaa

SEQ ID NO: 3148777 - RNA, 19 nt, Artificial Sequence
  Description of Artificial Sequence: Synthetic oligonucleotide
uguggacaccuuuguaaug

SEQ ID NO: 3148778 - RNA, 19 nt, Artificial Sequence
  Description of Artificial Sequence: Synthetic oligonucleotide
acaccuuuguaauguaaau

SEQ ID NO: 3148779 - RNA, 19 nt, Artificial Sequence
  Description of Artificial Sequence: Synthetic oligonucleotide
uuucacucuaaaugucaau

SEQ ID NO: 3148780 - RNA, 19 nt, Artificial Sequence
  Description of Artificial Sequence: Synthetic oligonucleotide
auggaagaaugucacuaau

SEQ ID NO: 3148781 - RNA, 19 nt, Artificial Sequence
  Description of Artificial Sequence: Synthetic oligonucleotide
cacucuaaaugucaaugga

SEQ ID NO: 3148782 - RNA, 19 nt, Artificial Sequence
  Description of Artificial Sequence: Synthetic oligonucleotide
acucuaaaugucaauggaa

SEQ ID NO: 3148783 - RNA, 19 nt, Artificial Sequence
  Description of Artificial Sequence: Synthetic oligonucleotide
caccuuuguaauguaaauc

SEQ ID NO: 3148784 - RNA, 19 nt, Artificial Sequence
  Description of Artificial Sequence: Synthetic oligonucleotide
agaaugucacuaauacacu

SEQ ID NO: 3148785 - RNA, 19 nt, Artificial Sequence
  Description of Artificial Sequence: Synthetic oligonucleotide
caauggaagaaugucacua

SEQ ID NO: 3148786 - RNA, 19 nt, Artificial Sequence
  Description of Artificial Sequence: Synthetic oligonucleotide
cuuuguaauguaaauccau

SEQ ID NO: 3148787 - RNA, 19 nt, Artificial Sequence
  Description of Artificial Sequence: Synthetic oligonucleotide
gaaugccaacaauauuuaa

SEQ ID NO: 3148788 - RNA, 19 nt, Artificial Sequence
  Description of Artificial Sequence: Synthetic oligonucleotide
acacuguggacaccuuugu

SEQ ID NO: 3148789 - RNA, 19 nt, Artificial Sequence
  Description of Artificial Sequence: Synthetic oligonucleotide
ggggcuuaaaauauuucac

SEQ ID NO: 3148790 - RNA, 19 nt, Artificial Sequence
  Description of Artificial Sequence: Synthetic oligonucleotide
auuucacucuaaaugucaa

SEQ ID NO: 3148791 - RNA, 19 nt, Artificial Sequence
  Description of Artificial Sequence: Synthetic oligonucleotide
gcuuaaaauauuucacucu

SEQ ID NO: 3148792 - RNA, 19 nt, Artificial Sequence
  Description of Artificial Sequence: Synthetic oligonucleotide
ggaaccacaagaaugccaa

SEQ ID NO: 3148793 - RNA, 19 nt, Artificial Sequence
  Description of Artificial Sequence: Synthetic oligonucleotide
ggcauuuaaaggaaccaca

SEQ ID NO: 3148794 - RNA, 19 nt, Artificial Sequence
  Description of Artificial Sequence: Synthetic oligonucleotide
auacacuguggacaccuuu

SEQ ID NO: 3148795 - RNA, 19 nt, Artificial Sequence
  Description of Artificial Sequence: Synthetic oligonucleotide
agaaugccaacaauauuua

SEQ ID NO: 3148796 - RNA, 19 nt, Artificial Sequence
  Description of Artificial Sequence: Synthetic oligonucleotide
aggaaccacaagaaugcca

SEQ ID NO: 3148797 - RNA, 19 nt, Artificial Sequence
  Description of Artificial Sequence: Synthetic oligonucleotide
gaaccacaagaaugccaac

SEQ ID NO: 3148798 - RNA, 19 nt, Artificial Sequence
  Description of Artificial Sequence: Synthetic oligonucleotide
gggcuuaaaauauuucacu

SEQ ID NO: 3148799 - RNA, 19 nt, Artificial Sequence
  Description of Artificial Sequence: Synthetic oligonucleotide
cuaauacacuguggacacc

SEQ ID NO: 3148800 - RNA, 19 nt, Artificial Sequence
  Description of Artificial Sequence: Synthetic oligonucleotide
guggacaccuuuguaaugu

SEQ ID NO: 3148801 - RNA, 19 nt, Artificial Sequence
  Description of Artificial Sequence: Synthetic oligonucleotide
gcauuuaaaggaaccacaa

SEQ ID NO: 3148802 - RNA, 19 nt, Artificial Sequence
  Description of Artificial Sequence: Synthetic oligonucleotide
uggacaccuuuguaaugua

SEQ ID NO: 3148803 - RNA, 19 nt, Artificial Sequence
  Description of Artificial Sequence: Synthetic oligonucleotide
ccuuuguaauguaaaucca

SEQ ID NO: 3148804 - RNA, 19 nt, Artificial Sequence
  Description of Artificial Sequence: Synthetic oligonucleotide
aauacacuguggacaccuu

SEQ ID NO: 3148805 - RNA, 19 nt, Artificial Sequence
  Description of Artificial Sequence: Synthetic oligonucleotide
gcaaaggcauuuaaaggaa

SEQ ID NO: 3148806 - RNA, 19 nt, Artificial Sequence
  Description of Artificial Sequence: Synthetic oligonucleotide
cuguggacaccuuuguaau

SEQ ID NO: 3148807 - RNA, 19 nt, Artificial Sequence
  Description of Artificial Sequence: Synthetic oligonucleotide
caagaaugccaacaauauu

SEQ ID NO: 3148808 - RNA, 19 nt, Artificial Sequence
  Description of Artificial Sequence: Synthetic oligonucleotide
ggacaccuuuguaauguaa

SEQ ID NO: 3148809 - RNA, 19 nt, Artificial Sequence
  Description of Artificial Sequence: Synthetic oligonucleotide
ccacaagaaugccaacaau

SEQ ID NO: 3148810 - RNA, 19 nt, Artificial Sequence
  Description of Artificial Sequence: Synthetic oligonucleotide
gaagauuacuuuuacauag

SEQ ID NO: 3148811 - RNA, 19 nt, Artificial Sequence
  Description of Artificial Sequence: Synthetic oligonucleotide
auuacuuuuacauagcaaa

SEQ ID NO: 3148812 - RNA, 19 nt, Artificial Sequence
  Description of Artificial Sequence: Synthetic oligonucleotide
acuuuuacauagcaaaagg

SEQ ID NO: 3148813 - RNA, 19 nt, Artificial Sequence
  Description of Artificial Sequence: Synthetic oligonucleotide
ugagcaaaaggcuuuacca

SEQ ID NO: 3148814 - RNA, 19 nt, Artificial Sequence
  Description of Artificial Sequence: Synthetic oligonucleotide
aacugugcugagcaaaagg

SEQ ID NO: 3148815 - RNA, 19 nt, Artificial Sequence
  Description of Artificial Sequence: Synthetic oligonucleotide
uuuuacauagcaaaagguu

SEQ ID NO: 3148816 - RNA, 19 nt, Artificial Sequence
  Description of Artificial Sequence: Synthetic oligonucleotide
cuuugaaagauaacugugc

SEQ ID NO: 3148817 - RNA, 19 nt, Artificial Sequence
  Description of Artificial Sequence: Synthetic oligonucleotide
uuuacauagcaaaagguuu

SEQ ID NO: 3148818 - RNA, 19 nt, Artificial Sequence
  Description of Artificial Sequence: Synthetic oligonucleotide
auuugaagauuacuuuuac

SEQ ID NO: 3148819 - RNA, 19 nt, Artificial Sequence
  Description of Artificial Sequence: Synthetic oligonucleotide
uuugaaagauaacugugcu

SEQ ID NO: 3148820 - RNA, 19 nt, Artificial Sequence
  Description of Artificial Sequence: Synthetic oligonucleotide
acucauaaggucuucucuc

SEQ ID NO: 3148821 - RNA, 19 nt, Artificial Sequence
  Description of Artificial Sequence: Synthetic oligonucleotide
uaugacuucuuucauguau

SEQ ID NO: 3148822 - RNA, 19 nt, Artificial Sequence
  Description of Artificial Sequence: Synthetic oligonucleotide
aagauuacuuuuacauagc

SEQ ID NO: 3148823 - RNA, 19 nt, Artificial Sequence
  Description of Artificial Sequence: Synthetic oligonucleotide
acugugcugagcaaaaggc

SEQ ID NO: 3148824 - RNA, 19 nt, Artificial Sequence
  Description of Artificial Sequence: Synthetic oligonucleotide
uguauuugaagauuacuuu

SEQ ID NO: 3148825 - RNA, 19 nt, Artificial Sequence
  Description of Artificial Sequence: Synthetic oligonucleotide
uacuuuuacauagcaaaag

SEQ ID NO: 3148826 - RNA, 19 nt, Artificial Sequence
  Description of Artificial Sequence: Synthetic oligonucleotide
uauuugaagauuacuuuua

SEQ ID NO: 3148827 - RNA, 19 nt, Artificial Sequence
  Description of Artificial Sequence: Synthetic oligonucleotide
uuugaagauuacuuuuaca

SEQ ID NO: 3148828 - RNA, 19 nt, Artificial Sequence
  Description of Artificial Sequence: Synthetic oligonucleotide
ugccuuugaaagauaacug

SEQ ID NO: 3148829 - RNA, 19 nt, Artificial Sequence
  Description of Artificial Sequence: Synthetic oligonucleotide
uuuuaugccuuugaaagau

SEQ ID NO: 3148830 - RNA, 19 nt, Artificial Sequence
  Description of Artificial Sequence: Synthetic oligonucleotide
uuaugccuuugaaagauaa

SEQ ID NO: 3148831 - RNA, 19 nt, Artificial Sequence
  Description of Artificial Sequence: Synthetic oligonucleotide
uuacuuuuacauagcaaaa

SEQ ID NO: 3148832 - RNA, 19 nt, Artificial Sequence
  Description of Artificial Sequence: Synthetic oligonucleotide
uucucuccaaguaugacuu

SEQ ID NO: 3148833 - RNA, 19 nt, Artificial Sequence
  Description of Artificial Sequence: Synthetic oligonucleotide
agauuacuuuuacauagca

SEQ ID NO: 3148834 - RNA, 19 nt, Artificial Sequence
  Description of Artificial Sequence: Synthetic oligonucleotide
augccuuugaaagauaacu

SEQ ID NO: 3148835 - RNA, 19 nt, Artificial Sequence
  Description of Artificial Sequence: Synthetic oligonucleotide
cucauaaggucuucucucc

SEQ ID NO: 3148836 - RNA, 19 nt, Artificial Sequence
  Description of Artificial Sequence: Synthetic oligonucleotide
gagcaaaaggcuuuaccac

SEQ ID NO: 3148837 - RNA, 19 nt, Artificial Sequence
  Description of Artificial Sequence: Synthetic oligonucleotide
auaaggucuucucuccaag

SEQ ID NO: 3148838 - RNA, 19 nt, Artificial Sequence
  Description of Artificial Sequence: Synthetic oligonucleotide
acacucauaaggucuucuc

SEQ ID NO: 3148839 - RNA, 19 nt, Artificial Sequence
  Description of Artificial Sequence: Synthetic oligonucleotide
ucauguauuugaagauuac

SEQ ID NO: 3148840 - RNA, 19 nt, Artificial Sequence
  Description of Artificial Sequence: Synthetic oligonucleotide
cugagcaaaaggcuuuacc

SEQ ID NO: 3148841 - RNA, 19 nt, Artificial Sequence
  Description of Artificial Sequence: Synthetic oligonucleotide
gaaagauaacugugcugag

SEQ ID NO: 3148842 - RNA, 19 nt, Artificial Sequence
  Description of Artificial Sequence: Synthetic oligonucleotide
uccaaguaugacuucuuuc

SEQ ID NO: 3148843 - RNA, 19 nt, Artificial Sequence
  Description of Artificial Sequence: Synthetic oligonucleotide
aaggucuucucuccaagua

SEQ ID NO: 3148844 - RNA, 19 nt, Artificial Sequence
  Description of Artificial Sequence: Synthetic oligonucleotide
uaugccuuugaaagauaac

SEQ ID NO: 3148845 - RNA, 19 nt, Artificial Sequence
  Description of Artificial Sequence: Synthetic oligonucleotide
auguauuugaagauuacuu

SEQ ID NO: 3148846 - RNA, 19 nt, Artificial Sequence
  Description of Artificial Sequence: Synthetic oligonucleotide
uuucauguauuugaagauu

SEQ ID NO: 3148847 - RNA, 19 nt, Artificial Sequence
  Description of Artificial Sequence: Synthetic oligonucleotide
cuuuuacauagcaaaaggu

SEQ ID NO: 3148848 - RNA, 19 nt, Artificial Sequence
  Description of Artificial Sequence: Synthetic oligonucleotide
uaaggucuucucuccaagu

SEQ ID NO: 3148849 - RNA, 19 nt, Artificial Sequence
  Description of Artificial Sequence: Synthetic oligonucleotide
cuuuuaugccuuugaaaga

SEQ ID NO: 3148850 - RNA, 19 nt, Artificial Sequence
  Description of Artificial Sequence: Synthetic oligonucleotide
ccuuugaaagauaacugug

SEQ ID NO: 3148851 - RNA, 19 nt, Artificial Sequence
  Description of Artificial Sequence: Synthetic oligonucleotide
gauuacuuuuacauagcaa

SEQ ID NO: 3148852 - RNA, 19 nt, Artificial Sequence
  Description of Artificial Sequence: Synthetic oligonucleotide
ccaaguaugacuucuuuca

SEQ ID NO: 3148853 - RNA, 19 nt, Artificial Sequence
  Description of Artificial Sequence: Synthetic oligonucleotide
guauuugaagauuacuuuu

SEQ ID NO: 3148854 - RNA, 19 nt, Artificial Sequence
  Description of Artificial Sequence: Synthetic oligonucleotide
uuuaugccuuugaaagaua

SEQ ID NO: 3148855 - RNA, 19 nt, Artificial Sequence
  Description of Artificial Sequence: Synthetic oligonucleotide
aggucuucucuccaaguau

SEQ ID NO: 3148856 - RNA, 19 nt, Artificial Sequence
  Description of Artificial Sequence: Synthetic oligonucleotide
uacacucauaaggucuucu

SEQ ID NO: 3148857 - RNA, 19 nt, Artificial Sequence
  Description of Artificial Sequence: Synthetic oligonucleotide
uaacugugcugagcaaaag

SEQ ID NO: 3148858 - RNA, 19 nt, Artificial Sequence
  Description of Artificial Sequence: Synthetic oligonucleotide
ucuucucuccaaguaugac

SEQ ID NO: 3148859 - RNA, 19 nt, Artificial Sequence
  Description of Artificial Sequence: Synthetic oligonucleotide
cuucucuccaaguaugacu

SEQ ID NO: 3148860 - RNA, 19 nt, Artificial Sequence
  Description of Artificial Sequence: Synthetic oligonucleotide
auaacugugcugagcaaaa

SEQ ID NO: 3148861 - RNA, 19 nt, Artificial Sequence
  Description of Artificial Sequence: Synthetic oligonucleotide
ucuccaaguaugacuucuu

SEQ ID NO: 3148862 - RNA, 19 nt, Artificial Sequence
  Description of Artificial Sequence: Synthetic oligonucleotide
cauaaggucuucucuccaa

SEQ ID NO: 3148863 - RNA, 19 nt, Artificial Sequence
  Description of Artificial Sequence: Synthetic oligonucleotide
augacuucuuucauguauu

SEQ ID NO: 3148864 - RNA, 19 nt, Artificial Sequence
  Description of Artificial Sequence: Synthetic oligonucleotide
gccuuugaaagauaacugu

SEQ ID NO: 3148865 - RNA, 19 nt, Artificial Sequence
  Description of Artificial Sequence: Synthetic oligonucleotide
gcaaaaggcuuuaccacac

SEQ ID NO: 3148866 - RNA, 19 nt, Artificial Sequence
  Description of Artificial Sequence: Synthetic oligonucleotide
cacucauaaggucuucucu

SEQ ID NO: 3148867 - RNA, 19 nt, Artificial Sequence
  Description of Artificial Sequence: Synthetic oligonucleotide
ucucuccaaguaugacuuc

SEQ ID NO: 3148868 - RNA, 19 nt, Artificial Sequence
  Description of Artificial Sequence: Synthetic oligonucleotide
uuacacucauaaggucuuc

SEQ ID NO: 3148869 - RNA, 19 nt, Artificial Sequence
  Description of Artificial Sequence: Synthetic oligonucleotide
cugugcugagcaaaaggcu

SEQ ID NO: 3148870 - RNA, 19 nt, Artificial Sequence
  Description of Artificial Sequence: Synthetic oligonucleotide
gucuucucuccaaguauga

SEQ ID NO: 3148871 - RNA, 19 nt, Artificial Sequence
  Description of Artificial Sequence: Synthetic oligonucleotide
cucuccaaguaugacuucu

SEQ ID NO: 3148872 - RNA, 19 nt, Artificial Sequence
  Description of Artificial Sequence: Synthetic oligonucleotide
caaguaugacuucuuucau

SEQ ID NO: 3148873 - RNA, 19 nt, Artificial Sequence
  Description of Artificial Sequence: Synthetic oligonucleotide
guaugacuucuuucaugua

SEQ ID NO: 3148874 - RNA, 19 nt, Artificial Sequence
  Description of Artificial Sequence: Synthetic oligonucleotide
cuccaaguaugacuucuuu

SEQ ID NO: 3148875 - RNA, 19 nt, Artificial Sequence
  Description of Artificial Sequence: Synthetic oligonucleotide
gcugagcaaaaggcuuuac

SEQ ID NO: 3148876 - RNA, 19 nt, Artificial Sequence
  Description of Artificial Sequence: Synthetic oligonucleotide
gugcugagcaaaaggcuuu

SEQ ID NO: 3148877 - RNA, 19 nt, Artificial Sequence
  Description of Artificial Sequence: Synthetic oligonucleotide
ugccguacuccuuuaaucc

SEQ ID NO: 3148878 - RNA, 19 nt, Artificial Sequence
  Description of Artificial Sequence: Synthetic oligonucleotide
aagugcuaguuccaggaca

SEQ ID NO: 3148879 - RNA, 19 nt, Artificial Sequence
  Description of Artificial Sequence: Synthetic oligonucleotide
acaagugcuaguuccagga

SEQ ID NO: 3148880 - RNA, 19 nt, Artificial Sequence
  Description of Artificial Sequence: Synthetic oligonucleotide
augccguacuccuuuaauc

SEQ ID NO: 3148881 - RNA, 19 nt, Artificial Sequence
  Description of Artificial Sequence: Synthetic oligonucleotide
uacaagugcuaguuccagg

SEQ ID NO: 3148882 - RNA, 19 nt, Artificial Sequence
  Description of Artificial Sequence: Synthetic oligonucleotide
auugaugccguacuccuuu

SEQ ID NO: 3148883 - RNA, 19 nt, Artificial Sequence
  Description of Artificial Sequence: Synthetic oligonucleotide
ugggcauugaugccguacu

SEQ ID NO: 3148884 - RNA, 19 nt, Artificial Sequence
  Description of Artificial Sequence: Synthetic oligonucleotide
agugcuaguuccaggacag

SEQ ID NO: 3148885 - RNA, 19 nt, Artificial Sequence
  Description of Artificial Sequence: Synthetic oligonucleotide
cagaucucuguugaguuug

SEQ ID NO: 3148886 - RNA, 19 nt, Artificial Sequence
  Description of Artificial Sequence: Synthetic oligonucleotide
cuacaagugcuaguuccag

SEQ ID NO: 3148887 - RNA, 19 nt, Artificial Sequence
  Description of Artificial Sequence: Synthetic oligonucleotide
caagugcuaguuccaggac

SEQ ID NO: 3148888 - RNA, 19 nt, Artificial Sequence
  Description of Artificial Sequence: Synthetic oligonucleotide
ugaugccguacuccuuuaa

SEQ ID NO: 3148889 - RNA, 19 nt, Artificial Sequence
  Description of Artificial Sequence: Synthetic oligonucleotide
aggcagaucucuguugagu

SEQ ID NO: 3148890 - RNA, 19 nt, Artificial Sequence
  Description of Artificial Sequence: Synthetic oligonucleotide
gaugccguacuccuuuaau

SEQ ID NO: 3148891 - RNA, 19 nt, Artificial Sequence
  Description of Artificial Sequence: Synthetic oligonucleotide
cugggcauugaugccguac

SEQ ID NO: 3148892 - RNA, 19 nt, Artificial Sequence
  Description of Artificial Sequence: Synthetic oligonucleotide
gccguacuccuuuaauccc

SEQ ID NO: 3148893 - RNA, 19 nt, Artificial Sequence
  Description of Artificial Sequence: Synthetic oligonucleotide
guacuccuuuaaucccagc

SEQ ID NO: 3148894 - RNA, 19 nt, Artificial Sequence
  Description of Artificial Sequence: Synthetic oligonucleotide
uugaugccguacuccuuua

SEQ ID NO: 3148895 - RNA, 19 nt, Artificial Sequence
  Description of Artificial Sequence: Synthetic oligonucleotide
gcauugaugccguacuccu

SEQ ID NO: 3148896 - RNA, 19 nt, Artificial Sequence
  Description of Artificial Sequence: Synthetic oligonucleotide
cguacuccuuuaaucccag

SEQ ID NO: 3148897 - RNA, 19 nt, Artificial Sequence
  Description of Artificial Sequence: Synthetic oligonucleotide
ccguacuccuuuaauccca

SEQ ID NO: 3148898 - RNA, 19 nt, Artificial Sequence
  Description of Artificial Sequence: Synthetic oligonucleotide
ggcagaucucuguugaguu

SEQ ID NO: 3148899 - RNA, 19 nt, Artificial Sequence
  Description of Artificial Sequence: Synthetic oligonucleotide
gggcauugaugccguacuc

SEQ ID NO: 3148900 - RNA, 19 nt, Artificial Sequence
  Description of Artificial Sequence: Synthetic oligonucleotide
gcagaucucuguugaguuu

SEQ ID NO: 3148901 - RNA, 19 nt, Artificial Sequence
  Description of Artificial Sequence: Synthetic oligonucleotide
uauuuaauuaauaacuuuu

SEQ ID NO: 3148902 - RNA, 19 nt, Artificial Sequence
  Description of Artificial Sequence: Synthetic oligonucleotide
ucuguauuuaauuaauaac

SEQ ID NO: 3148903 - RNA, 19 nt, Artificial Sequence
  Description of Artificial Sequence: Synthetic oligonucleotide
aauguaacuauucuguauu

SEQ ID NO: 3148904 - RNA, 19 nt, Artificial Sequence
  Description of Artificial Sequence: Synthetic oligonucleotide
uuucuuugcuuucacaacc

SEQ ID NO: 3148905 - RNA, 19 nt, Artificial Sequence
  Description of Artificial Sequence: Synthetic oligonucleotide
uguauuuaauuaauaacuu

SEQ ID NO: 3148906 - RNA, 19 nt, Artificial Sequence
  Description of Artificial Sequence: Synthetic oligonucleotide
uucuguauuuaauuaauaa

SEQ ID NO: 3148907 - RNA, 19 nt, Artificial Sequence
  Description of Artificial Sequence: Synthetic oligonucleotide
aacuauucuguauuuaauu

SEQ ID NO: 3148908 - RNA, 19 nt, Artificial Sequence
  Description of Artificial Sequence: Synthetic oligonucleotide
aaguuaacuuaauaaaauu

SEQ ID NO: 3148909 - RNA, 19 nt, Artificial Sequence
  Description of Artificial Sequence: Synthetic oligonucleotide
aaaguuaacuuaauaaaau

SEQ ID NO: 3148910 - RNA, 19 nt, Artificial Sequence
  Description of Artificial Sequence: Synthetic oligonucleotide
uauucuguauuuaauuaau

SEQ ID NO: 3148911 - RNA, 19 nt, Artificial Sequence
  Description of Artificial Sequence: Synthetic oligonucleotide
uucacaaccgucucuagcu

SEQ ID NO: 3148912 - RNA, 19 nt, Artificial Sequence
  Description of Artificial Sequence: Synthetic oligonucleotide
cuguauuuaauuaauaacu

SEQ ID NO: 3148913 - RNA, 19 nt, Artificial Sequence
  Description of Artificial Sequence: Synthetic oligonucleotide
ucuagcuccaguuccaaaa

SEQ ID NO: 3148914 - RNA, 19 nt, Artificial Sequence
  Description of Artificial Sequence: Synthetic oligonucleotide
acuauucuguauuuaauua

SEQ ID NO: 3148915 - RNA, 19 nt, Artificial Sequence
  Description of Artificial Sequence: Synthetic oligonucleotide
uuucacaaccgucucuagc

SEQ ID NO: 3148916 - RNA, 19 nt, Artificial Sequence
  Description of Artificial Sequence: Synthetic oligonucleotide
uuuucuuugcuuucacaac

SEQ ID NO: 3148917 - RNA, 19 nt, Artificial Sequence
  Description of Artificial Sequence: Synthetic oligonucleotide
guaacuauucuguauuuaa

SEQ ID NO: 3148918 - RNA, 19 nt, Artificial Sequence
  Description of Artificial Sequence: Synthetic oligonucleotide
aguuaacuuaauaaaauuu

SEQ ID NO: 3148919 - RNA, 19 nt, Artificial Sequence
  Description of Artificial Sequence: Synthetic oligonucleotide
uaacuauucuguauuuaau

SEQ ID NO: 3148920 - RNA, 19 nt, Artificial Sequence
  Description of Artificial Sequence: Synthetic oligonucleotide
cuauucuguauuuaauuaa

SEQ ID NO: 3148921 - RNA, 19 nt, Artificial Sequence
  Description of Artificial Sequence: Synthetic oligonucleotide
cuuugcuuucacaaccguc

SEQ ID NO: 3148922 - RNA, 19 nt, Artificial Sequence
  Description of Artificial Sequence: Synthetic oligonucleotide
uguaacuauucuguauuua

SEQ ID NO: 3148923 - RNA, 19 nt, Artificial Sequence
  Description of Artificial Sequence: Synthetic oligonucleotide
ucuuugcuuucacaaccgu

SEQ ID NO: 3148924 - RNA, 19 nt, Artificial Sequence
  Description of Artificial Sequence: Synthetic oligonucleotide
cacaaccgucucuagcucc

SEQ ID NO: 3148925 - RNA, 19 nt, Artificial Sequence
  Description of Artificial Sequence: Synthetic oligonucleotide
uugucuuuucuuugcuuuc

SEQ ID NO: 3148926 - RNA, 19 nt, Artificial Sequence
  Description of Artificial Sequence: Synthetic oligonucleotide
ugcuuucacaaccgucucu

SEQ ID NO: 3148927 - RNA, 19 nt, Artificial Sequence
  Description of Artificial Sequence: Synthetic oligonucleotide
guauuuaauuaauaacuuu

SEQ ID NO: 3148928 - RNA, 19 nt, Artificial Sequence
  Description of Artificial Sequence: Synthetic oligonucleotide
auguaacuauucuguauuu

SEQ ID NO: 3148929 - RNA, 19 nt, Artificial Sequence
  Description of Artificial Sequence: Synthetic oligonucleotide
ucacaaccgucucuagcuc

SEQ ID NO: 3148930 - RNA, 19 nt, Artificial Sequence
  Description of Artificial Sequence: Synthetic oligonucleotide
uugcuuucacaaccgucuc

SEQ ID NO: 3148931 - RNA, 19 nt, Artificial Sequence
  Description of Artificial Sequence: Synthetic oligonucleotide
accgucucuagcuccaguu

SEQ ID NO: 3148932 - RNA, 19 nt, Artificial Sequence
  Description of Artificial Sequence: Synthetic oligonucleotide
aaccgucucuagcuccagu

SEQ ID NO: 3148933 - RNA, 19 nt, Artificial Sequence
  Description of Artificial Sequence: Synthetic oligonucleotide
auucuguauuuaauuaaua

SEQ ID NO: 3148934 - RNA, 19 nt, Artificial Sequence
  Description of Artificial Sequence: Synthetic oligonucleotide
acaaccgucucuagcucca

SEQ ID NO: 3148935 - RNA, 19 nt, Artificial Sequence
  Description of Artificial Sequence: Synthetic oligonucleotide
cgucucuagcuccaguucc

SEQ ID NO: 3148936 - RNA, 19 nt, Artificial Sequence
  Description of Artificial Sequence: Synthetic oligonucleotide
gcuuucacaaccgucucua

SEQ ID NO: 3148937 - RNA, 19 nt, Artificial Sequence
  Description of Artificial Sequence: Synthetic oligonucleotide
caaccgucucuagcuccag

SEQ ID NO: 3148938 - RNA, 19 nt, Artificial Sequence
  Description of Artificial Sequence: Synthetic oligonucleotide
ccgucucuagcuccaguuc

SEQ ID NO: 3148939 - RNA, 19 nt, Artificial Sequence
  Description of Artificial Sequence: Synthetic oligonucleotide
uccaaagccacacagggaa

SEQ ID NO: 3148940 - RNA, 19 nt, Artificial Sequence
  Description of Artificial Sequence: Synthetic oligonucleotide
aaagccacacagggaaacc

SEQ ID NO: 3148941 - RNA, 19 nt, Artificial Sequence
  Description of Artificial Sequence: Synthetic oligonucleotide
uggcgcacaccuuuaaucc

SEQ ID NO: 3148942 - RNA, 19 nt, Artificial Sequence
  Description of Artificial Sequence: Synthetic oligonucleotide
gcuccaaagccacacaggg

SEQ ID NO: 3148943 - RNA, 19 nt, Artificial Sequence
  Description of Artificial Sequence: Synthetic oligonucleotide
cagaucugugaguucgagg

SEQ ID NO: 3148944 - RNA, 19 nt, Artificial Sequence
  Description of Artificial Sequence: Synthetic oligonucleotide
agagccagugccaggauag

SEQ ID NO: 3148945 - RNA, 19 nt, Artificial Sequence
  Description of Artificial Sequence: Synthetic oligonucleotide
uccagagccagugccagga

SEQ ID NO: 3148946 - RNA, 19 nt, Artificial Sequence
  Description of Artificial Sequence: Synthetic oligonucleotide
agccagugccaggauaggc

SEQ ID NO: 3148947 - RNA, 19 nt, Artificial Sequence
  Description of Artificial Sequence: Synthetic oligonucleotide
agggaaacccugucucgaa

SEQ ID NO: 3148948 - RNA, 19 nt, Artificial Sequence
  Description of Artificial Sequence: Synthetic oligonucleotide
ggcgcacaccuuuaauccc

SEQ ID NO: 3148949 - RNA, 19 nt, Artificial Sequence
  Description of Artificial Sequence: Synthetic oligonucleotide
gagccagugccaggauagg

SEQ ID NO: 3148950 - RNA, 19 nt, Artificial Sequence
  Description of Artificial Sequence: Synthetic oligonucleotide
ccagugccaggauaggcuc

SEQ ID NO: 3148951 - RNA, 19 nt, Artificial Sequence
  Description of Artificial Sequence: Synthetic oligonucleotide
gcagaucugugaguucgag

SEQ ID NO: 3148952 - RNA, 19 nt, Artificial Sequence
  Description of Artificial Sequence: Synthetic oligonucleotide
gggaaacccugucucgaaa

SEQ ID NO: 3148953 - RNA, 19 nt, Artificial Sequence
  Description of Artificial Sequence: Synthetic oligonucleotide
cagagccagugccaggaua

SEQ ID NO: 3148954 - RNA, 19 nt, Artificial Sequence
  Description of Artificial Sequence: Synthetic oligonucleotide
gcgcacaccuuuaauccca

SEQ ID NO: 3148955 - RNA, 19 nt, Artificial Sequence
  Description of Artificial Sequence: Synthetic oligonucleotide
gccagugccaggauaggcu

SEQ ID NO: 3148956 - RNA, 19 nt, Artificial Sequence
  Description of Artificial Sequence: Synthetic oligonucleotide
uuuguuguuuccaacaggg

SEQ ID NO: 3148957 - RNA, 19 nt, Artificial Sequence
  Description of Artificial Sequence: Synthetic oligonucleotide
ugugcuaucacugacccgg

SEQ ID NO: 3148958 - RNA, 19 nt, Artificial Sequence
  Description of Artificial Sequence: Synthetic oligonucleotide
auucaagagauccuccugc

SEQ ID NO: 3148959 - RNA, 19 nt, Artificial Sequence
  Description of Artificial Sequence: Synthetic oligonucleotide
uuuuguuguuuccaacagg

SEQ ID NO: 3148960 - RNA, 19 nt, Artificial Sequence
  Description of Artificial Sequence: Synthetic oligonucleotide
aaauucaagagauccuccu

SEQ ID NO: 3148961 - RNA, 19 nt, Artificial Sequence
  Description of Artificial Sequence: Synthetic oligonucleotide
aauucaagagauccuccug

SEQ ID NO: 3148962 - RNA, 19 nt, Artificial Sequence
  Description of Artificial Sequence: Synthetic oligonucleotide
aaaggcgugugcuaucacu

SEQ ID NO: 3148963 - RNA, 19 nt, Artificial Sequence
  Description of Artificial Sequence: Synthetic oligonucleotide
ucaaauucaagagauccuc

SEQ ID NO: 3148964 - RNA, 19 nt, Artificial Sequence
  Description of Artificial Sequence: Synthetic oligonucleotide
aagucgcucuuguagacca

SEQ ID NO: 3148965 - RNA, 19 nt, Artificial Sequence
  Description of Artificial Sequence: Synthetic oligonucleotide
cuggaagucgcucuuguag

SEQ ID NO: 3148966 - RNA, 19 nt, Artificial Sequence
  Description of Artificial Sequence: Synthetic oligonucleotide
caaauucaagagauccucc

SEQ ID NO: 3148967 - RNA, 19 nt, Artificial Sequence
  Description of Artificial Sequence: Synthetic oligonucleotide
cuggccucaaauucaagag

SEQ ID NO: 3148968 - RNA, 19 nt, Artificial Sequence
  Description of Artificial Sequence: Synthetic oligonucleotide
auuaaaggcgugugcuauc

SEQ ID NO: 3148969 - RNA, 19 nt, Artificial Sequence
  Description of Artificial Sequence: Synthetic oligonucleotide
uggaagucgcucuuguaga

SEQ ID NO: 3148970 - RNA, 19 nt, Artificial Sequence
  Description of Artificial Sequence: Synthetic oligonucleotide
uggccucaaauucaagaga

SEQ ID NO: 3148971 - RNA, 19 nt, Artificial Sequence
  Description of Artificial Sequence: Synthetic oligonucleotide
caagagauccuccugccuc

SEQ ID NO: 3148972 - RNA, 19 nt, Artificial Sequence
  Description of Artificial Sequence: Synthetic oligonucleotide
ccucaaauucaagagaucc

SEQ ID NO: 3148973 - RNA, 19 nt, Artificial Sequence
  Description of Artificial Sequence: Synthetic oligonucleotide
aaggcgugugcuaucacug

SEQ ID NO: 3148974 - RNA, 19 nt, Artificial Sequence
  Description of Artificial Sequence: Synthetic oligonucleotide
ucaagagauccuccugccu

SEQ ID NO: 3148975 - RNA, 19 nt, Artificial Sequence
  Description of Artificial Sequence: Synthetic oligonucleotide
uuguuguuuccaacagggu

SEQ ID NO: 3148976 - RNA, 19 nt, Artificial Sequence
  Description of Artificial Sequence: Synthetic oligonucleotide
gaagucgcucuuguagacc

SEQ ID NO: 3148977 - RNA, 19 nt, Artificial Sequence
  Description of Artificial Sequence: Synthetic oligonucleotide
uccuggaagucgcucuugu

SEQ ID NO: 3148978 - RNA, 19 nt, Artificial Sequence
  Description of Artificial Sequence: Synthetic oligonucleotide
gcgugcugggauuaaaggc

SEQ ID NO: 3148979 - RNA, 19 nt, Artificial Sequence
  Description of Artificial Sequence: Synthetic oligonucleotide
gcuggccucaaauucaaga

SEQ ID NO: 3148980 - RNA, 19 nt, Artificial Sequence
  Description of Artificial Sequence: Synthetic oligonucleotide
cucaaauucaagagauccu

SEQ ID NO: 3148981 - RNA, 19 nt, Artificial Sequence
  Description of Artificial Sequence: Synthetic oligonucleotide
gugugcuaucacugacccg

SEQ ID NO: 3148982 - RNA, 19 nt, Artificial Sequence
  Description of Artificial Sequence: Synthetic oligonucleotide
ggaagucgcucuuguagac

SEQ ID NO: 3148983 - RNA, 19 nt, Artificial Sequence
  Description of Artificial Sequence: Synthetic oligonucleotide
cgugugcuaucacugaccc

SEQ ID NO: 3148984 - RNA, 19 nt, Artificial Sequence
  Description of Artificial Sequence: Synthetic oligonucleotide
uuguuuccaacaggguuuu

SEQ ID NO: 3148985 - RNA, 19 nt, Artificial Sequence
  Description of Artificial Sequence: Synthetic oligonucleotide
aggcgugugcuaucacuga

SEQ ID NO: 3148986 - RNA, 19 nt, Artificial Sequence
  Description of Artificial Sequence: Synthetic oligonucleotide
ggcgugugcuaucacugac

SEQ ID NO: 3148987 - RNA, 19 nt, Artificial Sequence
  Description of Artificial Sequence: Synthetic oligonucleotide
cgcgugcugggauuaaagg

SEQ ID NO: 3148988 - RNA, 19 nt, Artificial Sequence
  Description of Artificial Sequence: Synthetic oligonucleotide
gcgugugcuaucacugacc

SEQ ID NO: 3148989 - RNA, 19 nt, Artificial Sequence
  Description of Artificial Sequence: Synthetic oligonucleotide
ggccucaaauucaagagau

SEQ ID NO: 3148990 - RNA, 19 nt, Artificial Sequence
  Description of Artificial Sequence: Synthetic oligonucleotide
ccgcgugcugggauuaaag

SEQ ID NO: 3148991 - RNA, 19 nt, Artificial Sequence
  Description of Artificial Sequence: Synthetic oligonucleotide
gugcuaucacugacccggc

SEQ ID NO: 3148992 - RNA, 19 nt, Artificial Sequence
  Description of Artificial Sequence: Synthetic oligonucleotide
ucccgcgugcugggauuaa

SEQ ID NO: 3148993 - RNA, 19 nt, Artificial Sequence
  Description of Artificial Sequence: Synthetic oligonucleotide
ccuggaagucgcucuugua

SEQ ID NO: 3148994 - RNA, 19 nt, Artificial Sequence
  Description of Artificial Sequence: Synthetic oligonucleotide
cucccgcgugcugggauua

SEQ ID NO: 3148995 - RNA, 19 nt, Artificial Sequence
  Description of Artificial Sequence: Synthetic oligonucleotide
gccucccgcgugcugggau

SEQ ID NO: 3148996 - RNA, 19 nt, Artificial Sequence
  Description of Artificial Sequence: Synthetic oligonucleotide
cccgcgugcugggauuaaa

SEQ ID NO: 3148997 - RNA, 19 nt, Artificial Sequence
  Description of Artificial Sequence: Synthetic oligonucleotide
ccucccgcgugcugggauu

SEQ ID NO: 3148998 - RNA, 19 nt, Artificial Sequence
  Description of Artificial Sequence: Synthetic oligonucleotide
ugucagacgaccaagcgcc

SEQ ID NO: 3148999 - RNA, 19 nt, Artificial Sequence
  Description of Artificial Sequence: Synthetic oligonucleotide
cuugucauccagcaggacg

SEQ ID NO: 3149000 - RNA, 19 nt, Artificial Sequence
  Description of Artificial Sequence: Synthetic oligonucleotide
aacgcagcagugucagacg

SEQ ID NO: 3149001 - RNA, 19 nt, Artificial Sequence
  Description of Artificial Sequence: Synthetic oligonucleotide
gaaaacgcagcagugucag

SEQ ID NO: 3149002 - RNA, 19 nt, Artificial Sequence
  Description of Artificial Sequence: Synthetic oligonucleotide
agugucagacgaccaagcg

SEQ ID NO: 3149003 - RNA, 19 nt, Artificial Sequence
  Description of Artificial Sequence: Synthetic oligonucleotide
acgaccaagcgccaccuuc

SEQ ID NO: 3149004 - RNA, 19 nt, Artificial Sequence
  Description of Artificial Sequence: Synthetic oligonucleotide
agcaggacgcggaaaacgc

SEQ ID NO: 3149005 - RNA, 19 nt, Artificial Sequence
  Description of Artificial Sequence: Synthetic oligonucleotide
gugucagacgaccaagcgc

SEQ ID NO: 3149006 - RNA, 19 nt, Artificial Sequence
  Description of Artificial Sequence: Synthetic oligonucleotide
acagcccacccucugcaac

SEQ ID NO: 3149007 - RNA, 19 nt, Artificial Sequence
  Description of Artificial Sequence: Synthetic oligonucleotide
ucugcaacgcaggaucagc

SEQ ID NO: 3149008 - RNA, 19 nt, Artificial Sequence
  Description of Artificial Sequence: Synthetic oligonucleotide
uccuugucauccagcagga

SEQ ID NO: 3149009 - RNA, 19 nt, Artificial Sequence
  Description of Artificial Sequence: Synthetic oligonucleotide
caggacgcggaaaacgcag

SEQ ID NO: 3149010 - RNA, 19 nt, Artificial Sequence
  Description of Artificial Sequence: Synthetic oligonucleotide
caacgcaggaucagcuccg

SEQ ID NO: 3149011 - RNA, 19 nt, Artificial Sequence
  Description of Artificial Sequence: Synthetic oligonucleotide
acgcggaaaacgcagcagu

SEQ ID NO: 3149012 - RNA, 19 nt, Artificial Sequence
  Description of Artificial Sequence: Synthetic oligonucleotide
cagugucagacgaccaagc

SEQ ID NO: 3149013 - RNA, 19 nt, Artificial Sequence
  Description of Artificial Sequence: Synthetic oligonucleotide
gcaacgcaggaucagcucc

SEQ ID NO: 3149014 - RNA, 19 nt, Artificial Sequence
  Description of Artificial Sequence: Synthetic oligonucleotide
cagcccacccucugcaacg

SEQ ID NO: 3149015 - RNA, 19 nt, Artificial Sequence
  Description of Artificial Sequence: Synthetic oligonucleotide
cagcaggacgcggaaaacg

SEQ ID NO: 3149016 - RNA, 19 nt, Artificial Sequence
  Description of Artificial Sequence: Synthetic oligonucleotide
cagacgaccaagcgccacc

SEQ ID NO: 3149017 - RNA, 19 nt, Artificial Sequence
  Description of Artificial Sequence: Synthetic oligonucleotide
agcagugucagacgaccaa

SEQ ID NO: 3149018 - RNA, 19 nt, Artificial Sequence
  Description of Artificial Sequence: Synthetic oligonucleotide
aacgcaggaucagcuccgg

SEQ ID NO: 3149019 - RNA, 19 nt, Artificial Sequence
  Description of Artificial Sequence: Synthetic oligonucleotide
gacgcggaaaacgcagcag

SEQ ID NO: 3149020 - RNA, 19 nt, Artificial Sequence
  Description of Artificial Sequence: Synthetic oligonucleotide
ugcaacgcaggaucagcuc

SEQ ID NO: 3149021 - RNA, 19 nt, Artificial Sequence
  Description of Artificial Sequence: Synthetic oligonucleotide
ugucauccagcaggacgcg

SEQ ID NO: 3149022 - RNA, 19 nt, Artificial Sequence
  Description of Artificial Sequence: Synthetic oligonucleotide
aggacgcggaaaacgcagc

SEQ ID NO: 3149023 - RNA, 19 nt, Artificial Sequence
  Description of Artificial Sequence: Synthetic oligonucleotide
acgcagcagugucagacga

SEQ ID NO: 3149024 - RNA, 19 nt, Artificial Sequence
  Description of Artificial Sequence: Synthetic oligonucleotide
accaagcgccaccuucauc

SEQ ID NO: 3149025 - RNA, 19 nt, Artificial Sequence
  Description of Artificial Sequence: Synthetic oligonucleotide
ugcccugcggggcuccuug

SEQ ID NO: 3149026 - RNA, 19 nt, Artificial Sequence
  Description of Artificial Sequence: Synthetic oligonucleotide
gcagcagugucagacgacc

SEQ ID NO: 3149027 - RNA, 19 nt, Artificial Sequence
  Description of Artificial Sequence: Synthetic oligonucleotide
ucagcuccggcugcccugc

SEQ ID NO: 3149028 - RNA, 19 nt, Artificial Sequence
  Description of Artificial Sequence: Synthetic oligonucleotide
cccucugcaacgcaggauc

SEQ ID NO: 3149029 - RNA, 19 nt, Artificial Sequence
  Description of Artificial Sequence: Synthetic oligonucleotide
agcccacccucugcaacgc

SEQ ID NO: 3149030 - RNA, 19 nt, Artificial Sequence
  Description of Artificial Sequence: Synthetic oligonucleotide
ccaagcgccaccuucaucu

SEQ ID NO: 3149031 - RNA, 19 nt, Artificial Sequence
  Description of Artificial Sequence: Synthetic oligonucleotide
agcuccggcugcccugcgg

SEQ ID NO: 3149032 - RNA, 19 nt, Artificial Sequence
  Description of Artificial Sequence: Synthetic oligonucleotide
cucugcaacgcaggaucag

SEQ ID NO: 3149033 - RNA, 19 nt, Artificial Sequence
  Description of Artificial Sequence: Synthetic oligonucleotide
gucauccagcaggacgcgg

SEQ ID NO: 3149034 - RNA, 19 nt, Artificial Sequence
  Description of Artificial Sequence: Synthetic oligonucleotide
agacgaccaagcgccaccu

SEQ ID NO: 3149035 - RNA, 19 nt, Artificial Sequence
  Description of Artificial Sequence: Synthetic oligonucleotide
ggaaaacgcagcaguguca

SEQ ID NO: 3149036 - RNA, 19 nt, Artificial Sequence
  Description of Artificial Sequence: Synthetic oligonucleotide
ccacccucugcaacgcagg

SEQ ID NO: 3149037 - RNA, 19 nt, Artificial Sequence
  Description of Artificial Sequence: Synthetic oligonucleotide
caagcgccaccuucaucuc

SEQ ID NO: 3149038 - RNA, 19 nt, Artificial Sequence
  Description of Artificial Sequence: Synthetic oligonucleotide
uccggcugcccugcggggc

SEQ ID NO: 3149039 - RNA, 19 nt, Artificial Sequence
  Description of Artificial Sequence: Synthetic oligonucleotide
cggaaaacgcagcaguguc

SEQ ID NO: 3149040 - RNA, 19 nt, Artificial Sequence
  Description of Artificial Sequence: Synthetic oligonucleotide
ggacgcggaaaacgcagca

SEQ ID NO: 3149041 - RNA, 19 nt, Artificial Sequence
  Description of Artificial Sequence: Synthetic oligonucleotide
cccacccucugcaacgcag

SEQ ID NO: 3149042 - RNA, 19 nt, Artificial Sequence
  Description of Artificial Sequence: Synthetic oligonucleotide
cugcaacgcaggaucagcu

SEQ ID NO: 3149043 - RNA, 19 nt, Artificial Sequence
  Description of Artificial Sequence: Synthetic oligonucleotide
cagcagugucagacgacca

SEQ ID NO: 3149044 - RNA, 19 nt, Artificial Sequence
  Description of Artificial Sequence: Synthetic oligonucleotide
cuccggcugcccugcgggg

SEQ ID NO: 3149045 - RNA, 19 nt, Artificial Sequence
  Description of Artificial Sequence: Synthetic oligonucleotide
ugcggggcuccuugucauc

SEQ ID NO: 3149046 - RNA, 19 nt, Artificial Sequence
  Description of Artificial Sequence: Synthetic oligonucleotide
cauccagcaggacgcggaa

SEQ ID NO: 3149047 - RNA, 19 nt, Artificial Sequence
  Description of Artificial Sequence: Synthetic oligonucleotide
cgcggaaaacgcagcagug

SEQ ID NO: 3149048 - RNA, 19 nt, Artificial Sequence
  Description of Artificial Sequence: Synthetic oligonucleotide
acccucugcaacgcaggau

SEQ ID NO: 3149049 - RNA, 19 nt, Artificial Sequence
  Description of Artificial Sequence: Synthetic oligonucleotide
cacccucugcaacgcagga

SEQ ID NO: 3149050 - RNA, 19 nt, Artificial Sequence
  Description of Artificial Sequence: Synthetic oligonucleotide
auccagcaggacgcggaaa

SEQ ID NO: 3149051 - RNA, 19 nt, Artificial Sequence
  Description of Artificial Sequence: Synthetic oligonucleotide
gaccaagcgccaccuucau

SEQ ID NO: 3149052 - RNA, 19 nt, Artificial Sequence
  Description of Artificial Sequence: Synthetic oligonucleotide
gcaggacgcggaaaacgca

SEQ ID NO: 3149053 - RNA, 19 nt, Artificial Sequence
  Description of Artificial Sequence: Synthetic oligonucleotide
cacagcccacccucugcaa

SEQ ID NO: 3149054 - RNA, 19 nt, Artificial Sequence
  Description of Artificial Sequence: Synthetic oligonucleotide
gucagacgaccaagcgcca

SEQ ID NO: 3149055 - RNA, 19 nt, Artificial Sequence
  Description of Artificial Sequence: Synthetic oligonucleotide
cgaccaagcgccaccuuca

SEQ ID NO: 3149056 - RNA, 19 nt, Artificial Sequence
  Description of Artificial Sequence: Synthetic oligonucleotide
ccucugcaacgcaggauca

SEQ ID NO: 3149057 - RNA, 19 nt, Artificial Sequence
  Description of Artificial Sequence: Synthetic oligonucleotide
gcggaaaacgcagcagugu

SEQ ID NO: 3149058 - RNA, 19 nt, Artificial Sequence
  Description of Artificial Sequence: Synthetic oligonucleotide
ccagcaggacgcggaaaac

SEQ ID NO: 3149059 - RNA, 19 nt, Artificial Sequence
  Description of Artificial Sequence: Synthetic oligonucleotide
cgcagcagugucagacgac

SEQ ID NO: 3149060 - RNA, 19 nt, Artificial Sequence
  Description of Artificial Sequence: Synthetic oligonucleotide
cugcggggcuccuugucau

SEQ ID NO: 3149061 - RNA, 19 nt, Artificial Sequence
  Description of Artificial Sequence: Synthetic oligonucleotide
ccuugucauccagcaggac

SEQ ID NO: 3149062 - RNA, 19 nt, Artificial Sequence
  Description of Artificial Sequence: Synthetic oligonucleotide
gacgaccaagcgccaccuu

SEQ ID NO: 3149063 - RNA, 19 nt, Artificial Sequence
  Description of Artificial Sequence: Synthetic oligonucleotide
ggcugcccugcggggcucc

SEQ ID NO: 3149064 - RNA, 19 nt, Artificial Sequence
  Description of Artificial Sequence: Synthetic oligonucleotide
gcccacccucugcaacgca

SEQ ID NO: 3149065 - RNA, 19 nt, Artificial Sequence
  Description of Artificial Sequence: Synthetic oligonucleotide
cggggcuccuugucaucca

SEQ ID NO: 3149066 - RNA, 19 nt, Artificial Sequence
  Description of Artificial Sequence: Synthetic oligonucleotide
ccggcugcccugcggggcu

SEQ ID NO: 3149067 - RNA, 19 nt, Artificial Sequence
  Description of Artificial Sequence: Synthetic oligonucleotide
gcccugcggggcuccuugu

SEQ ID NO: 3149068 - RNA, 19 nt, Artificial Sequence
  Description of Artificial Sequence: Synthetic oligonucleotide
cugcccugcggggcuccuu

SEQ ID NO: 3149069 - RNA, 19 nt, Artificial Sequence
  Description of Artificial Sequence: Synthetic oligonucleotide
gcugcccugcggggcuccu

SEQ ID NO: 3149070 - RNA, 19 nt, Artificial Sequence
  Description of Artificial Sequence: Synthetic oligonucleotide
cggcugcccugcggggcuc

SEQ ID NO: 3149071 - RNA, 19 nt, Artificial Sequence
  Description of Artificial Sequence: Synthetic oligonucleotide
acaauuuacaaauauauac

SEQ ID NO: 3149072 - RNA, 19 nt, Artificial Sequence
  Description of Artificial Sequence: Synthetic oligonucleotide
aauuuacaaauauauacug

SEQ ID NO: 3149073 - RNA, 19 nt, Artificial Sequence
  Description of Artificial Sequence: Synthetic oligonucleotide
uuuacaaauauauacuguc

SEQ ID NO: 3149074 - RNA, 19 nt, Artificial Sequence
  Description of Artificial Sequence: Synthetic oligonucleotide
uacaaauauauacuguccc

SEQ ID NO: 3149075 - RNA, 19 nt, Artificial Sequence
  Description of Artificial Sequence: Synthetic oligonucleotide
aaacucuuccucuggagac

SEQ ID NO: 3149076 - RNA, 19 nt, Artificial Sequence
  Description of Artificial Sequence: Synthetic oligonucleotide
aaauugagggacaauuuac

SEQ ID NO: 3149077 - RNA, 19 nt, Artificial Sequence
  Description of Artificial Sequence: Synthetic oligonucleotide
uuacaaauauauacugucc

SEQ ID NO: 3149078 - RNA, 19 nt, Artificial Sequence
  Description of Artificial Sequence: Synthetic oligonucleotide
ugagggacaauuuacaaau

SEQ ID NO: 3149079 - RNA, 19 nt, Artificial Sequence
  Description of Artificial Sequence: Synthetic oligonucleotide
uauauacugucccacuucc

SEQ ID NO: 3149080 - RNA, 19 nt, Artificial Sequence
  Description of Artificial Sequence: Synthetic oligonucleotide
uccaggaaggaaauugagg

SEQ ID NO: 3149081 - RNA, 19 nt, Artificial Sequence
  Description of Artificial Sequence: Synthetic oligonucleotide
aaaacucuuccucuggaga

SEQ ID NO: 3149082 - RNA, 19 nt, Artificial Sequence
  Description of Artificial Sequence: Synthetic oligonucleotide
aaauauauacugucccacu

SEQ ID NO: 3149083 - RNA, 19 nt, Artificial Sequence
  Description of Artificial Sequence: Synthetic oligonucleotide
acagaggucagagugaagg

SEQ ID NO: 3149084 - RNA, 19 nt, Artificial Sequence
  Description of Artificial Sequence: Synthetic oligonucleotide
auauauacugucccacuuc

SEQ ID NO: 3149085 - RNA, 19 nt, Artificial Sequence
  Description of Artificial Sequence: Synthetic oligonucleotide
aauauauacugucccacuu

SEQ ID NO: 3149086 - RNA, 19 nt, Artificial Sequence
  Description of Artificial Sequence: Synthetic oligonucleotide
ccaggaaggaaauugaggg

SEQ ID NO: 3149087 - RNA, 19 nt, Artificial Sequence
  Description of Artificial Sequence: Synthetic oligonucleotide
agugaagggaugccacucc

SEQ ID NO: 3149088 - RNA, 19 nt, Artificial Sequence
  Description of Artificial Sequence: Synthetic oligonucleotide
uuccucuggagacagaggu

SEQ ID NO: 3149089 - RNA, 19 nt, Artificial Sequence
  Description of Artificial Sequence: Synthetic oligonucleotide
gaagggaugccacuccagg

SEQ ID NO: 3149090 - RNA, 19 nt, Artificial Sequence
  Description of Artificial Sequence: Synthetic oligonucleotide
ucggauaugaauugagaaa

SEQ ID NO: 3149091 - RNA, 19 nt, Artificial Sequence
  Description of Artificial Sequence: Synthetic oligonucleotide
uauacugucccacuuccau

SEQ ID NO: 3149092 - RNA, 19 nt, Artificial Sequence
  Description of Artificial Sequence: Synthetic oligonucleotide
uacugucccacuuccaugc

SEQ ID NO: 3149093 - RNA, 19 nt, Artificial Sequence
  Description of Artificial Sequence: Synthetic oligonucleotide
aauugagggacaauuuaca

SEQ ID NO: 3149094 - RNA, 19 nt, Artificial Sequence
  Description of Artificial Sequence: Synthetic oligonucleotide
aaagccacgcuuucgcuau

SEQ ID NO: 3149095 - RNA, 19 nt, Artificial Sequence
  Description of Artificial Sequence: Synthetic oligonucleotide
ucuuccucuggagacagag

SEQ ID NO: 3149096 - RNA, 19 nt, Artificial Sequence
  Description of Artificial Sequence: Synthetic oligonucleotide
caaauauauacugucccac

SEQ ID NO: 3149097 - RNA, 19 nt, Artificial Sequence
  Description of Artificial Sequence: Synthetic oligonucleotide
gaaauugagggacaauuua

SEQ ID NO: 3149098 - RNA, 19 nt, Artificial Sequence
  Description of Artificial Sequence: Synthetic oligonucleotide
uuucgcuaucugcaguucc

SEQ ID NO: 3149099 - RNA, 19 nt, Artificial Sequence
  Description of Artificial Sequence: Synthetic oligonucleotide
ugcucggauaugaauugag

SEQ ID NO: 3149100 - RNA, 19 nt, Artificial Sequence
  Description of Artificial Sequence: Synthetic oligonucleotide
caauuuacaaauauauacu

SEQ ID NO: 3149101 - RNA, 19 nt, Artificial Sequence
  Description of Artificial Sequence: Synthetic oligonucleotide
uugagggacaauuuacaaa

SEQ ID NO: 3149102 - RNA, 19 nt, Artificial Sequence
  Description of Artificial Sequence: Synthetic oligonucleotide
agggacaauuuacaaauau

SEQ ID NO: 3149103 - RNA, 19 nt, Artificial Sequence
  Description of Artificial Sequence: Synthetic oligonucleotide
auugagggacaauuuacaa

SEQ ID NO: 3149104 - RNA, 19 nt, Artificial Sequence
  Description of Artificial Sequence: Synthetic oligonucleotide
uucgcuaucugcaguucca

SEQ ID NO: 3149105 - RNA, 19 nt, Artificial Sequence
  Description of Artificial Sequence: Synthetic oligonucleotide
aagggaugccacuccagga

SEQ ID NO: 3149106 - RNA, 19 nt, Artificial Sequence
  Description of Artificial Sequence: Synthetic oligonucleotide
ugucccacuuccaugcuaa

SEQ ID NO: 3149107 - RNA, 19 nt, Artificial Sequence
  Description of Artificial Sequence: Synthetic oligonucleotide
ugaagggaugccacuccag

SEQ ID NO: 3149108 - RNA, 19 nt, Artificial Sequence
  Description of Artificial Sequence: Synthetic oligonucleotide
ugccacuccaggaaggaaa

SEQ ID NO: 3149109 - RNA, 19 nt, Artificial Sequence
  Description of Artificial Sequence: Synthetic oligonucleotide
aggaaauugagggacaauu

SEQ ID NO: 3149110 - RNA, 19 nt, Artificial Sequence
  Description of Artificial Sequence: Synthetic oligonucleotide
cucggauaugaauugagaa

SEQ ID NO: 3149111 - RNA, 19 nt, Artificial Sequence
  Description of Artificial Sequence: Synthetic oligonucleotide
cacuccaggaaggaaauug

SEQ ID NO: 3149112 - RNA, 19 nt, Artificial Sequence
  Description of Artificial Sequence: Synthetic oligonucleotide
ucagagugaagggaugcca

SEQ ID NO: 3149113 - RNA, 19 nt, Artificial Sequence
  Description of Artificial Sequence: Synthetic oligonucleotide
cagaggucagagugaaggg

SEQ ID NO: 3149114 - RNA, 19 nt, Artificial Sequence
  Description of Artificial Sequence: Synthetic oligonucleotide
auacugucccacuuccaug

SEQ ID NO: 3149115 - RNA, 19 nt, Artificial Sequence
  Description of Artificial Sequence: Synthetic oligonucleotide
ugcuaaagccacgcuuucg

SEQ ID NO: 3149116 - RNA, 19 nt, Artificial Sequence
  Description of Artificial Sequence: Synthetic oligonucleotide
cacgcuuucgcuaucugca

SEQ ID NO: 3149117 - RNA, 19 nt, Artificial Sequence
  Description of Artificial Sequence: Synthetic oligonucleotide
uuccaugcuaaagccacgc

SEQ ID NO: 3149118 - RNA, 19 nt, Artificial Sequence
  Description of Artificial Sequence: Synthetic oligonucleotide
gcuaaagccacgcuuucgc

SEQ ID NO: 3149119 - RNA, 19 nt, Artificial Sequence
  Description of Artificial Sequence: Synthetic oligonucleotide
cccacuuccaugcuaaagc

SEQ ID NO: 3149120 - RNA, 19 nt, Artificial Sequence
  Description of Artificial Sequence: Synthetic oligonucleotide
cuccaggaaggaaauugag

SEQ ID NO: 3149121 - RNA, 19 nt, Artificial Sequence
  Description of Artificial Sequence: Synthetic oligonucleotide
cagagugaagggaugccac

SEQ ID NO: 3149122 - RNA, 19 nt, Artificial Sequence
  Description of Artificial Sequence: Synthetic oligonucleotide
uaaagccacgcuuucgcua

SEQ ID NO: 3149123 - RNA, 19 nt, Artificial Sequence
  Description of Artificial Sequence: Synthetic oligonucleotide
gacaauuuacaaauauaua

SEQ ID NO: 3149124 - RNA, 19 nt, Artificial Sequence
  Description of Artificial Sequence: Synthetic oligonucleotide
augcuaaagccacgcuuuc

SEQ ID NO: 3149125 - RNA, 19 nt, Artificial Sequence
  Description of Artificial Sequence: Synthetic oligonucleotide
cuuccaugcuaaagccacg

SEQ ID NO: 3149126 - RNA, 19 nt, Artificial Sequence
  Description of Artificial Sequence: Synthetic oligonucleotide
agagugaagggaugccacu

SEQ ID NO: 3149127 - RNA, 19 nt, Artificial Sequence
  Description of Artificial Sequence: Synthetic oligonucleotide
cuuccucuggagacagagg

SEQ ID NO: 3149128 - RNA, 19 nt, Artificial Sequence
  Description of Artificial Sequence: Synthetic oligonucleotide
aacucuuccucuggagaca

SEQ ID NO: 3149129 - RNA, 19 nt, Artificial Sequence
  Description of Artificial Sequence: Synthetic oligonucleotide
agaggucagagugaaggga

SEQ ID NO: 3149130 - RNA, 19 nt, Artificial Sequence
  Description of Artificial Sequence: Synthetic oligonucleotide
ucccacuuccaugcuaaag

SEQ ID NO: 3149131 - RNA, 19 nt, Artificial Sequence
  Description of Artificial Sequence: Synthetic oligonucleotide
ggacaauuuacaaauauau

SEQ ID NO: 3149132 - RNA, 19 nt, Artificial Sequence
  Description of Artificial Sequence: Synthetic oligonucleotide
uccaugcuaaagccacgcu

SEQ ID NO: 3149133 - RNA, 19 nt, Artificial Sequence
  Description of Artificial Sequence: Synthetic oligonucleotide
gaaggaaauugagggacaa

SEQ ID NO: 3149134 - RNA, 19 nt, Artificial Sequence
  Description of Artificial Sequence: Synthetic oligonucleotide
acgcuuucgcuaucugcag

SEQ ID NO: 3149135 - RNA, 19 nt, Artificial Sequence
  Description of Artificial Sequence: Synthetic oligonucleotide
acucuuccucuggagacag

SEQ ID NO: 3149136 - RNA, 19 nt, Artificial Sequence
  Description of Artificial Sequence: Synthetic oligonucleotide
gcugcucggauaugaauug

SEQ ID NO: 3149137 - RNA, 19 nt, Artificial Sequence
  Description of Artificial Sequence: Synthetic oligonucleotide
ccacuuccaugcuaaagcc

SEQ ID NO: 3149138 - RNA, 19 nt, Artificial Sequence
  Description of Artificial Sequence: Synthetic oligonucleotide
acuccaggaaggaaauuga

SEQ ID NO: 3149139 - RNA, 19 nt, Artificial Sequence
  Description of Artificial Sequence: Synthetic oligonucleotide
gagugaagggaugccacuc

SEQ ID NO: 3149140 - RNA, 19 nt, Artificial Sequence
  Description of Artificial Sequence: Synthetic oligonucleotide
aaggaaauugagggacaau

SEQ ID NO: 3149141 - RNA, 19 nt, Artificial Sequence
  Description of Artificial Sequence: Synthetic oligonucleotide
gagacagaggucagaguga

SEQ ID NO: 3149142 - RNA, 19 nt, Artificial Sequence
  Description of Artificial Sequence: Synthetic oligonucleotide
agacagaggucagagugaa

SEQ ID NO: 3149143 - RNA, 19 nt, Artificial Sequence
  Description of Artificial Sequence: Synthetic oligonucleotide
gucagagugaagggaugcc

SEQ ID NO: 3149144 - RNA, 19 nt, Artificial Sequence
  Description of Artificial Sequence: Synthetic oligonucleotide
aagccacgcuuucgcuauc

SEQ ID NO: 3149145 - RNA, 19 nt, Artificial Sequence
  Description of Artificial Sequence: Synthetic oligonucleotide
ggucagagugaagggaugc

SEQ ID NO: 3149146 - RNA, 19 nt, Artificial Sequence
  Description of Artificial Sequence: Synthetic oligonucleotide
gugaagggaugccacucca

SEQ ID NO: 3149147 - RNA, 19 nt, Artificial Sequence
  Description of Artificial Sequence: Synthetic oligonucleotide
cacuuccaugcuaaagcca

SEQ ID NO: 3149148 - RNA, 19 nt, Artificial Sequence
  Description of Artificial Sequence: Synthetic oligonucleotide
cucuggagacagaggucag

SEQ ID NO: 3149149 - RNA, 19 nt, Artificial Sequence
  Description of Artificial Sequence: Synthetic oligonucleotide
ggaugccacuccaggaagg

SEQ ID NO: 3149150 - RNA, 19 nt, Artificial Sequence
  Description of Artificial Sequence: Synthetic oligonucleotide
ccacgcuuucgcuaucugc

SEQ ID NO: 3149151 - RNA, 19 nt, Artificial Sequence
  Description of Artificial Sequence: Synthetic oligonucleotide
auauacugucccacuucca

SEQ ID NO: 3149152 - RNA, 19 nt, Artificial Sequence
  Description of Artificial Sequence: Synthetic oligonucleotide
gaggucagagugaagggau

SEQ ID NO: 3149153 - RNA, 19 nt, Artificial Sequence
  Description of Artificial Sequence: Synthetic oligonucleotide
cuuucgcuaucugcaguuc

SEQ ID NO: 3149154 - RNA, 19 nt, Artificial Sequence
  Description of Artificial Sequence: Synthetic oligonucleotide
gacagaggucagagugaag

SEQ ID NO: 3149155 - RNA, 19 nt, Artificial Sequence
  Description of Artificial Sequence: Synthetic oligonucleotide
gggacaauuuacaaauaua

SEQ ID NO: 3149156 - RNA, 19 nt, Artificial Sequence
  Description of Artificial Sequence: Synthetic oligonucleotide
acugucccacuuccaugcu

SEQ ID NO: 3149157 - RNA, 19 nt, Artificial Sequence
  Description of Artificial Sequence: Synthetic oligonucleotide
ucgcuaucugcaguuccaa

SEQ ID NO: 3149158 - RNA, 19 nt, Artificial Sequence
  Description of Artificial Sequence: Synthetic oligonucleotide
aggucagagugaagggaug

SEQ ID NO: 3149159 - RNA, 19 nt, Artificial Sequence
  Description of Artificial Sequence: Synthetic oligonucleotide
cggauaugaauugagaaaa

SEQ ID NO: 3149160 - RNA, 19 nt, Artificial Sequence
  Description of Artificial Sequence: Synthetic oligonucleotide
ggaaggaaauugagggaca

SEQ ID NO: 3149161 - RNA, 19 nt, Artificial Sequence
  Description of Artificial Sequence: Synthetic oligonucleotide
cuaaagccacgcuuucgcu

SEQ ID NO: 3149162 - RNA, 19 nt, Artificial Sequence
  Description of Artificial Sequence: Synthetic oligonucleotide
gcucggauaugaauugaga

SEQ ID NO: 3149163 - RNA, 19 nt, Artificial Sequence
  Description of Artificial Sequence: Synthetic oligonucleotide
agccacgcuuucgcuaucu

SEQ ID NO: 3149164 - RNA, 19 nt, Artificial Sequence
  Description of Artificial Sequence: Synthetic oligonucleotide
gagggacaauuuacaaaua

SEQ ID NO: 3149165 - RNA, 19 nt, Artificial Sequence
  Description of Artificial Sequence: Synthetic oligonucleotide
ggaaauugagggacaauuu

SEQ ID NO: 3149166 - RNA, 19 nt, Artificial Sequence
  Description of Artificial Sequence: Synthetic oligonucleotide
cugcucggauaugaauuga

SEQ ID NO: 3149167 - RNA, 19 nt, Artificial Sequence
  Description of Artificial Sequence: Synthetic oligonucleotide
augccacuccaggaaggaa

SEQ ID NO: 3149168 - RNA, 19 nt, Artificial Sequence
  Description of Artificial Sequence: Synthetic oligonucleotide
gcuuucgcuaucugcaguu

SEQ ID NO: 3149169 - RNA, 19 nt, Artificial Sequence
  Description of Artificial Sequence: Synthetic oligonucleotide
cugucccacuuccaugcua

SEQ ID NO: 3149170 - RNA, 19 nt, Artificial Sequence
  Description of Artificial Sequence: Synthetic oligonucleotide
gccacgcuuucgcuaucug

SEQ ID NO: 3149171 - RNA, 19 nt, Artificial Sequence
  Description of Artificial Sequence: Synthetic oligonucleotide
ccaugcuaaagccacgcuu

SEQ ID NO: 3149172 - RNA, 19 nt, Artificial Sequence
  Description of Artificial Sequence: Synthetic oligonucleotide
gucccacuuccaugcuaaa

SEQ ID NO: 3149173 - RNA, 19 nt, Artificial Sequence
  Description of Artificial Sequence: Synthetic oligonucleotide
gccacuccaggaaggaaau

SEQ ID NO: 3149174 - RNA, 19 nt, Artificial Sequence
  Description of Artificial Sequence: Synthetic oligonucleotide
cgcuuucgcuaucugcagu

SEQ ID NO: 3149175 - RNA, 19 nt, Artificial Sequence
  Description of Artificial Sequence: Synthetic oligonucleotide
ccacuccaggaaggaaauu

SEQ ID NO: 3149176 - RNA, 19 nt, Artificial Sequence
  Description of Artificial Sequence: Synthetic oligonucleotide
aacuccgagaucuaccugc

SEQ ID NO: 3149177 - RNA, 19 nt, Artificial Sequence
  Description of Artificial Sequence: Synthetic oligonucleotide
ucaaacuccgagaucuacc

SEQ ID NO: 3149178 - RNA, 19 nt, Artificial Sequence
  Description of Artificial Sequence: Synthetic oligonucleotide
uccgagaucuaccugccuc

SEQ ID NO: 3149179 - RNA, 19 nt, Artificial Sequence
  Description of Artificial Sequence: Synthetic oligonucleotide
uauagcacuggcuguccug

SEQ ID NO: 3149180 - RNA, 19 nt, Artificial Sequence
  Description of Artificial Sequence: Synthetic oligonucleotide
auagcacuggcuguccugg

SEQ ID NO: 3149181 - RNA, 19 nt, Artificial Sequence
  Description of Artificial Sequence: Synthetic oligonucleotide
agggcuucucuguauagca

SEQ ID NO: 3149182 - RNA, 19 nt, Artificial Sequence
  Description of Artificial Sequence: Synthetic oligonucleotide
aaacuccgagaucuaccug

SEQ ID NO: 3149183 - RNA, 19 nt, Artificial Sequence
  Description of Artificial Sequence: Synthetic oligonucleotide
uguauagcacuggcugucc

SEQ ID NO: 3149184 - RNA, 19 nt, Artificial Sequence
  Description of Artificial Sequence: Synthetic oligonucleotide
acagggcuucucuguauag

SEQ ID NO: 3149185 - RNA, 19 nt, Artificial Sequence
  Description of Artificial Sequence: Synthetic oligonucleotide
caugcaccaccacacccag

SEQ ID NO: 3149186 - RNA, 19 nt, Artificial Sequence
  Description of Artificial Sequence: Synthetic oligonucleotide
caaacuccgagaucuaccu

SEQ ID NO: 3149187 - RNA, 19 nt, Artificial Sequence
  Description of Artificial Sequence: Synthetic oligonucleotide
agacagggcuucucuguau

SEQ ID NO: 3149188 - RNA, 19 nt, Artificial Sequence
  Description of Artificial Sequence: Synthetic oligonucleotide
cuaccugccucugccuccc

SEQ ID NO: 3149189 - RNA, 19 nt, Artificial Sequence
  Description of Artificial Sequence: Synthetic oligonucleotide
ggcuucucuguauagcacu

SEQ ID NO: 3149190 - RNA, 19 nt, Artificial Sequence
  Description of Artificial Sequence: Synthetic oligonucleotide
gcacuggcuguccuggaac

SEQ ID NO: 3149191 - RNA, 19 nt, Artificial Sequence
  Description of Artificial Sequence: Synthetic oligonucleotide
uagcacuggcuguccugga

SEQ ID NO: 3149192 - RNA, 19 nt, Artificial Sequence
  Description of Artificial Sequence: Synthetic oligonucleotide
guauagcacuggcuguccu

SEQ ID NO: 3149193 - RNA, 19 nt, Artificial Sequence
  Description of Artificial Sequence: Synthetic oligonucleotide
gggcuucucuguauagcac

SEQ ID NO: 3149194 - RNA, 19 nt, Artificial Sequence
  Description of Artificial Sequence: Synthetic oligonucleotide
ccgagaucuaccugccucu

SEQ ID NO: 3149195 - RNA, 19 nt, Artificial Sequence
  Description of Artificial Sequence: Synthetic oligonucleotide
ccacacccagcuuaauuuu

SEQ ID NO: 3149196 - RNA, 19 nt, Artificial Sequence
  Description of Artificial Sequence: Synthetic oligonucleotide
uugcuaaccaccaucaccg

SEQ ID NO: 3149197 - RNA, 19 nt, Artificial Sequence
  Description of Artificial Sequence: Synthetic oligonucleotide
uuaccuaccacacucuugg

SEQ ID NO: 3149198 - RNA, 19 nt, Artificial Sequence
  Description of Artificial Sequence: Synthetic oligonucleotide
gacgaaaugacccuuugcg

SEQ ID NO: 3149199 - RNA, 19 nt, Artificial Sequence
  Description of Artificial Sequence: Synthetic oligonucleotide
uuaaucgcugcucucaucu

SEQ ID NO: 3149200 - RNA, 19 nt, Artificial Sequence
  Description of Artificial Sequence: Synthetic oligonucleotide
accguuaccuaccacacuc

SEQ ID NO: 3149201 - RNA, 19 nt, Artificial Sequence
  Description of Artificial Sequence: Synthetic oligonucleotide
acgaaaugacccuuugcgc

SEQ ID NO: 3149202 - RNA, 19 nt, Artificial Sequence
  Description of Artificial Sequence: Synthetic oligonucleotide
cuugcuaaccaccaucacc

SEQ ID NO: 3149203 - RNA, 19 nt, Artificial Sequence
  Description of Artificial Sequence: Synthetic oligonucleotide
uuguucaucuugcuaacca

SEQ ID NO: 3149204 - RNA, 19 nt, Artificial Sequence
  Description of Artificial Sequence: Synthetic oligonucleotide
gacuuagacccucaguagc

SEQ ID NO: 3149205 - RNA, 19 nt, Artificial Sequence
  Description of Artificial Sequence: Synthetic oligonucleotide
ugugcaucuuuguucaucu

SEQ ID NO: 3149206 - RNA, 19 nt, Artificial Sequence
  Description of Artificial Sequence: Synthetic oligonucleotide
accuaccacacucuugggc

SEQ ID NO: 3149207 - RNA, 19 nt, Artificial Sequence
  Description of Artificial Sequence: Synthetic oligonucleotide
uucaucuugcuaaccacca

SEQ ID NO: 3149208 - RNA, 19 nt, Artificial Sequence
  Description of Artificial Sequence: Synthetic oligonucleotide
aaucgcugcucucaucugu

SEQ ID NO: 3149209 - RNA, 19 nt, Artificial Sequence
  Description of Artificial Sequence: Synthetic oligonucleotide
accaccaucaccgcgggcg

SEQ ID NO: 3149210 - RNA, 19 nt, Artificial Sequence
  Description of Artificial Sequence: Synthetic oligonucleotide
uguucaucuugcuaaccac

SEQ ID NO: 3149211 - RNA, 19 nt, Artificial Sequence
  Description of Artificial Sequence: Synthetic oligonucleotide
aucaccgcgggcgagggcc

SEQ ID NO: 3149212 - RNA, 19 nt, Artificial Sequence
  Description of Artificial Sequence: Synthetic oligonucleotide
aaugacccuuugcgcgacc

SEQ ID NO: 3149213 - RNA, 19 nt, Artificial Sequence
  Description of Artificial Sequence: Synthetic oligonucleotide
uucccagcgacgaaaugac

SEQ ID NO: 3149214 - RNA, 19 nt, Artificial Sequence
  Description of Artificial Sequence: Synthetic oligonucleotide
ucaucugugcaucuuuguu

SEQ ID NO: 3149215 - RNA, 19 nt, Artificial Sequence
  Description of Artificial Sequence: Synthetic oligonucleotide
gaaaugacccuuugcgcga

SEQ ID NO: 3149216 - RNA, 19 nt, Artificial Sequence
  Description of Artificial Sequence: Synthetic oligonucleotide
cuuuguucaucuugcuaac

SEQ ID NO: 3149217 - RNA, 19 nt, Artificial Sequence
  Description of Artificial Sequence: Synthetic oligonucleotide
caucuugcuaaccaccauc

SEQ ID NO: 3149218 - RNA, 19 nt, Artificial Sequence
  Description of Artificial Sequence: Synthetic oligonucleotide
aaaugacccuuugcgcgac

SEQ ID NO: 3149219 - RNA, 19 nt, Artificial Sequence
  Description of Artificial Sequence: Synthetic oligonucleotide
cgaaaugacccuuugcgcg

SEQ ID NO: 3149220 - RNA, 19 nt, Artificial Sequence
  Description of Artificial Sequence: Synthetic oligonucleotide
gcugcccggacuuagaccc

SEQ ID NO: 3149221 - RNA, 19 nt, Artificial Sequence
  Description of Artificial Sequence: Synthetic oligonucleotide
guucaucuugcuaaccacc

SEQ ID NO: 3149222 - RNA, 19 nt, Artificial Sequence
  Description of Artificial Sequence: Synthetic oligonucleotide
ugcgcgaccguuaccuacc

SEQ ID NO: 3149223 - RNA, 19 nt, Artificial Sequence
  Description of Artificial Sequence: Synthetic oligonucleotide
uaaccaccaucaccgcggg

SEQ ID NO: 3149224 - RNA, 19 nt, Artificial Sequence
  Description of Artificial Sequence: Synthetic oligonucleotide
agggccgucccuucccagc

SEQ ID NO: 3149225 - RNA, 19 nt, Artificial Sequence
  Description of Artificial Sequence: Synthetic oligonucleotide
acacucuugggcugcccgg

SEQ ID NO: 3149226 - RNA, 19 nt, Artificial Sequence
  Description of Artificial Sequence: Synthetic oligonucleotide
cacacucuugggcugcccg

SEQ ID NO: 3149227 - RNA, 19 nt, Artificial Sequence
  Description of Artificial Sequence: Synthetic oligonucleotide
ucuugcuaaccaccaucac

SEQ ID NO: 3149228 - RNA, 19 nt, Artificial Sequence
  Description of Artificial Sequence: Synthetic oligonucleotide
cccagcgacgaaaugaccc

SEQ ID NO: 3149229 - RNA, 19 nt, Artificial Sequence
  Description of Artificial Sequence: Synthetic oligonucleotide
ggacuuagacccucaguag

SEQ ID NO: 3149230 - RNA, 19 nt, Artificial Sequence
  Description of Artificial Sequence: Synthetic oligonucleotide
cuucccagcgacgaaauga

SEQ ID NO: 3149231 - RNA, 19 nt, Artificial Sequence
  Description of Artificial Sequence: Synthetic oligonucleotide
aucuugcuaaccaccauca

SEQ ID NO: 3149232 - RNA, 19 nt, Artificial Sequence
  Description of Artificial Sequence: Synthetic oligonucleotide
acuuagacccucaguagcu

SEQ ID NO: 3149233 - RNA, 19 nt, Artificial Sequence
  Description of Artificial Sequence: Synthetic oligonucleotide
guuaccuaccacacucuug

SEQ ID NO: 3149234 - RNA, 19 nt, Artificial Sequence
  Description of Artificial Sequence: Synthetic oligonucleotide
gcuaaccaccaucaccgcg

SEQ ID NO: 3149235 - RNA, 19 nt, Artificial Sequence
  Description of Artificial Sequence: Synthetic oligonucleotide
aaccaccaucaccgcgggc

SEQ ID NO: 3149236 - RNA, 19 nt, Artificial Sequence
  Description of Artificial Sequence: Synthetic oligonucleotide
ucaucuugcuaaccaccau

SEQ ID NO: 3149237 - RNA, 19 nt, Artificial Sequence
  Description of Artificial Sequence: Synthetic oligonucleotide
uaaucgcugcucucaucug

SEQ ID NO: 3149238 - RNA, 19 nt, Artificial Sequence
  Description of Artificial Sequence: Synthetic oligonucleotide
uaccuaccacacucuuggg

SEQ ID NO: 3149239 - RNA, 19 nt, Artificial Sequence
  Description of Artificial Sequence: Synthetic oligonucleotide
uugcgcgaccguuaccuac

SEQ ID NO: 3149240 - RNA, 19 nt, Artificial Sequence
  Description of Artificial Sequence: Synthetic oligonucleotide
augacccuuugcgcgaccg

SEQ ID NO: 3149241 - RNA, 19 nt, Artificial Sequence
  Description of Artificial Sequence: Synthetic oligonucleotide
acucuugggcugcccggac

SEQ ID NO: 3149242 - RNA, 19 nt, Artificial Sequence
  Description of Artificial Sequence: Synthetic oligonucleotide
cuaccacacucuugggcug

SEQ ID NO: 3149243 - RNA, 19 nt, Artificial Sequence
  Description of Artificial Sequence: Synthetic oligonucleotide
ugcuaaccaccaucaccgc

SEQ ID NO: 3149244 - RNA, 19 nt, Artificial Sequence
  Description of Artificial Sequence: Synthetic oligonucleotide
ucccagcgacgaaaugacc

SEQ ID NO: 3149245 - RNA, 19 nt, Artificial Sequence
  Description of Artificial Sequence: Synthetic oligonucleotide
gcgaccguuaccuaccaca

SEQ ID NO: 3149246 - RNA, 19 nt, Artificial Sequence
  Description of Artificial Sequence: Synthetic oligonucleotide
cugugcaucuuuguucauc

SEQ ID NO: 3149247 - RNA, 19 nt, Artificial Sequence
  Description of Artificial Sequence: Synthetic oligonucleotide
ugcucucaucugugcaucu

SEQ ID NO: 3149248 - RNA, 19 nt, Artificial Sequence
  Description of Artificial Sequence: Synthetic oligonucleotide
uugggcugcccggacuuag

SEQ ID NO: 3149249 - RNA, 19 nt, Artificial Sequence
  Description of Artificial Sequence: Synthetic oligonucleotide
accaucaccgcgggcgagg

SEQ ID NO: 3149250 - RNA, 19 nt, Artificial Sequence
  Description of Artificial Sequence: Synthetic oligonucleotide
cuuagacccucaguagcuc

SEQ ID NO: 3149251 - RNA, 19 nt, Artificial Sequence
  Description of Artificial Sequence: Synthetic oligonucleotide
uaccacacucuugggcugc

SEQ ID NO: 3149252 - RNA, 19 nt, Artificial Sequence
  Description of Artificial Sequence: Synthetic oligonucleotide
ucgcugcucucaucugugc

SEQ ID NO: 3149253 - RNA, 19 nt, Artificial Sequence
  Description of Artificial Sequence: Synthetic oligonucleotide
ucaccgcgggcgagggccg

SEQ ID NO: 3149254 - RNA, 19 nt, Artificial Sequence
  Description of Artificial Sequence: Synthetic oligonucleotide
cuuugcgcgaccguuaccu

SEQ ID NO: 3149255 - RNA, 19 nt, Artificial Sequence
  Description of Artificial Sequence: Synthetic oligonucleotide
aucgcugcucucaucugug

SEQ ID NO: 3149256 - RNA, 19 nt, Artificial Sequence
  Description of Artificial Sequence: Synthetic oligonucleotide
ugacccuuugcgcgaccgu

SEQ ID NO: 3149257 - RNA, 19 nt, Artificial Sequence
  Description of Artificial Sequence: Synthetic oligonucleotide
ucccuucccagcgacgaaa

SEQ ID NO: 3149258 - RNA, 19 nt, Artificial Sequence
  Description of Artificial Sequence: Synthetic oligonucleotide
ugggcugcccggacuuaga

SEQ ID NO: 3149259 - RNA, 19 nt, Artificial Sequence
  Description of Artificial Sequence: Synthetic oligonucleotide
uuugcgcgaccguuaccua

SEQ ID NO: 3149260 - RNA, 19 nt, Artificial Sequence
  Description of Artificial Sequence: Synthetic oligonucleotide
gggccgucccuucccagcg

SEQ ID NO: 3149261 - RNA, 19 nt, Artificial Sequence
  Description of Artificial Sequence: Synthetic oligonucleotide
gagggccgucccuucccag

SEQ ID NO: 3149262 - RNA, 19 nt, Artificial Sequence
  Description of Artificial Sequence: Synthetic oligonucleotide
ccuaccacacucuugggcu

SEQ ID NO: 3149263 - RNA, 19 nt, Artificial Sequence
  Description of Artificial Sequence: Synthetic oligonucleotide
ucugugcaucuuuguucau

SEQ ID NO: 3149264 - RNA, 19 nt, Artificial Sequence
  Description of Artificial Sequence: Synthetic oligonucleotide
ggcugcccggacuuagacc

SEQ ID NO: 3149265 - RNA, 19 nt, Artificial Sequence
  Description of Artificial Sequence: Synthetic oligonucleotide
gcgacgaaaugacccuuug

SEQ ID NO: 3149266 - RNA, 19 nt, Artificial Sequence
  Description of Artificial Sequence: Synthetic oligonucleotide
cggacuuagacccucagua

SEQ ID NO: 3149267 - RNA, 19 nt, Artificial Sequence
  Description of Artificial Sequence: Synthetic oligonucleotide
cgaccguuaccuaccacac

SEQ ID NO: 3149268 - RNA, 19 nt, Artificial Sequence
  Description of Artificial Sequence: Synthetic oligonucleotide
cgacgaaaugacccuuugc

SEQ ID NO: 3149269 - RNA, 19 nt, Artificial Sequence
  Description of Artificial Sequence: Synthetic oligonucleotide
gaccguuaccuaccacacu

SEQ ID NO: 3149270 - RNA, 19 nt, Artificial Sequence
  Description of Artificial Sequence: Synthetic oligonucleotide
ugcccggacuuagacccuc

SEQ ID NO: 3149271 - RNA, 19 nt, Artificial Sequence
  Description of Artificial Sequence: Synthetic oligonucleotide
agcgacgaaaugacccuuu

SEQ ID NO: 3149272 - RNA, 19 nt, Artificial Sequence
  Description of Artificial Sequence: Synthetic oligonucleotide
cucucaucugugcaucuuu

SEQ ID NO: 3149273 - RNA, 19 nt, Artificial Sequence
  Description of Artificial Sequence: Synthetic oligonucleotide
gggcugcccggacuuagac

SEQ ID NO: 3149274 - RNA, 19 nt, Artificial Sequence
  Description of Artificial Sequence: Synthetic oligonucleotide
caucaccgcgggcgagggc

SEQ ID NO: 3149275 - RNA, 19 nt, Artificial Sequence
  Description of Artificial Sequence: Synthetic oligonucleotide
cacucuugggcugcccgga

SEQ ID NO: 3149276 - RNA, 19 nt, Artificial Sequence
  Description of Artificial Sequence: Synthetic oligonucleotide
cccuuugcgcgaccguuac

SEQ ID NO: 3149277 - RNA, 19 nt, Artificial Sequence
  Description of Artificial Sequence: Synthetic oligonucleotide
gcgagggccgucccuuccc

SEQ ID NO: 3149278 - RNA, 19 nt, Artificial Sequence
  Description of Artificial Sequence: Synthetic oligonucleotide
gacccuuugcgcgaccguu

SEQ ID NO: 3149279 - RNA, 19 nt, Artificial Sequence
  Description of Artificial Sequence: Synthetic oligonucleotide
caccaucaccgcgggcgag

SEQ ID NO: 3149280 - RNA, 19 nt, Artificial Sequence
  Description of Artificial Sequence: Synthetic oligonucleotide
gccgucccuucccagcgac

SEQ ID NO: 3149281 - RNA, 19 nt, Artificial Sequence
  Description of Artificial Sequence: Synthetic oligonucleotide
acccuuugcgcgaccguua

SEQ ID NO: 3149282 - RNA, 19 nt, Artificial Sequence
  Description of Artificial Sequence: Synthetic oligonucleotide
ccuuugcgcgaccguuacc

SEQ ID NO: 3149283 - RNA, 19 nt, Artificial Sequence
  Description of Artificial Sequence: Synthetic oligonucleotide
ccaucaccgcgggcgaggg

SEQ ID NO: 3149284 - RNA, 19 nt, Artificial Sequence
  Description of Artificial Sequence: Synthetic oligonucleotide
cccggacuuagacccucag

SEQ ID NO: 3149285 - RNA, 19 nt, Artificial Sequence
  Description of Artificial Sequence: Synthetic oligonucleotide
ccuucccagcgacgaaaug

SEQ ID NO: 3149286 - RNA, 19 nt, Artificial Sequence
  Description of Artificial Sequence: Synthetic oligonucleotide
ccagcgacgaaaugacccu

SEQ ID NO: 3149287 - RNA, 19 nt, Artificial Sequence
  Description of Artificial Sequence: Synthetic oligonucleotide
gucccuucccagcgacgaa

SEQ ID NO: 3149288 - RNA, 19 nt, Artificial Sequence
  Description of Artificial Sequence: Synthetic oligonucleotide
ccgucccuucccagcgacg

SEQ ID NO: 3149289 - RNA, 19 nt, Artificial Sequence
  Description of Artificial Sequence: Synthetic oligonucleotide
accgcgggcgagggccguc

SEQ ID NO: 3149290 - RNA, 19 nt, Artificial Sequence
  Description of Artificial Sequence: Synthetic oligonucleotide
gugcaucuuuguucaucuu

SEQ ID NO: 3149291 - RNA, 19 nt, Artificial Sequence
  Description of Artificial Sequence: Synthetic oligonucleotide
cgucccuucccagcgacga

SEQ ID NO: 3149292 - RNA, 19 nt, Artificial Sequence
  Description of Artificial Sequence: Synthetic oligonucleotide
ccaccaucaccgcgggcga

SEQ ID NO: 3149293 - RNA, 19 nt, Artificial Sequence
  Description of Artificial Sequence: Synthetic oligonucleotide
gcgcgaccguuaccuacca

SEQ ID NO: 3149294 - RNA, 19 nt, Artificial Sequence
  Description of Artificial Sequence: Synthetic oligonucleotide
ccguuaccuaccacacucu

SEQ ID NO: 3149295 - RNA, 19 nt, Artificial Sequence
  Description of Artificial Sequence: Synthetic oligonucleotide
ggccgucccuucccagcga

SEQ ID NO: 3149296 - RNA, 19 nt, Artificial Sequence
  Description of Artificial Sequence: Synthetic oligonucleotide
ccggacuuagacccucagu

SEQ ID NO: 3149297 - RNA, 19 nt, Artificial Sequence
  Description of Artificial Sequence: Synthetic oligonucleotide
cugcccggacuuagacccu

SEQ ID NO: 3149298 - RNA, 19 nt, Artificial Sequence
  Description of Artificial Sequence: Synthetic oligonucleotide
gggcgagggccgucccuuc

SEQ ID NO: 3149299 - RNA, 19 nt, Artificial Sequence
  Description of Artificial Sequence: Synthetic oligonucleotide
cagcgacgaaaugacccuu

SEQ ID NO: 3149300 - RNA, 19 nt, Artificial Sequence
  Description of Artificial Sequence: Synthetic oligonucleotide
cgcgaccguuaccuaccac

SEQ ID NO: 3149301 - RNA, 19 nt, Artificial Sequence
  Description of Artificial Sequence: Synthetic oligonucleotide
gcucucaucugugcaucuu

SEQ ID NO: 3149302 - RNA, 19 nt, Artificial Sequence
  Description of Artificial Sequence: Synthetic oligonucleotide
ccgcgggcgagggccgucc

SEQ ID NO: 3149303 - RNA, 19 nt, Artificial Sequence
  Description of Artificial Sequence: Synthetic oligonucleotide
gcccggacuuagacccuca

SEQ ID NO: 3149304 - RNA, 19 nt, Artificial Sequence
  Description of Artificial Sequence: Synthetic oligonucleotide
cccuucccagcgacgaaau

SEQ ID NO: 3149305 - RNA, 19 nt, Artificial Sequence
  Description of Artificial Sequence: Synthetic oligonucleotide
cgagggccgucccuuccca

SEQ ID NO: 3149306 - RNA, 19 nt, Artificial Sequence
  Description of Artificial Sequence: Synthetic oligonucleotide
cguuaccuaccacacucuu

SEQ ID NO: 3149307 - RNA, 19 nt, Artificial Sequence
  Description of Artificial Sequence: Synthetic oligonucleotide
gcgggcgagggccgucccu

SEQ ID NO: 3149308 - RNA, 19 nt, Artificial Sequence
  Description of Artificial Sequence: Synthetic oligonucleotide
cgcgggcgagggccguccc

SEQ ID NO: 3149309 - RNA, 19 nt, Artificial Sequence
  Description of Artificial Sequence: Synthetic oligonucleotide
caccgcgggcgagggccgu

SEQ ID NO: 3149310 - RNA, 19 nt, Artificial Sequence
  Description of Artificial Sequence: Synthetic oligonucleotide
cgggcgagggccgucccuu

SEQ ID NO: 3149311 - RNA, 19 nt, Artificial Sequence
  Description of Artificial Sequence: Synthetic oligonucleotide
aaaugaucuacauacuuuc

SEQ ID NO: 3149312 - RNA, 19 nt, Artificial Sequence
  Description of Artificial Sequence: Synthetic oligonucleotide
ucagagaucagacacgugg

SEQ ID NO: 3149313 - RNA, 19 nt, Artificial Sequence
  Description of Artificial Sequence: Synthetic oligonucleotide
acuuucaacacccucauuc

SEQ ID NO: 3149314 - RNA, 19 nt, Artificial Sequence
  Description of Artificial Sequence: Synthetic oligonucleotide
aacacccucauucaguaag

SEQ ID NO: 3149315 - RNA, 19 nt, Artificial Sequence
  Description of Artificial Sequence: Synthetic oligonucleotide
ugagucagagaucagacac

SEQ ID NO: 3149316 - RNA, 19 nt, Artificial Sequence
  Description of Artificial Sequence: Synthetic oligonucleotide
ucuacauacuuucaacacc

SEQ ID NO: 3149317 - RNA, 19 nt, Artificial Sequence
  Description of Artificial Sequence: Synthetic oligonucleotide
cuacauacuuucaacaccc

SEQ ID NO: 3149318 - RNA, 19 nt, Artificial Sequence
  Description of Artificial Sequence: Synthetic oligonucleotide
aauuucugcuuucuguuug

SEQ ID NO: 3149319 - RNA, 19 nt, Artificial Sequence
  Description of Artificial Sequence: Synthetic oligonucleotide
aucuacauacuuucaacac

SEQ ID NO: 3149320 - RNA, 19 nt, Artificial Sequence
  Description of Artificial Sequence: Synthetic oligonucleotide
uaccacuugagucagagau

SEQ ID NO: 3149321 - RNA, 19 nt, Artificial Sequence
  Description of Artificial Sequence: Synthetic oligonucleotide
aguaccauguccuagcuau

SEQ ID NO: 3149322 - RNA, 19 nt, Artificial Sequence
  Description of Artificial Sequence: Synthetic oligonucleotide
agcaguaccauguccuagc

SEQ ID NO: 3149323 - RNA, 19 nt, Artificial Sequence
  Description of Artificial Sequence: Synthetic oligonucleotide
ugaucuacauacuuucaac

SEQ ID NO: 3149324 - RNA, 19 nt, Artificial Sequence
  Description of Artificial Sequence: Synthetic oligonucleotide
ucugauucuggcagcaagc

SEQ ID NO: 3149325 - RNA, 19 nt, Artificial Sequence
  Description of Artificial Sequence: Synthetic oligonucleotide
ugaaaauuucugcuuucug

SEQ ID NO: 3149326 - RNA, 19 nt, Artificial Sequence
  Description of Artificial Sequence: Synthetic oligonucleotide
uaacacaucugauucuggc

SEQ ID NO: 3149327 - RNA, 19 nt, Artificial Sequence
  Description of Artificial Sequence: Synthetic oligonucleotide
gaucuacauacuuucaaca

SEQ ID NO: 3149328 - RNA, 19 nt, Artificial Sequence
  Description of Artificial Sequence: Synthetic oligonucleotide
ugugccuaccacuugaguc

SEQ ID NO: 3149329 - RNA, 19 nt, Artificial Sequence
  Description of Artificial Sequence: Synthetic oligonucleotide
agcaagcaguaccaugucc

SEQ ID NO: 3149330 - RNA, 19 nt, Artificial Sequence
  Description of Artificial Sequence: Synthetic oligonucleotide
cuugagucagagaucagac

SEQ ID NO: 3149331 - RNA, 19 nt, Artificial Sequence
  Description of Artificial Sequence: Synthetic oligonucleotide
ucuaacacaucugauucug

SEQ ID NO: 3149332 - RNA, 19 nt, Artificial Sequence
  Description of Artificial Sequence: Synthetic oligonucleotide
cauacuuucaacacccuca

SEQ ID NO: 3149333 - RNA, 19 nt, Artificial Sequence
  Description of Artificial Sequence: Synthetic oligonucleotide
gaaaauuucugcuuucugu

SEQ ID NO: 3149334 - RNA, 19 nt, Artificial Sequence
  Description of Artificial Sequence: Synthetic oligonucleotide
ucuguuugugccuaccacu

SEQ ID NO: 3149335 - RNA, 19 nt, Artificial Sequence
  Description of Artificial Sequence: Synthetic oligonucleotide
cauguccuagcuaugugcc

SEQ ID NO: 3149336 - RNA, 19 nt, Artificial Sequence
  Description of Artificial Sequence: Synthetic oligonucleotide
aaaaugaucuacauacuuu

SEQ ID NO: 3149337 - RNA, 19 nt, Artificial Sequence
  Description of Artificial Sequence: Synthetic oligonucleotide
acauacuuucaacacccuc

SEQ ID NO: 3149338 - RNA, 19 nt, Artificial Sequence
  Description of Artificial Sequence: Synthetic oligonucleotide
uuucaacacccucauucag

SEQ ID NO: 3149339 - RNA, 19 nt, Artificial Sequence
  Description of Artificial Sequence: Synthetic oligonucleotide
uucaacacccucauucagu

SEQ ID NO: 3149340 - RNA, 19 nt, Artificial Sequence
  Description of Artificial Sequence: Synthetic oligonucleotide
aucugauucuggcagcaag

SEQ ID NO: 3149341 - RNA, 19 nt, Artificial Sequence
  Description of Artificial Sequence: Synthetic oligonucleotide
agaucagacacguggaaaa

SEQ ID NO: 3149342 - RNA, 19 nt, Artificial Sequence
  Description of Artificial Sequence: Synthetic oligonucleotide
ugcccugaaaauuucugcu

SEQ ID NO: 3149343 - RNA, 19 nt, Artificial Sequence
  Description of Artificial Sequence: Synthetic oligonucleotide
uuucuguuugugccuacca

SEQ ID NO: 3149344 - RNA, 19 nt, Artificial Sequence
  Description of Artificial Sequence: Synthetic oligonucleotide
uagcuaugugcccugaaaa

SEQ ID NO: 3149345 - RNA, 19 nt, Artificial Sequence
  Description of Artificial Sequence: Synthetic oligonucleotide
augaucuacauacuuucaa

SEQ ID NO: 3149346 - RNA, 19 nt, Artificial Sequence
  Description of Artificial Sequence: Synthetic oligonucleotide
uucuguuugugccuaccac

SEQ ID NO: 3149347 - RNA, 19 nt, Artificial Sequence
  Description of Artificial Sequence: Synthetic oligonucleotide
uuugugccuaccacuugag

SEQ ID NO: 3149348 - RNA, 19 nt, Artificial Sequence
  Description of Artificial Sequence: Synthetic oligonucleotide
uucugcuuucuguuugugc

SEQ ID NO: 3149349 - RNA, 19 nt, Artificial Sequence
  Description of Artificial Sequence: Synthetic oligonucleotide
auguccuagcuaugugccc

SEQ ID NO: 3149350 - RNA, 19 nt, Artificial Sequence
  Description of Artificial Sequence: Synthetic oligonucleotide
ucaacacccucauucagua

SEQ ID NO: 3149351 - RNA, 19 nt, Artificial Sequence
  Description of Artificial Sequence: Synthetic oligonucleotide
cuaacacaucugauucugg

SEQ ID NO: 3149352 - RNA, 19 nt, Artificial Sequence
  Description of Artificial Sequence: Synthetic oligonucleotide
aaugaucuacauacuuuca

SEQ ID NO: 3149353 - RNA, 19 nt, Artificial Sequence
  Description of Artificial Sequence: Synthetic oligonucleotide
uucuaacacaucugauucu

SEQ ID NO: 3149354 - RNA, 19 nt, Artificial Sequence
  Description of Artificial Sequence: Synthetic oligonucleotide
uugagucagagaucagaca

SEQ ID NO: 3149355 - RNA, 19 nt, Artificial Sequence
  Description of Artificial Sequence: Synthetic oligonucleotide
gagucagagaucagacacg

SEQ ID NO: 3149356 - RNA, 19 nt, Artificial Sequence
  Description of Artificial Sequence: Synthetic oligonucleotide
cuuucaacacccucauuca

SEQ ID NO: 3149357 - RNA, 19 nt, Artificial Sequence
  Description of Artificial Sequence: Synthetic oligonucleotide
auacuuucaacacccucau

SEQ ID NO: 3149358 - RNA, 19 nt, Artificial Sequence
  Description of Artificial Sequence: Synthetic oligonucleotide
gauucuggcagcaagcagu

SEQ ID NO: 3149359 - RNA, 19 nt, Artificial Sequence
  Description of Artificial Sequence: Synthetic oligonucleotide
gugcccugaaaauuucugc

SEQ ID NO: 3149360 - RNA, 19 nt, Artificial Sequence
  Description of Artificial Sequence: Synthetic oligonucleotide
uguccuagcuaugugcccu

SEQ ID NO: 3149361 - RNA, 19 nt, Artificial Sequence
  Description of Artificial Sequence: Synthetic oligonucleotide
aagcaguaccauguccuag

SEQ ID NO: 3149362 - RNA, 19 nt, Artificial Sequence
  Description of Artificial Sequence: Synthetic oligonucleotide
uaugugcccugaaaauuuc

SEQ ID NO: 3149363 - RNA, 19 nt, Artificial Sequence
  Description of Artificial Sequence: Synthetic oligonucleotide
agcuaugugcccugaaaau

SEQ ID NO: 3149364 - RNA, 19 nt, Artificial Sequence
  Description of Artificial Sequence: Synthetic oligonucleotide
gugccuaccacuugaguca

SEQ ID NO: 3149365 - RNA, 19 nt, Artificial Sequence
  Description of Artificial Sequence: Synthetic oligonucleotide
agucagagaucagacacgu

SEQ ID NO: 3149366 - RNA, 19 nt, Artificial Sequence
  Description of Artificial Sequence: Synthetic oligonucleotide
acacccucauucaguaagc

SEQ ID NO: 3149367 - RNA, 19 nt, Artificial Sequence
  Description of Artificial Sequence: Synthetic oligonucleotide
cacaucugauucuggcagc

SEQ ID NO: 3149368 - RNA, 19 nt, Artificial Sequence
  Description of Artificial Sequence: Synthetic oligonucleotide
uacauacuuucaacacccu

SEQ ID NO: 3149369 - RNA, 19 nt, Artificial Sequence
  Description of Artificial Sequence: Synthetic oligonucleotide
agagaucagacacguggaa

SEQ ID NO: 3149370 - RNA, 19 nt, Artificial Sequence
  Description of Artificial Sequence: Synthetic oligonucleotide
uaccauguccuagcuaugu

SEQ ID NO: 3149371 - RNA, 19 nt, Artificial Sequence
  Description of Artificial Sequence: Synthetic oligonucleotide
accauguccuagcuaugug

SEQ ID NO: 3149372 - RNA, 19 nt, Artificial Sequence
  Description of Artificial Sequence: Synthetic oligonucleotide
ccauguccuagcuaugugc

SEQ ID NO: 3149373 - RNA, 19 nt, Artificial Sequence
  Description of Artificial Sequence: Synthetic oligonucleotide
cuuucuguuugugccuacc

SEQ ID NO: 3149374 - RNA, 19 nt, Artificial Sequence
  Description of Artificial Sequence: Synthetic oligonucleotide
accacuugagucagagauc

SEQ ID NO: 3149375 - RNA, 19 nt, Artificial Sequence
  Description of Artificial Sequence: Synthetic oligonucleotide
uugugccuaccacuugagu

SEQ ID NO: 3149376 - RNA, 19 nt, Artificial Sequence
  Description of Artificial Sequence: Synthetic oligonucleotide
cagagaucagacacgugga

SEQ ID NO: 3149377 - RNA, 19 nt, Artificial Sequence
  Description of Artificial Sequence: Synthetic oligonucleotide
cuagcuaugugcccugaaa

SEQ ID NO: 3149378 - RNA, 19 nt, Artificial Sequence
  Description of Artificial Sequence: Synthetic oligonucleotide
gagaucagacacguggaaa

SEQ ID NO: 3149379 - RNA, 19 nt, Artificial Sequence
  Description of Artificial Sequence: Synthetic oligonucleotide
acaucugauucuggcagca

SEQ ID NO: 3149380 - RNA, 19 nt, Artificial Sequence
  Description of Artificial Sequence: Synthetic oligonucleotide
uuucugcuuucuguuugug

SEQ ID NO: 3149381 - RNA, 19 nt, Artificial Sequence
  Description of Artificial Sequence: Synthetic oligonucleotide
ugccuaccacuugagucag

SEQ ID NO: 3149382 - RNA, 19 nt, Artificial Sequence
  Description of Artificial Sequence: Synthetic oligonucleotide
ggcagcaagcaguaccaug

SEQ ID NO: 3149383 - RNA, 19 nt, Artificial Sequence
  Description of Artificial Sequence: Synthetic oligonucleotide
cuaugugcccugaaaauuu

SEQ ID NO: 3149384 - RNA, 19 nt, Artificial Sequence
  Description of Artificial Sequence: Synthetic oligonucleotide
ccuaccacuugagucagag

SEQ ID NO: 3149385 - RNA, 19 nt, Artificial Sequence
  Description of Artificial Sequence: Synthetic oligonucleotide
cugauucuggcagcaagca

SEQ ID NO: 3149386 - RNA, 19 nt, Artificial Sequence
  Description of Artificial Sequence: Synthetic oligonucleotide
ugcuuucuguuugugccua

SEQ ID NO: 3149387 - RNA, 19 nt, Artificial Sequence
  Description of Artificial Sequence: Synthetic oligonucleotide
uacuuucaacacccucauu

SEQ ID NO: 3149388 - RNA, 19 nt, Artificial Sequence
  Description of Artificial Sequence: Synthetic oligonucleotide
guccuagcuaugugcccug

SEQ ID NO: 3149389 - RNA, 19 nt, Artificial Sequence
  Description of Artificial Sequence: Synthetic oligonucleotide
ccacuugagucagagauca

SEQ ID NO: 3149390 - RNA, 19 nt, Artificial Sequence
  Description of Artificial Sequence: Synthetic oligonucleotide
cacuugagucagagaucag

SEQ ID NO: 3149391 - RNA, 19 nt, Artificial Sequence
  Description of Artificial Sequence: Synthetic oligonucleotide
cugaaaauuucugcuuucu

SEQ ID NO: 3149392 - RNA, 19 nt, Artificial Sequence
  Description of Artificial Sequence: Synthetic oligonucleotide
gcagcaagcaguaccaugu

SEQ ID NO: 3149393 - RNA, 19 nt, Artificial Sequence
  Description of Artificial Sequence: Synthetic oligonucleotide
augugcccugaaaauuucu

SEQ ID NO: 3149394 - RNA, 19 nt, Artificial Sequence
  Description of Artificial Sequence: Synthetic oligonucleotide
auucuggcagcaagcagua

SEQ ID NO: 3149395 - RNA, 19 nt, Artificial Sequence
  Description of Artificial Sequence: Synthetic oligonucleotide
cagcaagcaguaccauguc

SEQ ID NO: 3149396 - RNA, 19 nt, Artificial Sequence
  Description of Artificial Sequence: Synthetic oligonucleotide
gcaagcaguaccauguccu

SEQ ID NO: 3149397 - RNA, 19 nt, Artificial Sequence
  Description of Artificial Sequence: Synthetic oligonucleotide
caagcaguaccauguccua

SEQ ID NO: 3149398 - RNA, 19 nt, Artificial Sequence
  Description of Artificial Sequence: Synthetic oligonucleotide
guaccauguccuagcuaug

SEQ ID NO: 3149399 - RNA, 19 nt, Artificial Sequence
  Description of Artificial Sequence: Synthetic oligonucleotide
cuaccacuugagucagaga

SEQ ID NO: 3149400 - RNA, 19 nt, Artificial Sequence
  Description of Artificial Sequence: Synthetic oligonucleotide
uccuagcuaugugcccuga

SEQ ID NO: 3149401 - RNA, 19 nt, Artificial Sequence
  Description of Artificial Sequence: Synthetic oligonucleotide
gucagagaucagacacgug

SEQ ID NO: 3149402 - RNA, 19 nt, Artificial Sequence
  Description of Artificial Sequence: Synthetic oligonucleotide
cugcuuucuguuugugccu

SEQ ID NO: 3149403 - RNA, 19 nt, Artificial Sequence
  Description of Artificial Sequence: Synthetic oligonucleotide
uucuggcagcaagcaguac

SEQ ID NO: 3149404 - RNA, 19 nt, Artificial Sequence
  Description of Artificial Sequence: Synthetic oligonucleotide
gcuuucuguuugugccuac

SEQ ID NO: 3149405 - RNA, 19 nt, Artificial Sequence
  Description of Artificial Sequence: Synthetic oligonucleotide
caacacccucauucaguaa

SEQ ID NO: 3149406 - RNA, 19 nt, Artificial Sequence
  Description of Artificial Sequence: Synthetic oligonucleotide
uggcagcaagcaguaccau

SEQ ID NO: 3149407 - RNA, 19 nt, Artificial Sequence
  Description of Artificial Sequence: Synthetic oligonucleotide
gcuaugugcccugaaaauu

SEQ ID NO: 3149408 - RNA, 19 nt, Artificial Sequence
  Description of Artificial Sequence: Synthetic oligonucleotide
caguaccauguccuagcua

SEQ ID NO: 3149409 - RNA, 19 nt, Artificial Sequence
  Description of Artificial Sequence: Synthetic oligonucleotide
caucugauucuggcagcaa

SEQ ID NO: 3149410 - RNA, 19 nt, Artificial Sequence
  Description of Artificial Sequence: Synthetic oligonucleotide
gcaguaccauguccuagcu

SEQ ID NO: 3149411 - RNA, 19 nt, Artificial Sequence
  Description of Artificial Sequence: Synthetic oligonucleotide
gcccugaaaauuucugcuu

SEQ ID NO: 3149412 - RNA, 19 nt, Artificial Sequence
  Description of Artificial Sequence: Synthetic oligonucleotide
cccugaaaauuucugcuuu

SEQ ID NO: 3149413 - RNA, 19 nt, Artificial Sequence
  Description of Artificial Sequence: Synthetic oligonucleotide
ccuagcuaugugcccugaa

SEQ ID NO: 3149414 - RNA, 19 nt, Artificial Sequence
  Description of Artificial Sequence: Synthetic oligonucleotide
gccuaccacuugagucaga

SEQ ID NO: 3149415 - RNA, 19 nt, Artificial Sequence
  Description of Artificial Sequence: Synthetic oligonucleotide
uucauuuugaguaagaucu

SEQ ID NO: 3149416 - RNA, 19 nt, Artificial Sequence
  Description of Artificial Sequence: Synthetic oligonucleotide
uuuuauuucauuuugagua

SEQ ID NO: 3149417 - RNA, 19 nt, Artificial Sequence
  Description of Artificial Sequence: Synthetic oligonucleotide
aauuuuauuucauuuugag

SEQ ID NO: 3149418 - RNA, 19 nt, Artificial Sequence
  Description of Artificial Sequence: Synthetic oligonucleotide
uuugaguaagaucucacgg

SEQ ID NO: 3149419 - RNA, 19 nt, Artificial Sequence
  Description of Artificial Sequence: Synthetic oligonucleotide
uuuugaguaagaucucacg

SEQ ID NO: 3149420 - RNA, 19 nt, Artificial Sequence
  Description of Artificial Sequence: Synthetic oligonucleotide
uucacauccaauuuuauuu

SEQ ID NO: 3149421 - RNA, 19 nt, Artificial Sequence
  Description of Artificial Sequence: Synthetic oligonucleotide
uggauacucacucagcacc

SEQ ID NO: 3149422 - RNA, 19 nt, Artificial Sequence
  Description of Artificial Sequence: Synthetic oligonucleotide
ugaguaagaucucacggcc

SEQ ID NO: 3149423 - RNA, 19 nt, Artificial Sequence
  Description of Artificial Sequence: Synthetic oligonucleotide
aaucucagcugcuucagca

SEQ ID NO: 3149424 - RNA, 19 nt, Artificial Sequence
  Description of Artificial Sequence: Synthetic oligonucleotide
uguggauacucacucagca

SEQ ID NO: 3149425 - RNA, 19 nt, Artificial Sequence
  Description of Artificial Sequence: Synthetic oligonucleotide
uugaguaagaucucacggc

SEQ ID NO: 3149426 - RNA, 19 nt, Artificial Sequence
  Description of Artificial Sequence: Synthetic oligonucleotide
auuuuauuucauuuugagu

SEQ ID NO: 3149427 - RNA, 19 nt, Artificial Sequence
  Description of Artificial Sequence: Synthetic oligonucleotide
uuucauuuugaguaagauc

SEQ ID NO: 3149428 - RNA, 19 nt, Artificial Sequence
  Description of Artificial Sequence: Synthetic oligonucleotide
uuuauuucauuuugaguaa

SEQ ID NO: 3149429 - RNA, 19 nt, Artificial Sequence
  Description of Artificial Sequence: Synthetic oligonucleotide
ucagcauucacauccaauu

SEQ ID NO: 3149430 - RNA, 19 nt, Artificial Sequence
  Description of Artificial Sequence: Synthetic oligonucleotide
auacucacucagcaccucc

SEQ ID NO: 3149431 - RNA, 19 nt, Artificial Sequence
  Description of Artificial Sequence: Synthetic oligonucleotide
uauuucauuuugaguaaga

SEQ ID NO: 3149432 - RNA, 19 nt, Artificial Sequence
  Description of Artificial Sequence: Synthetic oligonucleotide
auuuugaguaagaucucac

SEQ ID NO: 3149433 - RNA, 19 nt, Artificial Sequence
  Description of Artificial Sequence: Synthetic oligonucleotide
uuauuucauuuugaguaag

SEQ ID NO: 3149434 - RNA, 19 nt, Artificial Sequence
  Description of Artificial Sequence: Synthetic oligonucleotide
aguaagaucucacggcccu

SEQ ID NO: 3149435 - RNA, 19 nt, Artificial Sequence
  Description of Artificial Sequence: Synthetic oligonucleotide
ucacauccaauuuuauuuc

SEQ ID NO: 3149436 - RNA, 19 nt, Artificial Sequence
  Description of Artificial Sequence: Synthetic oligonucleotide
auccaauuuuauuucauuu

SEQ ID NO: 3149437 - RNA, 19 nt, Artificial Sequence
  Description of Artificial Sequence: Synthetic oligonucleotide
uccuggagagcaaucucag

SEQ ID NO: 3149438 - RNA, 19 nt, Artificial Sequence
  Description of Artificial Sequence: Synthetic oligonucleotide
uggagagcaaucucagcug

SEQ ID NO: 3149439 - RNA, 19 nt, Artificial Sequence
  Description of Artificial Sequence: Synthetic oligonucleotide
ccaauuuuauuucauuuug

SEQ ID NO: 3149440 - RNA, 19 nt, Artificial Sequence
  Description of Artificial Sequence: Synthetic oligonucleotide
uccuccaugacagccuggg

SEQ ID NO: 3149441 - RNA, 19 nt, Artificial Sequence
  Description of Artificial Sequence: Synthetic oligonucleotide
uucagcauucacauccaau

SEQ ID NO: 3149442 - RNA, 19 nt, Artificial Sequence
  Description of Artificial Sequence: Synthetic oligonucleotide
auucacauccaauuuuauu

SEQ ID NO: 3149443 - RNA, 19 nt, Artificial Sequence
  Description of Artificial Sequence: Synthetic oligonucleotide
agcauucacauccaauuuu

SEQ ID NO: 3149444 - RNA, 19 nt, Artificial Sequence
  Description of Artificial Sequence: Synthetic oligonucleotide
uacucacucagcaccuccc

SEQ ID NO: 3149445 - RNA, 19 nt, Artificial Sequence
  Description of Artificial Sequence: Synthetic oligonucleotide
ucauuuugaguaagaucuc

SEQ ID NO: 3149446 - RNA, 19 nt, Artificial Sequence
  Description of Artificial Sequence: Synthetic oligonucleotide
cuguggauacucacucagc

SEQ ID NO: 3149447 - RNA, 19 nt, Artificial Sequence
  Description of Artificial Sequence: Synthetic oligonucleotide
aagaucucacggcccuucu

SEQ ID NO: 3149448 - RNA, 19 nt, Artificial Sequence
  Description of Artificial Sequence: Synthetic oligonucleotide
cucacggcccuucuccucc

SEQ ID NO: 3149449 - RNA, 19 nt, Artificial Sequence
  Description of Artificial Sequence: Synthetic oligonucleotide
gaguaagaucucacggccc

SEQ ID NO: 3149450 - RNA, 19 nt, Artificial Sequence
  Description of Artificial Sequence: Synthetic oligonucleotide
cuggagagcaaucucagcu

SEQ ID NO: 3149451 - RNA, 19 nt, Artificial Sequence
  Description of Artificial Sequence: Synthetic oligonucleotide
ggagagcaaucucagcugc

SEQ ID NO: 3149452 - RNA, 19 nt, Artificial Sequence
  Description of Artificial Sequence: Synthetic oligonucleotide
cauuuugaguaagaucuca

SEQ ID NO: 3149453 - RNA, 19 nt, Artificial Sequence
  Description of Artificial Sequence: Synthetic oligonucleotide
guggauacucacucagcac

SEQ ID NO: 3149454 - RNA, 19 nt, Artificial Sequence
  Description of Artificial Sequence: Synthetic oligonucleotide
agccugggccuguggauac

SEQ ID NO: 3149455 - RNA, 19 nt, Artificial Sequence
  Description of Artificial Sequence: Synthetic oligonucleotide
cacauccaauuuuauuuca

SEQ ID NO: 3149456 - RNA, 19 nt, Artificial Sequence
  Description of Artificial Sequence: Synthetic oligonucleotide
uaagaucucacggcccuuc

SEQ ID NO: 3149457 - RNA, 19 nt, Artificial Sequence
  Description of Artificial Sequence: Synthetic oligonucleotide
ccuguggauacucacucag

SEQ ID NO: 3149458 - RNA, 19 nt, Artificial Sequence
  Description of Artificial Sequence: Synthetic oligonucleotide
ugggccuguggauacucac

SEQ ID NO: 3149459 - RNA, 19 nt, Artificial Sequence
  Description of Artificial Sequence: Synthetic oligonucleotide
caaucucagcugcuucagc

SEQ ID NO: 3149460 - RNA, 19 nt, Artificial Sequence
  Description of Artificial Sequence: Synthetic oligonucleotide
gacagccugggccugugga

SEQ ID NO: 3149461 - RNA, 19 nt, Artificial Sequence
  Description of Artificial Sequence: Synthetic oligonucleotide
aucucagcugcuucagcau

SEQ ID NO: 3149462 - RNA, 19 nt, Artificial Sequence
  Description of Artificial Sequence: Synthetic oligonucleotide
ugacagccugggccugugg

SEQ ID NO: 3149463 - RNA, 19 nt, Artificial Sequence
  Description of Artificial Sequence: Synthetic oligonucleotide
acauccaauuuuauuucau

SEQ ID NO: 3149464 - RNA, 19 nt, Artificial Sequence
  Description of Artificial Sequence: Synthetic oligonucleotide
cacucagcaccucccgcag

SEQ ID NO: 3149465 - RNA, 19 nt, Artificial Sequence
  Description of Artificial Sequence: Synthetic oligonucleotide
gcugcuucagcauucacau

SEQ ID NO: 3149466 - RNA, 19 nt, Artificial Sequence
  Description of Artificial Sequence: Synthetic oligonucleotide
aucucacggcccuucuccu

SEQ ID NO: 3149467 - RNA, 19 nt, Artificial Sequence
  Description of Artificial Sequence: Synthetic oligonucleotide
acagccugggccuguggau

SEQ ID NO: 3149468 - RNA, 19 nt, Artificial Sequence
  Description of Artificial Sequence: Synthetic oligonucleotide
ggccuguggauacucacuc

SEQ ID NO: 3149469 - RNA, 19 nt, Artificial Sequence
  Description of Artificial Sequence: Synthetic oligonucleotide
ucucacggcccuucuccuc

SEQ ID NO: 3149470 - RNA, 19 nt, Artificial Sequence
  Description of Artificial Sequence: Synthetic oligonucleotide
gcaaucucagcugcuucag

SEQ ID NO: 3149471 - RNA, 19 nt, Artificial Sequence
  Description of Artificial Sequence: Synthetic oligonucleotide
cuccuccaugacagccugg

SEQ ID NO: 3149472 - RNA, 19 nt, Artificial Sequence
  Description of Artificial Sequence: Synthetic oligonucleotide
gcauucacauccaauuuua

SEQ ID NO: 3149473 - RNA, 19 nt, Artificial Sequence
  Description of Artificial Sequence: Synthetic oligonucleotide
ccuggagagcaaucucagc

SEQ ID NO: 3149474 - RNA, 19 nt, Artificial Sequence
  Description of Artificial Sequence: Synthetic oligonucleotide
acggcccuucuccuccaug

SEQ ID NO: 3149475 - RNA, 19 nt, Artificial Sequence
  Description of Artificial Sequence: Synthetic oligonucleotide
accucccgcagauccuccu

SEQ ID NO: 3149476 - RNA, 19 nt, Artificial Sequence
  Description of Artificial Sequence: Synthetic oligonucleotide
cugcuucagcauucacauc

SEQ ID NO: 3149477 - RNA, 19 nt, Artificial Sequence
  Description of Artificial Sequence: Synthetic oligonucleotide
caccucccgcagauccucc

SEQ ID NO: 3149478 - RNA, 19 nt, Artificial Sequence
  Description of Artificial Sequence: Synthetic oligonucleotide
ucacggcccuucuccucca

SEQ ID NO: 3149479 - RNA, 19 nt, Artificial Sequence
  Description of Artificial Sequence: Synthetic oligonucleotide
cauucacauccaauuuuau

SEQ ID NO: 3149480 - RNA, 19 nt, Artificial Sequence
  Description of Artificial Sequence: Synthetic oligonucleotide
cuucagcauucacauccaa

SEQ ID NO: 3149481 - RNA, 19 nt, Artificial Sequence
  Description of Artificial Sequence: Synthetic oligonucleotide
augacagccugggccugug

SEQ ID NO: 3149482 - RNA, 19 nt, Artificial Sequence
  Description of Artificial Sequence: Synthetic oligonucleotide
ccgcagauccuccuugcug

SEQ ID NO: 3149483 - RNA, 19 nt, Artificial Sequence
  Description of Artificial Sequence: Synthetic oligonucleotide
cagcugcuucagcauucac

SEQ ID NO: 3149484 - RNA, 19 nt, Artificial Sequence
  Description of Artificial Sequence: Synthetic oligonucleotide
cugggccuguggauacuca

SEQ ID NO: 3149485 - RNA, 19 nt, Artificial Sequence
  Description of Artificial Sequence: Synthetic oligonucleotide
ccuccuggagagcaaucuc

SEQ ID NO: 3149486 - RNA, 19 nt, Artificial Sequence
  Description of Artificial Sequence: Synthetic oligonucleotide
gagagcaaucucagcugcu

SEQ ID NO: 3149487 - RNA, 19 nt, Artificial Sequence
  Description of Artificial Sequence: Synthetic oligonucleotide
cagcauucacauccaauuu

SEQ ID NO: 3149488 - RNA, 19 nt, Artificial Sequence
  Description of Artificial Sequence: Synthetic oligonucleotide
ggauacucacucagcaccu

SEQ ID NO: 3149489 - RNA, 19 nt, Artificial Sequence
  Description of Artificial Sequence: Synthetic oligonucleotide
gccuguggauacucacuca

SEQ ID NO: 3149490 - RNA, 19 nt, Artificial Sequence
  Description of Artificial Sequence: Synthetic oligonucleotide
gcuucagcauucacaucca

SEQ ID NO: 3149491 - RNA, 19 nt, Artificial Sequence
  Description of Artificial Sequence: Synthetic oligonucleotide
ccuccaugacagccugggc

SEQ ID NO: 3149492 - RNA, 19 nt, Artificial Sequence
  Description of Artificial Sequence: Synthetic oligonucleotide
cagccugggccuguggaua

SEQ ID NO: 3149493 - RNA, 19 nt, Artificial Sequence
  Description of Artificial Sequence: Synthetic oligonucleotide
gcaccucccgcagauccuc

SEQ ID NO: 3149494 - RNA, 19 nt, Artificial Sequence
  Description of Artificial Sequence: Synthetic oligonucleotide
gccuccuggagagcaaucu

SEQ ID NO: 3149495 - RNA, 19 nt, Artificial Sequence
  Description of Artificial Sequence: Synthetic oligonucleotide
guaagaucucacggcccuu

SEQ ID NO: 3149496 - RNA, 19 nt, Artificial Sequence
  Description of Artificial Sequence: Synthetic oligonucleotide
caugacagccugggccugu

SEQ ID NO: 3149497 - RNA, 19 nt, Artificial Sequence
  Description of Artificial Sequence: Synthetic oligonucleotide
gggccuguggauacucacu

SEQ ID NO: 3149498 - RNA, 19 nt, Artificial Sequence
  Description of Artificial Sequence: Synthetic oligonucleotide
ccaugacagccugggccug

SEQ ID NO: 3149499 - RNA, 19 nt, Artificial Sequence
  Description of Artificial Sequence: Synthetic oligonucleotide
cccgcagauccuccuugcu

SEQ ID NO: 3149500 - RNA, 19 nt, Artificial Sequence
  Description of Artificial Sequence: Synthetic oligonucleotide
cacggcccuucuccuccau

SEQ ID NO: 3149501 - RNA, 19 nt, Artificial Sequence
  Description of Artificial Sequence: Synthetic oligonucleotide
gccugggccuguggauacu

SEQ ID NO: 3149502 - RNA, 19 nt, Artificial Sequence
  Description of Artificial Sequence: Synthetic oligonucleotide
ugagccaucucuccaaagg

SEQ ID NO: 3149503 - RNA, 19 nt, Artificial Sequence
  Description of Artificial Sequence: Synthetic oligonucleotide
uuggacuuggguccucugg

SEQ ID NO: 3149504 - RNA, 19 nt, Artificial Sequence
  Description of Artificial Sequence: Synthetic oligonucleotide
uguggguucugggaguugg

SEQ ID NO: 3149505 - RNA, 19 nt, Artificial Sequence
  Description of Artificial Sequence: Synthetic oligonucleotide
gaggguguuagauucccug

SEQ ID NO: 3149506 - RNA, 19 nt, Artificial Sequence
  Description of Artificial Sequence: Synthetic oligonucleotide
aggguguuagauucccugg

SEQ ID NO: 3149507 - RNA, 19 nt, Artificial Sequence
  Description of Artificial Sequence: Synthetic oligonucleotide
guagucggugcucuuaacc

SEQ ID NO: 3149508 - RNA, 19 nt, Artificial Sequence
  Description of Artificial Sequence: Synthetic oligonucleotide
gagccaucucuccaaaggc

SEQ ID NO: 3149509 - RNA, 19 nt, Artificial Sequence
  Description of Artificial Sequence: Synthetic oligonucleotide
uggacuuggguccucugga

SEQ ID NO: 3149510 - RNA, 19 nt, Artificial Sequence
  Description of Artificial Sequence: Synthetic oligonucleotide
gugugaggguguuagauuc

SEQ ID NO: 3149511 - RNA, 19 nt, Artificial Sequence
  Description of Artificial Sequence: Synthetic oligonucleotide
ugugaggguguuagauucc

SEQ ID NO: 3149512 - RNA, 19 nt, Artificial Sequence
  Description of Artificial Sequence: Synthetic oligonucleotide
aguagucggugcucuuaac

SEQ ID NO: 3149513 - RNA, 19 nt, Artificial Sequence
  Description of Artificial Sequence: Synthetic oligonucleotide
uucugggaguuggacuugg

SEQ ID NO: 3149514 - RNA, 19 nt, Artificial Sequence
  Description of Artificial Sequence: Synthetic oligonucleotide
ugaggguguuagauucccu

SEQ ID NO: 3149515 - RNA, 19 nt, Artificial Sequence
  Description of Artificial Sequence: Synthetic oligonucleotide
gugaggguguuagauuccc

SEQ ID NO: 3149516 - RNA, 19 nt, Artificial Sequence
  Description of Artificial Sequence: Synthetic oligonucleotide
gaguagucggugcucuuaa

SEQ ID NO: 3149517 - RNA, 19 nt, Artificial Sequence
  Description of Artificial Sequence: Synthetic oligonucleotide
agccaucucuccaaaggcu

SEQ ID NO: 3149518 - RNA, 19 nt, Artificial Sequence
  Description of Artificial Sequence: Synthetic oligonucleotide
guuggacuuggguccucug

SEQ ID NO: 3149519 - RNA, 19 nt, Artificial Sequence
  Description of Artificial Sequence: Synthetic oligonucleotide
aguuggacuuggguccucu

SEQ ID NO: 3149520 - RNA, 19 nt, Artificial Sequence
  Description of Artificial Sequence: Synthetic oligonucleotide
uucccuggaacuggaguua

SEQ ID NO: 3149521 - RNA, 19 nt, Artificial Sequence
  Description of Artificial Sequence: Synthetic oligonucleotide
ggguguuagauucccugga

SEQ ID NO: 3149522 - RNA, 19 nt, Artificial Sequence
  Description of Artificial Sequence: Synthetic oligonucleotide
gguucugggaguuggacuu

SEQ ID NO: 3149523 - RNA, 19 nt, Artificial Sequence
  Description of Artificial Sequence: Synthetic oligonucleotide
guucugggaguuggacuug

SEQ ID NO: 3149524 - RNA, 19 nt, Artificial Sequence
  Description of Artificial Sequence: Synthetic oligonucleotide
ggguucugggaguuggacu

SEQ ID NO: 3149525 - RNA, 19 nt, Artificial Sequence
  Description of Artificial Sequence: Synthetic oligonucleotide
auguggguucugggaguug

SEQ ID NO: 3149526 - RNA, 19 nt, Artificial Sequence
  Description of Artificial Sequence: Synthetic oligonucleotide
guggguucugggaguugga

SEQ ID NO: 3149527 - RNA, 19 nt, Artificial Sequence
  Description of Artificial Sequence: Synthetic oligonucleotide
caucucuccaaaggcuuuu

SEQ ID NO: 3149528 - RNA, 19 nt, Artificial Sequence
  Description of Artificial Sequence: Synthetic oligonucleotide
gccaucucuccaaaggcuu

SEQ ID NO: 3149529 - RNA, 19 nt, Artificial Sequence
  Description of Artificial Sequence: Synthetic oligonucleotide
ccaucucuccaaaggcuuu

SEQ ID NO: 3149530 - RNA, 19 nt, Artificial Sequence
  Description of Artificial Sequence: Synthetic oligonucleotide
uggucuaaccacaucaacg

SEQ ID NO: 3149531 - RNA, 19 nt, Artificial Sequence
  Description of Artificial Sequence: Synthetic oligonucleotide
aauacagcuuuucuuccag

SEQ ID NO: 3149532 - RNA, 19 nt, Artificial Sequence
  Description of Artificial Sequence: Synthetic oligonucleotide
uugaauacagcuuuucuuc

SEQ ID NO: 3149533 - RNA, 19 nt, Artificial Sequence
  Description of Artificial Sequence: Synthetic oligonucleotide
ucuaaccacaucaacgucu

SEQ ID NO: 3149534 - RNA, 19 nt, Artificial Sequence
  Description of Artificial Sequence: Synthetic oligonucleotide
ucuucuuacuucuuucucc

SEQ ID NO: 3149535 - RNA, 19 nt, Artificial Sequence
  Description of Artificial Sequence: Synthetic oligonucleotide
uacagcuuuucuuccaggg

SEQ ID NO: 3149536 - RNA, 19 nt, Artificial Sequence
  Description of Artificial Sequence: Synthetic oligonucleotide
agaucuucuuacuucuuuc

SEQ ID NO: 3149537 - RNA, 19 nt, Artificial Sequence
  Description of Artificial Sequence: Synthetic oligonucleotide
uuuucuuccaggggaaccg

SEQ ID NO: 3149538 - RNA, 19 nt, Artificial Sequence
  Description of Artificial Sequence: Synthetic oligonucleotide
ucuuuuacuuccuggguca

SEQ ID NO: 3149539 - RNA, 19 nt, Artificial Sequence
  Description of Artificial Sequence: Synthetic oligonucleotide
ucuuacuucuuucuccucu

SEQ ID NO: 3149540 - RNA, 19 nt, Artificial Sequence
  Description of Artificial Sequence: Synthetic oligonucleotide
uguugaauacagcuuuucu

SEQ ID NO: 3149541 - RNA, 19 nt, Artificial Sequence
  Description of Artificial Sequence: Synthetic oligonucleotide
guuuggucuaaccacauca

SEQ ID NO: 3149542 - RNA, 19 nt, Artificial Sequence
  Description of Artificial Sequence: Synthetic oligonucleotide
cacucuuuuacuuccuggg

SEQ ID NO: 3149543 - RNA, 19 nt, Artificial Sequence
  Description of Artificial Sequence: Synthetic oligonucleotide
uguuucacgacguuugguc

SEQ ID NO: 3149544 - RNA, 19 nt, Artificial Sequence
  Description of Artificial Sequence: Synthetic oligonucleotide
ugaauacagcuuuucuucc

SEQ ID NO: 3149545 - RNA, 19 nt, Artificial Sequence
  Description of Artificial Sequence: Synthetic oligonucleotide
cacaucaacgucucgaguc

SEQ ID NO: 3149546 - RNA, 19 nt, Artificial Sequence
  Description of Artificial Sequence: Synthetic oligonucleotide
acacucuuuuacuuccugg

SEQ ID NO: 3149547 - RNA, 19 nt, Artificial Sequence
  Description of Artificial Sequence: Synthetic oligonucleotide
aucuucuuacuucuuucuc

SEQ ID NO: 3149548 - RNA, 19 nt, Artificial Sequence
  Description of Artificial Sequence: Synthetic oligonucleotide
uucuuucuccucuuuguug

SEQ ID NO: 3149549 - RNA, 19 nt, Artificial Sequence
  Description of Artificial Sequence: Synthetic oligonucleotide
ucuuuguugaauacagcuu

SEQ ID NO: 3149550 - RNA, 19 nt, Artificial Sequence
  Description of Artificial Sequence: Synthetic oligonucleotide
aaccacaucaacgucucga

SEQ ID NO: 3149551 - RNA, 19 nt, Artificial Sequence
  Description of Artificial Sequence: Synthetic oligonucleotide
acgacguuuggucuaacca

SEQ ID NO: 3149552 - RNA, 19 nt, Artificial Sequence
  Description of Artificial Sequence: Synthetic oligonucleotide
uuuggucuaaccacaucaa

SEQ ID NO: 3149553 - RNA, 19 nt, Artificial Sequence
  Description of Artificial Sequence: Synthetic oligonucleotide
accacaucaacgucucgag

SEQ ID NO: 3149554 - RNA, 19 nt, Artificial Sequence
  Description of Artificial Sequence: Synthetic oligonucleotide
cagaggguguuucacgacg

SEQ ID NO: 3149555 - RNA, 19 nt, Artificial Sequence
  Description of Artificial Sequence: Synthetic oligonucleotide
ugggagaucuucuuacuuc

SEQ ID NO: 3149556 - RNA, 19 nt, Artificial Sequence
  Description of Artificial Sequence: Synthetic oligonucleotide
aggggaaccgggacgaugc

SEQ ID NO: 3149557 - RNA, 19 nt, Artificial Sequence
  Description of Artificial Sequence: Synthetic oligonucleotide
uuggucuaaccacaucaac

SEQ ID NO: 3149558 - RNA, 19 nt, Artificial Sequence
  Description of Artificial Sequence: Synthetic oligonucleotide
cuaaccacaucaacgucuc

SEQ ID NO: 3149559 - RNA, 19 nt, Artificial Sequence
  Description of Artificial Sequence: Synthetic oligonucleotide
acaucaacgucucgaguca

SEQ ID NO: 3149560 - RNA, 19 nt, Artificial Sequence
  Description of Artificial Sequence: Synthetic oligonucleotide
gaauacagcuuuucuucca

SEQ ID NO: 3149561 - RNA, 19 nt, Artificial Sequence
  Description of Artificial Sequence: Synthetic oligonucleotide
cucuuuguugaauacagcu

SEQ ID NO: 3149562 - RNA, 19 nt, Artificial Sequence
  Description of Artificial Sequence: Synthetic oligonucleotide
uucuuccaggggaaccggg

SEQ ID NO: 3149563 - RNA, 19 nt, Artificial Sequence
  Description of Artificial Sequence: Synthetic oligonucleotide
cuuuucuuccaggggaacc

SEQ ID NO: 3149564 - RNA, 19 nt, Artificial Sequence
  Description of Artificial Sequence: Synthetic oligonucleotide
ucuuccaggggaaccggga

SEQ ID NO: 3149565 - RNA, 19 nt, Artificial Sequence
  Description of Artificial Sequence: Synthetic oligonucleotide
acucuuuuacuuccugggu

SEQ ID NO: 3149566 - RNA, 19 nt, Artificial Sequence
  Description of Artificial Sequence: Synthetic oligonucleotide
uuuguugaauacagcuuuu

SEQ ID NO: 3149567 - RNA, 19 nt, Artificial Sequence
  Description of Artificial Sequence: Synthetic oligonucleotide
ucuccucuuuguugaauac

SEQ ID NO: 3149568 - RNA, 19 nt, Artificial Sequence
  Description of Artificial Sequence: Synthetic oligonucleotide
ugccaccacacucuuuuac

SEQ ID NO: 3149569 - RNA, 19 nt, Artificial Sequence
  Description of Artificial Sequence: Synthetic oligonucleotide
uuucuuccaggggaaccgg

SEQ ID NO: 3149570 - RNA, 19 nt, Artificial Sequence
  Description of Artificial Sequence: Synthetic oligonucleotide
ggucagaggguguuucacg

SEQ ID NO: 3149571 - RNA, 19 nt, Artificial Sequence
  Description of Artificial Sequence: Synthetic oligonucleotide
gaugccaccacacucuuuu

SEQ ID NO: 3149572 - RNA, 19 nt, Artificial Sequence
  Description of Artificial Sequence: Synthetic oligonucleotide
guugaauacagcuuuucuu

SEQ ID NO: 3149573 - RNA, 19 nt, Artificial Sequence
  Description of Artificial Sequence: Synthetic oligonucleotide
gucagaggguguuucacga

SEQ ID NO: 3149574 - RNA, 19 nt, Artificial Sequence
  Description of Artificial Sequence: Synthetic oligonucleotide
uaaccacaucaacgucucg

SEQ ID NO: 3149575 - RNA, 19 nt, Artificial Sequence
  Description of Artificial Sequence: Synthetic oligonucleotide
gacguuuggucuaaccaca

SEQ ID NO: 3149576 - RNA, 19 nt, Artificial Sequence
  Description of Artificial Sequence: Synthetic oligonucleotide
uuucacgacguuuggucua

SEQ ID NO: 3149577 - RNA, 19 nt, Artificial Sequence
  Description of Artificial Sequence: Synthetic oligonucleotide
cuuuguugaauacagcuuu

SEQ ID NO: 3149578 - RNA, 19 nt, Artificial Sequence
  Description of Artificial Sequence: Synthetic oligonucleotide
cacgacguuuggucuaacc

SEQ ID NO: 3149579 - RNA, 19 nt, Artificial Sequence
  Description of Artificial Sequence: Synthetic oligonucleotide
uuguugaauacagcuuuuc

SEQ ID NO: 3149580 - RNA, 19 nt, Artificial Sequence
  Description of Artificial Sequence: Synthetic oligonucleotide
gguguuucacgacguuugg

SEQ ID NO: 3149581 - RNA, 19 nt, Artificial Sequence
  Description of Artificial Sequence: Synthetic oligonucleotide
accgggacgaugccaccac

SEQ ID NO: 3149582 - RNA, 19 nt, Artificial Sequence
  Description of Artificial Sequence: Synthetic oligonucleotide
ucagaggguguuucacgac

SEQ ID NO: 3149583 - RNA, 19 nt, Artificial Sequence
  Description of Artificial Sequence: Synthetic oligonucleotide
ggucuaaccacaucaacgu

SEQ ID NO: 3149584 - RNA, 19 nt, Artificial Sequence
  Description of Artificial Sequence: Synthetic oligonucleotide
cuucuuacuucuuucuccu

SEQ ID NO: 3149585 - RNA, 19 nt, Artificial Sequence
  Description of Artificial Sequence: Synthetic oligonucleotide
uuuuacuuccugggucaga

SEQ ID NO: 3149586 - RNA, 19 nt, Artificial Sequence
  Description of Artificial Sequence: Synthetic oligonucleotide
ggguguuucacgacguuug

SEQ ID NO: 3149587 - RNA, 19 nt, Artificial Sequence
  Description of Artificial Sequence: Synthetic oligonucleotide
guuucacgacguuuggucu

SEQ ID NO: 3149588 - RNA, 19 nt, Artificial Sequence
  Description of Artificial Sequence: Synthetic oligonucleotide
gucuaaccacaucaacguc

SEQ ID NO: 3149589 - RNA, 19 nt, Artificial Sequence
  Description of Artificial Sequence: Synthetic oligonucleotide
cuuuuacuuccugggucag

SEQ ID NO: 3149590 - RNA, 19 nt, Artificial Sequence
  Description of Artificial Sequence: Synthetic oligonucleotide
aaccgggacgaugccacca

SEQ ID NO: 3149591 - RNA, 19 nt, Artificial Sequence
  Description of Artificial Sequence: Synthetic oligonucleotide
gagaucuucuuacuucuuu

SEQ ID NO: 3149592 - RNA, 19 nt, Artificial Sequence
  Description of Artificial Sequence: Synthetic oligonucleotide
gacgaugccaccacacucu

SEQ ID NO: 3149593 - RNA, 19 nt, Artificial Sequence
  Description of Artificial Sequence: Synthetic oligonucleotide
uucacgacguuuggucuaa

SEQ ID NO: 3149594 - RNA, 19 nt, Artificial Sequence
  Description of Artificial Sequence: Synthetic oligonucleotide
uuucuccucuuuguugaau

SEQ ID NO: 3149595 - RNA, 19 nt, Artificial Sequence
  Description of Artificial Sequence: Synthetic oligonucleotide
ggacgaugccaccacacuc

SEQ ID NO: 3149596 - RNA, 19 nt, Artificial Sequence
  Description of Artificial Sequence: Synthetic oligonucleotide
aucaacgucucgagucaag

SEQ ID NO: 3149597 - RNA, 19 nt, Artificial Sequence
  Description of Artificial Sequence: Synthetic oligonucleotide
agaggguguuucacgacgu

SEQ ID NO: 3149598 - RNA, 19 nt, Artificial Sequence
  Description of Artificial Sequence: Synthetic oligonucleotide
cgacguuuggucuaaccac

SEQ ID NO: 3149599 - RNA, 19 nt, Artificial Sequence
  Description of Artificial Sequence: Synthetic oligonucleotide
ggaaccgggacgaugccac

SEQ ID NO: 3149600 - RNA, 19 nt, Artificial Sequence
  Description of Artificial Sequence: Synthetic oligonucleotide
gaaccgggacgaugccacc

SEQ ID NO: 3149601 - RNA, 19 nt, Artificial Sequence
  Description of Artificial Sequence: Synthetic oligonucleotide
ccucuuuguugaauacagc

SEQ ID NO: 3149602 - RNA, 19 nt, Artificial Sequence
  Description of Artificial Sequence: Synthetic oligonucleotide
gggagaucuucuuacuucu

SEQ ID NO: 3149603 - RNA, 19 nt, Artificial Sequence
  Description of Artificial Sequence: Synthetic oligonucleotide
cugggucagaggguguuuc

SEQ ID NO: 3149604 - RNA, 19 nt, Artificial Sequence
  Description of Artificial Sequence: Synthetic oligonucleotide
aggguguuucacgacguuu

SEQ ID NO: 3149605 - RNA, 19 nt, Artificial Sequence
  Description of Artificial Sequence: Synthetic oligonucleotide
acuuccugggucagagggu

SEQ ID NO: 3149606 - RNA, 19 nt, Artificial Sequence
  Description of Artificial Sequence: Synthetic oligonucleotide
uuccugggucagagggugu

SEQ ID NO: 3149607 - RNA, 19 nt, Artificial Sequence
  Description of Artificial Sequence: Synthetic oligonucleotide
caggggaaccgggacgaug

SEQ ID NO: 3149608 - RNA, 19 nt, Artificial Sequence
  Description of Artificial Sequence: Synthetic oligonucleotide
acgaugccaccacacucuu

SEQ ID NO: 3149609 - RNA, 19 nt, Artificial Sequence
  Description of Artificial Sequence: Synthetic oligonucleotide
uccugggucagaggguguu

SEQ ID NO: 3149610 - RNA, 19 nt, Artificial Sequence
  Description of Artificial Sequence: Synthetic oligonucleotide
cuuucuccucuuuguugaa

SEQ ID NO: 3149611 - RNA, 19 nt, Artificial Sequence
  Description of Artificial Sequence: Synthetic oligonucleotide
acguuuggucuaaccacau

SEQ ID NO: 3149612 - RNA, 19 nt, Artificial Sequence
  Description of Artificial Sequence: Synthetic oligonucleotide
gccaccacacucuuuuacu

SEQ ID NO: 3149613 - RNA, 19 nt, Artificial Sequence
  Description of Artificial Sequence: Synthetic oligonucleotide
augccaccacacucuuuua

SEQ ID NO: 3149614 - RNA, 19 nt, Artificial Sequence
  Description of Artificial Sequence: Synthetic oligonucleotide
cugggagaucuucuuacuu

SEQ ID NO: 3149615 - RNA, 19 nt, Artificial Sequence
  Description of Artificial Sequence: Synthetic oligonucleotide
guguuucacgacguuuggu

SEQ ID NO: 3149616 - RNA, 19 nt, Artificial Sequence
  Description of Artificial Sequence: Synthetic oligonucleotide
caucaacgucucgagucaa

SEQ ID NO: 3149617 - RNA, 19 nt, Artificial Sequence
  Description of Artificial Sequence: Synthetic oligonucleotide
ucacgacguuuggucuaac

SEQ ID NO: 3149618 - RNA, 19 nt, Artificial Sequence
  Description of Artificial Sequence: Synthetic oligonucleotide
ggggaaccgggacgaugcc

SEQ ID NO: 3149619 - RNA, 19 nt, Artificial Sequence
  Description of Artificial Sequence: Synthetic oligonucleotide
cgggacgaugccaccacac

SEQ ID NO: 3149620 - RNA, 19 nt, Artificial Sequence
  Description of Artificial Sequence: Synthetic oligonucleotide
gggacgaugccaccacacu

SEQ ID NO: 3149621 - RNA, 19 nt, Artificial Sequence
  Description of Artificial Sequence: Synthetic oligonucleotide
gaggguguuucacgacguu

SEQ ID NO: 3149622 - RNA, 19 nt, Artificial Sequence
  Description of Artificial Sequence: Synthetic oligonucleotide
gggaaccgggacgaugcca

SEQ ID NO: 3149623 - RNA, 19 nt, Artificial Sequence
  Description of Artificial Sequence: Synthetic oligonucleotide
cguuuggucuaaccacauc

SEQ ID NO: 3149624 - RNA, 19 nt, Artificial Sequence
  Description of Artificial Sequence: Synthetic oligonucleotide
ccaccacacucuuuuacuu

SEQ ID NO: 3149625 - RNA, 19 nt, Artificial Sequence
  Description of Artificial Sequence: Synthetic oligonucleotide
ccacaucaacgucucgagu

SEQ ID NO: 3149626 - RNA, 19 nt, Artificial Sequence
  Description of Artificial Sequence: Synthetic oligonucleotide
ggagaucuucuuacuucuu

SEQ ID NO: 3149627 - RNA, 19 nt, Artificial Sequence
  Description of Artificial Sequence: Synthetic oligonucleotide
ccgggacgaugccaccaca

SEQ ID NO: 3149628 - RNA, 19 nt, Artificial Sequence
  Description of Artificial Sequence: Synthetic oligonucleotide
ccugggucagaggguguuu

SEQ ID NO: 3149629 - RNA, 19 nt, Artificial Sequence
  Description of Artificial Sequence: Synthetic oligonucleotide
cgaugccaccacacucuuu

SEQ ID NO: 3149630 - RNA, 19 nt, Artificial Sequence
  Description of Artificial Sequence: Synthetic oligonucleotide
ccaggggaaccgggacgau

SEQ ID NO: 3149631 - RNA, 19 nt, Artificial Sequence
  Description of Artificial Sequence: Synthetic oligonucleotide
ucaucgauggacuuggggc

SEQ ID NO: 3149632 - RNA, 19 nt, Artificial Sequence
  Description of Artificial Sequence: Synthetic oligonucleotide
uagaacacgucaucaacgg

SEQ ID NO: 3149633 - RNA, 19 nt, Artificial Sequence
  Description of Artificial Sequence: Synthetic oligonucleotide
gaacacgucaucaacgggg

SEQ ID NO: 3149634 - RNA, 19 nt, Artificial Sequence
  Description of Artificial Sequence: Synthetic oligonucleotide
gauagaacacgucaucaac

SEQ ID NO: 3149635 - RNA, 19 nt, Artificial Sequence
  Description of Artificial Sequence: Synthetic oligonucleotide
ugggccauccgcuagacug

SEQ ID NO: 3149636 - RNA, 19 nt, Artificial Sequence
  Description of Artificial Sequence: Synthetic oligonucleotide
acuuggggcgacuuggugg

SEQ ID NO: 3149637 - RNA, 19 nt, Artificial Sequence
  Description of Artificial Sequence: Synthetic oligonucleotide
auagaacacgucaucaacg

SEQ ID NO: 3149638 - RNA, 19 nt, Artificial Sequence
  Description of Artificial Sequence: Synthetic oligonucleotide
aacacgucaucaacggggc

SEQ ID NO: 3149639 - RNA, 19 nt, Artificial Sequence
  Description of Artificial Sequence: Synthetic oligonucleotide
caucgauggacuuggggcg

SEQ ID NO: 3149640 - RNA, 19 nt, Artificial Sequence
  Description of Artificial Sequence: Synthetic oligonucleotide
acgucguugggccauccgc

SEQ ID NO: 3149641 - RNA, 19 nt, Artificial Sequence
  Description of Artificial Sequence: Synthetic oligonucleotide
aacggggcucuccaucucg

SEQ ID NO: 3149642 - RNA, 19 nt, Artificial Sequence
  Description of Artificial Sequence: Synthetic oligonucleotide
aucucgcugucaucgaugg

SEQ ID NO: 3149643 - RNA, 19 nt, Artificial Sequence
  Description of Artificial Sequence: Synthetic oligonucleotide
uggacuuggggcgacuugg

SEQ ID NO: 3149644 - RNA, 19 nt, Artificial Sequence
  Description of Artificial Sequence: Synthetic oligonucleotide
ucaucaacggggcucucca

SEQ ID NO: 3149645 - RNA, 19 nt, Artificial Sequence
  Description of Artificial Sequence: Synthetic oligonucleotide
aucaacggggcucuccauc

SEQ ID NO: 3149646 - RNA, 19 nt, Artificial Sequence
  Description of Artificial Sequence: Synthetic oligonucleotide
agaacacgucaucaacggg

SEQ ID NO: 3149647 - RNA, 19 nt, Artificial Sequence
  Description of Artificial Sequence: Synthetic oligonucleotide
cuccaucucgcugucaucg

SEQ ID NO: 3149648 - RNA, 19 nt, Artificial Sequence
  Description of Artificial Sequence: Synthetic oligonucleotide
gucaucgauggacuugggg

SEQ ID NO: 3149649 - RNA, 19 nt, Artificial Sequence
  Description of Artificial Sequence: Synthetic oligonucleotide
cucgcugucaucgauggac

SEQ ID NO: 3149650 - RNA, 19 nt, Artificial Sequence
  Description of Artificial Sequence: Synthetic oligonucleotide
cugucaucgauggacuugg

SEQ ID NO: 3149651 - RNA, 19 nt, Artificial Sequence
  Description of Artificial Sequence: Synthetic oligonucleotide
ucaacggggcucuccaucu

SEQ ID NO: 3149652 - RNA, 19 nt, Artificial Sequence
  Description of Artificial Sequence: Synthetic oligonucleotide
aggauagaacacgucauca

SEQ ID NO: 3149653 - RNA, 19 nt, Artificial Sequence
  Description of Artificial Sequence: Synthetic oligonucleotide
cuggagagcggccuguccc

SEQ ID NO: 3149654 - RNA, 19 nt, Artificial Sequence
  Description of Artificial Sequence: Synthetic oligonucleotide
ccugcauccacgucguugg

SEQ ID NO: 3149655 - RNA, 19 nt, Artificial Sequence
  Description of Artificial Sequence: Synthetic oligonucleotide
cuagacuggcugcugccag

SEQ ID NO: 3149656 - RNA, 19 nt, Artificial Sequence
  Description of Artificial Sequence: Synthetic oligonucleotide
caucucgcugucaucgaug

SEQ ID NO: 3149657 - RNA, 19 nt, Artificial Sequence
  Description of Artificial Sequence: Synthetic oligonucleotide
caggauagaacacgucauc

SEQ ID NO: 3149658 - RNA, 19 nt, Artificial Sequence
  Description of Artificial Sequence: Synthetic oligonucleotide
ucgcugucaucgauggacu

SEQ ID NO: 3149659 - RNA, 19 nt, Artificial Sequence
  Description of Artificial Sequence: Synthetic oligonucleotide
ucguugggccauccgcuag

SEQ ID NO: 3149660 - RNA, 19 nt, Artificial Sequence
  Description of Artificial Sequence: Synthetic oligonucleotide
gcauccacgucguugggcc

SEQ ID NO: 3149661 - RNA, 19 nt, Artificial Sequence
  Description of Artificial Sequence: Synthetic oligonucleotide
cauccgcuagacuggcugc

SEQ ID NO: 3149662 - RNA, 19 nt, Artificial Sequence
  Description of Artificial Sequence: Synthetic oligonucleotide
ugucaucgauggacuuggg

SEQ ID NO: 3149663 - RNA, 19 nt, Artificial Sequence
  Description of Artificial Sequence: Synthetic oligonucleotide
uagacuggcugcugccagc

SEQ ID NO: 3149664 - RNA, 19 nt, Artificial Sequence
  Description of Artificial Sequence: Synthetic oligonucleotide
uggagagcggccuguccca

SEQ ID NO: 3149665 - RNA, 19 nt, Artificial Sequence
  Description of Artificial Sequence: Synthetic oligonucleotide
cacgucaucaacggggcuc

SEQ ID NO: 3149666 - RNA, 19 nt, Artificial Sequence
  Description of Artificial Sequence: Synthetic oligonucleotide
agagcggccugucccagga

SEQ ID NO: 3149667 - RNA, 19 nt, Artificial Sequence
  Description of Artificial Sequence: Synthetic oligonucleotide
gacuuggggcgacuuggug

SEQ ID NO: 3149668 - RNA, 19 nt, Artificial Sequence
  Description of Artificial Sequence: Synthetic oligonucleotide
ugcauccacgucguugggc

SEQ ID NO: 3149669 - RNA, 19 nt, Artificial Sequence
  Description of Artificial Sequence: Synthetic oligonucleotide
auggacuuggggcgacuug

SEQ ID NO: 3149670 - RNA, 19 nt, Artificial Sequence
  Description of Artificial Sequence: Synthetic oligonucleotide
ggcgacuugguggugcugg

SEQ ID NO: 3149671 - RNA, 19 nt, Artificial Sequence
  Description of Artificial Sequence: Synthetic oligonucleotide
cugucccaggauagaacac

SEQ ID NO: 3149672 - RNA, 19 nt, Artificial Sequence
  Description of Artificial Sequence: Synthetic oligonucleotide
ggauagaacacgucaucaa

SEQ ID NO: 3149673 - RNA, 19 nt, Artificial Sequence
  Description of Artificial Sequence: Synthetic oligonucleotide
uccaucucgcugucaucga

SEQ ID NO: 3149674 - RNA, 19 nt, Artificial Sequence
  Description of Artificial Sequence: Synthetic oligonucleotide
gagagcggccugucccagg

SEQ ID NO: 3149675 - RNA, 19 nt, Artificial Sequence
  Description of Artificial Sequence: Synthetic oligonucleotide
gucaucaacggggcucucc

SEQ ID NO: 3149676 - RNA, 19 nt, Artificial Sequence
  Description of Artificial Sequence: Synthetic oligonucleotide
ucccaggauagaacacguc

SEQ ID NO: 3149677 - RNA, 19 nt, Artificial Sequence
  Description of Artificial Sequence: Synthetic oligonucleotide
uggggcgacuugguggugc

SEQ ID NO: 3149678 - RNA, 19 nt, Artificial Sequence
  Description of Artificial Sequence: Synthetic oligonucleotide
cccaggauagaacacguca

SEQ ID NO: 3149679 - RNA, 19 nt, Artificial Sequence
  Description of Artificial Sequence: Synthetic oligonucleotide
acgucaucaacggggcucu

SEQ ID NO: 3149680 - RNA, 19 nt, Artificial Sequence
  Description of Artificial Sequence: Synthetic oligonucleotide
ccugucccaggauagaaca

SEQ ID NO: 3149681 - RNA, 19 nt, Artificial Sequence
  Description of Artificial Sequence: Synthetic oligonucleotide
ccauccgcuagacuggcug

SEQ ID NO: 3149682 - RNA, 19 nt, Artificial Sequence
  Description of Artificial Sequence: Synthetic oligonucleotide
cacgucguugggccauccg

SEQ ID NO: 3149683 - RNA, 19 nt, Artificial Sequence
  Description of Artificial Sequence: Synthetic oligonucleotide
acggggcucuccaucucgc

SEQ ID NO: 3149684 - RNA, 19 nt, Artificial Sequence
  Description of Artificial Sequence: Synthetic oligonucleotide
ucucgcugucaucgaugga

SEQ ID NO: 3149685 - RNA, 19 nt, Artificial Sequence
  Description of Artificial Sequence: Synthetic oligonucleotide
gcugucaucgauggacuug

SEQ ID NO: 3149686 - RNA, 19 nt, Artificial Sequence
  Description of Artificial Sequence: Synthetic oligonucleotide
cuuggggcgacuugguggu

SEQ ID NO: 3149687 - RNA, 19 nt, Artificial Sequence
  Description of Artificial Sequence: Synthetic oligonucleotide
agacuggcugcugccagcu

SEQ ID NO: 3149688 - RNA, 19 nt, Artificial Sequence
  Description of Artificial Sequence: Synthetic oligonucleotide
agcggccugucccaggaua

SEQ ID NO: 3149689 - RNA, 19 nt, Artificial Sequence
  Description of Artificial Sequence: Synthetic oligonucleotide
aucgauggacuuggggcga

SEQ ID NO: 3149690 - RNA, 19 nt, Artificial Sequence
  Description of Artificial Sequence: Synthetic oligonucleotide
uccgcuagacuggcugcug

SEQ ID NO: 3149691 - RNA, 19 nt, Artificial Sequence
  Description of Artificial Sequence: Synthetic oligonucleotide
uugggccauccgcuagacu

SEQ ID NO: 3149692 - RNA, 19 nt, Artificial Sequence
  Description of Artificial Sequence: Synthetic oligonucleotide
acacgucaucaacggggcu

SEQ ID NO: 3149693 - RNA, 19 nt, Artificial Sequence
  Description of Artificial Sequence: Synthetic oligonucleotide
ccagcugcuggagagcggc

SEQ ID NO: 3149694 - RNA, 19 nt, Artificial Sequence
  Description of Artificial Sequence: Synthetic oligonucleotide
ggggcucuccaucucgcug

SEQ ID NO: 3149695 - RNA, 19 nt, Artificial Sequence
  Description of Artificial Sequence: Synthetic oligonucleotide
cugcauccacgucguuggg

SEQ ID NO: 3149696 - RNA, 19 nt, Artificial Sequence
  Description of Artificial Sequence: Synthetic oligonucleotide
auccgcuagacuggcugcu

SEQ ID NO: 3149697 - RNA, 19 nt, Artificial Sequence
  Description of Artificial Sequence: Synthetic oligonucleotide
gggccauccgcuagacugg

SEQ ID NO: 3149698 - RNA, 19 nt, Artificial Sequence
  Description of Artificial Sequence: Synthetic oligonucleotide
guugggccauccgcuagac

SEQ ID NO: 3149699 - RNA, 19 nt, Artificial Sequence
  Description of Artificial Sequence: Synthetic oligonucleotide
ucgauggacuuggggcgac

SEQ ID NO: 3149700 - RNA, 19 nt, Artificial Sequence
  Description of Artificial Sequence: Synthetic oligonucleotide
cucuccaucucgcugucau

SEQ ID NO: 3149701 - RNA, 19 nt, Artificial Sequence
  Description of Artificial Sequence: Synthetic oligonucleotide
gacuggcugcugccagcug

SEQ ID NO: 3149702 - RNA, 19 nt, Artificial Sequence
  Description of Artificial Sequence: Synthetic oligonucleotide
cugccagcugcuggagagc

SEQ ID NO: 3149703 - RNA, 19 nt, Artificial Sequence
  Description of Artificial Sequence: Synthetic oligonucleotide
cagcugcuggagagcggcc

SEQ ID NO: 3149704 - RNA, 19 nt, Artificial Sequence
  Description of Artificial Sequence: Synthetic oligonucleotide
auccacgucguugggccau

SEQ ID NO: 3149705 - RNA, 19 nt, Artificial Sequence
  Description of Artificial Sequence: Synthetic oligonucleotide
gucguugggccauccgcua

SEQ ID NO: 3149706 - RNA, 19 nt, Artificial Sequence
  Description of Artificial Sequence: Synthetic oligonucleotide
caacggggcucuccaucuc

SEQ ID NO: 3149707 - RNA, 19 nt, Artificial Sequence
  Description of Artificial Sequence: Synthetic oligonucleotide
gcggccugucccaggauag

SEQ ID NO: 3149708 - RNA, 19 nt, Artificial Sequence
  Description of Artificial Sequence: Synthetic oligonucleotide
gucccaggauagaacacgu

SEQ ID NO: 3149709 - RNA, 19 nt, Artificial Sequence
  Description of Artificial Sequence: Synthetic oligonucleotide
ccgcuagacuggcugcugc

SEQ ID NO: 3149710 - RNA, 19 nt, Artificial Sequence
  Description of Artificial Sequence: Synthetic oligonucleotide
cauccacgucguugggcca

SEQ ID NO: 3149711 - RNA, 19 nt, Artificial Sequence
  Description of Artificial Sequence: Synthetic oligonucleotide
gggcucuccaucucgcugu

SEQ ID NO: 3149712 - RNA, 19 nt, Artificial Sequence
  Description of Artificial Sequence: Synthetic oligonucleotide
gcuagacuggcugcugcca

SEQ ID NO: 3149713 - RNA, 19 nt, Artificial Sequence
  Description of Artificial Sequence: Synthetic oligonucleotide
cgcuagacuggcugcugcc

SEQ ID NO: 3149714 - RNA, 19 nt, Artificial Sequence
  Description of Artificial Sequence: Synthetic oligonucleotide
gccugucccaggauagaac

SEQ ID NO: 3149715 - RNA, 19 nt, Artificial Sequence
  Description of Artificial Sequence: Synthetic oligonucleotide
ccaggauagaacacgucau

SEQ ID NO: 3149716 - RNA, 19 nt, Artificial Sequence
  Description of Artificial Sequence: Synthetic oligonucleotide
gauggacuuggggcgacuu

SEQ ID NO: 3149717 - RNA, 19 nt, Artificial Sequence
  Description of Artificial Sequence: Synthetic oligonucleotide
uccacgucguugggccauc

SEQ ID NO: 3149718 - RNA, 19 nt, Artificial Sequence
  Description of Artificial Sequence: Synthetic oligonucleotide
ggagagcggccugucccag

SEQ ID NO: 3149719 - RNA, 19 nt, Artificial Sequence
  Description of Artificial Sequence: Synthetic oligonucleotide
uuggggcgacuugguggug

SEQ ID NO: 3149720 - RNA, 19 nt, Artificial Sequence
  Description of Artificial Sequence: Synthetic oligonucleotide
ggccauccgcuagacuggc

SEQ ID NO: 3149721 - RNA, 19 nt, Artificial Sequence
  Description of Artificial Sequence: Synthetic oligonucleotide
ggccugucccaggauagaa

SEQ ID NO: 3149722 - RNA, 19 nt, Artificial Sequence
  Description of Artificial Sequence: Synthetic oligonucleotide
ggcucuccaucucgcuguc

SEQ ID NO: 3149723 - RNA, 19 nt, Artificial Sequence
  Description of Artificial Sequence: Synthetic oligonucleotide
caucaacggggcucuccau

SEQ ID NO: 3149724 - RNA, 19 nt, Artificial Sequence
  Description of Artificial Sequence: Synthetic oligonucleotide
cguugggccauccgcuaga

SEQ ID NO: 3149725 - RNA, 19 nt, Artificial Sequence
  Description of Artificial Sequence: Synthetic oligonucleotide
cgucguugggccauccgcu

SEQ ID NO: 3149726 - RNA, 19 nt, Artificial Sequence
  Description of Artificial Sequence: Synthetic oligonucleotide
ggggcgacuugguggugcu

SEQ ID NO: 3149727 - RNA, 19 nt, Artificial Sequence
  Description of Artificial Sequence: Synthetic oligonucleotide
cgacuugguggugcuggug

SEQ ID NO: 3149728 - RNA, 19 nt, Artificial Sequence
  Description of Artificial Sequence: Synthetic oligonucleotide
ggacuuggggcgacuuggu

SEQ ID NO: 3149729 - RNA, 19 nt, Artificial Sequence
  Description of Artificial Sequence: Synthetic oligonucleotide
gcgacuugguggugcuggu

SEQ ID NO: 3149730 - RNA, 19 nt, Artificial Sequence
  Description of Artificial Sequence: Synthetic oligonucleotide
ccacgucguugggccaucc

SEQ ID NO: 3149731 - RNA, 19 nt, Artificial Sequence
  Description of Artificial Sequence: Synthetic oligonucleotide
gggcgacuugguggugcug

SEQ ID NO: 3149732 - RNA, 19 nt, Artificial Sequence
  Description of Artificial Sequence: Synthetic oligonucleotide
gagcggccugucccaggau

SEQ ID NO: 3149733 - RNA, 19 nt, Artificial Sequence
  Description of Artificial Sequence: Synthetic oligonucleotide
ccaucucgcugucaucgau

SEQ ID NO: 3149734 - RNA, 19 nt, Artificial Sequence
  Description of Artificial Sequence: Synthetic oligonucleotide
gcucuccaucucgcuguca

SEQ ID NO: 3149735 - RNA, 19 nt, Artificial Sequence
  Description of Artificial Sequence: Synthetic oligonucleotide
gccauccgcuagacuggcu

SEQ ID NO: 3149736 - RNA, 19 nt, Artificial Sequence
  Description of Artificial Sequence: Synthetic oligonucleotide
cggccugucccaggauaga

SEQ ID NO: 3149737 - RNA, 19 nt, Artificial Sequence
  Description of Artificial Sequence: Synthetic oligonucleotide
cgucaucaacggggcucuc

SEQ ID NO: 3149738 - RNA, 19 nt, Artificial Sequence
  Description of Artificial Sequence: Synthetic oligonucleotide
cgcugucaucgauggacuu

SEQ ID NO: 3149739 - RNA, 19 nt, Artificial Sequence
  Description of Artificial Sequence: Synthetic oligonucleotide
cggggcucuccaucucgcu

SEQ ID NO: 3149740 - RNA, 19 nt, Artificial Sequence
  Description of Artificial Sequence: Synthetic oligonucleotide
cgauggacuuggggcgacu

SEQ ID NO: 3149741 - RNA, 19 nt, Artificial Sequence
  Description of Artificial Sequence: Synthetic oligonucleotide
aauuucgcucuauagacca

SEQ ID NO: 3149742 - RNA, 19 nt, Artificial Sequence
  Description of Artificial Sequence: Synthetic oligonucleotide
uggaauuucgcucuauaga

SEQ ID NO: 3149743 - RNA, 19 nt, Artificial Sequence
  Description of Artificial Sequence: Synthetic oligonucleotide
cuugucucugccuucagag

SEQ ID NO: 3149744 - RNA, 19 nt, Artificial Sequence
  Description of Artificial Sequence: Synthetic oligonucleotide
ggaauuucgcucuauagac

SEQ ID NO: 3149745 - RNA, 19 nt, Artificial Sequence
  Description of Artificial Sequence: Synthetic oligonucleotide
uguccuggaauuucgcucu

SEQ ID NO: 3149746 - RNA, 19 nt, Artificial Sequence
  Description of Artificial Sequence: Synthetic oligonucleotide
cuggaauuucgcucuauag

SEQ ID NO: 3149747 - RNA, 19 nt, Artificial Sequence
  Description of Artificial Sequence: Synthetic oligonucleotide
cucugugaagccuuggcug

SEQ ID NO: 3149748 - RNA, 19 nt, Artificial Sequence
  Description of Artificial Sequence: Synthetic oligonucleotide
ucucugugaagccuuggcu

SEQ ID NO: 3149749 - RNA, 19 nt, Artificial Sequence
  Description of Artificial Sequence: Synthetic oligonucleotide
uucgcucuauagaccaugc

SEQ ID NO: 3149750 - RNA, 19 nt, Artificial Sequence
  Description of Artificial Sequence: Synthetic oligonucleotide
ucggagaucugcuugucuc

SEQ ID NO: 3149751 - RNA, 19 nt, Artificial Sequence
  Description of Artificial Sequence: Synthetic oligonucleotide
gaauuucgcucuauagacc

SEQ ID NO: 3149752 - RNA, 19 nt, Artificial Sequence
  Description of Artificial Sequence: Synthetic oligonucleotide
uuucgcucuauagaccaug

SEQ ID NO: 3149753 - RNA, 19 nt, Artificial Sequence
  Description of Artificial Sequence: Synthetic oligonucleotide
ugugaagccuuggcugucc

SEQ ID NO: 3149754 - RNA, 19 nt, Artificial Sequence
  Description of Artificial Sequence: Synthetic oligonucleotide
ucugcuugucucugccuuc

SEQ ID NO: 3149755 - RNA, 19 nt, Artificial Sequence
  Description of Artificial Sequence: Synthetic oligonucleotide
cugccuucagagugcuggg

SEQ ID NO: 3149756 - RNA, 19 nt, Artificial Sequence
  Description of Artificial Sequence: Synthetic oligonucleotide
ucgcucuauagaccaugcu

SEQ ID NO: 3149757 - RNA, 19 nt, Artificial Sequence
  Description of Artificial Sequence: Synthetic oligonucleotide
auuaaaggugugcgcuuuu

SEQ ID NO: 3149758 - RNA, 19 nt, Artificial Sequence
  Description of Artificial Sequence: Synthetic oligonucleotide
cgcucuauagaccaugcug

SEQ ID NO: 3149759 - RNA, 19 nt, Artificial Sequence
  Description of Artificial Sequence: Synthetic oligonucleotide
ugcuugucucugccuucag

SEQ ID NO: 3149760 - RNA, 19 nt, Artificial Sequence
  Description of Artificial Sequence: Synthetic oligonucleotide
acucggagaucugcuuguc

SEQ ID NO: 3149761 - RNA, 19 nt, Artificial Sequence
  Description of Artificial Sequence: Synthetic oligonucleotide
cuucagagugcugggauua

SEQ ID NO: 3149762 - RNA, 19 nt, Artificial Sequence
  Description of Artificial Sequence: Synthetic oligonucleotide
gauuaaaggugugcgcuuu

SEQ ID NO: 3149763 - RNA, 19 nt, Artificial Sequence
  Description of Artificial Sequence: Synthetic oligonucleotide
ugccuucagagugcuggga

SEQ ID NO: 3149764 - RNA, 19 nt, Artificial Sequence
  Description of Artificial Sequence: Synthetic oligonucleotide
uucagagugcugggauuaa

SEQ ID NO: 3149765 - RNA, 19 nt, Artificial Sequence
  Description of Artificial Sequence: Synthetic oligonucleotide
uccuggaauuucgcucuau

SEQ ID NO: 3149766 - RNA, 19 nt, Artificial Sequence
  Description of Artificial Sequence: Synthetic oligonucleotide
gcuugucucugccuucaga

SEQ ID NO: 3149767 - RNA, 19 nt, Artificial Sequence
  Description of Artificial Sequence: Synthetic oligonucleotide
auuucgcucuauagaccau

SEQ ID NO: 3149768 - RNA, 19 nt, Artificial Sequence
  Description of Artificial Sequence: Synthetic oligonucleotide
cugcuugucucugccuuca

SEQ ID NO: 3149769 - RNA, 19 nt, Artificial Sequence
  Description of Artificial Sequence: Synthetic oligonucleotide
gcuguccuggaauuucgcu

SEQ ID NO: 3149770 - RNA, 19 nt, Artificial Sequence
  Description of Artificial Sequence: Synthetic oligonucleotide
ggcuguccuggaauuucgc

SEQ ID NO: 3149771 - RNA, 19 nt, Artificial Sequence
  Description of Artificial Sequence: Synthetic oligonucleotide
cucggagaucugcuugucu

SEQ ID NO: 3149772 - RNA, 19 nt, Artificial Sequence
  Description of Artificial Sequence: Synthetic oligonucleotide
ccuggaauuucgcucuaua

SEQ ID NO: 3149773 - RNA, 19 nt, Artificial Sequence
  Description of Artificial Sequence: Synthetic oligonucleotide
gugaagccuuggcuguccu

SEQ ID NO: 3149774 - RNA, 19 nt, Artificial Sequence
  Description of Artificial Sequence: Synthetic oligonucleotide
gccuucagagugcugggau

SEQ ID NO: 3149775 - RNA, 19 nt, Artificial Sequence
  Description of Artificial Sequence: Synthetic oligonucleotide
guccuggaauuucgcucua

SEQ ID NO: 3149776 - RNA, 19 nt, Artificial Sequence
  Description of Artificial Sequence: Synthetic oligonucleotide
uuuauuuaagcucuggaag

SEQ ID NO: 3149777 - RNA, 19 nt, Artificial Sequence
  Description of Artificial Sequence: Synthetic oligonucleotide
aaaaucaauccuugguagg

SEQ ID NO: 3149778 - RNA, 19 nt, Artificial Sequence
  Description of Artificial Sequence: Synthetic oligonucleotide
uuuuguuuuaacaaguuuu

SEQ ID NO: 3149779 - RNA, 19 nt, Artificial Sequence
  Description of Artificial Sequence: Synthetic oligonucleotide
ucuucaggcacugacagcg

SEQ ID NO: 3149780 - RNA, 19 nt, Artificial Sequence
  Description of Artificial Sequence: Synthetic oligonucleotide
aaaucaauccuugguaggg

SEQ ID NO: 3149781 - RNA, 19 nt, Artificial Sequence
  Description of Artificial Sequence: Synthetic oligonucleotide
cuugguagggucuucaggc

SEQ ID NO: 3149782 - RNA, 19 nt, Artificial Sequence
  Description of Artificial Sequence: Synthetic oligonucleotide
uuauuuaagcucuggaagu

SEQ ID NO: 3149783 - RNA, 19 nt, Artificial Sequence
  Description of Artificial Sequence: Synthetic oligonucleotide
caaaaucaauccuugguag

SEQ ID NO: 3149784 - RNA, 19 nt, Artificial Sequence
  Description of Artificial Sequence: Synthetic oligonucleotide
ugacccuguagccuggugg

SEQ ID NO: 3149785 - RNA, 19 nt, Artificial Sequence
  Description of Artificial Sequence: Synthetic oligonucleotide
ucuggaaguccucaaaauc

SEQ ID NO: 3149786 - RNA, 19 nt, Artificial Sequence
  Description of Artificial Sequence: Synthetic oligonucleotide
uccucaaaaucaauccuug

SEQ ID NO: 3149787 - RNA, 19 nt, Artificial Sequence
  Description of Artificial Sequence: Synthetic oligonucleotide
auuuaagcucuggaagucc

SEQ ID NO: 3149788 - RNA, 19 nt, Artificial Sequence
  Description of Artificial Sequence: Synthetic oligonucleotide
uuuaagcucuggaaguccu

SEQ ID NO: 3149789 - RNA, 19 nt, Artificial Sequence
  Description of Artificial Sequence: Synthetic oligonucleotide
agggucuucaggcacugac

SEQ ID NO: 3149790 - RNA, 19 nt, Artificial Sequence
  Description of Artificial Sequence: Synthetic oligonucleotide
cacaauugacccuguagcc

SEQ ID NO: 3149791 - RNA, 19 nt, Artificial Sequence
  Description of Artificial Sequence: Synthetic oligonucleotide
agcuggccacaauugaccc

SEQ ID NO: 3149792 - RNA, 19 nt, Artificial Sequence
  Description of Artificial Sequence: Synthetic oligonucleotide
aucaauccuugguaggguc

SEQ ID NO: 3149793 - RNA, 19 nt, Artificial Sequence
  Description of Artificial Sequence: Synthetic oligonucleotide
cuggaaguccucaaaauca

SEQ ID NO: 3149794 - RNA, 19 nt, Artificial Sequence
  Description of Artificial Sequence: Synthetic oligonucleotide
caauugacccuguagccug

SEQ ID NO: 3149795 - RNA, 19 nt, Artificial Sequence
  Description of Artificial Sequence: Synthetic oligonucleotide
uggaaguccucaaaaucaa

SEQ ID NO: 3149796 - RNA, 19 nt, Artificial Sequence
  Description of Artificial Sequence: Synthetic oligonucleotide
ucaauccuugguagggucu

SEQ ID NO: 3149797 - RNA, 19 nt, Artificial Sequence
  Description of Artificial Sequence: Synthetic oligonucleotide
acugacagcgcagcuggcc

SEQ ID NO: 3149798 - RNA, 19 nt, Artificial Sequence
  Description of Artificial Sequence: Synthetic oligonucleotide
uauuuaagcucuggaaguc

SEQ ID NO: 3149799 - RNA, 19 nt, Artificial Sequence
  Description of Artificial Sequence: Synthetic oligonucleotide
ccacaauugacccuguagc

SEQ ID NO: 3149800 - RNA, 19 nt, Artificial Sequence
  Description of Artificial Sequence: Synthetic oligonucleotide
guagccugguggcuggugg

SEQ ID NO: 3149801 - RNA, 19 nt, Artificial Sequence
  Description of Artificial Sequence: Synthetic oligonucleotide
gacccuguagccugguggc

SEQ ID NO: 3149802 - RNA, 19 nt, Artificial Sequence
  Description of Artificial Sequence: Synthetic oligonucleotide
aaucaauccuugguagggu

SEQ ID NO: 3149803 - RNA, 19 nt, Artificial Sequence
  Description of Artificial Sequence: Synthetic oligonucleotide
cagcuggccacaauugacc

SEQ ID NO: 3149804 - RNA, 19 nt, Artificial Sequence
  Description of Artificial Sequence: Synthetic oligonucleotide
ggucuucaggcacugacag

SEQ ID NO: 3149805 - RNA, 19 nt, Artificial Sequence
  Description of Artificial Sequence: Synthetic oligonucleotide
acaauugacccuguagccu

SEQ ID NO: 3149806 - RNA, 19 nt, Artificial Sequence
  Description of Artificial Sequence: Synthetic oligonucleotide
uucaggcacugacagcgca

SEQ ID NO: 3149807 - RNA, 19 nt, Artificial Sequence
  Description of Artificial Sequence: Synthetic oligonucleotide
ugguagggucuucaggcac

SEQ ID NO: 3149808 - RNA, 19 nt, Artificial Sequence
  Description of Artificial Sequence: Synthetic oligonucleotide
cucaaaaucaauccuuggu

SEQ ID NO: 3149809 - RNA, 19 nt, Artificial Sequence
  Description of Artificial Sequence: Synthetic oligonucleotide
aauugacccuguagccugg

SEQ ID NO: 3149810 - RNA, 19 nt, Artificial Sequence
  Description of Artificial Sequence: Synthetic oligonucleotide
cuggccacaauugacccug

SEQ ID NO: 3149811 - RNA, 19 nt, Artificial Sequence
  Description of Artificial Sequence: Synthetic oligonucleotide
uugguagggucuucaggca

SEQ ID NO: 3149812 - RNA, 19 nt, Artificial Sequence
  Description of Artificial Sequence: Synthetic oligonucleotide
gccacaauugacccuguag

SEQ ID NO: 3149813 - RNA, 19 nt, Artificial Sequence
  Description of Artificial Sequence: Synthetic oligonucleotide
uuaagcucuggaaguccuc

SEQ ID NO: 3149814 - RNA, 19 nt, Artificial Sequence
  Description of Artificial Sequence: Synthetic oligonucleotide
aauccuugguagggucuuc

SEQ ID NO: 3149815 - RNA, 19 nt, Artificial Sequence
  Description of Artificial Sequence: Synthetic oligonucleotide
uccuugguagggucuucag

SEQ ID NO: 3149816 - RNA, 19 nt, Artificial Sequence
  Description of Artificial Sequence: Synthetic oligonucleotide
agcgcagcuggccacaauu

SEQ ID NO: 3149817 - RNA, 19 nt, Artificial Sequence
  Description of Artificial Sequence: Synthetic oligonucleotide
guggcugguggccagcaac

SEQ ID NO: 3149818 - RNA, 19 nt, Artificial Sequence
  Description of Artificial Sequence: Synthetic oligonucleotide
ccucaaaaucaauccuugg

SEQ ID NO: 3149819 - RNA, 19 nt, Artificial Sequence
  Description of Artificial Sequence: Synthetic oligonucleotide
aagcucuggaaguccucaa

SEQ ID NO: 3149820 - RNA, 19 nt, Artificial Sequence
  Description of Artificial Sequence: Synthetic oligonucleotide
uugacccuguagccuggug

SEQ ID NO: 3149821 - RNA, 19 nt, Artificial Sequence
  Description of Artificial Sequence: Synthetic oligonucleotide
cuucaggcacugacagcgc

SEQ ID NO: 3149822 - RNA, 19 nt, Artificial Sequence
  Description of Artificial Sequence: Synthetic oligonucleotide
ccuugguagggucuucagg

SEQ ID NO: 3149823 - RNA, 19 nt, Artificial Sequence
  Description of Artificial Sequence: Synthetic oligonucleotide
agccugguggcugguggcc

SEQ ID NO: 3149824 - RNA, 19 nt, Artificial Sequence
  Description of Artificial Sequence: Synthetic oligonucleotide
gucuucaggcacugacagc

SEQ ID NO: 3149825 - RNA, 19 nt, Artificial Sequence
  Description of Artificial Sequence: Synthetic oligonucleotide
ugacagcgcagcuggccac

SEQ ID NO: 3149826 - RNA, 19 nt, Artificial Sequence
  Description of Artificial Sequence: Synthetic oligonucleotide
cugacagcgcagcuggcca

SEQ ID NO: 3149827 - RNA, 19 nt, Artificial Sequence
  Description of Artificial Sequence: Synthetic oligonucleotide
uguagccugguggcuggug

SEQ ID NO: 3149828 - RNA, 19 nt, Artificial Sequence
  Description of Artificial Sequence: Synthetic oligonucleotide
auccuugguagggucuuca

SEQ ID NO: 3149829 - RNA, 19 nt, Artificial Sequence
  Description of Artificial Sequence: Synthetic oligonucleotide
guagggucuucaggcacug

SEQ ID NO: 3149830 - RNA, 19 nt, Artificial Sequence
  Description of Artificial Sequence: Synthetic oligonucleotide
ccuguagccugguggcugg

SEQ ID NO: 3149831 - RNA, 19 nt, Artificial Sequence
  Description of Artificial Sequence: Synthetic oligonucleotide
gcucuggaaguccucaaaa

SEQ ID NO: 3149832 - RNA, 19 nt, Artificial Sequence
  Description of Artificial Sequence: Synthetic oligonucleotide
cucuggaaguccucaaaau

SEQ ID NO: 3149833 - RNA, 19 nt, Artificial Sequence
  Description of Artificial Sequence: Synthetic oligonucleotide
guccucaaaaucaauccuu

SEQ ID NO: 3149834 - RNA, 19 nt, Artificial Sequence
  Description of Artificial Sequence: Synthetic oligonucleotide
cacugacagcgcagcuggc

SEQ ID NO: 3149835 - RNA, 19 nt, Artificial Sequence
  Description of Artificial Sequence: Synthetic oligonucleotide
gacagcgcagcuggccaca

SEQ ID NO: 3149836 - RNA, 19 nt, Artificial Sequence
  Description of Artificial Sequence: Synthetic oligonucleotide
auugacccuguagccuggu

SEQ ID NO: 3149837 - RNA, 19 nt, Artificial Sequence
  Description of Artificial Sequence: Synthetic oligonucleotide
cugguggcugguggccagc

SEQ ID NO: 3149838 - RNA, 19 nt, Artificial Sequence
  Description of Artificial Sequence: Synthetic oligonucleotide
ccugguggcugguggccag

SEQ ID NO: 3149839 - RNA, 19 nt, Artificial Sequence
  Description of Artificial Sequence: Synthetic oligonucleotide
acccuguagccugguggcu

SEQ ID NO: 3149840 - RNA, 19 nt, Artificial Sequence
  Description of Artificial Sequence: Synthetic oligonucleotide
gcgcagcuggccacaauug

SEQ ID NO: 3149841 - RNA, 19 nt, Artificial Sequence
  Description of Artificial Sequence: Synthetic oligonucleotide
gguagggucuucaggcacu

SEQ ID NO: 3149842 - RNA, 19 nt, Artificial Sequence
  Description of Artificial Sequence: Synthetic oligonucleotide
cccuguagccugguggcug

SEQ ID NO: 3149843 - RNA, 19 nt, Artificial Sequence
  Description of Artificial Sequence: Synthetic oligonucleotide
caauccuugguagggucuu

SEQ ID NO: 3149844 - RNA, 19 nt, Artificial Sequence
  Description of Artificial Sequence: Synthetic oligonucleotide
acagcgcagcuggccacaa

SEQ ID NO: 3149845 - RNA, 19 nt, Artificial Sequence
  Description of Artificial Sequence: Synthetic oligonucleotide
ggaaguccucaaaaucaau

SEQ ID NO: 3149846 - RNA, 19 nt, Artificial Sequence
  Description of Artificial Sequence: Synthetic oligonucleotide
cgcagcuggccacaauuga

SEQ ID NO: 3149847 - RNA, 19 nt, Artificial Sequence
  Description of Artificial Sequence: Synthetic oligonucleotide
gguggcugguggccagcaa

SEQ ID NO: 3149848 - RNA, 19 nt, Artificial Sequence
  Description of Artificial Sequence: Synthetic oligonucleotide
gccugguggcugguggcca

SEQ ID NO: 3149849 - RNA, 19 nt, Artificial Sequence
  Description of Artificial Sequence: Synthetic oligonucleotide
cuguagccugguggcuggu

SEQ ID NO: 3149850 - RNA, 19 nt, Artificial Sequence
  Description of Artificial Sequence: Synthetic oligonucleotide
cagcgcagcuggccacaau

SEQ ID NO: 3149851 - RNA, 19 nt, Artificial Sequence
  Description of Artificial Sequence: Synthetic oligonucleotide
uauauauacaacauucugc

SEQ ID NO: 3149852 - RNA, 19 nt, Artificial Sequence
  Description of Artificial Sequence: Synthetic oligonucleotide
uuauauauacaacauucug

SEQ ID NO: 3149853 - RNA, 19 nt, Artificial Sequence
  Description of Artificial Sequence: Synthetic oligonucleotide
uuuauuauauauacaacau

SEQ ID NO: 3149854 - RNA, 19 nt, Artificial Sequence
  Description of Artificial Sequence: Synthetic oligonucleotide
auuauauauacaacauucu

SEQ ID NO: 3149855 - RNA, 19 nt, Artificial Sequence
  Description of Artificial Sequence: Synthetic oligonucleotide
cuaaggauuacaaacaagg

SEQ ID NO: 3149856 - RNA, 19 nt, Artificial Sequence
  Description of Artificial Sequence: Synthetic oligonucleotide
gaguccauaggccagaggg

SEQ ID NO: 3149857 - RNA, 19 nt, Artificial Sequence
  Description of Artificial Sequence: Synthetic oligonucleotide
aaggauuacaaacaagggu

SEQ ID NO: 3149858 - RNA, 19 nt, Artificial Sequence
  Description of Artificial Sequence: Synthetic oligonucleotide
uaaggauuacaaacaaggg

SEQ ID NO: 3149859 - RNA, 19 nt, Artificial Sequence
  Description of Artificial Sequence: Synthetic oligonucleotide
gaaggguuuauucucaagc

SEQ ID NO: 3149860 - RNA, 19 nt, Artificial Sequence
  Description of Artificial Sequence: Synthetic oligonucleotide
uuauucucaagcaucuaag

SEQ ID NO: 3149861 - RNA, 19 nt, Artificial Sequence
  Description of Artificial Sequence: Synthetic oligonucleotide
uuucagaagaaaagggaag

SEQ ID NO: 3149862 - RNA, 19 nt, Artificial Sequence
  Description of Artificial Sequence: Synthetic oligonucleotide
aaagggaaggguuuauucu

SEQ ID NO: 3149863 - RNA, 19 nt, Artificial Sequence
  Description of Artificial Sequence: Synthetic oligonucleotide
uucagaagaaaagggaagg

SEQ ID NO: 3149864 - RNA, 19 nt, Artificial Sequence
  Description of Artificial Sequence: Synthetic oligonucleotide
uauucucaagcaucuaagg

SEQ ID NO: 3149865 - RNA, 19 nt, Artificial Sequence
  Description of Artificial Sequence: Synthetic oligonucleotide
uuuauucucaagcaucuaa

SEQ ID NO: 3149866 - RNA, 19 nt, Artificial Sequence
  Description of Artificial Sequence: Synthetic oligonucleotide
agaggggcaacacuggugg

SEQ ID NO: 3149867 - RNA, 19 nt, Artificial Sequence
  Description of Artificial Sequence: Synthetic oligonucleotide
ucuaaggauuacaaacaag

SEQ ID NO: 3149868 - RNA, 19 nt, Artificial Sequence
  Description of Artificial Sequence: Synthetic oligonucleotide
aaggguuuauucucaagca

SEQ ID NO: 3149869 - RNA, 19 nt, Artificial Sequence
  Description of Artificial Sequence: Synthetic oligonucleotide
uucucaagcaucuaaggau

SEQ ID NO: 3149870 - RNA, 19 nt, Artificial Sequence
  Description of Artificial Sequence: Synthetic oligonucleotide
ucagaagaaaagggaaggg

SEQ ID NO: 3149871 - RNA, 19 nt, Artificial Sequence
  Description of Artificial Sequence: Synthetic oligonucleotide
auucucaagcaucuaagga

SEQ ID NO: 3149872 - RNA, 19 nt, Artificial Sequence
  Description of Artificial Sequence: Synthetic oligonucleotide
uuacaaacaaggguauuug

SEQ ID NO: 3149873 - RNA, 19 nt, Artificial Sequence
  Description of Artificial Sequence: Synthetic oligonucleotide
aaacaaggguauuuguuua

SEQ ID NO: 3149874 - RNA, 19 nt, Artificial Sequence
  Description of Artificial Sequence: Synthetic oligonucleotide
aggauuacaaacaagggua

SEQ ID NO: 3149875 - RNA, 19 nt, Artificial Sequence
  Description of Artificial Sequence: Synthetic oligonucleotide
uaggccagaggguaggacc

SEQ ID NO: 3149876 - RNA, 19 nt, Artificial Sequence
  Description of Artificial Sequence: Synthetic oligonucleotide
ucucaagcaucuaaggauu

SEQ ID NO: 3149877 - RNA, 19 nt, Artificial Sequence
  Description of Artificial Sequence: Synthetic oligonucleotide
caucuaaggauuacaaaca

SEQ ID NO: 3149878 - RNA, 19 nt, Artificial Sequence
  Description of Artificial Sequence: Synthetic oligonucleotide
aaagggagaggggcaacac

SEQ ID NO: 3149879 - RNA, 19 nt, Artificial Sequence
  Description of Artificial Sequence: Synthetic oligonucleotide
aacaaggguauuuguuuaa

SEQ ID NO: 3149880 - RNA, 19 nt, Artificial Sequence
  Description of Artificial Sequence: Synthetic oligonucleotide
uacaaacaaggguauuugu

SEQ ID NO: 3149881 - RNA, 19 nt, Artificial Sequence
  Description of Artificial Sequence: Synthetic oligonucleotide
auuacaaacaaggguauuu

SEQ ID NO: 3149882 - RNA, 19 nt, Artificial Sequence
  Description of Artificial Sequence: Synthetic oligonucleotide
aucuaaggauuacaaacaa

SEQ ID NO: 3149883 - RNA, 19 nt, Artificial Sequence
  Description of Artificial Sequence: Synthetic oligonucleotide
aggaggaguccauaggcca

SEQ ID NO: 3149884 - RNA, 19 nt, Artificial Sequence
  Description of Artificial Sequence: Synthetic oligonucleotide
aagggagaggggcaacacu

SEQ ID NO: 3149885 - RNA, 19 nt, Artificial Sequence
  Description of Artificial Sequence: Synthetic oligonucleotide
ggaggaggaguccauaggc

SEQ ID NO: 3149886 - RNA, 19 nt, Artificial Sequence
  Description of Artificial Sequence: Synthetic oligonucleotide
agaagaaaagggaaggguu

SEQ ID NO: 3149887 - RNA, 19 nt, Artificial Sequence
  Description of Artificial Sequence: Synthetic oligonucleotide
aggaccaggccacuccagg

SEQ ID NO: 3149888 - RNA, 19 nt, Artificial Sequence
  Description of Artificial Sequence: Synthetic oligonucleotide
uccauaggccagaggguag

SEQ ID NO: 3149889 - RNA, 19 nt, Artificial Sequence
  Description of Artificial Sequence: Synthetic oligonucleotide
agcaucuaaggauuacaaa

SEQ ID NO: 3149890 - RNA, 19 nt, Artificial Sequence
  Description of Artificial Sequence: Synthetic oligonucleotide
aagcaucuaaggauuacaa

SEQ ID NO: 3149891 - RNA, 19 nt, Artificial Sequence
  Description of Artificial Sequence: Synthetic oligonucleotide
aggguuuauucucaagcau

SEQ ID NO: 3149892 - RNA, 19 nt, Artificial Sequence
  Description of Artificial Sequence: Synthetic oligonucleotide
ucaagcaucuaaggauuac

SEQ ID NO: 3149893 - RNA, 19 nt, Artificial Sequence
  Description of Artificial Sequence: Synthetic oligonucleotide
agggagaggggcaacacug

SEQ ID NO: 3149894 - RNA, 19 nt, Artificial Sequence
  Description of Artificial Sequence: Synthetic oligonucleotide
gaggaggaguccauaggcc

SEQ ID NO: 3149895 - RNA, 19 nt, Artificial Sequence
  Description of Artificial Sequence: Synthetic oligonucleotide
acaaacaaggguauuuguu

SEQ ID NO: 3149896 - RNA, 19 nt, Artificial Sequence
  Description of Artificial Sequence: Synthetic oligonucleotide
gguaggaccaggccacucc

SEQ ID NO: 3149897 - RNA, 19 nt, Artificial Sequence
  Description of Artificial Sequence: Synthetic oligonucleotide
auaggccagaggguaggac

SEQ ID NO: 3149898 - RNA, 19 nt, Artificial Sequence
  Description of Artificial Sequence: Synthetic oligonucleotide
gagaggggcaacacuggug

SEQ ID NO: 3149899 - RNA, 19 nt, Artificial Sequence
  Description of Artificial Sequence: Synthetic oligonucleotide
uaggaccaggccacuccag

SEQ ID NO: 3149900 - RNA, 19 nt, Artificial Sequence
  Description of Artificial Sequence: Synthetic oligonucleotide
ggaaggguuuauucucaag

SEQ ID NO: 3149901 - RNA, 19 nt, Artificial Sequence
  Description of Artificial Sequence: Synthetic oligonucleotide
caagcaucuaaggauuaca

SEQ ID NO: 3149902 - RNA, 19 nt, Artificial Sequence
  Description of Artificial Sequence: Synthetic oligonucleotide
ggguuuauucucaagcauc

SEQ ID NO: 3149903 - RNA, 19 nt, Artificial Sequence
  Description of Artificial Sequence: Synthetic oligonucleotide
caaggguauuuguuuaaaa

SEQ ID NO: 3149904 - RNA, 19 nt, Artificial Sequence
  Description of Artificial Sequence: Synthetic oligonucleotide
gaccaggccacuccagguc

SEQ ID NO: 3149905 - RNA, 19 nt, Artificial Sequence
  Description of Artificial Sequence: Synthetic oligonucleotide
acaaggguauuuguuuaaa

SEQ ID NO: 3149906 - RNA, 19 nt, Artificial Sequence
  Description of Artificial Sequence: Synthetic oligonucleotide
caacacugguggccggagg

SEQ ID NO: 3149907 - RNA, 19 nt, Artificial Sequence
  Description of Artificial Sequence: Synthetic oligonucleotide
guaggaccaggccacucca

SEQ ID NO: 3149908 - RNA, 19 nt, Artificial Sequence
  Description of Artificial Sequence: Synthetic oligonucleotide
agggaaggguuuauucuca

SEQ ID NO: 3149909 - RNA, 19 nt, Artificial Sequence
  Description of Artificial Sequence: Synthetic oligonucleotide
ggggcaacacugguggccg

SEQ ID NO: 3149910 - RNA, 19 nt, Artificial Sequence
  Description of Artificial Sequence: Synthetic oligonucleotide
aguccauaggccagagggu

SEQ ID NO: 3149911 - RNA, 19 nt, Artificial Sequence
  Description of Artificial Sequence: Synthetic oligonucleotide
gguuuauucucaagcaucu

SEQ ID NO: 3149912 - RNA, 19 nt, Artificial Sequence
  Description of Artificial Sequence: Synthetic oligonucleotide
cagaagaaaagggaagggu

SEQ ID NO: 3149913 - RNA, 19 nt, Artificial Sequence
  Description of Artificial Sequence: Synthetic oligonucleotide
ggaggaguccauaggccag

SEQ ID NO: 3149914 - RNA, 19 nt, Artificial Sequence
  Description of Artificial Sequence: Synthetic oligonucleotide
gaggggcaacacugguggc

SEQ ID NO: 3149915 - RNA, 19 nt, Artificial Sequence
  Description of Artificial Sequence: Synthetic oligonucleotide
ccagaggguaggaccaggc

SEQ ID NO: 3149916 - RNA, 19 nt, Artificial Sequence
  Description of Artificial Sequence: Synthetic oligonucleotide
ggaguccauaggccagagg

SEQ ID NO: 3149917 - RNA, 19 nt, Artificial Sequence
  Description of Artificial Sequence: Synthetic oligonucleotide
gaggaguccauaggccaga

SEQ ID NO: 3149918 - RNA, 19 nt, Artificial Sequence
  Description of Artificial Sequence: Synthetic oligonucleotide
guccauaggccagagggua

SEQ ID NO: 3149919 - RNA, 19 nt, Artificial Sequence
  Description of Artificial Sequence: Synthetic oligonucleotide
uggccggaggaggagucca

SEQ ID NO: 3149920 - RNA, 19 nt, Artificial Sequence
  Description of Artificial Sequence: Synthetic oligonucleotide
aggaguccauaggccagag

SEQ ID NO: 3149921 - RNA, 19 nt, Artificial Sequence
  Description of Artificial Sequence: Synthetic oligonucleotide
gggagaggggcaacacugg

SEQ ID NO: 3149922 - RNA, 19 nt, Artificial Sequence
  Description of Artificial Sequence: Synthetic oligonucleotide
cucaagcaucuaaggauua

SEQ ID NO: 3149923 - RNA, 19 nt, Artificial Sequence
  Description of Artificial Sequence: Synthetic oligonucleotide
acugguggccggaggagga

SEQ ID NO: 3149924 - RNA, 19 nt, Artificial Sequence
  Description of Artificial Sequence: Synthetic oligonucleotide
ccggaggaggaguccauag

SEQ ID NO: 3149925 - RNA, 19 nt, Artificial Sequence
  Description of Artificial Sequence: Synthetic oligonucleotide
ccauaggccagaggguagg

SEQ ID NO: 3149926 - RNA, 19 nt, Artificial Sequence
  Description of Artificial Sequence: Synthetic oligonucleotide
gauuacaaacaaggguauu

SEQ ID NO: 3149927 - RNA, 19 nt, Artificial Sequence
  Description of Artificial Sequence: Synthetic oligonucleotide
guuuauucucaagcaucua

SEQ ID NO: 3149928 - RNA, 19 nt, Artificial Sequence
  Description of Artificial Sequence: Synthetic oligonucleotide
ugguggccggaggaggagu

SEQ ID NO: 3149929 - RNA, 19 nt, Artificial Sequence
  Description of Artificial Sequence: Synthetic oligonucleotide
cggaggaggaguccauagg

SEQ ID NO: 3149930 - RNA, 19 nt, Artificial Sequence
  Description of Artificial Sequence: Synthetic oligonucleotide
gccagaggguaggaccagg

SEQ ID NO: 3149931 - RNA, 19 nt, Artificial Sequence
  Description of Artificial Sequence: Synthetic oligonucleotide
gggaaggguuuauucucaa

SEQ ID NO: 3149932 - RNA, 19 nt, Artificial Sequence
  Description of Artificial Sequence: Synthetic oligonucleotide
gcaacacugguggccggag

SEQ ID NO: 3149933 - RNA, 19 nt, Artificial Sequence
  Description of Artificial Sequence: Synthetic oligonucleotide
guggccggaggaggagucc

SEQ ID NO: 3149934 - RNA, 19 nt, Artificial Sequence
  Description of Artificial Sequence: Synthetic oligonucleotide
cauaggccagaggguagga

SEQ ID NO: 3149935 - RNA, 19 nt, Artificial Sequence
  Description of Artificial Sequence: Synthetic oligonucleotide
ggagaggggcaacacuggu

SEQ ID NO: 3149936 - RNA, 19 nt, Artificial Sequence
  Description of Artificial Sequence: Synthetic oligonucleotide
gggcaacacugguggccgg

SEQ ID NO: 3149937 - RNA, 19 nt, Artificial Sequence
  Description of Artificial Sequence: Synthetic oligonucleotide
ccaggccacuccagguccc

SEQ ID NO: 3149938 - RNA, 19 nt, Artificial Sequence
  Description of Artificial Sequence: Synthetic oligonucleotide
aggguaggaccaggccacu

SEQ ID NO: 3149939 - RNA, 19 nt, Artificial Sequence
  Description of Artificial Sequence: Synthetic oligonucleotide
ggaccaggccacuccaggu

SEQ ID NO: 3149940 - RNA, 19 nt, Artificial Sequence
  Description of Artificial Sequence: Synthetic oligonucleotide
gguggccggaggaggaguc

SEQ ID NO: 3149941 - RNA, 19 nt, Artificial Sequence
  Description of Artificial Sequence: Synthetic oligonucleotide
ggcaacacugguggccgga

SEQ ID NO: 3149942 - RNA, 19 nt, Artificial Sequence
  Description of Artificial Sequence: Synthetic oligonucleotide
ggguaggaccaggccacuc

SEQ ID NO: 3149943 - RNA, 19 nt, Artificial Sequence
  Description of Artificial Sequence: Synthetic oligonucleotide
aggccacuccaggucccua

SEQ ID NO: 3149944 - RNA, 19 nt, Artificial Sequence
  Description of Artificial Sequence: Synthetic oligonucleotide
gccggaggaggaguccaua

SEQ ID NO: 3149945 - RNA, 19 nt, Artificial Sequence
  Description of Artificial Sequence: Synthetic oligonucleotide
caggccacuccaggucccu

SEQ ID NO: 3149946 - RNA, 19 nt, Artificial Sequence
  Description of Artificial Sequence: Synthetic oligonucleotide
ggccggaggaggaguccau

SEQ ID NO: 3149947 - RNA, 19 nt, Artificial Sequence
  Description of Artificial Sequence: Synthetic oligonucleotide
uuugguggugaccucaucg

SEQ ID NO: 3149948 - RNA, 19 nt, Artificial Sequence
  Description of Artificial Sequence: Synthetic oligonucleotide
cucucucuagcuuuggugg

SEQ ID NO: 3149949 - RNA, 19 nt, Artificial Sequence
  Description of Artificial Sequence: Synthetic oligonucleotide
ucaaagccagcccuggucu

SEQ ID NO: 3149950 - RNA, 19 nt, Artificial Sequence
  Description of Artificial Sequence: Synthetic oligonucleotide
ucucucucuagcuuuggug

SEQ ID NO: 3149951 - RNA, 19 nt, Artificial Sequence
  Description of Artificial Sequence: Synthetic oligonucleotide
ucuacagacucucucucuc

SEQ ID NO: 3149952 - RNA, 19 nt, Artificial Sequence
  Description of Artificial Sequence: Synthetic oligonucleotide
uucaaagccagcccugguc

SEQ ID NO: 3149953 - RNA, 19 nt, Artificial Sequence
  Description of Artificial Sequence: Synthetic oligonucleotide
uggucuacagacucucucu

SEQ ID NO: 3149954 - RNA, 19 nt, Artificial Sequence
  Description of Artificial Sequence: Synthetic oligonucleotide
agcccuggucuacagacuc

SEQ ID NO: 3149955 - RNA, 19 nt, Artificial Sequence
  Description of Artificial Sequence: Synthetic oligonucleotide
aaagccagcccuggucuac

SEQ ID NO: 3149956 - RNA, 19 nt, Artificial Sequence
  Description of Artificial Sequence: Synthetic oligonucleotide
ucuagcuuugguggugacc

SEQ ID NO: 3149957 - RNA, 19 nt, Artificial Sequence
  Description of Artificial Sequence: Synthetic oligonucleotide
ucucucucucucucuagcu

SEQ ID NO: 3149958 - RNA, 19 nt, Artificial Sequence
  Description of Artificial Sequence: Synthetic oligonucleotide
uacagacucucucucucuc

SEQ ID NO: 3149959 - RNA, 19 nt, Artificial Sequence
  Description of Artificial Sequence: Synthetic oligonucleotide
cucucucucucucucuagc

SEQ ID NO: 3149960 - RNA, 19 nt, Artificial Sequence
  Description of Artificial Sequence: Synthetic oligonucleotide
ucucucucucucuagcuuu

SEQ ID NO: 3149961 - RNA, 19 nt, Artificial Sequence
  Description of Artificial Sequence: Synthetic oligonucleotide
ucucucucucucucucuag

SEQ ID NO: 3149962 - RNA, 19 nt, Artificial Sequence
  Description of Artificial Sequence: Synthetic oligonucleotide
cuggucuacagacucucuc

SEQ ID NO: 3149963 - RNA, 19 nt, Artificial Sequence
  Description of Artificial Sequence: Synthetic oligonucleotide
acagacucucucucucucu

SEQ ID NO: 3149964 - RNA, 19 nt, Artificial Sequence
  Description of Artificial Sequence: Synthetic oligonucleotide
gacucucucucucucucuc

SEQ ID NO: 3149965 - RNA, 19 nt, Artificial Sequence
  Description of Artificial Sequence: Synthetic oligonucleotide
ucucuagcuuuggugguga

SEQ ID NO: 3149966 - RNA, 19 nt, Artificial Sequence
  Description of Artificial Sequence: Synthetic oligonucleotide
cuagcuuugguggugaccu

SEQ ID NO: 3149967 - RNA, 19 nt, Artificial Sequence
  Description of Artificial Sequence: Synthetic oligonucleotide
ucucucucucucucucucu

SEQ ID NO: 3149968 - RNA, 19 nt, Artificial Sequence
  Description of Artificial Sequence: Synthetic oligonucleotide
cagacucucucucucucuc

SEQ ID NO: 3149969 - RNA, 19 nt, Artificial Sequence
  Description of Artificial Sequence: Synthetic oligonucleotide
cucucucucucuagcuuug

SEQ ID NO: 3149970 - RNA, 19 nt, Artificial Sequence
  Description of Artificial Sequence: Synthetic oligonucleotide
cucucucucucucucucuc

SEQ ID NO: 3149971 - RNA, 19 nt, Artificial Sequence
  Description of Artificial Sequence: Synthetic oligonucleotide
ccagcccuggucuacagac

SEQ ID NO: 3149972 - RNA, 19 nt, Artificial Sequence
  Description of Artificial Sequence: Synthetic oligonucleotide
agacucucucucucucucu

SEQ ID NO: 3149973 - RNA, 19 nt, Artificial Sequence
  Description of Artificial Sequence: Synthetic oligonucleotide
agcuuugguggugaccuca

SEQ ID NO: 3149974 - RNA, 19 nt, Artificial Sequence
  Description of Artificial Sequence: Synthetic oligonucleotide
acucucucucucucucucu

SEQ ID NO: 3149975 - RNA, 19 nt, Artificial Sequence
  Description of Artificial Sequence: Synthetic oligonucleotide
ggucuacagacucucucuc

SEQ ID NO: 3149976 - RNA, 19 nt, Artificial Sequence
  Description of Artificial Sequence: Synthetic oligonucleotide
cuuugguggugaccucauc

SEQ ID NO: 3149977 - RNA, 19 nt, Artificial Sequence
  Description of Artificial Sequence: Synthetic oligonucleotide
aagccagcccuggucuaca

SEQ ID NO: 3149978 - RNA, 19 nt, Artificial Sequence
  Description of Artificial Sequence: Synthetic oligonucleotide
agccagcccuggucuacag

SEQ ID NO: 3149979 - RNA, 19 nt, Artificial Sequence
  Description of Artificial Sequence: Synthetic oligonucleotide
cucuagcuuugguggugac

SEQ ID NO: 3149980 - RNA, 19 nt, Artificial Sequence
  Description of Artificial Sequence: Synthetic oligonucleotide
cuacagacucucucucucu

SEQ ID NO: 3149981 - RNA, 19 nt, Artificial Sequence
  Description of Artificial Sequence: Synthetic oligonucleotide
cucucucucucucucucua

SEQ ID NO: 3149982 - RNA, 19 nt, Artificial Sequence
  Description of Artificial Sequence: Synthetic oligonucleotide
uagcuuugguggugaccuc

SEQ ID NO: 3149983 - RNA, 19 nt, Artificial Sequence
  Description of Artificial Sequence: Synthetic oligonucleotide
guucaaagccagcccuggu

SEQ ID NO: 3149984 - RNA, 19 nt, Artificial Sequence
  Description of Artificial Sequence: Synthetic oligonucleotide
caaagccagcccuggucua

SEQ ID NO: 3149985 - RNA, 19 nt, Artificial Sequence
  Description of Artificial Sequence: Synthetic oligonucleotide
cucucucucuagcuuuggu

SEQ ID NO: 3149986 - RNA, 19 nt, Artificial Sequence
  Description of Artificial Sequence: Synthetic oligonucleotide
cucucucucucucuagcuu

SEQ ID NO: 3149987 - RNA, 19 nt, Artificial Sequence
  Description of Artificial Sequence: Synthetic oligonucleotide
cccuggucuacagacucuc

SEQ ID NO: 3149988 - RNA, 19 nt, Artificial Sequence
  Description of Artificial Sequence: Synthetic oligonucleotide
ccuggucuacagacucucu

SEQ ID NO: 3149989 - RNA, 19 nt, Artificial Sequence
  Description of Artificial Sequence: Synthetic oligonucleotide
gcuuugguggugaccucau

SEQ ID NO: 3149990 - RNA, 19 nt, Artificial Sequence
  Description of Artificial Sequence: Synthetic oligonucleotide
agaacuauauagagaaacc

SEQ ID NO: 3149991 - RNA, 19 nt, Artificial Sequence
  Description of Artificial Sequence: Synthetic oligonucleotide
gaacuauauagagaaaccc

SEQ ID NO: 3149992 - RNA, 19 nt, Artificial Sequence
  Description of Artificial Sequence: Synthetic oligonucleotide
aacuauauagagaaacccu

SEQ ID NO: 3149993 - RNA, 19 nt, Artificial Sequence
  Description of Artificial Sequence: Synthetic oligonucleotide
auauagagaaacccugucu

SEQ ID NO: 3149994 - RNA, 19 nt, Artificial Sequence
  Description of Artificial Sequence: Synthetic oligonucleotide
cagaacuauauagagaaac

SEQ ID NO: 3149995 - RNA, 19 nt, Artificial Sequence
  Description of Artificial Sequence: Synthetic oligonucleotide
uauauagagaaacccuguc

SEQ ID NO: 3149996 - RNA, 19 nt, Artificial Sequence
  Description of Artificial Sequence: Synthetic oligonucleotide
acuauauagagaaacccug

SEQ ID NO: 3149997 - RNA, 19 nt, Artificial Sequence
  Description of Artificial Sequence: Synthetic oligonucleotide
acgcuuuuaaucccagcac

SEQ ID NO: 3149998 - RNA, 19 nt, Artificial Sequence
  Description of Artificial Sequence: Synthetic oligonucleotide
cuacagagggaguuccagg

SEQ ID NO: 3149999 - RNA, 19 nt, Artificial Sequence
  Description of Artificial Sequence: Synthetic oligonucleotide
cacgcuuuuaaucccagca

SEQ ID NO: 3150000 - RNA, 19 nt, Artificial Sequence
  Description of Artificial Sequence: Synthetic oligonucleotide
cuauauagagaaacccugu

SEQ ID NO: 3150001 - RNA, 19 nt, Artificial Sequence
  Description of Artificial Sequence: Synthetic oligonucleotide
cgcuuuuaaucccagcacu

SEQ ID NO: 3150002 - RNA, 19 nt, Artificial Sequence
  Description of Artificial Sequence: Synthetic oligonucleotide
cugucuguaauuaauuaac

SEQ ID NO: 3150003 - RNA, 19 nt, Artificial Sequence
  Description of Artificial Sequence: Synthetic oligonucleotide
ugucuguaauuaauuaacu

SEQ ID NO: 3150004 - RNA, 19 nt, Artificial Sequence
  Description of Artificial Sequence: Synthetic oligonucleotide
aacugucuguaauuaauua

SEQ ID NO: 3150005 - RNA, 19 nt, Artificial Sequence
  Description of Artificial Sequence: Synthetic oligonucleotide
acugucuguaauuaauuaa

SEQ ID NO: 3150006 - RNA, 19 nt, Artificial Sequence
  Description of Artificial Sequence: Synthetic oligonucleotide
acaacugucuguaauuaau

SEQ ID NO: 3150007 - RNA, 19 nt, Artificial Sequence
  Description of Artificial Sequence: Synthetic oligonucleotide
ucacaacugucuguaauua

SEQ ID NO: 3150008 - RNA, 19 nt, Artificial Sequence
  Description of Artificial Sequence: Synthetic oligonucleotide
gucuguaauuaauuaacuu

SEQ ID NO: 3150009 - RNA, 19 nt, Artificial Sequence
  Description of Artificial Sequence: Synthetic oligonucleotide
cacaacugucuguaauuaa

SEQ ID NO: 3150010 - RNA, 19 nt, Artificial Sequence
  Description of Artificial Sequence: Synthetic oligonucleotide
caacugucuguaauuaauu

SEQ ID NO: 3150011 - RNA, 19 nt, Artificial Sequence
  Description of Artificial Sequence: Synthetic oligonucleotide
aaacaaaacaaaacaaaac

SEQ ID NO: 3150012 - RNA, 19 nt, Artificial Sequence
  Description of Artificial Sequence: Synthetic oligonucleotide
aaaacaaaacaaaacaaaa

SEQ ID NO: 3150013 - RNA, 19 nt, Artificial Sequence
  Description of Artificial Sequence: Synthetic oligonucleotide
caaaacaaaacaaaacaaa

SEQ ID NO: 3150014 - RNA, 19 nt, Artificial Sequence
  Description of Artificial Sequence: Synthetic oligonucleotide
uggucuccagagccgagug

SEQ ID NO: 3150015 - RNA, 19 nt, Artificial Sequence
  Description of Artificial Sequence: Synthetic oligonucleotide
gucuccagagccgagugcc

SEQ ID NO: 3150016 - RNA, 19 nt, Artificial Sequence
  Description of Artificial Sequence: Synthetic oligonucleotide
uccagagccgagugccagg

SEQ ID NO: 3150017 - RNA, 19 nt, Artificial Sequence
  Description of Artificial Sequence: Synthetic oligonucleotide
agagccgagugccaggaua

SEQ ID NO: 3150018 - RNA, 19 nt, Artificial Sequence
  Description of Artificial Sequence: Synthetic oligonucleotide
ucuccagagccgagugcca

SEQ ID NO: 3150019 - RNA, 19 nt, Artificial Sequence
  Description of Artificial Sequence: Synthetic oligonucleotide
cuccagagccgagugccag

SEQ ID NO: 3150020 - RNA, 19 nt, Artificial Sequence
  Description of Artificial Sequence: Synthetic oligonucleotide
ggucuccagagccgagugc

SEQ ID NO: 3150021 - RNA, 19 nt, Artificial Sequence
  Description of Artificial Sequence: Synthetic oligonucleotide
agccgagugccaggauagg

SEQ ID NO: 3150022 - RNA, 19 nt, Artificial Sequence
  Description of Artificial Sequence: Synthetic oligonucleotide
cuggucuccagagccgagu

SEQ ID NO: 3150023 - RNA, 19 nt, Artificial Sequence
  Description of Artificial Sequence: Synthetic oligonucleotide
ccagagccgagugccagga

SEQ ID NO: 3150024 - RNA, 19 nt, Artificial Sequence
  Description of Artificial Sequence: Synthetic oligonucleotide
uuuacuuggaccucugccu

SEQ ID NO: 3150025 - RNA, 19 nt, Artificial Sequence
  Description of Artificial Sequence: Synthetic oligonucleotide
cuccacuucgcucucaugg

SEQ ID NO: 3150026 - RNA, 19 nt, Artificial Sequence
  Description of Artificial Sequence: Synthetic oligonucleotide
ucucuugcgcuucagccug

SEQ ID NO: 3150027 - RNA, 19 nt, Artificial Sequence
  Description of Artificial Sequence: Synthetic oligonucleotide
ucugccucaucuuucuucu

SEQ ID NO: 3150028 - RNA, 19 nt, Artificial Sequence
  Description of Artificial Sequence: Synthetic oligonucleotide
uugcgcuucagccugcgca

SEQ ID NO: 3150029 - RNA, 19 nt, Artificial Sequence
  Description of Artificial Sequence: Synthetic oligonucleotide
agucccaaggaagauggcg

SEQ ID NO: 3150030 - RNA, 19 nt, Artificial Sequence
  Description of Artificial Sequence: Synthetic oligonucleotide
uggcgcaggagucccaagg

SEQ ID NO: 3150031 - RNA, 19 nt, Artificial Sequence
  Description of Artificial Sequence: Synthetic oligonucleotide
caucuuucuucucuugcgc

SEQ ID NO: 3150032 - RNA, 19 nt, Artificial Sequence
  Description of Artificial Sequence: Synthetic oligonucleotide
ugccucaucuuucuucucu

SEQ ID NO: 3150033 - RNA, 19 nt, Artificial Sequence
  Description of Artificial Sequence: Synthetic oligonucleotide
uuggaccucugccucaucu

SEQ ID NO: 3150034 - RNA, 19 nt, Artificial Sequence
  Description of Artificial Sequence: Synthetic oligonucleotide
uuacuuggaccucugccuc

SEQ ID NO: 3150035 - RNA, 19 nt, Artificial Sequence
  Description of Artificial Sequence: Synthetic oligonucleotide
ggagucccaaggaagaugg

SEQ ID NO: 3150036 - RNA, 19 nt, Artificial Sequence
  Description of Artificial Sequence: Synthetic oligonucleotide
uccacuucgcucucauggc

SEQ ID NO: 3150037 - RNA, 19 nt, Artificial Sequence
  Description of Artificial Sequence: Synthetic oligonucleotide
cugcgcauacgcuucuucc

SEQ ID NO: 3150038 - RNA, 19 nt, Artificial Sequence
  Description of Artificial Sequence: Synthetic oligonucleotide
ugcgcauacgcuucuuccu

SEQ ID NO: 3150039 - RNA, 19 nt, Artificial Sequence
  Description of Artificial Sequence: Synthetic oligonucleotide
auacgcuucuuccuccacu

SEQ ID NO: 3150040 - RNA, 19 nt, Artificial Sequence
  Description of Artificial Sequence: Synthetic oligonucleotide
uucgcucucauggcgcagg

SEQ ID NO: 3150041 - RNA, 19 nt, Artificial Sequence
  Description of Artificial Sequence: Synthetic oligonucleotide
ucagccugcgcauacgcuu

SEQ ID NO: 3150042 - RNA, 19 nt, Artificial Sequence
  Description of Artificial Sequence: Synthetic oligonucleotide
gucccaaggaagauggcgc

SEQ ID NO: 3150043 - RNA, 19 nt, Artificial Sequence
  Description of Artificial Sequence: Synthetic oligonucleotide
cacuucgcucucauggcgc

SEQ ID NO: 3150044 - RNA, 19 nt, Artificial Sequence
  Description of Artificial Sequence: Synthetic oligonucleotide
cuucagccugcgcauacgc

SEQ ID NO: 3150045 - RNA, 19 nt, Artificial Sequence
  Description of Artificial Sequence: Synthetic oligonucleotide
ucuuucuucucuugcgcuu

SEQ ID NO: 3150046 - RNA, 19 nt, Artificial Sequence
  Description of Artificial Sequence: Synthetic oligonucleotide
cacccgcagguuuacuugg

SEQ ID NO: 3150047 - RNA, 19 nt, Artificial Sequence
  Description of Artificial Sequence: Synthetic oligonucleotide
uccucggccucgcugggug

SEQ ID NO: 3150048 - RNA, 19 nt, Artificial Sequence
  Description of Artificial Sequence: Synthetic oligonucleotide
uacgcuucuuccuccacuu

SEQ ID NO: 3150049 - RNA, 19 nt, Artificial Sequence
  Description of Artificial Sequence: Synthetic oligonucleotide
ucccaaggaagauggcgcu

SEQ ID NO: 3150050 - RNA, 19 nt, Artificial Sequence
  Description of Artificial Sequence: Synthetic oligonucleotide
uucagccugcgcauacgcu

SEQ ID NO: 3150051 - RNA, 19 nt, Artificial Sequence
  Description of Artificial Sequence: Synthetic oligonucleotide
uacuuggaccucugccuca

SEQ ID NO: 3150052 - RNA, 19 nt, Artificial Sequence
  Description of Artificial Sequence: Synthetic oligonucleotide
aggagucccaaggaagaug

SEQ ID NO: 3150053 - RNA, 19 nt, Artificial Sequence
  Description of Artificial Sequence: Synthetic oligonucleotide
ugcgcuucagccugcgcau

SEQ ID NO: 3150054 - RNA, 19 nt, Artificial Sequence
  Description of Artificial Sequence: Synthetic oligonucleotide
ugcacccgcagguuuacuu

SEQ ID NO: 3150055 - RNA, 19 nt, Artificial Sequence
  Description of Artificial Sequence: Synthetic oligonucleotide
acuucgcucucauggcgca

SEQ ID NO: 3150056 - RNA, 19 nt, Artificial Sequence
  Description of Artificial Sequence: Synthetic oligonucleotide
ucuugcgcuucagccugcg

SEQ ID NO: 3150057 - RNA, 19 nt, Artificial Sequence
  Description of Artificial Sequence: Synthetic oligonucleotide
uccuccacuucgcucucau

SEQ ID NO: 3150058 - RNA, 19 nt, Artificial Sequence
  Description of Artificial Sequence: Synthetic oligonucleotide
gguuuacuuggaccucugc

SEQ ID NO: 3150059 - RNA, 19 nt, Artificial Sequence
  Description of Artificial Sequence: Synthetic oligonucleotide
cauacgcuucuuccuccac

SEQ ID NO: 3150060 - RNA, 19 nt, Artificial Sequence
  Description of Artificial Sequence: Synthetic oligonucleotide
uggaccucugccucaucuu

SEQ ID NO: 3150061 - RNA, 19 nt, Artificial Sequence
  Description of Artificial Sequence: Synthetic oligonucleotide
cgcuucuuccuccacuucg

SEQ ID NO: 3150062 - RNA, 19 nt, Artificial Sequence
  Description of Artificial Sequence: Synthetic oligonucleotide
gcacccgcagguuuacuug

SEQ ID NO: 3150063 - RNA, 19 nt, Artificial Sequence
  Description of Artificial Sequence: Synthetic oligonucleotide
cagccugcgcauacgcuuc

SEQ ID NO: 3150064 - RNA, 19 nt, Artificial Sequence
  Description of Artificial Sequence: Synthetic oligonucleotide
ugggugcacccgcagguuu

SEQ ID NO: 3150065 - RNA, 19 nt, Artificial Sequence
  Description of Artificial Sequence: Synthetic oligonucleotide
ccgcagguuuacuuggacc

SEQ ID NO: 3150066 - RNA, 19 nt, Artificial Sequence
  Description of Artificial Sequence: Synthetic oligonucleotide
ucgcucucauggcgcagga

SEQ ID NO: 3150067 - RNA, 19 nt, Artificial Sequence
  Description of Artificial Sequence: Synthetic oligonucleotide
ccacuucgcucucauggcg

SEQ ID NO: 3150068 - RNA, 19 nt, Artificial Sequence
  Description of Artificial Sequence: Synthetic oligonucleotide
ucauggcgcaggaguccca

SEQ ID NO: 3150069 - RNA, 19 nt, Artificial Sequence
  Description of Artificial Sequence: Synthetic oligonucleotide
ucgcugggugcacccgcag

SEQ ID NO: 3150070 - RNA, 19 nt, Artificial Sequence
  Description of Artificial Sequence: Synthetic oligonucleotide
gaccucugccucaucuuuc

SEQ ID NO: 3150071 - RNA, 19 nt, Artificial Sequence
  Description of Artificial Sequence: Synthetic oligonucleotide
gcucucauggcgcaggagu

SEQ ID NO: 3150072 - RNA, 19 nt, Artificial Sequence
  Description of Artificial Sequence: Synthetic oligonucleotide
auggcgcaggagucccaag

SEQ ID NO: 3150073 - RNA, 19 nt, Artificial Sequence
  Description of Artificial Sequence: Synthetic oligonucleotide
cuugcgcuucagccugcgc

SEQ ID NO: 3150074 - RNA, 19 nt, Artificial Sequence
  Description of Artificial Sequence: Synthetic oligonucleotide
agguuuacuuggaccucug

SEQ ID NO: 3150075 - RNA, 19 nt, Artificial Sequence
  Description of Artificial Sequence: Synthetic oligonucleotide
acuuggaccucugccucau

SEQ ID NO: 3150076 - RNA, 19 nt, Artificial Sequence
  Description of Artificial Sequence: Synthetic oligonucleotide
gagucccaaggaagauggc

SEQ ID NO: 3150077 - RNA, 19 nt, Artificial Sequence
  Description of Artificial Sequence: Synthetic oligonucleotide
gcuucagccugcgcauacg

SEQ ID NO: 3150078 - RNA, 19 nt, Artificial Sequence
  Description of Artificial Sequence: Synthetic oligonucleotide
gcgcauacgcuucuuccuc

SEQ ID NO: 3150079 - RNA, 19 nt, Artificial Sequence
  Description of Artificial Sequence: Synthetic oligonucleotide
cgcuccucggccucgcugg

SEQ ID NO: 3150080 - RNA, 19 nt, Artificial Sequence
  Description of Artificial Sequence: Synthetic oligonucleotide
agccugcgcauacgcuucu

SEQ ID NO: 3150081 - RNA, 19 nt, Artificial Sequence
  Description of Artificial Sequence: Synthetic oligonucleotide
cuucgcucucauggcgcag

SEQ ID NO: 3150082 - RNA, 19 nt, Artificial Sequence
  Description of Artificial Sequence: Synthetic oligonucleotide
cgcauacgcuucuuccucc

SEQ ID NO: 3150083 - RNA, 19 nt, Artificial Sequence
  Description of Artificial Sequence: Synthetic oligonucleotide
gcauacgcuucuuccucca

SEQ ID NO: 3150084 - RNA, 19 nt, Artificial Sequence
  Description of Artificial Sequence: Synthetic oligonucleotide
cucgcugggugcacccgca

SEQ ID NO: 3150085 - RNA, 19 nt, Artificial Sequence
  Description of Artificial Sequence: Synthetic oligonucleotide
cagguuuacuuggaccucu

SEQ ID NO: 3150086 - RNA, 19 nt, Artificial Sequence
  Description of Artificial Sequence: Synthetic oligonucleotide
cgcagguuuacuuggaccu

SEQ ID NO: 3150087 - RNA, 19 nt, Artificial Sequence
  Description of Artificial Sequence: Synthetic oligonucleotide
cuuggaccucugccucauc

SEQ ID NO: 3150088 - RNA, 19 nt, Artificial Sequence
  Description of Artificial Sequence: Synthetic oligonucleotide
gcugggugcacccgcaggu

SEQ ID NO: 3150089 - RNA, 19 nt, Artificial Sequence
  Description of Artificial Sequence: Synthetic oligonucleotide
ccugcgcauacgcuucuuc

SEQ ID NO: 3150090 - RNA, 19 nt, Artificial Sequence
  Description of Artificial Sequence: Synthetic oligonucleotide
uuccgcuccucggccucgc

SEQ ID NO: 3150091 - RNA, 19 nt, Artificial Sequence
  Description of Artificial Sequence: Synthetic oligonucleotide
uccgcuccucggccucgcu

SEQ ID NO: 3150092 - RNA, 19 nt, Artificial Sequence
  Description of Artificial Sequence: Synthetic oligonucleotide
cauggcgcaggagucccaa

SEQ ID NO: 3150093 - RNA, 19 nt, Artificial Sequence
  Description of Artificial Sequence: Synthetic oligonucleotide
ccucgcugggugcacccgc

SEQ ID NO: 3150094 - RNA, 19 nt, Artificial Sequence
  Description of Artificial Sequence: Synthetic oligonucleotide
cccgcagguuuacuuggac

SEQ ID NO: 3150095 - RNA, 19 nt, Artificial Sequence
  Description of Artificial Sequence: Synthetic oligonucleotide
gcagguuuacuuggaccuc

SEQ ID NO: 3150096 - RNA, 19 nt, Artificial Sequence
  Description of Artificial Sequence: Synthetic oligonucleotide
acccgcagguuuacuugga

SEQ ID NO: 3150097 - RNA, 19 nt, Artificial Sequence
  Description of Artificial Sequence: Synthetic oligonucleotide
ggugcacccgcagguuuac

SEQ ID NO: 3150098 - RNA, 19 nt, Artificial Sequence
  Description of Artificial Sequence: Synthetic oligonucleotide
gcuccucggccucgcuggg

SEQ ID NO: 3150099 - RNA, 19 nt, Artificial Sequence
  Description of Artificial Sequence: Synthetic oligonucleotide
ggaccucugccucaucuuu

SEQ ID NO: 3150100 - RNA, 19 nt, Artificial Sequence
  Description of Artificial Sequence: Synthetic oligonucleotide
ucggccucgcugggugcac

SEQ ID NO: 3150101 - RNA, 19 nt, Artificial Sequence
  Description of Artificial Sequence: Synthetic oligonucleotide
cucggccucgcugggugca

SEQ ID NO: 3150102 - RNA, 19 nt, Artificial Sequence
  Description of Artificial Sequence: Synthetic oligonucleotide
ccuccacuucgcucucaug

SEQ ID NO: 3150103 - RNA, 19 nt, Artificial Sequence
  Description of Artificial Sequence: Synthetic oligonucleotide
cgcugggugcacccgcagg

SEQ ID NO: 3150104 - RNA, 19 nt, Artificial Sequence
  Description of Artificial Sequence: Synthetic oligonucleotide
cgcuucagccugcgcauac

SEQ ID NO: 3150105 - RNA, 19 nt, Artificial Sequence
  Description of Artificial Sequence: Synthetic oligonucleotide
gccucgcugggugcacccg

SEQ ID NO: 3150106 - RNA, 19 nt, Artificial Sequence
  Description of Artificial Sequence: Synthetic oligonucleotide
ccucggccucgcugggugc

SEQ ID NO: 3150107 - RNA, 19 nt, Artificial Sequence
  Description of Artificial Sequence: Synthetic oligonucleotide
ccgcuccucggccucgcug

SEQ ID NO: 3150108 - RNA, 19 nt, Artificial Sequence
  Description of Artificial Sequence: Synthetic oligonucleotide
gggugcacccgcagguuua

SEQ ID NO: 3150109 - RNA, 19 nt, Artificial Sequence
  Description of Artificial Sequence: Synthetic oligonucleotide
cgcucucauggcgcaggag

SEQ ID NO: 3150110 - RNA, 19 nt, Artificial Sequence
  Description of Artificial Sequence: Synthetic oligonucleotide
cugggugcacccgcagguu

SEQ ID NO: 3150111 - RNA, 19 nt, Artificial Sequence
  Description of Artificial Sequence: Synthetic oligonucleotide
gugcacccgcagguuuacu

SEQ ID NO: 3150112 - RNA, 19 nt, Artificial Sequence
  Description of Artificial Sequence: Synthetic oligonucleotide
cuccucggccucgcugggu

SEQ ID NO: 3150113 - RNA, 19 nt, Artificial Sequence
  Description of Artificial Sequence: Synthetic oligonucleotide
cggccucgcugggugcacc

SEQ ID NO: 3150114 - RNA, 19 nt, Artificial Sequence
  Description of Artificial Sequence: Synthetic oligonucleotide
gcgcuucagccugcgcaua

SEQ ID NO: 3150115 - RNA, 19 nt, Artificial Sequence
  Description of Artificial Sequence: Synthetic oligonucleotide
gccugcgcauacgcuucuu

SEQ ID NO: 3150116 - RNA, 19 nt, Artificial Sequence
  Description of Artificial Sequence: Synthetic oligonucleotide
aauagaucuuucuauguac

SEQ ID NO: 3150117 - RNA, 19 nt, Artificial Sequence
  Description of Artificial Sequence: Synthetic oligonucleotide
uccucauaaaggaugaggg

SEQ ID NO: 3150118 - RNA, 19 nt, Artificial Sequence
  Description of Artificial Sequence: Synthetic oligonucleotide
ucugggagcagguagaagg

SEQ ID NO: 3150119 - RNA, 19 nt, Artificial Sequence
  Description of Artificial Sequence: Synthetic oligonucleotide
uauacaggcaccuggagag

SEQ ID NO: 3150120 - RNA, 19 nt, Artificial Sequence
  Description of Artificial Sequence: Synthetic oligonucleotide
uguacagccacguuuauac

SEQ ID NO: 3150121 - RNA, 19 nt, Artificial Sequence
  Description of Artificial Sequence: Synthetic oligonucleotide
ucuauguacagccacguuu

SEQ ID NO: 3150122 - RNA, 19 nt, Artificial Sequence
  Description of Artificial Sequence: Synthetic oligonucleotide
cacaagguccucauaaagg

SEQ ID NO: 3150123 - RNA, 19 nt, Artificial Sequence
  Description of Artificial Sequence: Synthetic oligonucleotide
uuauacaggcaccuggaga

SEQ ID NO: 3150124 - RNA, 19 nt, Artificial Sequence
  Description of Artificial Sequence: Synthetic oligonucleotide
aaaggaugaggguggcugg

SEQ ID NO: 3150125 - RNA, 19 nt, Artificial Sequence
  Description of Artificial Sequence: Synthetic oligonucleotide
cuuucuauguacagccacg

SEQ ID NO: 3150126 - RNA, 19 nt, Artificial Sequence
  Description of Artificial Sequence: Synthetic oligonucleotide
uaaaggaugaggguggcug

SEQ ID NO: 3150127 - RNA, 19 nt, Artificial Sequence
  Description of Artificial Sequence: Synthetic oligonucleotide
uaggaggaugugcacaagg

SEQ ID NO: 3150128 - RNA, 19 nt, Artificial Sequence
  Description of Artificial Sequence: Synthetic oligonucleotide
uacagccacguuuauacag

SEQ ID NO: 3150129 - RNA, 19 nt, Artificial Sequence
  Description of Artificial Sequence: Synthetic oligonucleotide
accuggagagccuaggagg

SEQ ID NO: 3150130 - RNA, 19 nt, Artificial Sequence
  Description of Artificial Sequence: Synthetic oligonucleotide
acaagguccucauaaagga

SEQ ID NO: 3150131 - RNA, 19 nt, Artificial Sequence
  Description of Artificial Sequence: Synthetic oligonucleotide
ucuuucuauguacagccac

SEQ ID NO: 3150132 - RNA, 19 nt, Artificial Sequence
  Description of Artificial Sequence: Synthetic oligonucleotide
uuuauacaggcaccuggag

SEQ ID NO: 3150133 - RNA, 19 nt, Artificial Sequence
  Description of Artificial Sequence: Synthetic oligonucleotide
cucauaaaggaugagggug

SEQ ID NO: 3150134 - RNA, 19 nt, Artificial Sequence
  Description of Artificial Sequence: Synthetic oligonucleotide
cacaauagaucuuucuaug

SEQ ID NO: 3150135 - RNA, 19 nt, Artificial Sequence
  Description of Artificial Sequence: Synthetic oligonucleotide
acaauagaucuuucuaugu

SEQ ID NO: 3150136 - RNA, 19 nt, Artificial Sequence
  Description of Artificial Sequence: Synthetic oligonucleotide
gcagguagaaggcugacgg

SEQ ID NO: 3150137 - RNA, 19 nt, Artificial Sequence
  Description of Artificial Sequence: Synthetic oligonucleotide
uagaucuuucuauguacag

SEQ ID NO: 3150138 - RNA, 19 nt, Artificial Sequence
  Description of Artificial Sequence: Synthetic oligonucleotide
aagguccucauaaaggaug

SEQ ID NO: 3150139 - RNA, 19 nt, Artificial Sequence
  Description of Artificial Sequence: Synthetic oligonucleotide
agagccuaggaggaugugc

SEQ ID NO: 3150140 - RNA, 19 nt, Artificial Sequence
  Description of Artificial Sequence: Synthetic oligonucleotide
aaggaugaggguggcuggc

SEQ ID NO: 3150141 - RNA, 19 nt, Artificial Sequence
  Description of Artificial Sequence: Synthetic oligonucleotide
uccugcucucccacaauag

SEQ ID NO: 3150142 - RNA, 19 nt, Artificial Sequence
  Description of Artificial Sequence: Synthetic oligonucleotide
ugcucucccacaauagauc

SEQ ID NO: 3150143 - RNA, 19 nt, Artificial Sequence
  Description of Artificial Sequence: Synthetic oligonucleotide
uuucuauguacagccacgu

SEQ ID NO: 3150144 - RNA, 19 nt, Artificial Sequence
  Description of Artificial Sequence: Synthetic oligonucleotide
uggcuggccgcucugggag

SEQ ID NO: 3150145 - RNA, 19 nt, Artificial Sequence
  Description of Artificial Sequence: Synthetic oligonucleotide
acagccacguuuauacagg

SEQ ID NO: 3150146 - RNA, 19 nt, Artificial Sequence
  Description of Artificial Sequence: Synthetic oligonucleotide
auagaucuuucuauguaca

SEQ ID NO: 3150147 - RNA, 19 nt, Artificial Sequence
  Description of Artificial Sequence: Synthetic oligonucleotide
ucccacaauagaucuuucu

SEQ ID NO: 3150148 - RNA, 19 nt, Artificial Sequence
  Description of Artificial Sequence: Synthetic oligonucleotide
gccacguuuauacaggcac

SEQ ID NO: 3150149 - RNA, 19 nt, Artificial Sequence
  Description of Artificial Sequence: Synthetic oligonucleotide
cugggagcagguagaaggc

SEQ ID NO: 3150150 - RNA, 19 nt, Artificial Sequence
  Description of Artificial Sequence: Synthetic oligonucleotide
cuauguacagccacguuua

SEQ ID NO: 3150151 - RNA, 19 nt, Artificial Sequence
  Description of Artificial Sequence: Synthetic oligonucleotide
ucucccacaauagaucuuu

SEQ ID NO: 3150152 - RNA, 19 nt, Artificial Sequence
  Description of Artificial Sequence: Synthetic oligonucleotide
guuuauacaggcaccugga

SEQ ID NO: 3150153 - RNA, 19 nt, Artificial Sequence
  Description of Artificial Sequence: Synthetic oligonucleotide
gaugaggguggcuggccgc

SEQ ID NO: 3150154 - RNA, 19 nt, Artificial Sequence
  Description of Artificial Sequence: Synthetic oligonucleotide
ugcacaagguccucauaaa

SEQ ID NO: 3150155 - RNA, 19 nt, Artificial Sequence
  Description of Artificial Sequence: Synthetic oligonucleotide
gugcacaagguccucauaa

SEQ ID NO: 3150156 - RNA, 19 nt, Artificial Sequence
  Description of Artificial Sequence: Synthetic oligonucleotide
cguuuauacaggcaccugg

SEQ ID NO: 3150157 - RNA, 19 nt, Artificial Sequence
  Description of Artificial Sequence: Synthetic oligonucleotide
uacaggcaccuggagagcc

SEQ ID NO: 3150158 - RNA, 19 nt, Artificial Sequence
  Description of Artificial Sequence: Synthetic oligonucleotide
uggagagccuaggaggaug

SEQ ID NO: 3150159 - RNA, 19 nt, Artificial Sequence
  Description of Artificial Sequence: Synthetic oligonucleotide
caauagaucuuucuaugua

SEQ ID NO: 3150160 - RNA, 19 nt, Artificial Sequence
  Description of Artificial Sequence: Synthetic oligonucleotide
gcacaagguccucauaaag

SEQ ID NO: 3150161 - RNA, 19 nt, Artificial Sequence
  Description of Artificial Sequence: Synthetic oligonucleotide
agcagguagaaggcugacg

SEQ ID NO: 3150162 - RNA, 19 nt, Artificial Sequence
  Description of Artificial Sequence: Synthetic oligonucleotide
gagccuaggaggaugugca

SEQ ID NO: 3150163 - RNA, 19 nt, Artificial Sequence
  Description of Artificial Sequence: Synthetic oligonucleotide
caccuggagagccuaggag

SEQ ID NO: 3150164 - RNA, 19 nt, Artificial Sequence
  Description of Artificial Sequence: Synthetic oligonucleotide
aggaugaggguggcuggcc

SEQ ID NO: 3150165 - RNA, 19 nt, Artificial Sequence
  Description of Artificial Sequence: Synthetic oligonucleotide
agccuaggaggaugugcac

SEQ ID NO: 3150166 - RNA, 19 nt, Artificial Sequence
  Description of Artificial Sequence: Synthetic oligonucleotide
cagccacguuuauacaggc

SEQ ID NO: 3150167 - RNA, 19 nt, Artificial Sequence
  Description of Artificial Sequence: Synthetic oligonucleotide
aggaggaugugcacaaggu

SEQ ID NO: 3150168 - RNA, 19 nt, Artificial Sequence
  Description of Artificial Sequence: Synthetic oligonucleotide
uauguacagccacguuuau

SEQ ID NO: 3150169 - RNA, 19 nt, Artificial Sequence
  Description of Artificial Sequence: Synthetic oligonucleotide
ggaugaggguggcuggccg

SEQ ID NO: 3150170 - RNA, 19 nt, Artificial Sequence
  Description of Artificial Sequence: Synthetic oligonucleotide
uucuauguacagccacguu

SEQ ID NO: 3150171 - RNA, 19 nt, Artificial Sequence
  Description of Artificial Sequence: Synthetic oligonucleotide
gaugugcacaagguccuca

SEQ ID NO: 3150172 - RNA, 19 nt, Artificial Sequence
  Description of Artificial Sequence: Synthetic oligonucleotide
ggaggaugugcacaagguc

SEQ ID NO: 3150173 - RNA, 19 nt, Artificial Sequence
  Description of Artificial Sequence: Synthetic oligonucleotide
aggaugugcacaagguccu

SEQ ID NO: 3150174 - RNA, 19 nt, Artificial Sequence
  Description of Artificial Sequence: Synthetic oligonucleotide
ugugcacaagguccucaua

SEQ ID NO: 3150175 - RNA, 19 nt, Artificial Sequence
  Description of Artificial Sequence: Synthetic oligonucleotide
ccacguuuauacaggcacc

SEQ ID NO: 3150176 - RNA, 19 nt, Artificial Sequence
  Description of Artificial Sequence: Synthetic oligonucleotide
auaaaggaugaggguggcu

SEQ ID NO: 3150177 - RNA, 19 nt, Artificial Sequence
  Description of Artificial Sequence: Synthetic oligonucleotide
acguuuauacaggcaccug

SEQ ID NO: 3150178 - RNA, 19 nt, Artificial Sequence
  Description of Artificial Sequence: Synthetic oligonucleotide
aucuuucuauguacagcca

SEQ ID NO: 3150179 - RNA, 19 nt, Artificial Sequence
  Description of Artificial Sequence: Synthetic oligonucleotide
guacagccacguuuauaca

SEQ ID NO: 3150180 - RNA, 19 nt, Artificial Sequence
  Description of Artificial Sequence: Synthetic oligonucleotide
cuaggaggaugugcacaag

SEQ ID NO: 3150181 - RNA, 19 nt, Artificial Sequence
  Description of Artificial Sequence: Synthetic oligonucleotide
gguggcuggccgcucuggg

SEQ ID NO: 3150182 - RNA, 19 nt, Artificial Sequence
  Description of Artificial Sequence: Synthetic oligonucleotide
cucccacaauagaucuuuc

SEQ ID NO: 3150183 - RNA, 19 nt, Artificial Sequence
  Description of Artificial Sequence: Synthetic oligonucleotide
cagguagaaggcugacgga

SEQ ID NO: 3150184 - RNA, 19 nt, Artificial Sequence
  Description of Artificial Sequence: Synthetic oligonucleotide
auguacagccacguuuaua

SEQ ID NO: 3150185 - RNA, 19 nt, Artificial Sequence
  Description of Artificial Sequence: Synthetic oligonucleotide
cccacaauagaucuuucua

SEQ ID NO: 3150186 - RNA, 19 nt, Artificial Sequence
  Description of Artificial Sequence: Synthetic oligonucleotide
cugcucucccacaauagau

SEQ ID NO: 3150187 - RNA, 19 nt, Artificial Sequence
  Description of Artificial Sequence: Synthetic oligonucleotide
augaggguggcuggccgcu

SEQ ID NO: 3150188 - RNA, 19 nt, Artificial Sequence
  Description of Artificial Sequence: Synthetic oligonucleotide
ggcaccuggagagccuagg

SEQ ID NO: 3150189 - RNA, 19 nt, Artificial Sequence
  Description of Artificial Sequence: Synthetic oligonucleotide
cucugggagcagguagaag

SEQ ID NO: 3150190 - RNA, 19 nt, Artificial Sequence
  Description of Artificial Sequence: Synthetic oligonucleotide
cacguuuauacaggcaccu

SEQ ID NO: 3150191 - RNA, 19 nt, Artificial Sequence
  Description of Artificial Sequence: Synthetic oligonucleotide
gcucucccacaauagaucu

SEQ ID NO: 3150192 - RNA, 19 nt, Artificial Sequence
  Description of Artificial Sequence: Synthetic oligonucleotide
ccuggagagccuaggagga

SEQ ID NO: 3150193 - RNA, 19 nt, Artificial Sequence
  Description of Artificial Sequence: Synthetic oligonucleotide
gagagccuaggaggaugug

SEQ ID NO: 3150194 - RNA, 19 nt, Artificial Sequence
  Description of Artificial Sequence: Synthetic oligonucleotide
ccuaggaggaugugcacaa

SEQ ID NO: 3150195 - RNA, 19 nt, Artificial Sequence
  Description of Artificial Sequence: Synthetic oligonucleotide
cuccugcucucccacaaua

SEQ ID NO: 3150196 - RNA, 19 nt, Artificial Sequence
  Description of Artificial Sequence: Synthetic oligonucleotide
ccacaauagaucuuucuau

SEQ ID NO: 3150197 - RNA, 19 nt, Artificial Sequence
  Description of Artificial Sequence: Synthetic oligonucleotide
guggcuggccgcucuggga

SEQ ID NO: 3150198 - RNA, 19 nt, Artificial Sequence
  Description of Artificial Sequence: Synthetic oligonucleotide
agccacguuuauacaggca

SEQ ID NO: 3150199 - RNA, 19 nt, Artificial Sequence
  Description of Artificial Sequence: Synthetic oligonucleotide
ggagcagguagaaggcuga

SEQ ID NO: 3150200 - RNA, 19 nt, Artificial Sequence
  Description of Artificial Sequence: Synthetic oligonucleotide
caagguccucauaaaggau

SEQ ID NO: 3150201 - RNA, 19 nt, Artificial Sequence
  Description of Artificial Sequence: Synthetic oligonucleotide
aggguggcuggccgcucug

SEQ ID NO: 3150202 - RNA, 19 nt, Artificial Sequence
  Description of Artificial Sequence: Synthetic oligonucleotide
ccgcucugggagcagguag

SEQ ID NO: 3150203 - RNA, 19 nt, Artificial Sequence
  Description of Artificial Sequence: Synthetic oligonucleotide
acaggcaccuggagagccu

SEQ ID NO: 3150204 - RNA, 19 nt, Artificial Sequence
  Description of Artificial Sequence: Synthetic oligonucleotide
ccugcucucccacaauaga

SEQ ID NO: 3150205 - RNA, 19 nt, Artificial Sequence
  Description of Artificial Sequence: Synthetic oligonucleotide
gccuaggaggaugugcaca

SEQ ID NO: 3150206 - RNA, 19 nt, Artificial Sequence
  Description of Artificial Sequence: Synthetic oligonucleotide
gcaccuggagagccuagga

SEQ ID NO: 3150207 - RNA, 19 nt, Artificial Sequence
  Description of Artificial Sequence: Synthetic oligonucleotide
ccucauaaaggaugagggu

SEQ ID NO: 3150208 - RNA, 19 nt, Artificial Sequence
  Description of Artificial Sequence: Synthetic oligonucleotide
gaggguggcuggccgcucu

SEQ ID NO: 3150209 - RNA, 19 nt, Artificial Sequence
  Description of Artificial Sequence: Synthetic oligonucleotide
aggcaccuggagagccuag

SEQ ID NO: 3150210 - RNA, 19 nt, Artificial Sequence
  Description of Artificial Sequence: Synthetic oligonucleotide
ggcuggccgcucugggagc

SEQ ID NO: 3150211 - RNA, 19 nt, Artificial Sequence
  Description of Artificial Sequence: Synthetic oligonucleotide
ggagagccuaggaggaugu

SEQ ID NO: 3150212 - RNA, 19 nt, Artificial Sequence
  Description of Artificial Sequence: Synthetic oligonucleotide
gccccuccugcucucccac

SEQ ID NO: 3150213 - RNA, 19 nt, Artificial Sequence
  Description of Artificial Sequence: Synthetic oligonucleotide
cucucccacaauagaucuu

SEQ ID NO: 3150214 - RNA, 19 nt, Artificial Sequence
  Description of Artificial Sequence: Synthetic oligonucleotide
cuggccgcucugggagcag

SEQ ID NO: 3150215 - RNA, 19 nt, Artificial Sequence
  Description of Artificial Sequence: Synthetic oligonucleotide
cgcucugggagcagguaga

SEQ ID NO: 3150216 - RNA, 19 nt, Artificial Sequence
  Description of Artificial Sequence: Synthetic oligonucleotide
caggcaccuggagagccua

SEQ ID NO: 3150217 - RNA, 19 nt, Artificial Sequence
  Description of Artificial Sequence: Synthetic oligonucleotide
gcucugggagcagguagaa

SEQ ID NO: 3150218 - RNA, 19 nt, Artificial Sequence
  Description of Artificial Sequence: Synthetic oligonucleotide
gcuggccgcucugggagca

SEQ ID NO: 3150219 - RNA, 19 nt, Artificial Sequence
  Description of Artificial Sequence: Synthetic oligonucleotide
cccuccugcucucccacaa

SEQ ID NO: 3150220 - RNA, 19 nt, Artificial Sequence
  Description of Artificial Sequence: Synthetic oligonucleotide
cuggagagccuaggaggau

SEQ ID NO: 3150221 - RNA, 19 nt, Artificial Sequence
  Description of Artificial Sequence: Synthetic oligonucleotide
gccgcucugggagcaggua

SEQ ID NO: 3150222 - RNA, 19 nt, Artificial Sequence
  Description of Artificial Sequence: Synthetic oligonucleotide
ccccuccugcucucccaca

SEQ ID NO: 3150223 - RNA, 19 nt, Artificial Sequence
  Description of Artificial Sequence: Synthetic oligonucleotide
ggccgcucugggagcaggu

SEQ ID NO: 3150224 - RNA, 19 nt, Artificial Sequence
  Description of Artificial Sequence: Synthetic oligonucleotide
ccuccugcucucccacaau

SEQ ID NO: 3150225 - RNA, 19 nt, Artificial Sequence
  Description of Artificial Sequence: Synthetic oligonucleotide
aaucucagcauucgggagg

SEQ ID NO: 3150226 - RNA, 19 nt, Artificial Sequence
  Description of Artificial Sequence: Synthetic oligonucleotide
uucacauagagaaacuguc

SEQ ID NO: 3150227 - RNA, 19 nt, Artificial Sequence
  Description of Artificial Sequence: Synthetic oligonucleotide
ggcuguuucacauagagaa

SEQ ID NO: 3150228 - RNA, 19 nt, Artificial Sequence
  Description of Artificial Sequence: Synthetic oligonucleotide
uguuucacauagagaaacu

SEQ ID NO: 3150229 - RNA, 19 nt, Artificial Sequence
  Description of Artificial Sequence: Synthetic oligonucleotide
cuguuucacauagagaaac

SEQ ID NO: 3150230 - RNA, 19 nt, Artificial Sequence
  Description of Artificial Sequence: Synthetic oligonucleotide
guuucacauagagaaacug

SEQ ID NO: 3150231 - RNA, 19 nt, Artificial Sequence
  Description of Artificial Sequence: Synthetic oligonucleotide
cucagcauucgggaggcag

SEQ ID NO: 3150232 - RNA, 19 nt, Artificial Sequence
  Description of Artificial Sequence: Synthetic oligonucleotide
gcuguuucacauagagaaa

SEQ ID NO: 3150233 - RNA, 19 nt, Artificial Sequence
  Description of Artificial Sequence: Synthetic oligonucleotide
gggcuguuucacauagaga

SEQ ID NO: 3150234 - RNA, 19 nt, Artificial Sequence
  Description of Artificial Sequence: Synthetic oligonucleotide
ucucagcauucgggaggca

SEQ ID NO: 3150235 - RNA, 19 nt, Artificial Sequence
  Description of Artificial Sequence: Synthetic oligonucleotide
aacaacaggauauccaaga

SEQ ID NO: 3150236 - RNA, 19 nt, Artificial Sequence
  Description of Artificial Sequence: Synthetic oligonucleotide
aacaggauauccaagagga

SEQ ID NO: 3150237 - RNA, 19 nt, Artificial Sequence
  Description of Artificial Sequence: Synthetic oligonucleotide
aguucugcagacccaaagc

SEQ ID NO: 3150238 - RNA, 19 nt, Artificial Sequence
  Description of Artificial Sequence: Synthetic oligonucleotide
aaagcugcaagaucuccag

SEQ ID NO: 3150239 - RNA, 19 nt, Artificial Sequence
  Description of Artificial Sequence: Synthetic oligonucleotide
ucuaugaucugcuggagga

SEQ ID NO: 3150240 - RNA, 19 nt, Artificial Sequence
  Description of Artificial Sequence: Synthetic oligonucleotide
aacaucaccccaucuauga

SEQ ID NO: 3150241 - RNA, 19 nt, Artificial Sequence
  Description of Artificial Sequence: Synthetic oligonucleotide
gaaggagucaguucugcag

SEQ ID NO: 3150242 - RNA, 19 nt, Artificial Sequence
  Description of Artificial Sequence: Synthetic oligonucleotide
agaucuccaggacacaggg

SEQ ID NO: 3150243 - RNA, 19 nt, Artificial Sequence
  Description of Artificial Sequence: Synthetic oligonucleotide
augugaaggagucaguucu

SEQ ID NO: 3150244 - RNA, 19 nt, Artificial Sequence
  Description of Artificial Sequence: Synthetic oligonucleotide
ugcaagaucuccaggacac

SEQ ID NO: 3150245 - RNA, 19 nt, Artificial Sequence
  Description of Artificial Sequence: Synthetic oligonucleotide
agaggagucccagagaggg

SEQ ID NO: 3150246 - RNA, 19 nt, Artificial Sequence
  Description of Artificial Sequence: Synthetic oligonucleotide
aaggagucaguucugcaga

SEQ ID NO: 3150247 - RNA, 19 nt, Artificial Sequence
  Description of Artificial Sequence: Synthetic oligonucleotide
gagucaguucugcagaccc

SEQ ID NO: 3150248 - RNA, 19 nt, Artificial Sequence
  Description of Artificial Sequence: Synthetic oligonucleotide
gaggaugugaaggagucag

SEQ ID NO: 3150249 - RNA, 19 nt, Artificial Sequence
  Description of Artificial Sequence: Synthetic oligonucleotide
caacaggauauccaagagg

SEQ ID NO: 3150250 - RNA, 19 nt, Artificial Sequence
  Description of Artificial Sequence: Synthetic oligonucleotide
acaacaggauauccaagag

SEQ ID NO: 3150251 - RNA, 19 nt, Artificial Sequence
  Description of Artificial Sequence: Synthetic oligonucleotide
aucuaugaucugcuggagg

SEQ ID NO: 3150252 - RNA, 19 nt, Artificial Sequence
  Description of Artificial Sequence: Synthetic oligonucleotide
aggagucccagagagggcc

SEQ ID NO: 3150253 - RNA, 19 nt, Artificial Sequence
  Description of Artificial Sequence: Synthetic oligonucleotide
gacacagggcaacaacagg

SEQ ID NO: 3150254 - RNA, 19 nt, Artificial Sequence
  Description of Artificial Sequence: Synthetic oligonucleotide
aggauauccaagaggaguc

SEQ ID NO: 3150255 - RNA, 19 nt, Artificial Sequence
  Description of Artificial Sequence: Synthetic oligonucleotide
gagggcccagcauuuauag

SEQ ID NO: 3150256 - RNA, 19 nt, Artificial Sequence
  Description of Artificial Sequence: Synthetic oligonucleotide
gaugugaaggagucaguuc

SEQ ID NO: 3150257 - RNA, 19 nt, Artificial Sequence
  Description of Artificial Sequence: Synthetic oligonucleotide
uggaggaugugaaggaguc

SEQ ID NO: 3150258 - RNA, 19 nt, Artificial Sequence
  Description of Artificial Sequence: Synthetic oligonucleotide
aagaucuccaggacacagg

SEQ ID NO: 3150259 - RNA, 19 nt, Artificial Sequence
  Description of Artificial Sequence: Synthetic oligonucleotide
aagcugcaagaucuccagg

SEQ ID NO: 3150260 - RNA, 19 nt, Artificial Sequence
  Description of Artificial Sequence: Synthetic oligonucleotide
ucugcuggaggaugugaag

SEQ ID NO: 3150261 - RNA, 19 nt, Artificial Sequence
  Description of Artificial Sequence: Synthetic oligonucleotide
ugugaaggagucaguucug

SEQ ID NO: 3150262 - RNA, 19 nt, Artificial Sequence
  Description of Artificial Sequence: Synthetic oligonucleotide
gauauccaagaggaguccc

SEQ ID NO: 3150263 - RNA, 19 nt, Artificial Sequence
  Description of Artificial Sequence: Synthetic oligonucleotide
aggagucaguucugcagac

SEQ ID NO: 3150264 - RNA, 19 nt, Artificial Sequence
  Description of Artificial Sequence: Synthetic oligonucleotide
uauccaagaggagucccag

SEQ ID NO: 3150265 - RNA, 19 nt, Artificial Sequence
  Description of Artificial Sequence: Synthetic oligonucleotide
ugaaggagucaguucugca

SEQ ID NO: 3150266 - RNA, 19 nt, Artificial Sequence
  Description of Artificial Sequence: Synthetic oligonucleotide
caacaacaggauauccaag

SEQ ID NO: 3150267 - RNA, 19 nt, Artificial Sequence
  Description of Artificial Sequence: Synthetic oligonucleotide
caucaccccaucuaugauc

SEQ ID NO: 3150268 - RNA, 19 nt, Artificial Sequence
  Description of Artificial Sequence: Synthetic oligonucleotide
cugcuggaggaugugaagg

SEQ ID NO: 3150269 - RNA, 19 nt, Artificial Sequence
  Description of Artificial Sequence: Synthetic oligonucleotide
ugcuggaggaugugaagga

SEQ ID NO: 3150270 - RNA, 19 nt, Artificial Sequence
  Description of Artificial Sequence: Synthetic oligonucleotide
acacagggcaacaacagga

SEQ ID NO: 3150271 - RNA, 19 nt, Artificial Sequence
  Description of Artificial Sequence: Synthetic oligonucleotide
caagaucuccaggacacag

SEQ ID NO: 3150272 - RNA, 19 nt, Artificial Sequence
  Description of Artificial Sequence: Synthetic oligonucleotide
caguucugcagacccaaag

SEQ ID NO: 3150273 - RNA, 19 nt, Artificial Sequence
  Description of Artificial Sequence: Synthetic oligonucleotide
aucaccccaucuaugaucu

SEQ ID NO: 3150274 - RNA, 19 nt, Artificial Sequence
  Description of Artificial Sequence: Synthetic oligonucleotide
caaagcugcaagaucucca

SEQ ID NO: 3150275 - RNA, 19 nt, Artificial Sequence
  Description of Artificial Sequence: Synthetic oligonucleotide
agggcaacaacaggauauc

SEQ ID NO: 3150276 - RNA, 19 nt, Artificial Sequence
  Description of Artificial Sequence: Synthetic oligonucleotide
caccccaucuaugaucugc

SEQ ID NO: 3150277 - RNA, 19 nt, Artificial Sequence
  Description of Artificial Sequence: Synthetic oligonucleotide
ccagcauuuauaguguagc

SEQ ID NO: 3150278 - RNA, 19 nt, Artificial Sequence
  Description of Artificial Sequence: Synthetic oligonucleotide
cccaucuaugaucugcugg

SEQ ID NO: 3150279 - RNA, 19 nt, Artificial Sequence
  Description of Artificial Sequence: Synthetic oligonucleotide
gacccaaagcugcaagauc

SEQ ID NO: 3150280 - RNA, 19 nt, Artificial Sequence
  Description of Artificial Sequence: Synthetic oligonucleotide
gcaacaacaggauauccaa

SEQ ID NO: 3150281 - RNA, 19 nt, Artificial Sequence
  Description of Artificial Sequence: Synthetic oligonucleotide
caacaucaccccaucuaug

SEQ ID NO: 3150282 - RNA, 19 nt, Artificial Sequence
  Description of Artificial Sequence: Synthetic oligonucleotide
aggacacagggcaacaaca

SEQ ID NO: 3150283 - RNA, 19 nt, Artificial Sequence
  Description of Artificial Sequence: Synthetic oligonucleotide
caggacacagggcaacaac

SEQ ID NO: 3150284 - RNA, 19 nt, Artificial Sequence
  Description of Artificial Sequence: Synthetic oligonucleotide
guucugcagacccaaagcu

SEQ ID NO: 3150285 - RNA, 19 nt, Artificial Sequence
  Description of Artificial Sequence: Synthetic oligonucleotide
ucccagagagggcccagca

SEQ ID NO: 3150286 - RNA, 19 nt, Artificial Sequence
  Description of Artificial Sequence: Synthetic oligonucleotide
gugaaggagucaguucugc

SEQ ID NO: 3150287 - RNA, 19 nt, Artificial Sequence
  Description of Artificial Sequence: Synthetic oligonucleotide
agacccaaagcugcaagau

SEQ ID NO: 3150288 - RNA, 19 nt, Artificial Sequence
  Description of Artificial Sequence: Synthetic oligonucleotide
auauccaagaggaguccca

SEQ ID NO: 3150289 - RNA, 19 nt, Artificial Sequence
  Description of Artificial Sequence: Synthetic oligonucleotide
ucuccaggacacagggcaa

SEQ ID NO: 3150290 - RNA, 19 nt, Artificial Sequence
  Description of Artificial Sequence: Synthetic oligonucleotide
ggacacagggcaacaacag

SEQ ID NO: 3150291 - RNA, 19 nt, Artificial Sequence
  Description of Artificial Sequence: Synthetic oligonucleotide
ccaucuaugaucugcugga

SEQ ID NO: 3150292 - RNA, 19 nt, Artificial Sequence
  Description of Artificial Sequence: Synthetic oligonucleotide
cugcaagaucuccaggaca

SEQ ID NO: 3150293 - RNA, 19 nt, Artificial Sequence
  Description of Artificial Sequence: Synthetic oligonucleotide
acaucaccccaucuaugau

SEQ ID NO: 3150294 - RNA, 19 nt, Artificial Sequence
  Description of Artificial Sequence: Synthetic oligonucleotide
cagggcaacaacaggauau

SEQ ID NO: 3150295 - RNA, 19 nt, Artificial Sequence
  Description of Artificial Sequence: Synthetic oligonucleotide
caggauauccaagaggagu

SEQ ID NO: 3150296 - RNA, 19 nt, Artificial Sequence
  Description of Artificial Sequence: Synthetic oligonucleotide
gcagacccaaagcugcaag

SEQ ID NO: 3150297 - RNA, 19 nt, Artificial Sequence
  Description of Artificial Sequence: Synthetic oligonucleotide
cagacccaaagcugcaaga

SEQ ID NO: 3150298 - RNA, 19 nt, Artificial Sequence
  Description of Artificial Sequence: Synthetic oligonucleotide
acagggcaacaacaggaua

SEQ ID NO: 3150299 - RNA, 19 nt, Artificial Sequence
  Description of Artificial Sequence: Synthetic oligonucleotide
gaucugcuggaggauguga

SEQ ID NO: 3150300 - RNA, 19 nt, Artificial Sequence
  Description of Artificial Sequence: Synthetic oligonucleotide
auccaagaggagucccaga

SEQ ID NO: 3150301 - RNA, 19 nt, Artificial Sequence
  Description of Artificial Sequence: Synthetic oligonucleotide
uccaggacacagggcaaca

SEQ ID NO: 3150302 - RNA, 19 nt, Artificial Sequence
  Description of Artificial Sequence: Synthetic oligonucleotide
ggauauccaagaggagucc

SEQ ID NO: 3150303 - RNA, 19 nt, Artificial Sequence
  Description of Artificial Sequence: Synthetic oligonucleotide
cccagcauuuauaguguag

SEQ ID NO: 3150304 - RNA, 19 nt, Artificial Sequence
  Description of Artificial Sequence: Synthetic oligonucleotide
agggcccagcauuuauagu

SEQ ID NO: 3150305 - RNA, 19 nt, Artificial Sequence
  Description of Artificial Sequence: Synthetic oligonucleotide
accccaucuaugaucugcu

SEQ ID NO: 3150306 - RNA, 19 nt, Artificial Sequence
  Description of Artificial Sequence: Synthetic oligonucleotide
ugcagacccaaagcugcaa

SEQ ID NO: 3150307 - RNA, 19 nt, Artificial Sequence
  Description of Artificial Sequence: Synthetic oligonucleotide
gaggagucccagagagggc

SEQ ID NO: 3150308 - RNA, 19 nt, Artificial Sequence
  Description of Artificial Sequence: Synthetic oligonucleotide
ccaaagcugcaagaucucc

SEQ ID NO: 3150309 - RNA, 19 nt, Artificial Sequence
  Description of Artificial Sequence: Synthetic oligonucleotide
cuccaggacacagggcaac

SEQ ID NO: 3150310 - RNA, 19 nt, Artificial Sequence
  Description of Artificial Sequence: Synthetic oligonucleotide
agucaguucugcagaccca

SEQ ID NO: 3150311 - RNA, 19 nt, Artificial Sequence
  Description of Artificial Sequence: Synthetic oligonucleotide
ggagucaguucugcagacc

SEQ ID NO: 3150312 - RNA, 19 nt, Artificial Sequence
  Description of Artificial Sequence: Synthetic oligonucleotide
aggaugugaaggagucagu

SEQ ID NO: 3150313 - RNA, 19 nt, Artificial Sequence
  Description of Artificial Sequence: Synthetic oligonucleotide
ucaccccaucuaugaucug

SEQ ID NO: 3150314 - RNA, 19 nt, Artificial Sequence
  Description of Artificial Sequence: Synthetic oligonucleotide
gagagggcccagcauuuau

SEQ ID NO: 3150315 - RNA, 19 nt, Artificial Sequence
  Description of Artificial Sequence: Synthetic oligonucleotide
agucccagagagggcccag

SEQ ID NO: 3150316 - RNA, 19 nt, Artificial Sequence
  Description of Artificial Sequence: Synthetic oligonucleotide
cugcagacccaaagcugca

SEQ ID NO: 3150317 - RNA, 19 nt, Artificial Sequence
  Description of Artificial Sequence: Synthetic oligonucleotide
agagggcccagcauuuaua

SEQ ID NO: 3150318 - RNA, 19 nt, Artificial Sequence
  Description of Artificial Sequence: Synthetic oligonucleotide
cacagggcaacaacaggau

SEQ ID NO: 3150319 - RNA, 19 nt, Artificial Sequence
  Description of Artificial Sequence: Synthetic oligonucleotide
gucccagagagggcccagc

SEQ ID NO: 3150320 - RNA, 19 nt, Artificial Sequence
  Description of Artificial Sequence: Synthetic oligonucleotide
gagucccagagagggccca

SEQ ID NO: 3150321 - RNA, 19 nt, Artificial Sequence
  Description of Artificial Sequence: Synthetic oligonucleotide
ggaugugaaggagucaguu

SEQ ID NO: 3150322 - RNA, 19 nt, Artificial Sequence
  Description of Artificial Sequence: Synthetic oligonucleotide
ggaggaugugaaggaguca

SEQ ID NO: 3150323 - RNA, 19 nt, Artificial Sequence
  Description of Artificial Sequence: Synthetic oligonucleotide
ccaacaucaccccaucuau

SEQ ID NO: 3150324 - RNA, 19 nt, Artificial Sequence
  Description of Artificial Sequence: Synthetic oligonucleotide
agagagggcccagcauuua

SEQ ID NO: 3150325 - RNA, 19 nt, Artificial Sequence
  Description of Artificial Sequence: Synthetic oligonucleotide
ccaagaggagucccagaga

SEQ ID NO: 3150326 - RNA, 19 nt, Artificial Sequence
  Description of Artificial Sequence: Synthetic oligonucleotide
ggagucccagagagggccc

SEQ ID NO: 3150327 - RNA, 19 nt, Artificial Sequence
  Description of Artificial Sequence: Synthetic oligonucleotide
cuaugaucugcuggaggau

SEQ ID NO: 3150328 - RNA, 19 nt, Artificial Sequence
  Description of Artificial Sequence: Synthetic oligonucleotide
cagagagggcccagcauuu

SEQ ID NO: 3150329 - RNA, 19 nt, Artificial Sequence
  Description of Artificial Sequence: Synthetic oligonucleotide
ccccaucuaugaucugcug

SEQ ID NO: 3150330 - RNA, 19 nt, Artificial Sequence
  Description of Artificial Sequence: Synthetic oligonucleotide
gcaagaucuccaggacaca

SEQ ID NO: 3150331 - RNA, 19 nt, Artificial Sequence
  Description of Artificial Sequence: Synthetic oligonucleotide
ccagagagggcccagcauu

SEQ ID NO: 3150332 - RNA, 19 nt, Artificial Sequence
  Description of Artificial Sequence: Synthetic oligonucleotide
ggcccagcauuuauagugu

SEQ ID NO: 3150333 - RNA, 19 nt, Artificial Sequence
  Description of Artificial Sequence: Synthetic oligonucleotide
gcccagcauuuauagugua

SEQ ID NO: 3150334 - RNA, 19 nt, Artificial Sequence
  Description of Artificial Sequence: Synthetic oligonucleotide
ccaggacacagggcaacaa

SEQ ID NO: 3150335 - RNA, 19 nt, Artificial Sequence
  Description of Artificial Sequence: Synthetic oligonucleotide
cccagagagggcccagcau

SEQ ID NO: 3150336 - RNA, 19 nt, Artificial Sequence
  Description of Artificial Sequence: Synthetic oligonucleotide
aacuaaauguccuagcugu

SEQ ID NO: 3150337 - RNA, 19 nt, Artificial Sequence
  Description of Artificial Sequence: Synthetic oligonucleotide
aaaacuaaauguccuagcu

SEQ ID NO: 3150338 - RNA, 19 nt, Artificial Sequence
  Description of Artificial Sequence: Synthetic oligonucleotide
cuaaggaugacuucugggc

SEQ ID NO: 3150339 - RNA, 19 nt, Artificial Sequence
  Description of Artificial Sequence: Synthetic oligonucleotide
aaacuaaauguccuagcug

SEQ ID NO: 3150340 - RNA, 19 nt, Artificial Sequence
  Description of Artificial Sequence: Synthetic oligonucleotide
uuucaaaacuaaauguccu

SEQ ID NO: 3150341 - RNA, 19 nt, Artificial Sequence
  Description of Artificial Sequence: Synthetic oligonucleotide
ugguuucaaaacuaaaugu

SEQ ID NO: 3150342 - RNA, 19 nt, Artificial Sequence
  Description of Artificial Sequence: Synthetic oligonucleotide
ucaaaacuaaauguccuag

SEQ ID NO: 3150343 - RNA, 19 nt, Artificial Sequence
  Description of Artificial Sequence: Synthetic oligonucleotide
ugagaggugcaggagaugg

SEQ ID NO: 3150344 - RNA, 19 nt, Artificial Sequence
  Description of Artificial Sequence: Synthetic oligonucleotide
guuucaaaacuaaaugucc

SEQ ID NO: 3150345 - RNA, 19 nt, Artificial Sequence
  Description of Artificial Sequence: Synthetic oligonucleotide
ucugaugccugcuaccucc

SEQ ID NO: 3150346 - RNA, 19 nt, Artificial Sequence
  Description of Artificial Sequence: Synthetic oligonucleotide
aaggaugacuucugggcag

SEQ ID NO: 3150347 - RNA, 19 nt, Artificial Sequence
  Description of Artificial Sequence: Synthetic oligonucleotide
uaaggaugacuucugggca

SEQ ID NO: 3150348 - RNA, 19 nt, Artificial Sequence
  Description of Artificial Sequence: Synthetic oligonucleotide
caaaacuaaauguccuagc

SEQ ID NO: 3150349 - RNA, 19 nt, Artificial Sequence
  Description of Artificial Sequence: Synthetic oligonucleotide
aauguccuagcuguguuug

SEQ ID NO: 3150350 - RNA, 19 nt, Artificial Sequence
  Description of Artificial Sequence: Synthetic oligonucleotide
uguguuuggcccaucuucu

SEQ ID NO: 3150351 - RNA, 19 nt, Artificial Sequence
  Description of Artificial Sequence: Synthetic oligonucleotide
uguuuggcccaucuucucc

SEQ ID NO: 3150352 - RNA, 19 nt, Artificial Sequence
  Description of Artificial Sequence: Synthetic oligonucleotide
uccuaaggaugacuucugg

SEQ ID NO: 3150353 - RNA, 19 nt, Artificial Sequence
  Description of Artificial Sequence: Synthetic oligonucleotide
uuaucugaugccugcuacc

SEQ ID NO: 3150354 - RNA, 19 nt, Artificial Sequence
  Description of Artificial Sequence: Synthetic oligonucleotide
cuuaucugaugccugcuac

SEQ ID NO: 3150355 - RNA, 19 nt, Artificial Sequence
  Description of Artificial Sequence: Synthetic oligonucleotide
gugcuugcuuaucugaugc

SEQ ID NO: 3150356 - RNA, 19 nt, Artificial Sequence
  Description of Artificial Sequence: Synthetic oligonucleotide
gaagugcuugcuuaucuga

SEQ ID NO: 3150357 - RNA, 19 nt, Artificial Sequence
  Description of Artificial Sequence: Synthetic oligonucleotide
cuugcuuaucugaugccug

SEQ ID NO: 3150358 - RNA, 19 nt, Artificial Sequence
  Description of Artificial Sequence: Synthetic oligonucleotide
cuguguuuggcccaucuuc

SEQ ID NO: 3150359 - RNA, 19 nt, Artificial Sequence
  Description of Artificial Sequence: Synthetic oligonucleotide
uugcuuaucugaugccugc

SEQ ID NO: 3150360 - RNA, 19 nt, Artificial Sequence
  Description of Artificial Sequence: Synthetic oligonucleotide
uaaauguccuagcuguguu

SEQ ID NO: 3150361 - RNA, 19 nt, Artificial Sequence
  Description of Artificial Sequence: Synthetic oligonucleotide
ucuucuccaugagaggugc

SEQ ID NO: 3150362 - RNA, 19 nt, Artificial Sequence
  Description of Artificial Sequence: Synthetic oligonucleotide
ugcuuugguuucaaaacua

SEQ ID NO: 3150363 - RNA, 19 nt, Artificial Sequence
  Description of Artificial Sequence: Synthetic oligonucleotide
gguuucaaaacuaaauguc

SEQ ID NO: 3150364 - RNA, 19 nt, Artificial Sequence
  Description of Artificial Sequence: Synthetic oligonucleotide
agugcuugcuuaucugaug

SEQ ID NO: 3150365 - RNA, 19 nt, Artificial Sequence
  Description of Artificial Sequence: Synthetic oligonucleotide
uccuagcuguguuuggccc

SEQ ID NO: 3150366 - RNA, 19 nt, Artificial Sequence
  Description of Artificial Sequence: Synthetic oligonucleotide
gcugcuuugguuucaaaac

SEQ ID NO: 3150367 - RNA, 19 nt, Artificial Sequence
  Description of Artificial Sequence: Synthetic oligonucleotide
augacuucugggcagcuau

SEQ ID NO: 3150368 - RNA, 19 nt, Artificial Sequence
  Description of Artificial Sequence: Synthetic oligonucleotide
ucuccaugagaggugcagg

SEQ ID NO: 3150369 - RNA, 19 nt, Artificial Sequence
  Description of Artificial Sequence: Synthetic oligonucleotide
uucuccaugagaggugcag

SEQ ID NO: 3150370 - RNA, 19 nt, Artificial Sequence
  Description of Artificial Sequence: Synthetic oligonucleotide
gaugggaagugcuugcuua

SEQ ID NO: 3150371 - RNA, 19 nt, Artificial Sequence
  Description of Artificial Sequence: Synthetic oligonucleotide
uaucugaugccugcuaccu

SEQ ID NO: 3150372 - RNA, 19 nt, Artificial Sequence
  Description of Artificial Sequence: Synthetic oligonucleotide
aaauguccuagcuguguuu

SEQ ID NO: 3150373 - RNA, 19 nt, Artificial Sequence
  Description of Artificial Sequence: Synthetic oligonucleotide
ugcuaccuccuaaggauga

SEQ ID NO: 3150374 - RNA, 19 nt, Artificial Sequence
  Description of Artificial Sequence: Synthetic oligonucleotide
uguccuagcuguguuuggc

SEQ ID NO: 3150375 - RNA, 19 nt, Artificial Sequence
  Description of Artificial Sequence: Synthetic oligonucleotide
ccuaaggaugacuucuggg

SEQ ID NO: 3150376 - RNA, 19 nt, Artificial Sequence
  Description of Artificial Sequence: Synthetic oligonucleotide
ugccugcuaccuccuaagg

SEQ ID NO: 3150377 - RNA, 19 nt, Artificial Sequence
  Description of Artificial Sequence: Synthetic oligonucleotide
augccugcuaccuccuaag

SEQ ID NO: 3150378 - RNA, 19 nt, Artificial Sequence
  Description of Artificial Sequence: Synthetic oligonucleotide
aggaugacuucugggcagc

SEQ ID NO: 3150379 - RNA, 19 nt, Artificial Sequence
  Description of Artificial Sequence: Synthetic oligonucleotide
uaccuccuaaggaugacuu

SEQ ID NO: 3150380 - RNA, 19 nt, Artificial Sequence
  Description of Artificial Sequence: Synthetic oligonucleotide
accuccuaaggaugacuuc

SEQ ID NO: 3150381 - RNA, 19 nt, Artificial Sequence
  Description of Artificial Sequence: Synthetic oligonucleotide
aggagaugggaagugcuug

SEQ ID NO: 3150382 - RNA, 19 nt, Artificial Sequence
  Description of Artificial Sequence: Synthetic oligonucleotide
uccaugagaggugcaggag

SEQ ID NO: 3150383 - RNA, 19 nt, Artificial Sequence
  Description of Artificial Sequence: Synthetic oligonucleotide
ugcuugcuuaucugaugcc

SEQ ID NO: 3150384 - RNA, 19 nt, Artificial Sequence
  Description of Artificial Sequence: Synthetic oligonucleotide
aucugaugccugcuaccuc

SEQ ID NO: 3150385 - RNA, 19 nt, Artificial Sequence
  Description of Artificial Sequence: Synthetic oligonucleotide
auguccuagcuguguuugg

SEQ ID NO: 3150386 - RNA, 19 nt, Artificial Sequence
  Description of Artificial Sequence: Synthetic oligonucleotide
agaggugcaggagauggga

SEQ ID NO: 3150387 - RNA, 19 nt, Artificial Sequence
  Description of Artificial Sequence: Synthetic oligonucleotide
guuuggcccaucuucucca

SEQ ID NO: 3150388 - RNA, 19 nt, Artificial Sequence
  Description of Artificial Sequence: Synthetic oligonucleotide
gaugccugcuaccuccuaa

SEQ ID NO: 3150389 - RNA, 19 nt, Artificial Sequence
  Description of Artificial Sequence: Synthetic oligonucleotide
guccuagcuguguuuggcc

SEQ ID NO: 3150390 - RNA, 19 nt, Artificial Sequence
  Description of Artificial Sequence: Synthetic oligonucleotide
cuccuaaggaugacuucug

SEQ ID NO: 3150391 - RNA, 19 nt, Artificial Sequence
  Description of Artificial Sequence: Synthetic oligonucleotide
aagugcuugcuuaucugau

SEQ ID NO: 3150392 - RNA, 19 nt, Artificial Sequence
  Description of Artificial Sequence: Synthetic oligonucleotide
ggagaugggaagugcuugc

SEQ ID NO: 3150393 - RNA, 19 nt, Artificial Sequence
  Description of Artificial Sequence: Synthetic oligonucleotide
agcuguguuuggcccaucu

SEQ ID NO: 3150394 - RNA, 19 nt, Artificial Sequence
  Description of Artificial Sequence: Synthetic oligonucleotide
cugcuaccuccuaaggaug

SEQ ID NO: 3150395 - RNA, 19 nt, Artificial Sequence
  Description of Artificial Sequence: Synthetic oligonucleotide
augggaagugcuugcuuau

SEQ ID NO: 3150396 - RNA, 19 nt, Artificial Sequence
  Description of Artificial Sequence: Synthetic oligonucleotide
cuccaugagaggugcagga

SEQ ID NO: 3150397 - RNA, 19 nt, Artificial Sequence
  Description of Artificial Sequence: Synthetic oligonucleotide
ugcuuaucugaugccugcu

SEQ ID NO: 3150398 - RNA, 19 nt, Artificial Sequence
  Description of Artificial Sequence: Synthetic oligonucleotide
ggcugcuuugguuucaaaa

SEQ ID NO: 3150399 - RNA, 19 nt, Artificial Sequence
  Description of Artificial Sequence: Synthetic oligonucleotide
ugagaugccauggcugcuu

SEQ ID NO: 3150400 - RNA, 19 nt, Artificial Sequence
  Description of Artificial Sequence: Synthetic oligonucleotide
aucuucuccaugagaggug

SEQ ID NO: 3150401 - RNA, 19 nt, Artificial Sequence
  Description of Artificial Sequence: Synthetic oligonucleotide
cugcuuugguuucaaaacu

SEQ ID NO: 3150402 - RNA, 19 nt, Artificial Sequence
  Description of Artificial Sequence: Synthetic oligonucleotide
ugccauggcugcuuugguu

SEQ ID NO: 3150403 - RNA, 19 nt, Artificial Sequence
  Description of Artificial Sequence: Synthetic oligonucleotide
agaugccauggcugcuuug

SEQ ID NO: 3150404 - RNA, 19 nt, Artificial Sequence
  Description of Artificial Sequence: Synthetic oligonucleotide
caucuucuccaugagaggu

SEQ ID NO: 3150405 - RNA, 19 nt, Artificial Sequence
  Description of Artificial Sequence: Synthetic oligonucleotide
uuuggcccaucuucuccau

SEQ ID NO: 3150406 - RNA, 19 nt, Artificial Sequence
  Description of Artificial Sequence: Synthetic oligonucleotide
cuaaauguccuagcugugu

SEQ ID NO: 3150407 - RNA, 19 nt, Artificial Sequence
  Description of Artificial Sequence: Synthetic oligonucleotide
caugagaggugcaggagau

SEQ ID NO: 3150408 - RNA, 19 nt, Artificial Sequence
  Description of Artificial Sequence: Synthetic oligonucleotide
augccauggcugcuuuggu

SEQ ID NO: 3150409 - RNA, 19 nt, Artificial Sequence
  Description of Artificial Sequence: Synthetic oligonucleotide
guguuuggcccaucuucuc

SEQ ID NO: 3150410 - RNA, 19 nt, Artificial Sequence
  Description of Artificial Sequence: Synthetic oligonucleotide
ugggaagugcuugcuuauc

SEQ ID NO: 3150411 - RNA, 19 nt, Artificial Sequence
  Description of Artificial Sequence: Synthetic oligonucleotide
gugcaggagaugggaagug

SEQ ID NO: 3150412 - RNA, 19 nt, Artificial Sequence
  Description of Artificial Sequence: Synthetic oligonucleotide
gccugcuaccuccuaagga

SEQ ID NO: 3150413 - RNA, 19 nt, Artificial Sequence
  Description of Artificial Sequence: Synthetic oligonucleotide
ugaugccugcuaccuccua

SEQ ID NO: 3150414 - RNA, 19 nt, Artificial Sequence
  Description of Artificial Sequence: Synthetic oligonucleotide
ccaugagaggugcaggaga

SEQ ID NO: 3150415 - RNA, 19 nt, Artificial Sequence
  Description of Artificial Sequence: Synthetic oligonucleotide
gcuuugguuucaaaacuaa

SEQ ID NO: 3150416 - RNA, 19 nt, Artificial Sequence
  Description of Artificial Sequence: Synthetic oligonucleotide
gaugacuucugggcagcua

SEQ ID NO: 3150417 - RNA, 19 nt, Artificial Sequence
  Description of Artificial Sequence: Synthetic oligonucleotide
gaggugcaggagaugggaa

SEQ ID NO: 3150418 - RNA, 19 nt, Artificial Sequence
  Description of Artificial Sequence: Synthetic oligonucleotide
ccugcuaccuccuaaggau

SEQ ID NO: 3150419 - RNA, 19 nt, Artificial Sequence
  Description of Artificial Sequence: Synthetic oligonucleotide
ggcccaucuucuccaugag

SEQ ID NO: 3150420 - RNA, 19 nt, Artificial Sequence
  Description of Artificial Sequence: Synthetic oligonucleotide
gcuuaucugaugccugcua

SEQ ID NO: 3150421 - RNA, 19 nt, Artificial Sequence
  Description of Artificial Sequence: Synthetic oligonucleotide
cuucuccaugagaggugca

SEQ ID NO: 3150422 - RNA, 19 nt, Artificial Sequence
  Description of Artificial Sequence: Synthetic oligonucleotide
gcuugcuuaucugaugccu

SEQ ID NO: 3150423 - RNA, 19 nt, Artificial Sequence
  Description of Artificial Sequence: Synthetic oligonucleotide
uggcugcuuugguuucaaa

SEQ ID NO: 3150424 - RNA, 19 nt, Artificial Sequence
  Description of Artificial Sequence: Synthetic oligonucleotide
auggcugcuuugguuucaa

SEQ ID NO: 3150425 - RNA, 19 nt, Artificial Sequence
  Description of Artificial Sequence: Synthetic oligonucleotide
cauggcugcuuugguuuca

SEQ ID NO: 3150426 - RNA, 19 nt, Artificial Sequence
  Description of Artificial Sequence: Synthetic oligonucleotide
ccuagcuguguuuggccca

SEQ ID NO: 3150427 - RNA, 19 nt, Artificial Sequence
  Description of Artificial Sequence: Synthetic oligonucleotide
gccauggcugcuuugguuu

SEQ ID NO: 3150428 - RNA, 19 nt, Artificial Sequence
  Description of Artificial Sequence: Synthetic oligonucleotide
cuaccuccuaaggaugacu

SEQ ID NO: 3150429 - RNA, 19 nt, Artificial Sequence
  Description of Artificial Sequence: Synthetic oligonucleotide
gcccaucuucuccaugaga

SEQ ID NO: 3150430 - RNA, 19 nt, Artificial Sequence
  Description of Artificial Sequence: Synthetic oligonucleotide
ccuccuaaggaugacuucu

SEQ ID NO: 3150431 - RNA, 19 nt, Artificial Sequence
  Description of Artificial Sequence: Synthetic oligonucleotide
gcuaccuccuaaggaugac

SEQ ID NO: 3150432 - RNA, 19 nt, Artificial Sequence
  Description of Artificial Sequence: Synthetic oligonucleotide
gagaugccauggcugcuuu

SEQ ID NO: 3150433 - RNA, 19 nt, Artificial Sequence
  Description of Artificial Sequence: Synthetic oligonucleotide
ccauggcugcuuugguuuc

SEQ ID NO: 3150434 - RNA, 19 nt, Artificial Sequence
  Description of Artificial Sequence: Synthetic oligonucleotide
caggagaugggaagugcuu

SEQ ID NO: 3150435 - RNA, 19 nt, Artificial Sequence
  Description of Artificial Sequence: Synthetic oligonucleotide
gcaggagaugggaagugcu

SEQ ID NO: 3150436 - RNA, 19 nt, Artificial Sequence
  Description of Artificial Sequence: Synthetic oligonucleotide
cugaugccugcuaccuccu

SEQ ID NO: 3150437 - RNA, 19 nt, Artificial Sequence
  Description of Artificial Sequence: Synthetic oligonucleotide
gugagaugccauggcugcu

SEQ ID NO: 3150438 - RNA, 19 nt, Artificial Sequence
  Description of Artificial Sequence: Synthetic oligonucleotide
uagcuguguuuggcccauc

SEQ ID NO: 3150439 - RNA, 19 nt, Artificial Sequence
  Description of Artificial Sequence: Synthetic oligonucleotide
gcuguguuuggcccaucuu

SEQ ID NO: 3150440 - RNA, 19 nt, Artificial Sequence
  Description of Artificial Sequence: Synthetic oligonucleotide
uuuuauugaaggaugggcu

SEQ ID NO: 3150441 - RNA, 19 nt, Artificial Sequence
  Description of Artificial Sequence: Synthetic oligonucleotide
ucuucuugaacucacucug

SEQ ID NO: 3150442 - RNA, 19 nt, Artificial Sequence
  Description of Artificial Sequence: Synthetic oligonucleotide
aauucagggagaucuaccu

SEQ ID NO: 3150443 - RNA, 19 nt, Artificial Sequence
  Description of Artificial Sequence: Synthetic oligonucleotide
uucagggagaucuaccugc

SEQ ID NO: 3150444 - RNA, 19 nt, Artificial Sequence
  Description of Artificial Sequence: Synthetic oligonucleotide
agaucuaccugcuucuguc

SEQ ID NO: 3150445 - RNA, 19 nt, Artificial Sequence
  Description of Artificial Sequence: Synthetic oligonucleotide
uaauucagggagaucuacc

SEQ ID NO: 3150446 - RNA, 19 nt, Artificial Sequence
  Description of Artificial Sequence: Synthetic oligonucleotide
uuuauugaaggaugggcuc

SEQ ID NO: 3150447 - RNA, 19 nt, Artificial Sequence
  Description of Artificial Sequence: Synthetic oligonucleotide
gaaggaugggcucuucuug

SEQ ID NO: 3150448 - RNA, 19 nt, Artificial Sequence
  Description of Artificial Sequence: Synthetic oligonucleotide
aaggaugggcucuucuuga

SEQ ID NO: 3150449 - RNA, 19 nt, Artificial Sequence
  Description of Artificial Sequence: Synthetic oligonucleotide
ggcccuguaauucagggag

SEQ ID NO: 3150450 - RNA, 19 nt, Artificial Sequence
  Description of Artificial Sequence: Synthetic oligonucleotide
uugaacucacucuguagac

SEQ ID NO: 3150451 - RNA, 19 nt, Artificial Sequence
  Description of Artificial Sequence: Synthetic oligonucleotide
uuauugaaggaugggcucu

SEQ ID NO: 3150452 - RNA, 19 nt, Artificial Sequence
  Description of Artificial Sequence: Synthetic oligonucleotide
acuagucuggcccuguaau

SEQ ID NO: 3150453 - RNA, 19 nt, Artificial Sequence
  Description of Artificial Sequence: Synthetic oligonucleotide
uguagacuagucuggcccu

SEQ ID NO: 3150454 - RNA, 19 nt, Artificial Sequence
  Description of Artificial Sequence: Synthetic oligonucleotide
cuggcccuguaauucaggg

SEQ ID NO: 3150455 - RNA, 19 nt, Artificial Sequence
  Description of Artificial Sequence: Synthetic oligonucleotide
ucuggcccuguaauucagg

SEQ ID NO: 3150456 - RNA, 19 nt, Artificial Sequence
  Description of Artificial Sequence: Synthetic oligonucleotide
uucuugaacucacucugua

SEQ ID NO: 3150457 - RNA, 19 nt, Artificial Sequence
  Description of Artificial Sequence: Synthetic oligonucleotide
uguaauucagggagaucua

SEQ ID NO: 3150458 - RNA, 19 nt, Artificial Sequence
  Description of Artificial Sequence: Synthetic oligonucleotide
uugaaggaugggcucuucu

SEQ ID NO: 3150459 - RNA, 19 nt, Artificial Sequence
  Description of Artificial Sequence: Synthetic oligonucleotide
cuguaauucagggagaucu

SEQ ID NO: 3150460 - RNA, 19 nt, Artificial Sequence
  Description of Artificial Sequence: Synthetic oligonucleotide
ucagggagaucuaccugcu

SEQ ID NO: 3150461 - RNA, 19 nt, Artificial Sequence
  Description of Artificial Sequence: Synthetic oligonucleotide
guaauucagggagaucuac

SEQ ID NO: 3150462 - RNA, 19 nt, Artificial Sequence
  Description of Artificial Sequence: Synthetic oligonucleotide
ucuaccugcuucugucuuc

SEQ ID NO: 3150463 - RNA, 19 nt, Artificial Sequence
  Description of Artificial Sequence: Synthetic oligonucleotide
agucuggcccuguaauuca

SEQ ID NO: 3150464 - RNA, 19 nt, Artificial Sequence
  Description of Artificial Sequence: Synthetic oligonucleotide
cuaccugcuucugucuucc

SEQ ID NO: 3150465 - RNA, 19 nt, Artificial Sequence
  Description of Artificial Sequence: Synthetic oligonucleotide
cucacucuguagacuaguc

SEQ ID NO: 3150466 - RNA, 19 nt, Artificial Sequence
  Description of Artificial Sequence: Synthetic oligonucleotide
accugcuucugucuuccca

SEQ ID NO: 3150467 - RNA, 19 nt, Artificial Sequence
  Description of Artificial Sequence: Synthetic oligonucleotide
uggcccuguaauucaggga

SEQ ID NO: 3150468 - RNA, 19 nt, Artificial Sequence
  Description of Artificial Sequence: Synthetic oligonucleotide
auugaaggaugggcucuuc

SEQ ID NO: 3150469 - RNA, 19 nt, Artificial Sequence
  Description of Artificial Sequence: Synthetic oligonucleotide
ugggcucuucuugaacuca

SEQ ID NO: 3150470 - RNA, 19 nt, Artificial Sequence
  Description of Artificial Sequence: Synthetic oligonucleotide
cucuucuugaacucacucu

SEQ ID NO: 3150471 - RNA, 19 nt, Artificial Sequence
  Description of Artificial Sequence: Synthetic oligonucleotide
aucuaccugcuucugucuu

SEQ ID NO: 3150472 - RNA, 19 nt, Artificial Sequence
  Description of Artificial Sequence: Synthetic oligonucleotide
gacuagucuggcccuguaa

SEQ ID NO: 3150473 - RNA, 19 nt, Artificial Sequence
  Description of Artificial Sequence: Synthetic oligonucleotide
uauugaaggaugggcucuu

SEQ ID NO: 3150474 - RNA, 19 nt, Artificial Sequence
  Description of Artificial Sequence: Synthetic oligonucleotide
gcucuucuugaacucacuc

SEQ ID NO: 3150475 - RNA, 19 nt, Artificial Sequence
  Description of Artificial Sequence: Synthetic oligonucleotide
aggaugggcucuucuugaa

SEQ ID NO: 3150476 - RNA, 19 nt, Artificial Sequence
  Description of Artificial Sequence: Synthetic oligonucleotide
uagacuagucuggcccugu

SEQ ID NO: 3150477 - RNA, 19 nt, Artificial Sequence
  Description of Artificial Sequence: Synthetic oligonucleotide
guagacuagucuggcccug

SEQ ID NO: 3150478 - RNA, 19 nt, Artificial Sequence
  Description of Artificial Sequence: Synthetic oligonucleotide
ggaugggcucuucuugaac

SEQ ID NO: 3150479 - RNA, 19 nt, Artificial Sequence
  Description of Artificial Sequence: Synthetic oligonucleotide
ucuucccagugcugggauu

SEQ ID NO: 3150480 - RNA, 19 nt, Artificial Sequence
  Description of Artificial Sequence: Synthetic oligonucleotide
gucuggcccuguaauucag

SEQ ID NO: 3150481 - RNA, 19 nt, Artificial Sequence
  Description of Artificial Sequence: Synthetic oligonucleotide
cuucccagugcugggauua

SEQ ID NO: 3150482 - RNA, 19 nt, Artificial Sequence
  Description of Artificial Sequence: Synthetic oligonucleotide
uaccugcuucugucuuccc

SEQ ID NO: 3150483 - RNA, 19 nt, Artificial Sequence
  Description of Artificial Sequence: Synthetic oligonucleotide
agacuagucuggcccugua

SEQ ID NO: 3150484 - RNA, 19 nt, Artificial Sequence
  Description of Artificial Sequence: Synthetic oligonucleotide
cuagucuggcccuguaauu

SEQ ID NO: 3150485 - RNA, 19 nt, Artificial Sequence
  Description of Artificial Sequence: Synthetic oligonucleotide
uucccagugcugggauuaa

SEQ ID NO: 3150486 - RNA, 19 nt, Artificial Sequence
  Description of Artificial Sequence: Synthetic oligonucleotide
gggcucuucuugaacucac

SEQ ID NO: 3150487 - RNA, 19 nt, Artificial Sequence
  Description of Artificial Sequence: Synthetic oligonucleotide
gucuucccagugcugggau

SEQ ID NO: 3150488 - RNA, 19 nt, Artificial Sequence
  Description of Artificial Sequence: Synthetic oligonucleotide
ccuguaauucagggagauc

SEQ ID NO: 3150489 - RNA, 19 nt, Artificial Sequence
  Description of Artificial Sequence: Synthetic oligonucleotide
gcccuguaauucagggaga

SEQ ID NO: 3150490 - RNA, 19 nt, Artificial Sequence
  Description of Artificial Sequence: Synthetic oligonucleotide
ggcucuucuugaacucacu

SEQ ID NO: 3150491 - RNA, 19 nt, Artificial Sequence
  Description of Artificial Sequence: Synthetic oligonucleotide
cccuguaauucagggagau

SEQ ID NO: 3150492 - RNA, 19 nt, Artificial Sequence
  Description of Artificial Sequence: Synthetic oligonucleotide
cagggagaucuaccugcuu

SEQ ID NO: 3150493 - RNA, 19 nt, Artificial Sequence
  Description of Artificial Sequence: Synthetic oligonucleotide
aaacaugucuuuccaacac

SEQ ID NO: 3150494 - RNA, 19 nt, Artificial Sequence
  Description of Artificial Sequence: Synthetic oligonucleotide
ucaaacucaaaaguuaaug

SEQ ID NO: 3150495 - RNA, 19 nt, Artificial Sequence
  Description of Artificial Sequence: Synthetic oligonucleotide
aaacucaaaaguuaaugua

SEQ ID NO: 3150496 - RNA, 19 nt, Artificial Sequence
  Description of Artificial Sequence: Synthetic oligonucleotide
aaaacaugucuuuccaaca

SEQ ID NO: 3150497 - RNA, 19 nt, Artificial Sequence
  Description of Artificial Sequence: Synthetic oligonucleotide
cuugccucaaacucaaaag

SEQ ID NO: 3150498 - RNA, 19 nt, Artificial Sequence
  Description of Artificial Sequence: Synthetic oligonucleotide
augucuuuccaacacauga

SEQ ID NO: 3150499 - RNA, 19 nt, Artificial Sequence
  Description of Artificial Sequence: Synthetic oligonucleotide
cuuuccaacacaugaaguc

SEQ ID NO: 3150500 - RNA, 19 nt, Artificial Sequence
  Description of Artificial Sequence: Synthetic oligonucleotide
uugccucaaacucaaaagu

SEQ ID NO: 3150501 - RNA, 19 nt, Artificial Sequence
  Description of Artificial Sequence: Synthetic oligonucleotide
aacaugucuuuccaacaca

SEQ ID NO: 3150502 - RNA, 19 nt, Artificial Sequence
  Description of Artificial Sequence: Synthetic oligonucleotide
ucuuuccaacacaugaagu

SEQ ID NO: 3150503 - RNA, 19 nt, Artificial Sequence
  Description of Artificial Sequence: Synthetic oligonucleotide
gucuuuccaacacaugaag

SEQ ID NO: 3150504 - RNA, 19 nt, Artificial Sequence
  Description of Artificial Sequence: Synthetic oligonucleotide
uuccaacacaugaagucug

SEQ ID NO: 3150505 - RNA, 19 nt, Artificial Sequence
  Description of Artificial Sequence: Synthetic oligonucleotide
ugccucaaacucaaaaguu

SEQ ID NO: 3150506 - RNA, 19 nt, Artificial Sequence
  Description of Artificial Sequence: Synthetic oligonucleotide
caaacucaaaaguuaaugu

SEQ ID NO: 3150507 - RNA, 19 nt, Artificial Sequence
  Description of Artificial Sequence: Synthetic oligonucleotide
uccaacacaugaagucugu

SEQ ID NO: 3150508 - RNA, 19 nt, Artificial Sequence
  Description of Artificial Sequence: Synthetic oligonucleotide
caugucuuuccaacacaug

SEQ ID NO: 3150509 - RNA, 19 nt, Artificial Sequence
  Description of Artificial Sequence: Synthetic oligonucleotide
acaugucuuuccaacacau

SEQ ID NO: 3150510 - RNA, 19 nt, Artificial Sequence
  Description of Artificial Sequence: Synthetic oligonucleotide
gcuugccucaaacucaaaa

SEQ ID NO: 3150511 - RNA, 19 nt, Artificial Sequence
  Description of Artificial Sequence: Synthetic oligonucleotide
ccucaaacucaaaaguuaa

SEQ ID NO: 3150512 - RNA, 19 nt, Artificial Sequence
  Description of Artificial Sequence: Synthetic oligonucleotide
cucaaacucaaaaguuaau

SEQ ID NO: 3150513 - RNA, 19 nt, Artificial Sequence
  Description of Artificial Sequence: Synthetic oligonucleotide
gccucaaacucaaaaguua

SEQ ID NO: 3150514 - RNA, 19 nt, Artificial Sequence
  Description of Artificial Sequence: Synthetic oligonucleotide
ggcuugccucaaacucaaa

SEQ ID NO: 3150515 - RNA, 19 nt, Artificial Sequence
  Description of Artificial Sequence: Synthetic oligonucleotide
aaugaagaaagagaguucg

SEQ ID NO: 3150516 - RNA, 19 nt, Artificial Sequence
  Description of Artificial Sequence: Synthetic oligonucleotide
aaagccuccaaguucacuc

SEQ ID NO: 3150517 - RNA, 19 nt, Artificial Sequence
  Description of Artificial Sequence: Synthetic oligonucleotide
uccaaguucacucuccagg

SEQ ID NO: 3150518 - RNA, 19 nt, Artificial Sequence
  Description of Artificial Sequence: Synthetic oligonucleotide
aaggucagaaucuugucca

SEQ ID NO: 3150519 - RNA, 19 nt, Artificial Sequence
  Description of Artificial Sequence: Synthetic oligonucleotide
agagaguucgcccaaguag

SEQ ID NO: 3150520 - RNA, 19 nt, Artificial Sequence
  Description of Artificial Sequence: Synthetic oligonucleotide
aagaaagagaguucgccca

SEQ ID NO: 3150521 - RNA, 19 nt, Artificial Sequence
  Description of Artificial Sequence: Synthetic oligonucleotide
caagugcugagcuaaagcc

SEQ ID NO: 3150522 - RNA, 19 nt, Artificial Sequence
  Description of Artificial Sequence: Synthetic oligonucleotide
gaagaaagagaguucgccc

SEQ ID NO: 3150523 - RNA, 19 nt, Artificial Sequence
  Description of Artificial Sequence: Synthetic oligonucleotide
ucugucuacccucaccagg

SEQ ID NO: 3150524 - RNA, 19 nt, Artificial Sequence
  Description of Artificial Sequence: Synthetic oligonucleotide
ugagcuaaagccuccaagu

SEQ ID NO: 3150525 - RNA, 19 nt, Artificial Sequence
  Description of Artificial Sequence: Synthetic oligonucleotide
gaaggucagaaucuugucc

SEQ ID NO: 3150526 - RNA, 19 nt, Artificial Sequence
  Description of Artificial Sequence: Synthetic oligonucleotide
ugaagaaagagaguucgcc

SEQ ID NO: 3150527 - RNA, 19 nt, Artificial Sequence
  Description of Artificial Sequence: Synthetic oligonucleotide
ucuacccucaccagguuag

SEQ ID NO: 3150528 - RNA, 19 nt, Artificial Sequence
  Description of Artificial Sequence: Synthetic oligonucleotide
aggagaaucgucugucuac

SEQ ID NO: 3150529 - RNA, 19 nt, Artificial Sequence
  Description of Artificial Sequence: Synthetic oligonucleotide
agcuaaagccuccaaguuc

SEQ ID NO: 3150530 - RNA, 19 nt, Artificial Sequence
  Description of Artificial Sequence: Synthetic oligonucleotide
ucacucuccaggagaaucg

SEQ ID NO: 3150531 - RNA, 19 nt, Artificial Sequence
  Description of Artificial Sequence: Synthetic oligonucleotide
aaguucacucuccaggaga

SEQ ID NO: 3150532 - RNA, 19 nt, Artificial Sequence
  Description of Artificial Sequence: Synthetic oligonucleotide
uggaaggucagaaucuugu

SEQ ID NO: 3150533 - RNA, 19 nt, Artificial Sequence
  Description of Artificial Sequence: Synthetic oligonucleotide
gagaguucgcccaaguagg

SEQ ID NO: 3150534 - RNA, 19 nt, Artificial Sequence
  Description of Artificial Sequence: Synthetic oligonucleotide
ccaaguaggauucacauug

SEQ ID NO: 3150535 - RNA, 19 nt, Artificial Sequence
  Description of Artificial Sequence: Synthetic oligonucleotide
auucacauuguuguggaag

SEQ ID NO: 3150536 - RNA, 19 nt, Artificial Sequence
  Description of Artificial Sequence: Synthetic oligonucleotide
guuguggaaggucagaauc

SEQ ID NO: 3150537 - RNA, 19 nt, Artificial Sequence
  Description of Artificial Sequence: Synthetic oligonucleotide
guaggauucacauuguugu

SEQ ID NO: 3150538 - RNA, 19 nt, Artificial Sequence
  Description of Artificial Sequence: Synthetic oligonucleotide
cagaaucuuguccaagugc

SEQ ID NO: 3150539 - RNA, 19 nt, Artificial Sequence
  Description of Artificial Sequence: Synthetic oligonucleotide
aggauucacauuguugugg

SEQ ID NO: 3150540 - RNA, 19 nt, Artificial Sequence
  Description of Artificial Sequence: Synthetic oligonucleotide
uuguggaaggucagaaucu

SEQ ID NO: 3150541 - RNA, 19 nt, Artificial Sequence
  Description of Artificial Sequence: Synthetic oligonucleotide
agaaucuuguccaagugcu

SEQ ID NO: 3150542 - RNA, 19 nt, Artificial Sequence
  Description of Artificial Sequence: Synthetic oligonucleotide
aaagagaguucgcccaagu

SEQ ID NO: 3150543 - RNA, 19 nt, Artificial Sequence
  Description of Artificial Sequence: Synthetic oligonucleotide
aguaggauucacauuguug

SEQ ID NO: 3150544 - RNA, 19 nt, Artificial Sequence
  Description of Artificial Sequence: Synthetic oligonucleotide
agugcugagcuaaagccuc

SEQ ID NO: 3150545 - RNA, 19 nt, Artificial Sequence
  Description of Artificial Sequence: Synthetic oligonucleotide
gaaucgucugucuacccuc

SEQ ID NO: 3150546 - RNA, 19 nt, Artificial Sequence
  Description of Artificial Sequence: Synthetic oligonucleotide
cugagcuaaagccuccaag

SEQ ID NO: 3150547 - RNA, 19 nt, Artificial Sequence
  Description of Artificial Sequence: Synthetic oligonucleotide
caaugaagaaagagaguuc

SEQ ID NO: 3150548 - RNA, 19 nt, Artificial Sequence
  Description of Artificial Sequence: Synthetic oligonucleotide
uaggauucacauuguugug

SEQ ID NO: 3150549 - RNA, 19 nt, Artificial Sequence
  Description of Artificial Sequence: Synthetic oligonucleotide
augaagaaagagaguucgc

SEQ ID NO: 3150550 - RNA, 19 nt, Artificial Sequence
  Description of Artificial Sequence: Synthetic oligonucleotide
uguccaagugcugagcuaa

SEQ ID NO: 3150551 - RNA, 19 nt, Artificial Sequence
  Description of Artificial Sequence: Synthetic oligonucleotide
aagugcugagcuaaagccu

SEQ ID NO: 3150552 - RNA, 19 nt, Artificial Sequence
  Description of Artificial Sequence: Synthetic oligonucleotide
aagccuccaaguucacucu

SEQ ID NO: 3150553 - RNA, 19 nt, Artificial Sequence
  Description of Artificial Sequence: Synthetic oligonucleotide
cauuguuguggaaggucag

SEQ ID NO: 3150554 - RNA, 19 nt, Artificial Sequence
  Description of Artificial Sequence: Synthetic oligonucleotide
acauuguuguggaagguca

SEQ ID NO: 3150555 - RNA, 19 nt, Artificial Sequence
  Description of Artificial Sequence: Synthetic oligonucleotide
aucuuguccaagugcugag

SEQ ID NO: 3150556 - RNA, 19 nt, Artificial Sequence
  Description of Artificial Sequence: Synthetic oligonucleotide
caccagguuagugagcagg

SEQ ID NO: 3150557 - RNA, 19 nt, Artificial Sequence
  Description of Artificial Sequence: Synthetic oligonucleotide
aagagaguucgcccaagua

SEQ ID NO: 3150558 - RNA, 19 nt, Artificial Sequence
  Description of Artificial Sequence: Synthetic oligonucleotide
ucuccaggagaaucgucug

SEQ ID NO: 3150559 - RNA, 19 nt, Artificial Sequence
  Description of Artificial Sequence: Synthetic oligonucleotide
ucgucugucuacccucacc

SEQ ID NO: 3150560 - RNA, 19 nt, Artificial Sequence
  Description of Artificial Sequence: Synthetic oligonucleotide
aaguaggauucacauuguu

SEQ ID NO: 3150561 - RNA, 19 nt, Artificial Sequence
  Description of Artificial Sequence: Synthetic oligonucleotide
acccucaccagguuaguga

SEQ ID NO: 3150562 - RNA, 19 nt, Artificial Sequence
  Description of Artificial Sequence: Synthetic oligonucleotide
aguucgcccaaguaggauu

SEQ ID NO: 3150563 - RNA, 19 nt, Artificial Sequence
  Description of Artificial Sequence: Synthetic oligonucleotide
uuguuguggaaggucagaa

SEQ ID NO: 3150564 - RNA, 19 nt, Artificial Sequence
  Description of Artificial Sequence: Synthetic oligonucleotide
gagaaucgucugucuaccc

SEQ ID NO: 3150565 - RNA, 19 nt, Artificial Sequence
  Description of Artificial Sequence: Synthetic oligonucleotide
agaaagagaguucgcccaa

SEQ ID NO: 3150566 - RNA, 19 nt, Artificial Sequence
  Description of Artificial Sequence: Synthetic oligonucleotide
uccaagugcugagcuaaag

SEQ ID NO: 3150567 - RNA, 19 nt, Artificial Sequence
  Description of Artificial Sequence: Synthetic oligonucleotide
ucuuguccaagugcugagc

SEQ ID NO: 3150568 - RNA, 19 nt, Artificial Sequence
  Description of Artificial Sequence: Synthetic oligonucleotide
gcuaaagccuccaaguuca

SEQ ID NO: 3150569 - RNA, 19 nt, Artificial Sequence
  Description of Artificial Sequence: Synthetic oligonucleotide
uccaggagaaucgucuguc

SEQ ID NO: 3150570 - RNA, 19 nt, Artificial Sequence
  Description of Artificial Sequence: Synthetic oligonucleotide
cacauuguuguggaagguc

SEQ ID NO: 3150571 - RNA, 19 nt, Artificial Sequence
  Description of Artificial Sequence: Synthetic oligonucleotide
ccaagugcugagcuaaagc

SEQ ID NO: 3150572 - RNA, 19 nt, Artificial Sequence
  Description of Artificial Sequence: Synthetic oligonucleotide
gaaucuuguccaagugcug

SEQ ID NO: 3150573 - RNA, 19 nt, Artificial Sequence
  Description of Artificial Sequence: Synthetic oligonucleotide
cucaccagguuagugagca

SEQ ID NO: 3150574 - RNA, 19 nt, Artificial Sequence
  Description of Artificial Sequence: Synthetic oligonucleotide
auuguuguggaaggucaga

SEQ ID NO: 3150575 - RNA, 19 nt, Artificial Sequence
  Description of Artificial Sequence: Synthetic oligonucleotide
ggauucacauuguugugga

SEQ ID NO: 3150576 - RNA, 19 nt, Artificial Sequence
  Description of Artificial Sequence: Synthetic oligonucleotide
aaucgucugucuacccuca

SEQ ID NO: 3150577 - RNA, 19 nt, Artificial Sequence
  Description of Artificial Sequence: Synthetic oligonucleotide
uguggaaggucagaaucuu

SEQ ID NO: 3150578 - RNA, 19 nt, Artificial Sequence
  Description of Artificial Sequence: Synthetic oligonucleotide
uaaagccuccaaguucacu

SEQ ID NO: 3150579 - RNA, 19 nt, Artificial Sequence
  Description of Artificial Sequence: Synthetic oligonucleotide
aucgucugucuacccucac

SEQ ID NO: 3150580 - RNA, 19 nt, Artificial Sequence
  Description of Artificial Sequence: Synthetic oligonucleotide
ggagaaucgucugucuacc

SEQ ID NO: 3150581 - RNA, 19 nt, Artificial Sequence
  Description of Artificial Sequence: Synthetic oligonucleotide
cuccaaguucacucuccag

SEQ ID NO: 3150582 - RNA, 19 nt, Artificial Sequence
  Description of Artificial Sequence: Synthetic oligonucleotide
cucuccaggagaaucgucu

SEQ ID NO: 3150583 - RNA, 19 nt, Artificial Sequence
  Description of Artificial Sequence: Synthetic oligonucleotide
gucugucuacccucaccag

SEQ ID NO: 3150584 - RNA, 19 nt, Artificial Sequence
  Description of Artificial Sequence: Synthetic oligonucleotide
gauucacauuguuguggaa

SEQ ID NO: 3150585 - RNA, 19 nt, Artificial Sequence
  Description of Artificial Sequence: Synthetic oligonucleotide
ggaaggucagaaucuuguc

SEQ ID NO: 3150586 - RNA, 19 nt, Artificial Sequence
  Description of Artificial Sequence: Synthetic oligonucleotide
cuaaagccuccaaguucac

SEQ ID NO: 3150587 - RNA, 19 nt, Artificial Sequence
  Description of Artificial Sequence: Synthetic oligonucleotide
guucgcccaaguaggauuc

SEQ ID NO: 3150588 - RNA, 19 nt, Artificial Sequence
  Description of Artificial Sequence: Synthetic oligonucleotide
uacccucaccagguuagug

SEQ ID NO: 3150589 - RNA, 19 nt, Artificial Sequence
  Description of Artificial Sequence: Synthetic oligonucleotide
ugcugagcuaaagccucca

SEQ ID NO: 3150590 - RNA, 19 nt, Artificial Sequence
  Description of Artificial Sequence: Synthetic oligonucleotide
cuuguccaagugcugagcu

SEQ ID NO: 3150591 - RNA, 19 nt, Artificial Sequence
  Description of Artificial Sequence: Synthetic oligonucleotide
accagguuagugagcagga

SEQ ID NO: 3150592 - RNA, 19 nt, Artificial Sequence
  Description of Artificial Sequence: Synthetic oligonucleotide
cugucuacccucaccaggu

SEQ ID NO: 3150593 - RNA, 19 nt, Artificial Sequence
  Description of Artificial Sequence: Synthetic oligonucleotide
aggucagaaucuuguccaa

SEQ ID NO: 3150594 - RNA, 19 nt, Artificial Sequence
  Description of Artificial Sequence: Synthetic oligonucleotide
acucuccaggagaaucguc

SEQ ID NO: 3150595 - RNA, 19 nt, Artificial Sequence
  Description of Artificial Sequence: Synthetic oligonucleotide
cccucaccagguuagugag

SEQ ID NO: 3150596 - RNA, 19 nt, Artificial Sequence
  Description of Artificial Sequence: Synthetic oligonucleotide
ccaaguucacucuccagga

SEQ ID NO: 3150597 - RNA, 19 nt, Artificial Sequence
  Description of Artificial Sequence: Synthetic oligonucleotide
gagcuaaagccuccaaguu

SEQ ID NO: 3150598 - RNA, 19 nt, Artificial Sequence
  Description of Artificial Sequence: Synthetic oligonucleotide
ccaaugaagaaagagaguu

SEQ ID NO: 3150599 - RNA, 19 nt, Artificial Sequence
  Description of Artificial Sequence: Synthetic oligonucleotide
agaguucgcccaaguagga

SEQ ID NO: 3150600 - RNA, 19 nt, Artificial Sequence
  Description of Artificial Sequence: Synthetic oligonucleotide
ucgcccaaguaggauucac

SEQ ID NO: 3150601 - RNA, 19 nt, Artificial Sequence
  Description of Artificial Sequence: Synthetic oligonucleotide
ugucuacccucaccagguu

SEQ ID NO: 3150602 - RNA, 19 nt, Artificial Sequence
  Description of Artificial Sequence: Synthetic oligonucleotide
caggagaaucgucugucua

SEQ ID NO: 3150603 - RNA, 19 nt, Artificial Sequence
  Description of Artificial Sequence: Synthetic oligonucleotide
gucuacccucaccagguua

SEQ ID NO: 3150604 - RNA, 19 nt, Artificial Sequence
  Description of Artificial Sequence: Synthetic oligonucleotide
caaguaggauucacauugu

SEQ ID NO: 3150605 - RNA, 19 nt, Artificial Sequence
  Description of Artificial Sequence: Synthetic oligonucleotide
uucgcccaaguaggauuca

SEQ ID NO: 3150606 - RNA, 19 nt, Artificial Sequence
  Description of Artificial Sequence: Synthetic oligonucleotide
cgucugucuacccucacca

SEQ ID NO: 3150607 - RNA, 19 nt, Artificial Sequence
  Description of Artificial Sequence: Synthetic oligonucleotide
gccuccaaguucacucucc

SEQ ID NO: 3150608 - RNA, 19 nt, Artificial Sequence
  Description of Artificial Sequence: Synthetic oligonucleotide
gcccaaguaggauucacau

SEQ ID NO: 3150609 - RNA, 19 nt, Artificial Sequence
  Description of Artificial Sequence: Synthetic oligonucleotide
ccucaccagguuagugagc

SEQ ID NO: 3150610 - RNA, 19 nt, Artificial Sequence
  Description of Artificial Sequence: Synthetic oligonucleotide
cuccaggagaaucgucugu

SEQ ID NO: 3150611 - RNA, 19 nt, Artificial Sequence
  Description of Artificial Sequence: Synthetic oligonucleotide
ccuccaaguucacucucca

SEQ ID NO: 3150612 - RNA, 19 nt, Artificial Sequence
  Description of Artificial Sequence: Synthetic oligonucleotide
gaguucgcccaaguaggau

SEQ ID NO: 3150613 - RNA, 19 nt, Artificial Sequence
  Description of Artificial Sequence: Synthetic oligonucleotide
gcugagcuaaagccuccaa

SEQ ID NO: 3150614 - RNA, 19 nt, Artificial Sequence
  Description of Artificial Sequence: Synthetic oligonucleotide
cacucuccaggagaaucgu

SEQ ID NO: 3150615 - RNA, 19 nt, Artificial Sequence
  Description of Artificial Sequence: Synthetic oligonucleotide
guccaagugcugagcuaaa

SEQ ID NO: 3150616 - RNA, 19 nt, Artificial Sequence
  Description of Artificial Sequence: Synthetic oligonucleotide
cgcccaaguaggauucaca

SEQ ID NO: 3150617 - RNA, 19 nt, Artificial Sequence
  Description of Artificial Sequence: Synthetic oligonucleotide
ccaggagaaucgucugucu

SEQ ID NO: 3150618 - RNA, 19 nt, Artificial Sequence
  Description of Artificial Sequence: Synthetic oligonucleotide
guucacucuccaggagaau

SEQ ID NO: 3150619 - RNA, 19 nt, Artificial Sequence
  Description of Artificial Sequence: Synthetic oligonucleotide
cccaaguaggauucacauu

SEQ ID NO: 3150620 - RNA, 19 nt, Artificial Sequence
  Description of Artificial Sequence: Synthetic oligonucleotide
cuacccucaccagguuagu

SEQ ID NO: 3150621 - RNA, 19 nt, Artificial Sequence
  Description of Artificial Sequence: Synthetic oligonucleotide
ccagguuagugagcaggaa

SEQ ID NO: 3150622 - RNA, 19 nt, Artificial Sequence
  Description of Artificial Sequence: Synthetic oligonucleotide
uggagcacgccuuuaaucc

SEQ ID NO: 3150623 - RNA, 19 nt, Artificial Sequence
  Description of Artificial Sequence: Synthetic oligonucleotide
caaagcugcacagagaaac

SEQ ID NO: 3150624 - RNA, 19 nt, Artificial Sequence
  Description of Artificial Sequence: Synthetic oligonucleotide
aaagcugcacagagaaacc

SEQ ID NO: 3150625 - RNA, 19 nt, Artificial Sequence
  Description of Artificial Sequence: Synthetic oligonucleotide
aagcugcacagagaaaccc

SEQ ID NO: 3150626 - RNA, 19 nt, Artificial Sequence
  Description of Artificial Sequence: Synthetic oligonucleotide
agagagugccaggauaggc

SEQ ID NO: 3150627 - RNA, 19 nt, Artificial Sequence
  Description of Artificial Sequence: Synthetic oligonucleotide
agagagagugccaggauag

SEQ ID NO: 3150628 - RNA, 19 nt, Artificial Sequence
  Description of Artificial Sequence: Synthetic oligonucleotide
gggucucugaguucgaggc

SEQ ID NO: 3150629 - RNA, 19 nt, Artificial Sequence
  Description of Artificial Sequence: Synthetic oligonucleotide
cuacagagagagugccagg

SEQ ID NO: 3150630 - RNA, 19 nt, Artificial Sequence
  Description of Artificial Sequence: Synthetic oligonucleotide
aggcgggucucugaguucg

SEQ ID NO: 3150631 - RNA, 19 nt, Artificial Sequence
  Description of Artificial Sequence: Synthetic oligonucleotide
guggagcacgccuuuaauc

SEQ ID NO: 3150632 - RNA, 19 nt, Artificial Sequence
  Description of Artificial Sequence: Synthetic oligonucleotide
gagagagugccaggauagg

SEQ ID NO: 3150633 - RNA, 19 nt, Artificial Sequence
  Description of Artificial Sequence: Synthetic oligonucleotide
ugguggagcacgccuuuaa

SEQ ID NO: 3150634 - RNA, 19 nt, Artificial Sequence
  Description of Artificial Sequence: Synthetic oligonucleotide
gagagugccaggauaggcu

SEQ ID NO: 3150635 - RNA, 19 nt, Artificial Sequence
  Description of Artificial Sequence: Synthetic oligonucleotide
auugguggagcacgccuuu

SEQ ID NO: 3150636 - RNA, 19 nt, Artificial Sequence
  Description of Artificial Sequence: Synthetic oligonucleotide
agcugcacagagaaacccu

SEQ ID NO: 3150637 - RNA, 19 nt, Artificial Sequence
  Description of Artificial Sequence: Synthetic oligonucleotide
ggucucugaguucgaggcc

SEQ ID NO: 3150638 - RNA, 19 nt, Artificial Sequence
  Description of Artificial Sequence: Synthetic oligonucleotide
gcugcacagagaaacccug

SEQ ID NO: 3150639 - RNA, 19 nt, Artificial Sequence
  Description of Artificial Sequence: Synthetic oligonucleotide
ggaggcaggggcaggcggg

SEQ ID NO: 3150640 - RNA, 19 nt, Artificial Sequence
  Description of Artificial Sequence: Synthetic oligonucleotide
gagcacgccuuuaauccua

SEQ ID NO: 3150641 - RNA, 19 nt, Artificial Sequence
  Description of Artificial Sequence: Synthetic oligonucleotide
cgggucucugaguucgagg

SEQ ID NO: 3150642 - RNA, 19 nt, Artificial Sequence
  Description of Artificial Sequence: Synthetic oligonucleotide
caggcgggucucugaguuc

SEQ ID NO: 3150643 - RNA, 19 nt, Artificial Sequence
  Description of Artificial Sequence: Synthetic oligonucleotide
uugguggagcacgccuuua

SEQ ID NO: 3150644 - RNA, 19 nt, Artificial Sequence
  Description of Artificial Sequence: Synthetic oligonucleotide
ggagcacgccuuuaauccu

SEQ ID NO: 3150645 - RNA, 19 nt, Artificial Sequence
  Description of Artificial Sequence: Synthetic oligonucleotide
aggggcaggcgggucucug

SEQ ID NO: 3150646 - RNA, 19 nt, Artificial Sequence
  Description of Artificial Sequence: Synthetic oligonucleotide
gguggagcacgccuuuaau

SEQ ID NO: 3150647 - RNA, 19 nt, Artificial Sequence
  Description of Artificial Sequence: Synthetic oligonucleotide
gcaggcgggucucugaguu

SEQ ID NO: 3150648 - RNA, 19 nt, Artificial Sequence
  Description of Artificial Sequence: Synthetic oligonucleotide
gcgggucucugaguucgag

SEQ ID NO: 3150649 - RNA, 19 nt, Artificial Sequence
  Description of Artificial Sequence: Synthetic oligonucleotide
ccaaagcugcacagagaaa

SEQ ID NO: 3150650 - RNA, 19 nt, Artificial Sequence
  Description of Artificial Sequence: Synthetic oligonucleotide
gaggcaggggcaggcgggu

SEQ ID NO: 3150651 - RNA, 19 nt, Artificial Sequence
  Description of Artificial Sequence: Synthetic oligonucleotide
ggcaggggcaggcgggucu

SEQ ID NO: 3150652 - RNA, 19 nt, Artificial Sequence
  Description of Artificial Sequence: Synthetic oligonucleotide
caggggcaggcgggucucu

SEQ ID NO: 3150653 - RNA, 19 nt, Artificial Sequence
  Description of Artificial Sequence: Synthetic oligonucleotide
aauacgucuacugacacuc

SEQ ID NO: 3150654 - RNA, 19 nt, Artificial Sequence
  Description of Artificial Sequence: Synthetic oligonucleotide
uucugcaacauucugaaug

SEQ ID NO: 3150655 - RNA, 19 nt, Artificial Sequence
  Description of Artificial Sequence: Synthetic oligonucleotide
uaaacuagcugucuguucc

SEQ ID NO: 3150656 - RNA, 19 nt, Artificial Sequence
  Description of Artificial Sequence: Synthetic oligonucleotide
aacauucugaaugugaaca

SEQ ID NO: 3150657 - RNA, 19 nt, Artificial Sequence
  Description of Artificial Sequence: Synthetic oligonucleotide
uguuccagaauccaaguga

SEQ ID NO: 3150658 - RNA, 19 nt, Artificial Sequence
  Description of Artificial Sequence: Synthetic oligonucleotide
ucuacugacacucccagcu

SEQ ID NO: 3150659 - RNA, 19 nt, Artificial Sequence
  Description of Artificial Sequence: Synthetic oligonucleotide
uaaauguucaugcucuugu

SEQ ID NO: 3150660 - RNA, 19 nt, Artificial Sequence
  Description of Artificial Sequence: Synthetic oligonucleotide
uguaauacgucuacugaca

SEQ ID NO: 3150661 - RNA, 19 nt, Artificial Sequence
  Description of Artificial Sequence: Synthetic oligonucleotide
uguuucacuaaacuagcug

SEQ ID NO: 3150662 - RNA, 19 nt, Artificial Sequence
  Description of Artificial Sequence: Synthetic oligonucleotide
aauguucaugcucuugugu

SEQ ID NO: 3150663 - RNA, 19 nt, Artificial Sequence
  Description of Artificial Sequence: Synthetic oligonucleotide
cuuguguucugcaacauuc

SEQ ID NO: 3150664 - RNA, 19 nt, Artificial Sequence
  Description of Artificial Sequence: Synthetic oligonucleotide
uccagaauccaagugaggc

SEQ ID NO: 3150665 - RNA, 19 nt, Artificial Sequence
  Description of Artificial Sequence: Synthetic oligonucleotide
agcuguuucacuaaacuag

SEQ ID NO: 3150666 - RNA, 19 nt, Artificial Sequence
  Description of Artificial Sequence: Synthetic oligonucleotide
uguucugcaacauucugaa

SEQ ID NO: 3150667 - RNA, 19 nt, Artificial Sequence
  Description of Artificial Sequence: Synthetic oligonucleotide
ugcaacauucugaauguga

SEQ ID NO: 3150668 - RNA, 19 nt, Artificial Sequence
  Description of Artificial Sequence: Synthetic oligonucleotide
uuuucuaaauguucaugcu

SEQ ID NO: 3150669 - RNA, 19 nt, Artificial Sequence
  Description of Artificial Sequence: Synthetic oligonucleotide
agcugucuguuccagaauc

SEQ ID NO: 3150670 - RNA, 19 nt, Artificial Sequence
  Description of Artificial Sequence: Synthetic oligonucleotide
ugcuguaauacgucuacug

SEQ ID NO: 3150671 - RNA, 19 nt, Artificial Sequence
  Description of Artificial Sequence: Synthetic oligonucleotide
uggcuuuucuaaauguuca

SEQ ID NO: 3150672 - RNA, 19 nt, Artificial Sequence
  Description of Artificial Sequence: Synthetic oligonucleotide
uuggcuuuucuaaauguuc

SEQ ID NO: 3150673 - RNA, 19 nt, Artificial Sequence
  Description of Artificial Sequence: Synthetic oligonucleotide
cuguaauacgucuacugac

SEQ ID NO: 3150674 - RNA, 19 nt, Artificial Sequence
  Description of Artificial Sequence: Synthetic oligonucleotide
ucacuaaacuagcugucug

SEQ ID NO: 3150675 - RNA, 19 nt, Artificial Sequence
  Description of Artificial Sequence: Synthetic oligonucleotide
ucucaggugcuguaauacg

SEQ ID NO: 3150676 - RNA, 19 nt, Artificial Sequence
  Description of Artificial Sequence: Synthetic oligonucleotide
uguguucugcaacauucug

SEQ ID NO: 3150677 - RNA, 19 nt, Artificial Sequence
  Description of Artificial Sequence: Synthetic oligonucleotide
ugaggcuuggcuuuucuaa

SEQ ID NO: 3150678 - RNA, 19 nt, Artificial Sequence
  Description of Artificial Sequence: Synthetic oligonucleotide
uuucacuaaacuagcuguc

SEQ ID NO: 3150679 - RNA, 19 nt, Artificial Sequence
  Description of Artificial Sequence: Synthetic oligonucleotide
guuucacuaaacuagcugu

SEQ ID NO: 3150680 - RNA, 19 nt, Artificial Sequence
  Description of Artificial Sequence: Synthetic oligonucleotide
ugcucuuguguucugcaac

SEQ ID NO: 3150681 - RNA, 19 nt, Artificial Sequence
  Description of Artificial Sequence: Synthetic oligonucleotide
aauccaagugaggcuuggc

SEQ ID NO: 3150682 - RNA, 19 nt, Artificial Sequence
  Description of Artificial Sequence: Synthetic oligonucleotide
uacgucuacugacacuccc

SEQ ID NO: 3150683 - RNA, 19 nt, Artificial Sequence
  Description of Artificial Sequence: Synthetic oligonucleotide
guuccagaauccaagugag

SEQ ID NO: 3150684 - RNA, 19 nt, Artificial Sequence
  Description of Artificial Sequence: Synthetic oligonucleotide
uuccagaauccaagugagg

SEQ ID NO: 3150685 - RNA, 19 nt, Artificial Sequence
  Description of Artificial Sequence: Synthetic oligonucleotide
guaauacgucuacugacac

SEQ ID NO: 3150686 - RNA, 19 nt, Artificial Sequence
  Description of Artificial Sequence: Synthetic oligonucleotide
aaacuagcugucuguucca

SEQ ID NO: 3150687 - RNA, 19 nt, Artificial Sequence
  Description of Artificial Sequence: Synthetic oligonucleotide
uuguguucugcaacauucu

SEQ ID NO: 3150688 - RNA, 19 nt, Artificial Sequence
  Description of Artificial Sequence: Synthetic oligonucleotide
uucacuaaacuagcugucu

SEQ ID NO: 3150689 - RNA, 19 nt, Artificial Sequence
  Description of Artificial Sequence: Synthetic oligonucleotide
uaauacgucuacugacacu

SEQ ID NO: 3150690 - RNA, 19 nt, Artificial Sequence
  Description of Artificial Sequence: Synthetic oligonucleotide
auccaagugaggcuuggcu

SEQ ID NO: 3150691 - RNA, 19 nt, Artificial Sequence
  Description of Artificial Sequence: Synthetic oligonucleotide
auguucaugcucuuguguu

SEQ ID NO: 3150692 - RNA, 19 nt, Artificial Sequence
  Description of Artificial Sequence: Synthetic oligonucleotide
uacugacacucccagcugu

SEQ ID NO: 3150693 - RNA, 19 nt, Artificial Sequence
  Description of Artificial Sequence: Synthetic oligonucleotide
ucaggugcuguaauacguc

SEQ ID NO: 3150694 - RNA, 19 nt, Artificial Sequence
  Description of Artificial Sequence: Synthetic oligonucleotide
uguucaugcucuuguguuc

SEQ ID NO: 3150695 - RNA, 19 nt, Artificial Sequence
  Description of Artificial Sequence: Synthetic oligonucleotide
cuaaacuagcugucuguuc

SEQ ID NO: 3150696 - RNA, 19 nt, Artificial Sequence
  Description of Artificial Sequence: Synthetic oligonucleotide
uccaagugaggcuuggcuu

SEQ ID NO: 3150697 - RNA, 19 nt, Artificial Sequence
  Description of Artificial Sequence: Synthetic oligonucleotide
caacauucugaaugugaac

SEQ ID NO: 3150698 - RNA, 19 nt, Artificial Sequence
  Description of Artificial Sequence: Synthetic oligonucleotide
gaauccaagugaggcuugg

SEQ ID NO: 3150699 - RNA, 19 nt, Artificial Sequence
  Description of Artificial Sequence: Synthetic oligonucleotide
aacuagcugucuguuccag

SEQ ID NO: 3150700 - RNA, 19 nt, Artificial Sequence
  Description of Artificial Sequence: Synthetic oligonucleotide
ugacacucccagcuguuuc

SEQ ID NO: 3150701 - RNA, 19 nt, Artificial Sequence
  Description of Artificial Sequence: Synthetic oligonucleotide
cuagcugucuguuccagaa

SEQ ID NO: 3150702 - RNA, 19 nt, Artificial Sequence
  Description of Artificial Sequence: Synthetic oligonucleotide
ucuuguguucugcaacauu

SEQ ID NO: 3150703 - RNA, 19 nt, Artificial Sequence
  Description of Artificial Sequence: Synthetic oligonucleotide
ggugcuguaauacgucuac

SEQ ID NO: 3150704 - RNA, 19 nt, Artificial Sequence
  Description of Artificial Sequence: Synthetic oligonucleotide
gacacucccagcuguuuca

SEQ ID NO: 3150705 - RNA, 19 nt, Artificial Sequence
  Description of Artificial Sequence: Synthetic oligonucleotide
acucccagcuguuucacua

SEQ ID NO: 3150706 - RNA, 19 nt, Artificial Sequence
  Description of Artificial Sequence: Synthetic oligonucleotide
cuguuccagaauccaagug

SEQ ID NO: 3150707 - RNA, 19 nt, Artificial Sequence
  Description of Artificial Sequence: Synthetic oligonucleotide
gcuguaauacgucuacuga

SEQ ID NO: 3150708 - RNA, 19 nt, Artificial Sequence
  Description of Artificial Sequence: Synthetic oligonucleotide
ucaugcucuuguguucugc

SEQ ID NO: 3150709 - RNA, 19 nt, Artificial Sequence
  Description of Artificial Sequence: Synthetic oligonucleotide
gucucaggugcuguaauac

SEQ ID NO: 3150710 - RNA, 19 nt, Artificial Sequence
  Description of Artificial Sequence: Synthetic oligonucleotide
uugucucaggugcuguaau

SEQ ID NO: 3150711 - RNA, 19 nt, Artificial Sequence
  Description of Artificial Sequence: Synthetic oligonucleotide
agugaggcuuggcuuuucu

SEQ ID NO: 3150712 - RNA, 19 nt, Artificial Sequence
  Description of Artificial Sequence: Synthetic oligonucleotide
gaggcuuggcuuuucuaaa

SEQ ID NO: 3150713 - RNA, 19 nt, Artificial Sequence
  Description of Artificial Sequence: Synthetic oligonucleotide
acuaaacuagcugucuguu

SEQ ID NO: 3150714 - RNA, 19 nt, Artificial Sequence
  Description of Artificial Sequence: Synthetic oligonucleotide
gcuguuucacuaaacuagc

SEQ ID NO: 3150715 - RNA, 19 nt, Artificial Sequence
  Description of Artificial Sequence: Synthetic oligonucleotide
ugucucaggugcuguaaua

SEQ ID NO: 3150716 - RNA, 19 nt, Artificial Sequence
  Description of Artificial Sequence: Synthetic oligonucleotide
gcuuuucuaaauguucaug

SEQ ID NO: 3150717 - RNA, 19 nt, Artificial Sequence
  Description of Artificial Sequence: Synthetic oligonucleotide
acuagcugucuguuccaga

SEQ ID NO: 3150718 - RNA, 19 nt, Artificial Sequence
  Description of Artificial Sequence: Synthetic oligonucleotide
guguucugcaacauucuga

SEQ ID NO: 3150719 - RNA, 19 nt, Artificial Sequence
  Description of Artificial Sequence: Synthetic oligonucleotide
auacgucuacugacacucc

SEQ ID NO: 3150720 - RNA, 19 nt, Artificial Sequence
  Description of Artificial Sequence: Synthetic oligonucleotide
caugcucuuguguucugca

SEQ ID NO: 3150721 - RNA, 19 nt, Artificial Sequence
  Description of Artificial Sequence: Synthetic oligonucleotide
cuacugacacucccagcug

SEQ ID NO: 3150722 - RNA, 19 nt, Artificial Sequence
  Description of Artificial Sequence: Synthetic oligonucleotide
ggcuuggcuuuucuaaaug

SEQ ID NO: 3150723 - RNA, 19 nt, Artificial Sequence
  Description of Artificial Sequence: Synthetic oligonucleotide
gucuacugacacucccagc

SEQ ID NO: 3150724 - RNA, 19 nt, Artificial Sequence
  Description of Artificial Sequence: Synthetic oligonucleotide
aggcuuggcuuuucuaaau

SEQ ID NO: 3150725 - RNA, 19 nt, Artificial Sequence
  Description of Artificial Sequence: Synthetic oligonucleotide
aagugaggcuuggcuuuuc

SEQ ID NO: 3150726 - RNA, 19 nt, Artificial Sequence
  Description of Artificial Sequence: Synthetic oligonucleotide
uucaugcucuuguguucug

SEQ ID NO: 3150727 - RNA, 19 nt, Artificial Sequence
  Description of Artificial Sequence: Synthetic oligonucleotide
cucaggugcuguaauacgu

SEQ ID NO: 3150728 - RNA, 19 nt, Artificial Sequence
  Description of Artificial Sequence: Synthetic oligonucleotide
acacucccagcuguuucac

SEQ ID NO: 3150729 - RNA, 19 nt, Artificial Sequence
  Description of Artificial Sequence: Synthetic oligonucleotide
ucccagcuguuucacuaaa

SEQ ID NO: 3150730 - RNA, 19 nt, Artificial Sequence
  Description of Artificial Sequence: Synthetic oligonucleotide
cagcuguuucacuaaacua

SEQ ID NO: 3150731 - RNA, 19 nt, Artificial Sequence
  Description of Artificial Sequence: Synthetic oligonucleotide
aguugucucaggugcugua

SEQ ID NO: 3150732 - RNA, 19 nt, Artificial Sequence
  Description of Artificial Sequence: Synthetic oligonucleotide
gcaacauucugaaugugaa

SEQ ID NO: 3150733 - RNA, 19 nt, Artificial Sequence
  Description of Artificial Sequence: Synthetic oligonucleotide
cacuaaacuagcugucugu

SEQ ID NO: 3150734 - RNA, 19 nt, Artificial Sequence
  Description of Artificial Sequence: Synthetic oligonucleotide
uagcugucuguuccagaau

SEQ ID NO: 3150735 - RNA, 19 nt, Artificial Sequence
  Description of Artificial Sequence: Synthetic oligonucleotide
gcucuuguguucugcaaca

SEQ ID NO: 3150736 - RNA, 19 nt, Artificial Sequence
  Description of Artificial Sequence: Synthetic oligonucleotide
agaauccaagugaggcuug

SEQ ID NO: 3150737 - RNA, 19 nt, Artificial Sequence
  Description of Artificial Sequence: Synthetic oligonucleotide
cuuggcuuuucuaaauguu

SEQ ID NO: 3150738 - RNA, 19 nt, Artificial Sequence
  Description of Artificial Sequence: Synthetic oligonucleotide
acgucuacugacacuccca

SEQ ID NO: 3150739 - RNA, 19 nt, Artificial Sequence
  Description of Artificial Sequence: Synthetic oligonucleotide
cugucuguuccagaaucca

SEQ ID NO: 3150740 - RNA, 19 nt, Artificial Sequence
  Description of Artificial Sequence: Synthetic oligonucleotide
guugucucaggugcuguaa

SEQ ID NO: 3150741 - RNA, 19 nt, Artificial Sequence
  Description of Artificial Sequence: Synthetic oligonucleotide
guucaugcucuuguguucu

SEQ ID NO: 3150742 - RNA, 19 nt, Artificial Sequence
  Description of Artificial Sequence: Synthetic oligonucleotide
gcugucuguuccagaaucc

SEQ ID NO: 3150743 - RNA, 19 nt, Artificial Sequence
  Description of Artificial Sequence: Synthetic oligonucleotide
cugcaacauucugaaugug

SEQ ID NO: 3150744 - RNA, 19 nt, Artificial Sequence
  Description of Artificial Sequence: Synthetic oligonucleotide
gcuuggcuuuucuaaaugu

SEQ ID NO: 3150745 - RNA, 19 nt, Artificial Sequence
  Description of Artificial Sequence: Synthetic oligonucleotide
cuguuucacuaaacuagcu

SEQ ID NO: 3150746 - RNA, 19 nt, Artificial Sequence
  Description of Artificial Sequence: Synthetic oligonucleotide
cgucuacugacacucccag

SEQ ID NO: 3150747 - RNA, 19 nt, Artificial Sequence
  Description of Artificial Sequence: Synthetic oligonucleotide
caggugcuguaauacgucu

SEQ ID NO: 3150748 - RNA, 19 nt, Artificial Sequence
  Description of Artificial Sequence: Synthetic oligonucleotide
cucccagcuguuucacuaa

SEQ ID NO: 3150749 - RNA, 19 nt, Artificial Sequence
  Description of Artificial Sequence: Synthetic oligonucleotide
cccagcuguuucacuaaac

SEQ ID NO: 3150750 - RNA, 19 nt, Artificial Sequence
  Description of Artificial Sequence: Synthetic oligonucleotide
ccagcuguuucacuaaacu

SEQ ID NO: 3150751 - RNA, 19 nt, Artificial Sequence
  Description of Artificial Sequence: Synthetic oligonucleotide
aggugcuguaauacgucua

SEQ ID NO: 3150752 - RNA, 19 nt, Artificial Sequence
  Description of Artificial Sequence: Synthetic oligonucleotide
acugacacucccagcuguu

SEQ ID NO: 3150753 - RNA, 19 nt, Artificial Sequence
  Description of Artificial Sequence: Synthetic oligonucleotide
ggcuuuucuaaauguucau

SEQ ID NO: 3150754 - RNA, 19 nt, Artificial Sequence
  Description of Artificial Sequence: Synthetic oligonucleotide
ccagaauccaagugaggcu

SEQ ID NO: 3150755 - RNA, 19 nt, Artificial Sequence
  Description of Artificial Sequence: Synthetic oligonucleotide
guucugcaacauucugaau

SEQ ID NO: 3150756 - RNA, 19 nt, Artificial Sequence
  Description of Artificial Sequence: Synthetic oligonucleotide
gugcuguaauacgucuacu

SEQ ID NO: 3150757 - RNA, 19 nt, Artificial Sequence
  Description of Artificial Sequence: Synthetic oligonucleotide
ccaagugaggcuuggcuuu

SEQ ID NO: 3150758 - RNA, 19 nt, Artificial Sequence
  Description of Artificial Sequence: Synthetic oligonucleotide
cucuuguguucugcaacau

SEQ ID NO: 3150759 - RNA, 19 nt, Artificial Sequence
  Description of Artificial Sequence: Synthetic oligonucleotide
cacucccagcuguuucacu

SEQ ID NO: 3150760 - RNA, 19 nt, Artificial Sequence
  Description of Artificial Sequence: Synthetic oligonucleotide
caagugaggcuuggcuuuu

SEQ ID NO: 3150761 - RNA, 19 nt, Artificial Sequence
  Description of Artificial Sequence: Synthetic oligonucleotide
cugacacucccagcuguuu

SEQ ID NO: 3150762 - RNA, 19 nt, Artificial Sequence
  Description of Artificial Sequence: Synthetic oligonucleotide
ucuaaucccagcacucagg

SEQ ID NO: 3150763 - RNA, 19 nt, Artificial Sequence
  Description of Artificial Sequence: Synthetic oligonucleotide
aaucugggagucugaggcc

SEQ ID NO: 3150764 - RNA, 19 nt, Artificial Sequence
  Description of Artificial Sequence: Synthetic oligonucleotide
gauaaucugggagucugag

SEQ ID NO: 3150765 - RNA, 19 nt, Artificial Sequence
  Description of Artificial Sequence: Synthetic oligonucleotide
caggcagauaaucugggag

SEQ ID NO: 3150766 - RNA, 19 nt, Artificial Sequence
  Description of Artificial Sequence: Synthetic oligonucleotide
aggucuacugaguugugug

SEQ ID NO: 3150767 - RNA, 19 nt, Artificial Sequence
  Description of Artificial Sequence: Synthetic oligonucleotide
ucugaggccagccuagguc

SEQ ID NO: 3150768 - RNA, 19 nt, Artificial Sequence
  Description of Artificial Sequence: Synthetic oligonucleotide
ugaguugugugugugugug

SEQ ID NO: 3150769 - RNA, 19 nt, Artificial Sequence
  Description of Artificial Sequence: Synthetic oligonucleotide
aggcagauaaucugggagu

SEQ ID NO: 3150770 - RNA, 19 nt, Artificial Sequence
  Description of Artificial Sequence: Synthetic oligonucleotide
ucuacugaguugugugugu

SEQ ID NO: 3150771 - RNA, 19 nt, Artificial Sequence
  Description of Artificial Sequence: Synthetic oligonucleotide
aguugugugugugugugug

SEQ ID NO: 3150772 - RNA, 19 nt, Artificial Sequence
  Description of Artificial Sequence: Synthetic oligonucleotide
uugugugugugugugugug

SEQ ID NO: 3150773 - RNA, 19 nt, Artificial Sequence
  Description of Artificial Sequence: Synthetic oligonucleotide
acugaguugugugugugug

SEQ ID NO: 3150774 - RNA, 19 nt, Artificial Sequence
  Description of Artificial Sequence: Synthetic oligonucleotide
cagauaaucugggagucug

SEQ ID NO: 3150775 - RNA, 19 nt, Artificial Sequence
  Description of Artificial Sequence: Synthetic oligonucleotide
cucuaaucccagcacucag

SEQ ID NO: 3150776 - RNA, 19 nt, Artificial Sequence
  Description of Artificial Sequence: Synthetic oligonucleotide
uguguguguguguguguga

SEQ ID NO: 3150777 - RNA, 19 nt, Artificial Sequence
  Description of Artificial Sequence: Synthetic oligonucleotide
uacugaguugugugugugu

SEQ ID NO: 3150778 - RNA, 19 nt, Artificial Sequence
  Description of Artificial Sequence: Synthetic oligonucleotide
ugugugugugugugaacuc

SEQ ID NO: 3150779 - RNA, 19 nt, Artificial Sequence
  Description of Artificial Sequence: Synthetic oligonucleotide
gucuacugaguugugugug

SEQ ID NO: 3150780 - RNA, 19 nt, Artificial Sequence
  Description of Artificial Sequence: Synthetic oligonucleotide
ugugugugugugaacucuu

SEQ ID NO: 3150781 - RNA, 19 nt, Artificial Sequence
  Description of Artificial Sequence: Synthetic oligonucleotide
gagucugaggccagccuag

SEQ ID NO: 3150782 - RNA, 19 nt, Artificial Sequence
  Description of Artificial Sequence: Synthetic oligonucleotide
ucugggagucugaggccag

SEQ ID NO: 3150783 - RNA, 19 nt, Artificial Sequence
  Description of Artificial Sequence: Synthetic oligonucleotide
ugugugugugugugugugu

SEQ ID NO: 3150784 - RNA, 19 nt, Artificial Sequence
  Description of Artificial Sequence: Synthetic oligonucleotide
acacgccucuaaucccagc

SEQ ID NO: 3150785 - RNA, 19 nt, Artificial Sequence
  Description of Artificial Sequence: Synthetic oligonucleotide
uagaggcaggcagauaauc

SEQ ID NO: 3150786 - RNA, 19 nt, Artificial Sequence
  Description of Artificial Sequence: Synthetic oligonucleotide
uaggucuacugaguugugu

SEQ ID NO: 3150787 - RNA, 19 nt, Artificial Sequence
  Description of Artificial Sequence: Synthetic oligonucleotide
ccagccuaggucuacugag

SEQ ID NO: 3150788 - RNA, 19 nt, Artificial Sequence
  Description of Artificial Sequence: Synthetic oligonucleotide
ugugugugugugugugaac

SEQ ID NO: 3150789 - RNA, 19 nt, Artificial Sequence
  Description of Artificial Sequence: Synthetic oligonucleotide
gugugugugugugugugug

SEQ ID NO: 3150790 - RNA, 19 nt, Artificial Sequence
  Description of Artificial Sequence: Synthetic oligonucleotide
aucugggagucugaggcca

SEQ ID NO: 3150791 - RNA, 19 nt, Artificial Sequence
  Description of Artificial Sequence: Synthetic oligonucleotide
ugaugguggcacacgccuc

SEQ ID NO: 3150792 - RNA, 19 nt, Artificial Sequence
  Description of Artificial Sequence: Synthetic oligonucleotide
cacgccucuaaucccagca

SEQ ID NO: 3150793 - RNA, 19 nt, Artificial Sequence
  Description of Artificial Sequence: Synthetic oligonucleotide
gaugguggcacacgccucu

SEQ ID NO: 3150794 - RNA, 19 nt, Artificial Sequence
  Description of Artificial Sequence: Synthetic oligonucleotide
cuacugaguugugugugug

SEQ ID NO: 3150795 - RNA, 19 nt, Artificial Sequence
  Description of Artificial Sequence: Synthetic oligonucleotide
gugaugguggcacacgccu

SEQ ID NO: 3150796 - RNA, 19 nt, Artificial Sequence
  Description of Artificial Sequence: Synthetic oligonucleotide
agccuaggucuacugaguu

SEQ ID NO: 3150797 - RNA, 19 nt, Artificial Sequence
  Description of Artificial Sequence: Synthetic oligonucleotide
gugugugugugugugaacu

SEQ ID NO: 3150798 - RNA, 19 nt, Artificial Sequence
  Description of Artificial Sequence: Synthetic oligonucleotide
cuaggucuacugaguugug

SEQ ID NO: 3150799 - RNA, 19 nt, Artificial Sequence
  Description of Artificial Sequence: Synthetic oligonucleotide
gggugaugguggcacacgc

SEQ ID NO: 3150800 - RNA, 19 nt, Artificial Sequence
  Description of Artificial Sequence: Synthetic oligonucleotide
agauaaucugggagucuga

SEQ ID NO: 3150801 - RNA, 19 nt, Artificial Sequence
  Description of Artificial Sequence: Synthetic oligonucleotide
cugaggccagccuaggucu

SEQ ID NO: 3150802 - RNA, 19 nt, Artificial Sequence
  Description of Artificial Sequence: Synthetic oligonucleotide
ggcagauaaucugggaguc

SEQ ID NO: 3150803 - RNA, 19 nt, Artificial Sequence
  Description of Artificial Sequence: Synthetic oligonucleotide
gugugugugugugugugaa

SEQ ID NO: 3150804 - RNA, 19 nt, Artificial Sequence
  Description of Artificial Sequence: Synthetic oligonucleotide
cugggugaugguggcacac

SEQ ID NO: 3150805 - RNA, 19 nt, Artificial Sequence
  Description of Artificial Sequence: Synthetic oligonucleotide
gccuaggucuacugaguug

SEQ ID NO: 3150806 - RNA, 19 nt, Artificial Sequence
  Description of Artificial Sequence: Synthetic oligonucleotide
ggugaugguggcacacgcc

SEQ ID NO: 3150807 - RNA, 19 nt, Artificial Sequence
  Description of Artificial Sequence: Synthetic oligonucleotide
ugaggccagccuaggucua

SEQ ID NO: 3150808 - RNA, 19 nt, Artificial Sequence
  Description of Artificial Sequence: Synthetic oligonucleotide
gugugugugugugaacucu

SEQ ID NO: 3150809 - RNA, 19 nt, Artificial Sequence
  Description of Artificial Sequence: Synthetic oligonucleotide
guugugugugugugugugu

SEQ ID NO: 3150810 - RNA, 19 nt, Artificial Sequence
  Description of Artificial Sequence: Synthetic oligonucleotide
ggucuacugaguugugugu

SEQ ID NO: 3150811 - RNA, 19 nt, Artificial Sequence
  Description of Artificial Sequence: Synthetic oligonucleotide
gaguugugugugugugugu

SEQ ID NO: 3150812 - RNA, 19 nt, Artificial Sequence
  Description of Artificial Sequence: Synthetic oligonucleotide
gcaggcagauaaucuggga

SEQ ID NO: 3150813 - RNA, 19 nt, Artificial Sequence
  Description of Artificial Sequence: Synthetic oligonucleotide
ccuaggucuacugaguugu

SEQ ID NO: 3150814 - RNA, 19 nt, Artificial Sequence
  Description of Artificial Sequence: Synthetic oligonucleotide
cugaguugugugugugugu

SEQ ID NO: 3150815 - RNA, 19 nt, Artificial Sequence
  Description of Artificial Sequence: Synthetic oligonucleotide
gccagccuaggucuacuga

SEQ ID NO: 3150816 - RNA, 19 nt, Artificial Sequence
  Description of Artificial Sequence: Synthetic oligonucleotide
ggccagccuaggucuacug

SEQ ID NO: 3150817 - RNA, 19 nt, Artificial Sequence
  Description of Artificial Sequence: Synthetic oligonucleotide
guagaggcaggcagauaau

SEQ ID NO: 3150818 - RNA, 19 nt, Artificial Sequence
  Description of Artificial Sequence: Synthetic oligonucleotide
gcugggugaugguggcaca

SEQ ID NO: 3150819 - RNA, 19 nt, Artificial Sequence
  Description of Artificial Sequence: Synthetic oligonucleotide
gcagauaaucugggagucu

SEQ ID NO: 3150820 - RNA, 19 nt, Artificial Sequence
  Description of Artificial Sequence: Synthetic oligonucleotide
cgccucuaaucccagcacu

SEQ ID NO: 3150821 - RNA, 19 nt, Artificial Sequence
  Description of Artificial Sequence: Synthetic oligonucleotide
uggcacacgaccuuuaggu

SEQ ID NO: 3150822 - RNA, 19 nt, Artificial Sequence
  Description of Artificial Sequence: Synthetic oligonucleotide
uccagagcuaguuccagga

SEQ ID NO: 3150823 - RNA, 19 nt, Artificial Sequence
  Description of Artificial Sequence: Synthetic oligonucleotide
accuuuaggucccagugcu

SEQ ID NO: 3150824 - RNA, 19 nt, Artificial Sequence
  Description of Artificial Sequence: Synthetic oligonucleotide
cacacgaccuuuagguccc

SEQ ID NO: 3150825 - RNA, 19 nt, Artificial Sequence
  Description of Artificial Sequence: Synthetic oligonucleotide
uuuaggucccagugcucag

SEQ ID NO: 3150826 - RNA, 19 nt, Artificial Sequence
  Description of Artificial Sequence: Synthetic oligonucleotide
uuaggucccagugcucagg

SEQ ID NO: 3150827 - RNA, 19 nt, Artificial Sequence
  Description of Artificial Sequence: Synthetic oligonucleotide
gcacacgaccuuuaggucc

SEQ ID NO: 3150828 - RNA, 19 nt, Artificial Sequence
  Description of Artificial Sequence: Synthetic oligonucleotide
guggcacacgaccuuuagg

SEQ ID NO: 3150829 - RNA, 19 nt, Artificial Sequence
  Description of Artificial Sequence: Synthetic oligonucleotide
cuuuaggucccagugcuca

SEQ ID NO: 3150830 - RNA, 19 nt, Artificial Sequence
  Description of Artificial Sequence: Synthetic oligonucleotide
acgaccuuuaggucccagu

SEQ ID NO: 3150831 - RNA, 19 nt, Artificial Sequence
  Description of Artificial Sequence: Synthetic oligonucleotide
gguggcacacgaccuuuag

SEQ ID NO: 3150832 - RNA, 19 nt, Artificial Sequence
  Description of Artificial Sequence: Synthetic oligonucleotide
cgaccuuuaggucccagug

SEQ ID NO: 3150833 - RNA, 19 nt, Artificial Sequence
  Description of Artificial Sequence: Synthetic oligonucleotide
ugguggcacacgaccuuua

SEQ ID NO: 3150834 - RNA, 19 nt, Artificial Sequence
  Description of Artificial Sequence: Synthetic oligonucleotide
ggcacacgaccuuuagguc

SEQ ID NO: 3150835 - RNA, 19 nt, Artificial Sequence
  Description of Artificial Sequence: Synthetic oligonucleotide
augguggcacacgaccuuu

SEQ ID NO: 3150836 - RNA, 19 nt, Artificial Sequence
  Description of Artificial Sequence: Synthetic oligonucleotide
cacgaccuuuaggucccag

SEQ ID NO: 3150837 - RNA, 19 nt, Artificial Sequence
  Description of Artificial Sequence: Synthetic oligonucleotide
ccuuuaggucccagugcuc

SEQ ID NO: 3150838 - RNA, 19 nt, Artificial Sequence
  Description of Artificial Sequence: Synthetic oligonucleotide
acacgaccuuuagguccca

SEQ ID NO: 3150839 - RNA, 19 nt, Artificial Sequence
  Description of Artificial Sequence: Synthetic oligonucleotide
uggucuugaacucacaaga

SEQ ID NO: 3150840 - RNA, 19 nt, Artificial Sequence
  Description of Artificial Sequence: Synthetic oligonucleotide
uuaaaggccaguaccacca

SEQ ID NO: 3150841 - RNA, 19 nt, Artificial Sequence
  Description of Artificial Sequence: Synthetic oligonucleotide
ucuugaacucacaagagau

SEQ ID NO: 3150842 - RNA, 19 nt, Artificial Sequence
  Description of Artificial Sequence: Synthetic oligonucleotide
agauuugccugccucugcc

SEQ ID NO: 3150843 - RNA, 19 nt, Artificial Sequence
  Description of Artificial Sequence: Synthetic oligonucleotide
cucacaagagauuugccug

SEQ ID NO: 3150844 - RNA, 19 nt, Artificial Sequence
  Description of Artificial Sequence: Synthetic oligonucleotide
acucacaagagauuugccu

SEQ ID NO: 3150845 - RNA, 19 nt, Artificial Sequence
  Description of Artificial Sequence: Synthetic oligonucleotide
aagagauuugccugccucu

SEQ ID NO: 3150846 - RNA, 19 nt, Artificial Sequence
  Description of Artificial Sequence: Synthetic oligonucleotide
gaacucacaagagauuugc

SEQ ID NO: 3150847 - RNA, 19 nt, Artificial Sequence
  Description of Artificial Sequence: Synthetic oligonucleotide
gggauuaaaggccaguacc

SEQ ID NO: 3150848 - RNA, 19 nt, Artificial Sequence
  Description of Artificial Sequence: Synthetic oligonucleotide
ucacaagagauuugccugc

SEQ ID NO: 3150849 - RNA, 19 nt, Artificial Sequence
  Description of Artificial Sequence: Synthetic oligonucleotide
aacucacaagagauuugcc

SEQ ID NO: 3150850 - RNA, 19 nt, Artificial Sequence
  Description of Artificial Sequence: Synthetic oligonucleotide
ugaacucacaagagauuug

SEQ ID NO: 3150851 - RNA, 19 nt, Artificial Sequence
  Description of Artificial Sequence: Synthetic oligonucleotide
uugaacucacaagagauuu

SEQ ID NO: 3150852 - RNA, 19 nt, Artificial Sequence
  Description of Artificial Sequence: Synthetic oligonucleotide
ugggauuaaaggccaguac

SEQ ID NO: 3150853 - RNA, 19 nt, Artificial Sequence
  Description of Artificial Sequence: Synthetic oligonucleotide
caagagauuugccugccuc

SEQ ID NO: 3150854 - RNA, 19 nt, Artificial Sequence
  Description of Artificial Sequence: Synthetic oligonucleotide
aaaggccaguaccaccacu

SEQ ID NO: 3150855 - RNA, 19 nt, Artificial Sequence
  Description of Artificial Sequence: Synthetic oligonucleotide
gucuugaacucacaagaga

SEQ ID NO: 3150856 - RNA, 19 nt, Artificial Sequence
  Description of Artificial Sequence: Synthetic oligonucleotide
aggccaguaccaccacugc

SEQ ID NO: 3150857 - RNA, 19 nt, Artificial Sequence
  Description of Artificial Sequence: Synthetic oligonucleotide
gagauuugccugccucugc

SEQ ID NO: 3150858 - RNA, 19 nt, Artificial Sequence
  Description of Artificial Sequence: Synthetic oligonucleotide
ccuagugcugggauuaaag

SEQ ID NO: 3150859 - RNA, 19 nt, Artificial Sequence
  Description of Artificial Sequence: Synthetic oligonucleotide
agagauuugccugccucug

SEQ ID NO: 3150860 - RNA, 19 nt, Artificial Sequence
  Description of Artificial Sequence: Synthetic oligonucleotide
cuggagaucaggcuggucu

SEQ ID NO: 3150861 - RNA, 19 nt, Artificial Sequence
  Description of Artificial Sequence: Synthetic oligonucleotide
uaaaggccaguaccaccac

SEQ ID NO: 3150862 - RNA, 19 nt, Artificial Sequence
  Description of Artificial Sequence: Synthetic oligonucleotide
acaagagauuugccugccu

SEQ ID NO: 3150863 - RNA, 19 nt, Artificial Sequence
  Description of Artificial Sequence: Synthetic oligonucleotide
ggucuugaacucacaagag

SEQ ID NO: 3150864 - RNA, 19 nt, Artificial Sequence
  Description of Artificial Sequence: Synthetic oligonucleotide
uggagaucaggcuggucuu

SEQ ID NO: 3150865 - RNA, 19 nt, Artificial Sequence
  Description of Artificial Sequence: Synthetic oligonucleotide
cacaagagauuugccugcc

SEQ ID NO: 3150866 - RNA, 19 nt, Artificial Sequence
  Description of Artificial Sequence: Synthetic oligonucleotide
caguaccaccacugcuugg

SEQ ID NO: 3150867 - RNA, 19 nt, Artificial Sequence
  Description of Artificial Sequence: Synthetic oligonucleotide
cuugaacucacaagagauu

SEQ ID NO: 3150868 - RNA, 19 nt, Artificial Sequence
  Description of Artificial Sequence: Synthetic oligonucleotide
gauuugccugccucugccu

SEQ ID NO: 3150869 - RNA, 19 nt, Artificial Sequence
  Description of Artificial Sequence: Synthetic oligonucleotide
ccaguaccaccacugcuug

SEQ ID NO: 3150870 - RNA, 19 nt, Artificial Sequence
  Description of Artificial Sequence: Synthetic oligonucleotide
cucccuagugcugggauua

SEQ ID NO: 3150871 - RNA, 19 nt, Artificial Sequence
  Description of Artificial Sequence: Synthetic oligonucleotide
ucuggagaucaggcugguc

SEQ ID NO: 3150872 - RNA, 19 nt, Artificial Sequence
  Description of Artificial Sequence: Synthetic oligonucleotide
ggagaucaggcuggucuug

SEQ ID NO: 3150873 - RNA, 19 nt, Artificial Sequence
  Description of Artificial Sequence: Synthetic oligonucleotide
ucccuagugcugggauuaa

SEQ ID NO: 3150874 - RNA, 19 nt, Artificial Sequence
  Description of Artificial Sequence: Synthetic oligonucleotide
ggccaguaccaccacugcu

SEQ ID NO: 3150875 - RNA, 19 nt, Artificial Sequence
  Description of Artificial Sequence: Synthetic oligonucleotide
gccucccuagugcugggau

SEQ ID NO: 3150876 - RNA, 19 nt, Artificial Sequence
  Description of Artificial Sequence: Synthetic oligonucleotide
cccuagugcugggauuaaa

SEQ ID NO: 3150877 - RNA, 19 nt, Artificial Sequence
  Description of Artificial Sequence: Synthetic oligonucleotide
ccucccuagugcugggauu

SEQ ID NO: 3150878 - RNA, 19 nt, Artificial Sequence
  Description of Artificial Sequence: Synthetic oligonucleotide
aauguuacagccuggaugc

SEQ ID NO: 3150879 - RNA, 19 nt, Artificial Sequence
  Description of Artificial Sequence: Synthetic oligonucleotide
gucgaaacagcauugaugg

SEQ ID NO: 3150880 - RNA, 19 nt, Artificial Sequence
  Description of Artificial Sequence: Synthetic oligonucleotide
gaugggaaaguccacagcg

SEQ ID NO: 3150881 - RNA, 19 nt, Artificial Sequence
  Description of Artificial Sequence: Synthetic oligonucleotide
gaauguuacagccuggaug

SEQ ID NO: 3150882 - RNA, 19 nt, Artificial Sequence
  Description of Artificial Sequence: Synthetic oligonucleotide
ugucgaaacagcauugaug

SEQ ID NO: 3150883 - RNA, 19 nt, Artificial Sequence
  Description of Artificial Sequence: Synthetic oligonucleotide
ucacacagcacccucauac

SEQ ID NO: 3150884 - RNA, 19 nt, Artificial Sequence
  Description of Artificial Sequence: Synthetic oligonucleotide
aacagcauugaugggaaag

SEQ ID NO: 3150885 - RNA, 19 nt, Artificial Sequence
  Description of Artificial Sequence: Synthetic oligonucleotide
agucucugaauguuacagc

SEQ ID NO: 3150886 - RNA, 19 nt, Artificial Sequence
  Description of Artificial Sequence: Synthetic oligonucleotide
gucucugaauguuacagcc

SEQ ID NO: 3150887 - RNA, 19 nt, Artificial Sequence
  Description of Artificial Sequence: Synthetic oligonucleotide
aguaugucgaaacagcauu

SEQ ID NO: 3150888 - RNA, 19 nt, Artificial Sequence
  Description of Artificial Sequence: Synthetic oligonucleotide
aaccuacagucucugaaug

SEQ ID NO: 3150889 - RNA, 19 nt, Artificial Sequence
  Description of Artificial Sequence: Synthetic oligonucleotide
aggaguaugucgaaacagc

SEQ ID NO: 3150890 - RNA, 19 nt, Artificial Sequence
  Description of Artificial Sequence: Synthetic oligonucleotide
agcauugaugggaaagucc

SEQ ID NO: 3150891 - RNA, 19 nt, Artificial Sequence
  Description of Artificial Sequence: Synthetic oligonucleotide
ugggaaaguccacagcgcc

SEQ ID NO: 3150892 - RNA, 19 nt, Artificial Sequence
  Description of Artificial Sequence: Synthetic oligonucleotide
uugaugggaaaguccacag

SEQ ID NO: 3150893 - RNA, 19 nt, Artificial Sequence
  Description of Artificial Sequence: Synthetic oligonucleotide
agcgccccaaccuacaguc

SEQ ID NO: 3150894 - RNA, 19 nt, Artificial Sequence
  Description of Artificial Sequence: Synthetic oligonucleotide
ucugaauguuacagccugg

SEQ ID NO: 3150895 - RNA, 19 nt, Artificial Sequence
  Description of Artificial Sequence: Synthetic oligonucleotide
uacagucucugaauguuac

SEQ ID NO: 3150896 - RNA, 19 nt, Artificial Sequence
  Description of Artificial Sequence: Synthetic oligonucleotide
acgaguauugucgcuaagg

SEQ ID NO: 3150897 - RNA, 19 nt, Artificial Sequence
  Description of Artificial Sequence: Synthetic oligonucleotide
cucugaauguuacagccug

SEQ ID NO: 3150898 - RNA, 19 nt, Artificial Sequence
  Description of Artificial Sequence: Synthetic oligonucleotide
uguuacagccuggaugccg

SEQ ID NO: 3150899 - RNA, 19 nt, Artificial Sequence
  Description of Artificial Sequence: Synthetic oligonucleotide
aaguccacagcgccccaac

SEQ ID NO: 3150900 - RNA, 19 nt, Artificial Sequence
  Description of Artificial Sequence: Synthetic oligonucleotide
gagggccucacacagcacc

SEQ ID NO: 3150901 - RNA, 19 nt, Artificial Sequence
  Description of Artificial Sequence: Synthetic oligonucleotide
ugaugggaaaguccacagc

SEQ ID NO: 3150902 - RNA, 19 nt, Artificial Sequence
  Description of Artificial Sequence: Synthetic oligonucleotide
acagcacccucauaccagg

SEQ ID NO: 3150903 - RNA, 19 nt, Artificial Sequence
  Description of Artificial Sequence: Synthetic oligonucleotide
cagucucugaauguuacag

SEQ ID NO: 3150904 - RNA, 19 nt, Artificial Sequence
  Description of Artificial Sequence: Synthetic oligonucleotide
acagccuggaugccggagg

SEQ ID NO: 3150905 - RNA, 19 nt, Artificial Sequence
  Description of Artificial Sequence: Synthetic oligonucleotide
ucucugaauguuacagccu

SEQ ID NO: 3150906 - RNA, 19 nt, Artificial Sequence
  Description of Artificial Sequence: Synthetic oligonucleotide
auugaugggaaaguccaca

SEQ ID NO: 3150907 - RNA, 19 nt, Artificial Sequence
  Description of Artificial Sequence: Synthetic oligonucleotide
guuacagccuggaugccgg

SEQ ID NO: 3150908 - RNA, 19 nt, Artificial Sequence
  Description of Artificial Sequence: Synthetic oligonucleotide
cacccucauaccaggaucc

SEQ ID NO: 3150909 - RNA, 19 nt, Artificial Sequence
  Description of Artificial Sequence: Synthetic oligonucleotide
augccggagggccucacac

SEQ ID NO: 3150910 - RNA, 19 nt, Artificial Sequence
  Description of Artificial Sequence: Synthetic oligonucleotide
uaugucgaaacagcauuga

SEQ ID NO: 3150911 - RNA, 19 nt, Artificial Sequence
  Description of Artificial Sequence: Synthetic oligonucleotide
aguccacagcgccccaacc

SEQ ID NO: 3150912 - RNA, 19 nt, Artificial Sequence
  Description of Artificial Sequence: Synthetic oligonucleotide
ucgaaacagcauugauggg

SEQ ID NO: 3150913 - RNA, 19 nt, Artificial Sequence
  Description of Artificial Sequence: Synthetic oligonucleotide
augggaaaguccacagcgc

SEQ ID NO: 3150914 - RNA, 19 nt, Artificial Sequence
  Description of Artificial Sequence: Synthetic oligonucleotide
cacagcacccucauaccag

SEQ ID NO: 3150915 - RNA, 19 nt, Artificial Sequence
  Description of Artificial Sequence: Synthetic oligonucleotide
ugaauguuacagccuggau

SEQ ID NO: 3150916 - RNA, 19 nt, Artificial Sequence
  Description of Artificial Sequence: Synthetic oligonucleotide
gaaacagcauugaugggaa

SEQ ID NO: 3150917 - RNA, 19 nt, Artificial Sequence
  Description of Artificial Sequence: Synthetic oligonucleotide
acagcauugaugggaaagu

SEQ ID NO: 3150918 - RNA, 19 nt, Artificial Sequence
  Description of Artificial Sequence: Synthetic oligonucleotide
guaugucgaaacagcauug

SEQ ID NO: 3150919 - RNA, 19 nt, Artificial Sequence
  Description of Artificial Sequence: Synthetic oligonucleotide
acacagcacccucauacca

SEQ ID NO: 3150920 - RNA, 19 nt, Artificial Sequence
  Description of Artificial Sequence: Synthetic oligonucleotide
cacacagcacccucauacc

SEQ ID NO: 3150921 - RNA, 19 nt, Artificial Sequence
  Description of Artificial Sequence: Synthetic oligonucleotide
accuacagucucugaaugu

SEQ ID NO: 3150922 - RNA, 19 nt, Artificial Sequence
  Description of Artificial Sequence: Synthetic oligonucleotide
acagucucugaauguuaca

SEQ ID NO: 3150923 - RNA, 19 nt, Artificial Sequence
  Description of Artificial Sequence: Synthetic oligonucleotide
augucgaaacagcauugau

SEQ ID NO: 3150924 - RNA, 19 nt, Artificial Sequence
  Description of Artificial Sequence: Synthetic oligonucleotide
uccacagcgccccaaccua

SEQ ID NO: 3150925 - RNA, 19 nt, Artificial Sequence
  Description of Artificial Sequence: Synthetic oligonucleotide
ggaaaguccacagcgcccc

SEQ ID NO: 3150926 - RNA, 19 nt, Artificial Sequence
  Description of Artificial Sequence: Synthetic oligonucleotide
gcauugaugggaaagucca

SEQ ID NO: 3150927 - RNA, 19 nt, Artificial Sequence
  Description of Artificial Sequence: Synthetic oligonucleotide
aaacagcauugaugggaaa

SEQ ID NO: 3150928 - RNA, 19 nt, Artificial Sequence
  Description of Artificial Sequence: Synthetic oligonucleotide
cagccuggaugccggaggg

SEQ ID NO: 3150929 - RNA, 19 nt, Artificial Sequence
  Description of Artificial Sequence: Synthetic oligonucleotide
acagcgccccaaccuacag

SEQ ID NO: 3150930 - RNA, 19 nt, Artificial Sequence
  Description of Artificial Sequence: Synthetic oligonucleotide
acccucauaccaggauccc

SEQ ID NO: 3150931 - RNA, 19 nt, Artificial Sequence
  Description of Artificial Sequence: Synthetic oligonucleotide
cugaauguuacagccugga

SEQ ID NO: 3150932 - RNA, 19 nt, Artificial Sequence
  Description of Artificial Sequence: Synthetic oligonucleotide
agcacccucauaccaggau

SEQ ID NO: 3150933 - RNA, 19 nt, Artificial Sequence
  Description of Artificial Sequence: Synthetic oligonucleotide
ggaguaugucgaaacagca

SEQ ID NO: 3150934 - RNA, 19 nt, Artificial Sequence
  Description of Artificial Sequence: Synthetic oligonucleotide
auguuacagccuggaugcc

SEQ ID NO: 3150935 - RNA, 19 nt, Artificial Sequence
  Description of Artificial Sequence: Synthetic oligonucleotide
uacagccuggaugccggag

SEQ ID NO: 3150936 - RNA, 19 nt, Artificial Sequence
  Description of Artificial Sequence: Synthetic oligonucleotide
cagcauugaugggaaaguc

SEQ ID NO: 3150937 - RNA, 19 nt, Artificial Sequence
  Description of Artificial Sequence: Synthetic oligonucleotide
ugccggagggccucacaca

SEQ ID NO: 3150938 - RNA, 19 nt, Artificial Sequence
  Description of Artificial Sequence: Synthetic oligonucleotide
gccggagggccucacacag

SEQ ID NO: 3150939 - RNA, 19 nt, Artificial Sequence
  Description of Artificial Sequence: Synthetic oligonucleotide
cacgaguauugucgcuaag

SEQ ID NO: 3150940 - RNA, 19 nt, Artificial Sequence
  Description of Artificial Sequence: Synthetic oligonucleotide
cuacagucucugaauguua

SEQ ID NO: 3150941 - RNA, 19 nt, Artificial Sequence
  Description of Artificial Sequence: Synthetic oligonucleotide
gcacccucauaccaggauc

SEQ ID NO: 3150942 - RNA, 19 nt, Artificial Sequence
  Description of Artificial Sequence: Synthetic oligonucleotide
uuacagccuggaugccgga

SEQ ID NO: 3150943 - RNA, 19 nt, Artificial Sequence
  Description of Artificial Sequence: Synthetic oligonucleotide
gaguaugucgaaacagcau

SEQ ID NO: 3150944 - RNA, 19 nt, Artificial Sequence
  Description of Artificial Sequence: Synthetic oligonucleotide
caaccuacagucucugaau

SEQ ID NO: 3150945 - RNA, 19 nt, Artificial Sequence
  Description of Artificial Sequence: Synthetic oligonucleotide
cgaaacagcauugauggga

SEQ ID NO: 3150946 - RNA, 19 nt, Artificial Sequence
  Description of Artificial Sequence: Synthetic oligonucleotide
gaugccggagggccucaca

SEQ ID NO: 3150947 - RNA, 19 nt, Artificial Sequence
  Description of Artificial Sequence: Synthetic oligonucleotide
ccaaccuacagucucugaa

SEQ ID NO: 3150948 - RNA, 19 nt, Artificial Sequence
  Description of Artificial Sequence: Synthetic oligonucleotide
gaaaguccacagcgcccca

SEQ ID NO: 3150949 - RNA, 19 nt, Artificial Sequence
  Description of Artificial Sequence: Synthetic oligonucleotide
guccacagcgccccaaccu

SEQ ID NO: 3150950 - RNA, 19 nt, Artificial Sequence
  Description of Artificial Sequence: Synthetic oligonucleotide
gccuggaugccggagggcc

SEQ ID NO: 3150951 - RNA, 19 nt, Artificial Sequence
  Description of Artificial Sequence: Synthetic oligonucleotide
cuggaugccggagggccuc

SEQ ID NO: 3150952 - RNA, 19 nt, Artificial Sequence
  Description of Artificial Sequence: Synthetic oligonucleotide
cacagcgccccaaccuaca

SEQ ID NO: 3150953 - RNA, 19 nt, Artificial Sequence
  Description of Artificial Sequence: Synthetic oligonucleotide
cccucauaccaggaucccc

SEQ ID NO: 3150954 - RNA, 19 nt, Artificial Sequence
  Description of Artificial Sequence: Synthetic oligonucleotide
ggccucacacagcacccuc

SEQ ID NO: 3150955 - RNA, 19 nt, Artificial Sequence
  Description of Artificial Sequence: Synthetic oligonucleotide
uggaugccggagggccuca

SEQ ID NO: 3150956 - RNA, 19 nt, Artificial Sequence
  Description of Artificial Sequence: Synthetic oligonucleotide
cagcacccucauaccagga

SEQ ID NO: 3150957 - RNA, 19 nt, Artificial Sequence
  Description of Artificial Sequence: Synthetic oligonucleotide
ccacagcgccccaaccuac

SEQ ID NO: 3150958 - RNA, 19 nt, Artificial Sequence
  Description of Artificial Sequence: Synthetic oligonucleotide
cgaguauugucgcuaaggu

SEQ ID NO: 3150959 - RNA, 19 nt, Artificial Sequence
  Description of Artificial Sequence: Synthetic oligonucleotide
cggagggccucacacagca

SEQ ID NO: 3150960 - RNA, 19 nt, Artificial Sequence
  Description of Artificial Sequence: Synthetic oligonucleotide
cucacacagcacccucaua

SEQ ID NO: 3150961 - RNA, 19 nt, Artificial Sequence
  Description of Artificial Sequence: Synthetic oligonucleotide
cgccccaaccuacagucuc

SEQ ID NO: 3150962 - RNA, 19 nt, Artificial Sequence
  Description of Artificial Sequence: Synthetic oligonucleotide
ccacgaguauugucgcuaa

SEQ ID NO: 3150963 - RNA, 19 nt, Artificial Sequence
  Description of Artificial Sequence: Synthetic oligonucleotide
ccggagggccucacacagc

SEQ ID NO: 3150964 - RNA, 19 nt, Artificial Sequence
  Description of Artificial Sequence: Synthetic oligonucleotide
ccuacagucucugaauguu

SEQ ID NO: 3150965 - RNA, 19 nt, Artificial Sequence
  Description of Artificial Sequence: Synthetic oligonucleotide
cccacgaguauugucgcua

SEQ ID NO: 3150966 - RNA, 19 nt, Artificial Sequence
  Description of Artificial Sequence: Synthetic oligonucleotide
ccccaaccuacagucucug

SEQ ID NO: 3150967 - RNA, 19 nt, Artificial Sequence
  Description of Artificial Sequence: Synthetic oligonucleotide
cagcgccccaaccuacagu

SEQ ID NO: 3150968 - RNA, 19 nt, Artificial Sequence
  Description of Artificial Sequence: Synthetic oligonucleotide
cccaaccuacagucucuga

SEQ ID NO: 3150969 - RNA, 19 nt, Artificial Sequence
  Description of Artificial Sequence: Synthetic oligonucleotide
ggagggccucacacagcac

SEQ ID NO: 3150970 - RNA, 19 nt, Artificial Sequence
  Description of Artificial Sequence: Synthetic oligonucleotide
ggaugccggagggccucac

SEQ ID NO: 3150971 - RNA, 19 nt, Artificial Sequence
  Description of Artificial Sequence: Synthetic oligonucleotide
gccccaaccuacagucucu

SEQ ID NO: 3150972 - RNA, 19 nt, Artificial Sequence
  Description of Artificial Sequence: Synthetic oligonucleotide
ccuggaugccggagggccu

SEQ ID NO: 3150973 - RNA, 19 nt, Artificial Sequence
  Description of Artificial Sequence: Synthetic oligonucleotide
gggccucacacagcacccu

SEQ ID NO: 3150974 - RNA, 19 nt, Artificial Sequence
  Description of Artificial Sequence: Synthetic oligonucleotide
ccccacgaguauugucgcu

SEQ ID NO: 3150975 - RNA, 19 nt, Artificial Sequence
  Description of Artificial Sequence: Synthetic oligonucleotide
gcgccccaaccuacagucu

SEQ ID NO: 3150976 - RNA, 19 nt, Artificial Sequence
  Description of Artificial Sequence: Synthetic oligonucleotide
aaauuguccuuccucugcc

SEQ ID NO: 3150977 - RNA, 19 nt, Artificial Sequence
  Description of Artificial Sequence: Synthetic oligonucleotide
uucaaacucacugaaauug

SEQ ID NO: 3150978 - RNA, 19 nt, Artificial Sequence
  Description of Artificial Sequence: Synthetic oligonucleotide
ugcuuuguagaccauacug

SEQ ID NO: 3150979 - RNA, 19 nt, Artificial Sequence
  Description of Artificial Sequence: Synthetic oligonucleotide
aaacucacugaaauugucc

SEQ ID NO: 3150980 - RNA, 19 nt, Artificial Sequence
  Description of Artificial Sequence: Synthetic oligonucleotide
acugucuucaaacucacug

SEQ ID NO: 3150981 - RNA, 19 nt, Artificial Sequence
  Description of Artificial Sequence: Synthetic oligonucleotide
ucuucaaacucacugaaau

SEQ ID NO: 3150982 - RNA, 19 nt, Artificial Sequence
  Description of Artificial Sequence: Synthetic oligonucleotide
acugaaauuguccuuccuc

SEQ ID NO: 3150983 - RNA, 19 nt, Artificial Sequence
  Description of Artificial Sequence: Synthetic oligonucleotide
aacucacugaaauuguccu

SEQ ID NO: 3150984 - RNA, 19 nt, Artificial Sequence
  Description of Artificial Sequence: Synthetic oligonucleotide
uuugcuuuguagaccauac

SEQ ID NO: 3150985 - RNA, 19 nt, Artificial Sequence
  Description of Artificial Sequence: Synthetic oligonucleotide
gaccauacugucuucaaac

SEQ ID NO: 3150986 - RNA, 19 nt, Artificial Sequence
  Description of Artificial Sequence: Synthetic oligonucleotide
gaaauuguccuuccucugc

SEQ ID NO: 3150987 - RNA, 19 nt, Artificial Sequence
  Description of Artificial Sequence: Synthetic oligonucleotide
cauacugucuucaaacuca

SEQ ID NO: 3150988 - RNA, 19 nt, Artificial Sequence
  Description of Artificial Sequence: Synthetic oligonucleotide
uuuguagaccauacugucu

SEQ ID NO: 3150989 - RNA, 19 nt, Artificial Sequence
  Description of Artificial Sequence: Synthetic oligonucleotide
uuguagaccauacugucuu

SEQ ID NO: 3150990 - RNA, 19 nt, Artificial Sequence
  Description of Artificial Sequence: Synthetic oligonucleotide
cuuuguagaccauacuguc

SEQ ID NO: 3150991 - RNA, 19 nt, Artificial Sequence
  Description of Artificial Sequence: Synthetic oligonucleotide
ugucuucaaacucacugaa

SEQ ID NO: 3150992 - RNA, 19 nt, Artificial Sequence
  Description of Artificial Sequence: Synthetic oligonucleotide
ugaaauuguccuuccucug

SEQ ID NO: 3150993 - RNA, 19 nt, Artificial Sequence
  Description of Artificial Sequence: Synthetic oligonucleotide
auuguccuuccucugccuc

SEQ ID NO: 3150994 - RNA, 19 nt, Artificial Sequence
  Description of Artificial Sequence: Synthetic oligonucleotide
aauuguccuuccucugccu

SEQ ID NO: 3150995 - RNA, 19 nt, Artificial Sequence
  Description of Artificial Sequence: Synthetic oligonucleotide
cucacugaaauuguccuuc

SEQ ID NO: 3150996 - RNA, 19 nt, Artificial Sequence
  Description of Artificial Sequence: Synthetic oligonucleotide
accauacugucuucaaacu

SEQ ID NO: 3150997 - RNA, 19 nt, Artificial Sequence
  Description of Artificial Sequence: Synthetic oligonucleotide
caaacucacugaaauuguc

SEQ ID NO: 3150998 - RNA, 19 nt, Artificial Sequence
  Description of Artificial Sequence: Synthetic oligonucleotide
ucacugaaauuguccuucc

SEQ ID NO: 3150999 - RNA, 19 nt, Artificial Sequence
  Description of Artificial Sequence: Synthetic oligonucleotide
auacugucuucaaacucac

SEQ ID NO: 3151000 - RNA, 19 nt, Artificial Sequence
  Description of Artificial Sequence: Synthetic oligonucleotide
uuguccuuccucugccucc

SEQ ID NO: 3151001 - RNA, 19 nt, Artificial Sequence
  Description of Artificial Sequence: Synthetic oligonucleotide
uugcuuuguagaccauacu

SEQ ID NO: 3151002 - RNA, 19 nt, Artificial Sequence
  Description of Artificial Sequence: Synthetic oligonucleotide
ugccuguccuggaauuugc

SEQ ID NO: 3151003 - RNA, 19 nt, Artificial Sequence
  Description of Artificial Sequence: Synthetic oligonucleotide
cugaaauuguccuuccucu

SEQ ID NO: 3151004 - RNA, 19 nt, Artificial Sequence
  Description of Artificial Sequence: Synthetic oligonucleotide
uagaccauacugucuucaa

SEQ ID NO: 3151005 - RNA, 19 nt, Artificial Sequence
  Description of Artificial Sequence: Synthetic oligonucleotide
agaccauacugucuucaaa

SEQ ID NO: 3151006 - RNA, 19 nt, Artificial Sequence
  Description of Artificial Sequence: Synthetic oligonucleotide
uguagaccauacugucuuc

SEQ ID NO: 3151007 - RNA, 19 nt, Artificial Sequence
  Description of Artificial Sequence: Synthetic oligonucleotide
uguccuuccucugccuccc

SEQ ID NO: 3151008 - RNA, 19 nt, Artificial Sequence
  Description of Artificial Sequence: Synthetic oligonucleotide
auuugcuuuguagaccaua

SEQ ID NO: 3151009 - RNA, 19 nt, Artificial Sequence
  Description of Artificial Sequence: Synthetic oligonucleotide
acucacugaaauuguccuu

SEQ ID NO: 3151010 - RNA, 19 nt, Artificial Sequence
  Description of Artificial Sequence: Synthetic oligonucleotide
guagaccauacugucuuca

SEQ ID NO: 3151011 - RNA, 19 nt, Artificial Sequence
  Description of Artificial Sequence: Synthetic oligonucleotide
uacugucuucaaacucacu

SEQ ID NO: 3151012 - RNA, 19 nt, Artificial Sequence
  Description of Artificial Sequence: Synthetic oligonucleotide
uucugccuguccuggaauu

SEQ ID NO: 3151013 - RNA, 19 nt, Artificial Sequence
  Description of Artificial Sequence: Synthetic oligonucleotide
cugccuguccuggaauuug

SEQ ID NO: 3151014 - RNA, 19 nt, Artificial Sequence
  Description of Artificial Sequence: Synthetic oligonucleotide
aauuugcuuuguagaccau

SEQ ID NO: 3151015 - RNA, 19 nt, Artificial Sequence
  Description of Artificial Sequence: Synthetic oligonucleotide
ucugccuguccuggaauuu

SEQ ID NO: 3151016 - RNA, 19 nt, Artificial Sequence
  Description of Artificial Sequence: Synthetic oligonucleotide
cuucaaacucacugaaauu

SEQ ID NO: 3151017 - RNA, 19 nt, Artificial Sequence
  Description of Artificial Sequence: Synthetic oligonucleotide
gcuuuguagaccauacugu

SEQ ID NO: 3151018 - RNA, 19 nt, Artificial Sequence
  Description of Artificial Sequence: Synthetic oligonucleotide
gucuucaaacucacugaaa

SEQ ID NO: 3151019 - RNA, 19 nt, Artificial Sequence
  Description of Artificial Sequence: Synthetic oligonucleotide
cuuccucugccucccaaau

SEQ ID NO: 3151020 - RNA, 19 nt, Artificial Sequence
  Description of Artificial Sequence: Synthetic oligonucleotide
cacugaaauuguccuuccu

SEQ ID NO: 3151021 - RNA, 19 nt, Artificial Sequence
  Description of Artificial Sequence: Synthetic oligonucleotide
gccuguccuggaauuugcu

SEQ ID NO: 3151022 - RNA, 19 nt, Artificial Sequence
  Description of Artificial Sequence: Synthetic oligonucleotide
uuugauaccagcacuaggg

SEQ ID NO: 3151023 - RNA, 19 nt, Artificial Sequence
  Description of Artificial Sequence: Synthetic oligonucleotide
gauaccagcacuagggagg

SEQ ID NO: 3151024 - RNA, 19 nt, Artificial Sequence
  Description of Artificial Sequence: Synthetic oligonucleotide
accagcauggucuacaaga

SEQ ID NO: 3151025 - RNA, 19 nt, Artificial Sequence
  Description of Artificial Sequence: Synthetic oligonucleotide
ugauaccagcacuagggag

SEQ ID NO: 3151026 - RNA, 19 nt, Artificial Sequence
  Description of Artificial Sequence: Synthetic oligonucleotide
cuuugauaccagcacuagg

SEQ ID NO: 3151027 - RNA, 19 nt, Artificial Sequence
  Description of Artificial Sequence: Synthetic oligonucleotide
agcauggucuacaagagcu

SEQ ID NO: 3151028 - RNA, 19 nt, Artificial Sequence
  Description of Artificial Sequence: Synthetic oligonucleotide
uugauaccagcacuaggga

SEQ ID NO: 3151029 - RNA, 19 nt, Artificial Sequence
  Description of Artificial Sequence: Synthetic oligonucleotide
aaacccugucucgaacccc

SEQ ID NO: 3151030 - RNA, 19 nt, Artificial Sequence
  Description of Artificial Sequence: Synthetic oligonucleotide
acuagggaggcagaggcag

SEQ ID NO: 3151031 - RNA, 19 nt, Artificial Sequence
  Description of Artificial Sequence: Synthetic oligonucleotide
auaccagcacuagggaggc

SEQ ID NO: 3151032 - RNA, 19 nt, Artificial Sequence
  Description of Artificial Sequence: Synthetic oligonucleotide
cauggucuacaagagcuag

SEQ ID NO: 3151033 - RNA, 19 nt, Artificial Sequence
  Description of Artificial Sequence: Synthetic oligonucleotide
gcacuagggaggcagaggc

SEQ ID NO: 3151034 - RNA, 19 nt, Artificial Sequence
  Description of Artificial Sequence: Synthetic oligonucleotide
agcacuagggaggcagagg

SEQ ID NO: 3151035 - RNA, 19 nt, Artificial Sequence
  Description of Artificial Sequence: Synthetic oligonucleotide
cagcauggucuacaagagc

SEQ ID NO: 3151036 - RNA, 19 nt, Artificial Sequence
  Description of Artificial Sequence: Synthetic oligonucleotide
ccagcauggucuacaagag

SEQ ID NO: 3151037 - RNA, 19 nt, Artificial Sequence
  Description of Artificial Sequence: Synthetic oligonucleotide
gaccagcauggucuacaag

SEQ ID NO: 3151038 - RNA, 19 nt, Artificial Sequence
  Description of Artificial Sequence: Synthetic oligonucleotide
agaccagcauggucuacaa

SEQ ID NO: 3151039 - RNA, 19 nt, Artificial Sequence
  Description of Artificial Sequence: Synthetic oligonucleotide
cagcacuagggaggcagag

SEQ ID NO: 3151040 - RNA, 19 nt, Artificial Sequence
  Description of Artificial Sequence: Synthetic oligonucleotide
cacuagggaggcagaggca

SEQ ID NO: 3151041 - RNA, 19 nt, Artificial Sequence
  Description of Artificial Sequence: Synthetic oligonucleotide
gcauggucuacaagagcua

SEQ ID NO: 3151042 - RNA, 19 nt, Artificial Sequence
  Description of Artificial Sequence: Synthetic oligonucleotide
ccagcacuagggaggcaga

SEQ ID NO: 3151043 - RNA, 19 nt, Artificial Sequence
  Description of Artificial Sequence: Synthetic oligonucleotide
aagcccauggccccagcac

SEQ ID NO: 3151044 - RNA, 19 nt, Artificial Sequence
  Description of Artificial Sequence: Synthetic oligonucleotide
agcccauggccccagcacc

SEQ ID NO: 3151045 - RNA, 19 nt, Artificial Sequence
  Description of Artificial Sequence: Synthetic oligonucleotide
cauggccccagcaccucag

SEQ ID NO: 3151046 - RNA, 19 nt, Artificial Sequence
  Description of Artificial Sequence: Synthetic oligonucleotide
gaagcccauggccccagca

SEQ ID NO: 3151047 - RNA, 19 nt, Artificial Sequence
  Description of Artificial Sequence: Synthetic oligonucleotide
auggccccagcaccucagg

SEQ ID NO: 3151048 - RNA, 19 nt, Artificial Sequence
  Description of Artificial Sequence: Synthetic oligonucleotide
uagaagcccauggccccag

SEQ ID NO: 3151049 - RNA, 19 nt, Artificial Sequence
  Description of Artificial Sequence: Synthetic oligonucleotide
gggucacauaugccguuug

SEQ ID NO: 3151050 - RNA, 19 nt, Artificial Sequence
  Description of Artificial Sequence: Synthetic oligonucleotide
ggccccagcaccucagggu

SEQ ID NO: 3151051 - RNA, 19 nt, Artificial Sequence
  Description of Artificial Sequence: Synthetic oligonucleotide
ccauggccccagcaccuca

SEQ ID NO: 3151052 - RNA, 19 nt, Artificial Sequence
  Description of Artificial Sequence: Synthetic oligonucleotide
uggccuuuaacucagagau

SEQ ID NO: 3151053 - RNA, 19 nt, Artificial Sequence
  Description of Artificial Sequence: Synthetic oligonucleotide
uuuaacucagagaucugcc

SEQ ID NO: 3151054 - RNA, 19 nt, Artificial Sequence
  Description of Artificial Sequence: Synthetic oligonucleotide
cuuuaacucagagaucugc

SEQ ID NO: 3151055 - RNA, 19 nt, Artificial Sequence
  Description of Artificial Sequence: Synthetic oligonucleotide
ugguccuggaauuugcucu

SEQ ID NO: 3151056 - RNA, 19 nt, Artificial Sequence
  Description of Artificial Sequence: Synthetic oligonucleotide
uuaacucagagaucugccu

SEQ ID NO: 3151057 - RNA, 19 nt, Artificial Sequence
  Description of Artificial Sequence: Synthetic oligonucleotide
aaggugugcaccaccagca

SEQ ID NO: 3151058 - RNA, 19 nt, Artificial Sequence
  Description of Artificial Sequence: Synthetic oligonucleotide
accaccagcaccugguuua

SEQ ID NO: 3151059 - RNA, 19 nt, Artificial Sequence
  Description of Artificial Sequence: Synthetic oligonucleotide
agcugguccuggaauuugc

SEQ ID NO: 3151060 - RNA, 19 nt, Artificial Sequence
  Description of Artificial Sequence: Synthetic oligonucleotide
uguagcccuagcugguccu

SEQ ID NO: 3151061 - RNA, 19 nt, Artificial Sequence
  Description of Artificial Sequence: Synthetic oligonucleotide
cuggccuuuaacucagaga

SEQ ID NO: 3151062 - RNA, 19 nt, Artificial Sequence
  Description of Artificial Sequence: Synthetic oligonucleotide
agacuggccuuuaacucag

SEQ ID NO: 3151063 - RNA, 19 nt, Artificial Sequence
  Description of Artificial Sequence: Synthetic oligonucleotide
cugguccuggaauuugcuc

SEQ ID NO: 3151064 - RNA, 19 nt, Artificial Sequence
  Description of Artificial Sequence: Synthetic oligonucleotide
guguagcccuagcuggucc

SEQ ID NO: 3151065 - RNA, 19 nt, Artificial Sequence
  Description of Artificial Sequence: Synthetic oligonucleotide
gccuuuaacucagagaucu

SEQ ID NO: 3151066 - RNA, 19 nt, Artificial Sequence
  Description of Artificial Sequence: Synthetic oligonucleotide
uagcugguccuggaauuug

SEQ ID NO: 3151067 - RNA, 19 nt, Artificial Sequence
  Description of Artificial Sequence: Synthetic oligonucleotide
uagcccuagcugguccugg

SEQ ID NO: 3151068 - RNA, 19 nt, Artificial Sequence
  Description of Artificial Sequence: Synthetic oligonucleotide
uguguagcccuagcugguc

SEQ ID NO: 3151069 - RNA, 19 nt, Artificial Sequence
  Description of Artificial Sequence: Synthetic oligonucleotide
gugcaccaccagcaccugg

SEQ ID NO: 3151070 - RNA, 19 nt, Artificial Sequence
  Description of Artificial Sequence: Synthetic oligonucleotide
agcccuagcugguccugga

SEQ ID NO: 3151071 - RNA, 19 nt, Artificial Sequence
  Description of Artificial Sequence: Synthetic oligonucleotide
ugugcaccaccagcaccug

SEQ ID NO: 3151072 - RNA, 19 nt, Artificial Sequence
  Description of Artificial Sequence: Synthetic oligonucleotide
guagcccuagcugguccug

SEQ ID NO: 3151073 - RNA, 19 nt, Artificial Sequence
  Description of Artificial Sequence: Synthetic oligonucleotide
ccuuuaacucagagaucug

SEQ ID NO: 3151074 - RNA, 19 nt, Artificial Sequence
  Description of Artificial Sequence: Synthetic oligonucleotide
uagaccagacuggccuuua

SEQ ID NO: 3151075 - RNA, 19 nt, Artificial Sequence
  Description of Artificial Sequence: Synthetic oligonucleotide
ggccuuuaacucagagauc

SEQ ID NO: 3151076 - RNA, 19 nt, Artificial Sequence
  Description of Artificial Sequence: Synthetic oligonucleotide
gacuggccuuuaacucaga

SEQ ID NO: 3151077 - RNA, 19 nt, Artificial Sequence
  Description of Artificial Sequence: Synthetic oligonucleotide
ccuagcugguccuggaauu

SEQ ID NO: 3151078 - RNA, 19 nt, Artificial Sequence
  Description of Artificial Sequence: Synthetic oligonucleotide
gcugguccuggaauuugcu

SEQ ID NO: 3151079 - RNA, 19 nt, Artificial Sequence
  Description of Artificial Sequence: Synthetic oligonucleotide
caccaccagcaccugguuu

SEQ ID NO: 3151080 - RNA, 19 nt, Artificial Sequence
  Description of Artificial Sequence: Synthetic oligonucleotide
gcccuagcugguccuggaa

SEQ ID NO: 3151081 - RNA, 19 nt, Artificial Sequence
  Description of Artificial Sequence: Synthetic oligonucleotide
cccuagcugguccuggaau

SEQ ID NO: 3151082 - RNA, 19 nt, Artificial Sequence
  Description of Artificial Sequence: Synthetic oligonucleotide
uuucuuuuaaaccaaaacu

SEQ ID NO: 3151083 - RNA, 19 nt, Artificial Sequence
  Description of Artificial Sequence: Synthetic oligonucleotide
uuuuaaaccaaaacuauuu

SEQ ID NO: 3151084 - RNA, 19 nt, Artificial Sequence
  Description of Artificial Sequence: Synthetic oligonucleotide
aaacuauuuauuuguuuug

SEQ ID NO: 3151085 - RNA, 19 nt, Artificial Sequence
  Description of Artificial Sequence: Synthetic oligonucleotide
accaaaacuauuuauuugu

SEQ ID NO: 3151086 - RNA, 19 nt, Artificial Sequence
  Description of Artificial Sequence: Synthetic oligonucleotide
aaccaaaacuauuuauuug

SEQ ID NO: 3151087 - RNA, 19 nt, Artificial Sequence
  Description of Artificial Sequence: Synthetic oligonucleotide
aaaccaaaacuauuuauuu

SEQ ID NO: 3151088 - RNA, 19 nt, Artificial Sequence
  Description of Artificial Sequence: Synthetic oligonucleotide
uaaaccaaaacuauuuauu

SEQ ID NO: 3151089 - RNA, 19 nt, Artificial Sequence
  Description of Artificial Sequence: Synthetic oligonucleotide
uuaaaccaaaacuauuuau

SEQ ID NO: 3151090 - RNA, 19 nt, Artificial Sequence
  Description of Artificial Sequence: Synthetic oligonucleotide
auuuauuuguuuuguuuug

SEQ ID NO: 3151091 - RNA, 19 nt, Artificial Sequence
  Description of Artificial Sequence: Synthetic oligonucleotide
uuauuuguuuuguuuugag

SEQ ID NO: 3151092 - RNA, 19 nt, Artificial Sequence
  Description of Artificial Sequence: Synthetic oligonucleotide
uuuaaaccaaaacuauuua

SEQ ID NO: 3151093 - RNA, 19 nt, Artificial Sequence
  Description of Artificial Sequence: Synthetic oligonucleotide
acucucuacaccaaguugg

SEQ ID NO: 3151094 - RNA, 19 nt, Artificial Sequence
  Description of Artificial Sequence: Synthetic oligonucleotide
aacucucuacaccaaguug

SEQ ID NO: 3151095 - RNA, 19 nt, Artificial Sequence
  Description of Artificial Sequence: Synthetic oligonucleotide
uauuuguuuuguuuugaga

SEQ ID NO: 3151096 - RNA, 19 nt, Artificial Sequence
  Description of Artificial Sequence: Synthetic oligonucleotide
acuguguaguccuugcuag

SEQ ID NO: 3151097 - RNA, 19 nt, Artificial Sequence
  Description of Artificial Sequence: Synthetic oligonucleotide
aacuauuuauuuguuuugu

SEQ ID NO: 3151098 - RNA, 19 nt, Artificial Sequence
  Description of Artificial Sequence: Synthetic oligonucleotide
uccuugcuagcccagaacu

SEQ ID NO: 3151099 - RNA, 19 nt, Artificial Sequence
  Description of Artificial Sequence: Synthetic oligonucleotide
uuuauuuguuuuguuuuga

SEQ ID NO: 3151100 - RNA, 19 nt, Artificial Sequence
  Description of Artificial Sequence: Synthetic oligonucleotide
uguuuuguuuugagacagg

SEQ ID NO: 3151101 - RNA, 19 nt, Artificial Sequence
  Description of Artificial Sequence: Synthetic oligonucleotide
ucuacaccaaguuggccug

SEQ ID NO: 3151102 - RNA, 19 nt, Artificial Sequence
  Description of Artificial Sequence: Synthetic oligonucleotide
uguaguccuugcuagccca

SEQ ID NO: 3151103 - RNA, 19 nt, Artificial Sequence
  Description of Artificial Sequence: Synthetic oligonucleotide
uagcccagaacucucuaca

SEQ ID NO: 3151104 - RNA, 19 nt, Artificial Sequence
  Description of Artificial Sequence: Synthetic oligonucleotide
agcccagaacucucuacac

SEQ ID NO: 3151105 - RNA, 19 nt, Artificial Sequence
  Description of Artificial Sequence: Synthetic oligonucleotide
cucucuacaccaaguuggc

SEQ ID NO: 3151106 - RNA, 19 nt, Artificial Sequence
  Description of Artificial Sequence: Synthetic oligonucleotide
aaguuggccuggaacucac

SEQ ID NO: 3151107 - RNA, 19 nt, Artificial Sequence
  Description of Artificial Sequence: Synthetic oligonucleotide
cagaacucucuacaccaag

SEQ ID NO: 3151108 - RNA, 19 nt, Artificial Sequence
  Description of Artificial Sequence: Synthetic oligonucleotide
cuagcccagaacucucuac

SEQ ID NO: 3151109 - RNA, 19 nt, Artificial Sequence
  Description of Artificial Sequence: Synthetic oligonucleotide
agggucucacuguguaguc

SEQ ID NO: 3151110 - RNA, 19 nt, Artificial Sequence
  Description of Artificial Sequence: Synthetic oligonucleotide
cucuacaccaaguuggccu

SEQ ID NO: 3151111 - RNA, 19 nt, Artificial Sequence
  Description of Artificial Sequence: Synthetic oligonucleotide
agaacucucuacaccaagu

SEQ ID NO: 3151112 - RNA, 19 nt, Artificial Sequence
  Description of Artificial Sequence: Synthetic oligonucleotide
guguaguccuugcuagccc

SEQ ID NO: 3151113 - RNA, 19 nt, Artificial Sequence
  Description of Artificial Sequence: Synthetic oligonucleotide
ugcuagcccagaacucucu

SEQ ID NO: 3151114 - RNA, 19 nt, Artificial Sequence
  Description of Artificial Sequence: Synthetic oligonucleotide
ucucuacaccaaguuggcc

SEQ ID NO: 3151115 - RNA, 19 nt, Artificial Sequence
  Description of Artificial Sequence: Synthetic oligonucleotide
uugcuagcccagaacucuc

SEQ ID NO: 3151116 - RNA, 19 nt, Artificial Sequence
  Description of Artificial Sequence: Synthetic oligonucleotide
caaaacuauuuauuuguuu

SEQ ID NO: 3151117 - RNA, 19 nt, Artificial Sequence
  Description of Artificial Sequence: Synthetic oligonucleotide
gaacucucuacaccaaguu

SEQ ID NO: 3151118 - RNA, 19 nt, Artificial Sequence
  Description of Artificial Sequence: Synthetic oligonucleotide
guccuugcuagcccagaac

SEQ ID NO: 3151119 - RNA, 19 nt, Artificial Sequence
  Description of Artificial Sequence: Synthetic oligonucleotide
cccagaacucucuacacca

SEQ ID NO: 3151120 - RNA, 19 nt, Artificial Sequence
  Description of Artificial Sequence: Synthetic oligonucleotide
uacaccaaguuggccugga

SEQ ID NO: 3151121 - RNA, 19 nt, Artificial Sequence
  Description of Artificial Sequence: Synthetic oligonucleotide
cuugcuagcccagaacucu

SEQ ID NO: 3151122 - RNA, 19 nt, Artificial Sequence
  Description of Artificial Sequence: Synthetic oligonucleotide
gcccagaacucucuacacc

SEQ ID NO: 3151123 - RNA, 19 nt, Artificial Sequence
  Description of Artificial Sequence: Synthetic oligonucleotide
guaguccuugcuagcccag

SEQ ID NO: 3151124 - RNA, 19 nt, Artificial Sequence
  Description of Artificial Sequence: Synthetic oligonucleotide
cuacaccaaguuggccugg

SEQ ID NO: 3151125 - RNA, 19 nt, Artificial Sequence
  Description of Artificial Sequence: Synthetic oligonucleotide
caaguuggccuggaacuca

SEQ ID NO: 3151126 - RNA, 19 nt, Artificial Sequence
  Description of Artificial Sequence: Synthetic oligonucleotide
acaccaaguuggccuggaa

SEQ ID NO: 3151127 - RNA, 19 nt, Artificial Sequence
  Description of Artificial Sequence: Synthetic oligonucleotide
ccuugcuagcccagaacuc

SEQ ID NO: 3151128 - RNA, 19 nt, Artificial Sequence
  Description of Artificial Sequence: Synthetic oligonucleotide
gcuagcccagaacucucua

SEQ ID NO: 3151129 - RNA, 19 nt, Artificial Sequence
  Description of Artificial Sequence: Synthetic oligonucleotide
ccagaacucucuacaccaa

SEQ ID NO: 3151130 - RNA, 19 nt, Artificial Sequence
  Description of Artificial Sequence: Synthetic oligonucleotide
uuuaaaauggaacuguuug

SEQ ID NO: 3151131 - RNA, 19 nt, Artificial Sequence
  Description of Artificial Sequence: Synthetic oligonucleotide
aagucuuuaaaauggaacu

SEQ ID NO: 3151132 - RNA, 19 nt, Artificial Sequence
  Description of Artificial Sequence: Synthetic oligonucleotide
uggaacuguuugaagaugg

SEQ ID NO: 3151133 - RNA, 19 nt, Artificial Sequence
  Description of Artificial Sequence: Synthetic oligonucleotide
uuugaagauggcaucccgg

SEQ ID NO: 3151134 - RNA, 19 nt, Artificial Sequence
  Description of Artificial Sequence: Synthetic oligonucleotide
uucauuccaccccacagcc

SEQ ID NO: 3151135 - RNA, 19 nt, Artificial Sequence
  Description of Artificial Sequence: Synthetic oligonucleotide
acuguuugaagauggcauc

SEQ ID NO: 3151136 - RNA, 19 nt, Artificial Sequence
  Description of Artificial Sequence: Synthetic oligonucleotide
aguucauuccaccccacag

SEQ ID NO: 3151137 - RNA, 19 nt, Artificial Sequence
  Description of Artificial Sequence: Synthetic oligonucleotide
uuuggcagcagcugguccc

SEQ ID NO: 3151138 - RNA, 19 nt, Artificial Sequence
  Description of Artificial Sequence: Synthetic oligonucleotide
uugaagucuuuaaaaugga

SEQ ID NO: 3151139 - RNA, 19 nt, Artificial Sequence
  Description of Artificial Sequence: Synthetic oligonucleotide
aacuguuugaagauggcau

SEQ ID NO: 3151140 - RNA, 19 nt, Artificial Sequence
  Description of Artificial Sequence: Synthetic oligonucleotide
auuuggcagcagcuggucc

SEQ ID NO: 3151141 - RNA, 19 nt, Artificial Sequence
  Description of Artificial Sequence: Synthetic oligonucleotide
guuugaagauggcaucccg

SEQ ID NO: 3151142 - RNA, 19 nt, Artificial Sequence
  Description of Artificial Sequence: Synthetic oligonucleotide
ugaagucuuuaaaauggaa

SEQ ID NO: 3151143 - RNA, 19 nt, Artificial Sequence
  Description of Artificial Sequence: Synthetic oligonucleotide
cagauuuggcagcagcugg

SEQ ID NO: 3151144 - RNA, 19 nt, Artificial Sequence
  Description of Artificial Sequence: Synthetic oligonucleotide
ucuuuaaaauggaacuguu

SEQ ID NO: 3151145 - RNA, 19 nt, Artificial Sequence
  Description of Artificial Sequence: Synthetic oligonucleotide
agucuuuaaaauggaacug

SEQ ID NO: 3151146 - RNA, 19 nt, Artificial Sequence
  Description of Artificial Sequence: Synthetic oligonucleotide
uccgcacucagccugugug

SEQ ID NO: 3151147 - RNA, 19 nt, Artificial Sequence
  Description of Artificial Sequence: Synthetic oligonucleotide
guucauuccaccccacagc

SEQ ID NO: 3151148 - RNA, 19 nt, Artificial Sequence
  Description of Artificial Sequence: Synthetic oligonucleotide
ucagauuuggcagcagcug

SEQ ID NO: 3151149 - RNA, 19 nt, Artificial Sequence
  Description of Artificial Sequence: Synthetic oligonucleotide
agcccucagauuuggcagc

SEQ ID NO: 3151150 - RNA, 19 nt, Artificial Sequence
  Description of Artificial Sequence: Synthetic oligonucleotide
acagcccucagauuuggca

SEQ ID NO: 3151151 - RNA, 19 nt, Artificial Sequence
  Description of Artificial Sequence: Synthetic oligonucleotide
uguuugaagauggcauccc

SEQ ID NO: 3151152 - RNA, 19 nt, Artificial Sequence
  Description of Artificial Sequence: Synthetic oligonucleotide
cuguuugaagauggcaucc

SEQ ID NO: 3151153 - RNA, 19 nt, Artificial Sequence
  Description of Artificial Sequence: Synthetic oligonucleotide
cuucccaguucauuccacc

SEQ ID NO: 3151154 - RNA, 19 nt, Artificial Sequence
  Description of Artificial Sequence: Synthetic oligonucleotide
cagcccucagauuuggcag

SEQ ID NO: 3151155 - RNA, 19 nt, Artificial Sequence
  Description of Artificial Sequence: Synthetic oligonucleotide
gaagauggcaucccggccu

SEQ ID NO: 3151156 - RNA, 19 nt, Artificial Sequence
  Description of Artificial Sequence: Synthetic oligonucleotide
gaacuguuugaagauggca

SEQ ID NO: 3151157 - RNA, 19 nt, Artificial Sequence
  Description of Artificial Sequence: Synthetic oligonucleotide
agccugugugccuugccag

SEQ ID NO: 3151158 - RNA, 19 nt, Artificial Sequence
  Description of Artificial Sequence: Synthetic oligonucleotide
ucauuccaccccacagccc

SEQ ID NO: 3151159 - RNA, 19 nt, Artificial Sequence
  Description of Artificial Sequence: Synthetic oligonucleotide
gucuuuaaaauggaacugu

SEQ ID NO: 3151160 - RNA, 19 nt, Artificial Sequence
  Description of Artificial Sequence: Synthetic oligonucleotide
gauggcaucccggccuucc

SEQ ID NO: 3151161 - RNA, 19 nt, Artificial Sequence
  Description of Artificial Sequence: Synthetic oligonucleotide
ucagccugugugccuugcc

SEQ ID NO: 3151162 - RNA, 19 nt, Artificial Sequence
  Description of Artificial Sequence: Synthetic oligonucleotide
cuguugaagucuuuaaaau

SEQ ID NO: 3151163 - RNA, 19 nt, Artificial Sequence
  Description of Artificial Sequence: Synthetic oligonucleotide
aagauggcaucccggccuu

SEQ ID NO: 3151164 - RNA, 19 nt, Artificial Sequence
  Description of Artificial Sequence: Synthetic oligonucleotide
agauuuggcagcagcuggu

SEQ ID NO: 3151165 - RNA, 19 nt, Artificial Sequence
  Description of Artificial Sequence: Synthetic oligonucleotide
gauuuggcagcagcugguc

SEQ ID NO: 3151166 - RNA, 19 nt, Artificial Sequence
  Description of Artificial Sequence: Synthetic oligonucleotide
cuuuaaaauggaacuguuu

SEQ ID NO: 3151167 - RNA, 19 nt, Artificial Sequence
  Description of Artificial Sequence: Synthetic oligonucleotide
aucccggccuucccaguuc

SEQ ID NO: 3151168 - RNA, 19 nt, Artificial Sequence
  Description of Artificial Sequence: Synthetic oligonucleotide
cauuccaccccacagcccu

SEQ ID NO: 3151169 - RNA, 19 nt, Artificial Sequence
  Description of Artificial Sequence: Synthetic oligonucleotide
ccucagauuuggcagcagc

SEQ ID NO: 3151170 - RNA, 19 nt, Artificial Sequence
  Description of Artificial Sequence: Synthetic oligonucleotide
ucccggccuucccaguuca

SEQ ID NO: 3151171 - RNA, 19 nt, Artificial Sequence
  Description of Artificial Sequence: Synthetic oligonucleotide
ggaacuguuugaagauggc

SEQ ID NO: 3151172 - RNA, 19 nt, Artificial Sequence
  Description of Artificial Sequence: Synthetic oligonucleotide
ggccuucccaguucauucc

SEQ ID NO: 3151173 - RNA, 19 nt, Artificial Sequence
  Description of Artificial Sequence: Synthetic oligonucleotide
uccuccgcacucagccugu

SEQ ID NO: 3151174 - RNA, 19 nt, Artificial Sequence
  Description of Artificial Sequence: Synthetic oligonucleotide
cacagcccucagauuuggc

SEQ ID NO: 3151175 - RNA, 19 nt, Artificial Sequence
  Description of Artificial Sequence: Synthetic oligonucleotide
cagccugugugccuugcca

SEQ ID NO: 3151176 - RNA, 19 nt, Artificial Sequence
  Description of Artificial Sequence: Synthetic oligonucleotide
caguucauuccaccccaca

SEQ ID NO: 3151177 - RNA, 19 nt, Artificial Sequence
  Description of Artificial Sequence: Synthetic oligonucleotide
gccugugugccuugccagc

SEQ ID NO: 3151178 - RNA, 19 nt, Artificial Sequence
  Description of Artificial Sequence: Synthetic oligonucleotide
caccccacagcccucagau

SEQ ID NO: 3151179 - RNA, 19 nt, Artificial Sequence
  Description of Artificial Sequence: Synthetic oligonucleotide
auuccaccccacagcccuc

SEQ ID NO: 3151180 - RNA, 19 nt, Artificial Sequence
  Description of Artificial Sequence: Synthetic oligonucleotide
cccaguucauuccacccca

SEQ ID NO: 3151181 - RNA, 19 nt, Artificial Sequence
  Description of Artificial Sequence: Synthetic oligonucleotide
ccgcacucagccugugugc

SEQ ID NO: 3151182 - RNA, 19 nt, Artificial Sequence
  Description of Artificial Sequence: Synthetic oligonucleotide
uggucccgcuccuccgcac

SEQ ID NO: 3151183 - RNA, 19 nt, Artificial Sequence
  Description of Artificial Sequence: Synthetic oligonucleotide
ccuucccaguucauuccac

SEQ ID NO: 3151184 - RNA, 19 nt, Artificial Sequence
  Description of Artificial Sequence: Synthetic oligonucleotide
gcuggucccgcuccuccgc

SEQ ID NO: 3151185 - RNA, 19 nt, Artificial Sequence
  Description of Artificial Sequence: Synthetic oligonucleotide
ucccgcuccuccgcacuca

SEQ ID NO: 3151186 - RNA, 19 nt, Artificial Sequence
  Description of Artificial Sequence: Synthetic oligonucleotide
cugugugccuugccagcca

SEQ ID NO: 3151187 - RNA, 19 nt, Artificial Sequence
  Description of Artificial Sequence: Synthetic oligonucleotide
cccuguugaagucuuuaaa

SEQ ID NO: 3151188 - RNA, 19 nt, Artificial Sequence
  Description of Artificial Sequence: Synthetic oligonucleotide
gccuucccaguucauucca

SEQ ID NO: 3151189 - RNA, 19 nt, Artificial Sequence
  Description of Artificial Sequence: Synthetic oligonucleotide
cggccuucccaguucauuc

SEQ ID NO: 3151190 - RNA, 19 nt, Artificial Sequence
  Description of Artificial Sequence: Synthetic oligonucleotide
ccacagcccucagauuugg

SEQ ID NO: 3151191 - RNA, 19 nt, Artificial Sequence
  Description of Artificial Sequence: Synthetic oligonucleotide
ccaguucauuccaccccac

SEQ ID NO: 3151192 - RNA, 19 nt, Artificial Sequence
  Description of Artificial Sequence: Synthetic oligonucleotide
gucccgcuccuccgcacuc

SEQ ID NO: 3151193 - RNA, 19 nt, Artificial Sequence
  Description of Artificial Sequence: Synthetic oligonucleotide
accccacagcccucagauu

SEQ ID NO: 3151194 - RNA, 19 nt, Artificial Sequence
  Description of Artificial Sequence: Synthetic oligonucleotide
cgcacucagccugugugcc

SEQ ID NO: 3151195 - RNA, 19 nt, Artificial Sequence
  Description of Artificial Sequence: Synthetic oligonucleotide
cuggucccgcuccuccgca

SEQ ID NO: 3151196 - RNA, 19 nt, Artificial Sequence
  Description of Artificial Sequence: Synthetic oligonucleotide
uggcagcagcuggucccgc

SEQ ID NO: 3151197 - RNA, 19 nt, Artificial Sequence
  Description of Artificial Sequence: Synthetic oligonucleotide
ccccacagcccucagauuu

SEQ ID NO: 3151198 - RNA, 19 nt, Artificial Sequence
  Description of Artificial Sequence: Synthetic oligonucleotide
gcccucagauuuggcagca

SEQ ID NO: 3151199 - RNA, 19 nt, Artificial Sequence
  Description of Artificial Sequence: Synthetic oligonucleotide
caucccggccuucccaguu

SEQ ID NO: 3151200 - RNA, 19 nt, Artificial Sequence
  Description of Artificial Sequence: Synthetic oligonucleotide
cacucagccugugugccuu

SEQ ID NO: 3151201 - RNA, 19 nt, Artificial Sequence
  Description of Artificial Sequence: Synthetic oligonucleotide
ggucccgcuccuccgcacu

SEQ ID NO: 3151202 - RNA, 19 nt, Artificial Sequence
  Description of Artificial Sequence: Synthetic oligonucleotide
cuccgcacucagccugugu

SEQ ID NO: 3151203 - RNA, 19 nt, Artificial Sequence
  Description of Artificial Sequence: Synthetic oligonucleotide
gcacucagccugugugccu

SEQ ID NO: 3151204 - RNA, 19 nt, Artificial Sequence
  Description of Artificial Sequence: Synthetic oligonucleotide
gcaucccggccuucccagu

SEQ ID NO: 3151205 - RNA, 19 nt, Artificial Sequence
  Description of Artificial Sequence: Synthetic oligonucleotide
ccuccgcacucagccugug

SEQ ID NO: 3151206 - RNA, 19 nt, Artificial Sequence
  Description of Artificial Sequence: Synthetic oligonucleotide
ccggccuucccaguucauu

SEQ ID NO: 3151207 - RNA, 19 nt, Artificial Sequence
  Description of Artificial Sequence: Synthetic oligonucleotide
cccggccuucccaguucau

SEQ ID NO: 3151208 - RNA, 19 nt, Artificial Sequence
  Description of Artificial Sequence: Synthetic oligonucleotide
cuugguuucuggcugggac

SEQ ID NO: 3151209 - RNA, 19 nt, Artificial Sequence
  Description of Artificial Sequence: Synthetic oligonucleotide
uugguuucuggcugggacu

SEQ ID NO: 3151210 - RNA, 19 nt, Artificial Sequence
  Description of Artificial Sequence: Synthetic oligonucleotide
ucuggcucgguuucuggcu

SEQ ID NO: 3151211 - RNA, 19 nt, Artificial Sequence
  Description of Artificial Sequence: Synthetic oligonucleotide
cucgguuucuggcugggac

SEQ ID NO: 3151212 - RNA, 19 nt, Artificial Sequence
  Description of Artificial Sequence: Synthetic oligonucleotide
cuggcugggacucccacug

SEQ ID NO: 3151213 - RNA, 19 nt, Artificial Sequence
  Description of Artificial Sequence: Synthetic oligonucleotide
ucgguuucuggcugggacu

SEQ ID NO: 3151214 - RNA, 19 nt, Artificial Sequence
  Description of Artificial Sequence: Synthetic oligonucleotide
ucaggcucaggcucaggcu

SEQ ID NO: 3151215 - RNA, 19 nt, Artificial Sequence
  Description of Artificial Sequence: Synthetic oligonucleotide
cucuggcucgguuucuggc

SEQ ID NO: 3151216 - RNA, 19 nt, Artificial Sequence
  Description of Artificial Sequence: Synthetic oligonucleotide
cuggggcucaggcucaggc

SEQ ID NO: 3151217 - RNA, 19 nt, Artificial Sequence
  Description of Artificial Sequence: Synthetic oligonucleotide
aggcuugguuucuggcugg

SEQ ID NO: 3151218 - RNA, 19 nt, Artificial Sequence
  Description of Artificial Sequence: Synthetic oligonucleotide
cugggacucccacuggggc

SEQ ID NO: 3151219 - RNA, 19 nt, Artificial Sequence
  Description of Artificial Sequence: Synthetic oligonucleotide
ucuggcugggacucccacu

SEQ ID NO: 3151220 - RNA, 19 nt, Artificial Sequence
  Description of Artificial Sequence: Synthetic oligonucleotide
ucaggcucuggcucgguuu

SEQ ID NO: 3151221 - RNA, 19 nt, Artificial Sequence
  Description of Artificial Sequence: Synthetic oligonucleotide
uuucuggcugggacucccc

SEQ ID NO: 3151222 - RNA, 19 nt, Artificial Sequence
  Description of Artificial Sequence: Synthetic oligonucleotide
ugguuucuggcugggacuc

SEQ ID NO: 3151223 - RNA, 19 nt, Artificial Sequence
  Description of Artificial Sequence: Synthetic oligonucleotide
cucccacuggggcucaggc

SEQ ID NO: 3151224 - RNA, 19 nt, Artificial Sequence
  Description of Artificial Sequence: Synthetic oligonucleotide
uucuggcugggacucccac

SEQ ID NO: 3151225 - RNA, 19 nt, Artificial Sequence
  Description of Artificial Sequence: Synthetic oligonucleotide
guuucuggcugggacuccc

SEQ ID NO: 3151226 - RNA, 19 nt, Artificial Sequence
  Description of Artificial Sequence: Synthetic oligonucleotide
uggcucgguuucuggcugg

SEQ ID NO: 3151227 - RNA, 19 nt, Artificial Sequence
  Description of Artificial Sequence: Synthetic oligonucleotide
uccggcucaggcucaggcu

SEQ ID NO: 3151228 - RNA, 19 nt, Artificial Sequence
  Description of Artificial Sequence: Synthetic oligonucleotide
uuucuggcugggacuccca

SEQ ID NO: 3151229 - RNA, 19 nt, Artificial Sequence
  Description of Artificial Sequence: Synthetic oligonucleotide
cuggcucgguuucuggcug

SEQ ID NO: 3151230 - RNA, 19 nt, Artificial Sequence
  Description of Artificial Sequence: Synthetic oligonucleotide
uggcugggacucccacugg

SEQ ID NO: 3151231 - RNA, 19 nt, Artificial Sequence
  Description of Artificial Sequence: Synthetic oligonucleotide
ggcugggacucccacuggg

SEQ ID NO: 3151232 - RNA, 19 nt, Artificial Sequence
  Description of Artificial Sequence: Synthetic oligonucleotide
cccacuggggcucaggcuc

SEQ ID NO: 3151233 - RNA, 19 nt, Artificial Sequence
  Description of Artificial Sequence: Synthetic oligonucleotide
gcucaggcuugguuucugg

SEQ ID NO: 3151234 - RNA, 19 nt, Artificial Sequence
  Description of Artificial Sequence: Synthetic oligonucleotide
ggggcucaggcucaggcuc

SEQ ID NO: 3151235 - RNA, 19 nt, Artificial Sequence
  Description of Artificial Sequence: Synthetic oligonucleotide
acucccacuggggcucagg

SEQ ID NO: 3151236 - RNA, 19 nt, Artificial Sequence
  Description of Artificial Sequence: Synthetic oligonucleotide
gcugggacucccacugggg

SEQ ID NO: 3151237 - RNA, 19 nt, Artificial Sequence
  Description of Artificial Sequence: Synthetic oligonucleotide
ugggacuccccuggggcuc

SEQ ID NO: 3151238 - RNA, 19 nt, Artificial Sequence
  Description of Artificial Sequence: Synthetic oligonucleotide
uggcucaggcuugguuucu

SEQ ID NO: 3151239 - RNA, 19 nt, Artificial Sequence
  Description of Artificial Sequence: Synthetic oligonucleotide
ccggcucaggcucaggcuc

SEQ ID NO: 3151240 - RNA, 19 nt, Artificial Sequence
  Description of Artificial Sequence: Synthetic oligonucleotide
ggcuugguuucuggcuggg

SEQ ID NO: 3151241 - RNA, 19 nt, Artificial Sequence
  Description of Artificial Sequence: Synthetic oligonucleotide
gggacucccacuggggcuc

SEQ ID NO: 3151242 - RNA, 19 nt, Artificial Sequence
  Description of Artificial Sequence: Synthetic oligonucleotide
gacuccccuggggcucagg

SEQ ID NO: 3151243 - RNA, 19 nt, Artificial Sequence
  Description of Artificial Sequence: Synthetic oligonucleotide
ggcucgguuucuggcuggg

SEQ ID NO: 3151244 - RNA, 19 nt, Artificial Sequence
  Description of Artificial Sequence: Synthetic oligonucleotide
ggcucaggcucuggcucgg

SEQ ID NO: 3151245 - RNA, 19 nt, Artificial Sequence
  Description of Artificial Sequence: Synthetic oligonucleotide
gguuucuggcugggacucc

SEQ ID NO: 3151246 - RNA, 19 nt, Artificial Sequence
  Description of Artificial Sequence: Synthetic oligonucleotide
cugggacuccccuggggcu

SEQ ID NO: 3151247 - RNA, 19 nt, Artificial Sequence
  Description of Artificial Sequence: Synthetic oligonucleotide
ggcucaggcuugguuucug

SEQ ID NO: 3151248 - RNA, 19 nt, Artificial Sequence
  Description of Artificial Sequence: Synthetic oligonucleotide
cacuggggcucaggcucag

SEQ ID NO: 3151249 - RNA, 19 nt, Artificial Sequence
  Description of Artificial Sequence: Synthetic oligonucleotide
gacucccacuggggcucag

SEQ ID NO: 3151250 - RNA, 19 nt, Artificial Sequence
  Description of Artificial Sequence: Synthetic oligonucleotide
aggcucuggcucgguuucu

SEQ ID NO: 3151251 - RNA, 19 nt, Artificial Sequence
  Description of Artificial Sequence: Synthetic oligonucleotide
ggcucaggcucaggcucag

SEQ ID NO: 3151252 - RNA, 19 nt, Artificial Sequence
  Description of Artificial Sequence: Synthetic oligonucleotide
cuccccuggggcucaggcu

SEQ ID NO: 3151253 - RNA, 19 nt, Artificial Sequence
  Description of Artificial Sequence: Synthetic oligonucleotide
cucuggcucaggcuugguu

SEQ ID NO: 3151254 - RNA, 19 nt, Artificial Sequence
  Description of Artificial Sequence: Synthetic oligonucleotide
cgguuucuggcugggacuc

SEQ ID NO: 3151255 - RNA, 19 nt, Artificial Sequence
  Description of Artificial Sequence: Synthetic oligonucleotide
gcuugguuucuggcuggga

SEQ ID NO: 3151256 - RNA, 19 nt, Artificial Sequence
  Description of Artificial Sequence: Synthetic oligonucleotide
ggcuccggcucaggcucag

SEQ ID NO: 3151257 - RNA, 19 nt, Artificial Sequence
  Description of Artificial Sequence: Synthetic oligonucleotide
ccacuggggcucaggcuca

SEQ ID NO: 3151258 - RNA, 19 nt, Artificial Sequence
  Description of Artificial Sequence: Synthetic oligonucleotide
cucaggcucuggcucgguu

SEQ ID NO: 3151259 - RNA, 19 nt, Artificial Sequence
  Description of Artificial Sequence: Synthetic oligonucleotide
gggacuccccuggggcuca

SEQ ID NO: 3151260 - RNA, 19 nt, Artificial Sequence
  Description of Artificial Sequence: Synthetic oligonucleotide
gcucgguuucuggcuggga

SEQ ID NO: 3151261 - RNA, 19 nt, Artificial Sequence
  Description of Artificial Sequence: Synthetic oligonucleotide
ccccuggggcucaggcuca

SEQ ID NO: 3151262 - RNA, 19 nt, Artificial Sequence
  Description of Artificial Sequence: Synthetic oligonucleotide
ggacucccacuggggcuca

SEQ ID NO: 3151263 - RNA, 19 nt, Artificial Sequence
  Description of Artificial Sequence: Synthetic oligonucleotide
ggacuccccuggggcucag

SEQ ID NO: 3151264 - RNA, 19 nt, Artificial Sequence
  Description of Artificial Sequence: Synthetic oligonucleotide
aaagaaacagcucuacagc

SEQ ID NO: 3151265 - RNA, 19 nt, Artificial Sequence
  Description of Artificial Sequence: Synthetic oligonucleotide
ugaauaauuauuuauugag

SEQ ID NO: 3151266 - RNA, 19 nt, Artificial Sequence
  Description of Artificial Sequence: Synthetic oligonucleotide
aauaauuauuuauugagaa

SEQ ID NO: 3151267 - RNA, 19 nt, Artificial Sequence
  Description of Artificial Sequence: Synthetic oligonucleotide
uaauuauuuauugagaagc

SEQ ID NO: 3151268 - RNA, 19 nt, Artificial Sequence
  Description of Artificial Sequence: Synthetic oligonucleotide
gaaagaaacagcucuacag

SEQ ID NO: 3151269 - RNA, 19 nt, Artificial Sequence
  Description of Artificial Sequence: Synthetic oligonucleotide
uuugaauaauuauuuauug

SEQ ID NO: 3151270 - RNA, 19 nt, Artificial Sequence
  Description of Artificial Sequence: Synthetic oligonucleotide
aauuauuuauugagaagcc

SEQ ID NO: 3151271 - RNA, 19 nt, Artificial Sequence
  Description of Artificial Sequence: Synthetic oligonucleotide
uuauuuauugagaagccac

SEQ ID NO: 3151272 - RNA, 19 nt, Artificial Sequence
  Description of Artificial Sequence: Synthetic oligonucleotide
auugagaagccacaguuuc

SEQ ID NO: 3151273 - RNA, 19 nt, Artificial Sequence
  Description of Artificial Sequence: Synthetic oligonucleotide
aaaagcaagauggauccac

SEQ ID NO: 3151274 - RNA, 19 nt, Artificial Sequence
  Description of Artificial Sequence: Synthetic oligonucleotide
uccacagaaagaaacagcu

SEQ ID NO: 3151275 - RNA, 19 nt, Artificial Sequence
  Description of Artificial Sequence: Synthetic oligonucleotide
auaauuauuuauugagaag

SEQ ID NO: 3151276 - RNA, 19 nt, Artificial Sequence
  Description of Artificial Sequence: Synthetic oligonucleotide
uaggcuuuuauauaaggca

SEQ ID NO: 3151277 - RNA, 19 nt, Artificial Sequence
  Description of Artificial Sequence: Synthetic oligonucleotide
uugaauaauuauuuauuga

SEQ ID NO: 3151278 - RNA, 19 nt, Artificial Sequence
  Description of Artificial Sequence: Synthetic oligonucleotide
uguaggcuuuuauauaagg

SEQ ID NO: 3151279 - RNA, 19 nt, Artificial Sequence
  Description of Artificial Sequence: Synthetic oligonucleotide
agauggauccacuauuuuc

SEQ ID NO: 3151280 - RNA, 19 nt, Artificial Sequence
  Description of Artificial Sequence: Synthetic oligonucleotide
auuuuccacagaaagaaac

SEQ ID NO: 3151281 - RNA, 19 nt, Artificial Sequence
  Description of Artificial Sequence: Synthetic oligonucleotide
uuauugagaagccacaguu

SEQ ID NO: 3151282 - RNA, 19 nt, Artificial Sequence
  Description of Artificial Sequence: Synthetic oligonucleotide
uccacuauuuuccacagaa

SEQ ID NO: 3151283 - RNA, 19 nt, Artificial Sequence
  Description of Artificial Sequence: Synthetic oligonucleotide
uuugacauuugaauaauua

SEQ ID NO: 3151284 - RNA, 19 nt, Artificial Sequence
  Description of Artificial Sequence: Synthetic oligonucleotide
cacuauuuuccacagaaag

SEQ ID NO: 3151285 - RNA, 19 nt, Artificial Sequence
  Description of Artificial Sequence: Synthetic oligonucleotide
gauggauccacuauuuucc

SEQ ID NO: 3151286 - RNA, 19 nt, Artificial Sequence
  Description of Artificial Sequence: Synthetic oligonucleotide
aagaaacagcucuacagca

SEQ ID NO: 3151287 - RNA, 19 nt, Artificial Sequence
  Description of Artificial Sequence: Synthetic oligonucleotide
ugacauuugaauaauuauu

SEQ ID NO: 3151288 - RNA, 19 nt, Artificial Sequence
  Description of Artificial Sequence: Synthetic oligonucleotide
acacuuuuacaacuguagg

SEQ ID NO: 3151289 - RNA, 19 nt, Artificial Sequence
  Description of Artificial Sequence: Synthetic oligonucleotide
uauuuauugagaagccaca

SEQ ID NO: 3151290 - RNA, 19 nt, Artificial Sequence
  Description of Artificial Sequence: Synthetic oligonucleotide
cacuuuuacaacuguaggc

SEQ ID NO: 3151291 - RNA, 19 nt, Artificial Sequence
  Description of Artificial Sequence: Synthetic oligonucleotide
cacacuuuuacaacuguag

SEQ ID NO: 3151292 - RNA, 19 nt, Artificial Sequence
  Description of Artificial Sequence: Synthetic oligonucleotide
uugacauuugaauaauuau

SEQ ID NO: 3151293 - RNA, 19 nt, Artificial Sequence
  Description of Artificial Sequence: Synthetic oligonucleotide
uuuauugagaagccacagu

SEQ ID NO: 3151294 - RNA, 19 nt, Artificial Sequence
  Description of Artificial Sequence: Synthetic oligonucleotide
agaagccacaguuucucac

SEQ ID NO: 3151295 - RNA, 19 nt, Artificial Sequence
  Description of Artificial Sequence: Synthetic oligonucleotide
uuccacagaaagaaacagc

SEQ ID NO: 3151296 - RNA, 19 nt, Artificial Sequence
  Description of Artificial Sequence: Synthetic oligonucleotide
gaauaauuauuuauugaga

SEQ ID NO: 3151297 - RNA, 19 nt, Artificial Sequence
  Description of Artificial Sequence: Synthetic oligonucleotide
guuucucacacuuuuacaa

SEQ ID NO: 3151298 - RNA, 19 nt, Artificial Sequence
  Description of Artificial Sequence: Synthetic oligonucleotide
uucucacacuuuuacaacu

SEQ ID NO: 3151299 - RNA, 19 nt, Artificial Sequence
  Description of Artificial Sequence: Synthetic oligonucleotide
auuuauugagaagccacag

SEQ ID NO: 3151300 - RNA, 19 nt, Artificial Sequence
  Description of Artificial Sequence: Synthetic oligonucleotide
ucucacacuuuuacaacug

SEQ ID NO: 3151301 - RNA, 19 nt, Artificial Sequence
  Description of Artificial Sequence: Synthetic oligonucleotide
auuugaauaauuauuuauu

SEQ ID NO: 3151302 - RNA, 19 nt, Artificial Sequence
  Description of Artificial Sequence: Synthetic oligonucleotide
uuucucacacuuuuacaac

SEQ ID NO: 3151303 - RNA, 19 nt, Artificial Sequence
  Description of Artificial Sequence: Synthetic oligonucleotide
cuauuuuccacagaaagaa

SEQ ID NO: 3151304 - RNA, 19 nt, Artificial Sequence
  Description of Artificial Sequence: Synthetic oligonucleotide
gauccacuauuuuccacag

SEQ ID NO: 3151305 - RNA, 19 nt, Artificial Sequence
  Description of Artificial Sequence: Synthetic oligonucleotide
auuauuuauugagaagcca

SEQ ID NO: 3151306 - RNA, 19 nt, Artificial Sequence
  Description of Artificial Sequence: Synthetic oligonucleotide
guaggcuuuuauauaaggc

SEQ ID NO: 3151307 - RNA, 19 nt, Artificial Sequence
  Description of Artificial Sequence: Synthetic oligonucleotide
agaaagaaacagcucuaca

SEQ ID NO: 3151308 - RNA, 19 nt, Artificial Sequence
  Description of Artificial Sequence: Synthetic oligonucleotide
acaacuguaggcuuuuaua

SEQ ID NO: 3151309 - RNA, 19 nt, Artificial Sequence
  Description of Artificial Sequence: Synthetic oligonucleotide
uuuuacaacuguaggcuuu

SEQ ID NO: 3151310 - RNA, 19 nt, Artificial Sequence
  Description of Artificial Sequence: Synthetic oligonucleotide
aacuguaggcuuuuauaua

SEQ ID NO: 3151311 - RNA, 19 nt, Artificial Sequence
  Description of Artificial Sequence: Synthetic oligonucleotide
aguuucucacacuuuuaca

SEQ ID NO: 3151312 - RNA, 19 nt, Artificial Sequence
  Description of Artificial Sequence: Synthetic oligonucleotide
acuauuuuccacagaaaga

SEQ ID NO: 3151313 - RNA, 19 nt, Artificial Sequence
  Description of Artificial Sequence: Synthetic oligonucleotide
caguuucucacacuuuuac

SEQ ID NO: 3151314 - RNA, 19 nt, Artificial Sequence
  Description of Artificial Sequence: Synthetic oligonucleotide
uauugagaagccacaguuu

SEQ ID NO: 3151315 - RNA, 19 nt, Artificial Sequence
  Description of Artificial Sequence: Synthetic oligonucleotide
gaagccacaguuucucaca

SEQ ID NO: 3151316 - RNA, 19 nt, Artificial Sequence
  Description of Artificial Sequence: Synthetic oligonucleotide
acauuugaauaauuauuua

SEQ ID NO: 3151317 - RNA, 19 nt, Artificial Sequence
  Description of Artificial Sequence: Synthetic oligonucleotide
cacagaaagaaacagcucu

SEQ ID NO: 3151318 - RNA, 19 nt, Artificial Sequence
  Description of Artificial Sequence: Synthetic oligonucleotide
cauuugaauaauuauuuau

SEQ ID NO: 3151319 - RNA, 19 nt, Artificial Sequence
  Description of Artificial Sequence: Synthetic oligonucleotide
gacauuugaauaauuauuu

SEQ ID NO: 3151320 - RNA, 19 nt, Artificial Sequence
  Description of Artificial Sequence: Synthetic oligonucleotide
ugagaagccacaguuucuc

SEQ ID NO: 3151321 - RNA, 19 nt, Artificial Sequence
  Description of Artificial Sequence: Synthetic oligonucleotide
uugagaagccacaguuucu

SEQ ID NO: 3151322 - RNA, 19 nt, Artificial Sequence
  Description of Artificial Sequence: Synthetic oligonucleotide
agcaagauggauccacuau

SEQ ID NO: 3151323 - RNA, 19 nt, Artificial Sequence
  Description of Artificial Sequence: Synthetic oligonucleotide
ucacacuuuuacaacugua

SEQ ID NO: 3151324 - RNA, 19 nt, Artificial Sequence
  Description of Artificial Sequence: Synthetic oligonucleotide
aaagcaagauggauccacu

SEQ ID NO: 3151325 - RNA, 19 nt, Artificial Sequence
  Description of Artificial Sequence: Synthetic oligonucleotide
aagauggauccacuauuuu

SEQ ID NO: 3151326 - RNA, 19 nt, Artificial Sequence
  Description of Artificial Sequence: Synthetic oligonucleotide
ggauccacuauuuuccaca

SEQ ID NO: 3151327 - RNA, 19 nt, Artificial Sequence
  Description of Artificial Sequence: Synthetic oligonucleotide
cuguaggcuuuuauauaag

SEQ ID NO: 3151328 - RNA, 19 nt, Artificial Sequence
  Description of Artificial Sequence: Synthetic oligonucleotide
aagcaagauggauccacua

SEQ ID NO: 3151329 - RNA, 19 nt, Artificial Sequence
  Description of Artificial Sequence: Synthetic oligonucleotide
cagaaagaaacagcucuac

SEQ ID NO: 3151330 - RNA, 19 nt, Artificial Sequence
  Description of Artificial Sequence: Synthetic oligonucleotide
uuuacaacuguaggcuuuu

SEQ ID NO: 3151331 - RNA, 19 nt, Artificial Sequence
  Description of Artificial Sequence: Synthetic oligonucleotide
auggauccacuauuuucca

SEQ ID NO: 3151332 - RNA, 19 nt, Artificial Sequence
  Description of Artificial Sequence: Synthetic oligonucleotide
uggauccacuauuuuccac

SEQ ID NO: 3151333 - RNA, 19 nt, Artificial Sequence
  Description of Artificial Sequence: Synthetic oligonucleotide
caacuguaggcuuuuauau

SEQ ID NO: 3151334 - RNA, 19 nt, Artificial Sequence
  Description of Artificial Sequence: Synthetic oligonucleotide
gagaagccacaguuucuca

SEQ ID NO: 3151335 - RNA, 19 nt, Artificial Sequence
  Description of Artificial Sequence: Synthetic oligonucleotide
acagaaagaaacagcucua

SEQ ID NO: 3151336 - RNA, 19 nt, Artificial Sequence
  Description of Artificial Sequence: Synthetic oligonucleotide
auccacuauuuuccacaga

SEQ ID NO: 3151337 - RNA, 19 nt, Artificial Sequence
  Description of Artificial Sequence: Synthetic oligonucleotide
gcuuuuauauaaggcaaaa

SEQ ID NO: 3151338 - RNA, 19 nt, Artificial Sequence
  Description of Artificial Sequence: Synthetic oligonucleotide
caagauggauccacuauuu

SEQ ID NO: 3151339 - RNA, 19 nt, Artificial Sequence
  Description of Artificial Sequence: Synthetic oligonucleotide
ccacagaaagaaacagcuc

SEQ ID NO: 3151340 - RNA, 19 nt, Artificial Sequence
  Description of Artificial Sequence: Synthetic oligonucleotide
cuuuuacaacuguaggcuu

SEQ ID NO: 3151341 - RNA, 19 nt, Artificial Sequence
  Description of Artificial Sequence: Synthetic oligonucleotide
acaguuucucacacuuuua

SEQ ID NO: 3151342 - RNA, 19 nt, Artificial Sequence
  Description of Artificial Sequence: Synthetic oligonucleotide
cucacacuuuuacaacugu

SEQ ID NO: 3151343 - RNA, 19 nt, Artificial Sequence
  Description of Artificial Sequence: Synthetic oligonucleotide
ggcuuuuauauaaggcaaa

SEQ ID NO: 3151344 - RNA, 19 nt, Artificial Sequence
  Description of Artificial Sequence: Synthetic oligonucleotide
gcaagauggauccacuauu

SEQ ID NO: 3151345 - RNA, 19 nt, Artificial Sequence
  Description of Artificial Sequence: Synthetic oligonucleotide
uuacaacuguaggcuuuua

SEQ ID NO: 3151346 - RNA, 19 nt, Artificial Sequence
  Description of Artificial Sequence: Synthetic oligonucleotide
ccacaguuucucacacuuu

SEQ ID NO: 3151347 - RNA, 19 nt, Artificial Sequence
  Description of Artificial Sequence: Synthetic oligonucleotide
aguggaucaagcuggcacc

SEQ ID NO: 3151348 - RNA, 19 nt, Artificial Sequence
  Description of Artificial Sequence: Synthetic oligonucleotide
uaaacuacgggcgggagca

SEQ ID NO: 3151349 - RNA, 19 nt, Artificial Sequence
  Description of Artificial Sequence: Synthetic oligonucleotide
cuguauguuccuuggaacc

SEQ ID NO: 3151350 - RNA, 19 nt, Artificial Sequence
  Description of Artificial Sequence: Synthetic oligonucleotide
guuccuuggaaccuggccc

SEQ ID NO: 3151351 - RNA, 19 nt, Artificial Sequence
  Description of Artificial Sequence: Synthetic oligonucleotide
uggcccuaaacuacgggcg

SEQ ID NO: 3151352 - RNA, 19 nt, Artificial Sequence
  Description of Artificial Sequence: Synthetic oligonucleotide
uguuccuuggaaccuggcc

SEQ ID NO: 3151353 - RNA, 19 nt, Artificial Sequence
  Description of Artificial Sequence: Synthetic oligonucleotide
uauguuccuuggaaccugg

SEQ ID NO: 3151354 - RNA, 19 nt, Artificial Sequence
  Description of Artificial Sequence: Synthetic oligonucleotide
gaugccagcuguauguucc

SEQ ID NO: 3151355 - RNA, 19 nt, Artificial Sequence
  Description of Artificial Sequence: Synthetic oligonucleotide
aagggaugaugccagcugu

SEQ ID NO: 3151356 - RNA, 19 nt, Artificial Sequence
  Description of Artificial Sequence: Synthetic oligonucleotide
ucaagcuggcaccuggccc

SEQ ID NO: 3151357 - RNA, 19 nt, Artificial Sequence
  Description of Artificial Sequence: Synthetic oligonucleotide
uacacaagggaugaugcca

SEQ ID NO: 3151358 - RNA, 19 nt, Artificial Sequence
  Description of Artificial Sequence: Synthetic oligonucleotide
auaggcaccccaccugccc

SEQ ID NO: 3151359 - RNA, 19 nt, Artificial Sequence
  Description of Artificial Sequence: Synthetic oligonucleotide
cauccuugcuacacaaggg

SEQ ID NO: 3151360 - RNA, 19 nt, Artificial Sequence
  Description of Artificial Sequence: Synthetic oligonucleotide
aucaagcuggcaccuggcc

SEQ ID NO: 3151361 - RNA, 19 nt, Artificial Sequence
  Description of Artificial Sequence: Synthetic oligonucleotide
gaugaugccagcuguaugu

SEQ ID NO: 3151362 - RNA, 19 nt, Artificial Sequence
  Description of Artificial Sequence: Synthetic oligonucleotide
gcauccuugcuacacaagg

SEQ ID NO: 3151363 - RNA, 19 nt, Artificial Sequence
  Description of Artificial Sequence: Synthetic oligonucleotide
cuggcccuaaacuacgggc

SEQ ID NO: 3151364 - RNA, 19 nt, Artificial Sequence
  Description of Artificial Sequence: Synthetic oligonucleotide
auccuugcuacacaaggga

SEQ ID NO: 3151365 - RNA, 19 nt, Artificial Sequence
  Description of Artificial Sequence: Synthetic oligonucleotide
ugcuacacaagggaugaug

SEQ ID NO: 3151366 - RNA, 19 nt, Artificial Sequence
  Description of Artificial Sequence: Synthetic oligonucleotide
uguauguuccuuggaaccu

SEQ ID NO: 3151367 - RNA, 19 nt, Artificial Sequence
  Description of Artificial Sequence: Synthetic oligonucleotide
cuaaacuacgggcgggagc

SEQ ID NO: 3151368 - RNA, 19 nt, Artificial Sequence
  Description of Artificial Sequence: Synthetic oligonucleotide
agcuguauguuccuuggaa

SEQ ID NO: 3151369 - RNA, 19 nt, Artificial Sequence
  Description of Artificial Sequence: Synthetic oligonucleotide
cuacacaagggaugaugcc

SEQ ID NO: 3151370 - RNA, 19 nt, Artificial Sequence
  Description of Artificial Sequence: Synthetic oligonucleotide
cuuggaaccuggcccaccc

SEQ ID NO: 3151371 - RNA, 19 nt, Artificial Sequence
  Description of Artificial Sequence: Synthetic oligonucleotide
cacccugccucccauaggc

SEQ ID NO: 3151372 - RNA, 19 nt, Artificial Sequence
  Description of Artificial Sequence: Synthetic oligonucleotide
uuccuuggaaccuggccca

SEQ ID NO: 3151373 - RNA, 19 nt, Artificial Sequence
  Description of Artificial Sequence: Synthetic oligonucleotide
ggaucaagcuggcaccugg

SEQ ID NO: 3151374 - RNA, 19 nt, Artificial Sequence
  Description of Artificial Sequence: Synthetic oligonucleotide
acuacgggcgggagcaucc

SEQ ID NO: 3151375 - RNA, 19 nt, Artificial Sequence
  Description of Artificial Sequence: Synthetic oligonucleotide
uggcaccuggcccuaaacu

SEQ ID NO: 3151376 - RNA, 19 nt, Artificial Sequence
  Description of Artificial Sequence: Synthetic oligonucleotide
uccuugcuacacaagggau

SEQ ID NO: 3151377 - RNA, 19 nt, Artificial Sequence
  Description of Artificial Sequence: Synthetic oligonucleotide
ucccauaggcaccccaccu

SEQ ID NO: 3151378 - RNA, 19 nt, Artificial Sequence
  Description of Artificial Sequence: Synthetic oligonucleotide
cuugcuacacaagggauga

SEQ ID NO: 3151379 - RNA, 19 nt, Artificial Sequence
  Description of Artificial Sequence: Synthetic oligonucleotide
acacaagggaugaugccag

SEQ ID NO: 3151380 - RNA, 19 nt, Artificial Sequence
  Description of Artificial Sequence: Synthetic oligonucleotide
aacuacgggcgggagcauc

SEQ ID NO: 3151381 - RNA, 19 nt, Artificial Sequence
  Description of Artificial Sequence: Synthetic oligonucleotide
gcuacacaagggaugaugc

SEQ ID NO: 3151382 - RNA, 19 nt, Artificial Sequence
  Description of Artificial Sequence: Synthetic oligonucleotide
uaggcaccccaccugcccc

SEQ ID NO: 3151383 - RNA, 19 nt, Artificial Sequence
  Description of Artificial Sequence: Synthetic oligonucleotide
caccuggcccuaaacuacg

SEQ ID NO: 3151384 - RNA, 19 nt, Artificial Sequence
  Description of Artificial Sequence: Synthetic oligonucleotide
gcuguauguuccuuggaac

SEQ ID NO: 3151385 - RNA, 19 nt, Artificial Sequence
  Description of Artificial Sequence: Synthetic oligonucleotide
guauguuccuuggaaccug

SEQ ID NO: 3151386 - RNA, 19 nt, Artificial Sequence
  Description of Artificial Sequence: Synthetic oligonucleotide
ccagcuguauguuccuugg

SEQ ID NO: 3151387 - RNA, 19 nt, Artificial Sequence
  Description of Artificial Sequence: Synthetic oligonucleotide
gaucaagcuggcaccuggc

SEQ ID NO: 3151388 - RNA, 19 nt, Artificial Sequence
  Description of Artificial Sequence: Synthetic oligonucleotide
ugaugccagcuguauguuc

SEQ ID NO: 3151389 - RNA, 19 nt, Artificial Sequence
  Description of Artificial Sequence: Synthetic oligonucleotide
acaagggaugaugccagcu

SEQ ID NO: 3151390 - RNA, 19 nt, Artificial Sequence
  Description of Artificial Sequence: Synthetic oligonucleotide
gaaccuggcccacccugcc

SEQ ID NO: 3151391 - RNA, 19 nt, Artificial Sequence
  Description of Artificial Sequence: Synthetic oligonucleotide
cauaggcaccccaccugcc

SEQ ID NO: 3151392 - RNA, 19 nt, Artificial Sequence
  Description of Artificial Sequence: Synthetic oligonucleotide
ccuugcuacacaagggaug

SEQ ID NO: 3151393 - RNA, 19 nt, Artificial Sequence
  Description of Artificial Sequence: Synthetic oligonucleotide
cucccauaggcaccccacc

SEQ ID NO: 3151394 - RNA, 19 nt, Artificial Sequence
  Description of Artificial Sequence: Synthetic oligonucleotide
ggaugaugccagcuguaug

SEQ ID NO: 3151395 - RNA, 19 nt, Artificial Sequence
  Description of Artificial Sequence: Synthetic oligonucleotide
ggcccuaaacuacgggcgg

SEQ ID NO: 3151396 - RNA, 19 nt, Artificial Sequence
  Description of Artificial Sequence: Synthetic oligonucleotide
cacaagggaugaugccagc

SEQ ID NO: 3151397 - RNA, 19 nt, Artificial Sequence
  Description of Artificial Sequence: Synthetic oligonucleotide
aaccuggcccacccugccu

SEQ ID NO: 3151398 - RNA, 19 nt, Artificial Sequence
  Description of Artificial Sequence: Synthetic oligonucleotide
auguuccuuggaaccuggc

SEQ ID NO: 3151399 - RNA, 19 nt, Artificial Sequence
  Description of Artificial Sequence: Synthetic oligonucleotide
ccauaggcaccccaccugc

SEQ ID NO: 3151400 - RNA, 19 nt, Artificial Sequence
  Description of Artificial Sequence: Synthetic oligonucleotide
gccagcuguauguuccuug

SEQ ID NO: 3151401 - RNA, 19 nt, Artificial Sequence
  Description of Artificial Sequence: Synthetic oligonucleotide
uuggaaccuggcccacccu

SEQ ID NO: 3151402 - RNA, 19 nt, Artificial Sequence
  Description of Artificial Sequence: Synthetic oligonucleotide
caagcuggcaccuggcccu

SEQ ID NO: 3151403 - RNA, 19 nt, Artificial Sequence
  Description of Artificial Sequence: Synthetic oligonucleotide
agcauccuugcuacacaag

SEQ ID NO: 3151404 - RNA, 19 nt, Artificial Sequence
  Description of Artificial Sequence: Synthetic oligonucleotide
uggaucaagcuggcaccug

SEQ ID NO: 3151405 - RNA, 19 nt, Artificial Sequence
  Description of Artificial Sequence: Synthetic oligonucleotide
cugccucccauaggcaccc

SEQ ID NO: 3151406 - RNA, 19 nt, Artificial Sequence
  Description of Artificial Sequence: Synthetic oligonucleotide
ggcaccuggcccuaaacua

SEQ ID NO: 3151407 - RNA, 19 nt, Artificial Sequence
  Description of Artificial Sequence: Synthetic oligonucleotide
cuggcaccuggcccuaaac

SEQ ID NO: 3151408 - RNA, 19 nt, Artificial Sequence
  Description of Artificial Sequence: Synthetic oligonucleotide
gcgggagcauccuugcuac

SEQ ID NO: 3151409 - RNA, 19 nt, Artificial Sequence
  Description of Artificial Sequence: Synthetic oligonucleotide
ggagcauccuugcuacaca

SEQ ID NO: 3151410 - RNA, 19 nt, Artificial Sequence
  Description of Artificial Sequence: Synthetic oligonucleotide
caccccaccugccccacug

SEQ ID NO: 3151411 - RNA, 19 nt, Artificial Sequence
  Description of Artificial Sequence: Synthetic oligonucleotide
gggagcauccuugcuacac

SEQ ID NO: 3151412 - RNA, 19 nt, Artificial Sequence
  Description of Artificial Sequence: Synthetic oligonucleotide
ccugccucccauaggcacc

SEQ ID NO: 3151413 - RNA, 19 nt, Artificial Sequence
  Description of Artificial Sequence: Synthetic oligonucleotide
acgggcgggagcauccuug

SEQ ID NO: 3151414 - RNA, 19 nt, Artificial Sequence
  Description of Artificial Sequence: Synthetic oligonucleotide
accuggcccuaaacuacgg

SEQ ID NO: 3151415 - RNA, 19 nt, Artificial Sequence
  Description of Artificial Sequence: Synthetic oligonucleotide
ccuggcccuaaacuacggg

SEQ ID NO: 3151416 - RNA, 19 nt, Artificial Sequence
  Description of Artificial Sequence: Synthetic oligonucleotide
ggaaccuggcccacccugc

SEQ ID NO: 3151417 - RNA, 19 nt, Artificial Sequence
  Description of Artificial Sequence: Synthetic oligonucleotide
gcaccuggcccuaaacuac

SEQ ID NO: 3151418 - RNA, 19 nt, Artificial Sequence
  Description of Artificial Sequence: Synthetic oligonucleotide
augaugccagcuguauguu

SEQ ID NO: 3151419 - RNA, 19 nt, Artificial Sequence
  Description of Artificial Sequence: Synthetic oligonucleotide
aggcaccccaccugcccca

SEQ ID NO: 3151420 - RNA, 19 nt, Artificial Sequence
  Description of Artificial Sequence: Synthetic oligonucleotide
ggcgggagcauccuugcua

SEQ ID NO: 3151421 - RNA, 19 nt, Artificial Sequence
  Description of Artificial Sequence: Synthetic oligonucleotide
cccugccucccauaggcac

SEQ ID NO: 3151422 - RNA, 19 nt, Artificial Sequence
  Description of Artificial Sequence: Synthetic oligonucleotide
gcccuaaacuacgggcggg

SEQ ID NO: 3151423 - RNA, 19 nt, Artificial Sequence
  Description of Artificial Sequence: Synthetic oligonucleotide
cccacccugccucccauag

SEQ ID NO: 3151424 - RNA, 19 nt, Artificial Sequence
  Description of Artificial Sequence: Synthetic oligonucleotide
uccuuggaaccuggcccac

SEQ ID NO: 3151425 - RNA, 19 nt, Artificial Sequence
  Description of Artificial Sequence: Synthetic oligonucleotide
uacgggcgggagcauccuu

SEQ ID NO: 3151426 - RNA, 19 nt, Artificial Sequence
  Description of Artificial Sequence: Synthetic oligonucleotide
cagcuguauguuccuugga

SEQ ID NO: 3151427 - RNA, 19 nt, Artificial Sequence
  Description of Artificial Sequence: Synthetic oligonucleotide
aaacuacgggcgggagcau

SEQ ID NO: 3151428 - RNA, 19 nt, Artificial Sequence
  Description of Artificial Sequence: Synthetic oligonucleotide
ccuaaacuacgggcgggag

SEQ ID NO: 3151429 - RNA, 19 nt, Artificial Sequence
  Description of Artificial Sequence: Synthetic oligonucleotide
agggaugaugccagcugua

SEQ ID NO: 3151430 - RNA, 19 nt, Artificial Sequence
  Description of Artificial Sequence: Synthetic oligonucleotide
accccaccugccccacuga

SEQ ID NO: 3151431 - RNA, 19 nt, Artificial Sequence
  Description of Artificial Sequence: Synthetic oligonucleotide
uugcuacacaagggaugau

SEQ ID NO: 3151432 - RNA, 19 nt, Artificial Sequence
  Description of Artificial Sequence: Synthetic oligonucleotide
guggaucaagcuggcaccu

SEQ ID NO: 3151433 - RNA, 19 nt, Artificial Sequence
  Description of Artificial Sequence: Synthetic oligonucleotide
ccacccugccucccauagg

SEQ ID NO: 3151434 - RNA, 19 nt, Artificial Sequence
  Description of Artificial Sequence: Synthetic oligonucleotide
aagcuggcaccuggcccua

SEQ ID NO: 3151435 - RNA, 19 nt, Artificial Sequence
  Description of Artificial Sequence: Synthetic oligonucleotide
ccuuggaaccuggcccacc

SEQ ID NO: 3151436 - RNA, 19 nt, Artificial Sequence
  Description of Artificial Sequence: Synthetic oligonucleotide
acccugccucccauaggca

SEQ ID NO: 3151437 - RNA, 19 nt, Artificial Sequence
  Description of Artificial Sequence: Synthetic oligonucleotide
gccucccauaggcacccca

SEQ ID NO: 3151438 - RNA, 19 nt, Artificial Sequence
  Description of Artificial Sequence: Synthetic oligonucleotide
cgggcgggagcauccuugc

SEQ ID NO: 3151439 - RNA, 19 nt, Artificial Sequence
  Description of Artificial Sequence: Synthetic oligonucleotide
gggaugaugccagcuguau

SEQ ID NO: 3151440 - RNA, 19 nt, Artificial Sequence
  Description of Artificial Sequence: Synthetic oligonucleotide
ugccucccauaggcacccc

SEQ ID NO: 3151441 - RNA, 19 nt, Artificial Sequence
  Description of Artificial Sequence: Synthetic oligonucleotide
ccccaccugccccacugac

SEQ ID NO: 3151442 - RNA, 19 nt, Artificial Sequence
  Description of Artificial Sequence: Synthetic oligonucleotide
cccuaaacuacgggcggga

SEQ ID NO: 3151443 - RNA, 19 nt, Artificial Sequence
  Description of Artificial Sequence: Synthetic oligonucleotide
gcuggcaccuggcccuaaa

SEQ ID NO: 3151444 - RNA, 19 nt, Artificial Sequence
  Description of Artificial Sequence: Synthetic oligonucleotide
ggcaccccaccugccccac

SEQ ID NO: 3151445 - RNA, 19 nt, Artificial Sequence
  Description of Artificial Sequence: Synthetic oligonucleotide
agcuggcaccuggcccuaa

SEQ ID NO: 3151446 - RNA, 19 nt, Artificial Sequence
  Description of Artificial Sequence: Synthetic oligonucleotide
cuacgggcgggagcauccu

SEQ ID NO: 3151447 - RNA, 19 nt, Artificial Sequence
  Description of Artificial Sequence: Synthetic oligonucleotide
gggcgggagcauccuugcu

SEQ ID NO: 3151448 - RNA, 19 nt, Artificial Sequence
  Description of Artificial Sequence: Synthetic oligonucleotide
gcccacccugccucccaua

SEQ ID NO: 3151449 - RNA, 19 nt, Artificial Sequence
  Description of Artificial Sequence: Synthetic oligonucleotide
ggcccacccugccucccau

SEQ ID NO: 3151450 - RNA, 19 nt, Artificial Sequence
  Description of Artificial Sequence: Synthetic oligonucleotide
cgggagcauccuugcuaca

SEQ ID NO: 3151451 - RNA, 19 nt, Artificial Sequence
  Description of Artificial Sequence: Synthetic oligonucleotide
gcaccccaccugccccacu

SEQ ID NO: 3151452 - RNA, 19 nt, Artificial Sequence
  Description of Artificial Sequence: Synthetic oligonucleotide
uauaaugagaucuagugcc

SEQ ID NO: 3151453 - RNA, 19 nt, Artificial Sequence
  Description of Artificial Sequence: Synthetic oligonucleotide
gauuugagagcacugacug

SEQ ID NO: 3151454 - RNA, 19 nt, Artificial Sequence
  Description of Artificial Sequence: Synthetic oligonucleotide
ugacuguucuuccagacca

SEQ ID NO: 3151455 - RNA, 19 nt, Artificial Sequence
  Description of Artificial Sequence: Synthetic oligonucleotide
cuauaaugagaucuagugc

SEQ ID NO: 3151456 - RNA, 19 nt, Artificial Sequence
  Description of Artificial Sequence: Synthetic oligonucleotide
ucagguagauuugagagca

SEQ ID NO: 3151457 - RNA, 19 nt, Artificial Sequence
  Description of Artificial Sequence: Synthetic oligonucleotide
uuccagaccauccugaguu

SEQ ID NO: 3151458 - RNA, 19 nt, Artificial Sequence
  Description of Artificial Sequence: Synthetic oligonucleotide
accauccugaguucaauuc

SEQ ID NO: 3151459 - RNA, 19 nt, Artificial Sequence
  Description of Artificial Sequence: Synthetic oligonucleotide
acugacuguucuuccagac

SEQ ID NO: 3151460 - RNA, 19 nt, Artificial Sequence
  Description of Artificial Sequence: Synthetic oligonucleotide
uagauuugagagcacugac

SEQ ID NO: 3151461 - RNA, 19 nt, Artificial Sequence
  Description of Artificial Sequence: Synthetic oligonucleotide
gcucagguagauuugagag

SEQ ID NO: 3151462 - RNA, 19 nt, Artificial Sequence
  Description of Artificial Sequence: Synthetic oligonucleotide
cauccugaguucaauuccc

SEQ ID NO: 3151463 - RNA, 19 nt, Artificial Sequence
  Description of Artificial Sequence: Synthetic oligonucleotide
agauggcucagguagauuu

SEQ ID NO: 3151464 - RNA, 19 nt, Artificial Sequence
  Description of Artificial Sequence: Synthetic oligonucleotide
cucagguagauuugagagc

SEQ ID NO: 3151465 - RNA, 19 nt, Artificial Sequence
  Description of Artificial Sequence: Synthetic oligonucleotide
uuugagagcacugacuguu

SEQ ID NO: 3151466 - RNA, 19 nt, Artificial Sequence
  Description of Artificial Sequence: Synthetic oligonucleotide
uucuuccagaccauccuga

SEQ ID NO: 3151467 - RNA, 19 nt, Artificial Sequence
  Description of Artificial Sequence: Synthetic oligonucleotide
cuguucuuccagaccaucc

SEQ ID NO: 3151468 - RNA, 19 nt, Artificial Sequence
  Description of Artificial Sequence: Synthetic oligonucleotide
ugagagcacugacuguucu

SEQ ID NO: 3151469 - RNA, 19 nt, Artificial Sequence
  Description of Artificial Sequence: Synthetic oligonucleotide
caucuauaaugagaucuag

SEQ ID NO: 3151470 - RNA, 19 nt, Artificial Sequence
  Description of Artificial Sequence: Synthetic oligonucleotide
cugacuguucuuccagacc

SEQ ID NO: 3151471 - RNA, 19 nt, Artificial Sequence
  Description of Artificial Sequence: Synthetic oligonucleotide
gagaucuagugccuucuuc

SEQ ID NO: 3151472 - RNA, 19 nt, Artificial Sequence
  Description of Artificial Sequence: Synthetic oligonucleotide
guagauuugagagcacuga

SEQ ID NO: 3151473 - RNA, 19 nt, Artificial Sequence
  Description of Artificial Sequence: Synthetic oligonucleotide
agauuugagagcacugacu

SEQ ID NO: 3151474 - RNA, 19 nt, Artificial Sequence
  Description of Artificial Sequence: Synthetic oligonucleotide
auuugagagcacugacugu

SEQ ID NO: 3151475 - RNA, 19 nt, Artificial Sequence
  Description of Artificial Sequence: Synthetic oligonucleotide
acuguucuuccagaccauc

SEQ ID NO: 3151476 - RNA, 19 nt, Artificial Sequence
  Description of Artificial Sequence: Synthetic oligonucleotide
uggcucagguagauuugag

SEQ ID NO: 3151477 - RNA, 19 nt, Artificial Sequence
  Description of Artificial Sequence: Synthetic oligonucleotide
agguagauuugagagcacu

SEQ ID NO: 3151478 - RNA, 19 nt, Artificial Sequence
  Description of Artificial Sequence: Synthetic oligonucleotide
gauggcucagguagauuug

SEQ ID NO: 3151479 - RNA, 19 nt, Artificial Sequence
  Description of Artificial Sequence: Synthetic oligonucleotide
ccauccugaguucaauucc

SEQ ID NO: 3151480 - RNA, 19 nt, Artificial Sequence
  Description of Artificial Sequence: Synthetic oligonucleotide
uugagagcacugacuguuc

SEQ ID NO: 3151481 - RNA, 19 nt, Artificial Sequence
  Description of Artificial Sequence: Synthetic oligonucleotide
gguagauuugagagcacug

SEQ ID NO: 3151482 - RNA, 19 nt, Artificial Sequence
  Description of Artificial Sequence: Synthetic oligonucleotide
ugagaucuagugccuucuu

SEQ ID NO: 3151483 - RNA, 19 nt, Artificial Sequence
  Description of Artificial Sequence: Synthetic oligonucleotide
uaaugagaucuagugccuu

SEQ ID NO: 3151484 - RNA, 19 nt, Artificial Sequence
  Description of Artificial Sequence: Synthetic oligonucleotide
uggagagauggcucaggua

SEQ ID NO: 3151485 - RNA, 19 nt, Artificial Sequence
  Description of Artificial Sequence: Synthetic oligonucleotide
auggcucagguagauuuga

SEQ ID NO: 3151486 - RNA, 19 nt, Artificial Sequence
  Description of Artificial Sequence: Synthetic oligonucleotide
agagauggcucagguagau

SEQ ID NO: 3151487 - RNA, 19 nt, Artificial Sequence
  Description of Artificial Sequence: Synthetic oligonucleotide
ggcucagguagauuugaga

SEQ ID NO: 3151488 - RNA, 19 nt, Artificial Sequence
  Description of Artificial Sequence: Synthetic oligonucleotide
gagagauggcucagguaga

SEQ ID NO: 3151489 - RNA, 19 nt, Artificial Sequence
  Description of Artificial Sequence: Synthetic oligonucleotide
cagguagauuugagagcac

SEQ ID NO: 3151490 - RNA, 19 nt, Artificial Sequence
  Description of Artificial Sequence: Synthetic oligonucleotide
agaccauccugaguucaau

SEQ ID NO: 3151491 - RNA, 19 nt, Artificial Sequence
  Description of Artificial Sequence: Synthetic oligonucleotide
gaccauccugaguucaauu

SEQ ID NO: 3151492 - RNA, 19 nt, Artificial Sequence
  Description of Artificial Sequence: Synthetic oligonucleotide
cagaccauccugaguucaa

SEQ ID NO: 3151493 - RNA, 19 nt, Artificial Sequence
  Description of Artificial Sequence: Synthetic oligonucleotide
gacuguucuuccagaccau

SEQ ID NO: 3151494 - RNA, 19 nt, Artificial Sequence
  Description of Artificial Sequence: Synthetic oligonucleotide
gagauggcucagguagauu

SEQ ID NO: 3151495 - RNA, 19 nt, Artificial Sequence
  Description of Artificial Sequence: Synthetic oligonucleotide
  modified_base (7)..(7): a, c, u, g, unknown or other
gaagggnuagaugagcgcc

SEQ ID NO: 3151496 - RNA, 19 nt, Artificial Sequence
  Description of Artificial Sequence: Synthetic oligonucleotide
  modified_base (9)..(9): a, c, u, g, unknown or other
cugaagggnuagaugagcg

SEQ ID NO: 3151497 - RNA, 19 nt, Artificial Sequence
  Description of Artificial Sequence: Synthetic oligonucleotide
  modified_base (8)..(8): a, c, u, g, unknown or other
ugaagggnuagaugagcgc

SEQ ID NO: 3151498 - RNA, 19 nt, Artificial Sequence
  Description of Artificial Sequence: Synthetic oligonucleotide
  modified_base (5)..(5): a, c, u, g, unknown or other
agggnuagaugagcgccac

SEQ ID NO: 3151499 - RNA, 19 nt, Artificial Sequence
  Description of Artificial Sequence: Synthetic oligonucleotide
  modified_base (6)..(6): a, c, u, g, unknown or other
aagggnuagaugagcgcca

SEQ ID NO: 3151500 - RNA, 19 nt, Artificial Sequence
  Description of Artificial Sequence: Synthetic oligonucleotide
  modified_base (3)..(3): a, c, u, g, unknown or other
ggnuagaugagcgccacca

SEQ ID NO: 3151501 - RNA, 19 nt, Artificial Sequence
  Description of Artificial Sequence: Synthetic oligonucleotide
  modified_base (2)..(2): a, c, u, g, unknown or other
gnuagaugagcgccaccau

SEQ ID NO: 3151502 - RNA, 19 nt, Artificial Sequence
  Description of Artificial Sequence: Synthetic oligonucleotide
  modified_base (4)..(4): a, c, u, g, unknown or other
gggnuagaugagcgccacc

SEQ ID NO: 3151503 - RNA, 19 nt, Artificial Sequence
  Description of Artificial Sequence: Synthetic oligonucleotide
acgaugaggggccugacuc

SEQ ID NO: 3151504 - RNA, 19 nt, Artificial Sequence
  Description of Artificial Sequence: Synthetic oligonucleotide
uuugcggugcacgaugagg

SEQ ID NO: 3151505 - RNA, 19 nt, Artificial Sequence
  Description of Artificial Sequence: Synthetic oligonucleotide
cuugcugauuccacaucug

SEQ ID NO: 3151506 - RNA, 19 nt, Artificial Sequence
  Description of Artificial Sequence: Synthetic oligonucleotide
ugauuccacaucugcugga

SEQ ID NO: 3151507 - RNA, 19 nt, Artificial Sequence
  Description of Artificial Sequence: Synthetic oligonucleotide
auuccacaucugcuggaag

SEQ ID NO: 3151508 - RNA, 19 nt, Artificial Sequence
  Description of Artificial Sequence: Synthetic oligonucleotide
ugcuugcugauuccacauc

SEQ ID NO: 3151509 - RNA, 19 nt, Artificial Sequence
  Description of Artificial Sequence: Synthetic oligonucleotide
ugcacgaugaggggccuga

SEQ ID NO: 3151510 - RNA, 19 nt, Artificial Sequence
  Description of Artificial Sequence: Synthetic oligonucleotide
gauuccacaucugcuggaa

SEQ ID NO: 3151511 - RNA, 19 nt, Artificial Sequence
  Description of Artificial Sequence: Synthetic oligonucleotide
gcuugcugauuccacaucu

SEQ ID NO: 3151512 - RNA, 19 nt, Artificial Sequence
  Description of Artificial Sequence: Synthetic oligonucleotide
gaugaggggccugacucgu

SEQ ID NO: 3151513 - RNA, 19 nt, Artificial Sequence
  Description of Artificial Sequence: Synthetic oligonucleotide
cgaugaggggccugacucg

SEQ ID NO: 3151514 - RNA, 19 nt, Artificial Sequence
  Description of Artificial Sequence: Synthetic oligonucleotide
cugcuugcugauuccacau

SEQ ID NO: 3151515 - RNA, 19 nt, Artificial Sequence
  Description of Artificial Sequence: Synthetic oligonucleotide
cggugcacgaugaggggcc

SEQ ID NO: 3151516 - RNA, 19 nt, Artificial Sequence
  Description of Artificial Sequence: Synthetic oligonucleotide
augaggggccugacucguc

SEQ ID NO: 3151517 - RNA, 19 nt, Artificial Sequence
  Description of Artificial Sequence: Synthetic oligonucleotide
gcggugcacgaugaggggc

SEQ ID NO: 3151518 - RNA, 19 nt, Artificial Sequence
  Description of Artificial Sequence: Synthetic oligonucleotide
cacgaugaggggccugacu

SEQ ID NO: 3151519 - RNA, 19 nt, Artificial Sequence
  Description of Artificial Sequence: Synthetic oligonucleotide
gugcacgaugaggggccug

SEQ ID NO: 3151520 - RNA, 19 nt, Artificial Sequence
  Description of Artificial Sequence: Synthetic oligonucleotide
ggugcacgaugaggggccu

SEQ ID NO: 3151521 - RNA, 19 nt, Artificial Sequence
  Description of Artificial Sequence: Synthetic oligonucleotide
uuuaagucuaggaaaaggg

SEQ ID NO: 3151522 - RNA, 19 nt, Artificial Sequence
  Description of Artificial Sequence: Synthetic oligonucleotide
uuuuaagucuaggaaaagg

SEQ ID NO: 3151523 - RNA, 19 nt, Artificial Sequence
  Description of Artificial Sequence: Synthetic oligonucleotide
uuaagucuaggaaaagggc

SEQ ID NO: 3151524 - RNA, 19 nt, Artificial Sequence
  Description of Artificial Sequence: Synthetic oligonucleotide
uaagucuaggaaaagggcu

SEQ ID NO: 3151525 - RNA, 19 nt, Artificial Sequence
  Description of Artificial Sequence: Synthetic oligonucleotide
aagucuaggaaaagggcug

SEQ ID NO: 3151526 - RNA, 19 nt, Artificial Sequence
  Description of Artificial Sequence: Synthetic oligonucleotide
ucuaggaaaagggcuggag

SEQ ID NO: 3151527 - RNA, 19 nt, Artificial Sequence
  Description of Artificial Sequence: Synthetic oligonucleotide
agucuaggaaaagggcugg

SEQ ID NO: 3151528 - RNA, 19 nt, Artificial Sequence
  Description of Artificial Sequence: Synthetic oligonucleotide
agagggauggcgcagaggc

SEQ ID NO: 3151529 - RNA, 19 nt, Artificial Sequence
  Description of Artificial Sequence: Synthetic oligonucleotide
aaguucaacucccagcaac

SEQ ID NO: 3151530 - RNA, 19 nt, Artificial Sequence
  Description of Artificial Sequence: Synthetic oligonucleotide
agguccuaaguucaacucc

SEQ ID NO: 3151531 - RNA, 19 nt, Artificial Sequence
  Description of Artificial Sequence: Synthetic oligonucleotide
ucaacucccagcaaccaca

SEQ ID NO: 3151532 - RNA, 19 nt, Artificial Sequence
  Description of Artificial Sequence: Synthetic oligonucleotide
uccguaaugagaucuggug

SEQ ID NO: 3151533 - RNA, 19 nt, Artificial Sequence
  Description of Artificial Sequence: Synthetic oligonucleotide
cuaaguucaacucccagca

SEQ ID NO: 3151534 - RNA, 19 nt, Artificial Sequence
  Description of Artificial Sequence: Synthetic oligonucleotide
aguucaacucccagcaacc

SEQ ID NO: 3151535 - RNA, 19 nt, Artificial Sequence
  Description of Artificial Sequence: Synthetic oligonucleotide
uccuaaguucaacucccag

SEQ ID NO: 3151536 - RNA, 19 nt, Artificial Sequence
  Description of Artificial Sequence: Synthetic oligonucleotide
agagguccuaaguucaacu

SEQ ID NO: 3151537 - RNA, 19 nt, Artificial Sequence
  Description of Artificial Sequence: Synthetic oligonucleotide
aguggcugcuccuccagag

SEQ ID NO: 3151538 - RNA, 19 nt, Artificial Sequence
  Description of Artificial Sequence: Synthetic oligonucleotide
uucaacucccagcaaccac

SEQ ID NO: 3151539 - RNA, 19 nt, Artificial Sequence
  Description of Artificial Sequence: Synthetic oligonucleotide
uaagagcaguggcugcucc

SEQ ID NO: 3151540 - RNA, 19 nt, Artificial Sequence
  Description of Artificial Sequence: Synthetic oligonucleotide
ccuaaguucaacucccagc

SEQ ID NO: 3151541 - RNA, 19 nt, Artificial Sequence
  Description of Artificial Sequence: Synthetic oligonucleotide
ugguggcccacaaccaucc

SEQ ID NO: 3151542 - RNA, 19 nt, Artificial Sequence
  Description of Artificial Sequence: Synthetic oligonucleotide
uccuccagagguccuaagu

SEQ ID NO: 3151543 - RNA, 19 nt, Artificial Sequence
  Description of Artificial Sequence: Synthetic oligonucleotide
gagguccuaaguucaacuc

SEQ ID NO: 3151544 - RNA, 19 nt, Artificial Sequence
  Description of Artificial Sequence: Synthetic oligonucleotide
uggcgcagaggcuaagagc

SEQ ID NO: 3151545 - RNA, 19 nt, Artificial Sequence
  Description of Artificial Sequence: Synthetic oligonucleotide
auggcgcagaggcuaagag

SEQ ID NO: 3151546 - RNA, 19 nt, Artificial Sequence
  Description of Artificial Sequence: Synthetic oligonucleotide
cguaaugagaucuggugcc

SEQ ID NO: 3151547 - RNA, 19 nt, Artificial Sequence
  Description of Artificial Sequence: Synthetic oligonucleotide
cauccguaaugagaucugg

SEQ ID NO: 3151548 - RNA, 19 nt, Artificial Sequence
  Description of Artificial Sequence: Synthetic oligonucleotide
uggcccacaaccauccgua

SEQ ID NO: 3151549 - RNA, 19 nt, Artificial Sequence
  Description of Artificial Sequence: Synthetic oligonucleotide
ccguaaugagaucuggugc

SEQ ID NO: 3151550 - RNA, 19 nt, Artificial Sequence
  Description of Artificial Sequence: Synthetic oligonucleotide
gguccuaaguucaacuccc

SEQ ID NO: 3151551 - RNA, 19 nt, Artificial Sequence
  Description of Artificial Sequence: Synthetic oligonucleotide
agagcaguggcugcuccuc

SEQ ID NO: 3151552 - RNA, 19 nt, Artificial Sequence
  Description of Artificial Sequence: Synthetic oligonucleotide
uaaguucaacucccagcaa

SEQ ID NO: 3151553 - RNA, 19 nt, Artificial Sequence
  Description of Artificial Sequence: Synthetic oligonucleotide
aggcuaagagcaguggcug

SEQ ID NO: 3151554 - RNA, 19 nt, Artificial Sequence
  Description of Artificial Sequence: Synthetic oligonucleotide
ggcgcagaggcuaagagca

SEQ ID NO: 3151555 - RNA, 19 nt, Artificial Sequence
  Description of Artificial Sequence: Synthetic oligonucleotide
cccacaaccauccguaaug

SEQ ID NO: 3151556 - RNA, 19 nt, Artificial Sequence
  Description of Artificial Sequence: Synthetic oligonucleotide
uaaugagaucuggugcccu

SEQ ID NO: 3151557 - RNA, 19 nt, Artificial Sequence
  Description of Artificial Sequence: Synthetic oligonucleotide
augguggcccacaaccauc

SEQ ID NO: 3151558 - RNA, 19 nt, Artificial Sequence
  Description of Artificial Sequence: Synthetic oligonucleotide
cagaggcuaagagcagugg

SEQ ID NO: 3151559 - RNA, 19 nt, Artificial Sequence
  Description of Artificial Sequence: Synthetic oligonucleotide
cuagagggauggcgcagag

SEQ ID NO: 3151560 - RNA, 19 nt, Artificial Sequence
  Description of Artificial Sequence: Synthetic oligonucleotide
gagcaguggcugcuccucc

SEQ ID NO: 3151561 - RNA, 19 nt, Artificial Sequence
  Description of Artificial Sequence: Synthetic oligonucleotide
gaggcuaagagcaguggcu

SEQ ID NO: 3151562 - RNA, 19 nt, Artificial Sequence
  Description of Artificial Sequence: Synthetic oligonucleotide
auccguaaugagaucuggu

SEQ ID NO: 3151563 - RNA, 19 nt, Artificial Sequence
  Description of Artificial Sequence: Synthetic oligonucleotide
agggauggcgcagaggcua

SEQ ID NO: 3151564 - RNA, 19 nt, Artificial Sequence
  Description of Artificial Sequence: Synthetic oligonucleotide
gauggcgcagaggcuaaga

SEQ ID NO: 3151565 - RNA, 19 nt, Artificial Sequence
  Description of Artificial Sequence: Synthetic oligonucleotide
ggcuaagagcaguggcugc

SEQ ID NO: 3151566 - RNA, 19 nt, Artificial Sequence
  Description of Artificial Sequence: Synthetic oligonucleotide
gcugcuccuccagaggucc

SEQ ID NO: 3151567 - RNA, 19 nt, Artificial Sequence
  Description of Artificial Sequence: Synthetic oligonucleotide
ccauccguaaugagaucug

SEQ ID NO: 3151568 - RNA, 19 nt, Artificial Sequence
  Description of Artificial Sequence: Synthetic oligonucleotide
gcagaggcuaagagcagug

SEQ ID NO: 3151569 - RNA, 19 nt, Artificial Sequence
  Description of Artificial Sequence: Synthetic oligonucleotide
gcaguggcugcuccuccag

SEQ ID NO: 3151570 - RNA, 19 nt, Artificial Sequence
  Description of Artificial Sequence: Synthetic oligonucleotide
guggcccacaaccauccgu

SEQ ID NO: 3151571 - RNA, 19 nt, Artificial Sequence
  Description of Artificial Sequence: Synthetic oligonucleotide
gguggcccacaaccauccg

SEQ ID NO: 3151572 - RNA, 19 nt, Artificial Sequence
  Description of Artificial Sequence: Synthetic oligonucleotide
ugcuccuccagagguccua

SEQ ID NO: 3151573 - RNA, 19 nt, Artificial Sequence
  Description of Artificial Sequence: Synthetic oligonucleotide
guccuaaguucaacuccca

SEQ ID NO: 3151574 - RNA, 19 nt, Artificial Sequence
  Description of Artificial Sequence: Synthetic oligonucleotide
gcuagagggauggcgcaga

SEQ ID NO: 3151575 - RNA, 19 nt, Artificial Sequence
  Description of Artificial Sequence: Synthetic oligonucleotide
gcuaagagcaguggcugcu

SEQ ID NO: 3151576 - RNA, 19 nt, Artificial Sequence
  Description of Artificial Sequence: Synthetic oligonucleotide
caguggcugcuccuccaga

SEQ ID NO: 3151577 - RNA, 19 nt, Artificial Sequence
  Description of Artificial Sequence: Synthetic oligonucleotide
caacucccagcaaccacau

SEQ ID NO: 3151578 - RNA, 19 nt, Artificial Sequence
  Description of Artificial Sequence: Synthetic oligonucleotide
ggauggcgcagaggcuaag

SEQ ID NO: 3151579 - RNA, 19 nt, Artificial Sequence
  Description of Artificial Sequence: Synthetic oligonucleotide
gagggauggcgcagaggcu

SEQ ID NO: 3151580 - RNA, 19 nt, Artificial Sequence
  Description of Artificial Sequence: Synthetic oligonucleotide
gcgcagaggcuaagagcag

SEQ ID NO: 3151581 - RNA, 19 nt, Artificial Sequence
  Description of Artificial Sequence: Synthetic oligonucleotide
ccuccagagguccuaaguu

SEQ ID NO: 3151582 - RNA, 19 nt, Artificial Sequence
  Description of Artificial Sequence: Synthetic oligonucleotide
ggcugcuccuccagagguc

SEQ ID NO: 3151583 - RNA, 19 nt, Artificial Sequence
  Description of Artificial Sequence: Synthetic oligonucleotide
ggcccacaaccauccguaa

SEQ ID NO: 3151584 - RNA, 19 nt, Artificial Sequence
  Description of Artificial Sequence: Synthetic oligonucleotide
gcccacaaccauccguaau

SEQ ID NO: 3151585 - RNA, 19 nt, Artificial Sequence
  Description of Artificial Sequence: Synthetic oligonucleotide
gggauggcgcagaggcuaa

SEQ ID NO: 3151586 - RNA, 19 nt, Artificial Sequence
  Description of Artificial Sequence: Synthetic oligonucleotide
gcuccuccagagguccuaa

SEQ ID NO: 3151587 - RNA, 19 nt, Artificial Sequence
  Description of Artificial Sequence: Synthetic oligonucleotide
cugcuccuccagagguccu

SEQ ID NO: 3151588 - RNA, 19 nt, Artificial Sequence
  Description of Artificial Sequence: Synthetic oligonucleotide
cgcagaggcuaagagcagu

SEQ ID NO: 3151589 - RNA, 19 nt, Artificial Sequence
  Description of Artificial Sequence: Synthetic oligonucleotide
aaaaggaauguauucuucc

SEQ ID NO: 3151590 - RNA, 19 nt, Artificial Sequence
  Description of Artificial Sequence: Synthetic oligonucleotide
acaaagaggacauauuuuc

SEQ ID NO: 3151591 - RNA, 19 nt, Artificial Sequence
  Description of Artificial Sequence: Synthetic oligonucleotide
uauucuuccccaucaaugg

SEQ ID NO: 3151592 - RNA, 19 nt, Artificial Sequence
  Description of Artificial Sequence: Synthetic oligonucleotide
cugcauacugcuuaaaagg

SEQ ID NO: 3151593 - RNA, 19 nt, Artificial Sequence
  Description of Artificial Sequence: Synthetic oligonucleotide
aaagaggacauauuuuccu

SEQ ID NO: 3151594 - RNA, 19 nt, Artificial Sequence
  Description of Artificial Sequence: Synthetic oligonucleotide
ucuguuagaccucaguaac

SEQ ID NO: 3151595 - RNA, 19 nt, Artificial Sequence
  Description of Artificial Sequence: Synthetic oligonucleotide
ucaguaacuggcuacguug

SEQ ID NO: 3151596 - RNA, 19 nt, Artificial Sequence
  Description of Artificial Sequence: Synthetic oligonucleotide
cauauuuuccugcauacug

SEQ ID NO: 3151597 - RNA, 19 nt, Artificial Sequence
  Description of Artificial Sequence: Synthetic oligonucleotide
uuagaccucaguaacuggc

SEQ ID NO: 3151598 - RNA, 19 nt, Artificial Sequence
  Description of Artificial Sequence: Synthetic oligonucleotide
agaggacauauuuuccugc

SEQ ID NO: 3151599 - RNA, 19 nt, Artificial Sequence
  Description of Artificial Sequence: Synthetic oligonucleotide
caagguauuggucuguuag

SEQ ID NO: 3151600 - RNA, 19 nt, Artificial Sequence
  Description of Artificial Sequence: Synthetic oligonucleotide
aagaggacauauuuuccug

SEQ ID NO: 3151601 - RNA, 19 nt, Artificial Sequence
  Description of Artificial Sequence: Synthetic oligonucleotide
auauuuuccugcauacugc

SEQ ID NO: 3151602 - RNA, 19 nt, Artificial Sequence
  Description of Artificial Sequence: Synthetic oligonucleotide
auggugagggcccauacuc

SEQ ID NO: 3151603 - RNA, 19 nt, Artificial Sequence
  Description of Artificial Sequence: Synthetic oligonucleotide
ugcauacugcuuaaaagga

SEQ ID NO: 3151604 - RNA, 19 nt, Artificial Sequence
  Description of Artificial Sequence: Synthetic oligonucleotide
ugacaaagaggacauauuu

SEQ ID NO: 3151605 - RNA, 19 nt, Artificial Sequence
  Description of Artificial Sequence: Synthetic oligonucleotide
ugagggcccauacucauag

SEQ ID NO: 3151606 - RNA, 19 nt, Artificial Sequence
  Description of Artificial Sequence: Synthetic oligonucleotide
uacguugacaaagaggaca

SEQ ID NO: 3151607 - RNA, 19 nt, Artificial Sequence
  Description of Artificial Sequence: Synthetic oligonucleotide
uuuuccugcauacugcuua

SEQ ID NO: 3151608 - RNA, 19 nt, Artificial Sequence
  Description of Artificial Sequence: Synthetic oligonucleotide
uguuagaccucaguaacug

SEQ ID NO: 3151609 - RNA, 19 nt, Artificial Sequence
  Description of Artificial Sequence: Synthetic oligonucleotide
caaagaggacauauuuucc

SEQ ID NO: 3151610 - RNA, 19 nt, Artificial Sequence
  Description of Artificial Sequence: Synthetic oligonucleotide
uccccaucaauggugaggg

SEQ ID NO: 3151611 - RNA, 19 nt, Artificial Sequence
  Description of Artificial Sequence: Synthetic oligonucleotide
uucuuccccaucaauggug

SEQ ID NO: 3151612 - RNA, 19 nt, Artificial Sequence
  Description of Artificial Sequence: Synthetic oligonucleotide
uaacuggcuacguugacaa

SEQ ID NO: 3151613 - RNA, 19 nt, Artificial Sequence
  Description of Artificial Sequence: Synthetic oligonucleotide
uauuuuccugcauacugcu

SEQ ID NO: 3151614 - RNA, 19 nt, Artificial Sequence
  Description of Artificial Sequence: Synthetic oligonucleotide
aagguauuggucuguuaga

SEQ ID NO: 3151615 - RNA, 19 nt, Artificial Sequence
  Description of Artificial Sequence: Synthetic oligonucleotide
agguauuggucuguuagac

SEQ ID NO: 3151616 - RNA, 19 nt, Artificial Sequence
  Description of Artificial Sequence: Synthetic oligonucleotide
cauacucauagauggugcc

SEQ ID NO: 3151617 - RNA, 19 nt, Artificial Sequence
  Description of Artificial Sequence: Synthetic oligonucleotide
guauucuuccccaucaaug

SEQ ID NO: 3151618 - RNA, 19 nt, Artificial Sequence
  Description of Artificial Sequence: Synthetic oligonucleotide
acuggcuacguugacaaag

SEQ ID NO: 3151619 - RNA, 19 nt, Artificial Sequence
  Description of Artificial Sequence: Synthetic oligonucleotide
aggaauguauucuucccca

SEQ ID NO: 3151620 - RNA, 19 nt, Artificial Sequence
  Description of Artificial Sequence: Synthetic oligonucleotide
gcuacguugacaaagagga

SEQ ID NO: 3151621 - RNA, 19 nt, Artificial Sequence
  Description of Artificial Sequence: Synthetic oligonucleotide
aauggugagggcccauacu

SEQ ID NO: 3151622 - RNA, 19 nt, Artificial Sequence
  Description of Artificial Sequence: Synthetic oligonucleotide
guauuggucuguuagaccu

SEQ ID NO: 3151623 - RNA, 19 nt, Artificial Sequence
  Description of Artificial Sequence: Synthetic oligonucleotide
ucuuccccaucaaugguga

SEQ ID NO: 3151624 - RNA, 19 nt, Artificial Sequence
  Description of Artificial Sequence: Synthetic oligonucleotide
guuagaccucaguaacugg

SEQ ID NO: 3151625 - RNA, 19 nt, Artificial Sequence
  Description of Artificial Sequence: Synthetic oligonucleotide
uuccccaucaauggugagg

SEQ ID NO: 3151626 - RNA, 19 nt, Artificial Sequence
  Description of Artificial Sequence: Synthetic oligonucleotide
aguaacuggcuacguugac

SEQ ID NO: 3151627 - RNA, 19 nt, Artificial Sequence
  Description of Artificial Sequence: Synthetic oligonucleotide
uccugcauacugcuuaaaa

SEQ ID NO: 3151628 - RNA, 19 nt, Artificial Sequence
  Description of Artificial Sequence: Synthetic oligonucleotide
uacugcuuaaaaggaaugu

SEQ ID NO: 3151629 - RNA, 19 nt, Artificial Sequence
  Description of Artificial Sequence: Synthetic oligonucleotide
gcuuaaaaggaauguauuc

SEQ ID NO: 3151630 - RNA, 19 nt, Artificial Sequence
  Description of Artificial Sequence: Synthetic oligonucleotide
gaauguauucuuccccauc

SEQ ID NO: 3151631 - RNA, 19 nt, Artificial Sequence
  Description of Artificial Sequence: Synthetic oligonucleotide
uagaccucaguaacuggcu

SEQ ID NO: 3151632 - RNA, 19 nt, Artificial Sequence
  Description of Artificial Sequence: Synthetic oligonucleotide
uugacaaagaggacauauu

SEQ ID NO: 3151633 - RNA, 19 nt, Artificial Sequence
  Description of Artificial Sequence: Synthetic oligonucleotide
cuuaaaaggaauguauucu

SEQ ID NO: 3151634 - RNA, 19 nt, Artificial Sequence
  Description of Artificial Sequence: Synthetic oligonucleotide
gaccucaguaacuggcuac

SEQ ID NO: 3151635 - RNA, 19 nt, Artificial Sequence
  Description of Artificial Sequence: Synthetic oligonucleotide
uggucuguuagaccucagu

SEQ ID NO: 3151636 - RNA, 19 nt, Artificial Sequence
  Description of Artificial Sequence: Synthetic oligonucleotide
accucaguaacuggcuacg

SEQ ID NO: 3151637 - RNA, 19 nt, Artificial Sequence
  Description of Artificial Sequence: Synthetic oligonucleotide
gucuguuagaccucaguaa

SEQ ID NO: 3151638 - RNA, 19 nt, Artificial Sequence
  Description of Artificial Sequence: Synthetic oligonucleotide
auucuuccccaucaauggu

SEQ ID NO: 3151639 - RNA, 19 nt, Artificial Sequence
  Description of Artificial Sequence: Synthetic oligonucleotide
uggcuacguugacaaagag

SEQ ID NO: 3151640 - RNA, 19 nt, Artificial Sequence
  Description of Artificial Sequence: Synthetic oligonucleotide
gguauuggucuguuagacc

SEQ ID NO: 3151641 - RNA, 19 nt, Artificial Sequence
  Description of Artificial Sequence: Synthetic oligonucleotide
acugcuuaaaaggaaugua

SEQ ID NO: 3151642 - RNA, 19 nt, Artificial Sequence
  Description of Artificial Sequence: Synthetic oligonucleotide
uggugagggcccauacuca

SEQ ID NO: 3151643 - RNA, 19 nt, Artificial Sequence
  Description of Artificial Sequence: Synthetic oligonucleotide
auacugcuuaaaaggaaug

SEQ ID NO: 3151644 - RNA, 19 nt, Artificial Sequence
  Description of Artificial Sequence: Synthetic oligonucleotide
ggcuacguugacaaagagg

SEQ ID NO: 3151645 - RNA, 19 nt, Artificial Sequence
  Description of Artificial Sequence: Synthetic oligonucleotide
uuuccugcauacugcuuaa

SEQ ID NO: 3151646 - RNA, 19 nt, Artificial Sequence
  Description of Artificial Sequence: Synthetic oligonucleotide
uauuggucuguuagaccuc

SEQ ID NO: 3151647 - RNA, 19 nt, Artificial Sequence
  Description of Artificial Sequence: Synthetic oligonucleotide
auuggucuguuagaccuca

SEQ ID NO: 3151648 - RNA, 19 nt, Artificial Sequence
  Description of Artificial Sequence: Synthetic oligonucleotide
cauacugcuuaaaaggaau

SEQ ID NO: 3151649 - RNA, 19 nt, Artificial Sequence
  Description of Artificial Sequence: Synthetic oligonucleotide
acauauuuuccugcauacu

SEQ ID NO: 3151650 - RNA, 19 nt, Artificial Sequence
  Description of Artificial Sequence: Synthetic oligonucleotide
ccaucaauggugagggccc

SEQ ID NO: 3151651 - RNA, 19 nt, Artificial Sequence
  Description of Artificial Sequence: Synthetic oligonucleotide
auacucauagauggugcca

SEQ ID NO: 3151652 - RNA, 19 nt, Artificial Sequence
  Description of Artificial Sequence: Synthetic oligonucleotide
guugacaaagaggacauau

SEQ ID NO: 3151653 - RNA, 19 nt, Artificial Sequence
  Description of Artificial Sequence: Synthetic oligonucleotide
guaacuggcuacguugaca

SEQ ID NO: 3151654 - RNA, 19 nt, Artificial Sequence
  Description of Artificial Sequence: Synthetic oligonucleotide
caauggugagggcccauac

SEQ ID NO: 3151655 - RNA, 19 nt, Artificial Sequence
  Description of Artificial Sequence: Synthetic oligonucleotide
cuacguugacaaagaggac

SEQ ID NO: 3151656 - RNA, 19 nt, Artificial Sequence
  Description of Artificial Sequence: Synthetic oligonucleotide
cugcuuaaaaggaauguau

SEQ ID NO: 3151657 - RNA, 19 nt, Artificial Sequence
  Description of Artificial Sequence: Synthetic oligonucleotide
cuggcuacguugacaaaga

SEQ ID NO: 3151658 - RNA, 19 nt, Artificial Sequence
  Description of Artificial Sequence: Synthetic oligonucleotide
aggacauauuuuccugcau

SEQ ID NO: 3151659 - RNA, 19 nt, Artificial Sequence
  Description of Artificial Sequence: Synthetic oligonucleotide
caguaacuggcuacguuga

SEQ ID NO: 3151660 - RNA, 19 nt, Artificial Sequence
  Description of Artificial Sequence: Synthetic oligonucleotide
uuggucuguuagaccucag

SEQ ID NO: 3151661 - RNA, 19 nt, Artificial Sequence
  Description of Artificial Sequence: Synthetic oligonucleotide
acguugacaaagaggacau

SEQ ID NO: 3151662 - RNA, 19 nt, Artificial Sequence
  Description of Artificial Sequence: Synthetic oligonucleotide
ggacauauuuuccugcaua

SEQ ID NO: 3151663 - RNA, 19 nt, Artificial Sequence
  Description of Artificial Sequence: Synthetic oligonucleotide
cccaucaauggugagggcc

SEQ ID NO: 3151664 - RNA, 19 nt, Artificial Sequence
  Description of Artificial Sequence: Synthetic oligonucleotide
ggucuguuagaccucagua

SEQ ID NO: 3151665 - RNA, 19 nt, Artificial Sequence
  Description of Artificial Sequence: Synthetic oligonucleotide
gacaaagaggacauauuuu

SEQ ID NO: 3151666 - RNA, 19 nt, Artificial Sequence
  Description of Artificial Sequence: Synthetic oligonucleotide
agaccucaguaacuggcua

SEQ ID NO: 3151667 - RNA, 19 nt, Artificial Sequence
  Description of Artificial Sequence: Synthetic oligonucleotide
ucaauggugagggcccaua

SEQ ID NO: 3151668 - RNA, 19 nt, Artificial Sequence
  Description of Artificial Sequence: Synthetic oligonucleotide
aacuggcuacguugacaaa

SEQ ID NO: 3151669 - RNA, 19 nt, Artificial Sequence
  Description of Artificial Sequence: Synthetic oligonucleotide
cccauacucauagauggug

SEQ ID NO: 3151670 - RNA, 19 nt, Artificial Sequence
  Description of Artificial Sequence: Synthetic oligonucleotide
cuuccccaucaauggugag

SEQ ID NO: 3151671 - RNA, 19 nt, Artificial Sequence
  Description of Artificial Sequence: Synthetic oligonucleotide
cuguuagaccucaguaacu

SEQ ID NO: 3151672 - RNA, 19 nt, Artificial Sequence
  Description of Artificial Sequence: Synthetic oligonucleotide
gggcccauacucauagaug

SEQ ID NO: 3151673 - RNA, 19 nt, Artificial Sequence
  Description of Artificial Sequence: Synthetic oligonucleotide
gcauacugcuuaaaaggaa

SEQ ID NO: 3151674 - RNA, 19 nt, Artificial Sequence
  Description of Artificial Sequence: Synthetic oligonucleotide
uuccugcauacugcuuaaa

SEQ ID NO: 3151675 - RNA, 19 nt, Artificial Sequence
  Description of Artificial Sequence: Synthetic oligonucleotide
gagggcccauacucauaga

SEQ ID NO: 3151676 - RNA, 19 nt, Artificial Sequence
  Description of Artificial Sequence: Synthetic oligonucleotide
cucaguaacuggcuacguu

SEQ ID NO: 3151677 - RNA, 19 nt, Artificial Sequence
  Description of Artificial Sequence: Synthetic oligonucleotide
caucaauggugagggccca

SEQ ID NO: 3151678 - RNA, 19 nt, Artificial Sequence
  Description of Artificial Sequence: Synthetic oligonucleotide
aucaauggugagggcccau

SEQ ID NO: 3151679 - RNA, 19 nt, Artificial Sequence
  Description of Artificial Sequence: Synthetic oligonucleotide
ggaauguauucuuccccau

SEQ ID NO: 3151680 - RNA, 19 nt, Artificial Sequence
  Description of Artificial Sequence: Synthetic oligonucleotide
ggugagggcccauacucau

SEQ ID NO: 3151681 - RNA, 19 nt, Artificial Sequence
  Description of Artificial Sequence: Synthetic oligonucleotide
gugagggcccauacucaua

SEQ ID NO: 3151682 - RNA, 19 nt, Artificial Sequence
  Description of Artificial Sequence: Synthetic oligonucleotide
ccccaucaauggugagggc

SEQ ID NO: 3151683 - RNA, 19 nt, Artificial Sequence
  Description of Artificial Sequence: Synthetic oligonucleotide
gcccauacucauagauggu

SEQ ID NO: 3151684 - RNA, 19 nt, Artificial Sequence
  Description of Artificial Sequence: Synthetic oligonucleotide
ccucaguaacuggcuacgu

SEQ ID NO: 3151685 - RNA, 19 nt, Artificial Sequence
  Description of Artificial Sequence: Synthetic oligonucleotide
cguugacaaagaggacaua

SEQ ID NO: 3151686 - RNA, 19 nt, Artificial Sequence
  Description of Artificial Sequence: Synthetic oligonucleotide
aaagcauggugacacacag

SEQ ID NO: 3151687 - RNA, 19 nt, Artificial Sequence
  Description of Artificial Sequence: Synthetic oligonucleotide
uccauuaucagcaugggua

SEQ ID NO: 3151688 - RNA, 19 nt, Artificial Sequence
  Description of Artificial Sequence: Synthetic oligonucleotide
ucacuuacuguuucaaagg

SEQ ID NO: 3151689 - RNA, 19 nt, Artificial Sequence
  Description of Artificial Sequence: Synthetic oligonucleotide
aauugggucucacuuacug

SEQ ID NO: 3151690 - RNA, 19 nt, Artificial Sequence
  Description of Artificial Sequence: Synthetic oligonucleotide
cucacuuacuguuucaaag

SEQ ID NO: 3151691 - RNA, 19 nt, Artificial Sequence
  Description of Artificial Sequence: Synthetic oligonucleotide
cauggugacacacaggcag

SEQ ID NO: 3151692 - RNA, 19 nt, Artificial Sequence
  Description of Artificial Sequence: Synthetic oligonucleotide
gagcugaguuucuacaucc

SEQ ID NO: 3151693 - RNA, 19 nt, Artificial Sequence
  Description of Artificial Sequence: Synthetic oligonucleotide
aucagcauggguaaaagca

SEQ ID NO: 3151694 - RNA, 19 nt, Artificial Sequence
  Description of Artificial Sequence: Synthetic oligonucleotide
cacacaggcagacauagug

SEQ ID NO: 3151695 - RNA, 19 nt, Artificial Sequence
  Description of Artificial Sequence: Synthetic oligonucleotide
auggguaaaagcaugguga

SEQ ID NO: 3151696 - RNA, 19 nt, Artificial Sequence
  Description of Artificial Sequence: Synthetic oligonucleotide
gguaaaagcauggugacac

SEQ ID NO: 3151697 - RNA, 19 nt, Artificial Sequence
  Description of Artificial Sequence: Synthetic oligonucleotide
gacacacaggcagacauag

SEQ ID NO: 3151698 - RNA, 19 nt, Artificial Sequence
  Description of Artificial Sequence: Synthetic oligonucleotide
ucagcauggguaaaagcau

SEQ ID NO: 3151699 - RNA, 19 nt, Artificial Sequence
  Description of Artificial Sequence: Synthetic oligonucleotide
uuaucagcauggguaaaag

SEQ ID NO: 3151700 - RNA, 19 nt, Artificial Sequence
  Description of Artificial Sequence: Synthetic oligonucleotide
cauggguaaaagcauggug

SEQ ID NO: 3151701 - RNA, 19 nt, Artificial Sequence
  Description of Artificial Sequence: Synthetic oligonucleotide
uacuguuucaaagguuuag

SEQ ID NO: 3151702 - RNA, 19 nt, Artificial Sequence
  Description of Artificial Sequence: Synthetic oligonucleotide
gcagacauagugcuggagg

SEQ ID NO: 3151703 - RNA, 19 nt, Artificial Sequence
  Description of Artificial Sequence: Synthetic oligonucleotide
uaucagcauggguaaaagc

SEQ ID NO: 3151704 - RNA, 19 nt, Artificial Sequence
  Description of Artificial Sequence: Synthetic oligonucleotide
uggguaaaagcauggugac

SEQ ID NO: 3151705 - RNA, 19 nt, Artificial Sequence
  Description of Artificial Sequence: Synthetic oligonucleotide
uaaaagcauggugacacac

SEQ ID NO: 3151706 - RNA, 19 nt, Artificial Sequence
  Description of Artificial Sequence: Synthetic oligonucleotide
gacauagugcuggaggagc

SEQ ID NO: 3151707 - RNA, 19 nt, Artificial Sequence
  Description of Artificial Sequence: Synthetic oligonucleotide
cuguuucaaagguuuaguc

SEQ ID NO: 3151708 - RNA, 19 nt, Artificial Sequence
  Description of Artificial Sequence: Synthetic oligonucleotide
aaaagcauggugacacaca

SEQ ID NO: 3151709 - RNA, 19 nt, Artificial Sequence
  Description of Artificial Sequence: Synthetic oligonucleotide
uugggucucacuuacuguu

SEQ ID NO: 3151710 - RNA, 19 nt, Artificial Sequence
  Description of Artificial Sequence: Synthetic oligonucleotide
acauuuaauugggucucac

SEQ ID NO: 3151711 - RNA, 19 nt, Artificial Sequence
  Description of Artificial Sequence: Synthetic oligonucleotide
auugggucucacuuacugu

SEQ ID NO: 3151712 - RNA, 19 nt, Artificial Sequence
  Description of Artificial Sequence: Synthetic oligonucleotide
acuguuucaaagguuuagu

SEQ ID NO: 3151713 - RNA, 19 nt, Artificial Sequence
  Description of Artificial Sequence: Synthetic oligonucleotide
cuuacuguuucaaagguuu

SEQ ID NO: 3151714 - RNA, 19 nt, Artificial Sequence
  Description of Artificial Sequence: Synthetic oligonucleotide
gaggagcugaguuucuaca

SEQ ID NO: 3151715 - RNA, 19 nt, Artificial Sequence
  Description of Artificial Sequence: Synthetic oligonucleotide
auuaucagcauggguaaaa

SEQ ID NO: 3151716 - RNA, 19 nt, Artificial Sequence
  Description of Artificial Sequence: Synthetic oligonucleotide
ucucacuuacuguuucaaa

SEQ ID NO: 3151717 - RNA, 19 nt, Artificial Sequence
  Description of Artificial Sequence: Synthetic oligonucleotide
cagacauagugcuggagga

SEQ ID NO: 3151718 - RNA, 19 nt, Artificial Sequence
  Description of Artificial Sequence: Synthetic oligonucleotide
aggagcugaguuucuacau

SEQ ID NO: 3151719 - RNA, 19 nt, Artificial Sequence
  Description of Artificial Sequence: Synthetic oligonucleotide
aagcauggugacacacagg

SEQ ID NO: 3151720 - RNA, 19 nt, Artificial Sequence
  Description of Artificial Sequence: Synthetic oligonucleotide
gcugaguuucuacauccag

SEQ ID NO: 3151721 - RNA, 19 nt, Artificial Sequence
  Description of Artificial Sequence: Synthetic oligonucleotide
agacauagugcuggaggag

SEQ ID NO: 3151722 - RNA, 19 nt, Artificial Sequence
  Description of Artificial Sequence: Synthetic oligonucleotide
uaauugggucucacuuacu

SEQ ID NO: 3151723 - RNA, 19 nt, Artificial Sequence
  Description of Artificial Sequence: Synthetic oligonucleotide
uagugcuggaggagcugag

SEQ ID NO: 3151724 - RNA, 19 nt, Artificial Sequence
  Description of Artificial Sequence: Synthetic oligonucleotide
guaaaagcauggugacaca

SEQ ID NO: 3151725 - RNA, 19 nt, Artificial Sequence
  Description of Artificial Sequence: Synthetic oligonucleotide
gaguuucuacauccagauc

SEQ ID NO: 3151726 - RNA, 19 nt, Artificial Sequence
  Description of Artificial Sequence: Synthetic oligonucleotide
gugacacacaggcagacau

SEQ ID NO: 3151727 - RNA, 19 nt, Artificial Sequence
  Description of Artificial Sequence: Synthetic oligonucleotide
ugggucucacuuacuguuu

SEQ ID NO: 3151728 - RNA, 19 nt, Artificial Sequence
  Description of Artificial Sequence: Synthetic oligonucleotide
cauuuaauugggucucacu

SEQ ID NO: 3151729 - RNA, 19 nt, Artificial Sequence
  Description of Artificial Sequence: Synthetic oligonucleotide
ggagcugaguuucuacauc

SEQ ID NO: 3151730 - RNA, 19 nt, Artificial Sequence
  Description of Artificial Sequence: Synthetic oligonucleotide
ggaggagcugaguuucuac

SEQ ID NO: 3151731 - RNA, 19 nt, Artificial Sequence
  Description of Artificial Sequence: Synthetic oligonucleotide
uggugacacacaggcagac

SEQ ID NO: 3151732 - RNA, 19 nt, Artificial Sequence
  Description of Artificial Sequence: Synthetic oligonucleotide
cacaggcagacauagugcu

SEQ ID NO: 3151733 - RNA, 19 nt, Artificial Sequence
  Description of Artificial Sequence: Synthetic oligonucleotide
acuuacuguuucaaagguu

SEQ ID NO: 3151734 - RNA, 19 nt, Artificial Sequence
  Description of Artificial Sequence: Synthetic oligonucleotide
acauagugcuggaggagcu

SEQ ID NO: 3151735 - RNA, 19 nt, Artificial Sequence
  Description of Artificial Sequence: Synthetic oligonucleotide
cacuuacuguuucaaaggu

SEQ ID NO: 3151736 - RNA, 19 nt, Artificial Sequence
  Description of Artificial Sequence: Synthetic oligonucleotide
cauagugcuggaggagcug

SEQ ID NO: 3151737 - RNA, 19 nt, Artificial Sequence
  Description of Artificial Sequence: Synthetic oligonucleotide
agugcuggaggagcugagu

SEQ ID NO: 3151738 - RNA, 19 nt, Artificial Sequence
  Description of Artificial Sequence: Synthetic oligonucleotide
gcuggaggagcugaguuuc

SEQ ID NO: 3151739 - RNA, 19 nt, Artificial Sequence
  Description of Artificial Sequence: Synthetic oligonucleotide
auggugacacacaggcaga

SEQ ID NO: 3151740 - RNA, 19 nt, Artificial Sequence
  Description of Artificial Sequence: Synthetic oligonucleotide
ccauuaucagcauggguaa

SEQ ID NO: 3151741 - RNA, 19 nt, Artificial Sequence
  Description of Artificial Sequence: Synthetic oligonucleotide
gucucacuuacuguuucaa

SEQ ID NO: 3151742 - RNA, 19 nt, Artificial Sequence
  Description of Artificial Sequence: Synthetic oligonucleotide
agcugaguuucuacaucca

SEQ ID NO: 3151743 - RNA, 19 nt, Artificial Sequence
  Description of Artificial Sequence: Synthetic oligonucleotide
gggucucacuuacuguuuc

SEQ ID NO: 3151744 - RNA, 19 nt, Artificial Sequence
  Description of Artificial Sequence: Synthetic oligonucleotide
guccauuaucagcaugggu

SEQ ID NO: 3151745 - RNA, 19 nt, Artificial Sequence
  Description of Artificial Sequence: Synthetic oligonucleotide
uggaggagcugaguuucua

SEQ ID NO: 3151746 - RNA, 19 nt, Artificial Sequence
  Description of Artificial Sequence: Synthetic oligonucleotide
ggucucacuuacuguuuca

SEQ ID NO: 3151747 - RNA, 19 nt, Artificial Sequence
  Description of Artificial Sequence: Synthetic oligonucleotide
ggguaaaagcauggugaca

SEQ ID NO: 3151748 - RNA, 19 nt, Artificial Sequence
  Description of Artificial Sequence: Synthetic oligonucleotide
cauuaucagcauggguaaa

SEQ ID NO: 3151749 - RNA, 19 nt, Artificial Sequence
  Description of Artificial Sequence: Synthetic oligonucleotide
acacacaggcagacauagu

SEQ ID NO: 3151750 - RNA, 19 nt, Artificial Sequence
  Description of Artificial Sequence: Synthetic oligonucleotide
gugcuggaggagcugaguu

SEQ ID NO: 3151751 - RNA, 19 nt, Artificial Sequence
  Description of Artificial Sequence: Synthetic oligonucleotide
cuggaggagcugaguuucu

SEQ ID NO: 3151752 - RNA, 19 nt, Artificial Sequence
  Description of Artificial Sequence: Synthetic oligonucleotide
gcauggguaaaagcauggu

SEQ ID NO: 3151753 - RNA, 19 nt, Artificial Sequence
  Description of Artificial Sequence: Synthetic oligonucleotide
uaaaaguauacauauauaa

SEQ ID NO: 3151754 - RNA, 19 nt, Artificial Sequence
  Description of Artificial Sequence: Synthetic oligonucleotide
aaacuaaaaguauacauau

SEQ ID NO: 3151755 - RNA, 19 nt, Artificial Sequence
  Description of Artificial Sequence: Synthetic oligonucleotide
acuaaaaguauacauauau

SEQ ID NO: 3151756 - RNA, 19 nt, Artificial Sequence
  Description of Artificial Sequence: Synthetic oligonucleotide
  modified_base (10)..(10): a, c, u, g, unknown or other
ugaagcuacngagaaaccc

SEQ ID NO: 3151757 - RNA, 19 nt, Artificial Sequence
  Description of Artificial Sequence: Synthetic oligonucleotide
aguauacauauauaaauau

SEQ ID NO: 3151758 - RNA, 19 nt, Artificial Sequence
  Description of Artificial Sequence: Synthetic oligonucleotide
  modified_base (12)..(12): a, c, u, g, unknown or other
ucugaagcuacngagaaac

SEQ ID NO: 3151759 - RNA, 19 nt, Artificial Sequence
  Description of Artificial Sequence: Synthetic oligonucleotide
uguguuugagaccagccug

SEQ ID NO: 3151760 - RNA, 19 nt, Artificial Sequence
  Description of Artificial Sequence: Synthetic oligonucleotide
aaaacuaaaaguauacaua

SEQ ID NO: 3151761 - RNA, 19 nt, Artificial Sequence
  Description of Artificial Sequence: Synthetic oligonucleotide
auuucuguguuugagacca

SEQ ID NO: 3151762 - RNA, 19 nt, Artificial Sequence
  Description of Artificial Sequence: Synthetic oligonucleotide
  modified_base (16)..(16): a, c, u, g, unknown or other
aggcucugaagcuacngag

SEQ ID NO: 3151763 - RNA, 19 nt, Artificial Sequence
  Description of Artificial Sequence: Synthetic oligonucleotide
ucuguguuugagaccagcc

SEQ ID NO: 3151764 - RNA, 19 nt, Artificial Sequence
  Description of Artificial Sequence: Synthetic oligonucleotide
  modified_base (4)..(4): a, c, u, g, unknown or other
uacngagaaacccugucuu

SEQ ID NO: 3151765 - RNA, 19 nt, Artificial Sequence
  Description of Artificial Sequence: Synthetic oligonucleotide
gauuucuguguuugagacc

SEQ ID NO: 3151766 - RNA, 19 nt, Artificial Sequence
  Description of Artificial Sequence: Synthetic oligonucleotide
ggauuucuguguuugagac

SEQ ID NO: 3151767 - RNA, 19 nt, Artificial Sequence
  Description of Artificial Sequence: Synthetic oligonucleotide
  modified_base (3)..(3): a, c, u, g, unknown or other
acngagaaacccugucuug

SEQ ID NO: 3151768 - RNA, 19 nt, Artificial Sequence
  Description of Artificial Sequence: Synthetic oligonucleotide
cuaaaaguauacauauaua

SEQ ID NO: 3151769 - RNA, 19 nt, Artificial Sequence
  Description of Artificial Sequence: Synthetic oligonucleotide
guguuugagaccagccugg

SEQ ID NO: 3151770 - RNA, 19 nt, Artificial Sequence
  Description of Artificial Sequence: Synthetic oligonucleotide
  modified_base (8)..(8): a, c, u, g, unknown or other
aagcuacngagaaacccug

SEQ ID NO: 3151771 - RNA, 19 nt, Artificial Sequence
  Description of Artificial Sequence: Synthetic oligonucleotide
  modified_base (9)..(9): a, c, u, g, unknown or other
gaagcuacngagaaacccu

SEQ ID NO: 3151772 - RNA, 19 nt, Artificial Sequence
  Description of Artificial Sequence: Synthetic oligonucleotide
uucuguguuugagaccagc

SEQ ID NO: 3151773 - RNA, 19 nt, Artificial Sequence
  Description of Artificial Sequence: Synthetic oligonucleotide
  modified_base (11)..(11): a, c, u, g, unknown or other
cugaagcuacngagaaacc

SEQ ID NO: 3151774 - RNA, 19 nt, Artificial Sequence
  Description of Artificial Sequence: Synthetic oligonucleotide
uccagggcaggcucugaag

SEQ ID NO: 3151775 - RNA, 19 nt, Artificial Sequence
  Description of Artificial Sequence: Synthetic oligonucleotide
aacuaaaaguauacauaua

SEQ ID NO: 3151776 - RNA, 19 nt, Artificial Sequence
  Description of Artificial Sequence: Synthetic oligonucleotide
  modified_base (14)..(14): a, c, u, g, unknown or other
gcucugaagcuacngagaa

SEQ ID NO: 3151777 - RNA, 19 nt, Artificial Sequence
  Description of Artificial Sequence: Synthetic oligonucleotide
uuucuguguuugagaccag

SEQ ID NO: 3151778 - RNA, 19 nt, Artificial Sequence
  Description of Artificial Sequence: Synthetic oligonucleotide
aggcggauuucuguguuug

SEQ ID NO: 3151779 - RNA, 19 nt, Artificial Sequence
  Description of Artificial Sequence: Synthetic oligonucleotide
  modified_base (2)..(2): a, c, u, g, unknown or other
cngagaaacccugucuuga

SEQ ID NO: 3151780 - RNA, 19 nt, Artificial Sequence
  Description of Artificial Sequence: Synthetic oligonucleotide
  modified_base (6)..(6): a, c, u, g, unknown or other
gcuacngagaaacccuguc

SEQ ID NO: 3151781 - RNA, 19 nt, Artificial Sequence
  Description of Artificial Sequence: Synthetic oligonucleotide
uuccagggcaggcucugaa

SEQ ID NO: 3151782 - RNA, 19 nt, Artificial Sequence
  Description of Artificial Sequence: Synthetic oligonucleotide
  modified_base (5)..(5): a, c, u, g, unknown or other
cuacngagaaacccugucu

SEQ ID NO: 3151783 - RNA, 19 nt, Artificial Sequence
  Description of Artificial Sequence: Synthetic oligonucleotide
  modified_base (7)..(7): a, c, u, g, unknown or other
agcuacngagaaacccugu

SEQ ID NO: 3151784 - RNA, 19 nt, Artificial Sequence
  Description of Artificial Sequence: Synthetic oligonucleotide
gcggauuucuguguuugag

SEQ ID NO: 3151785 - RNA, 19 nt, Artificial Sequence
  Description of Artificial Sequence: Synthetic oligonucleotide
  modified_base (17)..(17): a, c, u, g, unknown or other
caggcucugaagcuacnga

SEQ ID NO: 3151786 - RNA, 19 nt, Artificial Sequence
  Description of Artificial Sequence: Synthetic oligonucleotide
cuguguuugagaccagccu

SEQ ID NO: 3151787 - RNA, 19 nt, Artificial Sequence
  Description of Artificial Sequence: Synthetic oligonucleotide
  modified_base (13)..(13): a, c, u, g, unknown or other
cucugaagcuacngagaaa

SEQ ID NO: 3151788 - RNA, 19 nt, Artificial Sequence
  Description of Artificial Sequence: Synthetic oligonucleotide
  modified_base (18)..(18): a, c, u, g, unknown or other
gcaggcucugaagcuacng

SEQ ID NO: 3151789 - RNA, 19 nt, Artificial Sequence
  Description of Artificial Sequence: Synthetic oligonucleotide
  modified_base (15)..(15): a, c, u, g, unknown or other
ggcucugaagcuacngaga

SEQ ID NO: 3151790 - RNA, 19 nt, Artificial Sequence
  Description of Artificial Sequence: Synthetic oligonucleotide
agggcaggcucugaagcua

SEQ ID NO: 3151791 - RNA, 19 nt, Artificial Sequence
  Description of Artificial Sequence: Synthetic oligonucleotide
cggauuucuguguuugaga

SEQ ID NO: 3151792 - RNA, 19 nt, Artificial Sequence
  Description of Artificial Sequence: Synthetic oligonucleotide
ggcggauuucuguguuuga

SEQ ID NO: 3151793 - RNA, 19 nt, Artificial Sequence
  Description of Artificial Sequence: Synthetic oligonucleotide
caggcggauuucuguguuu

SEQ ID NO: 3151794 - RNA, 19 nt, Artificial Sequence
  Description of Artificial Sequence: Synthetic oligonucleotide
  modified_base (19)..(19): a, c, u, g, unknown or other
ggcaggcucugaagcuacn

SEQ ID NO: 3151795 - RNA, 19 nt, Artificial Sequence
  Description of Artificial Sequence: Synthetic oligonucleotide
uuuggcuuucucaagacag

SEQ ID NO: 3151796 - RNA, 19 nt, Artificial Sequence
  Description of Artificial Sequence: Synthetic oligonucleotide
uuuuguuuuguguuuggcu

SEQ ID NO: 3151797 - RNA, 19 nt, Artificial Sequence
  Description of Artificial Sequence: Synthetic oligonucleotide
uuuguguuuggcuuucuca

SEQ ID NO: 3151798 - RNA, 19 nt, Artificial Sequence
  Description of Artificial Sequence: Synthetic oligonucleotide
uuuguuuuguguuuggcuu

SEQ ID NO: 3151799 - RNA, 19 nt, Artificial Sequence
  Description of Artificial Sequence: Synthetic oligonucleotide
uuggcuuucucaagacagg

SEQ ID NO: 3151800 - RNA, 19 nt, Artificial Sequence
  Description of Artificial Sequence: Synthetic oligonucleotide
uguguuuggcuuucucaag

SEQ ID NO: 3151801 - RNA, 19 nt, Artificial Sequence
  Description of Artificial Sequence: Synthetic oligonucleotide
uggcuuucucaagacaggg

SEQ ID NO: 3151802 - RNA, 19 nt, Artificial Sequence
  Description of Artificial Sequence: Synthetic oligonucleotide
gcuuucucaagacagggug

SEQ ID NO: 3151803 - RNA, 19 nt, Artificial Sequence
  Description of Artificial Sequence: Synthetic oligonucleotide
uagaacucgcucugaagac

SEQ ID NO: 3151804 - RNA, 19 nt, Artificial Sequence
  Description of Artificial Sequence: Synthetic oligonucleotide
uuuuguguuuggcuuucuc

SEQ ID NO: 3151805 - RNA, 19 nt, Artificial Sequence
  Description of Artificial Sequence: Synthetic oligonucleotide
agggugucucuguguagcc

SEQ ID NO: 3151806 - RNA, 19 nt, Artificial Sequence
  Description of Artificial Sequence: Synthetic oligonucleotide
ugcccuagaacucgcucug

SEQ ID NO: 3151807 - RNA, 19 nt, Artificial Sequence
  Description of Artificial Sequence: Synthetic oligonucleotide
uuucucaagacaggguguc

SEQ ID NO: 3151808 - RNA, 19 nt, Artificial Sequence
  Description of Artificial Sequence: Synthetic oligonucleotide
guuuuguuuuguguuuggc

SEQ ID NO: 3151809 - RNA, 19 nt, Artificial Sequence
  Description of Artificial Sequence: Synthetic oligonucleotide
ucucaagacagggugucuc

SEQ ID NO: 3151810 - RNA, 19 nt, Artificial Sequence
  Description of Artificial Sequence: Synthetic oligonucleotide
cagggugucucuguguagc

SEQ ID NO: 3151811 - RNA, 19 nt, Artificial Sequence
  Description of Artificial Sequence: Synthetic oligonucleotide
agaucccuccugccucugc

SEQ ID NO: 3151812 - RNA, 19 nt, Artificial Sequence
  Description of Artificial Sequence: Synthetic oligonucleotide
cuggcugcccuagaacucg

SEQ ID NO: 3151813 - RNA, 19 nt, Artificial Sequence
  Description of Artificial Sequence: Synthetic oligonucleotide
uguuuuguguuuggcuuuc

SEQ ID NO: 3151814 - RNA, 19 nt, Artificial Sequence
  Description of Artificial Sequence: Synthetic oligonucleotide
gcucugaagaccaggcugg

SEQ ID NO: 3151815 - RNA, 19 nt, Artificial Sequence
  Description of Artificial Sequence: Synthetic oligonucleotide
gacagggugucucugugua

SEQ ID NO: 3151816 - RNA, 19 nt, Artificial Sequence
  Description of Artificial Sequence: Synthetic oligonucleotide
acagggugucucuguguag

SEQ ID NO: 3151817 - RNA, 19 nt, Artificial Sequence
  Description of Artificial Sequence: Synthetic oligonucleotide
ucugaagaccaggcuggcc

SEQ ID NO: 3151818 - RNA, 19 nt, Artificial Sequence
  Description of Artificial Sequence: Synthetic oligonucleotide
ugaagaccaggcuggccuc

SEQ ID NO: 3151819 - RNA, 19 nt, Artificial Sequence
  Description of Artificial Sequence: Synthetic oligonucleotide
cugaagaccaggcuggccu

SEQ ID NO: 3151820 - RNA, 19 nt, Artificial Sequence
  Description of Artificial Sequence: Synthetic oligonucleotide
ucgcucugaagaccaggcu

SEQ ID NO: 3151821 - RNA, 19 nt, Artificial Sequence
  Description of Artificial Sequence: Synthetic oligonucleotide
aucccuccugccucugcuc

SEQ ID NO: 3151822 - RNA, 19 nt, Artificial Sequence
  Description of Artificial Sequence: Synthetic oligonucleotide
cuuucucaagacagggugu

SEQ ID NO: 3151823 - RNA, 19 nt, Artificial Sequence
  Description of Artificial Sequence: Synthetic oligonucleotide
uucucaagacagggugucu

SEQ ID NO: 3151824 - RNA, 19 nt, Artificial Sequence
  Description of Artificial Sequence: Synthetic oligonucleotide
uggcugcccuagaacucgc

SEQ ID NO: 3151825 - RNA, 19 nt, Artificial Sequence
  Description of Artificial Sequence: Synthetic oligonucleotide
gaucccuccugccucugcu

SEQ ID NO: 3151826 - RNA, 19 nt, Artificial Sequence
  Description of Artificial Sequence: Synthetic oligonucleotide
cucugaagaccaggcuggc

SEQ ID NO: 3151827 - RNA, 19 nt, Artificial Sequence
  Description of Artificial Sequence: Synthetic oligonucleotide
ggugucucuguguagcccu

SEQ ID NO: 3151828 - RNA, 19 nt, Artificial Sequence
  Description of Artificial Sequence: Synthetic oligonucleotide
gccuccaacucacagagau

SEQ ID NO: 3151829 - RNA, 19 nt, Artificial Sequence
  Description of Artificial Sequence: Synthetic oligonucleotide
cugcccuagaacucgcucu

SEQ ID NO: 3151830 - RNA, 19 nt, Artificial Sequence
  Description of Artificial Sequence: Synthetic oligonucleotide
gcugcccuagaacucgcuc

SEQ ID NO: 3151831 - RNA, 19 nt, Artificial Sequence
  Description of Artificial Sequence: Synthetic oligonucleotide
gggugucucuguguagccc

SEQ ID NO: 3151832 - RNA, 19 nt, Artificial Sequence
  Description of Artificial Sequence: Synthetic oligonucleotide
gugucucuguguagcccug

SEQ ID NO: 3151833 - RNA, 19 nt, Artificial Sequence
  Description of Artificial Sequence: Synthetic oligonucleotide
ccuggcugcccuagaacuc

SEQ ID NO: 3151834 - RNA, 19 nt, Artificial Sequence
  Description of Artificial Sequence: Synthetic oligonucleotide
gagaucccuccugccucug

SEQ ID NO: 3151835 - RNA, 19 nt, Artificial Sequence
  Description of Artificial Sequence: Synthetic oligonucleotide
ccaacucacagagaucccu

SEQ ID NO: 3151836 - RNA, 19 nt, Artificial Sequence
  Description of Artificial Sequence: Synthetic oligonucleotide
ggcuuucucaagacagggu

SEQ ID NO: 3151837 - RNA, 19 nt, Artificial Sequence
  Description of Artificial Sequence: Synthetic oligonucleotide
cccuagaacucgcucugaa

SEQ ID NO: 3151838 - RNA, 19 nt, Artificial Sequence
  Description of Artificial Sequence: Synthetic oligonucleotide
gcccuagaacucgcucuga

SEQ ID NO: 3151839 - RNA, 19 nt, Artificial Sequence
  Description of Artificial Sequence: Synthetic oligonucleotide
ggcugcccuagaacucgcu

SEQ ID NO: 3151840 - RNA, 19 nt, Artificial Sequence
  Description of Artificial Sequence: Synthetic oligonucleotide
uuuaccucugaagugcugg

SEQ ID NO: 3151841 - RNA, 19 nt, Artificial Sequence
  Description of Artificial Sequence: Synthetic oligonucleotide
gauggccucaaacucacag

SEQ ID NO: 3151842 - RNA, 19 nt, Artificial Sequence
  Description of Artificial Sequence: Synthetic oligonucleotide
ucugccuuuaccucugaag

SEQ ID NO: 3151843 - RNA, 19 nt, Artificial Sequence
  Description of Artificial Sequence: Synthetic oligonucleotide
aagauggccucaaacucac

SEQ ID NO: 3151844 - RNA, 19 nt, Artificial Sequence
  Description of Artificial Sequence: Synthetic oligonucleotide
agguccgucugccuuuacc

SEQ ID NO: 3151845 - RNA, 19 nt, Artificial Sequence
  Description of Artificial Sequence: Synthetic oligonucleotide
uuaccucugaagugcuggg

SEQ ID NO: 3151846 - RNA, 19 nt, Artificial Sequence
  Description of Artificial Sequence: Synthetic oligonucleotide
gaccaagauggccucaaac

SEQ ID NO: 3151847 - RNA, 19 nt, Artificial Sequence
  Description of Artificial Sequence: Synthetic oligonucleotide
ugccuuuaccucugaagug

SEQ ID NO: 3151848 - RNA, 19 nt, Artificial Sequence
  Description of Artificial Sequence: Synthetic oligonucleotide
caagauggccucaaacuca

SEQ ID NO: 3151849 - RNA, 19 nt, Artificial Sequence
  Description of Artificial Sequence: Synthetic oligonucleotide
uccgucugccuuuaccucu

SEQ ID NO: 3151850 - RNA, 19 nt, Artificial Sequence
  Description of Artificial Sequence: Synthetic oligonucleotide
accucugaagugcugggau

SEQ ID NO: 3151851 - RNA, 19 nt, Artificial Sequence
  Description of Artificial Sequence: Synthetic oligonucleotide
aggugugcuccaccaccgc

SEQ ID NO: 3151852 - RNA, 19 nt, Artificial Sequence
  Description of Artificial Sequence: Synthetic oligonucleotide
acagagguccgucugccuu

SEQ ID NO: 3151853 - RNA, 19 nt, Artificial Sequence
  Description of Artificial Sequence: Synthetic oligonucleotide
gccuuuaccucugaagugc

SEQ ID NO: 3151854 - RNA, 19 nt, Artificial Sequence
  Description of Artificial Sequence: Synthetic oligonucleotide
ccaagauggccucaaacuc

SEQ ID NO: 3151855 - RNA, 19 nt, Artificial Sequence
  Description of Artificial Sequence: Synthetic oligonucleotide
cugccuuuaccucugaagu

SEQ ID NO: 3151856 - RNA, 19 nt, Artificial Sequence
  Description of Artificial Sequence: Synthetic oligonucleotide
cuuuaccucugaagugcug

SEQ ID NO: 3151857 - RNA, 19 nt, Artificial Sequence
  Description of Artificial Sequence: Synthetic oligonucleotide
ucgcucuguagaccaagau

SEQ ID NO: 3151858 - RNA, 19 nt, Artificial Sequence
  Description of Artificial Sequence: Synthetic oligonucleotide
uagaccaagauggccucaa

SEQ ID NO: 3151859 - RNA, 19 nt, Artificial Sequence
  Description of Artificial Sequence: Synthetic oligonucleotide
uaccucugaagugcuggga

SEQ ID NO: 3151860 - RNA, 19 nt, Artificial Sequence
  Description of Artificial Sequence: Synthetic oligonucleotide
ggugugcuccaccaccgcc

SEQ ID NO: 3151861 - RNA, 19 nt, Artificial Sequence
  Description of Artificial Sequence: Synthetic oligonucleotide
gguccgucugccuuuaccu

SEQ ID NO: 3151862 - RNA, 19 nt, Artificial Sequence
  Description of Artificial Sequence: Synthetic oligonucleotide
cucgcucuguagaccaaga

SEQ ID NO: 3151863 - RNA, 19 nt, Artificial Sequence
  Description of Artificial Sequence: Synthetic oligonucleotide
agaccaagauggccucaaa

SEQ ID NO: 3151864 - RNA, 19 nt, Artificial Sequence
  Description of Artificial Sequence: Synthetic oligonucleotide
guagaccaagauggccuca

SEQ ID NO: 3151865 - RNA, 19 nt, Artificial Sequence
  Description of Artificial Sequence: Synthetic oligonucleotide
gucugccuuuaccucugaa

SEQ ID NO: 3151866 - RNA, 19 nt, Artificial Sequence
  Description of Artificial Sequence: Synthetic oligonucleotide
gagguccgucugccuuuac

SEQ ID NO: 3151867 - RNA, 19 nt, Artificial Sequence
  Description of Artificial Sequence: Synthetic oligonucleotide
agagguccgucugccuuua

SEQ ID NO: 3151868 - RNA, 19 nt, Artificial Sequence
  Description of Artificial Sequence: Synthetic oligonucleotide
cagagguccgucugccuuu

SEQ ID NO: 3151869 - RNA, 19 nt, Artificial Sequence
  Description of Artificial Sequence: Synthetic oligonucleotide
ccuuuaccucugaagugcu

SEQ ID NO: 3151870 - RNA, 19 nt, Artificial Sequence
  Description of Artificial Sequence: Synthetic oligonucleotide
cgucugccuuuaccucuga

SEQ ID NO: 3151871 - RNA, 19 nt, Artificial Sequence
  Description of Artificial Sequence: Synthetic oligonucleotide
ucugauguagaguaaguug

SEQ ID NO: 3151872 - RNA, 19 nt, Artificial Sequence
  Description of Artificial Sequence: Synthetic oligonucleotide
augacuaaggccuucccac

SEQ ID NO: 3151873 - RNA, 19 nt, Artificial Sequence
  Description of Artificial Sequence: Synthetic oligonucleotide
uaaguugagagccaugacu

SEQ ID NO: 3151874 - RNA, 19 nt, Artificial Sequence
  Description of Artificial Sequence: Synthetic oligonucleotide
auguagaguaaguugagag

SEQ ID NO: 3151875 - RNA, 19 nt, Artificial Sequence
  Description of Artificial Sequence: Synthetic oligonucleotide
uugagagccaugacuaagg

SEQ ID NO: 3151876 - RNA, 19 nt, Artificial Sequence
  Description of Artificial Sequence: Synthetic oligonucleotide
uguagaguaaguugagagc

SEQ ID NO: 3151877 - RNA, 19 nt, Artificial Sequence
  Description of Artificial Sequence: Synthetic oligonucleotide
guagaguaaguugagagcc

SEQ ID NO: 3151878 - RNA, 19 nt, Artificial Sequence
  Description of Artificial Sequence: Synthetic oligonucleotide
auucauaagguuucuccag

SEQ ID NO: 3151879 - RNA, 19 nt, Artificial Sequence
  Description of Artificial Sequence: Synthetic oligonucleotide
aguucgcugauguugagug

SEQ ID NO: 3151880 - RNA, 19 nt, Artificial Sequence
  Description of Artificial Sequence: Synthetic oligonucleotide
uaagguuucuccaguguga

SEQ ID NO: 3151881 - RNA, 19 nt, Artificial Sequence
  Description of Artificial Sequence: Synthetic oligonucleotide
ugauguagaguaaguugag

SEQ ID NO: 3151882 - RNA, 19 nt, Artificial Sequence
  Description of Artificial Sequence: Synthetic oligonucleotide
cugauguagaguaaguuga

SEQ ID NO: 3151883 - RNA, 19 nt, Artificial Sequence
  Description of Artificial Sequence: Synthetic oligonucleotide
uucauaagguuucuccagu

SEQ ID NO: 3151884 - RNA, 19 nt, Artificial Sequence
  Description of Artificial Sequence: Synthetic oligonucleotide
aguaaguugagagccauga

SEQ ID NO: 3151885 - RNA, 19 nt, Artificial Sequence
  Description of Artificial Sequence: Synthetic oligonucleotide
ucauaagguuucuccagug

SEQ ID NO: 3151886 - RNA, 19 nt, Artificial Sequence
  Description of Artificial Sequence: Synthetic oligonucleotide
aagguuucuccagugugag

SEQ ID NO: 3151887 - RNA, 19 nt, Artificial Sequence
  Description of Artificial Sequence: Synthetic oligonucleotide
ugagagccaugacuaaggc

SEQ ID NO: 3151888 - RNA, 19 nt, Artificial Sequence
  Description of Artificial Sequence: Synthetic oligonucleotide
aaguugagagccaugacua

SEQ ID NO: 3151889 - RNA, 19 nt, Artificial Sequence
  Description of Artificial Sequence: Synthetic oligonucleotide
gagagccaugacuaaggcc

SEQ ID NO: 3151890 - RNA, 19 nt, Artificial Sequence
  Description of Artificial Sequence: Synthetic oligonucleotide
uagaguaaguugagagcca

SEQ ID NO: 3151891 - RNA, 19 nt, Artificial Sequence
  Description of Artificial Sequence: Synthetic oligonucleotide
guugagagccaugacuaag

SEQ ID NO: 3151892 - RNA, 19 nt, Artificial Sequence
  Description of Artificial Sequence: Synthetic oligonucleotide
ugacuaaggccuucccaca

SEQ ID NO: 3151893 - RNA, 19 nt, Artificial Sequence
  Description of Artificial Sequence: Synthetic oligonucleotide
cuaaggccuucccacauuc

SEQ ID NO: 3151894 - RNA, 19 nt, Artificial Sequence
  Description of Artificial Sequence: Synthetic oligonucleotide
gauguagaguaaguugaga

SEQ ID NO: 3151895 - RNA, 19 nt, Artificial Sequence
  Description of Artificial Sequence: Synthetic oligonucleotide
caugacuaaggccuuccca

SEQ ID NO: 3151896 - RNA, 19 nt, Artificial Sequence
  Description of Artificial Sequence: Synthetic oligonucleotide
ugaguucgcugauguugag

SEQ ID NO: 3151897 - RNA, 19 nt, Artificial Sequence
  Description of Artificial Sequence: Synthetic oligonucleotide
agaguaaguugagagccau

SEQ ID NO: 3151898 - RNA, 19 nt, Artificial Sequence
  Description of Artificial Sequence: Synthetic oligonucleotide
cugauguugagugagcugu

SEQ ID NO: 3151899 - RNA, 19 nt, Artificial Sequence
  Description of Artificial Sequence: Synthetic oligonucleotide
ucgcugauguugagugagc

SEQ ID NO: 3151900 - RNA, 19 nt, Artificial Sequence
  Description of Artificial Sequence: Synthetic oligonucleotide
gauguugagugagcuguga

SEQ ID NO: 3151901 - RNA, 19 nt, Artificial Sequence
  Description of Artificial Sequence: Synthetic oligonucleotide
aguugagagccaugacuaa

SEQ ID NO: 3151902 - RNA, 19 nt, Artificial Sequence
  Description of Artificial Sequence: Synthetic oligonucleotide
gugaguucgcugauguuga

SEQ ID NO: 3151903 - RNA, 19 nt, Artificial Sequence
  Description of Artificial Sequence: Synthetic oligonucleotide
gaguaaguugagagccaug

SEQ ID NO: 3151904 - RNA, 19 nt, Artificial Sequence
  Description of Artificial Sequence: Synthetic oligonucleotide
gcugauguugagugagcug

SEQ ID NO: 3151905 - RNA, 19 nt, Artificial Sequence
  Description of Artificial Sequence: Synthetic oligonucleotide
acuaaggccuucccacauu

SEQ ID NO: 3151906 - RNA, 19 nt, Artificial Sequence
  Description of Artificial Sequence: Synthetic oligonucleotide
cauaagguuucuccagugu

SEQ ID NO: 3151907 - RNA, 19 nt, Artificial Sequence
  Description of Artificial Sequence: Synthetic oligonucleotide
agguuucuccagugugagu

SEQ ID NO: 3151908 - RNA, 19 nt, Artificial Sequence
  Description of Artificial Sequence: Synthetic oligonucleotide
guucgcugauguugaguga

SEQ ID NO: 3151909 - RNA, 19 nt, Artificial Sequence
  Description of Artificial Sequence: Synthetic oligonucleotide
agccaugacuaaggccuuc

SEQ ID NO: 3151910 - RNA, 19 nt, Artificial Sequence
  Description of Artificial Sequence: Synthetic oligonucleotide
gguuucuccagugugaguu

SEQ ID NO: 3151911 - RNA, 19 nt, Artificial Sequence
  Description of Artificial Sequence: Synthetic oligonucleotide
gacuaaggccuucccacau

SEQ ID NO: 3151912 - RNA, 19 nt, Artificial Sequence
  Description of Artificial Sequence: Synthetic oligonucleotide
cacauuccuuacauucaua

SEQ ID NO: 3151913 - RNA, 19 nt, Artificial Sequence
  Description of Artificial Sequence: Synthetic oligonucleotide
gccaugacuaaggccuucc

SEQ ID NO: 3151914 - RNA, 19 nt, Artificial Sequence
  Description of Artificial Sequence: Synthetic oligonucleotide
gaguucgcugauguugagu

SEQ ID NO: 3151915 - RNA, 19 nt, Artificial Sequence
  Description of Artificial Sequence: Synthetic oligonucleotide
ccaugacuaaggccuuccc

SEQ ID NO: 3151916 - RNA, 19 nt, Artificial Sequence
  Description of Artificial Sequence: Synthetic oligonucleotide
gagccaugacuaaggccuu

SEQ ID NO: 3151917 - RNA, 19 nt, Artificial Sequence
  Description of Artificial Sequence: Synthetic oligonucleotide
cgcugauguugagugagcu

SEQ ID NO: 3151918 - RNA, 19 nt, Artificial Sequence
  Description of Artificial Sequence: Synthetic oligonucleotide
agaaauaacagcuaggagu

SEQ ID NO: 3151919 - RNA, 19 nt, Artificial Sequence
  Description of Artificial Sequence: Synthetic oligonucleotide
uuuugcagaaauaacagcu

SEQ ID NO: 3151920 - RNA, 19 nt, Artificial Sequence
  Description of Artificial Sequence: Synthetic oligonucleotide
uuucauuacaggcugcucc

SEQ ID NO: 3151921 - RNA, 19 nt, Artificial Sequence
  Description of Artificial Sequence: Synthetic oligonucleotide
aaacgaaugaucucucuug

SEQ ID NO: 3151922 - RNA, 19 nt, Artificial Sequence
  Description of Artificial Sequence: Synthetic oligonucleotide
gaaugaucucucuugacag

SEQ ID NO: 3151923 - RNA, 19 nt, Artificial Sequence
  Description of Artificial Sequence: Synthetic oligonucleotide
gaaauaacagcuaggaguc

SEQ ID NO: 3151924 - RNA, 19 nt, Artificial Sequence
  Description of Artificial Sequence: Synthetic oligonucleotide
ugcagaaauaacagcuagg

SEQ ID NO: 3151925 - RNA, 19 nt, Artificial Sequence
  Description of Artificial Sequence: Synthetic oligonucleotide
uugcagaaauaacagcuag

SEQ ID NO: 3151926 - RNA, 19 nt, Artificial Sequence
  Description of Artificial Sequence: Synthetic oligonucleotide
uccaagaggaaacgaauga

SEQ ID NO: 3151927 - RNA, 19 nt, Artificial Sequence
  Description of Artificial Sequence: Synthetic oligonucleotide
aagaggaaacgaaugaucu

SEQ ID NO: 3151928 - RNA, 19 nt, Artificial Sequence
  Description of Artificial Sequence: Synthetic oligonucleotide
ucucuugacagcccugggg

SEQ ID NO: 3151929 - RNA, 19 nt, Artificial Sequence
  Description of Artificial Sequence: Synthetic oligonucleotide
uggggugagcucaacaucc

SEQ ID NO: 3151930 - RNA, 19 nt, Artificial Sequence
  Description of Artificial Sequence: Synthetic oligonucleotide
uaggagucuuucauuacag

SEQ ID NO: 3151931 - RNA, 19 nt, Artificial Sequence
  Description of Artificial Sequence: Synthetic oligonucleotide
aacgaaugaucucucuuga

SEQ ID NO: 3151932 - RNA, 19 nt, Artificial Sequence
  Description of Artificial Sequence: Synthetic oligonucleotide
agcucaacauccuccagag

SEQ ID NO: 3151933 - RNA, 19 nt, Artificial Sequence
  Description of Artificial Sequence: Synthetic oligonucleotide
agaggaaacgaaugaucuc

SEQ ID NO: 3151934 - RNA, 19 nt, Artificial Sequence
  Description of Artificial Sequence: Synthetic oligonucleotide
ggagucuuucauuacaggc

SEQ ID NO: 3151935 - RNA, 19 nt, Artificial Sequence
  Description of Artificial Sequence: Synthetic oligonucleotide
caagaggaaacgaaugauc

SEQ ID NO: 3151936 - RNA, 19 nt, Artificial Sequence
  Description of Artificial Sequence: Synthetic oligonucleotide
uucauuacaggcugcucca

SEQ ID NO: 3151937 - RNA, 19 nt, Artificial Sequence
  Description of Artificial Sequence: Synthetic oligonucleotide
auuacaggcugcuccaaga

SEQ ID NO: 3151938 - RNA, 19 nt, Artificial Sequence
  Description of Artificial Sequence: Synthetic oligonucleotide
acagcuaggagucuuucau

SEQ ID NO: 3151939 - RNA, 19 nt, Artificial Sequence
  Description of Artificial Sequence: Synthetic oligonucleotide
ucucucuugacagcccugg

SEQ ID NO: 3151940 - RNA, 19 nt, Artificial Sequence
  Description of Artificial Sequence: Synthetic oligonucleotide
ucaacauccuccagagagu

SEQ ID NO: 3151941 - RNA, 19 nt, Artificial Sequence
  Description of Artificial Sequence: Synthetic oligonucleotide
aacagcuaggagucuuuca

SEQ ID NO: 3151942 - RNA, 19 nt, Artificial Sequence
  Description of Artificial Sequence: Synthetic oligonucleotide
aauaacagcuaggagucuu

SEQ ID NO: 3151943 - RNA, 19 nt, Artificial Sequence
  Description of Artificial Sequence: Synthetic oligonucleotide
acgaaugaucucucuugac

SEQ ID NO: 3151944 - RNA, 19 nt, Artificial Sequence
  Description of Artificial Sequence: Synthetic oligonucleotide
aggagucuuucauuacagg

SEQ ID NO: 3151945 - RNA, 19 nt, Artificial Sequence
  Description of Artificial Sequence: Synthetic oligonucleotide
ugcuccaagaggaaacgaa

SEQ ID NO: 3151946 - RNA, 19 nt, Artificial Sequence
  Description of Artificial Sequence: Synthetic oligonucleotide
cuccaagaggaaacgaaug

SEQ ID NO: 3151947 - RNA, 19 nt, Artificial Sequence
  Description of Artificial Sequence: Synthetic oligonucleotide
ucuuucauuacaggcugcu

SEQ ID NO: 3151948 - RNA, 19 nt, Artificial Sequence
  Description of Artificial Sequence: Synthetic oligonucleotide
agcuaggagucuuucauua

SEQ ID NO: 3151949 - RNA, 19 nt, Artificial Sequence
  Description of Artificial Sequence: Synthetic oligonucleotide
gaggaaacgaaugaucucu

SEQ ID NO: 3151950 - RNA, 19 nt, Artificial Sequence
  Description of Artificial Sequence: Synthetic oligonucleotide
ugaucucucuugacagccc

SEQ ID NO: 3151951 - RNA, 19 nt, Artificial Sequence
  Description of Artificial Sequence: Synthetic oligonucleotide
cuaggagucuuucauuaca

SEQ ID NO: 3151952 - RNA, 19 nt, Artificial Sequence
  Description of Artificial Sequence: Synthetic oligonucleotide
gagcucaacauccuccaga

SEQ ID NO: 3151953 - RNA, 19 nt, Artificial Sequence
  Description of Artificial Sequence: Synthetic oligonucleotide
acaggcugcuccaagagga

SEQ ID NO: 3151954 - RNA, 19 nt, Artificial Sequence
  Description of Artificial Sequence: Synthetic oligonucleotide
cauuacaggcugcuccaag

SEQ ID NO: 3151955 - RNA, 19 nt, Artificial Sequence
  Description of Artificial Sequence: Synthetic oligonucleotide
gcagaaauaacagcuagga

SEQ ID NO: 3151956 - RNA, 19 nt, Artificial Sequence
  Description of Artificial Sequence: Synthetic oligonucleotide
gagucuuucauuacaggcu

SEQ ID NO: 3151957 - RNA, 19 nt, Artificial Sequence
  Description of Artificial Sequence: Synthetic oligonucleotide
aaauaacagcuaggagucu

SEQ ID NO: 3151958 - RNA, 19 nt, Artificial Sequence
  Description of Artificial Sequence: Synthetic oligonucleotide
gaaacgaaugaucucucuu

SEQ ID NO: 3151959 - RNA, 19 nt, Artificial Sequence
  Description of Artificial Sequence: Synthetic oligonucleotide
aggaaacgaaugaucucuc

SEQ ID NO: 3151960 - RNA, 19 nt, Artificial Sequence
  Description of Artificial Sequence: Synthetic oligonucleotide
gugagcucaacauccucca

SEQ ID NO: 3151961 - RNA, 19 nt, Artificial Sequence
  Description of Artificial Sequence: Synthetic oligonucleotide
cuggggugagcucaacauc

SEQ ID NO: 3151962 - RNA, 19 nt, Artificial Sequence
  Description of Artificial Sequence: Synthetic oligonucleotide
gaucucucuugacagcccu

SEQ ID NO: 3151963 - RNA, 19 nt, Artificial Sequence
  Description of Artificial Sequence: Synthetic oligonucleotide
cucucuugacagcccuggg

SEQ ID NO: 3151964 - RNA, 19 nt, Artificial Sequence
  Description of Artificial Sequence: Synthetic oligonucleotide
uaacagcuaggagucuuuc

SEQ ID NO: 3151965 - RNA, 19 nt, Artificial Sequence
  Description of Artificial Sequence: Synthetic oligonucleotide
cuuucauuacaggcugcuc

SEQ ID NO: 3151966 - RNA, 19 nt, Artificial Sequence
  Description of Artificial Sequence: Synthetic oligonucleotide
aacauccuccagagaguug

SEQ ID NO: 3151967 - RNA, 19 nt, Artificial Sequence
  Description of Artificial Sequence: Synthetic oligonucleotide
uugacagcccuggggugag

SEQ ID NO: 3151968 - RNA, 19 nt, Artificial Sequence
  Description of Artificial Sequence: Synthetic oligonucleotide
gcugcuccaagaggaaacg

SEQ ID NO: 3151969 - RNA, 19 nt, Artificial Sequence
  Description of Artificial Sequence: Synthetic oligonucleotide
acagcccuggggugagcuc

SEQ ID NO: 3151970 - RNA, 19 nt, Artificial Sequence
  Description of Artificial Sequence: Synthetic oligonucleotide
cuugacagcccugggguga

SEQ ID NO: 3151971 - RNA, 19 nt, Artificial Sequence
  Description of Artificial Sequence: Synthetic oligonucleotide
gcuaggagucuuucauuac

SEQ ID NO: 3151972 - RNA, 19 nt, Artificial Sequence
  Description of Artificial Sequence: Synthetic oligonucleotide
cgaaugaucucucuugaca

SEQ ID NO: 3151973 - RNA, 19 nt, Artificial Sequence
  Description of Artificial Sequence: Synthetic oligonucleotide
gucuuucauuacaggcugc

SEQ ID NO: 3151974 - RNA, 19 nt, Artificial Sequence
  Description of Artificial Sequence: Synthetic oligonucleotide
auaacagcuaggagucuuu

SEQ ID NO: 3151975 - RNA, 19 nt, Artificial Sequence
  Description of Artificial Sequence: Synthetic oligonucleotide
ucauuacaggcugcuccaa

SEQ ID NO: 3151976 - RNA, 19 nt, Artificial Sequence
  Description of Artificial Sequence: Synthetic oligonucleotide
ggcugcuccaagaggaaac

SEQ ID NO: 3151977 - RNA, 19 nt, Artificial Sequence
  Description of Artificial Sequence: Synthetic oligonucleotide
aucucucuugacagcccug

SEQ ID NO: 3151978 - RNA, 19 nt, Artificial Sequence
  Description of Artificial Sequence: Synthetic oligonucleotide
ggaaacgaaugaucucucu

SEQ ID NO: 3151979 - RNA, 19 nt, Artificial Sequence
  Description of Artificial Sequence: Synthetic oligonucleotide
cagcccuggggugagcuca

SEQ ID NO: 3151980 - RNA, 19 nt, Artificial Sequence
  Description of Artificial Sequence: Synthetic oligonucleotide
gggugagcucaacauccuc

SEQ ID NO: 3151981 - RNA, 19 nt, Artificial Sequence
  Description of Artificial Sequence: Synthetic oligonucleotide
aggcugcuccaagaggaaa

SEQ ID NO: 3151982 - RNA, 19 nt, Artificial Sequence
  Description of Artificial Sequence: Synthetic oligonucleotide
gacagcccuggggugagcu

SEQ ID NO: 3151983 - RNA, 19 nt, Artificial Sequence
  Description of Artificial Sequence: Synthetic oligonucleotide
caggcugcuccaagaggaa

SEQ ID NO: 3151984 - RNA, 19 nt, Artificial Sequence
  Description of Artificial Sequence: Synthetic oligonucleotide
caacauccuccagagaguu

SEQ ID NO: 3151985 - RNA, 19 nt, Artificial Sequence
  Description of Artificial Sequence: Synthetic oligonucleotide
gcuccaagaggaaacgaau

SEQ ID NO: 3151986 - RNA, 19 nt, Artificial Sequence
  Description of Artificial Sequence: Synthetic oligonucleotide
ugacagcccuggggugagc

SEQ ID NO: 3151987 - RNA, 19 nt, Artificial Sequence
  Description of Artificial Sequence: Synthetic oligonucleotide
ccuggggugagcucaacau

SEQ ID NO: 3151988 - RNA, 19 nt, Artificial Sequence
  Description of Artificial Sequence: Synthetic oligonucleotide
cagcuaggagucuuucauu

SEQ ID NO: 3151989 - RNA, 19 nt, Artificial Sequence
  Description of Artificial Sequence: Synthetic oligonucleotide
ccaagaggaaacgaaugau

SEQ ID NO: 3151990 - RNA, 19 nt, Artificial Sequence
  Description of Artificial Sequence: Synthetic oligonucleotide
gcccuggggugagcucaac

SEQ ID NO: 3151991 - RNA, 19 nt, Artificial Sequence
  Description of Artificial Sequence: Synthetic oligonucleotide
aaugcuggaauuuaaaagg

SEQ ID NO: 3151992 - RNA, 19 nt, Artificial Sequence
  Description of Artificial Sequence: Synthetic oligonucleotide
gaaugcuggaauuuaaaag

SEQ ID NO: 3151993 - RNA, 19 nt, Artificial Sequence
  Description of Artificial Sequence: Synthetic oligonucleotide
ugucauccaacucacagag

SEQ ID NO: 3151994 - RNA, 19 nt, Artificial Sequence
  Description of Artificial Sequence: Synthetic oligonucleotide
gaauuuaaaaggugugugc

SEQ ID NO: 3151995 - RNA, 19 nt, Artificial Sequence
  Description of Artificial Sequence: Synthetic oligonucleotide
ucauccaacucacagagau

SEQ ID NO: 3151996 - RNA, 19 nt, Artificial Sequence
  Description of Artificial Sequence: Synthetic oligonucleotide
ugcuguaagagcaugcugu

SEQ ID NO: 3151997 - RNA, 19 nt, Artificial Sequence
  Description of Artificial Sequence: Synthetic oligonucleotide
uguaagagcaugcugucau

SEQ ID NO: 3151998 - RNA, 19 nt, Artificial Sequence
  Description of Artificial Sequence: Synthetic oligonucleotide
ugaaugcuggaauuuaaaa

SEQ ID NO: 3151999 - RNA, 19 nt, Artificial Sequence
  Description of Artificial Sequence: Synthetic oligonucleotide
caugcugucauccaacuca

SEQ ID NO: 3152000 - RNA, 19 nt, Artificial Sequence
  Description of Artificial Sequence: Synthetic oligonucleotide
auuuaaaaggugugugcca

SEQ ID NO: 3152001 - RNA, 19 nt, Artificial Sequence
  Description of Artificial Sequence: Synthetic oligonucleotide
aacugcuguaagagcaugc

SEQ ID NO: 3152002 - RNA, 19 nt, Artificial Sequence
  Description of Artificial Sequence: Synthetic oligonucleotide
cuggaauuuaaaaggugug

SEQ ID NO: 3152003 - RNA, 19 nt, Artificial Sequence
  Description of Artificial Sequence: Synthetic oligonucleotide
uggaauuuaaaaggugugu

SEQ ID NO: 3152004 - RNA, 19 nt, Artificial Sequence
  Description of Artificial Sequence: Synthetic oligonucleotide
ugcuggaauuuaaaaggug

SEQ ID NO: 3152005 - RNA, 19 nt, Artificial Sequence
  Description of Artificial Sequence: Synthetic oligonucleotide
ggaauuuaaaaggugugug

SEQ ID NO: 3152006 - RNA, 19 nt, Artificial Sequence
  Description of Artificial Sequence: Synthetic oligonucleotide
gcugucauccaacucacag

SEQ ID NO: 3152007 - RNA, 19 nt, Artificial Sequence
  Description of Artificial Sequence: Synthetic oligonucleotide
cuggaacugcuguaagagc

SEQ ID NO: 3152008 - RNA, 19 nt, Artificial Sequence
  Description of Artificial Sequence: Synthetic oligonucleotide
uccuggaacugcuguaaga

SEQ ID NO: 3152009 - RNA, 19 nt, Artificial Sequence
  Description of Artificial Sequence: Synthetic oligonucleotide
agagcaugcugucauccaa

SEQ ID NO: 3152010 - RNA, 19 nt, Artificial Sequence
  Description of Artificial Sequence: Synthetic oligonucleotide
acugcuguaagagcaugcu

SEQ ID NO: 3152011 - RNA, 19 nt, Artificial Sequence
  Description of Artificial Sequence: Synthetic oligonucleotide
agcaugcugucauccaacu

SEQ ID NO: 3152012 - RNA, 19 nt, Artificial Sequence
  Description of Artificial Sequence: Synthetic oligonucleotide
augcugucauccaacucac

SEQ ID NO: 3152013 - RNA, 19 nt, Artificial Sequence
  Description of Artificial Sequence: Synthetic oligonucleotide
uguccuggaacugcuguaa

SEQ ID NO: 3152014 - RNA, 19 nt, Artificial Sequence
  Description of Artificial Sequence: Synthetic oligonucleotide
augcuggaauuuaaaaggu

SEQ ID NO: 3152015 - RNA, 19 nt, Artificial Sequence
  Description of Artificial Sequence: Synthetic oligonucleotide
gaacugcuguaagagcaug

SEQ ID NO: 3152016 - RNA, 19 nt, Artificial Sequence
  Description of Artificial Sequence: Synthetic oligonucleotide
ccuggaacugcuguaagag

SEQ ID NO: 3152017 - RNA, 19 nt, Artificial Sequence
  Description of Artificial Sequence: Synthetic oligonucleotide
cugaaugcuggaauuuaaa

SEQ ID NO: 3152018 - RNA, 19 nt, Artificial Sequence
  Description of Artificial Sequence: Synthetic oligonucleotide
cugcuguaagagcaugcug

SEQ ID NO: 3152019 - RNA, 19 nt, Artificial Sequence
  Description of Artificial Sequence: Synthetic oligonucleotide
cauccaacucacagagauc

SEQ ID NO: 3152020 - RNA, 19 nt, Artificial Sequence
  Description of Artificial Sequence: Synthetic oligonucleotide
guaagagcaugcugucauc

SEQ ID NO: 3152021 - RNA, 19 nt, Artificial Sequence
  Description of Artificial Sequence: Synthetic oligonucleotide
gagcaugcugucauccaac

SEQ ID NO: 3152022 - RNA, 19 nt, Artificial Sequence
  Description of Artificial Sequence: Synthetic oligonucleotide
ccaacucacagagaucugc

SEQ ID NO: 3152023 - RNA, 19 nt, Artificial Sequence
  Description of Artificial Sequence: Synthetic oligonucleotide
gcuggaauuuaaaaggugu

SEQ ID NO: 3152024 - RNA, 19 nt, Artificial Sequence
  Description of Artificial Sequence: Synthetic oligonucleotide
ugcugucauccaacucaca

SEQ ID NO: 3152025 - RNA, 19 nt, Artificial Sequence
  Description of Artificial Sequence: Synthetic oligonucleotide
gcuguaagagcaugcuguc

SEQ ID NO: 3152026 - RNA, 19 nt, Artificial Sequence
  Description of Artificial Sequence: Synthetic oligonucleotide
cuguaagagcaugcuguca

SEQ ID NO: 3152027 - RNA, 19 nt, Artificial Sequence
  Description of Artificial Sequence: Synthetic oligonucleotide
gcaugcugucauccaacuc

SEQ ID NO: 3152028 - RNA, 19 nt, Artificial Sequence
  Description of Artificial Sequence: Synthetic oligonucleotide
gcuguccuggaacugcugu

SEQ ID NO: 3152029 - RNA, 19 nt, Artificial Sequence
  Description of Artificial Sequence: Synthetic oligonucleotide
gucauccaacucacagaga

SEQ ID NO: 3152030 - RNA, 19 nt, Artificial Sequence
  Description of Artificial Sequence: Synthetic oligonucleotide
cuccugaaugcuggaauuu

SEQ ID NO: 3152031 - RNA, 19 nt, Artificial Sequence
  Description of Artificial Sequence: Synthetic oligonucleotide
ccuccugaaugcuggaauu

SEQ ID NO: 3152032 - RNA, 19 nt, Artificial Sequence
  Description of Artificial Sequence: Synthetic oligonucleotide
augauacgcaucuuggucc

SEQ ID NO: 3152033 - RNA, 19 nt, Artificial Sequence
  Description of Artificial Sequence: Synthetic oligonucleotide
ucguucagcggccugaugg

SEQ ID NO: 3152034 - RNA, 19 nt, Artificial Sequence
  Description of Artificial Sequence: Synthetic oligonucleotide
aaccccaugauacgcaucu

SEQ ID NO: 3152035 - RNA, 19 nt, Artificial Sequence
  Description of Artificial Sequence: Synthetic oligonucleotide
ugauacgcaucuugguccg

SEQ ID NO: 3152036 - RNA, 19 nt, Artificial Sequence
  Description of Artificial Sequence: Synthetic oligonucleotide
auggcugugccccggaaac

SEQ ID NO: 3152037 - RNA, 19 nt, Artificial Sequence
  Description of Artificial Sequence: Synthetic oligonucleotide
caugauacgcaucuugguc

SEQ ID NO: 3152038 - RNA, 19 nt, Artificial Sequence
  Description of Artificial Sequence: Synthetic oligonucleotide
cacccagugguacagcugg

SEQ ID NO: 3152039 - RNA, 19 nt, Artificial Sequence
  Description of Artificial Sequence: Synthetic oligonucleotide
agugguacagcugggcggg

SEQ ID NO: 3152040 - RNA, 19 nt, Artificial Sequence
  Description of Artificial Sequence: Synthetic oligonucleotide
cagugguacagcugggcgg

SEQ ID NO: 3152041 - RNA, 19 nt, Artificial Sequence
  Description of Artificial Sequence: Synthetic oligonucleotide
uugguccgcaucuccaccc

SEQ ID NO: 3152042 - RNA, 19 nt, Artificial Sequence
  Description of Artificial Sequence: Synthetic oligonucleotide
ugccuccucguucagcggc

SEQ ID NO: 3152043 - RNA, 19 nt, Artificial Sequence
  Description of Artificial Sequence: Synthetic oligonucleotide
uccgcaucuccacccagug

SEQ ID NO: 3152044 - RNA, 19 nt, Artificial Sequence
  Description of Artificial Sequence: Synthetic oligonucleotide
cccggaaaccccaugauac

SEQ ID NO: 3152045 - RNA, 19 nt, Artificial Sequence
  Description of Artificial Sequence: Synthetic oligonucleotide
ucuugguccgcaucuccac

SEQ ID NO: 3152046 - RNA, 19 nt, Artificial Sequence
  Description of Artificial Sequence: Synthetic oligonucleotide
ugccccggaaaccccauga

SEQ ID NO: 3152047 - RNA, 19 nt, Artificial Sequence
  Description of Artificial Sequence: Synthetic oligonucleotide
cccaugauacgcaucuugg

SEQ ID NO: 3152048 - RNA, 19 nt, Artificial Sequence
  Description of Artificial Sequence: Synthetic oligonucleotide
cuugguccgcaucuccacc

SEQ ID NO: 3152049 - RNA, 19 nt, Artificial Sequence
  Description of Artificial Sequence: Synthetic oligonucleotide
aaaccccaugauacgcauc

SEQ ID NO: 3152050 - RNA, 19 nt, Artificial Sequence
  Description of Artificial Sequence: Synthetic oligonucleotide
gguacagcugggcgggacg

SEQ ID NO: 3152051 - RNA, 19 nt, Artificial Sequence
  Description of Artificial Sequence: Synthetic oligonucleotide
ugggcgggacggcaggcag

SEQ ID NO: 3152052 - RNA, 19 nt, Artificial Sequence
  Description of Artificial Sequence: Synthetic oligonucleotide
aucuccacccagugguaca

SEQ ID NO: 3152053 - RNA, 19 nt, Artificial Sequence
  Description of Artificial Sequence: Synthetic oligonucleotide
acgcaucuugguccgcauc

SEQ ID NO: 3152054 - RNA, 19 nt, Artificial Sequence
  Description of Artificial Sequence: Synthetic oligonucleotide
guacagcugggcgggacgg

SEQ ID NO: 3152055 - RNA, 19 nt, Artificial Sequence
  Description of Artificial Sequence: Synthetic oligonucleotide
ucugccgcugccuccucgu

SEQ ID NO: 3152056 - RNA, 19 nt, Artificial Sequence
  Description of Artificial Sequence: Synthetic oligonucleotide
gauggcugugccccggaaa

SEQ ID NO: 3152057 - RNA, 19 nt, Artificial Sequence
  Description of Artificial Sequence: Synthetic oligonucleotide
uccucguucagcggccuga

SEQ ID NO: 3152058 - RNA, 19 nt, Artificial Sequence
  Description of Artificial Sequence: Synthetic oligonucleotide
ccagugguacagcugggcg

SEQ ID NO: 3152059 - RNA, 19 nt, Artificial Sequence
  Description of Artificial Sequence: Synthetic oligonucleotide
ugguccgcaucuccaccca

SEQ ID NO: 3152060 - RNA, 19 nt, Artificial Sequence
  Description of Artificial Sequence: Synthetic oligonucleotide
auacgcaucuugguccgca

SEQ ID NO: 3152061 - RNA, 19 nt, Artificial Sequence
  Description of Artificial Sequence: Synthetic oligonucleotide
agcggccugauggcugugc

SEQ ID NO: 3152062 - RNA, 19 nt, Artificial Sequence
  Description of Artificial Sequence: Synthetic oligonucleotide
gaaaccccaugauacgcau

SEQ ID NO: 3152063 - RNA, 19 nt, Artificial Sequence
  Description of Artificial Sequence: Synthetic oligonucleotide
ggccugauggcugugcccc

SEQ ID NO: 3152064 - RNA, 19 nt, Artificial Sequence
  Description of Artificial Sequence: Synthetic oligonucleotide
caucuccacccagugguac

SEQ ID NO: 3152065 - RNA, 19 nt, Artificial Sequence
  Description of Artificial Sequence: Synthetic oligonucleotide
ccggaaaccccaugauacg

SEQ ID NO: 3152066 - RNA, 19 nt, Artificial Sequence
  Description of Artificial Sequence: Synthetic oligonucleotide
ugauggcugugccccggaa

SEQ ID NO: 3152067 - RNA, 19 nt, Artificial Sequence
  Description of Artificial Sequence: Synthetic oligonucleotide
uacgcaucuugguccgcau

SEQ ID NO: 3152068 - RNA, 19 nt, Artificial Sequence
  Description of Artificial Sequence: Synthetic oligonucleotide
cucugccgcugccuccucg

SEQ ID NO: 3152069 - RNA, 19 nt, Artificial Sequence
  Description of Artificial Sequence: Synthetic oligonucleotide
ccccaugauacgcaucuug

SEQ ID NO: 3152070 - RNA, 19 nt, Artificial Sequence
  Description of Artificial Sequence: Synthetic oligonucleotide
gauacgcaucuugguccgc

SEQ ID NO: 3152071 - RNA, 19 nt, Artificial Sequence
  Description of Artificial Sequence: Synthetic oligonucleotide
ugugccccggaaaccccau

SEQ ID NO: 3152072 - RNA, 19 nt, Artificial Sequence
  Description of Artificial Sequence: Synthetic oligonucleotide
cugccuccucguucagcgg

SEQ ID NO: 3152073 - RNA, 19 nt, Artificial Sequence
  Description of Artificial Sequence: Synthetic oligonucleotide
ggaaaccccaugauacgca

SEQ ID NO: 3152074 - RNA, 19 nt, Artificial Sequence
  Description of Artificial Sequence: Synthetic oligonucleotide
acagcugggcgggacggca

SEQ ID NO: 3152075 - RNA, 19 nt, Artificial Sequence
  Description of Artificial Sequence: Synthetic oligonucleotide
ugguacagcugggcgggac

SEQ ID NO: 3152076 - RNA, 19 nt, Artificial Sequence
  Description of Artificial Sequence: Synthetic oligonucleotide
uggcugugccccggaaacc

SEQ ID NO: 3152077 - RNA, 19 nt, Artificial Sequence
  Description of Artificial Sequence: Synthetic oligonucleotide
uacagcugggcgggacggc

SEQ ID NO: 3152078 - RNA, 19 nt, Artificial Sequence
  Description of Artificial Sequence: Synthetic oligonucleotide
cguucagcggccugauggc

SEQ ID NO: 3152079 - RNA, 19 nt, Artificial Sequence
  Description of Artificial Sequence: Synthetic oligonucleotide
cugugccccggaaacccca

SEQ ID NO: 3152080 - RNA, 19 nt, Artificial Sequence
  Description of Artificial Sequence: Synthetic oligonucleotide
gccgcugccuccucguuca

SEQ ID NO: 3152081 - RNA, 19 nt, Artificial Sequence
  Description of Artificial Sequence: Synthetic oligonucleotide
acccagugguacagcuggg

SEQ ID NO: 3152082 - RNA, 19 nt, Artificial Sequence
  Description of Artificial Sequence: Synthetic oligonucleotide
cggaaaccccaugauacgc

SEQ ID NO: 3152083 - RNA, 19 nt, Artificial Sequence
  Description of Artificial Sequence: Synthetic oligonucleotide
gguccgcaucuccacccag

SEQ ID NO: 3152084 - RNA, 19 nt, Artificial Sequence
  Description of Artificial Sequence: Synthetic oligonucleotide
cucguucagcggccugaug

SEQ ID NO: 3152085 - RNA, 19 nt, Artificial Sequence
  Description of Artificial Sequence: Synthetic oligonucleotide
gcggccugauggcugugcc

SEQ ID NO: 3152086 - RNA, 19 nt, Artificial Sequence
  Description of Artificial Sequence: Synthetic oligonucleotide
cuccucguucagcggccug

SEQ ID NO: 3152087 - RNA, 19 nt, Artificial Sequence
  Description of Artificial Sequence: Synthetic oligonucleotide
ccacccagugguacagcug

SEQ ID NO: 3152088 - RNA, 19 nt, Artificial Sequence
  Description of Artificial Sequence: Synthetic oligonucleotide
ccgcaucuccacccagugg

SEQ ID NO: 3152089 - RNA, 19 nt, Artificial Sequence
  Description of Artificial Sequence: Synthetic oligonucleotide
gugccccggaaaccccaug

SEQ ID NO: 3152090 - RNA, 19 nt, Artificial Sequence
  Description of Artificial Sequence: Synthetic oligonucleotide
cgcaucuccacccaguggu

SEQ ID NO: 3152091 - RNA, 19 nt, Artificial Sequence
  Description of Artificial Sequence: Synthetic oligonucleotide
ccaugauacgcaucuuggu

SEQ ID NO: 3152092 - RNA, 19 nt, Artificial Sequence
  Description of Artificial Sequence: Synthetic oligonucleotide
guucagcggccugauggcu

SEQ ID NO: 3152093 - RNA, 19 nt, Artificial Sequence
  Description of Artificial Sequence: Synthetic oligonucleotide
gcugugccccggaaacccc

SEQ ID NO: 3152094 - RNA, 19 nt, Artificial Sequence
  Description of Artificial Sequence: Synthetic oligonucleotide
gccuccucguucagcggcc

SEQ ID NO: 3152095 - RNA, 19 nt, Artificial Sequence
  Description of Artificial Sequence: Synthetic oligonucleotide
guccgcaucuccacccagu

SEQ ID NO: 3152096 - RNA, 19 nt, Artificial Sequence
  Description of Artificial Sequence: Synthetic oligonucleotide
accccaugauacgcaucuu

SEQ ID NO: 3152097 - RNA, 19 nt, Artificial Sequence
  Description of Artificial Sequence: Synthetic oligonucleotide
cgcaucuugguccgcaucu

SEQ ID NO: 3152098 - RNA, 19 nt, Artificial Sequence
  Description of Artificial Sequence: Synthetic oligonucleotide
cggccugauggcugugccc

SEQ ID NO: 3152099 - RNA, 19 nt, Artificial Sequence
  Description of Artificial Sequence: Synthetic oligonucleotide
gcugggcgggacggcaggc

SEQ ID NO: 3152100 - RNA, 19 nt, Artificial Sequence
  Description of Artificial Sequence: Synthetic oligonucleotide
ccccggaaaccccaugaua

SEQ ID NO: 3152101 - RNA, 19 nt, Artificial Sequence
  Description of Artificial Sequence: Synthetic oligonucleotide
gugguacagcugggcggga

SEQ ID NO: 3152102 - RNA, 19 nt, Artificial Sequence
  Description of Artificial Sequence: Synthetic oligonucleotide
gcaucuccacccaguggua

SEQ ID NO: 3152103 - RNA, 19 nt, Artificial Sequence
  Description of Artificial Sequence: Synthetic oligonucleotide
cagcggccugauggcugug

SEQ ID NO: 3152104 - RNA, 19 nt, Artificial Sequence
  Description of Artificial Sequence: Synthetic oligonucleotide
ggcgggacggcaggcagau

SEQ ID NO: 3152105 - RNA, 19 nt, Artificial Sequence
  Description of Artificial Sequence: Synthetic oligonucleotide
gccccggaaaccccaugau

SEQ ID NO: 3152106 - RNA, 19 nt, Artificial Sequence
  Description of Artificial Sequence: Synthetic oligonucleotide
gggcgggacggcaggcaga

SEQ ID NO: 3152107 - RNA, 19 nt, Artificial Sequence
  Description of Artificial Sequence: Synthetic oligonucleotide
cgcugccuccucguucagc

SEQ ID NO: 3152108 - RNA, 19 nt, Artificial Sequence
  Description of Artificial Sequence: Synthetic oligonucleotide
gcgggacggcaggcagaug

SEQ ID NO: 3152109 - RNA, 19 nt, Artificial Sequence
  Description of Artificial Sequence: Synthetic oligonucleotide
cugccgcugccuccucguu

SEQ ID NO: 3152110 - RNA, 19 nt, Artificial Sequence
  Description of Artificial Sequence: Synthetic oligonucleotide
ccucguucagcggccugau

SEQ ID NO: 3152111 - RNA, 19 nt, Artificial Sequence
  Description of Artificial Sequence: Synthetic oligonucleotide
ccuccucguucagcggccu

SEQ ID NO: 3152112 - RNA, 19 nt, Artificial Sequence
  Description of Artificial Sequence: Synthetic oligonucleotide
auaacaauaaacuaaaccu

SEQ ID NO: 3152113 - RNA, 19 nt, Artificial Sequence
  Description of Artificial Sequence: Synthetic oligonucleotide
gauaacaauaaacuaaacc

SEQ ID NO: 3152114 - RNA, 19 nt, Artificial Sequence
  Description of Artificial Sequence: Synthetic oligonucleotide
uaaacuaaaccucugaaac

SEQ ID NO: 3152115 - RNA, 19 nt, Artificial Sequence
  Description of Artificial Sequence: Synthetic oligonucleotide
aauaaacuaaaccucugaa

SEQ ID NO: 3152116 - RNA, 19 nt, Artificial Sequence
  Description of Artificial Sequence: Synthetic oligonucleotide
uaacaauaaacuaaaccuc

SEQ ID NO: 3152117 - RNA, 19 nt, Artificial Sequence
  Description of Artificial Sequence: Synthetic oligonucleotide
gaaacuguaagccacccca

SEQ ID NO: 3152118 - RNA, 19 nt, Artificial Sequence
  Description of Artificial Sequence: Synthetic oligonucleotide
caugauaacaauaaacuaa

SEQ ID NO: 3152119 - RNA, 19 nt, Artificial Sequence
  Description of Artificial Sequence: Synthetic oligonucleotide
aacaauaaacuaaaccucu

SEQ ID NO: 3152120 - RNA, 19 nt, Artificial Sequence
  Description of Artificial Sequence: Synthetic oligonucleotide
aaacuaaaccucugaaacu

SEQ ID NO: 3152121 - RNA, 19 nt, Artificial Sequence
  Description of Artificial Sequence: Synthetic oligonucleotide
auaaacuaaaccucugaaa

SEQ ID NO: 3152122 - RNA, 19 nt, Artificial Sequence
  Description of Artificial Sequence: Synthetic oligonucleotide
uaagccaccccaauuaaau

SEQ ID NO: 3152123 - RNA, 19 nt, Artificial Sequence
  Description of Artificial Sequence: Synthetic oligonucleotide
ucugaaacuguaagccacc

SEQ ID NO: 3152124 - RNA, 19 nt, Artificial Sequence
  Description of Artificial Sequence: Synthetic oligonucleotide
accccaauuaaauguuuuc

SEQ ID NO: 3152125 - RNA, 19 nt, Artificial Sequence
  Description of Artificial Sequence: Synthetic oligonucleotide
augauaacaauaaacuaaa

SEQ ID NO: 3152126 - RNA, 19 nt, Artificial Sequence
  Description of Artificial Sequence: Synthetic oligonucleotide
uugcuucccgccaugauaa

SEQ ID NO: 3152127 - RNA, 19 nt, Artificial Sequence
  Description of Artificial Sequence: Synthetic oligonucleotide
ugaaacuguaagccacccc

SEQ ID NO: 3152128 - RNA, 19 nt, Artificial Sequence
  Description of Artificial Sequence: Synthetic oligonucleotide
agccaccccaauuaaaugu

SEQ ID NO: 3152129 - RNA, 19 nt, Artificial Sequence
  Description of Artificial Sequence: Synthetic oligonucleotide
aagccaccccaauuaaaug

SEQ ID NO: 3152130 - RNA, 19 nt, Artificial Sequence
  Description of Artificial Sequence: Synthetic oligonucleotide
uguaagccaccccaauuaa

SEQ ID NO: 3152131 - RNA, 19 nt, Artificial Sequence
  Description of Artificial Sequence: Synthetic oligonucleotide
ucugccugcacacugccuu

SEQ ID NO: 3152132 - RNA, 19 nt, Artificial Sequence
  Description of Artificial Sequence: Synthetic oligonucleotide
caauaaacuaaaccucuga

SEQ ID NO: 3152133 - RNA, 19 nt, Artificial Sequence
  Description of Artificial Sequence: Synthetic oligonucleotide
aacuguaagccaccccaau

SEQ ID NO: 3152134 - RNA, 19 nt, Artificial Sequence
  Description of Artificial Sequence: Synthetic oligonucleotide
acaauaaacuaaaccucug

SEQ ID NO: 3152135 - RNA, 19 nt, Artificial Sequence
  Description of Artificial Sequence: Synthetic oligonucleotide
cugcacacugccuugcuuc

SEQ ID NO: 3152136 - RNA, 19 nt, Artificial Sequence
  Description of Artificial Sequence: Synthetic oligonucleotide
cacacugccuugcuucccg

SEQ ID NO: 3152137 - RNA, 19 nt, Artificial Sequence
  Description of Artificial Sequence: Synthetic oligonucleotide
acuguaagccaccccaauu

SEQ ID NO: 3152138 - RNA, 19 nt, Artificial Sequence
  Description of Artificial Sequence: Synthetic oligonucleotide
ugcacacugccuugcuucc

SEQ ID NO: 3152139 - RNA, 19 nt, Artificial Sequence
  Description of Artificial Sequence: Synthetic oligonucleotide
cuucccgccaugauaacaa

SEQ ID NO: 3152140 - RNA, 19 nt, Artificial Sequence
  Description of Artificial Sequence: Synthetic oligonucleotide
cugaaacuguaagccaccc

SEQ ID NO: 3152141 - RNA, 19 nt, Artificial Sequence
  Description of Artificial Sequence: Synthetic oligonucleotide
acugccuugcuucccgcca

SEQ ID NO: 3152142 - RNA, 19 nt, Artificial Sequence
  Description of Artificial Sequence: Synthetic oligonucleotide
acacugccuugcuucccgc

SEQ ID NO: 3152143 - RNA, 19 nt, Artificial Sequence
  Description of Artificial Sequence: Synthetic oligonucleotide
gccaugauaacaauaaacu

SEQ ID NO: 3152144 - RNA, 19 nt, Artificial Sequence
  Description of Artificial Sequence: Synthetic oligonucleotide
cuguaagccaccccaauua

SEQ ID NO: 3152145 - RNA, 19 nt, Artificial Sequence
  Description of Artificial Sequence: Synthetic oligonucleotide
cgccaugauaacaauaaac

SEQ ID NO: 3152146 - RNA, 19 nt, Artificial Sequence
  Description of Artificial Sequence: Synthetic oligonucleotide
cuugcuucccgccaugaua

SEQ ID NO: 3152147 - RNA, 19 nt, Artificial Sequence
  Description of Artificial Sequence: Synthetic oligonucleotide
aaacuguaagccaccccaa

SEQ ID NO: 3152148 - RNA, 19 nt, Artificial Sequence
  Description of Artificial Sequence: Synthetic oligonucleotide
ucccgccaugauaacaaua

SEQ ID NO: 3152149 - RNA, 19 nt, Artificial Sequence
  Description of Artificial Sequence: Synthetic oligonucleotide
ccaugauaacaauaaacua

SEQ ID NO: 3152150 - RNA, 19 nt, Artificial Sequence
  Description of Artificial Sequence: Synthetic oligonucleotide
cacugccuugcuucccgcc

SEQ ID NO: 3152151 - RNA, 19 nt, Artificial Sequence
  Description of Artificial Sequence: Synthetic oligonucleotide
ugccuugcuucccgccaug

SEQ ID NO: 3152152 - RNA, 19 nt, Artificial Sequence
  Description of Artificial Sequence: Synthetic oligonucleotide
cccgccaugauaacaauaa

SEQ ID NO: 3152153 - RNA, 19 nt, Artificial Sequence
  Description of Artificial Sequence: Synthetic oligonucleotide
cugccugcacacugccuug

SEQ ID NO: 3152154 - RNA, 19 nt, Artificial Sequence
  Description of Artificial Sequence: Synthetic oligonucleotide
guaagccaccccaauuaaa

SEQ ID NO: 3152155 - RNA, 19 nt, Artificial Sequence
  Description of Artificial Sequence: Synthetic oligonucleotide
uucccgccaugauaacaau

SEQ ID NO: 3152156 - RNA, 19 nt, Artificial Sequence
  Description of Artificial Sequence: Synthetic oligonucleotide
ugcuucccgccaugauaac

SEQ ID NO: 3152157 - RNA, 19 nt, Artificial Sequence
  Description of Artificial Sequence: Synthetic oligonucleotide
caccccaauuaaauguuuu

SEQ ID NO: 3152158 - RNA, 19 nt, Artificial Sequence
  Description of Artificial Sequence: Synthetic oligonucleotide
gcuucccgccaugauaaca

SEQ ID NO: 3152159 - RNA, 19 nt, Artificial Sequence
  Description of Artificial Sequence: Synthetic oligonucleotide
gcacacugccuugcuuccc

SEQ ID NO: 3152160 - RNA, 19 nt, Artificial Sequence
  Description of Artificial Sequence: Synthetic oligonucleotide
ccgccaugauaacaauaaa

SEQ ID NO: 3152161 - RNA, 19 nt, Artificial Sequence
  Description of Artificial Sequence: Synthetic oligonucleotide
cugccuugcuucccgccau

SEQ ID NO: 3152162 - RNA, 19 nt, Artificial Sequence
  Description of Artificial Sequence: Synthetic oligonucleotide
gccaccccaauuaaauguu

SEQ ID NO: 3152163 - RNA, 19 nt, Artificial Sequence
  Description of Artificial Sequence: Synthetic oligonucleotide
gccuugcuucccgccauga

SEQ ID NO: 3152164 - RNA, 19 nt, Artificial Sequence
  Description of Artificial Sequence: Synthetic oligonucleotide
gucugccugcacacugccu

SEQ ID NO: 3152165 - RNA, 19 nt, Artificial Sequence
  Description of Artificial Sequence: Synthetic oligonucleotide
ccaccccaauuaaauguuu

SEQ ID NO: 3152166 - RNA, 19 nt, Artificial Sequence
  Description of Artificial Sequence: Synthetic oligonucleotide
ccuugcuucccgccaugau

SEQ ID NO: 3152167 - RNA, 19 nt, Artificial Sequence
  Description of Artificial Sequence: Synthetic oligonucleotide
ccaugucugccugcacacu

SEQ ID NO: 3152168 - RNA, 19 nt, Artificial Sequence
  Description of Artificial Sequence: Synthetic oligonucleotide
cugaaauucaauuuggucc

SEQ ID NO: 3152169 - RNA, 19 nt, Artificial Sequence
  Description of Artificial Sequence: Synthetic oligonucleotide
uucaauuugguccuggucu

SEQ ID NO: 3152170 - RNA, 19 nt, Artificial Sequence
  Description of Artificial Sequence: Synthetic oligonucleotide
ucucugaaauucaauuugg

SEQ ID NO: 3152171 - RNA, 19 nt, Artificial Sequence
  Description of Artificial Sequence: Synthetic oligonucleotide
acaacuaucaacaacaaaa

SEQ ID NO: 3152172 - RNA, 19 nt, Artificial Sequence
  Description of Artificial Sequence: Synthetic oligonucleotide
ugaaauucaauuugguccu

SEQ ID NO: 3152173 - RNA, 19 nt, Artificial Sequence
  Description of Artificial Sequence: Synthetic oligonucleotide
aucucugaaauucaauuug

SEQ ID NO: 3152174 - RNA, 19 nt, Artificial Sequence
  Description of Artificial Sequence: Synthetic oligonucleotide
aaucucugaaauucaauuu

SEQ ID NO: 3152175 - RNA, 19 nt, Artificial Sequence
  Description of Artificial Sequence: Synthetic oligonucleotide
ucugaaauucaauuugguc

SEQ ID NO: 3152176 - RNA, 19 nt, Artificial Sequence
  Description of Artificial Sequence: Synthetic oligonucleotide
uugguccuggucuacagag

SEQ ID NO: 3152177 - RNA, 19 nt, Artificial Sequence
  Description of Artificial Sequence: Synthetic oligonucleotide
auucaauuugguccugguc

SEQ ID NO: 3152178 - RNA, 19 nt, Artificial Sequence
  Description of Artificial Sequence: Synthetic oligonucleotide
aauucaauuugguccuggu

SEQ ID NO: 3152179 - RNA, 19 nt, Artificial Sequence
  Description of Artificial Sequence: Synthetic oligonucleotide
aacaacuaucaacaacaaa

SEQ ID NO: 3152180 - RNA, 19 nt, Artificial Sequence
  Description of Artificial Sequence: Synthetic oligonucleotide
auuugguccuggucuacag

SEQ ID NO: 3152181 - RNA, 19 nt, Artificial Sequence
  Description of Artificial Sequence: Synthetic oligonucleotide
gaaucucugaaauucaauu

SEQ ID NO: 3152182 - RNA, 19 nt, Artificial Sequence
  Description of Artificial Sequence: Synthetic oligonucleotide
uggaaucucugaaauucaa

SEQ ID NO: 3152183 - RNA, 19 nt, Artificial Sequence
  Description of Artificial Sequence: Synthetic oligonucleotide
gguggaaucucugaaauuc

SEQ ID NO: 3152184 - RNA, 19 nt, Artificial Sequence
  Description of Artificial Sequence: Synthetic oligonucleotide
uuugguccuggucuacaga

SEQ ID NO: 3152185 - RNA, 19 nt, Artificial Sequence
  Description of Artificial Sequence: Synthetic oligonucleotide
ucaauuugguccuggucua

SEQ ID NO: 3152186 - RNA, 19 nt, Artificial Sequence
  Description of Artificial Sequence: Synthetic oligonucleotide
agagugacuuccaggacag

SEQ ID NO: 3152187 - RNA, 19 nt, Artificial Sequence
  Description of Artificial Sequence: Synthetic oligonucleotide
aauuugguccuggucuaca

SEQ ID NO: 3152188 - RNA, 19 nt, Artificial Sequence
  Description of Artificial Sequence: Synthetic oligonucleotide
cagagugacuuccaggaca

SEQ ID NO: 3152189 - RNA, 19 nt, Artificial Sequence
  Description of Artificial Sequence: Synthetic oligonucleotide
gguccuggucuacagagug

SEQ ID NO: 3152190 - RNA, 19 nt, Artificial Sequence
  Description of Artificial Sequence: Synthetic oligonucleotide
ggaagaggcagguggaauc

SEQ ID NO: 3152191 - RNA, 19 nt, Artificial Sequence
  Description of Artificial Sequence: Synthetic oligonucleotide
ugguccuggucuacagagu

SEQ ID NO: 3152192 - RNA, 19 nt, Artificial Sequence
  Description of Artificial Sequence: Synthetic oligonucleotide
aggcagguggaaucucuga

SEQ ID NO: 3152193 - RNA, 19 nt, Artificial Sequence
  Description of Artificial Sequence: Synthetic oligonucleotide
gaggcagguggaaucucug

SEQ ID NO: 3152194 - RNA, 19 nt, Artificial Sequence
  Description of Artificial Sequence: Synthetic oligonucleotide
guggaaucucugaaauuca

SEQ ID NO: 3152195 - RNA, 19 nt, Artificial Sequence
  Description of Artificial Sequence: Synthetic oligonucleotide
agguggaaucucugaaauu

SEQ ID NO: 3152196 - RNA, 19 nt, Artificial Sequence
  Description of Artificial Sequence: Synthetic oligonucleotide
cucugaaauucaauuuggu

SEQ ID NO: 3152197 - RNA, 19 nt, Artificial Sequence
  Description of Artificial Sequence: Synthetic oligonucleotide
aggaagaggcagguggaau

SEQ ID NO: 3152198 - RNA, 19 nt, Artificial Sequence
  Description of Artificial Sequence: Synthetic oligonucleotide
caauuugguccuggucuac

SEQ ID NO: 3152199 - RNA, 19 nt, Artificial Sequence
  Description of Artificial Sequence: Synthetic oligonucleotide
ggcagguggaaucucugaa

SEQ ID NO: 3152200 - RNA, 19 nt, Artificial Sequence
  Description of Artificial Sequence: Synthetic oligonucleotide
cagguggaaucucugaaau

SEQ ID NO: 3152201 - RNA, 19 nt, Artificial Sequence
  Description of Artificial Sequence: Synthetic oligonucleotide
gacuuccaggacagcccag

SEQ ID NO: 3152202 - RNA, 19 nt, Artificial Sequence
  Description of Artificial Sequence: Synthetic oligonucleotide
ggaaucucugaaauucaau

SEQ ID NO: 3152203 - RNA, 19 nt, Artificial Sequence
  Description of Artificial Sequence: Synthetic oligonucleotide
ucgaagaugcucucggccc

SEQ ID NO: 3152204 - RNA, 19 nt, Artificial Sequence
  Description of Artificial Sequence: Synthetic oligonucleotide
gucgaagagucccugcucg

SEQ ID NO: 3152205 - RNA, 19 nt, Artificial Sequence
  Description of Artificial Sequence: Synthetic oligonucleotide
aagagucccugcucgauga

SEQ ID NO: 3152206 - RNA, 19 nt, Artificial Sequence
  Description of Artificial Sequence: Synthetic oligonucleotide
cuguccgugaacgaggugc

SEQ ID NO: 3152207 - RNA, 19 nt, Artificial Sequence
  Description of Artificial Sequence: Synthetic oligonucleotide
cucgcgauguccuccaggc

SEQ ID NO: 3152208 - RNA, 19 nt, Artificial Sequence
  Description of Artificial Sequence: Synthetic oligonucleotide
ugcucgaugaggccugacc

SEQ ID NO: 3152209 - RNA, 19 nt, Artificial Sequence
  Description of Artificial Sequence: Synthetic oligonucleotide
cucgaagaugcucucggcc

SEQ ID NO: 3152210 - RNA, 19 nt, Artificial Sequence
  Description of Artificial Sequence: Synthetic oligonucleotide
agucccugcucgaugaggc

SEQ ID NO: 3152211 - RNA, 19 nt, Artificial Sequence
  Description of Artificial Sequence: Synthetic oligonucleotide
gaugcucucggcccucgcg

SEQ ID NO: 3152212 - RNA, 19 nt, Artificial Sequence
  Description of Artificial Sequence: Synthetic oligonucleotide
gaagagucccugcucgaug

SEQ ID NO: 3152213 - RNA, 19 nt, Artificial Sequence
  Description of Artificial Sequence: Synthetic oligonucleotide
ugcgguuccgggcuguggc

SEQ ID NO: 3152214 - RNA, 19 nt, Artificial Sequence
  Description of Artificial Sequence: Synthetic oligonucleotide
cucgaugaggccugacccg

SEQ ID NO: 3152215 - RNA, 19 nt, Artificial Sequence
  Description of Artificial Sequence: Synthetic oligonucleotide
ucgaugaggccugacccgg

SEQ ID NO: 3152216 - RNA, 19 nt, Artificial Sequence
  Description of Artificial Sequence: Synthetic oligonucleotide
uccgugaacgaggugcugc

SEQ ID NO: 3152217 - RNA, 19 nt, Artificial Sequence
  Description of Artificial Sequence: Synthetic oligonucleotide
uguccgugaacgaggugcu

SEQ ID NO: 3152218 - RNA, 19 nt, Artificial Sequence
  Description of Artificial Sequence: Synthetic oligonucleotide
uccaggcucgggucgaaga

SEQ ID NO: 3152219 - RNA, 19 nt, Artificial Sequence
  Description of Artificial Sequence: Synthetic oligonucleotide
gagucccugcucgaugagg

SEQ ID NO: 3152220 - RNA, 19 nt, Artificial Sequence
  Description of Artificial Sequence: Synthetic oligonucleotide
aagaugcucucggcccucg

SEQ ID NO: 3152221 - RNA, 19 nt, Artificial Sequence
  Description of Artificial Sequence: Synthetic oligonucleotide
agaugcucucggcccucgc

SEQ ID NO: 3152222 - RNA, 19 nt, Artificial Sequence
  Description of Artificial Sequence: Synthetic oligonucleotide
ucgaagagucccugcucga

SEQ ID NO: 3152223 - RNA, 19 nt, Artificial Sequence
  Description of Artificial Sequence: Synthetic oligonucleotide
augcucucggcccucgcga

SEQ ID NO: 3152224 - RNA, 19 nt, Artificial Sequence
  Description of Artificial Sequence: Synthetic oligonucleotide
ucggcccucgcgauguccu

SEQ ID NO: 3152225 - RNA, 19 nt, Artificial Sequence
  Description of Artificial Sequence: Synthetic oligonucleotide
aggcucgggucgaagaguc

SEQ ID NO: 3152226 - RNA, 19 nt, Artificial Sequence
  Description of Artificial Sequence: Synthetic oligonucleotide
uguggccucgaagaugcuc

SEQ ID NO: 3152227 - RNA, 19 nt, Artificial Sequence
  Description of Artificial Sequence: Synthetic oligonucleotide
acccggcuguccgugaacg

SEQ ID NO: 3152228 - RNA, 19 nt, Artificial Sequence
  Description of Artificial Sequence: Synthetic oligonucleotide
ucccugcucgaugaggccu

SEQ ID NO: 3152229 - RNA, 19 nt, Artificial Sequence
  Description of Artificial Sequence: Synthetic oligonucleotide
augaggccugacccggcug

SEQ ID NO: 3152230 - RNA, 19 nt, Artificial Sequence
  Description of Artificial Sequence: Synthetic oligonucleotide
aggccugacccggcugucc

SEQ ID NO: 3152231 - RNA, 19 nt, Artificial Sequence
  Description of Artificial Sequence: Synthetic oligonucleotide
ugacccggcuguccgugaa

SEQ ID NO: 3152232 - RNA, 19 nt, Artificial Sequence
  Description of Artificial Sequence: Synthetic oligonucleotide
ucgggucgaagagucccug

SEQ ID NO: 3152233 - RNA, 19 nt, Artificial Sequence
  Description of Artificial Sequence: Synthetic oligonucleotide
ucgcgauguccuccaggcu

SEQ ID NO: 3152234 - RNA, 19 nt, Artificial Sequence
  Description of Artificial Sequence: Synthetic oligonucleotide
ggccugacccggcuguccg

SEQ ID NO: 3152235 - RNA, 19 nt, Artificial Sequence
  Description of Artificial Sequence: Synthetic oligonucleotide
gcucgggucgaagaguccc

SEQ ID NO: 3152236 - RNA, 19 nt, Artificial Sequence
  Description of Artificial Sequence: Synthetic oligonucleotide
gaugaggccugacccggcu

SEQ ID NO: 3152237 - RNA, 19 nt, Artificial Sequence
  Description of Artificial Sequence: Synthetic oligonucleotide
gucccugcucgaugaggcc

SEQ ID NO: 3152238 - RNA, 19 nt, Artificial Sequence
  Description of Artificial Sequence: Synthetic oligonucleotide
gaagaugcucucggcccuc

SEQ ID NO: 3152239 - RNA, 19 nt, Artificial Sequence
  Description of Artificial Sequence: Synthetic oligonucleotide
ggucgaagagucccugcuc

SEQ ID NO: 3152240 - RNA, 19 nt, Artificial Sequence
  Description of Artificial Sequence: Synthetic oligonucleotide
ccaggcucgggucgaagag

SEQ ID NO: 3152241 - RNA, 19 nt, Artificial Sequence
  Description of Artificial Sequence: Synthetic oligonucleotide
ugcucucggcccucgcgau

SEQ ID NO: 3152242 - RNA, 19 nt, Artificial Sequence
  Description of Artificial Sequence: Synthetic oligonucleotide
gaugcgguuccgggcugug

SEQ ID NO: 3152243 - RNA, 19 nt, Artificial Sequence
  Description of Artificial Sequence: Synthetic oligonucleotide
gacccggcuguccgugaac

SEQ ID NO: 3152244 - RNA, 19 nt, Artificial Sequence
  Description of Artificial Sequence: Synthetic oligonucleotide
augcgguuccgggcugugg

SEQ ID NO: 3152245 - RNA, 19 nt, Artificial Sequence
  Description of Artificial Sequence: Synthetic oligonucleotide
uccuccaggcucgggucga

SEQ ID NO: 3152246 - RNA, 19 nt, Artificial Sequence
  Description of Artificial Sequence: Synthetic oligonucleotide
cgcgauguccuccaggcuc

SEQ ID NO: 3152247 - RNA, 19 nt, Artificial Sequence
  Description of Artificial Sequence: Synthetic oligonucleotide
guuccgggcuguggccucg

SEQ ID NO: 3152248 - RNA, 19 nt, Artificial Sequence
  Description of Artificial Sequence: Synthetic oligonucleotide
ccucgcgauguccuccagg

SEQ ID NO: 3152249 - RNA, 19 nt, Artificial Sequence
  Description of Artificial Sequence: Synthetic oligonucleotide
cucggcccucgcgaugucc

SEQ ID NO: 3152250 - RNA, 19 nt, Artificial Sequence
  Description of Artificial Sequence: Synthetic oligonucleotide
ggccucgaagaugcucucg

SEQ ID NO: 3152251 - RNA, 19 nt, Artificial Sequence
  Description of Artificial Sequence: Synthetic oligonucleotide
cggcuguccgugaacgagg

SEQ ID NO: 3152252 - RNA, 19 nt, Artificial Sequence
  Description of Artificial Sequence: Synthetic oligonucleotide
ccggcuguccgugaacgag

SEQ ID NO: 3152253 - RNA, 19 nt, Artificial Sequence
  Description of Artificial Sequence: Synthetic oligonucleotide
gggucgaagagucccugcu

SEQ ID NO: 3152254 - RNA, 19 nt, Artificial Sequence
  Description of Artificial Sequence: Synthetic oligonucleotide
cuccaggcucgggucgaag

SEQ ID NO: 3152255 - RNA, 19 nt, Artificial Sequence
  Description of Artificial Sequence: Synthetic oligonucleotide
cccugcucgaugaggccug

SEQ ID NO: 3152256 - RNA, 19 nt, Artificial Sequence
  Description of Artificial Sequence: Synthetic oligonucleotide
gcgguuccgggcuguggcc

SEQ ID NO: 3152257 - RNA, 19 nt, Artificial Sequence
  Description of Artificial Sequence: Synthetic oligonucleotide
guccgugaacgaggugcug

SEQ ID NO: 3152258 - RNA, 19 nt, Artificial Sequence
  Description of Artificial Sequence: Synthetic oligonucleotide
cucgggucgaagagucccu

SEQ ID NO: 3152259 - RNA, 19 nt, Artificial Sequence
  Description of Artificial Sequence: Synthetic oligonucleotide
ggcccucgcgauguccucc

SEQ ID NO: 3152260 - RNA, 19 nt, Artificial Sequence
  Description of Artificial Sequence: Synthetic oligonucleotide
ucucggcccucgcgauguc

SEQ ID NO: 3152261 - RNA, 19 nt, Artificial Sequence
  Description of Artificial Sequence: Synthetic oligonucleotide
uccgggcuguggccucgaa

SEQ ID NO: 3152262 - RNA, 19 nt, Artificial Sequence
  Description of Artificial Sequence: Synthetic oligonucleotide
ccgggcuguggccucgaag

SEQ ID NO: 3152263 - RNA, 19 nt, Artificial Sequence
  Description of Artificial Sequence: Synthetic oligonucleotide
gaggccugacccggcuguc

SEQ ID NO: 3152264 - RNA, 19 nt, Artificial Sequence
  Description of Artificial Sequence: Synthetic oligonucleotide
cucucggcccucgcgaugu

SEQ ID NO: 3152265 - RNA, 19 nt, Artificial Sequence
  Description of Artificial Sequence: Synthetic oligonucleotide
gcuguccgugaacgaggug

SEQ ID NO: 3152266 - RNA, 19 nt, Artificial Sequence
  Description of Artificial Sequence: Synthetic oligonucleotide
gguuccgggcuguggccuc

SEQ ID NO: 3152267 - RNA, 19 nt, Artificial Sequence
  Description of Artificial Sequence: Synthetic oligonucleotide
cugacccggcuguccguga

SEQ ID NO: 3152268 - RNA, 19 nt, Artificial Sequence
  Description of Artificial Sequence: Synthetic oligonucleotide
gcucucggcccucgcgaug

SEQ ID NO: 3152269 - RNA, 19 nt, Artificial Sequence
  Description of Artificial Sequence: Synthetic oligonucleotide
ccugacccggcuguccgug

SEQ ID NO: 3152270 - RNA, 19 nt, Artificial Sequence
  Description of Artificial Sequence: Synthetic oligonucleotide
cugcucgaugaggccugac

SEQ ID NO: 3152271 - RNA, 19 nt, Artificial Sequence
  Description of Artificial Sequence: Synthetic oligonucleotide
uuccgggcuguggccucga

SEQ ID NO: 3152272 - RNA, 19 nt, Artificial Sequence
  Description of Artificial Sequence: Synthetic oligonucleotide
cgggucgaagagucccugc

SEQ ID NO: 3152273 - RNA, 19 nt, Artificial Sequence
  Description of Artificial Sequence: Synthetic oligonucleotide
ggcucgggucgaagagucc

SEQ ID NO: 3152274 - RNA, 19 nt, Artificial Sequence
  Description of Artificial Sequence: Synthetic oligonucleotide
caggcucgggucgaagagu

SEQ ID NO: 3152275 - RNA, 19 nt, Artificial Sequence
  Description of Artificial Sequence: Synthetic oligonucleotide
cgaugaggccugacccggc

SEQ ID NO: 3152276 - RNA, 19 nt, Artificial Sequence
  Description of Artificial Sequence: Synthetic oligonucleotide
gcccucgcgauguccucca

SEQ ID NO: 3152277 - RNA, 19 nt, Artificial Sequence
  Description of Artificial Sequence: Synthetic oligonucleotide
ggcuguccgugaacgaggu

SEQ ID NO: 3152278 - RNA, 19 nt, Artificial Sequence
  Description of Artificial Sequence: Synthetic oligonucleotide
cgaagaugcucucggcccu

SEQ ID NO: 3152279 - RNA, 19 nt, Artificial Sequence
  Description of Artificial Sequence: Synthetic oligonucleotide
gggcuguggccucgaagau

SEQ ID NO: 3152280 - RNA, 19 nt, Artificial Sequence
  Description of Artificial Sequence: Synthetic oligonucleotide
cccucgcgauguccuccag

SEQ ID NO: 3152281 - RNA, 19 nt, Artificial Sequence
  Description of Artificial Sequence: Synthetic oligonucleotide
cccggcuguccgugaacga

SEQ ID NO: 3152282 - RNA, 19 nt, Artificial Sequence
  Description of Artificial Sequence: Synthetic oligonucleotide
cgauguccuccaggcucgg

SEQ ID NO: 3152283 - RNA, 19 nt, Artificial Sequence
  Description of Artificial Sequence: Synthetic oligonucleotide
cuguggccucgaagaugcu

SEQ ID NO: 3152284 - RNA, 19 nt, Artificial Sequence
  Description of Artificial Sequence: Synthetic oligonucleotide
gccugacccggcuguccgu

SEQ ID NO: 3152285 - RNA, 19 nt, Artificial Sequence
  Description of Artificial Sequence: Synthetic oligonucleotide
ccugcucgaugaggccuga

SEQ ID NO: 3152286 - RNA, 19 nt, Artificial Sequence
  Description of Artificial Sequence: Synthetic oligonucleotide
cgaagagucccugcucgau

SEQ ID NO: 3152287 - RNA, 19 nt, Artificial Sequence
  Description of Artificial Sequence: Synthetic oligonucleotide
cggcccucgcgauguccuc

SEQ ID NO: 3152288 - RNA, 19 nt, Artificial Sequence
  Description of Artificial Sequence: Synthetic oligonucleotide
ccuccaggcucgggucgaa

SEQ ID NO: 3152289 - RNA, 19 nt, Artificial Sequence
  Description of Artificial Sequence: Synthetic oligonucleotide
cgguuccgggcuguggccu

SEQ ID NO: 3152290 - RNA, 19 nt, Artificial Sequence
  Description of Artificial Sequence: Synthetic oligonucleotide
aauccuagcauuuagaagg

SEQ ID NO: 3152291 - RNA, 19 nt, Artificial Sequence
  Description of Artificial Sequence: Synthetic oligonucleotide
uuauguaaagaguuccggg

SEQ ID NO: 3152292 - RNA, 19 nt, Artificial Sequence
  Description of Artificial Sequence: Synthetic oligonucleotide
uauguaaagaguuccgggc

SEQ ID NO: 3152293 - RNA, 19 nt, Artificial Sequence
  Description of Artificial Sequence: Synthetic oligonucleotide
auguaaagaguuccgggcc

SEQ ID NO: 3152294 - RNA, 19 nt, Artificial Sequence
  Description of Artificial Sequence: Synthetic oligonucleotide
uuuauguaaagaguuccgg

SEQ ID NO: 3152295 - RNA, 19 nt, Artificial Sequence
  Description of Artificial Sequence: Synthetic oligonucleotide
accuuguuuauguaaagag

SEQ ID NO: 3152296 - RNA, 19 nt, Artificial Sequence
  Description of Artificial Sequence: Synthetic oligonucleotide
auuuagaaggcagaggcag

SEQ ID NO: 3152297 - RNA, 19 nt, Artificial Sequence
  Description of Artificial Sequence: Synthetic oligonucleotide
uuaauccuagcauuuagaa

SEQ ID NO: 3152298 - RNA, 19 nt, Artificial Sequence
  Description of Artificial Sequence: Synthetic oligonucleotide
uuuaaggccaaccuuguuu

SEQ ID NO: 3152299 - RNA, 19 nt, Artificial Sequence
  Description of Artificial Sequence: Synthetic oligonucleotide
uuuagaaggcagaggcagg

SEQ ID NO: 3152300 - RNA, 19 nt, Artificial Sequence
  Description of Artificial Sequence: Synthetic oligonucleotide
aaagaguuccgggccagcc

SEQ ID NO: 3152301 - RNA, 19 nt, Artificial Sequence
  Description of Artificial Sequence: Synthetic oligonucleotide
gcauuuagaaggcagaggc

SEQ ID NO: 3152302 - RNA, 19 nt, Artificial Sequence
  Description of Artificial Sequence: Synthetic oligonucleotide
uguaaagaguuccgggcca

SEQ ID NO: 3152303 - RNA, 19 nt, Artificial Sequence
  Description of Artificial Sequence: Synthetic oligonucleotide
guuuauguaaagaguuccg

SEQ ID NO: 3152304 - RNA, 19 nt, Artificial Sequence
  Description of Artificial Sequence: Synthetic oligonucleotide
uuaaggccaaccuuguuua

SEQ ID NO: 3152305 - RNA, 19 nt, Artificial Sequence
  Description of Artificial Sequence: Synthetic oligonucleotide
uuguuuauguaaagaguuc

SEQ ID NO: 3152306 - RNA, 19 nt, Artificial Sequence
  Description of Artificial Sequence: Synthetic oligonucleotide
aaccuuguuuauguaaaga

SEQ ID NO: 3152307 - RNA, 19 nt, Artificial Sequence
  Description of Artificial Sequence: Synthetic oligonucleotide
uacauugcucagcugucug

SEQ ID NO: 3152308 - RNA, 19 nt, Artificial Sequence
  Description of Artificial Sequence: Synthetic oligonucleotide
agggcuacauugcucagcu

SEQ ID NO: 3152309 - RNA, 19 nt, Artificial Sequence
  Description of Artificial Sequence: Synthetic oligonucleotide
cuuguuuauguaaagaguu

SEQ ID NO: 3152310 - RNA, 19 nt, Artificial Sequence
  Description of Artificial Sequence: Synthetic oligonucleotide
aggccaaccuuguuuaugu

SEQ ID NO: 3152311 - RNA, 19 nt, Artificial Sequence
  Description of Artificial Sequence: Synthetic oligonucleotide
uuagaaggcagaggcaggu

SEQ ID NO: 3152312 - RNA, 19 nt, Artificial Sequence
  Description of Artificial Sequence: Synthetic oligonucleotide
cuagcauuuagaaggcaga

SEQ ID NO: 3152313 - RNA, 19 nt, Artificial Sequence
  Description of Artificial Sequence: Synthetic oligonucleotide
aaggccaaccuuguuuaug

SEQ ID NO: 3152314 - RNA, 19 nt, Artificial Sequence
  Description of Artificial Sequence: Synthetic oligonucleotide
caaccuuguuuauguaaag

SEQ ID NO: 3152315 - RNA, 19 nt, Artificial Sequence
  Description of Artificial Sequence: Synthetic oligonucleotide
ccuagcauuuagaaggcag

SEQ ID NO: 3152316 - RNA, 19 nt, Artificial Sequence
  Description of Artificial Sequence: Synthetic oligonucleotide
auccuagcauuuagaaggc

SEQ ID NO: 3152317 - RNA, 19 nt, Artificial Sequence
  Description of Artificial Sequence: Synthetic oligonucleotide
acauugcucagcugucugu

SEQ ID NO: 3152318 - RNA, 19 nt, Artificial Sequence
  Description of Artificial Sequence: Synthetic oligonucleotide
uugcucagcugucugucuc

SEQ ID NO: 3152319 - RNA, 19 nt, Artificial Sequence
  Description of Artificial Sequence: Synthetic oligonucleotide
cauuuagaaggcagaggca

SEQ ID NO: 3152320 - RNA, 19 nt, Artificial Sequence
  Description of Artificial Sequence: Synthetic oligonucleotide
auugcucagcugucugucu

SEQ ID NO: 3152321 - RNA, 19 nt, Artificial Sequence
  Description of Artificial Sequence: Synthetic oligonucleotide
guaaagaguuccgggccag

SEQ ID NO: 3152322 - RNA, 19 nt, Artificial Sequence
  Description of Artificial Sequence: Synthetic oligonucleotide
aguuuaaggccaaccuugu

SEQ ID NO: 3152323 - RNA, 19 nt, Artificial Sequence
  Description of Artificial Sequence: Synthetic oligonucleotide
ugcucagcugucugucucu

SEQ ID NO: 3152324 - RNA, 19 nt, Artificial Sequence
  Description of Artificial Sequence: Synthetic oligonucleotide
cauugcucagcugucuguc

SEQ ID NO: 3152325 - RNA, 19 nt, Artificial Sequence
  Description of Artificial Sequence: Synthetic oligonucleotide
ggcuacauugcucagcugu

SEQ ID NO: 3152326 - RNA, 19 nt, Artificial Sequence
  Description of Artificial Sequence: Synthetic oligonucleotide
gccagggcuacauugcuca

SEQ ID NO: 3152327 - RNA, 19 nt, Artificial Sequence
  Description of Artificial Sequence: Synthetic oligonucleotide
cagggcuacauugcucagc

SEQ ID NO: 3152328 - RNA, 19 nt, Artificial Sequence
  Description of Artificial Sequence: Synthetic oligonucleotide
uccuagcauuuagaaggca

SEQ ID NO: 3152329 - RNA, 19 nt, Artificial Sequence
  Description of Artificial Sequence: Synthetic oligonucleotide
ccaaccuuguuuauguaaa

SEQ ID NO: 3152330 - RNA, 19 nt, Artificial Sequence
  Description of Artificial Sequence: Synthetic oligonucleotide
uaaggccaaccuuguuuau

SEQ ID NO: 3152331 - RNA, 19 nt, Artificial Sequence
  Description of Artificial Sequence: Synthetic oligonucleotide
gccaaccuuguuuauguaa

SEQ ID NO: 3152332 - RNA, 19 nt, Artificial Sequence
  Description of Artificial Sequence: Synthetic oligonucleotide
guggcucugugaguuuaag

SEQ ID NO: 3152333 - RNA, 19 nt, Artificial Sequence
  Description of Artificial Sequence: Synthetic oligonucleotide
agccagggcuacauugcuc

SEQ ID NO: 3152334 - RNA, 19 nt, Artificial Sequence
  Description of Artificial Sequence: Synthetic oligonucleotide
ccuuguuuauguaaagagu

SEQ ID NO: 3152335 - RNA, 19 nt, Artificial Sequence
  Description of Artificial Sequence: Synthetic oligonucleotide
gcuacauugcucagcuguc

SEQ ID NO: 3152336 - RNA, 19 nt, Artificial Sequence
  Description of Artificial Sequence: Synthetic oligonucleotide
agguggcucugugaguuua

SEQ ID NO: 3152337 - RNA, 19 nt, Artificial Sequence
  Description of Artificial Sequence: Synthetic oligonucleotide
cuacauugcucagcugucu

SEQ ID NO: 3152338 - RNA, 19 nt, Artificial Sequence
  Description of Artificial Sequence: Synthetic oligonucleotide
guuuaaggccaaccuuguu

SEQ ID NO: 3152339 - RNA, 19 nt, Artificial Sequence
  Description of Artificial Sequence: Synthetic oligonucleotide
ccagggcuacauugcucag

SEQ ID NO: 3152340 - RNA, 19 nt, Artificial Sequence
  Description of Artificial Sequence: Synthetic oligonucleotide
gggcuacauugcucagcug

SEQ ID NO: 3152341 - RNA, 19 nt, Artificial Sequence
  Description of Artificial Sequence: Synthetic oligonucleotide
cagccagggcuacauugcu

SEQ ID NO: 3152342 - RNA, 19 nt, Artificial Sequence
  Description of Artificial Sequence: Synthetic oligonucleotide
gcagguggcucugugaguu

SEQ ID NO: 3152343 - RNA, 19 nt, Artificial Sequence
  Description of Artificial Sequence: Synthetic oligonucleotide
cucagcugucugucucucu

SEQ ID NO: 3152344 - RNA, 19 nt, Artificial Sequence
  Description of Artificial Sequence: Synthetic oligonucleotide
ggccaaccuuguuuaugua

SEQ ID NO: 3152345 - RNA, 19 nt, Artificial Sequence
  Description of Artificial Sequence: Synthetic oligonucleotide
gguggcucugugaguuuaa

SEQ ID NO: 3152346 - RNA, 19 nt, Artificial Sequence
  Description of Artificial Sequence: Synthetic oligonucleotide
cagguggcucugugaguuu

SEQ ID NO: 3152347 - RNA, 19 nt, Artificial Sequence
  Description of Artificial Sequence: Synthetic oligonucleotide
uucuaagggaugaagauga

SEQ ID NO: 3152348 - RNA, 19 nt, Artificial Sequence
  Description of Artificial Sequence: Synthetic oligonucleotide
uaagggaugaagaugagaa

SEQ ID NO: 3152349 - RNA, 19 nt, Artificial Sequence
  Description of Artificial Sequence: Synthetic oligonucleotide
uuugauguuuucuaaggga

SEQ ID NO: 3152350 - RNA, 19 nt, Artificial Sequence
  Description of Artificial Sequence: Synthetic oligonucleotide
ugaacuguaacaccugcca

SEQ ID NO: 3152351 - RNA, 19 nt, Artificial Sequence
  Description of Artificial Sequence: Synthetic oligonucleotide
uguaacaccugccacacuc

SEQ ID NO: 3152352 - RNA, 19 nt, Artificial Sequence
  Description of Artificial Sequence: Synthetic oligonucleotide
uccagcaugaacuguaaca

SEQ ID NO: 3152353 - RNA, 19 nt, Artificial Sequence
  Description of Artificial Sequence: Synthetic oligonucleotide
aacuguaacaccugccaca

SEQ ID NO: 3152354 - RNA, 19 nt, Artificial Sequence
  Description of Artificial Sequence: Synthetic oligonucleotide
aguguccucacagugauuc

SEQ ID NO: 3152355 - RNA, 19 nt, Artificial Sequence
  Description of Artificial Sequence: Synthetic oligonucleotide
uugauguuuucuaagggau

SEQ ID NO: 3152356 - RNA, 19 nt, Artificial Sequence
  Description of Artificial Sequence: Synthetic oligonucleotide
aaggaguguccucacagug

SEQ ID NO: 3152357 - RNA, 19 nt, Artificial Sequence
  Description of Artificial Sequence: Synthetic oligonucleotide
guaaggaguguccucacag

SEQ ID NO: 3152358 - RNA, 19 nt, Artificial Sequence
  Description of Artificial Sequence: Synthetic oligonucleotide
uuucuaagggaugaagaug

SEQ ID NO: 3152359 - RNA, 19 nt, Artificial Sequence
  Description of Artificial Sequence: Synthetic oligonucleotide
ugauguuuucuaagggaug

SEQ ID NO: 3152360 - RNA, 19 nt, Artificial Sequence
  Description of Artificial Sequence: Synthetic oligonucleotide
acuguaacaccugccacac

SEQ ID NO: 3152361 - RNA, 19 nt, Artificial Sequence
  Description of Artificial Sequence: Synthetic oligonucleotide
ugcacacuuguaaggagug

SEQ ID NO: 3152362 - RNA, 19 nt, Artificial Sequence
  Description of Artificial Sequence: Synthetic oligonucleotide
acuuguaaggaguguccuc

SEQ ID NO: 3152363 - RNA, 19 nt, Artificial Sequence
  Description of Artificial Sequence: Synthetic oligonucleotide
auuccuuugauguuuucua

SEQ ID NO: 3152364 - RNA, 19 nt, Artificial Sequence
  Description of Artificial Sequence: Synthetic oligonucleotide
ucugcacacuuguaaggag

SEQ ID NO: 3152365 - RNA, 19 nt, Artificial Sequence
  Description of Artificial Sequence: Synthetic oligonucleotide
acacuuguaaggagugucc

SEQ ID NO: 3152366 - RNA, 19 nt, Artificial Sequence
  Description of Artificial Sequence: Synthetic oligonucleotide
agcaugaacuguaacaccu

SEQ ID NO: 3152367 - RNA, 19 nt, Artificial Sequence
  Description of Artificial Sequence: Synthetic oligonucleotide
aacaccugccacacucugc

SEQ ID NO: 3152368 - RNA, 19 nt, Artificial Sequence
  Description of Artificial Sequence: Synthetic oligonucleotide
cacucugcacacuuguaag

SEQ ID NO: 3152369 - RNA, 19 nt, Artificial Sequence
  Description of Artificial Sequence: Synthetic oligonucleotide
agggaugaagaugagaaaa

SEQ ID NO: 3152370 - RNA, 19 nt, Artificial Sequence
  Description of Artificial Sequence: Synthetic oligonucleotide
ucuaagggaugaagaugag

SEQ ID NO: 3152371 - RNA, 19 nt, Artificial Sequence
  Description of Artificial Sequence: Synthetic oligonucleotide
uguaaggaguguccucaca

SEQ ID NO: 3152372 - RNA, 19 nt, Artificial Sequence
  Description of Artificial Sequence: Synthetic oligonucleotide
acaccugccacacucugca

SEQ ID NO: 3152373 - RNA, 19 nt, Artificial Sequence
  Description of Artificial Sequence: Synthetic oligonucleotide
cacagugauuccuuugaug

SEQ ID NO: 3152374 - RNA, 19 nt, Artificial Sequence
  Description of Artificial Sequence: Synthetic oligonucleotide
aagggaugaagaugagaaa

SEQ ID NO: 3152375 - RNA, 19 nt, Artificial Sequence
  Description of Artificial Sequence: Synthetic oligonucleotide
gaacuguaacaccugccac

SEQ ID NO: 3152376 - RNA, 19 nt, Artificial Sequence
  Description of Artificial Sequence: Synthetic oligonucleotide
cuuguaaggaguguccuca

SEQ ID NO: 3152377 - RNA, 19 nt, Artificial Sequence
  Description of Artificial Sequence: Synthetic oligonucleotide
uaacaccugccacacucug

SEQ ID NO: 3152378 - RNA, 19 nt, Artificial Sequence
  Description of Artificial Sequence: Synthetic oligonucleotide
agugauuccuuugauguuu

SEQ ID NO: 3152379 - RNA, 19 nt, Artificial Sequence
  Description of Artificial Sequence: Synthetic oligonucleotide
cagcaugaacuguaacacc

SEQ ID NO: 3152380 - RNA, 19 nt, Artificial Sequence
  Description of Artificial Sequence: Synthetic oligonucleotide
cucacagugauuccuuuga

SEQ ID NO: 3152381 - RNA, 19 nt, Artificial Sequence
  Description of Artificial Sequence: Synthetic oligonucleotide
uguccucacagugauuccu

SEQ ID NO: 3152382 - RNA, 19 nt, Artificial Sequence
  Description of Artificial Sequence: Synthetic oligonucleotide
ucuccagcaugaacuguaa

SEQ ID NO: 3152383 - RNA, 19 nt, Artificial Sequence
  Description of Artificial Sequence: Synthetic oligonucleotide
ccagcaugaacuguaacac

SEQ ID NO: 3152384 - RNA, 19 nt, Artificial Sequence
  Description of Artificial Sequence: Synthetic oligonucleotide
uuguaaggaguguccucac

SEQ ID NO: 3152385 - RNA, 19 nt, Artificial Sequence
  Description of Artificial Sequence: Synthetic oligonucleotide
cuaagggaugaagaugaga

SEQ ID NO: 3152386 - RNA, 19 nt, Artificial Sequence
  Description of Artificial Sequence: Synthetic oligonucleotide
aggaguguccucacaguga

SEQ ID NO: 3152387 - RNA, 19 nt, Artificial Sequence
  Description of Artificial Sequence: Synthetic oligonucleotide
ugauuccuuugauguuuuc

SEQ ID NO: 3152388 - RNA, 19 nt, Artificial Sequence
  Description of Artificial Sequence: Synthetic oligonucleotide
cuccagcaugaacuguaac

SEQ ID NO: 3152389 - RNA, 19 nt, Artificial Sequence
  Description of Artificial Sequence: Synthetic oligonucleotide
cugcacacuuguaaggagu

SEQ ID NO: 3152390 - RNA, 19 nt, Artificial Sequence
  Description of Artificial Sequence: Synthetic oligonucleotide
uccucacagugauuccuuu

SEQ ID NO: 3152391 - RNA, 19 nt, Artificial Sequence
  Description of Artificial Sequence: Synthetic oligonucleotide
ccucacagugauuccuuug

SEQ ID NO: 3152392 - RNA, 19 nt, Artificial Sequence
  Description of Artificial Sequence: Synthetic oligonucleotide
gcaugaacuguaacaccug

SEQ ID NO: 3152393 - RNA, 19 nt, Artificial Sequence
  Description of Artificial Sequence: Synthetic oligonucleotide
ggaguguccucacagugau

SEQ ID NO: 3152394 - RNA, 19 nt, Artificial Sequence
  Description of Artificial Sequence: Synthetic oligonucleotide
guaacaccugccacacucu

SEQ ID NO: 3152395 - RNA, 19 nt, Artificial Sequence
  Description of Artificial Sequence: Synthetic oligonucleotide
cacuuguaaggaguguccu

SEQ ID NO: 3152396 - RNA, 19 nt, Artificial Sequence
  Description of Artificial Sequence: Synthetic oligonucleotide
caccugccacacucugcac

SEQ ID NO: 3152397 - RNA, 19 nt, Artificial Sequence
  Description of Artificial Sequence: Synthetic oligonucleotide
guccucacagugauuccuu

SEQ ID NO: 3152398 - RNA, 19 nt, Artificial Sequence
  Description of Artificial Sequence: Synthetic oligonucleotide
cuguaacaccugccacacu

SEQ ID NO: 3152399 - RNA, 19 nt, Artificial Sequence
  Description of Artificial Sequence: Synthetic oligonucleotide
gaguguccucacagugauu

SEQ ID NO: 3152400 - DNA, 17 bp, Artificial Sequence
  Description of Artificial Sequence: Synthetic oligonucleotide
ggagcagctcggaggcg

SEQ ID NO: 3152401 - DNA, 21 bp, Artificial Sequence
  Description of Artificial Sequence: Synthetic oligonucleotide
aaaaggcccctgtcttcatga

SEQ ID NO: 3152402 - DNA, 21 bp, Artificial Sequence
  Description of Artificial Sequence: Synthetic oligonucleotide
cgggcccaccagctctgagca

SEQ ID NO: 3152403 - DNA, 20 bp, Artificial Sequence
  Description of Artificial Sequence: Synthetic oligonucleotide
cctcctaggcaggactgtga

SEQ ID NO: 3152404 - DNA, 20 bp, Artificial Sequence
  Description of Artificial Sequence: Synthetic oligonucleotide
ccaagatgctgttgggttct

SEQ ID NO: 3152405 - DNA, 20 bp, Artificial Sequence
  Description of Artificial Sequence: Synthetic oligonucleotide
tcaggaacaagagacccagg

SEQ ID NO: 3152406 - DNA, 20 bp, Artificial Sequence
  Description of Artificial Sequence: Synthetic oligonucleotide
tctgtctgtggctgacttgg

SEQ ID NO: 3152407 - DNA, 20 bp, Artificial Sequence
  Description of Artificial Sequence: Synthetic oligonucleotide
tcacaacatcggagattcca

SEQ ID NO: 3152408 - DNA, 20 bp, Artificial Sequence
  Description of Artificial Sequence: Synthetic oligonucleotide
tgaagaatcttaggcgggtg

SEQ ID NO: 3152409 - DNA, 20 bp, Artificial Sequence
  Description of Artificial Sequence: Synthetic oligonucleotide
tggctacagcaacagagtgg

SEQ ID NO: 3152410 - DNA, 20 bp, Artificial Sequence
  Description of Artificial Sequence: Synthetic oligonucleotide
gtgagggagatgatcggtgt

SEQ ID NO: 3152411 - DNA, 20 bp, Artificial Sequence
  Description of Artificial Sequence: Synthetic oligonucleotide
agtccctgtccaataacccc

SEQ ID NO: 3152412 - RNA, 19 nt, Artificial Sequence
  Description of Artificial Sequence: Synthetic oligonucleotide
acagaggaggucuuucgaa

SEQ ID NO: 3152413 - RNA, 19 nt, Artificial Sequence
  Description of Artificial Sequence: Synthetic oligonucleotide
uucgaaagaccuccucugu

SEQ ID NO: 3152414 - RNA, 19 nt, Artificial Sequence
  Description of Artificial Sequence: Synthetic oligonucleotide
gucuuucgaagcuauguuu

SEQ ID NO: 3152415 - RNA, 19 nt, Artificial Sequence
  Description of Artificial Sequence: Synthetic oligonucleotide
aaacauagcuucgaaagac

SEQ ID NO: 3152416 - RNA, 19 nt, Artificial Sequence
  Description of Artificial Sequence: Synthetic oligonucleotide
uuuccaucuccaccaucag

SEQ ID NO: 3152417 - RNA, 19 nt, Artificial Sequence
  Description of Artificial Sequence: Synthetic oligonucleotide
cugaugguggagauggaaa

SEQ ID NO: 3152418 - RNA, 19 nt, Artificial Sequence
  Description of Artificial Sequence: Synthetic oligonucleotide
aucuccaccaucaggaaca

SEQ ID NO: 3152419 - RNA, 19 nt, Artificial Sequence
  Description of Artificial Sequence: Synthetic oligonucleotide
uguuccugaugguggagau

SEQ ID NO: 3152420 - RNA, 19 nt, Artificial Sequence
  Description of Artificial Sequence: Synthetic oligonucleotide
accaucaggaacaagagac

SEQ ID NO: 3152421 - RNA, 19 nt, Artificial Sequence
  Description of Artificial Sequence: Synthetic oligonucleotide
gucucuuguuccugauggu

SEQ ID NO: 3152422 - RNA, 19 nt, Artificial Sequence
  Description of Artificial Sequence: Synthetic oligonucleotide
accccgagauggacaauuu

SEQ ID NO: 3152423 - RNA, 19 nt, Artificial Sequence
  Description of Artificial Sequence: Synthetic oligonucleotide
aaauuguccaucucggggu

SEQ ID NO: 3152424 - RNA, 19 nt, Artificial Sequence
  Description of Artificial Sequence: Synthetic oligonucleotide
gauggacaauuugcuccua

SEQ ID NO: 3152425 - RNA, 19 nt, Artificial Sequence
  Description of Artificial Sequence: Synthetic oligonucleotide
uaggagcaaauuguccauc

SEQ ID NO: 3152426 - RNA, 19 nt, Artificial Sequence
  Description of Artificial Sequence: Synthetic oligonucleotide
caauuugcuccuagaaccc

SEQ ID NO: 3152427 - RNA, 19 nt, Artificial Sequence
  Description of Artificial Sequence: Synthetic oligonucleotide
ggguucuaggagcaaauug

SEQ ID NO: 3152428 - RNA, 19 nt, Artificial Sequence
  Description of Artificial Sequence: Synthetic oligonucleotide
agaacccaacagcaucuug

SEQ ID NO: 3152429 - RNA, 19 nt, Artificial Sequence
  Description of Artificial Sequence: Synthetic oligonucleotide
caagaugcuguuggguucu

SEQ ID NO: 3152430 - RNA, 19 nt, Artificial Sequence
  Description of Artificial Sequence: Synthetic oligonucleotide
gcagcuugcuaucauugga

SEQ ID NO: 3152431 - RNA, 19 nt, Artificial Sequence
  Description of Artificial Sequence: Synthetic oligonucleotide
uccaaugauagcaagcugc

SEQ ID NO: 3152432 - RNA, 19 nt, Artificial Sequence
  Description of Artificial Sequence: Synthetic oligonucleotide
gcuaucauuggagaugaca

SEQ ID NO: 3152433 - RNA, 19 nt, Artificial Sequence
  Description of Artificial Sequence: Synthetic oligonucleotide
ugucaucuccaaugauagc

SEQ ID NO: 3152434 - RNA, 19 nt, Artificial Sequence
  Description of Artificial Sequence: Synthetic oligonucleotide
augacauuaaccggagaua

SEQ ID NO: 3152435 - RNA, 19 nt, Artificial Sequence
  Description of Artificial Sequence: Synthetic oligonucleotide
uaucuccgguuaaugucau

SEQ ID NO: 3152436 - RNA, 19 nt, Artificial Sequence
  Description of Artificial Sequence: Synthetic oligonucleotide
uuaaccggagauacgacac

SEQ ID NO: 3152437 - RNA, 19 nt, Artificial Sequence
  Description of Artificial Sequence: Synthetic oligonucleotide
gugucguaucuccgguuaa

SEQ ID NO: 3152438 - RNA, 19 nt, Artificial Sequence
  Description of Artificial Sequence: Synthetic oligonucleotide
gauacgacacagaguucca

SEQ ID NO: 3152439 - RNA, 19 nt, Artificial Sequence
  Description of Artificial Sequence: Synthetic oligonucleotide
uggaacucugugucguauc

SEQ ID NO: 3152440 - RNA, 19 nt, Artificial Sequence
  Description of Artificial Sequence: Synthetic oligonucleotide
aguuccagaauuuacugga

SEQ ID NO: 3152441 - RNA, 19 nt, Artificial Sequence
  Description of Artificial Sequence: Synthetic oligonucleotide
uccaguaaauucuggaacu

SEQ ID NO: 3152442 - RNA, 19 nt, Artificial Sequence
  Description of Artificial Sequence: Synthetic oligonucleotide
auuuacuggagcagcugca

SEQ ID NO: 3152443 - RNA, 19 nt, Artificial Sequence
  Description of Artificial Sequence: Synthetic oligonucleotide
ugcagcugcuccaguaaau

SEQ ID NO: 3152444 - RNA, 19 nt, Artificial Sequence
  Description of Artificial Sequence: Synthetic oligonucleotide
ggaaugccuacgaacucuu

SEQ ID NO: 3152445 - RNA, 19 nt, Artificial Sequence
  Description of Artificial Sequence: Synthetic oligonucleotide
aagaguucguaggcauucc

SEQ ID NO: 3152446 - RNA, 19 nt, Artificial Sequence
  Description of Artificial Sequence: Synthetic oligonucleotide
acgaacucuucaccaagau

SEQ ID NO: 3152447 - RNA, 19 nt, Artificial Sequence
  Description of Artificial Sequence: Synthetic oligonucleotide
aucuuggugaagaguucgu

SEQ ID NO: 3152448 - RNA, 19 nt, Artificial Sequence
  Description of Artificial Sequence: Synthetic oligonucleotide
cucuucaccaagauugccu

SEQ ID NO: 3152449 - RNA, 19 nt, Artificial Sequence
  Description of Artificial Sequence: Synthetic oligonucleotide
aggcaaucuuggugaagag

SEQ ID NO: 3152450 - RNA, 19 nt, Artificial Sequence
  Description of Artificial Sequence: Synthetic oligonucleotide
agauugccuccagccuauu

SEQ ID NO: 3152451 - RNA, 19 nt, Artificial Sequence
  Description of Artificial Sequence: Synthetic oligonucleotide
aauaggcuggaggcaaucu

SEQ ID NO: 3152452 - RNA, 19 nt, Artificial Sequence
  Description of Artificial Sequence: Synthetic oligonucleotide
gccuauuuaagagcggcau

SEQ ID NO: 3152453 - RNA, 19 nt, Artificial Sequence
  Description of Artificial Sequence: Synthetic oligonucleotide
augccgcucuuaaauaggc

SEQ ID NO: 3152454 - RNA, 19 nt, Artificial Sequence
  Description of Artificial Sequence: Synthetic oligonucleotide
ccuguaugucuaccaacgu

SEQ ID NO: 3152455 - RNA, 19 nt, Artificial Sequence
  Description of Artificial Sequence: Synthetic oligonucleotide
acguugguagacauacagg

SEQ ID NO: 3152456 - RNA, 19 nt, Artificial Sequence
  Description of Artificial Sequence: Synthetic oligonucleotide
augucuaccaacgugguuu

SEQ ID NO: 3152457 - RNA, 19 nt, Artificial Sequence
  Description of Artificial Sequence: Synthetic oligonucleotide
aaaccacguugguagacau

SEQ ID NO: 3152458 - RNA, 19 nt, Artificial Sequence
  Description of Artificial Sequence: Synthetic oligonucleotide
uuuuggcggauaucauacu

SEQ ID NO: 3152459 - RNA, 19 nt, Artificial Sequence
  Description of Artificial Sequence: Synthetic oligonucleotide
aguaugauauccgccaaaa

SEQ ID NO: 3152460 - RNA, 19 nt, Artificial Sequence
  Description of Artificial Sequence: Synthetic oligonucleotide
gauaucauacugcaccauu

SEQ ID NO: 3152461 - RNA, 19 nt, Artificial Sequence
  Description of Artificial Sequence: Synthetic oligonucleotide
aauggugcaguaugauauc

SEQ ID NO: 3152462 - RNA, 19 nt, Artificial Sequence
  Description of Artificial Sequence: Synthetic oligonucleotide
auacugcaccauugcaucg

SEQ ID NO: 3152463 - RNA, 19 nt, Artificial Sequence
  Description of Artificial Sequence: Synthetic oligonucleotide
cgaugcaauggugcaguau

SEQ ID NO: 3152464 - RNA, 19 nt, Artificial Sequence
  Description of Artificial Sequence: Synthetic oligonucleotide
agacccaauccugauugug

SEQ ID NO: 3152465 - RNA, 19 nt, Artificial Sequence
  Description of Artificial Sequence: Synthetic oligonucleotide
cacaaucaggauugggucu

SEQ ID NO: 3152466 - RNA, 19 nt, Artificial Sequence
  Description of Artificial Sequence: Synthetic oligonucleotide
ccugauugugaugacaauu

SEQ ID NO: 3152467 - RNA, 19 nt, Artificial Sequence
  Description of Artificial Sequence: Synthetic oligonucleotide
aauugucaucacaaucagg

SEQ ID NO: 3152468 - RNA, 19 nt, Artificial Sequence
  Description of Artificial Sequence: Synthetic oligonucleotide
gaugacaauucuuggugug

SEQ ID NO: 3152469 - RNA, 19 nt, Artificial Sequence
  Description of Artificial Sequence: Synthetic oligonucleotide
cacaccaagaauugucauc

SEQ ID NO: 3152470 - RNA, 19 nt, Artificial Sequence
  Description of Artificial Sequence: Synthetic oligonucleotide
ucuuggugugguucuguug

SEQ ID NO: 3152471 - RNA, 19 nt, Artificial Sequence
  Description of Artificial Sequence: Synthetic oligonucleotide
caacagaaccacaccaaga

SEQ ID NO: 3152472 - RNA, 19 nt, Artificial Sequence
  Description of Artificial Sequence: Synthetic oligonucleotide
cgugguacacagauucuuc

SEQ ID NO: 3152473 - RNA, 19 nt, Artificial Sequence
  Description of Artificial Sequence: Synthetic oligonucleotide
gaagaaucuguguaccacg

SEQ ID NO: 3152474 - RNA, 19 nt, Artificial Sequence
  Description of Artificial Sequence: Synthetic oligonucleotide
uucuucagaucaugacucc

SEQ ID NO: 3152475 - RNA, 19 nt, Artificial Sequence
  Description of Artificial Sequence: Synthetic oligonucleotide
ggagucaugaucugaagaa

SEQ ID NO: 3152476 - RNA, 19 nt, Artificial Sequence
  Description of Artificial Sequence: Synthetic oligonucleotide
agcucugagcagaucauga

SEQ ID NO: 3152477 - RNA, 19 nt, Artificial Sequence
  Description of Artificial Sequence: Synthetic oligonucleotide
ucaugaucugcucagagcu

SEQ ID NO: 3152478 - RNA, 19 nt, Artificial Sequence
  Description of Artificial Sequence: Synthetic oligonucleotide
gagcagaucaugaagacag

SEQ ID NO: 3152479 - RNA, 19 nt, Artificial Sequence
  Description of Artificial Sequence: Synthetic oligonucleotide
cugucuucaugaucugcuc

SEQ ID NO: 3152480 - RNA, 19 nt, Artificial Sequence
  Description of Artificial Sequence: Synthetic oligonucleotide
uuugcuacaggguuucauc

SEQ ID NO: 3152481 - RNA, 19 nt, Artificial Sequence
  Description of Artificial Sequence: Synthetic oligonucleotide
gaugaaacccuguagcaaa

SEQ ID NO: 3152482 - RNA, 19 nt, Artificial Sequence
  Description of Artificial Sequence: Synthetic oligonucleotide
ugcuacaggguuucaucca

SEQ ID NO: 3152483 - RNA, 19 nt, Artificial Sequence
  Description of Artificial Sequence: Synthetic oligonucleotide
uggaugaaacccuguagca

SEQ ID NO: 3152484 - RNA, 19 nt, Artificial Sequence
  Description of Artificial Sequence: Synthetic oligonucleotide
uuucauccaggaucgagcu

SEQ ID NO: 3152485 - RNA, 19 nt, Artificial Sequence
  Description of Artificial Sequence: Synthetic oligonucleotide
agcucgauccuggaugaaa

SEQ ID NO: 3152486 - RNA, 19 nt, Artificial Sequence
  Description of Artificial Sequence: Synthetic oligonucleotide
auacaccugagcugaccuu

SEQ ID NO: 3152487 - RNA, 19 nt, Artificial Sequence
  Description of Artificial Sequence: Synthetic oligonucleotide
aaggucagcucagguguau

SEQ ID NO: 3152488 - RNA, 19 nt, Artificial Sequence
  Description of Artificial Sequence: Synthetic oligonucleotide
aggauccgucuaccaagaa

SEQ ID NO: 3152489 - RNA, 19 nt, Artificial Sequence
  Description of Artificial Sequence: Synthetic oligonucleotide
uucuugguagacggauccu

SEQ ID NO: 3152490 - RNA, 19 nt, Artificial Sequence
  Description of Artificial Sequence: Synthetic oligonucleotide
ccgucuaccaagaaguuga

SEQ ID NO: 3152491 - RNA, 19 nt, Artificial Sequence
  Description of Artificial Sequence: Synthetic oligonucleotide
ucaacuucuugguagacgg

SEQ ID NO: 3152492 - RNA, 19 nt, Artificial Sequence
  Description of Artificial Sequence: Synthetic oligonucleotide
uaccaagaaguugagcgag

SEQ ID NO: 3152493 - RNA, 19 nt, Artificial Sequence
  Description of Artificial Sequence: Synthetic oligonucleotide
cucgcucaacuucuuggua

SEQ ID NO: 3152494 - RNA, 19 nt, Artificial Sequence
  Description of Artificial Sequence: Synthetic oligonucleotide
gaauuggagaugagcugga

SEQ ID NO: 3152495 - RNA, 19 nt, Artificial Sequence
  Description of Artificial Sequence: Synthetic oligonucleotide
uccagcucaucuccaauuc

SEQ ID NO: 3152496 - RNA, 19 nt, Artificial Sequence
  Description of Artificial Sequence: Synthetic oligonucleotide
augagcuggacagcaacau

SEQ ID NO: 3152497 - RNA, 19 nt, Artificial Sequence
  Description of Artificial Sequence: Synthetic oligonucleotide
auguugcuguccagcucau

SEQ ID NO: 3152498 - RNA, 19 nt, Artificial Sequence
  Description of Artificial Sequence: Synthetic oligonucleotide
cugcagaggaugauugcua

SEQ ID NO: 3152499 - RNA, 19 nt, Artificial Sequence
  Description of Artificial Sequence: Synthetic oligonucleotide
uagcaaucauccucugcag

SEQ ID NO: 3152500 - RNA, 19 nt, Artificial Sequence
  Description of Artificial Sequence: Synthetic oligonucleotide
ugauugcuaauguggauac

SEQ ID NO: 3152501 - RNA, 19 nt, Artificial Sequence
  Description of Artificial Sequence: Synthetic oligonucleotide
guauccacauuagcaauca

SEQ ID NO: 3152502 - RNA, 19 nt, Artificial Sequence
  Description of Artificial Sequence: Synthetic oligonucleotide
auacuaacuccccacgaga

SEQ ID NO: 3152503 - RNA, 19 nt, Artificial Sequence
  Description of Artificial Sequence: Synthetic oligonucleotide
ucucguggggaguuaguau

SEQ ID NO: 3152504 - RNA, 19 nt, Artificial Sequence
  Description of Artificial Sequence: Synthetic oligonucleotide
cagcugacauguuugcuga

SEQ ID NO: 3152505 - RNA, 19 nt, Artificial Sequence
  Description of Artificial Sequence: Synthetic oligonucleotide
ucagcaaacaugucagcug

SEQ ID NO: 3152506 - RNA, 19 nt, Artificial Sequence
  Description of Artificial Sequence: Synthetic oligonucleotide
uguuugcugauggcaacuu

SEQ ID NO: 3152507 - RNA, 19 nt, Artificial Sequence
  Description of Artificial Sequence: Synthetic oligonucleotide
aaguugccaucagcaaaca

SEQ ID NO: 3152508 - RNA, 19 nt, Artificial Sequence
  Description of Artificial Sequence: Synthetic oligonucleotide
guuguugcccuuuucuacu

SEQ ID NO: 3152509 - RNA, 19 nt, Artificial Sequence
  Description of Artificial Sequence: Synthetic oligonucleotide
aguagaaaagggcaacaac

SEQ ID NO: 3152510 - RNA, 19 nt, Artificial Sequence
  Description of Artificial Sequence: Synthetic oligonucleotide
cuuugcuagcaaacuggug

SEQ ID NO: 3152511 - RNA, 19 nt, Artificial Sequence
  Description of Artificial Sequence: Synthetic oligonucleotide
caccaguuugcuagcaaag

SEQ ID NO: 3152512 - RNA, 19 nt, Artificial Sequence
  Description of Artificial Sequence: Synthetic oligonucleotide
aaagugcccgagcuaauca

SEQ ID NO: 3152513 - RNA, 19 nt, Artificial Sequence
  Description of Artificial Sequence: Synthetic oligonucleotide
ugauuagcucgggcacuuu

SEQ ID NO: 3152514 - RNA, 19 nt, Artificial Sequence
  Description of Artificial Sequence: Synthetic oligonucleotide
cuaaucagaaccaucaugg

SEQ ID NO: 3152515 - RNA, 19 nt, Artificial Sequence
  Description of Artificial Sequence: Synthetic oligonucleotide
ccaugaugguucugauuag

SEQ ID NO: 3152516 - RNA, 19 nt, Artificial Sequence
  Description of Artificial Sequence: Synthetic oligonucleotide
uaaucagaaccaucauggg

SEQ ID NO: 3152517 - RNA, 19 nt, Artificial Sequence
  Description of Artificial Sequence: Synthetic oligonucleotide
cccaugaugguucugauua

SEQ ID NO: 3152518 - RNA, 19 nt, Artificial Sequence
  Description of Artificial Sequence: Synthetic oligonucleotide
uugucuggauccaagacca

SEQ ID NO: 3152519 - RNA, 19 nt, Artificial Sequence
  Description of Artificial Sequence: Synthetic oligonucleotide
uggucuuggauccagacaa

SEQ ID NO: 3152520 - RNA, 19 nt, Artificial Sequence
  Description of Artificial Sequence: Synthetic oligonucleotide
auggccuccucucauacuu

SEQ ID NO: 3152521 - RNA, 19 nt, Artificial Sequence
  Description of Artificial Sequence: Synthetic oligonucleotide
aaguaugagaggaggccau

SEQ ID NO: 3152522 - RNA, 19 nt, Artificial Sequence
  Description of Artificial Sequence: Synthetic oligonucleotide
gacagugacuaucuuugug

SEQ ID NO: 3152523 - RNA, 19 nt, Artificial Sequence
  Description of Artificial Sequence: Synthetic oligonucleotide
cacaaagauagucacuguc

SEQ ID NO: 3152524 - RNA, 19 nt, Artificial Sequence
  Description of Artificial Sequence: Synthetic oligonucleotide
gugacuaucuuuguggcug

SEQ ID NO: 3152525 - RNA, 19 nt, Artificial Sequence
  Description of Artificial Sequence: Synthetic oligonucleotide
cagccacaaagauagucac

SEQ ID NO: 3152526 - RNA, 19 nt, Artificial Sequence
  Description of Artificial Sequence: Synthetic oligonucleotide
acucacgaucuggaagaac

SEQ ID NO: 3152527 - RNA, 19 nt, Artificial Sequence
  Description of Artificial Sequence: Synthetic oligonucleotide
guucuuccagaucgugagu

SEQ ID NO: 3152528 - RNA, 19 nt, Artificial Sequence
  Description of Artificial Sequence: Synthetic oligonucleotide
aucuggaagaacaugggcu

SEQ ID NO: 3152529 - RNA, 19 nt, Artificial Sequence
  Description of Artificial Sequence: Synthetic oligonucleotide
agcccauguucuuccagau

SEQ ID NO: 3152530 - RNA, 19 nt, Artificial Sequence
  Description of Artificial Sequence: Synthetic oligonucleotide
gucuuggacuauugucuuu

SEQ ID NO: 3152531 - RNA, 19 nt, Artificial Sequence
  Description of Artificial Sequence: Synthetic oligonucleotide
aaagacaauaguccaagac

SEQ ID NO: 3152532 - RNA, 19 nt, Artificial Sequence
  Description of Artificial Sequence: Synthetic oligonucleotide
uuuguaauuauugggaggg

SEQ ID NO: 3152533 - RNA, 19 nt, Artificial Sequence
  Description of Artificial Sequence: Synthetic oligonucleotide
cccucccaauaauuacaaa

SEQ ID NO: 3152534 - RNA, 19 nt, Artificial Sequence
  Description of Artificial Sequence: Synthetic oligonucleotide
guaauuauugggaggggug

SEQ ID NO: 3152535 - RNA, 19 nt, Artificial Sequence
  Description of Artificial Sequence: Synthetic oligonucleotide
caccccucccaauaauuac

SEQ ID NO: 3152536 - RNA, 19 nt, Artificial Sequence
  Description of Artificial Sequence: Synthetic oligonucleotide
aggggacaauaaaccucag

SEQ ID NO: 3152537 - RNA, 19 nt, Artificial Sequence
  Description of Artificial Sequence: Synthetic oligonucleotide
cugagguuuauuguccccu

SEQ ID NO: 3152538 - RNA, 19 nt, Artificial Sequence
  Description of Artificial Sequence: Synthetic oligonucleotide
accucagguccacuuuaaa

SEQ ID NO: 3152539 - RNA, 19 nt, Artificial Sequence
  Description of Artificial Sequence: Synthetic oligonucleotide
uuuaaaguggaccugaggu

SEQ ID NO: 3152540 - RNA, 19 nt, Artificial Sequence
  Description of Artificial Sequence: Synthetic oligonucleotide
acucaaggaccagcugauu

SEQ ID NO: 3152541 - RNA, 19 nt, Artificial Sequence
  Description of Artificial Sequence: Synthetic oligonucleotide
aaucagcugguccuugagu

SEQ ID NO: 3152542 - RNA, 19 nt, Artificial Sequence
  Description of Artificial Sequence: Synthetic oligonucleotide
cuacuuaaggaagaacaga

SEQ ID NO: 3152543 - RNA, 19 nt, Artificial Sequence
  Description of Artificial Sequence: Synthetic oligonucleotide
ucuguucuuccuuaaguag

SEQ ID NO: 3152544 - RNA, 19 nt, Artificial Sequence
  Description of Artificial Sequence: Synthetic oligonucleotide
gauuacgauuguugggguu

SEQ ID NO: 3152545 - RNA, 19 nt, Artificial Sequence
  Description of Artificial Sequence: Synthetic oligonucleotide
aaccccaacaaucguaauc

SEQ ID NO: 3152546 - RNA, 19 nt, Artificial Sequence
  Description of Artificial Sequence: Synthetic oligonucleotide
caguauccucaugaaggac

SEQ ID NO: 3152547 - RNA, 19 nt, Artificial Sequence
  Description of Artificial Sequence: Synthetic oligonucleotide
guccuucaugaggauacug

SEQ ID NO: 3152548 - RNA, 19 nt, Artificial Sequence
  Description of Artificial Sequence: Synthetic oligonucleotide
acuuagcagaugagcuugc

SEQ ID NO: 3152549 - RNA, 19 nt, Artificial Sequence
  Description of Artificial Sequence: Synthetic oligonucleotide
gcaagcucaucugcuaagu

SEQ ID NO: 3152550 - RNA, 19 nt, Artificial Sequence
  Description of Artificial Sequence: Synthetic oligonucleotide
cccuuguugaugucaugga

SEQ ID NO: 3152551 - RNA, 19 nt, Artificial Sequence
  Description of Artificial Sequence: Synthetic oligonucleotide
uccaugacaucaacaaggg

SEQ ID NO: 3152552 - RNA, 19 nt, Artificial Sequence
  Description of Artificial Sequence: Synthetic oligonucleotide
uuuccucagaacaccaaaa

SEQ ID NO: 3152553 - RNA, 19 nt, Artificial Sequence
  Description of Artificial Sequence: Synthetic oligonucleotide
uuuugguguucugaggaaa

SEQ ID NO: 3152554 - RNA, 19 nt, Artificial Sequence
  Description of Artificial Sequence: Synthetic oligonucleotide
aagacuauagugugacagc

SEQ ID NO: 3152555 - RNA, 19 nt, Artificial Sequence
  Description of Artificial Sequence: Synthetic oligonucleotide
gcugucacacuauagucuu

SEQ ID NO: 3152556 - RNA, 19 nt, Artificial Sequence
  Description of Artificial Sequence: Synthetic oligonucleotide
caagcuggucauugucaca

SEQ ID NO: 3152557 - RNA, 19 nt, Artificial Sequence
  Description of Artificial Sequence: Synthetic oligonucleotide
ugugacaaugaccagcuug

SEQ ID NO: 3152558 - RNA, 19 nt, Artificial Sequence
  Description of Artificial Sequence: Synthetic oligonucleotide
aacgaaacgugaacaucuu

SEQ ID NO: 3152559 - RNA, 19 nt, Artificial Sequence
  Description of Artificial Sequence: Synthetic oligonucleotide
aagauguucacguuucguu

SEQ ID NO: 3152560 - RNA, 19 nt, Artificial Sequence
  Description of Artificial Sequence: Synthetic oligonucleotide
ucaucauucccaacguugu

SEQ ID NO: 3152561 - RNA, 19 nt, Artificial Sequence
  Description of Artificial Sequence: Synthetic oligonucleotide
acaacguugggaaugauga

SEQ ID NO: 3152562 - RNA, 19 nt, Artificial Sequence
  Description of Artificial Sequence: Synthetic oligonucleotide
gaaauacaguccagacugc

SEQ ID NO: 3152563 - RNA, 19 nt, Artificial Sequence
  Description of Artificial Sequence: Synthetic oligonucleotide
gcagucuggacuguauuuc

SEQ ID NO: 3152564 - RNA, 19 nt, Artificial Sequence
  Description of Artificial Sequence: Synthetic oligonucleotide
uucaaacccaguggauauc

SEQ ID NO: 3152565 - RNA, 19 nt, Artificial Sequence
  Description of Artificial Sequence: Synthetic oligonucleotide
gauauccacuggguuugaa

SEQ ID NO: 3152566 - RNA, 19 nt, Artificial Sequence
  Description of Artificial Sequence: Synthetic oligonucleotide
uuauugggaguggcugcaa

SEQ ID NO: 3152567 - RNA, 19 nt, Artificial Sequence
  Description of Artificial Sequence: Synthetic oligonucleotide
uugcagccacucccaauaa

SEQ ID NO: 3152568 - RNA, 19 nt, Artificial Sequence
  Description of Artificial Sequence: Synthetic oligonucleotide
ccguuaucugaugggagaa

SEQ ID NO: 3152569 - RNA, 19 nt, Artificial Sequence
  Description of Artificial Sequence: Synthetic oligonucleotide
uucucccaucagauaacgg

SEQ ID NO: 3152570 - RNA, 19 nt, Artificial Sequence
  Description of Artificial Sequence: Synthetic oligonucleotide
uucacccacuaagcuguca

SEQ ID NO: 3152571 - RNA, 19 nt, Artificial Sequence
  Description of Artificial Sequence: Synthetic oligonucleotide
ugacagcuuagugggugaa

SEQ ID NO: 3152572 - RNA, 19 nt, Artificial Sequence
  Description of Artificial Sequence: Synthetic oligonucleotide
uguguggaguggagugaau

SEQ ID NO: 3152573 - RNA, 19 nt, Artificial Sequence
  Description of Artificial Sequence: Synthetic oligonucleotide
auucacuccacuccacaca

SEQ ID NO: 3152574 - RNA, 19 nt, Artificial Sequence
  Description of Artificial Sequence: Synthetic oligonucleotide
gaguggagugaauguagcu

SEQ ID NO: 3152575 - RNA, 19 nt, Artificial Sequence
  Description of Artificial Sequence: Synthetic oligonucleotide
agcuacauucacuccacuc

SEQ ID NO: 3152576 - RNA, 19 nt, Artificial Sequence
  Description of Artificial Sequence: Synthetic oligonucleotide
ucucccugaagaaucugaa

SEQ ID NO: 3152577 - RNA, 19 nt, Artificial Sequence
  Description of Artificial Sequence: Synthetic oligonucleotide
uucagauucuucagggaga

SEQ ID NO: 3152578 - RNA, 19 nt, Artificial Sequence
  Description of Artificial Sequence: Synthetic oligonucleotide
acaaggagcaguggaauga

SEQ ID NO: 3152579 - RNA, 19 nt, Artificial Sequence
  Description of Artificial Sequence: Synthetic oligonucleotide
ucauuccacugcuccuugu

SEQ ID NO: 3152580 - RNA, 19 nt, Artificial Sequence
  Description of Artificial Sequence: Synthetic oligonucleotide
aaugagguucacaagcagg

SEQ ID NO: 3152581 - RNA, 19 nt, Artificial Sequence
  Description of Artificial Sequence: Synthetic oligonucleotide
ccugcuugugaaccucauu

SEQ ID NO: 3152582 - RNA, 19 nt, Artificial Sequence
  Description of Artificial Sequence: Synthetic oligonucleotide
agugccuaugaggugauca

SEQ ID NO: 3152583 - RNA, 19 nt, Artificial Sequence
  Description of Artificial Sequence: Synthetic oligonucleotide
ugaucaccucauaggcacu

SEQ ID NO: 3152584 - RNA, 19 nt, Artificial Sequence
  Description of Artificial Sequence: Synthetic oligonucleotide
ucaaacugaaggguuauac

SEQ ID NO: 3152585 - RNA, 19 nt, Artificial Sequence
  Description of Artificial Sequence: Synthetic oligonucleotide
guauaacccuucaguuuga

SEQ ID NO: 3152586 - RNA, 19 nt, Artificial Sequence
  Description of Artificial Sequence: Synthetic oligonucleotide
ccugggccauuggucuguc

SEQ ID NO: 3152587 - RNA, 19 nt, Artificial Sequence
  Description of Artificial Sequence: Synthetic oligonucleotide
gacagaccaauggcccagg

SEQ ID NO: 3152588 - RNA, 19 nt, Artificial Sequence
  Description of Artificial Sequence: Synthetic oligonucleotide
gagagcauaaugaagaauc

SEQ ID NO: 3152589 - RNA, 19 nt, Artificial Sequence
  Description of Artificial Sequence: Synthetic oligonucleotide
gauucuucauuaugcucuc

SEQ ID NO: 3152590 - RNA, 19 nt, Artificial Sequence
  Description of Artificial Sequence: Synthetic oligonucleotide
ugcaucccauuucuaccau

SEQ ID NO: 3152591 - RNA, 19 nt, Artificial Sequence
  Description of Artificial Sequence: Synthetic oligonucleotide
augguagaaaugggaugca

SEQ ID NO: 3152592 - RNA, 19 nt, Artificial Sequence
  Description of Artificial Sequence: Synthetic oligonucleotide
aagggucucuauggaauca

SEQ ID NO: 3152593 - RNA, 19 nt, Artificial Sequence
  Description of Artificial Sequence: Synthetic oligonucleotide
ugauuccauagagacccuu

SEQ ID NO: 3152594 - RNA, 19 nt, Artificial Sequence
  Description of Artificial Sequence: Synthetic oligonucleotide
cuauggaaucaaggaugau

SEQ ID NO: 3152595 - RNA, 19 nt, Artificial Sequence
  Description of Artificial Sequence: Synthetic oligonucleotide
aucauccuugauuccauag

SEQ ID NO: 3152596 - RNA, 19 nt, Artificial Sequence
  Description of Artificial Sequence: Synthetic oligonucleotide
cugggacaaaauggaaucu

SEQ ID NO: 3152597 - RNA, 19 nt, Artificial Sequence
  Description of Artificial Sequence: Synthetic oligonucleotide
agauuccauuuugucccag

SEQ ID NO: 3152598 - RNA, 19 nt, Artificial Sequence
  Description of Artificial Sequence: Synthetic oligonucleotide
ugugaaggugacucuaacu

SEQ ID NO: 3152599 - RNA, 19 nt, Artificial Sequence
  Description of Artificial Sequence: Synthetic oligonucleotide
aguuagagucaccuucaca

SEQ ID NO: 3152600 - RNA, 19 nt, Artificial Sequence
  Description of Artificial Sequence: Synthetic oligonucleotide
gacucuaacuucugaagag

SEQ ID NO: 3152601 - RNA, 19 nt, Artificial Sequence
  Description of Artificial Sequence: Synthetic oligonucleotide
cucuucagaaguuagaguc

SEQ ID NO: 3152602 - RNA, 19 nt, Artificial Sequence
  Description of Artificial Sequence: Synthetic oligonucleotide
cuugaagaagagugcagau

SEQ ID NO: 3152603 - RNA, 19 nt, Artificial Sequence
  Description of Artificial Sequence: Synthetic oligonucleotide
aucugcacucuucuucaag

SEQ ID NO: 3152604 - RNA, 19 nt, Artificial Sequence
  Description of Artificial Sequence: Synthetic oligonucleotide
aucuggcuagcuacuauuc

SEQ ID NO: 3152605 - RNA, 19 nt, Artificial Sequence
  Description of Artificial Sequence: Synthetic oligonucleotide
gaauaguagcuagccagau

SEQ ID NO: 3152606 - RNA, 19 nt, Artificial Sequence
  Description of Artificial Sequence: Synthetic oligonucleotide
gcuagcuacuauucuacag

SEQ ID NO: 3152607 - RNA, 19 nt, Artificial Sequence
  Description of Artificial Sequence: Synthetic oligonucleotide
cuguagaauaguagcuagc

SEQ ID NO: 3152608 - RNA, 19 nt, Artificial Sequence
  Description of Artificial Sequence: Synthetic oligonucleotide
ugcuuuccggauuacuuag

SEQ ID NO: 3152609 - RNA, 19 nt, Artificial Sequence
  Description of Artificial Sequence: Synthetic oligonucleotide
cuaaguaauccggaaagca

SEQ ID NO: 3152610 - RNA, 19 nt, Artificial Sequence
  Description of Artificial Sequence: Synthetic oligonucleotide
gcuuuccggauuacuuaga

SEQ ID NO: 3152611 - RNA, 19 nt, Artificial Sequence
  Description of Artificial Sequence: Synthetic oligonucleotide
ucuaaguaauccggaaagc

SEQ ID NO: 3152612 - RNA, 19 nt, Artificial Sequence
  Description of Artificial Sequence: Synthetic oligonucleotide
uccggauuacuuagauucc

SEQ ID NO: 3152613 - RNA, 19 nt, Artificial Sequence
  Description of Artificial Sequence: Synthetic oligonucleotide
ggaaucuaaguaauccgga

SEQ ID NO: 3152614 - RNA, 19 nt, Artificial Sequence
  Description of Artificial Sequence: Synthetic oligonucleotide
ccggauuacuuagauuccc

SEQ ID NO: 3152615 - RNA, 19 nt, Artificial Sequence
  Description of Artificial Sequence: Synthetic oligonucleotide
gggaaucuaaguaauccgg

SEQ ID NO: 3152616 - RNA, 19 nt, Artificial Sequence
  Description of Artificial Sequence: Synthetic oligonucleotide
guauaucuacgaaggcgac

SEQ ID NO: 3152617 - RNA, 19 nt, Artificial Sequence
  Description of Artificial Sequence: Synthetic oligonucleotide
gucgccuucguagauauac

SEQ ID NO: 3152618 - RNA, 19 nt, Artificial Sequence
  Description of Artificial Sequence: Synthetic oligonucleotide
uauaucuacgaaggcgacg

SEQ ID NO: 3152619 - RNA, 19 nt, Artificial Sequence
  Description of Artificial Sequence: Synthetic oligonucleotide
cgucgccuucguagauaua

SEQ ID NO: 3152620 - RNA, 19 nt, Artificial Sequence
  Description of Artificial Sequence: Synthetic oligonucleotide
auaucuacgaaggcgacga

SEQ ID NO: 3152621 - RNA, 19 nt, Artificial Sequence
  Description of Artificial Sequence: Synthetic oligonucleotide
ucgucgccuucguagauau

SEQ ID NO: 3152622 - RNA, 19 nt, Artificial Sequence
  Description of Artificial Sequence: Synthetic oligonucleotide
uaucuacgaaggcgacgaa

SEQ ID NO: 3152623 - RNA, 19 nt, Artificial Sequence
  Description of Artificial Sequence: Synthetic oligonucleotide
uucgucgccuucguagaua

SEQ ID NO: 3152624 - RNA, 19 nt, Artificial Sequence
  Description of Artificial Sequence: Synthetic oligonucleotide
acgaacccuacaucguucu

SEQ ID NO: 3152625 - RNA, 19 nt, Artificial Sequence
  Description of Artificial Sequence: Synthetic oligonucleotide
agaacgauguaggguucgu

SEQ ID NO: 3152626 - RNA, 19 nt, Artificial Sequence
  Description of Artificial Sequence: Synthetic oligonucleotide
gaacccuacaucguucuaa

SEQ ID NO: 3152627 - RNA, 19 nt, Artificial Sequence
  Description of Artificial Sequence: Synthetic oligonucleotide
uuagaacgauguaggguuc

SEQ ID NO: 3152628 - RNA, 19 nt, Artificial Sequence
  Description of Artificial Sequence: Synthetic oligonucleotide
aacccuacaucguucuaaa

SEQ ID NO: 3152629 - RNA, 19 nt, Artificial Sequence
  Description of Artificial Sequence: Synthetic oligonucleotide
uuuagaacgauguaggguu

SEQ ID NO: 3152630 - RNA, 19 nt, Artificial Sequence
  Description of Artificial Sequence: Synthetic oligonucleotide
accaauuggagucgucaac

SEQ ID NO: 3152631 - RNA, 19 nt, Artificial Sequence
  Description of Artificial Sequence: Synthetic oligonucleotide
guugacgacuccaauuggu

SEQ ID NO: 3152632 - RNA, 19 nt, Artificial Sequence
  Description of Artificial Sequence: Synthetic oligonucleotide
ccaauuggagucgucaacu

SEQ ID NO: 3152633 - RNA, 19 nt, Artificial Sequence
  Description of Artificial Sequence: Synthetic oligonucleotide
aguugacgacuccaauugg

SEQ ID NO: 3152634 - RNA, 19 nt, Artificial Sequence
  Description of Artificial Sequence: Synthetic oligonucleotide
caauuggagucgucaacuu

SEQ ID NO: 3152635 - RNA, 19 nt, Artificial Sequence
  Description of Artificial Sequence: Synthetic oligonucleotide
aaguugacgacuccaauug

SEQ ID NO: 3152636 - RNA, 19 nt, Artificial Sequence
  Description of Artificial Sequence: Synthetic oligonucleotide
cacuuucacuuacccuaua

SEQ ID NO: 3152637 - RNA, 19 nt, Artificial Sequence
  Description of Artificial Sequence: Synthetic oligonucleotide
uauaggguaagugaaagug

SEQ ID NO: 3152638 - RNA, 19 nt, Artificial Sequence
  Description of Artificial Sequence: Synthetic oligonucleotide
acuuucacuuacccuauac

SEQ ID NO: 3152639 - RNA, 19 nt, Artificial Sequence
  Description of Artificial Sequence: Synthetic oligonucleotide
guauaggguaagugaaagu

SEQ ID NO: 3152640 - RNA, 19 nt, Artificial Sequence
  Description of Artificial Sequence: Synthetic oligonucleotide
uacaccaccgucaauuggu

SEQ ID NO: 3152641 - RNA, 19 nt, Artificial Sequence
  Description of Artificial Sequence: Synthetic oligonucleotide
accaauugacgguggugua

SEQ ID NO: 3152642 - RNA, 19 nt, Artificial Sequence
  Description of Artificial Sequence: Synthetic oligonucleotide
cuauggagauucgcuucac

SEQ ID NO: 3152643 - RNA, 19 nt, Artificial Sequence
  Description of Artificial Sequence: Synthetic oligonucleotide
gugaagcgaaucuccauag

SEQ ID NO: 3152644 - RNA, 19 nt, Artificial Sequence
  Description of Artificial Sequence: Synthetic oligonucleotide
gccggagugaaacuaaaua

SEQ ID NO: 3152645 - RNA, 19 nt, Artificial Sequence
  Description of Artificial Sequence: Synthetic oligonucleotide
uauuuaguuucacuccggc

SEQ ID NO: 3152646 - RNA, 19 nt, Artificial Sequence
  Description of Artificial Sequence: Synthetic oligonucleotide
augguuggcccgacuauua

SEQ ID NO: 3152647 - RNA, 19 nt, Artificial Sequence
  Description of Artificial Sequence: Synthetic oligonucleotide
uaauagucgggccaaccau

SEQ ID NO: 3152648 - RNA, 19 nt, Artificial Sequence
  Description of Artificial Sequence: Synthetic oligonucleotide
cgacuauuacggucgaaac

SEQ ID NO: 3152649 - RNA, 19 nt, Artificial Sequence
  Description of Artificial Sequence: Synthetic oligonucleotide
guuucgaccguaauagucg

SEQ ID NO: 3152650 - RNA, 19 nt, Artificial Sequence
  Description of Artificial Sequence: Synthetic oligonucleotide
gacuauuacggucgaaaca

SEQ ID NO: 3152651 - RNA, 19 nt, Artificial Sequence
  Description of Artificial Sequence: Synthetic oligonucleotide
uguuucgaccguaauaguc

SEQ ID NO: 3152652 - RNA, 19 nt, Artificial Sequence
  Description of Artificial Sequence: Synthetic oligonucleotide
acuauuacggucgaaacau

SEQ ID NO: 3152653 - RNA, 19 nt, Artificial Sequence
  Description of Artificial Sequence: Synthetic oligonucleotide
auguuucgaccguaauagu

SEQ ID NO: 3152654 - RNA, 19 nt, Artificial Sequence
  Description of Artificial Sequence: Synthetic oligonucleotide
cuauuacggucgaaacauc

SEQ ID NO: 3152655 - RNA, 19 nt, Artificial Sequence
  Description of Artificial Sequence: Synthetic oligonucleotide
gauguuucgaccguaauag

SEQ ID NO: 3152656 - RNA, 19 nt, Artificial Sequence
  Description of Artificial Sequence: Synthetic oligonucleotide
uauuacggucgaaacauca

SEQ ID NO: 3152657 - RNA, 19 nt, Artificial Sequence
  Description of Artificial Sequence: Synthetic oligonucleotide
ugauguuucgaccguaaua

SEQ ID NO: 3152658 - RNA, 19 nt, Artificial Sequence
  Description of Artificial Sequence: Synthetic oligonucleotide
cuuuggcgagguuagugaa

SEQ ID NO: 3152659 - RNA, 19 nt, Artificial Sequence
  Description of Artificial Sequence: Synthetic oligonucleotide
uucacuaaccucgccaaag

SEQ ID NO: 3152660 - RNA, 19 nt, Artificial Sequence
  Description of Artificial Sequence: Synthetic oligonucleotide
uuuggcgagguuagugaag

SEQ ID NO: 3152661 - RNA, 19 nt, Artificial Sequence
  Description of Artificial Sequence: Synthetic oligonucleotide
cuucacuaaccucgccaaa

SEQ ID NO: 3152662 - RNA, 19 nt, Artificial Sequence
  Description of Artificial Sequence: Synthetic oligonucleotide
aacuguuguuccuuaccgu

SEQ ID NO: 3152663 - RNA, 19 nt, Artificial Sequence
  Description of Artificial Sequence: Synthetic oligonucleotide
acgguaaggaacaacaguu

SEQ ID NO: 3152664 - RNA, 19 nt, Artificial Sequence
  Description of Artificial Sequence: Synthetic oligonucleotide
cgcuaagaacucuacaaua

SEQ ID NO: 3152665 - RNA, 19 nt, Artificial Sequence
  Description of Artificial Sequence: Synthetic oligonucleotide
uauuguagaguucuuagcg

SEQ ID NO: 3152666 - RNA, 19 nt, Artificial Sequence
  Description of Artificial Sequence: Synthetic oligonucleotide
agguaauuucuacgucgga

SEQ ID NO: 3152667 - RNA, 19 nt, Artificial Sequence
  Description of Artificial Sequence: Synthetic oligonucleotide
uccgacguagaaauuaccu

SEQ ID NO: 3152668 - RNA, 19 nt, Artificial Sequence
  Description of Artificial Sequence: Synthetic oligonucleotide
auuucuacgucggaggcaa

SEQ ID NO: 3152669 - RNA, 19 nt, Artificial Sequence
  Description of Artificial Sequence: Synthetic oligonucleotide
uugccuccgacguagaaau

SEQ ID NO: 3152670 - RNA, 19 nt, Artificial Sequence
  Description of Artificial Sequence: Synthetic oligonucleotide
uacgucggaggcaacuuua

SEQ ID NO: 3152671 - RNA, 19 nt, Artificial Sequence
  Description of Artificial Sequence: Synthetic oligonucleotide
uaaaguugccuccgacgua

SEQ ID NO: 3152672 - RNA, 19 nt, Artificial Sequence
  Description of Artificial Sequence: Synthetic oligonucleotide
uacccaacaagguaacgug

SEQ ID NO: 3152673 - RNA, 19 nt, Artificial Sequence
  Description of Artificial Sequence: Synthetic oligonucleotide
cacguuaccuuguugggua

SEQ ID NO: 3152674 - RNA, 19 nt, Artificial Sequence
  Description of Artificial Sequence: Synthetic oligonucleotide
agguaacgugguugucuau

SEQ ID NO: 3152675 - RNA, 19 nt, Artificial Sequence
  Description of Artificial Sequence: Synthetic oligonucleotide
auagacaaccacguuaccu

SEQ ID NO: 3152676 - RNA, 19 nt, Artificial Sequence
  Description of Artificial Sequence: Synthetic oligonucleotide
uggugguaacuauccuauu

SEQ ID NO: 3152677 - RNA, 19 nt, Artificial Sequence
  Description of Artificial Sequence: Synthetic oligonucleotide
aauaggauaguuaccacca

SEQ ID NO: 3152678 - RNA, 19 nt, Artificial Sequence
  Description of Artificial Sequence: Synthetic oligonucleotide
auguuacugaauuuccggc

SEQ ID NO: 3152679 - RNA, 19 nt, Artificial Sequence
  Description of Artificial Sequence: Synthetic oligonucleotide
gccggaaauucaguaacau

SEQ ID NO: 3152680 - RNA, 19 nt, Artificial Sequence
  Description of Artificial Sequence: Synthetic oligonucleotide
uguuacugaauuuccggca

SEQ ID NO: 3152681 - RNA, 19 nt, Artificial Sequence
  Description of Artificial Sequence: Synthetic oligonucleotide
ugccggaaauucaguaaca

SEQ ID NO: 3152682 - RNA, 19 nt, Artificial Sequence
  Description of Artificial Sequence: Synthetic oligonucleotide
guuacugaauuuccggcag

SEQ ID NO: 3152683 - RNA, 19 nt, Artificial Sequence
  Description of Artificial Sequence: Synthetic oligonucleotide
cugccggaaauucaguaac

SEQ ID NO: 3152684 - RNA, 19 nt, Artificial Sequence
  Description of Artificial Sequence: Synthetic oligonucleotide
uuacugaauuuccggcagc

SEQ ID NO: 3152685 - RNA, 19 nt, Artificial Sequence
  Description of Artificial Sequence: Synthetic oligonucleotide
gcugccggaaauucaguaa

SEQ ID NO: 3152686 - RNA, 19 nt, Artificial Sequence
  Description of Artificial Sequence: Synthetic oligonucleotide
ccacgagucuacaauucac

SEQ ID NO: 3152687 - RNA, 19 nt, Artificial Sequence
  Description of Artificial Sequence: Synthetic oligonucleotide
gugaauuguagacucgugg

SEQ ID NO: 3152688 - RNA, 19 nt, Artificial Sequence
  Description of Artificial Sequence: Synthetic oligonucleotide
uugcacaagauguguacga

SEQ ID NO: 3152689 - RNA, 19 nt, Artificial Sequence
  Description of Artificial Sequence: Synthetic oligonucleotide
ucguacacaucuugugcaa

SEQ ID NO: 3152690 - RNA, 19 nt, Artificial Sequence
  Description of Artificial Sequence: Synthetic oligonucleotide
cugguaacugguucgauau

SEQ ID NO: 3152691 - RNA, 19 nt, Artificial Sequence
  Description of Artificial Sequence: Synthetic oligonucleotide
auaucgaaccaguuaccag

SEQ ID NO: 3152692 - RNA, 19 nt, Artificial Sequence
  Description of Artificial Sequence: Synthetic oligonucleotide
ugguaacugguucgauauu

SEQ ID NO: 3152693 - RNA, 19 nt, Artificial Sequence
  Description of Artificial Sequence: Synthetic oligonucleotide
aauaucgaaccaguuacca

SEQ ID NO: 3152694 - RNA, 19 nt, Artificial Sequence
  Description of Artificial Sequence: Synthetic oligonucleotide
gguaacugguucgauauug

SEQ ID NO: 3152695 - RNA, 19 nt, Artificial Sequence
  Description of Artificial Sequence: Synthetic oligonucleotide
caauaucgaaccaguuacc

SEQ ID NO: 3152696 - RNA, 19 nt, Artificial Sequence
  Description of Artificial Sequence: Synthetic oligonucleotide
guaacugguucgauauugg

SEQ ID NO: 3152697 - RNA, 19 nt, Artificial Sequence
  Description of Artificial Sequence: Synthetic oligonucleotide
ccaauaucgaaccaguuac

SEQ ID NO: 3152698 - RNA, 19 nt, Artificial Sequence
  Description of Artificial Sequence: Synthetic oligonucleotide
uaacugguucgauauuggc

SEQ ID NO: 3152699 - RNA, 19 nt, Artificial Sequence
  Description of Artificial Sequence: Synthetic oligonucleotide
gccaauaucgaaccaguua

SEQ ID NO: 3152700 - RNA, 19 nt, Artificial Sequence
  Description of Artificial Sequence: Synthetic oligonucleotide
aacugguucgauauuggca

SEQ ID NO: 3152701 - RNA, 19 nt, Artificial Sequence
  Description of Artificial Sequence: Synthetic oligonucleotide
ugccaauaucgaaccaguu

SEQ ID NO: 3152702 - RNA, 19 nt, Artificial Sequence
  Description of Artificial Sequence: Synthetic oligonucleotide
gguucgauauuggcauauc

SEQ ID NO: 3152703 - RNA, 19 nt, Artificial Sequence
  Description of Artificial Sequence: Synthetic oligonucleotide
gauaugccaauaucgaacc

SEQ ID NO: 3152704 - RNA, 19 nt, Artificial Sequence
  Description of Artificial Sequence: Synthetic oligonucleotide
guucgauauuggcauaucg

SEQ ID NO: 3152705 - RNA, 19 nt, Artificial Sequence
  Description of Artificial Sequence: Synthetic oligonucleotide
cgauaugccaauaucgaac

SEQ ID NO: 3152706 - RNA, 19 nt, Artificial Sequence
  Description of Artificial Sequence: Synthetic oligonucleotide
uucgauauuggcauaucgu

SEQ ID NO: 3152707 - RNA, 19 nt, Artificial Sequence
  Description of Artificial Sequence: Synthetic oligonucleotide
acgauaugccaauaucgaa

SEQ ID NO: 3152708 - RNA, 19 nt, Artificial Sequence
  Description of Artificial Sequence: Synthetic oligonucleotide
ucgauauuggcauaucgug

SEQ ID NO: 3152709 - RNA, 19 nt, Artificial Sequence
  Description of Artificial Sequence: Synthetic oligonucleotide
cacgauaugccaauaucga

SEQ ID NO: 3152710 - RNA, 19 nt, Artificial Sequence
  Description of Artificial Sequence: Synthetic oligonucleotide
cgauauuggcauaucgugu

SEQ ID NO: 3152711 - RNA, 19 nt, Artificial Sequence
  Description of Artificial Sequence: Synthetic oligonucleotide
acacgauaugccaauaucg

SEQ ID NO: 3152712 - RNA, 19 nt, Artificial Sequence
  Description of Artificial Sequence: Synthetic oligonucleotide
auauuggcauaucguguga

SEQ ID NO: 3152713 - RNA, 19 nt, Artificial Sequence
  Description of Artificial Sequence: Synthetic oligonucleotide
ucacacgauaugccaauau

SEQ ID NO: 3152714 - RNA, 19 nt, Artificial Sequence
  Description of Artificial Sequence: Synthetic oligonucleotide
acucugaaaaugcgggcau

SEQ ID NO: 3152715 - RNA, 19 nt, Artificial Sequence
  Description of Artificial Sequence: Synthetic oligonucleotide
augcccgcauuuucagagu

SEQ ID NO: 3152716 - RNA, 19 nt, Artificial Sequence
  Description of Artificial Sequence: Synthetic oligonucleotide
gguuccuggcguuggauua

SEQ ID NO: 3152717 - RNA, 19 nt, Artificial Sequence
  Description of Artificial Sequence: Synthetic oligonucleotide
uaauccaacgccaggaacc

SEQ ID NO: 3152718 - RNA, 19 nt, Artificial Sequence
  Description of Artificial Sequence: Synthetic oligonucleotide
ggauuaugcucauucuuuu

SEQ ID NO: 3152719 - RNA, 19 nt, Artificial Sequence
  Description of Artificial Sequence: Synthetic oligonucleotide
aaaagaaugagcauaaucc

SEQ ID NO: 3152720 - RNA, 19 nt, Artificial Sequence
  Description of Artificial Sequence: Synthetic oligonucleotide
uuuauauagguggucauuu

SEQ ID NO: 3152721 - RNA, 19 nt, Artificial Sequence
  Description of Artificial Sequence: Synthetic oligonucleotide
aaaugaccaccuauauaaa

SEQ ID NO: 3152722 - RNA, 19 nt, Artificial Sequence
  Description of Artificial Sequence: Synthetic oligonucleotide
uauagguggucauuugguu

SEQ ID NO: 3152723 - RNA, 19 nt, Artificial Sequence
  Description of Artificial Sequence: Synthetic oligonucleotide
aaccaaaugaccaccuaua

SEQ ID NO: 3152724 - RNA, 19 nt, Artificial Sequence
  Description of Artificial Sequence: Synthetic oligonucleotide
ggucauuugguucgagaua

SEQ ID NO: 3152725 - RNA, 19 nt, Artificial Sequence
  Description of Artificial Sequence: Synthetic oligonucleotide
uaucucgaaccaaaugacc

SEQ ID NO: 3152726 - RNA, 19 nt, Artificial Sequence
  Description of Artificial Sequence: Synthetic oligonucleotide
gucauuugguucgagauaa

SEQ ID NO: 3152727 - RNA, 19 nt, Artificial Sequence
  Description of Artificial Sequence: Synthetic oligonucleotide
uuaucucgaaccaaaugac

SEQ ID NO: 3152728 - RNA, 19 nt, Artificial Sequence
  Description of Artificial Sequence: Synthetic oligonucleotide
cucuccaagauucuugcaa

SEQ ID NO: 3152729 - RNA, 19 nt, Artificial Sequence
  Description of Artificial Sequence: Synthetic oligonucleotide
uugcaagaaucuuggagag

SEQ ID NO: 3152730 - RNA, 19 nt, Artificial Sequence
  Description of Artificial Sequence: Synthetic oligonucleotide
caggaagaguccguguuuu

SEQ ID NO: 3152731 - RNA, 19 nt, Artificial Sequence
  Description of Artificial Sequence: Synthetic oligonucleotide
aaaacacggacucuuccug

SEQ ID NO: 3152732 - RNA, 19 nt, Artificial Sequence
  Description of Artificial Sequence: Synthetic oligonucleotide
gagcuaaagagcucugguu

SEQ ID NO: 3152733 - RNA, 19 nt, Artificial Sequence
  Description of Artificial Sequence: Synthetic oligonucleotide
aaccagagcucuuuagcuc

SEQ ID NO: 3152734 - RNA, 19 nt, Artificial Sequence
  Description of Artificial Sequence: Synthetic oligonucleotide
aaggucuaucaugacagau

SEQ ID NO: 3152735 - RNA, 19 nt, Artificial Sequence
  Description of Artificial Sequence: Synthetic oligonucleotide
aucugucaugauagaccuu

SEQ ID NO: 3152736 - RNA, 19 nt, Artificial Sequence
  Description of Artificial Sequence: Synthetic oligonucleotide
cugguccagcggagaauaa

SEQ ID NO: 3152737 - RNA, 19 nt, Artificial Sequence
  Description of Artificial Sequence: Synthetic oligonucleotide
uuauucuccgcuggaccag

SEQ ID NO: 3152738 - RNA, 19 nt, Artificial Sequence
  Description of Artificial Sequence: Synthetic oligonucleotide
gcacccagcgaacacucau

SEQ ID NO: 3152739 - RNA, 19 nt, Artificial Sequence
  Description of Artificial Sequence: Synthetic oligonucleotide
augaguguucgcugggugc

SEQ ID NO: 3152740 - RNA, 19 nt, Artificial Sequence
  Description of Artificial Sequence: Synthetic oligonucleotide
acuguguuuagaccuguaa

SEQ ID NO: 3152741 - RNA, 19 nt, Artificial Sequence
  Description of Artificial Sequence: Synthetic oligonucleotide
uuacaggucuaaacacagu

SEQ ID NO: 3152742 - RNA, 19 nt, Artificial Sequence
  Description of Artificial Sequence: Synthetic oligonucleotide
uggcuucaaacauccaguu

SEQ ID NO: 3152743 - RNA, 19 nt, Artificial Sequence
  Description of Artificial Sequence: Synthetic oligonucleotide
aacuggauguuugaagcca

SEQ ID NO: 3152744 - RNA, 19 nt, Artificial Sequence
  Description of Artificial Sequence: Synthetic oligonucleotide
caaagacaaaguacuccaa

SEQ ID NO: 3152745 - RNA, 19 nt, Artificial Sequence
  Description of Artificial Sequence: Synthetic oligonucleotide
uuggaguacuuugucuuug

SEQ ID NO: 3152746 - RNA, 19 nt, Artificial Sequence
  Description of Artificial Sequence: Synthetic oligonucleotide
aagacaaaguacuccaauu

SEQ ID NO: 3152747 - RNA, 19 nt, Artificial Sequence
  Description of Artificial Sequence: Synthetic oligonucleotide
aauuggaguacuuugucuu

SEQ ID NO: 3152748 - RNA, 19 nt, Artificial Sequence
  Description of Artificial Sequence: Synthetic oligonucleotide
agacaaaguacuccaauua

SEQ ID NO: 3152749 - RNA, 19 nt, Artificial Sequence
  Description of Artificial Sequence: Synthetic oligonucleotide
uaauuggaguacuuugucu

SEQ ID NO: 3152750 - RNA, 19 nt, Artificial Sequence
  Description of Artificial Sequence: Synthetic oligonucleotide
gacaaaguacuccaauuau

SEQ ID NO: 3152751 - RNA, 19 nt, Artificial Sequence
  Description of Artificial Sequence: Synthetic oligonucleotide
auaauuggaguacuuuguc

SEQ ID NO: 3152752 - RNA, 19 nt, Artificial Sequence
  Description of Artificial Sequence: Synthetic oligonucleotide
ugauccuggauauacacuu

SEQ ID NO: 3152753 - RNA, 19 nt, Artificial Sequence
  Description of Artificial Sequence: Synthetic oligonucleotide
aaguguauauccaggauca

SEQ ID NO: 3152754 - RNA, 19 nt, Artificial Sequence
  Description of Artificial Sequence: Synthetic oligonucleotide
ucauuuaauacaggucgaa

SEQ ID NO: 3152755 - RNA, 19 nt, Artificial Sequence
  Description of Artificial Sequence: Synthetic oligonucleotide
uucgaccuguauuaaauga

SEQ ID NO: 3152756 - RNA, 19 nt, Artificial Sequence
  Description of Artificial Sequence: Synthetic oligonucleotide
auuuaauacaggucgaauu

SEQ ID NO: 3152757 - RNA, 19 nt, Artificial Sequence
  Description of Artificial Sequence: Synthetic oligonucleotide
aauucgaccuguauuaaau

SEQ ID NO: 3152758 - RNA, 19 nt, Artificial Sequence
  Description of Artificial Sequence: Synthetic oligonucleotide
uacaggucgaauugaacau

SEQ ID NO: 3152759 - RNA, 19 nt, Artificial Sequence
  Description of Artificial Sequence: Synthetic oligonucleotide
auguucaauucgaccugua

SEQ ID NO: 3152760 - RNA, 19 nt, Artificial Sequence
  Description of Artificial Sequence: Synthetic oligonucleotide
gucgaauugaacauuuaua

SEQ ID NO: 3152761 - RNA, 19 nt, Artificial Sequence
  Description of Artificial Sequence: Synthetic oligonucleotide
uauaaauguucaauucgac

SEQ ID NO: 3152762 - RNA, 19 nt, Artificial Sequence
  Description of Artificial Sequence: Synthetic oligonucleotide
auauugaaggaaacaugaa

SEQ ID NO: 3152763 - RNA, 19 nt, Artificial Sequence
  Description of Artificial Sequence: Synthetic oligonucleotide
uucauguuuccuucaauau

SEQ ID NO: 3152764 - RNA, 19 nt, Artificial Sequence
  Description of Artificial Sequence: Synthetic oligonucleotide
ggaaacaugaaguugcacu

SEQ ID NO: 3152765 - RNA, 19 nt, Artificial Sequence
  Description of Artificial Sequence: Synthetic oligonucleotide
agugcaacuucauguuucc

SEQ ID NO: 3152766 - RNA, 19 nt, Artificial Sequence
  Description of Artificial Sequence: Synthetic oligonucleotide
agcuaagauuuaccuugga

SEQ ID NO: 3152767 - RNA, 19 nt, Artificial Sequence
  Description of Artificial Sequence: Synthetic oligonucleotide
uccaagguaaaucuuagcu

SEQ ID NO: 3152768 - RNA, 19 nt, Artificial Sequence
  Description of Artificial Sequence: Synthetic oligonucleotide
cuaagauuuaccuuggaca

SEQ ID NO: 3152769 - RNA, 19 nt, Artificial Sequence
  Description of Artificial Sequence: Synthetic oligonucleotide
uguccaagguaaaucuuag

SEQ ID NO: 3152770 - RNA, 19 nt, Artificial Sequence
  Description of Artificial Sequence: Synthetic oligonucleotide
uaagauuuaccuuggacaa

SEQ ID NO: 3152771 - RNA, 19 nt, Artificial Sequence
  Description of Artificial Sequence: Synthetic oligonucleotide
uuguccaagguaaaucuua

SEQ ID NO: 3152772 - RNA, 19 nt, Artificial Sequence
  Description of Artificial Sequence: Synthetic oligonucleotide
gagacuggggccaugccaa

SEQ ID NO: 3152773 - RNA, 19 nt, Artificial Sequence
  Description of Artificial Sequence: Synthetic oligonucleotide
uuggcauggccccagucuc

SEQ ID NO: 3152774 - RNA, 19 nt, Artificial Sequence
  Description of Artificial Sequence: Synthetic oligonucleotide
gggccaugccaaggacuau

SEQ ID NO: 3152775 - RNA, 19 nt, Artificial Sequence
  Description of Artificial Sequence: Synthetic oligonucleotide
auaguccuuggcauggccc

SEQ ID NO: 3152776 - RNA, 19 nt, Artificial Sequence
  Description of Artificial Sequence: Synthetic oligonucleotide
ugucauagcuacuggggaa

SEQ ID NO: 3152777 - RNA, 19 nt, Artificial Sequence
  Description of Artificial Sequence: Synthetic oligonucleotide
uuccccaguagcuaugaca

SEQ ID NO: 3152778 - RNA, 19 nt, Artificial Sequence
  Description of Artificial Sequence: Synthetic oligonucleotide
accauugugugggaaggaa

SEQ ID NO: 3152779 - RNA, 19 nt, Artificial Sequence
  Description of Artificial Sequence: Synthetic oligonucleotide
uuccuucccacacaauggu

SEQ ID NO: 3152780 - RNA, 19 nt, Artificial Sequence
  Description of Artificial Sequence: Synthetic oligonucleotide
gugggcagauguaaagaga

SEQ ID NO: 3152781 - RNA, 19 nt, Artificial Sequence
  Description of Artificial Sequence: Synthetic oligonucleotide
ucucuuuacaucugcccac

SEQ ID NO: 3152782 - RNA, 19 nt, Artificial Sequence
  Description of Artificial Sequence: Synthetic oligonucleotide
gauguaaagagaccggcaa

SEQ ID NO: 3152783 - RNA, 19 nt, Artificial Sequence
  Description of Artificial Sequence: Synthetic oligonucleotide
uugccggucucuuuacauc

SEQ ID NO: 3152784 - RNA, 19 nt, Artificial Sequence
  Description of Artificial Sequence: Synthetic oligonucleotide
gaagccccgcguugccuuu

SEQ ID NO: 3152785 - RNA, 19 nt, Artificial Sequence
  Description of Artificial Sequence: Synthetic oligonucleotide
aaaggcaacgcggggcuuc

SEQ ID NO: 3152786 - RNA, 19 nt, Artificial Sequence
  Description of Artificial Sequence: Synthetic oligonucleotide
ucacauacucauuuuacuu

SEQ ID NO: 3152787 - RNA, 19 nt, Artificial Sequence
  Description of Artificial Sequence: Synthetic oligonucleotide
aaguaaaaugaguauguga

SEQ ID NO: 3152788 - RNA, 19 nt, Artificial Sequence
  Description of Artificial Sequence: Synthetic oligonucleotide
acuugaaauuaugucacua

SEQ ID NO: 3152789 - RNA, 19 nt, Artificial Sequence
  Description of Artificial Sequence: Synthetic oligonucleotide
uagugacauaauuucaagu

SEQ ID NO: 3152790 - RNA, 19 nt, Artificial Sequence
  Description of Artificial Sequence: Synthetic oligonucleotide
aaauuaugucacuagacaa

SEQ ID NO: 3152791 - RNA, 19 nt, Artificial Sequence
  Description of Artificial Sequence: Synthetic oligonucleotide
uugucuagugacauaauuu

SEQ ID NO: 3152792 - RNA, 19 nt, Artificial Sequence
  Description of Artificial Sequence: Synthetic oligonucleotide
gagucuugagauuguuuuu

SEQ ID NO: 3152793 - RNA, 19 nt, Artificial Sequence
  Description of Artificial Sequence: Synthetic oligonucleotide
aaaaacaaucucaagacuc

SEQ ID NO: 3152794 - RNA, 19 nt, Artificial Sequence
  Description of Artificial Sequence: Synthetic oligonucleotide
ccgucuaccaagaaguuga

SEQ ID NO: 3152795 - RNA, 19 nt, Artificial Sequence
  Description of Artificial Sequence: Synthetic oligonucleotide
ucaacuucuugguagacgg

SEQ ID NO: 3152796 - RNA, 19 nt, Artificial Sequence
  Description of Artificial Sequence: Synthetic oligonucleotide
cagcugacauguuugcuga

SEQ ID NO: 3152797 - RNA, 19 nt, Artificial Sequence
  Description of Artificial Sequence: Synthetic oligonucleotide
ucagcaaacaugucagcug

SEQ ID NO: 3152798 - RNA, 19 nt, Artificial Sequence
  Description of Artificial Sequence: Synthetic oligonucleotide
guuguugcccuuuucuacu

SEQ ID NO: 3152799 - RNA, 19 nt, Artificial Sequence
  Description of Artificial Sequence: Synthetic oligonucleotide
aguagaaaagggcaacaac

SEQ ID NO: 3152800 - RNA, 19 nt, Artificial Sequence
  Description of Artificial Sequence: Synthetic oligonucleotide
gacagugacuaucuuugug

SEQ ID NO: 3152801 - RNA, 19 nt, Artificial Sequence
  Description of Artificial Sequence: Synthetic oligonucleotide
cacaaagauagucacuguc

SEQ ID NO: 3152802 - RNA, 19 nt, Artificial Sequence
  Description of Artificial Sequence: Synthetic oligonucleotide
agcucugagcagaucauga

SEQ ID NO: 3152803 - RNA, 19 nt, Artificial Sequence
  Description of Artificial Sequence: Synthetic oligonucleotide
ucaugaucugcucagagcu

SEQ ID NO: 3152804 - RNA, 19 nt, Artificial Sequence
  Description of Artificial Sequence: Synthetic oligonucleotide
gucuuucgaagcuauguuu

SEQ ID NO: 3152805 - RNA, 19 nt, Artificial Sequence
  Description of Artificial Sequence: Synthetic oligonucleotide
aaacauagcuucgaaagac

SEQ ID NO: 3152806 - RNA, 19 nt, Artificial Sequence
  Description of Artificial Sequence: Synthetic oligonucleotide
gcagcuugcuaucauugga

SEQ ID NO: 3152807 - RNA, 19 nt, Artificial Sequence
  Description of Artificial Sequence: Synthetic oligonucleotide
uccaaugauagcaagcugc

SEQ ID NO: 3152808 - RNA, 19 nt, Artificial Sequence
  Description of Artificial Sequence: Synthetic oligonucleotide
gcuaucauuggagaugaca

SEQ ID NO: 3152809 - RNA, 19 nt, Artificial Sequence
  Description of Artificial Sequence: Synthetic oligonucleotide
ugucaucuccaaugauagc

SEQ ID NO: 3152810 - RNA, 19 nt, Artificial Sequence
  Description of Artificial Sequence: Synthetic oligonucleotide
gccuauuuaagagcggcau

SEQ ID NO: 3152811 - RNA, 19 nt, Artificial Sequence
  Description of Artificial Sequence: Synthetic oligonucleotide
augccgcucuuaaauaggc

SEQ ID NO: 3152812 - RNA, 19 nt, Artificial Sequence
  Description of Artificial Sequence: Synthetic oligonucleotide
cgugguacacagauucuuc

SEQ ID NO: 3152813 - RNA, 19 nt, Artificial Sequence
  Description of Artificial Sequence: Synthetic oligonucleotide
gaagaaucuguguaccacg

SEQ ID NO: 3152814 - RNA, 19 nt, Artificial Sequence
  Description of Artificial Sequence: Synthetic oligonucleotide
cuacuuaaggaagaacaga

SEQ ID NO: 3152815 - RNA, 19 nt, Artificial Sequence
  Description of Artificial Sequence: Synthetic oligonucleotide
ucuguucuuccuuaaguag

SEQ ID NO: 3152816 - RNA, 19 nt, Artificial Sequence
  Description of Artificial Sequence: Synthetic oligonucleotide
caagcuggucauugucaca

SEQ ID NO: 3152817 - RNA, 19 nt, Artificial Sequence
  Description of Artificial Sequence: Synthetic oligonucleotide
ugugacaaugaccagcuug

SEQ ID NO: 3152818 - RNA, 19 nt, Artificial Sequence
  Description of Artificial Sequence: Synthetic oligonucleotide
ucaucauucccaacguugu

SEQ ID NO: 3152819 - RNA, 19 nt, Artificial Sequence
  Description of Artificial Sequence: Synthetic oligonucleotide
acaacguugggaaugauga

SEQ ID NO: 3152820 - RNA, 19 nt, Artificial Sequence
  Description of Artificial Sequence: Synthetic oligonucleotide
gaguggagugaauguagcu

SEQ ID NO: 3152821 - RNA, 19 nt, Artificial Sequence
  Description of Artificial Sequence: Synthetic oligonucleotide
agcuacauucacuccacuc

SEQ ID NO: 3152822 - RNA, 19 nt, Artificial Sequence
  Description of Artificial Sequence: Synthetic oligonucleotide
acaaggagcaguggaauga

SEQ ID NO: 3152823 - RNA, 19 nt, Artificial Sequence
  Description of Artificial Sequence: Synthetic oligonucleotide
ucauuccacugcuccuugu

SEQ ID NO: 3152824 - RNA, 19 nt, Artificial Sequence
  Description of Artificial Sequence: Synthetic oligonucleotide
augccaagcaagaaaagcg

SEQ ID NO: 3152825 - RNA, 19 nt, Artificial Sequence
  Description of Artificial Sequence: Synthetic oligonucleotide
ugccaagcaagaaaagcgg

SEQ ID NO: 3152826 - RNA, 19 nt, Artificial Sequence
  Description of Artificial Sequence: Synthetic oligonucleotide
gccaagcaagaaaagcggc

SEQ ID NO: 3152827 - RNA, 19 nt, Artificial Sequence
  Description of Artificial Sequence: Synthetic oligonucleotide
ccaagcaagaaaagcggcc

SEQ ID NO: 3152828 - RNA, 19 nt, Artificial Sequence
  Description of Artificial Sequence: Synthetic oligonucleotide
caagcaagaaaagcggccc

SEQ ID NO: 3152829 - RNA, 19 nt, Artificial Sequence
  Description of Artificial Sequence: Synthetic oligonucleotide
aagcaagaaaagcggcccg

SEQ ID NO: 3152830 - RNA, 19 nt, Artificial Sequence
  Description of Artificial Sequence: Synthetic oligonucleotide
caagaaaagcggcccgcaa

SEQ ID NO: 3152831 - RNA, 19 nt, Artificial Sequence
  Description of Artificial Sequence: Synthetic oligonucleotide
aagaaaagcggcccgcaac

SEQ ID NO: 3152832 - RNA, 19 nt, Artificial Sequence
  Description of Artificial Sequence: Synthetic oligonucleotide
ccgcaaccccauaagaggu

SEQ ID NO: 3152833 - RNA, 19 nt, Artificial Sequence
  Description of Artificial Sequence: Synthetic oligonucleotide
cgcaaccccauaagaggug

SEQ ID NO: 3152834 - RNA, 19 nt, Artificial Sequence
  Description of Artificial Sequence: Synthetic oligonucleotide
gcaaccccauaagaggugg

SEQ ID NO: 3152835 - RNA, 19 nt, Artificial Sequence
  Description of Artificial Sequence: Synthetic oligonucleotide
caaccccauaagagguggg

SEQ ID NO: 3152836 - RNA, 19 nt, Artificial Sequence
  Description of Artificial Sequence: Synthetic oligonucleotide
aaccccauaagaggugggu

SEQ ID NO: 3152837 - RNA, 19 nt, Artificial Sequence
  Description of Artificial Sequence: Synthetic oligonucleotide
accccauaagaggugggug

SEQ ID NO: 3152838 - RNA, 19 nt, Artificial Sequence
  Description of Artificial Sequence: Synthetic oligonucleotide
ccccauaagaggugggugu

SEQ ID NO: 3152839 - RNA, 19 nt, Artificial Sequence
  Description of Artificial Sequence: Synthetic oligonucleotide
cccauaagagguggguguu

SEQ ID NO: 3152840 - RNA, 19 nt, Artificial Sequence
  Description of Artificial Sequence: Synthetic oligonucleotide
ccauaagagguggguguuc

SEQ ID NO: 3152841 - RNA, 19 nt, Artificial Sequence
  Description of Artificial Sequence: Synthetic oligonucleotide
cauaagagguggguguuca

SEQ ID NO: 3152842 - RNA, 19 nt, Artificial Sequence
  Description of Artificial Sequence: Synthetic oligonucleotide
auaagagguggguguucac

SEQ ID NO: 3152843 - RNA, 19 nt, Artificial Sequence
  Description of Artificial Sequence: Synthetic oligonucleotide
uaagagguggguguucacc

SEQ ID NO: 3152844 - RNA, 19 nt, Artificial Sequence
  Description of Artificial Sequence: Synthetic oligonucleotide
aagagguggguguucaccc

SEQ ID NO: 3152845 - RNA, 19 nt, Artificial Sequence
  Description of Artificial Sequence: Synthetic oligonucleotide
agagguggguguucacccu

SEQ ID NO: 3152846 - RNA, 19 nt, Artificial Sequence
  Description of Artificial Sequence: Synthetic oligonucleotide
gagguggguguucacccuu

SEQ ID NO: 3152847 - RNA, 19 nt, Artificial Sequence
  Description of Artificial Sequence: Synthetic oligonucleotide
agguggguguucacccuua

SEQ ID NO: 3152848 - RNA, 19 nt, Artificial Sequence
  Description of Artificial Sequence: Synthetic oligonucleotide
gguggguguucacccuuaa

SEQ ID NO: 3152849 - RNA, 19 nt, Artificial Sequence
  Description of Artificial Sequence: Synthetic oligonucleotide
guggguguucacccuuaau

SEQ ID NO: 3152850 - RNA, 19 nt, Artificial Sequence
  Description of Artificial Sequence: Synthetic oligonucleotide
uggguguucacccuuaaua

SEQ ID NO: 3152851 - RNA, 19 nt, Artificial Sequence
  Description of Artificial Sequence: Synthetic oligonucleotide
ggguguucacccuuaauaa

SEQ ID NO: 3152852 - RNA, 19 nt, Artificial Sequence
  Description of Artificial Sequence: Synthetic oligonucleotide
gguguucacccuuaauaau

SEQ ID NO: 3152853 - RNA, 19 nt, Artificial Sequence
  Description of Artificial Sequence: Synthetic oligonucleotide
guguucacccuuaauaauc

SEQ ID NO: 3152854 - RNA, 19 nt, Artificial Sequence
  Description of Artificial Sequence: Synthetic oligonucleotide
uguucacccuuaauaaucc

SEQ ID NO: 3152855 - RNA, 19 nt, Artificial Sequence
  Description of Artificial Sequence: Synthetic oligonucleotide
guucacccuuaauaauccu

SEQ ID NO: 3152856 - RNA, 19 nt, Artificial Sequence
  Description of Artificial Sequence: Synthetic oligonucleotide
uucacccuuaauaauccuu

SEQ ID NO: 3152857 - RNA, 19 nt, Artificial Sequence
  Description of Artificial Sequence: Synthetic oligonucleotide
ucacccuuaauaauccuuc

SEQ ID NO: 3152858 - RNA, 19 nt, Artificial Sequence
  Description of Artificial Sequence: Synthetic oligonucleotide
cacccuuaauaauccuucc

SEQ ID NO: 3152859 - RNA, 19 nt, Artificial Sequence
  Description of Artificial Sequence: Synthetic oligonucleotide
acccuuaauaauccuuccg

SEQ ID NO: 3152860 - RNA, 19 nt, Artificial Sequence
  Description of Artificial Sequence: Synthetic oligonucleotide
cccuuaauaauccuuccga

SEQ ID NO: 3152861 - RNA, 19 nt, Artificial Sequence
  Description of Artificial Sequence: Synthetic oligonucleotide
ccuuaauaauccuuccgag

SEQ ID NO: 3152862 - RNA, 19 nt, Artificial Sequence
  Description of Artificial Sequence: Synthetic oligonucleotide
cuuaauaauccuuccgagg

SEQ ID NO: 3152863 - RNA, 19 nt, Artificial Sequence
  Description of Artificial Sequence: Synthetic oligonucleotide
uuaauaauccuuccgagga

SEQ ID NO: 3152864 - RNA, 19 nt, Artificial Sequence
  Description of Artificial Sequence: Synthetic oligonucleotide
uaauaauccuuccgaggag

SEQ ID NO: 3152865 - RNA, 19 nt, Artificial Sequence
  Description of Artificial Sequence: Synthetic oligonucleotide
aauaauccuuccgaggagg

SEQ ID NO: 3152866 - RNA, 19 nt, Artificial Sequence
  Description of Artificial Sequence: Synthetic oligonucleotide
auaauccuuccgaggagga

SEQ ID NO: 3152867 - RNA, 19 nt, Artificial Sequence
  Description of Artificial Sequence: Synthetic oligonucleotide
uaauccuuccgaggaggag

SEQ ID NO: 3152868 - RNA, 19 nt, Artificial Sequence
  Description of Artificial Sequence: Synthetic oligonucleotide
aauccuuccgaggaggaga

SEQ ID NO: 3152869 - RNA, 19 nt, Artificial Sequence
  Description of Artificial Sequence: Synthetic oligonucleotide
auccuuccgaggaggagaa

SEQ ID NO: 3152870 - RNA, 19 nt, Artificial Sequence
  Description of Artificial Sequence: Synthetic oligonucleotide
uccuuccgaggaggagaaa

SEQ ID NO: 3152871 - RNA, 19 nt, Artificial Sequence
  Description of Artificial Sequence: Synthetic oligonucleotide
ccuuccgaggaggagaaaa

SEQ ID NO: 3152872 - RNA, 19 nt, Artificial Sequence
  Description of Artificial Sequence: Synthetic oligonucleotide
aaacaaaauacgggagcuu

SEQ ID NO: 3152873 - RNA, 19 nt, Artificial Sequence
  Description of Artificial Sequence: Synthetic oligonucleotide
aacaaaauacgggagcuuc

SEQ ID NO: 3152874 - RNA, 19 nt, Artificial Sequence
  Description of Artificial Sequence: Synthetic oligonucleotide
acaaaauacgggagcuucc

SEQ ID NO: 3152875 - RNA, 19 nt, Artificial Sequence
  Description of Artificial Sequence: Synthetic oligonucleotide
caaaauacgggagcuucca

SEQ ID NO: 3152876 - RNA, 19 nt, Artificial Sequence
  Description of Artificial Sequence: Synthetic oligonucleotide
aaaauacgggagcuuccaa

SEQ ID NO: 3152877 - RNA, 19 nt, Artificial Sequence
  Description of Artificial Sequence: Synthetic oligonucleotide
aaauacgggagcuuccaau

SEQ ID NO: 3152878 - RNA, 19 nt, Artificial Sequence
  Description of Artificial Sequence: Synthetic oligonucleotide
aauacgggagcuuccaauc

SEQ ID NO: 3152879 - RNA, 19 nt, Artificial Sequence
  Description of Artificial Sequence: Synthetic oligonucleotide
auacgggagcuuccaaucu

SEQ ID NO: 3152880 - RNA, 19 nt, Artificial Sequence
  Description of Artificial Sequence: Synthetic oligonucleotide
uacgggagcuuccaaucuc

SEQ ID NO: 3152881 - RNA, 19 nt, Artificial Sequence
  Description of Artificial Sequence: Synthetic oligonucleotide
acgggagcuuccaaucucc

SEQ ID NO: 3152882 - RNA, 19 nt, Artificial Sequence
  Description of Artificial Sequence: Synthetic oligonucleotide
gggagcuuccaaucucccu

SEQ ID NO: 3152883 - RNA, 19 nt, Artificial Sequence
  Description of Artificial Sequence: Synthetic oligonucleotide
ggagcuuccaaucucccuu

SEQ ID NO: 3152884 - RNA, 19 nt, Artificial Sequence
  Description of Artificial Sequence: Synthetic oligonucleotide
gagcuuccaaucucccuuu

SEQ ID NO: 3152885 - RNA, 19 nt, Artificial Sequence
  Description of Artificial Sequence: Synthetic oligonucleotide
agcuuccaaucucccuuuu

SEQ ID NO: 3152886 - RNA, 19 nt, Artificial Sequence
  Description of Artificial Sequence: Synthetic oligonucleotide
uuugauuauuuuguuugcg

SEQ ID NO: 3152887 - RNA, 19 nt, Artificial Sequence
  Description of Artificial Sequence: Synthetic oligonucleotide
uugauuauuuuguuugcgg

SEQ ID NO: 3152888 - RNA, 19 nt, Artificial Sequence
  Description of Artificial Sequence: Synthetic oligonucleotide
ugauuauuuuguuugcgga

SEQ ID NO: 3152889 - RNA, 19 nt, Artificial Sequence
  Description of Artificial Sequence: Synthetic oligonucleotide
gauuauuuuguuugcggag

SEQ ID NO: 3152890 - RNA, 19 nt, Artificial Sequence
  Description of Artificial Sequence: Synthetic oligonucleotide
auuauuuuguuugcggaga

SEQ ID NO: 3152891 - RNA, 19 nt, Artificial Sequence
  Description of Artificial Sequence: Synthetic oligonucleotide
uuauuuuguuugcggagag

SEQ ID NO: 3152892 - RNA, 19 nt, Artificial Sequence
  Description of Artificial Sequence: Synthetic oligonucleotide
uauuuuguuugcggagagg

SEQ ID NO: 3152893 - RNA, 19 nt, Artificial Sequence
  Description of Artificial Sequence: Synthetic oligonucleotide
auuuuguuugcggagagga

SEQ ID NO: 3152894 - RNA, 19 nt, Artificial Sequence
  Description of Artificial Sequence: Synthetic oligonucleotide
uuuuguuugcggagaggaa

SEQ ID NO: 3152895 - RNA, 19 nt, Artificial Sequence
  Description of Artificial Sequence: Synthetic oligonucleotide
uuuguuugcggagaggaag

SEQ ID NO: 3152896 - RNA, 19 nt, Artificial Sequence
  Description of Artificial Sequence: Synthetic oligonucleotide
uuguuugcggagaggaagg

SEQ ID NO: 3152897 - RNA, 19 nt, Artificial Sequence
  Description of Artificial Sequence: Synthetic oligonucleotide
uguuugcggagaggaaggu

SEQ ID NO: 3152898 - RNA, 19 nt, Artificial Sequence
  Description of Artificial Sequence: Synthetic oligonucleotide
guuugcggagaggaagguu

SEQ ID NO: 3152899 - RNA, 19 nt, Artificial Sequence
  Description of Artificial Sequence: Synthetic oligonucleotide
uuugcggagaggaagguuu

SEQ ID NO: 3152900 - RNA, 19 nt, Artificial Sequence
  Description of Artificial Sequence: Synthetic oligonucleotide
uugcggagaggaagguuug

SEQ ID NO: 3152901 - RNA, 19 nt, Artificial Sequence
  Description of Artificial Sequence: Synthetic oligonucleotide
ugcggagaggaagguuugg

SEQ ID NO: 3152902 - RNA, 19 nt, Artificial Sequence
  Description of Artificial Sequence: Synthetic oligonucleotide
gcggagaggaagguuugga

SEQ ID NO: 3152903 - RNA, 19 nt, Artificial Sequence
  Description of Artificial Sequence: Synthetic oligonucleotide
cggagaggaagguuuggaa

SEQ ID NO: 3152904 - RNA, 19 nt, Artificial Sequence
  Description of Artificial Sequence: Synthetic oligonucleotide
ggagaggaagguuuggaag

SEQ ID NO: 3152905 - RNA, 19 nt, Artificial Sequence
  Description of Artificial Sequence: Synthetic oligonucleotide
gagaggaagguuuggaaga

SEQ ID NO: 3152906 - RNA, 19 nt, Artificial Sequence
  Description of Artificial Sequence: Synthetic oligonucleotide
agaggaagguuuggaagag

SEQ ID NO: 3152907 - RNA, 19 nt, Artificial Sequence
  Description of Artificial Sequence: Synthetic oligonucleotide
gaggaagguuuggaagagg

SEQ ID NO: 3152908 - RNA, 19 nt, Artificial Sequence
  Description of Artificial Sequence: Synthetic oligonucleotide
aggaagguuuggaagaggg

SEQ ID NO: 3152909 - RNA, 19 nt, Artificial Sequence
  Description of Artificial Sequence: Synthetic oligonucleotide
ggaagguuuggaagagggu

SEQ ID NO: 3152910 - RNA, 19 nt, Artificial Sequence
  Description of Artificial Sequence: Synthetic oligonucleotide
gaagguuuggaagagggua

SEQ ID NO: 3152911 - RNA, 19 nt, Artificial Sequence
  Description of Artificial Sequence: Synthetic oligonucleotide
aagguuuggaagaggguag

SEQ ID NO: 3152912 - RNA, 19 nt, Artificial Sequence
  Description of Artificial Sequence: Synthetic oligonucleotide
agguuuggaagaggguaga

SEQ ID NO: 3152913 - RNA, 19 nt, Artificial Sequence
  Description of Artificial Sequence: Synthetic oligonucleotide
gguuuggaagaggguagaa

SEQ ID NO: 3152914 - RNA, 19 nt, Artificial Sequence
  Description of Artificial Sequence: Synthetic oligonucleotide
guuuggaagaggguagaac

SEQ ID NO: 3152915 - RNA, 19 nt, Artificial Sequence
  Description of Artificial Sequence: Synthetic oligonucleotide
uuuggaagaggguagaacu

SEQ ID NO: 3152916 - RNA, 19 nt, Artificial Sequence
  Description of Artificial Sequence: Synthetic oligonucleotide
uuggaagaggguagaacuc

SEQ ID NO: 3152917 - RNA, 19 nt, Artificial Sequence
  Description of Artificial Sequence: Synthetic oligonucleotide
ggaagaggguagaacuccu

SEQ ID NO: 3152918 - RNA, 19 nt, Artificial Sequence
  Description of Artificial Sequence: Synthetic oligonucleotide
gaagaggguagaacuccuc

SEQ ID NO: 3152919 - RNA, 19 nt, Artificial Sequence
  Description of Artificial Sequence: Synthetic oligonucleotide
aagaggguagaacuccuca

SEQ ID NO: 3152920 - RNA, 19 nt, Artificial Sequence
  Description of Artificial Sequence: Synthetic oligonucleotide
agaggguagaacuccucac

SEQ ID NO: 3152921 - RNA, 19 nt, Artificial Sequence
  Description of Artificial Sequence: Synthetic oligonucleotide
gaggguagaacuccucacc

SEQ ID NO: 3152922 - RNA, 19 nt, Artificial Sequence
  Description of Artificial Sequence: Synthetic oligonucleotide
aggguagaacuccucaccu

SEQ ID NO: 3152923 - RNA, 19 nt, Artificial Sequence
  Description of Artificial Sequence: Synthetic oligonucleotide
ggguagaacuccucaccuc

SEQ ID NO: 3152924 - RNA, 19 nt, Artificial Sequence
  Description of Artificial Sequence: Synthetic oligonucleotide
gguagaacuccucaccucc

SEQ ID NO: 3152925 - RNA, 19 nt, Artificial Sequence
  Description of Artificial Sequence: Synthetic oligonucleotide
guagaacuccucaccucca

SEQ ID NO: 3152926 - RNA, 19 nt, Artificial Sequence
  Description of Artificial Sequence: Synthetic oligonucleotide
uagaacuccucaccuccag

SEQ ID NO: 3152927 - RNA, 19 nt, Artificial Sequence
  Description of Artificial Sequence: Synthetic oligonucleotide
agaacuccucaccuccagg

SEQ ID NO: 3152928 - RNA, 19 nt, Artificial Sequence
  Description of Artificial Sequence: Synthetic oligonucleotide
uccucaccuccagggguuu

SEQ ID NO: 3152929 - RNA, 19 nt, Artificial Sequence
  Description of Artificial Sequence: Synthetic oligonucleotide
accuccagggguuugcgaa

SEQ ID NO: 3152930 - RNA, 19 nt, Artificial Sequence
  Description of Artificial Sequence: Synthetic oligonucleotide
ccuccagggguuugcgaau

SEQ ID NO: 3152931 - RNA, 19 nt, Artificial Sequence
  Description of Artificial Sequence: Synthetic oligonucleotide
cuccagggguuugcgaauu

SEQ ID NO: 3152932 - RNA, 19 nt, Artificial Sequence
  Description of Artificial Sequence: Synthetic oligonucleotide
uccagggguuugcgaauuu

SEQ ID NO: 3152933 - RNA, 19 nt, Artificial Sequence
  Description of Artificial Sequence: Synthetic oligonucleotide
ggguuugcgaauuuugcua

SEQ ID NO: 3152934 - RNA, 19 nt, Artificial Sequence
  Description of Artificial Sequence: Synthetic oligonucleotide
gguuugcgaauuuugcuaa

SEQ ID NO: 3152935 - RNA, 19 nt, Artificial Sequence
  Description of Artificial Sequence: Synthetic oligonucleotide
guuugcgaauuuugcuaag

SEQ ID NO: 3152936 - RNA, 19 nt, Artificial Sequence
  Description of Artificial Sequence: Synthetic oligonucleotide
uuugcgaauuuugcuaaga

SEQ ID NO: 3152937 - RNA, 19 nt, Artificial Sequence
  Description of Artificial Sequence: Synthetic oligonucleotide
uugcgaauuuugcuaagaa

SEQ ID NO: 3152938 - RNA, 19 nt, Artificial Sequence
  Description of Artificial Sequence: Synthetic oligonucleotide
ugcgaauuuugcuaagaag

SEQ ID NO: 3152939 - RNA, 19 nt, Artificial Sequence
  Description of Artificial Sequence: Synthetic oligonucleotide
gcgaauuuugcuaagaagc

SEQ ID NO: 3152940 - RNA, 19 nt, Artificial Sequence
  Description of Artificial Sequence: Synthetic oligonucleotide
cgaauuuugcuaagaagca

SEQ ID NO: 3152941 - RNA, 19 nt, Artificial Sequence
  Description of Artificial Sequence: Synthetic oligonucleotide
gaauuuugcuaagaagcag

SEQ ID NO: 3152942 - RNA, 19 nt, Artificial Sequence
  Description of Artificial Sequence: Synthetic oligonucleotide
aauuuugcuaagaagcaga

SEQ ID NO: 3152943 - RNA, 19 nt, Artificial Sequence
  Description of Artificial Sequence: Synthetic oligonucleotide
auuuugcuaagaagcagac

SEQ ID NO: 3152944 - RNA, 19 nt, Artificial Sequence
  Description of Artificial Sequence: Synthetic oligonucleotide
uuuugcuaagaagcagacu

SEQ ID NO: 3152945 - RNA, 19 nt, Artificial Sequence
  Description of Artificial Sequence: Synthetic oligonucleotide
uuugcuaagaagcagacuu

SEQ ID NO: 3152946 - RNA, 19 nt, Artificial Sequence
  Description of Artificial Sequence: Synthetic oligonucleotide
uugcuaagaagcagacuuu

SEQ ID NO: 3152947 - RNA, 19 nt, Artificial Sequence
  Description of Artificial Sequence: Synthetic oligonucleotide
ugcuaagaagcagacuuuu

SEQ ID NO: 3152948 - RNA, 19 nt, Artificial Sequence
  Description of Artificial Sequence: Synthetic oligonucleotide
gcuaagaagcagacuuuua

SEQ ID NO: 3152949 - RNA, 19 nt, Artificial Sequence
  Description of Artificial Sequence: Synthetic oligonucleotide
cuaagaagcagacuuuuaa

SEQ ID NO: 3152950 - RNA, 19 nt, Artificial Sequence
  Description of Artificial Sequence: Synthetic oligonucleotide
uaagaagcagacuuuuaac

SEQ ID NO: 3152951 - RNA, 19 nt, Artificial Sequence
  Description of Artificial Sequence: Synthetic oligonucleotide
aagaagcagacuuuuaaca

SEQ ID NO: 3152952 - RNA, 19 nt, Artificial Sequence
  Description of Artificial Sequence: Synthetic oligonucleotide
agaagcagacuuuuaacaa

SEQ ID NO: 3152953 - RNA, 19 nt, Artificial Sequence
  Description of Artificial Sequence: Synthetic oligonucleotide
gaagcagacuuuuaacaag

SEQ ID NO: 3152954 - RNA, 19 nt, Artificial Sequence
  Description of Artificial Sequence: Synthetic oligonucleotide
aagcagacuuuuaacaagg

SEQ ID NO: 3152955 - RNA, 19 nt, Artificial Sequence
  Description of Artificial Sequence: Synthetic oligonucleotide
agcagacuuuuaacaaggu

SEQ ID NO: 3152956 - RNA, 19 nt, Artificial Sequence
  Description of Artificial Sequence: Synthetic oligonucleotide
gcagacuuuuaacaaggug

SEQ ID NO: 3152957 - RNA, 19 nt, Artificial Sequence
  Description of Artificial Sequence: Synthetic oligonucleotide
cagacuuuuaacaagguga

SEQ ID NO: 3152958 - RNA, 19 nt, Artificial Sequence
  Description of Artificial Sequence: Synthetic oligonucleotide
agacuuuuaacaaggugaa

SEQ ID NO: 3152959 - RNA, 19 nt, Artificial Sequence
  Description of Artificial Sequence: Synthetic oligonucleotide
gacuuuuaacaaggugaag

SEQ ID NO: 3152960 - RNA, 19 nt, Artificial Sequence
  Description of Artificial Sequence: Synthetic oligonucleotide
acuuuuaacaaggugaagu

SEQ ID NO: 3152961 - RNA, 19 nt, Artificial Sequence
  Description of Artificial Sequence: Synthetic oligonucleotide
cuuuuaacaaggugaagug

SEQ ID NO: 3152962 - RNA, 19 nt, Artificial Sequence
  Description of Artificial Sequence: Synthetic oligonucleotide
uuuuaacaaggugaagugg

SEQ ID NO: 3152963 - RNA, 19 nt, Artificial Sequence
  Description of Artificial Sequence: Synthetic oligonucleotide
uuuaacaaggugaaguggu

SEQ ID NO: 3152964 - RNA, 19 nt, Artificial Sequence
  Description of Artificial Sequence: Synthetic oligonucleotide
uuaacaaggugaaguggua

SEQ ID NO: 3152965 - RNA, 19 nt, Artificial Sequence
  Description of Artificial Sequence: Synthetic oligonucleotide
uaacaaggugaagugguau

SEQ ID NO: 3152966 - RNA, 19 nt, Artificial Sequence
  Description of Artificial Sequence: Synthetic oligonucleotide
aacaaggugaagugguauu

SEQ ID NO: 3152967 - RNA, 19 nt, Artificial Sequence
  Description of Artificial Sequence: Synthetic oligonucleotide
acaaggugaagugguauuu

SEQ ID NO: 3152968 - RNA, 19 nt, Artificial Sequence
  Description of Artificial Sequence: Synthetic oligonucleotide
caaggugaagugguauuuu

SEQ ID NO: 3152969 - RNA, 19 nt, Artificial Sequence
  Description of Artificial Sequence: Synthetic oligonucleotide
aaggugaagugguauuuug

SEQ ID NO: 3152970 - RNA, 19 nt, Artificial Sequence
  Description of Artificial Sequence: Synthetic oligonucleotide
aggugaagugguauuuugg

SEQ ID NO: 3152971 - RNA, 19 nt, Artificial Sequence
  Description of Artificial Sequence: Synthetic oligonucleotide
ggugaagugguauuuuggu

SEQ ID NO: 3152972 - RNA, 19 nt, Artificial Sequence
  Description of Artificial Sequence: Synthetic oligonucleotide
gugaagugguauuuuggug

SEQ ID NO: 3152973 - RNA, 19 nt, Artificial Sequence
  Description of Artificial Sequence: Synthetic oligonucleotide
ugaagugguauuuuggugc

SEQ ID NO: 3152974 - RNA, 19 nt, Artificial Sequence
  Description of Artificial Sequence: Synthetic oligonucleotide
gaagugguauuuuggugcc

SEQ ID NO: 3152975 - RNA, 19 nt, Artificial Sequence
  Description of Artificial Sequence: Synthetic oligonucleotide
aagugguauuuuggugccc

SEQ ID NO: 3152976 - RNA, 19 nt, Artificial Sequence
  Description of Artificial Sequence: Synthetic oligonucleotide
agugguauuuuggugcccg

SEQ ID NO: 3152977 - RNA, 19 nt, Artificial Sequence
  Description of Artificial Sequence: Synthetic oligonucleotide
gugguauuuuggugcccgc

SEQ ID NO: 3152978 - RNA, 19 nt, Artificial Sequence
  Description of Artificial Sequence: Synthetic oligonucleotide
ugguauuuuggugcccgcu

SEQ ID NO: 3152979 - RNA, 19 nt, Artificial Sequence
  Description of Artificial Sequence: Synthetic oligonucleotide
gguauuuuggugcccgcug

SEQ ID NO: 3152980 - RNA, 19 nt, Artificial Sequence
  Description of Artificial Sequence: Synthetic oligonucleotide
guauuuuggugcccgcugc

SEQ ID NO: 3152981 - RNA, 19 nt, Artificial Sequence
  Description of Artificial Sequence: Synthetic oligonucleotide
uauuuuggugcccgcugcc

SEQ ID NO: 3152982 - RNA, 19 nt, Artificial Sequence
  Description of Artificial Sequence: Synthetic oligonucleotide
auuuuggugcccgcugcca

SEQ ID NO: 3152983 - RNA, 19 nt, Artificial Sequence
  Description of Artificial Sequence: Synthetic oligonucleotide
ccgcugccacaucgagaaa

SEQ ID NO: 3152984 - RNA, 19 nt, Artificial Sequence
  Description of Artificial Sequence: Synthetic oligonucleotide
cgcugccacaucgagaaag

SEQ ID NO: 3152985 - RNA, 19 nt, Artificial Sequence
  Description of Artificial Sequence: Synthetic oligonucleotide
gcugccacaucgagaaagc

SEQ ID NO: 3152986 - RNA, 19 nt, Artificial Sequence
  Description of Artificial Sequence: Synthetic oligonucleotide
cugccacaucgagaaagcg

SEQ ID NO: 3152987 - RNA, 19 nt, Artificial Sequence
  Description of Artificial Sequence: Synthetic oligonucleotide
ugccacaucgagaaagcga

SEQ ID NO: 3152988 - RNA, 19 nt, Artificial Sequence
  Description of Artificial Sequence: Synthetic oligonucleotide
gccacaucgagaaagcgaa

SEQ ID NO: 3152989 - RNA, 19 nt, Artificial Sequence
  Description of Artificial Sequence: Synthetic oligonucleotide
ccacaucgagaaagcgaaa

SEQ ID NO: 3152990 - RNA, 19 nt, Artificial Sequence
  Description of Artificial Sequence: Synthetic oligonucleotide
cacaucgagaaagcgaaag

SEQ ID NO: 3152991 - RNA, 19 nt, Artificial Sequence
  Description of Artificial Sequence: Synthetic oligonucleotide
acaucgagaaagcgaaagg

SEQ ID NO: 3152992 - RNA, 19 nt, Artificial Sequence
  Description of Artificial Sequence: Synthetic oligonucleotide
caucgagaaagcgaaagga

SEQ ID NO: 3152993 - RNA, 19 nt, Artificial Sequence
  Description of Artificial Sequence: Synthetic oligonucleotide
aucgagaaagcgaaaggaa

SEQ ID NO: 3152994 - RNA, 19 nt, Artificial Sequence
  Description of Artificial Sequence: Synthetic oligonucleotide
ucgagaaagcgaaaggaac

SEQ ID NO: 3152995 - RNA, 19 nt, Artificial Sequence
  Description of Artificial Sequence: Synthetic oligonucleotide
cgagaaagcgaaaggaacc

SEQ ID NO: 3152996 - RNA, 19 nt, Artificial Sequence
  Description of Artificial Sequence: Synthetic oligonucleotide
gagaaagcgaaaggaaccg

SEQ ID NO: 3152997 - RNA, 19 nt, Artificial Sequence
  Description of Artificial Sequence: Synthetic oligonucleotide
agaaagcgaaaggaaccga

SEQ ID NO: 3152998 - RNA, 19 nt, Artificial Sequence
  Description of Artificial Sequence: Synthetic oligonucleotide
gaaagcgaaaggaaccgac

SEQ ID NO: 3152999 - RNA, 19 nt, Artificial Sequence
  Description of Artificial Sequence: Synthetic oligonucleotide
aaagcgaaaggaaccgacc

SEQ ID NO: 3153000 - RNA, 19 nt, Artificial Sequence
  Description of Artificial Sequence: Synthetic oligonucleotide
aagcgaaaggaaccgacca

SEQ ID NO: 3153001 - RNA, 19 nt, Artificial Sequence
  Description of Artificial Sequence: Synthetic oligonucleotide
agcgaaaggaaccgaccag

SEQ ID NO: 3153002 - RNA, 19 nt, Artificial Sequence
  Description of Artificial Sequence: Synthetic oligonucleotide
cgaaaggaaccgaccagca

SEQ ID NO: 3153003 - RNA, 19 nt, Artificial Sequence
  Description of Artificial Sequence: Synthetic oligonucleotide
gaaaggaaccgaccagcag

SEQ ID NO: 3153004 - RNA, 19 nt, Artificial Sequence
  Description of Artificial Sequence: Synthetic oligonucleotide
aaaggaaccgaccagcaga

SEQ ID NO: 3153005 - RNA, 19 nt, Artificial Sequence
  Description of Artificial Sequence: Synthetic oligonucleotide
aaggaaccgaccagcagaa

SEQ ID NO: 3153006 - RNA, 19 nt, Artificial Sequence
  Description of Artificial Sequence: Synthetic oligonucleotide
aggaaccgaccagcagaau

SEQ ID NO: 3153007 - RNA, 19 nt, Artificial Sequence
  Description of Artificial Sequence: Synthetic oligonucleotide
ggaaccgaccagcagaaua

SEQ ID NO: 3153008 - RNA, 19 nt, Artificial Sequence
  Description of Artificial Sequence: Synthetic oligonucleotide
gaaccgaccagcagaauaa

SEQ ID NO: 3153009 - RNA, 19 nt, Artificial Sequence
  Description of Artificial Sequence: Synthetic oligonucleotide
aaccgaccagcagaauaaa

SEQ ID NO: 3153010 - RNA, 19 nt, Artificial Sequence
  Description of Artificial Sequence: Synthetic oligonucleotide
accgaccagcagaauaaag

SEQ ID NO: 3153011 - RNA, 19 nt, Artificial Sequence
  Description of Artificial Sequence: Synthetic oligonucleotide
ccgaccagcagaauaaaga

SEQ ID NO: 3153012 - RNA, 19 nt, Artificial Sequence
  Description of Artificial Sequence: Synthetic oligonucleotide
cgaccagcagaauaaagaa

SEQ ID NO: 3153013 - RNA, 19 nt, Artificial Sequence
  Description of Artificial Sequence: Synthetic oligonucleotide
gaccagcagaauaaagaau

SEQ ID NO: 3153014 - RNA, 19 nt, Artificial Sequence
  Description of Artificial Sequence: Synthetic oligonucleotide
accagcagaauaaagaaua

SEQ ID NO: 3153015 - RNA, 19 nt, Artificial Sequence
  Description of Artificial Sequence: Synthetic oligonucleotide
ccagcagaauaaagaauac

SEQ ID NO: 3153016 - RNA, 19 nt, Artificial Sequence
  Description of Artificial Sequence: Synthetic oligonucleotide
cagcagaauaaagaauacu

SEQ ID NO: 3153017 - RNA, 19 nt, Artificial Sequence
  Description of Artificial Sequence: Synthetic oligonucleotide
agcagaauaaagaauacug

SEQ ID NO: 3153018 - RNA, 19 nt, Artificial Sequence
  Description of Artificial Sequence: Synthetic oligonucleotide
gcagaauaaagaauacugc

SEQ ID NO: 3153019 - RNA, 19 nt, Artificial Sequence
  Description of Artificial Sequence: Synthetic oligonucleotide
cagaauaaagaauacugca

SEQ ID NO: 3153020 - RNA, 19 nt, Artificial Sequence
  Description of Artificial Sequence: Synthetic oligonucleotide
agaauaaagaauacugcag

SEQ ID NO: 3153021 - RNA, 19 nt, Artificial Sequence
  Description of Artificial Sequence: Synthetic oligonucleotide
gaauaaagaauacugcagu

SEQ ID NO: 3153022 - RNA, 19 nt, Artificial Sequence
  Description of Artificial Sequence: Synthetic oligonucleotide
aauaaagaauacugcagua

SEQ ID NO: 3153023 - RNA, 19 nt, Artificial Sequence
  Description of Artificial Sequence: Synthetic oligonucleotide
auaaagaauacugcaguaa

SEQ ID NO: 3153024 - RNA, 19 nt, Artificial Sequence
  Description of Artificial Sequence: Synthetic oligonucleotide
uaaagaauacugcaguaaa

SEQ ID NO: 3153025 - RNA, 19 nt, Artificial Sequence
  Description of Artificial Sequence: Synthetic oligonucleotide
aaagaauacugcaguaaag

SEQ ID NO: 3153026 - RNA, 19 nt, Artificial Sequence
  Description of Artificial Sequence: Synthetic oligonucleotide
aagaauacugcaguaaaga

SEQ ID NO: 3153027 - RNA, 19 nt, Artificial Sequence
  Description of Artificial Sequence: Synthetic oligonucleotide
agaauacugcaguaaagaa

SEQ ID NO: 3153028 - RNA, 19 nt, Artificial Sequence
  Description of Artificial Sequence: Synthetic oligonucleotide
gaauacugcaguaaagaag

SEQ ID NO: 3153029 - RNA, 19 nt, Artificial Sequence
  Description of Artificial Sequence: Synthetic oligonucleotide
aauacugcaguaaagaagg

SEQ ID NO: 3153030 - RNA, 19 nt, Artificial Sequence
  Description of Artificial Sequence: Synthetic oligonucleotide
auacugcaguaaagaaggc

SEQ ID NO: 3153031 - RNA, 19 nt, Artificial Sequence
  Description of Artificial Sequence: Synthetic oligonucleotide
uacugcaguaaagaaggcc

SEQ ID NO: 3153032 - RNA, 19 nt, Artificial Sequence
  Description of Artificial Sequence: Synthetic oligonucleotide
acugcaguaaagaaggcca

SEQ ID NO: 3153033 - RNA, 19 nt, Artificial Sequence
  Description of Artificial Sequence: Synthetic oligonucleotide
cugcaguaaagaaggccac

SEQ ID NO: 3153034 - RNA, 19 nt, Artificial Sequence
  Description of Artificial Sequence: Synthetic oligonucleotide
ugcaguaaagaaggccaca

SEQ ID NO: 3153035 - RNA, 19 nt, Artificial Sequence
  Description of Artificial Sequence: Synthetic oligonucleotide
gcaguaaagaaggccacau

SEQ ID NO: 3153036 - RNA, 19 nt, Artificial Sequence
  Description of Artificial Sequence: Synthetic oligonucleotide
caguaaagaaggccacaua

SEQ ID NO: 3153037 - RNA, 19 nt, Artificial Sequence
  Description of Artificial Sequence: Synthetic oligonucleotide
aguaaagaaggccacauac

SEQ ID NO: 3153038 - RNA, 19 nt, Artificial Sequence
  Description of Artificial Sequence: Synthetic oligonucleotide
guaaagaaggccacauacu

SEQ ID NO: 3153039 - RNA, 19 nt, Artificial Sequence
  Description of Artificial Sequence: Synthetic oligonucleotide
uaaagaaggccacauacuu

SEQ ID NO: 3153040 - RNA, 19 nt, Artificial Sequence
  Description of Artificial Sequence: Synthetic oligonucleotide
aaagaaggccacauacuua

SEQ ID NO: 3153041 - RNA, 19 nt, Artificial Sequence
  Description of Artificial Sequence: Synthetic oligonucleotide
aagaaggccacauacuuau

SEQ ID NO: 3153042 - RNA, 19 nt, Artificial Sequence
  Description of Artificial Sequence: Synthetic oligonucleotide
agaaggccacauacuuauc

SEQ ID NO: 3153043 - RNA, 19 nt, Artificial Sequence
  Description of Artificial Sequence: Synthetic oligonucleotide
gaaggccacauacuuaucg

SEQ ID NO: 3153044 - RNA, 19 nt, Artificial Sequence
  Description of Artificial Sequence: Synthetic oligonucleotide
aaggccacauacuuaucga

SEQ ID NO: 3153045 - RNA, 19 nt, Artificial Sequence
  Description of Artificial Sequence: Synthetic oligonucleotide
aggccacauacuuaucgag

SEQ ID NO: 3153046 - RNA, 19 nt, Artificial Sequence
  Description of Artificial Sequence: Synthetic oligonucleotide
ggccacauacuuaucgagu

SEQ ID NO: 3153047 - RNA, 19 nt, Artificial Sequence
  Description of Artificial Sequence: Synthetic oligonucleotide
gccacauacuuaucgagug

SEQ ID NO: 3153048 - RNA, 19 nt, Artificial Sequence
  Description of Artificial Sequence: Synthetic oligonucleotide
ccacauacuuaucgagugu

SEQ ID NO: 3153049 - RNA, 19 nt, Artificial Sequence
  Description of Artificial Sequence: Synthetic oligonucleotide
cacauacuuaucgagugug

SEQ ID NO: 3153050 - RNA, 19 nt, Artificial Sequence
  Description of Artificial Sequence: Synthetic oligonucleotide
acauacuuaucgagugugg

SEQ ID NO: 3153051 - RNA, 19 nt, Artificial Sequence
  Description of Artificial Sequence: Synthetic oligonucleotide
cauacuuaucgagugugga

SEQ ID NO: 3153052 - RNA, 19 nt, Artificial Sequence
  Description of Artificial Sequence: Synthetic oligonucleotide
auacuuaucgaguguggag

SEQ ID NO: 3153053 - RNA, 19 nt, Artificial Sequence
  Description of Artificial Sequence: Synthetic oligonucleotide
uacuuaucgaguguggagc

SEQ ID NO: 3153054 - RNA, 19 nt, Artificial Sequence
  Description of Artificial Sequence: Synthetic oligonucleotide
acuuaucgaguguggagcu

SEQ ID NO: 3153055 - RNA, 19 nt, Artificial Sequence
  Description of Artificial Sequence: Synthetic oligonucleotide
cuuaucgaguguggagcuc

SEQ ID NO: 3153056 - RNA, 19 nt, Artificial Sequence
  Description of Artificial Sequence: Synthetic oligonucleotide
uuaucgaguguggagcucc

SEQ ID NO: 3153057 - RNA, 19 nt, Artificial Sequence
  Description of Artificial Sequence: Synthetic oligonucleotide
uaucgaguguggagcuccg

SEQ ID NO: 3153058 - RNA, 19 nt, Artificial Sequence
  Description of Artificial Sequence: Synthetic oligonucleotide
aagcgcagcgaccugucua

SEQ ID NO: 3153059 - RNA, 19 nt, Artificial Sequence
  Description of Artificial Sequence: Synthetic oligonucleotide
cagcgaccugucuacugcu

SEQ ID NO: 3153060 - RNA, 19 nt, Artificial Sequence
  Description of Artificial Sequence: Synthetic oligonucleotide
agcgaccugucuacugcug

SEQ ID NO: 3153061 - RNA, 19 nt, Artificial Sequence
  Description of Artificial Sequence: Synthetic oligonucleotide
gcgaccugucuacugcugu

SEQ ID NO: 3153062 - RNA, 19 nt, Artificial Sequence
  Description of Artificial Sequence: Synthetic oligonucleotide
cgaccugucuacugcugug

SEQ ID NO: 3153063 - RNA, 19 nt, Artificial Sequence
  Description of Artificial Sequence: Synthetic oligonucleotide
gaccugucuacugcuguga

SEQ ID NO: 3153064 - RNA, 19 nt, Artificial Sequence
  Description of Artificial Sequence: Synthetic oligonucleotide
accugucuacugcugugag

SEQ ID NO: 3153065 - RNA, 19 nt, Artificial Sequence
  Description of Artificial Sequence: Synthetic oligonucleotide
ccugucuacugcugugagu

SEQ ID NO: 3153066 - RNA, 19 nt, Artificial Sequence
  Description of Artificial Sequence: Synthetic oligonucleotide
cugucuacugcugugagua

SEQ ID NO: 3153067 - RNA, 19 nt, Artificial Sequence
  Description of Artificial Sequence: Synthetic oligonucleotide
ugucuacugcugugaguac

SEQ ID NO: 3153068 - RNA, 19 nt, Artificial Sequence
  Description of Artificial Sequence: Synthetic oligonucleotide
gucuacugcugugaguacc

SEQ ID NO: 3153069 - RNA, 19 nt, Artificial Sequence
  Description of Artificial Sequence: Synthetic oligonucleotide
ucuacugcugugaguaccc

SEQ ID NO: 3153070 - RNA, 19 nt, Artificial Sequence
  Description of Artificial Sequence: Synthetic oligonucleotide
cuacugcugugaguacccu

SEQ ID NO: 3153071 - RNA, 19 nt, Artificial Sequence
  Description of Artificial Sequence: Synthetic oligonucleotide
uacugcugugaguacccuu

SEQ ID NO: 3153072 - RNA, 19 nt, Artificial Sequence
  Description of Artificial Sequence: Synthetic oligonucleotide
acugcugugaguacccuuu

SEQ ID NO: 3153073 - RNA, 19 nt, Artificial Sequence
  Description of Artificial Sequence: Synthetic oligonucleotide
cugcugugaguacccuuuu

SEQ ID NO: 3153074 - RNA, 19 nt, Artificial Sequence
  Description of Artificial Sequence: Synthetic oligonucleotide
ugcugugaguacccuuuug

SEQ ID NO: 3153075 - RNA, 19 nt, Artificial Sequence
  Description of Artificial Sequence: Synthetic oligonucleotide
gcugugaguacccuuuugg

SEQ ID NO: 3153076 - RNA, 19 nt, Artificial Sequence
  Description of Artificial Sequence: Synthetic oligonucleotide
cugugaguacccuuuugga

SEQ ID NO: 3153077 - RNA, 19 nt, Artificial Sequence
  Description of Artificial Sequence: Synthetic oligonucleotide
ugugaguacccuuuuggag

SEQ ID NO: 3153078 - RNA, 19 nt, Artificial Sequence
  Description of Artificial Sequence: Synthetic oligonucleotide
gugaguacccuuuuggaga

SEQ ID NO: 3153079 - RNA, 19 nt, Artificial Sequence
  Description of Artificial Sequence: Synthetic oligonucleotide
ugaguacccuuuuggagac

SEQ ID NO: 3153080 - RNA, 19 nt, Artificial Sequence
  Description of Artificial Sequence: Synthetic oligonucleotide
gaguacccuuuuggagacg

SEQ ID NO: 3153081 - RNA, 19 nt, Artificial Sequence
  Description of Artificial Sequence: Synthetic oligonucleotide
aguacccuuuuggagacgg

SEQ ID NO: 3153082 - RNA, 19 nt, Artificial Sequence
  Description of Artificial Sequence: Synthetic oligonucleotide
guacccuuuuggagacggg

SEQ ID NO: 3153083 - RNA, 19 nt, Artificial Sequence
  Description of Artificial Sequence: Synthetic oligonucleotide
uuuggagacggggucuuug

SEQ ID NO: 3153084 - RNA, 19 nt, Artificial Sequence
  Description of Artificial Sequence: Synthetic oligonucleotide
uuggagacggggucuuugg

SEQ ID NO: 3153085 - RNA, 19 nt, Artificial Sequence
  Description of Artificial Sequence: Synthetic oligonucleotide
uggagacggggucuuuggu

SEQ ID NO: 3153086 - RNA, 19 nt, Artificial Sequence
  Description of Artificial Sequence: Synthetic oligonucleotide
gagacggggucuuugguga

SEQ ID NO: 3153087 - RNA, 19 nt, Artificial Sequence
  Description of Artificial Sequence: Synthetic oligonucleotide
agacggggucuuuggugac

SEQ ID NO: 3153088 - RNA, 19 nt, Artificial Sequence
  Description of Artificial Sequence: Synthetic oligonucleotide
gacggggucuuuggugacu

SEQ ID NO: 3153089 - RNA, 19 nt, Artificial Sequence
  Description of Artificial Sequence: Synthetic oligonucleotide
acggggucuuuggugacug

SEQ ID NO: 3153090 - RNA, 19 nt, Artificial Sequence
  Description of Artificial Sequence: Synthetic oligonucleotide
cggggucuuuggugacugu

SEQ ID NO: 3153091 - RNA, 19 nt, Artificial Sequence
  Description of Artificial Sequence: Synthetic oligonucleotide
ggggucuuuggugacugua

SEQ ID NO: 3153092 - RNA, 19 nt, Artificial Sequence
  Description of Artificial Sequence: Synthetic oligonucleotide
gggucuuuggugacuguag

SEQ ID NO: 3153093 - RNA, 19 nt, Artificial Sequence
  Description of Artificial Sequence: Synthetic oligonucleotide
ggucuuuggugacuguagc

SEQ ID NO: 3153094 - RNA, 19 nt, Artificial Sequence
  Description of Artificial Sequence: Synthetic oligonucleotide
gucuuuggugacuguagcc

SEQ ID NO: 3153095 - RNA, 19 nt, Artificial Sequence
  Description of Artificial Sequence: Synthetic oligonucleotide
ucuuuggugacuguagccg

SEQ ID NO: 3153096 - RNA, 19 nt, Artificial Sequence
  Description of Artificial Sequence: Synthetic oligonucleotide
cuuuggugacuguagccga

SEQ ID NO: 3153097 - RNA, 19 nt, Artificial Sequence
  Description of Artificial Sequence: Synthetic oligonucleotide
uuuggugacuguagccgag

SEQ ID NO: 3153098 - RNA, 19 nt, Artificial Sequence
  Description of Artificial Sequence: Synthetic oligonucleotide
uuggugacuguagccgagc

SEQ ID NO: 3153099 - RNA, 19 nt, Artificial Sequence
  Description of Artificial Sequence: Synthetic oligonucleotide
uggugacuguagccgagca

SEQ ID NO: 3153100 - RNA, 19 nt, Artificial Sequence
  Description of Artificial Sequence: Synthetic oligonucleotide
gugacuguagccgagcagu

SEQ ID NO: 3153101 - RNA, 19 nt, Artificial Sequence
  Description of Artificial Sequence: Synthetic oligonucleotide
ugacuguagccgagcaguu

SEQ ID NO: 3153102 - RNA, 19 nt, Artificial Sequence
  Description of Artificial Sequence: Synthetic oligonucleotide
gacuguagccgagcaguuc

SEQ ID NO: 3153103 - RNA, 19 nt, Artificial Sequence
  Description of Artificial Sequence: Synthetic oligonucleotide
acuguagccgagcaguucc

SEQ ID NO: 3153104 - RNA, 19 nt, Artificial Sequence
  Description of Artificial Sequence: Synthetic oligonucleotide
uguagccgagcaguucccu

SEQ ID NO: 3153105 - RNA, 19 nt, Artificial Sequence
  Description of Artificial Sequence: Synthetic oligonucleotide
uagccgagcaguucccugu

SEQ ID NO: 3153106 - RNA, 19 nt, Artificial Sequence
  Description of Artificial Sequence: Synthetic oligonucleotide
agccgagcaguucccugua

SEQ ID NO: 3153107 - RNA, 19 nt, Artificial Sequence
  Description of Artificial Sequence: Synthetic oligonucleotide
gccgagcaguucccuguaa

SEQ ID NO: 3153108 - RNA, 19 nt, Artificial Sequence
  Description of Artificial Sequence: Synthetic oligonucleotide
ccgagcaguucccuguaac

SEQ ID NO: 3153109 - RNA, 19 nt, Artificial Sequence
  Description of Artificial Sequence: Synthetic oligonucleotide
cgagcaguucccuguaacg

SEQ ID NO: 3153110 - RNA, 19 nt, Artificial Sequence
  Description of Artificial Sequence: Synthetic oligonucleotide
gagcaguucccuguaacgu

SEQ ID NO: 3153111 - RNA, 19 nt, Artificial Sequence
  Description of Artificial Sequence: Synthetic oligonucleotide
agcaguucccuguaacgua

SEQ ID NO: 3153112 - RNA, 19 nt, Artificial Sequence
  Description of Artificial Sequence: Synthetic oligonucleotide
gcaguucccuguaacguau

SEQ ID NO: 3153113 - RNA, 19 nt, Artificial Sequence
  Description of Artificial Sequence: Synthetic oligonucleotide
caguucccuguaacguaug

SEQ ID NO: 3153114 - RNA, 19 nt, Artificial Sequence
  Description of Artificial Sequence: Synthetic oligonucleotide
aguucccuguaacguaugu

SEQ ID NO: 3153115 - RNA, 19 nt, Artificial Sequence
  Description of Artificial Sequence: Synthetic oligonucleotide
guucccuguaacguaugug

SEQ ID NO: 3153116 - RNA, 19 nt, Artificial Sequence
  Description of Artificial Sequence: Synthetic oligonucleotide
uucccuguaacguauguga

SEQ ID NO: 3153117 - RNA, 19 nt, Artificial Sequence
  Description of Artificial Sequence: Synthetic oligonucleotide
ucccuguaacguaugugag

SEQ ID NO: 3153118 - RNA, 19 nt, Artificial Sequence
  Description of Artificial Sequence: Synthetic oligonucleotide
cccuguaacguaugugaga

SEQ ID NO: 3153119 - RNA, 19 nt, Artificial Sequence
  Description of Artificial Sequence: Synthetic oligonucleotide
ccuguaacguaugugagaa

SEQ ID NO: 3153120 - RNA, 19 nt, Artificial Sequence
  Description of Artificial Sequence: Synthetic oligonucleotide
cuguaacguaugugagaaa

SEQ ID NO: 3153121 - RNA, 19 nt, Artificial Sequence
  Description of Artificial Sequence: Synthetic oligonucleotide
uguaacguaugugagaaau

SEQ ID NO: 3153122 - RNA, 19 nt, Artificial Sequence
  Description of Artificial Sequence: Synthetic oligonucleotide
guaacguaugugagaaauu

SEQ ID NO: 3153123 - RNA, 19 nt, Artificial Sequence
  Description of Artificial Sequence: Synthetic oligonucleotide
uaacguaugugagaaauuu

SEQ ID NO: 3153124 - RNA, 19 nt, Artificial Sequence
  Description of Artificial Sequence: Synthetic oligonucleotide
aacguaugugagaaauuuc

SEQ ID NO: 3153125 - RNA, 19 nt, Artificial Sequence
  Description of Artificial Sequence: Synthetic oligonucleotide
acguaugugagaaauuucc

SEQ ID NO: 3153126 - RNA, 19 nt, Artificial Sequence
  Description of Artificial Sequence: Synthetic oligonucleotide
cguaugugagaaauuuccg

SEQ ID NO: 3153127 - RNA, 19 nt, Artificial Sequence
  Description of Artificial Sequence: Synthetic oligonucleotide
guaugugagaaauuuccgc

SEQ ID NO: 3153128 - RNA, 19 nt, Artificial Sequence
  Description of Artificial Sequence: Synthetic oligonucleotide
uaugugagaaauuuccgcg

SEQ ID NO: 3153129 - RNA, 19 nt, Artificial Sequence
  Description of Artificial Sequence: Synthetic oligonucleotide
augugagaaauuuccgcgg

SEQ ID NO: 3153130 - RNA, 19 nt, Artificial Sequence
  Description of Artificial Sequence: Synthetic oligonucleotide
ugugagaaauuuccgcggg

SEQ ID NO: 3153131 - RNA, 19 nt, Artificial Sequence
  Description of Artificial Sequence: Synthetic oligonucleotide
gugagaaauuuccgcgggc

SEQ ID NO: 3153132 - RNA, 19 nt, Artificial Sequence
  Description of Artificial Sequence: Synthetic oligonucleotide
ugagaaauuuccgcgggcu

SEQ ID NO: 3153133 - RNA, 19 nt, Artificial Sequence
  Description of Artificial Sequence: Synthetic oligonucleotide
gagaaauuuccgcgggcug

SEQ ID NO: 3153134 - RNA, 19 nt, Artificial Sequence
  Description of Artificial Sequence: Synthetic oligonucleotide
agaaauuuccgcgggcugg

SEQ ID NO: 3153135 - RNA, 19 nt, Artificial Sequence
  Description of Artificial Sequence: Synthetic oligonucleotide
aaauuuccgcgggcuggcu

SEQ ID NO: 3153136 - RNA, 19 nt, Artificial Sequence
  Description of Artificial Sequence: Synthetic oligonucleotide
gcgggcuggcugaacuuuu

SEQ ID NO: 3153137 - RNA, 19 nt, Artificial Sequence
  Description of Artificial Sequence: Synthetic oligonucleotide
cgggcuggcugaacuuuug

SEQ ID NO: 3153138 - RNA, 19 nt, Artificial Sequence
  Description of Artificial Sequence: Synthetic oligonucleotide
gggcuggcugaacuuuuga

SEQ ID NO: 3153139 - RNA, 19 nt, Artificial Sequence
  Description of Artificial Sequence: Synthetic oligonucleotide
ggcuggcugaacuuuugaa

SEQ ID NO: 3153140 - RNA, 19 nt, Artificial Sequence
  Description of Artificial Sequence: Synthetic oligonucleotide
gcuggcugaacuuuugaaa

SEQ ID NO: 3153141 - RNA, 19 nt, Artificial Sequence
  Description of Artificial Sequence: Synthetic oligonucleotide
cuggcugaacuuuugaaag

SEQ ID NO: 3153142 - RNA, 19 nt, Artificial Sequence
  Description of Artificial Sequence: Synthetic oligonucleotide
uggcugaacuuuugaaagu

SEQ ID NO: 3153143 - RNA, 19 nt, Artificial Sequence
  Description of Artificial Sequence: Synthetic oligonucleotide
ggcugaacuuuugaaagug

SEQ ID NO: 3153144 - RNA, 19 nt, Artificial Sequence
  Description of Artificial Sequence: Synthetic oligonucleotide
gcugaacuuuugaaaguga

SEQ ID NO: 3153145 - RNA, 19 nt, Artificial Sequence
  Description of Artificial Sequence: Synthetic oligonucleotide
cugaacuuuugaaagugag

SEQ ID NO: 3153146 - RNA, 19 nt, Artificial Sequence
  Description of Artificial Sequence: Synthetic oligonucleotide
ugaacuuuugaaagugagc

SEQ ID NO: 3153147 - RNA, 19 nt, Artificial Sequence
  Description of Artificial Sequence: Synthetic oligonucleotide
gaacuuuugaaagugagcg

SEQ ID NO: 3153148 - RNA, 19 nt, Artificial Sequence
  Description of Artificial Sequence: Synthetic oligonucleotide
aacuuuugaaagugagcgg

SEQ ID NO: 3153149 - RNA, 19 nt, Artificial Sequence
  Description of Artificial Sequence: Synthetic oligonucleotide
acuuuugaaagugagcggg

SEQ ID NO: 3153150 - RNA, 19 nt, Artificial Sequence
  Description of Artificial Sequence: Synthetic oligonucleotide
cuuuugaaagugagcggga

SEQ ID NO: 3153151 - RNA, 19 nt, Artificial Sequence
  Description of Artificial Sequence: Synthetic oligonucleotide
uuuugaaagugagcgggaa

SEQ ID NO: 3153152 - RNA, 19 nt, Artificial Sequence
  Description of Artificial Sequence: Synthetic oligonucleotide
uuugaaagugagcgggaag

SEQ ID NO: 3153153 - RNA, 19 nt, Artificial Sequence
  Description of Artificial Sequence: Synthetic oligonucleotide
uugaaagugagcgggaaga

SEQ ID NO: 3153154 - RNA, 19 nt, Artificial Sequence
  Description of Artificial Sequence: Synthetic oligonucleotide
ugaaagugagcgggaagau

SEQ ID NO: 3153155 - RNA, 19 nt, Artificial Sequence
  Description of Artificial Sequence: Synthetic oligonucleotide
gaaagugagcgggaagaug

SEQ ID NO: 3153156 - RNA, 19 nt, Artificial Sequence
  Description of Artificial Sequence: Synthetic oligonucleotide
aaagugagcgggaagaugc

SEQ ID NO: 3153157 - RNA, 19 nt, Artificial Sequence
  Description of Artificial Sequence: Synthetic oligonucleotide
aagugagcgggaagaugca

SEQ ID NO: 3153158 - RNA, 19 nt, Artificial Sequence
  Description of Artificial Sequence: Synthetic oligonucleotide
agugagcgggaagaugcag

SEQ ID NO: 3153159 - RNA, 19 nt, Artificial Sequence
  Description of Artificial Sequence: Synthetic oligonucleotide
ugagcgggaagaugcagca

SEQ ID NO: 3153160 - RNA, 19 nt, Artificial Sequence
  Description of Artificial Sequence: Synthetic oligonucleotide
ggaagaugcagcagcguga

SEQ ID NO: 3153161 - RNA, 19 nt, Artificial Sequence
  Description of Artificial Sequence: Synthetic oligonucleotide
gaagaugcagcagcgugau

SEQ ID NO: 3153162 - RNA, 19 nt, Artificial Sequence
  Description of Artificial Sequence: Synthetic oligonucleotide
aagaugcagcagcgugauu

SEQ ID NO: 3153163 - RNA, 19 nt, Artificial Sequence
  Description of Artificial Sequence: Synthetic oligonucleotide
agaugcagcagcgugauug

SEQ ID NO: 3153164 - RNA, 19 nt, Artificial Sequence
  Description of Artificial Sequence: Synthetic oligonucleotide
gaugcagcagcgugauugg

SEQ ID NO: 3153165 - RNA, 19 nt, Artificial Sequence
  Description of Artificial Sequence: Synthetic oligonucleotide
augcagcagcgugauugga

SEQ ID NO: 3153166 - RNA, 19 nt, Artificial Sequence
  Description of Artificial Sequence: Synthetic oligonucleotide
ugcagcagcgugauuggaa

SEQ ID NO: 3153167 - RNA, 19 nt, Artificial Sequence
  Description of Artificial Sequence: Synthetic oligonucleotide
gcagcagcgugauuggaag

SEQ ID NO: 3153168 - RNA, 19 nt, Artificial Sequence
  Description of Artificial Sequence: Synthetic oligonucleotide
cagcagcgugauuggaaga

SEQ ID NO: 3153169 - RNA, 19 nt, Artificial Sequence
  Description of Artificial Sequence: Synthetic oligonucleotide
agcagcgugauuggaagac

SEQ ID NO: 3153170 - RNA, 19 nt, Artificial Sequence
  Description of Artificial Sequence: Synthetic oligonucleotide
gcagcgugauuggaagaca

SEQ ID NO: 3153171 - RNA, 19 nt, Artificial Sequence
  Description of Artificial Sequence: Synthetic oligonucleotide
cagcgugauuggaagacag

SEQ ID NO: 3153172 - RNA, 19 nt, Artificial Sequence
  Description of Artificial Sequence: Synthetic oligonucleotide
agcgugauuggaagacagc

SEQ ID NO: 3153173 - RNA, 19 nt, Artificial Sequence
  Description of Artificial Sequence: Synthetic oligonucleotide
gcgugauuggaagacagcu

SEQ ID NO: 3153174 - RNA, 19 nt, Artificial Sequence
  Description of Artificial Sequence: Synthetic oligonucleotide
cgugauuggaagacagcug

SEQ ID NO: 3153175 - RNA, 19 nt, Artificial Sequence
  Description of Artificial Sequence: Synthetic oligonucleotide
gugauuggaagacagcugu

SEQ ID NO: 3153176 - RNA, 19 nt, Artificial Sequence
  Description of Artificial Sequence: Synthetic oligonucleotide
ugauuggaagacagcugua

SEQ ID NO: 3153177 - RNA, 19 nt, Artificial Sequence
  Description of Artificial Sequence: Synthetic oligonucleotide
gauuggaagacagcuguac

SEQ ID NO: 3153178 - RNA, 19 nt, Artificial Sequence
  Description of Artificial Sequence: Synthetic oligonucleotide
auuggaagacagcuguaca

SEQ ID NO: 3153179 - RNA, 19 nt, Artificial Sequence
  Description of Artificial Sequence: Synthetic oligonucleotide
uuggaagacagcuguacac

SEQ ID NO: 3153180 - RNA, 19 nt, Artificial Sequence
  Description of Artificial Sequence: Synthetic oligonucleotide
uggaagacagcuguacacg

SEQ ID NO: 3153181 - RNA, 19 nt, Artificial Sequence
  Description of Artificial Sequence: Synthetic oligonucleotide
ggaagacagcuguacacgu

SEQ ID NO: 3153182 - RNA, 19 nt, Artificial Sequence
  Description of Artificial Sequence: Synthetic oligonucleotide
gaagacagcuguacacguc

SEQ ID NO: 3153183 - RNA, 19 nt, Artificial Sequence
  Description of Artificial Sequence: Synthetic oligonucleotide
aagacagcuguacacguca

SEQ ID NO: 3153184 - RNA, 19 nt, Artificial Sequence
  Description of Artificial Sequence: Synthetic oligonucleotide
agacagcuguacacgucau

SEQ ID NO: 3153185 - RNA, 19 nt, Artificial Sequence
  Description of Artificial Sequence: Synthetic oligonucleotide
gacagcuguacacgucaua

SEQ ID NO: 3153186 - RNA, 19 nt, Artificial Sequence
  Description of Artificial Sequence: Synthetic oligonucleotide
acagcuguacacgucauag

SEQ ID NO: 3153187 - RNA, 19 nt, Artificial Sequence
  Description of Artificial Sequence: Synthetic oligonucleotide
cagcuguacacgucauagu

SEQ ID NO: 3153188 - RNA, 19 nt, Artificial Sequence
  Description of Artificial Sequence: Synthetic oligonucleotide
agcuguacacgucauagug

SEQ ID NO: 3153189 - RNA, 19 nt, Artificial Sequence
  Description of Artificial Sequence: Synthetic oligonucleotide
gcuguacacgucauagugg

SEQ ID NO: 3153190 - RNA, 19 nt, Artificial Sequence
  Description of Artificial Sequence: Synthetic oligonucleotide
cuguacacgucauaguggg

SEQ ID NO: 3153191 - RNA, 19 nt, Artificial Sequence
  Description of Artificial Sequence: Synthetic oligonucleotide
uguacacgucauagugggc

SEQ ID NO: 3153192 - RNA, 19 nt, Artificial Sequence
  Description of Artificial Sequence: Synthetic oligonucleotide
guacacgucauagugggcc

SEQ ID NO: 3153193 - RNA, 19 nt, Artificial Sequence
  Description of Artificial Sequence: Synthetic oligonucleotide
uacacgucauagugggccc

SEQ ID NO: 3153194 - RNA, 19 nt, Artificial Sequence
  Description of Artificial Sequence: Synthetic oligonucleotide
gguugugggaagagccagu

SEQ ID NO: 3153195 - RNA, 19 nt, Artificial Sequence
  Description of Artificial Sequence: Synthetic oligonucleotide
guugugggaagagccagug

SEQ ID NO: 3153196 - RNA, 19 nt, Artificial Sequence
  Description of Artificial Sequence: Synthetic oligonucleotide
uugugggaagagccagugg

SEQ ID NO: 3153197 - RNA, 19 nt, Artificial Sequence
  Description of Artificial Sequence: Synthetic oligonucleotide
agccagugggcccguaauu

SEQ ID NO: 3153198 - RNA, 19 nt, Artificial Sequence
  Description of Artificial Sequence: Synthetic oligonucleotide
gccagugggcccguaauuu

SEQ ID NO: 3153199 - RNA, 19 nt, Artificial Sequence
  Description of Artificial Sequence: Synthetic oligonucleotide
ccagugggcccguaauuuu

SEQ ID NO: 3153200 - RNA, 19 nt, Artificial Sequence
  Description of Artificial Sequence: Synthetic oligonucleotide
cagugggcccguaauuuug

SEQ ID NO: 3153201 - RNA, 19 nt, Artificial Sequence
  Description of Artificial Sequence: Synthetic oligonucleotide
agugggcccguaauuuugc

SEQ ID NO: 3153202 - RNA, 19 nt, Artificial Sequence
  Description of Artificial Sequence: Synthetic oligonucleotide
gugggcccguaauuuugcu

SEQ ID NO: 3153203 - RNA, 19 nt, Artificial Sequence
  Description of Artificial Sequence: Synthetic oligonucleotide
ugggcccguaauuuugcug

SEQ ID NO: 3153204 - RNA, 19 nt, Artificial Sequence
  Description of Artificial Sequence: Synthetic oligonucleotide
gggcccguaauuuugcuga

SEQ ID NO: 3153205 - RNA, 19 nt, Artificial Sequence
  Description of Artificial Sequence: Synthetic oligonucleotide
ggcccguaauuuugcugag

SEQ ID NO: 3153206 - RNA, 19 nt, Artificial Sequence
  Description of Artificial Sequence: Synthetic oligonucleotide
gcccguaauuuugcugagc

SEQ ID NO: 3153207 - RNA, 19 nt, Artificial Sequence
  Description of Artificial Sequence: Synthetic oligonucleotide
cccguaauuuugcugagcc

SEQ ID NO: 3153208 - RNA, 19 nt, Artificial Sequence
  Description of Artificial Sequence: Synthetic oligonucleotide
ccguaauuuugcugagccu

SEQ ID NO: 3153209 - RNA, 19 nt, Artificial Sequence
  Description of Artificial Sequence: Synthetic oligonucleotide
cguaauuuugcugagccua

SEQ ID NO: 3153210 - RNA, 19 nt, Artificial Sequence
  Description of Artificial Sequence: Synthetic oligonucleotide
guaauuuugcugagccuag

SEQ ID NO: 3153211 - RNA, 19 nt, Artificial Sequence
  Description of Artificial Sequence: Synthetic oligonucleotide
uaauuuugcugagccuagc

SEQ ID NO: 3153212 - RNA, 19 nt, Artificial Sequence
  Description of Artificial Sequence: Synthetic oligonucleotide
aauuuugcugagccuagcg

SEQ ID NO: 3153213 - RNA, 19 nt, Artificial Sequence
  Description of Artificial Sequence: Synthetic oligonucleotide
auuuugcugagccuagcga

SEQ ID NO: 3153214 - RNA, 19 nt, Artificial Sequence
  Description of Artificial Sequence: Synthetic oligonucleotide
uuuugcugagccuagcgac

SEQ ID NO: 3153215 - RNA, 19 nt, Artificial Sequence
  Description of Artificial Sequence: Synthetic oligonucleotide
uuugcugagccuagcgaca

SEQ ID NO: 3153216 - RNA, 19 nt, Artificial Sequence
  Description of Artificial Sequence: Synthetic oligonucleotide
uugcugagccuagcgacac

SEQ ID NO: 3153217 - RNA, 19 nt, Artificial Sequence
  Description of Artificial Sequence: Synthetic oligonucleotide
cugagccuagcgacaccua

SEQ ID NO: 3153218 - RNA, 19 nt, Artificial Sequence
  Description of Artificial Sequence: Synthetic oligonucleotide
ugagccuagcgacaccuac

SEQ ID NO: 3153219 - RNA, 19 nt, Artificial Sequence
  Description of Artificial Sequence: Synthetic oligonucleotide
gagccuagcgacaccuacu

SEQ ID NO: 3153220 - RNA, 19 nt, Artificial Sequence
  Description of Artificial Sequence: Synthetic oligonucleotide
agccuagcgacaccuacug

SEQ ID NO: 3153221 - RNA, 19 nt, Artificial Sequence
  Description of Artificial Sequence: Synthetic oligonucleotide
ccuagcgacaccuacugga

SEQ ID NO: 3153222 - RNA, 19 nt, Artificial Sequence
  Description of Artificial Sequence: Synthetic oligonucleotide
cuagcgacaccuacuggaa

SEQ ID NO: 3153223 - RNA, 19 nt, Artificial Sequence
  Description of Artificial Sequence: Synthetic oligonucleotide
uagcgacaccuacuggaag

SEQ ID NO: 3153224 - RNA, 19 nt, Artificial Sequence
  Description of Artificial Sequence: Synthetic oligonucleotide
agcgacaccuacuggaagc

SEQ ID NO: 3153225 - RNA, 19 nt, Artificial Sequence
  Description of Artificial Sequence: Synthetic oligonucleotide
cgacaccuacuggaagccu

SEQ ID NO: 3153226 - RNA, 19 nt, Artificial Sequence
  Description of Artificial Sequence: Synthetic oligonucleotide
gacaccuacuggaagccua

SEQ ID NO: 3153227 - RNA, 19 nt, Artificial Sequence
  Description of Artificial Sequence: Synthetic oligonucleotide
acaccuacuggaagccuag

SEQ ID NO: 3153228 - RNA, 19 nt, Artificial Sequence
  Description of Artificial Sequence: Synthetic oligonucleotide
caccuacuggaagccuagu

SEQ ID NO: 3153229 - RNA, 19 nt, Artificial Sequence
  Description of Artificial Sequence: Synthetic oligonucleotide
accuacuggaagccuagua

SEQ ID NO: 3153230 - RNA, 19 nt, Artificial Sequence
  Description of Artificial Sequence: Synthetic oligonucleotide
ccuacuggaagccuaguag

SEQ ID NO: 3153231 - RNA, 19 nt, Artificial Sequence
  Description of Artificial Sequence: Synthetic oligonucleotide
cuacuggaagccuaguaga

SEQ ID NO: 3153232 - RNA, 19 nt, Artificial Sequence
  Description of Artificial Sequence: Synthetic oligonucleotide
uacuggaagccuaguagaa

SEQ ID NO: 3153233 - RNA, 19 nt, Artificial Sequence
  Description of Artificial Sequence: Synthetic oligonucleotide
acuggaagccuaguagaaa

SEQ ID NO: 3153234 - RNA, 19 nt, Artificial Sequence
  Description of Artificial Sequence: Synthetic oligonucleotide
cuggaagccuaguagaaau

SEQ ID NO: 3153235 - RNA, 19 nt, Artificial Sequence
  Description of Artificial Sequence: Synthetic oligonucleotide
uggaagccuaguagaaaua

SEQ ID NO: 3153236 - RNA, 19 nt, Artificial Sequence
  Description of Artificial Sequence: Synthetic oligonucleotide
ggaagccuaguagaaauaa

SEQ ID NO: 3153237 - RNA, 19 nt, Artificial Sequence
  Description of Artificial Sequence: Synthetic oligonucleotide
gaagccuaguagaaauaag

SEQ ID NO: 3153238 - RNA, 19 nt, Artificial Sequence
  Description of Artificial Sequence: Synthetic oligonucleotide
aagccuaguagaaauaagu

SEQ ID NO: 3153239 - RNA, 19 nt, Artificial Sequence
  Description of Artificial Sequence: Synthetic oligonucleotide
agccuaguagaaauaagug

SEQ ID NO: 3153240 - RNA, 19 nt, Artificial Sequence
  Description of Artificial Sequence: Synthetic oligonucleotide
gccuaguagaaauaagugg

SEQ ID NO: 3153241 - RNA, 19 nt, Artificial Sequence
  Description of Artificial Sequence: Synthetic oligonucleotide
ccuaguagaaauaaguggu

SEQ ID NO: 3153242 - RNA, 19 nt, Artificial Sequence
  Description of Artificial Sequence: Synthetic oligonucleotide
cuaguagaaauaaguggug

SEQ ID NO: 3153243 - RNA, 19 nt, Artificial Sequence
  Description of Artificial Sequence: Synthetic oligonucleotide
uaguagaaauaaguggugg

SEQ ID NO: 3153244 - RNA, 19 nt, Artificial Sequence
  Description of Artificial Sequence: Synthetic oligonucleotide
aguagaaauaagugguggg

SEQ ID NO: 3153245 - RNA, 19 nt, Artificial Sequence
  Description of Artificial Sequence: Synthetic oligonucleotide
guagaaauaagugguggga

SEQ ID NO: 3153246 - RNA, 19 nt, Artificial Sequence
  Description of Artificial Sequence: Synthetic oligonucleotide
uagaaauaaguggugggau

SEQ ID NO: 3153247 - RNA, 19 nt, Artificial Sequence
  Description of Artificial Sequence: Synthetic oligonucleotide
agaaauaaguggugggaug

SEQ ID NO: 3153248 - RNA, 19 nt, Artificial Sequence
  Description of Artificial Sequence: Synthetic oligonucleotide
gaaauaaguggugggaugg

SEQ ID NO: 3153249 - RNA, 19 nt, Artificial Sequence
  Description of Artificial Sequence: Synthetic oligonucleotide
aaauaaguggugggaugga

SEQ ID NO: 3153250 - RNA, 19 nt, Artificial Sequence
  Description of Artificial Sequence: Synthetic oligonucleotide
aauaaguggugggauggau

SEQ ID NO: 3153251 - RNA, 19 nt, Artificial Sequence
  Description of Artificial Sequence: Synthetic oligonucleotide
auaaguggugggauggaua

SEQ ID NO: 3153252 - RNA, 19 nt, Artificial Sequence
  Description of Artificial Sequence: Synthetic oligonucleotide
uaaguggugggauggauau

SEQ ID NO: 3153253 - RNA, 19 nt, Artificial Sequence
  Description of Artificial Sequence: Synthetic oligonucleotide
aaguggugggauggauauc

SEQ ID NO: 3153254 - RNA, 19 nt, Artificial Sequence
  Description of Artificial Sequence: Synthetic oligonucleotide
aguggugggauggauauca

SEQ ID NO: 3153255 - RNA, 19 nt, Artificial Sequence
  Description of Artificial Sequence: Synthetic oligonucleotide
guggugggauggauaucau

SEQ ID NO: 3153256 - RNA, 19 nt, Artificial Sequence
  Description of Artificial Sequence: Synthetic oligonucleotide
uggugggauggauaucaug

SEQ ID NO: 3153257 - RNA, 19 nt, Artificial Sequence
  Description of Artificial Sequence: Synthetic oligonucleotide
ggugggauggauaucaugg

SEQ ID NO: 3153258 - RNA, 19 nt, Artificial Sequence
  Description of Artificial Sequence: Synthetic oligonucleotide
gugggauggauaucaugga

SEQ ID NO: 3153259 - RNA, 19 nt, Artificial Sequence
  Description of Artificial Sequence: Synthetic oligonucleotide
ugggauggauaucauggag

SEQ ID NO: 3153260 - RNA, 19 nt, Artificial Sequence
  Description of Artificial Sequence: Synthetic oligonucleotide
gggauggauaucauggaga

SEQ ID NO: 3153261 - RNA, 19 nt, Artificial Sequence
  Description of Artificial Sequence: Synthetic oligonucleotide
ggauggauaucauggagaa

SEQ ID NO: 3153262 - RNA, 19 nt, Artificial Sequence
  Description of Artificial Sequence: Synthetic oligonucleotide
gauggauaucauggagaag

SEQ ID NO: 3153263 - RNA, 19 nt, Artificial Sequence
  Description of Artificial Sequence: Synthetic oligonucleotide
auggauaucauggagaaga

SEQ ID NO: 3153264 - RNA, 19 nt, Artificial Sequence
  Description of Artificial Sequence: Synthetic oligonucleotide
uggauaucauggagaagaa

SEQ ID NO: 3153265 - RNA, 19 nt, Artificial Sequence
  Description of Artificial Sequence: Synthetic oligonucleotide
ggauaucauggagaagaag

SEQ ID NO: 3153266 - RNA, 19 nt, Artificial Sequence
  Description of Artificial Sequence: Synthetic oligonucleotide
gauaucauggagaagaagu

SEQ ID NO: 3153267 - RNA, 19 nt, Artificial Sequence
  Description of Artificial Sequence: Synthetic oligonucleotide
auaucauggagaagaaguu

SEQ ID NO: 3153268 - RNA, 19 nt, Artificial Sequence
  Description of Artificial Sequence: Synthetic oligonucleotide
uaucauggagaagaaguug

SEQ ID NO: 3153269 - RNA, 19 nt, Artificial Sequence
  Description of Artificial Sequence: Synthetic oligonucleotide
aucauggagaagaaguugu

SEQ ID NO: 3153270 - RNA, 19 nt, Artificial Sequence
  Description of Artificial Sequence: Synthetic oligonucleotide
ucauggagaagaaguuguu

SEQ ID NO: 3153271 - RNA, 19 nt, Artificial Sequence
  Description of Artificial Sequence: Synthetic oligonucleotide
cauggagaagaaguuguug

SEQ ID NO: 3153272 - RNA, 19 nt, Artificial Sequence
  Description of Artificial Sequence: Synthetic oligonucleotide
auggagaagaaguuguugu

SEQ ID NO: 3153273 - RNA, 19 nt, Artificial Sequence
  Description of Artificial Sequence: Synthetic oligonucleotide
uggagaagaaguuguuguu

SEQ ID NO: 3153274 - RNA, 19 nt, Artificial Sequence
  Description of Artificial Sequence: Synthetic oligonucleotide
ggagaagaaguuguuguuu

SEQ ID NO: 3153275 - RNA, 19 nt, Artificial Sequence
  Description of Artificial Sequence: Synthetic oligonucleotide
gagaagaaguuguuguuuu

SEQ ID NO: 3153276 - RNA, 19 nt, Artificial Sequence
  Description of Artificial Sequence: Synthetic oligonucleotide
agaagaaguuguuguuuug

SEQ ID NO: 3153277 - RNA, 19 nt, Artificial Sequence
  Description of Artificial Sequence: Synthetic oligonucleotide
gaagaaguuguuguuuugg

SEQ ID NO: 3153278 - RNA, 19 nt, Artificial Sequence
  Description of Artificial Sequence: Synthetic oligonucleotide
aagaaguuguuguuuugga

SEQ ID NO: 3153279 - RNA, 19 nt, Artificial Sequence
  Description of Artificial Sequence: Synthetic oligonucleotide
agaaguuguuguuuuggau

SEQ ID NO: 3153280 - RNA, 19 nt, Artificial Sequence
  Description of Artificial Sequence: Synthetic oligonucleotide
gaaguuguuguuuuggaug

SEQ ID NO: 3153281 - RNA, 19 nt, Artificial Sequence
  Description of Artificial Sequence: Synthetic oligonucleotide
aaguuguuguuuuggauga

SEQ ID NO: 3153282 - RNA, 19 nt, Artificial Sequence
  Description of Artificial Sequence: Synthetic oligonucleotide
aguuguuguuuuggaugau

SEQ ID NO: 3153283 - RNA, 19 nt, Artificial Sequence
  Description of Artificial Sequence: Synthetic oligonucleotide
guuguuguuuuggaugauu

SEQ ID NO: 3153284 - RNA, 19 nt, Artificial Sequence
  Description of Artificial Sequence: Synthetic oligonucleotide
uuguuguuuuggaugauuu

SEQ ID NO: 3153285 - RNA, 19 nt, Artificial Sequence
  Description of Artificial Sequence: Synthetic oligonucleotide
uuuuauggcugguuaccuu

SEQ ID NO: 3153286 - RNA, 19 nt, Artificial Sequence
  Description of Artificial Sequence: Synthetic oligonucleotide
uuuauggcugguuaccuug

SEQ ID NO: 3153287 - RNA, 19 nt, Artificial Sequence
  Description of Artificial Sequence: Synthetic oligonucleotide
uuauggcugguuaccuugg

SEQ ID NO: 3153288 - RNA, 19 nt, Artificial Sequence
  Description of Artificial Sequence: Synthetic oligonucleotide
uauggcugguuaccuuggg

SEQ ID NO: 3153289 - RNA, 19 nt, Artificial Sequence
  Description of Artificial Sequence: Synthetic oligonucleotide
auggcugguuaccuuggga

SEQ ID NO: 3153290 - RNA, 19 nt, Artificial Sequence
  Description of Artificial Sequence: Synthetic oligonucleotide
uggcugguuaccuugggau

SEQ ID NO: 3153291 - RNA, 19 nt, Artificial Sequence
  Description of Artificial Sequence: Synthetic oligonucleotide
ggcugguuaccuugggaug

SEQ ID NO: 3153292 - RNA, 19 nt, Artificial Sequence
  Description of Artificial Sequence: Synthetic oligonucleotide
gcugguuaccuugggauga

SEQ ID NO: 3153293 - RNA, 19 nt, Artificial Sequence
  Description of Artificial Sequence: Synthetic oligonucleotide
cugguuaccuugggaugau

SEQ ID NO: 3153294 - RNA, 19 nt, Artificial Sequence
  Description of Artificial Sequence: Synthetic oligonucleotide
ugguuaccuugggaugauc

SEQ ID NO: 3153295 - RNA, 19 nt, Artificial Sequence
  Description of Artificial Sequence: Synthetic oligonucleotide
gguuaccuugggaugaucu

SEQ ID NO: 3153296 - RNA, 19 nt, Artificial Sequence
  Description of Artificial Sequence: Synthetic oligonucleotide
guuaccuugggaugaucua

SEQ ID NO: 3153297 - RNA, 19 nt, Artificial Sequence
  Description of Artificial Sequence: Synthetic oligonucleotide
uuaccuugggaugaucuac

SEQ ID NO: 3153298 - RNA, 19 nt, Artificial Sequence
  Description of Artificial Sequence: Synthetic oligonucleotide
uaccuugggaugaucuacu

SEQ ID NO: 3153299 - RNA, 19 nt, Artificial Sequence
  Description of Artificial Sequence: Synthetic oligonucleotide
accuugggaugaucuacug

SEQ ID NO: 3153300 - RNA, 19 nt, Artificial Sequence
  Description of Artificial Sequence: Synthetic oligonucleotide
ccuugggaugaucuacuga

SEQ ID NO: 3153301 - RNA, 19 nt, Artificial Sequence
  Description of Artificial Sequence: Synthetic oligonucleotide
cuugggaugaucuacugag

SEQ ID NO: 3153302 - RNA, 19 nt, Artificial Sequence
  Description of Artificial Sequence: Synthetic oligonucleotide
uugggaugaucuacugaga

SEQ ID NO: 3153303 - RNA, 19 nt, Artificial Sequence
  Description of Artificial Sequence: Synthetic oligonucleotide
ugggaugaucuacugagac

SEQ ID NO: 3153304 - RNA, 19 nt, Artificial Sequence
  Description of Artificial Sequence: Synthetic oligonucleotide
gggaugaucuacugagacu

SEQ ID NO: 3153305 - RNA, 19 nt, Artificial Sequence
  Description of Artificial Sequence: Synthetic oligonucleotide
ggaugaucuacugagacug

SEQ ID NO: 3153306 - RNA, 19 nt, Artificial Sequence
  Description of Artificial Sequence: Synthetic oligonucleotide
gaugaucuacugagacugu

SEQ ID NO: 3153307 - RNA, 19 nt, Artificial Sequence
  Description of Artificial Sequence: Synthetic oligonucleotide
augaucuacugagacugug

SEQ ID NO: 3153308 - RNA, 19 nt, Artificial Sequence
  Description of Artificial Sequence: Synthetic oligonucleotide
ugaucuacugagacugugu

SEQ ID NO: 3153309 - RNA, 19 nt, Artificial Sequence
  Description of Artificial Sequence: Synthetic oligonucleotide
gaucuacugagacugugug

SEQ ID NO: 3153310 - RNA, 19 nt, Artificial Sequence
  Description of Artificial Sequence: Synthetic oligonucleotide
aucuacugagacuguguga

SEQ ID NO: 3153311 - RNA, 19 nt, Artificial Sequence
  Description of Artificial Sequence: Synthetic oligonucleotide
ucuacugagacugugugac

SEQ ID NO: 3153312 - RNA, 19 nt, Artificial Sequence
  Description of Artificial Sequence: Synthetic oligonucleotide
cuacugagacugugugacc

SEQ ID NO: 3153313 - RNA, 19 nt, Artificial Sequence
  Description of Artificial Sequence: Synthetic oligonucleotide
uacugagacugugugaccg

SEQ ID NO: 3153314 - RNA, 19 nt, Artificial Sequence
  Description of Artificial Sequence: Synthetic oligonucleotide
acugagacugugugaccgg

SEQ ID NO: 3153315 - RNA, 19 nt, Artificial Sequence
  Description of Artificial Sequence: Synthetic oligonucleotide
cugagacugugugaccggu

SEQ ID NO: 3153316 - RNA, 19 nt, Artificial Sequence
  Description of Artificial Sequence: Synthetic oligonucleotide
ugagacugugugaccggua

SEQ ID NO: 3153317 - RNA, 19 nt, Artificial Sequence
  Description of Artificial Sequence: Synthetic oligonucleotide
gagacugugugaccgguau

SEQ ID NO: 3153318 - RNA, 19 nt, Artificial Sequence
  Description of Artificial Sequence: Synthetic oligonucleotide
agacugugugaccgguauc

SEQ ID NO: 3153319 - RNA, 19 nt, Artificial Sequence
  Description of Artificial Sequence: Synthetic oligonucleotide
gacugugugaccgguaucc

SEQ ID NO: 3153320 - RNA, 19 nt, Artificial Sequence
  Description of Artificial Sequence: Synthetic oligonucleotide
acugugugaccgguaucca

SEQ ID NO: 3153321 - RNA, 19 nt, Artificial Sequence
  Description of Artificial Sequence: Synthetic oligonucleotide
cugugugaccgguauccau

SEQ ID NO: 3153322 - RNA, 19 nt, Artificial Sequence
  Description of Artificial Sequence: Synthetic oligonucleotide
ugugugaccgguauccauu

SEQ ID NO: 3153323 - RNA, 19 nt, Artificial Sequence
  Description of Artificial Sequence: Synthetic oligonucleotide
gugugaccgguauccauug

SEQ ID NO: 3153324 - RNA, 19 nt, Artificial Sequence
  Description of Artificial Sequence: Synthetic oligonucleotide
ugugaccgguauccauuga

SEQ ID NO: 3153325 - RNA, 19 nt, Artificial Sequence
  Description of Artificial Sequence: Synthetic oligonucleotide
gugaccgguauccauugac

SEQ ID NO: 3153326 - RNA, 19 nt, Artificial Sequence
  Description of Artificial Sequence: Synthetic oligonucleotide
ugaccgguauccauugacu

SEQ ID NO: 3153327 - RNA, 19 nt, Artificial Sequence
  Description of Artificial Sequence: Synthetic oligonucleotide
gaccgguauccauugacug

SEQ ID NO: 3153328 - RNA, 19 nt, Artificial Sequence
  Description of Artificial Sequence: Synthetic oligonucleotide
accgguauccauugacugu

SEQ ID NO: 3153329 - RNA, 19 nt, Artificial Sequence
  Description of Artificial Sequence: Synthetic oligonucleotide
ccgguauccauugacugua

SEQ ID NO: 3153330 - RNA, 19 nt, Artificial Sequence
  Description of Artificial Sequence: Synthetic oligonucleotide
cgguauccauugacuguag

SEQ ID NO: 3153331 - RNA, 19 nt, Artificial Sequence
  Description of Artificial Sequence: Synthetic oligonucleotide
gguauccauugacuguaga

SEQ ID NO: 3153332 - RNA, 19 nt, Artificial Sequence
  Description of Artificial Sequence: Synthetic oligonucleotide
guauccauugacuguagag

SEQ ID NO: 3153333 - RNA, 19 nt, Artificial Sequence
  Description of Artificial Sequence: Synthetic oligonucleotide
uauccauugacuguagaga

SEQ ID NO: 3153334 - RNA, 19 nt, Artificial Sequence
  Description of Artificial Sequence: Synthetic oligonucleotide
auccauugacuguagagac

SEQ ID NO: 3153335 - RNA, 19 nt, Artificial Sequence
  Description of Artificial Sequence: Synthetic oligonucleotide
uccauugacuguagagacu

SEQ ID NO: 3153336 - RNA, 19 nt, Artificial Sequence
  Description of Artificial Sequence: Synthetic oligonucleotide
ccauugacuguagagacua

SEQ ID NO: 3153337 - RNA, 19 nt, Artificial Sequence
  Description of Artificial Sequence: Synthetic oligonucleotide
cauugacuguagagacuaa

SEQ ID NO: 3153338 - RNA, 19 nt, Artificial Sequence
  Description of Artificial Sequence: Synthetic oligonucleotide
auugacuguagagacuaaa

SEQ ID NO: 3153339 - RNA, 19 nt, Artificial Sequence
  Description of Artificial Sequence: Synthetic oligonucleotide
uugacuguagagacuaaag

SEQ ID NO: 3153340 - RNA, 19 nt, Artificial Sequence
  Description of Artificial Sequence: Synthetic oligonucleotide
ugacuguagagacuaaagg

SEQ ID NO: 3153341 - RNA, 19 nt, Artificial Sequence
  Description of Artificial Sequence: Synthetic oligonucleotide
gacuguagagacuaaaggg

SEQ ID NO: 3153342 - RNA, 19 nt, Artificial Sequence
  Description of Artificial Sequence: Synthetic oligonucleotide
acuguagagacuaaagggg

SEQ ID NO: 3153343 - RNA, 19 nt, Artificial Sequence
  Description of Artificial Sequence: Synthetic oligonucleotide
uuuggcccgcaguauuuug

SEQ ID NO: 3153344 - RNA, 19 nt, Artificial Sequence
  Description of Artificial Sequence: Synthetic oligonucleotide
uuggcccgcaguauuuuga

SEQ ID NO: 3153345 - RNA, 19 nt, Artificial Sequence
  Description of Artificial Sequence: Synthetic oligonucleotide
uggcccgcaguauuuugau

SEQ ID NO: 3153346 - RNA, 19 nt, Artificial Sequence
  Description of Artificial Sequence: Synthetic oligonucleotide
ggcccgcaguauuuugauu

SEQ ID NO: 3153347 - RNA, 19 nt, Artificial Sequence
  Description of Artificial Sequence: Synthetic oligonucleotide
gcccgcaguauuuugauua

SEQ ID NO: 3153348 - RNA, 19 nt, Artificial Sequence
  Description of Artificial Sequence: Synthetic oligonucleotide
cccgcaguauuuugauuac

SEQ ID NO: 3153349 - RNA, 19 nt, Artificial Sequence
  Description of Artificial Sequence: Synthetic oligonucleotide
ccgcaguauuuugauuacc

SEQ ID NO: 3153350 - RNA, 19 nt, Artificial Sequence
  Description of Artificial Sequence: Synthetic oligonucleotide
cgcaguauuuugauuacca

SEQ ID NO: 3153351 - RNA, 19 nt, Artificial Sequence
  Description of Artificial Sequence: Synthetic oligonucleotide
gcaguauuuugauuaccag

SEQ ID NO: 3153352 - RNA, 19 nt, Artificial Sequence
  Description of Artificial Sequence: Synthetic oligonucleotide
caguauuuugauuaccagc

SEQ ID NO: 3153353 - RNA, 19 nt, Artificial Sequence
  Description of Artificial Sequence: Synthetic oligonucleotide
aguauuuugauuaccagca

SEQ ID NO: 3153354 - RNA, 19 nt, Artificial Sequence
  Description of Artificial Sequence: Synthetic oligonucleotide
guauuuugauuaccagcaa

SEQ ID NO: 3153355 - RNA, 19 nt, Artificial Sequence
  Description of Artificial Sequence: Synthetic oligonucleotide
uauuuugauuaccagcaau

SEQ ID NO: 3153356 - RNA, 19 nt, Artificial Sequence
  Description of Artificial Sequence: Synthetic oligonucleotide
auuuugauuaccagcaauc

SEQ ID NO: 3153357 - RNA, 19 nt, Artificial Sequence
  Description of Artificial Sequence: Synthetic oligonucleotide
uuuugauuaccagcaauca

SEQ ID NO: 3153358 - RNA, 19 nt, Artificial Sequence
  Description of Artificial Sequence: Synthetic oligonucleotide
uuugauuaccagcaaucag

SEQ ID NO: 3153359 - RNA, 19 nt, Artificial Sequence
  Description of Artificial Sequence: Synthetic oligonucleotide
uugauuaccagcaaucagg

SEQ ID NO: 3153360 - RNA, 19 nt, Artificial Sequence
  Description of Artificial Sequence: Synthetic oligonucleotide
ugauuaccagcaaucaggc

SEQ ID NO: 3153361 - RNA, 19 nt, Artificial Sequence
  Description of Artificial Sequence: Synthetic oligonucleotide
gauuaccagcaaucaggcc

SEQ ID NO: 3153362 - RNA, 19 nt, Artificial Sequence
  Description of Artificial Sequence: Synthetic oligonucleotide
auuaccagcaaucaggccc

SEQ ID NO: 3153363 - RNA, 19 nt, Artificial Sequence
  Description of Artificial Sequence: Synthetic oligonucleotide
uuaccagcaaucaggcccc

SEQ ID NO: 3153364 - RNA, 19 nt, Artificial Sequence
  Description of Artificial Sequence: Synthetic oligonucleotide
ccccaggaaugguacuccu

SEQ ID NO: 3153365 - RNA, 19 nt, Artificial Sequence
  Description of Artificial Sequence: Synthetic oligonucleotide
cccaggaaugguacuccuc

SEQ ID NO: 3153366 - RNA, 19 nt, Artificial Sequence
  Description of Artificial Sequence: Synthetic oligonucleotide
ccaggaaugguacuccuca

SEQ ID NO: 3153367 - RNA, 19 nt, Artificial Sequence
  Description of Artificial Sequence: Synthetic oligonucleotide
caggaaugguacuccucaa

SEQ ID NO: 3153368 - RNA, 19 nt, Artificial Sequence
  Description of Artificial Sequence: Synthetic oligonucleotide
aggaaugguacuccucaac

SEQ ID NO: 3153369 - RNA, 19 nt, Artificial Sequence
  Description of Artificial Sequence: Synthetic oligonucleotide
ggaaugguacuccucaacu

SEQ ID NO: 3153370 - RNA, 19 nt, Artificial Sequence
  Description of Artificial Sequence: Synthetic oligonucleotide
gaaugguacuccucaacug

SEQ ID NO: 3153371 - RNA, 19 nt, Artificial Sequence
  Description of Artificial Sequence: Synthetic oligonucleotide
aaugguacuccucaacugc

SEQ ID NO: 3153372 - RNA, 19 nt, Artificial Sequence
  Description of Artificial Sequence: Synthetic oligonucleotide
augguacuccucaacugcu

SEQ ID NO: 3153373 - RNA, 19 nt, Artificial Sequence
  Description of Artificial Sequence: Synthetic oligonucleotide
ugguacuccucaacugcug

SEQ ID NO: 3153374 - RNA, 19 nt, Artificial Sequence
  Description of Artificial Sequence: Synthetic oligonucleotide
gguacuccucaacugcugu

SEQ ID NO: 3153375 - RNA, 19 nt, Artificial Sequence
  Description of Artificial Sequence: Synthetic oligonucleotide
guacuccucaacugcuguc

SEQ ID NO: 3153376 - RNA, 19 nt, Artificial Sequence
  Description of Artificial Sequence: Synthetic oligonucleotide
uacuccucaacugcugucc

SEQ ID NO: 3153377 - RNA, 19 nt, Artificial Sequence
  Description of Artificial Sequence: Synthetic oligonucleotide
acuccucaacugcuguccc

SEQ ID NO: 3153378 - RNA, 19 nt, Artificial Sequence
  Description of Artificial Sequence: Synthetic oligonucleotide
cuccucaacugcuguccca

SEQ ID NO: 3153379 - RNA, 19 nt, Artificial Sequence
  Description of Artificial Sequence: Synthetic oligonucleotide
uccucaacugcugucccag

SEQ ID NO: 3153380 - RNA, 19 nt, Artificial Sequence
  Description of Artificial Sequence: Synthetic oligonucleotide
cucaacugcugucccagcu

SEQ ID NO: 3153381 - RNA, 19 nt, Artificial Sequence
  Description of Artificial Sequence: Synthetic oligonucleotide
ucaacugcugucccagcug

SEQ ID NO: 3153382 - RNA, 19 nt, Artificial Sequence
  Description of Artificial Sequence: Synthetic oligonucleotide
caacugcugucccagcugu

SEQ ID NO: 3153383 - RNA, 19 nt, Artificial Sequence
  Description of Artificial Sequence: Synthetic oligonucleotide
aacugcugucccagcugua

SEQ ID NO: 3153384 - RNA, 19 nt, Artificial Sequence
  Description of Artificial Sequence: Synthetic oligonucleotide
acugcugucccagcuguag

SEQ ID NO: 3153385 - RNA, 19 nt, Artificial Sequence
  Description of Artificial Sequence: Synthetic oligonucleotide
cugcugucccagcuguaga

SEQ ID NO: 3153386 - RNA, 19 nt, Artificial Sequence
  Description of Artificial Sequence: Synthetic oligonucleotide
ugcugucccagcuguagaa

SEQ ID NO: 3153387 - RNA, 19 nt, Artificial Sequence
  Description of Artificial Sequence: Synthetic oligonucleotide
gcugucccagcuguagaag

SEQ ID NO: 3153388 - RNA, 19 nt, Artificial Sequence
  Description of Artificial Sequence: Synthetic oligonucleotide
cugucccagcuguagaagc

SEQ ID NO: 3153389 - RNA, 19 nt, Artificial Sequence
  Description of Artificial Sequence: Synthetic oligonucleotide
ugucccagcuguagaagcu

SEQ ID NO: 3153390 - RNA, 19 nt, Artificial Sequence
  Description of Artificial Sequence: Synthetic oligonucleotide
gucccagcuguagaagcuc

SEQ ID NO: 3153391 - RNA, 19 nt, Artificial Sequence
  Description of Artificial Sequence: Synthetic oligonucleotide
ucccagcuguagaagcucu

SEQ ID NO: 3153392 - RNA, 19 nt, Artificial Sequence
  Description of Artificial Sequence: Synthetic oligonucleotide
cccagcuguagaagcucuc

SEQ ID NO: 3153393 - RNA, 19 nt, Artificial Sequence
  Description of Artificial Sequence: Synthetic oligonucleotide
ccagcuguagaagcucucu

SEQ ID NO: 3153394 - RNA, 19 nt, Artificial Sequence
  Description of Artificial Sequence: Synthetic oligonucleotide
cagcuguagaagcucucua

SEQ ID NO: 3153395 - RNA, 19 nt, Artificial Sequence
  Description of Artificial Sequence: Synthetic oligonucleotide
agcuguagaagcucucuau

SEQ ID NO: 3153396 - RNA, 19 nt, Artificial Sequence
  Description of Artificial Sequence: Synthetic oligonucleotide
gcuguagaagcucucuauc

SEQ ID NO: 3153397 - RNA, 19 nt, Artificial Sequence
  Description of Artificial Sequence: Synthetic oligonucleotide
cuguagaagcucucuaucg

SEQ ID NO: 3153398 - RNA, 19 nt, Artificial Sequence
  Description of Artificial Sequence: Synthetic oligonucleotide
uguagaagcucucuaucgg

SEQ ID NO: 3153399 - RNA, 19 nt, Artificial Sequence
  Description of Artificial Sequence: Synthetic oligonucleotide
guagaagcucucuaucgga

SEQ ID NO: 3153400 - RNA, 19 nt, Artificial Sequence
  Description of Artificial Sequence: Synthetic oligonucleotide
uagaagcucucuaucggag

SEQ ID NO: 3153401 - RNA, 19 nt, Artificial Sequence
  Description of Artificial Sequence: Synthetic oligonucleotide
agaagcucucuaucggagg

SEQ ID NO: 3153402 - RNA, 19 nt, Artificial Sequence
  Description of Artificial Sequence: Synthetic oligonucleotide
gaagcucucuaucggagga

SEQ ID NO: 3153403 - RNA, 19 nt, Artificial Sequence
  Description of Artificial Sequence: Synthetic oligonucleotide
aagcucucuaucggaggau

SEQ ID NO: 3153404 - RNA, 19 nt, Artificial Sequence
  Description of Artificial Sequence: Synthetic oligonucleotide
agcucucuaucggaggauu

SEQ ID NO: 3153405 - RNA, 19 nt, Artificial Sequence
  Description of Artificial Sequence: Synthetic oligonucleotide
gcucucuaucggaggauua

SEQ ID NO: 3153406 - RNA, 19 nt, Artificial Sequence
  Description of Artificial Sequence: Synthetic oligonucleotide
cucucuaucggaggauuac

SEQ ID NO: 3153407 - RNA, 19 nt, Artificial Sequence
  Description of Artificial Sequence: Synthetic oligonucleotide
ucucuaucggaggauuacu

SEQ ID NO: 3153408 - RNA, 19 nt, Artificial Sequence
  Description of Artificial Sequence: Synthetic oligonucleotide
cucuaucggaggauuacua

SEQ ID NO: 3153409 - RNA, 19 nt, Artificial Sequence
  Description of Artificial Sequence: Synthetic oligonucleotide
ucuaucggaggauuacuac

SEQ ID NO: 3153410 - RNA, 19 nt, Artificial Sequence
  Description of Artificial Sequence: Synthetic oligonucleotide
cuaucggaggauuacuacu

SEQ ID NO: 3153411 - RNA, 19 nt, Artificial Sequence
  Description of Artificial Sequence: Synthetic oligonucleotide
uaucggaggauuacuacuu

SEQ ID NO: 3153412 - RNA, 19 nt, Artificial Sequence
  Description of Artificial Sequence: Synthetic oligonucleotide
aucggaggauuacuacuuu

SEQ ID NO: 3153413 - RNA, 19 nt, Artificial Sequence
  Description of Artificial Sequence: Synthetic oligonucleotide
ucggaggauuacuacuuug

SEQ ID NO: 3153414 - RNA, 19 nt, Artificial Sequence
  Description of Artificial Sequence: Synthetic oligonucleotide
cggaggauuacuacuuugc

SEQ ID NO: 3153415 - RNA, 19 nt, Artificial Sequence
  Description of Artificial Sequence: Synthetic oligonucleotide
ggaggauuacuacuuugca

SEQ ID NO: 3153416 - RNA, 19 nt, Artificial Sequence
  Description of Artificial Sequence: Synthetic oligonucleotide
gaggauuacuacuuugcaa

SEQ ID NO: 3153417 - RNA, 19 nt, Artificial Sequence
  Description of Artificial Sequence: Synthetic oligonucleotide
aggauuacuacuuugcaau

SEQ ID NO: 3153418 - RNA, 19 nt, Artificial Sequence
  Description of Artificial Sequence: Synthetic oligonucleotide
ggauuacuacuuugcaauu

SEQ ID NO: 3153419 - RNA, 19 nt, Artificial Sequence
  Description of Artificial Sequence: Synthetic oligonucleotide
gauuacuacuuugcaauuu

SEQ ID NO: 3153420 - RNA, 19 nt, Artificial Sequence
  Description of Artificial Sequence: Synthetic oligonucleotide
auuacuacuuugcaauuuu

SEQ ID NO: 3153421 - RNA, 19 nt, Artificial Sequence
  Description of Artificial Sequence: Synthetic oligonucleotide
uuacuacuuugcaauuuug

SEQ ID NO: 3153422 - RNA, 19 nt, Artificial Sequence
  Description of Artificial Sequence: Synthetic oligonucleotide
uacuacuuugcaauuuugg

SEQ ID NO: 3153423 - RNA, 19 nt, Artificial Sequence
  Description of Artificial Sequence: Synthetic oligonucleotide
acuacuuugcaauuuugga

SEQ ID NO: 3153424 - RNA, 19 nt, Artificial Sequence
  Description of Artificial Sequence: Synthetic oligonucleotide
cuacuuugcaauuuuggaa

SEQ ID NO: 3153425 - RNA, 19 nt, Artificial Sequence
  Description of Artificial Sequence: Synthetic oligonucleotide
uacuuugcaauuuuggaag

SEQ ID NO: 3153426 - RNA, 19 nt, Artificial Sequence
  Description of Artificial Sequence: Synthetic oligonucleotide
acuuugcaauuuuggaaga

SEQ ID NO: 3153427 - RNA, 19 nt, Artificial Sequence
  Description of Artificial Sequence: Synthetic oligonucleotide
cuuugcaauuuuggaagac

SEQ ID NO: 3153428 - RNA, 19 nt, Artificial Sequence
  Description of Artificial Sequence: Synthetic oligonucleotide
uuugcaauuuuggaagacu

SEQ ID NO: 3153429 - RNA, 19 nt, Artificial Sequence
  Description of Artificial Sequence: Synthetic oligonucleotide
uugcaauuuuggaagacug

SEQ ID NO: 3153430 - RNA, 19 nt, Artificial Sequence
  Description of Artificial Sequence: Synthetic oligonucleotide
ugcaauuuuggaagacugc

SEQ ID NO: 3153431 - RNA, 19 nt, Artificial Sequence
  Description of Artificial Sequence: Synthetic oligonucleotide
gcaauuuuggaagacugcu

SEQ ID NO: 3153432 - RNA, 19 nt, Artificial Sequence
  Description of Artificial Sequence: Synthetic oligonucleotide
caauuuuggaagacugcug

SEQ ID NO: 3153433 - RNA, 19 nt, Artificial Sequence
  Description of Artificial Sequence: Synthetic oligonucleotide
aauuuuggaagacugcugg

SEQ ID NO: 3153434 - RNA, 19 nt, Artificial Sequence
  Description of Artificial Sequence: Synthetic oligonucleotide
auuuuggaagacugcugga

SEQ ID NO: 3153435 - RNA, 19 nt, Artificial Sequence
  Description of Artificial Sequence: Synthetic oligonucleotide
uuuuggaagacugcuggag

SEQ ID NO: 3153436 - RNA, 19 nt, Artificial Sequence
  Description of Artificial Sequence: Synthetic oligonucleotide
uuuggaagacugcuggaga

SEQ ID NO: 3153437 - RNA, 19 nt, Artificial Sequence
  Description of Artificial Sequence: Synthetic oligonucleotide
uuggaagacugcuggagaa

SEQ ID NO: 3153438 - RNA, 19 nt, Artificial Sequence
  Description of Artificial Sequence: Synthetic oligonucleotide
uggaagacugcuggagaac

SEQ ID NO: 3153439 - RNA, 19 nt, Artificial Sequence
  Description of Artificial Sequence: Synthetic oligonucleotide
ggaagacugcuggagaaca

SEQ ID NO: 3153440 - RNA, 19 nt, Artificial Sequence
  Description of Artificial Sequence: Synthetic oligonucleotide
gaagacugcuggagaacaa

SEQ ID NO: 3153441 - RNA, 19 nt, Artificial Sequence
  Description of Artificial Sequence: Synthetic oligonucleotide
aagacugcuggagaacaau

SEQ ID NO: 3153442 - RNA, 19 nt, Artificial Sequence
  Description of Artificial Sequence: Synthetic oligonucleotide
agacugcuggagaacaauc

SEQ ID NO: 3153443 - RNA, 19 nt, Artificial Sequence
  Description of Artificial Sequence: Synthetic oligonucleotide
gacugcuggagaacaaucc

SEQ ID NO: 3153444 - RNA, 19 nt, Artificial Sequence
  Description of Artificial Sequence: Synthetic oligonucleotide
acugcuggagaacaaucca

SEQ ID NO: 3153445 - RNA, 19 nt, Artificial Sequence
  Description of Artificial Sequence: Synthetic oligonucleotide
cugcuggagaacaauccac

SEQ ID NO: 3153446 - RNA, 19 nt, Artificial Sequence
  Description of Artificial Sequence: Synthetic oligonucleotide
ugcuggagaacaauccacg

SEQ ID NO: 3153447 - RNA, 19 nt, Artificial Sequence
  Description of Artificial Sequence: Synthetic oligonucleotide
gcuggagaacaauccacgg

SEQ ID NO: 3153448 - RNA, 19 nt, Artificial Sequence
  Description of Artificial Sequence: Synthetic oligonucleotide
cuggagaacaauccacgga

SEQ ID NO: 3153449 - RNA, 19 nt, Artificial Sequence
  Description of Artificial Sequence: Synthetic oligonucleotide
uggagaacaauccacggag

SEQ ID NO: 3153450 - RNA, 19 nt, Artificial Sequence
  Description of Artificial Sequence: Synthetic oligonucleotide
ggagaacaauccacggagg

SEQ ID NO: 3153451 - RNA, 19 nt, Artificial Sequence
  Description of Artificial Sequence: Synthetic oligonucleotide
gagaacaauccacggaggu

SEQ ID NO: 3153452 - RNA, 19 nt, Artificial Sequence
  Description of Artificial Sequence: Synthetic oligonucleotide
agaacaauccacggaggua

SEQ ID NO: 3153453 - RNA, 19 nt, Artificial Sequence
  Description of Artificial Sequence: Synthetic oligonucleotide
gaacaauccacggagguac

SEQ ID NO: 3153454 - RNA, 19 nt, Artificial Sequence
  Description of Artificial Sequence: Synthetic oligonucleotide
aacaauccacggagguacc

SEQ ID NO: 3153455 - RNA, 19 nt, Artificial Sequence
  Description of Artificial Sequence: Synthetic oligonucleotide
acaauccacggagguaccc

SEQ ID NO: 3153456 - RNA, 19 nt, Artificial Sequence
  Description of Artificial Sequence: Synthetic oligonucleotide
aauccacggagguacccga

SEQ ID NO: 3153457 - RNA, 19 nt, Artificial Sequence
  Description of Artificial Sequence: Synthetic oligonucleotide
auccacggagguacccgaa

SEQ ID NO: 3153458 - RNA, 19 nt, Artificial Sequence
  Description of Artificial Sequence: Synthetic oligonucleotide
agguacccgaaggccgauu

SEQ ID NO: 3153459 - RNA, 19 nt, Artificial Sequence
  Description of Artificial Sequence: Synthetic oligonucleotide
guacccgaaggccgauuug

SEQ ID NO: 3153460 - RNA, 19 nt, Artificial Sequence
  Description of Artificial Sequence: Synthetic oligonucleotide
uacccgaaggccgauuuga

SEQ ID NO: 3153461 - RNA, 19 nt, Artificial Sequence
  Description of Artificial Sequence: Synthetic oligonucleotide
acccgaaggccgauuugaa

SEQ ID NO: 3153462 - RNA, 19 nt, Artificial Sequence
  Description of Artificial Sequence: Synthetic oligonucleotide
cccgaaggccgauuugaag

SEQ ID NO: 3153463 - RNA, 19 nt, Artificial Sequence
  Description of Artificial Sequence: Synthetic oligonucleotide
ccgaaggccgauuugaagc

SEQ ID NO: 3153464 - RNA, 19 nt, Artificial Sequence
  Description of Artificial Sequence: Synthetic oligonucleotide
cgaaggccgauuugaagca

SEQ ID NO: 3153465 - RNA, 19 nt, Artificial Sequence
  Description of Artificial Sequence: Synthetic oligonucleotide
gaaggccgauuugaagcag

SEQ ID NO: 3153466 - RNA, 19 nt, Artificial Sequence
  Description of Artificial Sequence: Synthetic oligonucleotide
aaggccgauuugaagcagu

SEQ ID NO: 3153467 - RNA, 19 nt, Artificial Sequence
  Description of Artificial Sequence: Synthetic oligonucleotide
aggccgauuugaagcagug

SEQ ID NO: 3153468 - RNA, 19 nt, Artificial Sequence
  Description of Artificial Sequence: Synthetic oligonucleotide
ggccgauuugaagcagugg

SEQ ID NO: 3153469 - RNA, 19 nt, Artificial Sequence
  Description of Artificial Sequence: Synthetic oligonucleotide
gccgauuugaagcagugga

SEQ ID NO: 3153470 - RNA, 19 nt, Artificial Sequence
  Description of Artificial Sequence: Synthetic oligonucleotide
ccgauuugaagcaguggac

SEQ ID NO: 3153471 - RNA, 19 nt, Artificial Sequence
  Description of Artificial Sequence: Synthetic oligonucleotide
cgauuugaagcaguggacc

SEQ ID NO: 3153472 - RNA, 19 nt, Artificial Sequence
  Description of Artificial Sequence: Synthetic oligonucleotide
gauuugaagcaguggaccc

SEQ ID NO: 3153473 - RNA, 19 nt, Artificial Sequence
  Description of Artificial Sequence: Synthetic oligonucleotide
auuugaagcaguggaccca

SEQ ID NO: 3153474 - RNA, 19 nt, Artificial Sequence
  Description of Artificial Sequence: Synthetic oligonucleotide
uuugaagcaguggacccac

SEQ ID NO: 3153475 - RNA, 19 nt, Artificial Sequence
  Description of Artificial Sequence: Synthetic oligonucleotide
uugaagcaguggacccacc

SEQ ID NO: 3153476 - RNA, 19 nt, Artificial Sequence
  Description of Artificial Sequence: Synthetic oligonucleotide
acccacccugugcccuuuu

SEQ ID NO: 3153477 - RNA, 19 nt, Artificial Sequence
  Description of Artificial Sequence: Synthetic oligonucleotide
acccugugcccuuuuccca

SEQ ID NO: 3153478 - RNA, 19 nt, Artificial Sequence
  Description of Artificial Sequence: Synthetic oligonucleotide
cccugugcccuuuucccau

SEQ ID NO: 3153479 - RNA, 19 nt, Artificial Sequence
  Description of Artificial Sequence: Synthetic oligonucleotide
ccugugcccuuuucccaua

SEQ ID NO: 3153480 - RNA, 19 nt, Artificial Sequence
  Description of Artificial Sequence: Synthetic oligonucleotide
cugugcccuuuucccauau

SEQ ID NO: 3153481 - RNA, 19 nt, Artificial Sequence
  Description of Artificial Sequence: Synthetic oligonucleotide
ugugcccuuuucccauaua

SEQ ID NO: 3153482 - RNA, 19 nt, Artificial Sequence
  Description of Artificial Sequence: Synthetic oligonucleotide
gugcccuuuucccauauaa

SEQ ID NO: 3153483 - RNA, 19 nt, Artificial Sequence
  Description of Artificial Sequence: Synthetic oligonucleotide
ugcccuuuucccauauaaa

SEQ ID NO: 3153484 - RNA, 19 nt, Artificial Sequence
  Description of Artificial Sequence: Synthetic oligonucleotide
cccauauaaaauaaauuac

SEQ ID NO: 3153485 - RNA, 19 nt, Artificial Sequence
  Description of Artificial Sequence: Synthetic oligonucleotide
guacccgaaggccgauuug

SEQ ID NO: 3153486 - RNA, 19 nt, Artificial Sequence
  Description of Artificial Sequence: Synthetic oligonucleotide
cgcuuuucuugcuuggcau

SEQ ID NO: 3153487 - RNA, 19 nt, Artificial Sequence
  Description of Artificial Sequence: Synthetic oligonucleotide
ccgcuuuucuugcuuggca

SEQ ID NO: 3153488 - RNA, 19 nt, Artificial Sequence
  Description of Artificial Sequence: Synthetic oligonucleotide
gccgcuuuucuugcuuggc

SEQ ID NO: 3153489 - RNA, 19 nt, Artificial Sequence
  Description of Artificial Sequence: Synthetic oligonucleotide
ggccgcuuuucuugcuugg

SEQ ID NO: 3153490 - RNA, 19 nt, Artificial Sequence
  Description of Artificial Sequence: Synthetic oligonucleotide
gggccgcuuuucuugcuug

SEQ ID NO: 3153491 - RNA, 19 nt, Artificial Sequence
  Description of Artificial Sequence: Synthetic oligonucleotide
cgggccgcuuuucuugcuu

SEQ ID NO: 3153492 - RNA, 19 nt, Artificial Sequence
  Description of Artificial Sequence: Synthetic oligonucleotide
uugcgggccgcuuuucuug

SEQ ID NO: 3153493 - RNA, 19 nt, Artificial Sequence
  Description of Artificial Sequence: Synthetic oligonucleotide
guugcgggccgcuuuucuu

SEQ ID NO: 3153494 - RNA, 19 nt, Artificial Sequence
  Description of Artificial Sequence: Synthetic oligonucleotide
accucuuaugggguugcgg

SEQ ID NO: 3153495 - RNA, 19 nt, Artificial Sequence
  Description of Artificial Sequence: Synthetic oligonucleotide
caccucuuaugggguugcg

SEQ ID NO: 3153496 - RNA, 19 nt, Artificial Sequence
  Description of Artificial Sequence: Synthetic oligonucleotide
ccaccucuuaugggguugc

SEQ ID NO: 3153497 - RNA, 19 nt, Artificial Sequence
  Description of Artificial Sequence: Synthetic oligonucleotide
cccaccucuuaugggguug

SEQ ID NO: 3153498 - RNA, 19 nt, Artificial Sequence
  Description of Artificial Sequence: Synthetic oligonucleotide
acccaccucuuaugggguu

SEQ ID NO: 3153499 - RNA, 19 nt, Artificial Sequence
  Description of Artificial Sequence: Synthetic oligonucleotide
cacccaccucuuauggggu

SEQ ID NO: 3153500 - RNA, 19 nt, Artificial Sequence
  Description of Artificial Sequence: Synthetic oligonucleotide
acacccaccucuuaugggg

SEQ ID NO: 3153501 - RNA, 19 nt, Artificial Sequence
  Description of Artificial Sequence: Synthetic oligonucleotide
aacacccaccucuuauggg

SEQ ID NO: 3153502 - RNA, 19 nt, Artificial Sequence
  Description of Artificial Sequence: Synthetic oligonucleotide
gaacacccaccucuuaugg

SEQ ID NO: 3153503 - RNA, 19 nt, Artificial Sequence
  Description of Artificial Sequence: Synthetic oligonucleotide
ugaacacccaccucuuaug

SEQ ID NO: 3153504 - RNA, 19 nt, Artificial Sequence
  Description of Artificial Sequence: Synthetic oligonucleotide
gugaacacccaccucuuau

SEQ ID NO: 3153505 - RNA, 19 nt, Artificial Sequence
  Description of Artificial Sequence: Synthetic oligonucleotide
ggugaacacccaccucuua

SEQ ID NO: 3153506 - RNA, 19 nt, Artificial Sequence
  Description of Artificial Sequence: Synthetic oligonucleotide
gggugaacacccaccucuu

SEQ ID NO: 3153507 - RNA, 19 nt, Artificial Sequence
  Description of Artificial Sequence: Synthetic oligonucleotide
agggugaacacccaccucu

SEQ ID NO: 3153508 - RNA, 19 nt, Artificial Sequence
  Description of Artificial Sequence: Synthetic oligonucleotide
aagggugaacacccaccuc

SEQ ID NO: 3153509 - RNA, 19 nt, Artificial Sequence
  Description of Artificial Sequence: Synthetic oligonucleotide
uaagggugaacacccaccu

SEQ ID NO: 3153510 - RNA, 19 nt, Artificial Sequence
  Description of Artificial Sequence: Synthetic oligonucleotide
uuaagggugaacacccacc

SEQ ID NO: 3153511 - RNA, 19 nt, Artificial Sequence
  Description of Artificial Sequence: Synthetic oligonucleotide
auuaagggugaacacccac

SEQ ID NO: 3153512 - RNA, 19 nt, Artificial Sequence
  Description of Artificial Sequence: Synthetic oligonucleotide
uauuaagggugaacaccca

SEQ ID NO: 3153513 - RNA, 19 nt, Artificial Sequence
  Description of Artificial Sequence: Synthetic oligonucleotide
uuauuaagggugaacaccc

SEQ ID NO: 3153514 - RNA, 19 nt, Artificial Sequence
  Description of Artificial Sequence: Synthetic oligonucleotide
auuauuaagggugaacacc

SEQ ID NO: 3153515 - RNA, 19 nt, Artificial Sequence
  Description of Artificial Sequence: Synthetic oligonucleotide
gauuauuaagggugaacac

SEQ ID NO: 3153516 - RNA, 19 nt, Artificial Sequence
  Description of Artificial Sequence: Synthetic oligonucleotide
ggauuauuaagggugaaca

SEQ ID NO: 3153517 - RNA, 19 nt, Artificial Sequence
  Description of Artificial Sequence: Synthetic oligonucleotide
aggauuauuaagggugaac

SEQ ID NO: 3153518 - RNA, 19 nt, Artificial Sequence
  Description of Artificial Sequence: Synthetic oligonucleotide
aaggauuauuaagggugaa

SEQ ID NO: 3153519 - RNA, 19 nt, Artificial Sequence
  Description of Artificial Sequence: Synthetic oligonucleotide
gaaggauuauuaaggguga

SEQ ID NO: 3153520 - RNA, 19 nt, Artificial Sequence
  Description of Artificial Sequence: Synthetic oligonucleotide
ggaaggauuauuaagggug

SEQ ID NO: 3153521 - RNA, 19 nt, Artificial Sequence
  Description of Artificial Sequence: Synthetic oligonucleotide
cggaaggauuauuaagggu

SEQ ID NO: 3153522 - RNA, 19 nt, Artificial Sequence
  Description of Artificial Sequence: Synthetic oligonucleotide
ucggaaggauuauuaaggg

SEQ ID NO: 3153523 - RNA, 19 nt, Artificial Sequence
  Description of Artificial Sequence: Synthetic oligonucleotide
cucggaaggauuauuaagg

SEQ ID NO: 3153524 - RNA, 19 nt, Artificial Sequence
  Description of Artificial Sequence: Synthetic oligonucleotide
ccucggaaggauuauuaag

SEQ ID NO: 3153525 - RNA, 19 nt, Artificial Sequence
  Description of Artificial Sequence: Synthetic oligonucleotide
uccucggaaggauuauuaa

SEQ ID NO: 3153526 - RNA, 19 nt, Artificial Sequence
  Description of Artificial Sequence: Synthetic oligonucleotide
cuccucggaaggauuauua

SEQ ID NO: 3153527 - RNA, 19 nt, Artificial Sequence
  Description of Artificial Sequence: Synthetic oligonucleotide
ccuccucggaaggauuauu

SEQ ID NO: 3153528 - RNA, 19 nt, Artificial Sequence
  Description of Artificial Sequence: Synthetic oligonucleotide
uccuccucggaaggauuau

SEQ ID NO: 3153529 - RNA, 19 nt, Artificial Sequence
  Description of Artificial Sequence: Synthetic oligonucleotide
cuccuccucggaaggauua

SEQ ID NO: 3153530 - RNA, 19 nt, Artificial Sequence
  Description of Artificial Sequence: Synthetic oligonucleotide
ucuccuccucggaaggauu

SEQ ID NO: 3153531 - RNA, 19 nt, Artificial Sequence
  Description of Artificial Sequence: Synthetic oligonucleotide
uucuccuccucggaaggau

SEQ ID NO: 3153532 - RNA, 19 nt, Artificial Sequence
  Description of Artificial Sequence: Synthetic oligonucleotide
uuucuccuccucggaagga

SEQ ID NO: 3153533 - RNA, 19 nt, Artificial Sequence
  Description of Artificial Sequence: Synthetic oligonucleotide
uuuucuccuccucggaagg

SEQ ID NO: 3153534 - RNA, 19 nt, Artificial Sequence
  Description of Artificial Sequence: Synthetic oligonucleotide
aagcucccguauuuuguuu

SEQ ID NO: 3153535 - RNA, 19 nt, Artificial Sequence
  Description of Artificial Sequence: Synthetic oligonucleotide
gaagcucccguauuuuguu

SEQ ID NO: 3153536 - RNA, 19 nt, Artificial Sequence
  Description of Artificial Sequence: Synthetic oligonucleotide
ggaagcucccguauuuugu

SEQ ID NO: 3153537 - RNA, 19 nt, Artificial Sequence
  Description of Artificial Sequence: Synthetic oligonucleotide
uggaagcucccguauuuug

SEQ ID NO: 3153538 - RNA, 19 nt, Artificial Sequence
  Description of Artificial Sequence: Synthetic oligonucleotide
uuggaagcucccguauuuu

SEQ ID NO: 3153539 - RNA, 19 nt, Artificial Sequence
  Description of Artificial Sequence: Synthetic oligonucleotide
auuggaagcucccguauuu

SEQ ID NO: 3153540 - RNA, 19 nt, Artificial Sequence
  Description of Artificial Sequence: Synthetic oligonucleotide
gauuggaagcucccguauu

SEQ ID NO: 3153541 - RNA, 19 nt, Artificial Sequence
  Description of Artificial Sequence: Synthetic oligonucleotide
agauuggaagcucccguau

SEQ ID NO: 3153542 - RNA, 19 nt, Artificial Sequence
  Description of Artificial Sequence: Synthetic oligonucleotide
gagauuggaagcucccgua

SEQ ID NO: 3153543 - RNA, 19 nt, Artificial Sequence
  Description of Artificial Sequence: Synthetic oligonucleotide
ggagauuggaagcucccgu

SEQ ID NO: 3153544 - RNA, 19 nt, Artificial Sequence
  Description of Artificial Sequence: Synthetic oligonucleotide
agggagauuggaagcuccc

SEQ ID NO: 3153545 - RNA, 19 nt, Artificial Sequence
  Description of Artificial Sequence: Synthetic oligonucleotide
aagggagauuggaagcucc

SEQ ID NO: 3153546 - RNA, 19 nt, Artificial Sequence
  Description of Artificial Sequence: Synthetic oligonucleotide
aaagggagauuggaagcuc

SEQ ID NO: 3153547 - RNA, 19 nt, Artificial Sequence
  Description of Artificial Sequence: Synthetic oligonucleotide
aaaagggagauuggaagcu

SEQ ID NO: 3153548 - RNA, 19 nt, Artificial Sequence
  Description of Artificial Sequence: Synthetic oligonucleotide
cgcaaacaaaauaaucaaa

SEQ ID NO: 3153549 - RNA, 19 nt, Artificial Sequence
  Description of Artificial Sequence: Synthetic oligonucleotide
ccgcaaacaaaauaaucaa

SEQ ID NO: 3153550 - RNA, 19 nt, Artificial Sequence
  Description of Artificial Sequence: Synthetic oligonucleotide
uccgcaaacaaaauaauca

SEQ ID NO: 3153551 - RNA, 19 nt, Artificial Sequence
  Description of Artificial Sequence: Synthetic oligonucleotide
cuccgcaaacaaaauaauc

SEQ ID NO: 3153552 - RNA, 19 nt, Artificial Sequence
  Description of Artificial Sequence: Synthetic oligonucleotide
ucuccgcaaacaaaauaau

SEQ ID NO: 3153553 - RNA, 19 nt, Artificial Sequence
  Description of Artificial Sequence: Synthetic oligonucleotide
cucuccgcaaacaaaauaa

SEQ ID NO: 3153554 - RNA, 19 nt, Artificial Sequence
  Description of Artificial Sequence: Synthetic oligonucleotide
ccucuccgcaaacaaaaua

SEQ ID NO: 3153555 - RNA, 19 nt, Artificial Sequence
  Description of Artificial Sequence: Synthetic oligonucleotide
uccucuccgcaaacaaaau

SEQ ID NO: 3153556 - RNA, 19 nt, Artificial Sequence
  Description of Artificial Sequence: Synthetic oligonucleotide
uuccucuccgcaaacaaaa

SEQ ID NO: 3153557 - RNA, 19 nt, Artificial Sequence
  Description of Artificial Sequence: Synthetic oligonucleotide
cuuccucuccgcaaacaaa

SEQ ID NO: 3153558 - RNA, 19 nt, Artificial Sequence
  Description of Artificial Sequence: Synthetic oligonucleotide
ccuuccucuccgcaaacaa

SEQ ID NO: 3153559 - RNA, 19 nt, Artificial Sequence
  Description of Artificial Sequence: Synthetic oligonucleotide
accuuccucuccgcaaaca

SEQ ID NO: 3153560 - RNA, 19 nt, Artificial Sequence
  Description of Artificial Sequence: Synthetic oligonucleotide
aaccuuccucuccgcaaac

SEQ ID NO: 3153561 - RNA, 19 nt, Artificial Sequence
  Description of Artificial Sequence: Synthetic oligonucleotide
aaaccuuccucuccgcaaa

SEQ ID NO: 3153562 - RNA, 19 nt, Artificial Sequence
  Description of Artificial Sequence: Synthetic oligonucleotide
caaaccuuccucuccgcaa

SEQ ID NO: 3153563 - RNA, 19 nt, Artificial Sequence
  Description of Artificial Sequence: Synthetic oligonucleotide
ccaaaccuuccucuccgca

SEQ ID NO: 3153564 - RNA, 19 nt, Artificial Sequence
  Description of Artificial Sequence: Synthetic oligonucleotide
uccaaaccuuccucuccgc

SEQ ID NO: 3153565 - RNA, 19 nt, Artificial Sequence
  Description of Artificial Sequence: Synthetic oligonucleotide
uuccaaaccuuccucuccg

SEQ ID NO: 3153566 - RNA, 19 nt, Artificial Sequence
  Description of Artificial Sequence: Synthetic oligonucleotide
cuuccaaaccuuccucucc

SEQ ID NO: 3153567 - RNA, 19 nt, Artificial Sequence
  Description of Artificial Sequence: Synthetic oligonucleotide
ucuuccaaaccuuccucuc

SEQ ID NO: 3153568 - RNA, 19 nt, Artificial Sequence
  Description of Artificial Sequence: Synthetic oligonucleotide
cucuuccaaaccuuccucu

SEQ ID NO: 3153569 - RNA, 19 nt, Artificial Sequence
  Description of Artificial Sequence: Synthetic oligonucleotide
ccucuuccaaaccuuccuc

SEQ ID NO: 3153570 - RNA, 19 nt, Artificial Sequence
  Description of Artificial Sequence: Synthetic oligonucleotide
cccucuuccaaaccuuccu

SEQ ID NO: 3153571 - RNA, 19 nt, Artificial Sequence
  Description of Artificial Sequence: Synthetic oligonucleotide
acccucuuccaaaccuucc

SEQ ID NO: 3153572 - RNA, 19 nt, Artificial Sequence
  Description of Artificial Sequence: Synthetic oligonucleotide
uacccucuuccaaaccuuc

SEQ ID NO: 3153573 - RNA, 19 nt, Artificial Sequence
  Description of Artificial Sequence: Synthetic oligonucleotide
cuacccucuuccaaaccuu

SEQ ID NO: 3153574 - RNA, 19 nt, Artificial Sequence
  Description of Artificial Sequence: Synthetic oligonucleotide
ucuacccucuuccaaaccu

SEQ ID NO: 3153575 - RNA, 19 nt, Artificial Sequence
  Description of Artificial Sequence: Synthetic oligonucleotide
uucuacccucuuccaaacc

SEQ ID NO: 3153576 - RNA, 19 nt, Artificial Sequence
  Description of Artificial Sequence: Synthetic oligonucleotide
guucuacccucuuccaaac

SEQ ID NO: 3153577 - RNA, 19 nt, Artificial Sequence
  Description of Artificial Sequence: Synthetic oligonucleotide
aguucuacccucuuccaaa

SEQ ID NO: 3153578 - RNA, 19 nt, Artificial Sequence
  Description of Artificial Sequence: Synthetic oligonucleotide
gaguucuacccucuuccaa

SEQ ID NO: 3153579 - RNA, 19 nt, Artificial Sequence
  Description of Artificial Sequence: Synthetic oligonucleotide
ggaguucuacccucuucca

SEQ ID NO: 3153580 - RNA, 19 nt, Artificial Sequence
  Description of Artificial Sequence: Synthetic oligonucleotide
aggaguucuacccucuucc

SEQ ID NO: 3153581 - RNA, 19 nt, Artificial Sequence
  Description of Artificial Sequence: Synthetic oligonucleotide
gaggaguucuacccucuuc

SEQ ID NO: 3153582 - RNA, 19 nt, Artificial Sequence
  Description of Artificial Sequence: Synthetic oligonucleotide
ugaggaguucuacccucuu

SEQ ID NO: 3153583 - RNA, 19 nt, Artificial Sequence
  Description of Artificial Sequence: Synthetic oligonucleotide
gugaggaguucuacccucu

SEQ ID NO: 3153584 - RNA, 19 nt, Artificial Sequence
  Description of Artificial Sequence: Synthetic oligonucleotide
ggugaggaguucuacccuc

SEQ ID NO: 3153585 - RNA, 19 nt, Artificial Sequence
  Description of Artificial Sequence: Synthetic oligonucleotide
aggugaggaguucuacccu

SEQ ID NO: 3153586 - RNA, 19 nt, Artificial Sequence
  Description of Artificial Sequence: Synthetic oligonucleotide
gaggugaggaguucuaccc

SEQ ID NO: 3153587 - RNA, 19 nt, Artificial Sequence
  Description of Artificial Sequence: Synthetic oligonucleotide
ggaggugaggaguucuacc

SEQ ID NO: 3153588 - RNA, 19 nt, Artificial Sequence
  Description of Artificial Sequence: Synthetic oligonucleotide
uggaggugaggaguucuac

SEQ ID NO: 3153589 - RNA, 19 nt, Artificial Sequence
  Description of Artificial Sequence: Synthetic oligonucleotide
cuggaggugaggaguucua

SEQ ID NO: 3153590 - RNA, 19 nt, Artificial Sequence
  Description of Artificial Sequence: Synthetic oligonucleotide
ccuggaggugaggaguucu

SEQ ID NO: 3153591 - RNA, 19 nt, Artificial Sequence
  Description of Artificial Sequence: Synthetic oligonucleotide
aaaccccuggaggugagga

SEQ ID NO: 3153592 - RNA, 19 nt, Artificial Sequence
  Description of Artificial Sequence: Synthetic oligonucleotide
uucgcaaaccccuggaggu

SEQ ID NO: 3153593 - RNA, 19 nt, Artificial Sequence
  Description of Artificial Sequence: Synthetic oligonucleotide
auucgcaaaccccuggagg

SEQ ID NO: 3153594 - RNA, 19 nt, Artificial Sequence
  Description of Artificial Sequence: Synthetic oligonucleotide
aauucgcaaaccccuggag

SEQ ID NO: 3153595 - RNA, 19 nt, Artificial Sequence
  Description of Artificial Sequence: Synthetic oligonucleotide
aaauucgcaaaccccugga

SEQ ID NO: 3153596 - RNA, 19 nt, Artificial Sequence
  Description of Artificial Sequence: Synthetic oligonucleotide
uagcaaaauucgcaaaccc

SEQ ID NO: 3153597 - RNA, 19 nt, Artificial Sequence
  Description of Artificial Sequence: Synthetic oligonucleotide
uuagcaaaauucgcaaacc

SEQ ID NO: 3153598 - RNA, 19 nt, Artificial Sequence
  Description of Artificial Sequence: Synthetic oligonucleotide
cuuagcaaaauucgcaaac

SEQ ID NO: 3153599 - RNA, 19 nt, Artificial Sequence
  Description of Artificial Sequence: Synthetic oligonucleotide
ucuuagcaaaauucgcaaa

SEQ ID NO: 3153600 - RNA, 19 nt, Artificial Sequence
  Description of Artificial Sequence: Synthetic oligonucleotide
uucuuagcaaaauucgcaa

SEQ ID NO: 3153601 - RNA, 19 nt, Artificial Sequence
  Description of Artificial Sequence: Synthetic oligonucleotide
cuucuuagcaaaauucgca

SEQ ID NO: 3153602 - RNA, 19 nt, Artificial Sequence
  Description of Artificial Sequence: Synthetic oligonucleotide
gcuucuuagcaaaauucgc

SEQ ID NO: 3153603 - RNA, 19 nt, Artificial Sequence
  Description of Artificial Sequence: Synthetic oligonucleotide
ugcuucuuagcaaaauucg

SEQ ID NO: 3153604 - RNA, 19 nt, Artificial Sequence
  Description of Artificial Sequence: Synthetic oligonucleotide
cugcuucuuagcaaaauuc

SEQ ID NO: 3153605 - RNA, 19 nt, Artificial Sequence
  Description of Artificial Sequence: Synthetic oligonucleotide
ucugcuucuuagcaaaauu

SEQ ID NO: 3153606 - RNA, 19 nt, Artificial Sequence
  Description of Artificial Sequence: Synthetic oligonucleotide
gucugcuucuuagcaaaau

SEQ ID NO: 3153607 - RNA, 19 nt, Artificial Sequence
  Description of Artificial Sequence: Synthetic oligonucleotide
agucugcuucuuagcaaaa

SEQ ID NO: 3153608 - RNA, 19 nt, Artificial Sequence
  Description of Artificial Sequence: Synthetic oligonucleotide
aagucugcuucuuagcaaa

SEQ ID NO: 3153609 - RNA, 19 nt, Artificial Sequence
  Description of Artificial Sequence: Synthetic oligonucleotide
aaagucugcuucuuagcaa

SEQ ID NO: 3153610 - RNA, 19 nt, Artificial Sequence
  Description of Artificial Sequence: Synthetic oligonucleotide
aaaagucugcuucuuagca

SEQ ID NO: 3153611 - RNA, 19 nt, Artificial Sequence
  Description of Artificial Sequence: Synthetic oligonucleotide
uaaaagucugcuucuuagc

SEQ ID NO: 3153612 - RNA, 19 nt, Artificial Sequence
  Description of Artificial Sequence: Synthetic oligonucleotide
uuaaaagucugcuucuuag

SEQ ID NO: 3153613 - RNA, 19 nt, Artificial Sequence
  Description of Artificial Sequence: Synthetic oligonucleotide
guuaaaagucugcuucuua

SEQ ID NO: 3153614 - RNA, 19 nt, Artificial Sequence
  Description of Artificial Sequence: Synthetic oligonucleotide
uguuaaaagucugcuucuu

SEQ ID NO: 3153615 - RNA, 19 nt, Artificial Sequence
  Description of Artificial Sequence: Synthetic oligonucleotide
uuguuaaaagucugcuucu

SEQ ID NO: 3153616 - RNA, 19 nt, Artificial Sequence
  Description of Artificial Sequence: Synthetic oligonucleotide
cuuguuaaaagucugcuuc

SEQ ID NO: 3153617 - RNA, 19 nt, Artificial Sequence
  Description of Artificial Sequence: Synthetic oligonucleotide
ccuuguuaaaagucugcuu

SEQ ID NO: 3153618 - RNA, 19 nt, Artificial Sequence
  Description of Artificial Sequence: Synthetic oligonucleotide
accuuguuaaaagucugcu

SEQ ID NO: 3153619 - RNA, 19 nt, Artificial Sequence
  Description of Artificial Sequence: Synthetic oligonucleotide
caccuuguuaaaagucugc

SEQ ID NO: 3153620 - RNA, 19 nt, Artificial Sequence
  Description of Artificial Sequence: Synthetic oligonucleotide
ucaccuuguuaaaagucug

SEQ ID NO: 3153621 - RNA, 19 nt, Artificial Sequence
  Description of Artificial Sequence: Synthetic oligonucleotide
uucaccuuguuaaaagucu

SEQ ID NO: 3153622 - RNA, 19 nt, Artificial Sequence
  Description of Artificial Sequence: Synthetic oligonucleotide
cuucaccuuguuaaaaguc

SEQ ID NO: 3153623 - RNA, 19 nt, Artificial Sequence
  Description of Artificial Sequence: Synthetic oligonucleotide
acuucaccuuguuaaaagu

SEQ ID NO: 3153624 - RNA, 19 nt, Artificial Sequence
  Description of Artificial Sequence: Synthetic oligonucleotide
cacuucaccuuguuaaaag

SEQ ID NO: 3153625 - RNA, 19 nt, Artificial Sequence
  Description of Artificial Sequence: Synthetic oligonucleotide
ccacuucaccuuguuaaaa

SEQ ID NO: 3153626 - RNA, 19 nt, Artificial Sequence
  Description of Artificial Sequence: Synthetic oligonucleotide
accacuucaccuuguuaaa

SEQ ID NO: 3153627 - RNA, 19 nt, Artificial Sequence
  Description of Artificial Sequence: Synthetic oligonucleotide
uaccacuucaccuuguuaa

SEQ ID NO: 3153628 - RNA, 19 nt, Artificial Sequence
  Description of Artificial Sequence: Synthetic oligonucleotide
auaccacuucaccuuguua

SEQ ID NO: 3153629 - RNA, 19 nt, Artificial Sequence
  Description of Artificial Sequence: Synthetic oligonucleotide
aauaccacuucaccuuguu

SEQ ID NO: 3153630 - RNA, 19 nt, Artificial Sequence
  Description of Artificial Sequence: Synthetic oligonucleotide
aaauaccacuucaccuugu

SEQ ID NO: 3153631 - RNA, 19 nt, Artificial Sequence
  Description of Artificial Sequence: Synthetic oligonucleotide
aaaauaccacuucaccuug

SEQ ID NO: 3153632 - RNA, 19 nt, Artificial Sequence
  Description of Artificial Sequence: Synthetic oligonucleotide
caaaauaccacuucaccuu

SEQ ID NO: 3153633 - RNA, 19 nt, Artificial Sequence
  Description of Artificial Sequence: Synthetic oligonucleotide
ccaaaauaccacuucaccu

SEQ ID NO: 3153634 - RNA, 19 nt, Artificial Sequence
  Description of Artificial Sequence: Synthetic oligonucleotide
accaaaauaccacuucacc

SEQ ID NO: 3153635 - RNA, 19 nt, Artificial Sequence
  Description of Artificial Sequence: Synthetic oligonucleotide
caccaaaauaccacuucac

SEQ ID NO: 3153636 - RNA, 19 nt, Artificial Sequence
  Description of Artificial Sequence: Synthetic oligonucleotide
gcaccaaaauaccacuuca

SEQ ID NO: 3153637 - RNA, 19 nt, Artificial Sequence
  Description of Artificial Sequence: Synthetic oligonucleotide
ggcaccaaaauaccacuuc

SEQ ID NO: 3153638 - RNA, 19 nt, Artificial Sequence
  Description of Artificial Sequence: Synthetic oligonucleotide
gggcaccaaaauaccacuu

SEQ ID NO: 3153639 - RNA, 19 nt, Artificial Sequence
  Description of Artificial Sequence: Synthetic oligonucleotide
gcgggcaccaaaauaccac

SEQ ID NO: 3153640 - RNA, 19 nt, Artificial Sequence
  Description of Artificial Sequence: Synthetic oligonucleotide
agcgggcaccaaaauacca

SEQ ID NO: 3153641 - RNA, 19 nt, Artificial Sequence
  Description of Artificial Sequence: Synthetic oligonucleotide
cagcgggcaccaaaauacc

SEQ ID NO: 3153642 - RNA, 19 nt, Artificial Sequence
  Description of Artificial Sequence: Synthetic oligonucleotide
gcagcgggcaccaaaauac

SEQ ID NO: 3153643 - RNA, 19 nt, Artificial Sequence
  Description of Artificial Sequence: Synthetic oligonucleotide
ggcagcgggcaccaaaaua

SEQ ID NO: 3153644 - RNA, 19 nt, Artificial Sequence
  Description of Artificial Sequence: Synthetic oligonucleotide
uggcagcgggcaccaaaau

SEQ ID NO: 3153645 - RNA, 19 nt, Artificial Sequence
  Description of Artificial Sequence: Synthetic oligonucleotide
uuucucgauguggcagcgg

SEQ ID NO: 3153646 - RNA, 19 nt, Artificial Sequence
  Description of Artificial Sequence: Synthetic oligonucleotide
cuuucucgauguggcagcg

SEQ ID NO: 3153647 - RNA, 19 nt, Artificial Sequence
  Description of Artificial Sequence: Synthetic oligonucleotide
gcuuucucgauguggcagc

SEQ ID NO: 3153648 - RNA, 19 nt, Artificial Sequence
  Description of Artificial Sequence: Synthetic oligonucleotide
cgcuuucucgauguggcag

SEQ ID NO: 3153649 - RNA, 19 nt, Artificial Sequence
  Description of Artificial Sequence: Synthetic oligonucleotide
ucgcuuucucgauguggca

SEQ ID NO: 3153650 - RNA, 19 nt, Artificial Sequence
  Description of Artificial Sequence: Synthetic oligonucleotide
uucgcuuucucgauguggc

SEQ ID NO: 3153651 - RNA, 19 nt, Artificial Sequence
  Description of Artificial Sequence: Synthetic oligonucleotide
uuucgcuuucucgaugugg

SEQ ID NO: 3153652 - RNA, 19 nt, Artificial Sequence
  Description of Artificial Sequence: Synthetic oligonucleotide
cuuucgcuuucucgaugug

SEQ ID NO: 3153653 - RNA, 19 nt, Artificial Sequence
  Description of Artificial Sequence: Synthetic oligonucleotide
ccuuucgcuuucucgaugu

SEQ ID NO: 3153654 - RNA, 19 nt, Artificial Sequence
  Description of Artificial Sequence: Synthetic oligonucleotide
uccuuucgcuuucucgaug

SEQ ID NO: 3153655 - RNA, 19 nt, Artificial Sequence
  Description of Artificial Sequence: Synthetic oligonucleotide
uuccuuucgcuuucucgau

SEQ ID NO: 3153656 - RNA, 19 nt, Artificial Sequence
  Description of Artificial Sequence: Synthetic oligonucleotide
guuccuuucgcuuucucga

SEQ ID NO: 3153657 - RNA, 19 nt, Artificial Sequence
  Description of Artificial Sequence: Synthetic oligonucleotide
gguuccuuucgcuuucucg

SEQ ID NO: 3153658 - RNA, 19 nt, Artificial Sequence
  Description of Artificial Sequence: Synthetic oligonucleotide
cgguuccuuucgcuuucuc

SEQ ID NO: 3153659 - RNA, 19 nt, Artificial Sequence
  Description of Artificial Sequence: Synthetic oligonucleotide
ucgguuccuuucgcuuucu

SEQ ID NO: 3153660 - RNA, 19 nt, Artificial Sequence
  Description of Artificial Sequence: Synthetic oligonucleotide
gucgguuccuuucgcuuuc

SEQ ID NO: 3153661 - RNA, 19 nt, Artificial Sequence
  Description of Artificial Sequence: Synthetic oligonucleotide
ggucgguuccuuucgcuuu

SEQ ID NO: 3153662 - RNA, 19 nt, Artificial Sequence
  Description of Artificial Sequence: Synthetic oligonucleotide
uggucgguuccuuucgcuu

SEQ ID NO: 3153663 - RNA, 19 nt, Artificial Sequence
  Description of Artificial Sequence: Synthetic oligonucleotide
cuggucgguuccuuucgcu

SEQ ID NO: 3153664 - RNA, 19 nt, Artificial Sequence
  Description of Artificial Sequence: Synthetic oligonucleotide
ugcuggucgguuccuuucg

SEQ ID NO: 3153665 - RNA, 19 nt, Artificial Sequence
  Description of Artificial Sequence: Synthetic oligonucleotide
cugcuggucgguuccuuuc

SEQ ID NO: 3153666 - RNA, 19 nt, Artificial Sequence
  Description of Artificial Sequence: Synthetic oligonucleotide
ucugcuggucgguuccuuu

SEQ ID NO: 3153667 - RNA, 19 nt, Artificial Sequence
  Description of Artificial Sequence: Synthetic oligonucleotide
uucugcuggucgguuccuu

SEQ ID NO: 3153668 - RNA, 19 nt, Artificial Sequence
  Description of Artificial Sequence: Synthetic oligonucleotide
auucugcuggucgguuccu

SEQ ID NO: 3153669 - RNA, 19 nt, Artificial Sequence
  Description of Artificial Sequence: Synthetic oligonucleotide
uauucugcuggucgguucc

SEQ ID NO: 3153670 - RNA, 19 nt, Artificial Sequence
  Description of Artificial Sequence: Synthetic oligonucleotide
uuauucugcuggucgguuc

SEQ ID NO: 3153671 - RNA, 19 nt, Artificial Sequence
  Description of Artificial Sequence: Synthetic oligonucleotide
uuuauucugcuggucgguu

SEQ ID NO: 3153672 - RNA, 19 nt, Artificial Sequence
  Description of Artificial Sequence: Synthetic oligonucleotide
cuuuauucugcuggucggu

SEQ ID NO: 3153673 - RNA, 19 nt, Artificial Sequence
  Description of Artificial Sequence: Synthetic oligonucleotide
ucuuuauucugcuggucgg

SEQ ID NO: 3153674 - RNA, 19 nt, Artificial Sequence
  Description of Artificial Sequence: Synthetic oligonucleotide
uucuuuauucugcuggucg

SEQ ID NO: 3153675 - RNA, 19 nt, Artificial Sequence
  Description of Artificial Sequence: Synthetic oligonucleotide
auucuuuauucugcugguc

SEQ ID NO: 3153676 - RNA, 19 nt, Artificial Sequence
  Description of Artificial Sequence: Synthetic oligonucleotide
uauucuuuauucugcuggu

SEQ ID NO: 3153677 - RNA, 19 nt, Artificial Sequence
  Description of Artificial Sequence: Synthetic oligonucleotide
guauucuuuauucugcugg

SEQ ID NO: 3153678 - RNA, 19 nt, Artificial Sequence
  Description of Artificial Sequence: Synthetic oligonucleotide
aguauucuuuauucugcug

SEQ ID NO: 3153679 - RNA, 19 nt, Artificial Sequence
  Description of Artificial Sequence: Synthetic oligonucleotide
caguauucuuuauucugcu

SEQ ID NO: 3153680 - RNA, 19 nt, Artificial Sequence
  Description of Artificial Sequence: Synthetic oligonucleotide
gcaguauucuuuauucugc

SEQ ID NO: 3153681 - RNA, 19 nt, Artificial Sequence
  Description of Artificial Sequence: Synthetic oligonucleotide
ugcaguauucuuuauucug

SEQ ID NO: 3153682 - RNA, 19 nt, Artificial Sequence
  Description of Artificial Sequence: Synthetic oligonucleotide
cugcaguauucuuuauucu

SEQ ID NO: 3153683 - RNA, 19 nt, Artificial Sequence
  Description of Artificial Sequence: Synthetic oligonucleotide
acugcaguauucuuuauuc

SEQ ID NO: 3153684 - RNA, 19 nt, Artificial Sequence
  Description of Artificial Sequence: Synthetic oligonucleotide
uacugcaguauucuuuauu

SEQ ID NO: 3153685 - RNA, 19 nt, Artificial Sequence
  Description of Artificial Sequence: Synthetic oligonucleotide
uuacugcaguauucuuuau

SEQ ID NO: 3153686 - RNA, 19 nt, Artificial Sequence
  Description of Artificial Sequence: Synthetic oligonucleotide
uuuacugcaguauucuuua

SEQ ID NO: 3153687 - RNA, 19 nt, Artificial Sequence
  Description of Artificial Sequence: Synthetic oligonucleotide
cuuuacugcaguauucuuu

SEQ ID NO: 3153688 - RNA, 19 nt, Artificial Sequence
  Description of Artificial Sequence: Synthetic oligonucleotide
ucuuuacugcaguauucuu

SEQ ID NO: 3153689 - RNA, 19 nt, Artificial Sequence
  Description of Artificial Sequence: Synthetic oligonucleotide
uucuuuacugcaguauucu

SEQ ID NO: 3153690 - RNA, 19 nt, Artificial Sequence
  Description of Artificial Sequence: Synthetic oligonucleotide
cuucuuuacugcaguauuc

SEQ ID NO: 3153691 - RNA, 19 nt, Artificial Sequence
  Description of Artificial Sequence: Synthetic oligonucleotide
ccuucuuuacugcaguauu

SEQ ID NO: 3153692 - RNA, 19 nt, Artificial Sequence
  Description of Artificial Sequence: Synthetic oligonucleotide
gccuucuuuacugcaguau

SEQ ID NO: 3153693 - RNA, 19 nt, Artificial Sequence
  Description of Artificial Sequence: Synthetic oligonucleotide
ggccuucuuuacugcagua

SEQ ID NO: 3153694 - RNA, 19 nt, Artificial Sequence
  Description of Artificial Sequence: Synthetic oligonucleotide
uggccuucuuuacugcagu

SEQ ID NO: 3153695 - RNA, 19 nt, Artificial Sequence
  Description of Artificial Sequence: Synthetic oligonucleotide
guggccuucuuuacugcag

SEQ ID NO: 3153696 - RNA, 19 nt, Artificial Sequence
  Description of Artificial Sequence: Synthetic oligonucleotide
uguggccuucuuuacugca

SEQ ID NO: 3153697 - RNA, 19 nt, Artificial Sequence
  Description of Artificial Sequence: Synthetic oligonucleotide
auguggccuucuuuacugc

SEQ ID NO: 3153698 - RNA, 19 nt, Artificial Sequence
  Description of Artificial Sequence: Synthetic oligonucleotide
uauguggccuucuuuacug

SEQ ID NO: 3153699 - RNA, 19 nt, Artificial Sequence
  Description of Artificial Sequence: Synthetic oligonucleotide
guauguggccuucuuuacu

SEQ ID NO: 3153700 - RNA, 19 nt, Artificial Sequence
  Description of Artificial Sequence: Synthetic oligonucleotide
aguauguggccuucuuuac

SEQ ID NO: 3153701 - RNA, 19 nt, Artificial Sequence
  Description of Artificial Sequence: Synthetic oligonucleotide
aaguauguggccuucuuua

SEQ ID NO: 3153702 - RNA, 19 nt, Artificial Sequence
  Description of Artificial Sequence: Synthetic oligonucleotide
uaaguauguggccuucuuu

SEQ ID NO: 3153703 - RNA, 19 nt, Artificial Sequence
  Description of Artificial Sequence: Synthetic oligonucleotide
auaaguauguggccuucuu

SEQ ID NO: 3153704 - RNA, 19 nt, Artificial Sequence
  Description of Artificial Sequence: Synthetic oligonucleotide
gauaaguauguggccuucu

SEQ ID NO: 3153705 - RNA, 19 nt, Artificial Sequence
  Description of Artificial Sequence: Synthetic oligonucleotide
cgauaaguauguggccuuc

SEQ ID NO: 3153706 - RNA, 19 nt, Artificial Sequence
  Description of Artificial Sequence: Synthetic oligonucleotide
ucgauaaguauguggccuu

SEQ ID NO: 3153707 - RNA, 19 nt, Artificial Sequence
  Description of Artificial Sequence: Synthetic oligonucleotide
cucgauaaguauguggccu

SEQ ID NO: 3153708 - RNA, 19 nt, Artificial Sequence
  Description of Artificial Sequence: Synthetic oligonucleotide
acucgauaaguauguggcc

SEQ ID NO: 3153709 - RNA, 19 nt, Artificial Sequence
  Description of Artificial Sequence: Synthetic oligonucleotide
cacucgauaaguauguggc

SEQ ID NO: 3153710 - RNA, 19 nt, Artificial Sequence
  Description of Artificial Sequence: Synthetic oligonucleotide
acacucgauaaguaugugg

SEQ ID NO: 3153711 - RNA, 19 nt, Artificial Sequence
  Description of Artificial Sequence: Synthetic oligonucleotide
cacacucgauaaguaugug

SEQ ID NO: 3153712 - RNA, 19 nt, Artificial Sequence
  Description of Artificial Sequence: Synthetic oligonucleotide
ccacacucgauaaguaugu

SEQ ID NO: 3153713 - RNA, 19 nt, Artificial Sequence
  Description of Artificial Sequence: Synthetic oligonucleotide
uccacacucgauaaguaug

SEQ ID NO: 3153714 - RNA, 19 nt, Artificial Sequence
  Description of Artificial Sequence: Synthetic oligonucleotide
cuccacacucgauaaguau

SEQ ID NO: 3153715 - RNA, 19 nt, Artificial Sequence
  Description of Artificial Sequence: Synthetic oligonucleotide
gcuccacacucgauaagua

SEQ ID NO: 3153716 - RNA, 19 nt, Artificial Sequence
  Description of Artificial Sequence: Synthetic oligonucleotide
agcuccacacucgauaagu

SEQ ID NO: 3153717 - RNA, 19 nt, Artificial Sequence
  Description of Artificial Sequence: Synthetic oligonucleotide
gagcuccacacucgauaag

SEQ ID NO: 3153718 - RNA, 19 nt, Artificial Sequence
  Description of Artificial Sequence: Synthetic oligonucleotide
ggagcuccacacucgauaa

SEQ ID NO: 3153719 - RNA, 19 nt, Artificial Sequence
  Description of Artificial Sequence: Synthetic oligonucleotide
cggagcuccacacucgaua

SEQ ID NO: 3153720 - RNA, 19 nt, Artificial Sequence
  Description of Artificial Sequence: Synthetic oligonucleotide
uagacaggucgcugcgcuu

SEQ ID NO: 3153721 - RNA, 19 nt, Artificial Sequence
  Description of Artificial Sequence: Synthetic oligonucleotide
agcaguagacaggucgcug

SEQ ID NO: 3153722 - RNA, 19 nt, Artificial Sequence
  Description of Artificial Sequence: Synthetic oligonucleotide
cagcaguagacaggucgcu

SEQ ID NO: 3153723 - RNA, 19 nt, Artificial Sequence
  Description of Artificial Sequence: Synthetic oligonucleotide
acagcaguagacaggucgc

SEQ ID NO: 3153724 - RNA, 19 nt, Artificial Sequence
  Description of Artificial Sequence: Synthetic oligonucleotide
cacagcaguagacaggucg

SEQ ID NO: 3153725 - RNA, 19 nt, Artificial Sequence
  Description of Artificial Sequence: Synthetic oligonucleotide
ucacagcaguagacagguc

SEQ ID NO: 3153726 - RNA, 19 nt, Artificial Sequence
  Description of Artificial Sequence: Synthetic oligonucleotide
cucacagcaguagacaggu

SEQ ID NO: 3153727 - RNA, 19 nt, Artificial Sequence
  Description of Artificial Sequence: Synthetic oligonucleotide
acucacagcaguagacagg

SEQ ID NO: 3153728 - RNA, 19 nt, Artificial Sequence
  Description of Artificial Sequence: Synthetic oligonucleotide
uacucacagcaguagacag

SEQ ID NO: 3153729 - RNA, 19 nt, Artificial Sequence
  Description of Artificial Sequence: Synthetic oligonucleotide
guacucacagcaguagaca

SEQ ID NO: 3153730 - RNA, 19 nt, Artificial Sequence
  Description of Artificial Sequence: Synthetic oligonucleotide
gguacucacagcaguagac

SEQ ID NO: 3153731 - RNA, 19 nt, Artificial Sequence
  Description of Artificial Sequence: Synthetic oligonucleotide
ggguacucacagcaguaga

SEQ ID NO: 3153732 - RNA, 19 nt, Artificial Sequence
  Description of Artificial Sequence: Synthetic oligonucleotide
aggguacucacagcaguag

SEQ ID NO: 3153733 - RNA, 19 nt, Artificial Sequence
  Description of Artificial Sequence: Synthetic oligonucleotide
aaggguacucacagcagua

SEQ ID NO: 3153734 - RNA, 19 nt, Artificial Sequence
  Description of Artificial Sequence: Synthetic oligonucleotide
aaaggguacucacagcagu

SEQ ID NO: 3153735 - RNA, 19 nt, Artificial Sequence
  Description of Artificial Sequence: Synthetic oligonucleotide
aaaaggguacucacagcag

SEQ ID NO: 3153736 - RNA, 19 nt, Artificial Sequence
  Description of Artificial Sequence: Synthetic oligonucleotide
caaaaggguacucacagca

SEQ ID NO: 3153737 - RNA, 19 nt, Artificial Sequence
  Description of Artificial Sequence: Synthetic oligonucleotide
ccaaaaggguacucacagc

SEQ ID NO: 3153738 - RNA, 19 nt, Artificial Sequence
  Description of Artificial Sequence: Synthetic oligonucleotide
uccaaaaggguacucacag

SEQ ID NO: 3153739 - RNA, 19 nt, Artificial Sequence
  Description of Artificial Sequence: Synthetic oligonucleotide
cuccaaaaggguacucaca

SEQ ID NO: 3153740 - RNA, 19 nt, Artificial Sequence
  Description of Artificial Sequence: Synthetic oligonucleotide
ucuccaaaaggguacucac

SEQ ID NO: 3153741 - RNA, 19 nt, Artificial Sequence
  Description of Artificial Sequence: Synthetic oligonucleotide
gucuccaaaaggguacuca

SEQ ID NO: 3153742 - RNA, 19 nt, Artificial Sequence
  Description of Artificial Sequence: Synthetic oligonucleotide
cgucuccaaaaggguacuc

SEQ ID NO: 3153743 - RNA, 19 nt, Artificial Sequence
  Description of Artificial Sequence: Synthetic oligonucleotide
ccgucuccaaaaggguacu

SEQ ID NO: 3153744 - RNA, 19 nt, Artificial Sequence
  Description of Artificial Sequence: Synthetic oligonucleotide
cccgucuccaaaaggguac

SEQ ID NO: 3153745 - RNA, 19 nt, Artificial Sequence
  Description of Artificial Sequence: Synthetic oligonucleotide
caaagaccccgucuccaaa

SEQ ID NO: 3153746 - RNA, 19 nt, Artificial Sequence
  Description of Artificial Sequence: Synthetic oligonucleotide
ccaaagaccccgucuccaa

SEQ ID NO: 3153747 - RNA, 19 nt, Artificial Sequence
  Description of Artificial Sequence: Synthetic oligonucleotide
accaaagaccccgucucca

SEQ ID NO: 3153748 - RNA, 19 nt, Artificial Sequence
  Description of Artificial Sequence: Synthetic oligonucleotide
ucaccaaagaccccgucuc

SEQ ID NO: 3153749 - RNA, 19 nt, Artificial Sequence
  Description of Artificial Sequence: Synthetic oligonucleotide
gucaccaaagaccccgucu

SEQ ID NO: 3153750 - RNA, 19 nt, Artificial Sequence
  Description of Artificial Sequence: Synthetic oligonucleotide
agucaccaaagaccccguc

SEQ ID NO: 3153751 - RNA, 19 nt, Artificial Sequence
  Description of Artificial Sequence: Synthetic oligonucleotide
cagucaccaaagaccccgu

SEQ ID NO: 3153752 - RNA, 19 nt, Artificial Sequence
  Description of Artificial Sequence: Synthetic oligonucleotide
acagucaccaaagaccccg

SEQ ID NO: 3153753 - RNA, 19 nt, Artificial Sequence
  Description of Artificial Sequence: Synthetic oligonucleotide
uacagucaccaaagacccc

SEQ ID NO: 3153754 - RNA, 19 nt, Artificial Sequence
  Description of Artificial Sequence: Synthetic oligonucleotide
cuacagucaccaaagaccc

SEQ ID NO: 3153755 - RNA, 19 nt, Artificial Sequence
  Description of Artificial Sequence: Synthetic oligonucleotide
gcuacagucaccaaagacc

SEQ ID NO: 3153756 - RNA, 19 nt, Artificial Sequence
  Description of Artificial Sequence: Synthetic oligonucleotide
ggcuacagucaccaaagac

SEQ ID NO: 3153757 - RNA, 19 nt, Artificial Sequence
  Description of Artificial Sequence: Synthetic oligonucleotide
cggcuacagucaccaaaga

SEQ ID NO: 3153758 - RNA, 19 nt, Artificial Sequence
  Description of Artificial Sequence: Synthetic oligonucleotide
ucggcuacagucaccaaag

SEQ ID NO: 3153759 - RNA, 19 nt, Artificial Sequence
  Description of Artificial Sequence: Synthetic oligonucleotide
cucggcuacagucaccaaa

SEQ ID NO: 3153760 - RNA, 19 nt, Artificial Sequence
  Description of Artificial Sequence: Synthetic oligonucleotide
gcucggcuacagucaccaa

SEQ ID NO: 3153761 - RNA, 19 nt, Artificial Sequence
  Description of Artificial Sequence: Synthetic oligonucleotide
ugcucggcuacagucacca

SEQ ID NO: 3153762 - RNA, 19 nt, Artificial Sequence
  Description of Artificial Sequence: Synthetic oligonucleotide
acugcucggcuacagucac

SEQ ID NO: 3153763 - RNA, 19 nt, Artificial Sequence
  Description of Artificial Sequence: Synthetic oligonucleotide
aacugcucggcuacaguca

SEQ ID NO: 3153764 - RNA, 19 nt, Artificial Sequence
  Description of Artificial Sequence: Synthetic oligonucleotide
gaacugcucggcuacaguc

SEQ ID NO: 3153765 - RNA, 19 nt, Artificial Sequence
  Description of Artificial Sequence: Synthetic oligonucleotide
ggaacugcucggcuacagu

SEQ ID NO: 3153766 - RNA, 19 nt, Artificial Sequence
  Description of Artificial Sequence: Synthetic oligonucleotide
agggaacugcucggcuaca

SEQ ID NO: 3153767 - RNA, 19 nt, Artificial Sequence
  Description of Artificial Sequence: Synthetic oligonucleotide
acagggaacugcucggcua

SEQ ID NO: 3153768 - RNA, 19 nt, Artificial Sequence
  Description of Artificial Sequence: Synthetic oligonucleotide
uacagggaacugcucggcu

SEQ ID NO: 3153769 - RNA, 19 nt, Artificial Sequence
  Description of Artificial Sequence: Synthetic oligonucleotide
uuacagggaacugcucggc

SEQ ID NO: 3153770 - RNA, 19 nt, Artificial Sequence
  Description of Artificial Sequence: Synthetic oligonucleotide
guuacagggaacugcucgg

SEQ ID NO: 3153771 - RNA, 19 nt, Artificial Sequence
  Description of Artificial Sequence: Synthetic oligonucleotide
cguuacagggaacugcucg

SEQ ID NO: 3153772 - RNA, 19 nt, Artificial Sequence
  Description of Artificial Sequence: Synthetic oligonucleotide
acguuacagggaacugcuc

SEQ ID NO: 3153773 - RNA, 19 nt, Artificial Sequence
  Description of Artificial Sequence: Synthetic oligonucleotide
uacguuacagggaacugcu

SEQ ID NO: 3153774 - RNA, 19 nt, Artificial Sequence
  Description of Artificial Sequence: Synthetic oligonucleotide
auacguuacagggaacugc

SEQ ID NO: 3153775 - RNA, 19 nt, Artificial Sequence
  Description of Artificial Sequence: Synthetic oligonucleotide
cauacguuacagggaacug

SEQ ID NO: 3153776 - RNA, 19 nt, Artificial Sequence
  Description of Artificial Sequence: Synthetic oligonucleotide
acauacguuacagggaacu

SEQ ID NO: 3153777 - RNA, 19 nt, Artificial Sequence
  Description of Artificial Sequence: Synthetic oligonucleotide
cacauacguuacagggaac

SEQ ID NO: 3153778 - RNA, 19 nt, Artificial Sequence
  Description of Artificial Sequence: Synthetic oligonucleotide
ucacauacguuacagggaa

SEQ ID NO: 3153779 - RNA, 19 nt, Artificial Sequence
  Description of Artificial Sequence: Synthetic oligonucleotide
cucacauacguuacaggga

SEQ ID NO: 3153780 - RNA, 19 nt, Artificial Sequence
  Description of Artificial Sequence: Synthetic oligonucleotide
ucucacauacguuacaggg

SEQ ID NO: 3153781 - RNA, 19 nt, Artificial Sequence
  Description of Artificial Sequence: Synthetic oligonucleotide
uucucacauacguuacagg

SEQ ID NO: 3153782 - RNA, 19 nt, Artificial Sequence
  Description of Artificial Sequence: Synthetic oligonucleotide
uuucucacauacguuacag

SEQ ID NO: 3153783 - RNA, 19 nt, Artificial Sequence
  Description of Artificial Sequence: Synthetic oligonucleotide
auuucucacauacguuaca

SEQ ID NO: 3153784 - RNA, 19 nt, Artificial Sequence
  Description of Artificial Sequence: Synthetic oligonucleotide
aauuucucacauacguuac

SEQ ID NO: 3153785 - RNA, 19 nt, Artificial Sequence
  Description of Artificial Sequence: Synthetic oligonucleotide
aaauuucucacauacguua

SEQ ID NO: 3153786 - RNA, 19 nt, Artificial Sequence
  Description of Artificial Sequence: Synthetic oligonucleotide
gaaauuucucacauacguu

SEQ ID NO: 3153787 - RNA, 19 nt, Artificial Sequence
  Description of Artificial Sequence: Synthetic oligonucleotide
ggaaauuucucacauacgu

SEQ ID NO: 3153788 - RNA, 19 nt, Artificial Sequence
  Description of Artificial Sequence: Synthetic oligonucleotide
cggaaauuucucacauacg

SEQ ID NO: 3153789 - RNA, 19 nt, Artificial Sequence
  Description of Artificial Sequence: Synthetic oligonucleotide
gcggaaauuucucacauac

SEQ ID NO: 3153790 - RNA, 19 nt, Artificial Sequence
  Description of Artificial Sequence: Synthetic oligonucleotide
cgcggaaauuucucacaua

SEQ ID NO: 3153791 - RNA, 19 nt, Artificial Sequence
  Description of Artificial Sequence: Synthetic oligonucleotide
ccgcggaaauuucucacau

SEQ ID NO: 3153792 - RNA, 19 nt, Artificial Sequence
  Description of Artificial Sequence: Synthetic oligonucleotide
cccgcggaaauuucucaca

SEQ ID NO: 3153793 - RNA, 19 nt, Artificial Sequence
  Description of Artificial Sequence: Synthetic oligonucleotide
gcccgcggaaauuucucac

SEQ ID NO: 3153794 - RNA, 19 nt, Artificial Sequence
  Description of Artificial Sequence: Synthetic oligonucleotide
agcccgcggaaauuucuca

SEQ ID NO: 3153795 - RNA, 19 nt, Artificial Sequence
  Description of Artificial Sequence: Synthetic oligonucleotide
cagcccgcggaaauuucuc

SEQ ID NO: 3153796 - RNA, 19 nt, Artificial Sequence
  Description of Artificial Sequence: Synthetic oligonucleotide
ccagcccgcggaaauuucu

SEQ ID NO: 3153797 - RNA, 19 nt, Artificial Sequence
  Description of Artificial Sequence: Synthetic oligonucleotide
agccagcccgcggaaauuu

SEQ ID NO: 3153798 - RNA, 19 nt, Artificial Sequence
  Description of Artificial Sequence: Synthetic oligonucleotide
aaaaguucagccagcccgc

SEQ ID NO: 3153799 - RNA, 19 nt, Artificial Sequence
  Description of Artificial Sequence: Synthetic oligonucleotide
caaaaguucagccagcccg

SEQ ID NO: 3153800 - RNA, 19 nt, Artificial Sequence
  Description of Artificial Sequence: Synthetic oligonucleotide
ucaaaaguucagccagccc

SEQ ID NO: 3153801 - RNA, 19 nt, Artificial Sequence
  Description of Artificial Sequence: Synthetic oligonucleotide
uucaaaaguucagccagcc

SEQ ID NO: 3153802 - RNA, 19 nt, Artificial Sequence
  Description of Artificial Sequence: Synthetic oligonucleotide
uuucaaaaguucagccagc

SEQ ID NO: 3153803 - RNA, 19 nt, Artificial Sequence
  Description of Artificial Sequence: Synthetic oligonucleotide
cuuucaaaaguucagccag

SEQ ID NO: 3153804 - RNA, 19 nt, Artificial Sequence
  Description of Artificial Sequence: Synthetic oligonucleotide
acuuucaaaaguucagcca

SEQ ID NO: 3153805 - RNA, 19 nt, Artificial Sequence
  Description of Artificial Sequence: Synthetic oligonucleotide
cacuuucaaaaguucagcc

SEQ ID NO: 3153806 - RNA, 19 nt, Artificial Sequence
  Description of Artificial Sequence: Synthetic oligonucleotide
ucacuuucaaaaguucagc

SEQ ID NO: 3153807 - RNA, 19 nt, Artificial Sequence
  Description of Artificial Sequence: Synthetic oligonucleotide
cucacuuucaaaaguucag

SEQ ID NO: 3153808 - RNA, 19 nt, Artificial Sequence
  Description of Artificial Sequence: Synthetic oligonucleotide
gcucacuuucaaaaguuca

SEQ ID NO: 3153809 - RNA, 19 nt, Artificial Sequence
  Description of Artificial Sequence: Synthetic oligonucleotide
cgcucacuuucaaaaguuc

SEQ ID NO: 3153810 - RNA, 19 nt, Artificial Sequence
  Description of Artificial Sequence: Synthetic oligonucleotide
ccgcucacuuucaaaaguu

SEQ ID NO: 3153811 - RNA, 19 nt, Artificial Sequence
  Description of Artificial Sequence: Synthetic oligonucleotide
cccgcucacuuucaaaagu

SEQ ID NO: 3153812 - RNA, 19 nt, Artificial Sequence
  Description of Artificial Sequence: Synthetic oligonucleotide
ucccgcucacuuucaaaag

SEQ ID NO: 3153813 - RNA, 19 nt, Artificial Sequence
  Description of Artificial Sequence: Synthetic oligonucleotide
uucccgcucacuuucaaaa

SEQ ID NO: 3153814 - RNA, 19 nt, Artificial Sequence
  Description of Artificial Sequence: Synthetic oligonucleotide
cuucccgcucacuuucaaa

SEQ ID NO: 3153815 - RNA, 19 nt, Artificial Sequence
  Description of Artificial Sequence: Synthetic oligonucleotide
ucuucccgcucacuuucaa

SEQ ID NO: 3153816 - RNA, 19 nt, Artificial Sequence
  Description of Artificial Sequence: Synthetic oligonucleotide
aucuucccgcucacuuuca

SEQ ID NO: 3153817 - RNA, 19 nt, Artificial Sequence
  Description of Artificial Sequence: Synthetic oligonucleotide
caucuucccgcucacuuuc

SEQ ID NO: 3153818 - RNA, 19 nt, Artificial Sequence
  Description of Artificial Sequence: Synthetic oligonucleotide
gcaucuucccgcucacuuu

SEQ ID NO: 3153819 - RNA, 19 nt, Artificial Sequence
  Description of Artificial Sequence: Synthetic oligonucleotide
ugcaucuucccgcucacuu

SEQ ID NO: 3153820 - RNA, 19 nt, Artificial Sequence
  Description of Artificial Sequence: Synthetic oligonucleotide
cugcaucuucccgcucacu

SEQ ID NO: 3153821 - RNA, 19 nt, Artificial Sequence
  Description of Artificial Sequence: Synthetic oligonucleotide
ugcugcaucuucccgcuca

SEQ ID NO: 3153822 - RNA, 19 nt, Artificial Sequence
  Description of Artificial Sequence: Synthetic oligonucleotide
ucacgcugcugcaucuucc

SEQ ID NO: 3153823 - RNA, 19 nt, Artificial Sequence
  Description of Artificial Sequence: Synthetic oligonucleotide
aucacgcugcugcaucuuc

SEQ ID NO: 3153824 - RNA, 19 nt, Artificial Sequence
  Description of Artificial Sequence: Synthetic oligonucleotide
aaucacgcugcugcaucuu

SEQ ID NO: 3153825 - RNA, 19 nt, Artificial Sequence
  Description of Artificial Sequence: Synthetic oligonucleotide
caaucacgcugcugcaucu

SEQ ID NO: 3153826 - RNA, 19 nt, Artificial Sequence
  Description of Artificial Sequence: Synthetic oligonucleotide
ccaaucacgcugcugcauc

SEQ ID NO: 3153827 - RNA, 19 nt, Artificial Sequence
  Description of Artificial Sequence: Synthetic oligonucleotide
uccaaucacgcugcugcau

SEQ ID NO: 3153828 - RNA, 19 nt, Artificial Sequence
  Description of Artificial Sequence: Synthetic oligonucleotide
uuccaaucacgcugcugca

SEQ ID NO: 3153829 - RNA, 19 nt, Artificial Sequence
  Description of Artificial Sequence: Synthetic oligonucleotide
cuuccaaucacgcugcugc

SEQ ID NO: 3153830 - RNA, 19 nt, Artificial Sequence
  Description of Artificial Sequence: Synthetic oligonucleotide
ucuuccaaucacgcugcug

SEQ ID NO: 3153831 - RNA, 19 nt, Artificial Sequence
  Description of Artificial Sequence: Synthetic oligonucleotide
gucuuccaaucacgcugcu

SEQ ID NO: 3153832 - RNA, 19 nt, Artificial Sequence
  Description of Artificial Sequence: Synthetic oligonucleotide
ugucuuccaaucacgcugc

SEQ ID NO: 3153833 - RNA, 19 nt, Artificial Sequence
  Description of Artificial Sequence: Synthetic oligonucleotide
cugucuuccaaucacgcug

SEQ ID NO: 3153834 - RNA, 19 nt, Artificial Sequence
  Description of Artificial Sequence: Synthetic oligonucleotide
gcugucuuccaaucacgcu

SEQ ID NO: 3153835 - RNA, 19 nt, Artificial Sequence
  Description of Artificial Sequence: Synthetic oligonucleotide
agcugucuuccaaucacgc

SEQ ID NO: 3153836 - RNA, 19 nt, Artificial Sequence
  Description of Artificial Sequence: Synthetic oligonucleotide
cagcugucuuccaaucacg

SEQ ID NO: 3153837 - RNA, 19 nt, Artificial Sequence
  Description of Artificial Sequence: Synthetic oligonucleotide
acagcugucuuccaaucac

SEQ ID NO: 3153838 - RNA, 19 nt, Artificial Sequence
  Description of Artificial Sequence: Synthetic oligonucleotide
uacagcugucuuccaauca

SEQ ID NO: 3153839 - RNA, 19 nt, Artificial Sequence
  Description of Artificial Sequence: Synthetic oligonucleotide
guacagcugucuuccaauc

SEQ ID NO: 3153840 - RNA, 19 nt, Artificial Sequence
  Description of Artificial Sequence: Synthetic oligonucleotide
uguacagcugucuuccaau

SEQ ID NO: 3153841 - RNA, 19 nt, Artificial Sequence
  Description of Artificial Sequence: Synthetic oligonucleotide
guguacagcugucuuccaa

SEQ ID NO: 3153842 - RNA, 19 nt, Artificial Sequence
  Description of Artificial Sequence: Synthetic oligonucleotide
cguguacagcugucuucca

SEQ ID NO: 3153843 - RNA, 19 nt, Artificial Sequence
  Description of Artificial Sequence: Synthetic oligonucleotide
acguguacagcugucuucc

SEQ ID NO: 3153844 - RNA, 19 nt, Artificial Sequence
  Description of Artificial Sequence: Synthetic oligonucleotide
gacguguacagcugucuuc

SEQ ID NO: 3153845 - RNA, 19 nt, Artificial Sequence
  Description of Artificial Sequence: Synthetic oligonucleotide
ugacguguacagcugucuu

SEQ ID NO: 3153846 - RNA, 19 nt, Artificial Sequence
  Description of Artificial Sequence: Synthetic oligonucleotide
augacguguacagcugucu

SEQ ID NO: 3153847 - RNA, 19 nt, Artificial Sequence
  Description of Artificial Sequence: Synthetic oligonucleotide
uaugacguguacagcuguc

SEQ ID NO: 3153848 - RNA, 19 nt, Artificial Sequence
  Description of Artificial Sequence: Synthetic oligonucleotide
cuaugacguguacagcugu

SEQ ID NO: 3153849 - RNA, 19 nt, Artificial Sequence
  Description of Artificial Sequence: Synthetic oligonucleotide
acuaugacguguacagcug

SEQ ID NO: 3153850 - RNA, 19 nt, Artificial Sequence
  Description of Artificial Sequence: Synthetic oligonucleotide
cacuaugacguguacagcu

SEQ ID NO: 3153851 - RNA, 19 nt, Artificial Sequence
  Description of Artificial Sequence: Synthetic oligonucleotide
ccacuaugacguguacagc

SEQ ID NO: 3153852 - RNA, 19 nt, Artificial Sequence
  Description of Artificial Sequence: Synthetic oligonucleotide
cccacuaugacguguacag

SEQ ID NO: 3153853 - RNA, 19 nt, Artificial Sequence
  Description of Artificial Sequence: Synthetic oligonucleotide
gcccacuaugacguguaca

SEQ ID NO: 3153854 - RNA, 19 nt, Artificial Sequence
  Description of Artificial Sequence: Synthetic oligonucleotide
ggcccacuaugacguguac

SEQ ID NO: 3153855 - RNA, 19 nt, Artificial Sequence
  Description of Artificial Sequence: Synthetic oligonucleotide
gggcccacuaugacgugua

SEQ ID NO: 3153856 - RNA, 19 nt, Artificial Sequence
  Description of Artificial Sequence: Synthetic oligonucleotide
acuggcucuucccacaacc

SEQ ID NO: 3153857 - RNA, 19 nt, Artificial Sequence
  Description of Artificial Sequence: Synthetic oligonucleotide
cacuggcucuucccacaac

SEQ ID NO: 3153858 - RNA, 19 nt, Artificial Sequence
  Description of Artificial Sequence: Synthetic oligonucleotide
ccacuggcucuucccacaa

SEQ ID NO: 3153859 - RNA, 19 nt, Artificial Sequence
  Description of Artificial Sequence: Synthetic oligonucleotide
aauuacgggcccacuggcu

SEQ ID NO: 3153860 - RNA, 19 nt, Artificial Sequence
  Description of Artificial Sequence: Synthetic oligonucleotide
aaauuacgggcccacuggc

SEQ ID NO: 3153861 - RNA, 19 nt, Artificial Sequence
  Description of Artificial Sequence: Synthetic oligonucleotide
aaaauuacgggcccacugg

SEQ ID NO: 3153862 - RNA, 19 nt, Artificial Sequence
  Description of Artificial Sequence: Synthetic oligonucleotide
caaaauuacgggcccacug

SEQ ID NO: 3153863 - RNA, 19 nt, Artificial Sequence
  Description of Artificial Sequence: Synthetic oligonucleotide
gcaaaauuacgggcccacu

SEQ ID NO: 3153864 - RNA, 19 nt, Artificial Sequence
  Description of Artificial Sequence: Synthetic oligonucleotide
agcaaaauuacgggcccac

SEQ ID NO: 3153865 - RNA, 19 nt, Artificial Sequence
  Description of Artificial Sequence: Synthetic oligonucleotide
cagcaaaauuacgggccca

SEQ ID NO: 3153866 - RNA, 19 nt, Artificial Sequence
  Description of Artificial Sequence: Synthetic oligonucleotide
ucagcaaaauuacgggccc

SEQ ID NO: 3153867 - RNA, 19 nt, Artificial Sequence
  Description of Artificial Sequence: Synthetic oligonucleotide
cucagcaaaauuacgggcc

SEQ ID NO: 3153868 - RNA, 19 nt, Artificial Sequence
  Description of Artificial Sequence: Synthetic oligonucleotide
gcucagcaaaauuacgggc

SEQ ID NO: 3153869 - RNA, 19 nt, Artificial Sequence
  Description of Artificial Sequence: Synthetic oligonucleotide
ggcucagcaaaauuacggg

SEQ ID NO: 3153870 - RNA, 19 nt, Artificial Sequence
  Description of Artificial Sequence: Synthetic oligonucleotide
aggcucagcaaaauuacgg

SEQ ID NO: 3153871 - RNA, 19 nt, Artificial Sequence
  Description of Artificial Sequence: Synthetic oligonucleotide
uaggcucagcaaaauuacg

SEQ ID NO: 3153872 - RNA, 19 nt, Artificial Sequence
  Description of Artificial Sequence: Synthetic oligonucleotide
cuaggcucagcaaaauuac

SEQ ID NO: 3153873 - RNA, 19 nt, Artificial Sequence
  Description of Artificial Sequence: Synthetic oligonucleotide
gcuaggcucagcaaaauua

SEQ ID NO: 3153874 - RNA, 19 nt, Artificial Sequence
  Description of Artificial Sequence: Synthetic oligonucleotide
cgcuaggcucagcaaaauu

SEQ ID NO: 3153875 - RNA, 19 nt, Artificial Sequence
  Description of Artificial Sequence: Synthetic oligonucleotide
ucgcuaggcucagcaaaau

SEQ ID NO: 3153876 - RNA, 19 nt, Artificial Sequence
  Description of Artificial Sequence: Synthetic oligonucleotide
gucgcuaggcucagcaaaa

SEQ ID NO: 3153877 - RNA, 19 nt, Artificial Sequence
  Description of Artificial Sequence: Synthetic oligonucleotide
ugucgcuaggcucagcaaa

SEQ ID NO: 3153878 - RNA, 19 nt, Artificial Sequence
  Description of Artificial Sequence: Synthetic oligonucleotide
gugucgcuaggcucagcaa

SEQ ID NO: 3153879 - RNA, 19 nt, Artificial Sequence
  Description of Artificial Sequence: Synthetic oligonucleotide
uaggugucgcuaggcucag

SEQ ID NO: 3153880 - RNA, 19 nt, Artificial Sequence
  Description of Artificial Sequence: Synthetic oligonucleotide
guaggugucgcuaggcuca

SEQ ID NO: 3153881 - RNA, 19 nt, Artificial Sequence
  Description of Artificial Sequence: Synthetic oligonucleotide
aguaggugucgcuaggcuc

SEQ ID NO: 3153882 - RNA, 19 nt, Artificial Sequence
  Description of Artificial Sequence: Synthetic oligonucleotide
caguaggugucgcuaggcu

SEQ ID NO: 3153883 - RNA, 19 nt, Artificial Sequence
  Description of Artificial Sequence: Synthetic oligonucleotide
uccaguaggugucgcuagg

SEQ ID NO: 3153884 - RNA, 19 nt, Artificial Sequence
  Description of Artificial Sequence: Synthetic oligonucleotide
uuccaguaggugucgcuag

SEQ ID NO: 3153885 - RNA, 19 nt, Artificial Sequence
  Description of Artificial Sequence: Synthetic oligonucleotide
cuuccaguaggugucgcua

SEQ ID NO: 3153886 - RNA, 19 nt, Artificial Sequence
  Description of Artificial Sequence: Synthetic oligonucleotide
gcuuccaguaggugucgcu

SEQ ID NO: 3153887 - RNA, 19 nt, Artificial Sequence
  Description of Artificial Sequence: Synthetic oligonucleotide
aggcuuccaguaggugucg

SEQ ID NO: 3153888 - RNA, 19 nt, Artificial Sequence
  Description of Artificial Sequence: Synthetic oligonucleotide
uaggcuuccaguagguguc

SEQ ID NO: 3153889 - RNA, 19 nt, Artificial Sequence
  Description of Artificial Sequence: Synthetic oligonucleotide
cuaggcuuccaguaggugu

SEQ ID NO: 3153890 - RNA, 19 nt, Artificial Sequence
  Description of Artificial Sequence: Synthetic oligonucleotide
acuaggcuuccaguaggug

SEQ ID NO: 3153891 - RNA, 19 nt, Artificial Sequence
  Description of Artificial Sequence: Synthetic oligonucleotide
uacuaggcuuccaguaggu

SEQ ID NO: 3153892 - RNA, 19 nt, Artificial Sequence
  Description of Artificial Sequence: Synthetic oligonucleotide
cuacuaggcuuccaguagg

SEQ ID NO: 3153893 - RNA, 19 nt, Artificial Sequence
  Description of Artificial Sequence: Synthetic oligonucleotide
ucuacuaggcuuccaguag

SEQ ID NO: 3153894 - RNA, 19 nt, Artificial Sequence
  Description of Artificial Sequence: Synthetic oligonucleotide
uucuacuaggcuuccagua

SEQ ID NO: 3153895 - RNA, 19 nt, Artificial Sequence
  Description of Artificial Sequence: Synthetic oligonucleotide
uuucuacuaggcuuccagu

SEQ ID NO: 3153896 - RNA, 19 nt, Artificial Sequence
  Description of Artificial Sequence: Synthetic oligonucleotide
auuucuacuaggcuuccag

SEQ ID NO: 3153897 - RNA, 19 nt, Artificial Sequence
  Description of Artificial Sequence: Synthetic oligonucleotide
uauuucuacuaggcuucca

SEQ ID NO: 3153898 - RNA, 19 nt, Artificial Sequence
  Description of Artificial Sequence: Synthetic oligonucleotide
uuauuucuacuaggcuucc

SEQ ID NO: 3153899 - RNA, 19 nt, Artificial Sequence
  Description of Artificial Sequence: Synthetic oligonucleotide
cuuauuucuacuaggcuuc

SEQ ID NO: 3153900 - RNA, 19 nt, Artificial Sequence
  Description of Artificial Sequence: Synthetic oligonucleotide
acuuauuucuacuaggcuu

SEQ ID NO: 3153901 - RNA, 19 nt, Artificial Sequence
  Description of Artificial Sequence: Synthetic oligonucleotide
cacuuauuucuacuaggcu

SEQ ID NO: 3153902 - RNA, 19 nt, Artificial Sequence
  Description of Artificial Sequence: Synthetic oligonucleotide
ccacuuauuucuacuaggc

SEQ ID NO: 3153903 - RNA, 19 nt, Artificial Sequence
  Description of Artificial Sequence: Synthetic oligonucleotide
accacuuauuucuacuagg

SEQ ID NO: 3153904 - RNA, 19 nt, Artificial Sequence
  Description of Artificial Sequence: Synthetic oligonucleotide
caccacuuauuucuacuag

SEQ ID NO: 3153905 - RNA, 19 nt, Artificial Sequence
  Description of Artificial Sequence: Synthetic oligonucleotide
ccaccacuuauuucuacua

SEQ ID NO: 3153906 - RNA, 19 nt, Artificial Sequence
  Description of Artificial Sequence: Synthetic oligonucleotide
cccaccacuuauuucuacu

SEQ ID NO: 3153907 - RNA, 19 nt, Artificial Sequence
  Description of Artificial Sequence: Synthetic oligonucleotide
ucccaccacuuauuucuac

SEQ ID NO: 3153908 - RNA, 19 nt, Artificial Sequence
  Description of Artificial Sequence: Synthetic oligonucleotide
aucccaccacuuauuucua

SEQ ID NO: 3153909 - RNA, 19 nt, Artificial Sequence
  Description of Artificial Sequence: Synthetic oligonucleotide
caucccaccacuuauuucu

SEQ ID NO: 3153910 - RNA, 19 nt, Artificial Sequence
  Description of Artificial Sequence: Synthetic oligonucleotide
ccaucccaccacuuauuuc

SEQ ID NO: 3153911 - RNA, 19 nt, Artificial Sequence
  Description of Artificial Sequence: Synthetic oligonucleotide
uccaucccaccacuuauuu

SEQ ID NO: 3153912 - RNA, 19 nt, Artificial Sequence
  Description of Artificial Sequence: Synthetic oligonucleotide
auccaucccaccacuuauu

SEQ ID NO: 3153913 - RNA, 19 nt, Artificial Sequence
  Description of Artificial Sequence: Synthetic oligonucleotide
uauccaucccaccacuuau

SEQ ID NO: 3153914 - RNA, 19 nt, Artificial Sequence
  Description of Artificial Sequence: Synthetic oligonucleotide
auauccaucccaccacuua

SEQ ID NO: 3153915 - RNA, 19 nt, Artificial Sequence
  Description of Artificial Sequence: Synthetic oligonucleotide
gauauccaucccaccacuu

SEQ ID NO: 3153916 - RNA, 19 nt, Artificial Sequence
  Description of Artificial Sequence: Synthetic oligonucleotide
ugauauccaucccaccacu

SEQ ID NO: 3153917 - RNA, 19 nt, Artificial Sequence
  Description of Artificial Sequence: Synthetic oligonucleotide
augauauccaucccaccac

SEQ ID NO: 3153918 - RNA, 19 nt, Artificial Sequence
  Description of Artificial Sequence: Synthetic oligonucleotide
caugauauccaucccacca

SEQ ID NO: 3153919 - RNA, 19 nt, Artificial Sequence
  Description of Artificial Sequence: Synthetic oligonucleotide
ccaugauauccaucccacc

SEQ ID NO: 3153920 - RNA, 19 nt, Artificial Sequence
  Description of Artificial Sequence: Synthetic oligonucleotide
uccaugauauccaucccac

SEQ ID NO: 3153921 - RNA, 19 nt, Artificial Sequence
  Description of Artificial Sequence: Synthetic oligonucleotide
cuccaugauauccauccca

SEQ ID NO: 3153922 - RNA, 19 nt, Artificial Sequence
  Description of Artificial Sequence: Synthetic oligonucleotide
ucuccaugauauccauccc

SEQ ID NO: 3153923 - RNA, 19 nt, Artificial Sequence
  Description of Artificial Sequence: Synthetic oligonucleotide
uucuccaugauauccaucc

SEQ ID NO: 3153924 - RNA, 19 nt, Artificial Sequence
  Description of Artificial Sequence: Synthetic oligonucleotide
cuucuccaugauauccauc

SEQ ID NO: 3153925 - RNA, 19 nt, Artificial Sequence
  Description of Artificial Sequence: Synthetic oligonucleotide
ucuucuccaugauauccau

SEQ ID NO: 3153926 - RNA, 19 nt, Artificial Sequence
  Description of Artificial Sequence: Synthetic oligonucleotide
uucuucuccaugauaucca

SEQ ID NO: 3153927 - RNA, 19 nt, Artificial Sequence
  Description of Artificial Sequence: Synthetic oligonucleotide
cuucuucuccaugauaucc

SEQ ID NO: 3153928 - RNA, 19 nt, Artificial Sequence
  Description of Artificial Sequence: Synthetic oligonucleotide
acuucuucuccaugauauc

SEQ ID NO: 3153929 - RNA, 19 nt, Artificial Sequence
  Description of Artificial Sequence: Synthetic oligonucleotide
aacuucuucuccaugauau

SEQ ID NO: 3153930 - RNA, 19 nt, Artificial Sequence
  Description of Artificial Sequence: Synthetic oligonucleotide
caacuucuucuccaugaua

SEQ ID NO: 3153931 - RNA, 19 nt, Artificial Sequence
  Description of Artificial Sequence: Synthetic oligonucleotide
acaacuucuucuccaugau

SEQ ID NO: 3153932 - RNA, 19 nt, Artificial Sequence
  Description of Artificial Sequence: Synthetic oligonucleotide
aacaacuucuucuccauga

SEQ ID NO: 3153933 - RNA, 19 nt, Artificial Sequence
  Description of Artificial Sequence: Synthetic oligonucleotide
caacaacuucuucuccaug

SEQ ID NO: 3153934 - RNA, 19 nt, Artificial Sequence
  Description of Artificial Sequence: Synthetic oligonucleotide
acaacaacuucuucuccau

SEQ ID NO: 3153935 - RNA, 19 nt, Artificial Sequence
  Description of Artificial Sequence: Synthetic oligonucleotide
aacaacaacuucuucucca

SEQ ID NO: 3153936 - RNA, 19 nt, Artificial Sequence
  Description of Artificial Sequence: Synthetic oligonucleotide
aaacaacaacuucuucucc

SEQ ID NO: 3153937 - RNA, 19 nt, Artificial Sequence
  Description of Artificial Sequence: Synthetic oligonucleotide
aaaacaacaacuucuucuc

SEQ ID NO: 3153938 - RNA, 19 nt, Artificial Sequence
  Description of Artificial Sequence: Synthetic oligonucleotide
caaaacaacaacuucuucu

SEQ ID NO: 3153939 - RNA, 19 nt, Artificial Sequence
  Description of Artificial Sequence: Synthetic oligonucleotide
ccaaaacaacaacuucuuc

SEQ ID NO: 3153940 - RNA, 19 nt, Artificial Sequence
  Description of Artificial Sequence: Synthetic oligonucleotide
uccaaaacaacaacuucuu

SEQ ID NO: 3153941 - RNA, 19 nt, Artificial Sequence
  Description of Artificial Sequence: Synthetic oligonucleotide
auccaaaacaacaacuucu

SEQ ID NO: 3153942 - RNA, 19 nt, Artificial Sequence
  Description of Artificial Sequence: Synthetic oligonucleotide
cauccaaaacaacaacuuc

SEQ ID NO: 3153943 - RNA, 19 nt, Artificial Sequence
  Description of Artificial Sequence: Synthetic oligonucleotide
ucauccaaaacaacaacuu

SEQ ID NO: 3153944 - RNA, 19 nt, Artificial Sequence
  Description of Artificial Sequence: Synthetic oligonucleotide
aucauccaaaacaacaacu

SEQ ID NO: 3153945 - RNA, 19 nt, Artificial Sequence
  Description of Artificial Sequence: Synthetic oligonucleotide
aaucauccaaaacaacaac

SEQ ID NO: 3153946 - RNA, 19 nt, Artificial Sequence
  Description of Artificial Sequence: Synthetic oligonucleotide
aaaucauccaaaacaacaa

SEQ ID NO: 3153947 - RNA, 19 nt, Artificial Sequence
  Description of Artificial Sequence: Synthetic oligonucleotide
aagguaaccagccauaaaa

SEQ ID NO: 3153948 - RNA, 19 nt, Artificial Sequence
  Description of Artificial Sequence: Synthetic oligonucleotide
caagguaaccagccauaaa

SEQ ID NO: 3153949 - RNA, 19 nt, Artificial Sequence
  Description of Artificial Sequence: Synthetic oligonucleotide
ccaagguaaccagccauaa

SEQ ID NO: 3153950 - RNA, 19 nt, Artificial Sequence
  Description of Artificial Sequence: Synthetic oligonucleotide
cccaagguaaccagccaua

SEQ ID NO: 3153951 - RNA, 19 nt, Artificial Sequence
  Description of Artificial Sequence: Synthetic oligonucleotide
ucccaagguaaccagccau

SEQ ID NO: 3153952 - RNA, 19 nt, Artificial Sequence
  Description of Artificial Sequence: Synthetic oligonucleotide
aucccaagguaaccagcca

SEQ ID NO: 3153953 - RNA, 19 nt, Artificial Sequence
  Description of Artificial Sequence: Synthetic oligonucleotide
caucccaagguaaccagcc

SEQ ID NO: 3153954 - RNA, 19 nt, Artificial Sequence
  Description of Artificial Sequence: Synthetic oligonucleotide
ucaucccaagguaaccagc

SEQ ID NO: 3153955 - RNA, 19 nt, Artificial Sequence
  Description of Artificial Sequence: Synthetic oligonucleotide
aucaucccaagguaaccag

SEQ ID NO: 3153956 - RNA, 19 nt, Artificial Sequence
  Description of Artificial Sequence: Synthetic oligonucleotide
gaucaucccaagguaacca

SEQ ID NO: 3153957 - RNA, 19 nt, Artificial Sequence
  Description of Artificial Sequence: Synthetic oligonucleotide
agaucaucccaagguaacc

SEQ ID NO: 3153958 - RNA, 19 nt, Artificial Sequence
  Description of Artificial Sequence: Synthetic oligonucleotide
uagaucaucccaagguaac

SEQ ID NO: 3153959 - RNA, 19 nt, Artificial Sequence
  Description of Artificial Sequence: Synthetic oligonucleotide
guagaucaucccaagguaa

SEQ ID NO: 3153960 - RNA, 19 nt, Artificial Sequence
  Description of Artificial Sequence: Synthetic oligonucleotide
aguagaucaucccaaggua

SEQ ID NO: 3153961 - RNA, 19 nt, Artificial Sequence
  Description of Artificial Sequence: Synthetic oligonucleotide
caguagaucaucccaaggu

SEQ ID NO: 3153962 - RNA, 19 nt, Artificial Sequence
  Description of Artificial Sequence: Synthetic oligonucleotide
ucaguagaucaucccaagg

SEQ ID NO: 3153963 - RNA, 19 nt, Artificial Sequence
  Description of Artificial Sequence: Synthetic oligonucleotide
cucaguagaucaucccaag

SEQ ID NO: 3153964 - RNA, 19 nt, Artificial Sequence
  Description of Artificial Sequence: Synthetic oligonucleotide
ucucaguagaucaucccaa

SEQ ID NO: 3153965 - RNA, 19 nt, Artificial Sequence
  Description of Artificial Sequence: Synthetic oligonucleotide
gucucaguagaucauccca

SEQ ID NO: 3153966 - RNA, 19 nt, Artificial Sequence
  Description of Artificial Sequence: Synthetic oligonucleotide
agucucaguagaucauccc

SEQ ID NO: 3153967 - RNA, 19 nt, Artificial Sequence
  Description of Artificial Sequence: Synthetic oligonucleotide
cagucucaguagaucaucc

SEQ ID NO: 3153968 - RNA, 19 nt, Artificial Sequence
  Description of Artificial Sequence: Synthetic oligonucleotide
acagucucaguagaucauc

SEQ ID NO: 3153969 - RNA, 19 nt, Artificial Sequence
  Description of Artificial Sequence: Synthetic oligonucleotide
cacagucucaguagaucau

SEQ ID NO: 3153970 - RNA, 19 nt, Artificial Sequence
  Description of Artificial Sequence: Synthetic oligonucleotide
acacagucucaguagauca

SEQ ID NO: 3153971 - RNA, 19 nt, Artificial Sequence
  Description of Artificial Sequence: Synthetic oligonucleotide
cacacagucucaguagauc

SEQ ID NO: 3153972 - RNA, 19 nt, Artificial Sequence
  Description of Artificial Sequence: Synthetic oligonucleotide
ucacacagucucaguagau

SEQ ID NO: 3153973 - RNA, 19 nt, Artificial Sequence
  Description of Artificial Sequence: Synthetic oligonucleotide
gucacacagucucaguaga

SEQ ID NO: 3153974 - RNA, 19 nt, Artificial Sequence
  Description of Artificial Sequence: Synthetic oligonucleotide
ggucacacagucucaguag

SEQ ID NO: 3153975 - RNA, 19 nt, Artificial Sequence
  Description of Artificial Sequence: Synthetic oligonucleotide
cggucacacagucucagua

SEQ ID NO: 3153976 - RNA, 19 nt, Artificial Sequence
  Description of Artificial Sequence: Synthetic oligonucleotide
ccggucacacagucucagu

SEQ ID NO: 3153977 - RNA, 19 nt, Artificial Sequence
  Description of Artificial Sequence: Synthetic oligonucleotide
accggucacacagucucag

SEQ ID NO: 3153978 - RNA, 19 nt, Artificial Sequence
  Description of Artificial Sequence: Synthetic oligonucleotide
uaccggucacacagucuca

SEQ ID NO: 3153979 - RNA, 19 nt, Artificial Sequence
  Description of Artificial Sequence: Synthetic oligonucleotide
auaccggucacacagucuc

SEQ ID NO: 3153980 - RNA, 19 nt, Artificial Sequence
  Description of Artificial Sequence: Synthetic oligonucleotide
gauaccggucacacagucu

SEQ ID NO: 3153981 - RNA, 19 nt, Artificial Sequence
  Description of Artificial Sequence: Synthetic oligonucleotide
ggauaccggucacacaguc

SEQ ID NO: 3153982 - RNA, 19 nt, Artificial Sequence
  Description of Artificial Sequence: Synthetic oligonucleotide
uggauaccggucacacagu

SEQ ID NO: 3153983 - RNA, 19 nt, Artificial Sequence
  Description of Artificial Sequence: Synthetic oligonucleotide
auggauaccggucacacag

SEQ ID NO: 3153984 - RNA, 19 nt, Artificial Sequence
  Description of Artificial Sequence: Synthetic oligonucleotide
aauggauaccggucacaca

SEQ ID NO: 3153985 - RNA, 19 nt, Artificial Sequence
  Description of Artificial Sequence: Synthetic oligonucleotide
caauggauaccggucacac

SEQ ID NO: 3153986 - RNA, 19 nt, Artificial Sequence
  Description of Artificial Sequence: Synthetic oligonucleotide
ucaauggauaccggucaca

SEQ ID NO: 3153987 - RNA, 19 nt, Artificial Sequence
  Description of Artificial Sequence: Synthetic oligonucleotide
gucaauggauaccggucac

SEQ ID NO: 3153988 - RNA, 19 nt, Artificial Sequence
  Description of Artificial Sequence: Synthetic oligonucleotide
agucaauggauaccgguca

SEQ ID NO: 3153989 - RNA, 19 nt, Artificial Sequence
  Description of Artificial Sequence: Synthetic oligonucleotide
cagucaauggauaccgguc

SEQ ID NO: 3153990 - RNA, 19 nt, Artificial Sequence
  Description of Artificial Sequence: Synthetic oligonucleotide
acagucaauggauaccggu

SEQ ID NO: 3153991 - RNA, 19 nt, Artificial Sequence
  Description of Artificial Sequence: Synthetic oligonucleotide
uacagucaauggauaccgg

SEQ ID NO: 3153992 - RNA, 19 nt, Artificial Sequence
  Description of Artificial Sequence: Synthetic oligonucleotide
cuacagucaauggauaccg

SEQ ID NO: 3153993 - RNA, 19 nt, Artificial Sequence
  Description of Artificial Sequence: Synthetic oligonucleotide
ucuacagucaauggauacc

SEQ ID NO: 3153994 - RNA, 19 nt, Artificial Sequence
  Description of Artificial Sequence: Synthetic oligonucleotide
cucuacagucaauggauac

SEQ ID NO: 3153995 - RNA, 19 nt, Artificial Sequence
  Description of Artificial Sequence: Synthetic oligonucleotide
ucucuacagucaauggaua

SEQ ID NO: 3153996 - RNA, 19 nt, Artificial Sequence
  Description of Artificial Sequence: Synthetic oligonucleotide
gucucuacagucaauggau

SEQ ID NO: 3153997 - RNA, 19 nt, Artificial Sequence
  Description of Artificial Sequence: Synthetic oligonucleotide
agucucuacagucaaugga

SEQ ID NO: 3153998 - RNA, 19 nt, Artificial Sequence
  Description of Artificial Sequence: Synthetic oligonucleotide
uagucucuacagucaaugg

SEQ ID NO: 3153999 - RNA, 19 nt, Artificial Sequence
  Description of Artificial Sequence: Synthetic oligonucleotide
uuagucucuacagucaaug

SEQ ID NO: 3154000 - RNA, 19 nt, Artificial Sequence
  Description of Artificial Sequence: Synthetic oligonucleotide
uuuagucucuacagucaau

SEQ ID NO: 3154001 - RNA, 19 nt, Artificial Sequence
  Description of Artificial Sequence: Synthetic oligonucleotide
cuuuagucucuacagucaa

SEQ ID NO: 3154002 - RNA, 19 nt, Artificial Sequence
  Description of Artificial Sequence: Synthetic oligonucleotide
ccuuuagucucuacaguca

SEQ ID NO: 3154003 - RNA, 19 nt, Artificial Sequence
  Description of Artificial Sequence: Synthetic oligonucleotide
cccuuuagucucuacaguc

SEQ ID NO: 3154004 - RNA, 19 nt, Artificial Sequence
  Description of Artificial Sequence: Synthetic oligonucleotide
ccccuuuagucucuacagu

SEQ ID NO: 3154005 - RNA, 19 nt, Artificial Sequence
  Description of Artificial Sequence: Synthetic oligonucleotide
caaaauacugcgggccaaa

SEQ ID NO: 3154006 - RNA, 19 nt, Artificial Sequence
  Description of Artificial Sequence: Synthetic oligonucleotide
ucaaaauacugcgggccaa

SEQ ID NO: 3154007 - RNA, 19 nt, Artificial Sequence
  Description of Artificial Sequence: Synthetic oligonucleotide
aucaaaauacugcgggcca

SEQ ID NO: 3154008 - RNA, 19 nt, Artificial Sequence
  Description of Artificial Sequence: Synthetic oligonucleotide
aaucaaaauacugcgggcc

SEQ ID NO: 3154009 - RNA, 19 nt, Artificial Sequence
  Description of Artificial Sequence: Synthetic oligonucleotide
uaaucaaaauacugcgggc

SEQ ID NO: 3154010 - RNA, 19 nt, Artificial Sequence
  Description of Artificial Sequence: Synthetic oligonucleotide
guaaucaaaauacugcggg

SEQ ID NO: 3154011 - RNA, 19 nt, Artificial Sequence
  Description of Artificial Sequence: Synthetic oligonucleotide
gguaaucaaaauacugcgg

SEQ ID NO: 3154012 - RNA, 19 nt, Artificial Sequence
  Description of Artificial Sequence: Synthetic oligonucleotide
ugguaaucaaaauacugcg

SEQ ID NO: 3154013 - RNA, 19 nt, Artificial Sequence
  Description of Artificial Sequence: Synthetic oligonucleotide
cugguaaucaaaauacugc

SEQ ID NO: 3154014 - RNA, 19 nt, Artificial Sequence
  Description of Artificial Sequence: Synthetic oligonucleotide
gcugguaaucaaaauacug

SEQ ID NO: 3154015 - RNA, 19 nt, Artificial Sequence
  Description of Artificial Sequence: Synthetic oligonucleotide
ugcugguaaucaaaauacu

SEQ ID NO: 3154016 - RNA, 19 nt, Artificial Sequence
  Description of Artificial Sequence: Synthetic oligonucleotide
uugcugguaaucaaaauac

SEQ ID NO: 3154017 - RNA, 19 nt, Artificial Sequence
  Description of Artificial Sequence: Synthetic oligonucleotide
auugcugguaaucaaaaua

SEQ ID NO: 3154018 - RNA, 19 nt, Artificial Sequence
  Description of Artificial Sequence: Synthetic oligonucleotide
gauugcugguaaucaaaau

SEQ ID NO: 3154019 - RNA, 19 nt, Artificial Sequence
  Description of Artificial Sequence: Synthetic oligonucleotide
ugauugcugguaaucaaaa

SEQ ID NO: 3154020 - RNA, 19 nt, Artificial Sequence
  Description of Artificial Sequence: Synthetic oligonucleotide
cugauugcugguaaucaaa

SEQ ID NO: 3154021 - RNA, 19 nt, Artificial Sequence
  Description of Artificial Sequence: Synthetic oligonucleotide
ccugauugcugguaaucaa

SEQ ID NO: 3154022 - RNA, 19 nt, Artificial Sequence
  Description of Artificial Sequence: Synthetic oligonucleotide
gccugauugcugguaauca

SEQ ID NO: 3154023 - RNA, 19 nt, Artificial Sequence
  Description of Artificial Sequence: Synthetic oligonucleotide
ggccugauugcugguaauc

SEQ ID NO: 3154024 - RNA, 19 nt, Artificial Sequence
  Description of Artificial Sequence: Synthetic oligonucleotide
gggccugauugcugguaau

SEQ ID NO: 3154025 - RNA, 19 nt, Artificial Sequence
  Description of Artificial Sequence: Synthetic oligonucleotide
ggggccugauugcugguaa

SEQ ID NO: 3154026 - RNA, 19 nt, Artificial Sequence
  Description of Artificial Sequence: Synthetic oligonucleotide
aggaguaccauuccugggg

SEQ ID NO: 3154027 - RNA, 19 nt, Artificial Sequence
  Description of Artificial Sequence: Synthetic oligonucleotide
gaggaguaccauuccuggg

SEQ ID NO: 3154028 - RNA, 19 nt, Artificial Sequence
  Description of Artificial Sequence: Synthetic oligonucleotide
ugaggaguaccauuccugg

SEQ ID NO: 3154029 - RNA, 19 nt, Artificial Sequence
  Description of Artificial Sequence: Synthetic oligonucleotide
uugaggaguaccauuccug

SEQ ID NO: 3154030 - RNA, 19 nt, Artificial Sequence
  Description of Artificial Sequence: Synthetic oligonucleotide
guugaggaguaccauuccu

SEQ ID NO: 3154031 - RNA, 19 nt, Artificial Sequence
  Description of Artificial Sequence: Synthetic oligonucleotide
aguugaggaguaccauucc

SEQ ID NO: 3154032 - RNA, 19 nt, Artificial Sequence
  Description of Artificial Sequence: Synthetic oligonucleotide
caguugaggaguaccauuc

SEQ ID NO: 3154033 - RNA, 19 nt, Artificial Sequence
  Description of Artificial Sequence: Synthetic oligonucleotide
gcaguugaggaguaccauu

SEQ ID NO: 3154034 - RNA, 19 nt, Artificial Sequence
  Description of Artificial Sequence: Synthetic oligonucleotide
agcaguugaggaguaccau

SEQ ID NO: 3154035 - RNA, 19 nt, Artificial Sequence
  Description of Artificial Sequence: Synthetic oligonucleotide
cagcaguugaggaguacca

SEQ ID NO: 3154036 - RNA, 19 nt, Artificial Sequence
  Description of Artificial Sequence: Synthetic oligonucleotide
acagcaguugaggaguacc

SEQ ID NO: 3154037 - RNA, 19 nt, Artificial Sequence
  Description of Artificial Sequence: Synthetic oligonucleotide
gacagcaguugaggaguac

SEQ ID NO: 3154038 - RNA, 19 nt, Artificial Sequence
  Description of Artificial Sequence: Synthetic oligonucleotide
ggacagcaguugaggagua

SEQ ID NO: 3154039 - RNA, 19 nt, Artificial Sequence
  Description of Artificial Sequence: Synthetic oligonucleotide
gggacagcaguugaggagu

SEQ ID NO: 3154040 - RNA, 19 nt, Artificial Sequence
  Description of Artificial Sequence: Synthetic oligonucleotide
ugggacagcaguugaggag

SEQ ID NO: 3154041 - RNA, 19 nt, Artificial Sequence
  Description of Artificial Sequence: Synthetic oligonucleotide
cugggacagcaguugagga

SEQ ID NO: 3154042 - RNA, 19 nt, Artificial Sequence
  Description of Artificial Sequence: Synthetic oligonucleotide
agcugggacagcaguugag

SEQ ID NO: 3154043 - RNA, 19 nt, Artificial Sequence
  Description of Artificial Sequence: Synthetic oligonucleotide
cagcugggacagcaguuga

SEQ ID NO: 3154044 - RNA, 19 nt, Artificial Sequence
  Description of Artificial Sequence: Synthetic oligonucleotide
acagcugggacagcaguug

SEQ ID NO: 3154045 - RNA, 19 nt, Artificial Sequence
  Description of Artificial Sequence: Synthetic oligonucleotide
uacagcugggacagcaguu

SEQ ID NO: 3154046 - RNA, 19 nt, Artificial Sequence
  Description of Artificial Sequence: Synthetic oligonucleotide
cuacagcugggacagcagu

SEQ ID NO: 3154047 - RNA, 19 nt, Artificial Sequence
  Description of Artificial Sequence: Synthetic oligonucleotide
ucuacagcugggacagcag

SEQ ID NO: 3154048 - RNA, 19 nt, Artificial Sequence
  Description of Artificial Sequence: Synthetic oligonucleotide
uucuacagcugggacagca

SEQ ID NO: 3154049 - RNA, 19 nt, Artificial Sequence
  Description of Artificial Sequence: Synthetic oligonucleotide
cuucuacagcugggacagc

SEQ ID NO: 3154050 - RNA, 19 nt, Artificial Sequence
  Description of Artificial Sequence: Synthetic oligonucleotide
gcuucuacagcugggacag

SEQ ID NO: 3154051 - RNA, 19 nt, Artificial Sequence
  Description of Artificial Sequence: Synthetic oligonucleotide
agcuucuacagcugggaca

SEQ ID NO: 3154052 - RNA, 19 nt, Artificial Sequence
  Description of Artificial Sequence: Synthetic oligonucleotide
gagcuucuacagcugggac

SEQ ID NO: 3154053 - RNA, 19 nt, Artificial Sequence
  Description of Artificial Sequence: Synthetic oligonucleotide
agagcuucuacagcuggga

SEQ ID NO: 3154054 - RNA, 19 nt, Artificial Sequence
  Description of Artificial Sequence: Synthetic oligonucleotide
gagagcuucuacagcuggg

SEQ ID NO: 3154055 - RNA, 19 nt, Artificial Sequence
  Description of Artificial Sequence: Synthetic oligonucleotide
agagagcuucuacagcugg

SEQ ID NO: 3154056 - RNA, 19 nt, Artificial Sequence
  Description of Artificial Sequence: Synthetic oligonucleotide
uagagagcuucuacagcug

SEQ ID NO: 3154057 - RNA, 19 nt, Artificial Sequence
  Description of Artificial Sequence: Synthetic oligonucleotide
auagagagcuucuacagcu

SEQ ID NO: 3154058 - RNA, 19 nt, Artificial Sequence
  Description of Artificial Sequence: Synthetic oligonucleotide
gauagagagcuucuacagc

SEQ ID NO: 3154059 - RNA, 19 nt, Artificial Sequence
  Description of Artificial Sequence: Synthetic oligonucleotide
cgauagagagcuucuacag

SEQ ID NO: 3154060 - RNA, 19 nt, Artificial Sequence
  Description of Artificial Sequence: Synthetic oligonucleotide
ccgauagagagcuucuaca

SEQ ID NO: 3154061 - RNA, 19 nt, Artificial Sequence
  Description of Artificial Sequence: Synthetic oligonucleotide
uccgauagagagcuucuac

SEQ ID NO: 3154062 - RNA, 19 nt, Artificial Sequence
  Description of Artificial Sequence: Synthetic oligonucleotide
cuccgauagagagcuucua

SEQ ID NO: 3154063 - RNA, 19 nt, Artificial Sequence
  Description of Artificial Sequence: Synthetic oligonucleotide
ccuccgauagagagcuucu

SEQ ID NO: 3154064 - RNA, 19 nt, Artificial Sequence
  Description of Artificial Sequence: Synthetic oligonucleotide
uccuccgauagagagcuuc

SEQ ID NO: 3154065 - RNA, 19 nt, Artificial Sequence
  Description of Artificial Sequence: Synthetic oligonucleotide
auccuccgauagagagcuu

SEQ ID NO: 3154066 - RNA, 19 nt, Artificial Sequence
  Description of Artificial Sequence: Synthetic oligonucleotide
aauccuccgauagagagcu

SEQ ID NO: 3154067 - RNA, 19 nt, Artificial Sequence
  Description of Artificial Sequence: Synthetic oligonucleotide
uaauccuccgauagagagc

SEQ ID NO: 3154068 - RNA, 19 nt, Artificial Sequence
  Description of Artificial Sequence: Synthetic oligonucleotide
guaauccuccgauagagag

SEQ ID NO: 3154069 - RNA, 19 nt, Artificial Sequence
  Description of Artificial Sequence: Synthetic oligonucleotide
aguaauccuccgauagaga

SEQ ID NO: 3154070 - RNA, 19 nt, Artificial Sequence
  Description of Artificial Sequence: Synthetic oligonucleotide
uaguaauccuccgauagag

SEQ ID NO: 3154071 - RNA, 19 nt, Artificial Sequence
  Description of Artificial Sequence: Synthetic oligonucleotide
guaguaauccuccgauaga

SEQ ID NO: 3154072 - RNA, 19 nt, Artificial Sequence
  Description of Artificial Sequence: Synthetic oligonucleotide
aguaguaauccuccgauag

SEQ ID NO: 3154073 - RNA, 19 nt, Artificial Sequence
  Description of Artificial Sequence: Synthetic oligonucleotide
aaguaguaauccuccgaua

SEQ ID NO: 3154074 - RNA, 19 nt, Artificial Sequence
  Description of Artificial Sequence: Synthetic oligonucleotide
aaaguaguaauccuccgau

SEQ ID NO: 3154075 - RNA, 19 nt, Artificial Sequence
  Description of Artificial Sequence: Synthetic oligonucleotide
caaaguaguaauccuccga

SEQ ID NO: 3154076 - RNA, 19 nt, Artificial Sequence
  Description of Artificial Sequence: Synthetic oligonucleotide
gcaaaguaguaauccuccg

SEQ ID NO: 3154077 - RNA, 19 nt, Artificial Sequence
  Description of Artificial Sequence: Synthetic oligonucleotide
ugcaaaguaguaauccucc

SEQ ID NO: 3154078 - RNA, 19 nt, Artificial Sequence
  Description of Artificial Sequence: Synthetic oligonucleotide
uugcaaaguaguaauccuc

SEQ ID NO: 3154079 - RNA, 19 nt, Artificial Sequence
  Description of Artificial Sequence: Synthetic oligonucleotide
auugcaaaguaguaauccu

SEQ ID NO: 3154080 - RNA, 19 nt, Artificial Sequence
  Description of Artificial Sequence: Synthetic oligonucleotide
aauugcaaaguaguaaucc

SEQ ID NO: 3154081 - RNA, 19 nt, Artificial Sequence
  Description of Artificial Sequence: Synthetic oligonucleotide
aaauugcaaaguaguaauc

SEQ ID NO: 3154082 - RNA, 19 nt, Artificial Sequence
  Description of Artificial Sequence: Synthetic oligonucleotide
aaaauugcaaaguaguaau

SEQ ID NO: 3154083 - RNA, 19 nt, Artificial Sequence
  Description of Artificial Sequence: Synthetic oligonucleotide
caaaauugcaaaguaguaa

SEQ ID NO: 3154084 - RNA, 19 nt, Artificial Sequence
  Description of Artificial Sequence: Synthetic oligonucleotide
ccaaaauugcaaaguagua

SEQ ID NO: 3154085 - RNA, 19 nt, Artificial Sequence
  Description of Artificial Sequence: Synthetic oligonucleotide
uccaaaauugcaaaguagu

SEQ ID NO: 3154086 - RNA, 19 nt, Artificial Sequence
  Description of Artificial Sequence: Synthetic oligonucleotide
uuccaaaauugcaaaguag

SEQ ID NO: 3154087 - RNA, 19 nt, Artificial Sequence
  Description of Artificial Sequence: Synthetic oligonucleotide
cuuccaaaauugcaaagua

SEQ ID NO: 3154088 - RNA, 19 nt, Artificial Sequence
  Description of Artificial Sequence: Synthetic oligonucleotide
ucuuccaaaauugcaaagu

SEQ ID NO: 3154089 - RNA, 19 nt, Artificial Sequence
  Description of Artificial Sequence: Synthetic oligonucleotide
gucuuccaaaauugcaaag

SEQ ID NO: 3154090 - RNA, 19 nt, Artificial Sequence
  Description of Artificial Sequence: Synthetic oligonucleotide
agucuuccaaaauugcaaa

SEQ ID NO: 3154091 - RNA, 19 nt, Artificial Sequence
  Description of Artificial Sequence: Synthetic oligonucleotide
cagucuuccaaaauugcaa

SEQ ID NO: 3154092 - RNA, 19 nt, Artificial Sequence
  Description of Artificial Sequence: Synthetic oligonucleotide
gcagucuuccaaaauugca

SEQ ID NO: 3154093 - RNA, 19 nt, Artificial Sequence
  Description of Artificial Sequence: Synthetic oligonucleotide
agcagucuuccaaaauugc

SEQ ID NO: 3154094 - RNA, 19 nt, Artificial Sequence
  Description of Artificial Sequence: Synthetic oligonucleotide
cagcagucuuccaaaauug

SEQ ID NO: 3154095 - RNA, 19 nt, Artificial Sequence
  Description of Artificial Sequence: Synthetic oligonucleotide
ccagcagucuuccaaaauu

SEQ ID NO: 3154096 - RNA, 19 nt, Artificial Sequence
  Description of Artificial Sequence: Synthetic oligonucleotide
uccagcagucuuccaaaau

SEQ ID NO: 3154097 - RNA, 19 nt, Artificial Sequence
  Description of Artificial Sequence: Synthetic oligonucleotide
cuccagcagucuuccaaaa

SEQ ID NO: 3154098 - RNA, 19 nt, Artificial Sequence
  Description of Artificial Sequence: Synthetic oligonucleotide
ucuccagcagucuuccaaa

SEQ ID NO: 3154099 - RNA, 19 nt, Artificial Sequence
  Description of Artificial Sequence: Synthetic oligonucleotide
uucuccagcagucuuccaa

SEQ ID NO: 3154100 - RNA, 19 nt, Artificial Sequence
  Description of Artificial Sequence: Synthetic oligonucleotide
guucuccagcagucuucca

SEQ ID NO: 3154101 - RNA, 19 nt, Artificial Sequence
  Description of Artificial Sequence: Synthetic oligonucleotide
uguucuccagcagucuucc

SEQ ID NO: 3154102 - RNA, 19 nt, Artificial Sequence
  Description of Artificial Sequence: Synthetic oligonucleotide
uuguucuccagcagucuuc

SEQ ID NO: 3154103 - RNA, 19 nt, Artificial Sequence
  Description of Artificial Sequence: Synthetic oligonucleotide
auuguucuccagcagucuu

SEQ ID NO: 3154104 - RNA, 19 nt, Artificial Sequence
  Description of Artificial Sequence: Synthetic oligonucleotide
gauuguucuccagcagucu

SEQ ID NO: 3154105 - RNA, 19 nt, Artificial Sequence
  Description of Artificial Sequence: Synthetic oligonucleotide
ggauuguucuccagcaguc

SEQ ID NO: 3154106 - RNA, 19 nt, Artificial Sequence
  Description of Artificial Sequence: Synthetic oligonucleotide
uggauuguucuccagcagu

SEQ ID NO: 3154107 - RNA, 19 nt, Artificial Sequence
  Description of Artificial Sequence: Synthetic oligonucleotide
guggauuguucuccagcag

SEQ ID NO: 3154108 - RNA, 19 nt, Artificial Sequence
  Description of Artificial Sequence: Synthetic oligonucleotide
cguggauuguucuccagca

SEQ ID NO: 3154109 - RNA, 19 nt, Artificial Sequence
  Description of Artificial Sequence: Synthetic oligonucleotide
ccguggauuguucuccagc

SEQ ID NO: 3154110 - RNA, 19 nt, Artificial Sequence
  Description of Artificial Sequence: Synthetic oligonucleotide
uccguggauuguucuccag

SEQ ID NO: 3154111 - RNA, 19 nt, Artificial Sequence
  Description of Artificial Sequence: Synthetic oligonucleotide
cuccguggauuguucucca

SEQ ID NO: 3154112 - RNA, 19 nt, Artificial Sequence
  Description of Artificial Sequence: Synthetic oligonucleotide
ccuccguggauuguucucc

SEQ ID NO: 3154113 - RNA, 19 nt, Artificial Sequence
  Description of Artificial Sequence: Synthetic oligonucleotide
accuccguggauuguucuc

SEQ ID NO: 3154114 - RNA, 19 nt, Artificial Sequence
  Description of Artificial Sequence: Synthetic oligonucleotide
uaccuccguggauuguucu

SEQ ID NO: 3154115 - RNA, 19 nt, Artificial Sequence
  Description of Artificial Sequence: Synthetic oligonucleotide
guaccuccguggauuguuc

SEQ ID NO: 3154116 - RNA, 19 nt, Artificial Sequence
  Description of Artificial Sequence: Synthetic oligonucleotide
gguaccuccguggauuguu

SEQ ID NO: 3154117 - RNA, 19 nt, Artificial Sequence
  Description of Artificial Sequence: Synthetic oligonucleotide
ggguaccuccguggauugu

SEQ ID NO: 3154118 - RNA, 19 nt, Artificial Sequence
  Description of Artificial Sequence: Synthetic oligonucleotide
ucggguaccuccguggauu

SEQ ID NO: 3154119 - RNA, 19 nt, Artificial Sequence
  Description of Artificial Sequence: Synthetic oligonucleotide
uucggguaccuccguggau

SEQ ID NO: 3154120 - RNA, 19 nt, Artificial Sequence
  Description of Artificial Sequence: Synthetic oligonucleotide
aaucggccuucggguaccu

SEQ ID NO: 3154121 - RNA, 19 nt, Artificial Sequence
  Description of Artificial Sequence: Synthetic oligonucleotide
aaaucggccuucggguacc

SEQ ID NO: 3154122 - RNA, 19 nt, Artificial Sequence
  Description of Artificial Sequence: Synthetic oligonucleotide
caaaucggccuucggguac

SEQ ID NO: 3154123 - RNA, 19 nt, Artificial Sequence
  Description of Artificial Sequence: Synthetic oligonucleotide
ucaaaucggccuucgggua

SEQ ID NO: 3154124 - RNA, 19 nt, Artificial Sequence
  Description of Artificial Sequence: Synthetic oligonucleotide
uucaaaucggccuucgggu

SEQ ID NO: 3154125 - RNA, 19 nt, Artificial Sequence
  Description of Artificial Sequence: Synthetic oligonucleotide
cuucaaaucggccuucggg

SEQ ID NO: 3154126 - RNA, 19 nt, Artificial Sequence
  Description of Artificial Sequence: Synthetic oligonucleotide
gcuucaaaucggccuucgg

SEQ ID NO: 3154127 - RNA, 19 nt, Artificial Sequence
  Description of Artificial Sequence: Synthetic oligonucleotide
ugcuucaaaucggccuucg

SEQ ID NO: 3154128 - RNA, 19 nt, Artificial Sequence
  Description of Artificial Sequence: Synthetic oligonucleotide
cugcuucaaaucggccuuc

SEQ ID NO: 3154129 - RNA, 19 nt, Artificial Sequence
  Description of Artificial Sequence: Synthetic oligonucleotide
acugcuucaaaucggccuu

SEQ ID NO: 3154130 - RNA, 19 nt, Artificial Sequence
  Description of Artificial Sequence: Synthetic oligonucleotide
cacugcuucaaaucggccu

SEQ ID NO: 3154131 - RNA, 19 nt, Artificial Sequence
  Description of Artificial Sequence: Synthetic oligonucleotide
ccacugcuucaaaucggcc

SEQ ID NO: 3154132 - RNA, 19 nt, Artificial Sequence
  Description of Artificial Sequence: Synthetic oligonucleotide
uccacugcuucaaaucggc

SEQ ID NO: 3154133 - RNA, 19 nt, Artificial Sequence
  Description of Artificial Sequence: Synthetic oligonucleotide
guccacugcuucaaaucgg

SEQ ID NO: 3154134 - RNA, 19 nt, Artificial Sequence
  Description of Artificial Sequence: Synthetic oligonucleotide
gguccacugcuucaaaucg

SEQ ID NO: 3154135 - RNA, 19 nt, Artificial Sequence
  Description of Artificial Sequence: Synthetic oligonucleotide
ggguccacugcuucaaauc

SEQ ID NO: 3154136 - RNA, 19 nt, Artificial Sequence
  Description of Artificial Sequence: Synthetic oligonucleotide
uggguccacugcuucaaau

SEQ ID NO: 3154137 - RNA, 19 nt, Artificial Sequence
  Description of Artificial Sequence: Synthetic oligonucleotide
guggguccacugcuucaaa

SEQ ID NO: 3154138 - RNA, 19 nt, Artificial Sequence
  Description of Artificial Sequence: Synthetic oligonucleotide
gguggguccacugcuucaa

SEQ ID NO: 3154139 - RNA, 19 nt, Artificial Sequence
  Description of Artificial Sequence: Synthetic oligonucleotide
aaaagggcacagggugggu

SEQ ID NO: 3154140 - RNA, 19 nt, Artificial Sequence
  Description of Artificial Sequence: Synthetic oligonucleotide
ugggaaaagggcacagggu

SEQ ID NO: 3154141 - RNA, 19 nt, Artificial Sequence
  Description of Artificial Sequence: Synthetic oligonucleotide
augggaaaagggcacaggg

SEQ ID NO: 3154142 - RNA, 19 nt, Artificial Sequence
  Description of Artificial Sequence: Synthetic oligonucleotide
uaugggaaaagggcacagg

SEQ ID NO: 3154143 - RNA, 19 nt, Artificial Sequence
  Description of Artificial Sequence: Synthetic oligonucleotide
auaugggaaaagggcacag

SEQ ID NO: 3154144 - RNA, 19 nt, Artificial Sequence
  Description of Artificial Sequence: Synthetic oligonucleotide
uauaugggaaaagggcaca

SEQ ID NO: 3154145 - RNA, 19 nt, Artificial Sequence
  Description of Artificial Sequence: Synthetic oligonucleotide
uuauaugggaaaagggcac

SEQ ID NO: 3154146 - RNA, 19 nt, Artificial Sequence
  Description of Artificial Sequence: Synthetic oligonucleotide
uuuauaugggaaaagggca

SEQ ID NO: 3154147 - RNA, 19 nt, Artificial Sequence
  Description of Artificial Sequence: Synthetic oligonucleotide
guaauuuauuuuauauggg

SEQ ID NO: 3154148 - DNA, 939 bp, Artificial Sequence
  Description of Artificial Sequence: Synthetic polynucleotide
atgccaagcaagaaaagcggcccgcaaccccataagaggtgggtgttcacccttaataatccttccgaggaggagaaaaacaaaatacgggagcttccaatctccctttttgattattttgtttgcggagaggaaggtttggaagagggtagaactcctcacctccaggggtttgcgaattttgctaagaagcagacttttaacaaggtgaagtggtattttggtgcccgctgccacatcgagaaagcgaaaggaaccgaccagcagaataaagaatactgcagtaaagaaggccacatacttatcgagtgtggagctccgcggaaccaggggaagcgcagcgacctgtctactgctgtgagtacccttttggagacggggtctttggtgactgtagccgagcagttccctgtaacgtatgtgagaaatttccgcgggctggctgaacttttgaaagtgagcgggaagatgcagcagcgtgattggaagacagctgtacacgtcatagtgggcccgcccggttgtgggaagagccagtgggcccgtaattttgctgagcctagcgacacctactggaagcctagtagaaataagtggtgggatggatatcatggagaagaagttgttgttttggatgatttttatggctggttaccttgggatgatctactgagactgtgtgaccggtatccattgactgtagagactaaagggggtactgttccttttttggcccgcagtattttgattaccagcaatcaggccccccaggaatggtactcctcaactgctgtcccagctgtagaagctctctatcggaggattactactttgcaattttggaagactgctggagaacaatccacggaggtacccgaaggccgatttgaagcagtggacccaccctgtgcccttttcccatataaaataaattactga

SEQ ID NO: 3154149 - DNA, 939 bp, Artificial Sequence
  Description of Artificial Sequence: Synthetic polynucleotide
atgccaagcaagaaaagcggcccgcaaccccataagaggtgggtgttcacccttaataatccttccgaggaggagaaaaacaaaatacgggagcttccaatctccctttttgattattttgtttgcggagaggaaggtttggaagagggtagaactcctcacctccaggggtttgcgaattttgctaagaagcagacttttaacaaggtgaagtggtattttggtgcccgctgccacatcgagaaagcgaaaggaaccgaccagcagaataaagaatactgcagtaaagaaggccacatacttatcgagtgtggagctccgcggaaccaggggaagcgcagcgacctgtctactgctgtgagtacccttttggagacggggtctttggtgactgtagccgagcagtcccctgtaacgtatgtgagaaatttccgcgggctggctgaacttttgaaagtgagcgggaagatgcagcagcgtgattggaagacagctgtacacgtcatagtgggcccgcccggttgtgggaagagccagtgggcccgtaattttgctgagcctagcgacacctactggaagcctagtagaaataagtggtgggatggatatcatggagaagaagttgttgttttggatgatttttatggctggttaccttgggatgatctactgagactgtgtgaccggtatccattgactgtagagactaaagggggtactgttccttttttggcccgcagtattttgattaccagcaatcaggccccccaggaatggtactcctcaactgctgtcccagctgtagaagctctctatcggaggattactactttgcaattttggaagactgctggagaacaatccacggaggtacccgaaggccgatttgaagcagtggacccaccctgtgcccttttcccatataaaataaattactga

SEQ ID NO: 3154150 - DNA, 939 bp, Artificial Sequence; identical to SEQ ID NO: 3154148
  Description of Artificial Sequence: Synthetic polynucleotide

SEQ ID NO: 3154151 - DNA, 939 bp, Artificial Sequence
  Description of Artificial Sequence: Synthetic polynucleotide
atgccaagcaagaaaagcggcccgcaaccccataagaggtgggtgttcacccttaataatccttccgaggaggagaaaaacaaaatacgggagcttccaatctccctttttgattattttgtttgcggagaggaaggtttggaagagggtagaactcctcacctccaggggtttgcgaattttgctaagaagcagacttttaacaaggtgaagtggtattttggtgcccgctgccacatcgagaaagcgaaaggaaccgaccagcagaataaagaatactgcagtaaagaaggccacatacttatcgagtgtggagctccgcggaaccaggggaagcgcagcgacctgtctactgctgtgagtacccttttggagacggggtctttggtgactgtagccgagcagttccctgtaacgtatgtgagaaatttccgcgggttggctgaacttttgaaagtgagcgggaagatgcagcagcgtgattggaagacagctgtacacgtcatagtgggcccgcccggttgtgggaagagccagtgggcccgtaattttgctgagcctagcgacacctactggaagcctagtagaaataagtggtgggatggatatcatggagaagaagttgttgttttggatgatttttatggctggttaccttgggatgatctactgagactgtgtgaccggtatccattgactgtagagactaaagggggtactgttccttttttggcccgcagtattttgattaccagcaatcaggccccccaggaatggtactcctcaactgctgtcccagctgtagaagctctctatcggaggattactactttgcaattttggaagactgctggagaacaatccacggaggtacccgaaggccgatttgaagcagtggacccaccctgtgcccttttcccatataaaataaattactga

SEQ ID NO: 3154152 - DNA, 939 bp, Artificial Sequence
  Description of Artificial Sequence: Synthetic polynucleotide
atgccaagcaagaaaagcggcccgcaaccccataagaggtgggtgttcacccttaataatccttccgaggaggagaaaaacaaaatacgggagcttccaatctccctttttgattattttgtttgcggagaggaaggtttggaagagggtagaactcctcacctccaggggtttgcgaattttgctaagaagcagacttttaacaaggtgaagtggtattttggtgcccgctgccacatcgagaaagcgaaaggaaccgaccaccggaataaagaatactgcagtaaagaaggccacatacttatcgagtgtggagctccgcggaaccaggggaagcgcagcgacctgtctactgctgtgagtacccttttggagacggggtctttggtgactgtagccgagcagttccctgtaacgtatgtgagaaatttccgcgggctggctgaactttagaaagtgagcgggaagatgcagcagcgtgattggaagacagctgtacacgtcatagtgggcccgcccggttgtgggaagagccagtgggcccgtaattttgctgagcctagcgacacctactggaagcctagtagaaataagtggtgggatggatatcatggagaagaagttgttgttttggatgatttttatggctggttaccttgggatgatctactagaactgtgtgaccggtatccattgactgtagagactaaaggcggtactgttccttttttggcccgcagtattttgattaccagcaatcaggccccccaggaatggtactcctcaactgctgtcccagctgtagaagctctctatcggaggattactactttgcaattttggaagactgctggagaacaatccacggaggtacccgaaggccgatttgaagcagtggacccaccctgtgcccttttcccatataaaataaattactga

SEQ ID NO: 3154153 - RNA, 19 nt, Artificial Sequence
  Description of Artificial Sequence: Synthetic oligonucleotide
cguuuugcuccaaaggacu

SEQ ID NO: 3154154 - RNA, 19 nt, Artificial Sequence
  Description of Artificial Sequence: Synthetic oligonucleotide
cagaaaguagcaaucauca

SEQ ID NO: 3154155 - RNA, 19 nt, Artificial Sequence
  Description of Artificial Sequence: Synthetic oligonucleotide
gcagcagcuagauuaugga

SEQ ID NO: 3154156 - RNA, 19 nt, Artificial Sequence
  Description of Artificial Sequence: Synthetic oligonucleotide
cagcuagauuauggagugu

SEQ ID NO: 3154157 - RNA, 19 nt, Artificial Sequence
  Description of Artificial Sequence: Synthetic oligonucleotide
cgaagaauuuaaccgugcu

SEQ ID NO: 3154158 - RNA, 19 nt, Artificial Sequence
  Description of Artificial Sequence: Synthetic oligonucleotide
gaagaauuuaaccgugcua

SEQ ID NO: 3154159 - RNA, 19 nt, Artificial Sequence
  Description of Artificial Sequence: Synthetic oligonucleotide
guaggauucacggaagcuu

SEQ ID NO: 3154160 - RNA, 19 nt, Artificial Sequence
  Description of Artificial Sequence: Synthetic oligonucleotide
gaugacaggaacaccuaca

SEQ ID NO: 3154161 - RNA, 19 nt, Artificial Sequence
  Description of Artificial Sequence: Synthetic oligonucleotide
cuacaagugcuacagccaa

SEQ ID NO: 3154162 - RNA, 19 nt, Artificial Sequence
  Description of Artificial Sequence: Synthetic oligonucleotide
cuccauggauaaauucgga

SEQ ID NO: 3154163 - RNA, 19 nt, Artificial Sequence
  Description of Artificial Sequence: Synthetic oligonucleotide
ccauggauaaauucggauu

SEQ ID NO: 3154164 - RNA, 19 nt, Artificial Sequence
  Description of Artificial Sequence: Synthetic oligonucleotide
gauaaauucggauuucggu

SEQ ID NO: 3154165 - RNA, 19 nt, Artificial Sequence
  Description of Artificial Sequence: Synthetic oligonucleotide
ggauuucgguuacccuaca

SEQ ID NO: 3154166 - RNA, 19 nt, Artificial Sequence
  Description of Artificial Sequence: Synthetic oligonucleotide
gauuucgguuacccuacaa

SEQ ID NO: 3154167 - RNA, 19 nt, Artificial Sequence
  Description of Artificial Sequence: Synthetic oligonucleotide
cgguuacccuacaaucagu

SEQ ID NO: 3154168 - RNA, 19 nt, Artificial Sequence
  Description of Artificial Sequence: Synthetic oligonucleotide
caguauuuuggaggugugu

SEQ ID NO: 3154169 - RNA, 19 nt, Artificial Sequence
  Description of Artificial Sequence: Synthetic oligonucleotide
guauuuuggaggugugucu

SEQ ID NO: 3154170 - RNA, 19 nt, Artificial Sequence
  Description of Artificial Sequence: Synthetic oligonucleotide
cugccuugagcaaagaaca

SEQ ID NO: 3154171 - RNA, 19 nt, Artificial Sequence
  Description of Artificial Sequence: Synthetic oligonucleotide
gcaaagaacaauucacgaa

SEQ ID NO: 3154172 - RNA, 19 nt, Artificial Sequence
  Description of Artificial Sequence: Synthetic oligonucleotide
gaacaauucacgaagauca

SEQ ID NO: 3154173 - RNA, 19 nt, Artificial Sequence
  Description of Artificial Sequence: Synthetic oligonucleotide
caauggguucccaaacaau

SEQ ID NO: 3154174 - RNA, 19 nt, Artificial Sequence
  Description of Artificial Sequence: Synthetic oligonucleotide
gcugucauugggaaaugca

SEQ ID NO: 3154175 - RNA, 19 nt, Artificial Sequence
  Description of Artificial Sequence: Synthetic oligonucleotide
ggagagguuugaccguauu

SEQ ID NO: 3154176 - RNA, 19 nt, Artificial Sequence
  Description of Artificial Sequence: Synthetic oligonucleotide
gaucacaguggauaucgga

SEQ ID NO: 3154177 - RNA, 19 nt, Artificial Sequence
  Description of Artificial Sequence: Synthetic oligonucleotide
aguccuuuggagcaaaacg

SEQ ID NO: 3154178 - RNA, 19 nt, Artificial Sequence
  Description of Artificial Sequence: Synthetic oligonucleotide
ugaugauugcuacuuucug

SEQ ID NO: 3154179 - RNA, 19 nt, Artificial Sequence
  Description of Artificial Sequence: Synthetic oligonucleotide
uccauaaucuagcugcugc

SEQ ID NO: 3154180 - RNA, 19 nt, Artificial Sequence
  Description of Artificial Sequence: Synthetic oligonucleotide
acacuccauaaucuagcug

SEQ ID NO: 3154181 - RNA, 19 nt, Artificial Sequence
  Description of Artificial Sequence: Synthetic oligonucleotide
agcacgguuaaauucuucg

SEQ ID NO: 3154182 - RNA, 19 nt, Artificial Sequence
  Description of Artificial Sequence: Synthetic oligonucleotide
uagcacgguuaaauucuuc

SEQ ID NO: 3154183 - RNA, 19 nt, Artificial Sequence
  Description of Artificial Sequence: Synthetic oligonucleotide
aagcuuccgugaauccuac

SEQ ID NO: 3154184 - RNA, 19 nt, Artificial Sequence
  Description of Artificial Sequence: Synthetic oligonucleotide
uguagguguuccugucauc

SEQ ID NO: 3154185 - RNA, 19 nt, Artificial Sequence
  Description of Artificial Sequence: Synthetic oligonucleotide
uuggcuguagcacuuguag

SEQ ID NO: 3154186 - RNA, 19 nt, Artificial Sequence
  Description of Artificial Sequence: Synthetic oligonucleotide
uccgaauuuauccauggag

SEQ ID NO: 3154187 - RNA, 19 nt, Artificial Sequence
  Description of Artificial Sequence: Synthetic oligonucleotide
aauccgaauuuauccaugg

SEQ ID NO: 3154188 - RNA, 19 nt, Artificial Sequence
  Description of Artificial Sequence: Synthetic oligonucleotide
accgaaauccgaauuuauc

SEQ ID NO: 3154189 - RNA, 19 nt, Artificial Sequence
  Description of Artificial Sequence: Synthetic oligonucleotide
uguaggguaaccgaaaucc

SEQ ID NO: 3154190 - RNA, 19 nt, Artificial Sequence
  Description of Artificial Sequence: Synthetic oligonucleotide
uuguaggguaaccgaaauc

SEQ ID NO: 3154191 - RNA, 19 nt, Artificial Sequence
  Description of Artificial Sequence: Synthetic oligonucleotide
acugauuguaggguaaccg

SEQ ID NO: 3154192 - RNA, 19 nt, Artificial Sequence
  Description of Artificial Sequence: Synthetic oligonucleotide
acacaccuccaaaauacug

SEQ ID NO: 3154193 - RNA, 19 nt, Artificial Sequence
  Description of Artificial Sequence: Synthetic oligonucleotide
agacacaccuccaaaauac

SEQ ID NO: 3154194 - RNA, 19 nt, Artificial Sequence
  Description of Artificial Sequence: Synthetic oligonucleotide
uguucuuugcucaaggcag

SEQ ID NO: 3154195 - RNA, 19 nt, Artificial Sequence
  Description of Artificial Sequence: Synthetic oligonucleotide
uucgugaauuguucuuugc

SEQ ID NO: 3154196 - RNA, 19 nt, Artificial Sequence
  Description of Artificial Sequence: Synthetic oligonucleotide
ugaucuucgugaauuguuc

SEQ ID NO: 3154197 - RNA, 19 nt, Artificial Sequence
  Description of Artificial Sequence: Synthetic oligonucleotide
auuguuugggaacccauug

SEQ ID NO: 3154198 - RNA, 19 nt, Artificial Sequence
  Description of Artificial Sequence: Synthetic oligonucleotide
ugcauuucccaaugacagc

SEQ ID NO: 3154199 - RNA, 19 nt, Artificial Sequence
  Description of Artificial Sequence: Synthetic oligonucleotide
aauacggucaaaccucucc

SEQ ID NO: 3154200 - RNA, 19 nt, Artificial Sequence
  Description of Artificial Sequence: Synthetic oligonucleotide
uccgauauccacugugauc

SEQ ID NO: 3154201 - RNA, 19 nt, Artificial Sequence
  Description of Artificial Sequence: Synthetic oligonucleotide
cggcauagcaaauacauau

SEQ ID NO: 3154202 - RNA, 19 nt, Artificial Sequence
  Description of Artificial Sequence: Synthetic oligonucleotide
gguauaauguugagagaaa

SEQ ID NO: 3154203 - RNA, 19 nt, Artificial Sequence
  Description of Artificial Sequence: Synthetic oligonucleotide
cacaugaucagauuguaua

SEQ ID NO: 3154204 - RNA, 19 nt, Artificial Sequence
  Description of Artificial Sequence: Synthetic oligonucleotide
cagauuguauacuaacaaa

SEQ ID NO: 3154205 - RNA, 19 nt, Artificial Sequence
  Description of Artificial Sequence: Synthetic oligonucleotide
gacuguguugcucaaacaa

SEQ ID NO: 3154206 - RNA, 19 nt, Artificial Sequence
  Description of Artificial Sequence: Synthetic oligonucleotide
cuuacaugagaggccuuau

SEQ ID NO: 3154207 - RNA, 19 nt, Artificial Sequence
  Description of Artificial Sequence: Synthetic oligonucleotide
caugagaggccuuauugau

SEQ ID NO: 3154208 - RNA, 19 nt, Artificial Sequence
  Description of Artificial Sequence: Synthetic oligonucleotide
gaggccuuauugauguaaa

SEQ ID NO: 3154209 - RNA, 19 nt, Artificial Sequence
  Description of Artificial Sequence: Synthetic oligonucleotide
gagugaaauuaguuuugau

SEQ ID NO: 3154210 - RNA, 19 nt, Artificial Sequence
  Description of Artificial Sequence: Synthetic oligonucleotide
caucauuccuuuucguaau

SEQ ID NO: 3154211 - RNA, 19 nt, Artificial Sequence
  Description of Artificial Sequence: Synthetic oligonucleotide
ggcaucugauaccgauguu

SEQ ID NO: 3154212 - RNA, 19 nt, Artificial Sequence
  Description of Artificial Sequence: Synthetic oligonucleotide
gacagguacacaaccuuuu

SEQ ID NO: 3154213 - RNA, 19 nt, Artificial Sequence
  Description of Artificial Sequence: Synthetic oligonucleotide
caaccuuuuaaucgugcaa

SEQ ID NO: 3154214 - RNA, 19 nt, Artificial Sequence
  Description of Artificial Sequence: Synthetic oligonucleotide
cugaaaaugaccgaaauua

SEQ ID NO: 3154215 - RNA, 19 nt, Artificial Sequence
  Description of Artificial Sequence: Synthetic oligonucleotide
gaccgaaauuauuacggau

SEQ ID NO: 3154216 - RNA, 19 nt, Artificial Sequence
  Description of Artificial Sequence: Synthetic oligonucleotide
ggagaaaugccacgucauu

SEQ ID NO: 3154217 - RNA, 19 nt, Artificial Sequence
  Description of Artificial Sequence: Synthetic oligonucleotide
gacugacaguggaacaauu

SEQ ID NO: 3154218 - RNA, 19 nt, Artificial Sequence
  Description of Artificial Sequence: Synthetic oligonucleotide
caagaagauuaauggauuu

SEQ ID NO: 3154219 - RNA, 19 nt, Artificial Sequence
  Description of Artificial Sequence: Synthetic oligonucleotide
cuaugcuggauacaacgua

SEQ ID NO: 3154220 - RNA, 19 nt, Artificial Sequence
  Description of Artificial Sequence: Synthetic oligonucleotide
gcuggauacaacguaacaa

SEQ ID NO: 3154221 - RNA, 19 nt, Artificial Sequence
  Description of Artificial Sequence: Synthetic oligonucleotide
gagggagacuuagggaaau

SEQ ID NO: 3154222 - RNA, 19 nt, Artificial Sequence
  Description of Artificial Sequence: Synthetic oligonucleotide
cagagaacgucaguauauu

SEQ ID NO: 3154223 - RNA, 19 nt, Artificial Sequence
  Description of Artificial Sequence: Synthetic oligonucleotide
cuugucaguagauuguaua

SEQ ID NO: 3154224 - RNA, 19 nt, Artificial Sequence
  Description of Artificial Sequence: Synthetic oligonucleotide
gcuccuauuagagacuauu

SEQ ID NO: 3154225 - RNA, 19 nt, Artificial Sequence
  Description of Artificial Sequence: Synthetic oligonucleotide
auauguauuugcuaugccg

SEQ ID NO: 3154226 - RNA, 19 nt, Artificial Sequence
  Description of Artificial Sequence: Synthetic oligonucleotide
uuucucucaacauuauacc

SEQ ID NO: 3154227 - RNA, 19 nt, Artificial Sequence
  Description of Artificial Sequence: Synthetic oligonucleotide
uauacaaucugaucaugug

SEQ ID NO: 3154228 - RNA, 19 nt, Artificial Sequence
  Description of Artificial Sequence: Synthetic oligonucleotide
uuuguuaguauacaaucug

SEQ ID NO: 3154229 - RNA, 19 nt, Artificial Sequence
  Description of Artificial Sequence: Synthetic oligonucleotide
uuguuugagcaacacaguc

SEQ ID NO: 3154230 - RNA, 19 nt, Artificial Sequence
  Description of Artificial Sequence: Synthetic oligonucleotide
auaaggccucucauguaag

SEQ ID NO: 3154231 - RNA, 19 nt, Artificial Sequence
  Description of Artificial Sequence: Synthetic oligonucleotide
aucaauaaggccucucaug

SEQ ID NO: 3154232 - RNA, 19 nt, Artificial Sequence
  Description of Artificial Sequence: Synthetic oligonucleotide
uuuacaucaauaaggccuc

SEQ ID NO: 3154233 - RNA, 19 nt, Artificial Sequence
  Description of Artificial Sequence: Synthetic oligonucleotide
aucaaaacuaauuucacuc

SEQ ID NO: 3154234 - RNA, 19 nt, Artificial Sequence
  Description of Artificial Sequence: Synthetic oligonucleotide
auuacgaaaaggaaugaug

SEQ ID NO: 3154235 - RNA, 19 nt, Artificial Sequence
  Description of Artificial Sequence: Synthetic oligonucleotide
aacaucgguaucagaugcc

SEQ ID NO: 3154236 - RNA, 19 nt, Artificial Sequence
  Description of Artificial Sequence: Synthetic oligonucleotide
aaaagguuguguaccuguc

SEQ ID NO: 3154237 - RNA, 19 nt, Artificial Sequence
  Description of Artificial Sequence: Synthetic oligonucleotide
uugcacgauuaaaagguug

SEQ ID NO: 3154238 - RNA, 19 nt, Artificial Sequence
  Description of Artificial Sequence: Synthetic oligonucleotide
uaauuucggucauuuucag

SEQ ID NO: 3154239 - RNA, 19 nt, Artificial Sequence
  Description of Artificial Sequence: Synthetic oligonucleotide
auccguaauaauuucgguc

SEQ ID NO: 3154240 - RNA, 19 nt, Artificial Sequence
  Description of Artificial Sequence: Synthetic oligonucleotide
aaugacguggcauuucucc

SEQ ID NO: 3154241 - RNA, 19 nt, Artificial Sequence
  Description of Artificial Sequence: Synthetic oligonucleotide
aauuguuccacugucaguc

SEQ ID NO: 3154242 - RNA, 19 nt, Artificial Sequence
  Description of Artificial Sequence: Synthetic oligonucleotide
aaauccauuaaucuucuug

SEQ ID NO: 3154243 - RNA, 19 nt, Artificial Sequence
  Description of Artificial Sequence: Synthetic oligonucleotide
uacguuguauccagcauag

SEQ ID NO: 3154244 - RNA, 19 nt, Artificial Sequence
  Description of Artificial Sequence: Synthetic oligonucleotide
uuguuacguuguauccagc

SEQ ID NO: 3154245 - RNA, 19 nt, Artificial Sequence
  Description of Artificial Sequence: Synthetic oligonucleotide
auuucccuaagucucccuc

SEQ ID NO: 3154246 - RNA, 19 nt, Artificial Sequence
  Description of Artificial Sequence: Synthetic oligonucleotide
aauauacugacguucucug

SEQ ID NO: 3154247 - RNA, 19 nt, Artificial Sequence
  Description of Artificial Sequence: Synthetic oligonucleotide
uauacaaucuacugacaag

SEQ ID NO: 3154248 - RNA, 19 nt, Artificial Sequence
  Description of Artificial Sequence: Synthetic oligonucleotide
aauagucucuaauaggagc

SEQ ID NO: 3154249 - RNA, 19 nt, Artificial Sequence
  Description of Artificial Sequence: Synthetic oligonucleotide
cacaguguguggguaucua

SEQ ID NO: 3154250 - RNA, 19 nt, Artificial Sequence
  Description of Artificial Sequence: Synthetic oligonucleotide
guggguaucuacagaccau

SEQ ID NO: 3154251 - RNA, 19 nt, Artificial Sequence
  Description of Artificial Sequence: Synthetic oligonucleotide
guuucuuaaccaucaucau

SEQ ID NO: 3154252 - RNA, 19 nt, Artificial Sequence
  Description of Artificial Sequence: Synthetic oligonucleotide
ccaucaucaugaggucgau

SEQ ID NO: 3154253 - RNA, 19 nt, Artificial Sequence
  Description of Artificial Sequence: Synthetic oligonucleotide
guagcaaaucugauucaaa

SEQ ID NO: 3154254 - RNA, 19 nt, Artificial Sequence
  Description of Artificial Sequence: Synthetic oligonucleotide
gauucaaaaggagggcuuu

SEQ ID NO: 3154255 - RNA, 19 nt, Artificial Sequence
  Description of Artificial Sequence: Synthetic oligonucleotide
cuacuugcagggugguaaa

SEQ ID NO: 3154256 - RNA, 19 nt, Artificial Sequence
  Description of Artificial Sequence: Synthetic oligonucleotide
gugguaaaauggccuacua

SEQ ID NO: 3154257 - RNA, 19 nt, Artificial Sequence
  Description of Artificial Sequence: Synthetic oligonucleotide
caguguggauauugauaua

SEQ ID NO: 3154258 - RNA, 19 nt, Artificial Sequence
  Description of Artificial Sequence: Synthetic oligonucleotide
guggauauugauauagaua

SEQ ID NO: 3154259 - RNA, 19 nt, Artificial Sequence
  Description of Artificial Sequence: Synthetic oligonucleotide
gcaaagaguauugagcuuu

SEQ ID NO: 3154260 - RNA, 19 nt, Artificial Sequence
  Description of Artificial Sequence: Synthetic oligonucleotide
gaguauugagcuuuggaua

SEQ ID NO: 3154261 - RNA, 19 nt, Artificial Sequence
  Description of Artificial Sequence: Synthetic oligonucleotide
guauugagcuuuggauauu

SEQ ID NO: 3154262 - RNA, 19 nt, Artificial Sequence
  Description of Artificial Sequence: Synthetic oligonucleotide
gcuauugguuugcaguguu

SEQ ID NO: 3154263 - RNA, 19 nt, Artificial Sequence
  Description of Artificial Sequence: Synthetic oligonucleotide
cugacaaauggucgcauuu

SEQ ID NO: 3154264 - RNA, 19 nt, Artificial Sequence
  Description of Artificial Sequence: Synthetic oligonucleotide
gacaaauggucgcauuuau

SEQ ID NO: 3154265 - RNA, 19 nt, Artificial Sequence
  Description of Artificial Sequence: Synthetic oligonucleotide
gaaauggucuccuacgauu

SEQ ID NO: 3154266 - RNA, 19 nt, Artificial Sequence
  Description of Artificial Sequence: Synthetic oligonucleotide
ccuacgauuauagagauau

SEQ ID NO: 3154267 - RNA, 19 nt, Artificial Sequence
  Description of Artificial Sequence: Synthetic oligonucleotide
cuacgauuauagagauauu

SEQ ID NO: 3154268 - RNA, 19 nt, Artificial Sequence
  Description of Artificial Sequence: Synthetic oligonucleotide
gagauauuguugguaucaa

SEQ ID NO: 3154269 - RNA, 19 nt, Artificial Sequence
  Description of Artificial Sequence: Synthetic oligonucleotide
guugguaucaaucuauuaa

SEQ ID NO: 3154270 - RNA, 19 nt, Artificial Sequence
  Description of Artificial Sequence: Synthetic oligonucleotide
gcugggauguauagcagaa

SEQ ID NO: 3154271 - RNA, 19 nt, Artificial Sequence
  Description of Artificial Sequence: Synthetic oligonucleotide
gcagaaguuaaugcaacaa

SEQ ID NO: 3154272 - RNA, 19 nt, Artificial Sequence
  Description of Artificial Sequence: Synthetic oligonucleotide
gcuggaaagagguugcuua

SEQ ID NO: 3154273 - RNA, 19 nt, Artificial Sequence
  Description of Artificial Sequence: Synthetic oligonucleotide
uagauacccacacacugug

SEQ ID NO: 3154274 - RNA, 19 nt, Artificial Sequence
  Description of Artificial Sequence: Synthetic oligonucleotide
auggucuguagauacccac

SEQ ID NO: 3154275 - RNA, 19 nt, Artificial Sequence
  Description of Artificial Sequence: Synthetic oligonucleotide
augaugaugguuaagaaac

SEQ ID NO: 3154276 - RNA, 19 nt, Artificial Sequence
  Description of Artificial Sequence: Synthetic oligonucleotide
aucgaccucaugaugaugg

SEQ ID NO: 3154277 - RNA, 19 nt, Artificial Sequence
  Description of Artificial Sequence: Synthetic oligonucleotide
uuugaaucagauuugcuac

SEQ ID NO: 3154278 - RNA, 19 nt, Artificial Sequence
  Description of Artificial Sequence: Synthetic oligonucleotide
aaagcccuccuuuugaauc

SEQ ID NO: 3154279 - RNA, 19 nt, Artificial Sequence
  Description of Artificial Sequence: Synthetic oligonucleotide
uuuaccacccugcaaguag

SEQ ID NO: 3154280 - RNA, 19 nt, Artificial Sequence
  Description of Artificial Sequence: Synthetic oligonucleotide
uaguaggccauuuuaccac

SEQ ID NO: 3154281 - RNA, 19 nt, Artificial Sequence
  Description of Artificial Sequence: Synthetic oligonucleotide
uauaucaauauccacacug

SEQ ID NO: 3154282 - RNA, 19 nt, Artificial Sequence
  Description of Artificial Sequence: Synthetic oligonucleotide
uaucuauaucaauauccac

SEQ ID NO: 3154283 - RNA, 19 nt, Artificial Sequence
  Description of Artificial Sequence: Synthetic oligonucleotide
aaagcucaauacucuuugc

SEQ ID NO: 3154284 - RNA, 19 nt, Artificial Sequence
  Description of Artificial Sequence: Synthetic oligonucleotide
uauccaaagcucaauacuc

SEQ ID NO: 3154285 - RNA, 19 nt, Artificial Sequence
  Description of Artificial Sequence: Synthetic oligonucleotide
aauauccaaagcucaauac

SEQ ID NO: 3154286 - RNA, 19 nt, Artificial Sequence
  Description of Artificial Sequence: Synthetic oligonucleotide
aacacugcaaaccaauagc

SEQ ID NO: 3154287 - RNA, 19 nt, Artificial Sequence
  Description of Artificial Sequence: Synthetic oligonucleotide
aaaugcgaccauuugucag

SEQ ID NO: 3154288 - RNA, 19 nt, Artificial Sequence
  Description of Artificial Sequence: Synthetic oligonucleotide
auaaaugcgaccauuuguc

SEQ ID NO: 3154289 - RNA, 19 nt, Artificial Sequence
  Description of Artificial Sequence: Synthetic oligonucleotide
aaucguaggagaccauuuc

SEQ ID NO: 3154290 - RNA, 19 nt, Artificial Sequence
  Description of Artificial Sequence: Synthetic oligonucleotide
auaucucuauaaucguagg

SEQ ID NO: 3154291 - RNA, 19 nt, Artificial Sequence
  Description of Artificial Sequence: Synthetic oligonucleotide
aauaucucuauaaucguag

SEQ ID NO: 3154292 - RNA, 19 nt, Artificial Sequence
  Description of Artificial Sequence: Synthetic oligonucleotide
uugauaccaacaauaucuc

SEQ ID NO: 3154293 - RNA, 19 nt, Artificial Sequence
  Description of Artificial Sequence: Synthetic oligonucleotide
uuaauagauugauaccaac

SEQ ID NO: 3154294 - RNA, 19 nt, Artificial Sequence
  Description of Artificial Sequence: Synthetic oligonucleotide
uucugcuauacaucccagc

SEQ ID NO: 3154295 - RNA, 19 nt, Artificial Sequence
  Description of Artificial Sequence: Synthetic oligonucleotide
uuguugcauuaacuucugc

SEQ ID NO: 3154296 - RNA, 19 nt, Artificial Sequence
  Description of Artificial Sequence: Synthetic oligonucleotide
uaagcaaccucuuuccagc

SEQ ID NO: 3154297 - RNA, 19 nt, Artificial Sequence
  Description of Artificial Sequence: Synthetic oligonucleotide
guaacacuuaucgcaugau

SEQ ID NO: 3154298 - RNA, 19 nt, Artificial Sequence
  Description of Artificial Sequence: Synthetic oligonucleotide
cgccugaaaccugacauaa

SEQ ID NO: 3154299 - RNA, 19 nt, Artificial Sequence
  Description of Artificial Sequence: Synthetic oligonucleotide
ggaccauugacgacucuau

SEQ ID NO: 3154300 - RNA, 19 nt, Artificial Sequence
  Description of Artificial Sequence: Synthetic oligonucleotide
cauugacgacucuauuaga

SEQ ID NO: 3154301 - RNA, 19 nt, Artificial Sequence
  Description of Artificial Sequence: Synthetic oligonucleotide
cacuuguucuauuccccaa

SEQ ID NO: 3154302 - RNA, 19 nt, Artificial Sequence
  Description of Artificial Sequence: Synthetic oligonucleotide
cugguuguaugauugguaa

SEQ ID NO: 3154303 - RNA, 19 nt, Artificial Sequence
  Description of Artificial Sequence: Synthetic oligonucleotide
gaauuuugaaguuccuuaa

SEQ ID NO: 3154304 - RNA, 19 nt, Artificial Sequence
  Description of Artificial Sequence: Synthetic oligonucleotide
cgaguagcaauugucagua

SEQ ID NO: 3154305 - RNA, 19 nt, Artificial Sequence
  Description of Artificial Sequence: Synthetic oligonucleotide
gagguggaaucauucacca

SEQ ID NO: 3154306 - RNA, 19 nt, Artificial Sequence
  Description of Artificial Sequence: Synthetic oligonucleotide
ccucuggaauagcauuaca

SEQ ID NO: 3154307 - RNA, 19 nt, Artificial Sequence
  Description of Artificial Sequence: Synthetic oligonucleotide
cuaagaaacugcaugacga

SEQ ID NO: 3154308 - RNA, 19 nt, Artificial Sequence
  Description of Artificial Sequence: Synthetic oligonucleotide
gguggucucaaaucuagca

SEQ ID NO: 3154309 - RNA, 19 nt, Artificial Sequence
  Description of Artificial Sequence: Synthetic oligonucleotide
gauuauacuacccguagaa

SEQ ID NO: 3154310 - RNA, 19 nt, Artificial Sequence
  Description of Artificial Sequence: Synthetic oligonucleotide
cccguagaauauacuaggu

SEQ ID NO: 3154311 - RNA, 19 nt, Artificial Sequence
  Description of Artificial Sequence: Synthetic oligonucleotide
gcauuuccuaauugaggua

SEQ ID NO: 3154312 - RNA, 19 nt, Artificial Sequence
  Description of Artificial Sequence: Synthetic oligonucleotide
gacuuggaggauacgguua

SEQ ID NO: 3154313 - RNA, 19 nt, Artificial Sequence
  Description of Artificial Sequence: Synthetic oligonucleotide
guacauaugaguauaaaga

SEQ ID NO: 3154314 - RNA, 19 nt, Artificial Sequence
  Description of Artificial Sequence: Synthetic oligonucleotide
cacauucaagguauucauu

SEQ ID NO: 3154315 - RNA, 19 nt, Artificial Sequence
  Description of Artificial Sequence: Synthetic oligonucleotide
ccuuggagcaacuaaccuu

SEQ ID NO: 3154316 - RNA, 19 nt, Artificial Sequence
  Description of Artificial Sequence: Synthetic oligonucleotide
caacuaaccuuaaaggcuu

SEQ ID NO: 3154317 - RNA, 19 nt, Artificial Sequence
  Description of Artificial Sequence: Synthetic oligonucleotide
ggcuugccuuguuaagaca

SEQ ID NO: 3154318 - RNA, 19 nt, Artificial Sequence
  Description of Artificial Sequence: Synthetic oligonucleotide
gccuuguuaagacauaguu

SEQ ID NO: 3154319 - RNA, 19 nt, Artificial Sequence
  Description of Artificial Sequence: Synthetic oligonucleotide
cuggcauuuaacaaccuaa

SEQ ID NO: 3154320 - RNA, 19 nt, Artificial Sequence
  Description of Artificial Sequence: Synthetic oligonucleotide
gccccauaguaaggauaua

SEQ ID NO: 3154321 - RNA, 19 nt, Artificial Sequence
  Description of Artificial Sequence: Synthetic oligonucleotide
aucaugcgauaaguguuac

SEQ ID NO: 3154322 - RNA, 19 nt, Artificial Sequence
  Description of Artificial Sequence: Synthetic oligonucleotide
uuaugucagguuucaggcg

SEQ ID NO: 3154323 - RNA, 19 nt, Artificial Sequence
  Description of Artificial Sequence: Synthetic oligonucleotide
auagagucgucaauggucc

SEQ ID NO: 3154324 - RNA, 19 nt, Artificial Sequence
  Description of Artificial Sequence: Synthetic oligonucleotide
ucuaauagagucgucaaug

SEQ ID NO: 3154325 - RNA, 19 nt, Artificial Sequence
  Description of Artificial Sequence: Synthetic oligonucleotide
uuggggaauagaacaagug

SEQ ID NO: 3154326 - RNA, 19 nt, Artificial Sequence
  Description of Artificial Sequence: Synthetic oligonucleotide
uuaccaaucauacaaccag

SEQ ID NO: 3154327 - RNA, 19 nt, Artificial Sequence
  Description of Artificial Sequence: Synthetic oligonucleotide
uuaaggaacuucaaaauuc

SEQ ID NO: 3154328 - RNA, 19 nt, Artificial Sequence
  Description of Artificial Sequence: Synthetic oligonucleotide
uacugacaauugcuacucg

SEQ ID NO: 3154329 - RNA, 19 nt, Artificial Sequence
  Description of Artificial Sequence: Synthetic oligonucleotide
uggugaaugauuccaccuc

SEQ ID NO: 3154330 - RNA, 19 nt, Artificial Sequence
  Description of Artificial Sequence: Synthetic oligonucleotide
uguaaugcuauuccagagg

SEQ ID NO: 3154331 - RNA, 19 nt, Artificial Sequence
  Description of Artificial Sequence: Synthetic oligonucleotide
ucgucaugcaguuucuuag

SEQ ID NO: 3154332 - RNA, 19 nt, Artificial Sequence
  Description of Artificial Sequence: Synthetic oligonucleotide
ugcuagauuugagaccacc

SEQ ID NO: 3154333 - RNA, 19 nt, Artificial Sequence
  Description of Artificial Sequence: Synthetic oligonucleotide
uucuacggguaguauaauc

SEQ ID NO: 3154334 - RNA, 19 nt, Artificial Sequence
  Description of Artificial Sequence: Synthetic oligonucleotide
accuaguauauucuacggg

SEQ ID NO: 3154335 - RNA, 19 nt, Artificial Sequence
  Description of Artificial Sequence: Synthetic oligonucleotide
uaccucaauuaggaaaugc

SEQ ID NO: 3154336 - RNA, 19 nt, Artificial Sequence
  Description of Artificial Sequence: Synthetic oligonucleotide
uaaccguauccuccaaguc

SEQ ID NO: 3154337 - RNA, 19 nt, Artificial Sequence
  Description of Artificial Sequence: Synthetic oligonucleotide
ucuuuauacucauauguac

SEQ ID NO: 3154338 - RNA, 19 nt, Artificial Sequence
  Description of Artificial Sequence: Synthetic oligonucleotide
aaugaauaccuugaaugug

SEQ ID NO: 3154339 - RNA, 19 nt, Artificial Sequence
  Description of Artificial Sequence: Synthetic oligonucleotide
aagguuaguugcuccaagg

SEQ ID NO: 3154340 - RNA, 19 nt, Artificial Sequence
  Description of Artificial Sequence: Synthetic oligonucleotide
aagccuuuaagguuaguug

SEQ ID NO: 3154341 - RNA, 19 nt, Artificial Sequence
  Description of Artificial Sequence: Synthetic oligonucleotide
ugucuuaacaaggcaagcc

SEQ ID NO: 3154342 - RNA, 19 nt, Artificial Sequence
  Description of Artificial Sequence: Synthetic oligonucleotide
aacuaugucuuaacaaggc

SEQ ID NO: 3154343 - RNA, 19 nt, Artificial Sequence
  Description of Artificial Sequence: Synthetic oligonucleotide
uuagguuguuaaaugccag

SEQ ID NO: 3154344 - RNA, 19 nt, Artificial Sequence
  Description of Artificial Sequence: Synthetic oligonucleotide
uauauccuuacuauggggc

SEQ ID NO: 3154345 - RNA, 19 nt, Artificial Sequence
  Description of Artificial Sequence: Synthetic oligonucleotide
ggcgcagagcucuacuuuu

SEQ ID NO: 3154346 - RNA, 19 nt, Artificial Sequence
  Description of Artificial Sequence: Synthetic oligonucleotide
ggcaucuuggcuagagaau

SEQ ID NO: 3154347 - RNA, 19 nt, Artificial Sequence
  Description of Artificial Sequence: Synthetic oligonucleotide
gggaagucuggcaagguua

SEQ ID NO: 3154348 - RNA, 19 nt, Artificial Sequence
  Description of Artificial Sequence: Synthetic oligonucleotide
gaagucuggcaagguuaau

SEQ ID NO: 3154349 - RNA, 19 nt, Artificial Sequence
  Description of Artificial Sequence: Synthetic oligonucleotide
caagguuaauaacaucuuu

SEQ ID NO: 3154350 - RNA, 19 nt, Artificial Sequence
  Description of Artificial Sequence: Synthetic oligonucleotide
gucccaaggaauugcuaaa

SEQ ID NO: 3154351 - RNA, 19 nt, Artificial Sequence
  Description of Artificial Sequence: Synthetic oligonucleotide
cuaaaauuaaguguuccau

SEQ ID NO: 3154352 - RNA, 19 nt, Artificial Sequence
  Description of Artificial Sequence: Synthetic oligonucleotide
guacgcuguccaaaacaau

SEQ ID NO: 3154353 - RNA, 19 nt, Artificial Sequence
  Description of Artificial Sequence: Synthetic oligonucleotide
cuuuuguggcucuuagcaa

SEQ ID NO: 3154354 - RNA, 19 nt, Artificial Sequence
  Description of Artificial Sequence: Synthetic oligonucleotide
cagucuaccaggugacgua

SEQ ID NO: 3154355 - RNA, 19 nt, Artificial Sequence
  Description of Artificial Sequence: Synthetic oligonucleotide
caggugacguaccaguuaa

SEQ ID NO: 3154356 - RNA, 19 nt, Artificial Sequence
  Description of Artificial Sequence: Synthetic oligonucleotide
cguuauguacaguccucau

SEQ ID NO: 3154357 - RNA, 19 nt, Artificial Sequence
  Description of Artificial Sequence: Synthetic oligonucleotide
ggagcagaauccauggcua

SEQ ID NO: 3154358 - RNA, 19 nt, Artificial Sequence
  Description of Artificial Sequence: Synthetic oligonucleotide
gaauccauggcuaggguuu

SEQ ID NO: 3154359 - RNA, 19 nt, Artificial Sequence
  Description of Artificial Sequence: Synthetic oligonucleotide
ggccauaacuauugcugua

SEQ ID NO: 3154360 - RNA, 19 nt, Artificial Sequence
  Description of Artificial Sequence: Synthetic oligonucleotide
cuguacucuguucgggauu

SEQ ID NO: 3154361 - RNA, 19 nt, Artificial Sequence
  Description of Artificial Sequence: Synthetic oligonucleotide
cuuugguuggcguguacau

SEQ ID NO: 3154362 - RNA, 19 nt, Artificial Sequence
  Description of Artificial Sequence: Synthetic oligonucleotide
cagauaacgguuaccuuua

SEQ ID NO: 3154363 - RNA, 19 nt, Artificial Sequence
  Description of Artificial Sequence: Synthetic oligonucleotide
ccuggugugcguuucuauu

SEQ ID NO: 3154364 - RNA, 19 nt, Artificial Sequence
  Description of Artificial Sequence: Synthetic oligonucleotide
cguuucuauuuacuucuau

SEQ ID NO: 3154365 - RNA, 19 nt, Artificial Sequence
  Description of Artificial Sequence: Synthetic oligonucleotide
cagcccucagagacuaaaa

SEQ ID NO: 3154366 - RNA, 19 nt, Artificial Sequence
  Description of Artificial Sequence: Synthetic oligonucleotide
cuugaaaauggacaggcaa

SEQ ID NO: 3154367 - RNA, 19 nt, Artificial Sequence
  Description of Artificial Sequence: Synthetic oligonucleotide
gccuuaagcuauuuucgaa

SEQ ID NO: 3154368 - RNA, 19 nt, Artificial Sequence
  Description of Artificial Sequence: Synthetic oligonucleotide
ggauagauuaaaagcggaa

SEQ ID NO: 3154369 - RNA, 19 nt, Artificial Sequence
  Description of Artificial Sequence: Synthetic oligonucleotide
aaaaguagagcucugcgcc

SEQ ID NO: 3154370 - RNA, 19 nt, Artificial Sequence
  Description of Artificial Sequence: Synthetic oligonucleotide
auucucuagccaagaugcc

SEQ ID NO: 3154371 - RNA, 19 nt, Artificial Sequence
  Description of Artificial Sequence: Synthetic oligonucleotide
uaaccuugccagacuuccc

SEQ ID NO: 3154372 - RNA, 19 nt, Artificial Sequence
  Description of Artificial Sequence: Synthetic oligonucleotide
auuaaccuugccagacuuc

SEQ ID NO: 3154373 - RNA, 19 nt, Artificial Sequence
  Description of Artificial Sequence: Synthetic oligonucleotide
aaagauguuauuaaccuug

SEQ ID NO: 3154374 - RNA, 19 nt, Artificial Sequence
  Description of Artificial Sequence: Synthetic oligonucleotide
uuuagcaauuccuugggac

SEQ ID NO: 3154375 - RNA, 19 nt, Artificial Sequence
  Description of Artificial Sequence: Synthetic oligonucleotide
auggaacacuuaauuuuag

SEQ ID NO: 3154376 - RNA, 19 nt, Artificial Sequence
  Description of Artificial Sequence: Synthetic oligonucleotide
auuguuuuggacagcguac

SEQ ID NO: 3154377 - RNA, 19 nt, Artificial Sequence
  Description of Artificial Sequence: Synthetic oligonucleotide
uugcuaagagccacaaaag

SEQ ID NO: 3154378 - RNA, 19 nt, Artificial Sequence
  Description of Artificial Sequence: Synthetic oligonucleotide
uacgucaccugguagacug

SEQ ID NO: 3154379 - RNA, 19 nt, Artificial Sequence
  Description of Artificial Sequence: Synthetic oligonucleotide
uuaacugguacgucaccug

SEQ ID NO: 3154380 - RNA, 19 nt, Artificial Sequence
  Description of Artificial Sequence: Synthetic oligonucleotide
augaggacuguacauaacg

SEQ ID NO: 3154381 - RNA, 19 nt, Artificial Sequence
  Description of Artificial Sequence: Synthetic oligonucleotide
uagccauggauucugcucc

SEQ ID NO: 3154382 - RNA, 19 nt, Artificial Sequence
  Description of Artificial Sequence: Synthetic oligonucleotide
aaacccuagccauggauuc

SEQ ID NO: 3154383 - RNA, 19 nt, Artificial Sequence
  Description of Artificial Sequence: Synthetic oligonucleotide
uacagcaauaguuauggcc

SEQ ID NO: 3154384 - RNA, 19 nt, Artificial Sequence
  Description of Artificial Sequence: Synthetic oligonucleotide
aaucccgaacagaguacag

SEQ ID NO: 3154385 - RNA, 19 nt, Artificial Sequence
  Description of Artificial Sequence: Synthetic oligonucleotide
auguacacgccaaccaaag

SEQ ID NO: 3154386 - RNA, 19 nt, Artificial Sequence
  Description of Artificial Sequence: Synthetic oligonucleotide
uaaagguaaccguuaucug

SEQ ID NO: 3154387 - RNA, 19 nt, Artificial Sequence
  Description of Artificial Sequence: Synthetic oligonucleotide
aauagaaacgcacaccagg

SEQ ID NO: 3154388 - RNA, 19 nt, Artificial Sequence
  Description of Artificial Sequence: Synthetic oligonucleotide
auagaaguaaauagaaacg

SEQ ID NO: 3154389 - RNA, 19 nt, Artificial Sequence
  Description of Artificial Sequence: Synthetic oligonucleotide
uuuuagucucugagggcug

SEQ ID NO: 3154390 - RNA, 19 nt, Artificial Sequence
  Description of Artificial Sequence: Synthetic oligonucleotide
uugccuguccauuuucaag

SEQ ID NO: 3154391 - RNA, 19 nt, Artificial Sequence
  Description of Artificial Sequence: Synthetic oligonucleotide
uucgaaaauagcuuaaggc

SEQ ID NO: 3154392 - RNA, 19 nt, Artificial Sequence
  Description of Artificial Sequence: Synthetic oligonucleotide
uuccgcuuuuaaucuaucc

SEQ ID NO: 3154393 - RNA, 19 nt, Artificial Sequence
  Description of Artificial Sequence: Synthetic oligonucleotide
aauggaaugggaaguugga

SEQ ID NO: 3154394 - RNA, 19 nt, Artificial Sequence
  Description of Artificial Sequence: Synthetic oligonucleotide
aguuggagccucuggauau

SEQ ID NO: 3154395 - RNA, 19 nt, Artificial Sequence
  Description of Artificial Sequence: Synthetic oligonucleotide
ggaaaggagagaccucguu

SEQ ID NO: 3154396 - RNA, 19 nt, Artificial Sequence
  Description of Artificial Sequence: Synthetic oligonucleotide
gaaaggagagaccucguuu

SEQ ID NO: 3154397 - RNA, 19 nt, Artificial Sequence
  Description of Artificial Sequence: Synthetic oligonucleotide
cugcaauggaagggaacga

SEQ ID NO: 3154398 - RNA, 19 nt, Artificial Sequence
  Description of Artificial Sequence: Synthetic oligonucleotide
aggccaucacgagagauca

SEQ ID NO: 3154399 - RNA, 19 nt, Artificial Sequence
  Description of Artificial Sequence: Synthetic oligonucleotide
aucacgagagaucaaugca

SEQ ID NO: 3154400 - RNA, 19 nt, Artificial Sequence
  Description of Artificial Sequence: Synthetic oligonucleotide
uuccggagcuacaccuucu

SEQ ID NO: 3154401 - RNA, 19 nt, Artificial Sequence
  Description of Artificial Sequence: Synthetic oligonucleotide
uccggagcuacaccuucua

SEQ ID NO: 3154402 - RNA, 19 nt, Artificial Sequence
  Description of Artificial Sequence: Synthetic oligonucleotide
acaccuucuaccgcuacca

SEQ ID NO: 3154403 - RNA, 19 nt, Artificial Sequence
  Description of Artificial Sequence: Synthetic oligonucleotide
acgacaucaacaagcggua

SEQ ID NO: 3154404 - RNA, 19 nt, Artificial Sequence
  Description of Artificial Sequence: Synthetic oligonucleotide
uguucgacagcggcauuaa

SEQ ID NO: 3154405 - RNA, 19 nt, Artificial Sequence
  Description of Artificial Sequence: Synthetic oligonucleotide
uggguuucgguuacugcau

SEQ ID NO: 3154406 - RNA, 19 nt, Artificial Sequence
  Description of Artificial Sequence: Synthetic oligonucleotide
uucgguuacugcauggcca

SEQ ID NO: 3154407 - RNA, 19 nt, Artificial Sequence
  Description of Artificial Sequence: Synthetic oligonucleotide
acaauguuuacaugaagua

SEQ ID NO: 3154408 - RNA, 19 nt, Artificial Sequence
  Description of Artificial Sequence: Synthetic oligonucleotide
gguggggcauuuaguggua

SEQ ID NO: 3154409 - RNA, 19 nt, Artificial Sequence
  Description of Artificial Sequence: Synthetic oligonucleotide
ggggcauuuagugguacga

SEQ ID NO: 3154410 - RNA, 19 nt, Artificial Sequence
  Description of Artificial Sequence: Synthetic oligonucleotide
auuuagugguacgacgcuu

SEQ ID NO: 3154411 - RNA, 19 nt, Artificial Sequence
  Description of Artificial Sequence: Synthetic oligonucleotide
uuagugguacgacgcuucu

SEQ ID NO: 3154412 - RNA, 19 nt, Artificial Sequence
  Description of Artificial Sequence: Synthetic oligonucleotide
uagugguacgacgcuucuu

SEQ ID NO: 3154413 - RNA, 19 nt, Artificial Sequence
  Description of Artificial Sequence: Synthetic oligonucleotide
aaugcauugcugugagagu

SEQ ID NO: 3154414 - RNA, 19 nt, Artificial Sequence
  Description of Artificial Sequence: Synthetic oligonucleotide
uccaacuucccauuccauu

SEQ ID NO: 3154415 - RNA, 19 nt, Artificial Sequence
  Description of Artificial Sequence: Synthetic oligonucleotide
auauccagaggcuccaacu

SEQ ID NO: 3154416 - RNA, 19 nt, Artificial Sequence
  Description of Artificial Sequence: Synthetic oligonucleotide
aacgaggucucuccuuucc

SEQ ID NO: 3154417 - RNA, 19 nt, Artificial Sequence
  Description of Artificial Sequence: Synthetic oligonucleotide
aaacgaggucucuccuuuc

SEQ ID NO: 3154418 - RNA, 19 nt, Artificial Sequence
  Description of Artificial Sequence: Synthetic oligonucleotide
ucguucccuuccauugcag

SEQ ID NO: 3154419 - RNA, 19 nt, Artificial Sequence
  Description of Artificial Sequence: Synthetic oligonucleotide
ugaucucucgugauggccu

SEQ ID NO: 3154420 - RNA, 19 nt, Artificial Sequence
  Description of Artificial Sequence: Synthetic oligonucleotide
ugcauugaucucucgugau

SEQ ID NO: 3154421 - RNA, 19 nt, Artificial Sequence
  Description of Artificial Sequence: Synthetic oligonucleotide
agaagguguagcuccggaa

SEQ ID NO: 3154422 - RNA, 19 nt, Artificial Sequence
  Description of Artificial Sequence: Synthetic oligonucleotide
uagaagguguagcuccgga

SEQ ID NO: 3154423 - RNA, 19 nt, Artificial Sequence
  Description of Artificial Sequence: Synthetic oligonucleotide
ugguagcgguagaaggugu

SEQ ID NO: 3154424 - RNA, 19 nt, Artificial Sequence
  Description of Artificial Sequence: Synthetic oligonucleotide
uaccgcuuguugaugucgu

SEQ ID NO: 3154425 - RNA, 19 nt, Artificial Sequence
  Description of Artificial Sequence: Synthetic oligonucleotide
uuaaugccgcugucgaaca

SEQ ID NO: 3154426 - RNA, 19 nt, Artificial Sequence
  Description of Artificial Sequence: Synthetic oligonucleotide
augcaguaaccgaaaccca

SEQ ID NO: 3154427 - RNA, 19 nt, Artificial Sequence
  Description of Artificial Sequence: Synthetic oligonucleotide
uggccaugcaguaaccgaa

SEQ ID NO: 3154428 - RNA, 19 nt, Artificial Sequence
  Description of Artificial Sequence: Synthetic oligonucleotide
uacuucauguaaacauugu

SEQ ID NO: 3154429 - RNA, 19 nt, Artificial Sequence
  Description of Artificial Sequence: Synthetic oligonucleotide
uaccacuaaaugccccacc

SEQ ID NO: 3154430 - RNA, 19 nt, Artificial Sequence
  Description of Artificial Sequence: Synthetic oligonucleotide
agcgucguaccacuaaaug

SEQ ID NO: 3154431 - RNA, 19 nt, Artificial Sequence
  Description of Artificial Sequence: Synthetic oligonucleotide
aagcgucguaccacuaaau

SEQ ID NO: 3154432 - RNA, 19 nt, Artificial Sequence
  Description of Artificial Sequence: Synthetic oligonucleotide
agaagcgucguaccacuaa

SEQ ID NO: 3154433 - RNA, 19 nt, Artificial Sequence
  Description of Artificial Sequence: Synthetic oligonucleotide
aagaagcgucguaccacua

SEQ ID NO: 3154434 - RNA, 19 nt, Artificial Sequence
  Description of Artificial Sequence: Synthetic oligonucleotide
acucucacagcaaugcauu

SEQ ID NO: 3154435 - RNA, 19 nt, Artificial Sequence
  Description of Artificial Sequence: Synthetic oligonucleotide
ggacgguacuaccagauaa

SEQ ID NO: 3154436 - RNA, 19 nt, Artificial Sequence
  Description of Artificial Sequence: Synthetic oligonucleotide
gacgguacuaccagauaaa

SEQ ID NO: 3154437 - RNA, 19 nt, Artificial Sequence
  Description of Artificial Sequence: Synthetic oligonucleotide
ggguuuaacugcgaaagca

SEQ ID NO: 3154438 - RNA, 19 nt, Artificial Sequence
  Description of Artificial Sequence: Synthetic oligonucleotide
gguuuaacugcgaaagcaa

SEQ ID NO: 3154439 - RNA, 19 nt, Artificial Sequence
  Description of Artificial Sequence: Synthetic oligonucleotide
ccgaguaggggagacuuau

SEQ ID NO: 3154440 - RNA, 19 nt, Artificial Sequence
  Description of Artificial Sequence: Synthetic oligonucleotide
ccugcauacaacuagcacu

SEQ ID NO: 3154441 - RNA, 19 nt, Artificial Sequence
  Description of Artificial Sequence: Synthetic oligonucleotide
gugggauaaacagcacgau

SEQ ID NO: 3154442 - RNA, 19 nt, Artificial Sequence
  Description of Artificial Sequence: Synthetic oligonucleotide
gggauaaacagcacgauau

SEQ ID NO: 3154443 - RNA, 19 nt, Artificial Sequence
  Description of Artificial Sequence: Synthetic oligonucleotide
caggauuccgaaacucgua

SEQ ID NO: 3154444 - RNA, 19 nt, Artificial Sequence
  Description of Artificial Sequence: Synthetic oligonucleotide
cacuggaaggaagcuacca

SEQ ID NO: 3154445 - RNA, 19 nt, Artificial Sequence
  Description of Artificial Sequence: Synthetic oligonucleotide
cuggauuccguguugagua

SEQ ID NO: 3154446 - RNA, 19 nt, Artificial Sequence
  Description of Artificial Sequence: Synthetic oligonucleotide
guuucugacgucaagguca

SEQ ID NO: 3154447 - RNA, 19 nt, Artificial Sequence
  Description of Artificial Sequence: Synthetic oligonucleotide
ggaacgaccuaucucuuua

SEQ ID NO: 3154448 - RNA, 19 nt, Artificial Sequence
  Description of Artificial Sequence: Synthetic oligonucleotide
cucaggauaccgacugacu

SEQ ID NO: 3154449 - RNA, 19 nt, Artificial Sequence
  Description of Artificial Sequence: Synthetic oligonucleotide
ggcccuucugcuacuaagu

SEQ ID NO: 3154450 - RNA, 19 nt, Artificial Sequence
  Description of Artificial Sequence: Synthetic oligonucleotide
gagucuucacaacguauca

SEQ ID NO: 3154451 - RNA, 19 nt, Artificial Sequence
  Description of Artificial Sequence: Synthetic oligonucleotide
gaccuaagcuuuguugaca

SEQ ID NO: 3154452 - RNA, 19 nt, Artificial Sequence
  Description of Artificial Sequence: Synthetic oligonucleotide
gagguggaccccguuaaau

SEQ ID NO: 3154453 - RNA, 19 nt, Artificial Sequence
  Description of Artificial Sequence: Synthetic oligonucleotide
ggugagagucuacaguguu

SEQ ID NO: 3154454 - RNA, 19 nt, Artificial Sequence
  Description of Artificial Sequence: Synthetic oligonucleotide
ggccuugacuucucggaua

SEQ ID NO: 3154455 - RNA, 19 nt, Artificial Sequence
  Description of Artificial Sequence: Synthetic oligonucleotide
ccaccauuacgggcuauaa

SEQ ID NO: 3154456 - RNA, 19 nt, Artificial Sequence
  Description of Artificial Sequence: Synthetic oligonucleotide
cgggcuauaagauucggca

SEQ ID NO: 3154457 - RNA, 19 nt, Artificial Sequence
  Description of Artificial Sequence: Synthetic oligonucleotide
gggcuauaagauucggcau

SEQ ID NO: 3154458 - RNA, 19 nt, Artificial Sequence
  Description of Artificial Sequence: Synthetic oligonucleotide
cccagaugcaaguuaccga

SEQ ID NO: 3154459 - RNA, 19 nt, Artificial Sequence
  Description of Artificial Sequence: Synthetic oligonucleotide
gccccgauguuaggacuua

SEQ ID NO: 3154460 - RNA, 19 nt, Artificial Sequence
  Description of Artificial Sequence: Synthetic oligonucleotide
guuaggacuuacacuauca

SEQ ID NO: 3154461 - RNA, 19 nt, Artificial Sequence
  Description of Artificial Sequence: Synthetic oligonucleotide
gaaccagggaccgaauaca

SEQ ID NO: 3154462 - RNA, 19 nt, Artificial Sequence
  Description of Artificial Sequence: Synthetic oligonucleotide
cucaugagaccacaugcua

SEQ ID NO: 3154463 - RNA, 19 nt, Artificial Sequence
  Description of Artificial Sequence: Synthetic oligonucleotide
gacuuuucucacgauuggu

SEQ ID NO: 3154464 - RNA, 19 nt, Artificial Sequence
  Description of Artificial Sequence: Synthetic oligonucleotide
uuaucugguaguaccgucc

SEQ ID NO: 3154465 - RNA, 19 nt, Artificial Sequence
  Description of Artificial Sequence: Synthetic oligonucleotide
uuuaucugguaguaccguc

SEQ ID NO: 3154466 - RNA, 19 nt, Artificial Sequence
  Description of Artificial Sequence: Synthetic oligonucleotide
ugcuuucgcaguuaaaccc

SEQ ID NO: 3154467 - RNA, 19 nt, Artificial Sequence
  Description of Artificial Sequence: Synthetic oligonucleotide
uugcuuucgcaguuaaacc

SEQ ID NO: 3154468 - RNA, 19 nt, Artificial Sequence
  Description of Artificial Sequence: Synthetic oligonucleotide
auaagucuccccuacucgg

SEQ ID NO: 3154469 - RNA, 19 nt, Artificial Sequence
  Description of Artificial Sequence: Synthetic oligonucleotide
agugcuaguuguaugcagg

SEQ ID NO: 3154470 - RNA, 19 nt, Artificial Sequence
  Description of Artificial Sequence: Synthetic oligonucleotide
aucgugcuguuuaucccac

SEQ ID NO: 3154471 - RNA, 19 nt, Artificial Sequence
  Description of Artificial Sequence: Synthetic oligonucleotide
auaucgugcuguuuauccc

SEQ ID NO: 3154472 - RNA, 19 nt, Artificial Sequence
  Description of Artificial Sequence: Synthetic oligonucleotide
uacgaguuucggaauccug

SEQ ID NO: 3154473 - RNA, 19 nt, Artificial Sequence
  Description of Artificial Sequence: Synthetic oligonucleotide
ugguagcuuccuuccagug

SEQ ID NO: 3154474 - RNA, 19 nt, Artificial Sequence
  Description of Artificial Sequence: Synthetic oligonucleotide
uacucaacacggaauccag

SEQ ID NO: 3154475 - RNA, 19 nt, Artificial Sequence
  Description of Artificial Sequence: Synthetic oligonucleotide
ugaccuugacgucagaaac

SEQ ID NO: 3154476 - RNA, 19 nt, Artificial Sequence
  Description of Artificial Sequence: Synthetic oligonucleotide
uaaagagauaggucguucc

SEQ ID NO: 3154477 - RNA, 19 nt, Artificial Sequence
  Description of Artificial Sequence: Synthetic oligonucleotide
agucagucgguauccugag

SEQ ID NO: 3154478 - RNA, 19 nt, Artificial Sequence
  Description of Artificial Sequence: Synthetic oligonucleotide
acuuaguagcagaagggcc

SEQ ID NO: 3154479 - RNA, 19 nt, Artificial Sequence
  Description of Artificial Sequence: Synthetic oligonucleotide
ugauacguugugaagacuc

SEQ ID NO: 3154480 - RNA, 19 nt, Artificial Sequence
  Description of Artificial Sequence: Synthetic oligonucleotide
ugucaacaaagcuuagguc

SEQ ID NO: 3154481 - RNA, 19 nt, Artificial Sequence
  Description of Artificial Sequence: Synthetic oligonucleotide
auuuaacgggguccaccuc

SEQ ID NO: 3154482 - RNA, 19 nt, Artificial Sequence
  Description of Artificial Sequence: Synthetic oligonucleotide
aacacuguagacucucacc

SEQ ID NO: 3154483 - RNA, 19 nt, Artificial Sequence
  Description of Artificial Sequence: Synthetic oligonucleotide
uauccgagaagucaaggcc

SEQ ID NO: 3154484 - RNA, 19 nt, Artificial Sequence
  Description of Artificial Sequence: Synthetic oligonucleotide
uuauagcccguaauggugg

SEQ ID NO: 3154485 - RNA, 19 nt, Artificial Sequence
  Description of Artificial Sequence: Synthetic oligonucleotide
ugccgaaucuuauagcccg

SEQ ID NO: 3154486 - RNA, 19 nt, Artificial Sequence
  Description of Artificial Sequence: Synthetic oligonucleotide
augccgaaucuuauagccc

SEQ ID NO: 3154487 - RNA, 19 nt, Artificial Sequence
  Description of Artificial Sequence: Synthetic oligonucleotide
ucgguaacuugcaucuggg

SEQ ID NO: 3154488 - RNA, 19 nt, Artificial Sequence
  Description of Artificial Sequence: Synthetic oligonucleotide
uaaguccuaacaucggggc

SEQ ID NO: 3154489 - RNA, 19 nt, Artificial Sequence
  Description of Artificial Sequence: Synthetic oligonucleotide
ugauaguguaaguccuaac

SEQ ID NO: 3154490 - RNA, 19 nt, Artificial Sequence
  Description of Artificial Sequence: Synthetic oligonucleotide
uguauucggucccugguuc

SEQ ID NO: 3154491 - RNA, 19 nt, Artificial Sequence
  Description of Artificial Sequence: Synthetic oligonucleotide
uagcauguggucucaugag

SEQ ID NO: 3154492 - RNA, 19 nt, Artificial Sequence
  Description of Artificial Sequence: Synthetic oligonucleotide
accaaucgugagaaaaguc

SEQ ID NO: 3154493 - RNA, 19 nt, Artificial Sequence
  Description of Artificial Sequence: Synthetic oligonucleotide
uauucaguaguacggauuu

SEQ ID NO: 3154494 - RNA, 19 nt, Artificial Sequence
  Description of Artificial Sequence: Synthetic oligonucleotide
uacggauuucuauuaaguu

SEQ ID NO: 3154495 - RNA, 19 nt, Artificial Sequence
  Description of Artificial Sequence: Synthetic oligonucleotide
aggaguauaccggaacaau

SEQ ID NO: 3154496 - RNA, 19 nt, Artificial Sequence
  Description of Artificial Sequence: Synthetic oligonucleotide
ugaccaauggcuaagugaa

SEQ ID NO: 3154497 - RNA, 19 nt, Artificial Sequence
  Description of Artificial Sequence: Synthetic oligonucleotide
guguaaugauaugugcaua

SEQ ID NO: 3154498 - RNA, 19 nt, Artificial Sequence
  Description of Artificial Sequence: Synthetic oligonucleotide
guugcaucgaggcaaguuu

SEQ ID NO: 3154499 - RNA, 19 nt, Artificial Sequence
  Description of Artificial Sequence: Synthetic oligonucleotide
cucaagaagcccuagauuu

SEQ ID NO: 3154500 - RNA, 19 nt, Artificial Sequence
  Description of Artificial Sequence: Synthetic oligonucleotide
gacgcuacguguacuacua

SEQ ID NO: 3154501 - RNA, 19 nt, Artificial Sequence
  Description of Artificial Sequence: Synthetic oligonucleotide
auguguauacguaggaauu

SEQ ID NO: 3154502 - RNA, 19 nt, Artificial Sequence
  Description of Artificial Sequence: Synthetic oligonucleotide
uguguauacguaggaauuu

SEQ ID NO: 3154503 - RNA, 19 nt, Artificial Sequence
  Description of Artificial Sequence: Synthetic oligonucleotide
guaccauauccggcuauuu

SEQ ID NO: 3154504 - RNA, 19 nt, Artificial Sequence
  Description of Artificial Sequence: Synthetic oligonucleotide
uaccauauccggcuauuua

SEQ ID NO: 3154505 - RNA, 19 nt, Artificial Sequence
  Description of Artificial Sequence: Synthetic oligonucleotide
uuagcaugcugccguaauu

SEQ ID NO: 3154506 - RNA, 19 nt, Artificial Sequence
  Description of Artificial Sequence: Synthetic oligonucleotide
auaaaaguugucggugauu

SEQ ID NO: 3154507 - RNA, 19 nt, Artificial Sequence
  Description of Artificial Sequence: Synthetic oligonucleotide
acgccaggcaacaucuuaa

SEQ ID NO: 3154508 - RNA, 19 nt, Artificial Sequence
  Description of Artificial Sequence: Synthetic oligonucleotide
caggcaacaucuuaacauu

SEQ ID NO: 3154509 - RNA, 19 nt, Artificial Sequence
  Description of Artificial Sequence: Synthetic oligonucleotide
uucuuauuaggucuucaau

SEQ ID NO: 3154510 - RNA, 19 nt, Artificial Sequence
  Description of Artificial Sequence: Synthetic oligonucleotide
gaccuuacacguuguauua

SEQ ID NO: 3154511 - RNA, 19 nt, Artificial Sequence
  Description of Artificial Sequence: Synthetic oligonucleotide
aaauuuacacuugcucgau

SEQ ID NO: 3154512 - RNA, 19 nt, Artificial Sequence
  Description of Artificial Sequence: Synthetic oligonucleotide
agcauuaaugguaaggauu

SEQ ID NO: 3154513 - RNA, 19 nt, Artificial Sequence
  Description of Artificial Sequence: Synthetic oligonucleotide
uuugggauccguuggucaa

SEQ ID NO: 3154514 - RNA, 19 nt, Artificial Sequence
  Description of Artificial Sequence: Synthetic oligonucleotide
aucacauucacgauucuaa

SEQ ID NO: 3154515 - RNA, 19 nt, Artificial Sequence
  Description of Artificial Sequence: Synthetic oligonucleotide
uucacgauucuaacuucua

SEQ ID NO: 3154516 - RNA, 19 nt, Artificial Sequence
  Description of Artificial Sequence: Synthetic oligonucleotide
ucacgauucuaacuucuaa

SEQ ID NO: 3154517 - RNA, 19 nt, Artificial Sequence
  Description of Artificial Sequence: Synthetic oligonucleotide
gacguuaacucuuacccuu

SEQ ID NO: 3154518 - RNA, 19 nt, Artificial Sequence
  Description of Artificial Sequence: Synthetic oligonucleotide
uuuugaauguuucgauguu

SEQ ID NO: 3154519 - RNA, 19 nt, Artificial Sequence
  Description of Artificial Sequence: Synthetic oligonucleotide
uaauuagcuugaaacgcau

SEQ ID NO: 3154520 - RNA, 19 nt, Artificial Sequence
  Description of Artificial Sequence: Synthetic oligonucleotide
auugguagccccacucaaa

SEQ ID NO: 3154521 - RNA, 19 nt, Artificial Sequence
  Description of Artificial Sequence: Synthetic oligonucleotide
gcaucagauguuucggcuu

SEQ ID NO: 3154522 - RNA, 19 nt, Artificial Sequence
  Description of Artificial Sequence: Synthetic oligonucleotide
cccuuuaucucuuaguguu

SEQ ID NO: 3154523 - RNA, 19 nt, Artificial Sequence
  Description of Artificial Sequence: Synthetic oligonucleotide
aaauccguacuacugaaua

SEQ ID NO: 3154524 - RNA, 19 nt, Artificial Sequence
  Description of Artificial Sequence: Synthetic oligonucleotide
aacuuaauagaaauccgua

SEQ ID NO: 3154525 - RNA, 19 nt, Artificial Sequence
  Description of Artificial Sequence: Synthetic oligonucleotide
auuguuccgguauacuccu

SEQ ID NO: 3154526 - RNA, 19 nt, Artificial Sequence
  Description of Artificial Sequence: Synthetic oligonucleotide
uucacuuagccauugguca

SEQ ID NO: 3154527 - RNA, 19 nt, Artificial Sequence
  Description of Artificial Sequence: Synthetic oligonucleotide
uaugcacauaucauuacac

SEQ ID NO: 3154528 - RNA, 19 nt, Artificial Sequence
  Description of Artificial Sequence: Synthetic oligonucleotide
aaacuugccucgaugcaac

SEQ ID NO: 3154529 - RNA, 19 nt, Artificial Sequence
  Description of Artificial Sequence: Synthetic oligonucleotide
aaaucuagggcuucuugag

SEQ ID NO: 3154530 - RNA, 19 nt, Artificial Sequence
  Description of Artificial Sequence: Synthetic oligonucleotide
uaguaguacacguagcguc

SEQ ID NO: 3154531 - RNA, 19 nt, Artificial Sequence
  Description of Artificial Sequence: Synthetic oligonucleotide
aauuccuacguauacacau

SEQ ID NO: 3154532 - RNA, 19 nt, Artificial Sequence
  Description of Artificial Sequence: Synthetic oligonucleotide
aaauuccuacguauacaca

SEQ ID NO: 3154533 - RNA, 19 nt, Artificial Sequence
  Description of Artificial Sequence: Synthetic oligonucleotide
aaauagccggauaugguac

SEQ ID NO: 3154534 - RNA, 19 nt, Artificial Sequence
  Description of Artificial Sequence: Synthetic oligonucleotide
uaaauagccggauauggua

SEQ ID NO: 3154535 - RNA, 19 nt, Artificial Sequence
  Description of Artificial Sequence: Synthetic oligonucleotide
aauuacggcagcaugcuaa

SEQ ID NO: 3154536 - RNA, 19 nt, Artificial Sequence
  Description of Artificial Sequence: Synthetic oligonucleotide
aaucaccgacaacuuuuau

SEQ ID NO: 3154537 - RNA, 19 nt, Artificial Sequence
  Description of Artificial Sequence: Synthetic oligonucleotide
uuaagauguugccuggcgu

SEQ ID NO: 3154538 - RNA, 19 nt, Artificial Sequence
  Description of Artificial Sequence: Synthetic oligonucleotide
aauguuaagauguugccug

SEQ ID NO: 3154539 - RNA, 19 nt, Artificial Sequence
  Description of Artificial Sequence: Synthetic oligonucleotide
auugaagaccuaauaagaa

SEQ ID NO: 3154540 - RNA, 19 nt, Artificial Sequence
  Description of Artificial Sequence: Synthetic oligonucleotide
uaauacaacguguaagguc

SEQ ID NO: 3154541 - RNA, 19 nt, Artificial Sequence
  Description of Artificial Sequence: Synthetic oligonucleotide
aucgagcaaguguaaauuu

SEQ ID NO: 3154542 - RNA, 19 nt, Artificial Sequence
  Description of Artificial Sequence: Synthetic oligonucleotide
aauccuuaccauuaaugcu

SEQ ID NO: 3154543 - RNA, 19 nt, Artificial Sequence
  Description of Artificial Sequence: Synthetic oligonucleotide
uugaccaacggaucccaaa

SEQ ID NO: 3154544 - RNA, 19 nt, Artificial Sequence
  Description of Artificial Sequence: Synthetic oligonucleotide
uuagaaucgugaaugugau

SEQ ID NO: 3154545 - RNA, 19 nt, Artificial Sequence
  Description of Artificial Sequence: Synthetic oligonucleotide
uagaaguuagaaucgugaa

SEQ ID NO: 3154546 - RNA, 19 nt, Artificial Sequence
  Description of Artificial Sequence: Synthetic oligonucleotide
uuagaaguuagaaucguga

SEQ ID NO: 3154547 - RNA, 19 nt, Artificial Sequence
  Description of Artificial Sequence: Synthetic oligonucleotide
aaggguaagaguuaacguc

SEQ ID NO: 3154548 - RNA, 19 nt, Artificial Sequence
  Description of Artificial Sequence: Synthetic oligonucleotide
aacaucgaaacauucaaaa

SEQ ID NO: 3154549 - RNA, 19 nt, Artificial Sequence
  Description of Artificial Sequence: Synthetic oligonucleotide
augcguuucaagcuaauua

SEQ ID NO: 3154550 - RNA, 19 nt, Artificial Sequence
  Description of Artificial Sequence: Synthetic oligonucleotide
uuugaguggggcuaccaau

SEQ ID NO: 3154551 - RNA, 19 nt, Artificial Sequence
  Description of Artificial Sequence: Synthetic oligonucleotide
aagccgaaacaucugaugc

SEQ ID NO: 3154552 - RNA, 19 nt, Artificial Sequence
  Description of Artificial Sequence: Synthetic oligonucleotide
aacacuaagagauaaaggg

SEQ ID NO: 3154553 - RNA, 19 nt, Artificial Sequence
  Description of Artificial Sequence: Synthetic oligonucleotide
ggcagaugaacuuacccuu

SEQ ID NO: 3154554 - RNA, 19 nt, Artificial Sequence
  Description of Artificial Sequence: Synthetic oligonucleotide
cagaugaacuuacccuugu

SEQ ID NO: 3154555 - RNA, 19 nt, Artificial Sequence
  Description of Artificial Sequence: Synthetic oligonucleotide
ggagaaagccgucuuaacu

SEQ ID NO: 3154556 - RNA, 19 nt, Artificial Sequence
  Description of Artificial Sequence: Synthetic oligonucleotide
gagaaagccgucuuaacuu

SEQ ID NO: 3154557 - RNA, 19 nt, Artificial Sequence
  Description of Artificial Sequence: Synthetic oligonucleotide
ccgucuuaacuugguccaa

SEQ ID NO: 3154558 - RNA, 19 nt, Artificial Sequence
  Description of Artificial Sequence: Synthetic oligonucleotide
gugaaauacaguccugacu

SEQ ID NO: 3154559 - RNA, 19 nt, Artificial Sequence
  Description of Artificial Sequence: Synthetic oligonucleotide
caagcugcugauugucuca

SEQ ID NO: 3154560 - RNA, 19 nt, Artificial Sequence
  Description of Artificial Sequence: Synthetic oligonucleotide
gcugauugucucaaaccca

SEQ ID NO: 3154561 - RNA, 19 nt, Artificial Sequence
  Description of Artificial Sequence: Synthetic oligonucleotide
gggcaugcacggaauaaaa

SEQ ID NO: 3154562 - RNA, 19 nt, Artificial Sequence
  Description of Artificial Sequence: Synthetic oligonucleotide
guagugaagaugauccuaa

SEQ ID NO: 3154563 - RNA, 19 nt, Artificial Sequence
  Description of Artificial Sequence: Synthetic oligonucleotide
gaagaugauccuaaaaccu

SEQ ID NO: 3154564 - RNA, 19 nt, Artificial Sequence
  Description of Artificial Sequence: Synthetic oligonucleotide
cuuaauguugcacuuucca

SEQ ID NO: 3154565 - RNA, 19 nt, Artificial Sequence
  Description of Artificial Sequence: Synthetic oligonucleotide
gguguauguaucucaacua

SEQ ID NO: 3154566 - RNA, 19 nt, Artificial Sequence
  Description of Artificial Sequence: Synthetic oligonucleotide
ccaccuaguauuguacagu

SEQ ID NO: 3154567 - RNA, 19 nt, Artificial Sequence
  Description of Artificial Sequence: Synthetic oligonucleotide
guggugugacaucaaucca

SEQ ID NO: 3154568 - RNA, 19 nt, Artificial Sequence
  Description of Artificial Sequence: Synthetic oligonucleotide
caucaauccagcauugaaa

SEQ ID NO: 3154569 - RNA, 19 nt, Artificial Sequence
  Description of Artificial Sequence: Synthetic oligonucleotide
guuuaaacauuagcccaga

SEQ ID NO: 3154570 - RNA, 19 nt, Artificial Sequence
  Description of Artificial Sequence: Synthetic oligonucleotide
cacaggauugucaaacuau

SEQ ID NO: 3154571 - RNA, 19 nt, Artificial Sequence
  Description of Artificial Sequence: Synthetic oligonucleotide
caaacuauuugacaaaccu

SEQ ID NO: 3154572 - RNA, 19 nt, Artificial Sequence
  Description of Artificial Sequence: Synthetic oligonucleotide
cugccagcugaauagcuua

SEQ ID NO: 3154573 - RNA, 19 nt, Artificial Sequence
  Description of Artificial Sequence: Synthetic oligonucleotide
cuguugguagguccaaaua

SEQ ID NO: 3154574 - RNA, 19 nt, Artificial Sequence
  Description of Artificial Sequence: Synthetic oligonucleotide
cuucuuuggaacuugugua

SEQ ID NO: 3154575 - RNA, 19 nt, Artificial Sequence
  Description of Artificial Sequence: Synthetic oligonucleotide
ggaacuuguguauaccuuu

SEQ ID NO: 3154576 - RNA, 19 nt, Artificial Sequence
  Description of Artificial Sequence: Synthetic oligonucleotide
gaacuuguguauaccuuuu

SEQ ID NO: 3154577 - RNA, 19 nt, Artificial Sequence
  Description of Artificial Sequence: Synthetic oligonucleotide
guacuguaucagacuaguu

SEQ ID NO: 3154578 - RNA, 19 nt, Artificial Sequence
  Description of Artificial Sequence: Synthetic oligonucleotide
guuuauauaugcaacaaga

SEQ ID NO: 3154579 - RNA, 19 nt, Artificial Sequence
  Description of Artificial Sequence: Synthetic oligonucleotide
aaggguaaguucaucugcc

SEQ ID NO: 3154580 - RNA, 19 nt, Artificial Sequence
  Description of Artificial Sequence: Synthetic oligonucleotide
acaaggguaaguucaucug

SEQ ID NO: 3154581 - RNA, 19 nt, Artificial Sequence
  Description of Artificial Sequence: Synthetic oligonucleotide
aguuaagacggcuuucucc

SEQ ID NO: 3154582 - RNA, 19 nt, Artificial Sequence
  Description of Artificial Sequence: Synthetic oligonucleotide
aaguuaagacggcuuucuc

SEQ ID NO: 3154583 - RNA, 19 nt, Artificial Sequence
  Description of Artificial Sequence: Synthetic oligonucleotide
uuggaccaaguuaagacgg

SEQ ID NO: 3154584 - RNA, 19 nt, Artificial Sequence
  Description of Artificial Sequence: Synthetic oligonucleotide
agucaggacuguauuucac

SEQ ID NO: 3154585 - RNA, 19 nt, Artificial Sequence
  Description of Artificial Sequence: Synthetic oligonucleotide
ugagacaaucagcagcuug

SEQ ID NO: 3154586 - RNA, 19 nt, Artificial Sequence
  Description of Artificial Sequence: Synthetic oligonucleotide
uggguuugagacaaucagc

SEQ ID NO: 3154587 - RNA, 19 nt, Artificial Sequence
  Description of Artificial Sequence: Synthetic oligonucleotide
uuuuauuccgugcaugccc

SEQ ID NO: 3154588 - RNA, 19 nt, Artificial Sequence
  Description of Artificial Sequence: Synthetic oligonucleotide
uuaggaucaucuucacuac

SEQ ID NO: 3154589 - RNA, 19 nt, Artificial Sequence
  Description of Artificial Sequence: Synthetic oligonucleotide
agguuuuaggaucaucuuc

SEQ ID NO: 3154590 - RNA, 19 nt, Artificial Sequence
  Description of Artificial Sequence: Synthetic oligonucleotide
uggaaagugcaacauuaag

SEQ ID NO: 3154591 - RNA, 19 nt, Artificial Sequence
  Description of Artificial Sequence: Synthetic oligonucleotide
uaguugagauacauacacc

SEQ ID NO: 3154592 - RNA, 19 nt, Artificial Sequence
  Description of Artificial Sequence: Synthetic oligonucleotide
acuguacaauacuaggugg

SEQ ID NO: 3154593 - RNA, 19 nt, Artificial Sequence
  Description of Artificial Sequence: Synthetic oligonucleotide
uggauugaugucacaccac

SEQ ID NO: 3154594 - RNA, 19 nt, Artificial Sequence
  Description of Artificial Sequence: Synthetic oligonucleotide
uuucaaugcuggauugaug

SEQ ID NO: 3154595 - RNA, 19 nt, Artificial Sequence
  Description of Artificial Sequence: Synthetic oligonucleotide
ucugggcuaauguuuaaac

SEQ ID NO: 3154596 - RNA, 19 nt, Artificial Sequence
  Description of Artificial Sequence: Synthetic oligonucleotide
auaguuugacaauccugug

SEQ ID NO: 3154597 - RNA, 19 nt, Artificial Sequence
  Description of Artificial Sequence: Synthetic oligonucleotide
agguuugucaaauaguuug

SEQ ID NO: 3154598 - RNA, 19 nt, Artificial Sequence
  Description of Artificial Sequence: Synthetic oligonucleotide
uaagcuauucagcuggcag

SEQ ID NO: 3154599 - RNA, 19 nt, Artificial Sequence
  Description of Artificial Sequence: Synthetic oligonucleotide
uauuuggaccuaccaacag

SEQ ID NO: 3154600 - RNA, 19 nt, Artificial Sequence
  Description of Artificial Sequence: Synthetic oligonucleotide
uacacaaguuccaaagaag

SEQ ID NO: 3154601 - RNA, 19 nt, Artificial Sequence
  Description of Artificial Sequence: Synthetic oligonucleotide
aaagguauacacaaguucc

SEQ ID NO: 3154602 - RNA, 19 nt, Artificial Sequence
  Description of Artificial Sequence: Synthetic oligonucleotide
aaaagguauacacaaguuc

SEQ ID NO: 3154603 - RNA, 19 nt, Artificial Sequence
  Description of Artificial Sequence: Synthetic oligonucleotide
aacuagucugauacaguac

SEQ ID NO: 3154604 - RNA, 19 nt, Artificial Sequence
  Description of Artificial Sequence: Synthetic oligonucleotide
ucuuguugcauauauaaac

SEQ ID NO: 3154605 - RNA, 19 nt, Artificial Sequence
  Description of Artificial Sequence: Synthetic oligonucleotide
aauacaaauuucacccuaa

SEQ ID NO: 3154606 - RNA, 19 nt, Artificial Sequence
  Description of Artificial Sequence: Synthetic oligonucleotide
ucuccauggucuagcauuu

SEQ ID NO: 3154607 - RNA, 19 nt, Artificial Sequence
  Description of Artificial Sequence: Synthetic oligonucleotide
uccagaagcaaaucagguu

SEQ ID NO: 3154608 - RNA, 19 nt, Artificial Sequence
  Description of Artificial Sequence: Synthetic oligonucleotide
gcuccagagacuaccuauu

SEQ ID NO: 3154609 - RNA, 19 nt, Artificial Sequence
  Description of Artificial Sequence: Synthetic oligonucleotide
uaccuauuguuugaaaguu

SEQ ID NO: 3154610 - RNA, 19 nt, Artificial Sequence
  Description of Artificial Sequence: Synthetic oligonucleotide
uuugggauaaucacuauaa

SEQ ID NO: 3154611 - RNA, 19 nt, Artificial Sequence
  Description of Artificial Sequence: Synthetic oligonucleotide
ggauaaucacuauaacgaa

SEQ ID NO: 3154612 - RNA, 19 nt, Artificial Sequence
  Description of Artificial Sequence: Synthetic oligonucleotide
ugaccuauaccguacagua

SEQ ID NO: 3154613 - RNA, 19 nt, Artificial Sequence
  Description of Artificial Sequence: Synthetic oligonucleotide
gucuaaagacguagaagua

SEQ ID NO: 3154614 - RNA, 19 nt, Artificial Sequence
  Description of Artificial Sequence: Synthetic oligonucleotide
agaaguagauccuccggua

SEQ ID NO: 3154615 - RNA, 19 nt, Artificial Sequence
  Description of Artificial Sequence: Synthetic oligonucleotide
gaaguagauccuccgguaa

SEQ ID NO: 3154616 - RNA, 19 nt, Artificial Sequence
  Description of Artificial Sequence: Synthetic oligonucleotide
aaaucaugagugaccuuua

SEQ ID NO: 3154617 - RNA, 19 nt, Artificial Sequence
  Description of Artificial Sequence: Synthetic oligonucleotide
ugagugaccuuuaugauuu

SEQ ID NO: 3154618 - RNA, 19 nt, Artificial Sequence
  Description of Artificial Sequence: Synthetic oligonucleotide
acacuuaccucugaucauu

SEQ ID NO: 3154619 - RNA, 19 nt, Artificial Sequence
  Description of Artificial Sequence: Synthetic oligonucleotide
uccuguaucaagucuauaa

SEQ ID NO: 3154620 - RNA, 19 nt, Artificial Sequence
  Description of Artificial Sequence: Synthetic oligonucleotide
guagaagaaccgguagaaa

SEQ ID NO: 3154621 - RNA, 19 nt, Artificial Sequence
  Description of Artificial Sequence: Synthetic oligonucleotide
cgguagaaauuuguuacau

SEQ ID NO: 3154622 - RNA, 19 nt, Artificial Sequence
  Description of Artificial Sequence: Synthetic oligonucleotide
acauaauugagaguaggau

SEQ ID NO: 3154623 - RNA, 19 nt, Artificial Sequence
  Description of Artificial Sequence: Synthetic oligonucleotide
uaaacagagcagucgagau

SEQ ID NO: 3154624 - RNA, 19 nt, Artificial Sequence
  Description of Artificial Sequence: Synthetic oligonucleotide
ucgagauucagggaauuau

SEQ ID NO: 3154625 - RNA, 19 nt, Artificial Sequence
  Description of Artificial Sequence: Synthetic oligonucleotide
cgacgauaauaccucacaa

SEQ ID NO: 3154626 - RNA, 19 nt, Artificial Sequence
  Description of Artificial Sequence: Synthetic oligonucleotide
cuaggaaaugacauacuau

SEQ ID NO: 3154627 - RNA, 19 nt, Artificial Sequence
  Description of Artificial Sequence: Synthetic oligonucleotide
uaggaaaugacauacuaua

SEQ ID NO: 3154628 - RNA, 19 nt, Artificial Sequence
  Description of Artificial Sequence: Synthetic oligonucleotide
uaugggacuuguaguauaa

SEQ ID NO: 3154629 - RNA, 19 nt, Artificial Sequence
  Description of Artificial Sequence: Synthetic oligonucleotide
uugggauccucguucugaa

SEQ ID NO: 3154630 - RNA, 19 nt, Artificial Sequence
  Description of Artificial Sequence: Synthetic oligonucleotide
acaccauucugacugaaua

SEQ ID NO: 3154631 - RNA, 19 nt, Artificial Sequence
  Description of Artificial Sequence: Synthetic oligonucleotide
agaagagauccguaugcuu

SEQ ID NO: 3154632 - RNA, 19 nt, Artificial Sequence
  Description of Artificial Sequence: Synthetic oligonucleotide
acuugaaccugauaaccuu

SEQ ID NO: 3154633 - RNA, 19 nt, Artificial Sequence
  Description of Artificial Sequence: Synthetic oligonucleotide
gacagaguccuuagauuau

SEQ ID NO: 3154634 - RNA, 19 nt, Artificial Sequence
  Description of Artificial Sequence: Synthetic oligonucleotide
uuagggugaaauuuguauu

SEQ ID NO: 3154635 - RNA, 19 nt, Artificial Sequence
  Description of Artificial Sequence: Synthetic oligonucleotide
aaaugcuagaccauggaga

SEQ ID NO: 3154636 - RNA, 19 nt, Artificial Sequence
  Description of Artificial Sequence: Synthetic oligonucleotide
aaccugauuugcuucugga

SEQ ID NO: 3154637 - RNA, 19 nt, Artificial Sequence
  Description of Artificial Sequence: Synthetic oligonucleotide
aacuuucaaacaauaggua

SEQ ID NO: 3154638 - RNA, 19 nt, Artificial Sequence
  Description of Artificial Sequence: Synthetic oligonucleotide
aacuuucaaacaauaggua

SEQ ID NO: 3154639 - RNA, 19 nt, Artificial Sequence
  Description of Artificial Sequence: Synthetic oligonucleotide
uuauagugauuaucccaaa

SEQ ID NO: 3154640 - RNA, 19 nt, Artificial Sequence
  Description of Artificial Sequence: Synthetic oligonucleotide
uucguuauagugauuaucc

SEQ ID NO: 3154641 - RNA, 19 nt, Artificial Sequence
  Description of Artificial Sequence: Synthetic oligonucleotide
uacuguacgguauagguca

SEQ ID NO: 3154642 - RNA, 19 nt, Artificial Sequence
  Description of Artificial Sequence: Synthetic oligonucleotide
uacuucuacgucuuuagac

SEQ ID NO: 3154643 - RNA, 19 nt, Artificial Sequence
  Description of Artificial Sequence: Synthetic oligonucleotide
uaccggaggaucuacuucu

SEQ ID NO: 3154644 - RNA, 19 nt, Artificial Sequence
  Description of Artificial Sequence: Synthetic oligonucleotide
uuaccggaggaucuacuuc

SEQ ID NO: 3154645 - RNA, 19 nt, Artificial Sequence
  Description of Artificial Sequence: Synthetic oligonucleotide
uaaaggucacucaugauuu

SEQ ID NO: 3154646 - RNA, 19 nt, Artificial Sequence
  Description of Artificial Sequence: Synthetic oligonucleotide
aaaucauaaaggucacuca

SEQ ID NO: 3154647 - RNA, 19 nt, Artificial Sequence
  Description of Artificial Sequence: Synthetic oligonucleotide
aaugaucagagguaagugu

SEQ ID NO: 3154648 - RNA, 19 nt, Artificial Sequence
  Description of Artificial Sequence: Synthetic oligonucleotide
uuauagacuugauacagga

SEQ ID NO: 3154649 - RNA, 19 nt, Artificial Sequence
  Description of Artificial Sequence: Synthetic oligonucleotide
uuucuaccgguucuucuac

SEQ ID NO: 3154650 - RNA, 19 nt, Artificial Sequence
  Description of Artificial Sequence: Synthetic oligonucleotide
auguaacaaauuucuaccg

SEQ ID NO: 3154651 - RNA, 19 nt, Artificial Sequence
  Description of Artificial Sequence: Synthetic oligonucleotide
auccuacucucaauuaugu

SEQ ID NO: 3154652 - RNA, 19 nt, Artificial Sequence
  Description of Artificial Sequence: Synthetic oligonucleotide
aucucgacugcucuguuua

SEQ ID NO: 3154653 - RNA, 19 nt, Artificial Sequence
  Description of Artificial Sequence: Synthetic oligonucleotide
auaauucccugaaucucga

SEQ ID NO: 3154654 - RNA, 19 nt, Artificial Sequence
  Description of Artificial Sequence: Synthetic oligonucleotide
uugugagguauuaucgucg

SEQ ID NO: 3154655 - RNA, 19 nt, Artificial Sequence
  Description of Artificial Sequence: Synthetic oligonucleotide
auaguaugucauuuccuag

SEQ ID NO: 3154656 - RNA, 19 nt, Artificial Sequence
  Description of Artificial Sequence: Synthetic oligonucleotide
uauaguaugucauuuccua

SEQ ID NO: 3154657 - RNA, 19 nt, Artificial Sequence
  Description of Artificial Sequence: Synthetic oligonucleotide
uuauacuacaagucccaua

SEQ ID NO: 3154658 - RNA, 19 nt, Artificial Sequence
  Description of Artificial Sequence: Synthetic oligonucleotide
uucagaacgaggaucccaa

SEQ ID NO: 3154659 - RNA, 19 nt, Artificial Sequence
  Description of Artificial Sequence: Synthetic oligonucleotide
uauucagucagaauggugu

SEQ ID NO: 3154660 - RNA, 19 nt, Artificial Sequence
  Description of Artificial Sequence: Synthetic oligonucleotide
aagcauacggaucucuucu

SEQ ID NO: 3154661 - RNA, 19 nt, Artificial Sequence
  Description of Artificial Sequence: Synthetic oligonucleotide
aagguuaucagguucaagu

SEQ ID NO: 3154662 - RNA, 19 nt, Artificial Sequence
  Description of Artificial Sequence: Synthetic oligonucleotide
auaaucuaaggacucuguc

SEQ ID NO: 3154663 - RNA, 19 nt, Artificial Sequence
  Description of Artificial Sequence: Synthetic oligonucleotide
guguugaucucaguccgau

SEQ ID NO: 3154664 - RNA, 19 nt, Artificial Sequence
  Description of Artificial Sequence: Synthetic oligonucleotide
uauucuuaaccgggcugau

SEQ ID NO: 3154665 - RNA, 19 nt, Artificial Sequence
  Description of Artificial Sequence: Synthetic oligonucleotide
cgggcugauuguauucguu

SEQ ID NO: 3154666 - RNA, 19 nt, Artificial Sequence
  Description of Artificial Sequence: Synthetic oligonucleotide
gggcugauuguauucguua

SEQ ID NO: 3154667 - RNA, 19 nt, Artificial Sequence
  Description of Artificial Sequence: Synthetic oligonucleotide
ggcugauuguauucguuau

SEQ ID NO: 3154668 - RNA, 19 nt, Artificial Sequence
  Description of Artificial Sequence: Synthetic oligonucleotide
augcuuucauauagccguu

SEQ ID NO: 3154669 - RNA, 19 nt, Artificial Sequence
  Description of Artificial Sequence: Synthetic oligonucleotide
uuucauauagccguuagaa

SEQ ID NO: 3154670 - RNA, 19 nt, Artificial Sequence
  Description of Artificial Sequence: Synthetic oligonucleotide
uucauauagccguuagaaa

SEQ ID NO: 3154671 - RNA, 19 nt, Artificial Sequence
  Description of Artificial Sequence: Synthetic oligonucleotide
uagaaagagaaacgggcau

SEQ ID NO: 3154672 - RNA, 19 nt, Artificial Sequence
  Description of Artificial Sequence: Synthetic oligonucleotide
cagaaaaucuuacgaaguu

SEQ ID NO: 3154673 - RNA, 19 nt, Artificial Sequence
  Description of Artificial Sequence: Synthetic oligonucleotide
aauuagguucuaggagcua

SEQ ID NO: 3154674 - RNA, 19 nt, Artificial Sequence
  Description of Artificial Sequence: Synthetic oligonucleotide
uagucaguugaagcgguuu

SEQ ID NO: 3154675 - RNA, 19 nt, Artificial Sequence
  Description of Artificial Sequence: Synthetic oligonucleotide
caguugaagcgguuuuguu

SEQ ID NO: 3154676 - RNA, 19 nt, Artificial Sequence
  Description of Artificial Sequence: Synthetic oligonucleotide
gcgguuuuguuacugcgaa

SEQ ID NO: 3154677 - RNA, 19 nt, Artificial Sequence
  Description of Artificial Sequence: Synthetic oligonucleotide
uuuuguuacugcgaaguuu

SEQ ID NO: 3154678 - RNA, 19 nt, Artificial Sequence
  Description of Artificial Sequence: Synthetic oligonucleotide
uuuguuacugcgaaguuuu

SEQ ID NO: 3154679 - RNA, 19 nt, Artificial Sequence
  Description of Artificial Sequence: Synthetic oligonucleotide
auccaaaagcucuguguaa

SEQ ID NO: 3154680 - RNA, 19 nt, Artificial Sequence
  Description of Artificial Sequence: Synthetic oligonucleotide
uccaaaagcucuguguaau

SEQ ID NO: 3154681 - RNA, 19 nt, Artificial Sequence
  Description of Artificial Sequence: Synthetic oligonucleotide
cucuguguaaugaguguuu

SEQ ID NO: 3154682 - RNA, 19 nt, Artificial Sequence
  Description of Artificial Sequence: Synthetic oligonucleotide
ugaccuugguccacuguaa

SEQ ID NO: 3154683 - RNA, 19 nt, Artificial Sequence
  Description of Artificial Sequence: Synthetic oligonucleotide
gaccuugguccacuguaaa

SEQ ID NO: 3154684 - RNA, 19 nt, Artificial Sequence
  Description of Artificial Sequence: Synthetic oligonucleotide
gaggcauccgauucaacaa

SEQ ID NO: 3154685 - RNA, 19 nt, Artificial Sequence
  Description of Artificial Sequence: Synthetic oligonucleotide
uccgauucaacaacgaaau

SEQ ID NO: 3154686 - RNA, 19 nt, Artificial Sequence
  Description of Artificial Sequence: Synthetic oligonucleotide
gauucaacaacgaaaugua

SEQ ID NO: 3154687 - RNA, 19 nt, Artificial Sequence
  Description of Artificial Sequence: Synthetic oligonucleotide
aaaauuggacuguuacguu

SEQ ID NO: 3154688 - RNA, 19 nt, Artificial Sequence
  Description of Artificial Sequence: Synthetic oligonucleotide
uuacguuccacuuaaaguu

SEQ ID NO: 3154689 - RNA, 19 nt, Artificial Sequence
  Description of Artificial Sequence: Synthetic oligonucleotide
aaguguaaagggauccguu

SEQ ID NO: 3154690 - RNA, 19 nt, Artificial Sequence
  Description of Artificial Sequence: Synthetic oligonucleotide
aguguaaagggauccguua

SEQ ID NO: 3154691 - RNA, 19 nt, Artificial Sequence
  Description of Artificial Sequence: Synthetic oligonucleotide
guguaaagggauccguuau

SEQ ID NO: 3154692 - RNA, 19 nt, Artificial Sequence
  Description of Artificial Sequence: Synthetic oligonucleotide
gauccguuaugcucuuuua

SEQ ID NO: 3154693 - RNA, 19 nt, Artificial Sequence
  Description of Artificial Sequence: Synthetic oligonucleotide
auccguuaugcucuuuuau

SEQ ID NO: 3154694 - RNA, 19 nt, Artificial Sequence
  Description of Artificial Sequence: Synthetic oligonucleotide
uccguuaugcucuuuuauu

SEQ ID NO: 3154695 - RNA, 19 nt, Artificial Sequence
  Description of Artificial Sequence: Synthetic oligonucleotide
ccguuaugcucuuuuauua

SEQ ID NO: 3154696 - RNA, 19 nt, Artificial Sequence
  Description of Artificial Sequence: Synthetic oligonucleotide
cguuaugcucuuuuauuaa

SEQ ID NO: 3154697 - RNA, 19 nt, Artificial Sequence
  Description of Artificial Sequence: Synthetic oligonucleotide
aucggacugagaucaacac

SEQ ID NO: 3154698 - RNA, 19 nt, Artificial Sequence
  Description of Artificial Sequence: Synthetic oligonucleotide
aucagcccgguuaagaaua

SEQ ID NO: 3154699 - RNA, 19 nt, Artificial Sequence
  Description of Artificial Sequence: Synthetic oligonucleotide
aacgaauacaaucagcccg

SEQ ID NO: 3154700 - RNA, 19 nt, Artificial Sequence
  Description of Artificial Sequence: Synthetic oligonucleotide
uaacgaauacaaucagccc

SEQ ID NO: 3154701 - RNA, 19 nt, Artificial Sequence
  Description of Artificial Sequence: Synthetic oligonucleotide
auaacgaauacaaucagcc

SEQ ID NO: 3154702 - RNA, 19 nt, Artificial Sequence
  Description of Artificial Sequence: Synthetic oligonucleotide
aacggcuauaugaaagcau

SEQ ID NO: 3154703 - RNA, 19 nt, Artificial Sequence
  Description of Artificial Sequence: Synthetic oligonucleotide
uucuaacggcuauaugaaa

SEQ ID NO: 3154704 - RNA, 19 nt, Artificial Sequence
  Description of Artificial Sequence: Synthetic oligonucleotide
uuucuaacggcuauaugaa

SEQ ID NO: 3154705 - RNA, 19 nt, Artificial Sequence
  Description of Artificial Sequence: Synthetic oligonucleotide
augcccguuucucuuucua

SEQ ID NO: 3154706 - RNA, 19 nt, Artificial Sequence
  Description of Artificial Sequence: Synthetic oligonucleotide
aacuucguaagauuuucug

SEQ ID NO: 3154707 - RNA, 19 nt, Artificial Sequence
  Description of Artificial Sequence: Synthetic oligonucleotide
uagcuccuagaaccuaauu

SEQ ID NO: 3154708 - RNA, 19 nt, Artificial Sequence
  Description of Artificial Sequence: Synthetic oligonucleotide
aaaccgcuucaacugacua

SEQ ID NO: 3154709 - RNA, 19 nt, Artificial Sequence
  Description of Artificial Sequence: Synthetic oligonucleotide
aacaaaaccgcuucaacug

SEQ ID NO: 3154710 - RNA, 19 nt, Artificial Sequence
  Description of Artificial Sequence: Synthetic oligonucleotide
uucgcaguaacaaaaccgc

SEQ ID NO: 3154711 - RNA, 19 nt, Artificial Sequence
  Description of Artificial Sequence: Synthetic oligonucleotide
aaacuucgcaguaacaaaa

SEQ ID NO: 3154712 - RNA, 19 nt, Artificial Sequence
  Description of Artificial Sequence: Synthetic oligonucleotide
aaaacuucgcaguaacaaa

SEQ ID NO: 3154713 - RNA, 19 nt, Artificial Sequence
  Description of Artificial Sequence: Synthetic oligonucleotide
uuacacagagcuuuuggau

SEQ ID NO: 3154714 - RNA, 19 nt, Artificial Sequence
  Description of Artificial Sequence: Synthetic oligonucleotide
auuacacagagcuuuugga

SEQ ID NO: 3154715 - RNA, 19 nt, Artificial Sequence
  Description of Artificial Sequence: Synthetic oligonucleotide
aaacacucauuacacagag

SEQ ID NO: 3154716 - RNA, 19 nt, Artificial Sequence
  Description of Artificial Sequence: Synthetic oligonucleotide
uuacaguggaccaagguca

SEQ ID NO: 3154717 - RNA, 19 nt, Artificial Sequence
  Description of Artificial Sequence: Synthetic oligonucleotide
uuuacaguggaccaagguc

SEQ ID NO: 3154718 - RNA, 19 nt, Artificial Sequence
  Description of Artificial Sequence: Synthetic oligonucleotide
uuguugaaucggaugccuc

SEQ ID NO: 3154719 - RNA, 19 nt, Artificial Sequence
  Description of Artificial Sequence: Synthetic oligonucleotide
auuucguuguugaaucgga

SEQ ID NO: 3154720 - RNA, 19 nt, Artificial Sequence
  Description of Artificial Sequence: Synthetic oligonucleotide
uacauuucguuguugaauc

SEQ ID NO: 3154721 - RNA, 19 nt, Artificial Sequence
  Description of Artificial Sequence: Synthetic oligonucleotide
aacguaacaguccaauuuu

SEQ ID NO: 3154722 - RNA, 19 nt, Artificial Sequence
  Description of Artificial Sequence: Synthetic oligonucleotide
aacuuuaaguggaacguaa

SEQ ID NO: 3154723 - RNA, 19 nt, Artificial Sequence
  Description of Artificial Sequence: Synthetic oligonucleotide
aacggaucccuuuacacuu

SEQ ID NO: 3154724 - RNA, 19 nt, Artificial Sequence
  Description of Artificial Sequence: Synthetic oligonucleotide
uaacggaucccuuuacacu

SEQ ID NO: 3154725 - RNA, 19 nt, Artificial Sequence
  Description of Artificial Sequence: Synthetic oligonucleotide
auaacggaucccuuuacac

SEQ ID NO: 3154726 - RNA, 19 nt, Artificial Sequence
  Description of Artificial Sequence: Synthetic oligonucleotide
uaaaagagcauaacggauc

SEQ ID NO: 3154727 - RNA, 19 nt, Artificial Sequence
  Description of Artificial Sequence: Synthetic oligonucleotide
auaaaagagcauaacggau

SEQ ID NO: 3154728 - RNA, 19 nt, Artificial Sequence
  Description of Artificial Sequence: Synthetic oligonucleotide
aauaaaagagcauaacgga

SEQ ID NO: 3154729 - RNA, 19 nt, Artificial Sequence
  Description of Artificial Sequence: Synthetic oligonucleotide
uaauaaaagagcauaacgg

SEQ ID NO: 3154730 - RNA, 19 nt, Artificial Sequence
  Description of Artificial Sequence: Synthetic oligonucleotide
uuaauaaaagagcauaacg

SEQ ID NO: 3154731 - RNA, 19 nt, Artificial Sequence
  Description of Artificial Sequence: Synthetic oligonucleotide
gagggucuuuuaggauaaa

SEQ ID NO: 3154732 - RNA, 19 nt, Artificial Sequence
  Description of Artificial Sequence: Synthetic oligonucleotide
gggucuuuuaggauaaauu

SEQ ID NO: 3154733 - RNA, 19 nt, Artificial Sequence
  Description of Artificial Sequence: Synthetic oligonucleotide
cucugaauuguacauaaau

SEQ ID NO: 3154734 - RNA, 19 nt, Artificial Sequence
  Description of Artificial Sequence: Synthetic oligonucleotide
cagccuuaccacauaauuu

SEQ ID NO: 3154735 - RNA, 19 nt, Artificial Sequence
  Description of Artificial Sequence: Synthetic oligonucleotide
cugcauuuuggagcgcaua

SEQ ID NO: 3154736 - RNA, 19 nt, Artificial Sequence
  Description of Artificial Sequence: Synthetic oligonucleotide
cgacauugguguggguauu

SEQ ID NO: 3154737 - RNA, 19 nt, Artificial Sequence
  Description of Artificial Sequence: Synthetic oligonucleotide
gacauugguguggguauuu

SEQ ID NO: 3154738 - RNA, 19 nt, Artificial Sequence
  Description of Artificial Sequence: Synthetic oligonucleotide
cauugguguggguauuuaa

SEQ ID NO: 3154739 - RNA, 19 nt, Artificial Sequence
  Description of Artificial Sequence: Synthetic oligonucleotide
gagccacagcugguuucuu

SEQ ID NO: 3154740 - RNA, 19 nt, Artificial Sequence
  Description of Artificial Sequence: Synthetic oligonucleotide
gccacagcugguuucuuuu

SEQ ID NO: 3154741 - RNA, 19 nt, Artificial Sequence
  Description of Artificial Sequence: Synthetic oligonucleotide
ccacagcugguuucuuuua

SEQ ID NO: 3154742 - RNA, 19 nt, Artificial Sequence
  Description of Artificial Sequence: Synthetic oligonucleotide
cagcugguuucuuuuauua

SEQ ID NO: 3154743 - RNA, 19 nt, Artificial Sequence
  Description of Artificial Sequence: Synthetic oligonucleotide
gcugguuucuuuuauuauu

SEQ ID NO: 3154744 - RNA, 19 nt, Artificial Sequence
  Description of Artificial Sequence: Synthetic oligonucleotide
guggaaccaaucaauuguu

SEQ ID NO: 3154745 - RNA, 19 nt, Artificial Sequence
  Description of Artificial Sequence: Synthetic oligonucleotide
guuugguccagcucagguu

SEQ ID NO: 3154746 - RNA, 19 nt, Artificial Sequence
  Description of Artificial Sequence: Synthetic oligonucleotide
guaccuggagugguaggua

SEQ ID NO: 3154747 - RNA, 19 nt, Artificial Sequence
  Description of Artificial Sequence: Synthetic oligonucleotide
ggcgggaggaguaguuaau

SEQ ID NO: 3154748 - RNA, 19 nt, Artificial Sequence
  Description of Artificial Sequence: Synthetic oligonucleotide
gcgggaggaguaguuaaua

SEQ ID NO: 3154749 - RNA, 19 nt, Artificial Sequence
  Description of Artificial Sequence: Synthetic oligonucleotide
cgggaggaguaguuaauau

SEQ ID NO: 3154750 - RNA, 19 nt, Artificial Sequence
  Description of Artificial Sequence: Synthetic oligonucleotide
gggaggaguaguuaauaua

SEQ ID NO: 3154751 - RNA, 19 nt, Artificial Sequence
  Description of Artificial Sequence: Synthetic oligonucleotide
gggguuacaaaguuggcau

SEQ ID NO: 3154752 - RNA, 19 nt, Artificial Sequence
  Description of Artificial Sequence: Synthetic oligonucleotide
caaaguuggcauccaagau

SEQ ID NO: 3154753 - RNA, 19 nt, Artificial Sequence
  Description of Artificial Sequence: Synthetic oligonucleotide
gacccaacaccucuuugau

SEQ ID NO: 3154754 - RNA, 19 nt, Artificial Sequence
  Description of Artificial Sequence: Synthetic oligonucleotide
cucuuugauuagaggugau

SEQ ID NO: 3154755 - RNA, 19 nt, Artificial Sequence
  Description of Artificial Sequence: Synthetic oligonucleotide
cauauuuagccuuucuaau

SEQ ID NO: 3154756 - RNA, 19 nt, Artificial Sequence
  Description of Artificial Sequence: Synthetic oligonucleotide
cuuucuaauacgguaguau

SEQ ID NO: 3154757 - RNA, 19 nt, Artificial Sequence
  Description of Artificial Sequence: Synthetic oligonucleotide
cgguaguauuggaaaggua

SEQ ID NO: 3154758 - RNA, 19 nt, Artificial Sequence
  Description of Artificial Sequence: Synthetic oligonucleotide
ggaacuggccgauguugaa

SEQ ID NO: 3154759 - RNA, 19 nt, Artificial Sequence
  Description of Artificial Sequence: Synthetic oligonucleotide
gaacuggccgauguugaau

SEQ ID NO: 3154760 - RNA, 19 nt, Artificial Sequence
  Description of Artificial Sequence: Synthetic oligonucleotide
guugaauuugaggugguua

SEQ ID NO: 3154761 - RNA, 19 nt, Artificial Sequence
  Description of Artificial Sequence: Synthetic oligonucleotide
gaggugguuaacauuccaa

SEQ ID NO: 3154762 - RNA, 19 nt, Artificial Sequence
  Description of Artificial Sequence: Synthetic oligonucleotide
gugguuaacauuccaagau

SEQ ID NO: 3154763 - RNA, 19 nt, Artificial Sequence
  Description of Artificial Sequence: Synthetic oligonucleotide
ccaagauggcugcgaguau

SEQ ID NO: 3154764 - RNA, 19 nt, Artificial Sequence
  Description of Artificial Sequence: Synthetic oligonucleotide
gcugcgaguauccuccuuu

SEQ ID NO: 3154765 - RNA, 19 nt, Artificial Sequence
  Description of Artificial Sequence: Synthetic oligonucleotide
cugcgaguauccuccuuuu

SEQ ID NO: 3154766 - RNA, 19 nt, Artificial Sequence
  Description of Artificial Sequence: Synthetic oligonucleotide
gcgaguauccuccuuuuau

SEQ ID NO: 3154767 - RNA, 19 nt, Artificial Sequence
  Description of Artificial Sequence: Synthetic oligonucleotide
ccuccuuuuauggugagua

SEQ ID NO: 3154768 - RNA, 19 nt, Artificial Sequence
  Description of Artificial Sequence: Synthetic oligonucleotide
ccuuuuauggugaguacaa

SEQ ID NO: 3154769 - RNA, 19 nt, Artificial Sequence
  Description of Artificial Sequence: Synthetic oligonucleotide
cuuuuauggugaguacaaa

SEQ ID NO: 3154770 - RNA, 19 nt, Artificial Sequence
  Description of Artificial Sequence: Synthetic oligonucleotide
ggugaguacaaauucucua

SEQ ID NO: 3154771 - RNA, 19 nt, Artificial Sequence
  Description of Artificial Sequence: Synthetic oligonucleotide
cucuagaaaggcgggaauu

SEQ ID NO: 3154772 - RNA, 19 nt, Artificial Sequence
  Description of Artificial Sequence: Synthetic oligonucleotide
cuuucggcgccaucuguaa

SEQ ID NO: 3154773 - RNA, 19 nt, Artificial Sequence
  Description of Artificial Sequence: Synthetic oligonucleotide
gcgccaucuguaacgguuu

SEQ ID NO: 3154774 - RNA, 19 nt, Artificial Sequence
  Description of Artificial Sequence: Synthetic oligonucleotide
cuccggaggauguuuccaa

SEQ ID NO: 3154775 - RNA, 19 nt, Artificial Sequence
  Description of Artificial Sequence: Synthetic oligonucleotide
cggaggauguuuccaagau

SEQ ID NO: 3154776 - RNA, 19 nt, Artificial Sequence
  Description of Artificial Sequence: Synthetic oligonucleotide
gguccuucuucugcgguaa

SEQ ID NO: 3154777 - RNA, 19 nt, Artificial Sequence
  Description of Artificial Sequence: Synthetic oligonucleotide
gccacgucauccuauaaaa

SEQ ID NO: 3154778 - RNA, 19 nt, Artificial Sequence
  Description of Artificial Sequence: Synthetic oligonucleotide
gaagugcgcugcuguagua

SEQ ID NO: 3154779 - RNA, 19 nt, Artificial Sequence
  Description of Artificial Sequence: Synthetic oligonucleotide
uuuauccuaaaagacccuc

SEQ ID NO: 3154780 - RNA, 19 nt, Artificial Sequence
  Description of Artificial Sequence: Synthetic oligonucleotide
aauuuauccuaaaagaccc

SEQ ID NO: 3154781 - RNA, 19 nt, Artificial Sequence
  Description of Artificial Sequence: Synthetic oligonucleotide
auuuauguacaauucagag

SEQ ID NO: 3154782 - RNA, 19 nt, Artificial Sequence
  Description of Artificial Sequence: Synthetic oligonucleotide
aaauuaugugguaaggcug

SEQ ID NO: 3154783 - RNA, 19 nt, Artificial Sequence
  Description of Artificial Sequence: Synthetic oligonucleotide
uaugcgcuccaaaaugcag

SEQ ID NO: 3154784 - RNA, 19 nt, Artificial Sequence
  Description of Artificial Sequence: Synthetic oligonucleotide
aauacccacaccaaugucg

SEQ ID NO: 3154785 - RNA, 19 nt, Artificial Sequence
  Description of Artificial Sequence: Synthetic oligonucleotide
aaauacccacaccaauguc

SEQ ID NO: 3154786 - RNA, 19 nt, Artificial Sequence
  Description of Artificial Sequence: Synthetic oligonucleotide
uuaaauacccacaccaaug

SEQ ID NO: 3154787 - RNA, 19 nt, Artificial Sequence
  Description of Artificial Sequence: Synthetic oligonucleotide
aagaaaccagcuguggcuc

SEQ ID NO: 3154788 - RNA, 19 nt, Artificial Sequence
  Description of Artificial Sequence: Synthetic oligonucleotide
aaaagaaaccagcuguggc

SEQ ID NO: 3154789 - RNA, 19 nt, Artificial Sequence
  Description of Artificial Sequence: Synthetic oligonucleotide
uaaaagaaaccagcugugg

SEQ ID NO: 3154790 - RNA, 19 nt, Artificial Sequence
  Description of Artificial Sequence: Synthetic oligonucleotide
uaauaaaagaaaccagcug

SEQ ID NO: 3154791 - RNA, 19 nt, Artificial Sequence
  Description of Artificial Sequence: Synthetic oligonucleotide
aauaauaaaagaaaccagc

SEQ ID NO: 3154792 - RNA, 19 nt, Artificial Sequence
  Description of Artificial Sequence: Synthetic oligonucleotide
aacaauugauugguuccac

SEQ ID NO: 3154793 - RNA, 19 nt, Artificial Sequence
  Description of Artificial Sequence: Synthetic oligonucleotide
aaccugagcuggaccaaac

SEQ ID NO: 3154794 - RNA, 19 nt, Artificial Sequence
  Description of Artificial Sequence: Synthetic oligonucleotide
uaccuaccacuccagguac

SEQ ID NO: 3154795 - RNA, 19 nt, Artificial Sequence
  Description of Artificial Sequence: Synthetic oligonucleotide
auuaacuacuccucccgcc

SEQ ID NO: 3154796 - RNA, 19 nt, Artificial Sequence
  Description of Artificial Sequence: Synthetic oligonucleotide
uauuaacuacuccucccgc

SEQ ID NO: 3154797 - RNA, 19 nt, Artificial Sequence
  Description of Artificial Sequence: Synthetic oligonucleotide
auauuaacuacuccucccg

SEQ ID NO: 3154798 - RNA, 19 nt, Artificial Sequence
  Description of Artificial Sequence: Synthetic oligonucleotide
uauauuaacuacuccuccc

SEQ ID NO: 3154799 - RNA, 19 nt, Artificial Sequence
  Description of Artificial Sequence: Synthetic oligonucleotide
augccaacuuuguaacccc

SEQ ID NO: 3154800 - RNA, 19 nt, Artificial Sequence
  Description of Artificial Sequence: Synthetic oligonucleotide
aucuuggaugccaacuuug

SEQ ID NO: 3154801 - RNA, 19 nt, Artificial Sequence
  Description of Artificial Sequence: Synthetic oligonucleotide
aucaaagagguguuggguc

SEQ ID NO: 3154802 - RNA, 19 nt, Artificial Sequence
  Description of Artificial Sequence: Synthetic oligonucleotide
aucaccucuaaucaaagag

SEQ ID NO: 3154803 - RNA, 19 nt, Artificial Sequence
  Description of Artificial Sequence: Synthetic oligonucleotide
auuagaaaggcuaaauaug

SEQ ID NO: 3154804 - RNA, 19 nt, Artificial Sequence
  Description of Artificial Sequence: Synthetic oligonucleotide
auacuaccguauuagaaag

SEQ ID NO: 3154805 - RNA, 19 nt, Artificial Sequence
  Description of Artificial Sequence: Synthetic oligonucleotide
uaccuuuccaauacuaccg

SEQ ID NO: 3154806 - RNA, 19 nt, Artificial Sequence
  Description of Artificial Sequence: Synthetic oligonucleotide
uucaacaucggccaguucc

SEQ ID NO: 3154807 - RNA, 19 nt, Artificial Sequence
  Description of Artificial Sequence: Synthetic oligonucleotide
auucaacaucggccaguuc

SEQ ID NO: 3154808 - RNA, 19 nt, Artificial Sequence
  Description of Artificial Sequence: Synthetic oligonucleotide
uaaccaccucaaauucaac

SEQ ID NO: 3154809 - RNA, 19 nt, Artificial Sequence
  Description of Artificial Sequence: Synthetic oligonucleotide
uuggaauguuaaccaccuc

SEQ ID NO: 3154810 - RNA, 19 nt, Artificial Sequence
  Description of Artificial Sequence: Synthetic oligonucleotide
aucuuggaauguuaaccac

SEQ ID NO: 3154811 - RNA, 19 nt, Artificial Sequence
  Description of Artificial Sequence: Synthetic oligonucleotide
auacucgcagccaucuugg

SEQ ID NO: 3154812 - RNA, 19 nt, Artificial Sequence
  Description of Artificial Sequence: Synthetic oligonucleotide
aaaggaggauacucgcagc

SEQ ID NO: 3154813 - RNA, 19 nt, Artificial Sequence
  Description of Artificial Sequence: Synthetic oligonucleotide
aaaaggaggauacucgcag

SEQ ID NO: 3154814 - RNA, 19 nt, Artificial Sequence
  Description of Artificial Sequence: Synthetic oligonucleotide
auaaaaggaggauacucgc

SEQ ID NO: 3154815 - RNA, 19 nt, Artificial Sequence
  Description of Artificial Sequence: Synthetic oligonucleotide
uacucaccauaaaaggagg

SEQ ID NO: 3154816 - RNA, 19 nt, Artificial Sequence
  Description of Artificial Sequence: Synthetic oligonucleotide
uuguacucaccauaaaagg

SEQ ID NO: 3154817 - RNA, 19 nt, Artificial Sequence
  Description of Artificial Sequence: Synthetic oligonucleotide
uuuguacucaccauaaaag

SEQ ID NO: 3154818 - RNA, 19 nt, Artificial Sequence
  Description of Artificial Sequence: Synthetic oligonucleotide
uagagaauuuguacucacc

SEQ ID NO: 3154819 - RNA, 19 nt, Artificial Sequence
  Description of Artificial Sequence: Synthetic oligonucleotide
aauucccgccuuucuagag

SEQ ID NO: 3154820 - RNA, 19 nt, Artificial Sequence
  Description of Artificial Sequence: Synthetic oligonucleotide
uuacagauggcgccgaaag

SEQ ID NO: 3154821 - RNA, 19 nt, Artificial Sequence
  Description of Artificial Sequence: Synthetic oligonucleotide
aaaccguuacagauggcgc

SEQ ID NO: 3154822 - RNA, 19 nt, Artificial Sequence
  Description of Artificial Sequence: Synthetic oligonucleotide
uuggaaacauccuccggag

SEQ ID NO: 3154823 - RNA, 19 nt, Artificial Sequence
  Description of Artificial Sequence: Synthetic oligonucleotide
aucuuggaaacauccuccg

SEQ ID NO: 3154824 - RNA, 19 nt, Artificial Sequence
  Description of Artificial Sequence: Synthetic oligonucleotide
uuaccgcagaagaaggacc

SEQ ID NO: 3154825 - RNA, 19 nt, Artificial Sequence
  Description of Artificial Sequence: Synthetic oligonucleotide
uuuuauaggaugacguggc

SEQ ID NO: 3154826 - RNA, 19 nt, Artificial Sequence
  Description of Artificial Sequence: Synthetic oligonucleotide
uacuacagcagcgcacuuc

SEQ ID NO: 3154827 - RNA, 19 nt, Artificial Sequence
  Description of Artificial Sequence: Synthetic oligonucleotide
uacuucugaggagcaggua

SEQ ID NO: 3154828 - RNA, 19 nt, Artificial Sequence
  Description of Artificial Sequence: Synthetic oligonucleotide
ggagguuuuccgcagcuau

SEQ ID NO: 3154829 - RNA, 19 nt, Artificial Sequence
  Description of Artificial Sequence: Synthetic oligonucleotide
agguuuuccgcagcuaugu

SEQ ID NO: 3154830 - RNA, 19 nt, Artificial Sequence
  Description of Artificial Sequence: Synthetic oligonucleotide
gguuuuccgcagcuauguu

SEQ ID NO: 3154831 - RNA, 19 nt, Artificial Sequence
  Description of Artificial Sequence: Synthetic oligonucleotide
gacccagaaauggucaccu

SEQ ID NO: 3154832 - RNA, 19 nt, Artificial Sequence
  Description of Artificial Sequence: Synthetic oligonucleotide
ucggcagcucgcuaucauu

SEQ ID NO: 3154833 - RNA, 19 nt, Artificial Sequence
  Description of Artificial Sequence: Synthetic oligonucleotide
agcucgcuaucauugggga

SEQ ID NO: 3154834 - RNA, 19 nt, Artificial Sequence
  Description of Artificial Sequence: Synthetic oligonucleotide
cuaucauuggggacgacau

SEQ ID NO: 3154835 - RNA, 19 nt, Artificial Sequence
  Description of Artificial Sequence: Synthetic oligonucleotide
aucauuggggacgacauca

SEQ ID NO: 3154836 - RNA, 19 nt, Artificial Sequence
  Description of Artificial Sequence: Synthetic oligonucleotide
cgacaucaaccagcgcuau

SEQ ID NO: 3154837 - RNA, 19 nt, Artificial Sequence
  Description of Artificial Sequence: Synthetic oligonucleotide
agcgcuaugacucggaguu

SEQ ID NO: 3154838 - RNA, 19 nt, Artificial Sequence
  Description of Artificial Sequence: Synthetic oligonucleotide
gcuaugacucggaguucca

SEQ ID NO: 3154839 - RNA, 19 nt, Artificial Sequence
  Description of Artificial Sequence: Synthetic oligonucleotide
acagccgacagcagagaau

SEQ ID NO: 3154840 - RNA, 19 nt, Artificial Sequence
  Description of Artificial Sequence: Synthetic oligonucleotide
cgacagcagagaaugccua

SEQ ID NO: 3154841 - RNA, 19 nt, Artificial Sequence
  Description of Artificial Sequence: Synthetic oligonucleotide
gacagcagagaaugccuau

SEQ ID NO: 3154842 - RNA, 19 nt, Artificial Sequence
  Description of Artificial Sequence: Synthetic oligonucleotide
gagaaugccuaugaguacu

SEQ ID NO: 3154843 - RNA, 19 nt, Artificial Sequence
  Description of Artificial Sequence: Synthetic oligonucleotide
agaaugccuaugaguacuu

SEQ ID NO: 3154844 - RNA, 19 nt, Artificial Sequence
  Description of Artificial Sequence: Synthetic oligonucleotide
uacuucaccaagauugccu

SEQ ID NO: 3154845 - RNA, 19 nt, Artificial Sequence
  Description of Artificial Sequence: Synthetic oligonucleotide
uucaccaagauugccucga

SEQ ID NO: 3154846 - RNA, 19 nt, Artificial Sequence
  Description of Artificial Sequence: Synthetic oligonucleotide
caagauugccucgagccua

SEQ ID NO: 3154847 - RNA, 19 nt, Artificial Sequence
  Description of Artificial Sequence: Synthetic oligonucleotide
aagauugccucgagccuau

SEQ ID NO: 3154848 - RNA, 19 nt, Artificial Sequence
  Description of Artificial Sequence: Synthetic oligonucleotide
uugccucgagccuauuuga

SEQ ID NO: 3154849 - RNA, 19 nt, Artificial Sequence
  Description of Artificial Sequence: Synthetic oligonucleotide
gccucgagccuauuugaga

SEQ ID NO: 3154850 - RNA, 19 nt, Artificial Sequence
  Description of Artificial Sequence: Synthetic oligonucleotide
uauuugagagcggcaucaa

SEQ ID NO: 3154851 - RNA, 19 nt, Artificial Sequence
  Description of Artificial Sequence: Synthetic oligonucleotide
uuugagagcggcaucaacu

SEQ ID NO: 3154852 - RNA, 19 nt, Artificial Sequence
  Description of Artificial Sequence: Synthetic oligonucleotide
uucaugcugcaucauugca

SEQ ID NO: 3154853 - RNA, 19 nt, Artificial Sequence
  Description of Artificial Sequence: Synthetic oligonucleotide
ucaugcugcaucauugcau

SEQ ID NO: 3154854 - RNA, 19 nt, Artificial Sequence
  Description of Artificial Sequence: Synthetic oligonucleotide
caugcugcaucauugcauu

SEQ ID NO: 3154855 - RNA, 19 nt, Artificial Sequence
  Description of Artificial Sequence: Synthetic oligonucleotide
ugaacgugcugauagugcu

SEQ ID NO: 3154856 - RNA, 19 nt, Artificial Sequence
  Description of Artificial Sequence: Synthetic oligonucleotide
aacgugcugauagugcugu

SEQ ID NO: 3154857 - RNA, 19 nt, Artificial Sequence
  Description of Artificial Sequence: Synthetic oligonucleotide
cgugcugauagugcugucu

SEQ ID NO: 3154858 - RNA, 19 nt, Artificial Sequence
  Description of Artificial Sequence: Synthetic oligonucleotide
ugcugauagugcugucugu

SEQ ID NO: 3154859 - RNA, 19 nt, Artificial Sequence
  Description of Artificial Sequence: Synthetic oligonucleotide
ugauagugcugucuguggu

SEQ ID NO: 3154860 - RNA, 19 nt, Artificial Sequence
  Description of Artificial Sequence: Synthetic oligonucleotide
uagugcugucugugguucu

SEQ ID NO: 3154861 - RNA, 19 nt, Artificial Sequence
  Description of Artificial Sequence: Synthetic oligonucleotide
ugcugucugugguucuguu

SEQ ID NO: 3154862 - RNA, 19 nt, Artificial Sequence
  Description of Artificial Sequence: Synthetic oligonucleotide
gguucuguugggccaguuu

SEQ ID NO: 3154863 - RNA, 19 nt, Artificial Sequence
  Description of Artificial Sequence: Synthetic oligonucleotide
ccaguuugugguacgaaga

SEQ ID NO: 3154864 - RNA, 19 nt, Artificial Sequence
  Description of Artificial Sequence: Synthetic oligonucleotide
caguuugugguacgaagau

SEQ ID NO: 3154865 - RNA, 19 nt, Artificial Sequence
  Description of Artificial Sequence: Synthetic oligonucleotide
aguuugugguacgaagauu

SEQ ID NO: 3154866 - RNA, 19 nt, Artificial Sequence
  Description of Artificial Sequence: Synthetic oligonucleotide
uuugugguacgaagauucu

SEQ ID NO: 3154867 - RNA, 19 nt, Artificial Sequence
  Description of Artificial Sequence: Synthetic oligonucleotide
uugugguacgaagauucuu

SEQ ID NO: 3154868 - RNA, 19 nt, Artificial Sequence
  Description of Artificial Sequence: Synthetic oligonucleotide
gugguacgaagauucuuca

SEQ ID NO: 3154869 - RNA, 19 nt, Artificial Sequence
  Description of Artificial Sequence: Synthetic oligonucleotide
ugguacgaagauucuucaa

SEQ ID NO: 3154870 - RNA, 19 nt, Artificial Sequence
  Description of Artificial Sequence: Synthetic oligonucleotide
gguacgaagauucuucaaa

SEQ ID NO: 3154871 - RNA, 19 nt, Artificial Sequence
  Description of Artificial Sequence: Synthetic oligonucleotide
guacgaagauucuucaaau

SEQ ID NO: 3154872 - RNA, 19 nt, Artificial Sequence
  Description of Artificial Sequence: Synthetic oligonucleotide
acgaagauucuucaaauca

SEQ ID NO: 3154873 - RNA, 19 nt, Artificial Sequence
  Description of Artificial Sequence: Synthetic oligonucleotide
cgaagauucuucaaaucau

SEQ ID NO: 3154874 - RNA, 19 nt, Artificial Sequence
  Description of Artificial Sequence: Synthetic oligonucleotide
gauucuucaaaucaugacu

SEQ ID NO: 3154875 - RNA, 19 nt, Artificial Sequence
  Description of Artificial Sequence: Synthetic oligonucleotide
uaccugcuccucagaagua

SEQ ID NO: 3154876 - RNA, 19 nt, Artificial Sequence
  Description of Artificial Sequence: Synthetic oligonucleotide
auagcugcggaaaaccucc

SEQ ID NO: 3154877 - RNA, 19 nt, Artificial Sequence
  Description of Artificial Sequence: Synthetic oligonucleotide
acauagcugcggaaaaccu

SEQ ID NO: 3154878 - RNA, 19 nt, Artificial Sequence
  Description of Artificial Sequence: Synthetic oligonucleotide
aacauagcugcggaaaacc

SEQ ID NO: 3154879 - RNA, 19 nt, Artificial Sequence
  Description of Artificial Sequence: Synthetic oligonucleotide
aggugaccauuucuggguc

SEQ ID NO: 3154880 - RNA, 19 nt, Artificial Sequence
  Description of Artificial Sequence: Synthetic oligonucleotide
aaugauagcgagcugccga

SEQ ID NO: 3154881 - RNA, 19 nt, Artificial Sequence
  Description of Artificial Sequence: Synthetic oligonucleotide
uccccaaugauagcgagcu

SEQ ID NO: 3154882 - RNA, 19 nt, Artificial Sequence
  Description of Artificial Sequence: Synthetic oligonucleotide
augucguccccaaugauag

SEQ ID NO: 3154883 - RNA, 19 nt, Artificial Sequence
  Description of Artificial Sequence: Synthetic oligonucleotide
ugaugucguccccaaugau

SEQ ID NO: 3154884 - RNA, 19 nt, Artificial Sequence
  Description of Artificial Sequence: Synthetic oligonucleotide
auagcgcugguugaugucg

SEQ ID NO: 3154885 - RNA, 19 nt, Artificial Sequence
  Description of Artificial Sequence: Synthetic oligonucleotide
aacuccgagucauagcgcu

SEQ ID NO: 3154886 - RNA, 19 nt, Artificial Sequence
  Description of Artificial Sequence: Synthetic oligonucleotide
uggaacuccgagucauagc

SEQ ID NO: 3154887 - RNA, 19 nt, Artificial Sequence
  Description of Artificial Sequence: Synthetic oligonucleotide
auucucugcugucggcugu

SEQ ID NO: 3154888 - RNA, 19 nt, Artificial Sequence
  Description of Artificial Sequence: Synthetic oligonucleotide
uaggcauucucugcugucg

SEQ ID NO: 3154889 - RNA, 19 nt, Artificial Sequence
  Description of Artificial Sequence: Synthetic oligonucleotide
auaggcauucucugcuguc

SEQ ID NO: 3154890 - RNA, 19 nt, Artificial Sequence
  Description of Artificial Sequence: Synthetic oligonucleotide
aguacucauaggcauucuc

SEQ ID NO: 3154891 - RNA, 19 nt, Artificial Sequence
  Description of Artificial Sequence: Synthetic oligonucleotide
aaguacucauaggcauucu

SEQ ID NO: 3154892 - RNA, 19 nt, Artificial Sequence
  Description of Artificial Sequence: Synthetic oligonucleotide
aggcaaucuuggugaagua

SEQ ID NO: 3154893 - RNA, 19 nt, Artificial Sequence
  Description of Artificial Sequence: Synthetic oligonucleotide
ucgaggcaaucuuggugaa

SEQ ID NO: 3154894 - RNA, 19 nt, Artificial Sequence
  Description of Artificial Sequence: Synthetic oligonucleotide
uaggcucgaggcaaucuug

SEQ ID NO: 3154895 - RNA, 19 nt, Artificial Sequence
  Description of Artificial Sequence: Synthetic oligonucleotide
auaggcucgaggcaaucuu

SEQ ID NO: 3154896 - RNA, 19 nt, Artificial Sequence
  Description of Artificial Sequence: Synthetic oligonucleotide
ucaaauaggcucgaggcaa

SEQ ID NO: 3154897 - RNA, 19 nt, Artificial Sequence
  Description of Artificial Sequence: Synthetic oligonucleotide
ucucaaauaggcucgaggc

SEQ ID NO: 3154898 - RNA, 19 nt, Artificial Sequence
  Description of Artificial Sequence: Synthetic oligonucleotide
uugaugccgcucucaaaua

SEQ ID NO: 3154899 - RNA, 19 nt, Artificial Sequence
  Description of Artificial Sequence: Synthetic oligonucleotide
aguugaugccgcucucaaa

SEQ ID NO: 3154900 - RNA, 19 nt, Artificial Sequence
  Description of Artificial Sequence: Synthetic oligonucleotide
ugcaaugaugcagcaugaa

SEQ ID NO: 3154901 - RNA, 19 nt, Artificial Sequence
  Description of Artificial Sequence: Synthetic oligonucleotide
augcaaugaugcagcauga

SEQ ID NO: 3154902 - RNA, 19 nt, Artificial Sequence
  Description of Artificial Sequence: Synthetic oligonucleotide
aaugcaaugaugcagcaug

SEQ ID NO: 3154903 - RNA, 19 nt, Artificial Sequence
  Description of Artificial Sequence: Synthetic oligonucleotide
agcacuaucagcacguuca

SEQ ID NO: 3154904 - RNA, 19 nt, Artificial Sequence
  Description of Artificial Sequence: Synthetic oligonucleotide
acagcacuaucagcacguu

SEQ ID NO: 3154905 - RNA, 19 nt, Artificial Sequence
  Description of Artificial Sequence: Synthetic oligonucleotide
agacagcacuaucagcacg

SEQ ID NO: 3154906 - RNA, 19 nt, Artificial Sequence
  Description of Artificial Sequence: Synthetic oligonucleotide
acagacagcacuaucagca

SEQ ID NO: 3154907 - RNA, 19 nt, Artificial Sequence
  Description of Artificial Sequence: Synthetic oligonucleotide
accacagacagcacuauca

SEQ ID NO: 3154908 - RNA, 19 nt, Artificial Sequence
  Description of Artificial Sequence: Synthetic oligonucleotide
agaaccacagacagcacua

SEQ ID NO: 3154909 - RNA, 19 nt, Artificial Sequence
  Description of Artificial Sequence: Synthetic oligonucleotide
aacagaaccacagacagca

SEQ ID NO: 3154910 - RNA, 19 nt, Artificial Sequence
  Description of Artificial Sequence: Synthetic oligonucleotide
aaacuggcccaacagaacc

SEQ ID NO: 3154911 - RNA, 19 nt, Artificial Sequence
  Description of Artificial Sequence: Synthetic oligonucleotide
ucuucguaccacaaacugg

SEQ ID NO: 3154912 - RNA, 19 nt, Artificial Sequence
  Description of Artificial Sequence: Synthetic oligonucleotide
aucuucguaccacaaacug

SEQ ID NO: 3154913 - RNA, 19 nt, Artificial Sequence
  Description of Artificial Sequence: Synthetic oligonucleotide
aaucuucguaccacaaacu

SEQ ID NO: 3154914 - RNA, 19 nt, Artificial Sequence
  Description of Artificial Sequence: Synthetic oligonucleotide
agaaucuucguaccacaaa

SEQ ID NO: 3154915 - RNA, 19 nt, Artificial Sequence
  Description of Artificial Sequence: Synthetic oligonucleotide
aagaaucuucguaccacaa

SEQ ID NO: 3154916 - RNA, 19 nt, Artificial Sequence
  Description of Artificial Sequence: Synthetic oligonucleotide
ugaagaaucuucguaccac

SEQ ID NO: 3154917 - RNA, 19 nt, Artificial Sequence
  Description of Artificial Sequence: Synthetic oligonucleotide
uugaagaaucuucguacca

SEQ ID NO: 3154918 - RNA, 19 nt, Artificial Sequence
  Description of Artificial Sequence: Synthetic oligonucleotide
uuugaagaaucuucguacc

SEQ ID NO: 3154919 - RNA, 19 nt, Artificial Sequence
  Description of Artificial Sequence: Synthetic oligonucleotide
auuugaagaaucuucguac

SEQ ID NO: 3154920 - RNA, 19 nt, Artificial Sequence
  Description of Artificial Sequence: Synthetic oligonucleotide
ugauuugaagaaucuucgu

SEQ ID NO: 3154921 - RNA, 19 nt, Artificial Sequence
  Description of Artificial Sequence: Synthetic oligonucleotide
augauuugaagaaucuucg

SEQ ID NO: 3154922 - RNA, 19 nt, Artificial Sequence
  Description of Artificial Sequence: Synthetic oligonucleotide
agucaugauuugaagaauc

SEQ ID NO: 3154923 - RNA, 19 nt, Artificial Sequence
  Description of Artificial Sequence: Synthetic oligonucleotide
gcucugagcagaucaugaa

SEQ ID NO: 3154924 - RNA, 19 nt, Artificial Sequence
  Description of Artificial Sequence: Synthetic oligonucleotide
cccuuuugcuucaggguuu

SEQ ID NO: 3154925 - RNA, 19 nt, Artificial Sequence
  Description of Artificial Sequence: Synthetic oligonucleotide
uuuugcuucaggguuucau

SEQ ID NO: 3154926 - RNA, 19 nt, Artificial Sequence
  Description of Artificial Sequence: Synthetic oligonucleotide
ugcuucaggguuucaucca

SEQ ID NO: 3154927 - RNA, 19 nt, Artificial Sequence
  Description of Artificial Sequence: Synthetic oligonucleotide
gcuucaggguuucauccaa

SEQ ID NO: 3154928 - RNA, 19 nt, Artificial Sequence
  Description of Artificial Sequence: Synthetic oligonucleotide
aagaucgagcagggcgaau

SEQ ID NO: 3154929 - RNA, 19 nt, Artificial Sequence
  Description of Artificial Sequence: Synthetic oligonucleotide
caccaagaagcugagcgaa

SEQ ID NO: 3154930 - RNA, 19 nt, Artificial Sequence
  Description of Artificial Sequence: Synthetic oligonucleotide
accaagaagcugagcgaau

SEQ ID NO: 3154931 - RNA, 19 nt, Artificial Sequence
  Description of Artificial Sequence: Synthetic oligonucleotide
caagaagcugagcgaaugu

SEQ ID NO: 3154932 - RNA, 19 nt, Artificial Sequence
  Description of Artificial Sequence: Synthetic oligonucleotide
agcugagcgaaugucucaa

SEQ ID NO: 3154933 - RNA, 19 nt, Artificial Sequence
  Description of Artificial Sequence: Synthetic oligonucleotide
agcgaaugucucaagcgca

SEQ ID NO: 3154934 - RNA, 19 nt, Artificial Sequence
  Description of Artificial Sequence: Synthetic oligonucleotide
gcgaaugucucaagcgcau

SEQ ID NO: 3154935 - RNA, 19 nt, Artificial Sequence
  Description of Artificial Sequence: Synthetic oligonucleotide
ucucaagcgcaucggagau

SEQ ID NO: 3154936 - RNA, 19 nt, Artificial Sequence
  Description of Artificial Sequence: Synthetic oligonucleotide
ucaagcgcaucggagauga

SEQ ID NO: 3154937 - RNA, 19 nt, Artificial Sequence
  Description of Artificial Sequence: Synthetic oligonucleotide
agcgcaucggagaugaacu

SEQ ID NO: 3154938 - RNA, 19 nt, Artificial Sequence
  Description of Artificial Sequence: Synthetic oligonucleotide
gagaugaacuggacaguaa

SEQ ID NO: 3154939 - RNA, 19 nt, Artificial Sequence
  Description of Artificial Sequence: Synthetic oligonucleotide
aacuggacaguaacaugga

SEQ ID NO: 3154940 - RNA, 19 nt, Artificial Sequence
  Description of Artificial Sequence: Synthetic oligonucleotide
acaguaacauggaguugca

SEQ ID NO: 3154941 - RNA, 19 nt, Artificial Sequence
  Description of Artificial Sequence: Synthetic oligonucleotide
aguaacauggaguugcaga

SEQ ID NO: 3154942 - RNA, 19 nt, Artificial Sequence
  Description of Artificial Sequence: Synthetic oligonucleotide
guugcagaggaugaucgca

SEQ ID NO: 3154943 - RNA, 19 nt, Artificial Sequence
  Description of Artificial Sequence: Synthetic oligonucleotide
gugaggucuucuuccgagu

SEQ ID NO: 3154944 - RNA, 19 nt, Artificial Sequence
  Description of Artificial Sequence: Synthetic oligonucleotide
aguggcagcugagauguuu

SEQ ID NO: 3154945 - RNA, 19 nt, Artificial Sequence
  Description of Artificial Sequence: Synthetic oligonucleotide
guggcagcugagauguuuu

SEQ ID NO: 3154946 - RNA, 19 nt, Artificial Sequence
  Description of Artificial Sequence: Synthetic oligonucleotide
cagcugagauguuuucuga

SEQ ID NO: 3154947 - RNA, 19 nt, Artificial Sequence
  Description of Artificial Sequence: Synthetic oligonucleotide
agcugagauguuuucugau

SEQ ID NO: 3154948 - RNA, 19 nt, Artificial Sequence
  Description of Artificial Sequence: Synthetic oligonucleotide
gagauguuuucugauggca

SEQ ID NO: 3154949 - RNA, 19 nt, Artificial Sequence
  Description of Artificial Sequence: Synthetic oligonucleotide
agauguuuucugauggcaa

SEQ ID NO: 3154950 - RNA, 19 nt, Artificial Sequence
  Description of Artificial Sequence: Synthetic oligonucleotide
auguuuucugauggcaacu

SEQ ID NO: 3154951 - RNA, 19 nt, Artificial Sequence
  Description of Artificial Sequence: Synthetic oligonucleotide
ggguuguugcccucuucua

SEQ ID NO: 3154952 - RNA, 19 nt, Artificial Sequence
  Description of Artificial Sequence: Synthetic oligonucleotide
cucuucuacuuugccagca

SEQ ID NO: 3154953 - RNA, 19 nt, Artificial Sequence
  Description of Artificial Sequence: Synthetic oligonucleotide
ucuucuacuuugccagcaa

SEQ ID NO: 3154954 - RNA, 19 nt, Artificial Sequence
  Description of Artificial Sequence: Synthetic oligonucleotide
ucuacuuugccagcaaacu

SEQ ID NO: 3154955 - RNA, 19 nt, Artificial Sequence
  Description of Artificial Sequence: Synthetic oligonucleotide
ccagcaaacuggugcucaa

SEQ ID NO: 3154956 - RNA, 19 nt, Artificial Sequence
  Description of Artificial Sequence: Synthetic oligonucleotide
aucaggaccaucaugggcu

SEQ ID NO: 3154957 - RNA, 19 nt, Artificial Sequence
  Description of Artificial Sequence: Synthetic oligonucleotide
gacacuggacuuccuucga

SEQ ID NO: 3154958 - RNA, 19 nt, Artificial Sequence
  Description of Artificial Sequence: Synthetic oligonucleotide
cuccucuccuacuuuggga

SEQ ID NO: 3154959 - RNA, 19 nt, Artificial Sequence
  Description of Artificial Sequence: Synthetic oligonucleotide
uguggcuggagugcuuacu

SEQ ID NO: 3154960 - RNA, 19 nt, Artificial Sequence
  Description of Artificial Sequence: Synthetic oligonucleotide
uggagugcuuacugcguca

SEQ ID NO: 3154961 - RNA, 19 nt, Artificial Sequence
  Description of Artificial Sequence: Synthetic oligonucleotide
gagugcuuacugcgucacu

SEQ ID NO: 3154962 - RNA, 19 nt, Artificial Sequence
  Description of Artificial Sequence: Synthetic oligonucleotide
gugcuuacugcgucacuca

SEQ ID NO: 3154963 - RNA, 19 nt, Artificial Sequence
  Description of Artificial Sequence: Synthetic oligonucleotide
acugcgucacucaccaucu

SEQ ID NO: 3154964 - RNA, 19 nt, Artificial Sequence
  Description of Artificial Sequence: Synthetic oligonucleotide
cgucacucaccaucuggaa

SEQ ID NO: 3154965 - RNA, 19 nt, Artificial Sequence
  Description of Artificial Sequence: Synthetic oligonucleotide
cgccuuggacugugucuuu

SEQ ID NO: 3154966 - RNA, 19 nt, Artificial Sequence
  Description of Artificial Sequence: Synthetic oligonucleotide
gccuuggacugugucuuuu

SEQ ID NO: 3154967 - RNA, 19 nt, Artificial Sequence
  Description of Artificial Sequence: Synthetic oligonucleotide
ggacugugucuuuucugca

SEQ ID NO: 3154968 - RNA, 19 nt, Artificial Sequence
  Description of Artificial Sequence: Synthetic oligonucleotide
gacugugucuuuucugcau

SEQ ID NO: 3154969 - RNA, 19 nt, Artificial Sequence
  Description of Artificial Sequence: Synthetic oligonucleotide
ugugucuuuucugcauaaa

SEQ ID NO: 3154970 - RNA, 19 nt, Artificial Sequence
  Description of Artificial Sequence: Synthetic oligonucleotide
gugucuuuucugcauaaau

SEQ ID NO: 3154971 - RNA, 19 nt, Artificial Sequence
  Description of Artificial Sequence: Synthetic oligonucleotide
uucaugaucugcucagagc

SEQ ID NO: 3154972 - RNA, 19 nt, Artificial Sequence
  Description of Artificial Sequence: Synthetic oligonucleotide
aaacccugaagcaaaaggg

SEQ ID NO: 3154973 - RNA, 19 nt, Artificial Sequence
  Description of Artificial Sequence: Synthetic oligonucleotide
augaaacccugaagcaaaa

SEQ ID NO: 3154974 - RNA, 19 nt, Artificial Sequence
  Description of Artificial Sequence: Synthetic oligonucleotide
uggaugaaacccugaagca

SEQ ID NO: 3154975 - RNA, 19 nt, Artificial Sequence
  Description of Artificial Sequence: Synthetic oligonucleotide
uuggaugaaacccugaagc

SEQ ID NO: 3154976 - RNA, 19 nt, Artificial Sequence
  Description of Artificial Sequence: Synthetic oligonucleotide
auucgcccugcucgaucuu

SEQ ID NO: 3154977 - RNA, 19 nt, Artificial Sequence
  Description of Artificial Sequence: Synthetic oligonucleotide
uucgcucagcuucuuggug

SEQ ID NO: 3154978 - RNA, 19 nt, Artificial Sequence
  Description of Artificial Sequence: Synthetic oligonucleotide
auucgcucagcuucuuggu

SEQ ID NO: 3154979 - RNA, 19 nt, Artificial Sequence
  Description of Artificial Sequence: Synthetic oligonucleotide
acauucgcucagcuucuug

SEQ ID NO: 3154980 - RNA, 19 nt, Artificial Sequence
  Description of Artificial Sequence: Synthetic oligonucleotide
uugagacauucgcucagcu

SEQ ID NO: 3154981 - RNA, 19 nt, Artificial Sequence
  Description of Artificial Sequence: Synthetic oligonucleotide
ugcgcuugagacauucgcu

SEQ ID NO: 3154982 - RNA, 19 nt, Artificial Sequence
  Description of Artificial Sequence: Synthetic oligonucleotide
augcgcuugagacauucgc

SEQ ID NO: 3154983 - RNA, 19 nt, Artificial Sequence
  Description of Artificial Sequence: Synthetic oligonucleotide
aucuccgaugcgcuugaga

SEQ ID NO: 3154984 - RNA, 19 nt, Artificial Sequence
  Description of Artificial Sequence: Synthetic oligonucleotide
ucaucuccgaugcgcuuga

SEQ ID NO: 3154985 - RNA, 19 nt, Artificial Sequence
  Description of Artificial Sequence: Synthetic oligonucleotide
aguucaucuccgaugcgcu

SEQ ID NO: 3154986 - RNA, 19 nt, Artificial Sequence
  Description of Artificial Sequence: Synthetic oligonucleotide
uuacuguccaguucaucuc

SEQ ID NO: 3154987 - RNA, 19 nt, Artificial Sequence
  Description of Artificial Sequence: Synthetic oligonucleotide
uccauguuacuguccaguu

SEQ ID NO: 3154988 - RNA, 19 nt, Artificial Sequence
  Description of Artificial Sequence: Synthetic oligonucleotide
ugcaacuccauguuacugu

SEQ ID NO: 3154989 - RNA, 19 nt, Artificial Sequence
  Description of Artificial Sequence: Synthetic oligonucleotide
ucugcaacuccauguuacu

SEQ ID NO: 3154990 - RNA, 19 nt, Artificial Sequence
  Description of Artificial Sequence: Synthetic oligonucleotide
ugcgaucauccucugcaac

SEQ ID NO: 3154991 - RNA, 19 nt, Artificial Sequence
  Description of Artificial Sequence: Synthetic oligonucleotide
acucggaagaagaccucac

SEQ ID NO: 3154992 - RNA, 19 nt, Artificial Sequence
  Description of Artificial Sequence: Synthetic oligonucleotide
aaacaucucagcugccacu

SEQ ID NO: 3154993 - RNA, 19 nt, Artificial Sequence
  Description of Artificial Sequence: Synthetic oligonucleotide
aaaacaucucagcugccac

SEQ ID NO: 3154994 - RNA, 19 nt, Artificial Sequence
  Description of Artificial Sequence: Synthetic oligonucleotide
ucagaaaacaucucagcug

SEQ ID NO: 3154995 - RNA, 19 nt, Artificial Sequence
  Description of Artificial Sequence: Synthetic oligonucleotide
aucagaaaacaucucagcu

SEQ ID NO: 3154996 - RNA, 19 nt, Artificial Sequence
  Description of Artificial Sequence: Synthetic oligonucleotide
ugccaucagaaaacaucuc

SEQ ID NO: 3154997 - RNA, 19 nt, Artificial Sequence
  Description of Artificial Sequence: Synthetic oligonucleotide
uugccaucagaaaacaucu

SEQ ID NO: 3154998 - RNA, 19 nt, Artificial Sequence
  Description of Artificial Sequence: Synthetic oligonucleotide
aguugccaucagaaaacau

SEQ ID NO: 3154999 - RNA, 19 nt, Artificial Sequence
  Description of Artificial Sequence: Synthetic oligonucleotide
uagaagagggcaacaaccc

SEQ ID NO: 3155000 - RNA, 19 nt, Artificial Sequence
  Description of Artificial Sequence: Synthetic oligonucleotide
ugcuggcaaaguagaagag

SEQ ID NO: 3155001 - RNA, 19 nt, Artificial Sequence
  Description of Artificial Sequence: Synthetic oligonucleotide
uugcuggcaaaguagaaga

SEQ ID NO: 3155002 - RNA, 19 nt, Artificial Sequence
  Description of Artificial Sequence: Synthetic oligonucleotide
aguuugcuggcaaaguaga

SEQ ID NO: 3155003 - RNA, 19 nt, Artificial Sequence
  Description of Artificial Sequence: Synthetic oligonucleotide
uugagcaccaguuugcugg

SEQ ID NO: 3155004 - RNA, 19 nt, Artificial Sequence
  Description of Artificial Sequence: Synthetic oligonucleotide
agcccaugaugguccugau

SEQ ID NO: 3155005 - RNA, 19 nt, Artificial Sequence
  Description of Artificial Sequence: Synthetic oligonucleotide
ucgaaggaaguccaguguc

SEQ ID NO: 3155006 - RNA, 19 nt, Artificial Sequence
  Description of Artificial Sequence: Synthetic oligonucleotide
ucccaaaguaggagaggag

SEQ ID NO: 3155007 - RNA, 19 nt, Artificial Sequence
  Description of Artificial Sequence: Synthetic oligonucleotide
aguaagcacuccagccaca

SEQ ID NO: 3155008 - RNA, 19 nt, Artificial Sequence
  Description of Artificial Sequence: Synthetic oligonucleotide
ugacgcaguaagcacucca

SEQ ID NO: 3155009 - RNA, 19 nt, Artificial Sequence
  Description of Artificial Sequence: Synthetic oligonucleotide
agugacgcaguaagcacuc

SEQ ID NO: 3155010 - RNA, 19 nt, Artificial Sequence
  Description of Artificial Sequence: Synthetic oligonucleotide
ugagugacgcaguaagcac

SEQ ID NO: 3155011 - RNA, 19 nt, Artificial Sequence
  Description of Artificial Sequence: Synthetic oligonucleotide
agauggugagugacgcagu

SEQ ID NO: 3155012 - RNA, 19 nt, Artificial Sequence
  Description of Artificial Sequence: Synthetic oligonucleotide
uuccagauggugagugacg

SEQ ID NO: 3155013 - RNA, 19 nt, Artificial Sequence
  Description of Artificial Sequence: Synthetic oligonucleotide
aaagacacaguccaaggcg

SEQ ID NO: 3155014 - RNA, 19 nt, Artificial Sequence
  Description of Artificial Sequence: Synthetic oligonucleotide
aaaagacacaguccaaggc

SEQ ID NO: 3155015 - RNA, 19 nt, Artificial Sequence
  Description of Artificial Sequence: Synthetic oligonucleotide
ugcagaaaagacacagucc

SEQ ID NO: 3155016 - RNA, 19 nt, Artificial Sequence
  Description of Artificial Sequence: Synthetic oligonucleotide
augcagaaaagacacaguc

SEQ ID NO: 3155017 - RNA, 19 nt, Artificial Sequence
  Description of Artificial Sequence: Synthetic oligonucleotide
uuuaugcagaaaagacaca

SEQ ID NO: 3155018 - RNA, 19 nt, Artificial Sequence
  Description of Artificial Sequence: Synthetic oligonucleotide
auuuaugcagaaaagacac

SEQ ID NO: 3155019 - RNA, 19 nt, Artificial Sequence
  Description of Artificial Sequence: Synthetic oligonucleotide
caauaaacugcuaucacaa

SEQ ID NO: 3155020 - RNA, 19 nt, Artificial Sequence
  Description of Artificial Sequence: Synthetic oligonucleotide
gaucauaauaccauagucu

SEQ ID NO: 3155021 - RNA, 19 nt, Artificial Sequence
  Description of Artificial Sequence: Synthetic oligonucleotide
cauaauaccauagucuguu

SEQ ID NO: 3155022 - RNA, 19 nt, Artificial Sequence
  Description of Artificial Sequence: Synthetic oligonucleotide
gcuaugucgccuugaaugu

SEQ ID NO: 3155023 - RNA, 19 nt, Artificial Sequence
  Description of Artificial Sequence: Synthetic oligonucleotide
cuaugucgccuugaauguu

SEQ ID NO: 3155024 - RNA, 19 nt, Artificial Sequence
  Description of Artificial Sequence: Synthetic oligonucleotide
ccaucguguccucguauuu

SEQ ID NO: 3155025 - RNA, 19 nt, Artificial Sequence
  Description of Artificial Sequence: Synthetic oligonucleotide
gugucgagugguauaauaa

SEQ ID NO: 3155026 - RNA, 19 nt, Artificial Sequence
  Description of Artificial Sequence: Synthetic oligonucleotide
gauaauuaugugucuugga

SEQ ID NO: 3155027 - RNA, 19 nt, Artificial Sequence
  Description of Artificial Sequence: Synthetic oligonucleotide
cacagaguaucgauccuau

SEQ ID NO: 3155028 - RNA, 19 nt, Artificial Sequence
  Description of Artificial Sequence: Synthetic oligonucleotide
cagaguaucgauccuaugu

SEQ ID NO: 3155029 - RNA, 19 nt, Artificial Sequence
  Description of Artificial Sequence: Synthetic oligonucleotide
gaaagagucguagcucuca

SEQ ID NO: 3155030 - RNA, 19 nt, Artificial Sequence
  Description of Artificial Sequence: Synthetic oligonucleotide
ggaaagagaccguuaaaua

SEQ ID NO: 3155031 - RNA, 19 nt, Artificial Sequence
  Description of Artificial Sequence: Synthetic oligonucleotide
gaaagagaccguuaaauau

SEQ ID NO: 3155032 - RNA, 19 nt, Artificial Sequence
  Description of Artificial Sequence: Synthetic oligonucleotide
ccauauccauugaguugaa

SEQ ID NO: 3155033 - RNA, 19 nt, Artificial Sequence
  Description of Artificial Sequence: Synthetic oligonucleotide
guuucacauugucucuaca

SEQ ID NO: 3155034 - RNA, 19 nt, Artificial Sequence
  Description of Artificial Sequence: Synthetic oligonucleotide
gccucaucgauucuaugua

SEQ ID NO: 3155035 - RNA, 19 nt, Artificial Sequence
  Description of Artificial Sequence: Synthetic oligonucleotide
gcacgucaaggugcuaaua

SEQ ID NO: 3155036 - RNA, 19 nt, Artificial Sequence
  Description of Artificial Sequence: Synthetic oligonucleotide
ccgccuuucauauaugaga

SEQ ID NO: 3155037 - RNA, 19 nt, Artificial Sequence
  Description of Artificial Sequence: Synthetic oligonucleotide
cgccuuucauauaugagaa

SEQ ID NO: 3155038 - RNA, 19 nt, Artificial Sequence
  Description of Artificial Sequence: Synthetic oligonucleotide
cagcaacuguaaucuguau

SEQ ID NO: 3155039 - RNA, 19 nt, Artificial Sequence
  Description of Artificial Sequence: Synthetic oligonucleotide
ccgcauggugguaucaaua

SEQ ID NO: 3155040 - RNA, 19 nt, Artificial Sequence
  Description of Artificial Sequence: Synthetic oligonucleotide
guaacgcagauaaauggga

SEQ ID NO: 3155041 - RNA, 19 nt, Artificial Sequence
  Description of Artificial Sequence: Synthetic oligonucleotide
cuccuuagguaguaugcca

SEQ ID NO: 3155042 - RNA, 19 nt, Artificial Sequence
  Description of Artificial Sequence: Synthetic oligonucleotide
ccuuagguaguaugccauu

SEQ ID NO: 3155043 - RNA, 19 nt, Artificial Sequence
  Description of Artificial Sequence: Synthetic oligonucleotide
cuuagguaguaugccauuu

SEQ ID NO: 3155044 - RNA, 19 nt, Artificial Sequence
  Description of Artificial Sequence: Synthetic oligonucleotide
gaaucaccuuauaucgggu

SEQ ID NO: 3155045 - RNA, 19 nt, Artificial Sequence
  Description of Artificial Sequence: Synthetic oligonucleotide
cagauucaagaauaaggcu

SEQ ID NO: 3155046 - RNA, 19 nt, Artificial Sequence
  Description of Artificial Sequence: Synthetic oligonucleotide
cucauaaccaagcaccuuu

SEQ ID NO: 3155047 - RNA, 19 nt, Artificial Sequence
  Description of Artificial Sequence: Synthetic oligonucleotide
cgucauugcacuuaauaua

SEQ ID NO: 3155048 - RNA, 19 nt, Artificial Sequence
  Description of Artificial Sequence: Synthetic oligonucleotide
cacuuaauauaguaaggga

SEQ ID NO: 3155049 - RNA, 19 nt, Artificial Sequence
  Description of Artificial Sequence: Synthetic oligonucleotide
cuuaauauaguaagggaca

SEQ ID NO: 3155050 - RNA, 19 nt, Artificial Sequence
  Description of Artificial Sequence: Synthetic oligonucleotide
cucauggacguucuuuaau

SEQ ID NO: 3155051 - RNA, 19 nt, Artificial Sequence
  Description of Artificial Sequence: Synthetic oligonucleotide
gugauguuugcaacucacu

SEQ ID NO: 3155052 - RNA, 19 nt, Artificial Sequence
  Description of Artificial Sequence: Synthetic oligonucleotide
gcaacucacuaguguaguu

SEQ ID NO: 3155053 - RNA, 19 nt, Artificial Sequence
  Description of Artificial Sequence: Synthetic oligonucleotide
ggauuauauuagaguuucu

SEQ ID NO: 3155054 - RNA, 19 nt, Artificial Sequence
  Description of Artificial Sequence: Synthetic oligonucleotide
caagauaaacucuagacau

SEQ ID NO: 3155055 - RNA, 19 nt, Artificial Sequence
  Description of Artificial Sequence: Synthetic oligonucleotide
cucacuuaaaugucuuacu

SEQ ID NO: 3155056 - RNA, 19 nt, Artificial Sequence
  Description of Artificial Sequence: Synthetic oligonucleotide
cacuuaaaugucuuacuau

SEQ ID NO: 3155057 - RNA, 19 nt, Artificial Sequence
  Description of Artificial Sequence: Synthetic oligonucleotide
ccaugggaguguaacguuu

SEQ ID NO: 3155058 - RNA, 19 nt, Artificial Sequence
  Description of Artificial Sequence: Synthetic oligonucleotide
ggaguguaacguuugcgau

SEQ ID NO: 3155059 - RNA, 19 nt, Artificial Sequence
  Description of Artificial Sequence: Synthetic oligonucleotide
gaguguaacguuugcgaua

SEQ ID NO: 3155060 - RNA, 19 nt, Artificial Sequence
  Description of Artificial Sequence: Synthetic oligonucleotide
guaacguuugcgauaaacu

SEQ ID NO: 3155061 - RNA, 19 nt, Artificial Sequence
  Description of Artificial Sequence: Synthetic oligonucleotide
gcgauaaacugccguaauu

SEQ ID NO: 3155062 - RNA, 19 nt, Artificial Sequence
  Description of Artificial Sequence: Synthetic oligonucleotide
cgauaaacugccguaauuu

SEQ ID NO: 3155063 - RNA, 19 nt, Artificial Sequence
  Description of Artificial Sequence: Synthetic oligonucleotide
caucugugauuuaggucau

SEQ ID NO: 3155064 - RNA, 19 nt, Artificial Sequence
  Description of Artificial Sequence: Synthetic oligonucleotide
gugauuuaggucauuaauu

SEQ ID NO: 3155065 - RNA, 19 nt, Artificial Sequence
  Description of Artificial Sequence: Synthetic oligonucleotide
gccgaaguuucuuuaauua

SEQ ID NO: 3155066 - RNA, 19 nt, Artificial Sequence
  Description of Artificial Sequence: Synthetic oligonucleotide
cuauaauaccucuuaauuu

SEQ ID NO: 3155067 - RNA, 19 nt, Artificial Sequence
  Description of Artificial Sequence: Synthetic oligonucleotide
uugugauagcaguuuauug

SEQ ID NO: 3155068 - RNA, 19 nt, Artificial Sequence
  Description of Artificial Sequence: Synthetic oligonucleotide
agacuaugguauuaugauc

SEQ ID NO: 3155069 - RNA, 19 nt, Artificial Sequence
  Description of Artificial Sequence: Synthetic oligonucleotide
aacagacuaugguauuaug

SEQ ID NO: 3155070 - RNA, 19 nt, Artificial Sequence
  Description of Artificial Sequence: Synthetic oligonucleotide
acauucaaggcgacauagc

SEQ ID NO: 3155071 - RNA, 19 nt, Artificial Sequence
  Description of Artificial Sequence: Synthetic oligonucleotide
aacauucaaggcgacauag

SEQ ID NO: 3155072 - RNA, 19 nt, Artificial Sequence
  Description of Artificial Sequence: Synthetic oligonucleotide
aaauacgaggacacgaugg

SEQ ID NO: 3155073 - RNA, 19 nt, Artificial Sequence
  Description of Artificial Sequence: Synthetic oligonucleotide
uuauuauaccacucgacac

SEQ ID NO: 3155074 - RNA, 19 nt, Artificial Sequence
  Description of Artificial Sequence: Synthetic oligonucleotide
uccaagacacauaauuauc

SEQ ID NO: 3155075 - RNA, 19 nt, Artificial Sequence
  Description of Artificial Sequence: Synthetic oligonucleotide
auaggaucgauacucugug

SEQ ID NO: 3155076 - RNA, 19 nt, Artificial Sequence
  Description of Artificial Sequence: Synthetic oligonucleotide
acauaggaucgauacucug

SEQ ID NO: 3155077 - RNA, 19 nt, Artificial Sequence
  Description of Artificial Sequence: Synthetic oligonucleotide
ugagagcuacgacucuuuc

SEQ ID NO: 3155078 - RNA, 19 nt, Artificial Sequence
  Description of Artificial Sequence: Synthetic oligonucleotide
uauuuaacggucucuuucc

SEQ ID NO: 3155079 - RNA, 19 nt, Artificial Sequence
  Description of Artificial Sequence: Synthetic oligonucleotide
auauuuaacggucucuuuc

SEQ ID NO: 3155080 - RNA, 19 nt, Artificial Sequence
  Description of Artificial Sequence: Synthetic oligonucleotide
uucaacucaauggauaugg

SEQ ID NO: 3155081 - RNA, 19 nt, Artificial Sequence
  Description of Artificial Sequence: Synthetic oligonucleotide
uguagagacaaugugaaac

SEQ ID NO: 3155082 - RNA, 19 nt, Artificial Sequence
  Description of Artificial Sequence: Synthetic oligonucleotide
uacauagaaucgaugaggc

SEQ ID NO: 3155083 - RNA, 19 nt, Artificial Sequence
  Description of Artificial Sequence: Synthetic oligonucleotide
uauuagcaccuugacgugc

SEQ ID NO: 3155084 - RNA, 19 nt, Artificial Sequence
  Description of Artificial Sequence: Synthetic oligonucleotide
ucucauauaugaaaggcgg

SEQ ID NO: 3155085 - RNA, 19 nt, Artificial Sequence
  Description of Artificial Sequence: Synthetic oligonucleotide
uucucauauaugaaaggcg

SEQ ID NO: 3155086 - RNA, 19 nt, Artificial Sequence
  Description of Artificial Sequence: Synthetic oligonucleotide
auacagauuacaguugcug

SEQ ID NO: 3155087 - RNA, 19 nt, Artificial Sequence
  Description of Artificial Sequence: Synthetic oligonucleotide
uauugauaccaccaugcgg

SEQ ID NO: 3155088 - RNA, 19 nt, Artificial Sequence
  Description of Artificial Sequence: Synthetic oligonucleotide
ucccauuuaucugcguuac

SEQ ID NO: 3155089 - RNA, 19 nt, Artificial Sequence
  Description of Artificial Sequence: Synthetic oligonucleotide
uggcauacuaccuaaggag

SEQ ID NO: 3155090 - RNA, 19 nt, Artificial Sequence
  Description of Artificial Sequence: Synthetic oligonucleotide
aauggcauacuaccuaagg

SEQ ID NO: 3155091 - RNA, 19 nt, Artificial Sequence
  Description of Artificial Sequence: Synthetic oligonucleotide
aaauggcauacuaccuaag

SEQ ID NO: 3155092 - RNA, 19 nt, Artificial Sequence
  Description of Artificial Sequence: Synthetic oligonucleotide
acccgauauaaggugauuc

SEQ ID NO: 3155093 - RNA, 19 nt, Artificial Sequence
  Description of Artificial Sequence: Synthetic oligonucleotide
agccuuauucuugaaucug

SEQ ID NO: 3155094 - RNA, 19 nt, Artificial Sequence
  Description of Artificial Sequence: Synthetic oligonucleotide
aaaggugcuugguuaugag

SEQ ID NO: 3155095 - RNA, 19 nt, Artificial Sequence
  Description of Artificial Sequence: Synthetic oligonucleotide
uauauuaagugcaaugacg

SEQ ID NO: 3155096 - RNA, 19 nt, Artificial Sequence
  Description of Artificial Sequence: Synthetic oligonucleotide
ucccuuacuauauuaagug

SEQ ID NO: 3155097 - RNA, 19 nt, Artificial Sequence
  Description of Artificial Sequence: Synthetic oligonucleotide
ugucccuuacuauauuaag

SEQ ID NO: 3155098 - RNA, 19 nt, Artificial Sequence
  Description of Artificial Sequence: Synthetic oligonucleotide
auuaaagaacguccaugag

SEQ ID NO: 3155099 - RNA, 19 nt, Artificial Sequence
  Description of Artificial Sequence: Synthetic oligonucleotide
agugaguugcaaacaucac

SEQ ID NO: 3155100 - RNA, 19 nt, Artificial Sequence
  Description of Artificial Sequence: Synthetic oligonucleotide
aacuacacuagugaguugc

SEQ ID NO: 3155101 - RNA, 19 nt, Artificial Sequence
  Description of Artificial Sequence: Synthetic oligonucleotide
agaaacucuaauauaaucc

SEQ ID NO: 3155102 - RNA, 19 nt, Artificial Sequence
  Description of Artificial Sequence: Synthetic oligonucleotide
augucuagaguuuaucuug

SEQ ID NO: 3155103 - RNA, 19 nt, Artificial Sequence
  Description of Artificial Sequence: Synthetic oligonucleotide
aguaagacauuuaagugag

SEQ ID NO: 3155104 - RNA, 19 nt, Artificial Sequence
  Description of Artificial Sequence: Synthetic oligonucleotide
auaguaagacauuuaagug

SEQ ID NO: 3155105 - RNA, 19 nt, Artificial Sequence
  Description of Artificial Sequence: Synthetic oligonucleotide
aaacguuacacucccaugg

SEQ ID NO: 3155106 - RNA, 19 nt, Artificial Sequence
  Description of Artificial Sequence: Synthetic oligonucleotide
aucgcaaacguuacacucc

SEQ ID NO: 3155107 - RNA, 19 nt, Artificial Sequence
  Description of Artificial Sequence: Synthetic oligonucleotide
uaucgcaaacguuacacuc

SEQ ID NO: 3155108 - RNA, 19 nt, Artificial Sequence
  Description of Artificial Sequence: Synthetic oligonucleotide
aguuuaucgcaaacguuac

SEQ ID NO: 3155109 - RNA, 19 nt, Artificial Sequence
  Description of Artificial Sequence: Synthetic oligonucleotide
aauuacggcaguuuaucgc

SEQ ID NO: 3155110 - RNA, 19 nt, Artificial Sequence
  Description of Artificial Sequence: Synthetic oligonucleotide
aaauuacggcaguuuaucg

SEQ ID NO: 3155111 - RNA, 19 nt, Artificial Sequence
  Description of Artificial Sequence: Synthetic oligonucleotide
augaccuaaaucacagaug

SEQ ID NO: 3155112 - RNA, 19 nt, Artificial Sequence
  Description of Artificial Sequence: Synthetic oligonucleotide
aauuaaugaccuaaaucac

SEQ ID NO: 3155113 - RNA, 19 nt, Artificial Sequence
  Description of Artificial Sequence: Synthetic oligonucleotide
uaauuaaagaaacuucggc

SEQ ID NO: 3155114 - RNA, 19 nt, Artificial Sequence
  Description of Artificial Sequence: Synthetic oligonucleotide
aaauuaagagguauuauag

SEQ ID NO: 3155115 - RNA, 19 nt, Artificial Sequence
  Description of Artificial Sequence: Synthetic oligonucleotide
ccgcgauuaccaccgugau

SEQ ID NO: 3155116 - RNA, 19 nt, Artificial Sequence
  Description of Artificial Sequence: Synthetic oligonucleotide
gcgauuaccaccgugauca

SEQ ID NO: 3155117 - RNA, 19 nt, Artificial Sequence
  Description of Artificial Sequence: Synthetic oligonucleotide
cgauuaccaccgugaucaa

SEQ ID NO: 3155118 - RNA, 19 nt, Artificial Sequence
  Description of Artificial Sequence: Synthetic oligonucleotide
auuaccaccgugaucaaca

SEQ ID NO: 3155119 - RNA, 19 nt, Artificial Sequence
  Description of Artificial Sequence: Synthetic oligonucleotide
cgugaucaacaucugcggu

SEQ ID NO: 3155120 - RNA, 19 nt, Artificial Sequence
  Description of Artificial Sequence: Synthetic oligonucleotide
ugaucaacaucugcgguga

SEQ ID NO: 3155121 - RNA, 19 nt, Artificial Sequence
  Description of Artificial Sequence: Synthetic oligonucleotide
caacaucugcggugacaca

SEQ ID NO: 3155122 - RNA, 19 nt, Artificial Sequence
  Description of Artificial Sequence: Synthetic oligonucleotide
ucugcggugacacagucgu

SEQ ID NO: 3155123 - RNA, 19 nt, Artificial Sequence
  Description of Artificial Sequence: Synthetic oligonucleotide
caugaacugguguggccga

SEQ ID NO: 3155124 - RNA, 19 nt, Artificial Sequence
  Description of Artificial Sequence: Synthetic oligonucleotide
acuccgugaagaccaggga

SEQ ID NO: 3155125 - RNA, 19 nt, Artificial Sequence
  Description of Artificial Sequence: Synthetic oligonucleotide
cugaccgucaccuucguca

SEQ ID NO: 3155126 - RNA, 19 nt, Artificial Sequence
  Description of Artificial Sequence: Synthetic oligonucleotide
gaccgucaccuucgucauu

SEQ ID NO: 3155127 - RNA, 19 nt, Artificial Sequence
  Description of Artificial Sequence: Synthetic oligonucleotide
ucaccuucgucauucuugu

SEQ ID NO: 3155128 - RNA, 19 nt, Artificial Sequence
  Description of Artificial Sequence: Synthetic oligonucleotide
cuucgucauucuugucuca

SEQ ID NO: 3155129 - RNA, 19 nt, Artificial Sequence
  Description of Artificial Sequence: Synthetic oligonucleotide
uucgucauucuugucucaa

SEQ ID NO: 3155130 - RNA, 19 nt, Artificial Sequence
  Description of Artificial Sequence: Synthetic oligonucleotide
auucuugucucaaccggcu

SEQ ID NO: 3155131 - RNA, 19 nt, Artificial Sequence
  Description of Artificial Sequence: Synthetic oligonucleotide
aaccggcucccuggugauu

SEQ ID NO: 3155132 - RNA, 19 nt, Artificial Sequence
  Description of Artificial Sequence: Synthetic oligonucleotide
accggcucccuggugauuu

SEQ ID NO: 3155133 - RNA, 19 nt, Artificial Sequence
  Description of Artificial Sequence: Synthetic oligonucleotide
cucccuggugauuuucgaa

SEQ ID NO: 3155134 - RNA, 19 nt, Artificial Sequence
  Description of Artificial Sequence: Synthetic oligonucleotide
ucccuggugauuuucgaaa

SEQ ID NO: 3155135 - RNA, 19 nt, Artificial Sequence
  Description of Artificial Sequence: Synthetic oligonucleotide
ccuggugauuuucgaaaca

SEQ ID NO: 3155136 - RNA, 19 nt, Artificial Sequence
  Description of Artificial Sequence: Synthetic oligonucleotide
uggugauuuucgaaacagu

SEQ ID NO: 3155137 - RNA, 19 nt, Artificial Sequence
  Description of Artificial Sequence: Synthetic oligonucleotide
ggugauuuucgaaacaguu

SEQ ID NO: 3155138 - RNA, 19 nt, Artificial Sequence
  Description of Artificial Sequence: Synthetic oligonucleotide
gugauuuucgaaacaguuu

SEQ ID NO: 3155139 - RNA, 19 nt, Artificial Sequence
  Description of Artificial Sequence: Synthetic oligonucleotide
uuuucgaaacaguuuccga

SEQ ID NO: 3155140 - RNA, 19 nt, Artificial Sequence
  Description of Artificial Sequence: Synthetic oligonucleotide
uucgaaacaguuuccgaga

SEQ ID NO: 3155141 - RNA, 19 nt, Artificial Sequence
  Description of Artificial Sequence: Synthetic oligonucleotide
ucgaaacaguuuccgagau

SEQ ID NO: 3155142 - RNA, 19 nt, Artificial Sequence
  Description of Artificial Sequence: Synthetic oligonucleotide
aaacaguuuccgagauggu

SEQ ID NO: 3155143 - RNA, 19 nt, Artificial Sequence
  Description of Artificial Sequence: Synthetic oligonucleotide
aacaguuuccgagauggua

SEQ ID NO: 3155144 - RNA, 19 nt, Artificial Sequence
  Description of Artificial Sequence: Synthetic oligonucleotide
acaguuuccgagaugguaa

SEQ ID NO: 3155145 - RNA, 19 nt, Artificial Sequence
  Description of Artificial Sequence: Synthetic oligonucleotide
caguuuccgagaugguaaa

SEQ ID NO: 3155146 - RNA, 19 nt, Artificial Sequence
  Description of Artificial Sequence: Synthetic oligonucleotide
uuuccgagaugguaaaaca

SEQ ID NO: 3155147 - RNA, 19 nt, Artificial Sequence
  Description of Artificial Sequence: Synthetic oligonucleotide
uuccgagaugguaaaacau

SEQ ID NO: 3155148 - RNA, 19 nt, Artificial Sequence
  Description of Artificial Sequence: Synthetic oligonucleotide
uccgagaugguaaaacauu

SEQ ID NO: 3155149 - RNA, 19 nt, Artificial Sequence
  Description of Artificial Sequence: Synthetic oligonucleotide
guaaaacauuacggagggu

SEQ ID NO: 3155150 - RNA, 19 nt, Artificial Sequence
  Description of Artificial Sequence: Synthetic oligonucleotide
uaaaacauuacggaggguu

SEQ ID NO: 3155151 - RNA, 19 nt, Artificial Sequence
  Description of Artificial Sequence: Synthetic oligonucleotide
aaacauuacggaggguugu

SEQ ID NO: 3155152 - RNA, 19 nt, Artificial Sequence
  Description of Artificial Sequence: Synthetic oligonucleotide
aacauuacggaggguugua

SEQ ID NO: 3155153 - RNA, 19 nt, Artificial Sequence
  Description of Artificial Sequence: Synthetic oligonucleotide
cauuacggaggguuguagu

SEQ ID NO: 3155154 - RNA, 19 nt, Artificial Sequence
  Description of Artificial Sequence: Synthetic oligonucleotide
ucccgucgcacugucaccu

SEQ ID NO: 3155155 - RNA, 19 nt, Artificial Sequence
  Description of Artificial Sequence: Synthetic oligonucleotide
cccgucgcacugucaccuu

SEQ ID NO: 3155156 - RNA, 19 nt, Artificial Sequence
  Description of Artificial Sequence: Synthetic oligonucleotide
cgucgcacugucaccuuca

SEQ ID NO: 3155157 - RNA, 19 nt, Artificial Sequence
  Description of Artificial Sequence: Synthetic oligonucleotide
uucaggucccucuagcgcu

SEQ ID NO: 3155158 - RNA, 19 nt, Artificial Sequence
  Description of Artificial Sequence: Synthetic oligonucleotide
cccucuagcgcugguguca

SEQ ID NO: 3155159 - RNA, 19 nt, Artificial Sequence
  Description of Artificial Sequence: Synthetic oligonucleotide
ucuagcgcuggugucaaua

SEQ ID NO: 3155160 - RNA, 19 nt, Artificial Sequence
  Description of Artificial Sequence: Synthetic oligonucleotide
cgcuggugucaauaaagca

SEQ ID NO: 3155161 - RNA, 19 nt, Artificial Sequence
  Description of Artificial Sequence: Synthetic oligonucleotide
uggugucaauaaagcacgu

SEQ ID NO: 3155162 - RNA, 19 nt, Artificial Sequence
  Description of Artificial Sequence: Synthetic oligonucleotide
aucacggugguaaucgcgg

SEQ ID NO: 3155163 - RNA, 19 nt, Artificial Sequence
  Description of Artificial Sequence: Synthetic oligonucleotide
ugaucacggugguaaucgc

SEQ ID NO: 3155164 - RNA, 19 nt, Artificial Sequence
  Description of Artificial Sequence: Synthetic oligonucleotide
uugaucacggugguaaucg

SEQ ID NO: 3155165 - RNA, 19 nt, Artificial Sequence
  Description of Artificial Sequence: Synthetic oligonucleotide
uguugaucacggugguaau

SEQ ID NO: 3155166 - RNA, 19 nt, Artificial Sequence
  Description of Artificial Sequence: Synthetic oligonucleotide
accgcagauguugaucacg

SEQ ID NO: 3155167 - RNA, 19 nt, Artificial Sequence
  Description of Artificial Sequence: Synthetic oligonucleotide
ucaccgcagauguugauca

SEQ ID NO: 3155168 - RNA, 19 nt, Artificial Sequence
  Description of Artificial Sequence: Synthetic oligonucleotide
ugugucaccgcagauguug

SEQ ID NO: 3155169 - RNA, 19 nt, Artificial Sequence
  Description of Artificial Sequence: Synthetic oligonucleotide
acgacugugucaccgcaga

SEQ ID NO: 3155170 - RNA, 19 nt, Artificial Sequence
  Description of Artificial Sequence: Synthetic oligonucleotide
ucggccacaccaguucaug

SEQ ID NO: 3155171 - RNA, 19 nt, Artificial Sequence
  Description of Artificial Sequence: Synthetic oligonucleotide
ucccuggucuucacggagu

SEQ ID NO: 3155172 - RNA, 19 nt, Artificial Sequence
  Description of Artificial Sequence: Synthetic oligonucleotide
ugacgaaggugacggucag

SEQ ID NO: 3155173 - RNA, 19 nt, Artificial Sequence
  Description of Artificial Sequence: Synthetic oligonucleotide
aaugacgaaggugacgguc

SEQ ID NO: 3155174 - RNA, 19 nt, Artificial Sequence
  Description of Artificial Sequence: Synthetic oligonucleotide
acaagaaugacgaagguga

SEQ ID NO: 3155175 - RNA, 19 nt, Artificial Sequence
  Description of Artificial Sequence: Synthetic oligonucleotide
ugagacaagaaugacgaag

SEQ ID NO: 3155176 - RNA, 19 nt, Artificial Sequence
  Description of Artificial Sequence: Synthetic oligonucleotide
uugagacaagaaugacgaa

SEQ ID NO: 3155177 - RNA, 19 nt, Artificial Sequence
  Description of Artificial Sequence: Synthetic oligonucleotide
agccgguugagacaagaau

SEQ ID NO: 3155178 - RNA, 19 nt, Artificial Sequence
  Description of Artificial Sequence: Synthetic oligonucleotide
aaucaccagggagccgguu

SEQ ID NO: 3155179 - RNA, 19 nt, Artificial Sequence
  Description of Artificial Sequence: Synthetic oligonucleotide
aaaucaccagggagccggu

SEQ ID NO: 3155180 - RNA, 19 nt, Artificial Sequence
  Description of Artificial Sequence: Synthetic oligonucleotide
uucgaaaaucaccagggag

SEQ ID NO: 3155181 - RNA, 19 nt, Artificial Sequence
  Description of Artificial Sequence: Synthetic oligonucleotide
uuucgaaaaucaccaggga

SEQ ID NO: 3155182 - RNA, 19 nt, Artificial Sequence
  Description of Artificial Sequence: Synthetic oligonucleotide
uguuucgaaaaucaccagg

SEQ ID NO: 3155183 - RNA, 19 nt, Artificial Sequence
  Description of Artificial Sequence: Synthetic oligonucleotide
acuguuucgaaaaucacca

SEQ ID NO: 3155184 - RNA, 19 nt, Artificial Sequence
  Description of Artificial Sequence: Synthetic oligonucleotide
aacuguuucgaaaaucacc

SEQ ID NO: 3155185 - RNA, 19 nt, Artificial Sequence
  Description of Artificial Sequence: Synthetic oligonucleotide
aaacuguuucgaaaaucac

SEQ ID NO: 3155186 - RNA, 19 nt, Artificial Sequence
  Description of Artificial Sequence: Synthetic oligonucleotide
ucggaaacuguuucgaaaa

SEQ ID NO: 3155187 - RNA, 19 nt, Artificial Sequence
  Description of Artificial Sequence: Synthetic oligonucleotide
ucucggaaacuguuucgaa

SEQ ID NO: 3155188 - RNA, 19 nt, Artificial Sequence
  Description of Artificial Sequence: Synthetic oligonucleotide
aucucggaaacuguuucga

SEQ ID NO: 3155189 - RNA, 19 nt, Artificial Sequence
  Description of Artificial Sequence: Synthetic oligonucleotide
accaucucggaaacuguuu

SEQ ID NO: 3155190 - RNA, 19 nt, Artificial Sequence
  Description of Artificial Sequence: Synthetic oligonucleotide
uaccaucucggaaacuguu

SEQ ID NO: 3155191 - RNA, 19 nt, Artificial Sequence
  Description of Artificial Sequence: Synthetic oligonucleotide
uuaccaucucggaaacugu

SEQ ID NO: 3155192 - RNA, 19 nt, Artificial Sequence
  Description of Artificial Sequence: Synthetic oligonucleotide
uuuaccaucucggaaacug

SEQ ID NO: 3155193 - RNA, 19 nt, Artificial Sequence
  Description of Artificial Sequence: Synthetic oligonucleotide
uguuuuaccaucucggaaa

SEQ ID NO: 3155194 - RNA, 19 nt, Artificial Sequence
  Description of Artificial Sequence: Synthetic oligonucleotide
auguuuuaccaucucggaa

SEQ ID NO: 3155195 - RNA, 19 nt, Artificial Sequence
  Description of Artificial Sequence: Synthetic oligonucleotide
aauguuuuaccaucucgga

SEQ ID NO: 3155196 - RNA, 19 nt, Artificial Sequence
  Description of Artificial Sequence: Synthetic oligonucleotide
acccuccguaauguuuuac

SEQ ID NO: 3155197 - RNA, 19 nt, Artificial Sequence
  Description of Artificial Sequence: Synthetic oligonucleotide
aacccuccguaauguuuua

SEQ ID NO: 3155198 - RNA, 19 nt, Artificial Sequence
  Description of Artificial Sequence: Synthetic oligonucleotide
acaacccuccguaauguuu

SEQ ID NO: 3155199 - RNA, 19 nt, Artificial Sequence
  Description of Artificial Sequence: Synthetic oligonucleotide
uacaacccuccguaauguu

SEQ ID NO: 3155200 - RNA, 19 nt, Artificial Sequence
  Description of Artificial Sequence: Synthetic oligonucleotide
acuacaacccuccguaaug

SEQ ID NO: 3155201 - RNA, 19 nt, Artificial Sequence
  Description of Artificial Sequence: Synthetic oligonucleotide
aggugacagugcgacggga

SEQ ID NO: 3155202 - RNA, 19 nt, Artificial Sequence
  Description of Artificial Sequence: Synthetic oligonucleotide
aaggugacagugcgacggg

SEQ ID NO: 3155203 - RNA, 19 nt, Artificial Sequence
  Description of Artificial Sequence: Synthetic oligonucleotide
ugaaggugacagugcgacg

SEQ ID NO: 3155204 - RNA, 19 nt, Artificial Sequence
  Description of Artificial Sequence: Synthetic oligonucleotide
agcgcuagagggaccugaa

SEQ ID NO: 3155205 - RNA, 19 nt, Artificial Sequence
  Description of Artificial Sequence: Synthetic oligonucleotide
ugacaccagcgcuagaggg

SEQ ID NO: 3155206 - RNA, 19 nt, Artificial Sequence
  Description of Artificial Sequence: Synthetic oligonucleotide
uauugacaccagcgcuaga

SEQ ID NO: 3155207 - RNA, 19 nt, Artificial Sequence
  Description of Artificial Sequence: Synthetic oligonucleotide
ugcuuuauugacaccagcg

SEQ ID NO: 3155208 - RNA, 19 nt, Artificial Sequence
  Description of Artificial Sequence: Synthetic oligonucleotide
acgugcuuuauugacacca

SEQ ID NO: 3155209 - RNA, 19 nt, Artificial Sequence
  Description of Artificial Sequence: Synthetic oligonucleotide
uggaccaagaccaguacaa

SEQ ID NO: 3155210 - RNA, 19 nt, Artificial Sequence
  Description of Artificial Sequence: Synthetic oligonucleotide
ggaccaagaccaguacaag

SEQ ID NO: 3155211 - RNA, 19 nt, Artificial Sequence
  Description of Artificial Sequence: Synthetic oligonucleotide
caagaccaguacaagguuc

SEQ ID NO: 3155212 - RNA, 19 nt, Artificial Sequence
  Description of Artificial Sequence: Synthetic oligonucleotide
agaccaguacaagguuccu

SEQ ID NO: 3155213 - RNA, 19 nt, Artificial Sequence
  Description of Artificial Sequence: Synthetic oligonucleotide
gaccaguacaagguuccug

SEQ ID NO: 3155214 - RNA, 19 nt, Artificial Sequence
  Description of Artificial Sequence: Synthetic oligonucleotide
ccaguacaagguuccugaa

SEQ ID NO: 3155215 - RNA, 19 nt, Artificial Sequence
  Description of Artificial Sequence: Synthetic oligonucleotide
aguacaagguuccugaaac

SEQ ID NO: 3155216 - RNA, 19 nt, Artificial Sequence
  Description of Artificial Sequence: Synthetic oligonucleotide
guacaagguuccugaaacu

SEQ ID NO: 3155217 - RNA, 19 nt, Artificial Sequence
  Description of Artificial Sequence: Synthetic oligonucleotide
uacaagguuccugaaacug

SEQ ID NO: 3155218 - RNA, 19 nt, Artificial Sequence
  Description of Artificial Sequence: Synthetic oligonucleotide
aagguuccugaaacuggag

SEQ ID NO: 3155219 - RNA, 19 nt, Artificial Sequence
  Description of Artificial Sequence: Synthetic oligonucleotide
aaacuggagccccccagag

SEQ ID NO: 3155220 - RNA, 19 nt, Artificial Sequence
  Description of Artificial Sequence: Synthetic oligonucleotide
cccagagcaugguucccgu

SEQ ID NO: 3155221 - RNA, 19 nt, Artificial Sequence
  Description of Artificial Sequence: Synthetic oligonucleotide
ccagagcaugguucccgug

SEQ ID NO: 3155222 - RNA, 19 nt, Artificial Sequence
  Description of Artificial Sequence: Synthetic oligonucleotide
cagagcaugguucccguga

SEQ ID NO: 3155223 - RNA, 19 nt, Artificial Sequence
  Description of Artificial Sequence: Synthetic oligonucleotide
agagcaugguucccgugac

SEQ ID NO: 3155224 - RNA, 19 nt, Artificial Sequence
  Description of Artificial Sequence: Synthetic oligonucleotide
agcaugguucccgugacga

SEQ ID NO: 3155225 - RNA, 19 nt, Artificial Sequence
  Description of Artificial Sequence: Synthetic oligonucleotide
augguucccgugacgacca

SEQ ID NO: 3155226 - RNA, 19 nt, Artificial Sequence
  Description of Artificial Sequence: Synthetic oligonucleotide
ccgugacgaccaccgugau

SEQ ID NO: 3155227 - RNA, 19 nt, Artificial Sequence
  Description of Artificial Sequence: Synthetic oligonucleotide
cgugacgaccaccgugauc

SEQ ID NO: 3155228 - RNA, 19 nt, Artificial Sequence
  Description of Artificial Sequence: Synthetic oligonucleotide
gugacgaccaccgugauca

SEQ ID NO: 3155229 - RNA, 19 nt, Artificial Sequence
  Description of Artificial Sequence: Synthetic oligonucleotide
ugacgaccaccgugaucaa

SEQ ID NO: 3155230 - RNA, 19 nt, Artificial Sequence
  Description of Artificial Sequence: Synthetic oligonucleotide
uccgcagugacacggucgu

SEQ ID NO: 3155231 - RNA, 19 nt, Artificial Sequence
  Description of Artificial Sequence: Synthetic oligonucleotide
ucgugcccgaccacaucgu

SEQ ID NO: 3155232 - RNA, 19 nt, Artificial Sequence
  Description of Artificial Sequence: Synthetic oligonucleotide
gugcccgaccacaucgucu

SEQ ID NO: 3155233 - RNA, 19 nt, Artificial Sequence
  Description of Artificial Sequence: Synthetic oligonucleotide
ugcccgaccacaucgucug

SEQ ID NO: 3155234 - RNA, 19 nt, Artificial Sequence
  Description of Artificial Sequence: Synthetic oligonucleotide
ggucccuguucaacacugu

SEQ ID NO: 3155235 - RNA, 19 nt, Artificial Sequence
  Description of Artificial Sequence: Synthetic oligonucleotide
cugguguugccugggcauc

SEQ ID NO: 3155236 - RNA, 19 nt, Artificial Sequence
  Description of Artificial Sequence: Synthetic oligonucleotide
gguguugccugggcaucgu

SEQ ID NO: 3155237 - RNA, 19 nt, Artificial Sequence
  Description of Artificial Sequence: Synthetic oligonucleotide
guguugccugggcaucgug

SEQ ID NO: 3155238 - RNA, 19 nt, Artificial Sequence
  Description of Artificial Sequence: Synthetic oligonucleotide
gccucaacaucucggccuu

SEQ ID NO: 3155239 - RNA, 19 nt, Artificial Sequence
  Description of Artificial Sequence: Synthetic oligonucleotide
ccucaacaucucggccuug

SEQ ID NO: 3155240 - RNA, 19 nt, Artificial Sequence
  Description of Artificial Sequence: Synthetic oligonucleotide
acaucucggccuuggucgu

SEQ ID NO: 3155241 - RNA, 19 nt, Artificial Sequence
  Description of Artificial Sequence: Synthetic oligonucleotide
caucucggccuuggucgug

SEQ ID NO: 3155242 - RNA, 19 nt, Artificial Sequence
  Description of Artificial Sequence: Synthetic oligonucleotide
aucauccugggcaucauau

SEQ ID NO: 3155243 - RNA, 19 nt, Artificial Sequence
  Description of Artificial Sequence: Synthetic oligonucleotide
ucauccugggcaucauauc

SEQ ID NO: 3155244 - RNA, 19 nt, Artificial Sequence
  Description of Artificial Sequence: Synthetic oligonucleotide
uccauuguccuucugagaa

SEQ ID NO: 3155245 - RNA, 19 nt, Artificial Sequence
  Description of Artificial Sequence: Synthetic oligonucleotide
ccauuguccuucugagaau

SEQ ID NO: 3155246 - RNA, 19 nt, Artificial Sequence
  Description of Artificial Sequence: Synthetic oligonucleotide
cauuguccuucugagaaua

SEQ ID NO: 3155247 - RNA, 19 nt, Artificial Sequence
  Description of Artificial Sequence: Synthetic oligonucleotide
guccuucugagaauagccu

SEQ ID NO: 3155248 - RNA, 19 nt, Artificial Sequence
  Description of Artificial Sequence: Synthetic oligonucleotide
uccuucugagaauagccuu

SEQ ID NO: 3155249 - RNA, 19 nt, Artificial Sequence
  Description of Artificial Sequence: Synthetic oligonucleotide
cuucugagaauagccuuug

SEQ ID NO: 3155250 - RNA, 19 nt, Artificial Sequence
  Description of Artificial Sequence: Synthetic oligonucleotide
auagccuuuggcgcggccu

SEQ ID NO: 3155251 - RNA, 19 nt, Artificial Sequence
  Description of Artificial Sequence: Synthetic oligonucleotide
uagccuuuggcgcggccua

SEQ ID NO: 3155252 - RNA, 19 nt, Artificial Sequence
  Description of Artificial Sequence: Synthetic oligonucleotide
ggagaggagucgcuaccac

SEQ ID NO: 3155253 - RNA, 19 nt, Artificial Sequence
  Description of Artificial Sequence: Synthetic oligonucleotide
gagaggagucgcuaccacu

SEQ ID NO: 3155254 - RNA, 19 nt, Artificial Sequence
  Description of Artificial Sequence: Synthetic oligonucleotide
agaggagucgcuaccacua

SEQ ID NO: 3155255 - RNA, 19 nt, Artificial Sequence
  Description of Artificial Sequence: Synthetic oligonucleotide
gaggagucgcuaccacuag

SEQ ID NO: 3155256 - RNA, 19 nt, Artificial Sequence
  Description of Artificial Sequence: Synthetic oligonucleotide
uuguacuggucuuggucca

SEQ ID NO: 3155257 - RNA, 19 nt, Artificial Sequence
  Description of Artificial Sequence: Synthetic oligonucleotide
cuuguacuggucuuggucc

SEQ ID NO: 3155258 - RNA, 19 nt, Artificial Sequence
  Description of Artificial Sequence: Synthetic oligonucleotide
gaaccuuguacuggucuug

SEQ ID NO: 3155259 - RNA, 19 nt, Artificial Sequence
  Description of Artificial Sequence: Synthetic oligonucleotide
aggaaccuuguacuggucu

SEQ ID NO: 3155260 - RNA, 19 nt, Artificial Sequence
  Description of Artificial Sequence: Synthetic oligonucleotide
caggaaccuuguacugguc

SEQ ID NO: 3155261 - RNA, 19 nt, Artificial Sequence
  Description of Artificial Sequence: Synthetic oligonucleotide
uucaggaaccuuguacugg

SEQ ID NO: 3155262 - RNA, 19 nt, Artificial Sequence
  Description of Artificial Sequence: Synthetic oligonucleotide
guuucaggaaccuuguacu

SEQ ID NO: 3155263 - RNA, 19 nt, Artificial Sequence
  Description of Artificial Sequence: Synthetic oligonucleotide
aguuucaggaaccuuguac

SEQ ID NO: 3155264 - RNA, 19 nt, Artificial Sequence
  Description of Artificial Sequence: Synthetic oligonucleotide
caguuucaggaaccuugua

SEQ ID NO: 3155265 - RNA, 19 nt, Artificial Sequence
  Description of Artificial Sequence: Synthetic oligonucleotide
cuccaguuucaggaaccuu

SEQ ID NO: 3155266 - RNA, 19 nt, Artificial Sequence
  Description of Artificial Sequence: Synthetic oligonucleotide
cucuggggggcuccaguuu

SEQ ID NO: 3155267 - RNA, 19 nt, Artificial Sequence
  Description of Artificial Sequence: Synthetic oligonucleotide
acgggaaccaugcucuggg

SEQ ID NO: 3155268 - RNA, 19 nt, Artificial Sequence
  Description of Artificial Sequence: Synthetic oligonucleotide
cacgggaaccaugcucugg

SEQ ID NO: 3155269 - RNA, 19 nt, Artificial Sequence
  Description of Artificial Sequence: Synthetic oligonucleotide
ucacgggaaccaugcucug

SEQ ID NO: 3155270 - RNA, 19 nt, Artificial Sequence
  Description of Artificial Sequence: Synthetic oligonucleotide
gucacgggaaccaugcucu

SEQ ID NO: 3155271 - RNA, 19 nt, Artificial Sequence
  Description of Artificial Sequence: Synthetic oligonucleotide
ucgucacgggaaccaugcu

SEQ ID NO: 3155272 - RNA, 19 nt, Artificial Sequence
  Description of Artificial Sequence: Synthetic oligonucleotide
uggucgucacgggaaccau

SEQ ID NO: 3155273 - RNA, 19 nt, Artificial Sequence
  Description of Artificial Sequence: Synthetic oligonucleotide
aucacgguggucgucacgg

SEQ ID NO: 3155274 - RNA, 19 nt, Artificial Sequence
  Description of Artificial Sequence: Synthetic oligonucleotide
gaucacgguggucgucacg

SEQ ID NO: 3155275 - RNA, 19 nt, Artificial Sequence
  Description of Artificial Sequence: Synthetic oligonucleotide
ugaucacgguggucgucac

SEQ ID NO: 3155276 - RNA, 19 nt, Artificial Sequence
  Description of Artificial Sequence: Synthetic oligonucleotide
uugaucacgguggucguca

SEQ ID NO: 3155277 - RNA, 19 nt, Artificial Sequence
  Description of Artificial Sequence: Synthetic oligonucleotide
acgaccgugucacugcgga

SEQ ID NO: 3155278 - RNA, 19 nt, Artificial Sequence
  Description of Artificial Sequence: Synthetic oligonucleotide
acgauguggucgggcacga

SEQ ID NO: 3155279 - RNA, 19 nt, Artificial Sequence
  Description of Artificial Sequence: Synthetic oligonucleotide
agacgauguggucgggcac

SEQ ID NO: 3155280 - RNA, 19 nt, Artificial Sequence
  Description of Artificial Sequence: Synthetic oligonucleotide
cagacgauguggucgggca

SEQ ID NO: 3155281 - RNA, 19 nt, Artificial Sequence
  Description of Artificial Sequence: Synthetic oligonucleotide
acaguguugaacagggacc

SEQ ID NO: 3155282 - RNA, 19 nt, Artificial Sequence
  Description of Artificial Sequence: Synthetic oligonucleotide
gaugcccaggcaacaccag

SEQ ID NO: 3155283 - RNA, 19 nt, Artificial Sequence
  Description of Artificial Sequence: Synthetic oligonucleotide
acgaugcccaggcaacacc

SEQ ID NO: 3155284 - RNA, 19 nt, Artificial Sequence
  Description of Artificial Sequence: Synthetic oligonucleotide
cacgaugcccaggcaacac

SEQ ID NO: 3155285 - RNA, 19 nt, Artificial Sequence
  Description of Artificial Sequence: Synthetic oligonucleotide
aaggccgagauguugaggc

SEQ ID NO: 3155286 - RNA, 19 nt, Artificial Sequence
  Description of Artificial Sequence: Synthetic oligonucleotide
caaggccgagauguugagg

SEQ ID NO: 3155287 - RNA, 19 nt, Artificial Sequence
  Description of Artificial Sequence: Synthetic oligonucleotide
acgaccaaggccgagaugu

SEQ ID NO: 3155288 - RNA, 19 nt, Artificial Sequence
  Description of Artificial Sequence: Synthetic oligonucleotide
cacgaccaaggccgagaug

SEQ ID NO: 3155289 - RNA, 19 nt, Artificial Sequence
  Description of Artificial Sequence: Synthetic oligonucleotide
auaugaugcccaggaugau

SEQ ID NO: 3155290 - RNA, 19 nt, Artificial Sequence
  Description of Artificial Sequence: Synthetic oligonucleotide
gauaugaugcccaggauga

SEQ ID NO: 3155291 - RNA, 19 nt, Artificial Sequence
  Description of Artificial Sequence: Synthetic oligonucleotide
uucucagaaggacaaugga

SEQ ID NO: 3155292 - RNA, 19 nt, Artificial Sequence
  Description of Artificial Sequence: Synthetic oligonucleotide
auucucagaaggacaaugg

SEQ ID NO: 3155293 - RNA, 19 nt, Artificial Sequence
  Description of Artificial Sequence: Synthetic oligonucleotide
uauucucagaaggacaaug

SEQ ID NO: 3155294 - RNA, 19 nt, Artificial Sequence
  Description of Artificial Sequence: Synthetic oligonucleotide
aggcuauucucagaaggac

SEQ ID NO: 3155295 - RNA, 19 nt, Artificial Sequence
  Description of Artificial Sequence: Synthetic oligonucleotide
aaggcuauucucagaagga

SEQ ID NO: 3155296 - RNA, 19 nt, Artificial Sequence
  Description of Artificial Sequence: Synthetic oligonucleotide
caaaggcuauucucagaag

SEQ ID NO: 3155297 - RNA, 19 nt, Artificial Sequence
  Description of Artificial Sequence: Synthetic oligonucleotide
aggccgcgccaaaggcuau

SEQ ID NO: 3155298 - RNA, 19 nt, Artificial Sequence
  Description of Artificial Sequence: Synthetic oligonucleotide
uaggccgcgccaaaggcua

SEQ ID NO: 3155299 - RNA, 19 nt, Artificial Sequence
  Description of Artificial Sequence: Synthetic oligonucleotide
gugguagcgacuccucucc

SEQ ID NO: 3155300 - RNA, 19 nt, Artificial Sequence
  Description of Artificial Sequence: Synthetic oligonucleotide
agugguagcgacuccucuc

SEQ ID NO: 3155301 - RNA, 19 nt, Artificial Sequence
  Description of Artificial Sequence: Synthetic oligonucleotide
uagugguagcgacuccucu

SEQ ID NO: 3155302 - RNA, 19 nt, Artificial Sequence
  Description of Artificial Sequence: Synthetic oligonucleotide
cuagugguagcgacuccuc

SEQ ID NO: 3155303 - RNA, 19 nt, Artificial Sequence
  Description of Artificial Sequence: Synthetic oligonucleotide
cacacgagcccagggagaa

SEQ ID NO: 3155304 - RNA, 19 nt, Artificial Sequence
  Description of Artificial Sequence: Synthetic oligonucleotide
acacgagcccagggagaau

SEQ ID NO: 3155305 - RNA, 19 nt, Artificial Sequence
  Description of Artificial Sequence: Synthetic oligonucleotide
gagcccagggagaauccca

SEQ ID NO: 3155306 - RNA, 19 nt, Artificial Sequence
  Description of Artificial Sequence: Synthetic oligonucleotide
agcccagggagaaucccag

SEQ ID NO: 3155307 - RNA, 19 nt, Artificial Sequence
  Description of Artificial Sequence: Synthetic oligonucleotide
gcccagggagaaucccaga

SEQ ID NO: 3155308 - RNA, 19 nt, Artificial Sequence
  Description of Artificial Sequence: Synthetic oligonucleotide
cccagggagaaucccagau

SEQ ID NO: 3155309 - RNA, 19 nt, Artificial Sequence
  Description of Artificial Sequence: Synthetic oligonucleotide
ccagggagaaucccagaug

SEQ ID NO: 3155310 - RNA, 19 nt, Artificial Sequence
  Description of Artificial Sequence: Synthetic oligonucleotide
ggagaaucccagaugcgca

SEQ ID NO: 3155311 - RNA, 19 nt, Artificial Sequence
  Description of Artificial Sequence: Synthetic oligonucleotide
gagaaucccagaugcgcag

SEQ ID NO: 3155312 - RNA, 19 nt, Artificial Sequence
  Description of Artificial Sequence: Synthetic oligonucleotide
aaucccagaugcgcagaca

SEQ ID NO: 3155313 - RNA, 19 nt, Artificial Sequence
  Description of Artificial Sequence: Synthetic oligonucleotide
gagggcacccacgucagga

SEQ ID NO: 3155314 - RNA, 19 nt, Artificial Sequence
  Description of Artificial Sequence: Synthetic oligonucleotide
cccacgucaggaaaccuga

SEQ ID NO: 3155315 - RNA, 19 nt, Artificial Sequence
  Description of Artificial Sequence: Synthetic oligonucleotide
ccacgucaggaaaccugag

SEQ ID NO: 3155316 - RNA, 19 nt, Artificial Sequence
  Description of Artificial Sequence: Synthetic oligonucleotide
cgucaggaaaccugagccu

SEQ ID NO: 3155317 - RNA, 19 nt, Artificial Sequence
  Description of Artificial Sequence: Synthetic oligonucleotide
gucaggaaaccugagccuc

SEQ ID NO: 3155318 - RNA, 19 nt, Artificial Sequence
  Description of Artificial Sequence: Synthetic oligonucleotide
aaaccugagccucggggaa

SEQ ID NO: 3155319 - RNA, 19 nt, Artificial Sequence
  Description of Artificial Sequence: Synthetic oligonucleotide
agcacggcuccugcgacga

SEQ ID NO: 3155320 - RNA, 19 nt, Artificial Sequence
  Description of Artificial Sequence: Synthetic oligonucleotide
cuccugcgacgaccacggu

SEQ ID NO: 3155321 - RNA, 19 nt, Artificial Sequence
  Description of Artificial Sequence: Synthetic oligonucleotide
ggugaucaacgucccggug

SEQ ID NO: 3155322 - RNA, 19 nt, Artificial Sequence
  Description of Artificial Sequence: Synthetic oligonucleotide
gaucaacgucccgguggag

SEQ ID NO: 3155323 - RNA, 19 nt, Artificial Sequence
  Description of Artificial Sequence: Synthetic oligonucleotide
ucuuccugaacugguucug

SEQ ID NO: 3155324 - RNA, 19 nt, Artificial Sequence
  Description of Artificial Sequence: Synthetic oligonucleotide
uccuccugaccaucauauc

SEQ ID NO: 3155325 - RNA, 19 nt, Artificial Sequence
  Description of Artificial Sequence: Synthetic oligonucleotide
cuccugaccaucauaucca

SEQ ID NO: 3155326 - RNA, 19 nt, Artificial Sequence
  Description of Artificial Sequence: Synthetic oligonucleotide
gaccaucauauccauuguc

SEQ ID NO: 3155327 - RNA, 19 nt, Artificial Sequence
  Description of Artificial Sequence: Synthetic oligonucleotide
gcggccgcuaccacuagga

SEQ ID NO: 3155328 - RNA, 19 nt, Artificial Sequence
  Description of Artificial Sequence: Synthetic oligonucleotide
ugcuccgggugcacagacu

SEQ ID NO: 3155329 - RNA, 19 nt, Artificial Sequence
  Description of Artificial Sequence: Synthetic oligonucleotide
gcuccgggugcacagacug

SEQ ID NO: 3155330 - RNA, 19 nt, Artificial Sequence
  Description of Artificial Sequence: Synthetic oligonucleotide
cgggugcacagacuggccu

SEQ ID NO: 3155331 - RNA, 19 nt, Artificial Sequence
  Description of Artificial Sequence: Synthetic oligonucleotide
gggugcacagacuggccug

SEQ ID NO: 3155332 - RNA, 19 nt, Artificial Sequence
  Description of Artificial Sequence: Synthetic oligonucleotide
gugcacagacuggccugua

SEQ ID NO: 3155333 - RNA, 19 nt, Artificial Sequence
  Description of Artificial Sequence: Synthetic oligonucleotide
ugcacagacuggccuguau

SEQ ID NO: 3155334 - RNA, 19 nt, Artificial Sequence
  Description of Artificial Sequence: Synthetic oligonucleotide
gcacagacuggccuguaug

SEQ ID NO: 3155335 - RNA, 19 nt, Artificial Sequence
  Description of Artificial Sequence: Synthetic oligonucleotide
acagacuggccuguaugca

SEQ ID NO: 3155336 - RNA, 19 nt, Artificial Sequence
  Description of Artificial Sequence: Synthetic oligonucleotide
cagacuggccuguaugcag

SEQ ID NO: 3155337 - RNA, 19 nt, Artificial Sequence
  Description of Artificial Sequence: Synthetic oligonucleotide
cuggccuguaugcagccga

SEQ ID NO: 3155338 - RNA, 19 nt, Artificial Sequence
  Description of Artificial Sequence: Synthetic oligonucleotide
uggccuguaugcagccgac

SEQ ID NO: 3155339 - RNA, 19 nt, Artificial Sequence
  Description of Artificial Sequence: Synthetic oligonucleotide
guaugcagccgacuucaau

SEQ ID NO: 3155340 - RNA, 19 nt, Artificial Sequence
  Description of Artificial Sequence: Synthetic oligonucleotide
uaugcagccgacuucaaua

SEQ ID NO: 3155341 - RNA, 19 nt, Artificial Sequence
  Description of Artificial Sequence: Synthetic oligonucleotide
augcagccgacuucaauaa

SEQ ID NO: 3155342 - RNA, 19 nt, Artificial Sequence
  Description of Artificial Sequence: Synthetic oligonucleotide
gcagccgacuucaauaaag

SEQ ID NO: 3155343 - RNA, 19 nt, Artificial Sequence
  Description of Artificial Sequence: Synthetic oligonucleotide
agccgacuucaauaaagug

SEQ ID NO: 3155344 - RNA, 19 nt, Artificial Sequence
  Description of Artificial Sequence: Synthetic oligonucleotide
cgacuucaauaaagugcca

SEQ ID NO: 3155345 - RNA, 19 nt, Artificial Sequence
  Description of Artificial Sequence: Synthetic oligonucleotide
gacuucaauaaagugccau

SEQ ID NO: 3155346 - RNA, 19 nt, Artificial Sequence
  Description of Artificial Sequence: Synthetic oligonucleotide
acuucaauaaagugccaug

SEQ ID NO: 3155347 - RNA, 19 nt, Artificial Sequence
  Description of Artificial Sequence: Synthetic oligonucleotide
cuucaauaaagugccaugu

SEQ ID NO: 3155348 - RNA, 19 nt, Artificial Sequence
  Description of Artificial Sequence: Synthetic oligonucleotide
uucaauaaagugccaugug

SEQ ID NO: 3155349 - RNA, 19 nt, Artificial Sequence
  Description of Artificial Sequence: Synthetic oligonucleotide
ucaauaaagugccaugugu

SEQ ID NO: 3155350 - RNA, 19 nt, Artificial Sequence
  Description of Artificial Sequence: Synthetic oligonucleotide
uucucccugggcucgugug

SEQ ID NO: 3155351 - RNA, 19 nt, Artificial Sequence
  Description of Artificial Sequence: Synthetic oligonucleotide
auucucccugggcucgugu

SEQ ID NO: 3155352 - RNA, 19 nt, Artificial Sequence
  Description of Artificial Sequence: Synthetic oligonucleotide
ugggauucucccugggcuc

SEQ ID NO: 3155353 - RNA, 19 nt, Artificial Sequence
  Description of Artificial Sequence: Synthetic oligonucleotide
cugggauucucccugggcu

SEQ ID NO: 3155354 - RNA, 19 nt, Artificial Sequence
  Description of Artificial Sequence: Synthetic oligonucleotide
ucugggauucucccugggc

SEQ ID NO: 3155355 - RNA, 19 nt, Artificial Sequence
  Description of Artificial Sequence: Synthetic oligonucleotide
aucugggauucucccuggg

SEQ ID NO: 3155356 - RNA, 19 nt, Artificial Sequence
  Description of Artificial Sequence: Synthetic oligonucleotide
caucugggauucucccugg

SEQ ID NO: 3155357 - RNA, 19 nt, Artificial Sequence
  Description of Artificial Sequence: Synthetic oligonucleotide
ugcgcaucugggauucucc

SEQ ID NO: 3155358 - RNA, 19 nt, Artificial Sequence
  Description of Artificial Sequence: Synthetic oligonucleotide
cugcgcaucugggauucuc

SEQ ID NO: 3155359 - RNA, 19 nt, Artificial Sequence
  Description of Artificial Sequence: Synthetic oligonucleotide
ugucugcgcaucugggauu

SEQ ID NO: 3155360 - RNA, 19 nt, Artificial Sequence
  Description of Artificial Sequence: Synthetic oligonucleotide
uccugacgugggugcccuc

SEQ ID NO: 3155361 - RNA, 19 nt, Artificial Sequence
  Description of Artificial Sequence: Synthetic oligonucleotide
ucagguuuccugacguggg

SEQ ID NO: 3155362 - RNA, 19 nt, Artificial Sequence
  Description of Artificial Sequence: Synthetic oligonucleotide
cucagguuuccugacgugg

SEQ ID NO: 3155363 - RNA, 19 nt, Artificial Sequence
  Description of Artificial Sequence: Synthetic oligonucleotide
aggcucagguuuccugacg

SEQ ID NO: 3155364 - RNA, 19 nt, Artificial Sequence
  Description of Artificial Sequence: Synthetic oligonucleotide
gaggcucagguuuccugac

SEQ ID NO: 3155365 - RNA, 19 nt, Artificial Sequence
  Description of Artificial Sequence: Synthetic oligonucleotide
uuccccgaggcucagguuu

SEQ ID NO: 3155366 - RNA, 19 nt, Artificial Sequence
  Description of Artificial Sequence: Synthetic oligonucleotide
ucgucgcaggagccgugcu

SEQ ID NO: 3155367 - RNA, 19 nt, Artificial Sequence
  Description of Artificial Sequence: Synthetic oligonucleotide
accguggucgucgcaggag

SEQ ID NO: 3155368 - RNA, 19 nt, Artificial Sequence
  Description of Artificial Sequence: Synthetic oligonucleotide
caccgggacguugaucacc

SEQ ID NO: 3155369 - RNA, 19 nt, Artificial Sequence
  Description of Artificial Sequence: Synthetic oligonucleotide
cuccaccgggacguugauc

SEQ ID NO: 3155370 - RNA, 19 nt, Artificial Sequence
  Description of Artificial Sequence: Synthetic oligonucleotide
cagaaccaguucaggaaga

SEQ ID NO: 3155371 - RNA, 19 nt, Artificial Sequence
  Description of Artificial Sequence: Synthetic oligonucleotide
gauaugauggucaggagga

SEQ ID NO: 3155372 - RNA, 19 nt, Artificial Sequence
  Description of Artificial Sequence: Synthetic oligonucleotide
uggauaugauggucaggag

SEQ ID NO: 3155373 - RNA, 19 nt, Artificial Sequence
  Description of Artificial Sequence: Synthetic oligonucleotide
gacaauggauaugaugguc

SEQ ID NO: 3155374 - RNA, 19 nt, Artificial Sequence
  Description of Artificial Sequence: Synthetic oligonucleotide
uccuagugguagcggccgc

SEQ ID NO: 3155375 - RNA, 19 nt, Artificial Sequence
  Description of Artificial Sequence: Synthetic oligonucleotide
agucugugcacccggagca

SEQ ID NO: 3155376 - RNA, 19 nt, Artificial Sequence
  Description of Artificial Sequence: Synthetic oligonucleotide
cagucugugcacccggagc

SEQ ID NO: 3155377 - RNA, 19 nt, Artificial Sequence
  Description of Artificial Sequence: Synthetic oligonucleotide
aggccagucugugcacccg

SEQ ID NO: 3155378 - RNA, 19 nt, Artificial Sequence
  Description of Artificial Sequence: Synthetic oligonucleotide
caggccagucugugcaccc

SEQ ID NO: 3155379 - RNA, 19 nt, Artificial Sequence
  Description of Artificial Sequence: Synthetic oligonucleotide
uacaggccagucugugcac

SEQ ID NO: 3155380 - RNA, 19 nt, Artificial Sequence
  Description of Artificial Sequence: Synthetic oligonucleotide
auacaggccagucugugca

SEQ ID NO: 3155381 - RNA, 19 nt, Artificial Sequence
  Description of Artificial Sequence: Synthetic oligonucleotide
cauacaggccagucugugc

SEQ ID NO: 3155382 - RNA, 19 nt, Artificial Sequence
  Description of Artificial Sequence: Synthetic oligonucleotide
ugcauacaggccagucugu

SEQ ID NO: 3155383 - RNA, 19 nt, Artificial Sequence
  Description of Artificial Sequence: Synthetic oligonucleotide
cugcauacaggccagucug

SEQ ID NO: 3155384 - RNA, 19 nt, Artificial Sequence
  Description of Artificial Sequence: Synthetic oligonucleotide
ucggcugcauacaggccag

SEQ ID NO: 3155385 - RNA, 19 nt, Artificial Sequence
  Description of Artificial Sequence: Synthetic oligonucleotide
gucggcugcauacaggcca

SEQ ID NO: 3155386 - RNA, 19 nt, Artificial Sequence
  Description of Artificial Sequence: Synthetic oligonucleotide
auugaagucggcugcauac

SEQ ID NO: 3155387 - RNA, 19 nt, Artificial Sequence
  Description of Artificial Sequence: Synthetic oligonucleotide
uauugaagucggcugcaua

SEQ ID NO: 3155388 - RNA, 19 nt, Artificial Sequence
  Description of Artificial Sequence: Synthetic oligonucleotide
uuauugaagucggcugcau

SEQ ID NO: 3155389 - RNA, 19 nt, Artificial Sequence
  Description of Artificial Sequence: Synthetic oligonucleotide
cuuuauugaagucggcugc

SEQ ID NO: 3155390 - RNA, 19 nt, Artificial Sequence
  Description of Artificial Sequence: Synthetic oligonucleotide
cacuuuauugaagucggcu

SEQ ID NO: 3155391 - RNA, 19 nt, Artificial Sequence
  Description of Artificial Sequence: Synthetic oligonucleotide
uggcacuuuauugaagucg

SEQ ID NO: 3155392 - RNA, 19 nt, Artificial Sequence
  Description of Artificial Sequence: Synthetic oligonucleotide
auggcacuuuauugaaguc

SEQ ID NO: 3155393 - RNA, 19 nt, Artificial Sequence
  Description of Artificial Sequence: Synthetic oligonucleotide
cauggcacuuuauugaagu

SEQ ID NO: 3155394 - RNA, 19 nt, Artificial Sequence
  Description of Artificial Sequence: Synthetic oligonucleotide
acauggcacuuuauugaag

SEQ ID NO: 3155395 - RNA, 19 nt, Artificial Sequence
  Description of Artificial Sequence: Synthetic oligonucleotide
cacauggcacuuuauugaa

SEQ ID NO: 3155396 - RNA, 19 nt, Artificial Sequence
  Description of Artificial Sequence: Synthetic oligonucleotide
acacauggcacuuuauuga

SEQ ID NO: 3155397 - RNA, 19 nt, Artificial Sequence
  Description of Artificial Sequence: Synthetic oligonucleotide
gaugauaccuuuauccuaa

SEQ ID NO: 3155398 - RNA, 19 nt, Artificial Sequence
  Description of Artificial Sequence: Synthetic oligonucleotide
caacccgucuaucaggaau

SEQ ID NO: 3155399 - RNA, 19 nt, Artificial Sequence
  Description of Artificial Sequence: Synthetic oligonucleotide
gaccuuuucagcauauuau

SEQ ID NO: 3155400 - RNA, 19 nt, Artificial Sequence
  Description of Artificial Sequence: Synthetic oligonucleotide
cuuggaaaugauacuuggu

SEQ ID NO: 3155401 - RNA, 19 nt, Artificial Sequence
  Description of Artificial Sequence: Synthetic oligonucleotide
cgugcgacuuuucuucacu

SEQ ID NO: 3155402 - RNA, 19 nt, Artificial Sequence
  Description of Artificial Sequence: Synthetic oligonucleotide
gcucaauguuuacgacaaa

SEQ ID NO: 3155403 - RNA, 19 nt, Artificial Sequence
  Description of Artificial Sequence: Synthetic oligonucleotide
caaaguuaaauugcguaua

SEQ ID NO: 3155404 - RNA, 19 nt, Artificial Sequence
  Description of Artificial Sequence: Synthetic oligonucleotide
ggaaggaaacaacacuucu

SEQ ID NO: 3155405 - RNA, 19 nt, Artificial Sequence
  Description of Artificial Sequence: Synthetic oligonucleotide
cuccguggcauaauauuga

SEQ ID NO: 3155406 - RNA, 19 nt, Artificial Sequence
  Description of Artificial Sequence: Synthetic oligonucleotide
ccguggcauaauauugacu

SEQ ID NO: 3155407 - RNA, 19 nt, Artificial Sequence
  Description of Artificial Sequence: Synthetic oligonucleotide
cucauucacccuauuugaa

SEQ ID NO: 3155408 - RNA, 19 nt, Artificial Sequence
  Description of Artificial Sequence: Synthetic oligonucleotide
gccgaagauaagacaauca

SEQ ID NO: 3155409 - RNA, 19 nt, Artificial Sequence
  Description of Artificial Sequence: Synthetic oligonucleotide
cagcuuagauaucuggaaa

SEQ ID NO: 3155410 - RNA, 19 nt, Artificial Sequence
  Description of Artificial Sequence: Synthetic oligonucleotide
guuuacuccagagauaaaa

SEQ ID NO: 3155411 - RNA, 19 nt, Artificial Sequence
  Description of Artificial Sequence: Synthetic oligonucleotide
gagaccacuuacuguuuaa

SEQ ID NO: 3155412 - RNA, 19 nt, Artificial Sequence
  Description of Artificial Sequence: Synthetic oligonucleotide
ccacuuacuguuuaaaagu

SEQ ID NO: 3155413 - RNA, 19 nt, Artificial Sequence
  Description of Artificial Sequence: Synthetic oligonucleotide
cuuacuguuuaaaaguuaa

SEQ ID NO: 3155414 - RNA, 19 nt, Artificial Sequence
  Description of Artificial Sequence: Synthetic oligonucleotide
gaccccaguugcaaauaaa

SEQ ID NO: 3155415 - RNA, 19 nt, Artificial Sequence
  Description of Artificial Sequence: Synthetic oligonucleotide
cauccggcuugauucuaaa

SEQ ID NO: 3155416 - RNA, 19 nt, Artificial Sequence
  Description of Artificial Sequence: Synthetic oligonucleotide
cacgcacguccaaauguua

SEQ ID NO: 3155417 - RNA, 19 nt, Artificial Sequence
  Description of Artificial Sequence: Synthetic oligonucleotide
cgcacguccaaauguuacu

SEQ ID NO: 3155418 - RNA, 19 nt, Artificial Sequence
  Description of Artificial Sequence: Synthetic oligonucleotide
gcacguccaaauguuacuu

SEQ ID NO: 3155419 - RNA, 19 nt, Artificial Sequence
  Description of Artificial Sequence: Synthetic oligonucleotide
guggcucuaugccuauuua

SEQ ID NO: 3155420 - RNA, 19 nt, Artificial Sequence
  Description of Artificial Sequence: Synthetic oligonucleotide
ggggacaguucagguaaau

SEQ ID NO: 3155421 - RNA, 19 nt, Artificial Sequence
  Description of Artificial Sequence: Synthetic oligonucleotide
caacccaaugugucuuucu

SEQ ID NO: 3155422 - RNA, 19 nt, Artificial Sequence
  Description of Artificial Sequence: Synthetic oligonucleotide
cuuuccgaaagggaauuua

SEQ ID NO: 3155423 - RNA, 19 nt, Artificial Sequence
  Description of Artificial Sequence: Synthetic oligonucleotide
cauccguuuggucuaaaga

SEQ ID NO: 3155424 - RNA, 19 nt, Artificial Sequence
  Description of Artificial Sequence: Synthetic oligonucleotide
ccccggucauuaccaugaa

SEQ ID NO: 3155425 - RNA, 19 nt, Artificial Sequence
  Description of Artificial Sequence: Synthetic oligonucleotide
ccagaauuucccacuaauu

SEQ ID NO: 3155426 - RNA, 19 nt, Artificial Sequence
  Description of Artificial Sequence: Synthetic oligonucleotide
cgcugacugaauauugugu

SEQ ID NO: 3155427 - RNA, 19 nt, Artificial Sequence
  Description of Artificial Sequence: Synthetic oligonucleotide
cagugguuuuagugauacu

SEQ ID NO: 3155428 - RNA, 19 nt, Artificial Sequence
  Description of Artificial Sequence: Synthetic oligonucleotide
gugguuuuagugauacugu

SEQ ID NO: 3155429 - RNA, 19 nt, Artificial Sequence
  Description of Artificial Sequence: Synthetic oligonucleotide
caucccuguugucauuuau

SEQ ID NO: 3155430 - RNA, 19 nt, Artificial Sequence
  Description of Artificial Sequence: Synthetic oligonucleotide
cccuguugucauuuauguu

SEQ ID NO: 3155431 - RNA, 19 nt, Artificial Sequence
  Description of Artificial Sequence: Synthetic oligonucleotide
cucuugagauguaucaguu

SEQ ID NO: 3155432 - RNA, 19 nt, Artificial Sequence
  Description of Artificial Sequence: Synthetic oligonucleotide
gauguaucaguuauguguu

SEQ ID NO: 3155433 - RNA, 19 nt, Artificial Sequence
  Description of Artificial Sequence: Synthetic oligonucleotide
ccauccacuauagaugagu

SEQ ID NO: 3155434 - RNA, 19 nt, Artificial Sequence
  Description of Artificial Sequence: Synthetic oligonucleotide
cauccacuauagaugagua

SEQ ID NO: 3155435 - RNA, 19 nt, Artificial Sequence
  Description of Artificial Sequence: Synthetic oligonucleotide
ccacuauagaugaguauuu

SEQ ID NO: 3155436 - RNA, 19 nt, Artificial Sequence
  Description of Artificial Sequence: Synthetic oligonucleotide
ggaaagguguuuuaucauu

SEQ ID NO: 3155437 - RNA, 19 nt, Artificial Sequence
  Description of Artificial Sequence: Synthetic oligonucleotide
gaaaauacgaacacuaucu

SEQ ID NO: 3155438 - RNA, 19 nt, Artificial Sequence
  Description of Artificial Sequence: Synthetic oligonucleotide
guagaagaaacuaaucaaa

SEQ ID NO: 3155439 - RNA, 19 nt, Artificial Sequence
  Description of Artificial Sequence: Synthetic oligonucleotide
cgggaaacuauucgaauga

SEQ ID NO: 3155440 - RNA, 19 nt, Artificial Sequence
  Description of Artificial Sequence: Synthetic oligonucleotide
gggaaacuauucgaaugaa

SEQ ID NO: 3155441 - RNA, 19 nt, Artificial Sequence
  Description of Artificial Sequence: Synthetic oligonucleotide
gaaacuauucgaaugaaga

SEQ ID NO: 3155442 - RNA, 19 nt, Artificial Sequence
  Description of Artificial Sequence: Synthetic oligonucleotide
caggucacagguccuaaau

SEQ ID NO: 3155443 - RNA, 19 nt, Artificial Sequence
  Description of Artificial Sequence: Synthetic oligonucleotide
gucacagguccuaaaucca

SEQ ID NO: 3155444 - RNA, 19 nt, Artificial Sequence
  Description of Artificial Sequence: Synthetic oligonucleotide
cagaggcuugaaagacacu

SEQ ID NO: 3155445 - RNA, 19 nt, Artificial Sequence
  Description of Artificial Sequence: Synthetic oligonucleotide
uuaggauaaagguaucauc

SEQ ID NO: 3155446 - RNA, 19 nt, Artificial Sequence
  Description of Artificial Sequence: Synthetic oligonucleotide
auuccugauagacggguug

SEQ ID NO: 3155447 - RNA, 19 nt, Artificial Sequence
  Description of Artificial Sequence: Synthetic oligonucleotide
auaauaugcugaaaagguc

SEQ ID NO: 3155448 - RNA, 19 nt, Artificial Sequence
  Description of Artificial Sequence: Synthetic oligonucleotide
accaaguaucauuuccaag

SEQ ID NO: 3155449 - RNA, 19 nt, Artificial Sequence
  Description of Artificial Sequence: Synthetic oligonucleotide
agugaagaaaagucgcacg

SEQ ID NO: 3155450 - RNA, 19 nt, Artificial Sequence
  Description of Artificial Sequence: Synthetic oligonucleotide
uuugucguaaacauugagc

SEQ ID NO: 3155451 - RNA, 19 nt, Artificial Sequence
  Description of Artificial Sequence: Synthetic oligonucleotide
uauacgcaauuuaacuuug

SEQ ID NO: 3155452 - RNA, 19 nt, Artificial Sequence
  Description of Artificial Sequence: Synthetic oligonucleotide
agaaguguuguuuccuucc

SEQ ID NO: 3155453 - RNA, 19 nt, Artificial Sequence
  Description of Artificial Sequence: Synthetic oligonucleotide
ucaauauuaugccacggag

SEQ ID NO: 3155454 - RNA, 19 nt, Artificial Sequence
  Description of Artificial Sequence: Synthetic oligonucleotide
agucaauauuaugccacgg

SEQ ID NO: 3155455 - RNA, 19 nt, Artificial Sequence
  Description of Artificial Sequence: Synthetic oligonucleotide
uucaaauagggugaaugag

SEQ ID NO: 3155456 - RNA, 19 nt, Artificial Sequence
  Description of Artificial Sequence: Synthetic oligonucleotide
ugauugucuuaucuucggc

SEQ ID NO: 3155457 - RNA, 19 nt, Artificial Sequence
  Description of Artificial Sequence: Synthetic oligonucleotide
uuuccagauaucuaagcug

SEQ ID NO: 3155458 - RNA, 19 nt, Artificial Sequence
  Description of Artificial Sequence: Synthetic oligonucleotide
uuuuaucucuggaguaaac

SEQ ID NO: 3155459 - RNA, 19 nt, Artificial Sequence
  Description of Artificial Sequence: Synthetic oligonucleotide
uuaaacaguaaguggucuc

SEQ ID NO: 3155460 - RNA, 19 nt, Artificial Sequence
  Description of Artificial Sequence: Synthetic oligonucleotide
acuuuuaaacaguaagugg

SEQ ID NO: 3155461 - RNA, 19 nt, Artificial Sequence
  Description of Artificial Sequence: Synthetic oligonucleotide
uuaacuuuuaaacaguaag

SEQ ID NO: 3155462 - RNA, 19 nt, Artificial Sequence
  Description of Artificial Sequence: Synthetic oligonucleotide
uuuauuugcaacugggguc

SEQ ID NO: 3155463 - RNA, 19 nt, Artificial Sequence
  Description of Artificial Sequence: Synthetic oligonucleotide
uuuagaaucaagccggaug

SEQ ID NO: 3155464 - RNA, 19 nt, Artificial Sequence
  Description of Artificial Sequence: Synthetic oligonucleotide
uaacauuuggacgugcgug

SEQ ID NO: 3155465 - RNA, 19 nt, Artificial Sequence
  Description of Artificial Sequence: Synthetic oligonucleotide
aguaacauuuggacgugcg

SEQ ID NO: 3155466 - RNA, 19 nt, Artificial Sequence
  Description of Artificial Sequence: Synthetic oligonucleotide
aaguaacauuuggacgugc

SEQ ID NO: 3155467 - RNA, 19 nt, Artificial Sequence
  Description of Artificial Sequence: Synthetic oligonucleotide
uaaauaggcauagagccac

SEQ ID NO: 3155468 - RNA, 19 nt, Artificial Sequence
  Description of Artificial Sequence: Synthetic oligonucleotide
auuuaccugaacugucccc

SEQ ID NO: 3155469 - RNA, 19 nt, Artificial Sequence
  Description of Artificial Sequence: Synthetic oligonucleotide
agaaagacacauuggguug

SEQ ID NO: 3155470 - RNA, 19 nt, Artificial Sequence
  Description of Artificial Sequence: Synthetic oligonucleotide
uaaauucccuuucggaaag

SEQ ID NO: 3155471 - RNA, 19 nt, Artificial Sequence
  Description of Artificial Sequence: Synthetic oligonucleotide
ucuuuagaccaaacggaug

SEQ ID NO: 3155472 - RNA, 19 nt, Artificial Sequence
  Description of Artificial Sequence: Synthetic oligonucleotide
uucaugguaaugaccgggg

SEQ ID NO: 3155473 - RNA, 19 nt, Artificial Sequence
  Description of Artificial Sequence: Synthetic oligonucleotide
aauuagugggaaauucugg

SEQ ID NO: 3155474 - RNA, 19 nt, Artificial Sequence
  Description of Artificial Sequence: Synthetic oligonucleotide
acacaauauucagucagcg

SEQ ID NO: 3155475 - RNA, 19 nt, Artificial Sequence
  Description of Artificial Sequence: Synthetic oligonucleotide
aguaucacuaaaaccacug

SEQ ID NO: 3155476 - RNA, 19 nt, Artificial Sequence
  Description of Artificial Sequence: Synthetic oligonucleotide
acaguaucacuaaaaccac

SEQ ID NO: 3155477 - RNA, 19 nt, Artificial Sequence
  Description of Artificial Sequence: Synthetic oligonucleotide
auaaaugacaacagggaug

SEQ ID NO: 3155478 - RNA, 19 nt, Artificial Sequence
  Description of Artificial Sequence: Synthetic oligonucleotide
aacauaaaugacaacaggg

SEQ ID NO: 3155479 - RNA, 19 nt, Artificial Sequence
  Description of Artificial Sequence: Synthetic oligonucleotide
aacugauacaucucaagag

SEQ ID NO: 3155480 - RNA, 19 nt, Artificial Sequence
  Description of Artificial Sequence: Synthetic oligonucleotide
aacacauaacugauacauc

SEQ ID NO: 3155481 - RNA, 19 nt, Artificial Sequence
  Description of Artificial Sequence: Synthetic oligonucleotide
acucaucuauaguggaugg

SEQ ID NO: 3155482 - RNA, 19 nt, Artificial Sequence
  Description of Artificial Sequence: Synthetic oligonucleotide
uacucaucuauaguggaug

SEQ ID NO: 3155483 - RNA, 19 nt, Artificial Sequence
  Description of Artificial Sequence: Synthetic oligonucleotide
aaauacucaucuauagugg

SEQ ID NO: 3155484 - RNA, 19 nt, Artificial Sequence
  Description of Artificial Sequence: Synthetic oligonucleotide
aaugauaaaacaccuuucc

SEQ ID NO: 3155485 - RNA, 19 nt, Artificial Sequence
  Description of Artificial Sequence: Synthetic oligonucleotide
agauaguguucguauuuuc

SEQ ID NO: 3155486 - RNA, 19 nt, Artificial Sequence
  Description of Artificial Sequence: Synthetic oligonucleotide
uuugauuaguuucuucuac

SEQ ID NO: 3155487 - RNA, 19 nt, Artificial Sequence
  Description of Artificial Sequence: Synthetic oligonucleotide
ucauucgaauaguuucccg

SEQ ID NO: 3155488 - RNA, 19 nt, Artificial Sequence
  Description of Artificial Sequence: Synthetic oligonucleotide
uucauucgaauaguuuccc

SEQ ID NO: 3155489 - RNA, 19 nt, Artificial Sequence
  Description of Artificial Sequence: Synthetic oligonucleotide
ucuucauucgaauaguuuc

SEQ ID NO: 3155490 - RNA, 19 nt, Artificial Sequence
  Description of Artificial Sequence: Synthetic oligonucleotide
auuuaggaccugugaccug

SEQ ID NO: 3155491 - RNA, 19 nt, Artificial Sequence
  Description of Artificial Sequence: Synthetic oligonucleotide
uggauuuaggaccugugac

SEQ ID NO: 3155492 - RNA, 19 nt, Artificial Sequence
  Description of Artificial Sequence: Synthetic oligonucleotide
agugucuuucaagccucug

SEQ ID NO: 3155493 - RNA, 19 nt, Artificial Sequence
  Description of Artificial Sequence: Synthetic oligonucleotide
gguaauaggugagacucuu

SEQ ID NO: 3155494 - RNA, 19 nt, Artificial Sequence
  Description of Artificial Sequence: Synthetic oligonucleotide
gagacucuucccauuuuca

SEQ ID NO: 3155495 - RNA, 19 nt, Artificial Sequence
  Description of Artificial Sequence: Synthetic oligonucleotide
cauuuucaucaugaccagu

SEQ ID NO: 3155496 - RNA, 19 nt, Artificial Sequence
  Description of Artificial Sequence: Synthetic oligonucleotide
caguagaugcauccuccaa

SEQ ID NO: 3155497 - RNA, 19 nt, Artificial Sequence
  Description of Artificial Sequence: Synthetic oligonucleotide
cuccaaacaacucuccugu

SEQ ID NO: 3155498 - RNA, 19 nt, Artificial Sequence
  Description of Artificial Sequence: Synthetic oligonucleotide
cucuugccaugagcaacga

SEQ ID NO: 3155499 - RNA, 19 nt, Artificial Sequence
  Description of Artificial Sequence: Synthetic oligonucleotide
ccaugagcaacgacuugcu

SEQ ID NO: 3155500 - RNA, 19 nt, Artificial Sequence
  Description of Artificial Sequence: Synthetic oligonucleotide
caugagcaacgacuugcuu

SEQ ID NO: 3155501 - RNA, 19 nt, Artificial Sequence
  Description of Artificial Sequence: Synthetic oligonucleotide
cuucgaucccagcuaagca

SEQ ID NO: 3155502 - RNA, 19 nt, Artificial Sequence
  Description of Artificial Sequence: Synthetic oligonucleotide
gcaguuuggagugucagga

SEQ ID NO: 3155503 - RNA, 19 nt, Artificial Sequence
  Description of Artificial Sequence: Synthetic oligonucleotide
guuuggagugucaggagcu

SEQ ID NO: 3155504 - RNA, 19 nt, Artificial Sequence
  Description of Artificial Sequence: Synthetic oligonucleotide
gucaggagcuccuauuaca

SEQ ID NO: 3155505 - RNA, 19 nt, Artificial Sequence
  Description of Artificial Sequence: Synthetic oligonucleotide
ccuauuacaguugaaugga

SEQ ID NO: 3155506 - RNA, 19 nt, Artificial Sequence
  Description of Artificial Sequence: Synthetic oligonucleotide
cuauuacaguugaauggaa

SEQ ID NO: 3155507 - RNA, 19 nt, Artificial Sequence
  Description of Artificial Sequence: Synthetic oligonucleotide
guugaauggaaccacugaa

SEQ ID NO: 3155508 - RNA, 19 nt, Artificial Sequence
  Description of Artificial Sequence: Synthetic oligonucleotide
gaauggaaccacugaauau

SEQ ID NO: 3155509 - RNA, 19 nt, Artificial Sequence
  Description of Artificial Sequence: Synthetic oligonucleotide
gaaccacugaauauugccu

SEQ ID NO: 3155510 - RNA, 19 nt, Artificial Sequence
  Description of Artificial Sequence: Synthetic oligonucleotide
gccucaaggacaggauaaa

SEQ ID NO: 3155511 - RNA, 19 nt, Artificial Sequence
  Description of Artificial Sequence: Synthetic oligonucleotide
cucaaggacaggauaaacu

SEQ ID NO: 3155512 - RNA, 19 nt, Artificial Sequence
  Description of Artificial Sequence: Synthetic oligonucleotide
gauaaacuucgagaucccu

SEQ ID NO: 3155513 - RNA, 19 nt, Artificial Sequence
  Description of Artificial Sequence: Synthetic oligonucleotide
cagaaggaggacaucauau

SEQ ID NO: 3155514 - RNA, 19 nt, Artificial Sequence
  Description of Artificial Sequence: Synthetic oligonucleotide
gaggacaucauauugauca

SEQ ID NO: 3155515 - RNA, 19 nt, Artificial Sequence
  Description of Artificial Sequence: Synthetic oligonucleotide
caucauauugaucacccau

SEQ ID NO: 3155516 - RNA, 19 nt, Artificial Sequence
  Description of Artificial Sequence: Synthetic oligonucleotide
cuuugauauuuucaggaga

SEQ ID NO: 3155517 - RNA, 19 nt, Artificial Sequence
  Description of Artificial Sequence: Synthetic oligonucleotide
gagaaauaucucuagaaca

SEQ ID NO: 3155518 - RNA, 19 nt, Artificial Sequence
  Description of Artificial Sequence: Synthetic oligonucleotide
cuagaacaggauggaauga

SEQ ID NO: 3155519 - RNA, 19 nt, Artificial Sequence
  Description of Artificial Sequence: Synthetic oligonucleotide
gauggaaugagaccacugu

SEQ ID NO: 3155520 - RNA, 19 nt, Artificial Sequence
  Description of Artificial Sequence: Synthetic oligonucleotide
ggaaugagaccacugucga

SEQ ID NO: 3155521 - RNA, 19 nt, Artificial Sequence
  Description of Artificial Sequence: Synthetic oligonucleotide
gaccacugucgagaaccuu

SEQ ID NO: 3155522 - RNA, 19 nt, Artificial Sequence
  Description of Artificial Sequence: Synthetic oligonucleotide
cugucgagaaccuucuugu

SEQ ID NO: 3155523 - RNA, 19 nt, Artificial Sequence
  Description of Artificial Sequence: Synthetic oligonucleotide
cugggacaacaggacucuu

SEQ ID NO: 3155524 - RNA, 19 nt, Artificial Sequence
  Description of Artificial Sequence: Synthetic oligonucleotide
gggacaacaggacucuucu

SEQ ID NO: 3155525 - RNA, 19 nt, Artificial Sequence
  Description of Artificial Sequence: Synthetic oligonucleotide
ggacucuucugcaccugaa

SEQ ID NO: 3155526 - RNA, 19 nt, Artificial Sequence
  Description of Artificial Sequence: Synthetic oligonucleotide
caccugaagaaauauuacu

SEQ ID NO: 3155527 - RNA, 19 nt, Artificial Sequence
  Description of Artificial Sequence: Synthetic oligonucleotide
gaaauauuacuuaaggauu

SEQ ID NO: 3155528 - RNA, 19 nt, Artificial Sequence
  Description of Artificial Sequence: Synthetic oligonucleotide
caaggaguacagcaucugu

SEQ ID NO: 3155529 - RNA, 19 nt, Artificial Sequence
  Description of Artificial Sequence: Synthetic oligonucleotide
gcaucugugccuggacaau

SEQ ID NO: 3155530 - RNA, 19 nt, Artificial Sequence
  Description of Artificial Sequence: Synthetic oligonucleotide
caucugugccuggacaaua

SEQ ID NO: 3155531 - RNA, 19 nt, Artificial Sequence
  Description of Artificial Sequence: Synthetic oligonucleotide
gugccuggacaauagucca

SEQ ID NO: 3155532 - RNA, 19 nt, Artificial Sequence
  Description of Artificial Sequence: Synthetic oligonucleotide
cuggacaauaguccaagca

SEQ ID NO: 3155533 - RNA, 19 nt, Artificial Sequence
  Description of Artificial Sequence: Synthetic oligonucleotide
ggacaauaguccaagcaga

SEQ ID NO: 3155534 - RNA, 19 nt, Artificial Sequence
  Description of Artificial Sequence: Synthetic oligonucleotide
gacaauaguccaagcagaa

SEQ ID NO: 3155535 - RNA, 19 nt, Artificial Sequence
  Description of Artificial Sequence: Synthetic oligonucleotide
guccaagcagaaaucugca

SEQ ID NO: 3155536 - RNA, 19 nt, Artificial Sequence
  Description of Artificial Sequence: Synthetic oligonucleotide
gaaaucugcaggaacuuuu

SEQ ID NO: 3155537 - RNA, 19 nt, Artificial Sequence
  Description of Artificial Sequence: Synthetic oligonucleotide
cuuccuuaauauacuuaca

SEQ ID NO: 3155538 - RNA, 19 nt, Artificial Sequence
  Description of Artificial Sequence: Synthetic oligonucleotide
ccuuaauauacuuacagau

SEQ ID NO: 3155539 - RNA, 19 nt, Artificial Sequence
  Description of Artificial Sequence: Synthetic oligonucleotide
cuuaauauacuuacagauu

SEQ ID NO: 3155540 - RNA, 19 nt, Artificial Sequence
  Description of Artificial Sequence: Synthetic oligonucleotide
cuuacagauuaucuccaga

SEQ ID NO: 3155541 - RNA, 19 nt, Artificial Sequence
  Description of Artificial Sequence: Synthetic oligonucleotide
aagagucucaccuauuacc

SEQ ID NO: 3155542 - RNA, 19 nt, Artificial Sequence
  Description of Artificial Sequence: Synthetic oligonucleotide
ugaaaaugggaagagucuc

SEQ ID NO: 3155543 - RNA, 19 nt, Artificial Sequence
  Description of Artificial Sequence: Synthetic oligonucleotide
acuggucaugaugaaaaug

SEQ ID NO: 3155544 - RNA, 19 nt, Artificial Sequence
  Description of Artificial Sequence: Synthetic oligonucleotide
uuggaggaugcaucuacug

SEQ ID NO: 3155545 - RNA, 19 nt, Artificial Sequence
  Description of Artificial Sequence: Synthetic oligonucleotide
acaggagaguuguuuggag

SEQ ID NO: 3155546 - RNA, 19 nt, Artificial Sequence
  Description of Artificial Sequence: Synthetic oligonucleotide
ucguugcucauggcaagag

SEQ ID NO: 3155547 - RNA, 19 nt, Artificial Sequence
  Description of Artificial Sequence: Synthetic oligonucleotide
agcaagucguugcucaugg

SEQ ID NO: 3155548 - RNA, 19 nt, Artificial Sequence
  Description of Artificial Sequence: Synthetic oligonucleotide
aagcaagucguugcucaug

SEQ ID NO: 3155549 - RNA, 19 nt, Artificial Sequence
  Description of Artificial Sequence: Synthetic oligonucleotide
ugcuuagcugggaucgaag

SEQ ID NO: 3155550 - RNA, 19 nt, Artificial Sequence
  Description of Artificial Sequence: Synthetic oligonucleotide
uccugacacuccaaacugc

SEQ ID NO: 3155551 - RNA, 19 nt, Artificial Sequence
  Description of Artificial Sequence: Synthetic oligonucleotide
agcuccugacacuccaaac

SEQ ID NO: 3155552 - RNA, 19 nt, Artificial Sequence
  Description of Artificial Sequence: Synthetic oligonucleotide
uguaauaggagcuccugac

SEQ ID NO: 3155553 - RNA, 19 nt, Artificial Sequence
  Description of Artificial Sequence: Synthetic oligonucleotide
uccauucaacuguaauagg

SEQ ID NO: 3155554 - RNA, 19 nt, Artificial Sequence
  Description of Artificial Sequence: Synthetic oligonucleotide
uuccauucaacuguaauag

SEQ ID NO: 3155555 - RNA, 19 nt, Artificial Sequence
  Description of Artificial Sequence: Synthetic oligonucleotide
uucagugguuccauucaac

SEQ ID NO: 3155556 - RNA, 19 nt, Artificial Sequence
  Description of Artificial Sequence: Synthetic oligonucleotide
auauucagugguuccauuc

SEQ ID NO: 3155557 - RNA, 19 nt, Artificial Sequence
  Description of Artificial Sequence: Synthetic oligonucleotide
aggcaauauucagugguuc

SEQ ID NO: 3155558 - RNA, 19 nt, Artificial Sequence
  Description of Artificial Sequence: Synthetic oligonucleotide
uuuauccuguccuugaggc

SEQ ID NO: 3155559 - RNA, 19 nt, Artificial Sequence
  Description of Artificial Sequence: Synthetic oligonucleotide
aguuuauccuguccuugag

SEQ ID NO: 3155560 - RNA, 19 nt, Artificial Sequence
  Description of Artificial Sequence: Synthetic oligonucleotide
agggaucucgaaguuuauc

SEQ ID NO: 3155561 - RNA, 19 nt, Artificial Sequence
  Description of Artificial Sequence: Synthetic oligonucleotide
auaugauguccuccuucug

SEQ ID NO: 3155562 - RNA, 19 nt, Artificial Sequence
  Description of Artificial Sequence: Synthetic oligonucleotide
ugaucaauaugauguccuc

SEQ ID NO: 3155563 - RNA, 19 nt, Artificial Sequence
  Description of Artificial Sequence: Synthetic oligonucleotide
augggugaucaauaugaug

SEQ ID NO: 3155564 - RNA, 19 nt, Artificial Sequence
  Description of Artificial Sequence: Synthetic oligonucleotide
ucuccugaaaauaucaaag

SEQ ID NO: 3155565 - RNA, 19 nt, Artificial Sequence
  Description of Artificial Sequence: Synthetic oligonucleotide
uguucuagagauauuucuc

SEQ ID NO: 3155566 - RNA, 19 nt, Artificial Sequence
  Description of Artificial Sequence: Synthetic oligonucleotide
ucauuccauccuguucuag

SEQ ID NO: 3155567 - RNA, 19 nt, Artificial Sequence
  Description of Artificial Sequence: Synthetic oligonucleotide
acaguggucucauuccauc

SEQ ID NO: 3155568 - RNA, 19 nt, Artificial Sequence
  Description of Artificial Sequence: Synthetic oligonucleotide
ucgacaguggucucauucc

SEQ ID NO: 3155569 - RNA, 19 nt, Artificial Sequence
  Description of Artificial Sequence: Synthetic oligonucleotide
aagguucucgacagugguc

SEQ ID NO: 3155570 - RNA, 19 nt, Artificial Sequence
  Description of Artificial Sequence: Synthetic oligonucleotide
acaagaagguucucgacag

SEQ ID NO: 3155571 - RNA, 19 nt, Artificial Sequence
  Description of Artificial Sequence: Synthetic oligonucleotide
aagaguccuguugucccag

SEQ ID NO: 3155572 - RNA, 19 nt, Artificial Sequence
  Description of Artificial Sequence: Synthetic oligonucleotide
agaagaguccuguuguccc

SEQ ID NO: 3155573 - RNA, 19 nt, Artificial Sequence
  Description of Artificial Sequence: Synthetic oligonucleotide
uucaggugcagaagagucc

SEQ ID NO: 3155574 - RNA, 19 nt, Artificial Sequence
  Description of Artificial Sequence: Synthetic oligonucleotide
aguaauauuucuucaggug

SEQ ID NO: 3155575 - RNA, 19 nt, Artificial Sequence
  Description of Artificial Sequence: Synthetic oligonucleotide
aauccuuaaguaauauuuc

SEQ ID NO: 3155576 - RNA, 19 nt, Artificial Sequence
  Description of Artificial Sequence: Synthetic oligonucleotide
acagaugcuguacuccuug

SEQ ID NO: 3155577 - RNA, 19 nt, Artificial Sequence
  Description of Artificial Sequence: Synthetic oligonucleotide
auuguccaggcacagaugc

SEQ ID NO: 3155578 - RNA, 19 nt, Artificial Sequence
  Description of Artificial Sequence: Synthetic oligonucleotide
uauuguccaggcacagaug

SEQ ID NO: 3155579 - RNA, 19 nt, Artificial Sequence
  Description of Artificial Sequence: Synthetic oligonucleotide
uggacuauuguccaggcac

SEQ ID NO: 3155580 - RNA, 19 nt, Artificial Sequence
  Description of Artificial Sequence: Synthetic oligonucleotide
ugcuuggacuauuguccag

SEQ ID NO: 3155581 - RNA, 19 nt, Artificial Sequence
  Description of Artificial Sequence: Synthetic oligonucleotide
ucugcuuggacuauugucc

SEQ ID NO: 3155582 - RNA, 19 nt, Artificial Sequence
  Description of Artificial Sequence: Synthetic oligonucleotide
uucugcuuggacuauuguc

SEQ ID NO: 3155583 - RNA, 19 nt, Artificial Sequence
  Description of Artificial Sequence: Synthetic oligonucleotide
ugcagauuucugcuuggac

SEQ ID NO: 3155584 - RNA, 19 nt, Artificial Sequence
  Description of Artificial Sequence: Synthetic oligonucleotide
aaaaguuccugcagauuuc

SEQ ID NO: 3155585 - RNA, 19 nt, Artificial Sequence
  Description of Artificial Sequence: Synthetic oligonucleotide
uguaaguauauuaaggaag

SEQ ID NO: 3155586 - RNA, 19 nt, Artificial Sequence
  Description of Artificial Sequence: Synthetic oligonucleotide
aucuguaaguauauuaagg

SEQ ID NO: 3155587 - RNA, 19 nt, Artificial Sequence
  Description of Artificial Sequence: Synthetic oligonucleotide
aaucuguaaguauauuaag

SEQ ID NO: 3155588 - RNA, 19 nt, Artificial Sequence
  Description of Artificial Sequence: Synthetic oligonucleotide
ucuggagauaaucuguaag

SEQ ID NO: 3155589 - RNA, 19 nt, Artificial Sequence
  Description of Artificial Sequence: Synthetic oligonucleotide
ccaaaauggcaacgcucaa

SEQ ID NO: 3155590 - RNA, 19 nt, Artificial Sequence
  Description of Artificial Sequence: Synthetic oligonucleotide
gucucuggcaaagacuaca

SEQ ID NO: 3155591 - RNA, 19 nt, Artificial Sequence
  Description of Artificial Sequence: Synthetic oligonucleotide
cuggcaaagacuacaaugu

SEQ ID NO: 3155592 - RNA, 19 nt, Artificial Sequence
  Description of Artificial Sequence: Synthetic oligonucleotide
ggcaaagacuacaauguga

SEQ ID NO: 3155593 - RNA, 19 nt, Artificial Sequence
  Description of Artificial Sequence: Synthetic oligonucleotide
guugggaguucacccguua

SEQ ID NO: 3155594 - RNA, 19 nt, Artificial Sequence
  Description of Artificial Sequence: Synthetic oligonucleotide
ggaguucacccguuaagcu

SEQ ID NO: 3155595 - RNA, 19 nt, Artificial Sequence
  Description of Artificial Sequence: Synthetic oligonucleotide
ggaacaguggaaacagguu

SEQ ID NO: 3155596 - RNA, 19 nt, Artificial Sequence
  Description of Artificial Sequence: Synthetic oligonucleotide
gaggaagaggcccguuuaa

SEQ ID NO: 3155597 - RNA, 19 nt, Artificial Sequence
  Description of Artificial Sequence: Synthetic oligonucleotide
gaagaggcccguuuaaaga

SEQ ID NO: 3155598 - RNA, 19 nt, Artificial Sequence
  Description of Artificial Sequence: Synthetic oligonucleotide
ccaugucacugucuagacu

SEQ ID NO: 3155599 - RNA, 19 nt, Artificial Sequence
  Description of Artificial Sequence: Synthetic oligonucleotide
gucacugucuagacuacaa

SEQ ID NO: 3155600 - RNA, 19 nt, Artificial Sequence
  Description of Artificial Sequence: Synthetic oligonucleotide
cacugucuagacuacaaca

SEQ ID NO: 3155601 - RNA, 19 nt, Artificial Sequence
  Description of Artificial Sequence: Synthetic oligonucleotide
caacaagauuuuaauugga

SEQ ID NO: 3155602 - RNA, 19 nt, Artificial Sequence
  Description of Artificial Sequence: Synthetic oligonucleotide
caagauuuuaauuggaggu

SEQ ID NO: 3155603 - RNA, 19 nt, Artificial Sequence
  Description of Artificial Sequence: Synthetic oligonucleotide
gaccuguuacucaagucgu

SEQ ID NO: 3155604 - RNA, 19 nt, Artificial Sequence
  Description of Artificial Sequence: Synthetic oligonucleotide
ccuguuacucaagucguaa

SEQ ID NO: 3155605 - RNA, 19 nt, Artificial Sequence
  Description of Artificial Sequence: Synthetic oligonucleotide
cuguuacucaagucguaau

SEQ ID NO: 3155606 - RNA, 19 nt, Artificial Sequence
  Description of Artificial Sequence: Synthetic oligonucleotide
guuacucaagucguaauau

SEQ ID NO: 3155607 - RNA, 19 nt, Artificial Sequence
  Description of Artificial Sequence: Synthetic oligonucleotide
cguaauauuaaaauggccu

SEQ ID NO: 3155608 - RNA, 19 nt, Artificial Sequence
  Description of Artificial Sequence: Synthetic oligonucleotide
guaauauuaaaauggccua

SEQ ID NO: 3155609 - RNA, 19 nt, Artificial Sequence
  Description of Artificial Sequence: Synthetic oligonucleotide
guuuccuaaaguuacacau

SEQ ID NO: 3155610 - RNA, 19 nt, Artificial Sequence
  Description of Artificial Sequence: Synthetic oligonucleotide
ccuaaaguuacacauagga

SEQ ID NO: 3155611 - RNA, 19 nt, Artificial Sequence
  Description of Artificial Sequence: Synthetic oligonucleotide
cuaaaguuacacauaggaa

SEQ ID NO: 3155612 - RNA, 19 nt, Artificial Sequence
  Description of Artificial Sequence: Synthetic oligonucleotide
ccugcagcuauguccugau

SEQ ID NO: 3155613 - RNA, 19 nt, Artificial Sequence
  Description of Artificial Sequence: Synthetic oligonucleotide
gaugcuggaugagaccugu

SEQ ID NO: 3155614 - RNA, 19 nt, Artificial Sequence
  Description of Artificial Sequence: Synthetic oligonucleotide
guccuaaauugguuaacgu

SEQ ID NO: 3155615 - RNA, 19 nt, Artificial Sequence
  Description of Artificial Sequence: Synthetic oligonucleotide
ccuaaauugguuaacguaa

SEQ ID NO: 3155616 - RNA, 19 nt, Artificial Sequence
  Description of Artificial Sequence: Synthetic oligonucleotide
cuaaauugguuaacguaau

SEQ ID NO: 3155617 - RNA, 19 nt, Artificial Sequence
  Description of Artificial Sequence: Synthetic oligonucleotide
ccacugccaaugucauaua

SEQ ID NO: 3155618 - RNA, 19 nt, Artificial Sequence
  Description of Artificial Sequence: Synthetic oligonucleotide
cauauaugcugcagcuacu

SEQ ID NO: 3155619 - RNA, 19 nt, Artificial Sequence
  Description of Artificial Sequence: Synthetic oligonucleotide
gcugcagcuacuccuuaaa

SEQ ID NO: 3155620 - RNA, 19 nt, Artificial Sequence
  Description of Artificial Sequence: Synthetic oligonucleotide
gcagcuacuccuuaaacca

SEQ ID NO: 3155621 - RNA, 19 nt, Artificial Sequence
  Description of Artificial Sequence: Synthetic oligonucleotide
guauuuacuguguuuugua

SEQ ID NO: 3155622 - RNA, 19 nt, Artificial Sequence
  Description of Artificial Sequence: Synthetic oligonucleotide
guaacuucugauuccuuca

SEQ ID NO: 3155623 - RNA, 19 nt, Artificial Sequence
  Description of Artificial Sequence: Synthetic oligonucleotide
ccuucaucccaacauccaa

SEQ ID NO: 3155624 - RNA, 19 nt, Artificial Sequence
  Description of Artificial Sequence: Synthetic oligonucleotide
cccaacauccaacaugccu

SEQ ID NO: 3155625 - RNA, 19 nt, Artificial Sequence
  Description of Artificial Sequence: Synthetic oligonucleotide
caacaugccuaggccaucu

SEQ ID NO: 3155626 - RNA, 19 nt, Artificial Sequence
  Description of Artificial Sequence: Synthetic oligonucleotide
caugccuaggccaucuuuu

SEQ ID NO: 3155627 - RNA, 19 nt, Artificial Sequence
  Description of Artificial Sequence: Synthetic oligonucleotide
gccuaggccaucuuuucuu

SEQ ID NO: 3155628 - RNA, 19 nt, Artificial Sequence
  Description of Artificial Sequence: Synthetic oligonucleotide
gucacauccugggauccaa

SEQ ID NO: 3155629 - RNA, 19 nt, Artificial Sequence
  Description of Artificial Sequence: Synthetic oligonucleotide
cauccugggauccaaugua

SEQ ID NO: 3155630 - RNA, 19 nt, Artificial Sequence
  Description of Artificial Sequence: Synthetic oligonucleotide
guguacuauauaugucaga

SEQ ID NO: 3155631 - RNA, 19 nt, Artificial Sequence
  Description of Artificial Sequence: Synthetic oligonucleotide
guacuauauaugucagaau

SEQ ID NO: 3155632 - RNA, 19 nt, Artificial Sequence
  Description of Artificial Sequence: Synthetic oligonucleotide
guguacauugccauauaau

SEQ ID NO: 3155633 - RNA, 19 nt, Artificial Sequence
  Description of Artificial Sequence: Synthetic oligonucleotide
guacauugccauauaaugu

SEQ ID NO: 3155634 - RNA, 19 nt, Artificial Sequence
  Description of Artificial Sequence: Synthetic oligonucleotide
gcaaccaacugucauacca

SEQ ID NO: 3155635 - RNA, 19 nt, Artificial Sequence
  Description of Artificial Sequence: Synthetic oligonucleotide
caaccaacugucauaccaa

SEQ ID NO: 3155636 - RNA, 19 nt, Artificial Sequence
  Description of Artificial Sequence: Synthetic oligonucleotide
uugagcguugccauuuugg

SEQ ID NO: 3155637 - RNA, 19 nt, Artificial Sequence
  Description of Artificial Sequence: Synthetic oligonucleotide
uguagucuuugccagagac

SEQ ID NO: 3155638 - RNA, 19 nt, Artificial Sequence
  Description of Artificial Sequence: Synthetic oligonucleotide
acauuguagucuuugccag

SEQ ID NO: 3155639 - RNA, 19 nt, Artificial Sequence
  Description of Artificial Sequence: Synthetic oligonucleotide
ucacauuguagucuuugcc

SEQ ID NO: 3155640 - RNA, 19 nt, Artificial Sequence
  Description of Artificial Sequence: Synthetic oligonucleotide
uaacgggugaacucccaac

SEQ ID NO: 3155641 - RNA, 19 nt, Artificial Sequence
  Description of Artificial Sequence: Synthetic oligonucleotide
agcuuaacgggugaacucc

SEQ ID NO: 3155642 - RNA, 19 nt, Artificial Sequence
  Description of Artificial Sequence: Synthetic oligonucleotide
aaccuguuuccacuguucc

SEQ ID NO: 3155643 - RNA, 19 nt, Artificial Sequence
  Description of Artificial Sequence: Synthetic oligonucleotide
uuaaacgggccucuuccuc

SEQ ID NO: 3155644 - RNA, 19 nt, Artificial Sequence
  Description of Artificial Sequence: Synthetic oligonucleotide
ucuuuaaacgggccucuuc

SEQ ID NO: 3155645 - RNA, 19 nt, Artificial Sequence
  Description of Artificial Sequence: Synthetic oligonucleotide
agucuagacagugacaugg

SEQ ID NO: 3155646 - RNA, 19 nt, Artificial Sequence
  Description of Artificial Sequence: Synthetic oligonucleotide
uuguagucuagacagugac

SEQ ID NO: 3155647 - RNA, 19 nt, Artificial Sequence
  Description of Artificial Sequence: Synthetic oligonucleotide
uguuguagucuagacagug

SEQ ID NO: 3155648 - RNA, 19 nt, Artificial Sequence
  Description of Artificial Sequence: Synthetic oligonucleotide
uccaauuaaaaucuuguug

SEQ ID NO: 3155649 - RNA, 19 nt, Artificial Sequence
  Description of Artificial Sequence: Synthetic oligonucleotide
accuccaauuaaaaucuug

SEQ ID NO: 3155650 - RNA, 19 nt, Artificial Sequence
  Description of Artificial Sequence: Synthetic oligonucleotide
acgacuugaguaacagguc

SEQ ID NO: 3155651 - RNA, 19 nt, Artificial Sequence
  Description of Artificial Sequence: Synthetic oligonucleotide
uuacgacuugaguaacagg

SEQ ID NO: 3155652 - RNA, 19 nt, Artificial Sequence
  Description of Artificial Sequence: Synthetic oligonucleotide
auuacgacuugaguaacag

SEQ ID NO: 3155653 - RNA, 19 nt, Artificial Sequence
  Description of Artificial Sequence: Synthetic oligonucleotide
auauuacgacuugaguaac

SEQ ID NO: 3155654 - RNA, 19 nt, Artificial Sequence
  Description of Artificial Sequence: Synthetic oligonucleotide
aggccauuuuaauauuacg

SEQ ID NO: 3155655 - RNA, 19 nt, Artificial Sequence
  Description of Artificial Sequence: Synthetic oligonucleotide
uaggccauuuuaauauuac

SEQ ID NO: 3155656 - RNA, 19 nt, Artificial Sequence
  Description of Artificial Sequence: Synthetic oligonucleotide
auguguaacuuuaggaaac

SEQ ID NO: 3155657 - RNA, 19 nt, Artificial Sequence
  Description of Artificial Sequence: Synthetic oligonucleotide
uccuauguguaacuuuagg

SEQ ID NO: 3155658 - RNA, 19 nt, Artificial Sequence
  Description of Artificial Sequence: Synthetic oligonucleotide
uuccuauguguaacuuuag

SEQ ID NO: 3155659 - RNA, 19 nt, Artificial Sequence
  Description of Artificial Sequence: Synthetic oligonucleotide
aucaggacauagcugcagg

SEQ ID NO: 3155660 - RNA, 19 nt, Artificial Sequence
  Description of Artificial Sequence: Synthetic oligonucleotide
acaggucucauccagcauc

SEQ ID NO: 3155661 - RNA, 19 nt, Artificial Sequence
  Description of Artificial Sequence: Synthetic oligonucleotide
acguuaaccaauuuaggac

SEQ ID NO: 3155662 - RNA, 19 nt, Artificial Sequence
  Description of Artificial Sequence: Synthetic oligonucleotide
uuacguuaaccaauuuagg

SEQ ID NO: 3155663 - RNA, 19 nt, Artificial Sequence
  Description of Artificial Sequence: Synthetic oligonucleotide
auuacguuaaccaauuuag

SEQ ID NO: 3155664 - RNA, 19 nt, Artificial Sequence
  Description of Artificial Sequence: Synthetic oligonucleotide
uauaugacauuggcagugg

SEQ ID NO: 3155665 - RNA, 19 nt, Artificial Sequence
  Description of Artificial Sequence: Synthetic oligonucleotide
aguagcugcagcauauaug

SEQ ID NO: 3155666 - RNA, 19 nt, Artificial Sequence
  Description of Artificial Sequence: Synthetic oligonucleotide
uuuaaggaguagcugcagc

SEQ ID NO: 3155667 - RNA, 19 nt, Artificial Sequence
  Description of Artificial Sequence: Synthetic oligonucleotide
ugguuuaaggaguagcugc

SEQ ID NO: 3155668 - RNA, 19 nt, Artificial Sequence
  Description of Artificial Sequence: Synthetic oligonucleotide
uacaaaacacaguaaauac

SEQ ID NO: 3155669 - RNA, 19 nt, Artificial Sequence
  Description of Artificial Sequence: Synthetic oligonucleotide
ugaaggaaucagaaguuac

SEQ ID NO: 3155670 - RNA, 19 nt, Artificial Sequence
  Description of Artificial Sequence: Synthetic oligonucleotide
uuggauguugggaugaagg

SEQ ID NO: 3155671 - RNA, 19 nt, Artificial Sequence
  Description of Artificial Sequence: Synthetic oligonucleotide
aggcauguuggauguuggg

SEQ ID NO: 3155672 - RNA, 19 nt, Artificial Sequence
  Description of Artificial Sequence: Synthetic oligonucleotide
agauggccuaggcauguug

SEQ ID NO: 3155673 - RNA, 19 nt, Artificial Sequence
  Description of Artificial Sequence: Synthetic oligonucleotide
aaaagauggccuaggcaug

SEQ ID NO: 3155674 - RNA, 19 nt, Artificial Sequence
  Description of Artificial Sequence: Synthetic oligonucleotide
aagaaaagauggccuaggc

SEQ ID NO: 3155675 - RNA, 19 nt, Artificial Sequence
  Description of Artificial Sequence: Synthetic oligonucleotide
uuggaucccaggaugugac

SEQ ID NO: 3155676 - RNA, 19 nt, Artificial Sequence
  Description of Artificial Sequence: Synthetic oligonucleotide
uacauuggaucccaggaug

SEQ ID NO: 3155677 - RNA, 19 nt, Artificial Sequence
  Description of Artificial Sequence: Synthetic oligonucleotide
ucugacauauauaguacac

SEQ ID NO: 3155678 - RNA, 19 nt, Artificial Sequence
  Description of Artificial Sequence: Synthetic oligonucleotide
auucugacauauauaguac

SEQ ID NO: 3155679 - RNA, 19 nt, Artificial Sequence
  Description of Artificial Sequence: Synthetic oligonucleotide
auuauauggcaauguacac

SEQ ID NO: 3155680 - RNA, 19 nt, Artificial Sequence
  Description of Artificial Sequence: Synthetic oligonucleotide
acauuauauggcaauguac

SEQ ID NO: 3155681 - RNA, 19 nt, Artificial Sequence
  Description of Artificial Sequence: Synthetic oligonucleotide
ugguaugacaguugguugc

SEQ ID NO: 3155682 - RNA, 19 nt, Artificial Sequence
  Description of Artificial Sequence: Synthetic oligonucleotide
uugguaugacaguugguug

SEQ ID NO: 3155683 - RNA, 19 nt, Artificial Sequence
  Description of Artificial Sequence: Synthetic oligonucleotide
uucccucuccguccauccu

SEQ ID NO: 3155684 - RNA, 19 nt, Artificial Sequence
  Description of Artificial Sequence: Synthetic oligonucleotide
cucuccguccauccuuuua

SEQ ID NO: 3155685 - RNA, 19 nt, Artificial Sequence
  Description of Artificial Sequence: Synthetic oligonucleotide
ucuccguccauccuuuuau

SEQ ID NO: 3155686 - RNA, 19 nt, Artificial Sequence
  Description of Artificial Sequence: Synthetic oligonucleotide
gccucugugucacuguaga

SEQ ID NO: 3155687 - RNA, 19 nt, Artificial Sequence
  Description of Artificial Sequence: Synthetic oligonucleotide
cugugucacuguagaaccu

SEQ ID NO: 3155688 - RNA, 19 nt, Artificial Sequence
  Description of Artificial Sequence: Synthetic oligonucleotide
cuagacagcgaugacguuu

SEQ ID NO: 3155689 - RNA, 19 nt, Artificial Sequence
  Description of Artificial Sequence: Synthetic oligonucleotide
ggacaagacuuacgaguau

SEQ ID NO: 3155690 - RNA, 19 nt, Artificial Sequence
  Description of Artificial Sequence: Synthetic oligonucleotide
acaagacuuacgaguauau

SEQ ID NO: 3155691 - RNA, 19 nt, Artificial Sequence
  Description of Artificial Sequence: Synthetic oligonucleotide
gaguauauccgccaccauu

SEQ ID NO: 3155692 - RNA, 19 nt, Artificial Sequence
  Description of Artificial Sequence: Synthetic oligonucleotide
aguauauccgccaccauuu

SEQ ID NO: 3155693 - RNA, 19 nt, Artificial Sequence
  Description of Artificial Sequence: Synthetic oligonucleotide
ccgccaccauuucagcaau

SEQ ID NO: 3155694 - RNA, 19 nt, Artificial Sequence
  Description of Artificial Sequence: Synthetic oligonucleotide
cagcaauuuuggccguauu

SEQ ID NO: 3155695 - RNA, 19 nt, Artificial Sequence
  Description of Artificial Sequence: Synthetic oligonucleotide
gcaauuuuggccguauuca

SEQ ID NO: 3155696 - RNA, 19 nt, Artificial Sequence
  Description of Artificial Sequence: Synthetic oligonucleotide
uguucuggagauacucccu

SEQ ID NO: 3155697 - RNA, 19 nt, Artificial Sequence
  Description of Artificial Sequence: Synthetic oligonucleotide
cuggagauacucccuuacu

SEQ ID NO: 3155698 - RNA, 19 nt, Artificial Sequence
  Description of Artificial Sequence: Synthetic oligonucleotide
uuacaacaagcgaccagga

SEQ ID NO: 3155699 - RNA, 19 nt, Artificial Sequence
  Description of Artificial Sequence: Synthetic oligonucleotide
aacaagcgaccaggaucga

SEQ ID NO: 3155700 - RNA, 19 nt, Artificial Sequence
  Description of Artificial Sequence: Synthetic oligonucleotide
caagcgaccaggaucgacu

SEQ ID NO: 3155701 - RNA, 19 nt, Artificial Sequence
  Description of Artificial Sequence: Synthetic oligonucleotide
accggcuggguagaauccu

SEQ ID NO: 3155702 - RNA, 19 nt, Artificial Sequence
  Description of Artificial Sequence: Synthetic oligonucleotide
ccggcuggguagaauccuu

SEQ ID NO: 3155703 - RNA, 19 nt, Artificial Sequence
  Description of Artificial Sequence: Synthetic oligonucleotide
aauccuucaucaaggcgcu

SEQ ID NO: 3155704 - RNA, 19 nt, Artificial Sequence
  Description of Artificial Sequence: Synthetic oligonucleotide
ggcuagucuggcugacgaa

SEQ ID NO: 3155705 - RNA, 19 nt, Artificial Sequence
  Description of Artificial Sequence: Synthetic oligonucleotide
aaguggcccgugucuacca

SEQ ID NO: 3155706 - RNA, 19 nt, Artificial Sequence
  Description of Artificial Sequence: Synthetic oligonucleotide
cagcggagccacaguuagu

SEQ ID NO: 3155707 - RNA, 19 nt, Artificial Sequence
  Description of Artificial Sequence: Synthetic oligonucleotide
ggagccacaguuaguuccu

SEQ ID NO: 3155708 - RNA, 19 nt, Artificial Sequence
  Description of Artificial Sequence: Synthetic oligonucleotide
gccacaguuaguuccugcu

SEQ ID NO: 3155709 - RNA, 19 nt, Artificial Sequence
  Description of Artificial Sequence: Synthetic oligonucleotide
cauucuggggcugugagaa

SEQ ID NO: 3155710 - RNA, 19 nt, Artificial Sequence
  Description of Artificial Sequence: Synthetic oligonucleotide
agcugucaacccucugacu

SEQ ID NO: 3155711 - RNA, 19 nt, Artificial Sequence
  Description of Artificial Sequence: Synthetic oligonucleotide
cacccucagcauuagcucu

SEQ ID NO: 3155712 - RNA, 19 nt, Artificial Sequence
  Description of Artificial Sequence: Synthetic oligonucleotide
guguccacuggugcacuga

SEQ ID NO: 3155713 - RNA, 19 nt, Artificial Sequence
  Description of Artificial Sequence: Synthetic oligonucleotide
caaggugccuacccacuca

SEQ ID NO: 3155714 - RNA, 19 nt, Artificial Sequence
  Description of Artificial Sequence: Synthetic oligonucleotide
acccacucaacauuugaca

SEQ ID NO: 3155715 - RNA, 19 nt, Artificial Sequence
  Description of Artificial Sequence: Synthetic oligonucleotide
cacucaacauuugacagga

SEQ ID NO: 3155716 - RNA, 19 nt, Artificial Sequence
  Description of Artificial Sequence: Synthetic oligonucleotide
aaguugccugccagcucaa

SEQ ID NO: 3155717 - RNA, 19 nt, Artificial Sequence
  Description of Artificial Sequence: Synthetic oligonucleotide
ucugguacaaugcccacua

SEQ ID NO: 3155718 - RNA, 19 nt, Artificial Sequence
  Description of Artificial Sequence: Synthetic oligonucleotide
gguacaaugcccacuacga

SEQ ID NO: 3155719 - RNA, 19 nt, Artificial Sequence
  Description of Artificial Sequence: Synthetic oligonucleotide
gcccacuacgagucuacca

SEQ ID NO: 3155720 - RNA, 19 nt, Artificial Sequence
  Description of Artificial Sequence: Synthetic oligonucleotide
acuacgagucuaccaccgu

SEQ ID NO: 3155721 - RNA, 19 nt, Artificial Sequence
  Description of Artificial Sequence: Synthetic oligonucleotide
cgagucuaccaccguccaa

SEQ ID NO: 3155722 - RNA, 19 nt, Artificial Sequence
  Description of Artificial Sequence: Synthetic oligonucleotide
ccguccaaacugcccauca

SEQ ID NO: 3155723 - RNA, 19 nt, Artificial Sequence
  Description of Artificial Sequence: Synthetic oligonucleotide
aaacugcccaucaacucaa

SEQ ID NO: 3155724 - RNA, 19 nt, Artificial Sequence
  Description of Artificial Sequence: Synthetic oligonucleotide
ugaccacaagauguccgca

SEQ ID NO: 3155725 - RNA, 19 nt, Artificial Sequence
  Description of Artificial Sequence: Synthetic oligonucleotide
gaccacaagauguccgcaa

SEQ ID NO: 3155726 - RNA, 19 nt, Artificial Sequence
  Description of Artificial Sequence: Synthetic oligonucleotide
ccaguacccacagacauuu

SEQ ID NO: 3155727 - RNA, 19 nt, Artificial Sequence
  Description of Artificial Sequence: Synthetic oligonucleotide
cugaccuacuggagcauaa

SEQ ID NO: 3155728 - RNA, 19 nt, Artificial Sequence
  Description of Artificial Sequence: Synthetic oligonucleotide
ugaccuacuggagcauaau

SEQ ID NO: 3155729 - RNA, 19 nt, Artificial Sequence
  Description of Artificial Sequence: Synthetic oligonucleotide
ccuacuggagcauaauccu

SEQ ID NO: 3155730 - RNA, 19 nt, Artificial Sequence
  Description of Artificial Sequence: Synthetic oligonucleotide
aggauggacggagagggaa

SEQ ID NO: 3155731 - RNA, 19 nt, Artificial Sequence
  Description of Artificial Sequence: Synthetic oligonucleotide
uaaaaggauggacggagag

SEQ ID NO: 3155732 - RNA, 19 nt, Artificial Sequence
  Description of Artificial Sequence: Synthetic oligonucleotide
auaaaaggauggacggaga

SEQ ID NO: 3155733 - RNA, 19 nt, Artificial Sequence
  Description of Artificial Sequence: Synthetic oligonucleotide
ucuacagugacacagaggc

SEQ ID NO: 3155734 - RNA, 19 nt, Artificial Sequence
  Description of Artificial Sequence: Synthetic oligonucleotide
agguucuacagugacacag

SEQ ID NO: 3155735 - RNA, 19 nt, Artificial Sequence
  Description of Artificial Sequence: Synthetic oligonucleotide
aaacgucaucgcugucuag

SEQ ID NO: 3155736 - RNA, 19 nt, Artificial Sequence
  Description of Artificial Sequence: Synthetic oligonucleotide
auacucguaagucuugucc

SEQ ID NO: 3155737 - RNA, 19 nt, Artificial Sequence
  Description of Artificial Sequence: Synthetic oligonucleotide
auauacucguaagucuugu

SEQ ID NO: 3155738 - RNA, 19 nt, Artificial Sequence
  Description of Artificial Sequence: Synthetic oligonucleotide
aaugguggcggauauacuc

SEQ ID NO: 3155739 - RNA, 19 nt, Artificial Sequence
  Description of Artificial Sequence: Synthetic oligonucleotide
aaaugguggcggauauacu

SEQ ID NO: 3155740 - RNA, 19 nt, Artificial Sequence
  Description of Artificial Sequence: Synthetic oligonucleotide
auugcugaaaugguggcgg

SEQ ID NO: 3155741 - RNA, 19 nt, Artificial Sequence
  Description of Artificial Sequence: Synthetic oligonucleotide
aauacggccaaaauugcug

SEQ ID NO: 3155742 - RNA, 19 nt, Artificial Sequence
  Description of Artificial Sequence: Synthetic oligonucleotide
ugaauacggccaaaauugc

SEQ ID NO: 3155743 - RNA, 19 nt, Artificial Sequence
  Description of Artificial Sequence: Synthetic oligonucleotide
agggaguaucuccagaaca

SEQ ID NO: 3155744 - RNA, 19 nt, Artificial Sequence
  Description of Artificial Sequence: Synthetic oligonucleotide
aguaagggaguaucuccag

SEQ ID NO: 3155745 - RNA, 19 nt, Artificial Sequence
  Description of Artificial Sequence: Synthetic oligonucleotide
uccuggucgcuuguuguaa

SEQ ID NO: 3155746 - RNA, 19 nt, Artificial Sequence
  Description of Artificial Sequence: Synthetic oligonucleotide
ucgauccuggucgcuuguu

SEQ ID NO: 3155747 - RNA, 19 nt, Artificial Sequence
  Description of Artificial Sequence: Synthetic oligonucleotide
agucgauccuggucgcuug

SEQ ID NO: 3155748 - RNA, 19 nt, Artificial Sequence
  Description of Artificial Sequence: Synthetic oligonucleotide
aggauucuacccagccggu

SEQ ID NO: 3155749 - RNA, 19 nt, Artificial Sequence
  Description of Artificial Sequence: Synthetic oligonucleotide
aaggauucuacccagccgg

SEQ ID NO: 3155750 - RNA, 19 nt, Artificial Sequence
  Description of Artificial Sequence: Synthetic oligonucleotide
agcgccuugaugaaggauu

SEQ ID NO: 3155751 - RNA, 19 nt, Artificial Sequence
  Description of Artificial Sequence: Synthetic oligonucleotide
uucgucagccagacuagcc

SEQ ID NO: 3155752 - RNA, 19 nt, Artificial Sequence
  Description of Artificial Sequence: Synthetic oligonucleotide
ugguagacacgggccacuu

SEQ ID NO: 3155753 - RNA, 19 nt, Artificial Sequence
  Description of Artificial Sequence: Synthetic oligonucleotide
acuaacuguggcuccgcug

SEQ ID NO: 3155754 - RNA, 19 nt, Artificial Sequence
  Description of Artificial Sequence: Synthetic oligonucleotide
aggaacuaacuguggcucc

SEQ ID NO: 3155755 - RNA, 19 nt, Artificial Sequence
  Description of Artificial Sequence: Synthetic oligonucleotide
agcaggaacuaacuguggc

SEQ ID NO: 3155756 - RNA, 19 nt, Artificial Sequence
  Description of Artificial Sequence: Synthetic oligonucleotide
uucucacagccccagaaug

SEQ ID NO: 3155757 - RNA, 19 nt, Artificial Sequence
  Description of Artificial Sequence: Synthetic oligonucleotide
agucagaggguugacagcu

SEQ ID NO: 3155758 - RNA, 19 nt, Artificial Sequence
  Description of Artificial Sequence: Synthetic oligonucleotide
agagcuaaugcugagggug

SEQ ID NO: 3155759 - RNA, 19 nt, Artificial Sequence
  Description of Artificial Sequence: Synthetic oligonucleotide
ucagugcaccaguggacac

SEQ ID NO: 3155760 - RNA, 19 nt, Artificial Sequence
  Description of Artificial Sequence: Synthetic oligonucleotide
ugaguggguaggcaccuug

SEQ ID NO: 3155761 - RNA, 19 nt, Artificial Sequence
  Description of Artificial Sequence: Synthetic oligonucleotide
ugucaaauguugagugggu

SEQ ID NO: 3155762 - RNA, 19 nt, Artificial Sequence
  Description of Artificial Sequence: Synthetic oligonucleotide
uccugucaaauguugagug

SEQ ID NO: 3155763 - RNA, 19 nt, Artificial Sequence
  Description of Artificial Sequence: Synthetic oligonucleotide
uugagcuggcaggcaacuu

SEQ ID NO: 3155764 - RNA, 19 nt, Artificial Sequence
  Description of Artificial Sequence: Synthetic oligonucleotide
uagugggcauuguaccaga

SEQ ID NO: 3155765 - RNA, 19 nt, Artificial Sequence
  Description of Artificial Sequence: Synthetic oligonucleotide
ucguagugggcauuguacc

SEQ ID NO: 3155766 - RNA, 19 nt, Artificial Sequence
  Description of Artificial Sequence: Synthetic oligonucleotide
ugguagacucguagugggc

SEQ ID NO: 3155767 - RNA, 19 nt, Artificial Sequence
  Description of Artificial Sequence: Synthetic oligonucleotide
acggugguagacucguagu

SEQ ID NO: 3155768 - RNA, 19 nt, Artificial Sequence
  Description of Artificial Sequence: Synthetic oligonucleotide
uuggacggugguagacucg

SEQ ID NO: 3155769 - RNA, 19 nt, Artificial Sequence
  Description of Artificial Sequence: Synthetic oligonucleotide
ugaugggcaguuuggacgg

SEQ ID NO: 3155770 - RNA, 19 nt, Artificial Sequence
  Description of Artificial Sequence: Synthetic oligonucleotide
uugaguugaugggcaguuu

SEQ ID NO: 3155771 - RNA, 19 nt, Artificial Sequence
  Description of Artificial Sequence: Synthetic oligonucleotide
ugcggacaucuugugguca

SEQ ID NO: 3155772 - RNA, 19 nt, Artificial Sequence
  Description of Artificial Sequence: Synthetic oligonucleotide
uugcggacaucuugugguc

SEQ ID NO: 3155773 - RNA, 19 nt, Artificial Sequence
  Description of Artificial Sequence: Synthetic oligonucleotide
aaaugucuguggguacugg

SEQ ID NO: 3155774 - RNA, 19 nt, Artificial Sequence
  Description of Artificial Sequence: Synthetic oligonucleotide
uuaugcuccaguaggucag

SEQ ID NO: 3155775 - RNA, 19 nt, Artificial Sequence
  Description of Artificial Sequence: Synthetic oligonucleotide
auuaugcuccaguagguca

SEQ ID NO: 3155776 - RNA, 19 nt, Artificial Sequence
  Description of Artificial Sequence: Synthetic oligonucleotide
aggauuaugcuccaguagg

SEQ ID NO: 3155777 - RNA, 19 nt, Artificial Sequence
  Description of Artificial Sequence: Synthetic oligonucleotide
uaucauaucuacuccuuuu

SEQ ID NO: 3155778 - RNA, 19 nt, Artificial Sequence
  Description of Artificial Sequence: Synthetic oligonucleotide
caauaaauguguuguuaga

SEQ ID NO: 3155779 - RNA, 19 nt, Artificial Sequence
  Description of Artificial Sequence: Synthetic oligonucleotide
aagauauagucaacuuacu

SEQ ID NO: 3155780 - RNA, 19 nt, Artificial Sequence
  Description of Artificial Sequence: Synthetic oligonucleotide
gauggagguuuuaacucca

SEQ ID NO: 3155781 - RNA, 19 nt, Artificial Sequence
  Description of Artificial Sequence: Synthetic oligonucleotide
acaaugagcuaucucaccu

SEQ ID NO: 3155782 - RNA, 19 nt, Artificial Sequence
  Description of Artificial Sequence: Synthetic oligonucleotide
ucugcgugaauuugacuga

SEQ ID NO: 3155783 - RNA, 19 nt, Artificial Sequence
  Description of Artificial Sequence: Synthetic oligonucleotide
acuccaucuaauguccaau

SEQ ID NO: 3155784 - RNA, 19 nt, Artificial Sequence
  Description of Artificial Sequence: Synthetic oligonucleotide
aucuaauguccaauucaau

SEQ ID NO: 3155785 - RNA, 19 nt, Artificial Sequence
  Description of Artificial Sequence: Synthetic oligonucleotide
cuaauguccaauucaauca

SEQ ID NO: 3155786 - RNA, 19 nt, Artificial Sequence
  Description of Artificial Sequence: Synthetic oligonucleotide
ucaagaucauucaaaauaa

SEQ ID NO: 3155787 - RNA, 19 nt, Artificial Sequence
  Description of Artificial Sequence: Synthetic oligonucleotide
caaauuagaucuaucucau

SEQ ID NO: 3155788 - RNA, 19 nt, Artificial Sequence
  Description of Artificial Sequence: Synthetic oligonucleotide
ucauaaugguuugucaucu

SEQ ID NO: 3155789 - RNA, 19 nt, Artificial Sequence
  Description of Artificial Sequence: Synthetic oligonucleotide
ugguuugucaucuacuaaa

SEQ ID NO: 3155790 - RNA, 19 nt, Artificial Sequence
  Description of Artificial Sequence: Synthetic oligonucleotide
caggguguuuccaugcaau

SEQ ID NO: 3155791 - RNA, 19 nt, Artificial Sequence
  Description of Artificial Sequence: Synthetic oligonucleotide
aggguguuuccaugcaauu

SEQ ID NO: 3155792 - RNA, 19 nt, Artificial Sequence
  Description of Artificial Sequence: Synthetic oligonucleotide
gaacaagcaauaugacguu

SEQ ID NO: 3155793 - RNA, 19 nt, Artificial Sequence
  Description of Artificial Sequence: Synthetic oligonucleotide
ugacguuccuuggacuaaa

SEQ ID NO: 3155794 - RNA, 19 nt, Artificial Sequence
  Description of Artificial Sequence: Synthetic oligonucleotide
gacuaaagcauacaaaucu

SEQ ID NO: 3155795 - RNA, 19 nt, Artificial Sequence
  Description of Artificial Sequence: Synthetic oligonucleotide
gugauugagaacaauuccu

SEQ ID NO: 3155796 - RNA, 19 nt, Artificial Sequence
  Description of Artificial Sequence: Synthetic oligonucleotide
acuggaguauaauaauaua

SEQ ID NO: 3155797 - RNA, 19 nt, Artificial Sequence
  Description of Artificial Sequence: Synthetic oligonucleotide
ugggcuucucaauguaaga

SEQ ID NO: 3155798 - RNA, 19 nt, Artificial Sequence
  Description of Artificial Sequence: Synthetic oligonucleotide
cuggauuugaaacgaucuu

SEQ ID NO: 3155799 - RNA, 19 nt, Artificial Sequence
  Description of Artificial Sequence: Synthetic oligonucleotide
uggauuugaaacgaucuuu

SEQ ID NO: 3155800 - RNA, 19 nt, Artificial Sequence
  Description of Artificial Sequence: Synthetic oligonucleotide
ggauuugaaacgaucuuuu

SEQ ID NO: 3155801 - RNA, 19 nt, Artificial Sequence
  Description of Artificial Sequence: Synthetic oligonucleotide
acuacuucgcaggcauaaa

SEQ ID NO: 3155802 - RNA, 19 nt, Artificial Sequence
  Description of Artificial Sequence: Synthetic oligonucleotide
gcaauauguucacaggauu

SEQ ID NO: 3155803 - RNA, 19 nt, Artificial Sequence
  Description of Artificial Sequence: Synthetic oligonucleotide
ucacaaguuugcaaacuuu

SEQ ID NO: 3155804 - RNA, 19 nt, Artificial Sequence
  Description of Artificial Sequence: Synthetic oligonucleotide
aaaauauugucgaaaucua

SEQ ID NO: 3155805 - RNA, 19 nt, Artificial Sequence
  Description of Artificial Sequence: Synthetic oligonucleotide
gucgaaaucuaccuuuccu

SEQ ID NO: 3155806 - RNA, 19 nt, Artificial Sequence
  Description of Artificial Sequence: Synthetic oligonucleotide
uucuuaauuuagagucuaa

SEQ ID NO: 3155807 - RNA, 19 nt, Artificial Sequence
  Description of Artificial Sequence: Synthetic oligonucleotide
auuuagagucuaauggcuu

SEQ ID NO: 3155808 - RNA, 19 nt, Artificial Sequence
  Description of Artificial Sequence: Synthetic oligonucleotide
uguucaagggcuuaucuga

SEQ ID NO: 3155809 - RNA, 19 nt, Artificial Sequence
  Description of Artificial Sequence: Synthetic oligonucleotide
gaagaaucucauaacauca

SEQ ID NO: 3155810 - RNA, 19 nt, Artificial Sequence
  Description of Artificial Sequence: Synthetic oligonucleotide
aauccauuugauuguaccu

SEQ ID NO: 3155811 - RNA, 19 nt, Artificial Sequence
  Description of Artificial Sequence: Synthetic oligonucleotide
uuucagugcaccgaauucu

SEQ ID NO: 3155812 - RNA, 19 nt, Artificial Sequence
  Description of Artificial Sequence: Synthetic oligonucleotide
uucagugcaccgaauucuu

SEQ ID NO: 3155813 - RNA, 19 nt, Artificial Sequence
  Description of Artificial Sequence: Synthetic oligonucleotide
agagcaguuugaauacgca

SEQ ID NO: 3155814 - RNA, 19 nt, Artificial Sequence
  Description of Artificial Sequence: Synthetic oligonucleotide
uauauaauucaugccuaua

SEQ ID NO: 3155815 - RNA, 19 nt, Artificial Sequence
  Description of Artificial Sequence: Synthetic oligonucleotide
aaagauagagauugggucu

SEQ ID NO: 3155816 - RNA, 19 nt, Artificial Sequence
  Description of Artificial Sequence: Synthetic oligonucleotide
uccuugaacucgagucaau

SEQ ID NO: 3155817 - RNA, 19 nt, Artificial Sequence
  Description of Artificial Sequence: Synthetic oligonucleotide
aacucgagucaaucauuaa

SEQ ID NO: 3155818 - RNA, 19 nt, Artificial Sequence
  Description of Artificial Sequence: Synthetic oligonucleotide
uuuuguuauaacacagcau

SEQ ID NO: 3155819 - RNA, 19 nt, Artificial Sequence
  Description of Artificial Sequence: Synthetic oligonucleotide
cuauuaaaggauccauuau

SEQ ID NO: 3155820 - RNA, 19 nt, Artificial Sequence
  Description of Artificial Sequence: Synthetic oligonucleotide
gaacaaaaucuagagucca

SEQ ID NO: 3155821 - RNA, 19 nt, Artificial Sequence
  Description of Artificial Sequence: Synthetic oligonucleotide
aaacugaaccaugcacucu

SEQ ID NO: 3155822 - RNA, 19 nt, Artificial Sequence
  Description of Artificial Sequence: Synthetic oligonucleotide
uucagaaagaacggguaaa

SEQ ID NO: 3155823 - RNA, 19 nt, Artificial Sequence
  Description of Artificial Sequence: Synthetic oligonucleotide
ucagaaagaacggguaaau

SEQ ID NO: 3155824 - RNA, 19 nt, Artificial Sequence
  Description of Artificial Sequence: Synthetic oligonucleotide
aaaaggaguagauaugaua

SEQ ID NO: 3155825 - RNA, 19 nt, Artificial Sequence
  Description of Artificial Sequence: Synthetic oligonucleotide
ucuaacaacacauuuauug

SEQ ID NO: 3155826 - RNA, 19 nt, Artificial Sequence
  Description of Artificial Sequence: Synthetic oligonucleotide
aguaaguugacuauaucuu

SEQ ID NO: 3155827 - RNA, 19 nt, Artificial Sequence
  Description of Artificial Sequence: Synthetic oligonucleotide
uggaguuaaaaccuccauc

SEQ ID NO: 3155828 - RNA, 19 nt, Artificial Sequence
  Description of Artificial Sequence: Synthetic oligonucleotide
aggugagauagcucauugu

SEQ ID NO: 3155829 - RNA, 19 nt, Artificial Sequence
  Description of Artificial Sequence: Synthetic oligonucleotide
ucagucaaauucacgcaga

SEQ ID NO: 3155830 - RNA, 19 nt, Artificial Sequence
  Description of Artificial Sequence: Synthetic oligonucleotide
auuggacauuagauggagu

SEQ ID NO: 3155831 - RNA, 19 nt, Artificial Sequence
  Description of Artificial Sequence: Synthetic oligonucleotide
auugaauuggacauuagau

SEQ ID NO: 3155832 - RNA, 19 nt, Artificial Sequence
  Description of Artificial Sequence: Synthetic oligonucleotide
ugauugaauuggacauuag

SEQ ID NO: 3155833 - RNA, 19 nt, Artificial Sequence
  Description of Artificial Sequence: Synthetic oligonucleotide
uuauuuugaaugaucuuga

SEQ ID NO: 3155834 - RNA, 19 nt, Artificial Sequence
  Description of Artificial Sequence: Synthetic oligonucleotide
augagauagaucuaauuug

SEQ ID NO: 3155835 - RNA, 19 nt, Artificial Sequence
  Description of Artificial Sequence: Synthetic oligonucleotide
agaugacaaaccauuauga

SEQ ID NO: 3155836 - RNA, 19 nt, Artificial Sequence
  Description of Artificial Sequence: Synthetic oligonucleotide
uuuaguagaugacaaacca

SEQ ID NO: 3155837 - RNA, 19 nt, Artificial Sequence
  Description of Artificial Sequence: Synthetic oligonucleotide
auugcauggaaacacccug

SEQ ID NO: 3155838 - RNA, 19 nt, Artificial Sequence
  Description of Artificial Sequence: Synthetic oligonucleotide
aauugcauggaaacacccu

SEQ ID NO: 3155839 - RNA, 19 nt, Artificial Sequence
  Description of Artificial Sequence: Synthetic oligonucleotide
aacgucauauugcuuguuc

SEQ ID NO: 3155840 - RNA, 19 nt, Artificial Sequence
  Description of Artificial Sequence: Synthetic oligonucleotide
uuuaguccaaggaacguca

SEQ ID NO: 3155841 - RNA, 19 nt, Artificial Sequence
  Description of Artificial Sequence: Synthetic oligonucleotide
agauuuguaugcuuuaguc

SEQ ID NO: 3155842 - RNA, 19 nt, Artificial Sequence
  Description of Artificial Sequence: Synthetic oligonucleotide
aggaauuguucucaaucac

SEQ ID NO: 3155843 - RNA, 19 nt, Artificial Sequence
  Description of Artificial Sequence: Synthetic oligonucleotide
uauauuauuauacuccagu

SEQ ID NO: 3155844 - RNA, 19 nt, Artificial Sequence
  Description of Artificial Sequence: Synthetic oligonucleotide
ucuuacauugagaagccca

SEQ ID NO: 3155845 - RNA, 19 nt, Artificial Sequence
  Description of Artificial Sequence: Synthetic oligonucleotide
aagaucguuucaaauccag

SEQ ID NO: 3155846 - RNA, 19 nt, Artificial Sequence
  Description of Artificial Sequence: Synthetic oligonucleotide
aaagaucguuucaaaucca

SEQ ID NO: 3155847 - RNA, 19 nt, Artificial Sequence
  Description of Artificial Sequence: Synthetic oligonucleotide
aaaagaucguuucaaaucc

SEQ ID NO: 3155848 - RNA, 19 nt, Artificial Sequence
  Description of Artificial Sequence: Synthetic oligonucleotide
uuuaugccugcgaaguagu

SEQ ID NO: 3155849 - RNA, 19 nt, Artificial Sequence
  Description of Artificial Sequence: Synthetic oligonucleotide
aauccugugaacauauugc

SEQ ID NO: 3155850 - RNA, 19 nt, Artificial Sequence
  Description of Artificial Sequence: Synthetic oligonucleotide
aaaguuugcaaacuuguga

SEQ ID NO: 3155851 - RNA, 19 nt, Artificial Sequence
  Description of Artificial Sequence: Synthetic oligonucleotide
uagauuucgacaauauuuu

SEQ ID NO: 3155852 - RNA, 19 nt, Artificial Sequence
  Description of Artificial Sequence: Synthetic oligonucleotide
aggaaagguagauuucgac

SEQ ID NO: 3155853 - RNA, 19 nt, Artificial Sequence
  Description of Artificial Sequence: Synthetic oligonucleotide
uuagacucuaaauuaagaa

SEQ ID NO: 3155854 - RNA, 19 nt, Artificial Sequence
  Description of Artificial Sequence: Synthetic oligonucleotide
aagccauuagacucuaaau

SEQ ID NO: 3155855 - RNA, 19 nt, Artificial Sequence
  Description of Artificial Sequence: Synthetic oligonucleotide
ucagauaagcccuugaaca

SEQ ID NO: 3155856 - RNA, 19 nt, Artificial Sequence
  Description of Artificial Sequence: Synthetic oligonucleotide
ugauguuaugagauucuuc

SEQ ID NO: 3155857 - RNA, 19 nt, Artificial Sequence
  Description of Artificial Sequence: Synthetic oligonucleotide
agguacaaucaaauggauu

SEQ ID NO: 3155858 - RNA, 19 nt, Artificial Sequence
  Description of Artificial Sequence: Synthetic oligonucleotide
agaauucggugcacugaaa

SEQ ID NO: 3155859 - RNA, 19 nt, Artificial Sequence
  Description of Artificial Sequence: Synthetic oligonucleotide
aagaauucggugcacugaa

SEQ ID NO: 3155860 - RNA, 19 nt, Artificial Sequence
  Description of Artificial Sequence: Synthetic oligonucleotide
ugcguauucaaacugcucu

SEQ ID NO: 3155861 - RNA, 19 nt, Artificial Sequence
  Description of Artificial Sequence: Synthetic oligonucleotide
uauaggcaugaauuauaua

SEQ ID NO: 3155862 - RNA, 19 nt, Artificial Sequence
  Description of Artificial Sequence: Synthetic oligonucleotide
agacccaaucucuaucuuu

SEQ ID NO: 3155863 - RNA, 19 nt, Artificial Sequence
  Description of Artificial Sequence: Synthetic oligonucleotide
auugacucgaguucaagga

SEQ ID NO: 3155864 - RNA, 19 nt, Artificial Sequence
  Description of Artificial Sequence: Synthetic oligonucleotide
uuaaugauugacucgaguu

SEQ ID NO: 3155865 - RNA, 19 nt, Artificial Sequence
  Description of Artificial Sequence: Synthetic oligonucleotide
augcuguguuauaacaaaa

SEQ ID NO: 3155866 - RNA, 19 nt, Artificial Sequence
  Description of Artificial Sequence: Synthetic oligonucleotide
auaauggauccuuuaauag

SEQ ID NO: 3155867 - RNA, 19 nt, Artificial Sequence
  Description of Artificial Sequence: Synthetic oligonucleotide
uggacucuagauuuuguuc

SEQ ID NO: 3155868 - RNA, 19 nt, Artificial Sequence
  Description of Artificial Sequence: Synthetic oligonucleotide
agagugcaugguucaguuu

SEQ ID NO: 3155869 - RNA, 19 nt, Artificial Sequence
  Description of Artificial Sequence: Synthetic oligonucleotide
uuuacccguucuuucugaa

SEQ ID NO: 3155870 - RNA, 19 nt, Artificial Sequence
  Description of Artificial Sequence: Synthetic oligonucleotide
auuuacccguucuuucuga

SEQ ID NO: 3155871 - RNA, 19 nt, Artificial Sequence
  Description of Artificial Sequence: Synthetic oligonucleotide
gugugcuggaauucggcuu

SEQ ID NO: 3155872 - RNA, 19 nt, Artificial Sequence
  Description of Artificial Sequence: Synthetic oligonucleotide
gugcuggaauucggcuuga

SEQ ID NO: 3155873 - RNA, 19 nt, Artificial Sequence
  Description of Artificial Sequence: Synthetic oligonucleotide
cuggaauucggcuugagca

SEQ ID NO: 3155874 - RNA, 19 nt, Artificial Sequence
  Description of Artificial Sequence: Synthetic oligonucleotide
ggaauucggcuugagcaga

SEQ ID NO: 3155875 - RNA, 19 nt, Artificial Sequence
  Description of Artificial Sequence: Synthetic oligonucleotide
gaauucggcuugagcagau

SEQ ID NO: 3155876 - RNA, 19 nt, Artificial Sequence
  Description of Artificial Sequence: Synthetic oligonucleotide
aauucggcuugagcagauu

SEQ ID NO: 3155877 - RNA, 19 nt, Artificial Sequence
  Description of Artificial Sequence: Synthetic oligonucleotide
auucggcuugagcagauua

SEQ ID NO: 3155878 - RNA, 19 nt, Artificial Sequence
  Description of Artificial Sequence: Synthetic oligonucleotide
uucggcuugagcagauuau

SEQ ID NO: 3155879 - RNA, 19 nt, Artificial Sequence
  Description of Artificial Sequence: Synthetic oligonucleotide
cggcuugagcagauuauga

SEQ ID NO: 3155880 - RNA, 19 nt, Artificial Sequence
  Description of Artificial Sequence: Synthetic oligonucleotide
ggcuugagcagauuaugaa

SEQ ID NO: 3155881 - RNA, 19 nt, Artificial Sequence
  Description of Artificial Sequence: Synthetic oligonucleotide
gcuugagcagauuaugaaa

SEQ ID NO: 3155882 - RNA, 19 nt, Artificial Sequence
  Description of Artificial Sequence: Synthetic oligonucleotide
cuugagcagauuaugaaaa

SEQ ID NO: 3155883 - RNA, 19 nt, Artificial Sequence
  Description of Artificial Sequence: Synthetic oligonucleotide
ugcuacaggguuucaucca

SEQ ID NO: 3155884 - RNA, 19 nt, Artificial Sequence
  Description of Artificial Sequence: Synthetic oligonucleotide
uacaggguuucauccagga

SEQ ID NO: 3155885 - RNA, 19 nt, Artificial Sequence
  Description of Artificial Sequence: Synthetic oligonucleotide
uuucauccaggaucgagca

SEQ ID NO: 3155886 - RNA, 19 nt, Artificial Sequence
  Description of Artificial Sequence: Synthetic oligonucleotide
gagacaccugagcugaccu

SEQ ID NO: 3155887 - RNA, 19 nt, Artificial Sequence
  Description of Artificial Sequence: Synthetic oligonucleotide
caggaugcguccaccaaga

SEQ ID NO: 3155888 - RNA, 19 nt, Artificial Sequence
  Description of Artificial Sequence: Synthetic oligonucleotide
aggaugcguccaccaagaa

SEQ ID NO: 3155889 - RNA, 19 nt, Artificial Sequence
  Description of Artificial Sequence: Synthetic oligonucleotide
augcguccaccaagaagcu

SEQ ID NO: 3155890 - RNA, 19 nt, Artificial Sequence
  Description of Artificial Sequence: Synthetic oligonucleotide
caagaagcugagcgagugu

SEQ ID NO: 3155891 - RNA, 19 nt, Artificial Sequence
  Description of Artificial Sequence: Synthetic oligonucleotide
cgagugucuccggcgaauu

SEQ ID NO: 3155892 - RNA, 19 nt, Artificial Sequence
  Description of Artificial Sequence: Synthetic oligonucleotide
gugucuccggcgaauugga

SEQ ID NO: 3155893 - RNA, 19 nt, Artificial Sequence
  Description of Artificial Sequence: Synthetic oligonucleotide
uccggcgaauuggagauga

SEQ ID NO: 3155894 - RNA, 19 nt, Artificial Sequence
  Description of Artificial Sequence: Synthetic oligonucleotide
ccggcgaauuggagaugaa

SEQ ID NO: 3155895 - RNA, 19 nt, Artificial Sequence
  Description of Artificial Sequence: Synthetic oligonucleotide
augaacuggacagcaauau

SEQ ID NO: 3155896 - RNA, 19 nt, Artificial Sequence
  Description of Artificial Sequence: Synthetic oligonucleotide
aacuggacagcaauaugga

SEQ ID NO: 3155897 - RNA, 19 nt, Artificial Sequence
  Description of Artificial Sequence: Synthetic oligonucleotide
aauauggagcugcagagga

SEQ ID NO: 3155898 - RNA, 19 nt, Artificial Sequence
  Description of Artificial Sequence: Synthetic oligonucleotide
agaggaugauugcugacgu

SEQ ID NO: 3155899 - RNA, 19 nt, Artificial Sequence
  Description of Artificial Sequence: Synthetic oligonucleotide
augauugcugacguggaca

SEQ ID NO: 3155900 - RNA, 19 nt, Artificial Sequence
  Description of Artificial Sequence: Synthetic oligonucleotide
ccgcgaagucuucuuccga

SEQ ID NO: 3155901 - RNA, 19 nt, Artificial Sequence
  Description of Artificial Sequence: Synthetic oligonucleotide
gcgaagucuucuuccgagu

SEQ ID NO: 3155902 - RNA, 19 nt, Artificial Sequence
  Description of Artificial Sequence: Synthetic oligonucleotide
cgaagucuucuuccgagua

SEQ ID NO: 3155903 - RNA, 19 nt, Artificial Sequence
  Description of Artificial Sequence: Synthetic oligonucleotide
agucuucuuccgaguagca

SEQ ID NO: 3155904 - RNA, 19 nt, Artificial Sequence
  Description of Artificial Sequence: Synthetic oligonucleotide
uuccgaguagcaagccgaa

SEQ ID NO: 3155905 - RNA, 19 nt, Artificial Sequence
  Description of Artificial Sequence: Synthetic oligonucleotide
uccgaguagcaagccgaau

SEQ ID NO: 3155906 - RNA, 19 nt, Artificial Sequence
  Description of Artificial Sequence: Synthetic oligonucleotide
ccgaguagcaagccgaauu

SEQ ID NO: 3155907 - RNA, 19 nt, Artificial Sequence
  Description of Artificial Sequence: Synthetic oligonucleotide
gaguagcaagccgaauucu

SEQ ID NO: 3155908 - RNA, 19 nt, Artificial Sequence
  Description of Artificial Sequence: Synthetic oligonucleotide
uagcaagccgaauucugca

SEQ ID NO: 3155909 - RNA, 19 nt, Artificial Sequence
  Description of Artificial Sequence: Synthetic oligonucleotide
cgaauucugcagauaucca

SEQ ID NO: 3155910 - RNA, 19 nt, Artificial Sequence
  Description of Artificial Sequence: Synthetic oligonucleotide
auucugcagauauccauca

SEQ ID NO: 3155911 - RNA, 19 nt, Artificial Sequence
  Description of Artificial Sequence: Synthetic oligonucleotide
ucugcagauauccaucaca

SEQ ID NO: 3155912 - RNA, 19 nt, Artificial Sequence
  Description of Artificial Sequence: Synthetic oligonucleotide
ugcagauauccaucacacu

SEQ ID NO: 3155913 - RNA, 19 nt, Artificial Sequence
  Description of Artificial Sequence: Synthetic oligonucleotide
ccgcucgagcaugcaucua

SEQ ID NO: 3155914 - RNA, 19 nt, Artificial Sequence
  Description of Artificial Sequence: Synthetic oligonucleotide
gcucgagcaugcaucuaga

SEQ ID NO: 3155915 - RNA, 19 nt, Artificial Sequence
  Description of Artificial Sequence: Synthetic oligonucleotide
gcaucuagagggcccaauu

SEQ ID NO: 3155916 - RNA, 19 nt, Artificial Sequence
  Description of Artificial Sequence: Synthetic oligonucleotide
gggcccaauucgcccuaua

SEQ ID NO: 3155917 - RNA, 19 nt, Artificial Sequence
  Description of Artificial Sequence: Synthetic oligonucleotide
gcccaauucgcccuauagu

SEQ ID NO: 3155918 - RNA, 19 nt, Artificial Sequence
  Description of Artificial Sequence: Synthetic oligonucleotide
aagccgaauuccagcacac

SEQ ID NO: 3155919 - RNA, 19 nt, Artificial Sequence
  Description of Artificial Sequence: Synthetic oligonucleotide
ucaagccgaauuccagcac

SEQ ID NO: 3155920 - RNA, 19 nt, Artificial Sequence
  Description of Artificial Sequence: Synthetic oligonucleotide
ugcucaagccgaauuccag

SEQ ID NO: 3155921 - RNA, 19 nt, Artificial Sequence
  Description of Artificial Sequence: Synthetic oligonucleotide
ucugcucaagccgaauucc

SEQ ID NO: 3155922 - RNA, 19 nt, Artificial Sequence
  Description of Artificial Sequence: Synthetic oligonucleotide
aucugcucaagccgaauuc

SEQ ID NO: 3155923 - RNA, 19 nt, Artificial Sequence
  Description of Artificial Sequence: Synthetic oligonucleotide
aaucugcucaagccgaauu

SEQ ID NO: 3155924 - RNA, 19 nt, Artificial Sequence
  Description of Artificial Sequence: Synthetic oligonucleotide
uaaucugcucaagccgaau

SEQ ID NO: 3155925 - RNA, 19 nt, Artificial Sequence
  Description of Artificial Sequence: Synthetic oligonucleotide
auaaucugcucaagccgaa

SEQ ID NO: 3155926 - RNA, 19 nt, Artificial Sequence
  Description of Artificial Sequence: Synthetic oligonucleotide
ucauaaucugcucaagccg

SEQ ID NO: 3155927 - RNA, 19 nt, Artificial Sequence
  Description of Artificial Sequence: Synthetic oligonucleotide
uucauaaucugcucaagcc

SEQ ID NO: 3155928 - RNA, 19 nt, Artificial Sequence
  Description of Artificial Sequence: Synthetic oligonucleotide
uuucauaaucugcucaagc

SEQ ID NO: 3155929 - RNA, 19 nt, Artificial Sequence
  Description of Artificial Sequence: Synthetic oligonucleotide
uuuucauaaucugcucaag

SEQ ID NO: 3155930 - RNA, 19 nt, Artificial Sequence
  Description of Artificial Sequence: Synthetic oligonucleotide
uggaugaaacccuguagca

SEQ ID NO: 3155931 - RNA, 19 nt, Artificial Sequence
  Description of Artificial Sequence: Synthetic oligonucleotide
uccuggaugaaacccugua

SEQ ID NO: 3155932 - RNA, 19 nt, Artificial Sequence
  Description of Artificial Sequence: Synthetic oligonucleotide
ugcucgauccuggaugaaa

SEQ ID NO: 3155933 - RNA, 19 nt, Artificial Sequence
  Description of Artificial Sequence: Synthetic oligonucleotide
aggucagcucaggugucuc

SEQ ID NO: 3155934 - RNA, 19 nt, Artificial Sequence
  Description of Artificial Sequence: Synthetic oligonucleotide
ucuugguggacgcauccug

SEQ ID NO: 3155935 - RNA, 19 nt, Artificial Sequence
  Description of Artificial Sequence: Synthetic oligonucleotide
uucuugguggacgcauccu

SEQ ID NO: 3155936 - RNA, 19 nt, Artificial Sequence
  Description of Artificial Sequence: Synthetic oligonucleotide
agcuucuugguggacgcau

SEQ ID NO: 3155937 - RNA, 19 nt, Artificial Sequence
  Description of Artificial Sequence: Synthetic oligonucleotide
acacucgcucagcuucuug

SEQ ID NO: 3155938 - RNA, 19 nt, Artificial Sequence
  Description of Artificial Sequence: Synthetic oligonucleotide
aauucgccggagacacucg

SEQ ID NO: 3155939 - RNA, 19 nt, Artificial Sequence
  Description of Artificial Sequence: Synthetic oligonucleotide
uccaauucgccggagacac

SEQ ID NO: 3155940 - RNA, 19 nt, Artificial Sequence
  Description of Artificial Sequence: Synthetic oligonucleotide
ucaucuccaauucgccgga

SEQ ID NO: 3155941 - RNA, 19 nt, Artificial Sequence
  Description of Artificial Sequence: Synthetic oligonucleotide
uucaucuccaauucgccgg

SEQ ID NO: 3155942 - RNA, 19 nt, Artificial Sequence
  Description of Artificial Sequence: Synthetic oligonucleotide
auauugcuguccaguucau

SEQ ID NO: 3155943 - RNA, 19 nt, Artificial Sequence
  Description of Artificial Sequence: Synthetic oligonucleotide
uccauauugcuguccaguu

SEQ ID NO: 3155944 - RNA, 19 nt, Artificial Sequence
  Description of Artificial Sequence: Synthetic oligonucleotide
uccucugcagcuccauauu

SEQ ID NO: 3155945 - RNA, 19 nt, Artificial Sequence
  Description of Artificial Sequence: Synthetic oligonucleotide
acgucagcaaucauccucu

SEQ ID NO: 3155946 - RNA, 19 nt, Artificial Sequence
  Description of Artificial Sequence: Synthetic oligonucleotide
uguccacgucagcaaucau

SEQ ID NO: 3155947 - RNA, 19 nt, Artificial Sequence
  Description of Artificial Sequence: Synthetic oligonucleotide
ucggaagaagacuucgcgg

SEQ ID NO: 3155948 - RNA, 19 nt, Artificial Sequence
  Description of Artificial Sequence: Synthetic oligonucleotide
acucggaagaagacuucgc

SEQ ID NO: 3155949 - RNA, 19 nt, Artificial Sequence
  Description of Artificial Sequence: Synthetic oligonucleotide
uacucggaagaagacuucg

SEQ ID NO: 3155950 - RNA, 19 nt, Artificial Sequence
  Description of Artificial Sequence: Synthetic oligonucleotide
ugcuacucggaagaagacu

SEQ ID NO: 3155951 - RNA, 19 nt, Artificial Sequence
  Description of Artificial Sequence: Synthetic oligonucleotide
uucggcuugcuacucggaa

SEQ ID NO: 3155952 - RNA, 19 nt, Artificial Sequence
  Description of Artificial Sequence: Synthetic oligonucleotide
auucggcuugcuacucgga

SEQ ID NO: 3155953 - RNA, 19 nt, Artificial Sequence
  Description of Artificial Sequence: Synthetic oligonucleotide
aauucggcuugcuacucgg

SEQ ID NO: 3155954 - RNA, 19 nt, Artificial Sequence
  Description of Artificial Sequence: Synthetic oligonucleotide
agaauucggcuugcuacuc

SEQ ID NO: 3155955 - RNA, 19 nt, Artificial Sequence
  Description of Artificial Sequence: Synthetic oligonucleotide
ugcagaauucggcuugcua

SEQ ID NO: 3155956 - RNA, 19 nt, Artificial Sequence
  Description of Artificial Sequence: Synthetic oligonucleotide
uggauaucugcagaauucg

SEQ ID NO: 3155957 - RNA, 19 nt, Artificial Sequence
  Description of Artificial Sequence: Synthetic oligonucleotide
ugauggauaucugcagaau

SEQ ID NO: 3155958 - RNA, 19 nt, Artificial Sequence
  Description of Artificial Sequence: Synthetic oligonucleotide
ugugauggauaucugcaga

SEQ ID NO: 3155959 - RNA, 19 nt, Artificial Sequence
  Description of Artificial Sequence: Synthetic oligonucleotide
agugugauggauaucugca

SEQ ID NO: 3155960 - RNA, 19 nt, Artificial Sequence
  Description of Artificial Sequence: Synthetic oligonucleotide
uagaugcaugcucgagcgg

SEQ ID NO: 3155961 - RNA, 19 nt, Artificial Sequence
  Description of Artificial Sequence: Synthetic oligonucleotide
ucuagaugcaugcucgagc

SEQ ID NO: 3155962 - RNA, 19 nt, Artificial Sequence
  Description of Artificial Sequence: Synthetic oligonucleotide
aauugggcccucuagaugc

SEQ ID NO: 3155963 - RNA, 19 nt, Artificial Sequence
  Description of Artificial Sequence: Synthetic oligonucleotide
uauagggcgaauugggccc

SEQ ID NO: 3155964 - RNA, 19 nt, Artificial Sequence
  Description of Artificial Sequence: Synthetic oligonucleotide
acuauagggcgaauugggc

SEQ ID NO: 3155965 - RNA, 19 nt, Artificial Sequence
  Description of Artificial Sequence: Synthetic oligonucleotide
gacugagcucaaucuagga

SEQ ID NO: 3155966 - RNA, 19 nt, Artificial Sequence
  Description of Artificial Sequence: Synthetic oligonucleotide
cugagcucaaucuaggaua

SEQ ID NO: 3155967 - RNA, 19 nt, Artificial Sequence
  Description of Artificial Sequence: Synthetic oligonucleotide
gagcucaaucuaggauaua

SEQ ID NO: 3155968 - RNA, 19 nt, Artificial Sequence
  Description of Artificial Sequence: Synthetic oligonucleotide
caggauguuuacaugcgau

SEQ ID NO: 3155969 - RNA, 19 nt, Artificial Sequence
  Description of Artificial Sequence: Synthetic oligonucleotide
gaaccucucacugagccau

SEQ ID NO: 3155970 - RNA, 19 nt, Artificial Sequence
  Description of Artificial Sequence: Synthetic oligonucleotide
gccaugugaagcuuucgca

SEQ ID NO: 3155971 - RNA, 19 nt, Artificial Sequence
  Description of Artificial Sequence: Synthetic oligonucleotide
caugugaagcuuucgcaca

SEQ ID NO: 3155972 - RNA, 19 nt, Artificial Sequence
  Description of Artificial Sequence: Synthetic oligonucleotide
cacuuggaguaccuuauaa

SEQ ID NO: 3155973 - RNA, 19 nt, Artificial Sequence
  Description of Artificial Sequence: Synthetic oligonucleotide
cggauuaccacuaacaugu

SEQ ID NO: 3155974 - RNA, 19 nt, Artificial Sequence
  Description of Artificial Sequence: Synthetic oligonucleotide
ggauuaccacuaacauguu

SEQ ID NO: 3155975 - RNA, 19 nt, Artificial Sequence
  Description of Artificial Sequence: Synthetic oligonucleotide
cuaacauguucacaggucu

SEQ ID NO: 3155976 - RNA, 19 nt, Artificial Sequence
  Description of Artificial Sequence: Synthetic oligonucleotide
cauuuguaucacuugcuaa

SEQ ID NO: 3155977 - RNA, 19 nt, Artificial Sequence
  Description of Artificial Sequence: Synthetic oligonucleotide
gcagguucucaaucuuaca

SEQ ID NO: 3155978 - RNA, 19 nt, Artificial Sequence
  Description of Artificial Sequence: Synthetic oligonucleotide
gacuuugcgaagugaauca

SEQ ID NO: 3155979 - RNA, 19 nt, Artificial Sequence
  Description of Artificial Sequence: Synthetic oligonucleotide
cuuugcgaagugaaucauu

SEQ ID NO: 3155980 - RNA, 19 nt, Artificial Sequence
  Description of Artificial Sequence: Synthetic oligonucleotide
cauccacugcggaaucuga

SEQ ID NO: 3155981 - RNA, 19 nt, Artificial Sequence
  Description of Artificial Sequence: Synthetic oligonucleotide
gcggaaucugacuguccua

SEQ ID NO: 3155982 - RNA, 19 nt, Artificial Sequence
  Description of Artificial Sequence: Synthetic oligonucleotide
ggaaucugacuguccuaga

SEQ ID NO: 3155983 - RNA, 19 nt, Artificial Sequence
  Description of Artificial Sequence: Synthetic oligonucleotide
cugacuguccuagacauca

SEQ ID NO: 3155984 - RNA, 19 nt, Artificial Sequence
  Description of Artificial Sequence: Synthetic oligonucleotide
gacuucaugaacucgauau

SEQ ID NO: 3155985 - RNA, 19 nt, Artificial Sequence
  Description of Artificial Sequence: Synthetic oligonucleotide
gcagcacaauaauuuagcu

SEQ ID NO: 3155986 - RNA, 19 nt, Artificial Sequence
  Description of Artificial Sequence: Synthetic oligonucleotide
gcacaauaauuuagcucga

SEQ ID NO: 3155987 - RNA, 19 nt, Artificial Sequence
  Description of Artificial Sequence: Synthetic oligonucleotide
caauaauuuagcucgacuu

SEQ ID NO: 3155988 - RNA, 19 nt, Artificial Sequence
  Description of Artificial Sequence: Synthetic oligonucleotide
ggauuuaggaucaaauaau

SEQ ID NO: 3155989 - RNA, 19 nt, Artificial Sequence
  Description of Artificial Sequence: Synthetic oligonucleotide
cgacuuuauuugaugacca

SEQ ID NO: 3155990 - RNA, 19 nt, Artificial Sequence
  Description of Artificial Sequence: Synthetic oligonucleotide
gcuaguuggcuaaacgaca

SEQ ID NO: 3155991 - RNA, 19 nt, Artificial Sequence
  Description of Artificial Sequence: Synthetic oligonucleotide
guuggcuaaacgacacuca

SEQ ID NO: 3155992 - RNA, 19 nt, Artificial Sequence
  Description of Artificial Sequence: Synthetic oligonucleotide
caagcauauauacccggau

SEQ ID NO: 3155993 - RNA, 19 nt, Artificial Sequence
  Description of Artificial Sequence: Synthetic oligonucleotide
cauauauacccggauugca

SEQ ID NO: 3155994 - RNA, 19 nt, Artificial Sequence
  Description of Artificial Sequence: Synthetic oligonucleotide
ccggauugcagucucagua

SEQ ID NO: 3155995 - RNA, 19 nt, Artificial Sequence
  Description of Artificial Sequence: Synthetic oligonucleotide
gcagucucaguacauuugu

SEQ ID NO: 3155996 - RNA, 19 nt, Artificial Sequence
  Description of Artificial Sequence: Synthetic oligonucleotide
cccgccuaaauaucacggu

SEQ ID NO: 3155997 - RNA, 19 nt, Artificial Sequence
  Description of Artificial Sequence: Synthetic oligonucleotide
gccuaaauaucacgguacu

SEQ ID NO: 3155998 - RNA, 19 nt, Artificial Sequence
  Description of Artificial Sequence: Synthetic oligonucleotide
cuaaauaucacgguacucu

SEQ ID NO: 3155999 - RNA, 19 nt, Artificial Sequence
  Description of Artificial Sequence: Synthetic oligonucleotide
gaaggguggagaauagcuu

SEQ ID NO: 3156000 - RNA, 19 nt, Artificial Sequence
  Description of Artificial Sequence: Synthetic oligonucleotide
cagacuaccgggaguguuu

SEQ ID NO: 3156001 - RNA, 19 nt, Artificial Sequence
  Description of Artificial Sequence: Synthetic oligonucleotide
guguuugauuaugacgccu

SEQ ID NO: 3156002 - RNA, 19 nt, Artificial Sequence
  Description of Artificial Sequence: Synthetic oligonucleotide
guuugauuaugacgccuau

SEQ ID NO: 3156003 - RNA, 19 nt, Artificial Sequence
  Description of Artificial Sequence: Synthetic oligonucleotide
cgccuauguuauucaugca

SEQ ID NO: 3156004 - RNA, 19 nt, Artificial Sequence
  Description of Artificial Sequence: Synthetic oligonucleotide
cuauugagcaaagucgaga

SEQ ID NO: 3156005 - RNA, 19 nt, Artificial Sequence
  Description of Artificial Sequence: Synthetic oligonucleotide
cgagacuccaucauacuga

SEQ ID NO: 3156006 - RNA, 19 nt, Artificial Sequence
  Description of Artificial Sequence: Synthetic oligonucleotide
gcacuuaaaucuaauagua

SEQ ID NO: 3156007 - RNA, 19 nt, Artificial Sequence
  Description of Artificial Sequence: Synthetic oligonucleotide
gcaucauaccagaugcuau

SEQ ID NO: 3156008 - RNA, 19 nt, Artificial Sequence
  Description of Artificial Sequence: Synthetic oligonucleotide
gcacugggucacaaacguu

SEQ ID NO: 3156009 - RNA, 19 nt, Artificial Sequence
  Description of Artificial Sequence: Synthetic oligonucleotide
cacugggucacaaacguuu

SEQ ID NO: 3156010 - RNA, 19 nt, Artificial Sequence
  Description of Artificial Sequence: Synthetic oligonucleotide
gggucacaaacguuuagau

SEQ ID NO: 3156011 - RNA, 19 nt, Artificial Sequence
  Description of Artificial Sequence: Synthetic oligonucleotide
cguuuagauacuaugcagu

SEQ ID NO: 3156012 - RNA, 19 nt, Artificial Sequence
  Description of Artificial Sequence: Synthetic oligonucleotide
uccuagauugagcucaguc

SEQ ID NO: 3156013 - RNA, 19 nt, Artificial Sequence
  Description of Artificial Sequence: Synthetic oligonucleotide
uauccuagauugagcucag

SEQ ID NO: 3156014 - RNA, 19 nt, Artificial Sequence
  Description of Artificial Sequence: Synthetic oligonucleotide
uauauccuagauugagcuc

SEQ ID NO: 3156015 - RNA, 19 nt, Artificial Sequence
  Description of Artificial Sequence: Synthetic oligonucleotide
aucgcauguaaacauccug

SEQ ID NO: 3156016 - RNA, 19 nt, Artificial Sequence
  Description of Artificial Sequence: Synthetic oligonucleotide
auggcucagugagagguuc

SEQ ID NO: 3156017 - RNA, 19 nt, Artificial Sequence
  Description of Artificial Sequence: Synthetic oligonucleotide
ugcgaaagcuucacauggc

SEQ ID NO: 3156018 - RNA, 19 nt, Artificial Sequence
  Description of Artificial Sequence: Synthetic oligonucleotide
ugugcgaaagcuucacaug

SEQ ID NO: 3156019 - RNA, 19 nt, Artificial Sequence
  Description of Artificial Sequence: Synthetic oligonucleotide
uuauaagguacuccaagug

SEQ ID NO: 3156020 - RNA, 19 nt, Artificial Sequence
  Description of Artificial Sequence: Synthetic oligonucleotide
acauguuagugguaauccg

SEQ ID NO: 3156021 - RNA, 19 nt, Artificial Sequence
  Description of Artificial Sequence: Synthetic oligonucleotide
aacauguuagugguaaucc

SEQ ID NO: 3156022 - RNA, 19 nt, Artificial Sequence
  Description of Artificial Sequence: Synthetic oligonucleotide
agaccugugaacauguuag

SEQ ID NO: 3156023 - RNA, 19 nt, Artificial Sequence
  Description of Artificial Sequence: Synthetic oligonucleotide
uuagcaagugauacaaaug

SEQ ID NO: 3156024 - RNA, 19 nt, Artificial Sequence
  Description of Artificial Sequence: Synthetic oligonucleotide
uguaagauugagaaccugc

SEQ ID NO: 3156025 - RNA, 19 nt, Artificial Sequence
  Description of Artificial Sequence: Synthetic oligonucleotide
ugauucacuucgcaaaguc

SEQ ID NO: 3156026 - RNA, 19 nt, Artificial Sequence
  Description of Artificial Sequence: Synthetic oligonucleotide
aaugauucacuucgcaaag

SEQ ID NO: 3156027 - RNA, 19 nt, Artificial Sequence
  Description of Artificial Sequence: Synthetic oligonucleotide
ucagauuccgcaguggaug

SEQ ID NO: 3156028 - RNA, 19 nt, Artificial Sequence
  Description of Artificial Sequence: Synthetic oligonucleotide
uaggacagucagauuccgc

SEQ ID NO: 3156029 - RNA, 19 nt, Artificial Sequence
  Description of Artificial Sequence: Synthetic oligonucleotide
ucuaggacagucagauucc

SEQ ID NO: 3156030 - RNA, 19 nt, Artificial Sequence
  Description of Artificial Sequence: Synthetic oligonucleotide
ugaugucuaggacagucag

SEQ ID NO: 3156031 - RNA, 19 nt, Artificial Sequence
  Description of Artificial Sequence: Synthetic oligonucleotide
auaucgaguucaugaaguc

SEQ ID NO: 3156032 - RNA, 19 nt, Artificial Sequence
  Description of Artificial Sequence: Synthetic oligonucleotide
agcuaaauuauugugcugc

SEQ ID NO: 3156033 - RNA, 19 nt, Artificial Sequence
  Description of Artificial Sequence: Synthetic oligonucleotide
ucgagcuaaauuauugugc

SEQ ID NO: 3156034 - RNA, 19 nt, Artificial Sequence
  Description of Artificial Sequence: Synthetic oligonucleotide
aagucgagcuaaauuauug

SEQ ID NO: 3156035 - RNA, 19 nt, Artificial Sequence
  Description of Artificial Sequence: Synthetic oligonucleotide
auuauuugauccuaaaucc

SEQ ID NO: 3156036 - RNA, 19 nt, Artificial Sequence
  Description of Artificial Sequence: Synthetic oligonucleotide
uggucaucaaauaaagucg

SEQ ID NO: 3156037 - RNA, 19 nt, Artificial Sequence
  Description of Artificial Sequence: Synthetic oligonucleotide
ugucguuuagccaacuagc

SEQ ID NO: 3156038 - RNA, 19 nt, Artificial Sequence
  Description of Artificial Sequence: Synthetic oligonucleotide
ugagugucguuuagccaac

SEQ ID NO: 3156039 - RNA, 19 nt, Artificial Sequence
  Description of Artificial Sequence: Synthetic oligonucleotide
auccggguauauaugcuug

SEQ ID NO: 3156040 - RNA, 19 nt, Artificial Sequence
  Description of Artificial Sequence: Synthetic oligonucleotide
ugcaauccggguauauaug

SEQ ID NO: 3156041 - RNA, 19 nt, Artificial Sequence
  Description of Artificial Sequence: Synthetic oligonucleotide
uacugagacugcaauccgg

SEQ ID NO: 3156042 - RNA, 19 nt, Artificial Sequence
  Description of Artificial Sequence: Synthetic oligonucleotide
acaaauguacugagacugc

SEQ ID NO: 3156043 - RNA, 19 nt, Artificial Sequence
  Description of Artificial Sequence: Synthetic oligonucleotide
accgugauauuuaggcggg

SEQ ID NO: 3156044 - RNA, 19 nt, Artificial Sequence
  Description of Artificial Sequence: Synthetic oligonucleotide
aguaccgugauauuuaggc

SEQ ID NO: 3156045 - RNA, 19 nt, Artificial Sequence
  Description of Artificial Sequence: Synthetic oligonucleotide
agaguaccgugauauuuag

SEQ ID NO: 3156046 - RNA, 19 nt, Artificial Sequence
  Description of Artificial Sequence: Synthetic oligonucleotide
aagcuauucuccacccuuc

SEQ ID NO: 3156047 - RNA, 19 nt, Artificial Sequence
  Description of Artificial Sequence: Synthetic oligonucleotide
aaacacucccgguagucug

SEQ ID NO: 3156048 - RNA, 19 nt, Artificial Sequence
  Description of Artificial Sequence: Synthetic oligonucleotide
aggcgucauaaucaaacac

SEQ ID NO: 3156049 - RNA, 19 nt, Artificial Sequence
  Description of Artificial Sequence: Synthetic oligonucleotide
auaggcgucauaaucaaac

SEQ ID NO: 3156050 - RNA, 19 nt, Artificial Sequence
  Description of Artificial Sequence: Synthetic oligonucleotide
ugcaugaauaacauaggcg

SEQ ID NO: 3156051 - RNA, 19 nt, Artificial Sequence
  Description of Artificial Sequence: Synthetic oligonucleotide
ucucgacuuugcucaauag

SEQ ID NO: 3156052 - RNA, 19 nt, Artificial Sequence
  Description of Artificial Sequence: Synthetic oligonucleotide
ucaguaugauggagucucg

SEQ ID NO: 3156053 - RNA, 19 nt, Artificial Sequence
  Description of Artificial Sequence: Synthetic oligonucleotide
uacuauuagauuuaagugc

SEQ ID NO: 3156054 - RNA, 19 nt, Artificial Sequence
  Description of Artificial Sequence: Synthetic oligonucleotide
auagcaucugguaugaugc

SEQ ID NO: 3156055 - RNA, 19 nt, Artificial Sequence
  Description of Artificial Sequence: Synthetic oligonucleotide
aacguuugugacccagugc

SEQ ID NO: 3156056 - RNA, 19 nt, Artificial Sequence
  Description of Artificial Sequence: Synthetic oligonucleotide
aaacguuugugacccagug

SEQ ID NO: 3156057 - RNA, 19 nt, Artificial Sequence
  Description of Artificial Sequence: Synthetic oligonucleotide
aucuaaacguuugugaccc

SEQ ID NO: 3156058 - RNA, 19 nt, Artificial Sequence
  Description of Artificial Sequence: Synthetic oligonucleotide
acugcauaguaucuaaacg

SEQ ID NO: 3156059 - RNA, 19 nt, Artificial Sequence
  Description of Artificial Sequence: Synthetic oligonucleotide
gcagcuuuggaucauaaua

SEQ ID NO: 3156060 - RNA, 19 nt, Artificial Sequence
  Description of Artificial Sequence: Synthetic oligonucleotide
cauaauacaauagucuguu

SEQ ID NO: 3156061 - RNA, 19 nt, Artificial Sequence
  Description of Artificial Sequence: Synthetic oligonucleotide
gaagacuuuuauugcagua

SEQ ID NO: 3156062 - RNA, 19 nt, Artificial Sequence
  Description of Artificial Sequence: Synthetic oligonucleotide
guuugaugagugccaucuu

SEQ ID NO: 3156063 - RNA, 19 nt, Artificial Sequence
  Description of Artificial Sequence: Synthetic oligonucleotide
gaccauccauaccgugaaa

SEQ ID NO: 3156064 - RNA, 19 nt, Artificial Sequence
  Description of Artificial Sequence: Synthetic oligonucleotide
ccauccauaccgugaaauu

SEQ ID NO: 3156065 - RNA, 19 nt, Artificial Sequence
  Description of Artificial Sequence: Synthetic oligonucleotide
gguggucuuagauagauau

SEQ ID NO: 3156066 - RNA, 19 nt, Artificial Sequence
  Description of Artificial Sequence: Synthetic oligonucleotide
guggucuuagauagauaua

SEQ ID NO: 3156067 - RNA, 19 nt, Artificial Sequence
  Description of Artificial Sequence: Synthetic oligonucleotide
guagacuguggaccauaua

SEQ ID NO: 3156068 - RNA, 19 nt, Artificial Sequence
  Description of Artificial Sequence: Synthetic oligonucleotide
gauuguacggaagacuauu

SEQ ID NO: 3156069 - RNA, 19 nt, Artificial Sequence
  Description of Artificial Sequence: Synthetic oligonucleotide
cggaagacuauuaagggaa

SEQ ID NO: 3156070 - RNA, 19 nt, Artificial Sequence
  Description of Artificial Sequence: Synthetic oligonucleotide
ggaaagagauucuacguua

SEQ ID NO: 3156071 - RNA, 19 nt, Artificial Sequence
  Description of Artificial Sequence: Synthetic oligonucleotide
gaaagagauucuacguuaa

SEQ ID NO: 3156072 - RNA, 19 nt, Artificial Sequence
  Description of Artificial Sequence: Synthetic oligonucleotide
gcuugaaaucuugcgcaaa

SEQ ID NO: 3156073 - RNA, 19 nt, Artificial Sequence
  Description of Artificial Sequence: Synthetic oligonucleotide
gcagcaguucgaaaguguu

SEQ ID NO: 3156074 - RNA, 19 nt, Artificial Sequence
  Description of Artificial Sequence: Synthetic oligonucleotide
ccaucuccuuuuacgaaua

SEQ ID NO: 3156075 - RNA, 19 nt, Artificial Sequence
  Description of Artificial Sequence: Synthetic oligonucleotide
ccacagaauaccguuccua

SEQ ID NO: 3156076 - RNA, 19 nt, Artificial Sequence
  Description of Artificial Sequence: Synthetic oligonucleotide
gcaccaauuuccaauuaua

SEQ ID NO: 3156077 - RNA, 19 nt, Artificial Sequence
  Description of Artificial Sequence: Synthetic oligonucleotide
caccaauuuccaauuauau

SEQ ID NO: 3156078 - RNA, 19 nt, Artificial Sequence
  Description of Artificial Sequence: Synthetic oligonucleotide
ccaauuuccaauuauauaa

SEQ ID NO: 3156079 - RNA, 19 nt, Artificial Sequence
  Description of Artificial Sequence: Synthetic oligonucleotide
gaauguuugagggauaguu

SEQ ID NO: 3156080 - RNA, 19 nt, Artificial Sequence
  Description of Artificial Sequence: Synthetic oligonucleotide
cuuuaggagacgaaagcua

SEQ ID NO: 3156081 - RNA, 19 nt, Artificial Sequence
  Description of Artificial Sequence: Synthetic oligonucleotide
ccugaggauacgacgagau

SEQ ID NO: 3156082 - RNA, 19 nt, Artificial Sequence
  Description of Artificial Sequence: Synthetic oligonucleotide
gaggauacgacgagauguu

SEQ ID NO: 3156083 - RNA, 19 nt, Artificial Sequence
  Description of Artificial Sequence: Synthetic oligonucleotide
ggauacgacgagauguuuu

SEQ ID NO: 3156084 - RNA, 19 nt, Artificial Sequence
  Description of Artificial Sequence: Synthetic oligonucleotide
gagagguuacaauaucuau

SEQ ID NO: 3156085 - RNA, 19 nt, Artificial Sequence
  Description of Artificial Sequence: Synthetic oligonucleotide
ggacauugacuuuaaguuu

SEQ ID NO: 3156086 - RNA, 19 nt, Artificial Sequence
  Description of Artificial Sequence: Synthetic oligonucleotide
gacauugacuuuaaguuua

SEQ ID NO: 3156087 - RNA, 19 nt, Artificial Sequence
  Description of Artificial Sequence: Synthetic oligonucleotide
gaaaagucugaagcgcgua

SEQ ID NO: 3156088 - RNA, 19 nt, Artificial Sequence
  Description of Artificial Sequence: Synthetic oligonucleotide
cccaguacacaguauacaa

SEQ ID NO: 3156089 - RNA, 19 nt, Artificial Sequence
  Description of Artificial Sequence: Synthetic oligonucleotide
cauuccacgguaucgaaau

SEQ ID NO: 3156090 - RNA, 19 nt, Artificial Sequence
  Description of Artificial Sequence: Synthetic oligonucleotide
gggaaagcacuuccacuaa

SEQ ID NO: 3156091 - RNA, 19 nt, Artificial Sequence
  Description of Artificial Sequence: Synthetic oligonucleotide
gcuggcguagggguuaaau

SEQ ID NO: 3156092 - RNA, 19 nt, Artificial Sequence
  Description of Artificial Sequence: Synthetic oligonucleotide
cacaauuguagucccugaa

SEQ ID NO: 3156093 - RNA, 19 nt, Artificial Sequence
  Description of Artificial Sequence: Synthetic oligonucleotide
guacucuacugaguaauaa

SEQ ID NO: 3156094 - RNA, 19 nt, Artificial Sequence
  Description of Artificial Sequence: Synthetic oligonucleotide
gcuagaaaugcuuggugau

SEQ ID NO: 3156095 - RNA, 19 nt, Artificial Sequence
  Description of Artificial Sequence: Synthetic oligonucleotide
gucgaauggugguaucgau

SEQ ID NO: 3156096 - RNA, 19 nt, Artificial Sequence
  Description of Artificial Sequence: Synthetic oligonucleotide
cgaauggugguaucgauuu

SEQ ID NO: 3156097 - RNA, 19 nt, Artificial Sequence
  Description of Artificial Sequence: Synthetic oligonucleotide
gaauggugguaucgauuuu

SEQ ID NO: 3156098 - RNA, 19 nt, Artificial Sequence
  Description of Artificial Sequence: Synthetic oligonucleotide
ccuccugguuacauaguaa

SEQ ID NO: 3156099 - RNA, 19 nt, Artificial Sequence
  Description of Artificial Sequence: Synthetic oligonucleotide
gccucauaccauuauaaua

SEQ ID NO: 3156100 - RNA, 19 nt, Artificial Sequence
  Description of Artificial Sequence: Synthetic oligonucleotide
guuaccagcgcuuagaauu

SEQ ID NO: 3156101 - RNA, 19 nt, Artificial Sequence
  Description of Artificial Sequence: Synthetic oligonucleotide
cgaucugcucuagucaaua

SEQ ID NO: 3156102 - RNA, 19 nt, Artificial Sequence
  Description of Artificial Sequence: Synthetic oligonucleotide
gaucugcucuagucaauaa

SEQ ID NO: 3156103 - RNA, 19 nt, Artificial Sequence
  Description of Artificial Sequence: Synthetic oligonucleotide
cucuagucaauaauaccau

SEQ ID NO: 3156104 - RNA, 19 nt, Artificial Sequence
  Description of Artificial Sequence: Synthetic oligonucleotide
cuugcuggugccauuuaua

SEQ ID NO: 3156105 - RNA, 19 nt, Artificial Sequence
  Description of Artificial Sequence: Synthetic oligonucleotide
gguuuggcaaguguacuau

SEQ ID NO: 3156106 - RNA, 19 nt, Artificial Sequence
  Description of Artificial Sequence: Synthetic oligonucleotide
ggcaaguguacuauccaau

SEQ ID NO: 3156107 - RNA, 19 nt, Artificial Sequence
  Description of Artificial Sequence: Synthetic oligonucleotide
uauuaugauccaaagcugc

SEQ ID NO: 3156108 - RNA, 19 nt, Artificial Sequence
  Description of Artificial Sequence: Synthetic oligonucleotide
aacagacuauuguauuaug

SEQ ID NO: 3156109 - RNA, 19 nt, Artificial Sequence
  Description of Artificial Sequence: Synthetic oligonucleotide
uacugcaauaaaagucuuc

SEQ ID NO: 3156110 - RNA, 19 nt, Artificial Sequence
  Description of Artificial Sequence: Synthetic oligonucleotide
aagauggcacucaucaaac

SEQ ID NO: 3156111 - RNA, 19 nt, Artificial Sequence
  Description of Artificial Sequence: Synthetic oligonucleotide
uuucacgguauggaugguc

SEQ ID NO: 3156112 - RNA, 19 nt, Artificial Sequence
  Description of Artificial Sequence: Synthetic oligonucleotide
aauuucacgguauggaugg

SEQ ID NO: 3156113 - RNA, 19 nt, Artificial Sequence
  Description of Artificial Sequence: Synthetic oligonucleotide
auaucuaucuaagaccacc

SEQ ID NO: 3156114 - RNA, 19 nt, Artificial Sequence
  Description of Artificial Sequence: Synthetic oligonucleotide
uauaucuaucuaagaccac

SEQ ID NO: 3156115 - RNA, 19 nt, Artificial Sequence
  Description of Artificial Sequence: Synthetic oligonucleotide
uauaugguccacagucuac

SEQ ID NO: 3156116 - RNA, 19 nt, Artificial Sequence
  Description of Artificial Sequence: Synthetic oligonucleotide
aauagucuuccguacaauc

SEQ ID NO: 3156117 - RNA, 19 nt, Artificial Sequence
  Description of Artificial Sequence: Synthetic oligonucleotide
uucccuuaauagucuuccg

SEQ ID NO: 3156118 - RNA, 19 nt, Artificial Sequence
  Description of Artificial Sequence: Synthetic oligonucleotide
uaacguagaaucucuuucc

SEQ ID NO: 3156119 - RNA, 19 nt, Artificial Sequence
  Description of Artificial Sequence: Synthetic oligonucleotide
uuaacguagaaucucuuuc

SEQ ID NO: 3156120 - RNA, 19 nt, Artificial Sequence
  Description of Artificial Sequence: Synthetic oligonucleotide
uuugcgcaagauuucaagc

SEQ ID NO: 3156121 - RNA, 19 nt, Artificial Sequence
  Description of Artificial Sequence: Synthetic oligonucleotide
aacacuuucgaacugcugc

SEQ ID NO: 3156122 - RNA, 19 nt, Artificial Sequence
  Description of Artificial Sequence: Synthetic oligonucleotide
uauucguaaaaggagaugg

SEQ ID NO: 3156123 - RNA, 19 nt, Artificial Sequence
  Description of Artificial Sequence: Synthetic oligonucleotide
uaggaacgguauucugugg

SEQ ID NO: 3156124 - RNA, 19 nt, Artificial Sequence
  Description of Artificial Sequence: Synthetic oligonucleotide
uauaauuggaaauuggugc

SEQ ID NO: 3156125 - RNA, 19 nt, Artificial Sequence
  Description of Artificial Sequence: Synthetic oligonucleotide
auauaauuggaaauuggug

SEQ ID NO: 3156126 - RNA, 19 nt, Artificial Sequence
  Description of Artificial Sequence: Synthetic oligonucleotide
uuauauaauuggaaauugg

SEQ ID NO: 3156127 - RNA, 19 nt, Artificial Sequence
  Description of Artificial Sequence: Synthetic oligonucleotide
aacuaucccucaaacauuc

SEQ ID NO: 3156128 - RNA, 19 nt, Artificial Sequence
  Description of Artificial Sequence: Synthetic oligonucleotide
uagcuuucgucuccuaaag

SEQ ID NO: 3156129 - RNA, 19 nt, Artificial Sequence
  Description of Artificial Sequence: Synthetic oligonucleotide
aucucgucguauccucagg

SEQ ID NO: 3156130 - RNA, 19 nt, Artificial Sequence
  Description of Artificial Sequence: Synthetic oligonucleotide
aacaucucgucguauccuc

SEQ ID NO: 3156131 - RNA, 19 nt, Artificial Sequence
  Description of Artificial Sequence: Synthetic oligonucleotide
aaaacaucucgucguaucc

SEQ ID NO: 3156132 - RNA, 19 nt, Artificial Sequence
  Description of Artificial Sequence: Synthetic oligonucleotide
auagauauuguaaccucuc

SEQ ID NO: 3156133 - RNA, 19 nt, Artificial Sequence
  Description of Artificial Sequence: Synthetic oligonucleotide
aaacuuaaagucaaugucc

SEQ ID NO: 3156134 - RNA, 19 nt, Artificial Sequence
  Description of Artificial Sequence: Synthetic oligonucleotide
uaaacuuaaagucaauguc

SEQ ID NO: 3156135 - RNA, 19 nt, Artificial Sequence
  Description of Artificial Sequence: Synthetic oligonucleotide
uacgcgcuucagacuuuuc

SEQ ID NO: 3156136 - RNA, 19 nt, Artificial Sequence
  Description of Artificial Sequence: Synthetic oligonucleotide
uuguauacuguguacuggg

SEQ ID NO: 3156137 - RNA, 19 nt, Artificial Sequence
  Description of Artificial Sequence: Synthetic oligonucleotide
auuucgauaccguggaaug

SEQ ID NO: 3156138 - RNA, 19 nt, Artificial Sequence
  Description of Artificial Sequence: Synthetic oligonucleotide
uuaguggaagugcuuuccc

SEQ ID NO: 3156139 - RNA, 19 nt, Artificial Sequence
  Description of Artificial Sequence: Synthetic oligonucleotide
auuuaaccccuacgccagc

SEQ ID NO: 3156140 - RNA, 19 nt, Artificial Sequence
  Description of Artificial Sequence: Synthetic oligonucleotide
uucagggacuacaauugug

SEQ ID NO: 3156141 - RNA, 19 nt, Artificial Sequence
  Description of Artificial Sequence: Synthetic oligonucleotide
uuauuacucaguagaguac

SEQ ID NO: 3156142 - RNA, 19 nt, Artificial Sequence
  Description of Artificial Sequence: Synthetic oligonucleotide
aucaccaagcauuucuagc

SEQ ID NO: 3156143 - RNA, 19 nt, Artificial Sequence
  Description of Artificial Sequence: Synthetic oligonucleotide
aucgauaccaccauucgac

SEQ ID NO: 3156144 - RNA, 19 nt, Artificial Sequence
  Description of Artificial Sequence: Synthetic oligonucleotide
aaaucgauaccaccauucg

SEQ ID NO: 3156145 - RNA, 19 nt, Artificial Sequence
  Description of Artificial Sequence: Synthetic oligonucleotide
aaaaucgauaccaccauuc

SEQ ID NO: 3156146 - RNA, 19 nt, Artificial Sequence
  Description of Artificial Sequence: Synthetic oligonucleotide
uuacuauguaaccaggagg

SEQ ID NO: 3156147 - RNA, 19 nt, Artificial Sequence
  Description of Artificial Sequence: Synthetic oligonucleotide
uauuauaaugguaugaggc

SEQ ID NO: 3156148 - RNA, 19 nt, Artificial Sequence
  Description of Artificial Sequence: Synthetic oligonucleotide
aauucuaagcgcugguaac

SEQ ID NO: 3156149 - RNA, 19 nt, Artificial Sequence
  Description of Artificial Sequence: Synthetic oligonucleotide
uauugacuagagcagaucg

SEQ ID NO: 3156150 - RNA, 19 nt, Artificial Sequence
  Description of Artificial Sequence: Synthetic oligonucleotide
uuauugacuagagcagauc

SEQ ID NO: 3156151 - RNA, 19 nt, Artificial Sequence
  Description of Artificial Sequence: Synthetic oligonucleotide
augguauuauugacuagag

SEQ ID NO: 3156152 - RNA, 19 nt, Artificial Sequence
  Description of Artificial Sequence: Synthetic oligonucleotide
uauaaauggcaccagcaag

SEQ ID NO: 3156153 - RNA, 19 nt, Artificial Sequence
  Description of Artificial Sequence: Synthetic oligonucleotide
auaguacacuugccaaacc

SEQ ID NO: 3156154 - RNA, 19 nt, Artificial Sequence
  Description of Artificial Sequence: Synthetic oligonucleotide
auuggauaguacacuugcc

SEQ ID NO: 3156155 - RNA, 19 nt, Artificial Sequence
  Description of Artificial Sequence: Synthetic oligonucleotide
augacugcaaaccaucagu

SEQ ID NO: 3156156 - RNA, 19 nt, Artificial Sequence
  Description of Artificial Sequence: Synthetic oligonucleotide
gacugcaaaccaucagucu

SEQ ID NO: 3156157 - RNA, 19 nt, Artificial Sequence
  Description of Artificial Sequence: Synthetic oligonucleotide
ccacaacaagacgugacuu

SEQ ID NO: 3156158 - RNA, 19 nt, Artificial Sequence
  Description of Artificial Sequence: Synthetic oligonucleotide
cacaacaagacgugacuuu

SEQ ID NO: 3156159 - RNA, 19 nt, Artificial Sequence
  Description of Artificial Sequence: Synthetic oligonucleotide
acaacaagacgugacuuuu

SEQ ID NO: 3156160 - RNA, 19 nt, Artificial Sequence
  Description of Artificial Sequence: Synthetic oligonucleotide
acaagacgugacuuuucca

SEQ ID NO: 3156161 - RNA, 19 nt, Artificial Sequence
  Description of Artificial Sequence: Synthetic oligonucleotide
acaccucuucaacaugcuu

SEQ ID NO: 3156162 - RNA, 19 nt, Artificial Sequence
  Description of Artificial Sequence: Synthetic oligonucleotide
cucuucaacaugcuuagca

SEQ ID NO: 3156163 - RNA, 19 nt, Artificial Sequence
  Description of Artificial Sequence: Synthetic oligonucleotide
aaacacuggauugaccgca

SEQ ID NO: 3156164 - RNA, 19 nt, Artificial Sequence
  Description of Artificial Sequence: Synthetic oligonucleotide
aaccagauccagcauuaca

SEQ ID NO: 3156165 - RNA, 19 nt, Artificial Sequence
  Description of Artificial Sequence: Synthetic oligonucleotide
agauccagcauuacaucca

SEQ ID NO: 3156166 - RNA, 19 nt, Artificial Sequence
  Description of Artificial Sequence: Synthetic oligonucleotide
gcauuacauccaucaccuu

SEQ ID NO: 3156167 - RNA, 19 nt, Artificial Sequence
  Description of Artificial Sequence: Synthetic oligonucleotide
accuugagcaaugcuucgu

SEQ ID NO: 3156168 - RNA, 19 nt, Artificial Sequence
  Description of Artificial Sequence: Synthetic oligonucleotide
ccuugagcaaugcuucgua

SEQ ID NO: 3156169 - RNA, 19 nt, Artificial Sequence
  Description of Artificial Sequence: Synthetic oligonucleotide
uugagcaaugcuucguaaa

SEQ ID NO: 3156170 - RNA, 19 nt, Artificial Sequence
  Description of Artificial Sequence: Synthetic oligonucleotide
agcaaugcuucguaaacca

SEQ ID NO: 3156171 - RNA, 19 nt, Artificial Sequence
  Description of Artificial Sequence: Synthetic oligonucleotide
ucagauccauccacaacuu

SEQ ID NO: 3156172 - RNA, 19 nt, Artificial Sequence
  Description of Artificial Sequence: Synthetic oligonucleotide
caacaacuacagugcuugu

SEQ ID NO: 3156173 - RNA, 19 nt, Artificial Sequence
  Description of Artificial Sequence: Synthetic oligonucleotide
aacuacagugcuuguaccu

SEQ ID NO: 3156174 - RNA, 19 nt, Artificial Sequence
  Description of Artificial Sequence: Synthetic oligonucleotide
acguggacacacucauaca

SEQ ID NO: 3156175 - RNA, 19 nt, Artificial Sequence
  Description of Artificial Sequence: Synthetic oligonucleotide
cguggacacacucauacaa

SEQ ID NO: 3156176 - RNA, 19 nt, Artificial Sequence
  Description of Artificial Sequence: Synthetic oligonucleotide
acaauggaugaaaagucga

SEQ ID NO: 3156177 - RNA, 19 nt, Artificial Sequence
  Description of Artificial Sequence: Synthetic oligonucleotide
auggaugaaaagucgagcu

SEQ ID NO: 3156178 - RNA, 19 nt, Artificial Sequence
  Description of Artificial Sequence: Synthetic oligonucleotide
ugaaaagucgagcuccucu

SEQ ID NO: 3156179 - RNA, 19 nt, Artificial Sequence
  Description of Artificial Sequence: Synthetic oligonucleotide
aaaagucgagcuccucuca

SEQ ID NO: 3156180 - RNA, 19 nt, Artificial Sequence
  Description of Artificial Sequence: Synthetic oligonucleotide
ccucauccaaacgucucaa

SEQ ID NO: 3156181 - RNA, 19 nt, Artificial Sequence
  Description of Artificial Sequence: Synthetic oligonucleotide
acugaugguuugcagucau

SEQ ID NO: 3156182 - RNA, 19 nt, Artificial Sequence
  Description of Artificial Sequence: Synthetic oligonucleotide
agacugaugguuugcaguc

SEQ ID NO: 3156183 - RNA, 19 nt, Artificial Sequence
  Description of Artificial Sequence: Synthetic oligonucleotide
aagucacgucuuguugugg

SEQ ID NO: 3156184 - RNA, 19 nt, Artificial Sequence
  Description of Artificial Sequence: Synthetic oligonucleotide
aaagucacgucuuguugug

SEQ ID NO: 3156185 - RNA, 19 nt, Artificial Sequence
  Description of Artificial Sequence: Synthetic oligonucleotide
aaaagucacgucuuguugu

SEQ ID NO: 3156186 - RNA, 19 nt, Artificial Sequence
  Description of Artificial Sequence: Synthetic oligonucleotide
uggaaaagucacgucuugu

SEQ ID NO: 3156187 - RNA, 19 nt, Artificial Sequence
  Description of Artificial Sequence: Synthetic oligonucleotide
aagcauguugaagaggugu

SEQ ID NO: 3156188 - RNA, 19 nt, Artificial Sequence
  Description of Artificial Sequence: Synthetic oligonucleotide
ugcuaagcauguugaagag

SEQ ID NO: 3156189 - RNA, 19 nt, Artificial Sequence
  Description of Artificial Sequence: Synthetic oligonucleotide
ugcggucaauccaguguuu

SEQ ID NO: 3156190 - RNA, 19 nt, Artificial Sequence
  Description of Artificial Sequence: Synthetic oligonucleotide
uguaaugcuggaucugguu

SEQ ID NO: 3156191 - RNA, 19 nt, Artificial Sequence
  Description of Artificial Sequence: Synthetic oligonucleotide
uggauguaaugcuggaucu

SEQ ID NO: 3156192 - RNA, 19 nt, Artificial Sequence
  Description of Artificial Sequence: Synthetic oligonucleotide
aaggugauggauguaaugc

SEQ ID NO: 3156193 - RNA, 19 nt, Artificial Sequence
  Description of Artificial Sequence: Synthetic oligonucleotide
acgaagcauugcucaaggu

SEQ ID NO: 3156194 - RNA, 19 nt, Artificial Sequence
  Description of Artificial Sequence: Synthetic oligonucleotide
uacgaagcauugcucaagg

SEQ ID NO: 3156195 - RNA, 19 nt, Artificial Sequence
  Description of Artificial Sequence: Synthetic oligonucleotide
uuuacgaagcauugcucaa

SEQ ID NO: 3156196 - RNA, 19 nt, Artificial Sequence
  Description of Artificial Sequence: Synthetic oligonucleotide
ugguuuacgaagcauugcu

SEQ ID NO: 3156197 - RNA, 19 nt, Artificial Sequence
  Description of Artificial Sequence: Synthetic oligonucleotide
aaguuguggauggaucuga

SEQ ID NO: 3156198 - RNA, 19 nt, Artificial Sequence
  Description of Artificial Sequence: Synthetic oligonucleotide
acaagcacuguaguuguug

SEQ ID NO: 3156199 - RNA, 19 nt, Artificial Sequence
  Description of Artificial Sequence: Synthetic oligonucleotide
agguacaagcacuguaguu

SEQ ID NO: 3156200 - RNA, 19 nt, Artificial Sequence
  Description of Artificial Sequence: Synthetic oligonucleotide
uguaugaguguguccacgu

SEQ ID NO: 3156201 - RNA, 19 nt, Artificial Sequence
  Description of Artificial Sequence: Synthetic oligonucleotide
uuguaugaguguguccacg

SEQ ID NO: 3156202 - RNA, 19 nt, Artificial Sequence
  Description of Artificial Sequence: Synthetic oligonucleotide
ucgacuuuucauccauugu

SEQ ID NO: 3156203 - RNA, 19 nt, Artificial Sequence
  Description of Artificial Sequence: Synthetic oligonucleotide
agcucgacuuuucauccau

SEQ ID NO: 3156204 - RNA, 19 nt, Artificial Sequence
  Description of Artificial Sequence: Synthetic oligonucleotide
agaggagcucgacuuuuca

SEQ ID NO: 3156205 - RNA, 19 nt, Artificial Sequence
  Description of Artificial Sequence: Synthetic oligonucleotide
ugagaggagcucgacuuuu

SEQ ID NO: 3156206 - RNA, 19 nt, Artificial Sequence
  Description of Artificial Sequence: Synthetic oligonucleotide
uugagacguuuggaugagg

SEQ ID NO: 3156207 - RNA, 19 nt, Artificial Sequence
  Description of Artificial Sequence: Synthetic oligonucleotide
cugcauacaaauuuuacca

SEQ ID NO: 3156208 - RNA, 19 nt, Artificial Sequence
  Description of Artificial Sequence: Synthetic oligonucleotide
ggagcugcagcggguuuau

SEQ ID NO: 3156209 - RNA, 19 nt, Artificial Sequence
  Description of Artificial Sequence: Synthetic oligonucleotide
gacaagcacggucugugau

SEQ ID NO: 3156210 - RNA, 19 nt, Artificial Sequence
  Description of Artificial Sequence: Synthetic oligonucleotide
gcguggacaacggguguuu

SEQ ID NO: 3156211 - RNA, 19 nt, Artificial Sequence
  Description of Artificial Sequence: Synthetic oligonucleotide
cguggacaacggguguuuu

SEQ ID NO: 3156212 - RNA, 19 nt, Artificial Sequence
  Description of Artificial Sequence: Synthetic oligonucleotide
guuuugggaacgcaaacca

SEQ ID NO: 3156213 - RNA, 19 nt, Artificial Sequence
  Description of Artificial Sequence: Synthetic oligonucleotide
caacguggcaugccaaacu

SEQ ID NO: 3156214 - RNA, 19 nt, Artificial Sequence
  Description of Artificial Sequence: Synthetic oligonucleotide
cugagcagaccagaaacga

SEQ ID NO: 3156215 - RNA, 19 nt, Artificial Sequence
  Description of Artificial Sequence: Synthetic oligonucleotide
gcacaguuuuaagcacgau

SEQ ID NO: 3156216 - RNA, 19 nt, Artificial Sequence
  Description of Artificial Sequence: Synthetic oligonucleotide
caguuuuaagcacgaugga

SEQ ID NO: 3156217 - RNA, 19 nt, Artificial Sequence
  Description of Artificial Sequence: Synthetic oligonucleotide
gugcgcaaccccuuacuua

SEQ ID NO: 3156218 - RNA, 19 nt, Artificial Sequence
  Description of Artificial Sequence: Synthetic oligonucleotide
gcgcaaccccuuacuuaua

SEQ ID NO: 3156219 - RNA, 19 nt, Artificial Sequence
  Description of Artificial Sequence: Synthetic oligonucleotide
caaccccuuacuuauacaa

SEQ ID NO: 3156220 - RNA, 19 nt, Artificial Sequence
  Description of Artificial Sequence: Synthetic oligonucleotide
cuugaagccuccuguacga

SEQ ID NO: 3156221 - RNA, 19 nt, Artificial Sequence
  Description of Artificial Sequence: Synthetic oligonucleotide
caucucaugauaacgagga

SEQ ID NO: 3156222 - RNA, 19 nt, Artificial Sequence
  Description of Artificial Sequence: Synthetic oligonucleotide
cguagcaggaacuuggcca

SEQ ID NO: 3156223 - RNA, 19 nt, Artificial Sequence
  Description of Artificial Sequence: Synthetic oligonucleotide
gggcuuuguuaaauuucuu

SEQ ID NO: 3156224 - RNA, 19 nt, Artificial Sequence
  Description of Artificial Sequence: Synthetic oligonucleotide
ccacagagagggugucucu

SEQ ID NO: 3156225 - RNA, 19 nt, Artificial Sequence
  Description of Artificial Sequence: Synthetic oligonucleotide
gaucccucgaggccaaaau

SEQ ID NO: 3156226 - RNA, 19 nt, Artificial Sequence
  Description of Artificial Sequence: Synthetic oligonucleotide
gcuauucucggcuucacau

SEQ ID NO: 3156227 - RNA, 19 nt, Artificial Sequence
  Description of Artificial Sequence: Synthetic oligonucleotide
cucggcuucacauuugguu

SEQ ID NO: 3156228 - RNA, 19 nt, Artificial Sequence
  Description of Artificial Sequence: Synthetic oligonucleotide
caggagcccucauucugcu

SEQ ID NO: 3156229 - RNA, 19 nt, Artificial Sequence
  Description of Artificial Sequence: Synthetic oligonucleotide
gaguuguguauacccuucu

SEQ ID NO: 3156230 - RNA, 19 nt, Artificial Sequence
  Description of Artificial Sequence: Synthetic oligonucleotide
gugugucuuuugaucuaca

SEQ ID NO: 3156231 - RNA, 19 nt, Artificial Sequence
  Description of Artificial Sequence: Synthetic oligonucleotide
gaugagaaacucgugucga

SEQ ID NO: 3156232 - RNA, 19 nt, Artificial Sequence
  Description of Artificial Sequence: Synthetic oligonucleotide
guuggcacacaaauagggu

SEQ ID NO: 3156233 - RNA, 19 nt, Artificial Sequence
  Description of Artificial Sequence: Synthetic oligonucleotide
cacacaaauagggucaacu

SEQ ID NO: 3156234 - RNA, 19 nt, Artificial Sequence
  Description of Artificial Sequence: Synthetic oligonucleotide
caagcugcauugccuguuu

SEQ ID NO: 3156235 - RNA, 19 nt, Artificial Sequence
  Description of Artificial Sequence: Synthetic oligonucleotide
caucucucaccuacucccu

SEQ ID NO: 3156236 - RNA, 19 nt, Artificial Sequence
  Description of Artificial Sequence: Synthetic oligonucleotide
gaaguggguuauuuuagcu

SEQ ID NO: 3156237 - RNA, 19 nt, Artificial Sequence
  Description of Artificial Sequence: Synthetic oligonucleotide
guggguuauuuuagcuaga

SEQ ID NO: 3156238 - RNA, 19 nt, Artificial Sequence
  Description of Artificial Sequence: Synthetic oligonucleotide
gguuauuuuagcuagagga

SEQ ID NO: 3156239 - RNA, 19 nt, Artificial Sequence
  Description of Artificial Sequence: Synthetic oligonucleotide
gcuagaggaauauacuuua

SEQ ID NO: 3156240 - RNA, 19 nt, Artificial Sequence
  Description of Artificial Sequence: Synthetic oligonucleotide
cagcacugacuuuuagguu

SEQ ID NO: 3156241 - RNA, 19 nt, Artificial Sequence
  Description of Artificial Sequence: Synthetic oligonucleotide
gggcagacauggcuugagu

SEQ ID NO: 3156242 - RNA, 19 nt, Artificial Sequence
  Description of Artificial Sequence: Synthetic oligonucleotide
ccagggugccauaggcuuu

SEQ ID NO: 3156243 - RNA, 19 nt, Artificial Sequence
  Description of Artificial Sequence: Synthetic oligonucleotide
gccauaggcuuuaaaccau

SEQ ID NO: 3156244 - RNA, 19 nt, Artificial Sequence
  Description of Artificial Sequence: Synthetic oligonucleotide
ccauaggcuuuaaaccauu

SEQ ID NO: 3156245 - RNA, 19 nt, Artificial Sequence
  Description of Artificial Sequence: Synthetic oligonucleotide
ggccacgguauuugcauga

SEQ ID NO: 3156246 - RNA, 19 nt, Artificial Sequence
  Description of Artificial Sequence: Synthetic oligonucleotide
guauuugcaugaguugggu

SEQ ID NO: 3156247 - RNA, 19 nt, Artificial Sequence
  Description of Artificial Sequence: Synthetic oligonucleotide
cuuagcagcccauaggaga

SEQ ID NO: 3156248 - RNA, 19 nt, Artificial Sequence
  Description of Artificial Sequence: Synthetic oligonucleotide
gccacuacugacuugggca

SEQ ID NO: 3156249 - RNA, 19 nt, Artificial Sequence
  Description of Artificial Sequence: Synthetic oligonucleotide
ccacuacugacuugggcaa

SEQ ID NO: 3156250 - RNA, 19 nt, Artificial Sequence
  Description of Artificial Sequence: Synthetic oligonucleotide
gucagggcccgucuuaaga

SEQ ID NO: 3156251 - RNA, 19 nt, Artificial Sequence
  Description of Artificial Sequence: Synthetic oligonucleotide
ggaugagagagggcguuuu

SEQ ID NO: 3156252 - RNA, 19 nt, Artificial Sequence
  Description of Artificial Sequence: Synthetic oligonucleotide
gggcguuuuaaaugcgcuu

SEQ ID NO: 3156253 - RNA, 19 nt, Artificial Sequence
  Description of Artificial Sequence: Synthetic oligonucleotide
cuguucuccccaugaggaa

SEQ ID NO: 3156254 - RNA, 19 nt, Artificial Sequence
  Description of Artificial Sequence: Synthetic oligonucleotide
ugguaaaauuuguaugcag

SEQ ID NO: 3156255 - RNA, 19 nt, Artificial Sequence
  Description of Artificial Sequence: Synthetic oligonucleotide
auaaacccgcugcagcucc

SEQ ID NO: 3156256 - RNA, 19 nt, Artificial Sequence
  Description of Artificial Sequence: Synthetic oligonucleotide
aucacagaccgugcuuguc

SEQ ID NO: 3156257 - RNA, 19 nt, Artificial Sequence
  Description of Artificial Sequence: Synthetic oligonucleotide
aaacacccguuguccacgc

SEQ ID NO: 3156258 - RNA, 19 nt, Artificial Sequence
  Description of Artificial Sequence: Synthetic oligonucleotide
aaaacacccguuguccacg

SEQ ID NO: 3156259 - RNA, 19 nt, Artificial Sequence
  Description of Artificial Sequence: Synthetic oligonucleotide
ugguuugcguucccaaaac

SEQ ID NO: 3156260 - RNA, 19 nt, Artificial Sequence
  Description of Artificial Sequence: Synthetic oligonucleotide
aguuuggcaugccacguug

SEQ ID NO: 3156261 - RNA, 19 nt, Artificial Sequence
  Description of Artificial Sequence: Synthetic oligonucleotide
ucguuucuggucugcucag

SEQ ID NO: 3156262 - RNA, 19 nt, Artificial Sequence
  Description of Artificial Sequence: Synthetic oligonucleotide
aucgugcuuaaaacugugc

SEQ ID NO: 3156263 - RNA, 19 nt, Artificial Sequence
  Description of Artificial Sequence: Synthetic oligonucleotide
uccaucgugcuuaaaacug

SEQ ID NO: 3156264 - RNA, 19 nt, Artificial Sequence
  Description of Artificial Sequence: Synthetic oligonucleotide
uaaguaagggguugcgcac

SEQ ID NO: 3156265 - RNA, 19 nt, Artificial Sequence
  Description of Artificial Sequence: Synthetic oligonucleotide
uauaaguaagggguugcgc

SEQ ID NO: 3156266 - RNA, 19 nt, Artificial Sequence
  Description of Artificial Sequence: Synthetic oligonucleotide
uuguauaaguaagggguug

SEQ ID NO: 3156267 - RNA, 19 nt, Artificial Sequence
  Description of Artificial Sequence: Synthetic oligonucleotide
ucguacaggaggcuucaag

SEQ ID NO: 3156268 - RNA, 19 nt, Artificial Sequence
  Description of Artificial Sequence: Synthetic oligonucleotide
uccucguuaucaugagaug

SEQ ID NO: 3156269 - RNA, 19 nt, Artificial Sequence
  Description of Artificial Sequence: Synthetic oligonucleotide
uggccaaguuccugcuacg

SEQ ID NO: 3156270 - RNA, 19 nt, Artificial Sequence
  Description of Artificial Sequence: Synthetic oligonucleotide
aagaaauuuaacaaagccc

SEQ ID NO: 3156271 - RNA, 19 nt, Artificial Sequence
  Description of Artificial Sequence: Synthetic oligonucleotide
agagacacccucucugugg

SEQ ID NO: 3156272 - RNA, 19 nt, Artificial Sequence
  Description of Artificial Sequence: Synthetic oligonucleotide
auuuuggccucgagggauc

SEQ ID NO: 3156273 - RNA, 19 nt, Artificial Sequence
  Description of Artificial Sequence: Synthetic oligonucleotide
augugaagccgagaauagc

SEQ ID NO: 3156274 - RNA, 19 nt, Artificial Sequence
  Description of Artificial Sequence: Synthetic oligonucleotide
aaccaaaugugaagccgag

SEQ ID NO: 3156275 - RNA, 19 nt, Artificial Sequence
  Description of Artificial Sequence: Synthetic oligonucleotide
agcagaaugagggcuccug

SEQ ID NO: 3156276 - RNA, 19 nt, Artificial Sequence
  Description of Artificial Sequence: Synthetic oligonucleotide
agaaggguauacacaacuc

SEQ ID NO: 3156277 - RNA, 19 nt, Artificial Sequence
  Description of Artificial Sequence: Synthetic oligonucleotide
uguagaucaaaagacacac

SEQ ID NO: 3156278 - RNA, 19 nt, Artificial Sequence
  Description of Artificial Sequence: Synthetic oligonucleotide
ucgacacgaguuucucauc

SEQ ID NO: 3156279 - RNA, 19 nt, Artificial Sequence
  Description of Artificial Sequence: Synthetic oligonucleotide
acccuauuugugugccaac

SEQ ID NO: 3156280 - RNA, 19 nt, Artificial Sequence
  Description of Artificial Sequence: Synthetic oligonucleotide
aguugacccuauuugugug

SEQ ID NO: 3156281 - RNA, 19 nt, Artificial Sequence
  Description of Artificial Sequence: Synthetic oligonucleotide
aaacaggcaaugcagcuug

SEQ ID NO: 3156282 - RNA, 19 nt, Artificial Sequence
  Description of Artificial Sequence: Synthetic oligonucleotide
agggaguaggugagagaug

SEQ ID NO: 3156283 - RNA, 19 nt, Artificial Sequence
  Description of Artificial Sequence: Synthetic oligonucleotide
agcuaaaauaacccacuuc

SEQ ID NO: 3156284 - RNA, 19 nt, Artificial Sequence
  Description of Artificial Sequence: Synthetic oligonucleotide
ucuagcuaaaauaacccac

SEQ ID NO: 3156285 - RNA, 19 nt, Artificial Sequence
  Description of Artificial Sequence: Synthetic oligonucleotide
uccucuagcuaaaauaacc

SEQ ID NO: 3156286 - RNA, 19 nt, Artificial Sequence
  Description of Artificial Sequence: Synthetic oligonucleotide
uaaaguauauuccucuagc

SEQ ID NO: 3156287 - RNA, 19 nt, Artificial Sequence
  Description of Artificial Sequence: Synthetic oligonucleotide
aaccuaaaagucagugcug

SEQ ID NO: 3156288 - RNA, 19 nt, Artificial Sequence
  Description of Artificial Sequence: Synthetic oligonucleotide
acucaagccaugucugccc

SEQ ID NO: 3156289 - RNA, 19 nt, Artificial Sequence
  Description of Artificial Sequence: Synthetic oligonucleotide
aaagccuauggcacccugg

SEQ ID NO: 3156290 - RNA, 19 nt, Artificial Sequence
  Description of Artificial Sequence: Synthetic oligonucleotide
augguuuaaagccuauggc

SEQ ID NO: 3156291 - RNA, 19 nt, Artificial Sequence
  Description of Artificial Sequence: Synthetic oligonucleotide
aaugguuuaaagccuaugg

SEQ ID NO: 3156292 - RNA, 19 nt, Artificial Sequence
  Description of Artificial Sequence: Synthetic oligonucleotide
ucaugcaaauaccguggcc

SEQ ID NO: 3156293 - RNA, 19 nt, Artificial Sequence
  Description of Artificial Sequence: Synthetic oligonucleotide
acccaacucaugcaaauac

SEQ ID NO: 3156294 - RNA, 19 nt, Artificial Sequence
  Description of Artificial Sequence: Synthetic oligonucleotide
ucuccuaugggcugcuaag

SEQ ID NO: 3156295 - RNA, 19 nt, Artificial Sequence
  Description of Artificial Sequence: Synthetic oligonucleotide
ugcccaagucaguaguggc

SEQ ID NO: 3156296 - RNA, 19 nt, Artificial Sequence
  Description of Artificial Sequence: Synthetic oligonucleotide
uugcccaagucaguagugg

SEQ ID NO: 3156297 - RNA, 19 nt, Artificial Sequence
  Description of Artificial Sequence: Synthetic oligonucleotide
ucuuaagacgggcccugac

SEQ ID NO: 3156298 - RNA, 19 nt, Artificial Sequence
  Description of Artificial Sequence: Synthetic oligonucleotide
aaaacgcccucucucaucc

SEQ ID NO: 3156299 - RNA, 19 nt, Artificial Sequence
  Description of Artificial Sequence: Synthetic oligonucleotide
aagcgcauuuaaaacgccc

SEQ ID NO: 3156300 - RNA, 19 nt, Artificial Sequence
  Description of Artificial Sequence: Synthetic oligonucleotide
uuccucauggggagaacag

SEQ ID NO: 3156301 - RNA, 19 nt, Artificial Sequence
  Description of Artificial Sequence: Synthetic oligonucleotide
ccgucuauuucaaagagca

SEQ ID NO: 3156302 - RNA, 19 nt, Artificial Sequence
  Description of Artificial Sequence: Synthetic oligonucleotide
agguucaugucaucuuuaa

SEQ ID NO: 3156303 - RNA, 19 nt, Artificial Sequence
  Description of Artificial Sequence: Synthetic oligonucleotide
cacugagaguguaagaacu

SEQ ID NO: 3156304 - RNA, 19 nt, Artificial Sequence
  Description of Artificial Sequence: Synthetic oligonucleotide
caauaaugucucuaugaga

SEQ ID NO: 3156305 - RNA, 19 nt, Artificial Sequence
  Description of Artificial Sequence: Synthetic oligonucleotide
ccgcuagauucgaacccuu

SEQ ID NO: 3156306 - RNA, 19 nt, Artificial Sequence
  Description of Artificial Sequence: Synthetic oligonucleotide
cgcgcuguccgcuagauuc

SEQ ID NO: 3156307 - RNA, 19 nt, Artificial Sequence
  Description of Artificial Sequence: Synthetic oligonucleotide
ugguguuugucuuaauucu

SEQ ID NO: 3156308 - RNA, 19 nt, Artificial Sequence
  Description of Artificial Sequence: Synthetic oligonucleotide
ucaccaaggcuucagaaaa

SEQ ID NO: 3156309 - RNA, 19 nt, Artificial Sequence
  Description of Artificial Sequence: Synthetic oligonucleotide
ccaauaaugucucuaugag

SEQ ID NO: 3156310 - RNA, 19 nt, Artificial Sequence
  Description of Artificial Sequence: Synthetic oligonucleotide
cugccugaggaucguuuua

SEQ ID NO: 3156311 - RNA, 19 nt, Artificial Sequence
  Description of Artificial Sequence: Synthetic oligonucleotide
cccaauaaugucucuauga

SEQ ID NO: 3156312 - RNA, 19 nt, Artificial Sequence
  Description of Artificial Sequence: Synthetic oligonucleotide
cucccaauaaugucucuau

SEQ ID NO: 3156313 - RNA, 19 nt, Artificial Sequence
  Description of Artificial Sequence: Synthetic oligonucleotide
cgcuagauucgaacccuuc

SEQ ID NO: 3156314 - RNA, 19 nt, Artificial Sequence
  Description of Artificial Sequence: Synthetic oligonucleotide
gcugccugaggaucguuuu

SEQ ID NO: 3156315 - RNA, 19 nt, Artificial Sequence
  Description of Artificial Sequence: Synthetic oligonucleotide
cuaugucccuuuucucuau

SEQ ID NO: 3156316 - RNA, 19 nt, Artificial Sequence
  Description of Artificial Sequence: Synthetic oligonucleotide
accgcugggucgaauccaa

SEQ ID NO: 3156317 - RNA, 19 nt, Artificial Sequence
  Description of Artificial Sequence: Synthetic oligonucleotide
cuucuuggaucucagagga

SEQ ID NO: 3156318 - RNA, 19 nt, Artificial Sequence
  Description of Artificial Sequence: Synthetic oligonucleotide
ccaccgguaauucagaauc

SEQ ID NO: 3156319 - RNA, 19 nt, Artificial Sequence
  Description of Artificial Sequence: Synthetic oligonucleotide
gcaacaagggccagacacu

SEQ ID NO: 3156320 - RNA, 19 nt, Artificial Sequence
  Description of Artificial Sequence: Synthetic oligonucleotide
uccccagaugccaacauuu

SEQ ID NO: 3156321 - RNA, 19 nt, Artificial Sequence
  Description of Artificial Sequence: Synthetic oligonucleotide
guguuugucuuaauucucc

SEQ ID NO: 3156322 - RNA, 19 nt, Artificial Sequence
  Description of Artificial Sequence: Synthetic oligonucleotide
aguucacggugaagcauga

SEQ ID NO: 3156323 - RNA, 19 nt, Artificial Sequence
  Description of Artificial Sequence: Synthetic oligonucleotide
ccugaggaucguuuuaaag

SEQ ID NO: 3156324 - RNA, 19 nt, Artificial Sequence
  Description of Artificial Sequence: Synthetic oligonucleotide
gucucuaugagacucagga

SEQ ID NO: 3156325 - RNA, 19 nt, Artificial Sequence
  Description of Artificial Sequence: Synthetic oligonucleotide
ugcucuuugaaauagacgg

SEQ ID NO: 3156326 - RNA, 19 nt, Artificial Sequence
  Description of Artificial Sequence: Synthetic oligonucleotide
uuaaagaugacaugaaccu

SEQ ID NO: 3156327 - RNA, 19 nt, Artificial Sequence
  Description of Artificial Sequence: Synthetic oligonucleotide
aguucuuacacucucagug

SEQ ID NO: 3156328 - RNA, 19 nt, Artificial Sequence
  Description of Artificial Sequence: Synthetic oligonucleotide
ucucauagagacauuauug

SEQ ID NO: 3156329 - RNA, 19 nt, Artificial Sequence
  Description of Artificial Sequence: Synthetic oligonucleotide
aaggguucgaaucuagcgg

SEQ ID NO: 3156330 - RNA, 19 nt, Artificial Sequence
  Description of Artificial Sequence: Synthetic oligonucleotide
gaaucuagcggacagcgcg

SEQ ID NO: 3156331 - RNA, 19 nt, Artificial Sequence
  Description of Artificial Sequence: Synthetic oligonucleotide
agaauuaagacaaacacca

SEQ ID NO: 3156332 - RNA, 19 nt, Artificial Sequence
  Description of Artificial Sequence: Synthetic oligonucleotide
uuuucugaagccuugguga

SEQ ID NO: 3156333 - RNA, 19 nt, Artificial Sequence
  Description of Artificial Sequence: Synthetic oligonucleotide
cucauagagacauuauugg

SEQ ID NO: 3156334 - RNA, 19 nt, Artificial Sequence
  Description of Artificial Sequence: Synthetic oligonucleotide
uaaaacgauccucaggcag

SEQ ID NO: 3156335 - RNA, 19 nt, Artificial Sequence
  Description of Artificial Sequence: Synthetic oligonucleotide
ucauagagacauuauuggg

SEQ ID NO: 3156336 - RNA, 19 nt, Artificial Sequence
  Description of Artificial Sequence: Synthetic oligonucleotide
auagagacauuauugggag

SEQ ID NO: 3156337 - RNA, 19 nt, Artificial Sequence
  Description of Artificial Sequence: Synthetic oligonucleotide
gaaggguucgaaucuagcg

SEQ ID NO: 3156338 - RNA, 19 nt, Artificial Sequence
  Description of Artificial Sequence: Synthetic oligonucleotide
aaaacgauccucaggcagc

SEQ ID NO: 3156339 - RNA, 19 nt, Artificial Sequence
  Description of Artificial Sequence: Synthetic oligonucleotide
auagagaaaagggacauag

SEQ ID NO: 3156340 - RNA, 19 nt, Artificial Sequence
  Description of Artificial Sequence: Synthetic oligonucleotide
uuggauucgacccagcggu

SEQ ID NO: 3156341 - RNA, 19 nt, Artificial Sequence
  Description of Artificial Sequence: Synthetic oligonucleotide
uccucugagauccaagaag

SEQ ID NO: 3156342 - RNA, 19 nt, Artificial Sequence
  Description of Artificial Sequence: Synthetic oligonucleotide
gauucugaauuaccggugg

SEQ ID NO: 3156343 - RNA, 19 nt, Artificial Sequence
  Description of Artificial Sequence: Synthetic oligonucleotide
agugucuggcccuuguugc

SEQ ID NO: 3156344 - RNA, 19 nt, Artificial Sequence
  Description of Artificial Sequence: Synthetic oligonucleotide
aaauguuggcaucugggga

SEQ ID NO: 3156345 - RNA, 19 nt, Artificial Sequence
  Description of Artificial Sequence: Synthetic oligonucleotide
ggagaauuaagacaaacac

SEQ ID NO: 3156346 - RNA, 19 nt, Artificial Sequence
  Description of Artificial Sequence: Synthetic oligonucleotide
ucaugcuucaccgugaacu

SEQ ID NO: 3156347 - RNA, 19 nt, Artificial Sequence
  Description of Artificial Sequence: Synthetic oligonucleotide
cuuuaaaacgauccucagg

SEQ ID NO: 3156348 - RNA, 19 nt, Artificial Sequence
  Description of Artificial Sequence: Synthetic oligonucleotide
uccugagucucauagagac

SEQ ID NO: 3156349 - RNA, 19 nt, Artificial Sequence
  Description of Artificial Sequence: Synthetic oligonucleotide
acuacaguguaauaauauu

SEQ ID NO: 3156350 - RNA, 19 nt, Artificial Sequence
  Description of Artificial Sequence: Synthetic oligonucleotide
cuuucagugcuauugguuu

SEQ ID NO: 3156351 - RNA, 19 nt, Artificial Sequence
  Description of Artificial Sequence: Synthetic oligonucleotide
cuuuuaagaugacgccuuu

SEQ ID NO: 3156352 - RNA, 19 nt, Artificial Sequence
  Description of Artificial Sequence: Synthetic oligonucleotide
cguucaagugcagucauuu

SEQ ID NO: 3156353 - RNA, 19 nt, Artificial Sequence
  Description of Artificial Sequence: Synthetic oligonucleotide
gcugaaaauuauaagcucu

SEQ ID NO: 3156354 - RNA, 19 nt, Artificial Sequence
  Description of Artificial Sequence: Synthetic oligonucleotide
ggguggauuuuaucuaaag

SEQ ID NO: 3156355 - RNA, 19 nt, Artificial Sequence
  Description of Artificial Sequence: Synthetic oligonucleotide
gcagaugggugcuagaaga

SEQ ID NO: 3156356 - RNA, 19 nt, Artificial Sequence
  Description of Artificial Sequence: Synthetic oligonucleotide
cauuugugguuauaaucuu

SEQ ID NO: 3156357 - RNA, 19 nt, Artificial Sequence
  Description of Artificial Sequence: Synthetic oligonucleotide
ugaguuauuugacuuuugu

SEQ ID NO: 3156358 - RNA, 19 nt, Artificial Sequence
  Description of Artificial Sequence: Synthetic oligonucleotide
ggaucaauuccacgacaag

SEQ ID NO: 3156359 - RNA, 19 nt, Artificial Sequence
  Description of Artificial Sequence: Synthetic oligonucleotide
aacucaacuuggaucaauu

SEQ ID NO: 3156360 - RNA, 19 nt, Artificial Sequence
  Description of Artificial Sequence: Synthetic oligonucleotide
gucucuaucaggguggauu

SEQ ID NO: 3156361 - RNA, 19 nt, Artificial Sequence
  Description of Artificial Sequence: Synthetic oligonucleotide
ccaacaggggagguuuauu

SEQ ID NO: 3156362 - RNA, 19 nt, Artificial Sequence
  Description of Artificial Sequence: Synthetic oligonucleotide
uguucaguaugagguuaau

SEQ ID NO: 3156363 - RNA, 19 nt, Artificial Sequence
  Description of Artificial Sequence: Synthetic oligonucleotide
cccuucacgugaaauugag

SEQ ID NO: 3156364 - RNA, 19 nt, Artificial Sequence
  Description of Artificial Sequence: Synthetic oligonucleotide
ucacuacaguguaauaaua

SEQ ID NO: 3156365 - RNA, 19 nt, Artificial Sequence
  Description of Artificial Sequence: Synthetic oligonucleotide
acguucaagugcagucauu

SEQ ID NO: 3156366 - RNA, 19 nt, Artificial Sequence
  Description of Artificial Sequence: Synthetic oligonucleotide
gcacugaauauauauaaac

SEQ ID NO: 3156367 - RNA, 19 nt, Artificial Sequence
  Description of Artificial Sequence: Synthetic oligonucleotide
cuuuugaguuguauugacu

SEQ ID NO: 3156368 - RNA, 19 nt, Artificial Sequence
  Description of Artificial Sequence: Synthetic oligonucleotide
caacaggggagguuuauuu

SEQ ID NO: 3156369 - RNA, 19 nt, Artificial Sequence
  Description of Artificial Sequence: Synthetic oligonucleotide
cucuguguagacuuaagaa

SEQ ID NO: 3156370 - RNA, 19 nt, Artificial Sequence
  Description of Artificial Sequence: Synthetic oligonucleotide
cuuugauugacaaucccaa

SEQ ID NO: 3156371 - RNA, 19 nt, Artificial Sequence
  Description of Artificial Sequence: Synthetic oligonucleotide
guuccacuguguugacacu

SEQ ID NO: 3156372 - RNA, 19 nt, Artificial Sequence
  Description of Artificial Sequence: Synthetic oligonucleotide
ucauuugugguuauaaucu

SEQ ID NO: 3156373 - RNA, 19 nt, Artificial Sequence
  Description of Artificial Sequence: Synthetic oligonucleotide
aauauuauuacacuguagu

SEQ ID NO: 3156374 - RNA, 19 nt, Artificial Sequence
  Description of Artificial Sequence: Synthetic oligonucleotide
aaaccaauagcacugaaag

SEQ ID NO: 3156375 - RNA, 19 nt, Artificial Sequence
  Description of Artificial Sequence: Synthetic oligonucleotide
aaaggcgucaucuuaaaag

SEQ ID NO: 3156376 - RNA, 19 nt, Artificial Sequence
  Description of Artificial Sequence: Synthetic oligonucleotide
aaaugacugcacuugaacg

SEQ ID NO: 3156377 - RNA, 19 nt, Artificial Sequence
  Description of Artificial Sequence: Synthetic oligonucleotide
agagcuuauaauuuucagc

SEQ ID NO: 3156378 - RNA, 19 nt, Artificial Sequence
  Description of Artificial Sequence: Synthetic oligonucleotide
cuuuagauaaaauccaccc

SEQ ID NO: 3156379 - RNA, 19 nt, Artificial Sequence
  Description of Artificial Sequence: Synthetic oligonucleotide
ucuucuagcacccaucugc

SEQ ID NO: 3156380 - RNA, 19 nt, Artificial Sequence
  Description of Artificial Sequence: Synthetic oligonucleotide
aagauuauaaccacaaaug

SEQ ID NO: 3156381 - RNA, 19 nt, Artificial Sequence
  Description of Artificial Sequence: Synthetic oligonucleotide
acaaaagucaaauaacuca

SEQ ID NO: 3156382 - RNA, 19 nt, Artificial Sequence
  Description of Artificial Sequence: Synthetic oligonucleotide
cuugucguggaauugaucc

SEQ ID NO: 3156383 - RNA, 19 nt, Artificial Sequence
  Description of Artificial Sequence: Synthetic oligonucleotide
aauugauccaaguugaguu

SEQ ID NO: 3156384 - RNA, 19 nt, Artificial Sequence
  Description of Artificial Sequence: Synthetic oligonucleotide
aauccacccugauagagac

SEQ ID NO: 3156385 - RNA, 19 nt, Artificial Sequence
  Description of Artificial Sequence: Synthetic oligonucleotide
aauaaaccuccccuguugg

SEQ ID NO: 3156386 - RNA, 19 nt, Artificial Sequence
  Description of Artificial Sequence: Synthetic oligonucleotide
auuaaccucauacugaaca

SEQ ID NO: 3156387 - RNA, 19 nt, Artificial Sequence
  Description of Artificial Sequence: Synthetic oligonucleotide
cucaauuucacgugaaggg

SEQ ID NO: 3156388 - RNA, 19 nt, Artificial Sequence
  Description of Artificial Sequence: Synthetic oligonucleotide
uauuauuacacuguaguga

SEQ ID NO: 3156389 - RNA, 19 nt, Artificial Sequence
  Description of Artificial Sequence: Synthetic oligonucleotide
aaugacugcacuugaacgu

SEQ ID NO: 3156390 - RNA, 19 nt, Artificial Sequence
  Description of Artificial Sequence: Synthetic oligonucleotide
guuuauauauauucagugc

SEQ ID NO: 3156391 - RNA, 19 nt, Artificial Sequence
  Description of Artificial Sequence: Synthetic oligonucleotide
agucaauacaacucaaaag

SEQ ID NO: 3156392 - RNA, 19 nt, Artificial Sequence
  Description of Artificial Sequence: Synthetic oligonucleotide
aaauaaaccuccccuguug

SEQ ID NO: 3156393 - RNA, 19 nt, Artificial Sequence
  Description of Artificial Sequence: Synthetic oligonucleotide
uucuuaagucuacacagag

SEQ ID NO: 3156394 - RNA, 19 nt, Artificial Sequence
  Description of Artificial Sequence: Synthetic oligonucleotide
uugggauugucaaucaaag

SEQ ID NO: 3156395 - RNA, 19 nt, Artificial Sequence
  Description of Artificial Sequence: Synthetic oligonucleotide
agugucaacacaguggaac

SEQ ID NO: 3156396 - RNA, 19 nt, Artificial Sequence
  Description of Artificial Sequence: Synthetic oligonucleotide
agauuauaaccacaaauga

SEQ ID NO: 3156397 - RNA, 19 nt, Artificial Sequence
  Description of Artificial Sequence: Synthetic oligonucleotide
gcagcagaguggcugguuu

SEQ ID NO: 3156398 - RNA, 19 nt, Artificial Sequence
  Description of Artificial Sequence: Synthetic oligonucleotide
gacugaagaacauagauau

SEQ ID NO: 3156399 - RNA, 19 nt, Artificial Sequence
  Description of Artificial Sequence: Synthetic oligonucleotide
gaaugaauauucguccuuu

SEQ ID NO: 3156400 - RNA, 19 nt, Artificial Sequence
  Description of Artificial Sequence: Synthetic oligonucleotide
gugugacuaccaaguaauu

SEQ ID NO: 3156401 - RNA, 19 nt, Artificial Sequence
  Description of Artificial Sequence: Synthetic oligonucleotide
ccagccugguugaacuaag

SEQ ID NO: 3156402 - RNA, 19 nt, Artificial Sequence
  Description of Artificial Sequence: Synthetic oligonucleotide
ccaggucuuuugaaacaca

SEQ ID NO: 3156403 - RNA, 19 nt, Artificial Sequence
  Description of Artificial Sequence: Synthetic oligonucleotide
cauccaaagugccuauuag

SEQ ID NO: 3156404 - RNA, 19 nt, Artificial Sequence
  Description of Artificial Sequence: Synthetic oligonucleotide
gccuauuaguguggccaaa

SEQ ID NO: 3156405 - RNA, 19 nt, Artificial Sequence
  Description of Artificial Sequence: Synthetic oligonucleotide
gggugugacuaccaaguaa

SEQ ID NO: 3156406 - RNA, 19 nt, Artificial Sequence
  Description of Artificial Sequence: Synthetic oligonucleotide
cucuuuagucuccuacacu

SEQ ID NO: 3156407 - RNA, 19 nt, Artificial Sequence
  Description of Artificial Sequence: Synthetic oligonucleotide
guuuagcuucuguagucuu

SEQ ID NO: 3156408 - RNA, 19 nt, Artificial Sequence
  Description of Artificial Sequence: Synthetic oligonucleotide
gaauauucguccuuuagga

SEQ ID NO: 3156409 - RNA, 19 nt, Artificial Sequence
  Description of Artificial Sequence: Synthetic oligonucleotide
uucucuuuagucuccuaca

SEQ ID NO: 3156410 - RNA, 19 nt, Artificial Sequence
  Description of Artificial Sequence: Synthetic oligonucleotide
gaacauagauauuuacgua

SEQ ID NO: 3156411 - RNA, 19 nt, Artificial Sequence
  Description of Artificial Sequence: Synthetic oligonucleotide
gcuuugugucagucaaaua

SEQ ID NO: 3156412 - RNA, 19 nt, Artificial Sequence
  Description of Artificial Sequence: Synthetic oligonucleotide
acauagauauuuacguagu

SEQ ID NO: 3156413 - RNA, 19 nt, Artificial Sequence
  Description of Artificial Sequence: Synthetic oligonucleotide
gcuugagaggcagaguaca

SEQ ID NO: 3156414 - RNA, 19 nt, Artificial Sequence
  Description of Artificial Sequence: Synthetic oligonucleotide
ccagaggagaaugaauauu

SEQ ID NO: 3156415 - RNA, 19 nt, Artificial Sequence
  Description of Artificial Sequence: Synthetic oligonucleotide
cauucucuuuagucuccua

SEQ ID NO: 3156416 - RNA, 19 nt, Artificial Sequence
  Description of Artificial Sequence: Synthetic oligonucleotide
gagaaugaauauucguccu

SEQ ID NO: 3156417 - RNA, 19 nt, Artificial Sequence
  Description of Artificial Sequence: Synthetic oligonucleotide
ugaacuaaggugagcuuga

SEQ ID NO: 3156418 - RNA, 19 nt, Artificial Sequence
  Description of Artificial Sequence: Synthetic oligonucleotide
ggaugauggaauaccuagu

SEQ ID NO: 3156419 - RNA, 19 nt, Artificial Sequence
  Description of Artificial Sequence: Synthetic oligonucleotide
ggugugacuaccaaguaau

SEQ ID NO: 3156420 - RNA, 19 nt, Artificial Sequence
  Description of Artificial Sequence: Synthetic oligonucleotide
cuccauucucuuuagucuc

SEQ ID NO: 3156421 - RNA, 19 nt, Artificial Sequence
  Description of Artificial Sequence: Synthetic oligonucleotide
gucuccauucucuuuaguc

SEQ ID NO: 3156422 - RNA, 19 nt, Artificial Sequence
  Description of Artificial Sequence: Synthetic oligonucleotide
ugcccagccugguugaacu

SEQ ID NO: 3156423 - RNA, 19 nt, Artificial Sequence
  Description of Artificial Sequence: Synthetic oligonucleotide
aaugaauauucguccuuua

SEQ ID NO: 3156424 - RNA, 19 nt, Artificial Sequence
  Description of Artificial Sequence: Synthetic oligonucleotide
ggcuccgaacccaaucaug

SEQ ID NO: 3156425 - RNA, 19 nt, Artificial Sequence
  Description of Artificial Sequence: Synthetic oligonucleotide
cgaacccaaucauggucca

SEQ ID NO: 3156426 - RNA, 19 nt, Artificial Sequence
  Description of Artificial Sequence: Synthetic oligonucleotide
cccuccuggucuccauucu

SEQ ID NO: 3156427 - RNA, 19 nt, Artificial Sequence
  Description of Artificial Sequence: Synthetic oligonucleotide
gugacuaccaaguaauuac

SEQ ID NO: 3156428 - RNA, 19 nt, Artificial Sequence
  Description of Artificial Sequence: Synthetic oligonucleotide
cccaagaagucgaagagcu

SEQ ID NO: 3156429 - RNA, 19 nt, Artificial Sequence
  Description of Artificial Sequence: Synthetic oligonucleotide
cggacugguggagguuaag

SEQ ID NO: 3156430 - RNA, 19 nt, Artificial Sequence
  Description of Artificial Sequence: Synthetic oligonucleotide
ccaucaacucagcauaugc

SEQ ID NO: 3156431 - RNA, 19 nt, Artificial Sequence
  Description of Artificial Sequence: Synthetic oligonucleotide
ugugcucaccaauauagca

SEQ ID NO: 3156432 - RNA, 19 nt, Artificial Sequence
  Description of Artificial Sequence: Synthetic oligonucleotide
cuggcccaaugaagauuca

SEQ ID NO: 3156433 - RNA, 19 nt, Artificial Sequence
  Description of Artificial Sequence: Synthetic oligonucleotide
ggguguauuggcgagagcu

SEQ ID NO: 3156434 - RNA, 19 nt, Artificial Sequence
  Description of Artificial Sequence: Synthetic oligonucleotide
acacaagcacggguguauu

SEQ ID NO: 3156435 - RNA, 19 nt, Artificial Sequence
  Description of Artificial Sequence: Synthetic oligonucleotide
auccaaagugccuauuagu

SEQ ID NO: 3156436 - RNA, 19 nt, Artificial Sequence
  Description of Artificial Sequence: Synthetic oligonucleotide
gaggagaaugaauauucgu

SEQ ID NO: 3156437 - RNA, 19 nt, Artificial Sequence
  Description of Artificial Sequence: Synthetic oligonucleotide
uuacucuggcuuuagcaga

SEQ ID NO: 3156438 - RNA, 19 nt, Artificial Sequence
  Description of Artificial Sequence: Synthetic oligonucleotide
ucacugggcuuuucugaga

SEQ ID NO: 3156439 - RNA, 19 nt, Artificial Sequence
  Description of Artificial Sequence: Synthetic oligonucleotide
ugacuaccaaguaauuaca

SEQ ID NO: 3156440 - RNA, 19 nt, Artificial Sequence
  Description of Artificial Sequence: Synthetic oligonucleotide
gcccaaugaagauucagcu

SEQ ID NO: 3156441 - RNA, 19 nt, Artificial Sequence
  Description of Artificial Sequence: Synthetic oligonucleotide
caauguacuaccacccaau

SEQ ID NO: 3156442 - RNA, 19 nt, Artificial Sequence
  Description of Artificial Sequence: Synthetic oligonucleotide
gagcuuuguuuaaguccug

SEQ ID NO: 3156443 - RNA, 19 nt, Artificial Sequence
  Description of Artificial Sequence: Synthetic oligonucleotide
ucggacugguggagguuaa

SEQ ID NO: 3156444 - RNA, 19 nt, Artificial Sequence
  Description of Artificial Sequence: Synthetic oligonucleotide
aaaccagccacucugcugc

SEQ ID NO: 3156445 - RNA, 19 nt, Artificial Sequence
  Description of Artificial Sequence: Synthetic oligonucleotide
auaucuauguucuucaguc

SEQ ID NO: 3156446 - RNA, 19 nt, Artificial Sequence
  Description of Artificial Sequence: Synthetic oligonucleotide
aaaggacgaauauucauuc

SEQ ID NO: 3156447 - RNA, 19 nt, Artificial Sequence
  Description of Artificial Sequence: Synthetic oligonucleotide
aauuacuugguagucacac

SEQ ID NO: 3156448 - RNA, 19 nt, Artificial Sequence
  Description of Artificial Sequence: Synthetic oligonucleotide
cuuaguucaaccaggcugg

SEQ ID NO: 3156449 - RNA, 19 nt, Artificial Sequence
  Description of Artificial Sequence: Synthetic oligonucleotide
uguguuucaaaagaccugg

SEQ ID NO: 3156450 - RNA, 19 nt, Artificial Sequence
  Description of Artificial Sequence: Synthetic oligonucleotide
cuaauaggcacuuuggaug

SEQ ID NO: 3156451 - RNA, 19 nt, Artificial Sequence
  Description of Artificial Sequence: Synthetic oligonucleotide
uuuggccacacuaauaggc

SEQ ID NO: 3156452 - RNA, 19 nt, Artificial Sequence
  Description of Artificial Sequence: Synthetic oligonucleotide
uuacuugguagucacaccc

SEQ ID NO: 3156453 - RNA, 19 nt, Artificial Sequence
  Description of Artificial Sequence: Synthetic oligonucleotide
aguguaggagacuaaagag

SEQ ID NO: 3156454 - RNA, 19 nt, Artificial Sequence
  Description of Artificial Sequence: Synthetic oligonucleotide
aagacuacagaagcuaaac

SEQ ID NO: 3156455 - RNA, 19 nt, Artificial Sequence
  Description of Artificial Sequence: Synthetic oligonucleotide
uccuaaaggacgaauauuc

SEQ ID NO: 3156456 - RNA, 19 nt, Artificial Sequence
  Description of Artificial Sequence: Synthetic oligonucleotide
uguaggagacuaaagagaa

SEQ ID NO: 3156457 - RNA, 19 nt, Artificial Sequence
  Description of Artificial Sequence: Synthetic oligonucleotide
uacguaaauaucuauguuc

SEQ ID NO: 3156458 - RNA, 19 nt, Artificial Sequence
  Description of Artificial Sequence: Synthetic oligonucleotide
uauuugacugacacaaagc

SEQ ID NO: 3156459 - RNA, 19 nt, Artificial Sequence
  Description of Artificial Sequence: Synthetic oligonucleotide
acuacguaaauaucuaugu

SEQ ID NO: 3156460 - RNA, 19 nt, Artificial Sequence
  Description of Artificial Sequence: Synthetic oligonucleotide
uguacucugccucucaagc

SEQ ID NO: 3156461 - RNA, 19 nt, Artificial Sequence
  Description of Artificial Sequence: Synthetic oligonucleotide
aauauucauucuccucugg

SEQ ID NO: 3156462 - RNA, 19 nt, Artificial Sequence
  Description of Artificial Sequence: Synthetic oligonucleotide
uaggagacuaaagagaaug

SEQ ID NO: 3156463 - RNA, 19 nt, Artificial Sequence
  Description of Artificial Sequence: Synthetic oligonucleotide
aggacgaauauucauucuc

SEQ ID NO: 3156464 - RNA, 19 nt, Artificial Sequence
  Description of Artificial Sequence: Synthetic oligonucleotide
ucaagcucaccuuaguuca

SEQ ID NO: 3156465 - RNA, 19 nt, Artificial Sequence
  Description of Artificial Sequence: Synthetic oligonucleotide
acuagguauuccaucaucc

SEQ ID NO: 3156466 - RNA, 19 nt, Artificial Sequence
  Description of Artificial Sequence: Synthetic oligonucleotide
auuacuugguagucacacc

SEQ ID NO: 3156467 - RNA, 19 nt, Artificial Sequence
  Description of Artificial Sequence: Synthetic oligonucleotide
gagacuaaagagaauggag

SEQ ID NO: 3156468 - RNA, 19 nt, Artificial Sequence
  Description of Artificial Sequence: Synthetic oligonucleotide
gacuaaagagaauggagac

SEQ ID NO: 3156469 - RNA, 19 nt, Artificial Sequence
  Description of Artificial Sequence: Synthetic oligonucleotide
aguucaaccaggcugggca

SEQ ID NO: 3156470 - RNA, 19 nt, Artificial Sequence
  Description of Artificial Sequence: Synthetic oligonucleotide
uaaaggacgaauauucauu

SEQ ID NO: 3156471 - RNA, 19 nt, Artificial Sequence
  Description of Artificial Sequence: Synthetic oligonucleotide
caugauuggguucggagcc

SEQ ID NO: 3156472 - RNA, 19 nt, Artificial Sequence
  Description of Artificial Sequence: Synthetic oligonucleotide
uggaccaugauuggguucg

SEQ ID NO: 3156473 - RNA, 19 nt, Artificial Sequence
  Description of Artificial Sequence: Synthetic oligonucleotide
agaauggagaccaggaggg

SEQ ID NO: 3156474 - RNA, 19 nt, Artificial Sequence
  Description of Artificial Sequence: Synthetic oligonucleotide
guaauuacuugguagucac

SEQ ID NO: 3156475 - RNA, 19 nt, Artificial Sequence
  Description of Artificial Sequence: Synthetic oligonucleotide
agcucuucgacuucuuggg

SEQ ID NO: 3156476 - RNA, 19 nt, Artificial Sequence
  Description of Artificial Sequence: Synthetic oligonucleotide
cuuaaccuccaccaguccg

SEQ ID NO: 3156477 - RNA, 19 nt, Artificial Sequence
  Description of Artificial Sequence: Synthetic oligonucleotide
gcauaugcugaguugaugg

SEQ ID NO: 3156478 - RNA, 19 nt, Artificial Sequence
  Description of Artificial Sequence: Synthetic oligonucleotide
ugcuauauuggugagcaca

SEQ ID NO: 3156479 - RNA, 19 nt, Artificial Sequence
  Description of Artificial Sequence: Synthetic oligonucleotide
ugaaucuucauugggccag

SEQ ID NO: 3156480 - RNA, 19 nt, Artificial Sequence
  Description of Artificial Sequence: Synthetic oligonucleotide
agcucucgccaauacaccc

SEQ ID NO: 3156481 - RNA, 19 nt, Artificial Sequence
  Description of Artificial Sequence: Synthetic oligonucleotide
aauacacccgugcuugugu

SEQ ID NO: 3156482 - RNA, 19 nt, Artificial Sequence
  Description of Artificial Sequence: Synthetic oligonucleotide
acuaauaggcacuuuggau

SEQ ID NO: 3156483 - RNA, 19 nt, Artificial Sequence
  Description of Artificial Sequence: Synthetic oligonucleotide
acgaauauucauucuccuc

SEQ ID NO: 3156484 - RNA, 19 nt, Artificial Sequence
  Description of Artificial Sequence: Synthetic oligonucleotide
ucugcuaaagccagaguaa

SEQ ID NO: 3156485 - RNA, 19 nt, Artificial Sequence
  Description of Artificial Sequence: Synthetic oligonucleotide
ucucagaaaagcccaguga

SEQ ID NO: 3156486 - RNA, 19 nt, Artificial Sequence
  Description of Artificial Sequence: Synthetic oligonucleotide
uguaauuacuugguaguca

SEQ ID NO: 3156487 - RNA, 19 nt, Artificial Sequence
  Description of Artificial Sequence: Synthetic oligonucleotide
agcugaaucuucauugggc

SEQ ID NO: 3156488 - RNA, 19 nt, Artificial Sequence
  Description of Artificial Sequence: Synthetic oligonucleotide
auugggugguaguacauug

SEQ ID NO: 3156489 - RNA, 19 nt, Artificial Sequence
  Description of Artificial Sequence: Synthetic oligonucleotide
caggacuuaaacaaagcuc

SEQ ID NO: 3156490 - RNA, 19 nt, Artificial Sequence
  Description of Artificial Sequence: Synthetic oligonucleotide
uuaaccuccaccaguccga

SEQ ID NO: 3156491 - RNA, 19 nt, Artificial Sequence
  Description of Artificial Sequence: Synthetic oligonucleotide
gcacuugggucacgaaauu

SEQ ID NO: 3156492 - RNA, 19 nt, Artificial Sequence
  Description of Artificial Sequence: Synthetic oligonucleotide
gcuucuggcuaaccauucu

SEQ ID NO: 3156493 - RNA, 19 nt, Artificial Sequence
  Description of Artificial Sequence: Synthetic oligonucleotide
guaucauaauugaaucuca

SEQ ID NO: 3156494 - RNA, 19 nt, Artificial Sequence
  Description of Artificial Sequence: Synthetic oligonucleotide
cucuaaaugugcuaaccuu

SEQ ID NO: 3156495 - RNA, 19 nt, Artificial Sequence
  Description of Artificial Sequence: Synthetic oligonucleotide
ugaugauauuguaucauaa

SEQ ID NO: 3156496 - RNA, 19 nt, Artificial Sequence
  Description of Artificial Sequence: Synthetic oligonucleotide
cgaaauucagcacauuaaa

SEQ ID NO: 3156497 - RNA, 19 nt, Artificial Sequence
  Description of Artificial Sequence: Synthetic oligonucleotide
ucagcacauuaaaauuauu

SEQ ID NO: 3156498 - RNA, 19 nt, Artificial Sequence
  Description of Artificial Sequence: Synthetic oligonucleotide
ccauuuaggccauacaccu

SEQ ID NO: 3156499 - RNA, 19 nt, Artificial Sequence
  Description of Artificial Sequence: Synthetic oligonucleotide
gggauagauccaauuuaua

SEQ ID NO: 3156500 - RNA, 19 nt, Artificial Sequence
  Description of Artificial Sequence: Synthetic oligonucleotide
gaguuuuacuugaaaguuu

SEQ ID NO: 3156501 - RNA, 19 nt, Artificial Sequence
  Description of Artificial Sequence: Synthetic oligonucleotide
cuucuuaacugauguaugu

SEQ ID NO: 3156502 - RNA, 19 nt, Artificial Sequence
  Description of Artificial Sequence: Synthetic oligonucleotide
gauauuguaucauaauuga

SEQ ID NO: 3156503 - RNA, 19 nt, Artificial Sequence
  Description of Artificial Sequence: Synthetic oligonucleotide
ggauaaaugccuuucauca

SEQ ID NO: 3156504 - RNA, 19 nt, Artificial Sequence
  Description of Artificial Sequence: Synthetic oligonucleotide
ccaugauggagguaccauu

SEQ ID NO: 3156505 - RNA, 19 nt, Artificial Sequence
  Description of Artificial Sequence: Synthetic oligonucleotide
caauacagacuauguucuu

SEQ ID NO: 3156506 - RNA, 19 nt, Artificial Sequence
  Description of Artificial Sequence: Synthetic oligonucleotide
gaugauauuguaucauaau

SEQ ID NO: 3156507 - RNA, 19 nt, Artificial Sequence
  Description of Artificial Sequence: Synthetic oligonucleotide
guuuaaaucucguugcauc

SEQ ID NO: 3156508 - RNA, 19 nt, Artificial Sequence
  Description of Artificial Sequence: Synthetic oligonucleotide
guaugaagauagcaucauc

SEQ ID NO: 3156509 - RNA, 19 nt, Artificial Sequence
  Description of Artificial Sequence: Synthetic oligonucleotide
gaauauuuucauaauacuu

SEQ ID NO: 3156510 - RNA, 19 nt, Artificial Sequence
  Description of Artificial Sequence: Synthetic oligonucleotide
cuugaaaguuucauguuua

SEQ ID NO: 3156511 - RNA, 19 nt, Artificial Sequence
  Description of Artificial Sequence: Synthetic oligonucleotide
cuuucaucauaaauugcaa

SEQ ID NO: 3156512 - RNA, 19 nt, Artificial Sequence
  Description of Artificial Sequence: Synthetic oligonucleotide
cgaagaggaauguuuaaau

SEQ ID NO: 3156513 - RNA, 19 nt, Artificial Sequence
  Description of Artificial Sequence: Synthetic oligonucleotide
aucucugagguguaucaca

SEQ ID NO: 3156514 - RNA, 19 nt, Artificial Sequence
  Description of Artificial Sequence: Synthetic oligonucleotide
guauagaugaugauauugu

SEQ ID NO: 3156515 - RNA, 19 nt, Artificial Sequence
  Description of Artificial Sequence: Synthetic oligonucleotide
agggauagauccaauuuau

SEQ ID NO: 3156516 - RNA, 19 nt, Artificial Sequence
  Description of Artificial Sequence: Synthetic oligonucleotide
acugauguaugucaauaca

SEQ ID NO: 3156517 - RNA, 19 nt, Artificial Sequence
  Description of Artificial Sequence: Synthetic oligonucleotide
cggauaaaugccuuucauc

SEQ ID NO: 3156518 - RNA, 19 nt, Artificial Sequence
  Description of Artificial Sequence: Synthetic oligonucleotide
gauuauaaacuaaaccaug

SEQ ID NO: 3156519 - RNA, 19 nt, Artificial Sequence
  Description of Artificial Sequence: Synthetic oligonucleotide
uauagaugaugauauugua

SEQ ID NO: 3156520 - RNA, 19 nt, Artificial Sequence
  Description of Artificial Sequence: Synthetic oligonucleotide
ggcuaaccauucuucuuaa

SEQ ID NO: 3156521 - RNA, 19 nt, Artificial Sequence
  Description of Artificial Sequence: Synthetic oligonucleotide
ccuuucaucauaaauugca

SEQ ID NO: 3156522 - RNA, 19 nt, Artificial Sequence
  Description of Artificial Sequence: Synthetic oligonucleotide
ucuucuuaacugauguaug

SEQ ID NO: 3156523 - RNA, 19 nt, Artificial Sequence
  Description of Artificial Sequence: Synthetic oligonucleotide
agcccuaucacaaaucuga

SEQ ID NO: 3156524 - RNA, 19 nt, Artificial Sequence
  Description of Artificial Sequence: Synthetic oligonucleotide
agaauauuuucauaauacu

SEQ ID NO: 3156525 - RNA, 19 nt, Artificial Sequence
  Description of Artificial Sequence: Synthetic oligonucleotide
guaugucaauacagacuau

SEQ ID NO: 3156526 - RNA, 19 nt, Artificial Sequence
  Description of Artificial Sequence: Synthetic oligonucleotide
uucuggaaaugucucuaaa

SEQ ID NO: 3156527 - RNA, 19 nt, Artificial Sequence
  Description of Artificial Sequence: Synthetic oligonucleotide
cuaucacaaaucugaguuu

SEQ ID NO: 3156528 - RNA, 19 nt, Artificial Sequence
  Description of Artificial Sequence: Synthetic oligonucleotide
ccaaauucaucaguccaga

SEQ ID NO: 3156529 - RNA, 19 nt, Artificial Sequence
  Description of Artificial Sequence: Synthetic oligonucleotide
ccaaauaaauacuugggca

SEQ ID NO: 3156530 - RNA, 19 nt, Artificial Sequence
  Description of Artificial Sequence: Synthetic oligonucleotide
caauuuauaaagcccuauc

SEQ ID NO: 3156531 - RNA, 19 nt, Artificial Sequence
  Description of Artificial Sequence: Synthetic oligonucleotide
uuauuucaggccucuuauu

SEQ ID NO: 3156532 - RNA, 19 nt, Artificial Sequence
  Description of Artificial Sequence: Synthetic oligonucleotide
uuaacaacugguuuauuua

SEQ ID NO: 3156533 - RNA, 19 nt, Artificial Sequence
  Description of Artificial Sequence: Synthetic oligonucleotide
cagaauauuuucauaauac

SEQ ID NO: 3156534 - RNA, 19 nt, Artificial Sequence
  Description of Artificial Sequence: Synthetic oligonucleotide
gccucuuauuaacaacugg

SEQ ID NO: 3156535 - RNA, 19 nt, Artificial Sequence
  Description of Artificial Sequence: Synthetic oligonucleotide
auuuauauguauagaugau

SEQ ID NO: 3156536 - RNA, 19 nt, Artificial Sequence
  Description of Artificial Sequence: Synthetic oligonucleotide
uuaacugauguaugucaau

SEQ ID NO: 3156537 - RNA, 19 nt, Artificial Sequence
  Description of Artificial Sequence: Synthetic oligonucleotide
ugccuuucaucauaaauug

SEQ ID NO: 3156538 - RNA, 19 nt, Artificial Sequence
  Description of Artificial Sequence: Synthetic oligonucleotide
cuuauuaacaacugguuua

SEQ ID NO: 3156539 - RNA, 19 nt, Artificial Sequence
  Description of Artificial Sequence: Synthetic oligonucleotide
aauuucgugacccaagugc

SEQ ID NO: 3156540 - RNA, 19 nt, Artificial Sequence
  Description of Artificial Sequence: Synthetic oligonucleotide
agaaugguuagccagaagc

SEQ ID NO: 3156541 - RNA, 19 nt, Artificial Sequence
  Description of Artificial Sequence: Synthetic oligonucleotide
ugagauucaauuaugauac

SEQ ID NO: 3156542 - RNA, 19 nt, Artificial Sequence
  Description of Artificial Sequence: Synthetic oligonucleotide
aagguuagcacauuuagag

SEQ ID NO: 3156543 - RNA, 19 nt, Artificial Sequence
  Description of Artificial Sequence: Synthetic oligonucleotide
uuaugauacaauaucauca

SEQ ID NO: 3156544 - RNA, 19 nt, Artificial Sequence
  Description of Artificial Sequence: Synthetic oligonucleotide
uuuaaugugcugaauuucg

SEQ ID NO: 3156545 - RNA, 19 nt, Artificial Sequence
  Description of Artificial Sequence: Synthetic oligonucleotide
aauaauuuuaaugugcuga

SEQ ID NO: 3156546 - RNA, 19 nt, Artificial Sequence
  Description of Artificial Sequence: Synthetic oligonucleotide
agguguauggccuaaaugg

SEQ ID NO: 3156547 - RNA, 19 nt, Artificial Sequence
  Description of Artificial Sequence: Synthetic oligonucleotide
uauaaauuggaucuauccc

SEQ ID NO: 3156548 - RNA, 19 nt, Artificial Sequence
  Description of Artificial Sequence: Synthetic oligonucleotide
aaacuuucaaguaaaacuc

SEQ ID NO: 3156549 - RNA, 19 nt, Artificial Sequence
  Description of Artificial Sequence: Synthetic oligonucleotide
acauacaucaguuaagaag

SEQ ID NO: 3156550 - RNA, 19 nt, Artificial Sequence
  Description of Artificial Sequence: Synthetic oligonucleotide
ucaauuaugauacaauauc

SEQ ID NO: 3156551 - RNA, 19 nt, Artificial Sequence
  Description of Artificial Sequence: Synthetic oligonucleotide
ugaugaaaggcauuuaucc

SEQ ID NO: 3156552 - RNA, 19 nt, Artificial Sequence
  Description of Artificial Sequence: Synthetic oligonucleotide
aaugguaccuccaucaugg

SEQ ID NO: 3156553 - RNA, 19 nt, Artificial Sequence
  Description of Artificial Sequence: Synthetic oligonucleotide
aagaacauagucuguauug

SEQ ID NO: 3156554 - RNA, 19 nt, Artificial Sequence
  Description of Artificial Sequence: Synthetic oligonucleotide
auuaugauacaauaucauc

SEQ ID NO: 3156555 - RNA, 19 nt, Artificial Sequence
  Description of Artificial Sequence: Synthetic oligonucleotide
gaugcaacgagauuuaaac

SEQ ID NO: 3156556 - RNA, 19 nt, Artificial Sequence
  Description of Artificial Sequence: Synthetic oligonucleotide
gaugaugcuaucuucauac

SEQ ID NO: 3156557 - RNA, 19 nt, Artificial Sequence
  Description of Artificial Sequence: Synthetic oligonucleotide
aaguauuaugaaaauauuc

SEQ ID NO: 3156558 - RNA, 19 nt, Artificial Sequence
  Description of Artificial Sequence: Synthetic oligonucleotide
uaaacaugaaacuuucaag

SEQ ID NO: 3156559 - RNA, 19 nt, Artificial Sequence
  Description of Artificial Sequence: Synthetic oligonucleotide
uugcaauuuaugaugaaag

SEQ ID NO: 3156560 - RNA, 19 nt, Artificial Sequence
  Description of Artificial Sequence: Synthetic oligonucleotide
auuuaaacauuccucuucg

SEQ ID NO: 3156561 - RNA, 19 nt, Artificial Sequence
  Description of Artificial Sequence: Synthetic oligonucleotide
ugugauacaccucagagau

SEQ ID NO: 3156562 - RNA, 19 nt, Artificial Sequence
  Description of Artificial Sequence: Synthetic oligonucleotide
acaauaucaucaucuauac

SEQ ID NO: 3156563 - RNA, 19 nt, Artificial Sequence
  Description of Artificial Sequence: Synthetic oligonucleotide
auaaauuggaucuaucccu

SEQ ID NO: 3156564 - RNA, 19 nt, Artificial Sequence
  Description of Artificial Sequence: Synthetic oligonucleotide
uguauugacauacaucagu

SEQ ID NO: 3156565 - RNA, 19 nt, Artificial Sequence
  Description of Artificial Sequence: Synthetic oligonucleotide
gaugaaaggcauuuauccg

SEQ ID NO: 3156566 - RNA, 19 nt, Artificial Sequence
  Description of Artificial Sequence: Synthetic oligonucleotide
caugguuuaguuuauaauc

SEQ ID NO: 3156567 - RNA, 19 nt, Artificial Sequence
  Description of Artificial Sequence: Synthetic oligonucleotide
uacaauaucaucaucuaua

SEQ ID NO: 3156568 - RNA, 19 nt, Artificial Sequence
  Description of Artificial Sequence: Synthetic oligonucleotide
uuaagaagaaugguuagcc

SEQ ID NO: 3156569 - RNA, 19 nt, Artificial Sequence
  Description of Artificial Sequence: Synthetic oligonucleotide
ugcaauuuaugaugaaagg

SEQ ID NO: 3156570 - RNA, 19 nt, Artificial Sequence
  Description of Artificial Sequence: Synthetic oligonucleotide
cauacaucaguuaagaaga

SEQ ID NO: 3156571 - RNA, 19 nt, Artificial Sequence
  Description of Artificial Sequence: Synthetic oligonucleotide
ucagauuugugauagggcu

SEQ ID NO: 3156572 - RNA, 19 nt, Artificial Sequence
  Description of Artificial Sequence: Synthetic oligonucleotide
aguauuaugaaaauauucu

SEQ ID NO: 3156573 - RNA, 19 nt, Artificial Sequence
  Description of Artificial Sequence: Synthetic oligonucleotide
auagucuguauugacauac

SEQ ID NO: 3156574 - RNA, 19 nt, Artificial Sequence
  Description of Artificial Sequence: Synthetic oligonucleotide
uuuagagacauuuccagaa

SEQ ID NO: 3156575 - RNA, 19 nt, Artificial Sequence
  Description of Artificial Sequence: Synthetic oligonucleotide
aaacucagauuugugauag

SEQ ID NO: 3156576 - RNA, 19 nt, Artificial Sequence
  Description of Artificial Sequence: Synthetic oligonucleotide
ucuggacugaugaauuugg

SEQ ID NO: 3156577 - RNA, 19 nt, Artificial Sequence
  Description of Artificial Sequence: Synthetic oligonucleotide
ugcccaaguauuuauuugg

SEQ ID NO: 3156578 - RNA, 19 nt, Artificial Sequence
  Description of Artificial Sequence: Synthetic oligonucleotide
gauagggcuuuauaaauug

SEQ ID NO: 3156579 - RNA, 19 nt, Artificial Sequence
  Description of Artificial Sequence: Synthetic oligonucleotide
aauaagaggccugaaauaa

SEQ ID NO: 3156580 - RNA, 19 nt, Artificial Sequence
  Description of Artificial Sequence: Synthetic oligonucleotide
uaaauaaaccaguuguuaa

SEQ ID NO: 3156581 - RNA, 19 nt, Artificial Sequence
  Description of Artificial Sequence: Synthetic oligonucleotide
guauuaugaaaauauucug

SEQ ID NO: 3156582 - RNA, 19 nt, Artificial Sequence
  Description of Artificial Sequence: Synthetic oligonucleotide
ccaguuguuaauaagaggc

SEQ ID NO: 3156583 - RNA, 19 nt, Artificial Sequence
  Description of Artificial Sequence: Synthetic oligonucleotide
aucaucuauacauauaaau

SEQ ID NO: 3156584 - RNA, 19 nt, Artificial Sequence
  Description of Artificial Sequence: Synthetic oligonucleotide
auugacauacaucaguuaa

SEQ ID NO: 3156585 - RNA, 19 nt, Artificial Sequence
  Description of Artificial Sequence: Synthetic oligonucleotide
caauuuaugaugaaaggca

SEQ ID NO: 3156586 - RNA, 19 nt, Artificial Sequence
  Description of Artificial Sequence: Synthetic oligonucleotide
uaaaccaguuguuaauaag

SEQ ID NO: 3156587 - RNA, 19 nt, Artificial Sequence
  Description of Artificial Sequence: Synthetic oligonucleotide
ggucauuaucugcaucauu

SEQ ID NO: 3156588 - RNA, 19 nt, Artificial Sequence
  Description of Artificial Sequence: Synthetic oligonucleotide
auaugcaaauguuacuuuu

SEQ ID NO: 3156589 - RNA, 19 nt, Artificial Sequence
  Description of Artificial Sequence: Synthetic oligonucleotide
uuaucugcaucauuauugu

SEQ ID NO: 3156590 - RNA, 19 nt, Artificial Sequence
  Description of Artificial Sequence: Synthetic oligonucleotide
cgcucuucaugaacuucug

SEQ ID NO: 3156591 - RNA, 19 nt, Artificial Sequence
  Description of Artificial Sequence: Synthetic oligonucleotide
ggcagucauucaagccuuu

SEQ ID NO: 3156592 - RNA, 19 nt, Artificial Sequence
  Description of Artificial Sequence: Synthetic oligonucleotide
cauucuggguucuaguccu

SEQ ID NO: 3156593 - RNA, 19 nt, Artificial Sequence
  Description of Artificial Sequence: Synthetic oligonucleotide
gauggugggcgaugugauu

SEQ ID NO: 3156594 - RNA, 19 nt, Artificial Sequence
  Description of Artificial Sequence: Synthetic oligonucleotide
ggcugaggccuucacccuu

SEQ ID NO: 3156595 - RNA, 19 nt, Artificial Sequence
  Description of Artificial Sequence: Synthetic oligonucleotide
cacaguggauccaauaaaa

SEQ ID NO: 3156596 - RNA, 19 nt, Artificial Sequence
  Description of Artificial Sequence: Synthetic oligonucleotide
gcaaauguuacuuuucaua

SEQ ID NO: 3156597 - RNA, 19 nt, Artificial Sequence
  Description of Artificial Sequence: Synthetic oligonucleotide
acaucaguucccugaucuu

SEQ ID NO: 3156598 - RNA, 19 nt, Artificial Sequence
  Description of Artificial Sequence: Synthetic oligonucleotide
gccauaauucccaagccuu

SEQ ID NO: 3156599 - RNA, 19 nt, Artificial Sequence
  Description of Artificial Sequence: Synthetic oligonucleotide
cuacgcauaugcaaauguu

SEQ ID NO: 3156600 - RNA, 19 nt, Artificial Sequence
  Description of Artificial Sequence: Synthetic oligonucleotide
cucuguggcagucauucaa

SEQ ID NO: 3156601 - RNA, 19 nt, Artificial Sequence
  Description of Artificial Sequence: Synthetic oligonucleotide
cauucaagccuuuucacaa

SEQ ID NO: 3156602 - RNA, 19 nt, Artificial Sequence
  Description of Artificial Sequence: Synthetic oligonucleotide
gccucaacaucaguucccu

SEQ ID NO: 3156603 - RNA, 19 nt, Artificial Sequence
  Description of Artificial Sequence: Synthetic oligonucleotide
ccacaguggauccaauaaa

SEQ ID NO: 3156604 - RNA, 19 nt, Artificial Sequence
  Description of Artificial Sequence: Synthetic oligonucleotide
augcaaauguuacuuuuca

SEQ ID NO: 3156605 - RNA, 19 nt, Artificial Sequence
  Description of Artificial Sequence: Synthetic oligonucleotide
ucauucaagccuuuucaca

SEQ ID NO: 3156606 - RNA, 19 nt, Artificial Sequence
  Description of Artificial Sequence: Synthetic oligonucleotide
gguucuaguccugcccugu

SEQ ID NO: 3156607 - RNA, 19 nt, Artificial Sequence
  Description of Artificial Sequence: Synthetic oligonucleotide
ggccuucacccuuuguuua

SEQ ID NO: 3156608 - RNA, 19 nt, Artificial Sequence
  Description of Artificial Sequence: Synthetic oligonucleotide
ucauauauaucuguccaca

SEQ ID NO: 3156609 - RNA, 19 nt, Artificial Sequence
  Description of Artificial Sequence: Synthetic oligonucleotide
ggauccaauaaaaguaaug

SEQ ID NO: 3156610 - RNA, 19 nt, Artificial Sequence
  Description of Artificial Sequence: Synthetic oligonucleotide
ccaugagccauaauuccca

SEQ ID NO: 3156611 - RNA, 19 nt, Artificial Sequence
  Description of Artificial Sequence: Synthetic oligonucleotide
caaguuaugagacaaucaa

SEQ ID NO: 3156612 - RNA, 19 nt, Artificial Sequence
  Description of Artificial Sequence: Synthetic oligonucleotide
ccauaauucccaagccuuc

SEQ ID NO: 3156613 - RNA, 19 nt, Artificial Sequence
  Description of Artificial Sequence: Synthetic oligonucleotide
cuuuucauauauaucuguc

SEQ ID NO: 3156614 - RNA, 19 nt, Artificial Sequence
  Description of Artificial Sequence: Synthetic oligonucleotide
ccaaguuaugagacaauca

SEQ ID NO: 3156615 - RNA, 19 nt, Artificial Sequence
  Description of Artificial Sequence: Synthetic oligonucleotide
guuacuuuucauauauauc

SEQ ID NO: 3156616 - RNA, 19 nt, Artificial Sequence
  Description of Artificial Sequence: Synthetic oligonucleotide
ccaccucuguggcagucau

SEQ ID NO: 3156617 - RNA, 19 nt, Artificial Sequence
  Description of Artificial Sequence: Synthetic oligonucleotide
ccucuguggcagucauuca

SEQ ID NO: 3156618 - RNA, 19 nt, Artificial Sequence
  Description of Artificial Sequence: Synthetic oligonucleotide
uguuacuuuucauauauau

SEQ ID NO: 3156619 - RNA, 19 nt, Artificial Sequence
  Description of Artificial Sequence: Synthetic oligonucleotide
guguccucauggucauuau

SEQ ID NO: 3156620 - RNA, 19 nt, Artificial Sequence
  Description of Artificial Sequence: Synthetic oligonucleotide
cucuucaugaacuucuguu

SEQ ID NO: 3156621 - RNA, 19 nt, Artificial Sequence
  Description of Artificial Sequence: Synthetic oligonucleotide
caguggauccaauaaaagu

SEQ ID NO: 3156622 - RNA, 19 nt, Artificial Sequence
  Description of Artificial Sequence: Synthetic oligonucleotide
acuucuguugccuggguuu

SEQ ID NO: 3156623 - RNA, 19 nt, Artificial Sequence
  Description of Artificial Sequence: Synthetic oligonucleotide
gcagucauucaagccuuuu

SEQ ID NO: 3156624 - RNA, 19 nt, Artificial Sequence
  Description of Artificial Sequence: Synthetic oligonucleotide
ggugauuguucgagucagu

SEQ ID NO: 3156625 - RNA, 19 nt, Artificial Sequence
  Description of Artificial Sequence: Synthetic oligonucleotide
gcaucauuauugucuccac

SEQ ID NO: 3156626 - RNA, 19 nt, Artificial Sequence
  Description of Artificial Sequence: Synthetic oligonucleotide
gucauuaucugcaucauua

SEQ ID NO: 3156627 - RNA, 19 nt, Artificial Sequence
  Description of Artificial Sequence: Synthetic oligonucleotide
acuuuucauauauaucugu

SEQ ID NO: 3156628 - RNA, 19 nt, Artificial Sequence
  Description of Artificial Sequence: Synthetic oligonucleotide
ucuucaguguccucauggu

SEQ ID NO: 3156629 - RNA, 19 nt, Artificial Sequence
  Description of Artificial Sequence: Synthetic oligonucleotide
auauauaucuguccacagu

SEQ ID NO: 3156630 - RNA, 19 nt, Artificial Sequence
  Description of Artificial Sequence: Synthetic oligonucleotide
uguucaacgcgcucuucau

SEQ ID NO: 3156631 - RNA, 19 nt, Artificial Sequence
  Description of Artificial Sequence: Synthetic oligonucleotide
ccccaaguuaugagacaau

SEQ ID NO: 3156632 - RNA, 19 nt, Artificial Sequence
  Description of Artificial Sequence: Synthetic oligonucleotide
ccagaaggggugauuguuc

SEQ ID NO: 3156633 - RNA, 19 nt, Artificial Sequence
  Description of Artificial Sequence: Synthetic oligonucleotide
cccacaacucagcuguugu

SEQ ID NO: 3156634 - RNA, 19 nt, Artificial Sequence
  Description of Artificial Sequence: Synthetic oligonucleotide
aaugaugcagauaaugacc

SEQ ID NO: 3156635 - RNA, 19 nt, Artificial Sequence
  Description of Artificial Sequence: Synthetic oligonucleotide
aaaaguaacauuugcauau

SEQ ID NO: 3156636 - RNA, 19 nt, Artificial Sequence
  Description of Artificial Sequence: Synthetic oligonucleotide
acaauaaugaugcagauaa

SEQ ID NO: 3156637 - RNA, 19 nt, Artificial Sequence
  Description of Artificial Sequence: Synthetic oligonucleotide
cagaaguucaugaagagcg

SEQ ID NO: 3156638 - RNA, 19 nt, Artificial Sequence
  Description of Artificial Sequence: Synthetic oligonucleotide
aaaggcuugaaugacugcc

SEQ ID NO: 3156639 - RNA, 19 nt, Artificial Sequence
  Description of Artificial Sequence: Synthetic oligonucleotide
aggacuagaacccagaaug

SEQ ID NO: 3156640 - RNA, 19 nt, Artificial Sequence
  Description of Artificial Sequence: Synthetic oligonucleotide
aaucacaucgcccaccauc

SEQ ID NO: 3156641 - RNA, 19 nt, Artificial Sequence
  Description of Artificial Sequence: Synthetic oligonucleotide
aagggugaaggccucagcc

SEQ ID NO: 3156642 - RNA, 19 nt, Artificial Sequence
  Description of Artificial Sequence: Synthetic oligonucleotide
uuuuauuggauccacugug

SEQ ID NO: 3156643 - RNA, 19 nt, Artificial Sequence
  Description of Artificial Sequence: Synthetic oligonucleotide
uaugaaaaguaacauuugc

SEQ ID NO: 3156644 - RNA, 19 nt, Artificial Sequence
  Description of Artificial Sequence: Synthetic oligonucleotide
aagaucagggaacugaugu

SEQ ID NO: 3156645 - RNA, 19 nt, Artificial Sequence
  Description of Artificial Sequence: Synthetic oligonucleotide
aaggcuugggaauuauggc

SEQ ID NO: 3156646 - RNA, 19 nt, Artificial Sequence
  Description of Artificial Sequence: Synthetic oligonucleotide
aacauuugcauaugcguag

SEQ ID NO: 3156647 - RNA, 19 nt, Artificial Sequence
  Description of Artificial Sequence: Synthetic oligonucleotide
uugaaugacugccacagag

SEQ ID NO: 3156648 - RNA, 19 nt, Artificial Sequence
  Description of Artificial Sequence: Synthetic oligonucleotide
uugugaaaaggcuugaaug

SEQ ID NO: 3156649 - RNA, 19 nt, Artificial Sequence
  Description of Artificial Sequence: Synthetic oligonucleotide
agggaacugauguugaggc

SEQ ID NO: 3156650 - RNA, 19 nt, Artificial Sequence
  Description of Artificial Sequence: Synthetic oligonucleotide
uuuauuggauccacugugg

SEQ ID NO: 3156651 - RNA, 19 nt, Artificial Sequence
  Description of Artificial Sequence: Synthetic oligonucleotide
ugaaaaguaacauuugcau

SEQ ID NO: 3156652 - RNA, 19 nt, Artificial Sequence
  Description of Artificial Sequence: Synthetic oligonucleotide
ugugaaaaggcuugaauga

SEQ ID NO: 3156653 - RNA, 19 nt, Artificial Sequence
  Description of Artificial Sequence: Synthetic oligonucleotide
acagggcaggacuagaacc

SEQ ID NO: 3156654 - RNA, 19 nt, Artificial Sequence
  Description of Artificial Sequence: Synthetic oligonucleotide
uaaacaaagggugaaggcc

SEQ ID NO: 3156655 - RNA, 19 nt, Artificial Sequence
  Description of Artificial Sequence: Synthetic oligonucleotide
uguggacagauauauauga

SEQ ID NO: 3156656 - RNA, 19 nt, Artificial Sequence
  Description of Artificial Sequence: Synthetic oligonucleotide
cauuacuuuuauuggaucc

SEQ ID NO: 3156657 - RNA, 19 nt, Artificial Sequence
  Description of Artificial Sequence: Synthetic oligonucleotide
ugggaauuauggcucaugg

SEQ ID NO: 3156658 - RNA, 19 nt, Artificial Sequence
  Description of Artificial Sequence: Synthetic oligonucleotide
uugauugucucauaacuug

SEQ ID NO: 3156659 - RNA, 19 nt, Artificial Sequence
  Description of Artificial Sequence: Synthetic oligonucleotide
gaaggcuugggaauuaugg

SEQ ID NO: 3156660 - RNA, 19 nt, Artificial Sequence
  Description of Artificial Sequence: Synthetic oligonucleotide
gacagauauauaugaaaag

SEQ ID NO: 3156661 - RNA, 19 nt, Artificial Sequence
  Description of Artificial Sequence: Synthetic oligonucleotide
ugauugucucauaacuugg

SEQ ID NO: 3156662 - RNA, 19 nt, Artificial Sequence
  Description of Artificial Sequence: Synthetic oligonucleotide
gauauauaugaaaaguaac

SEQ ID NO: 3156663 - RNA, 19 nt, Artificial Sequence
  Description of Artificial Sequence: Synthetic oligonucleotide
augacugccacagaggugg

SEQ ID NO: 3156664 - RNA, 19 nt, Artificial Sequence
  Description of Artificial Sequence: Synthetic oligonucleotide
ugaaugacugccacagagg

SEQ ID NO: 3156665 - RNA, 19 nt, Artificial Sequence
  Description of Artificial Sequence: Synthetic oligonucleotide
auauauaugaaaaguaaca

SEQ ID NO: 3156666 - RNA, 19 nt, Artificial Sequence
  Description of Artificial Sequence: Synthetic oligonucleotide
auaaugaccaugaggacac

SEQ ID NO: 3156667 - RNA, 19 nt, Artificial Sequence
  Description of Artificial Sequence: Synthetic oligonucleotide
aacagaaguucaugaagag

SEQ ID NO: 3156668 - RNA, 19 nt, Artificial Sequence
  Description of Artificial Sequence: Synthetic oligonucleotide
acuuuuauuggauccacug

SEQ ID NO: 3156669 - RNA, 19 nt, Artificial Sequence
  Description of Artificial Sequence: Synthetic oligonucleotide
aaacccaggcaacagaagu

SEQ ID NO: 3156670 - RNA, 19 nt, Artificial Sequence
  Description of Artificial Sequence: Synthetic oligonucleotide
aaaaggcuugaaugacugc

SEQ ID NO: 3156671 - RNA, 19 nt, Artificial Sequence
  Description of Artificial Sequence: Synthetic oligonucleotide
acugacucgaacaaucacc

SEQ ID NO: 3156672 - RNA, 19 nt, Artificial Sequence
  Description of Artificial Sequence: Synthetic oligonucleotide
guggagacaauaaugaugc

SEQ ID NO: 3156673 - RNA, 19 nt, Artificial Sequence
  Description of Artificial Sequence: Synthetic oligonucleotide
uaaugaugcagauaaugac

SEQ ID NO: 3156674 - RNA, 19 nt, Artificial Sequence
  Description of Artificial Sequence: Synthetic oligonucleotide
acagauauauaugaaaagu

SEQ ID NO: 3156675 - RNA, 19 nt, Artificial Sequence
  Description of Artificial Sequence: Synthetic oligonucleotide
accaugaggacacugaaga

SEQ ID NO: 3156676 - RNA, 19 nt, Artificial Sequence
  Description of Artificial Sequence: Synthetic oligonucleotide
acuguggacagauauauau

SEQ ID NO: 3156677 - RNA, 19 nt, Artificial Sequence
  Description of Artificial Sequence: Synthetic oligonucleotide
augaagagcgcguugaaca

SEQ ID NO: 3156678 - RNA, 19 nt, Artificial Sequence
  Description of Artificial Sequence: Synthetic oligonucleotide
auugucucauaacuugggg

SEQ ID NO: 3156679 - RNA, 19 nt, Artificial Sequence
  Description of Artificial Sequence: Synthetic oligonucleotide
gaacaaucaccccuucugg

SEQ ID NO: 3156680 - RNA, 19 nt, Artificial Sequence
  Description of Artificial Sequence: Synthetic oligonucleotide
acaacagcugaguuguggg

SEQ ID NO: 3156681 - RNA, 19 nt, Artificial Sequence
  Description of Artificial Sequence: Synthetic oligonucleotide
gguugucauuaccaucauu

SEQ ID NO: 3156682 - RNA, 19 nt, Artificial Sequence
  Description of Artificial Sequence: Synthetic oligonucleotide
ccaucguggauucaauaaa

SEQ ID NO: 3156683 - RNA, 19 nt, Artificial Sequence
  Description of Artificial Sequence: Synthetic oligonucleotide
cgucuuuacauuuaguaga

SEQ ID NO: 3156684 - RNA, 19 nt, Artificial Sequence
  Description of Artificial Sequence: Synthetic oligonucleotide
cuauauagagguuaacacu

SEQ ID NO: 3156685 - RNA, 19 nt, Artificial Sequence
  Description of Artificial Sequence: Synthetic oligonucleotide
cucccuauauagagguuaa

SEQ ID NO: 3156686 - RNA, 19 nt, Artificial Sequence
  Description of Artificial Sequence: Synthetic oligonucleotide
gcuggucgucuuuacauuu

SEQ ID NO: 3156687 - RNA, 19 nt, Artificial Sequence
  Description of Artificial Sequence: Synthetic oligonucleotide
guuucugcuggucgucuuu

SEQ ID NO: 3156688 - RNA, 19 nt, Artificial Sequence
  Description of Artificial Sequence: Synthetic oligonucleotide
uguucaauacgcucuucuu

SEQ ID NO: 3156689 - RNA, 19 nt, Artificial Sequence
  Description of Artificial Sequence: Synthetic oligonucleotide
gauucuggcuuuugguccu

SEQ ID NO: 3156690 - RNA, 19 nt, Artificial Sequence
  Description of Artificial Sequence: Synthetic oligonucleotide
ggcuuuugguccugacaug

SEQ ID NO: 3156691 - RNA, 19 nt, Artificial Sequence
  Description of Artificial Sequence: Synthetic oligonucleotide
cgcccugguccucagcauc

SEQ ID NO: 3156692 - RNA, 19 nt, Artificial Sequence
  Description of Artificial Sequence: Synthetic oligonucleotide
ccaucauugcugucgucuc

SEQ ID NO: 3156693 - RNA, 19 nt, Artificial Sequence
  Description of Artificial Sequence: Synthetic oligonucleotide
cccaaacuaugaaagaauc

SEQ ID NO: 3156694 - RNA, 19 nt, Artificial Sequence
  Description of Artificial Sequence: Synthetic oligonucleotide
ggucgucuuuacauuuagu

SEQ ID NO: 3156695 - RNA, 19 nt, Artificial Sequence
  Description of Artificial Sequence: Synthetic oligonucleotide
ucugcuggucgucuuuaca

SEQ ID NO: 3156696 - RNA, 19 nt, Artificial Sequence
  Description of Artificial Sequence: Synthetic oligonucleotide
ccaugaaccacacuucuca

SEQ ID NO: 3156697 - RNA, 19 nt, Artificial Sequence
  Description of Artificial Sequence: Synthetic oligonucleotide
ccuuacuccucccuauaua

SEQ ID NO: 3156698 - RNA, 19 nt, Artificial Sequence
  Description of Artificial Sequence: Synthetic oligonucleotide
ccucaugguugucauuacc

SEQ ID NO: 3156699 - RNA, 19 nt, Artificial Sequence
  Description of Artificial Sequence: Synthetic oligonucleotide
gguuucugcuggucgucuu

SEQ ID NO: 3156700 - RNA, 19 nt, Artificial Sequence
  Description of Artificial Sequence: Synthetic oligonucleotide
gaaucaaggaagaauauga

SEQ ID NO: 3156701 - RNA, 19 nt, Artificial Sequence
  Description of Artificial Sequence: Synthetic oligonucleotide
gcuuuugguccugacaugu

SEQ ID NO: 3156702 - RNA, 19 nt, Artificial Sequence
  Description of Artificial Sequence: Synthetic oligonucleotide
ucgucuccauuaugguuuc

SEQ ID NO: 3156703 - RNA, 19 nt, Artificial Sequence
  Description of Artificial Sequence: Synthetic oligonucleotide
gcuccuuacuccucccuau

SEQ ID NO: 3156704 - RNA, 19 nt, Artificial Sequence
  Description of Artificial Sequence: Synthetic oligonucleotide
gcauccucaugguugucau

SEQ ID NO: 3156705 - RNA, 19 nt, Artificial Sequence
  Description of Artificial Sequence: Synthetic oligonucleotide
cauccucaugguugucauu

SEQ ID NO: 3156706 - RNA, 19 nt, Artificial Sequence
  Description of Artificial Sequence: Synthetic oligonucleotide
cccuauauagagguuaaca

SEQ ID NO: 3156707 - RNA, 19 nt, Artificial Sequence
  Description of Artificial Sequence: Synthetic oligonucleotide
caucguggauucaauaaag

SEQ ID NO: 3156708 - RNA, 19 nt, Artificial Sequence
  Description of Artificial Sequence: Synthetic oligonucleotide
ccuacucugugaagucuag

SEQ ID NO: 3156709 - RNA, 19 nt, Artificial Sequence
  Description of Artificial Sequence: Synthetic oligonucleotide
cuucuugacuccuaccaac

SEQ ID NO: 3156710 - RNA, 19 nt, Artificial Sequence
  Description of Artificial Sequence: Synthetic oligonucleotide
aguagaggauucuggcuuu

SEQ ID NO: 3156711 - RNA, 19 nt, Artificial Sequence
  Description of Artificial Sequence: Synthetic oligonucleotide
gguuaacacucacccaucu

SEQ ID NO: 3156712 - RNA, 19 nt, Artificial Sequence
  Description of Artificial Sequence: Synthetic oligonucleotide
guagaggauucuggcuuuu

SEQ ID NO: 3156713 - RNA, 19 nt, Artificial Sequence
  Description of Artificial Sequence: Synthetic oligonucleotide
uccucaugguugucauuac

SEQ ID NO: 3156714 - RNA, 19 nt, Artificial Sequence
  Description of Artificial Sequence: Synthetic oligonucleotide
caccaugaaccacacuucu

SEQ ID NO: 3156715 - RNA, 19 nt, Artificial Sequence
  Description of Artificial Sequence: Synthetic oligonucleotide
uggucgucuuuacauuuag

SEQ ID NO: 3156716 - RNA, 19 nt, Artificial Sequence
  Description of Artificial Sequence: Synthetic oligonucleotide
ugcuggucgucuuuacauu

SEQ ID NO: 3156717 - RNA, 19 nt, Artificial Sequence
  Description of Artificial Sequence: Synthetic oligonucleotide
cuuuacauuuaguagagga

SEQ ID NO: 3156718 - RNA, 19 nt, Artificial Sequence
  Description of Artificial Sequence: Synthetic oligonucleotide
gucuuuacauuuaguagag

SEQ ID NO: 3156719 - RNA, 19 nt, Artificial Sequence
  Description of Artificial Sequence: Synthetic oligonucleotide
cauuaugguuucugcuggu

SEQ ID NO: 3156720 - RNA, 19 nt, Artificial Sequence
  Description of Artificial Sequence: Synthetic oligonucleotide
auauagagguuaacacuca

SEQ ID NO: 3156721 - RNA, 19 nt, Artificial Sequence
  Description of Artificial Sequence: Synthetic oligonucleotide
ucguggauucaauaaagua

SEQ ID NO: 3156722 - RNA, 19 nt, Artificial Sequence
  Description of Artificial Sequence: Synthetic oligonucleotide
acagcugcuuugcuccuua

SEQ ID NO: 3156723 - RNA, 19 nt, Artificial Sequence
  Description of Artificial Sequence: Synthetic oligonucleotide
cuaugaaagaaucaaggaa

SEQ ID NO: 3156724 - RNA, 19 nt, Artificial Sequence
  Description of Artificial Sequence: Synthetic oligonucleotide
gauggugggcgaugugacu

SEQ ID NO: 3156725 - RNA, 19 nt, Artificial Sequence
  Description of Artificial Sequence: Synthetic oligonucleotide
cuggucgucuuuacauuua

SEQ ID NO: 3156726 - RNA, 19 nt, Artificial Sequence
  Description of Artificial Sequence: Synthetic oligonucleotide
ccccaaacuaugaaagaau

SEQ ID NO: 3156727 - RNA, 19 nt, Artificial Sequence
  Description of Artificial Sequence: Synthetic oligonucleotide
gccucaacaucagcgcccu

SEQ ID NO: 3156728 - RNA, 19 nt, Artificial Sequence
  Description of Artificial Sequence: Synthetic oligonucleotide
aaugaugguaaugacaacc

SEQ ID NO: 3156729 - RNA, 19 nt, Artificial Sequence
  Description of Artificial Sequence: Synthetic oligonucleotide
uuuauugaauccacgaugg

SEQ ID NO: 3156730 - RNA, 19 nt, Artificial Sequence
  Description of Artificial Sequence: Synthetic oligonucleotide
ucuacuaaauguaaagacg

SEQ ID NO: 3156731 - RNA, 19 nt, Artificial Sequence
  Description of Artificial Sequence: Synthetic oligonucleotide
aguguuaaccucuauauag

SEQ ID NO: 3156732 - RNA, 19 nt, Artificial Sequence
  Description of Artificial Sequence: Synthetic oligonucleotide
uuaaccucuauauagggag

SEQ ID NO: 3156733 - RNA, 19 nt, Artificial Sequence
  Description of Artificial Sequence: Synthetic oligonucleotide
aaauguaaagacgaccagc

SEQ ID NO: 3156734 - RNA, 19 nt, Artificial Sequence
  Description of Artificial Sequence: Synthetic oligonucleotide
aaagacgaccagcagaaac

SEQ ID NO: 3156735 - RNA, 19 nt, Artificial Sequence
  Description of Artificial Sequence: Synthetic oligonucleotide
aagaagagcguauugaaca

SEQ ID NO: 3156736 - RNA, 19 nt, Artificial Sequence
  Description of Artificial Sequence: Synthetic oligonucleotide
aggaccaaaagccagaauc

SEQ ID NO: 3156737 - RNA, 19 nt, Artificial Sequence
  Description of Artificial Sequence: Synthetic oligonucleotide
caugucaggaccaaaagcc

SEQ ID NO: 3156738 - RNA, 19 nt, Artificial Sequence
  Description of Artificial Sequence: Synthetic oligonucleotide
gaugcugaggaccagggcg

SEQ ID NO: 3156739 - RNA, 19 nt, Artificial Sequence
  Description of Artificial Sequence: Synthetic oligonucleotide
gagacgacagcaaugaugg

SEQ ID NO: 3156740 - RNA, 19 nt, Artificial Sequence
  Description of Artificial Sequence: Synthetic oligonucleotide
gauucuuucauaguuuggg

SEQ ID NO: 3156741 - RNA, 19 nt, Artificial Sequence
  Description of Artificial Sequence: Synthetic oligonucleotide
acuaaauguaaagacgacc

SEQ ID NO: 3156742 - RNA, 19 nt, Artificial Sequence
  Description of Artificial Sequence: Synthetic oligonucleotide
uguaaagacgaccagcaga

SEQ ID NO: 3156743 - RNA, 19 nt, Artificial Sequence
  Description of Artificial Sequence: Synthetic oligonucleotide
ugagaagugugguucaugg

SEQ ID NO: 3156744 - RNA, 19 nt, Artificial Sequence
  Description of Artificial Sequence: Synthetic oligonucleotide
uauauagggaggaguaagg

SEQ ID NO: 3156745 - RNA, 19 nt, Artificial Sequence
  Description of Artificial Sequence: Synthetic oligonucleotide
gguaaugacaaccaugagg

SEQ ID NO: 3156746 - RNA, 19 nt, Artificial Sequence
  Description of Artificial Sequence: Synthetic oligonucleotide
aagacgaccagcagaaacc

SEQ ID NO: 3156747 - RNA, 19 nt, Artificial Sequence
  Description of Artificial Sequence: Synthetic oligonucleotide
ucauauucuuccuugauuc

SEQ ID NO: 3156748 - RNA, 19 nt, Artificial Sequence
  Description of Artificial Sequence: Synthetic oligonucleotide
acaugucaggaccaaaagc

SEQ ID NO: 3156749 - RNA, 19 nt, Artificial Sequence
  Description of Artificial Sequence: Synthetic oligonucleotide
gaaaccauaauggagacga

SEQ ID NO: 3156750 - RNA, 19 nt, Artificial Sequence
  Description of Artificial Sequence: Synthetic oligonucleotide
auagggaggaguaaggagc

SEQ ID NO: 3156751 - RNA, 19 nt, Artificial Sequence
  Description of Artificial Sequence: Synthetic oligonucleotide
augacaaccaugaggaugc

SEQ ID NO: 3156752 - RNA, 19 nt, Artificial Sequence
  Description of Artificial Sequence: Synthetic oligonucleotide
aaugacaaccaugaggaug

SEQ ID NO: 3156753 - RNA, 19 nt, Artificial Sequence
  Description of Artificial Sequence: Synthetic oligonucleotide
uguuaaccucuauauaggg

SEQ ID NO: 3156754 - RNA, 19 nt, Artificial Sequence
  Description of Artificial Sequence: Synthetic oligonucleotide
cuuuauugaauccacgaug

SEQ ID NO: 3156755 - RNA, 19 nt, Artificial Sequence
  Description of Artificial Sequence: Synthetic oligonucleotide
cuagacuucacagaguagg

SEQ ID NO: 3156756 - RNA, 19 nt, Artificial Sequence
  Description of Artificial Sequence: Synthetic oligonucleotide
guugguaggagucaagaag

SEQ ID NO: 3156757 - RNA, 19 nt, Artificial Sequence
  Description of Artificial Sequence: Synthetic oligonucleotide
aaagccagaauccucuacu

SEQ ID NO: 3156758 - RNA, 19 nt, Artificial Sequence
  Description of Artificial Sequence: Synthetic oligonucleotide
agaugggugaguguuaacc

SEQ ID NO: 3156759 - RNA, 19 nt, Artificial Sequence
  Description of Artificial Sequence: Synthetic oligonucleotide
aaaagccagaauccucuac

SEQ ID NO: 3156760 - RNA, 19 nt, Artificial Sequence
  Description of Artificial Sequence: Synthetic oligonucleotide
guaaugacaaccaugagga

SEQ ID NO: 3156761 - RNA, 19 nt, Artificial Sequence
  Description of Artificial Sequence: Synthetic oligonucleotide
agaagugugguucauggug

SEQ ID NO: 3156762 - RNA, 19 nt, Artificial Sequence
  Description of Artificial Sequence: Synthetic oligonucleotide
cuaaauguaaagacgacca

SEQ ID NO: 3156763 - RNA, 19 nt, Artificial Sequence
  Description of Artificial Sequence: Synthetic oligonucleotide
aauguaaagacgaccagca

SEQ ID NO: 3156764 - RNA, 19 nt, Artificial Sequence
  Description of Artificial Sequence: Synthetic oligonucleotide
uccucuacuaaauguaaag

SEQ ID NO: 3156765 - RNA, 19 nt, Artificial Sequence
  Description of Artificial Sequence: Synthetic oligonucleotide
cucuacuaaauguaaagac

SEQ ID NO: 3156766 - RNA, 19 nt, Artificial Sequence
  Description of Artificial Sequence: Synthetic oligonucleotide
accagcagaaaccauaaug

SEQ ID NO: 3156767 - RNA, 19 nt, Artificial Sequence
  Description of Artificial Sequence: Synthetic oligonucleotide
ugaguguuaaccucuauau

SEQ ID NO: 3156768 - RNA, 19 nt, Artificial Sequence
  Description of Artificial Sequence: Synthetic oligonucleotide
uacuuuauugaauccacga

SEQ ID NO: 3156769 - RNA, 19 nt, Artificial Sequence
  Description of Artificial Sequence: Synthetic oligonucleotide
uaaggagcaaagcagcugu

SEQ ID NO: 3156770 - RNA, 19 nt, Artificial Sequence
  Description of Artificial Sequence: Synthetic oligonucleotide
uuccuugauucuuucauag

SEQ ID NO: 3156771 - RNA, 19 nt, Artificial Sequence
  Description of Artificial Sequence: Synthetic oligonucleotide
agucacaucgcccaccauc

SEQ ID NO: 3156772 - RNA, 19 nt, Artificial Sequence
  Description of Artificial Sequence: Synthetic oligonucleotide
uaaauguaaagacgaccag

SEQ ID NO: 3156773 - RNA, 19 nt, Artificial Sequence
  Description of Artificial Sequence: Synthetic oligonucleotide
auucuuucauaguuugggg

SEQ ID NO: 3156774 - RNA, 19 nt, Artificial Sequence
  Description of Artificial Sequence: Synthetic oligonucleotide
agggcgcugauguugaggc

SEQ ID NO: 3156775 - RNA, 19 nt, Artificial Sequence
  Description of Artificial Sequence: Synthetic oligonucleotide
guguauuguguacaagcca

SEQ ID NO: 3156776 - RNA, 19 nt, Artificial Sequence
  Description of Artificial Sequence: Synthetic oligonucleotide
guauuguguacaagccaga

SEQ ID NO: 3156777 - RNA, 19 nt, Artificial Sequence
  Description of Artificial Sequence: Synthetic oligonucleotide
gcagcuucacugaugugcu

SEQ ID NO: 3156778 - RNA, 19 nt, Artificial Sequence
  Description of Artificial Sequence: Synthetic oligonucleotide
gaaacaaggccaggacauu

SEQ ID NO: 3156779 - RNA, 19 nt, Artificial Sequence
  Description of Artificial Sequence: Synthetic oligonucleotide
gaucuggaucauaacugga

SEQ ID NO: 3156780 - RNA, 19 nt, Artificial Sequence
  Description of Artificial Sequence: Synthetic oligonucleotide
cuuuaugccggaaagaacu

SEQ ID NO: 3156781 - RNA, 19 nt, Artificial Sequence
  Description of Artificial Sequence: Synthetic oligonucleotide
cuuccugaaauaccucaau

SEQ ID NO: 3156782 - RNA, 19 nt, Artificial Sequence
  Description of Artificial Sequence: Synthetic oligonucleotide
caauuauguguucuuuuca

SEQ ID NO: 3156783 - RNA, 19 nt, Artificial Sequence
  Description of Artificial Sequence: Synthetic oligonucleotide
ccgccaguauugacgaguu

SEQ ID NO: 3156784 - RNA, 19 nt, Artificial Sequence
  Description of Artificial Sequence: Synthetic oligonucleotide
cgccaguauugacgaguuu

SEQ ID NO: 3156785 - RNA, 19 nt, Artificial Sequence
  Description of Artificial Sequence: Synthetic oligonucleotide
gccaguauugacgaguuuu

SEQ ID NO: 3156786 - RNA, 19 nt, Artificial Sequence
  Description of Artificial Sequence: Synthetic oligonucleotide
ccugaggaacacacugaga

SEQ ID NO: 3156787 - RNA, 19 nt, Artificial Sequence
  Description of Artificial Sequence: Synthetic oligonucleotide
cugagagaugcuucaucau

SEQ ID NO: 3156788 - RNA, 19 nt, Artificial Sequence
  Description of Artificial Sequence: Synthetic oligonucleotide
gaugcuucaucauugaaaa

SEQ ID NO: 3156789 - RNA, 19 nt, Artificial Sequence
  Description of Artificial Sequence: Synthetic oligonucleotide
cccgaggaagaacacagaa

SEQ ID NO: 3156790 - RNA, 19 nt, Artificial Sequence
  Description of Artificial Sequence: Synthetic oligonucleotide
ccgaggaagaacacagaaa

SEQ ID NO: 3156791 - RNA, 19 nt, Artificial Sequence
  Description of Artificial Sequence: Synthetic oligonucleotide
cucggggaacuauucuaau

SEQ ID NO: 3156792 - RNA, 19 nt, Artificial Sequence
  Description of Artificial Sequence: Synthetic oligonucleotide
cggggaacuauucuaauga

SEQ ID NO: 3156793 - RNA, 19 nt, Artificial Sequence
  Description of Artificial Sequence: Synthetic oligonucleotide
cagcaguggagaagucguu

SEQ ID NO: 3156794 - RNA, 19 nt, Artificial Sequence
  Description of Artificial Sequence: Synthetic oligonucleotide
gagaagucguucccuuucu

SEQ ID NO: 3156795 - RNA, 19 nt, Artificial Sequence
  Description of Artificial Sequence: Synthetic oligonucleotide
gauuguuugguauuuucga

SEQ ID NO: 3156796 - RNA, 19 nt, Artificial Sequence
  Description of Artificial Sequence: Synthetic oligonucleotide
guuugguauuuucgagaau

SEQ ID NO: 3156797 - RNA, 19 nt, Artificial Sequence
  Description of Artificial Sequence: Synthetic oligonucleotide
gguauuuucgagaauagcu

SEQ ID NO: 3156798 - RNA, 19 nt, Artificial Sequence
  Description of Artificial Sequence: Synthetic oligonucleotide
guauuuucgagaauagcuu

SEQ ID NO: 3156799 - RNA, 19 nt, Artificial Sequence
  Description of Artificial Sequence: Synthetic oligonucleotide
gaugugggguuggugaaua

SEQ ID NO: 3156800 - RNA, 19 nt, Artificial Sequence
  Description of Artificial Sequence: Synthetic oligonucleotide
cuaugggcugccguuuugu

SEQ ID NO: 3156801 - RNA, 19 nt, Artificial Sequence
  Description of Artificial Sequence: Synthetic oligonucleotide
cuuacagaagcuucucagu

SEQ ID NO: 3156802 - RNA, 19 nt, Artificial Sequence
  Description of Artificial Sequence: Synthetic oligonucleotide
uggcuuguacacaauacac

SEQ ID NO: 3156803 - RNA, 19 nt, Artificial Sequence
  Description of Artificial Sequence: Synthetic oligonucleotide
ucuggcuuguacacaauac

SEQ ID NO: 3156804 - RNA, 19 nt, Artificial Sequence
  Description of Artificial Sequence: Synthetic oligonucleotide
agcacaucagugaagcugc

SEQ ID NO: 3156805 - RNA, 19 nt, Artificial Sequence
  Description of Artificial Sequence: Synthetic oligonucleotide
aauguccuggccuuguuuc

SEQ ID NO: 3156806 - RNA, 19 nt, Artificial Sequence
  Description of Artificial Sequence: Synthetic oligonucleotide
uccaguuaugauccagauc

SEQ ID NO: 3156807 - RNA, 19 nt, Artificial Sequence
  Description of Artificial Sequence: Synthetic oligonucleotide
aguucuuuccggcauaaag

SEQ ID NO: 3156808 - RNA, 19 nt, Artificial Sequence
  Description of Artificial Sequence: Synthetic oligonucleotide
auugagguauuucaggaag

SEQ ID NO: 3156809 - RNA, 19 nt, Artificial Sequence
  Description of Artificial Sequence: Synthetic oligonucleotide
ugaaaagaacacauaauug

SEQ ID NO: 3156810 - RNA, 19 nt, Artificial Sequence
  Description of Artificial Sequence: Synthetic oligonucleotide
aacucgucaauacuggcgg

SEQ ID NO: 3156811 - RNA, 19 nt, Artificial Sequence
  Description of Artificial Sequence: Synthetic oligonucleotide
aaacucgucaauacuggcg

SEQ ID NO: 3156812 - RNA, 19 nt, Artificial Sequence
  Description of Artificial Sequence: Synthetic oligonucleotide
aaaacucgucaauacuggc

SEQ ID NO: 3156813 - RNA, 19 nt, Artificial Sequence
  Description of Artificial Sequence: Synthetic oligonucleotide
ucucaguguguuccucagg

SEQ ID NO: 3156814 - RNA, 19 nt, Artificial Sequence
  Description of Artificial Sequence: Synthetic oligonucleotide
augaugaagcaucucucag

SEQ ID NO: 3156815 - RNA, 19 nt, Artificial Sequence
  Description of Artificial Sequence: Synthetic oligonucleotide
uuuucaaugaugaagcauc

SEQ ID NO: 3156816 - RNA, 19 nt, Artificial Sequence
  Description of Artificial Sequence: Synthetic oligonucleotide
uucuguguucuuccucggg

SEQ ID NO: 3156817 - RNA, 19 nt, Artificial Sequence
  Description of Artificial Sequence: Synthetic oligonucleotide
uuucuguguucuuccucgg

SEQ ID NO: 3156818 - RNA, 19 nt, Artificial Sequence
  Description of Artificial Sequence: Synthetic oligonucleotide
auuagaauaguuccccgag

SEQ ID NO: 3156819 - RNA, 19 nt, Artificial Sequence
  Description of Artificial Sequence: Synthetic oligonucleotide
ucauuagaauaguuccccg

SEQ ID NO: 3156820 - RNA, 19 nt, Artificial Sequence
  Description of Artificial Sequence: Synthetic oligonucleotide
aacgacuucuccacugcug

SEQ ID NO: 3156821 - RNA, 19 nt, Artificial Sequence
  Description of Artificial Sequence: Synthetic oligonucleotide
agaaagggaacgacuucuc

SEQ ID NO: 3156822 - RNA, 19 nt, Artificial Sequence
  Description of Artificial Sequence: Synthetic oligonucleotide
ucgaaaauaccaaacaauc

SEQ ID NO: 3156823 - RNA, 19 nt, Artificial Sequence
  Description of Artificial Sequence: Synthetic oligonucleotide
auucucgaaaauaccaaac

SEQ ID NO: 3156824 - RNA, 19 nt, Artificial Sequence
  Description of Artificial Sequence: Synthetic oligonucleotide
agcuauucucgaaaauacc

SEQ ID NO: 3156825 - RNA, 19 nt, Artificial Sequence
  Description of Artificial Sequence: Synthetic oligonucleotide
aagcuauucucgaaaauac

SEQ ID NO: 3156826 - RNA, 19 nt, Artificial Sequence
  Description of Artificial Sequence: Synthetic oligonucleotide
uauucaccaaccccacauc

SEQ ID NO: 3156827 - RNA, 19 nt, Artificial Sequence
  Description of Artificial Sequence: Synthetic oligonucleotide
acaaaacggcagcccauag

SEQ ID NO: 3156828 - RNA, 19 nt, Artificial Sequence
  Description of Artificial Sequence: Synthetic oligonucleotide
acugagaagcuucuguaag

SEQ ID NO: 3156829 - RNA, 19 nt, Artificial Sequence
  Description of Artificial Sequence: Synthetic oligonucleotide
ggcugaaaaugauaauuac

SEQ ID NO: 3156830 - RNA, 19 nt, Artificial Sequence
  Description of Artificial Sequence: Synthetic oligonucleotide
ccuuuaaaauacugauguu

SEQ ID NO: 3156831 - RNA, 19 nt, Artificial Sequence
  Description of Artificial Sequence: Synthetic oligonucleotide
acaucaaggugcuacuaga

SEQ ID NO: 3156832 - RNA, 19 nt, Artificial Sequence
  Description of Artificial Sequence: Synthetic oligonucleotide
ccuucugcaggcuuuuaca

SEQ ID NO: 3156833 - RNA, 19 nt, Artificial Sequence
  Description of Artificial Sequence: Synthetic oligonucleotide
gcuccaaauugaaguuuca

SEQ ID NO: 3156834 - RNA, 19 nt, Artificial Sequence
  Description of Artificial Sequence: Synthetic oligonucleotide
uccuauaauuauccuuuaa

SEQ ID NO: 3156835 - RNA, 19 nt, Artificial Sequence
  Description of Artificial Sequence: Synthetic oligonucleotide
ccaacuaccucauauccca

SEQ ID NO: 3156836 - RNA, 19 nt, Artificial Sequence
  Description of Artificial Sequence: Synthetic oligonucleotide
cgccuaagaaccuauaguu

SEQ ID NO: 3156837 - RNA, 19 nt, Artificial Sequence
  Description of Artificial Sequence: Synthetic oligonucleotide
aguuaugauuuaguuaaca

SEQ ID NO: 3156838 - RNA, 19 nt, Artificial Sequence
  Description of Artificial Sequence: Synthetic oligonucleotide
uucuggaauuuaacuauuu

SEQ ID NO: 3156839 - RNA, 19 nt, Artificial Sequence
  Description of Artificial Sequence: Synthetic oligonucleotide
cccgcugagucaucuggua

SEQ ID NO: 3156840 - RNA, 19 nt, Artificial Sequence
  Description of Artificial Sequence: Synthetic oligonucleotide
gaauuuauaccauuaugag

SEQ ID NO: 3156841 - RNA, 19 nt, Artificial Sequence
  Description of Artificial Sequence: Synthetic oligonucleotide
cuagcaaagccguugaaga

SEQ ID NO: 3156842 - RNA, 19 nt, Artificial Sequence
  Description of Artificial Sequence: Synthetic oligonucleotide
guuaccagcgcuuagaauu

SEQ ID NO: 3156843 - RNA, 19 nt, Artificial Sequence
  Description of Artificial Sequence: Synthetic oligonucleotide
cugcugggcugcuauuuaa

SEQ ID NO: 3156844 - RNA, 19 nt, Artificial Sequence
  Description of Artificial Sequence: Synthetic oligonucleotide
ccucauaucccauucagaa

SEQ ID NO: 3156845 - RNA, 19 nt, Artificial Sequence
  Description of Artificial Sequence: Synthetic oligonucleotide
gaaaucagcugaauuacuu

SEQ ID NO: 3156846 - RNA, 19 nt, Artificial Sequence
  Description of Artificial Sequence: Synthetic oligonucleotide
aucccauucagaauuuaua

SEQ ID NO: 3156847 - RNA, 19 nt, Artificial Sequence
  Description of Artificial Sequence: Synthetic oligonucleotide
gcagaaauuuguugacuga

SEQ ID NO: 3156848 - RNA, 19 nt, Artificial Sequence
  Description of Artificial Sequence: Synthetic oligonucleotide
cucgcuauguuugaccauc

SEQ ID NO: 3156849 - RNA, 19 nt, Artificial Sequence
  Description of Artificial Sequence: Synthetic oligonucleotide
ccacaaguacuuuaaagcu

SEQ ID NO: 3156850 - RNA, 19 nt, Artificial Sequence
  Description of Artificial Sequence: Synthetic oligonucleotide
accucuaacacuccuauaa

SEQ ID NO: 3156851 - RNA, 19 nt, Artificial Sequence
  Description of Artificial Sequence: Synthetic oligonucleotide
cgguuccgcugacaauaga

SEQ ID NO: 3156852 - RNA, 19 nt, Artificial Sequence
  Description of Artificial Sequence: Synthetic oligonucleotide
gcccagcaaugaauguacu

SEQ ID NO: 3156853 - RNA, 19 nt, Artificial Sequence
  Description of Artificial Sequence: Synthetic oligonucleotide
gcaaugaauguacucuacu

SEQ ID NO: 3156854 - RNA, 19 nt, Artificial Sequence
  Description of Artificial Sequence: Synthetic oligonucleotide
cggaccuuacagcaauuaa

SEQ ID NO: 3156855 - RNA, 19 nt, Artificial Sequence
  Description of Artificial Sequence: Synthetic oligonucleotide
gacugaacacuuaauuaug

SEQ ID NO: 3156856 - RNA, 19 nt, Artificial Sequence
  Description of Artificial Sequence: Synthetic oligonucleotide
ugauggaaacgcuaacaca

SEQ ID NO: 3156857 - RNA, 19 nt, Artificial Sequence
  Description of Artificial Sequence: Synthetic oligonucleotide
ccuucugcuggguacuccu

SEQ ID NO: 3156858 - RNA, 19 nt, Artificial Sequence
  Description of Artificial Sequence: Synthetic oligonucleotide
gccuaagaaccuauaguuc

SEQ ID NO: 3156859 - RNA, 19 nt, Artificial Sequence
  Description of Artificial Sequence: Synthetic oligonucleotide
ugugcuaguuucagcuuga

SEQ ID NO: 3156860 - RNA, 19 nt, Artificial Sequence
  Description of Artificial Sequence: Synthetic oligonucleotide
ggacugauucuucaggcuu

SEQ ID NO: 3156861 - RNA, 19 nt, Artificial Sequence
  Description of Artificial Sequence: Synthetic oligonucleotide
guuccugugcgcagucacu

SEQ ID NO: 3156862 - RNA, 19 nt, Artificial Sequence
  Description of Artificial Sequence: Synthetic oligonucleotide
ggagaugcgauuuuggacu

SEQ ID NO: 3156863 - RNA, 19 nt, Artificial Sequence
  Description of Artificial Sequence: Synthetic oligonucleotide
ccucagaccucgaggauuu

SEQ ID NO: 3156864 - RNA, 19 nt, Artificial Sequence
  Description of Artificial Sequence: Synthetic oligonucleotide
cugcugguucuguagcaaa

SEQ ID NO: 3156865 - RNA, 19 nt, Artificial Sequence
  Description of Artificial Sequence: Synthetic oligonucleotide
ccacuagcagggaaaauga

SEQ ID NO: 3156866 - RNA, 19 nt, Artificial Sequence
  Description of Artificial Sequence: Synthetic oligonucleotide
guuuauagacagcauguua

SEQ ID NO: 3156867 - RNA, 19 nt, Artificial Sequence
  Description of Artificial Sequence: Synthetic oligonucleotide
agcuccaaauugaaguuuc

SEQ ID NO: 3156868 - RNA, 19 nt, Artificial Sequence
  Description of Artificial Sequence: Synthetic oligonucleotide
cuaucaccacauaucucuu

SEQ ID NO: 3156869 - RNA, 19 nt, Artificial Sequence
  Description of Artificial Sequence: Synthetic oligonucleotide
cagaauuuauaccauuaug

SEQ ID NO: 3156870 - RNA, 19 nt, Artificial Sequence
  Description of Artificial Sequence: Synthetic oligonucleotide
uuuguugacugaacacuua

SEQ ID NO: 3156871 - RNA, 19 nt, Artificial Sequence
  Description of Artificial Sequence: Synthetic oligonucleotide
ugacugaacacuuaauuau

SEQ ID NO: 3156872 - RNA, 19 nt, Artificial Sequence
  Description of Artificial Sequence: Synthetic oligonucleotide
ccuccugguuaugugguca

SEQ ID NO: 3156873 - RNA, 19 nt, Artificial Sequence
  Description of Artificial Sequence: Synthetic oligonucleotide
cugacaaaagcauagcgga

SEQ ID NO: 3156874 - RNA, 19 nt, Artificial Sequence
  Description of Artificial Sequence: Synthetic oligonucleotide
ccaauggcaguuaugauuu

SEQ ID NO: 3156875 - RNA, 19 nt, Artificial Sequence
  Description of Artificial Sequence: Synthetic oligonucleotide
cggucagcaccuuacggau

SEQ ID NO: 3156876 - RNA, 19 nt, Artificial Sequence
  Description of Artificial Sequence: Synthetic oligonucleotide
auuccugggagaugcgauu

SEQ ID NO: 3156877 - RNA, 19 nt, Artificial Sequence
  Description of Artificial Sequence: Synthetic oligonucleotide
guaauuaucauuuucagcc

SEQ ID NO: 3156878 - RNA, 19 nt, Artificial Sequence
  Description of Artificial Sequence: Synthetic oligonucleotide
aacaucaguauuuuaaagg

SEQ ID NO: 3156879 - RNA, 19 nt, Artificial Sequence
  Description of Artificial Sequence: Synthetic oligonucleotide
ucuaguagcaccuugaugu

SEQ ID NO: 3156880 - RNA, 19 nt, Artificial Sequence
  Description of Artificial Sequence: Synthetic oligonucleotide
uguaaaagccugcagaagg

SEQ ID NO: 3156881 - RNA, 19 nt, Artificial Sequence
  Description of Artificial Sequence: Synthetic oligonucleotide
ugaaacuucaauuuggagc

SEQ ID NO: 3156882 - RNA, 19 nt, Artificial Sequence
  Description of Artificial Sequence: Synthetic oligonucleotide
uuaaaggauaauuauagga

SEQ ID NO: 3156883 - RNA, 19 nt, Artificial Sequence
  Description of Artificial Sequence: Synthetic oligonucleotide
ugggauaugagguaguugg

SEQ ID NO: 3156884 - RNA, 19 nt, Artificial Sequence
  Description of Artificial Sequence: Synthetic oligonucleotide
aacuauagguucuuaggcg

SEQ ID NO: 3156885 - RNA, 19 nt, Artificial Sequence
  Description of Artificial Sequence: Synthetic oligonucleotide
uguuaacuaaaucauaacu

SEQ ID NO: 3156886 - RNA, 19 nt, Artificial Sequence
  Description of Artificial Sequence: Synthetic oligonucleotide
aaauaguuaaauuccagaa

SEQ ID NO: 3156887 - RNA, 19 nt, Artificial Sequence
  Description of Artificial Sequence: Synthetic oligonucleotide
uaccagaugacucagcggg

SEQ ID NO: 3156888 - RNA, 19 nt, Artificial Sequence
  Description of Artificial Sequence: Synthetic oligonucleotide
cucauaaugguauaaauuc

SEQ ID NO: 3156889 - RNA, 19 nt, Artificial Sequence
  Description of Artificial Sequence: Synthetic oligonucleotide
ucuucaacggcuuugcuag

SEQ ID NO: 3156890 - RNA, 19 nt, Artificial Sequence
  Description of Artificial Sequence: Synthetic oligonucleotide
aauucuaagcgcugguaac

SEQ ID NO: 3156891 - RNA, 19 nt, Artificial Sequence
  Description of Artificial Sequence: Synthetic oligonucleotide
uuaaauagcagcccagcag

SEQ ID NO: 3156892 - RNA, 19 nt, Artificial Sequence
  Description of Artificial Sequence: Synthetic oligonucleotide
uucugaaugggauaugagg

SEQ ID NO: 3156893 - RNA, 19 nt, Artificial Sequence
  Description of Artificial Sequence: Synthetic oligonucleotide
aaguaauucagcugauuuc

SEQ ID NO: 3156894 - RNA, 19 nt, Artificial Sequence
  Description of Artificial Sequence: Synthetic oligonucleotide
uauaaauucugaaugggau

SEQ ID NO: 3156895 - RNA, 19 nt, Artificial Sequence
  Description of Artificial Sequence: Synthetic oligonucleotide
ucagucaacaaauuucugc

SEQ ID NO: 3156896 - RNA, 19 nt, Artificial Sequence
  Description of Artificial Sequence: Synthetic oligonucleotide
gauggucaaacauagcgag

SEQ ID NO: 3156897 - RNA, 19 nt, Artificial Sequence
  Description of Artificial Sequence: Synthetic oligonucleotide
agcuuuaaaguacuugugg

SEQ ID NO: 3156898 - RNA, 19 nt, Artificial Sequence
  Description of Artificial Sequence: Synthetic oligonucleotide
uuauaggaguguuagaggu

SEQ ID NO: 3156899 - RNA, 19 nt, Artificial Sequence
  Description of Artificial Sequence: Synthetic oligonucleotide
ucuauugucagcggaaccg

SEQ ID NO: 3156900 - RNA, 19 nt, Artificial Sequence
  Description of Artificial Sequence: Synthetic oligonucleotide
aguacauucauugcugggc

SEQ ID NO: 3156901 - RNA, 19 nt, Artificial Sequence
  Description of Artificial Sequence: Synthetic oligonucleotide
aguagaguacauucauugc

SEQ ID NO: 3156902 - RNA, 19 nt, Artificial Sequence
  Description of Artificial Sequence: Synthetic oligonucleotide
uuaauugcuguaagguccg

SEQ ID NO: 3156903 - RNA, 19 nt, Artificial Sequence
  Description of Artificial Sequence: Synthetic oligonucleotide
cauaauuaaguguucaguc

SEQ ID NO: 3156904 - RNA, 19 nt, Artificial Sequence
  Description of Artificial Sequence: Synthetic oligonucleotide
uguguuagcguuuccauca

SEQ ID NO: 3156905 - RNA, 19 nt, Artificial Sequence
  Description of Artificial Sequence: Synthetic oligonucleotide
aggaguacccagcagaagg

SEQ ID NO: 3156906 - RNA, 19 nt, Artificial Sequence
  Description of Artificial Sequence: Synthetic oligonucleotide
gaacuauagguucuuaggc

SEQ ID NO: 3156907 - RNA, 19 nt, Artificial Sequence
  Description of Artificial Sequence: Synthetic oligonucleotide
ucaagcugaaacuagcaca

SEQ ID NO: 3156908 - RNA, 19 nt, Artificial Sequence
  Description of Artificial Sequence: Synthetic oligonucleotide
aagccugaagaaucagucc

SEQ ID NO: 3156909 - RNA, 19 nt, Artificial Sequence
  Description of Artificial Sequence: Synthetic oligonucleotide
agugacugcgcacaggaac

SEQ ID NO: 3156910 - RNA, 19 nt, Artificial Sequence
  Description of Artificial Sequence: Synthetic oligonucleotide
aguccaaaaucgcaucucc

SEQ ID NO: 3156911 - RNA, 19 nt, Artificial Sequence
  Description of Artificial Sequence: Synthetic oligonucleotide
aaauccucgaggucugagg

SEQ ID NO: 3156912 - RNA, 19 nt, Artificial Sequence
  Description of Artificial Sequence: Synthetic oligonucleotide
uuugcuacagaaccagcag

SEQ ID NO: 3156913 - RNA, 19 nt, Artificial Sequence
  Description of Artificial Sequence: Synthetic oligonucleotide
ucauuuucccugcuagugg

SEQ ID NO: 3156914 - RNA, 19 nt, Artificial Sequence
  Description of Artificial Sequence: Synthetic oligonucleotide
uaacaugcugucuauaaac

SEQ ID NO: 3156915 - RNA, 19 nt, Artificial Sequence
  Description of Artificial Sequence: Synthetic oligonucleotide
gaaacuucaauuuggagcu

SEQ ID NO: 3156916 - RNA, 19 nt, Artificial Sequence
  Description of Artificial Sequence: Synthetic oligonucleotide
aagagauauguggugauag

SEQ ID NO: 3156917 - RNA, 19 nt, Artificial Sequence
  Description of Artificial Sequence: Synthetic oligonucleotide
cauaaugguauaaauucug

SEQ ID NO: 3156918 - RNA, 19 nt, Artificial Sequence
  Description of Artificial Sequence: Synthetic oligonucleotide
uaaguguucagucaacaaa

SEQ ID NO: 3156919 - RNA, 19 nt, Artificial Sequence
  Description of Artificial Sequence: Synthetic oligonucleotide
auaauuaaguguucaguca

SEQ ID NO: 3156920 - RNA, 19 nt, Artificial Sequence
  Description of Artificial Sequence: Synthetic oligonucleotide
ugaccacauaaccaggagg

SEQ ID NO: 3156921 - RNA, 19 nt, Artificial Sequence
  Description of Artificial Sequence: Synthetic oligonucleotide
uccgcuaugcuuuugucag

SEQ ID NO: 3156922 - RNA, 19 nt, Artificial Sequence
  Description of Artificial Sequence: Synthetic oligonucleotide
aaaucauaacugccauugg

SEQ ID NO: 3156923 - RNA, 19 nt, Artificial Sequence
  Description of Artificial Sequence: Synthetic oligonucleotide
auccguaaggugcugaccg

SEQ ID NO: 3156924 - RNA, 19 nt, Artificial Sequence
  Description of Artificial Sequence: Synthetic oligonucleotide
aaucgcaucucccaggaau

SEQ ID NO: 3156925 - RNA, 19 nt, Artificial Sequence
  Description of Artificial Sequence: Synthetic oligonucleotide
ggcuuuagauuagugccuu

SEQ ID NO: 3156926 - RNA, 19 nt, Artificial Sequence
  Description of Artificial Sequence: Synthetic oligonucleotide
gagcuuaacuaauagaucu

SEQ ID NO: 3156927 - RNA, 19 nt, Artificial Sequence
  Description of Artificial Sequence: Synthetic oligonucleotide
cgugauauucaaauaguuu

SEQ ID NO: 3156928 - RNA, 19 nt, Artificial Sequence
  Description of Artificial Sequence: Synthetic oligonucleotide
ugaucaacacuguuucguu

SEQ ID NO: 3156929 - RNA, 19 nt, Artificial Sequence
  Description of Artificial Sequence: Synthetic oligonucleotide
cagucaaguuagugaucaa

SEQ ID NO: 3156930 - RNA, 19 nt, Artificial Sequence
  Description of Artificial Sequence: Synthetic oligonucleotide
cucucauguuucauaacca

SEQ ID NO: 3156931 - RNA, 19 nt, Artificial Sequence
  Description of Artificial Sequence: Synthetic oligonucleotide
gaccaaauguucuuuuaua

SEQ ID NO: 3156932 - RNA, 19 nt, Artificial Sequence
  Description of Artificial Sequence: Synthetic oligonucleotide
cucccugagcgcuauaacu

SEQ ID NO: 3156933 - RNA, 19 nt, Artificial Sequence
  Description of Artificial Sequence: Synthetic oligonucleotide
cgagcuuaacuaauagauc

SEQ ID NO: 3156934 - RNA, 19 nt, Artificial Sequence
  Description of Artificial Sequence: Synthetic oligonucleotide
ucucauguuucauaaccaa

SEQ ID NO: 3156935 - RNA, 19 nt, Artificial Sequence
  Description of Artificial Sequence: Synthetic oligonucleotide
cucuaggaguagugaucuu

SEQ ID NO: 3156936 - RNA, 19 nt, Artificial Sequence
  Description of Artificial Sequence: Synthetic oligonucleotide
cuauaaaucuccuucucga

SEQ ID NO: 3156937 - RNA, 19 nt, Artificial Sequence
  Description of Artificial Sequence: Synthetic oligonucleotide
gaugauacuucauguuuaa

SEQ ID NO: 3156938 - RNA, 19 nt, Artificial Sequence
  Description of Artificial Sequence: Synthetic oligonucleotide
ggggcuuaguaagauaaug

SEQ ID NO: 3156939 - RNA, 19 nt, Artificial Sequence
  Description of Artificial Sequence: Synthetic oligonucleotide
cgaccauagaugauacuuc

SEQ ID NO: 3156940 - RNA, 19 nt, Artificial Sequence
  Description of Artificial Sequence: Synthetic oligonucleotide
cgcuauaacuggcaacucc

SEQ ID NO: 3156941 - RNA, 19 nt, Artificial Sequence
  Description of Artificial Sequence: Synthetic oligonucleotide
acgaauaaccucuuguaaa

SEQ ID NO: 3156942 - RNA, 19 nt, Artificial Sequence
  Description of Artificial Sequence: Synthetic oligonucleotide
uguuuaaugccgcauauca

SEQ ID NO: 3156943 - RNA, 19 nt, Artificial Sequence
  Description of Artificial Sequence: Synthetic oligonucleotide
ucguguggacaaacgucuu

SEQ ID NO: 3156944 - RNA, 19 nt, Artificial Sequence
  Description of Artificial Sequence: Synthetic oligonucleotide
gaucaacacuguuucguuu

SEQ ID NO: 3156945 - RNA, 19 nt, Artificial Sequence
  Description of Artificial Sequence: Synthetic oligonucleotide
ucuacgagcuuaacuaaua

SEQ ID NO: 3156946 - RNA, 19 nt, Artificial Sequence
  Description of Artificial Sequence: Synthetic oligonucleotide
gguucucuacuaguggaau

SEQ ID NO: 3156947 - RNA, 19 nt, Artificial Sequence
  Description of Artificial Sequence: Synthetic oligonucleotide
gcaucuacaugcgccagau

SEQ ID NO: 3156948 - RNA, 19 nt, Artificial Sequence
  Description of Artificial Sequence: Synthetic oligonucleotide
cucagugagacguguaaau

SEQ ID NO: 3156949 - RNA, 19 nt, Artificial Sequence
  Description of Artificial Sequence: Synthetic oligonucleotide
aaggcacuaaucuaaagcc

SEQ ID NO: 3156950 - RNA, 19 nt, Artificial Sequence
  Description of Artificial Sequence: Synthetic oligonucleotide
agaucuauuaguuaagcuc

SEQ ID NO: 3156951 - RNA, 19 nt, Artificial Sequence
  Description of Artificial Sequence: Synthetic oligonucleotide
aaacuauuugaauaucacg

SEQ ID NO: 3156952 - RNA, 19 nt, Artificial Sequence
  Description of Artificial Sequence: Synthetic oligonucleotide
aacgaaacaguguugauca

SEQ ID NO: 3156953 - RNA, 19 nt, Artificial Sequence
  Description of Artificial Sequence: Synthetic oligonucleotide
uugaucacuaacuugacug

SEQ ID NO: 3156954 - RNA, 19 nt, Artificial Sequence
  Description of Artificial Sequence: Synthetic oligonucleotide
ugguuaugaaacaugagag

SEQ ID NO: 3156955 - RNA, 19 nt, Artificial Sequence
  Description of Artificial Sequence: Synthetic oligonucleotide
uauaaaagaacauuugguc

SEQ ID NO: 3156956 - RNA, 19 nt, Artificial Sequence
  Description of Artificial Sequence: Synthetic oligonucleotide
aguuauagcgcucagggag

SEQ ID NO: 3156957 - RNA, 19 nt, Artificial Sequence
  Description of Artificial Sequence: Synthetic oligonucleotide
gaucuauuaguuaagcucg

SEQ ID NO: 3156958 - RNA, 19 nt, Artificial Sequence
  Description of Artificial Sequence: Synthetic oligonucleotide
uugguuaugaaacaugaga

SEQ ID NO: 3156959 - RNA, 19 nt, Artificial Sequence
  Description of Artificial Sequence: Synthetic oligonucleotide
aagaucacuacuccuagag

SEQ ID NO: 3156960 - RNA, 19 nt, Artificial Sequence
  Description of Artificial Sequence: Synthetic oligonucleotide
ucgagaaggagauuuauag

SEQ ID NO: 3156961 - RNA, 19 nt, Artificial Sequence
  Description of Artificial Sequence: Synthetic oligonucleotide
uuaaacaugaaguaucauc

SEQ ID NO: 3156962 - RNA, 19 nt, Artificial Sequence
  Description of Artificial Sequence: Synthetic oligonucleotide
cauuaucuuacuaagcccc

SEQ ID NO: 3156963 - RNA, 19 nt, Artificial Sequence
  Description of Artificial Sequence: Synthetic oligonucleotide
gaaguaucaucuauggucg

SEQ ID NO: 3156964 - RNA, 19 nt, Artificial Sequence
  Description of Artificial Sequence: Synthetic oligonucleotide
ggaguugccaguuauagcg

SEQ ID NO: 3156965 - RNA, 19 nt, Artificial Sequence
  Description of Artificial Sequence: Synthetic oligonucleotide
uuuacaagagguuauucgu

SEQ ID NO: 3156966 - RNA, 19 nt, Artificial Sequence
  Description of Artificial Sequence: Synthetic oligonucleotide
ugauaugcggcauuaaaca

SEQ ID NO: 3156967 - RNA, 19 nt, Artificial Sequence
  Description of Artificial Sequence: Synthetic oligonucleotide
aagacguuuguccacacga

SEQ ID NO: 3156968 - RNA, 19 nt, Artificial Sequence
  Description of Artificial Sequence: Synthetic oligonucleotide
aaacgaaacaguguugauc

SEQ ID NO: 3156969 - RNA, 19 nt, Artificial Sequence
  Description of Artificial Sequence: Synthetic oligonucleotide
uauuaguuaagcucguaga

SEQ ID NO: 3156970 - RNA, 19 nt, Artificial Sequence
  Description of Artificial Sequence: Synthetic oligonucleotide
auuccacuaguagagaacc

SEQ ID NO: 3156971 - RNA, 19 nt, Artificial Sequence
  Description of Artificial Sequence: Synthetic oligonucleotide
aucuggcgcauguagaugc

SEQ ID NO: 3156972 - RNA, 19 nt, Artificial Sequence
  Description of Artificial Sequence: Synthetic oligonucleotide
auuuacacgucucacugag

SEQ ID NO: 3156973 - RNA, 19 nt, Artificial Sequence
  Description of Artificial Sequence: Synthetic oligonucleotide
gccagaguucuacaacauu

SEQ ID NO: 3156974 - RNA, 19 nt, Artificial Sequence
  Description of Artificial Sequence: Synthetic oligonucleotide
gcuucucucugacgcuaau

SEQ ID NO: 3156975 - RNA, 19 nt, Artificial Sequence
  Description of Artificial Sequence: Synthetic oligonucleotide
ggaccuuucucaacuacua

SEQ ID NO: 3156976 - RNA, 19 nt, Artificial Sequence
  Description of Artificial Sequence: Synthetic oligonucleotide
gcgagaaggcuauccacuu

SEQ ID NO: 3156977 - RNA, 19 nt, Artificial Sequence
  Description of Artificial Sequence: Synthetic oligonucleotide
cucucugacgcuaauugau

SEQ ID NO: 3156978 - RNA, 19 nt, Artificial Sequence
  Description of Artificial Sequence: Synthetic oligonucleotide
aguucuacaacauugcuca

SEQ ID NO: 3156979 - RNA, 19 nt, Artificial Sequence
  Description of Artificial Sequence: Synthetic oligonucleotide
gccuuuccggcuacucauu

SEQ ID NO: 3156980 - RNA, 19 nt, Artificial Sequence
  Description of Artificial Sequence: Synthetic oligonucleotide
gagccuuauuggggauauu

SEQ ID NO: 3156981 - RNA, 19 nt, Artificial Sequence
  Description of Artificial Sequence: Synthetic oligonucleotide
gagacugugaaauaccucu

SEQ ID NO: 3156982 - RNA, 19 nt, Artificial Sequence
  Description of Artificial Sequence: Synthetic oligonucleotide
gacacgagcucuaugccuu

SEQ ID NO: 3156983 - RNA, 19 nt, Artificial Sequence
  Description of Artificial Sequence: Synthetic oligonucleotide
uggcgauguuucuagagua

SEQ ID NO: 3156984 - RNA, 19 nt, Artificial Sequence
  Description of Artificial Sequence: Synthetic oligonucleotide
uuuccuagauuccucauaa

SEQ ID NO: 3156985 - RNA, 19 nt, Artificial Sequence
  Description of Artificial Sequence: Synthetic oligonucleotide
ccucuguguucgaaaccaa

SEQ ID NO: 3156986 - RNA, 19 nt, Artificial Sequence
  Description of Artificial Sequence: Synthetic oligonucleotide
gccucuguguucgaaacca

SEQ ID NO: 3156987 - RNA, 19 nt, Artificial Sequence
  Description of Artificial Sequence: Synthetic oligonucleotide
cucugaauuccaaagagug

SEQ ID NO: 3156988 - RNA, 19 nt, Artificial Sequence
  Description of Artificial Sequence: Synthetic oligonucleotide
uggggaauaccucugaauu

SEQ ID NO: 3156989 - RNA, 19 nt, Artificial Sequence
  Description of Artificial Sequence: Synthetic oligonucleotide
uuuugagaguaagcuauaa

SEQ ID NO: 3156990 - RNA, 19 nt, Artificial Sequence
  Description of Artificial Sequence: Synthetic oligonucleotide
cuguuucacccaaacaacu

SEQ ID NO: 3156991 - RNA, 19 nt, Artificial Sequence
  Description of Artificial Sequence: Synthetic oligonucleotide
cguggacuuugauaucgac

SEQ ID NO: 3156992 - RNA, 19 nt, Artificial Sequence
  Description of Artificial Sequence: Synthetic oligonucleotide
ugcuuuuggcuaucagguu

SEQ ID NO: 3156993 - RNA, 19 nt, Artificial Sequence
  Description of Artificial Sequence: Synthetic oligonucleotide
gguuuuccuagauuccuca

SEQ ID NO: 3156994 - RNA, 19 nt, Artificial Sequence
  Description of Artificial Sequence: Synthetic oligonucleotide
gccgguguggacuccuacu

SEQ ID NO: 3156995 - RNA, 19 nt, Artificial Sequence
  Description of Artificial Sequence: Synthetic oligonucleotide
cuuauuggggauauugaca

SEQ ID NO: 3156996 - RNA, 19 nt, Artificial Sequence
  Description of Artificial Sequence: Synthetic oligonucleotide
uugagaguaagcuauaaaa

SEQ ID NO: 3156997 - RNA, 19 nt, Artificial Sequence
  Description of Artificial Sequence: Synthetic oligonucleotide
aauguuguagaacucuggc

SEQ ID NO: 3156998 - RNA, 19 nt, Artificial Sequence
  Description of Artificial Sequence: Synthetic oligonucleotide
auuagcgucagagagaagc

SEQ ID NO: 3156999 - RNA, 19 nt, Artificial Sequence
  Description of Artificial Sequence: Synthetic oligonucleotide
uaguaguugagaaaggucc

SEQ ID NO: 3157000 - RNA, 19 nt, Artificial Sequence
  Description of Artificial Sequence: Synthetic oligonucleotide
aaguggauagccuucucgc

SEQ ID NO: 3157001 - RNA, 19 nt, Artificial Sequence
  Description of Artificial Sequence: Synthetic oligonucleotide
aucaauuagcgucagagag

SEQ ID NO: 3157002 - RNA, 19 nt, Artificial Sequence
  Description of Artificial Sequence: Synthetic oligonucleotide
ugagcaauguuguagaacu

SEQ ID NO: 3157003 - RNA, 19 nt, Artificial Sequence
  Description of Artificial Sequence: Synthetic oligonucleotide
aaugaguagccggaaaggc

SEQ ID NO: 3157004 - RNA, 19 nt, Artificial Sequence
  Description of Artificial Sequence: Synthetic oligonucleotide
aauauccccaauaaggcuc

SEQ ID NO: 3157005 - RNA, 19 nt, Artificial Sequence
  Description of Artificial Sequence: Synthetic oligonucleotide
agagguauuucacagucuc

SEQ ID NO: 3157006 - RNA, 19 nt, Artificial Sequence
  Description of Artificial Sequence: Synthetic oligonucleotide
aaggcauagagcucguguc

SEQ ID NO: 3157007 - RNA, 19 nt, Artificial Sequence
  Description of Artificial Sequence: Synthetic oligonucleotide
uacucuagaaacaucgcca

SEQ ID NO: 3157008 - RNA, 19 nt, Artificial Sequence
  Description of Artificial Sequence: Synthetic oligonucleotide
uuaugaggaaucuaggaaa

SEQ ID NO: 3157009 - RNA, 19 nt, Artificial Sequence
  Description of Artificial Sequence: Synthetic oligonucleotide
uugguuucgaacacagagg

SEQ ID NO: 3157010 - RNA, 19 nt, Artificial Sequence
  Description of Artificial Sequence: Synthetic oligonucleotide
ugguuucgaacacagaggc

SEQ ID NO: 3157011 - RNA, 19 nt, Artificial Sequence
  Description of Artificial Sequence: Synthetic oligonucleotide
cacucuuuggaauucagag

SEQ ID NO: 3157012 - RNA, 19 nt, Artificial Sequence
  Description of Artificial Sequence: Synthetic oligonucleotide
aauucagagguauucccca

SEQ ID NO: 3157013 - RNA, 19 nt, Artificial Sequence
  Description of Artificial Sequence: Synthetic oligonucleotide
uuauagcuuacucucaaaa

SEQ ID NO: 3157014 - RNA, 19 nt, Artificial Sequence
  Description of Artificial Sequence: Synthetic oligonucleotide
aguuguuugggugaaacag

SEQ ID NO: 3157015 - RNA, 19 nt, Artificial Sequence
  Description of Artificial Sequence: Synthetic oligonucleotide
gucgauaucaaaguccacg

SEQ ID NO: 3157016 - RNA, 19 nt, Artificial Sequence
  Description of Artificial Sequence: Synthetic oligonucleotide
aaccugauagccaaaagca

SEQ ID NO: 3157017 - RNA, 19 nt, Artificial Sequence
  Description of Artificial Sequence: Synthetic oligonucleotide
ugaggaaucuaggaaaacc

SEQ ID NO: 3157018 - RNA, 19 nt, Artificial Sequence
  Description of Artificial Sequence: Synthetic oligonucleotide
aguaggaguccacaccggc

SEQ ID NO: 3157019 - RNA, 19 nt, Artificial Sequence
  Description of Artificial Sequence: Synthetic oligonucleotide
ugucaauauccccaauaag

SEQ ID NO: 3157020 - RNA, 19 nt, Artificial Sequence
  Description of Artificial Sequence: Synthetic oligonucleotide
uuuuauagcuuacucucaa

SEQ ID NO: 3157021 - RNA, 19 nt, Artificial Sequence
  Description of Artificial Sequence: Synthetic oligonucleotide
ggagauaaauaccugcuuu

SEQ ID NO: 3157022 - RNA, 19 nt, Artificial Sequence
  Description of Artificial Sequence: Synthetic oligonucleotide
aguaauaaaucuuagaauu

SEQ ID NO: 3157023 - RNA, 19 nt, Artificial Sequence
  Description of Artificial Sequence: Synthetic oligonucleotide
gucaguaaguaauaaaucu

SEQ ID NO: 3157024 - RNA, 19 nt, Artificial Sequence
  Description of Artificial Sequence: Synthetic oligonucleotide
gcuucuaaccaauucuaca

SEQ ID NO: 3157025 - RNA, 19 nt, Artificial Sequence
  Description of Artificial Sequence: Synthetic oligonucleotide
ggauguuguguuagguuuu

SEQ ID NO: 3157026 - RNA, 19 nt, Artificial Sequence
  Description of Artificial Sequence: Synthetic oligonucleotide
gguaguauaacaaguucuu

SEQ ID NO: 3157027 - RNA, 19 nt, Artificial Sequence
  Description of Artificial Sequence: Synthetic oligonucleotide
uccucuaaaccuuucuuau

SEQ ID NO: 3157028 - RNA, 19 nt, Artificial Sequence
  Description of Artificial Sequence: Synthetic oligonucleotide
ccucuaaaccuuucuuaua

SEQ ID NO: 3157029 - RNA, 19 nt, Artificial Sequence
  Description of Artificial Sequence: Synthetic oligonucleotide
uuguuuaccuaguaaaauu

SEQ ID NO: 3157030 - RNA, 19 nt, Artificial Sequence
  Description of Artificial Sequence: Synthetic oligonucleotide
ccauaauacauaguguaua

SEQ ID NO: 3157031 - RNA, 19 nt, Artificial Sequence
  Description of Artificial Sequence: Synthetic oligonucleotide
gugcuuuguucaucuuaau

SEQ ID NO: 3157032 - RNA, 19 nt, Artificial Sequence
  Description of Artificial Sequence: Synthetic oligonucleotide
cccuaauuugcaauguuuu

SEQ ID NO: 3157033 - RNA, 19 nt, Artificial Sequence
  Description of Artificial Sequence: Synthetic oligonucleotide
caauguuuuccccauaaaa

SEQ ID NO: 3157034 - RNA, 19 nt, Artificial Sequence
  Description of Artificial Sequence: Synthetic oligonucleotide
gcaaguauuuaauucaggu

SEQ ID NO: 3157035 - RNA, 19 nt, Artificial Sequence
  Description of Artificial Sequence: Synthetic oligonucleotide
agcugaagcuuaacuacuu

SEQ ID NO: 3157036 - RNA, 19 nt, Artificial Sequence
  Description of Artificial Sequence: Synthetic oligonucleotide
augccagacucaucauaaa

SEQ ID NO: 3157037 - RNA, 19 nt, Artificial Sequence
  Description of Artificial Sequence: Synthetic oligonucleotide
gucuuugaguucauuagaa

SEQ ID NO: 3157038 - RNA, 19 nt, Artificial Sequence
  Description of Artificial Sequence: Synthetic oligonucleotide
gguagcauuuaguaaauau

SEQ ID NO: 3157039 - RNA, 19 nt, Artificial Sequence
  Description of Artificial Sequence: Synthetic oligonucleotide
agagcaaguauuuaauuca

SEQ ID NO: 3157040 - RNA, 19 nt, Artificial Sequence
  Description of Artificial Sequence: Synthetic oligonucleotide
guaguuuacuagauauguu

SEQ ID NO: 3157041 - RNA, 19 nt, Artificial Sequence
  Description of Artificial Sequence: Synthetic oligonucleotide
gcaaguuagcagcgauauu

SEQ ID NO: 3157042 - RNA, 19 nt, Artificial Sequence
  Description of Artificial Sequence: Synthetic oligonucleotide
gaguauaauuguuucagaa

SEQ ID NO: 3157043 - RNA, 19 nt, Artificial Sequence
  Description of Artificial Sequence: Synthetic oligonucleotide
cucugacuuuaauuuaacu

SEQ ID NO: 3157044 - RNA, 19 nt, Artificial Sequence
  Description of Artificial Sequence: Synthetic oligonucleotide
uuuauuggcucguaguuaa

SEQ ID NO: 3157045 - RNA, 19 nt, Artificial Sequence
  Description of Artificial Sequence: Synthetic oligonucleotide
aaagcagguauuuaucucc

SEQ ID NO: 3157046 - RNA, 19 nt, Artificial Sequence
  Description of Artificial Sequence: Synthetic oligonucleotide
aauucuaagauuuauuacu

SEQ ID NO: 3157047 - RNA, 19 nt, Artificial Sequence
  Description of Artificial Sequence: Synthetic oligonucleotide
agauuuauuacuuacugac

SEQ ID NO: 3157048 - RNA, 19 nt, Artificial Sequence
  Description of Artificial Sequence: Synthetic oligonucleotide
uguagaauugguuagaagc

SEQ ID NO: 3157049 - RNA, 19 nt, Artificial Sequence
  Description of Artificial Sequence: Synthetic oligonucleotide
aaaaccuaacacaacaucc

SEQ ID NO: 3157050 - RNA, 19 nt, Artificial Sequence
  Description of Artificial Sequence: Synthetic oligonucleotide
aagaacuuguuauacuacc

SEQ ID NO: 3157051 - RNA, 19 nt, Artificial Sequence
  Description of Artificial Sequence: Synthetic oligonucleotide
auaagaaagguuuagagga

SEQ ID NO: 3157052 - RNA, 19 nt, Artificial Sequence
  Description of Artificial Sequence: Synthetic oligonucleotide
uauaagaaagguuuagagg

SEQ ID NO: 3157053 - RNA, 19 nt, Artificial Sequence
  Description of Artificial Sequence: Synthetic oligonucleotide
aauuuuacuagguaaacaa

SEQ ID NO: 3157054 - RNA, 19 nt, Artificial Sequence
  Description of Artificial Sequence: Synthetic oligonucleotide
uauacacuauguauuaugg

SEQ ID NO: 3157055 - RNA, 19 nt, Artificial Sequence
  Description of Artificial Sequence: Synthetic oligonucleotide
auuaagaugaacaaagcac

SEQ ID NO: 3157056 - RNA, 19 nt, Artificial Sequence
  Description of Artificial Sequence: Synthetic oligonucleotide
aaaacauugcaaauuaggg

SEQ ID NO: 3157057 - RNA, 19 nt, Artificial Sequence
  Description of Artificial Sequence: Synthetic oligonucleotide
uuuuauggggaaaacauug

SEQ ID NO: 3157058 - RNA, 19 nt, Artificial Sequence
  Description of Artificial Sequence: Synthetic oligonucleotide
accugaauuaaauacuugc

SEQ ID NO: 3157059 - RNA, 19 nt, Artificial Sequence
  Description of Artificial Sequence: Synthetic oligonucleotide
aaguaguuaagcuucagcu

SEQ ID NO: 3157060 - RNA, 19 nt, Artificial Sequence
  Description of Artificial Sequence: Synthetic oligonucleotide
uuuaugaugagucuggcau

SEQ ID NO: 3157061 - RNA, 19 nt, Artificial Sequence
  Description of Artificial Sequence: Synthetic oligonucleotide
uucuaaugaacucaaagac

SEQ ID NO: 3157062 - RNA, 19 nt, Artificial Sequence
  Description of Artificial Sequence: Synthetic oligonucleotide
auauuuacuaaaugcuacc

SEQ ID NO: 3157063 - RNA, 19 nt, Artificial Sequence
  Description of Artificial Sequence: Synthetic oligonucleotide
ugaauuaaauacuugcucu

SEQ ID NO: 3157064 - RNA, 19 nt, Artificial Sequence
  Description of Artificial Sequence: Synthetic oligonucleotide
aacauaucuaguaaacuac

SEQ ID NO: 3157065 - RNA, 19 nt, Artificial Sequence
  Description of Artificial Sequence: Synthetic oligonucleotide
aauaucgcugcuaacuugc

SEQ ID NO: 3157066 - RNA, 19 nt, Artificial Sequence
  Description of Artificial Sequence: Synthetic oligonucleotide
uucugaaacaauuauacuc

SEQ ID NO: 3157067 - RNA, 19 nt, Artificial Sequence
  Description of Artificial Sequence: Synthetic oligonucleotide
aguuaaauuaaagucagag

SEQ ID NO: 3157068 - RNA, 19 nt, Artificial Sequence
  Description of Artificial Sequence: Synthetic oligonucleotide
uuaacuacgagccaauaaa

SEQ ID NO: 3157069 - RNA, 19 nt, Artificial Sequence
  Description of Artificial Sequence: Synthetic oligonucleotide
cuguaugagucaaauaacu

SEQ ID NO: 3157070 - RNA, 19 nt, Artificial Sequence
  Description of Artificial Sequence: Synthetic oligonucleotide
ggcccaaagugcuucgguu

SEQ ID NO: 3157071 - RNA, 19 nt, Artificial Sequence
  Description of Artificial Sequence: Synthetic oligonucleotide
uuggaugagucuuaauaaa

SEQ ID NO: 3157072 - RNA, 19 nt, Artificial Sequence
  Description of Artificial Sequence: Synthetic oligonucleotide
ccagguagugaguaaacuu

SEQ ID NO: 3157073 - RNA, 19 nt, Artificial Sequence
  Description of Artificial Sequence: Synthetic oligonucleotide
gcuccagacugggguuaau

SEQ ID NO: 3157074 - RNA, 19 nt, Artificial Sequence
  Description of Artificial Sequence: Synthetic oligonucleotide
gguagugaguaaacuugua

SEQ ID NO: 3157075 - RNA, 19 nt, Artificial Sequence
  Description of Artificial Sequence: Synthetic oligonucleotide
ggguuaaugucacacggcu

SEQ ID NO: 3157076 - RNA, 19 nt, Artificial Sequence
  Description of Artificial Sequence: Synthetic oligonucleotide
uggucuaucucaaugcuag

SEQ ID NO: 3157077 - RNA, 19 nt, Artificial Sequence
  Description of Artificial Sequence: Synthetic oligonucleotide
gguccaggcacaaaguccu

SEQ ID NO: 3157078 - RNA, 19 nt, Artificial Sequence
  Description of Artificial Sequence: Synthetic oligonucleotide
gcaucugugccuacucgga

SEQ ID NO: 3157079 - RNA, 19 nt, Artificial Sequence
  Description of Artificial Sequence: Synthetic oligonucleotide
cgcuauuccagacaggaga

SEQ ID NO: 3157080 - RNA, 19 nt, Artificial Sequence
  Description of Artificial Sequence: Synthetic oligonucleotide
caaccagguagugaguaaa

SEQ ID NO: 3157081 - RNA, 19 nt, Artificial Sequence
  Description of Artificial Sequence: Synthetic oligonucleotide
agauuuguuuguccuacga

SEQ ID NO: 3157082 - RNA, 19 nt, Artificial Sequence
  Description of Artificial Sequence: Synthetic oligonucleotide
cuguccgugggcaaauauc

SEQ ID NO: 3157083 - RNA, 19 nt, Artificial Sequence
  Description of Artificial Sequence: Synthetic oligonucleotide
gugugucggcugucacuau

SEQ ID NO: 3157084 - RNA, 19 nt, Artificial Sequence
  Description of Artificial Sequence: Synthetic oligonucleotide
ugcagaaggagacgcuauu

SEQ ID NO: 3157085 - RNA, 19 nt, Artificial Sequence
  Description of Artificial Sequence: Synthetic oligonucleotide
cugagaggguggucuaucu

SEQ ID NO: 3157086 - RNA, 19 nt, Artificial Sequence
  Description of Artificial Sequence: Synthetic oligonucleotide
ggguguguaccucaaucag

SEQ ID NO: 3157087 - RNA, 19 nt, Artificial Sequence
  Description of Artificial Sequence: Synthetic oligonucleotide
ccuuuguaugacaagcaga

SEQ ID NO: 3157088 - RNA, 19 nt, Artificial Sequence
  Description of Artificial Sequence: Synthetic oligonucleotide
uguccgugggcaaauauca

SEQ ID NO: 3157089 - RNA, 19 nt, Artificial Sequence
  Description of Artificial Sequence: Synthetic oligonucleotide
gguggucuaucucaaugcu

SEQ ID NO: 3157090 - RNA, 19 nt, Artificial Sequence
  Description of Artificial Sequence: Synthetic oligonucleotide
cgacuugcccuguccugca

SEQ ID NO: 3157091 - RNA, 19 nt, Artificial Sequence
  Description of Artificial Sequence: Synthetic oligonucleotide
gagucuuaauaaauuaucc

SEQ ID NO: 3157092 - RNA, 19 nt, Artificial Sequence
  Description of Artificial Sequence: Synthetic oligonucleotide
cccugcuggccuuugcgga

SEQ ID NO: 3157093 - RNA, 19 nt, Artificial Sequence
  Description of Artificial Sequence: Synthetic oligonucleotide
aguuauuugacucauacag

SEQ ID NO: 3157094 - RNA, 19 nt, Artificial Sequence
  Description of Artificial Sequence: Synthetic oligonucleotide
aaccgaagcacuuugggcc

SEQ ID NO: 3157095 - RNA, 19 nt, Artificial Sequence
  Description of Artificial Sequence: Synthetic oligonucleotide
uuuauuaagacucauccaa

SEQ ID NO: 3157096 - RNA, 19 nt, Artificial Sequence
  Description of Artificial Sequence: Synthetic oligonucleotide
aaguuuacucacuaccugg

SEQ ID NO: 3157097 - RNA, 19 nt, Artificial Sequence
  Description of Artificial Sequence: Synthetic oligonucleotide
auuaaccccagucuggagc

SEQ ID NO: 3157098 - RNA, 19 nt, Artificial Sequence
  Description of Artificial Sequence: Synthetic oligonucleotide
uacaaguuuacucacuacc

SEQ ID NO: 3157099 - RNA, 19 nt, Artificial Sequence
  Description of Artificial Sequence: Synthetic oligonucleotide
agccgugugacauuaaccc

SEQ ID NO: 3157100 - RNA, 19 nt, Artificial Sequence
  Description of Artificial Sequence: Synthetic oligonucleotide
cuagcauugagauagacca

SEQ ID NO: 3157101 - RNA, 19 nt, Artificial Sequence
  Description of Artificial Sequence: Synthetic oligonucleotide
aggacuuugugccuggacc

SEQ ID NO: 3157102 - RNA, 19 nt, Artificial Sequence
  Description of Artificial Sequence: Synthetic oligonucleotide
uccgaguaggcacagaugc

SEQ ID NO: 3157103 - RNA, 19 nt, Artificial Sequence
  Description of Artificial Sequence: Synthetic oligonucleotide
ucuccugucuggaauagcg

SEQ ID NO: 3157104 - RNA, 19 nt, Artificial Sequence
  Description of Artificial Sequence: Synthetic oligonucleotide
uuuacucacuaccugguug

SEQ ID NO: 3157105 - RNA, 19 nt, Artificial Sequence
  Description of Artificial Sequence: Synthetic oligonucleotide
ucguaggacaaacaaaucu

SEQ ID NO: 3157106 - RNA, 19 nt, Artificial Sequence
  Description of Artificial Sequence: Synthetic oligonucleotide
gauauuugcccacggacag

SEQ ID NO: 3157107 - RNA, 19 nt, Artificial Sequence
  Description of Artificial Sequence: Synthetic oligonucleotide
auagugacagccgacacac

SEQ ID NO: 3157108 - RNA, 19 nt, Artificial Sequence
  Description of Artificial Sequence: Synthetic oligonucleotide
aauagcgucuccuucugca

SEQ ID NO: 3157109 - RNA, 19 nt, Artificial Sequence
  Description of Artificial Sequence: Synthetic oligonucleotide
agauagaccacccucucag

SEQ ID NO: 3157110 - RNA, 19 nt, Artificial Sequence
  Description of Artificial Sequence: Synthetic oligonucleotide
cugauugagguacacaccc

SEQ ID NO: 3157111 - RNA, 19 nt, Artificial Sequence
  Description of Artificial Sequence: Synthetic oligonucleotide
ucugcuugucauacaaagg

SEQ ID NO: 3157112 - RNA, 19 nt, Artificial Sequence
  Description of Artificial Sequence: Synthetic oligonucleotide
ugauauuugcccacggaca

SEQ ID NO: 3157113 - RNA, 19 nt, Artificial Sequence
  Description of Artificial Sequence: Synthetic oligonucleotide
agcauugagauagaccacc

SEQ ID NO: 3157114 - RNA, 19 nt, Artificial Sequence
  Description of Artificial Sequence: Synthetic oligonucleotide
ugcaggacagggcaagucg

SEQ ID NO: 3157115 - RNA, 19 nt, Artificial Sequence
  Description of Artificial Sequence: Synthetic oligonucleotide
ggauaauuuauuaagacuc

SEQ ID NO: 3157116 - RNA, 19 nt, Artificial Sequence
  Description of Artificial Sequence: Synthetic oligonucleotide
uccgcaaaggccagcaggg

SEQ ID NO: 3157117 - RNA, 19 nt, Artificial Sequence
  Description of Artificial Sequence: Synthetic oligonucleotide
augcccgcauuuucagagu

SEQ ID NO: 3157118 - RNA, 19 nt, Artificial Sequence
  Description of Artificial Sequence: Synthetic oligonucleotide
aaaagaaugagcauaaucc

SEQ ID NO: 3157119 - RNA, 19 nt, Artificial Sequence
  Description of Artificial Sequence: Synthetic oligonucleotide
aaaugaccaccuauauaaa

SEQ ID NO: 3157120 - RNA, 19 nt, Artificial Sequence
  Description of Artificial Sequence: Synthetic oligonucleotide
aaccaaaugaccaccuaua

SEQ ID NO: 3157121 - RNA, 19 nt, Artificial Sequence
  Description of Artificial Sequence: Synthetic oligonucleotide
uaucucgaaccaaaugacc

SEQ ID NO: 3157122 - RNA, 19 nt, Artificial Sequence
  Description of Artificial Sequence: Synthetic oligonucleotide
aaccagagcucuuuagcuc

SEQ ID NO: 3157123 - RNA, 19 nt, Artificial Sequence
  Description of Artificial Sequence: Synthetic oligonucleotide
aucugucaugauagaccuu

SEQ ID NO: 3157124 - RNA, 19 nt, Artificial Sequence
  Description of Artificial Sequence: Synthetic oligonucleotide
augaguguucgcugggugc

SEQ ID NO: 3157125 - RNA, 19 nt, Artificial Sequence
  Description of Artificial Sequence: Synthetic oligonucleotide
uuacaggucuaaacacagu

SEQ ID NO: 3157126 - RNA, 19 nt, Artificial Sequence
  Description of Artificial Sequence: Synthetic oligonucleotide
aacuggauguuugaagcca

SEQ ID NO: 3157127 - RNA, 19 nt, Artificial Sequence
  Description of Artificial Sequence: Synthetic oligonucleotide
uuggaguacuuugucuuug

SEQ ID NO: 3157128 - RNA, 19 nt, Artificial Sequence
  Description of Artificial Sequence: Synthetic oligonucleotide
aauuggaguacuuugucuu

SEQ ID NO: 3157129 - RNA, 19 nt, Artificial Sequence
  Description of Artificial Sequence: Synthetic oligonucleotide
uaauuggaguacuuugucu

SEQ ID NO: 3157130 - RNA, 19 nt, Artificial Sequence
  Description of Artificial Sequence: Synthetic oligonucleotide
uugcaagaaucuuggagag

SEQ ID NO: 3157131 - RNA, 19 nt, Artificial Sequence
  Description of Artificial Sequence: Synthetic oligonucleotide
uucauguuuccuucaauau

SEQ ID NO: 3157132 - RNA, 19 nt, Artificial Sequence
  Description of Artificial Sequence: Synthetic oligonucleotide
uccaagguaaaucuuagcu

SEQ ID NO: 3157133 - RNA, 19 nt, Artificial Sequence
  Description of Artificial Sequence: Synthetic oligonucleotide
auaguccuuggcauggccc

SEQ ID NO: 3157134 - RNA, 19 nt, Artificial Sequence
  Description of Artificial Sequence: Synthetic oligonucleotide
uuccuucccacacaauggu

SEQ ID NO: 3157135 - RNA, 19 nt, Artificial Sequence
  Description of Artificial Sequence: Synthetic oligonucleotide
uugccggucucuuuacauc

SEQ ID NO: 3157136 - RNA, 19 nt, Artificial Sequence
  Description of Artificial Sequence: Synthetic oligonucleotide
uugucuagugacauaauuu

SEQ ID NO: 3157137 - RNA, 19 nt, Artificial Sequence
  Description of Artificial Sequence: Synthetic oligonucleotide
aaaaacaaucucaagacuc

SEQ ID NO: 3157138 - RNA, 19 nt, Artificial Sequence
  Description of Artificial Sequence: Synthetic oligonucleotide
uguccaagguaaaucuuag

SEQ ID NO: 3157139 - RNA, 19 nt, Artificial Sequence
  Description of Artificial Sequence: Synthetic oligonucleotide
uuguccaagguaaaucuua

SEQ ID NO: 3157140 - RNA, 19 nt, Artificial Sequence
  Description of Artificial Sequence: Synthetic oligonucleotide
uuggcauggccccagucuc

SEQ ID NO: 3157141 - RNA, 19 nt, Artificial Sequence
  Description of Artificial Sequence: Synthetic oligonucleotide
uuuccugagagguaguuug

SEQ ID NO: 3157142 - RNA, 19 nt, Artificial Sequence
  Description of Artificial Sequence: Synthetic oligonucleotide
ucaguguccucaucuaccg

SEQ ID NO: 3157143 - RNA, 19 nt, Artificial Sequence
  Description of Artificial Sequence: Synthetic oligonucleotide
agguuggaucaauagggcc

SEQ ID NO: 3157144 - RNA, 19 nt, Artificial Sequence
  Description of Artificial Sequence: Synthetic oligonucleotide
agaacugaagcaaucgaac

SEQ ID NO: 3157145 - RNA, 19 nt, Artificial Sequence
  Description of Artificial Sequence: Synthetic oligonucleotide
ugcgguugaaggucaaugg

SEQ ID NO: 3157146 - RNA, 19 nt, Artificial Sequence
  Description of Artificial Sequence: Synthetic oligonucleotide
agcaguaaguagugagcac

SEQ ID NO: 3157147 - RNA, 19 nt, Artificial Sequence
  Description of Artificial Sequence: Synthetic oligonucleotide
uacgguuccaguuggugac

SEQ ID NO: 3157148 - RNA, 19 nt, Artificial Sequence
  Description of Artificial Sequence: Synthetic oligonucleotide
agcacgaaccagucagaac

SEQ ID NO: 3157149 - DNA, 488 bp, Cricetulus griseus
atgaaggaggctactaccagtttgtcatcccagacctatcacctaagaacaggtcctactgcggaacccagtcagagtacaagcctcccatctaccacttctacagccacatcgtgtccaatgacagcacagtgattgtgaagaaccagcctgtcaactactccttctcctgcacctaccactccacctacctggtgaaccaggctgcttttgaccagagagtggccactgttcatgtcaagaatgggagcatgggcacatttgagagccagttgtccctcaacttctacactaatgccaagttttccaccaagagagaagcccctttcattctggagacatcggaaatcggttcagacctgttcacaggagtggaagccaaagggctaagcacccggtttaaagtggtcctgaacagctgttgggccacccctcagctgacttcatgtaccccttggtatcggtccattctccaatcagtttgaaac

SEQ ID NO: 3157150 - DNA, 509 bp, Cricetulus griseus
ctgcgggccgatttagagcagcggctcggcgccctcgctatccgcacggagatcgtggagcaccccgaggtgtttacaattgaagaaatgatgcctcatattcaacatttgaaaggagcacatagtaagaacttatttcttaaagacaaaaagaagaaacactactggctggtgacagttcttcatgatagacaaattaatttaaatgatcttggcaagcagttaggagttgggagtggaaatcttcgatttgctgatgaaacagccatgcaagaaaaattaaaagttggtccaggctgtgccacacctctggcactgttctgtgatgatggggatgttacatttgttttggattcagcttttctggaaggtggacatgaaaaagtatactttcatccaatgactaatgctgcaaccatgggcttgagtcctgaagactttctcgtatttgtgaaggctacggggcatgatcccataattctaaactttgattaaaaactgattgggag

SEQ ID NO: 3157151 - DNA, 416 bp, Cricetulus griseus
  modified_base (178)..(178): a, c, t, g, unknown or other
  modified_base (267)..(267): a, c, t, g, unknown or other
gtgtgtctccatcatggatgcttttcagagcattttaaaattctttcttaaccaaagaactgctattggctacagcttcatggctttgctgaccgtgggaagtgaacgttctcttctcactcgtggcctttaagtgcccttgcagcgctgagaatacagcctatgggctggtttttcncttcgcccctgcctgggtgttactgatccttggattctttctgaataacaaggcatggagactcttcactggctgctgtataaaccccnggaaaatcttccgtaggagacgctgctgccgcttcttctacgtcctgggccacatcacactgagttcattggtggctccagtgatgtggctctctgtggctttgcttaatgggacgttttatgaatgtgctatgagtgggacaagaagc

SEQ ID NO: 3157152 - DNA, 479 bp, Cricetulus griseus
aggaatctctgttggaagagatgacaatgagtctgggccccttgttgttggtcttcatgctgggtctgatttccatcccaccaactctgtcccagaatgaccccaggtatatcacattcctgaaccagcactatgatgcccatccaacgggtcgggacgacagatactgtaacagtataatgagaaggcgaaagctgacctctccctgcaaagagctcaacacctttattcatggcaccaaggacaacatcaaggccatctgtgaaacaagtggaactccttacacaaataacttaagaaaaagcacctctcaattccagatcaccatttgcaggcatagtggagggtctccccggcctccatgccggtaccgagcctccagagggttcagatacatcgttattgcctgtgaaaatggcttacctgtccacttagacgagtcctttttcagttcatagccagcaggcccctggcacaga

SEQ ID NO: 3157153 - DNA, 267 bp, Cricetulus griseus
  modified_base (35)..(35): a, c, t, g, unknown or other
actgacctgaaacaaaaaggaaagctggacgaggnaacccagcgtctagaatgtctatatgaaaagctctgtgaggggacactctcaccgcatgtcctggctggactccacgaagttgcccgatgcgtggatgaaggcagctttgagcagggtcttgcagtgcatgcccaggtggcggcctgcagcagcttcagcgaggtatccagcttcatgcctgtcctgaaggctgtcctcaccatcgcacacaagctgcagggctaagccagg

SEQ ID NO: 3157154 - DNA, 234 bp, Cricetulus griseus
ttttgcggtggtcggcatgcagctgtttggaaagagctacaaggagtgtgtctgcaagatttccaatgattgtgagcttccacgctggcacatgcatgacttcttccactccttcctgatcgtgttccgtgtactgtgtggagagtggatagagaccatgtgggactgcatggaggtcgccggccagaccatgtgtctcactgtcttcatgatggtcatggtgattggcaacct

SEQ ID NO: 3157155 - DNA, 394 bp, Cricetulus griseus
cagtgaagccaccacagagcctgagccagcgaaaccggaaggggtggtgatgaatgggaaagaggaggagccaagtgcagaagaggccctcagcaaaggactgggccagatgaccaccatgacactgatggtgacagctacaaggacaaaaccgagtcagttaccagtggccccttgtccccagagggctcgccctccaagtcaccctccaaaaagaaaagaaattccgaaccccctccttcctgaagaagagcaagaagaaggagaaggtggaatcctgattggtggctcctgctacctccctgccctccttccctgcccttctcccaactctgcccctggagcacagggccaatgagggatcgagaaggacctcggatcacactcagagggg

SEQ ID NO: 3157156 - DNA, 529 bp, Cricetulus griseus
aaactttttttttttttttactttaaaacactacttcatagtaaataatagcttgtactaaccataaatttcatggcagtttttccatgatgagagattaatcaaaatactttcatgatattttgttttacatattttgtgttatgtttgagtacagttcaggtctcatccttttaaaatcccctttgctaacccttctggttttataaactgagtttgttaacatttattataattaaggggcctatctggaataatatatatttttatgctttgcctttcctacctgattgatactgcatttgtctttgatcatttttaatgaagatttatttttgcagaatatgcttaataactttctaatcagtaagtaaatggaattaaatggtttatatttaaataaaaggatctgctcaagggttcctccagtagaatgattttcaaaacctcaacctgtagtgcttgtgtctgggatccttgaactggcaattttttgtcttccctgctctaaatagccacagtaaattaa

SEQ ID NO: 3157157 - DNA, 1019 bp, Cricetulus griseus
ctcatcctacccttccagagggtcacccgcctcaagatgctggtggagaacatcttgaagcggacggcaccgggctcccaagatgaggacatggccaccaaagccttcagtgcactcaaggagctggtgcaggaatgcaactccagcgtgcagtccatgaagaggactgaggagctcatccacctgagtaagaagatccactttgagggcaagatctttccactgatctcacaggcccgctggctggtgcggcacggggagctggtggagttggcccccttgcccgctgcgccacccgccaagctgaagctgtccagcaaggccgtgtaccttcacctcttcaatgactgtctgctactgtcccggaggaaagagctcgggaagtttgctgttttcgtccatgccaatatggctgagctgcaggttcgagacctgagcctgaagctgcagggcatcccaggtcacgtattcctgctccggctgctgcatgggcagcgtgccaggcaccagctgctgttgagagcacgaactgaaagtgagaagcaacggtggatctcagccttgcgaccagccagcccccaggaggacaagcaggtcacctgtgatggagaagaccgcccccaggtccagtgcgtgaggacctacaaggccctgcagcctgatgagttgaccctggagaagacagacatcctggcagtgaagacccggaccagtgatggctggctggagggtgtgcgcctcgctgatggtgagaaggggtgggtaccgcaggcccacgtggaggagatcagcagcctcagcgctcgacttcgaaacctccgagagaacaagagggtcaccaatgctagcagcaagctgggggacccgcctgcctgatgctcccctggcacccagctgggtctgctcctgtgctgtgggcttctgtgtgtctgggggcttctctgcaggcgctgggtaacagttctgtaaatacgccctggctgcctctgctttgacgtctgaccctagggcctttgcac

SEQ ID NO: 3157158 - DNA, 478 bp, Cricetulus griseus
  modified_base (274)..(274): a, c, t, g, unknown or other
tcatctccaagtcccctctcctgttcccccagggcccccacgagtggcggtctcttctcccccaggcctctcttttgggctcactgatgattgcttccccattgctggggtttatgataccaccacagaaagcaagtgtagcatcaaggcggctgtggccaagaacatgctggaccccatcactgggcagaagctgttggaggcccaggcagccacagggggcatcgtggaccttcttagccgagagcgatactctgtgcacaaggcggtggancggggactcattgagaacacctccacgcagcggctgctcaatgcccagaaggccttcaccgggcattgaggacccggtcaccaagaagaggctgtcagtaggtgaggccatccagaagggctggatgccccaggaaagtgtgcttccccacctgctggcacagcacctgaccgggggtctcattgaccccaagaggacgggacg

SEQ ID NO: 3157159 - DNA, 966 bp, Cricetulus griseus
cgctgtggaaagtgcccagttcttgttgctacttcagtagctgccagagggcttgatattgaaaatgttcaacatgttattcaatttttgtatcttccttctaccattgatgaatatgttcatcgtattgggcgtactgggcgttgtggaaatactggcagagcaatttcttttttttttgtatactgaatctgataatcatttagcacaacctctagttaaagtactatcagatgctcaacaggatgttcctgcatggctagaagaaattgcctttagcacatatgtacctcctggcttcaataatagcacaagaggaactgtgtttgcatctgttgacactaggaagaatttccagggcaagaacactttgaatacagcgggaatctcttcttcacaagctcccaatccagtcgatgatgagtcatgggattaaagcaaacaaacatacttcaagtctcatagttttgatgcagagaagtcttatatctcctgttcttctgttcttactcccaacccttaaaataaccagctacattgacgactagttatgtgagatgctgaaagttacaacattgcagttactgatacaaatggtgttaactggaaatattaaagcattctaaatgtttcttatttctagtatattcttcagaaagttaagacatgtttcatgtccaagtgctaagtcttagtatagtgcttatgatcccataaaacaagcaataggatctgaggtacttttggttaattattgggtctaatttctacttgatcctttaaaagaatagtgtgttggtgcaatgtgataatatgattttcatgaaacagtggaaactgaagcctttcagttatttgatttttatatcatcagacatgtaatgaaaatggttgtttgtcaatgtgagctctgtacttggtggtgtgacaaatgtttgtcttttataattatacagtattttcctt

SEQ ID NO: 3157160 - DNA, 1418 bp, Cricetulus griseus
atcagggacacatataaccaatcaatacctcagcctcctcctcggaaaattaagcgacccaaacgaaaaatgtacagggaagaacccacttcaataatgaatgcgattaagctacggcccaggcaagtcctgtgtgataagtgtaaaaacagtgttgttgcagaaaagaaggaaattagaaaaggtagcagtgactcttctaggtatgaagataaaaaacggagaaatgatagtgtagctactgtagaacaaaaaactgaaaactgaccataaagttgatagggaaaaaccaaaacgagagccagagaagaaatgctgtggtgagggtttccaatattgctcacagcagaggcagagtagtcaaagtttctgctcaggcaaacacgtcaaaagctcagttaagtaccaagaaagtgctccagagcaagaacatggatcacgcaaaagctcgggaagtattgaaaattgccaaagaaaaggcacagaagaagcaaagtgaaacctctacttccaaaaacacacactcaaaagtccatttcacacgtcgctatcagaatcctagctcaggttccctcccacctcgagtgcgtttaaagccacaaaggtacaggaacgaagaaaatgactcttccctgaagacaggactggagaaaattcggagtggcaagctggcccctaagccgcagtctcgctgcacctccacccgctcagcaggtttttcctcctggcagtatgcatgtaccttccacttcttccgtttcctcttcttcaaaggaagagaaagcctcagtaattccttgaaaatgaaaatcttttccaaaatagtctctaaatgtatcacaccagatggcaggaccatatgtgtaggggacattgtttgggccaagatatatggcttcccatggtggccagcccgaattcttactataactgtaagccggaaagataatggtcctttaagcccgacaagaggcttgtatttcatggtttgcatctccaacaacatctttccttgctctttcacaactctccccctttctagaaaacttccagttacgttttaataagaagagaaagggtctgtatcgcagggctatcacagaggcagctaaggctgctaagcagctgacccctgaagtgcgggctttgttgacacagtttgaaacgtgaacatggacagtaaggtaggcgagaaccgctggagtggtctcagttcccttgctagttaggaatcatttccaccagctagcttggccaaactggaaagaaattgcactcagttggctttttatacttatatagccatttttagactaagaagcttaaaactgaacatgctgtcaaattttctctaaaggaagtgagattttttagccagtattttccagttttgaaatctaaaaccatcctaaggcata

SEQ ID NO: 3157161 - DNA, 344 bp, Cricetulus griseus
aggaatcttcaaaactccatcccaactatttggttcctggtgtcatcaatgactagaccgaaaacctagggaacctattacttcccctgggaagtcagtgatggccaagttcctgacggaagcacactgcgaacatttggcaggttgtgcttctacgacatgacacgctcccttgccaccctgacagcacggtacacgtctgatcagtgtcagctgcgagtctgcaccaagctggtggagccatttgagccacatgtggacttcctgtacatggttctgggggagctggagcatgaggaggatggaggtcctgtggtgaaggcccggctgctcacctgtgtgga

SEQ ID NO: 3157162 - DNA, 422 bp, Cricetulus griseus
  modified_base (412)..(412): a, c, t, g, unknown or other
gccccatattccgtctcggcaaaatcgtggaggatgcagggcacagcttccaggatatggcagttgagggaggcatcatgggcatccaggtcaagtgggactgcaaccttgacagagccgcctccctctgcctgcccaggtattccttcaggcgccttgacacccgggacctggagcacaacgtgtctcctggctacaacttcaggtttgccaagtactacaaggacctcactggtaacgaacagcgcacactcatcaaggcatacggcatccgctttgacatcatcgtgtttgggaaggctgggaagtttgacatcatccctaccatgatcaacattggctctggcttggcactactgggggtgcgaccgtactatgtgacgtcatagtcctctactgcatgaagaaaagntattactacc

SEQ ID NO: 3157163 - DNA, 2335 bp, Cricetulus griseus
agttcttttgtcctaagaagatggtttgcctagtcctgaacatgtactgtccgttctgatgggacaagatccaatatgaatgtaagtgatggaggaagacgacgctatgaggataatgaacatacattacgaatatatcctgggacaatttcagaaggcacaatttattgtccaattcctgccagaaaaaactccacagctgctgaggtgattgactctcttataaatagacttcacctagacaaaacaaaatgttacgttttagcagaggtaaaggaatttggtggagaagaatggatactcaatccaaccgactgtccagttcaacgaatgatgttgtggccccggatggctttggaaaatcgcttgagtggagaggactaccgcctttcttctgaggaaaaaaaccttgatggatcaatccattatggtagcctccaatcatggctacggataaccgaagaacgccgaaggatgatggaaaggggtttccttccacagcctcaacagaaagactttgatgatttatgtagcttacctgatttgaatgagaaaactctcttagaaaacctacggaaccgcttttaagcataaaaaaatttatacttatgtttggcagtattctaatagctattaacccattcaaaatttcttcctatttataaatcctaaatatgtcaaaatgtatgataaccaccagttgggaaaacttgaaccccacatatatgcggtggcagatgtagcttaccatgctatgcttcagcgcaaaaagaatcagtgtattgtgatttcaggagagagtggttctgggaagacacaaagcacaaactttcttattcatcaccttactgccctcagtcagaaaggatttgctagtggagtagaacagattattctttggagtgaggaatctctcttagcaccatccttttatcagtcaagacaaagaatagagaggccttcttctctgtatatccaaaataccccaagtaagggagaagctggtgtactagcttccccatcagcagtcactaaaagagatgcaactcttgccacaaaagatagtccctccattcatttacctccaaaagaccgacctgtcaccctgttctttgaaagaaaaggaagcccatgtcaatctctcaaagaatcatccaagacagaaagaataggcacccatcataatgttgcctgtaaactctctaataatcgaattacagaaagagaacactttaggtcagctcactcttatggccacagatctgatgacccttccagagggggaagctcaagagccattttcttcacaccgaaagacaatatcacagtggaaatcctcaagtccacaaacaagatgaaccagcttggaaatctaagttagcagggccgggccaacgagaggttgccagaccggcccataaaaagaaagctcgaatggcgcggacgcgctccgatttcttgactagaggtacttttgccgatggggagggggatacagaggaagatgattacgatgacattattgagccccttctctcccttgaccaagcttctcactctgcctgaaagtagttgccaagtctgagccttcaagcaagttacgaaagcagctaagaaagcagccagactctgtggactcaggcatctcttccgtctcttcatgtttatctaacactacatcatctcatggcactagaaagcgatttcagatttattccaagtctccattttaccgagctgcctcagcttgtgaggccctgggaacggaaggaccactaggccaagccaaatccctggaagacaggcctcagttcatcagcagaggaacctttaaccctgaaaagggcaaacaaaactaaagagtgtgaaaaattcacctcagaaaccaaagagacccaagaagggacagtcacatctggccgaaagaaaactgtggacccagactgcagctctgcacagcagttgccactctttggaaataatgagtttatggtctgaatgacagatggcgtcccatgtgaccatgtaatcacttcgctacaagtactcacatacaacattgcatgagtgttatagaaagctgccaaaagaaatttagaaagttttattatgatctatttaaaactttatcttcttttttcagaccatcagtattagatgaaaaaaaaatcaagaactacttgaagctatttttgttaatatacttattcctgaagtttattgtaaatacacatgtatagtatgcctagttcttttaactttgtgcttcccccttccttcccactggagttcttcctacagatgagaggccattggacaggtggtgagaaccatt

SEQ ID NO: 3157164 - DNA, 2553 bp, Cricetulus griseus
gatgatgagaaacgacggatagttttttctgtgaaggaaaagtacacaaagacaaaagatcgctgaagaaataggcatagaggggagtgacgatgacgcattagtaactggagagcaagacgaagaactcagccggtgggaacaggagcagattagaaaaggaattaatatccctcaggttcaagcaagtcagccgactgaagtgaatatgtactaccagaacacttaccagacaatgccttatggggcatcctatggcataccttatagttacacagcctatggatcatcagatgccaagcctcaaaaaacagatagtacagtccctttcaaaactcccagtaatgagatggctcccgttactattgatttggtaaagaaacagcttaaagacaggttggactccatgaaagaattgcacaaaaccaatcgacagcagcatgagaagcacctgcaaagccgagtggactccaccagggctattgagagtattaaggaaggggcttcgtgggggtattggtgaaacggtataaaatttttgcaagaaatgcgagggtatgtccaagacttgcttgagtgtttcagtgaaaaggtgccactgattaatgaccttgaatcagcaatgcatcagctgtacaaacagcgcgcttcccgccttgtccaaagacgacaagatgatattaaagatgaatcttcggagttttcaagccattcaaataaagctttgatggcaccaaatcttgattcctttggacgtgatcgggcactgtatcaagaacatgcaaaacgtcggatagcagagcgggaggctaggaggactcgccgaaggcaagccagagagcaaactggtaagatggcggatcaccttgaaggcctttccagtgatgatgaggagacgtcaacagatattacaaatttcaatctggagaaagatcgcattgtgaaagaatccagcaaagtgtttgaagacgtccttgagagtttctattcaattgactgcattaaagcacagtttgaagcatggcgttcaaagtactacacgtcctacaaggatgcgtacattggtctttgtctgccaagactgttcgcccctctcatcagactgcagctcctcacctggacccctctcgaggcaaaatgctgtgactttgaatatatgctgtggtttgagtctctgctgttctatggctgtgaagaacgggagcaggagaaggacgatgctgacgttgctctgttacccaccattgtggagaaggtgattcttcccaagctgacagtgatagctgaaaacatgtgggatcccttttctacaacacagacttccagaatggttggaatcacactaaaattaataaatggctatccttcggtagtcaatgcagaaaataaaaacacacaggtgtatctgaaagcacttttattgaggatgagaagaactttagatgatgatgtattcatgcccttatatcccaaaaatgtcttagaaaataaaaattctgggccttacttattttttcaacgacagttttggtcttctgtcaagctattgggaaatttcctccagtggtatggcattttttcaaacaaaactcttcaggagttgtcaatagatggcttgttaaatagatacattctcatggcttttcagaattcagaatatggagatgacagcatcaaaaaagcccaaaatgtaatcaactgtttccccaagcagtggtttgtgaatctgaaaggagaaagaactatttctcagttagaaaatttttgccggtatcttgtacatttagcagatacaatttatagaaatagtattgggtgctctgacgtggaaaaaagaaatgcaagagaaaacataaaacagatagtaaagcttcttgcaagtgttcgggctttggatcatgctgtgtctgttgcaagtgaccacaatgtgaaagaacttaagtctctgattgaaggaaaatagatctgagaccgaaaagtgtttgctttgctaccattcccagtgtgtaaattttgtatatatgtaaagtttcttaaactgtaagataactgtttaaatacaaaaacattatattaatactgtgtccttaaatgtgatttcttcagaacgaaaggaattcagattatttctaggagtctatgaatgttttccttactgcctgtcatattttgtttatggaagtattttgtatcgtcattaaattaacttggtttaagtgtcctctataaatgatgtgtgtgcagtgtaaattgtgtaattatgctcccggcccagcttatagatacatgaatttctattgtccatcatattttaaatcccacatatgtgagttatatatgcaataaagaatatgccttgctgactagacgcacccaggcaatttactattggtggtcttctgtaatgtttataccacattgtaaatactcagagaaacttgttttaaagttaatgctttctgattctgtggttttcaaaagaggaactttttggaaattaaggactattgtttgataattatgtgtaattaagctttagccaagcattaaatt

SEQ ID NO: 3157165 - DNA, 234 bp, Cricetulus griseus
tgccttctctcgctataaaaaagctgcactcttccctgatggccgaagtgttggagacaagatcttcaggacggggggctctgaaaagcctttcagggatgcccaggagatgtgcaggcaggctggagggcagctggcctccccacgttctgctgctgagaatgccgccatagagcagctgatcgcaccccacaataaggctgcctttctgagcatgacagacgtggacacaga

SEQ ID NO: 3157166 - DNA, 697 bp, Cricetulus griseus
ctaagggaagcgtcctgagtcactatggagacggggcacaaaagcagttctagctgcagaaaggatacccacgaaatctgctcccctggattactggtgttcacaggctgctccgagcaggatgccaacttggctaagcaattttggctcggggcgtccatgtatccccctcgccgaactactcagttggttggctgaccaagaaacaagcagtcagcggctaccggtggccaggaattctaaagaccttgtgagggagaaaattctgcttggtcctttccctttgatcaaacaaggatctttgctaaagtccaaaagattcaagaatctgaagagaaggcaaagtttcttgaaaggccaaaagagagatgagattatccaacttctaagaaacaaagagaagagagaattttgaaagaactggtttcattacctcataaacccaaggccaagtacctgaagcaaaggaagtctcatcagagtcagacaaacaggaacaagaagaagtcaaagccttggaatgatttgattgatagatggaagcaggtgactggcatgtattcacttttgaaacaagttatgctaacatcaggatccctaggtaaaagatgtgcagatttccagaaatttgataactactgaacattcatgtttgaatagactaaaataaaagttaagaatacagaaaaaaaaaaaa

SEQ ID NO: 3157167 - DNA, 237 bp, Cricetulus griseus
gtgtgtggcaactctccacagggcctggtctgccatcctgtttcccctgtcctttctttgtcatgtttgagaattaatgagtgtacaaatttttgtattgcttttgactttttttagaaatgggtgaagaagtctaaatgggggagggaaagtctcttatgatgtgaattaacttgaaatcacaaggcaaacaagtggttggttattcattataatcaagaatgttgccaaaacaac

SEQ ID NO: 3157168 - DNA, 311 bp, Cricetulus griseus
ctgggacaaagaccgccagcccctctaccgcacacaatacctaaaaggacgtcaacagatccatgcgcgtgttcatcgaccacggcaaccatctccacatccgctttacccagttgagtgaccggggcatctattactgctggcggcaagggttgagaatcgctggcttccggttgggagtaacatctcgaggacgctacccagcctcactctcagaccccgagactcgcagtgctgtggagctcaccctgataggctatctgctcatcaccgcaatctttgtcaccattcatgtctgtcggtgctgttgc

SEQ ID NO: 3157169 - DNA, 446 bp, Cricetulus griseus
gttaacatgagcgagttggtcaagatcatccggcgccgcctgcagctcaaccccacgcaggccttcttcctgctggtgaaccagcacagcatggtgagcgtatccacgcccatcgctgacatctacgaacaggagaaggatgaagacggattcctctacatggtctatgcctcccaagaaacctttggcttctgagtcaggaggaggggtgggggatggttggggattctggtcaagctttctccagggaggtcctggctcctaagctgagctatttcattcccgagtgggttaggcagagatgtgaactccctacccctcccctggtgggggacaccagccagcctaccatgctctggtgtaggtcctgccagtcacgttagggttgctcctctgggtactggctcagttgggagtgggtggggaacagcacccctgctgtgtgg

SEQ ID NO: 3157170 - DNA, 2510 bp, Cricetulus griseus
gtcattgtatctcgaacaaactttatctcatcacacacagagaagcctgttagaatagttggactgtccactgcattagctaatgctcgagaccttgctggctcaatatcaagcagatgggtttgttcaacttccgaccatcagttcgcccagttcctctggaagtccacattcaaggtttcccgggtcaacattactgcccacgcatggctagtatgaacaagcctgcatttcaggaaattagaagtcattctccagccaaacctgttttgatatttgtctcatcaagacgtcaaactcgacttactgctttagagttgatagcttttctggctactgaagaagaccctaaacagtggttgaatatggatgagcaagagatggagaacatcattgggacaatacgagattccaacctgaagctgactctagcgtttgggataggaatgcatcatgctggactgcatgaaagagaccgaaaaactgtggaagagctgtttgtgaactgtaaagttcaggttctcatttgctacaagcacattagcatggggtgttaaactttccagctcacttagtaattattaaaggaacagaatattatgatgggaaaacagacgttatgtggattttcccatcacagatgtcctgcagatgatgggtcgagctgggagacctcagtttgatgaccagggcaaagctgtaattcttgttcatgatataaaaaaagattttataaaatttctttatgaacctttcccagtggaatcaagcttattaggagtgctttctgaccacttaaatgcagagattgctggaggtacaataacatctaagcaagatgcaatggattatatcacatggacttactttttccgacgtcttatcatgaaccccagctactacagcttggacgatgtcagccacgactccatgaacaagttcctgtcacatctgattgagaagtctctggttgagttggagcattcccactgcattgaagttgcagaggataaccgcagcattgagccactagaatatggccgaattgcctcctactactatttgaagcacaaaacagtgaagatgttcaaggaccgtttgaaacctgagtgcagcactgaagaattgctttcaattctgagtgatgcagaagaatacacagacttgccagtaagacacaatgaggaccatacaaacagcgaattggccaaatgtcttcccattgaatcaaatcttcattcatttgacagtcctcacaccaaagctcatctcttgcttcaagcacatctcagccgagccatgctgccctgcccagattacgacactgataccaaaacggtcttagatcaagctcttagagtatgtcaggccatgctggatgtggctgccagccagggctggctggtaactgccataaacatcacccacctggttcagatggtgatccaaggccggtggctaaaggactcatcccttcttacaataccaaacatagaacagcaccgtcttcaccttttcaggaaatggaaaccacccataaagggcccacatggtaggtggcgaacatccatcgagtgccttcctgagctgatccatgcctgtgaagggaaagaccatgtattcagctccatggtggagaatgagttacagtcagcaaaagcaaagcaggcatggaatttcttatctcgcttgccagtgataaatgttggcctaagtgttaaaggctcatgggatgactcagtcgacggacataatgaactctccatttcaactctgacagcagacaaacgagacgacaacaaatggatcaagttgcatgctgatcaggagtatgtgcttcaagtcagcctgcagagagtccattttgggctccacaagggaaaacacgagaattatgcagttactcctcgatttccaaaattaaaagatgaaggatggtttttgatattaggtgaggtggataagagagagctaattgctttaaaacgagtaggatttgttcgaactcatcatgacatctccctctctttctgtactcctgaaacacctggaagatatatcttcaccctgtatctcttgagtgactgttatcttggcctagaccagcagtatgatatttatctcaatgtcacaaaagcgaacatttctgcacaggtctctgatgacttcactgacttgacagtatagtaacctgacctaaacaagccacttgaaagaagtgactaagagtcttggctgttcaatcatctggacaagtggaattacttggtgtctatcttggcagaatcaacttctaaatctcaaaacatctagaaaattgacagtgactacagtgatgattccagcaacattagctacagaggcctattaaaaagtgctgccttttgtaacagcttcatgggttttttacgtgtaagataagtaagcatatagtattatttttaagttgtgtatattggagatgatggttgtaagttatccaccttcacatctcataatgtactgtttac

SEQ ID NO: 3157171 - DNA, 412 bp, Cricetulus griseus
gtttcctgagaagagagatttcaagacactttagtaacagcttggtccctcttttcctctgtaggaacttatttcaatagtaatatcaacaacaagatgtactgagactgcttggtaatctaaacaaactaccagtgagaaacctgatgacaggttgtggagcctggtgattccaaacaaagccatcgcctgcattctttctccttctggtgctacagctccgagggcccttcacctttctgtctgtgaaatacaactgtggcttttttcagtagaagagtatgttggcggtttcgctatgttctgggggtgggagggaagaaaggaaaaagtaccattggggaggggaaggcttaatatttatttggttattcaaaatacatatcagagtttagatttccagtcttagttg

SEQ ID NO: 3157172 - DNA, 374 bp, Cricetulus griseus
taccctgctgggcccaggagtcatgccagacacaccagtggaggacgccctcttccaaatcatacactgcttccaccactatgcttcccgggaaggggacgtggagaccttgtccctggaggagctgaaagccctcctcctggatagtgtgcctcgcttcatggacaccttgggccgcaggcagacatactacatcacagagctgtttcgggtggctgacaaaaaaaaggcaaccagatctgctttgatgagttcctgtacatcttgggcaaactggtgaaggactatcacctgcagttccaccggcaactgtgtgcacactactgcgcccagcacagcctctactagagagaggacaggcagtgtctcaccac

SEQ ID NO: 3157173 - DNA, 1664 bp, Cricetulus griseus
gtacttcaagggactccttgtgaagtgcactggtgcgcttctgggcgttggagagacaatttaatcagtgacaggaagccggctctctctaagcaagtgaccagctgcagtcagacaagctccccaaggagggtcccaggagtctcccacaccacctgtacctgccatggagcctctgaaggcgctgctgctcctgtcggagtccttggggctcttgctgaactctgtgtggtaccaccgatacacagccagctggtagagaagctgggccagcatctcttaccttggatggaccggatctcctcagagcaactgaaccccagcatctatgttggtcctgcgcctttccagcctgcaggctgggaccaaggaagatctatacctgcatagtcctcaagctcaattatcagcagtgcctcctggggtctgcctccagcaatgacaacagtgattgccagaccaagttttctgcaggccacctggccctctacctgcttgctctcagggccaactgcgagtttgttcagagccgaaagggtgacaggctggtgtcacagctgaagtggttcttggaggatgagaagaaagccattgggcataatcatgaaggccacccccacagcagctattaccagtacagcctcagcatcctggcactgtgtgtccaccagaagcgggtccatgacagcgtggtgggaaagctcctgtatgctattgaacatgaccaccatgtacgccagggccacctctctgtggacacagaagccatggccggcttggccttcacctgtttggagcgtttcgttttcaaccctgatctgagaccacgaatcaccatggccattgacaaagttcgagagaagatcctgaaggcccagacccctgagggcaactttgggaacatctacagcaccccactggcactgcagtttctgatgacctcccctgcttctggggtagaactgggcacagcatgcatcaaggcaagagcatctctgcaggccagcatacaggatggggccttccagaatcctctgatgatttcccagctgctacccgtcctgaaccagaagacctacctggatcttgacttcccagattgccaggcacccagggtcatgttggtaccagctgtggaggattcttcaccagcacacatcccagaggtcatcagtgtcacgctgaaggtctccagtgtcctgccaccatacaaacaaacaatttctgtccttgctgggtcctccttggaagatgtcctgaagatggctcaaaacataggaggattcacgtataggacacagccctccttgtcaggcccctacctgacatctgtactcaggaaagaagttggggatcgagaattctggcagctcctccgagaccctgacacccccctgctgcaaggcattgctgactacaaaccccagaatggggaaaccattgagctccggctagttagttggtagcctcgggctccctcctgatgtccttggcctctgctgccacctcatgtgtacttggagcagagtctctcagatcacctccattatctctacaaagaggatcctaagccactgcctacctggaagcaggaaggaaaaacctcccctagggaggctgctagtttaagtctagccctgcctgaccccagggtcttttatgaa

SEQ ID NO: 3157174 - DNA, 365 bp, Cricetulus griseus
gaaagagctgcaggctgcacttgctagctgatgagaagtacaaaagggagaatgatgccaagttacgggcagttgaacaaagagtgccttcctatgaggagttcagaggtattgtccttgtcatcacacctgaaaacctctggaacagaaggacaagatgggaggaaaaaagaagtgtgccctggaatagtcacactactagggaaaggacttttgaggatgtggccactgaaaataccccaggagaaaatcacccttcctgcctgcgacctctgcagagttttaccgtgattggcggagacacttaagaagttgggtcagagcgctaccaagccctgcttcaacttgggggtcccaagctgggc

SEQ ID NO: 3157175 - DNA, 271 bp, Cricetulus griseus
ctcagccttggccggaactgctgactcttggccccgacctgcacggaactctggacactgtggtcttgccgggtccacctcacagggctgcttctattaagggctggctgttacctccagcagcctcatcatgacccagcagggatggggagggtgaccccggagctggaggattctctttaagcctggtctttagtttggctgaaggccgaagctggttcttgatttacatcacagtagggcccttcgaggggctggactggtcctgctg

SEQ ID NO: 3157176 - DNA, 587 bp, Cricetulus griseus
tcattcccagacagactatcatagatatcaatctgaagggtacccagaacctgttggaggcctgtgtccaggcttgtgtgccagccttcatctacaccagcacaattgaagttgcggggcccaactcctacaaggacatcgtcctaaatggcaatgaggaagagcaacatgaaactacatggtctcattcatacccatacagcaaaaagatggctgagaaggcagtgctggcagccaatggatccaccctgaaaaatggtgacactttccacacttgtgccttaaggcctatgtgggcttcgcctaatccagtgaggcctcctctgcccctgctgtactggcttgccttcctgctggaaactgtgagcttcctgctgcgtccaatctacaattacccagcctccctttaaccgccatttggtcacactctcaaatagcgtgttcactttctcctacaagaaagctcagcgagatctgggctatgaaccccctgtcagctgggaggaagccagggaaaaaacttcagagtggattgggtcactagtggagcagcacaaggggacactgaacataaagactcagtgatg

SEQ ID NO: 3157177 - DNA, 644 bp, Cricetulus griseus
agtcagcccattaaagccgatgtcctttttatccatggccttatgggggcagcgtttaaaacctggcgccagcacgacagtaagcgggctctgacggaaaatgtcgtggtggatgagaacaggtacactacgtgctggcccaagacatggctagcaaaggatatcacatagcatgggaggtcttcttgtcaaaaagatgctgttggaagcctctaggaaaccagaactgagcgctcttataaacaacaccagaggaatgattttttatagtgtcccgcaccatggatcacgcttggctgaatactcagttaacattcgctatcttctctttccttcgttggaagtcaaagaactcagcaaggattctcctgcactcaagaagctacaggatgactttgtggagtttgcgaaagacaagaacttccaggtgctgaactttgtagaaacacaaccaacatttatcggcaggatgatcaagctacacatagtgcccgtggagtcggcagatttaggcattggggatctaattcctgtagatgtcaaccatctggacatttgcaagccgaagacaaaggatgcttttttgtatcaacgtactctacagttcatctgtgagactttagccagagaccttaaaaactgag

SEQ ID NO: 3157178 - DNA, 497 bp, Cricetulus griseus
accgaaagcttcctggctaccatcaccctgtccttatcaatgattgccagaatgcttccatctatttcctgaagaacctggcatcctttgggtggacccatccagggtagttctctgtggagagagtattggaggttgggctgtagccattgtcactcaggccttaacctgcattcccagtctaccccagatcaaggctcaaatcctgatttgtccactagtgaatttcatcaattttcagttaccatcacatcaacagaacaaaaatgtgccattacttaccagagacttcatgtttatgtgtatgtgtaaatacctggtcattgacccctcttggaaagatgccattttgacaggttctgccatacctctggacaagtggaagaaatacaggaaatggctcagctatgacaacattcccagaagattttggagccaagatccacaacctgagattcttgggccttttaatgaggcagcctatctagaaaccaaac

SEQ ID NO: 3157179 - DNA, 419 bp, Cricetulus griseus
atagactctttgtggttctaaatcaaaagaaactttaataagactgttgtgatagcatttgaatttgtagccacaaggccaaccaatctttgtctgtaacattaactacttggcacactaatctaaatcataatggatggtgaatatgtcctatgtaattggaaagaacaattatggccagcaaaagtcttatgtaggtctgaaatttcatcaagcagtaaaaggaaaatggcattttccctgaaagttcaaatactttcactagatgagaaaattaccgtggacagcaaagacataaaagtcctaagtaaagctgaggttgaaaccattgtgtccttactagcagtagagtcagaggtcagagttccacctagggaagagacagcctatgaaagagcactgaaaatggcactggaaat

SEQ ID NO: 3157180 - DNA, 262 bp, Cricetulus griseus
tagttgactctggttgagtttttggtagtcatatccacaaaagtattatccacccagtggagctattatagcttgccttggggaatttagttttagctcttagctttgctctttggtccattttgagttaatctttgtgtgtgatgtaagttaagggtttgacttcccattctcctcatgtggatatctagttttccacattgccctttggtgggaaacattccaccatgcagggtacggctgtttctaagcctgagtctct

SEQ ID NO: 3157181 - DNA, 391 bp, Cricetulus griseus
atccgccacaagtttgggagcaaggtggtggaccatctgatctccgaggaacaggctcgaaaggccattggtgaaatctttgagggccagaagagatcaagctcatggccaagcaggacccagagccctgcacaaatctcctccatcttcgcagactactatgacctgggctaccacatgcggtccaacttgtttcaaggcccgccccaggagacaaagagcctcatgaaggcttcctacacgccagaggtgattgagaaagctgtgagggatgtagagcattggcatggcaggaagacggatgagctgggacggtggcaccggaaaaatgctatggatatgaacttgcagaaagcactggaagagaaatatggagaaaagagcaaatcca

SEQ ID NO: 3157182 - DNA, 242 bp, Cricetulus griseus
caggaggaaaccccatctctttggctttgtgagacaggctttcattccgtagcccaggctggcccttttttttctgttattgtttggtttgttttcaaagacaaggtttctctgtataacagctctggagcctatccaggaactcactctggagaccaggctggactcaaactcacagagacccacctgcctctgcctcccgagtgctgggattaaaggcatgcaccaccaaagcccggctt

SEQ ID NO: 3157183 - DNA, 1011 bp, Cricetulus griseus
tcccggaagcgaaagctactccgcctcttccgagccaggtcgcgaccttgaggccgggatcaggtttccgagcgagcgtgtcgggcctcccggggctctgaagccccctttctcgccatggctgcggcccgaaacctgcgcaccgcgctcatatttagcggcttcatctccttggtcggcgccgccttctaccctatctacttccggcccctcatgaggctggaggaataccagaaggagcaggctgtaaatcgagctggtattgtccaggaagatgtccagccaccagggttgaaagtgtggtccgatccttttggcaggaaatgaggctgtcagtaaatctgatgagaaaagtgagcatcttcatcctgtgcactctgcagtggggacaatagatggttcactgtggccacatggctggagagggaacactcatgctgccagccagaacccttatgatagagactgtgtgcaaagacagtgcttcctctaagtccctggagaacctgaacagatgacatcattaggaagccctcatggctccagtgactttgcaggagcagagccagcctgcagagctgttggtggaagatctgctcctcgtgcagtctttatcacttccaagctgtgatgtgaacacaagcaacctgtgggcgcaagggcctcagctgctttgccacctttggaataagcagtttcaatgcaaatgtccatgccaagctgccttgcaggaatctgagaatgttccagtcgataaagctgtttgagggcaggatcctcggctctgtttaagaatacactgcacagcttaaccatctcattgaaattccctgggttgggaagtaaatagataggaagcaagtcacgccagactgtactacacacagtagaatcatgggtgagcctgctaacagcaaggctttctcttaaaaaaaaaaaaaaaaaaaaaaaaaaaaaaaaaaaaaaaaaaaaaaaaaaaaaaaaaaaaaaaaaaaaaaaaaaaaaaaaaaa

SEQ ID NO: 3157184 - DNA, 1487 bp, Cricetulus griseus
gtggagttcgccaagcgtctgccgggcttcaccggcctgaccatcgcagaccagatcaccctgctcaaggctgcctgcttggacatcttgattctcagaatttgcaccaggtataccccagagcaagacaccatgaccttctccgatggccttactctgaatcgaacccagatgcacaatgctggcttcggtccactgactgaccttgtgttcacctttgccaaccagctcctgcctttggaaatggatgacacagaaacaggccttctaagtgccatctgcttaatctgtggagaccgccaggaccttgaggaaccaacaaaagtagacaagctccaagaaccactgctggaagcactaaagatttacattagaaaacgtcggcccagcaagccccacatgtttccaaagatcttaatgaaaatcacagatctccgcagcatcagcgctcagttccgaagtgaaaatgcaaggtaaaacatttttactgctgcttagtttttggactgaaatatgttaaactccaaaaggaccaagaagttttcatatgtatcaatatatattccttactgtgtaacttgcctagaaatacaaacttttcaaattctgaaattcagccatttcatgccaccagaaactagttaagagcttctattttcctctctgaacagtcaagatgcatggcaaagacccagttgagatgatttagccctggttaagtttctgaagactttgtacatacagaagtatggctttgttctttctatcctgtacgttggtgctttcttttgtcttgcaaactcaataaccaagacaccaaggttatggagcagactactgtacatcactgtacatcttgctttcatgaataacaaggcctcatggtaaggaaccaggacctttgtacagtacaggataagactaaagacgctctggtttaagtaatgtggaagcttctccttgctttttgatgctcaagctgcatcctttcttttgtgttgcccagatagaatataccacttcactgcactagcagaagagaattctgtatcagtgtaactgccagttcagttaatcaaatgtcatttgttcaattgttaatgtcactttaaattaaaagtggtgtattccttaatgacacaactaccgaatgaaaaaaagatgcatttttacagtcatgatagcctccaaggcaaaaacactgtccagtgttagtaagtttgtttacctgttcacaagccattggagagatatcacaggataatcagcaggctagtctgcctggactctagtagcccagtgtccttcctgactcacgcctgatcctgggatttcccccagtcttgatgcttgaaggtataggcaagtggcctcttctggccttgttcaatcactatgacgcagagtgacagctgtggtagagtggttgacagactcaagtgtcaggttctgagttctcatgtaagcactagtggaattttttgttt

SEQ ID NO: 3157185 - DNA, 239 bp, Cricetulus griseus
gcagactgcaaagcgccggaaaagcgccagaagtaaagagaagaagtaatggcaaagaagatgaaacttgaacagaagaaacagaaagaagaatgcaatcagagccaagaacagcatgccaccagttctgaggagacatctggaacagaggaggaggaagaggagtccagtgtcatcatggggcgatgaggatagacatttgcagattgcctactatgtcctgccttgctgctcttgct

SEQ ID NO: 3157186 - DNA, 770 bp, Cricetulus griseus
gtgacagacggagccggcgggccgcctgggcccccagagaccacgccatggtacgcgcgggcgccgtggggacgcatctccccacgtccagcctggacatctttggggacttgaggaagatgaacaaacgacagctctactaccaggttttaaactttgccatgatcgtgtcctctgcactcatgatatggaaaggcttaattgttctcacgggcagcgagagtcccatcgtggtggtgctaagtggcagtatggagccggcctttcacaggggagatctgctgttccttacaaacttccgggaggaccccatcagagctggtgaaatagttgtttttaaagttgaaggaagagacataccgatagttcacagagtaatcaaggttcatgaaaaagataatggagacatcaagtttctgactaaaggggataataatgaaattgatgatagaggcttgtacaaagaaggccagaactggctggaaaagaaggacgtggtgggaagagcgagagggttcttaccttacgttggtatggtcaccattataatgaatgactatccaaaattcaagtatgctcttttggctgtgatgggcgcatatgtgttactaaaacgtgaatcctaacacgagaagccgtccctgggaccagattgaaatgaattctgttgaaaaagagaaaagctaatatatttgaaatgttccactttctgtataaagggaaaccaggtggagatgtttttgtcttgtccaaataaatgattcaccagt

SEQ ID NO: 3157187 - DNA, 1487 bp, Cricetulus griseus
gggcagctggtctgccggggagggactcggaggccttgctataaagtcatttacttccatgatgcttttcaaagactgaactttgaggaagccaaagaagcctgcaggagggatgggggacagctcgtcagtattgaaacagaagatgagcagagactgatagaaaaattcattgaaaacctcttggcatctgatggtgatttctggattggcctcaggaggctggaggtgaagcaggtcaacaacacagcctgccaggacctttatgcttggacagatgggagcacatcacaatttaggaactggtatgtggatgagccttcttgtggcagtgaggtctgcgtggtgatgtaccatcagccatcggcaccacctggcatcgggggctcatacatgttccagtggaatgacgaccggtgcaacatgaagaacaatttcatttgcaaatatgctgacgagaagccaagtacaacaccttctataaggcctggaggtgaagcaactgagccaccaacaccagtacttccagaagaaacacagaaagaagacaccaaagaaacattcaaagaaagcagagaggctgctttgaatcttgcctacatcctaatccccagcattcccctgttcctcttactagtggtcacttcagctgcatgttgggtttggatctgtagaagaagaaaacaagagcagccagatcctaccacaaaggagcaacacaccatttggcccactcctcaccaagaaaacagccccaacctagatgtttacaatgtcatcagaaaacaaagcgaagctgatttaactgagccccgcccagacctgaagaacatctcatttcgggtgtgttctagtgaagcccctcctgatgatatatcttgtgactatgacaacatggctgtgaacccttcagaaagtgggtttgtgactctggcaagtatggagagtggatttgtgaccaatgacatttatgagttctcccctgacagaatggggaggagcaaggagagtggatgggtggaaaatgaaatatattactaagacatatgaaaaactggcaaaaatgagaaaacaaaagcaaaagcctcctatttctcacaaggaaaatgttcagaaagtttatgaagatgctcagaccagttcttaaggtgagcacagaatctccacaagttcctactgggtccccaagttctggatgtatcccttatcccagagcctcacccagctcagccttgtgagaaggcaccttgcctaggggctgccatacagcagaccctcgataactgtcagccagtgtgctgcaactgatgttcaagggctgatgcttccaatggtcaggataaaggtgtcaccaaggagtttggaaagcccgcctctaggctccttgctctctacagcagcacgtgcaatcatagaaagacataaactctggaatcttctcaaaggctatgtatggaagccccaggctggcctgcccagcaacaatt

SEQ ID NO: 3157188 - DNA, 577 bp, Cricetulus griseus
tttctcagaacaccttcacctcaaactacagatgttctacagctgaaatactgacttccaaatacaccaccttcgctgctcagagcaccccacagtcaccagcagcgttgtcccctccaaccccagtcaacagctgtaccgtgaacccttgtcttcatgatggtgaatgcatcgtggacctcaccagtcatgggtatagatgcgcatgcccacctgcctggcaaggggacaactgcagtgtggatgtggatgaatgcctctcgagcccctgtccgcccctagccatgtgcaacaatactcagggatctttcacctgcagatgcccagtcgggtatcagttggagaaaggaatatgcaatctggttagaaccttcgtgactgagtttaaattaaagaagacttttctcaatactactgtggaaaaccattctgacattcacgaggttgaaaacgagatcgatccagaaatatgtcaactcctgcaggtcctctgctgaagtctgccagctcttggggtctcaaaggagaatctttagagccggcagcttgtgcaagcggaagagtccagaatgtgaca

SEQ ID NO: 3157189 - DNA, 676 bp, Cricetulus griseus
  modified_base (420)..(420): a, c, t, g, unknown or other
gggggccggccgtgaggagctctggagttgccggcggggaacatgtcggagtcggaattcggcaaaaagtgggaccggtgcatggccgacgcggtggtgaagctagctactggctttggattaggagttgttttctcactcaccttctttaaaagaagaatgtggccactagcctttggttctggcgtgggattggggatggcctactccaactgtcagcatgactttcaggctccgtatcttctacatggaaaatatgtcaaagagcagtgacttatgctgagaacaccccagcgggaggaaagagaaaccatgtttattcctcaggaatactgaagtgccctggagtgtgctgagatcctatgacagtgtcatcacaacgctttcgactccagccactgtttgtgtgttagaaaccgngtctgtttctttgtattttctctttggaaattgtaaggagacgatcttaaataaattagaaatgggaatgcccttctggaaccaaacacaaaggaattcatgggtttaaggagccagtgatgggaacccagctgggcacaggatactagggcaaaagctgtggcgccccaaaagtggcctgcgctgccaactataatataaatacatacagtctgaacttgacactgtataatttggctcagaacaatatgtattt

SEQ ID NO: 3157190 - DNA, 876 bp, Cricetulus griseus
cctacaatatcatggtcctggtgaataccttctgtgatagctgcatccccaaaacctattggaatctgggctactggctatgctatatcaacagcaccgtgaaccccgtgtgctatgccctgtgcaacaaaacattcagaaccaccttcaagatgcttctcttatgccagtgtgacaaaagaaagagacgcaaacagcagtaccaacaaagacagtcagtcatttttcacaagcgagtgcctgagcaggccttgtagaaaaagggtttgtcagtagcagtgaccacacacgcatatcagcccacacagcctagcagaagtctggcacaggtgggaggccattcctggtggtgataaaaaggggttttatcaaccacacaggagagaagctgcctgtttactgatccattgactaaactgattttggccaagtgccaattcagcaggaaagaaaagagaaacattctgctgaatataaagaaatagattctgaaatagacttttaagtgtttttttcttaaagagaaaaaaatatattgtcttgaagcaagtatcctctgaaattggtttgcctaggtcttttaattcccatcagctctgaaatcgcaggtgagcctcgctgcactagttgcagtgtgctcttcccaagggtcccaaagtgtccatccagaccccatgtgaagcacggcaggcttggatatctgtggttctgagttattttgtacattgcaaagctgacacctcttgtcccaatcagcttctgtccccttttggtgtgttgttaaactctatttgtggatttgattcttggttcatgcaaagtactgttttgtgcagttcaagtttcaaacaaataaaattgcatatgaatacatgc

SEQ ID NO: 3157191 - DNA, 435 bp, Cricetulus griseus
caacgtctgccgctggctcggatctggagaagtcacccgggatcttgccccagccagaggctacagtggccctcaaaggaccctgatgccgccttctccatcagtaagcctcctcatccttcgtggatgagccgagctccagctggtcacgtgcctctggcagctgcctgcttgaagtcagtaaaatctgcctgggatgcccgcagctcatcttctcatactcaaagcgaagctgaaagcactgctggaaatgccagctcttctcagaggaaaggggtgaggactgtgtggttccctataccccgaagacgactgaggcagctgccttttccacctgcgaggccacaggggccctgtcaacagtattacagtggtgtccggtctttcgtaagagccacatgcttctctcagcttccatggataaaaccttcaagg

SEQ ID NO: 3157192 - DNA, 344 bp, Cricetulus griseus
tccgtgatgaaatcaagggcagcattacactgaatcttccccaggacatgtggttgtatcggtcagtgaaaattctgtattcctttggcattttcgtgacctattcaattcagttctatgttccagcagagatcattatccctggagtcactgccagacttcatgccaaatggaagcgcatctgtgaatttgggatacggtccttcttggttaagtatcacctgtgctggagcagttctcattcctcgcctaggacatcgtgatctcctttgttggggctgtgagcagcagcacgctggccctgatcctgcccccaatcgtggaaatccttacattctctaagg

SEQ ID NO: 3157193 - DNA, 206 bp, Cricetulus griseus
aaaccttacaaatgtagtgaatgtgagaaatcctttccatatatctcaagtcttagaaagcataagagaagtcatacaggagagaaaccttacagatgtagtaaatgtgagaaatcctttacacagggttcacacctaagacaacatcagacccttcatacaggagagaaaccttacaaatgtaatgaatgtaataaaccctttac

SEQ ID NO: 3157194 - DNA, 438 bp, Cricetulus griseus
  modified_base (377)..(377): a, c, t, g, unknown or other
cggcaagcggatcatctcattttcttgtttctcatgtcccttgctggggtactcaaccattacctcatcttcttcttcgggagcgactttgagaactacataagaactgtaaccaccacaatttcccctctgcttctcatcccctgatggctggatacagagtgggccgatcaccgatcaatagagaggcattagaattcaaccctctgaaggtctctgctcctcctcagctgtagatgttgtaaatctagtggccctctgggctccacagcatcagttaaccttgcttttccgggaagaaaataattttgtgtcagctccgccccttgaacatggcagtggcccgggaattattgtctagctccatcctgcccttntcctggcttgttgtgctctctgaaggtgtcttgtgaccagacgtgtgttttccaaaaataa

SEQ ID NO: 3157195 - DNA, 918 bp, Cricetulus griseus
  modified_base (877)..(877): a, c, t, g, unknown or other
tcactccttactcgacatcagaggattcacactggtgaaaaaccctatgactgtaaagagtgtggaaaaaattttagtcggggctcagaacttactcagcatgagagaatccacactggtgagaaaccctatgagtgtaaggagtgcggcaagtcttttattcgcagctcacagcttactcaacatcaaagaatccatactggtgaaaaaccgtatgaatgtaaagaatgcagaatggccttcactcagagctcacatctttctcaacatcagagacttcatactggtgagaaaccctatgtatgtagtgaatgtggcaaagccttcgctcgtggattactacttatacaacatcagagaattcatactggtgaaaaaccatatcggtgtagggagtgtgggaaggccttcattcgtggttcacagctcactcaacatcagcgaactcacactggagaaaaaccttatgaatgtaaggaatgtgggaaggcctttggtcatggctctcaacttactctacatcagagaatccatacaggtgagaagccctatgaatgtaaagaatgtagaaaggccttcactcagagctcacatctttctcggcaccaacggattcataccggtgagaaaccatatcaatgtaaagaatgtgagaaggcctttactcgtgggtcacaattaatgcaacatcagagaattcatagcagtgacaaatctgttgactgtaaagaatgtggaatagactttagtcatcattcacaattttttatttgagttaacttattcttttccattagcatagcttttcctggtcatcagtgaagaactcttacgaatgtaaatataggactcacaaagttcagcatttgaaaatttnatatgggagactagaaatgctgatataattcacatagcaaa

SEQ ID NO: 3157196 - DNA, 221 bp, Cricetulus griseus
ttgctttcgtcaggagaattccttggaccgcggcgacgagtgagctgagaaaacattttgctcagtttggcaatataaaaaggtgtaatgtaccttttgacagagagactggctttcacagaggcatgggttgggttcagttttcttcagaggaagaacttcagaatgcactacaacaagaaaatcatattattgatggagtaaagatggatgttaaagct

SEQ ID NO: 3157197 - DNA, 721 bp, Cricetulus griseus
tgcagggccccgccgccgccatgtccggctcgttcgagctctcggtgcaagatctcaacgacctgctctcagacggcagcggctgccacagcctcccgagtccagccctgcaacgaggtcatcccaaggatccacgtgggcaacgcgtctgtggctcaggacatcccccagctgcaaaaattaggcatcacccatgtcctgaatgccgccgagggcaggtccttcatgcatgtcaacaccaatgccaacttttacaaggattccggcatcatctactttggcatcaaggccaatgatacgcaggagttcaacctcagcgcctactttgaaagggccgcagacttcatcgaccaggccttggcttacaacaatggccggtgcttgtccattgccgtgaggggtacagccgctccccaacactagtcattgcctacctcatgatgcggcagaagatggacgtcaaatctgctttgagcatcgtgaggcagaatcgtgagatcggccccaatgacggtttcctggcccaactctgccagctcaatgccagactagccaaggagggcaaggtgaaactctagggtgcccacagcctctcctgcagaggtctgaccgggaggccctggctgccatgcttaggaaacacagtgtaccctgctcccagtgtcacaaggcacttgcccatatgtctgtcccattgtggtcctggggctgctcctccctt

SEQ ID NO: 3157198 - DNA, 739 bp, Cricetulus griseus
tgtggatttcattgaaagtacatattttttaagaactgaaggtgtttttagcagacaacgttcttgatacagcagcgttaatatgaaccttcaattggaaaacttgacctttagctgctccagattccatgactgtgggaaaatggacctcagttcttttttgtataacatgaggactctggactgtttgaattcagaaagttaaaaggctcctaaagccctgcaagacagcgttgggaatgttctccattgctgtcatttttcctccaaaaataacctggcttggaagtcattggttgaaagggaacttgactccccgtagaaactggaggaaggtaatacaagtaaagagggacagactgtatttctgccagagtagtaaacccaccaaaaggttctaggtacggattttggagacaatctggtggacagtttatctttgaacttgaactgatgccctactaagtgccatgctcaaatccaagcattgtatcttggctactttgttagatccttgttttaagaacagtttggaagactttttcctgaaggtgctgatttagaaacttataaacagatccttgcagaagaggtttgtaattatatggaatcttcgccggggcctgccaaattgcaacctcggaagcatctggccctttagttagattaggaactgattcatttacttctataaaagaaggcacctccaattcagattctatggatagctcagccgcag

SEQ ID NO: 3157199 - DNA, 1984 bp, Cricetulus griseus
cgctgacggggacgggggctgggtccgaggagagcgggcgcaggatggacgaggacgtgctgaccactctgaagatcctcatcatcggcgagagtggggtgggcaagtccagcctgctcctgaggttcacagatgacacctttgatccagaacttgcagcaacaataggtgttgactttaaggtgaaaaccatttcagtggatggaaataaggctaaacttgcaatatgggatacggctggtcaagagagattcagaacattaactcccagctattacagaggtgcacagggagttatattagtttatgatgtcacaagaagagacacctttgttaaactggataattggttaaatgaattggaaacatactgtacaagaaatgacatagtaaacatgctagttggaaataaaattgataaggaaaatcgtgaagttgatagaaatgaaggcctcaaatttgcacgtaaacattctatgttgttcatagaggcaagtgcaaaaacctgtgacggtgttcagtgtgcctttgaggagcttgttgagaagatcattcagacacctggactatgggaaagtgaaaaccagaacaaaggagtcaagctgtcacacagggaagagagccatggaggaggagcctgtggtggttactgttctgtgctataaactctggggagtccatctcttgcatatttgatcagataataacatctttctgtagataaactcttaactgctattagggaccttgcagtttgcacataattgtttttatcatggcagtgagtacttgcaagaaaccccctcattggctttcccaggcaaaatgttatagtacgcatgcccagtttgcagtctatagttgtttttttgtttcccttgaggaataacaaagcatgattcacagcttttctaggatgtttgagagtcttagtattaagtagaattctcagttcagaatgtagcccatgccaagtcataattaaatttctatttgttctgatgatgcttccaaaatagtattgataagttaaagcagtttggcattttaatttactccagtgattagctcagtttacctggagctttaatccattgcacacattggattcctgatccttggtgcgatgttttagttacatggagtctggcaggatgaccgtcatttgcgtttcggaagtacatgaacagtatattataactctttaatacttccacttttaaaacccaacatcttttttcaaaagtgttggtagtgtttgtccaggtgcctcaactgtagcttgtgtaatgactatctgtatcttacggcttccataaatgactaattgctattcaaaaacctatttctgtgttttgaaggtgggggagaaaacactaaatgataatttgagaaaggcgtattgcttccagattctgagtggtggggaagtgctattgcaatgaattgttgataatttactgtaacaagtagccaatagtttattaaaaaaaatcaacctgtacagaataataaaccttttccacagtattcagttttctaactccttgttatagtacattgtatgtttttttcactcatatattatttaatttacgttgacctttgctatttatgctccataagtaatatgtacttaggctggtcactgtactattcctcattaagattctgatattaatttttgcagtttattctctatgtacaatggtaaatgataaacatttttgtgtacctttgcaatatgtgtattagtgggtttgcttcagattggcttctttctgaacaggatatcttcatatttggaaaccttacattctacttcatttatacttggtagtctacatgtgattagagcttttatacattctgtatatttttattaaatataagacttttgcttctataatgttagagaaaggtagctcacaatacacttataatttggtcatgttacattaaattttagatttatgtacatttt

SEQ ID NO: 3157200 - DNA, 496 bp, Cricetulus griseus
ggaatgggtccatgtggctcctctcccagacacctaccggggcctttaccgggaggaccaccccaatccagcagaggcctatgccaatgaggtgaagaatgtgatcaatatcgcacaggagaaaggcaggaagattgcagccttctttgctgagtctctacccagtgtggctgggcagatcattccccctgctggctacttctcccaggtggcagagcatattcgcagggctggaggactctttgttgcagatgagatccaggttggctttggccgggtaggcaagcacttttgggccttccagctggaaggggaaagctttgtccccgacattgtcaccatgggaaagtccattggcaatggccatcctgttgcctgcgtggccactacccaagctgtgtcaagagcatttgaagccactggtgtagaatacttcaacacgtttggtggcaacccagtgtcctgtcccacctttaaaaaaataaaaaaaagttaa

SEQ ID NO: 3157201 - DNA, 499 bp, Cricetulus griseus
caccaaacagttctcatcgaagaggtggcccatgagtacaaggagaagctccaggcagctctgaagaagctgatggcagacaagaaaaaattagagaactggaaagatgatcttcagaaggagaaagcttcctgggagaacaaaattcagaaagatgtagaaaatgttcagacagagtttagaaaactgggagacattctggactctgaggagaagagtgagctgcagaaactgatgcaagagaaggaaggcatcatgaacagcctggcagaggctgaagataaacatgcccagcagagcaagttactaggagacctcatctcagatgtggagcatcagttgcagtgctcaaccatggaaatgctgcagggtgtggatggcatcatatcatggagtcatgccttttcactcaagagacccaaaactatccccaaggaacgaagaagagtgttccgagcccctgatctgcaaggcatgctgcaagtcctgcaagagctca

SEQ ID NO: 3157202 - DNA, 464 bp, Cricetulus griseus
  modified_base (428)..(428): a, c, t, g, unknown or other
tagacctggcaacattgacaagcgtcagcctgctggacaagtttgagcgaaatgtgaatggcgggaagatcatgccctctgaaaacttatcacctccaggttatcagagaaatgacaatgagaagcccagaacatctcctgtcccggcttgccaggatcataataaggcaggacaggaaatgtgctatgtgtgtttgcaacgagcacaacggaatttcccattgtattatggagaggacaggaggaggagagagatagaggatgagcgacttatgcagcagtaccaaatactcaaagaccaggaggctgtcttcaaaaaccaggtgaaaagcatggctgcaagagagcagaatcagaaaaatgctgcctataatcttggagtcgctgaagctataaggaaccacaagaatgagaaacctgaattttanaaatccttcctgttcgataaacgacctcttagccct

SEQ ID NO: 3157203 - DNA, 479 bp, Cricetulus griseus
  modified_base (461)..(461): a, c, t, g, unknown or other
gctgagcttcgaaacaaccgacgagtagtctgagaagccattttgagcaatggggaacactcaccgactgtgtggtaatgagagatccaaatacgaagcgatccaggggctttggttttgtcacgtacgctactgtggaagaagtagatgccgctatgaatgcaaggccacacaaggtggatggcagagttgtggaacctaagagagctgtttcaagagaagattctcaaagaccaggggcccacttaaactgtgaaaaagatctttgttggtggtattaaagaggacactgaagaacatcaccttcgtgattattttgagcagtatgggaagattgaagtgattgaaatcatgacggacagaggcagtgggaaaaaaagagggtttgcttttgtcacctttgatgaccatgactctgtggacaagattgttattcagaaatacatactgtgaatggccanaactgtgaagtgagaaag

SEQ ID NO: 3157204 - DNA, 1498 bp, Cricetulus griseus
  modified_base (912)..(912): a, c, t, g, unknown or other
cttcgctgctgctgcggcttgtgacgctgctattgctgctgctgtcccaggcaggaagctcgctccttcgtagtggatcggctgcatgacagattcctcctgaacggggtcccttccgctatgtttctggcagtctagcaactactttcgcgtaccgcgggtactttgggagatcttgctcttcaccacagatgggcctcaaggactcagatgtggttccctacagggactctataccactatagattttggcccagctgacaacatgaccagaatcttctccctgcttcgggattatgaaccccatgggccattggtgaactctgagtactatacaggctggctggactactggggccagaatcactccatgcggaccagttcggcaatagcccaaggactagaaaaaatgctcaggataggagccagtgtgaacatgtatatgtttcatggaggtactaacttcggatactggaatggtgctgacgagaagggacgcttccttccaattaccaccagctatgactatgatgcacccatatctgaagcaggggatctcacacctaagctttttgcaattcgaagtgtcatcagcaagttccaggaaattcccttgggacctttacctccccccagccccaagatgaagcttggacctctgactatgaacctggatgggaatttgctgtctttcctagactttctctgcccccacggccccatccgttcagttttgcctttgacctttgaggctgtcaagcaggaccatggctttatgctgtaccggacctatctgacttacactattgtagaaccaacagcattctgggtgccaaataatggaattcatgaccgtgcctatgtgatggtggatggggtattcaagggtgttctggagcggaatttgaaacncgaactatatttgacagggaaataggggccaagctggatatagcagctgacgaaagagcacagcctcaagcttcctctggcccgccttctattccacaacatttcagtgttaggcaagcttgggacacatttctgtatctacctggatggaccaagggccaagtatggatcaacgggtttaacttgggccggtactggacaaagcggggtccacaacagaccctatacgtgccaagacttctgctgtttggtagatcgacaaacaaaatcacattgctggagctagaaaatgtgcctcatgagccccaaatccaatttttggatacgcctatcctcaatagcactttccactggggatatacctatttcctctcagaaacacaaggttcatatgaaccaatggagttaagtgggcactgaaagaaagataacacttgaatctgggacatagggcaggatcctttggtgctggccacagtgaccataaataatcaaaggctacaatccctctgaatgtaagtacagatacaattttcttgccaaactttattgtgattaaaattccaaagacagtactggctccaca

SEQ ID NO: 3157205 - DNA, 1075 bp, Cricetulus griseus
agctcgcctggctggcaagctgccggggccccgctctgccgtctgccgggatggagacgatgcgagcacagcggctgcagcccggcgtaggtgccggcgggagaggcactctgcgagcgctgcggccgggggtgaccggggccccgactagctccgccacaccccccgcgggcccgccgcctgccccgccgccccccgcccgcccccgccccgttgcttctggctggggccccggggctgcccctgccccccggcgcctcggggagccctgccgtgctgcgcgaggccgtggaggcggtggtgaggagcttcgccaagcacacgcagggctacggccgagtgaatgtggtggaggcacttcaggaattctggcagatgaagcagtcccggggcgctgacttgaagaatggggctctggtggtgtacgagatggtcccttccaacagccctccctatgtctgctacgtcactctgcctgggggaagttgttttgggagtttccagttttgccccacaaaagctgaggcccggcgcagtgctgcgaagattgcgctaatgaactccgtgttcaatgaacatccatcccgaagaattactgatgagtttattgagaagagtgtctcagaggccctggcatctttcaatggtaacagagaggaagctgacaacccaaatacaggaattggtgctttccgattcatgctggaatctaataagggcaaatcaatgctggagtttcaggagctaatgacagtttttcagctgttgcactggaatggcagccttaaggccatgagggaaagacagtgctcacgacaggaggtgttggctcattattcgcaccgggccctggatgacgatattcgccaccaaatggctttagactgggtgagccgggagcagagcgtgccaggggcactgtctagagagctggcctccactgaacgagagctggatgaagcccggctggcgggcaaggagctgcgcttccacaaggagaagaaagatattctcatgctggctgctgggcagttgggcaacatgcatccttccagctgctgagcacctgccctct

SEQ ID NO: 3157206 - DNA, 2785 bp, Cricetulus griseus
ggaagtgacgctgacacggtggataagaataagtgctgtacactctgtaacatgtcctttacctcagctgtggtggccgactcccactaccaaggcaaaattcacgccaaaaggttaaaactgttgctaggagagaaacctccattgaaaaccacagcaacacccctgagttcacttaaggcccctcgagtggacacggctcctgtggtcacacctccctatcaaaggagagactctggcagatactgtggcctctgtgcagcctggtttaataatcctctgatggcccagcagcattatgatggcaagaaacacaaaaagaatgcagcacgggttgccttgctagagcagctgggaacatcgctggatctgggggaactgagaggtctgagacgtacttacagatgtaccatctgcagtgtgtccctcaactcaatagaacagtaccatgcacacctgcaaggatcgaaacatcagaccaacctgaagaataaataatgaaacatcaatcaagagctaagaagagatgccagcatttctctgtggcagagaactgctcaccgaccaaaagaggatcctttcttgagcaatgaacacttcttacaaggattcacagattaacacatgaccaatcttgatttctggaaatagataagatttctttttccttgtttaatttagtggcaaattatacttggatgggttttaaagaatcctttcctggtaacatgtttagcacaagttctaaactgcaatcacacagcaactagtcagagcattattcagacttacacagagtggaaaatttaatttcctatttattctagatttccttagagttaccatgattctgtgagacccttcatggctatcatgtaagtctcccagatccattaacgattacacgtttgtcatcacggggaacatagttggtgacaacatccgcagtaatagaacagactgtggtttgtggaagttatataacagacagaattctggtctttctgcctcacgccgatgagccagccttgcctctaatgccaggagcatgcgaatagttgagaaagagaggaaggaccttcactctggatcaccttgattgaaagctacctaagattaagccaagttttgtccttgcaagctgccagatcatagcttaggaaaagaattagtttgattgcatgatgatcctattaagtcaaagtgttgtcacagtggtcgaccttggtgtaatgctttactaaaggcatccaaaggaggatttttaaaccccagagtgagagagaaatggtccttaggaagttggcctgaatggtgggctttaatttgggacactgatgatttggtgactaaatcctgaagaagcttctttcttctatttctcttccatcctgttgctgagctgggatttggtgactttgaaaaggatgactatgggtagaggatcgaccagagaactgatgctctttgaagggatcgactctgagtgcaactgttaaattccttctccagggtcaattgctctgcattgtgatgggaagtagtgtcttgtacacactacaaggtagaagcagaactgccattcctgggctctcagctggctggagcagccctttccaccctgtgaccaccaatctaatgaagtcagactttttcagacatcattgctttccacggagatctgaagtggttacagccagtgagcaataaatgaaacgacacggaaatgcacagtgttgttcttaaggtgcctgttttgttgtgtgaggaggtcacagtctgtgaagcgtccagactgtggctgtgaagaggaaggtcacacaccatgtacagtcctgctgcaggtggggaggaagaagggtgtggtgacaattttattttgctattttggaaaaagcacacaacagagctacaatcctccagtgatggcttgtcttcgaatgtgtggaataaagctttatttgtcaattctgctagtaaaataagcattgtccatgtaatttaccatgtgaactccatgtgtagccctgattcctcagaggtccaaatgactccttagtcctggcaatacaattcaaatttgctttacaaaatgttcttccccttttagttgcagaagtaaacttgaggctagcacatgtgccagtggccacaaatgccatagcagtgagtcccaaattaatgagctctccttatatacagtctccacagcccagtgaactcataaatatgctcataaagcaatccactaagcagcaaatgctgcagcgattccttctgctgatgaagtagccgtaaaactcacccactcctgctggactggaagaccagcaggatttgaactttcttggcctcttagatgacataggaacatttggagctgcaaagatcttcatactgtctgttggagcgactttattaggccaaccatatcaaaaccaccttcctgtcaaagctaagtgagacatgttttgacaaggggttgggaatccagaacactaaaccccaataagagactgaccaggttgtagctacactctccactaaatatctatggttcacttgatcagctttgtccaatccaatgaattatttcctttgtaagaataaaactaagaagggtctgtctgttcaacaaattattgtagggatgagtccccctccccttttctggttttgaatttgttcatattcaaggcatgttaaactacctcataggtttgttgtgtggattagctgattaataaataacaactgcttaaaataaaaaaaaaaaaaaaaaaaa

SEQ ID NO: 3157207 - DNA, 463 bp, Cricetulus griseus
ttctgggtccacacaccaacgaagacttcccaacctgccttctgtgtacttgtataagtaccactgtatactgtgatgaccaggaacttgatgctattcctccactccccaagaagactgcatatttctattcgcgctttaacagaattaaaaagatcaacaaaaatgactttgcaaacctaagtgatttaaaaaggattgatctgacatcaaacttaatatcagagattgatgaagatgcattccgaaagctgcctcatctccaagagcttgtcctacgtgacaataaaattaagcagcttccagaattgccaaccactttgacatttattgatatcagcaacaatagactgggaaggaaagggattaagcaagaagcgtttaaagacatgtatgatcttcaccatctctatatcacggataacagcttggaccacattcctctgccacttccagaaagtct

SEQ ID NO: 3157208 - DNA, 267 bp, Cricetulus griseus
cccgaaatgcaaagggtgcaacgagcatattgtggtaggagatcagaatgtggagtacaagggtgacgtctggtcataaaaaactgcttcgtctgcagcaactgcaaggaagtcattggaaccgaaagtttcttccctagagatgaggggttcttctgtgtgtcttgccatgaggccaagttttccaagcagtgtgtgaaatgcaaccagcccatcacatctggagggatcagttaccaggatcaaccctggcatactgagtgcttt

SEQ ID NO: 3157209 - DNA, 283 bp, Cricetulus griseus
tgtgcagttgctcagctctgtgagccattctgctgtccactcttgttagagatgggactctcagcccatgggaaggttcagagagctctgggcatcagcatggactgggccagttctgctactgaaggggctgtgtgtctagaagtctccgttgcaggacaattcccctattctcacagccagcacttggctcagcagccagtggggaaatctggcctgattacaaggatgctttgggaagaatgacttagagagagagagagagagagagagagagagagag

SEQ ID NO: 3157210 - DNA, 391 bp, Cricetulus griseus
ccatccatccatcctggccttgtacacaaactgaatataagtgtggcaatggaaactgcatttctcagcactatgtgtgtgacaatgtcgatgactgtggtgacctttctgatgaaagtggttgcaatctaggagaaaacagaacatgtgctgaaaacatatgtgaacagaactgtacccagttaagcaatggaggatttatctgttcctgtattcctgggttcaaatctagtactttggacaaaaattcatgccaagatatcaatgagtgtgagcagtttggcatctgcccccagagctgtcgaaatagcaaaggaagttatgaatgtctctgtgcagatggcttcaagtctatggatagtcattttggagaacggtgtgcagctgatgg

SEQ ID NO: 3157211 - DNA, 274 bp, Cricetulus griseus
ccagttgaggacaagccccccccagcgagcagtgctgcccgccagagccccacctgcacggtgtgcaagaagaccctcagctctttgagcaacctcaaggtccacatgcgttcacacactggcgagcggccctatgcctgtgaccagtgttcctatgcctgcgcccaaagcagcaagctcaacagacacaagaagacccaccggcagccgacccctgggagtcctgccgccccccccgccaccacaagggggaatctccccaagcagcccctcc

SEQ ID NO: 3157212 - DNA, 273 bp, Cricetulus griseus
gctccacctcaggtccacagcatgcagtcccaggagagcggtgtccactacagcaggtgggacaacagcagccgggatgaagtcagcatgactgccatgtccagcaccgaggaggcctcatgctatcgcaggctctcccagaaactgtgctcgggcaagctggggatcgccatgaaggtgctgggtggagtggctctcttctggatcgtcttcatcttgggctatgtcactggttactacgtgcacaagtgcaaataaatgctgtcccattcc

SEQ ID NO: 3157213 - DNA, 3736 bp, Cricetulus griseus
gggagctatctcagtagggaaaaactgtggatttgcatggaatactgtggtggcggatcacttcaagatatttatcatgttactgggccattatctgaattgcaaatagcctatgtatgcagagagacattgcagggtcttgcctatttgcatactaaaggcaaaatgcatagagatatcaaaggtgcaaatattttattaacagaccatggtgatgtaaaattagctgattttggtgtggctgcaaaaataacagctaccattgcaaagagaaagtctttcatcggcaccccttattggatggccccagaggttgcagcagtggaaaagaatggtggctacaaccaactctgtggtaattttcagcctccaaaactaaaggacaaaacaaaatggtcatcgacattccataattttgtcaaaatagcactaacgaaaaaccctaagaaaaggccgactgctgaaaggctcctgactcacacctttgttgggcagtcaggtctatctcgggccctagcagttgaactgttggacaaggtgaacaacccagacaaccatgcacactacactgaaggagacgatgatgactttgagccccatgcaatcattcgtcatacaattagatctacaaacaggaattccagagctgaacggacagcttcagaaattaattttgacaaattacagtttgaaccacctctgaggaaagaaacagaagcccgggatgaaatgggactaccatcagacccaaattttatattacattggaatccttttgtggatggtgcaaatacaggcaggtcaacctctaaacgtgctgtaccacctcccctacctcctaagccacggataaacagttaccccgaagacagccttgcagatgaggaaaaatcagcaaccgtcaaacgttgccctgatccagagaccagagcacctcacattctcagaaggcagagcagcccaagctgtgttcctgtagcagagacatctcctctataggaaatggtgatgggatttcaaaactgatcagcgaaaacacagagggatcagcgcaagctccacagttacctcggaaaaaggacaagagggacttccctaaaccaaccatcaatggccttccacccaccccaaaagttttgatgggagcgtgtttttccaaagtatttgatggctgccctttgaaaatcaattgtgcaacatcctggatacaccctgatacaaaagatcagtacattatttttggaactgaagatggtatttacacattgaatcttaatgagctgcatgaggcgactatggaacagttgtttccacggaaatgtacctggctgtatgtcatcaataacacactgatgtcattatcagaaggaaagacctttcagctctactcccacaatcttattgctttgtttgaacaagccagaaaaccagggttagctgcccatatacaaactcataggtttcctgaccgcattctgccaagaaagtttgccttaacaacaaagatccctgatacaaaaggctgccataaatgctgcatagttagaaacccttacacaggacataaatacctctgcggagctttgcagtctggaattgttctgcttcagtggtatgaaccaatgcagaaattcatgttgattaagcactttgattttcctttaccaagtcccttgaatgtttttgaaatgttggtgataccagaacaggagtaccccatggtttgtgtagctatcagcaaaggcacagagtcaaaccaagtagttcagtttgagacaatcaacttgaattctgcatcttcctggtttacagaaatcggtgcgggcagccaacaactggattccattcacgtgactcagttggagagagacactgttttggtgtgtttagacaaatttgtaaaaattgtaaatctacaaggaaaactaaagtcaagtaagaagcttgcctctgagctgagttttgacttccgcattgaatctgttgtgtgccttcaagacagcgtgttggctttctggaaacatgggatgcagggtaaaagcttcaaatcggatgaggtcacccaggaaatttcagatgagacgagagttttccgcttattgggatcagacagggttgttgttttggaaagcagaccaacagaaaaccccacagcacacagcaatctctacatcttagctgggcatgaaaatagttactaagcaacagaaacaaattccaagtgacgagaagacaaatatactccattgaaagcaagagtgttttaagggaattcactatagactgcagtatgacttgctttaattgttgtgggttttatatcaaatgatctgtacattaggatagaattcagtatttttctgtagctggaaacagctagtcaatctcttgccactgtgtggtggttatatcaagtttgcttaataaaagctatgagacgaatagtcctctagttccaggaaacacagtcctttaaaaaaataatgtttgtaacaaggtgccatggttttttaaataactcacatgattatcttcagagaggttagtgagcagtctgtcattttataccaggccttattccttcttagtgaacataatttgataagaagttatcgaacaagcctttcactttgacattggccgttctgtatgtttttgtaagatagaatatttaatccttatttattaatctcttgctggagtggtgtaatgtttctaacttttagcaaaggaaggttgcagagcagctgtttttttttataatgtgtgaacattttgtttacctttacacagtcgtactttaggggctacaggcaatgtgtttaggggttcagcacatgcagtttcatttaacaaagtattttctgacagtttcacacagggttgccttaaagggaatttatgttttccattgcggatggttgtatgggcttgtgctgaagtgctgatggtggacaaagccttggcaggcatgtgtaatgtctaggtgtgactaccatatgtttgacaagcagtataatatacctgtgatttttttttttgcattagggataatgcacaagaaattaatcttcatatatctcatgatccctaatgtttggggggaaaagtatttaactgcccatattatgtcttttacttatgttatgccaatggggaacctgcaaagtaatttcgtgtgtaatcttggggttttcacatacataggtgttcattgtgagtagggttaaggaaaaaatactttaagtgaaattggaatttctgatggcatagtatagataaattatgttgtttttatattttttaaaaagccactatactaaaattcaaggatagggccatttttagtatgtttttcttttacaattgttagtattcagaattgatgtgttctattggtaccagctgtcttaatgcatttattaagaccacttagcattgaggtgatgaacagggggctagtagtagcaaactctagaaatagtctgaccagatacttgacaggaaaaccatgtacctatctcatctttagcaggcttataaagtacatgttatcatctccatctttccaatgaggaaataagagtttaacaaagttaagcaacttaaccacttcatactggttagttcttgagccagaccaagagtctcctgactctgctcctctcactatgcaatatacaaggaataaaatgttacacaaacgaaaaaaaaaaaaaaaaaaaaaaaaaaaaaa

SEQ ID NO: 3157214 - DNA, 1513 bp, Cricetulus griseus
  modified_base (1469)..(1469): a, c, t, g, unknown or other
ggatgtggcggtgctggtgcagagggtggtgaaggacatcaccaacgccttccgcaggaacccgcacatagatgaaattggcctgctcccatgccctgaagcaagatacaaccggagtcccatagtcctggttgagaacaaacttggtgtggagagctggtgtgtcaagttcttattaccatatgtccacaacaagctccttttgtacagaacaagaaagcaatggctaaacaaagatgaattgatagatgtcacctgcaccctgctgcttctcaacccagacttcaccacggcatggaatgtaaggaaagagctcatcctttctggcactttaagtccaattaaggatctacatctgggaaaattggccttaactaagttcctaagagtccagagacatggattcacaggcgctgggtgctgcagcagttactgtactgcagcacaactctttgaaaaatgagccaaaagatgaagaagcaacagctacaacagaggaaccaaggataaatcttacccagctcctagaagaagaagtggaattctgcacagatcttattaattcctatccaggacatgaaaccctttggtgtcataggcggcatgctttctaccttcaacatcacttaaatggcaagtgtcctcccaacgtgacgcacctgtcacctgcagactgctctggcggcactttgaatgacttgcacctgattccagcaagcccccaactgtctcaggcaatggaagtggatggactgaatgactccagcaaacaaggctattcccaggaaaccagcgcttgaagcggaccccactccagaccctgtaggcctagagatggagcacaggtttattgatcaagtgctatccacttgtcggaatgtagagcaagccaggtatgccaatgcatacaggaaatggctggtgactttgagtcagtaagaggggtggattcatcctaagaaatcccccttttagtgcaatattgctttcctttctcaatgccatagttgcatgaactgactggctaactatgtattcttcatctatagcttaagaaacctttcattttatttattttgttatgagccggcattcctttgggtacaaaataattgtacagttccttcttgctaagcacttagtcttaagtcttaatttttttttcctgtttgattccatgccctttatatttccatatttgtcttctcatttggttcttgagattggttcacacacctttactcacctcagttcagttgctacataaacggtttctttaaagattgaaattttaagttgcagttcagcttaagaatattaatacatgtgcagaaggtcttgacctaattgcaattttaagattaaaatggctagatagatggatatgtgaaaatgtaagccacttctttctcaagcttgttctccagttactgactaagagaaccaaagccaggagtgttagaatttanaatagaaaaaaaaaatagacttccaatgtaatctatttttaaat

SEQ ID NO: 3157215 - DNA, 493 bp, Cricetulus griseus
cgggaaagtggcggtggcgcggcatggcggcggcggagtcgctgacctcgggtggccccggggccgtacggctgccgcggtcgccaccactcaaggtgctggcagagcagctgcggcgccacgcggagggaggcccgggcgcgtggcggctgtcgcgggcggcggtgggccgagagccgctggagctggcggccgtgtggatgcagggcaccgtgctggcggcggaaggcggccaggcgcggctgcgcgacccgagcggggccttctccgtgcggggcctggagcgcgtacctagaggccggccttgcctgctcccaggaaagtatgtgatggtgatgggcgtggttcaggcctgtagccctgagccctgcctacaggctgtgaagatgacggatctttctgacaatcccgtccacgaaagcatgtgggaactggaggtggaagacttacacaggagcatcccttagagctgggaccctttaagaacagcttt

SEQ ID NO: 3157216 - DNA, 317 bp, Cricetulus griseus
accacatcaactattctgcatcatttaaaggcagagtcaaactgggtgcagactctggactccacctgtctccagtccaaatccaagatgatggcaaaacattcacttgccgcctgacagtcaatcctcttgaagtctggaagacctccactatagtcaaggttttcgctaagccagaaatcctcctgattgtggaaaacagcaccgtggatgtcttaagagagagagcatttacctgcctactgaagaatgtcttccccagagcaaatattacctaggttaatagatggaaagtttcttcaaggtgacgaacaagg

SEQ ID NO: 3157217 - DNA, 384 bp, Cricetulus griseus
  modified_base (197)..(197): a, c, t, g, unknown or other
gtccccttaagaaggttatagatttctagaatggggtcagttaacctccttgtcataggaggccaatcttgcaaatgtcttggtttcttcttccatcagtgcatggctttctccctaccacagtatggaaaatggccttggagatccccagtggccaccagagaagagacgcctgtccctgcagatggtccttttanctgccatctccttctcaggcctcttcacattcccttcattggctgtgatatggaattgaaatctttatttcaatacaaattttcctcgtgtgtgccagatggccacatccccagctctgaatgaacaattagataaattaaagctactgtgtaatctttctcaacaaaaatcaacaaagctaccaaa

SEQ ID NO: 3157218 - DNA, 2222 bp, Cricetulus griseus
acagaatcagtcggtggagaccctacagggagatttgccatccagacagaccccaacagcaacgatggggctcgtcactgtggtaaaaccaattgactttgaaacaaataggatgtttgtacttactgttgctgcagaaaatcaagtgccattagccaagggaattcagcacccaccccagtcaacagcaactgtgtcagtaacagttattgatgtcaatgaaaacccttactttgctccaaatcctaaaatcattcgccaagaagaaggcctccatgcaggcaccatgctgaccacgttcacagctcaggaccccgatcgatatatgcaacagagtatcagatacacaaaactatctgatcctgccaattggctgaaaatagaccctgtgaatgggcagatcactactattgctgttttggatagagaatcgccaaatgtaaaaaacaacatatataatgctaccttccttgcttctgacaatggaattcctcctatgagtggaacgggaacactgcaaatctatttacttgatatcaatgacaacgccccattgatccaaatgctgggccatttgcttttgatcttcctttatctccagtgactattaaaagaaactggaccatcacccgacttaatggtgattttgctcaactcaatttaaaataaaatttttggaagctggtatctatgaagttcccatcattattacagattcagggaatcctcccaagtccaatatttccatcctgcgtgtgaaggtttgccagtgtgactccaatggagactgtacagatgtggacaggattgtaggtgccgggctgggcactggtgccatcattgctattctgctttgtatcatcatcctgctaatccttgttctcatgtttgtggtatggatgaaacgccgggataaagagcgccaagccaagcagcttttaattgacccagaagatgatgtaagagataatattttgaaatatgatgaagaaggtggaggagaagaagaccaggactatgacttgagccagctccagcaaccagatactgtggagcctgatgccatcaagccagtgggaatcagacggttggatgagaggcccatccatgccgagccacagtatccagtccgatctgcagccccacaccctggggacattggggacttcattaatgagggccttaaagctgctgacaacgatcccacagcgccgccatatgactcactcttagtcttcgactacgagggcagtggttccacggctggctccttgagctccctcaattcctctagtagcggtggggaccaggactatgactacctgaatgactggggaccccgtttcaagaagctggccgacatgtacggcggtggcgacgactgaacggcaggacggacttggcttttggacaagtacgaacagtttcacctgatattcccaaaaagcatacagaagctaggctttaactctgtagtccactagcaccgtgcttgctggaggcttgggcgtaggctgcgaaccagtttgggctcccagggaatatcagtgatccgatactgtctggaaaacaccgagctcagctacacttgaattttacagtacagaagcactgggattttatgtgcctttttgtacctttttcagattggaattagttttctgtttaaggctttaatggtactgatttctgaaacaataaggaaaaatattttgtggcgggagcagaaagttaaacgtgatatgcttcaacacacttttgttacaatgcatttgcttttgttaagatacagaatgaaacaaacattaaaaaaaattaactcattgagtgattttgttaccttggggtggggggctaaaatcttaaaacttacgcagctggttgcagataaagggagttttcatatcaccaatttgtagcaaaattgaatttttcataaactagaatgttagacacattttggtcttaatccatgtacactttttatttcctgtatttttccacctcgatgtaaaaatggtgtgtgtacataatgttttatcagcatagactatggaggagtgcagagaaatcggaacatgtgtatgtattatttggactttggattcaggttttttgcatgttaatatctttcgttatagataaagtatttacaaaacagtgacatttgattcaactgttgagctttttaatttttaacttttttttaattttagtatttt

SEQ ID NO: 3157219 - DNA, 274 bp, Cricetulus griseus
tgtgtgtgttggttttagaagggccttgataaaaattacacagcagtttgataactgaaaaaagcttaaaagtcttccggcccacctcactctctcatttcaatattaatgtattatatgtaactacttggaaaagagtgattattcaaatgcttcatcccacagaaagaatatagatgatagaatatattttattaataaaattaattggagcctagcagagtttccatgtgctcacaattattattgtgtctgggtttcttgtttgtatcaa

SEQ ID NO: 3157220 - DNA, 211 bp, Cricetulus griseus
ttttttttttttaaagtattttatttatttatcatgtatacagtctatacagtcttctgccttcctgtcagaagagggcaccagatctcattcaaggtggttttgagctaccatgtggttgctgggaattgaactcaggacctctgtaagtacaattggtgctcttaaccactgagccatctctctagcccacacctgttcactctaaaaa

SEQ ID NO: 3157221 - DNA, 339 bp, Cricetulus griseus
atctgggcactgctgaagaaatttccaagaaggattgtccataattttagagaaaatgagtgaatacaagacaattgttcttttaaaaggaatgaagttcatagatgataaccattttaggacaatcaagtccttactaagaaaaaactaaatctaacgaaagagatgcaagaggattatgacagatttcaaatagctgacctgatggaagacaaattcccaaatgatgctggactggacacactgattgaagtttgtcaaagcattgaagaacttaaaggccttgcgaaaaacctgaaaacagagaaggcaaaagttaaaagtcaaaagaaagaaaaa

SEQ ID NO: 3157222 - DNA, 688 bp, Cricetulus griseus
ggttctggctgagctcttggaacttggctgtcctgagcagagcctacgggatgccattatcttggacctcttttcccatgcactcatcttctgccgccagcagggcttttcactagagcagacatcagcagcttgtgccttgctccaagatcttcacaaggcctgtgttgctacccctttgggcaatgtggaggaatgctaccgctactttaccagcgttctcttttgccatggagtcaggcggcccccttttagcatcgatctctttaaagaggaacagctgctggcattggcagactatgtgatcaacacctacttccgccacttcaagctctacaaatacgtcttcacaccccaggttcggctggacctatctttgacttacatagggctacagccacccaagccctggccagaagagaaagaaggcgaggtgttggcagaacaagcagctactccacaggaggaagaaccagaaactgtgacccagccagagcaacagccaaagtgaggtgtgcatcctccaaacctatatcaagacccagcctgagcaaggagctgaggcagctccagcagctggtggaggagcggctcaaggagagcgaggaaaggctagagcagcaaactggacggccttggagcggccctatcagccaccgtcccagcaaaggcaagaccaagaccaagt

SEQ ID NO: 3157223 - DNA, 177 bp, Cricetulus griseus
ctggaggcagaagccagcctccacgagaagaaggaagtaaccttcctcattgaatatgttcattacatggtggacaaaccatggggaggactataaggctatggcccgggatgagaagaattactatcaagatacaccaaagattctttgcagaataagaagatggaggttgactga

SEQ ID NO: 3157224 - DNA, 472 bp, Cricetulus griseus
cagcggcgaggccaccaggacactgatcaatccttcgtctgtggagagagccgccagtttgcccagtgcctcatcttgggtcttgttcctgaccagtggcatgctcatcagcgtactgggcatttgggtgcctggatgtggctcagactgggaacaggagtccctgaatgagacagatactggagaatcagaggcccagatgtgcagcttcctgtctctgcagatcatggggcccttgattgtgcttgtgggactgtgtttctttgtggtggcccatgttaagaagaaaacaacttgagttcaagccgacatactcctgaaatggaaggggaacacacccacagtacggagcctgttcatatcactgtaggtgactcggtgataatattcccgccccctccaccaccttattttcctgagtcttcagcaggaactcgacctcctgggcctaacagtttgcaccacactgaaa

SEQ ID NO: 3157225 - DNA, 705 bp, Cricetulus griseus
  modified_base (25)..(25): a, c, t, g, unknown or other
gacattgtgaacttaattactgaangccaaaggcagcaactagcatctgtgagctactcctctcgctatgccctgggcctcttttatgaagtaggcatgaagattgatgtcccatgggctggacgatacatcaccagtaacccctgcgtgcgcttcatctccattgataatcagaagcgcagcatagagtcatcagaatttggtccatccctggtgatccacaccactgtcccattcggagttacacacatggagcacagggaggaagatgtgcagcagataatcagccagcaactggaaaccattctgccgggtttgcctcagccggttgctaccaaatgccagaagtggaggtattcacaggttataaactcagctgccaactgtcccggccagatgactcttcacctcaacccttccctggtgtgtggcggggatggatttactcactccaacttcgatggctgcgtcgcctcggccctgagtgtcctggaagctttaaagaatcatatttagggtctatgttcttgttttctacattgacttggggtatttttttgttttctacagacctctgtaattaattactcttgttttccaattttgtggagagaaattacttggaaaaatgtctccagttaattgtcatttttcatgtgaaatataaaaacaatgttataatttgatagctaccaccataataaa

SEQ ID NO: 3157226 - DNA, 550 bp, Cricetulus griseus
gacagtttatatgtatcacacccaacatcagcagccagcatcttcttcattgagagacgcccaagcagatggccagcaatgaagtttcgaagaggatcaggacatcctgcttatgcagaagtggaaccagttggagagaaagaaggttttattgtatcagagcagtgctaaagtttagggacagagcagcaccagtactggcttacaggtgttaagactaaacttcgcttatacctttaaaacagacagacacacacccacagccacacacaaagggagccctaaactgctgtagccagaagggagacaagatttctggatgagcccaagcacaggaactattgaaaagaaaactcagacttgtacaagacaccatgtacactgaatataaaattccctagtggaatgacatccatggttcatgaggaacatctcctgtggacttgccagacgtgtgacaaggtgacaatgtttttagtttaggtgcagggttgcaaagggatcaaggaaaatataatgataataaataaagctttagttcacaaaggga

SEQ ID NO: 3157227 - DNA, 944 bp, Cricetulus griseus
tgaggctgaaccgctctctcctctggttgtccctggcacacaatcgtattcaagacaagggagcactgaagctggccgaggtcctgcgtccctttgagctgacccacaaggaggtggtggagcggcggcgcctactgctggagaaaggatcacaggaacggtctcgatcgccttcctcctcccgacacggggactccaaaaacggaccgggaccgggacaagttgcagatggtgggcatcagcaatattaccttggtggacaagtcagaaaagatgcagacaataaaaacacctaagggcctgggcaagaaaaaggagaagacaggggaagttgtaaagaaggaagagaagtcaggcccggggcagtcacccacacaaggaacccctaagaaagaagatgcctcaaaggcaggcaaagggaaggtaaccatccctgagcagaagatgagcaagggaaaagggacgaagacgggaagcaaagagaagcgcagcatcctcctggagtcagagcagctagttgttgaaactacagagatggttaaccctctcctggaacctgtggagcaccgtgatgggaaggttttcctgcctgggaacaaggtccttttgcacctcaacctcctccgaaaccggatcacagaggtggggctggaagccttcctcaccgccgtgcaataccaggttcaggtctccaagcccaagacttcggccaagggccccttggggctgctgtggctgtcccttgccaaaaactgctttgacccacagtgtccaacatacaccatgattcaggaactgatgctgccaagggatcctgtgaaggccaaggtcaaggaggaggagggcacagctatctaggcctcccacgggcagccctatcttcttgggagatatcttggaccagtaacatagtctattgctgtgttattcttggaaaatcactc

SEQ ID NO: 3157228 - DNA, 154 bp, Cricetulus griseus
aaggtatttgaatatcttaccaagaaatatcttaagaagaataatcttcgtgattggcttcgtgtggttgcatctgacaaggagacttacgaacttcgttacttccagattagtcaagatgaagatggatcagagtctgaggactaattggcct

SEQ ID NO: 3157229 - DNA, 189 bp, Cricetulus griseus
gatgcaccgtatgagtacgagctgatgctgaaatgcctgaatattgtcttcacatccatgttctctatggaatgcatattgaagatcatcgcctttggggttctgaactacttcagagatgcctggaatgtctttgactttgtcactgtgttgggaagtattactgatattttagtaacagagattgcg

SEQ ID NO: 3157230 - DNA, 310 bp, Cricetulus griseus
tacagtttgtcttgtcttcttatggttggcataaatataatgtagtgataaacactcaccttttacaatagaatgacttgtattggcagtgtttgtgttaccaatctagtctttttaatgtgaacttttcaaccaaagtattcttgcttcaggtctgtttcctttctttttggtaagttttctgaagtggaatataatgtgttagaggagtacacaaaactactttgcatgtttttctttcttgtctttcttttattttctttttggaggtctgtgtagattctttttagcaaaataaaattcagaaaaa

SEQ ID NO: 3157231 - DNA, 468 bp, Cricetulus griseus
tggagggtccctagtgaaggaacagtgggtactgactgcccggcaatgtgtctggtcatgccatgaacctctcacaggatatgaggtatggttgggtacaatcaaccagaacccacagcctggagaggcaaacctgcaaagggtctcagtggccaaggcagtgtgcggacctgcaggctcccagcttgttctgctcaagctggagagacctgtgatcttgaaccatcacgtggcccggatttgcctgcctcctgagcagtatgtggtacctccagggaccaagtgtgagattgcaggctggggtgaatccacaggtacaagcaataacacagtcctgcatgtggcctcgatgaaggtcatctccaaccaggagtgtaatgtaaagcaccgaggtcatgtacaagagagtgagatgtgcaccgagggactgctggtccccacaggggcttgtgagggtgactacggggg

SEQ ID NO: 3157232 - DNA, 413 bp, Cricetulus griseus
ccatggctcgcaccaagcagacggcccgcaagtccaccggcggcaaggccccgcgcaagcagctggctaccaaggctgcccgcaagagcgcgccggccacgggcggcgtcaagaagcctcaccgctaccggcccggcaccgtggcgctgcgcgagatccggcgctaccagaaatccaccgagctgctgatccgcaagctgccgttccagcgcctggtgcgcgagatcgcgcaggactttaagaccgacctgcgcttccagagctcggccgtcatggcgctgcaggaggcgagcgaggcctacctggtggggctgttcgaggacaccaacctgtgcgccatccacgccaagcgcgtcaccatcatgcccaaggacatccagctggcccgccgcatccgcggggagcgggcctaa

SEQ ID NO: 3157233 - DNA, 1976 bp, Cricetulus griseus
ttacctgatccatgggtatctcaaataacaaacacagacacactggcagctgttgctcagatcttacaaagccctcaaatgtttcgagtggctctggacttcttggagtactgcctccaaacttgcccaacaactctggacttgtaggactacagccaccaaatgttacaaatcctgctggacttatgggaacacagccaccgattggacctcaaaacttacctcccttaactatcccagctcaaagggtgcctgcattgccgatgttagacatccgtccaggactgataccacaggctcctggaccaagattccctttactacagcctggaatacccccccagcggggtatccctcccccagcggtacttgatgcagctcttcatccgccaccccgtggacctttccctccaggagatcttttcagtcagccagaaagaccttttctggctcctggaagaccaagtctagacaacgttcccaacccagataaacggataccacttgggaatgacagtattcagcaggaaggtgatagagactaccggtttcctcctgtagaaacaagggaaggcattaatagaccgcccccagtggatgttagggatgttgttgggagacctatagatcccagagaaggccctggaaggcctccgttagatggtagggatcattttggaagagctcctgtggacatgagagagaatcttgggaggccaggtctagatcatcttggtcgaagagaccactttggctttccccctgagaagccctgggggcttagagattttgatgagagagagcatcgagttctgcctgtcttcggtggtccaaaaggcttacatgaagaaagaggtagatttcgggctggaagttaccgatttgatcctagaagtggtccttggaacagaggatttgggcaagacgttcccagagattttgatgaccgaagaagaccctgggagaggcagagggatagggatgacagagattttgatttctgccgagaaattaatggaaatcgtcttggacgagatagaattcaaaacacttgggtcccccctcctcatgctcgggtttttgattatttcgaaggggccacttctcaacgaaaaggtgagaatgtgcctcaagttaacggtgaaaatacagagagacatgctcagccaccgcctttaccagtacagaaggaccctgaactctatgacaaactggcgtcatcaggggacatagacaaggaggagagcggcacagttgctggtgtagaaagtgaagcagtggtggtagagagcacagagactgaggggacataaccatcgctcagtaggtaaaagaacccttttgtaaagttgtcatctctgtaagaggttaacggctgactgcaccacagttgttcacgtttatctgccagaactaagttaatctgatgttcatgttcacctttctcttaaaataattgtacaactgacttgtatagacattgttcttaatatgaacatggtaggtaaacattttttttttctgataaagtataaatgttgccccacattcttttaacgtcaaggagatgctaacagcttgtcggagacttcctatggaagagagggttttagacactgtcattgggttggtggccatatttcagaacagcaaggtgtggcatatcttctccatagctctaggctgctgcaggatttaaggtaacaaacaaagctgtgacattttatgcaaggactggctctagattcttgaggagcataatacagagattttaagaagtgattttgtaaaaatctccactatggtctctgttactccaaagttaagtgtgtgtgatttgttcctcatactgcagtgagtaaaaaagataaaaaagcaaacaacataaacattaaaatacgtttcaatgttgggtgaattttgtttttagatgccaataaaacttacttgtttgataaaaaaaaaaaaaaaaaaaa

SEQ ID NO: 3157234 - DNA, 711 bp, Cricetulus griseus
ctcagtgttcaaaaacttgggaaatgctgcatgtctagctagcaaaatttactttttgtatgggaatataaatttttgttgaggtactgtctttcaaccctaatccttttcaccaagaatgaagctatttaaaaactaagatgccaacagatcacgaggagccctgtggccccagtctcaggtcattttgcctgaatggggggatttgttatgtgatacctactattcccagcccattctgtaggtgcattgagaattatacaggagctcgttgcgaagaggtttttctcccaagtgccagcatccaaagcaaaagtaacctgtcggcagctttcctggccctggtgatcctagtcacgctcgccattgcagcactctgcttcctatgcaggaagggccaccttcagagggccagttctgtccagtgtgagatcagcctggtggagaggagcagtaccagtgcccaccacagtcacagagatcactgaagacacacccagtgaaggcagacttacttctcagaagtcagtgaagacaagttgtccacctggcctccagctaagatgatattcatattgctgaaagtactgactactcgctgcagataattactggctcccaccttacagcagttatagccaaagacaaggaccacacgaagctcagggttatccagaagacctgcagagaagtaagacacaggacagtctt

SEQ ID NO: 3157235 - DNA, 968 bp, Cricetulus griseus
cgaagatgcttacaaaacccaggtgaggattgacaatgagcctgctttacttggatatcttggacactgcgtggtcaggcagagttcacggccatgcgggagcagtacatgcgcgggggtgagggcttcatcatctgctattctgtcactgaccgccaatcattccaggaggctgccaagttcaaggagcttattttccaggtccgtcacacctatgaaattccccttgtgctagtgggtaacaaaattgacctggaacagttccgccaggtctctacagaagaaggcatgaatcttgctcgagaatacaattgtgccttctttgagacctctgcagccctgatgatgcttttcaaggcttagtaagagaaattcgcaggaaggaatccatgctatccttgatggaaaagaattaaagagaaaggacagcctgtggaagaagataaaaggactcactagaaaagaaaagagaaaacatgacatgatactctgcttctgtgtccttcccatctatctttctgaatttttatcaaccagacaatgctatttagattttacaatatattaccaaataaaattaacattccaattgcctcattttcctgtaaagagtagcttcatttcgtatgctgtctagttataaagaaaatatgcaaacttgtagctaggatgataaaaggcttaggggatctgcttttgcctgataactctagttgtttgcatttcacaaatctgtaaataatgaagaggctagaatagttcaaagcaaaagatcaagtcctggtcttttcttaagtggaaaagtcttggtatttcttcttgagtccttcatagatgagcattagagaaattactgataatataaactgatggcttgttaaagctcaaaaattacatgtgcccatatttgcagtgctcaggttgccacacacctttaaagaattagcacagtgaagttactatgatga

SEQ ID NO: 3157236 - DNA, 444 bp, Cricetulus griseus
acccggtgaccatggcggtgtttcacgacgaggtggagatcgaggactttcaatatgacgaggactcggagacatatttctaccccctgcccctgtggggataacttctccatcaccaaggaagatttggagaatggagaagatgtggcaacgtgtcctagctgctctctcattataaaaagtgatttatgacaaagatcagtttatgtgtggagaaacagtcccagcaccttcaaccaacaaagagttagttaaatgctgaaggagccctgaggagcccaaatcctaagtattagggaatgagcccaggttgatggaacaagtgctgggttaacaagctcagatgggtcatgggttaagagcactttctcctcttctagaggcttttctgttcaattcttagcactcacatcgcagctcacaactgtctgtaactcctgttcc

SEQ ID NO: 3157237 - DNA, 251 bp, Cricetulus griseus
gtactgaaggccttccgagtgcccaatgacttccatgctcgccgtgcagccacctccagaacctacctgtaccgtctggccacaggctgtcactggcctgatcagctgcctgtgtttgaacaaaatgtatgctgggctctgcagacaaagtccctggatgtggctgccatgcaggaggctgcccagcacctcatcgggacacacgatttcagtgctttccagtctgctggcagcccagccacaagtactgt

SEQ ID NO: 3157238 - DNA, 204 bp, Cricetulus griseus
agccgggcgtcggtggcacaagcctttaattcccagcactcgggagggcagaggcaggcagatccctctgagtttgaggccagcctggtctacagagcaagttccaggacagccagggctacacagagaaaccctgcctcaaaaaaacaaaacaaaaaccaataataaaatactcatactatttgtaaaaaaaaaaaaaaaaaa

SEQ ID NO: 3157239 - DNA, 495 bp, Cricetulus griseus
ggcgacggcggcgagcgggatggccgccgacccggccctcagcccggacgggcccgctagcgagcacggggcgagcggcggaggccgcggggacgagccgggcagtcccagggcgctgcgggcccggctggagaagctggaggtcatgtaccgccgggccctgctgcagctgcacctggagcagcaggccgcgcgcccgccgtcagacagcgaccccagaccgctcccagaaactgccaccggcctgagcgcctgcgacccggacggtcccgggccctggctgtagcccgagggcgcggcgggaggggtggggccagcgcgccccgccccttcgcgggcagcgcccgccctccaacacacggaagctcaggatttgtactcccaggactcccgcccccacccaacggcacttccgggtgccacagtcgttggttggcctggggcatggagaggagccagaagctcctaattcccacatgggcagagcaactgcca

SEQ ID NO: 3157240 - DNA, 465 bp, Cricetulus griseus
gaggagcagcggagctgcgcaagtacacctaaagccactgctggagaagcgccggcgcgcaaggatcaaccagagcctgagccaggctaaaggggctggtattgcccttgctgggcgcggagacttcccgctactcgaagctggagaaggcggacatcctggaaatgaccgtgcgcttcctgcaggagcagcctgtgtccccctaccctactgcagcgccggagcccttggatagttacctcgagggttacagagcctgtctggcgcgcttggcgcgcatgctgccggcctgcagcgtcctggagccggccgtgagcgtgcgcctgctggagcacctgcggcagaggactgtcagtggtgtcccaccttcacagacacctacacccgcccctgctccagctccctctccgcaggtgcctcctccaggcagccctggcctctggcggccctggtaggctcctggat

SEQ ID NO: 3157241 - DNA, 460 bp, Cricetulus griseus
gaaaggactcagcggagcgacaggccctttaaatgcaatcagtgtgggaaatgtttcactcagagttctcacctcatccgacatcagataactcacaacagagaggaagaaccacatggacgaagccgaaggcgacaacggccctgtggtcggggctcaaagctcgttcagaatccacacttaaattcaagagagatccccatggcccaggcaaaggcaggacaagcaagcagggcactggccttgtttgaccttcatgaaattatgcaggagaaaacccctgtgcatgttattggggtagaagaaccttcaatgggcaattctatgttatttgacatcagagaatctacataggaaggaaacttaagataactctggagttactgggtacaaacgttaagtccacagagtcatatatatatatatatatatatatatatatatatatatatattagtgt

SEQ ID NO: 3157242 - DNA, 1757 bp, Cricetulus griseus
ctgtggccatcttcctgggagtcccctttgccaggcctcctcttggatccctgagatttgctccaccacagcctccagagccctggagctttgtgaagaatgccacctcttacccccctatgtgctcccaagatgcagtgagaggacagaggaccaatgacctcataaccaacagaaaggagaaaatccatctggagttttctgaagactgtctttacctgaatatttacactcctgctgacttgacaaggagcagcaggttgccagtgatggtgtggatccatggaggaggactgatattgggcggtgcatcaacctatgatggactggctctctctgcccatgaaaacgtggtggtggtggccattcagtaccgcctgagcatctggggattcttcagcacaggggatgaacacagccgtggaaactggggtcatttggaccaggtggctgcactgcactgggttcaagacaacattgccaattttggaggggacccaggctctgtgaccatttttggagagtcagcaggaggtgaaagtgtctctgttcttatgttctctcccttggccaagaacctcttccacagggccatttctgagagtggtgtgatccttgttcctggcttgtttaccaaagattccaggatagtcactgagaaagttgctgttactgctgggtgcaaaaccaccacatctgctgtcattgttcactgcctgcgccagaagacggaggacgagctcttggaggtcatgcagaaaatgaatctgtttaaacttaatgtacaaggagacaccaaagagaaccacgcttttgtaccaactgtgcttgatggggtgctgctgccaaaggcacctgaagagatcctggctgagaagaatttcaacactgtgccctacatcgtgggaatcaacaagcaagagtttggctggcttctaccaacaatgatgggatttctacaaactgatgtaaagtgggacaagaagatggccatagctctcctgcagaagttcgctccctatttcggcatgaatgaggatgcagttccagttgcaattgagaagtatgtaagaggtagcaatgagccactcaaaatcagagatggagtcctagatatccttggggatttaacatttggtatcccatcagtgattgtgtcccgtggccacagagatactggagctcctacctacatgtatgaatttcagtaccatccaagtttctcatcacacatgagacccaaaaatgtagttggagaccatggggatgaagtctactctgtcttcggtgcccccattttaagagatggagcctctgaagaggagaccaacctcagcaagatgatgatgaaattctgggccaactttgctcggaatgggaaccctaacggtgaaggactgccccactggccagagtatgaccagaaggaaggctacctgcagatcggtgccaccactcagcaagcccagagactgaaaggggaggaagtggctttctggactgagatcctggctaagaaacaacccaagccagagcacaatgagctgtgaatgcaaggttctgccaacctcagagcagagaagccaagatatggttctttcactaaaggtgtttataaattttaatggatcatggaagaccctggacaattttgtcagagagatgagcagaggccagatgggaaatgtttgtacttgtggcctcaattttgagaataaatgttctttttaaggtacaaaaaaaaaaaaaaaaaaaaa

SEQ ID NO: 3157243 - DNA, 1742 bp, Cricetulus griseus
tcagctacagtgttagctaagtttggaaagaagacagaaaagagaccccggtggcagctttgctgttgttctttgctttagttgtcctttggggtattgtggcgcaaggctgtttgttgtgcttttagcggtgctgtctccggttcctcgcactcctgtgaacaagcccctgggcaagagcagctacagcaaccaacatcagaacaagcaaggggagagcgcctggtgtcatgaccaaggcaagagaccagagccgccgggagggatgctgcggatccttaacaaactacctgacctcggcaaaattccttctctaccttgggcactctctctccacgttggggggatcggatgtggcactttgcagtgtctgtgtttctggtggaactctatggaaacagcctcctcttgacagctgtctacgggctggtggtagcaggctcttgttctggtcctgggacgccatcattgagtggtctcctactataaccagccagtgtttctggctggcatgggcctggccttcctctatatgacagtcctgggctttgattgcatcaccacagggtacgcctacactcagggactaagtggctccatcctcagtgttttgatgggagcatctgcaataactggaataatgggaactgtggctttcacttggctgcgtcggaaatgtggccttgttcggactggtctgttctcaggactggctcagctttcctgtttgatcttgtgtgtgatctccgtgttcatgcctggaagccccttggacctatctgtttctccattcgaagatatccgttctaggttcatgcaggtggagccagtgtccctaaactaccaaaaacaccagagaccgtctttacacctgaaatgcctatgtccaaccccataatctctgtcagtctgctctttgcaggcgtcattgctgctagaatcggtctttggtccttcgatttaactgtgacacagttgctgcaagaaaatgtaattgaatctgaaagaggcattatcaacggtgtgcagaactccatgaactaccttcttgaccttctgcatttcatcatggtcatcctggcccccaatcctgaagcttttggcttacttgtgttgatttcagtctcctttgtggcaatgggccatcttatgtatttccgatttgcccagaagacgctgggcaaccagctttttgtttgtggtcctgatgaaaaagaagttacagatgaaaatcaacctaacacatctgttgtgtaacatagtttctctgtggcccctgttactagatcgtggagagcatgtgtgcttattctgtactacagaattccaataaatgcctgcatatttctctgattttacccacacgctgtgccttgagggctaagagcactcactaacctaagtcagcaaaagatggttacatgtagaaaatcagcccacacttggaaaggactcttttgacgagttcctatagaacattttactcttatttacttgggcttaggtgttcattatctctgcattattctagagcaaagatagtcacaaaagtttccctttcaatatctctgaaaataaaaggaaaaactgtttgtatatattttttaaaactgttttgccagttattttgtaacatgccagtacccacatgggacattgccttcacttttgatgcactttcatggagactgactgcaatacgttgctatgagcactttctttgtccttgagtttaatctttt

SEQ ID NO: 3157244 - DNA, 215 bp, Cricetulus griseus
atgaagttgaacctacagtgagtgttgtccaaggagtattcagcaataatggtcatctctcccaagatccatatgaccttccaaagaacagtcacatcccttgccattatgacctgctgccagtaagggacagctcatcctctcccaagagagaagatggtggtggtggcggcagcagcagcagcagcagcagcaatagcagcagcagcagcagc

SEQ ID NO: 3157245 - DNA, 537 bp, Cricetulus griseus
tgggtctttggaaaccggaagtagtctttgtcaccctcactcgcagcaattccgatgacggtccacaatctgtacctatttgaccggaatggagtgtgtctacactacagcgagtggcaccgcaagaagcaagcggggatccctaaggaagaggagtacaagctgatgtatgggatgctcttctccattcgttcgtttgtcagcaagatgtccccgctagacatgaaggatggctttctgtctttccaaactagccggtacaaactccattactacgaaacgcccactggaatcaaggttgtcatgaatactgacttgggcgtgggtcctatccgagatgtgctacaccacatctacagtgcgctgtatgtggagttggtcgtgaagaatcctctgtgcccactgggacagactgtgcaaagtgagctcttccgctcccggctagattcctatgtccgatctttgcccttcttctctgcccgagcgggctgaaacatctacctcacccctcagaagaatctgtgactgtctggaccc

SEQ ID NO: 3157246 - DNA, 1071 bp, Cricetulus griseus
ctcgcaagccataatggaatcagtctataaagatctggacattatttttggtgttgatctaccaagcgatcaagaatttcaggttgttaaggatgcagttttaggctgtctacttgactttttgccaaaaggtgttaaaaaagaaaagataaccctaaagacaatgaaagaggcatatgtgcagaaaatggtcaaaatttgcaataaccatgatcgttggagtctcatctctctttcaaataacactgggaagaatgtagaactaaaatttgtcaattcactcagacggcaatttgaatttagtgtagattcatttcagattcttttggattccatgttagatttctatagtgtccccaatgctaagctaaccaaagaatcttgtcctgttgttgtggctgaaagtatgtatggggattttcaggaagcaatgatacatttgaaatacaagcttatatctaccagaaaacctgaagagatcagaggtggtggtcttttaaaatacagcaatttgttggttcgtgacttcaaacccgcttgtcaaaaagaaattaagactctggaacgttacatgtgttctagatttttcattgattttcctgatgtagcagaacagcaaaagaaaattgaatcatacctccgcaaccatttcataggtgaagaaaaaagcaagtatgactaccttatgaccttgcatggagttgtgaaccaaagtactgtctgcctcatgggttatgaaagaaggcaaactcttaacatgatcacccttttggctttgaaagtacttggagaacagaatatattacccagtacagacaacgtaacttgcttctaccaacctgctccatacctagttcttgagggagggtatccaagttattatgtagcatcagggccaccacttgtttacttccagccatgccccacagtgcggcttccagtacggaatggcatgatgtaagaaatacacataccagaagcattgcttaagtgcatctgaaaagcaactttcaaatttctagtaaaagttaagatcttatttttctgttagttgcctaacttacttttcac

SEQ ID NO: 3157247 - DNA, 594 bp, Cricetulus griseus
ctctgactttggcctctgcaagaagctggcagtgggtaggcacagtttcagccgtcgttcaggggtacctggcactgaaggctggatcgccccagagatgttgagtgaagactgcaaggaaaaccctacctacacagtggacatcttctctgcaggctgtgttttttactatgtcatctctgagggcaaccatccttttggcaagtccttgcagcggcaggccaacatcctcctgggcgcctgcagccttgactgcttccactcagacaagcatgaggacgtcattgctcgtgaattgatagagaagatgattgctatggatccccagcaacggccctctgcaaagcatgtgctaaaacacccattcttctggagcctggaaaagcagctccagttctttcaggatgtgagtgaccgaatagaaaaggagtccttggatggcccgatagtaagacagttggagagaggcggagagccgtggtgaagatggactggcgggagaacatcactgtccccttgcagacagatctgcgaaaatttagaacctacaaaggtggctctgtcagagatctccttcgagccatgagaaacaag

SEQ ID NO: 3157248 - DNA, 504 bp, Cricetulus griseus
cgggccggacgggctgaggaggcgccggtcgctagcacgcgaggccaagggccggacggccaccggagagctcagcgcgcccggtgcggggagggacccgccacccgcggccccccacgcggggacagcgatgcggtgcatcccgagatcccggtagcctcggatctgcggcggtgatggatgagccgtggtgggaagggcgcgtcgcctcggacgtccactgcaccctacgcgaaaaggactaaagcttcccaccttccgcgcccactccccactcctgaagagccgtcggttctttgtagacattctgaccctgctgagcagacactgccatctgtgcccctcagcccggcacctggcccatctacctactggaccacttcatggaccagtacaacatcaccacctccaagcagctgtatactgtggccgtctcctgcctcctgctggccagtaagtttgaggacagggaagaccgtgtcgcccaaactggagcagataaac

SEQ ID NO: 3157249 - DNA, 772 bp, Cricetulus griseus
ggagcggaggcgtgagcaggaacgtatccaccgtgagcgggaggagctacgacggcagcaggagctgcgctatgagcaagagcgccggcctgcagtgcgcaggccttacgatgtggatggccggcgtgatgatgcctactggccagaagccaagcgggcagcactggatgaccgctaccactcagaccgatgatgggagacagagaaggacagcattaccctgaacgccatggagggcctgaacgccatggccgggactctcgagacggctggggctacagctctaacaagagaatgagtgaaggccgagggctgccccctcctcccaggcgtgactggggggaacacagccggagacttgaagatgaccgggcatggcagggtgcagctgacggaggcatgatggagcgtgagcacaagaggtggcaaggtggtgagaggagcatgtctggccactcagggcctggccacatgatgaaccgaggtggcatgtcagggcgtggcagtttcgcccctggtggagcctcacgtggccatgtgattccacgtggagggatgcagggaggctttggaggacagagccggggcagcaggcccagtgatgcccgcttcacccgccgctactgagcacctgtgccacccagctgtgtgacctctgtgtcctgtcaggacttctcccaccattgtacaaaagaattttttttaaatctgctgccatattgtagcttgttaaatgtgaatttgttttcattttggtttttgttgctgtttt

SEQ ID NO: 3157250 - DNA, 640 bp, Cricetulus griseus
ccgggatgcatgtgcctagagcagtgtttgtggacctggagcccactgtggtcgatgaagtacgcactggaacctacaggcaacttttccacccagagcagctgatcacggggaaggaagatgcagccaataattatgccagaggtcattataccattggcaaggagattgtcgacctggtcctggaccgaattcgaaaactagcagatctgtgcacaggactgcagggcttcctcatcttccacagctttggaggtggcacaggatctgggttcgcatctctgctgatggaacggctttcggtggactatggcaagaagtccaagctggagtttgccatttacccagccccccaggtttccacagctgttgtggagccctacaactccatcctgaccacgcacacgacactggacactctgactgtgctttcattggtggacaacgaagccatctaatgtatgccaagcgggcctttgtacactggtacgtgggagaaggcatggaggagggggaggttctcagaggcccgacgaggacctggctgcgctggagaaggattatgaagaggtgggcgtggattccgttgaagcagaggcagaagaaggggaggagtattgagagtatgggtccggctggc

SEQ ID NO: 3157251 - DNA, 1437 bp, Cricetulus griseus
cagtcatgaacatcatccatagcatcttcagcctggtgctcaagttccgaagccagctcatctctcagacctggggcccagctactggcccccgtggtgctgagcaccccaacttcccactcatgcagcagtcctacagcaccttcaagtactactcccacttcctcttcaaagtgaccaagctggtgaaccgtggctaccagcctcaccttgaagacttcctgcttcgcatcaacttcaacaactactaccaggactcctgaggacagacaggctcacggtgctgcatccctgtttgacctggctgggaacagggcagcgaacacagacagacctggaaaagtggctttatttagaggcctgggatttagcaggtgtcaggcccagccctttggggcaagatgcaccaacaggctacaaggcttatttagccctgtttgcatcacttataagcatgagactgcattcctacactggcttgaagcactgtgtgctgggggcatgttgagtgctaggccagggcagtactgctaaagcagaatcagacagagatgggtcatgttttgactggagatctctgccatcatgcacagaccatgagggtagggatcccaatggtctcagcaattcagcagcactggggaagccttggggaccctgggtgtggaggacaccaaggcctttatgaggatcatgttacactgagctctgcagcccagaggggtggtctgctgctgtaggaacactgctcatcagtggtccttgctgctgcttcagggcctgtggcctccccttcactgtaataaggagactccagcagcttcaggacacgtcgcacctagagaacagatgagaagaattgggtgagcggcatatttaatgacagctcttcctcccagggacacaataggcacaggtgtgtgcttgcctcggcaaagtctccattttcagcagcttcaatggcattctgtgcaatgtagttccttaggacgtacttggggttgttggtgtgcatgatgcgcacacgttctgcctgccaggcagcagtgtctccaacatcctccttctccttgtccagacgggctctggaatcatagccctagctgggttttcccaacaagaacagcttgctccatgcccccaattcagggccatctgtagccactcccttgtgtcactggccaaggagccaggacaggggaccctaaagctgcctacctgtactcctgtagccaggtttcccagtggtctatgttcctgctctgtagttcagtggggctcagctgttccagccgtgactgttgttctacacgctctagctcctttgtgacatttgcttgagtgccaatgagtgcaaagagctgtgggttcgactgtgcaagcatcagcatcatagagagctgcctgaagagaggggtggcatgagaaatatctcag

SEQ ID NO: 3157252 - DNA, 213 bp, Cricetulus griseus
gaggactgcctcggtccccacgaccagtgggtcaggtccggttttgattgtttccatagagccttctcaacacactcaggcattacagtgtacgtatttgccttcggcttcttcaagcctcttggggaacctcttcgcagtggccccgaagatcccacgttcttgcagctcagcgctgtggaccgctgtcctagccagctctcctccgtgtat

SEQ ID NO: 3157253 - DNA, 386 bp, Cricetulus griseus
ggacaagccattcaaagcaatattaaagctggtgatgtaaagagagaagacctgttcatcactacaaagctttggtgcacttgctttcggccagagctggtccggcctagtttggaaaatcactgaaaaacttcaactggactatgttgatctgtacattatacatcacccagtgccgatgaagtcaggggataatgattttccagtagatgaacaagggaaattactgtttgacacagtggatttctgtgccacgtgggaggcattggagaagtgtaaggatgcaggattggtcaaatctattggggtgtccaactttaaccacaggcagctagagagaatcctgaataagccaggacttaagtacaaacctgtctgcaatcagg

SEQ ID NO: 3157254 - DNA, 428 bp, Cricetulus griseus
ctcagccaggggggactacatccgggcggcggagaagttgcggaaggagatttacagctccgagcagagcgatgagcgtctgatgcgcatgtacaacgtgcgcatcatgagggtggagttctacttcctgtcccagtatgtgtcgccggccgactccccattccgccacatcttcctgggccaaggtgaccacactttgggtgccctgctggatcatcttcggatgctgcgctccgatggctctgggcttccaggagagccgcttccggcgccagttggcactgctcacggtggacactgcagggggccgccaatgcgctgagtggcgacgtctggaacattgacaataacttttgaggctccaagccccacctgagccccacgcgattctgtctcccttttgagtggtgcaggtgaaaggaggtgcc

SEQ ID NO: 3157255 - DNA, 885 bp, Cricetulus griseus
attttatttttaaccactgccttcattcatttttatcatcccctcctttggatcaaaacctatctgctagatgattttagaatactaccttgaggagtatttgtgaacttggtttagagtttctagactcacatacttgtttcacttgtgtctgagatctgttagcacttgattcgcttctgagaattcagtagtcacctgtcactggcttttattacacttcaggatgatcctgcttgacatgtggcttacagaagatttgccaaattatactttagtggcagtctgtcccccccccccatagattattctccactatcacaaatcagtgcaaatacttatggtctttcctagcatttcattgtcattacctatcaccaaaagaaattgaactctgttgttcgggaagctccttttcccaggctgagaacaattgaaagtgcatataatgtaaaggtctcacaaacatttgctaggttgtccttttcaatgcatgtgcaggctgcatcctgtcattgttttaagccagggtttataaataagtagatttatatcagtcttaatagaagcgtataccccttgtaagcttcggtggcaatacggattgaaacccgacagttgtcttgtatttgcttcctaggttctgcatgcaagtggtgataggtaggactgacaacacactgcctttgacttctagcatttagcaaccgagagttgtagagtcaacaaagctgtaagtctcttcacttaacctgtggttcttactaaaactattatctgaatctacagcatcccaccatgaaatatttggtaaatttatgttgtgatgtgttgcagcatgtaaataactataacttctctgcaataaaacatttatatagaaaa

SEQ ID NO: 3157256 - DNA, 387 bp, Cricetulus griseus
tgcttcctggaaccatcaagagggaggatgtctgtgacattgcacacagatgtgggagatatcaaaatagaagtcttctgtgagaggacacccaaaacatgtgagaatttcttggctctttgcgccagtaattactacaatggctgtgtatttcataggaacatcaagggtttcatggttcaaacgggagatccaacaggtactggaaggggaggcagcagtatctggggcaagaagtttgaggacgaatatagtgaatatctgaagcacaacgttagaggtgttgtatctatggctaataatgggccaaataccaatggatctcagttcttcatcacctatggcaagcagccacatctggacatgaaatacacagtatttggaaag

SEQ ID NO: 3157257 - DNA, 188 bp, Cricetulus griseus
ctttcatggacattttcccataggctggcctctgagtctcaatcctccagcctcagcctcctttaatctcagcactcaggagacagaggcaagcagatccactgaattcaaggccagcctgctctatagagagagagtttcaggacagccagaactacacagagaaaccctgtctaggaaaaataaaa

SEQ ID NO: 3157258 - DNA, 812 bp, Cricetulus griseus
gcaggcatcagaggtggaggagaaagagatggaccccccagattctgcctcgagggtcgttctgtggccgcttcctcagcatggtgaacactgatgatgtcaatgccatcatcctggcccagaagaacatgctggaccgctttgagaaaaccaacgagatgcttctgaacttcaacaacctgtccagcgtgcgactgcagcaaatgagtgagcgcttcatgcaccatactcgcaccttggtggacatgaaacgggacctggacagcatcttccgcaggatcaggacactgaaggggaagctggcccggcagcacccagaggccttcagtcacatcccagaggggacattcctagaggacgaagatgaagaccccattccacccagtatcaccacaaccatcgccacctcggagcagagcacaggctcctgtgacaccagtcctgacactgtctcaccgtctctcagtcctggctttgaggacctatcacatattagacctggttcccctgctatcaacggccacagccacacagatgacgaggaagagacacatggagaatagccccccttcccaccatcccagaaaggccagggcagcagtggtcctcccagggtcacatttggtcagctttgctgctccattctgtcataggcagggttcctaatccctgccccttctaaaagtgggatttccctatgccaggacatgcaccctagctggggcactggggctggctaaaggtatcctgcagctacagccttggccagctctgaaagtacttctagaagtttccagagaccaaagccagat

SEQ ID NO: 3157259 - DNA, 355 bp, Cricetulus griseus
tttgttacgttactgaatgggagcaagcacagagcgcgattcagcggtttcatcagtttctttccgaggcagagagttaatagtgcagctgcagcccacagatgctctgtgtgcattaccaacctgcccatctctttcacgttggaagagtttgaagaacttgtccgagcatatgggaacatcgagaggtgttttttggtctacagtgaagttactggccactccaaaggctatgggtttgtggagtacatgaaaaaagacttcgctgccaaggctagactggagttattgggcaggcagatgggagcgtcggcactctttgcacagtggatggatgttaatctgttggcttcgg

SEQ ID NO: 3157260 - DNA, 444 bp, Cricetulus griseus
  modified_base (13)..(13): a, c, t, g, unknown or other
  modified_base (110)..(110): a, c, t, g, unknown or other
tgagagcttagcngttaaaattacacaacgtactctatccgtatcgcttcaccaagaaataggttcattcaatgcaggttctccagcaagtggacaacaagttattgccngtttaatgagcacgaaaatggaagagaatggcaagcaggtggaaacctgctagtcttggtggatcagcacgctgcccatgagcgagttcgtttggagcagcttatttctgactcctatgagaagcagcctccgcaaagctctggtcggaaaaaattactgtcttccatgataattcctcctctagccatcacggtaccaaaggagcaaaggagactcttgtggtcttaccacaaacatttagaagatctgggactggaattgatctttccagatgctagtgattcttttgatccttaaaatactaaaaaataaaaaaaaaaataaaaaaaaaaa

SEQ ID NO: 3157261 - DNA, 713 bp, Cricetulus griseus
tgtggggctctgaacaatagaagtgccgcgggcgagagctaagcgaccgtttggcgtgacttggtagttgacgggaccgcgggactcgggagcgtccgtcatgttctgcgagaaagctacggagcttgtccgcgagttgcaacgcgcaccggaagggcagctgccggccttcaacgaggatggactcagacaagttctggaggagatgaaagctttgtatgaacaaatcagtctgatgtgaatgaagcaaagtcagctggacgaggtgatttgataccaacaatcaaatttcgacattgttctttgttaagaaatcgacgctgcactgtagcatacctgtatgaccggttacttcggattagagcactcaggtgggaatatggcagtgtcttgccaaatgctttgagattccacatgtctgctgaagaaatggagtggttcaaccattataaaaaatctcttgctacttacatgaggtcactgggaggagatgaaggtttggacatcacacaggatatgaaacctcccaaaagcctatatattgaagtacgatgtttaaaagactatggagaatttgaagttgatgatggcacttcagttctgctcaaaaaaaatagtcagcactttttgcctcggtggaaatgtgagcagttaatcagacaaggggttctagagcatgtgctgtcctgactgtgtcccgtgatgacaacagc

SEQ ID NO: 3157262 - DNA, 3259 bp, Cricetulus griseus
agatcaaggagtcagtatttccttcaaatctttgagaattctgtcatttcacaacaagacagcattactgctcatcaacagatgtctcattctccgcattgtatttgccgggagagaatctgggagtgtactggactgcttccctctgctcttgccggcacagacagcagacaccattattgacacacagctctgcaggggacttctttttgttctgagtacattaggctggatctgtatgaatagactaatgatccatggcagtgccagcactgtggatccctttgtcatctcaatggttggggacggtgctcaattcctatacacgctctagaggctggcaatagaaaatcggcagctggacacagtagatttcttcttgaagagcaaggaaaatcttcttactccatcttcaaaatctcctgttcctgatcagctgcatcatcacttttcatcccagttatatttaagacaggtggaagagatgatgccagcactggatttactttgctcagcaattagagaaagtgactctgagacccaaagcaagcactttgcagagcagctgcttcaccttacactgtcttttctcaacaaacaaataaaaactttcttcaggattactaatcattctgctcaacgactcgaggagctggtcaggataggcctggatttggtgtttgacagtttgaaaaggaacaatgtagaggaagcctccatgctcttgaggaatatgggcttcagtgtggaagatgagttgctcaagatatgcttttatacaactgataaaaatatacgggactttttggttgaaattttaaaagaaaaggaatgtttttctgaaaaagaaagaagaactatagactttgttcatcaagttgaaaagttttattcaggacgtttccaagaaaatgtgcagatgcagccctttccctattggataaaggaacaggactatctcaagcacaaatctatcttggacacattcctcaagcatgatcagaaagatgagtttaatgaccagcaccaaagaattgcgctgaattgggctcactggtgggatcagcaaacacaagaatgcatccttctccccaggataagtccagaagaatacaaaagcacattccccggactccctctggaggtacctcacggctcgccatgactggtcaaacattagcttgtggattgaagaatttcagacccaggaaacagggccacctcatcagaacaagtggccccctctgagtgctgacatcattgatcagaatacttgttgcaacaattacatgaagaataagattctagacaagctggccaggagtgggacttttcttgcatctgaactagaagactttgaactgttcctcctgagactcagccggattgggggtgtgatgcaagacgccctccccgtgcagagctacagagcctcgggagggtgggattttcactcgcacttcatcctctactgtctggagcacgacctacagcatcttctctacgtctatcttgactactacaatgctcctagtattctgccctctgatattacactctaccacctcattcagtctttgccaccctttgatcctagcagattgtttggctggcagtctgccaacacactagcaataggagatacaaccaaccgtctcccacatttttccagccctgacctggtgagtaaatacgctgtagtggaacgtctgaattatgcgtattatttacatcacggacgcccatcatttgcctttggtacttttctggtccaggagttaatcaagagtaagactcccaaacaactgcctcttggtgctggctcctcactgaggcagtgaaacatcgggctccgatcctcagtgtcctggcctcttgtctcctagggggctagtgctgtgccctgtctctgtgtttggattgtcacctctgtggaggacagggttgcagctgaagcaatgggacacatccaggcctcagtagaggatcattcctggagccttgaggacctgtccatgatctggagaactgtattgacaaggcagaagagccatactctcatccgaggcttccggcttttcattaaggattccccacttctgttgattatggagatgtatgaactatgtatgttcttcaagaattacgagaaagccaaagttaagcttgtggagttccagaaaagaccttagagacgcttgacacaatggccgtgtagatctattttggaaaagactgaaggcagatggacagtttgctgtggccaggagagtggcagagttagccgcattacctgtggacagcttggtgattgaacagctagcccaggaaatgaagaccctgaaacacactcagcagtggccccgcaaacacacaagaattgacttctggaaaaaatgccatgaaatttttaagaaaaactccatttccaacagggcagcctcttccttcttctccagtcaggtcccctgtggtgagtgagcacccccactgagcaagacgatcttgaggagcgccatctgttgctcacactggtggggcactggctcgcccgagaagagcctgttcccttggaggagctggaagcgctggagaaacagacctggatctgccgcatcacccagcaccgggagataggggagaatcatgaggcagcagcctgtatccagctcaagctaatcgagtctcagccctgggaggaaagcctcaaggatggagtccaactaaaacagctcctgcttaaagctctgactctgatgttggatgcagcggagagttatgccaaggactcctgtgtacgacaggccctacactgtaaacgactcaccaagttaataacactacagattcactttctgaacactggtcagaacacaatgcttatcaacttgagccatcagaagctaatggactgtatcatggcgctacctaggttctaccaggcttctattgtagccgaggcctatgactttgttcctgattgggctgaagttctctaccaacaagtgattcttaaaggagactttagttacttggaagaatttaaacagcaaaaattactaagacccaatatatttgaagacatttccaaaaaatataaacaacatcagcctaccgaacagggtcacagaaaacctgaagaagttactttcatattgtgaagatatctacctgcattacaagctggcatatgaacacaaattttttgaaattgtgaatgtgcttctgaaggaccctcaaacaggatgctgtcttaaag

SEQ ID NO: 3157263 - DNA, 308 bp, Cricetulus griseus
cggcggcggcggtggcggcggcagcgggggagtgcgcgggtgcgagtccgcggccgggagcgggaatgtcgaggagttcgaaggcggtgctgggcctctcggtgctgctgacggcggccacggtggccggcgtgcatctgaagcagcggcaggaccggcagaggcttcgtgacggagtgatcagagacattgagaggcagaatcagaaaaaagaaaacattcgtcttttgggagaacagattattttgactaagcaacttgaagcagaaagagagaagatgttggaaagaggatctcaaaacacttga

SEQ ID NO: 3157264 - DNA, 446 bp, Cricetulus griseus
gaagccgagacctgcaggccgcattcgacaccggcacggctcaccccatccaagccgcagaactgtgcccgccgtggccacctgattcccagctgtgtgtcctccagggccccagcgatgtgctcctcgccccgtgtgccccgccctcgactgaggtctgagccaacacccctgccgctgcctctgcccctgcccgctccgactcccagccagggtccctcgccttcctcccctggacccgggggcccaggtgggggaggtggtcgcggccggaagctactgctgcccacgcccctgctacgggacctgtacaccctcagtggactccctttaataaagacatctttgtaacagaaaaaaaaaaaaaaaaaaaaaaaaaaaaaaaaaaaaaaaaaaaaaaaaaaaaaaaaaaaaaaaaaaaaaaaaaaaaaaaaaaaaaaaaaaaa

SEQ ID NO: 3157265 - DNA, 1709 bp, Cricetulus griseus
  modified_base (697)..(697): a, c, t, g, unknown or other
gttccagctctacagccctggaggggtggcctgcgatgatgatggggagctgtttgccagcatggtgcacatcctcatgggctcctgttacaagaccaaaaagtttctgctctcactggcagaaaacaagctgggcccctgcatgctcctggcactgagagggaaccagaccatggcggagatcctgtgcttgatgctggaatacaacatcattgacaacaacgacacccagacagcagagtgggtcctggggtggccccagcacctggctgcaggatagatgggggagtcttggggggcggaggggggaggggcgggggatcctcagcacgcccagccccgcctaattcttagagcttcatattggaacctttgaccttgatcaaagcggccttggtggcaacaagaggaactcgggccagaaggaggatgccttttcttcctggaggtgcaccgagccgagatatcgcccctaccattgggacaagaatacccagtcatgtcaccccatcgtcctgtgtccccaccatcgctatgcaaagtggttcttgttgtacataagatttaaataacgcacctatttaagaaatgttgacaaattgcgggtctgggacccgctcttatttatgaagtctttgaccagccctccctccccgcctgccccctggcgtgtagtactgtctggaccagtcagctntcgggttagtgctagtaggttttggtttggttttttaaaggtaaacaaaacaaaacaaaacaacaagagaaaaacaaaacaaacaaaaaagaacctttggaaaattaattgcttttttcttaacggactctgtatgctaatgctgtccccgtcagtctgcccacctgctaccctgtattatttccagttgtttccagcttccttgtgggtgggggttaaggcagggggggaggaggaaggagacagtgtctccatattgtagctcactcctcccctctgctgcttctgtaaatctggaagggtcctgacccttcctccctgtataccccatagaaaagttggtcctccgaggtcctgctgccatccccacccctcttttagctgttcctgtcccctactgagacttgcgacctgtagcctccccacccctccactaatgtgttcactgcggcatcccctcatccacgtgccctgaggcagaccaacatcatttctttttacaaacagttggctttttcttgccaaagccctcactgtaccctttttctgtttgtttagcacaaatatttcccctccctggcacctccaaaccaaacccaccagtcgatgttaattgttttatatctatttaatcttattcgatggaaaccatgctttagttgttttatactttgccaggtagactttattacccccccccaatatgccctcatttttttaaaaaaaaaaaaaaaaaacacacaaaaaaaaaacacaaacaaaaacaaaaaaacagagactttgggtttcagtctcagtcttaattcactttccgtggcaggttttcttttgtgcgtgtgcctgtgtgtgtgtggagtgagttctgttttgtgttcgtttctctgttgatttctgttgttgctttcttccccaactccaaccccggttccgtgcttcatagcaccctggtgcagacagaagcagaagcagaaaaataaataaaggaaataaaaagaaaaaaaaaaaagttaaa

SEQ ID NO: 3157266 - DNA, 476 bp, Cricetulus griseus
agacggtcaaaacaaatgctgcttgtagtcaaaacgcaaaccaaatcttctctgtttcagaagaaattactcgtcaacaggcggcaggaccacttgagagaaatatccaactggaatcccaaggattagcttcacggggtgacctcagcattcctggtctcaatgaacagtgtgtgctagtagaccatagagaaaggaatacggacactttgggttacaggtaggcaagagagtgtgctccttcaagtcagagaaggtggtggtggaagacactgtccctatcataccaaaggagaagcatgcccaagaggaggactcaagcatagactatgatttaagccccaggacacaacagcccatgaagattatgtgaccacaagattgtgacccttggaggaggaatgtttaccatacatatacatattttccatagtgctctgggtggggaaaatgtttagagattacattatcaaatg

SEQ ID NO: 3157267 - DNA, 2307 bp, Cricetulus griseus
tacccagataatcgtcaggagttctctagtactatgataaccctatctttgagaagtttgggaaaggaggaacatatccaagaaggtatcatgtgtcatatcatcatcaagagtataatgatggtcgtaagacttttccaagagctagaaggacccagggcaccagcttccgatctcctgtgagtttcagtcctactgatcactccttaagcactagtagtggaagcagtatctttaccccagagtatgacgacagtcgaataagaagaaggggaagtgacatagacaatcctactttgactgtcacagacatcagcccacccagccgttcacctcgagctaccaacaaactggagattgggcaaactgcttggccaaggagcttttggtagggtctacctctgttacgatgttgataccggaagagagttggctgttaaacaagttcagtttaaccctgacagcccggagaccagcaaggaagtaaatgcacttgagtgtgaaattcagttgttgaaaaacttgctacacgaccgaattgttcagtattatggctgcttgagggatcctcgggagaaaacactctccatctttatggagtatatgccagggggttcaattaaggaccaactaaaagcatacggagctcttacagagaatgtgactaggaaatacacccgtcagattctggagggggtccactatctgcatagtaatatgattgtccacagagatatcaaaggagcaaatatctaatcttatgctggaaacctcatgtgtgggtgtgttgtaatttctttgtcttttatgagtgagggcatcttttctacttgagcaaaatcatggtacctggattgctagggttttattttgttgtttgttttgctgtttctttgtctctggttgttatttccctttggctcatttttggtccatcagggtaacgtgcagtacagaagagagacaaacactcttcaaaaagatacctgcacactggaactcaaagcaattgttagctttttaaacagtctcctattgctttcctaaattcagtagttaatagctgcatcagaatacttttgatggaaggtcaatagtaaaatataaaaggattttttttgaaaggaaacaattttgtcaaaggaagtaaaataattacactccattttttctgcttaatagtatgggctaacagatgaagttttgaatttttaaaaattactctaaatgtatttgttttttttaaatgcacaactgattcttttggtactgcaatgtttctttgtggtctggaaaatggccagactgctgactttgtgcctttaaatgcattctgcattgccagtagcagacttccggtgctggagctagatccactagcaggccagtatattttccctaagtagctagtgcaaatgatggtttaataaaggtatttattgtaaattgccaagctcttagttgctaaaagtagattaaaattcaatttgtgtgttgagtatatgataattagcttatatataattcttaaatagaaagtattcagtcttagatatttctttatgaactttttggaatagaaattctgccagacattatccaacctaaccagcttccttagcttaccaagtcttcaaaaggaaatattcttatacctctttttggttggctaaggaaggtgtgctgtgatgccactttagtaattaaaggtttacatttcttctattgatgttggttttaaaattcagcctgcattctgaaatattctaacaagttaaaaccaaaaaaataatacttttaatgtctaacatctctttcatgtggttgtttttactctattgtaaataaacttggataaattttaaaataaacttttatcttacaaactatgatttatcaatttgtaaatttaccctttgacttactgtaaatttaaaatgtatccattaaattctctatatttaatgtattattttcagcaaatatttttaatctcagttgaatactgggcagtttataattatgtatatttttgtttcttatcaatgttgactttttttgcacattttccaaacatttaatttgtacactgatttatatgaccaataattgttgagtgtctgagaatcatgagtgtgtgcattgaactactgtctaatggaagccttctaaaattgtagtggtgttatgaaatgatttgtgttaggaataaagtctacagttgacgttcactatcactaagcttattaggttgaaaggaacccatgtgactagaacctaccattaagccagacacagtgtagtatg

SEQ ID NO: 3157268 - DNA, 891 bp, Cricetulus griseus
  modified_base (333)..(333): a, c, t, g, unknown or other
  modified_base (348)..(348): a, c, t, g, unknown or other
gaattctccagtccccgccgagatggccaccccgtatcccagaagcggcggccgaggtgatgtcaagtgcgggggcggccgtggagccagcgtcccctgggatttcctgcccgggttaatggtcaaggccccgccaggaccctgcctgcaggcgcagcgcaaggagaagtcccgcaacgcggcgcgctggcggcgcgggaaggaaaatctagagttcttcgagctggccaaactgctccctctgcccggtgccatctccagccaactggacaaggcgtccatcgtgcgtctgtcacttacctccgcctgcgacgcttcgctgcgctgggggcnccgccctgggggttncgggccgtcgggcctccgtcgggcctcgccccagcccgccgaggccctgtggctctggtctctgagtcttcgacaggtggagctgacgggcagcagcgtctttgactacatccatcccggggaccactcggaggtattggagcaactgggactgcgggctgcgaccccgggccccaacgccgccttccgtgtcatcctcttcatcttcatcttcctcctcgctggtggacacccccgaaatggaaaccagccccacagaggcactccccgccttccgggtccaggagcgctccttcttcgtccgcatgaagtccaccctcaccaaaagaggcctgaacgtcaaagcctcaggttacaaggtcattcacataacagggcgcctgaggtcccgagccctgggccttgtggcacttggacacacgctgccccggccccgctggctgagctgcctctgcacggacacatggtcgtcttccgcctcagcctgggcctcaccatcctagcttgtgagagcagagtcagcgagtggagcctggtgtctcc

SEQ ID NO: 3157269 - DNA, 298 bp, Cricetulus griseus
tgaactagaaatgctgactactgctcttcatgctagccctgaaaatctagaagcagagctttggaacgactgacgctgggtcaggccctagtggacacagctgccggcggtatcaggcaccatggaatgtttgccaggcctgttcccatccctgggagcggaggtgcaaagctgcaggcacaaggattgaggaaagaggaaggaagagagagctgccgaaacagtaaccatgaggtgcaaggggccactgcaagtcaattgggccaccaactcattctgcacaccaacatttaaacag

SEQ ID NO: 3157270 - DNA, 313 bp, Cricetulus griseus
ggccatcttaggctacttgctatatggagagtgccaggaggtcttgtggtggggaggggtgttcctcatcctttgtgggctcaccctgatccacagcaagttcccacccacctgggaggcaagcaagcaacagtgacgccagttggttggatggtcacactgtaaagatgactgtgatgcccagccgtgggttgacaagtaggactgtttccaagctggcctgggagtacagcccctgactatcagccacaaggagatgccagaccaacaccaggcctctgaccaaaacaaacacacacacaacaaaaaaaaa

SEQ ID NO: 3157271 - DNA, 482 bp, Cricetulus griseus
agctgaagaatgagctagccgacatacatcgcaagctggaagccactgtcatagagaaccagtttttgaaacagcttcagcttaggcacttgaaagctatcgggaaatatgtgaactcacagaacaatctgcctcagatcacagcgaagcaccagaatgaggtgaagaacctacggcagcttcttcggaagtcccaggagaaggagcgaattgtgtcaaggaaactccgagaaaccgacagtgagttgctgaggaccaaagacgccttgcaggccctacagaaactttcagaagacaaaaaccttgcagaaagagaagacctgactcgcaggctgactgttcttacagcgaaaatggagacaaatgacaaaaaatacagaacttggaaaagcagctgaggctgaacaatcgatcctttagtcggcagttggccaaagaaaccggaagacgctagcagctcaaacagcgacaaagaccctgca

SEQ ID NO: 3157272 - DNA, 325 bp, Cricetulus griseus
gtcagcgacaagcgccactgaccctctgcgactctaaagtccatagatttttacctccagccagctggtctccccaccccacccatgctggtgtgtgtgtctctgaccctggttttcctgtatgtctgagcctggttccctatcttgacgttgttgatgttatacaagccacttcaggtacagtatgcctacagcgggagccagggccggggggacggcaagttgtcctaccagggccacgcctatgactcagggcaacacaggccctcagagctattgaagcttactaagcatcttccaaaaaagaaaaaaaaaaaaaagttaa

SEQ ID NO: 3157273 - DNA, 2049 bp, Cricetulus griseus
aactgtttctataatatggagttaggagtacatgtctttaagtgacaatgccagcatgtgcttgacgctacggaacaagagtgcatctccaagtctgtctctttccttcctcggaataaggaagagttggaaagaacaattaaaaccatccagggagccataactggggatatcctccccaggctgcacaagtgcctggcatctgcgaccaagagggaagaagaacacaagctggtcaagtcaaaggtcgtgaacgaggaggaagtagtccgagtccccttggcttttgccatggttaagctgatgcggtcactcccacaggaggttatggaggcaaatctgcccagtgttttgctgaaagtgtgtgtcctcctcaagaacagagcacaggaagtcagagacattgcccgcagtactctctccaaaataattgaggacctgggtgtgcgctttctgcagtatgtcctcaaagagttacagacttgactatccccttggtgagaaattgagaccaaacttggaattcatgctcgctcaactgaattatgaacatgagactggaagagaatccaccttggaaatgattgcctatctctttgacaccttccctcagggactgctccatgacacctgcgggatgttcttcatccctctttgcctaatgatggtcaacgatgactctgccatgtgcaaaaagatggcatccatggccattaaatccttgctcagcaaggtcagccttgagaagagagactggctgtttggtctggttacctcctggtttgaagcaaaaaagcgattaaacaggcagctagctgccctgacctgtggcttgttcgtggaaagtgaaggagttgattttgagagaaggcttggaacgcttcttcctgtgattgaaaaggagattaatcctgaaaactttaaagatatcatagaggaggtggaagaaaaagctgcagatcgcctgctgtttggttttctcacactgataagtaaactcatcaaggaatgtaacatcattcacttcaccaagccctcggagactttgaataaaatctggagtcatgtacactctcacctcagacatccgcacaactgggtatggctcacagcagcccagatttttggattgctctttgcatcttgccaaccagaagagctcattcaaaaatggaaaaacaaaaagaccaaaaagaagcccacggagcctgtagcagtcaggttcctaacaagtgaccttgatcagaagatgaagagtatctctctggcttcatgccatcagctgcattccaaattcttagatgagtccctaggagaacaggttgttaagaatttgttgttcatagcaaaagtcttatatttactggaacctgattctgggaacaagctaggagagtcaaaaggcatggaagaacaggacacattgggaggtgctctggccagagaagcagcagaagatgaggctggtacggatgggaaaatggagttggacagagaagagaaggaagagcccagcaagtcagccacactgctgtggctgatccagaagctgacccggacggctaagctggaagctgcttatactcccagaaaccccttaaagagaacctgcatctttaagttcctcggtgcagtggccgtggatcttggagtggaccgggtccagccctacctcccagtgattatcgcccctctgtttcgggaactcaacagcacctattcagagcaagatcctttgctgaagaatctgtcccaggaaatcatagaattgctcagaaagctggttgggctcgagagcttctcactggcctttgcctctgtacagaaacaggctagtgagaagagggctctccggaagaagaggaaggctctagagtttgtaaccaatcctgatgttgctgccaagaaaaagttgaagaaacataaaaataaaagtgaagcaaagaaaagaaagatagagttcctacgcccaggctataaggccaagagacaaaaatcccacagcctgagagacttagcaatagtggagtaaggtgtccctgtgtgcat

SEQ ID NO: 3157274 - DNA, 620 bp, Cricetulus griseus
cagatggaggagaagagctgctccaggacttggggtggtatcatggcaacctctcaaggcatgcggctgaggctcttctcctctccaatggtcgtgatggtagctacctgctaagggacagcaatgagcagactggactctattcgctctccgtgagagccaaagactctgtcaaacactttcatgttgaatacactgggtactcatttaaatttggcttcaatgaatattcaactttaaaggattttgtcaagcattttgcaaatcagcctttgatcggaagtgagacagggactctgattgttttgaaacatccctatccaagaaaagtagaagagccttccatctatgaatcagtccgggtccacacagcaatgcagacaggaagaacagaaaatgacctcgtgcccactgcgccttctcttggcaccaaagaaggctacctcaccaagcagggcggcctggtaaagacctggaaaacaagatggttcacttttgcaaaggaacgaactgaaatatttcaaagaccagatgtcaccggaaccaattcgcattctggacctgacagagtgctctgctgtccagtttgattactcacaggaaagagtgaactgtttctg

SEQ ID NO: 3157275 - DNA, 302 bp, Cricetulus griseus
tgtggacacattgtgttgctataagataccagctcaaggagatagaaatacccttgggagtactcatgggacagtcaccaccgcacaagccgggtcagcataacagccttcttgagagagtacgccccaccgcggaactcggcccagtagaccccgtcctggtagcggctccggtagtgacctccatgataccacacaccattgaggttggagtgggcacaggcgtggtaccaccagccccacgatggtagagagagagagagagagagagagagagagagagagagagagagagagagagt

SEQ ID NO: 3157276 - DNA, 1883 bp, Cricetulus griseus
gggactgcctaagaaactaaatggaaatttaactggttatcttttacaataccagataataaacgacacttatgagattggagagttaaatgaaatcaatgttactactccatcttgtgaagagaaacagaggtggaaagtattcagtaaaagaaaaggaagatttacacccagatccagaagttcaatcagcaaaagatgaaacttttggtgaatacagtgacagtgatgagaagcctctcaaaggaagccttcggtccttgaataggaacatgcagcccacagagagtgctgacagcttagtggaatatggagagggggaccactccatattcaatgaagatgggtctttcattggggcctacaccggagctaaagagaagggctctgttgaaagcaatggaagttcaacagccacgttcccactacgggcataagcacagcacattcaagcacaaaaaaaatcagatgccaaacatttcaggcctgtgtttcatttttggttttgttttcgggtgctcaaaatgcagaacacaaaacaaatcctgtacttagatccactttcactcaatccaaagttcctgtttcacatactctgcttctgcctggttctcctgtttagtgtgcgtgcgttaatgttgctaaccatgtgggtttctttctggctgcacaattgtacttaatttttaagaactgttttagtgactttgattcactacaggaaacaagattgtaagcaagcaagctggttatttaaaaatgtaaaaaggattatgaatgtttattaaacatttctttctctctcttcctttcttcctttctttctgtttttaaacttagactaactggagctcaaaaggagtggtggtcaggagttattttaaaagcagaaagatgttgatgattgtattttgtgtcttcatttgtatgctcacagcattcagcctttatgtttatatactggtacccttggatgtatttcatgaatgcattgtacatattgtattaatatttacacagttttaaaacatagtgttttattttgaagtgagaaagagaacattaataggcatgaatgtacagctagagtgtatatagtagtccttatatatctctacttcaatgctctcaaaataaaatataaccatggaggaaaatgcattcatatttttcaaaataagttctggagtgggttcctgccccattcccccacaaagaaaattatttatagcagaagttcttctataccagttagtttataacatattgtaaatgtatttgtggtagtatcatcattttcaatgttttccctctgtcaaagttagtacagtgtccaggaatttagtttctggcatgtgggctaccagtccgtcttaaaatggtacagaagttttagaatggtttagaaatgacttgaaggactctgaatacatataagtaaataattaatgtttgctctctcatttaacagaaacatttaacgtgactgctaaatattaactatgttaagtgatccagttcaccgatttcactttgctttgtgtaaaaaatctactgttaagtgaggagtatgatttgcacatgccattgaaaattattaatcagaagaaaaataagcagggtctttgctatataaaagcgttttccactaattctgcatgcgtatttataagatgagaaatcagtagatttattctcttggtataaaggcatctgatattttagatgtacccatgtttataaaaaaactgtagagcacaatggacttaatgctattttatactgatggaagagagagagaacaataaggagagatgttggctgcttttctaagtattaaaacatattgccaattgaaaccctaagtatgtttacatgccatg

SEQ ID NO: 3157277 - DNA, 397 bp, Cricetulus griseus
ttaagggacaacacgcatttcatgatcttggaaaagggacagaaatggacaccgggcagtaagtatgtcccagtctacaagcaaccaaagaaatcgggaatagccagggttaccttcgacctgtataggctgaatcccaaggactttctcggctgcctcaacatcaaggccaccatgtatgagatgtactcggtgtcctatgatatccgatgcacaagtgccaaggccatgttaaggagtctgcttcgatttgtgtcctatgctgcccaggtagcaggacagttcctggtctacgcaggcacatacatgctccgagtactggccgatacggaagcacagccatctcccaagcctaacgccaagggctggttcatgtaaacaggtcacagctccagag

SEQ ID NO: 3157278 - DNA, 1408 bp, Cricetulus griseus
tgagcgcgctccctgcaggcctggccggagcaccatgatgcccggcaagacgcacccggcggcgcccgggccagccgacctcccgcggtgtcagggctgcgccaccctgcagcagaatctaaatgaatatgttgaagcattaattgccttgaaacaaaaaattattaatacagataacctgctgacggaatatcagaagaaatgcgatgagcactatgccatgctgctgtgagcgcagagtcgtacaacatagctatagctcgggccctgaggaagattgctgagtcctcttttgacctgcttcctgtcattcgtagtcacgtgtatgtgggaaacatctccaaaagcctgtcatgagagatcaagagaaggaagttgtttatgaatttagcaccacaaacaagcatttaggagaatacttacttcgctctattctctcagagctaaagattcagaagacatctctagatcacagttacatccatgcactgtgcagagtatatgtgggcatttgtcggcaacttggagacttggaaagagctcgcttgttctgttatagccttctgaaagaagattttccagaatctgagaagttgactctattcattgccaacatgtggcgtgaagtgtttctctcccagtcagccattagtcaagcgatgcagctggttgccaggcagcgtgccagaggcgaggttctgaactgcctgagagcgttcctcagctgggaaaagaacgctcctatagatgttggaatcgtggtttctaagctgcttttgaccatacagctatgccccaaaacagaatttcaggcgagtgaagagtttaggtgaagacctcagtgcaaacataatatcagctcggttattggtatgttcaatacaacatgctcaggatgaagatattcccatggggcgtgcagcttgcagctgtctatgccctttgtgacttgagtcctagcaatccagcagagatatccaagatcctggaagcttggcggacacagacttccaacactattccatctgcaatcgtcagctgcctggaagaggttggctcccttagtgctgatggctcagctgtctccacaagcgcaggagactctgcaccctgagagcccggggctcagctccctgagatgggaaggtcatcagaaggtcatggtcactgtgcagagaagagctctgtgggctctgcatggggacagccctgtgggggtatgtgcatacagacagtgctatctatgatgtgtttcacattggatgatattcctttcggaatttttgtatttgtatatagaaatgggtttaataactcactgtgattctgattcgtcttattatccattatttcttaaaactcttgtatgtgtttttataataaaaataaagcaagccatatacactgt

SEQ ID NO: 3157279 - DNA, 427 bp, Cricetulus griseus
ataattatgatggccattttgatgctgcagatgaaattacacaacatgtagccaacactgatgttcctatcccaacacactattttgtggtgctgacaagttgtaaagacaaagcctacacacccgacagctgtcctgggtggttggatgtcctgcctttcatcatccctcatcgacccaccaacatggaaagctgtcccgaaaacagaacagaagacctttgggtggaagacaggtttaaagcacacattgcccgggtccgtgatgtagaactccttactggccttgacttttatcaggaaaaagcacagcctgtctcggaaattttgcaactgaagacatatttacccacatttgaaactgttatttgaatgaatgtataaagcaatttgacaaaatgaggaaattctctagtaaacaaaaaaaa

SEQ ID NO: 3157280 - DNA, 377 bp, Cricetulus griseus
acagctgtgccatcatggaaggagaggatgtggaagatgacctcatctttaccagcaagaagtcactgtttgggaagatcaaatcctttacctctaagaggactcctgatggatttgactcggtgccgctgaagacatcttcaggaggcccagacatggacctgtgagaggcacaggccctgcctcgcctgcctcgcctgggcacatcatcctgcaggcctgtggcaatgtaggcacaagcatcctgcactccccactgctgggaatctcttcatcgtggccttatcagaagtttggattacccttgttttttacagagtacccaaacctttctctctgcttgcctcaaacctaccaaatataccgacactttgtgt

SEQ ID NO: 3157281 - DNA, 505 bp, Cricetulus griseus
ccgctgccacctccccgatcgccgtgtcttggcactcgcagtccatccgccccgcggtgctgggccgtcggccctccgtggcgcagagccctcggagagccaaggagcgccagcctggaactgcaagcgcgggcgggaaggagcccgagtttagggtggtgaacatccacaatgagcggcgctggaggagcttggaggagccgaatccagctttctcggttccccgaactttggccatcagaggggtcgctagtcgcagcctgtgtccggggaagagaagtgggaagctgaacaagcctgccagcgcctcgccagaaaaatatcagggaagctgcagaacagtaaccctggaattcaaaggagtggaaaagcctagatgaactatgacgacgatgcatcaaagaatcctaaagcaatagagctttttatacctccctacccctactagctcagagaggaagaccaaatgtcaagtaattgaagtggaataaaaacattatctgct

SEQ ID NO: 3157282 - DNA, 1366 bp, Cricetulus griseus
agtggacaagaagagagacaaaattgaaaggaagattcttgatagtcaagagagagcattctgggacgtccacaggcctgtgcctggatgtgtaaataccacagaagtggacattaagaagtcatcccgaatgagaaacccacacaaaacacgcaagtcagtctatggtttacaaaatgacatccgaagccacagtcccacccacacacctacaccagaaaccaagcctcctacagaagacgagctgcaccaacagataaaatactggcaaatacagttagacagacatcgattaaaaatgtcaaaagttgctgatagtctactaagctatacggaacagtatgtagagtatgacccgtttcttgtgccacctgaacccttccaacccctggctgtcggatgatacgaagaaaaggcctatccgagaagtaccctctcgggtgcaggaatatggcaagaatttctggctcctggggcccccagtgccattaacttggattctaagagttatgataaaaccacacagaatgtgaaggaaccaggacgatacacatttgaagatgctcaggagcacatttacaagctgatgaagagcgactcactacccccgctttataagatctagtgcctaccaggaacttctacaggcaaagagaaaggggaaatctctcacatccaagaggttaacaagccttgttcagtcttactaaaggatcacctttgtgacatggaagctgaatgcagccatcgccccataccttgtagcccattgctgttacctggagccgaggatgttagaccaagattgttgcatgaatgaaggacctgaattgttcttttctgtgtgcacattaaggcatcatcattgccaagggaccctttgccatctcattgcctccatctccacctgttgtctgcttcccttcctcctcttactaagctgggtctgtgtcttttcctttttaaccagttcaagtgaagtaaaactttattttcccccttcctctctttttcttaaagcttctgctagatatacacagttcactgaaaattcagtcagtcacaaactggaagaattgtaaaagaaaaaagtatatatcaataagtatacacatggcttcacatttattaaataataaattagcacgggaggtgtcatttcatccttgtatccacagtctgaaacaaatgcccatctttgtctgttctctggacattgtctgttcatgttttctgcgtttatttttataccatatttaaatgagaaaacaccttttactcctaaattgttatcaaagttgacctctgtaaatttgtgtatgtttatattgttgttttatcttttcattaaaagatgcagaatctc

SEQ ID NO: 3157283 - DNA, 323 bp, Cricetulus griseus
aaaatatatttatcccctcatatccaagatcatagaattggatagttggtttttaaaacatattacagtaagcggtgtaacgtaattcttaattgacagtttttaattaactgttagtgtgctctcaacaggcgacagattccccggacctaaatcagtgtttctcagaagcatggctttgtctgccaagagaaaatagctttctttggccaaatgtaaaattacattaagataagaaaggttacagaggaaagtttgaagacacaaaaatttaaattttggcccagaaactgaatttgcttaacactgctacataatttggg

SEQ ID NO: 3157284 - DNA, 761 bp, Cricetulus griseus
gccccggaccgtagccagctcacactgaggcaggaatggccccaagacctccgacggccacgccccaggagtcagtgacattcaaagatgtggctgtggactttacccgggaagagtggcaccatgtggaccctgcccagaggagcttatacagggacgtgatgctggagaattacagccacctggtttctcttgggtatcaagtgtccaagccagaggtgatcttcaaattggagcaaggagaagagccatggatctcagagagagaaatccaaagacctttctgtccagactggaagaccaggcctgacaccaagtcgttgggtattcagcgtggcaaatctgaagtatcccatagtacaaatgttctgtcacatgccatattgggagatatctgggatgtaaagcccagtgaatgtgaaagacttggaaataatgtggactataacaattagttactcagagtagtatccctgcaaaaaagaagccttataagtgtgataaatgtaggaaatcatttattcacagatcatctactttaattaaacatgagaaaattcacaaagatgatgcttatcccaatggtacagaccaaggagtttattctggaaggaaacatcatgaatgtactgattgtgggaagaccttcctctggaaaacacagcttactgaacatcagagaattcacactggggaaaaaccctttgagtgtaatgtgtgtggaaaggccttcaggcacagctcatccctaggtcaacatg

SEQ ID NO: 3157285 - DNA, 463 bp, Cricetulus griseus
gacgatgactcctggtgttcgtcctccacgtcctcctccgactccgaagaagaagggtattttcttggacaacccatccctcagcctcggccacagagattcacctactatacagatgacctttctagtccaacttctgcactgcccactgcacagtttagtcagaggacaactaaatccaagaagaaaagggacacaagggcaaaaactgtatcatttcttaaccaagtagacacggagatttccttcaatattaaaaaaggctctgtatgcatggtggggctatgtacatacttgttgctggggccctgttaatcttacaagtgttatttatgggtcaagctttgtaaactgtataaatgtaaaaacaaaccccacacatacctctggagtatatggtgaaaccaaggagaagctgtttgggtgttcttccctaggcagggggaggtctctcagcaggtga

SEQ ID NO: 3157286 - DNA, 416 bp, Cricetulus griseus
  modified_base (96)..(96): a, c, t, g, unknown or other
ctgcattctctggcagaccattaataagggaacttcaggaagcaagcacagtccttcacaatgtttatgaaacatatacattggaatagtcaattntttcctttctatctggtggattgaagctgacagtatagtgcaaactcattctctctagttaaaaaacacactgccaagagctatctctttaatctaagggaaagatcaaaatgcatgagaatatatcctactagcacacaacttcccctcttacaatggaaaatctgttcccatttcagttgcctttaaacagtctttgacaagtagatttcaaaaccagagatttaaaaatctgtgtactttgctggtgaaagacatttgcattttcccctttaaaaggaatggggccgtccccctggctcatttcacttcagtacttt

SEQ ID NO: 3157287 - DNA, 456 bp, Cricetulus griseus
ctctctctctctctctctctctctctccccctcctctctctctgcaaagggaaatagtgccttactataagtgggttgagctatgcagaagataatgtgcatgacaaactacttttattttctttatgtcagtccttttttttcttagtctaggttggttttgtgtatttttggttttaaattttatttttccctctgttcttttctttggtggaggagggtaagaaaagctgtcttcacctttttcaaaagttgggtggtgtgtctaaggacagaaggaggctctgttcattcagctccgtcacatttaccctccctactttggtaaacactccaatgcaatgtggcaacttatgaaatctttgtatgaaaacaaaaagactgcaaaaatacaactttcaaaagaaataattcattgcatgtttattatgcaagtttaaatgaacaaagaaagcc

SEQ ID NO: 3157288 - DNA, 395 bp, Cricetulus griseus
aaaagtgaaaatgttttattgcctaggggctgggaaaccatttccctaggcttttcttcttcctccctccttccctgcctccctcccttaggaacagtattggccttagctcctgggcccagctgctgcctcccccctactcctaccagctcttctgccttcagttgagctctgttgggcttgagggttcttgttctctccccacctctcccattatcttttttcttttgatcacattttagggggagggcatctttttttgtttgtttgtttttatttttttcctaagaaagcatttgcctttctttccctctcctttcaacataacaatcgtggtaacagaatgcaactgctgatttatcgatgtatttaatgtaagtaaaaaaggagaaaaa

SEQ ID NO: 3157289 - DNA, 870 bp, Cricetulus griseus
  modified_base (163)..(163): a, c, t, g, unknown or other
gggcgcgggcggctgtcggtcccggttggcggcgggggaagatggtggcgctggaggcgggagcggctagagagcagctttattcccaggcttggcacggtcgctgtcactagcgccgcctgctcccgcgggcccgcggacccagctgtcaggcaagtttttntttttctttctttctttctttcttttcttttcttcccacccacacctatgctcccttgctgcacactgatgaaaacccacccacagagccctgctcaggtctctccacccactggtgtagctgtcaccaatgtttacaaccaagggccacctcttgctaatgttttaactctcaccttcacaaggctacctgttggtttgcgtttcacctccgtctgctccttccctggttagggtccacttgagcacacaactctgatttcattttccctccaccaaggcagtgtgtgatgaccgtgtgggaatgaaatctcttgtacatacttagcacagcacctggagtatgaactcgcaccccattctgtaacggggtgcattagcgcttactgtaaaaacatcgggaaaagtatagtattgtatttgtaacaatatcgttctttgtatacacgaaactcaatgatctctatatataaatataaatatatataaataaaatatatctacacgtgagcctggaatgttgacactgcacacacactgaatgtatttcctctgacagtctggtcaccagtcctggcccaccctcaccttctttgtgccgtggctgcagttgtctggtttggggttgtgatgtatttaatgtgctatctccttatttaactgaacgctaatgtctgtataagaattgctgcaacaataaacaaggac

SEQ ID NO: 3157290 - DNA, 388 bp, Cricetulus griseus
tttggagctcgagatgggactggctctgaacaccagatcaaccaccagggcttctctgctgaggtgcagctgattcacttcaaccaagaactctatgggaatctcagtgctgcctcgaggggccccaatggcctggccatcctcagcctctttgtcaatgtggctggcagctccaactcattcctcagtcgcctcctcaaccgggacaccatcaccagaatctcctacaagaatgatgcctactttcttcaagacctaagcctggagctcctgttccccagagtccttcggcttcatcacctatcagggctctctcagcacccctccctgctctgagactgtcacctggatcctcatcgacagggctctcaatattacctccctccag

SEQ ID NO: 3157291 - DNA, 442 bp, Cricetulus griseus
ggcgccatggcggcctgcgggatacgttcgctggccagagcggcactagggaggccaccgtcttgggctgaaggcttccgacagccgctgagctcaaccctctgctcggattccgaaggagcctgcggcggctctgctccagactcccggggaacgcccgaaggagagccgaggcatccggcgagccaagagttaaccgcggccgagcggcacatcgccgggctgcaccgggccgcctgcgcggctggccagctaagctatgtggacccagctacgggctatgtagtgctcacaagactggcccacttgcagagaggtgcctgctgtggttctgcctgcagacattgtccatatggccaagtcaatgtgaaagatccatctaaaaagagcaattcaactcctacttttatgtttgacaacaactttacctctgttctgtcaa

SEQ ID NO: 3157292 - DNA, 214 bp, Cricetulus griseus
ttcaaaggctcattacaccggatcccagtctgccccagccagggcggcgtccacctcaggattggtgcctctgctcacaactgttcgcccacaccagccaagcaagaactcattgcctgggagaaggaaacacacttgtaggatgtgacaaaggccaggtgactccagagacagggacctggccaaggctacctcctcccagggataacctctg

SEQ ID NO: 3157293 - DNA, 264 bp, Cricetulus griseus
ctgactccagaagaagccagagccctgggcctggttggcacgtctgaactgcagctgtgacttttttaggccctcagaagtgttgctgagcagagactcaggctagccccacccctttcagcaggggtagggagacttggcttaaacatctgatggttgagaactgagagctcatttctgggtgttacactgcttgtgtcgctgctgtacattgacatagatccccaggatcttctgcatgtactttatcaagtcagctagtgt

SEQ ID NO: 3157294 - DNA, 353 bp, Cricetulus griseus
cgataagctggagctgatgttccagaaagctgattctgatttggattacattcaatataggctggaatatgaaatcaagaccaatcacccagattcagcaggagagaaaaatgcagttgcaattttaaaggaattatcagcaataaagtctcggtatcaagctttgtgtgcacgctttaagccactttctattgaacaaaaagagaacaagagccgcatttgtgctactctgagcaagacaatgaccacgatacaagaactacaaaaacagacagatctggagctaactcaactgactgaagaagagaaagcggtgacagagcagttaaaatctcacatgccggacctataaa

SEQ ID NO: 3157295 - DNA, 416 bp, Cricetulus griseus
ggagtctatgacaatgagaagaagcttcaacttcagttgaatgaaaccaagtcacaagcctttgtgtcgaattctcccaaactcttttgtcctaaaaacagaagctttgacattgatgccatctacagtgtgattgatgatgccaagcagtacgtgtacattgctgtcactgactacctgcctatctccagtaccagcacaaaaaggacatactggccagatttggacgggaaaataagagaagcattagttttacgaagcgttaaagtccggctcctcattagcttctggaaggagactgaccccctcacatttaacttcatttcatctcttaaagctatttgcactgaaatagccaactgcagtttaaaagttaaatttttgacctggaaagagagaatgcgtgtgcaacaaag

SEQ ID NO: 3157296 - DNA, 3494 bp, Cricetulus griseus
cggacccagtctctcagtccggcggcgcggcagaaacctcgaaccggtggagcccacccacgacctgacgcccaagaggccgcgaagaccgttccgttttctgagcggcggactggtgcagtcagaatgtcttttccccctcatttgaatcgccctcctatgggaatcccagcactccctcccgggatcccacccccacagtttcctggctttcctccacctgtacctccagggacaccaatgattcctgtaccaatgagtattatggctcctgctccaactgtcctagtacctactgtgtctatggttgggaagcatttgggagcgagaaaggatcatcccggcttaaagttgaaagaaaatgatgaaaattgtggtcctactactacagtttttgttggcaacatctctgagaaagcctcagacatgcttatacgacagctcttagctaaatgtggtttggtgttgagctggaagagagtacaaggtgcttctggaaaacttcaagcttttggattttgtgagtataaagagcctgaatctaccctccgtgctctcagattattgcatgaccttcagattggagagaagaagctacttgtcaaagttgatgcaaagacaaaggcacagttggatgagtggaaagcaaagaagaaggcttctaatgggagtgccagaccagagactgtcactaatgatgacgaagaagccttagatgaagaaacaaagagaagagaccagatgattaaaggggccatcgtaagttttaatacgtgaatactccagtgagactaaatcgccccctcacaggagtctgactctcaacccaggaagaagaagaaggaaaagaaggaggacattttccgtagatttccagtggcaccattgattccttacccactcatcaccaaggaggatataaatgctatagaaatggaagaagacaaaagagaccttgatatccccgagagatcagcaaattcagagacacacacaagaaactggaagaagagaaaggcaaaaaagaaaaagaaagacaggaaattgagaaagaacggagagaaagagagagggaacgtgaaagggaacgagagaggcgagaacgggaacgagaaagggaaagagaacgtgaacgagaaaaggaaaagaacgggagcgggaacgagaacgggatagggatcgtgaccgcacaaaagagagagaccgagaccgagagagagatcgggaccgtgatcgagaaaggagctcagacagaaataaggatcgtagtcgatcaagagaaaaaaagcagagaccgggaacgggaaagggaaagagagagagagagagaacgggaacgagaaagagaacgagaacgagagagagaaagagaaagagaacgggagcgagaaagagagaaagataagaaaagagacagggaagaggatgaagaagatgcatatgaacgacgaaaacttgaaagaaaacttagagagaaagaggctgcttatcaagagcgccttaagaattgggaaatcagagaacgaaagaaaactagggaatatgagaaagaagcggaaagagaagaagaaagaagaagagaaatggctaaagaggctaaacgactaaaagaattcctagaagattatgatgatgatagagatgatccaaagtactatagggggagtgcgcttcagaaacggttgcgtgatagggaaaaagaaatggaagctgatgaacgagataggaagagagagaaggaagaacttgaggaaatcaggcaacgtttactggccgaaggacatccagatccagatgcagagctccagaggatggaacaagaggctgagaggcgcagacagcctcaaataaagcaagagccagaatcagaggaagaagaagaagaaaagcaagaaaagaagtattattattcctcattgaaaactcaccagatcaacagcagcctgaggagcataggccaaaaataggactaagtcttaaattgggtgcttccaatagtcctggccaacctaattctgtgaagcgaaagaaactacctgtagatagtgtctttaacaaattcgaggatgaagacagcgatgatgtgccccgcaaaaggaaacttgttcccttggattatggtgaagatgataaaaatgctaccaaaggcactgtaaacactgaagaaaagcgcaagcacattaaaagtctcattgagaaaattcccacagccaaacctgagctctttgcttatcctctggattggtctattgtggattccatactgatggaacgaagaatcaggccgtggatcaataagaaaatcatagaatacataggtgaagaagaagctacattagttgattttgtttgttctaaggttatggcacatagttcaccgcagagcattttagatgatgttgccatggtactagatgaagaagcagaagtttttatagtcaaaatgtggagattattgatatatgaaacagaagccaagaaaattggtcttgtgaagtaaaactctttttacagtcagagttacatttcagatttcttctttcacatccttcagagaactttgaattttctgtgtcttcaaagacatttgtgagatctgtaatttttttaatgtagaaaatgtgaattctttgtcctctaatttgttgatgccctgtgtacgcacttggttgtaaagccctccgaagccctggttctctttctacccaccaggtacaaattgctggtgtgttttataagctgcagctactgtacacagcctatctcatgtaatcttgttctgctgattcgtccttgtaaatattgaaatgattccccagttcttttgcaggattccacctaatattaaaattgtactatacaggcaccaacatggataatttgaatactagtcatacccattaccatctcatcccactcccctgatcagaaatgacaagcccttgtaaaggcatggagtttaaaattagagtgcaaaaactagcagacagtcattcttaatgtatctctgtattaatgtgtttatgtcagtgtatgtataaaagttctttttttaaattttcattcatggcagtttcctgtccacaaatttttatcactggtcatcaaactttaaatatattgatgacatgtttagagaaatcctcagactttattagtaattcagaagatcaccaggggacaaaatttatttgaaaagtaccaagttctaaatatttcttataacaaataaggtgcagctgttgccatgtttgtttattaaaaggtaaagactggcttattagggtaatgtaactgtgagcttgagttactaaggttttttttttgttttttttttttctttcttttaaacatcttgaggacatccaaaacaatgttcttaatgttcaaccttgacatggttttcattatgtaaatatttcagttattaaaaatgtatatatttgatcttggagatgcttccttcaagtcttataaataaatggcattatgtt

SEQ ID NO: 3157297 - DNA, 815 bp, Cricetulus griseus
cccgggcattgtccggctccggcagcggtggtccggctgcgagagcggctgcagcggcggctctgggcggcgttgggcgtcgcgcggccgagaccatggctggaggcaaagctgggaaagacagtgggaaggccaaggctaaggcagtgtcccgctcacagagagctgggctgcagtttcctgtgggccgaatccacagacacttgaagactcgcaccacaagccatggacgggtgggtgccactgctgctgtgtacagtgcggcaattctggagtacctcacggctgaggtactggagttggcaggtaatgcttccaaggatctcaaagtaaagcgcatcactccacgtcacttgcagcttgcaatccgaggtgatgaagagttggattcacttatcaaggctaccatagctgggggcggtgtgattccacatatccacaaatctctgattggaaagaagggacaacagaaaactgcttaggaagtgattaaccaacctgctcaccccactgtctataacagggacagaggggaaaagcatagacaattgctgtagacaagataaaagaaacatttgtatgtttttagactcacgaagtttgatacagtccctttccctgtggttatggtcatgtgttgattgaccaggtttttcccttgtgttttatacaaaaatagaattgataaaacattttttacaaaatgaatttgtctcagaatttcttcattatgtgttagaaatactttgctcacacctgggcatggttgtgtatgcctgcaatcccagcatttgagaggtgtgggcaggaccttc

SEQ ID NO: 3157298 - DNA, 456 bp, Cricetulus griseus
tttggtgcaaggatattagactatgtcttcaacatgtgcgaagggaaatttgactacctggagcggctctcagacaaactgctgctgaagatcatctgcttcctggaactcgaagatattgccaggctctctcagacatcaagcaggtttgcaaagctgtgcaagtgtgactcattgtgggagcagatagttcaggcggcctgtgacaccgtctcccccgacatgcgggccctggcgaaggacgtgggctggagacaggtgttcttcaccaacaagattcagctgcagaggcaaatccgcaggaagaagctgagacagggaaggcagaaggacaagaaatatgcttaggggctggctcttccctccagaggggccacagacgtgcttctcctcatgtccaattcttgttcttttaacaacagcggttgctgattcctggaatcacttgaaaaacca

SEQ ID NO: 3157299 - DNA, 1036 bp, Cricetulus griseus
atcgctttgtctttgagacaccgttcactctgtcgggcaagaagcacggtggagtggcggagcaatgcaagcggaggacagtcttgaccaccagtcacttgttcccctacgtgaagaagactaatgcaaagaaataccccgacaaccaagtaaagctactgaaagaaatattcaggcaatttgcagatgcatgtgggcaggcccttgatgtgaatgagcgcctcatcaaggaagaccagatggagtaccaggaagaactgaggtcccactataaagacatgcttagtgaactgtccgccatcatgaatgagcagattacgggcagggacgacccagcaaagcgcggagtggagcgaccctacacacgtgtaactagcaaggtgtacccagctgtgcctatggtctccatctcacccagtgctgaagtttgaggagaactctctgaatttttgcagctaatctcggggaagaacaagatagatttaattatttgaagtttttacagtgttaatattcctgtttacctcgctagcttgagaattttgacagcctctgaatttgcacatttcctctgattcctttgttctcctgagtggtattgatcaaaccacactgaacatttgtcctgaaattccagtgaatgtgcagcttcaaagcaaactgagtttgctcttgggtataatttgttcaattccaggtcctagtacacacattttaaaggttgaagtgaatgtttttgtaacatttaagcatatttcagatgtaaatagaaaattgtaaaatatatggtttttatcaaatttcaaagaatgtttttagttattacttatgaaagtactaaaattatatgaataacatttcagatgttatattaaaatatttgtgtatgtgtaaaaaagtgttgataaatactaatactctaaagtttgtggagttcctttatttgtaatatatgtgcttctaaaagcaatggtgtgtgaaattataaaagtattttgctgttgttaatataaaataaaaatacagttactttgca

SEQ ID NO: 3157300 - DNA, 1148 bp, Cricetulus griseus
gaagaggacagacttgctctgagggtcgagggccgtgtggttgtccactgcagtgcagggattgggaggacggggtggtttcatcgctacatccattggctgtcaacagttgaaagaagagggagtcgtggacacactaagtattgtctgccagcttcgtgtagacaggggtggcatggttcaaaccagtgaacagtatgaatttgtgcaccatgccctgtgcctgtacgagagcagactttcaccagaaactgtccagtgattccgtgaagattgaaagagtgtcaatctcatgggtgattaatgaaatcacctacttatggctcctagaaggagcttcctgcagtggatgaggaagctttaacgccaacctgcggcatggactgtggaagatctggcaacataagagattgccaaccctttgtgtataggaatgcaatctgtaagcatcccccaaattattttgatatcttgtgtttagatgctttaatgtttataaagtctgtcttgtgaatggactgtcagctgttcaactgttccagtttaagtgctattacctatctcagttaccagaatcttgctgctaatgttgcaagtgattaataacagatttttaacaaatacatttttgttttgaaaaaaaaaaaaatcaaatgcagtaactattttatatggaaatgtgtcttgataataatatataagtatatgtataagtatatatatatattctgttattaggcatagaggtggcttctgctccacaactctaactactatatttctacattgtgacttgttttgctttaaaaaagggataaacaaatttataataactataaagtatcaataattttaaatactcatctctcttctactaagaagggatttttgaatatgctgtttacctggaatctctctcccaataaaaggcagctgccgccggagttgctccagcctgtctcattcccagaagtctttctaaagatgatatcatgcacatacttgcatttctaaaaggtttgatttctctagagacaaacgaagtaaaataactacacccagcaaacacgagatgttctgctcatatatgaattttcgatgcagcaaagctgactttgtttcatactaccaataaatggctcttaaca

SEQ ID NO: 3157301 - DNA, 999 bp, Cricetulus griseus
aagcgctgtgtgcgaagtgcttatcctccagccagacccagcataaataccacttccaaaagaccttctcaatatctcagacaggaaactgccgaatcatggcatattgtgatggtttgagctgcctagtggtgtcacagccttctcctcagtcttccttccttccaggctttggtgttaagatgttgagtactgccaacatgaaaagcagtcagtatattcctatagcaagcagatacgtggattagcttttagcagtcgatccaaaggcctactgctctctgcttcctttgacagcactattaaactgaccagcctagaaacaaatactagtggtgcagacttacaatactggacgtccatgtgctgtccttggagccagggggctttgtagactttcagacagagagcaatacccgacactgtcttgtgacttacaggcctgataaaagccataacactatacgaactgtgctgttggagatgtcttacaaactagatgatgctggagaaccagtctgttcatgccttcctgtgcaaacattccttgggggacccacttgcaaactattgaccaaaaatgccatctttcaaagcccagagaatgatggcaatgtcctagtatgtactggggatgaagcatcaaagtctgctctgttgtggaatgctggcagtggcttgttgctgcaggacctgaagactgatcaacctgttttggacatctgcccatttgaagcaaatcagagcaactatttggccaccttaactgagaaggatgtccatttttataaatgggagtgagcatggtcttgagaccttccaaacatgctactggttaatgttaagtattgtttttagcacctagtagtcctgaacaagatacctgtttatatgttgtaactagaacttttgaatcatgggttcatttggactagtgtgattctaggtcatggagacactaagattgtgtatactatttgaaccaaaagagtacctttg

SEQ ID NO: 3157302 - DNA, 454 bp, Cricetulus griseus
  modified_base (19)..(19): a, c, t, g, unknown or other
ataataataataaataaanaaaaaaaaaagtaataaattaaagcaaaaattcaattgcctgccgtggattcaattctctgcttaatgaggccagaagtgatataacaccttgtgtaagggtggtttacatgtcgcccttctcatatatttaaagcatgtctattgtgtttgtcctaaaagaaacatttcaactaaatgtgctctgtgtttaagataggctcgggcagtggcagtaaccctgactataaagtcaggaacgctgactgtagcctctgttgcagaatccccctcttgtgggatgctacatagttttgtatctgcctaaaattgtaatttctctgtagatctcccctatggtggtgtcaccaatgaattcaaagcaggtgccattattttttaaacacttgatgtttgctttggtgttaaataaaagtactagatttcttaaaatttt

SEQ ID NO: 3157303 - DNA, 1728 bp, Cricetulus griseus
ccacacatacaaaggccatggctgcaaagctggagacaggatcccgtgacttaaaaaaaaaaattaaaaataaaaaattaaaaaaaaataagactttaactgcagttccaaagcttctctaacccaaaaattacagtaccaaatgattgactcaggattgttttcccatattgatatgctggcaatataggatggtatgtaatgaagagaactgatgcagattggttgaatgcgcttgtaatatatgactaaaatatagaaaattaaaaaaattaaaaggggactaaaaatttgttttgtataaagaggttagccctgcgcacgtaggactgaattcagtgatatccctatacactgccatttagtggataggttattgtacttccattcatactctgggcacttgtgttatattgttctgttacacacttttgtttaacctgttttgtttttatcatatatgcattaaaagtattatctttatcaacatttgctgctattgtgttaacatttttttttttttgcttgccatgagttcccatttccaccacccagtgaattgacttataaattgctatgcttttcctgtttttctgttgctgtggaacttaaagaatgtgaaagctgtcaaagagtatttgacgaatcacttttgtgtttggtatagtaagacaatgtgattcattccaaagtaacagaaggttatttgtaagaaagttaaaggcttgtgaacaaaggaagctaagctgttgtacatattgtagttggctgtgcatggtacaaatttattaatatgaagaaatgcaaaatgtattgcttttgatatttctattctgagatgaacaagtagcatgtaatgcaactgtttgacagtttaactcaaatcatgcttcaaactgttttaatgatcaaatcaggtcacagttcattttcatcttcttgtacagtttttgtttggctaatgatcacagcaatctttatacattttatgtgaactttttaatgtccttagtttggatttttgttgttcggtactttaccatttatttgaatcctgaagacacttttttgattgtgtttcgtaagagacaacatggcctcctaaggtgcaatcctgccactatagtgagctaatgtcctgaatccaaaggcttcagaaaattgcttttgccttttcatgaatgttaagcagcagcattgtgagatcgatctgtcctggcagttaacacgatgtgcaacagtgtgttagcatggaacagaacgcctctcacaaaacaaaggaccgttttacaaaggatgattccgacagtatgtcgacataaacttttacaactgcacagcagaccaaaaaagaaaaaaaaaggaaaaaaaaaaactttaactggatggacgttgttagggtgagaaataaaaggacagcctccaaaggttgagaacaagaattgtttttcctggatatcaaagggattatcaacagcgtaatcattgtctccaacaacatgtactctcaacgcctgggttacataggaagcgcaccctgaggttttaataaagcccctatggctataactttaaataaactaaaccaaaaatgttattgatgttttatatagtagagagtaggatcattagtttttgttactgtaatgtttgaagtctcaaatgcaccgtattacggtaataacataggttttagaaaactttcttttttaatttgtcacagacctg

SEQ ID NO: 3157304 - DNA, 916 bp, Cricetulus griseus
ccaactgatgctccatgtgagggcagcatgctagtcagctcgtcttccgaccattccttgactgtgtggaaggagctggagcagaagcccacacaccactacaagtcagcgtccgatcccatccacaccttcgacctgtatggcagcgaggtgatcactggcactgtagccaacaagattggtatctgttccctgcttgaaccaccctctcaggccaccacgaagctcagctccgagaacttccgtggcacactcactagcctggccttgctgcccacgaaacgccacctcctgctgggctcagacaatggcatcatccgcctcctgttgctcagccagtttcttctagccaacttctccccagctctgtctaccaaggataggaaactactcctacccagggtactgatggtacctggactccatcctaaggagggctggccatgacccaggagtttaagggctttgtctggggtttcagtatccactctgccaggtcttcccagtgtgggaccagaaaaagggggaaaagagaagcagggccagagaagaggttacatggccccagctggtccagaaatgaatccatgccttgccttggtgcccctaacacagtgtttgtgccttgagccagggaggcagcccttggggccagcacccctggggagaaggggcaacaggaatcatctctgcatctcaggtccctcccaggagaagggaagatcctggcatctcttgagtccccatttagaggagagaagcagtctgagatgtggcccctgctgcctcctcactgtttgcaattcatgtaaatatgatcaataaattctttaggaagccaagaaaccaaaaaaaaaaaaaaaaaaaaaaaaaaaaaaaaaaaaaaaaaaaaaaaaaaaaaaaaaaaaaaaaaaaa

SEQ ID NO: 3157305 - DNA, 665 bp, Cricetulus griseus
ctggttttccattatttgttttgtctgtctgtctgtctgtctgtctgtctgtctgtatgttctccttttacttttgcactgttgaatgggtctaacaaattggttcccaagctcctttttatgaagaatctaaataatgtggcagcttaaaatagagatgtgtgctaactttaatacatgctcatgtctgttagccatacagtctgttatcttaaatgctcattcatacatggaatatgttacttaaaatgtgttccttccagaaaatgtttgcaaagggaggtattggctgtgggttcattgttaccaatttctgcctgccacaatctttagaaattcttccaagtgccaccattgacagtaggacaaggattggaagcatgtacattttcttctcgtagcaagggtgggttacaagaagctttcaaacctccttctgacctgtgttatcaatggtctattttaataaaatggctagatggggttggcagatggttcgagaagaattttttggtgtaataaatgtggtctcatagtgattgtgatcctattctgtaatcaagagaactagatcaaataaagttaagcaggttaaatccactttgtgcctatcttttcactgacaataaagttagctgtttgaaaaagcaaaaaaaaaaaaaaaa

SEQ ID NO: 3157306 - DNA, 365 bp, Cricetulus griseus
  modified_base (315)..(315): a, c, t, g, unknown or other
aggtttccaaatacggtgacctggccaactggatggtgccaggccagaaggtgaagggcatgggcggggccatggacttggtgtcgggtgacaagaccaaagtggtggtcaccatggagcattgcaccaagaaaagcagcccaaaatcttggagaaatgcaccatgccgctgaccggcaagcgctgcgtgaacctcatcatcaccgaaaaggccgtgtttgacgtggacccgaagaaggggctgacgctggtggagctgtgggagggctcgtcactggatgaggtcaaggccaccacaggctgtgcctttaaagngtcccccgaccttaagcccatgcagcagatcaaacctgatgcttgaggag

SEQ ID NO: 3157307 - DNA, 2833 bp, Cricetulus griseus
gagctcgaggagctctcctcggtgcccttcgtcaacggggtcctcttctgcaagatgcggctgctggacggtggcagctttaccgccgagtcctccagggaggtggtgcaagcaaactgtgttcgctggagaaagaaattctcatttatgtgcaaaatgagtgccagtgcctccaccggcatcctggatccttgtatctacagagtgtctgtacggaaggaattaaaaggtggcaaagcttaaagctgggctttgcagatctaaacctggcagagtttgctggatcaggaaataccacccgtcgctgtttactggaaggctatgataccaaaaatacaagacaggacaattccattcttaaagtttggatcagtatgcagcttgatgtctggtgacccatgttttaaaacgtcctccctccacatccatgtcaataccaatcgctggggaacccgagtctctggaggaggacagaaaaggtggcgagactctcaaagtgcatcttggaatagcagatctttcagcaaagagtgcctctgttccagatgaacttggtgcctggggacattctagaacatcaagctatgcaagccagcagtccaaagtatcagggtatagcacttgtcactcccggtcatccagtttctccgagttctgccaccgaagaaatacctcagtgggaagtacatcaacagggattgagagcattctggagccatgtgatgaaactgagcaaatcgcagctgaaccaaatcctgacccccgataaagaagaagaagcccctgagaaactcaccaggggcccggtgaagcaggattctgttgagtctcagctaaagcgggttgatgacaccagagtggatgctgatgacgtcgtagagaaaatcctgcagagtcaggacttcagcctcgattccagtgcagaagaagaaggactgaggttatttgtggggcctggaggaagtaccacctttggcagccatcaccttccaaacagggtaggatctggagcctatgagcaggttgtgatcaaacgttagaggtgacatcggctgacagaagcttccctgtgtgtgagctatggacaacaggtgtttagtgttttagtcaagcatgtaagaaaaacgaccaacctgtttacaagtgaagttcatctgaaaaaatgacaccgtgtttttagagtatcttgaatactaagagaaaaggattttctggatcatgttaagatacatttggaggctgggacattgacatgagcatcttgccagggaggaagttacctagatgggtgaggacatgctatctcttttcaagtgaaccaatccattggatgttacaaaaagatcaaagttttaactacagataatgaggatattatttagaggtttattctgacaattttaaaagcatatttttctattttagaagtataatttctaggctatatttttattggcacttctgcaaatgattttggattctaaagataataataacattggattgtgagcatgactcactgagaccacgcatcagacacacacaaggtgctgtaatcagggcagagtcgctgccttacttagcctggctgcccttggcctctgtctttacacaagattaggtcttggtatttcaaatggtacagaatcctttttttagaaaataaaaggtgtggggctggggactatagctcagttggtagcatgtttacctagatcacacaaagccttgggttcaggattcagtacataaactgtgtgtggtagtgcacacctgtaaccccagcacttgggaggtggaggcaggaggattagatgttctaggtcattcttagctccttagagagttaggggccaaactagactgtatgagacactatctacaaaaaaggaaaaaactgtgtgccacagaagttcaccacttaactcctttgttactaaaaggaaaagatatcttcaactagtctccactcaaaacatattcaaatccaggctcacacctgtaatcccagtacttgggaggctgaggaaggaggagctatgagttcaaggataacctgggttacatgatctacttgagttcaagggcagtctgggctccatggtaatcctgagcccaaaatgagaccctgactcaaaaaaaccttttttttttcaagcaggcaggcagcactgagttttgatgtcaaagcatccagaagcaattccagactctcagatttccatgttaaataaaccacttttgaagcataagctgacagtttcattaactatttcactgaataagtggtaatatgggtggtctctccatacaacaaacttcatgattttaaaaaattgatttacaatgtgttctgtattttcaaatgtgtatgtttatcttacttatataattatttcaccaatattcactggccaaattcaatgtaaggaaagacagactatagaaggagttgattgattttgacaatatgtcttgagaattaccttctctatattatttcaatcatttggaggtttacaatgtgtttatgaaatgtattattagtagctgaggaatagctcagcagtaaggaactttccagcatgtgcaagacctgggattggtcctcagtgctgaaaaaaggaaatgaagtgattccgtcagtattctgttctaatacttggagaatgaccttcatatgtatgtattttatgtcttatgttttaactagacagtgataaaatccaggaaatgttttataacaaaataaagttttgtttgtaaaatatttgtaataatgtaaaagtggatcttatacatgttcaataaaaagcagtatctcaaaacttta

SEQ ID NO: 3157308 - DNA, 380 bp, Cricetulus griseus
tgctcatgctggcctgcctggcactaggcagtctgggggctcatctgctgctgctgcggaggcggcggggctggtggcgcccgcggtgccttcggctacggggtcggcggcggggtcggcggaggggcgtgtggcgacttggctagtgagatcagagtggacgccgaggcggccgggtgcaaggccagcgggcgcggcagccgcgtcacccagctcctggggtacccgacgcagaacgtcagccgctccctgcgccgcaagtacgcgcctccgccctgcggcagccccgacgacgtggccctagtgccccgcacaccctccgcagcctgcgaagcgggcccctcccccgtactaacatcaaggtcaagagcgcggagccg

SEQ ID NO: 3157309 - DNA, 447 bp, Cricetulus griseus
ggagagaaaccttacaaatgtagtgaatgtgagaaatgctttacccagagaggccatcttacaaatcaccagagagttcacacaggagagaaaccttacaaatgtagtgagtgtgacaagtccttcaccaagaaagatcatctgagaattcactacagaatccatacaggagaaaaaccatataaatgtactgactgtgacaaatcgtttactcagaaaagcagtctcataactcatcagagacttcatatgggagagaaaccttacaggtgtagtgaatgtgacacgtgctttacccagacaggccatcttaaaattcatcagagaattcatactggagtgaagccttacaaatgtagtgattgtgacagatccttacacaaaggaccatcttagaacgcatcagagacttcatacaggaagaaaaaccttataaatgtagtgaat

SEQ ID NO: 3157310 - DNA, 3073 bp, Cricetulus griseus
gttgaacttatcatccagaagatacaagaggaatccacagagtggcagctgtctcatatcagttatgccaatgtgacaggtccagtggcaaattccaatccgaccggatctccttatgcaaacactgctgaagtgttaccaactgccgcagcagccgcagggctattaggacatgctaaccttgccggcgttgcggccttcccagcagttttatctggcttcacaggcaatgacctggtggccatcacctctgcacttaatacattagccagctatggatataatctcaacacattaggtttagggctcagccaagcagcagcaacggggctttggctgcagcagctgccagtgccaacccagcagcagcagcagccaatttgttggccacctatgccagtgaggcctcagccagcggcagcacggctggtggaacggcgggtactgatcccatcgcctggccagtagaacagtcattactccattaacatcctcactgtttagacacataactgtggtacagtgtattggaaattttataaacaaaagtgaaagtgccaacacattattgatagctgataatgtttcattatctgcaactgctggataagtacgttgcattttaagagcttataattgtgtataatttgttaacactagaaacctattagtattgtgaatgtagattttactgtgaagctatctgtgatttagctgtttgctccatgacggagtccttgcagcatggcgctagcagccagtgcagtttctaatactcggtaatttgcatgttttgtggagcattttttatgtcaccaaccagacagtatttcctgcatgcttatttagaagaggcagtttatcgttgagaggtagtgtgatctacctttgtcaggtctttttgacaggtcatttcagagtaagcctttgttcccaagacccaacaactgtcaccctcttctgtacctctcctgagtgccaactgtccaggccatttgacacaccatctgttaacctctgagtttgcccgctcaaggccactcataggggcatccatccccaaacgcacctcctcatgctgtgcatgcagtcttaaattcaatggacaaaactaaaaatgctggctacctctggatcatctggctgagcaactgaattacaaaagagaattacttccatctcaacttcagcccattggttacgtccatcctagcaagctaaatggcatcccagctgctcctttctgtgcaaccaattaaagaacaatgagtgtgatgctccatgtctgaatttcgtccagcctctctctgaactgtgatctttgtcctcatgaactttcccttttgttcattgaactatatggactcttcatttcatattgatttactgtgcaatttacttttggacattgagaacttgaaattatttcctgatcccttccccttccactattaataattcatttctgtcaaactgtaagagtaggactcatttttttttagttttagtttttaacattggactgttatttcattttagagttctcgatctctaaatatttatttagagaatgattttcaaagggaatgatatgcttgtttaaatgaaagagaaaagctgtagtaaactgtgttaattggtaatgactattttatcgtcgatactctgtagctgtgtaagttttgacaaatagtgtatctcgtggaatcagtggttagcattgccgctattatatttactcattttatcattataaatgtgcttagttcatcatagtagatgtttctttgaagccaaaccatttaaacagttatgtgtattttattagctagtgtggctgacagtgcactcagttcaattttatttgtaaatgggaattccaaacttttcctacttggcatggttatatgttagttaaaactgaaagctaaattggcgatatttacattttaatttatggtaacaaataagggtttgtatgcattatgtgtaaaagctatgttttctgcttattcgactccttccagcttcccatcacatctgtaacaaacttttaaaattatattgccacaccaccatgcacaaacctacctgcacagtagagatagattattccatagcattcagatggttaacagaggttagcaagtcctgtattatatatttatatcgctttctaagaaagtgcatattaatgtttactttaagaatgtgtaaatggtgctatcaagaatctgataaattttatcccagttttttgtgtaccacttctaatgtatgagatttattttttattggaaaaataaacagtatgaaagcattaaattggtagattttagtaatttgacaatgaatggaatccccatgttacaggccctatcttttcttagaaattttaatggtggtaatagacttcaacagaggtactggtaatgacattccttttaatccattcttatggtacattcttgattcatataatgattcctcactgagtccttaagcaaattttgtttactgtaattctcctccaagaagggaattcttgcttcccaaggcagcaggttgaaaggagatgaagatataatttaacactctacatcacatacccaatttgagaccagttactctgttagtagaagaaattcattgatcatcaaatacagggcaagcatggctatacataataattttgagtgcaatgcaatcttagaaatttaatatgtacactttatttaaatgaaacagccatatgaaattgcttatgattagaaaaacagaatgaactcattttgcctctgcttggttctcataataacgtgtatgtgctggattttttttaaatagtttttataattgcgatggaagggcaattgtctcattaaaagtggtgcagaggccaatacttgggttgccattagatatataaacaagtgaaaactgtggaacaagttttaagctcattttggaaaaaaaaaaaacagttctgtagaaatgcatatttgtatttgtttctctaataaatctgcaaatagctttaaacacaaaaggcccactttgaatctgcatttaa

SEQ ID NO: 3157311 - DNA, 248 bp, Cricetulus griseus
gtaggagggtgtcaggtagttgtgaatcagaactgggtgctgatagattttctttccttctttataccaacccttgttatgataattctatatggtaatatttttctggtagctaggcaacaggctaaaaagatagaaaatattggtagcaaaacagaatcatcctcagagaattacaaagacagggtggcaaagagagagagaaaagcagccaaaaccctgggaatcaccgtggtagcattcatgat

SEQ ID NO: 3157312 - DNA, 675 bp, Cricetulus griseus
gacacggcggccgggcctggtggctctggaacgtagatcaggaagtaaacagtccactaatcctgctgataactaccatctggcccggaggaggactctgcaagtggttgtgagttccttgctgacagaggcaggatttgagagtgctgagaaagcatctgtggaaacattgacagagatgctgcagagctacatctcggaaatcgggagaagtgccaagtcttactgcgagcacacagccaggacccagcccacattgtcggatatcgtggtcacgctggttgaaatggggttcaatgtggacactcttcctgcatatgctaaacggtctcagagaatggtcatcactgcacctccagtgactaatcagccagtgacacccaaggccctcactgcggggcagaaccggccccacccaaccacacactccccagccattttcctgagtttccggatccccacacctacatcaaaactccaacataccgtgaaccagtgtctgactaccaggtcctgagaaggctgcatctcagaggcgagatgtggagcgagccctcacccgtttcatggccaagacaggcgagacccagagtcttttcaaggatgatggtcagcactttccccttgattgctgccagacctttcaccatcccctacctcacagcccttgcttcc

SEQ ID NO: 3157313 - DNA, 391 bp, Cricetulus griseus
atgtctggacgaggcaagcagggtggcaaggctcgcgccaaggccaagacccgctcctcccgggccggcctgcagttccccgtgggccgtgtgcaccgcctgctccgcaagggcaactactcggagcgggtgggtgccggcgccccggtgtacctggcggccgtgctggagtacctgacggccgagatcctggagctggctggcaacgcggcccgcgacaacaagaaaacccgcatcatcccgcgccatctgcagctggccatccgcaacgatgaggagcttaacaagctgctggggcgcgtgaccatcgcgcagggcggcgtcctgcccaacatccaagctgtgctgctgcccaagaagaccgagagccaccataagaccaaggtgaaat

SEQ ID NO: 3157314 - DNA, 2391 bp, Cricetulus griseus
ccggaggatgttttcttctaaaacaaaaccagcagatgaacagagcatatacgaaaaggagagaatagcacatgcaaagcaaatcataaagccgtttattctcagaagagtgaaagaggaggttctcaagcaactgcctcctaagaaggatcagattgagctgtgtgcaatgtcagagaagcaggagcagctctactggggccttttcaacagattgaaaaagtccattaacaacttggaaaaaaacacagaaatgtgcaatgtcatgatgcaattgagaaaaatggccaatcaccctttattacatcgccagtattatacacctgaaaagctgaaggagatgtctcagctaatgctgaaggaacctacacattgtgaggctaaccccgacctgatctttgaagacatggaagttatgacagactttgaactacatgtactttgtaaacagtatcgacacattaataattaccagttagacatggatttgattttagactctgggaaattccgagccttaggatgcatcttgtcggaattgaaacagaagggtgatagagttgtattattcagccagttcaccatgatgctggatatattagaggttcttttaaaacatcatcaacataggtacctccgattagatggaaagactcagatatcagaaaggattcatctaatcgatgagtttaatacagatatggatatctttatatttctcttgtcaacgaaagctggtggattaggaataaatctgacttcagcaaatgttgttatacttcatgacattgattgcaatccatacaatgacaaacaagcagaagacaggtgccatagagttggtcagactaaagaagtattagttattaaattaataagccaaggaaccattgaagagtccatgctaaaaattaaccaacagaagttgaaactagagcaagatatgaccacagtagatgaagctgatgaaggaagtatgccagcagatatagccacattactaaaaacgtcgatgggcctgtgaaaggagaactctggaattcctgattgatgaggaaatatcaacttggtgcactcaaggacattcactcacagtgaccatggggtttatgagcatttgtaactttttataatttcatgttgcatttctcatagtatggacaactttttgccactaactggattctccagatattcacatcctgaagatgttgaataaccattttacaaagcagttttctgaatggggattagttggtgattgtttgtaacaaatatgctaatgctttagaaatgtcagtatttttgtaattatttctacctccaaatatatataaatatatataaatatatatattgtctttcactggataatgtgtgtagatttacatgtgccttatttgacaatgcttatgtcttgcttttgcctgtctcatttgacatttttattatgttaaagaatgcagcagtataggttgtttagccttcattttattgctatttgaagcagatgttcaccaatgtcagtaagaactcatcctgaatcaaaaggtggcattccatctactaacatccccaggtcctctttctccttctgttaaaacacatttgtttggctaggcactaagttgttttccagtgagtagtaacttaagcctttctcctgctctgtggctcaattccttctttcatttgcttactgcacttctgtgctcattaactctgcttactcgtgtgtataaccatcagcttcatctcccgcttttgcttctcttaactgttgcccagtcacttctgctccagttctctcccatatttcctactgccacacacagatcagcaaatgctggtgacatttttctaggcaagaagaacaacttaaagttacttcacttcaaaagagactggatgtgacttcatactaaggcagcattaggtactgcatggaaataggtcattaactttaaattcttatcaaaatataatttaccagttcccaggatttccaatacaagaccacctgaagagaagccattgttcaattccagttcaatgtagatgacaaagtgaaatttagaagtaaaattgtctgttatttcagtctttattaactaactattcctttaaattttgcctgtcagtctatattgctgtttttactatacacaagattctttgtacaacttgtgagctttatgtgttatgtttttattatgtaaatatcattataaataaacttatttataaatgagagatttgttaattattggagctcatactttttaagtacatcctgactgcaaaggtgctaggcaagctgttagaaggttgatgtcatcatacagtgcttggttttaggtatccaagactctaaactttgactcaatagat

SEQ ID NO: 3157315 - DNA, 352 bp, Cricetulus griseus
agaactcattctgtagtgaaaacaatgaatatcagcaatatgataaaacctttgcaagtcccagttttcttcaaaggcatgaaagaagtcactctggagaaaaacgctatgaatgtagtcaatgtggtaaagcctttgcacacaacagccatcttcaaaggcatgaaagaactcatactggagagagaccctatgagtgtaatcaatgtggtatagccttttcatctcgcagtaatcttctcagtcatgaaagaagtcataatggagagaaaccctatgaatgcaaccaatgtgataaagcttttgctcgtaagagccatcttcaatatcatgaaagaatacacactagaga

SEQ ID NO: 3157316 - DNA, 316 bp, Cricetulus griseus
agccaccacaggcctcgcagatctcttcgtcgccatcgtcacagctctggatgctgtagcagtggtggcagcagtggctgctgtggcagcagtggtggcagcagctgtggcagcagtggctgctgtggcagcagtggtggcagcagctgtggcagtagccaacagtccggtggctgttgctaacccgggtgaggaagacttcagacaactgttgcaggaggaagccatgctcagcagactgccccatgcatctgccctctctaccctggctctcctccttgccctgcccactcagatgctgacatctcctgtgaaa

SEQ ID NO: 3157317 - DNA, 908 bp, Cricetulus griseus
gagcggcccgtgtggtggctgcttacagcttggtgtggggcagccaggggggatcctcaaaccgggcccatacagtggtgggggctggactggttggctttttcctgggggtacttgcagcatcccttactcttctcctgattggtcgccgtcagcagcgtcggcgacagagggaacttttagctagagataaggtgggcttagacctgggggctccaccttctgggaccacaagctacagccaagaccctccctcgccttctcctgaagatgaacggctgcccctgtgagagatcaatccgtgatacttctgccatagcccccgatcttgggcccagtagttgtgggaaggagcaaagacatagctctgacttgctttatggtgggccctggacagaaggaagcaccacaccatagaggtagttagggctggtgtatactgcgtctttgtggtggctgtatgattttccagtttgctaactggggagtgcatgatcccctgactgccttgagatctctcctttctcagtttccctttgttcctggaagagtgtgtgtctgtacactggtgtgcctagaagacctgtccatatgtgcatgaatggcagggccggtgccttctgctcagtcctggtcttggcctgtgaatgtgcctcgcccatccctggtgagggacctcagactccagtggtgatgcagccctttccagttgacattttctgctctactttccttgacagcagcctgtgaactactcaagagtccccttgggtttggagttatcagtgggtttgcatgggatctttgacccatagggacgttggtttattcatctgtaaagtggggatatacctacctcagggttgctgcaaggaccaaatgaggaaatgtataaacaataaagcatt

SEQ ID NO: 3157318 - DNA, 431 bp, Cricetulus griseus
caacttttggtgctttacatagtgaagtgacattttcatttgattgatagtttgactgggtataaaagtataatttgaaaaatttcccccagaattaaaaagcacttttatttttcttaattttgtagactcatcttttacaaggacaattccagtctaaactgtttctcattttctgcaaatttttcccattcattctggaggtattggaaaaacttaccctctagtagtctgaaaaataccatacaagaaatatttctttgttaaccttttctataaggatatacactgtcaatgttcagactctcacttcaaaagcaatttcattttattttgctataatttatcttctgtatttctaaacgttttgattaaatattttaccaactgaactggttatataagatcctaagcatgtttcttttctattt

SEQ ID NO: 3157319 - DNA, 402 bp, Cricetulus griseus
ctgaagccgctatccaagagcctaccgtccatccagcagctgcaccccgctaccccaaggagttgcagccacatcttgctgagccatacgctggggctgcctgtagggaaagcacccgagctactacttccaaaggctgcctctctccgccaagatcttctgtttctccaagaccagcgggatctccaaagaggaaatcttcacgtgaagaccagtctgcctctgggaccatccacccaggagctgctgcagatcaaggcgtcccaagaaaaggagcagaaggaggacatggggcagaccctgaagaaactggaggacctggtgacacagtcgctggagcagatccccaagctgcagtggctcgttggggactggtgggagcagccaggccaagccaccctc

SEQ ID NO: 3157320 - DNA, 2057 bp, Cricetulus griseus
gcggcggctgcggaagagacccgggctgcgtggacgcgagcgcccaggaacctgcgagcaatcgggccacggcagggccgcccgcggggctgccactccccgggcccctcgacccccagagtttggaactgcagctggagcgcgaggccgagggagcggggccacgggaggcgacccccggtcagcagccccccgacgggctgcttctggacgtgctggcccagcgacacccgccccccgccaagccgcaagtcttgtgctcggtgtactgcgtggagagcgacctgcccgaggcccccaccggacggcggcagcatcgagctggagttctacctggctccggagcccttctccgtgcctggcctattaggagctccaccctactcgggcctgggcggggtgggggacccctacgcgcccctcatggtgctgatgtgccgggtgtgcctggaagacaagcccatcaagcccctgccctgctgcaagaaggcggtgtgtgaggagtgcctcaaaatctacctgagcgcccaggtacaacttggccaagtagaaatcaaatgccccatcacagagtgttttgaatttctggaggaaactactgtcgtctacaacttgactcatgaagactccatcaagtataagtacttcttggaacttggccgaattgactccagcaccaagccgtgtcctcagtgcaaacacttcacaacctttaagaaaaaggacatatccctactccttccagatcagaaagcagatacaaaatccagtgtcccgcttgccaattcatctggtgttttaagtgccatgctccttggcatgaaggtgttaactgcaaggagtacaaaaaaggagacaagttactgcgtcattgggccagtgaaattgagcatgggcagagaaatgcccagaagtgtccaaagtgcaagatccatatccagagaacggaaggatgtgaccatatgacttgttcacagtgtaacactaatttttgttatcgatgtggagagagataccgccagctccggttttttggagaccacacatcaaacctcagtatatttggatgcaaatatcgctacctcccagagagacctcatttaagaagattagttcgagggtcagtttgtgctggaaagctcttcattgcgcctctcatcctggttttgggattggcactaggggccatagcagttgtaatcggtttatttgtatttcctatatattgcctttgtaaaaaacagagaaagcgatcacggacaggtatgcactggtgatccacagaggatttcccatgacatcagccggtaccaagggaggctgtgcaggatggtatacgtctgtgagtcggatccttcagaacacctagaggaacttctgccatcttgtttcctgtggttctctgcaggccacagtgcctctagctacggtgcactcccaacatggtatcctgtccttccctaaacaaattgctgctttttaaaaaatggtcactttcgttaattatagacatttatatagcaactctgacctttgtggttcttggaagaagatattttgagaacagggtatcctcagatgtgttttgagggcacctcacaggggtattgtttggactgtctgaaccgtgtgcttccctccaggctgtgtctgtgagacttggtgtgcatagctgaagtcctgtctgttccagcaaacaaagccactttgcagaagataaattacagttcaccaaatgcacctgttttcatctgtagcccaagtcgtaccattctcttgttctttggatactgtaattgcttaaaaaaacaaaatcagtacccagaagggaattggtggaattaaattaatgagaagaaccatgagtaactggtgcgtatgtgtaaggatgtgactgtgtgtatataaacacgtattaaatcaggctccataaccgtgtgcttgtccatttccatgtctattttcatagaaccattcagccatgagggtccctttcatgggcctaacttggtaatgtactgaattaaaaccagtgtcaacaaaaaaaaaaaaaaaaa

SEQ ID NO: 3157321 - DNA, 278 bp, Cricetulus griseus
aatgaagctatgagtacaccatttccaagcacatcttcaggtatagcaataaattgccacacgtgtgcttatatgaacgatgatggaaaatgtcttcgtggagaaggagtatgcaccactcaaaattcccagcagtgcatgttaaagaagatctttgaaggtggaaaactccagttcatggttcaagggtgtgagaacatgtgcccatctatgaacctcttctctcatggaacaagaatgcaaattatgtgctgtcggaatgaacctctctgcaacaa

SEQ ID NO: 3157322 - DNA, 658 bp, Cricetulus griseus
gtgaggcgccaagatggcggcgtcgaagccgcaggcttgctctgaattcggggatactggtgtgttgctgaaggaagctagagaagcgccccaggacatcaagatggcaatttatacatatggtcagctgattccttctctaggggatgcaaaattcagaccaatgatctccgaaatcattgaaaacagcttgaatattataaaaaaccgaccttaaatatatatggaactttatactttggaactactagtgctatgtctggactagtagcaaacatcattttcagaaacagtttcaaggttcaacatgaagcactgaagacctgtgtatacttgactacccttccatttttggctaccatcattacttacaagctctttgtaactgatgctttgcattcaggtaacttaagcaaggaaaactgtattatgagaagtgtactgattggtgtgggatgtggtattttatatcccagtgctctggcttttcgtaaaaatggacatttggcagttaagtatcattccgttccactgccaccaaaaggaagagttatactccattggttaatccttagtcaaactgggatgaaattaatgtctgctcctctagtatttcagtaaagtgaagcaaaaaaaaaaaaaaaaaaaaaaaaaaaaa

SEQ ID NO: 3157323 - DNA, 1732 bp, Cricetulus griseus
ccgtggcaggccgtggggcttcaggctccacggcagtggcggcgaccgtgcgtgagctcctgcaggacgactgttatggtgactttttaaatgaagattttgatgtaaaagtttatacttctcaatctattcatcaagctgtaattgctgagcaactagcaaaacttgcccaagggatcagtcagttggataaagaactacacctacaggttgttgcaagacatgaagatttactggcacaagcaactgggattgaatctttggaaggtgttcttcagatgatgcagacaagaattggtgctttacagggagctgttgataggatgaaatacaaaaattgttgagccatataataaaatagttttgaaacaggcattttgaaggtgaataccctaaactattacgtctttataatgacttatggaagcgtcttcaacagtacagtcaaaatacccaagggaatttcagaacaagtgggactgctgacctctgcattgaaaccccccacatggaagatgatacacaagacatgttcatcctgaaaagggccggattatgatccagaaaaagctttgaaggattcactacaaccctatgaggctgcttatctctcaaaatccctatctcgactcttcgatcccatcaatttggttttccccctggtggcgtaatcctccttcctctgatgagcttgatggcatcattaaaactatagcaagtgaactcaatgtagctgctgttgatgcaaacctcacattagctgtgtcaaaaatgtagcgaagaccatccagttatatggtgtgaaatcagagcagcttctctgtactcaaggagatgcaagccaggtaattgggcctctcactgaaggacagaagagaaatgtaggagtggtgaattccctgtttaagttgtaccaagcagtagcaaaggtggttgccagtcagagctcattcccatcagcagctgagcaaactgtcacatcagccctaaagacaattcactctctcatggggaatgccatacagcccttactgacttcagtggcagatgcggtcgaggctataatcatcaccatgcatcaggaagatttttccgggtcattgtccagctcaggaaagcctgatgttccttgttctctatacatgagagagctacaaggtttcattgccagagttatgaatgactactttaagcactttgaatgtttggattttgtctttgacaatactgaagttattgcccgaagagctattgaactttttatccgaaatgccagtcttgtaagacctcttggggaaggtgggaaaatgcgacttgctacggattttgcacagatggagctggctgtgggtccactttgcagaagagtgtctgatttgggaaagtcctatcgaatgctgaggtcattcagacccctgctcttccagacaagtgagcacgtggcagagagtccagcagtgggggatgtcattccattcagtgtcatcattcagttcctgttcacaagagcaccggctgagctgaaatcccccttccagagggcagaatggtcccatgctcgcttctcccagtggctggacgatcatccatctgaaaaggacaggctcctccttctcaggggagccctggaagcttatgttcaatcagtgagaagcagagaagaaacaagaatttgcaccagtgtatcccattatggtccagctgcttcagagctatgtctactcttcagtga

SEQ ID NO: 3157324 - DNA, 414 bp, Cricetulus griseus
ctgagggagcaaccggacaatataccagcttttgccgcagcatattttgaaaaccttctagaaaaaagagagaaaaccagtcttttgactccagcagaagtggggggctaagctagaggaccgcttctataacaaccatgcattcaaggacccagaacaaactgagaaatgtgaacaagaaatggccaaatcatctgggagagaagaaacaccagttacggccttcgaggagtctactgaggaagaaagggaaaaggaggagtacgctgctctcaaaatccaatcagtcttccggggacatgtggccagagaagaggtaaagaaaatgaggtcagataaaagtgcccaagcgaaaggagaggaagaccagtgaggacactggctttaccccccaggaaacatgaaaaagtaatc

SEQ ID NO: 3157325 - DNA, 474 bp, Cricetulus griseus
ccctgggccaggaaccccaggccatccccaccacagtgactctcacttctagcatcgaaggccaggatcctgccatgccttcctggggcaatcatgaggcccgagccagcctcaaactgcccttatccagtgtctgtggccagctcctgtcttcaccccactggagccacccatcacatgtgtgtggtctcaggaatcagtctcgcacaggctgcaggctgtcttccaagaagcccttgacctttaccgaatgttggtctccagcaaccagctgggtgccgaacagcagcaggcacagacggagctggcctccgcctttcagtggatccacagccagctggaagccagcaactggatggctgcagctaacacggctccaccccagacactgcctagccccagcctgccttcctcacctacactgtcgtctcctggccagcccaaactgcaggccctgctggaacactactcaga

SEQ ID NO: 3157326 - DNA, 299 bp, Cricetulus griseus
acaggagaaaactttacatatgtaatgaatgtggcaaatccctttacacgttttcaggtcttaaaagacatcagagaatccacacaggggacaaaccgtacaaatgtaatgaatgtgagaaatcctttacccagaaagtaagtcttagaactcatcagagaatacatacaggagagaaaccttataagtgtaatgaatgtgacaggtcctttaccaggaaattctatcttagaactcatcagagaatacatacaggagagaaaccttacaaatgtagtgagtgtgataaatcatttact

SEQ ID NO: 3157327 - DNA, 287 bp, Cricetulus griseus
tgtgtgcgtgtgtgtatgtgctgtgctgcttccattaaatatgaggccaaaaggcctttcctaacctgatgaggttccctcccgatgatcccctcctggatatcttatgcctgtgcatcaatcaacttgtaaaggatgttgtaatctcatggaatcataagaagctcctgattaagcagcttgctttcccctgttttataggttaaaatgctgaagcttaaatcatcttaaaagttgtatgctaagtttctggcaagacctgtgagtaaaagtaaagtgtttgactt

SEQ ID NO: 3157328 - DNA, 793 bp, Cricetulus griseus
gactgttgggatggcccaaaatttattttcttttgaggctgtgaattatataaagttgcattttcattgtttacatgatattctataggatgttagaatttttccattgtcagtgaatataatatttggctttgagatgattttcaaatgtatttttggacttgtattttggtctccccttgacttcatgaagctacattctccttctgaattgaagacccagattcagttttataattcatttaaaagaagtgttcaaaatagttaaattgtcctttatgatttcttcacccccacccaaagtgggaattccatgaagatggattgcatctctttattcccaaaccccttttagaataggttgtaaggaagaaagtgatcttctgtatataaggaaaaatggttttacataaattttgttacacatttttgctaatggctttgtatgtaacaagaatccagttgccaagctgtctgtcataattttgcttacattagacttaaaactcagagtagtacaagcagaaaatttccccaaagatttcaagaaaaaacagttattttctcataatccaagtgaatagataattaaaagaaaccttttccctttaggggaaccaagtaactatattttagtactgacatatattattttcattgtgaatccattttttattgcatgttcaggtgtcatttgctttttgtaccatgaattacaatgatgttcctgctggacttcataaaaatataattaaaaacagattttttgaaaaaaaaaaaaaaataaaaaaaa

SEQ ID NO: 3157329 - DNA, 347 bp, Cricetulus griseus
aggtgccaaagagcgttcagagatctatgaagcatttgaaaacatgtatcctattctagaaagttttaagaaaacctgagtgtgtcattgggtttttcatattgtaatgctttggatatgtgcctaagcacagcagagaaagagtgggtttcttctacacatgactgtagaagtctctcatgctgtctagcaatctctgttattatgccaatagaattgtttcttgtttgatttttttgtcttgattttggaaacagggtctgttgggtagcccaaaatgcagtttgatttattacaaggtgattctgtgtgaataaccatggttaagaaatgaaaatttcttactc

SEQ ID NO: 3157330 - DNA, 393 bp, Cricetulus griseus
tgggtacgtggacccacagagcccagcttgtggcagctgtgaagttgagcagagccttcgggtccccctacctagcctgctattccctgggcagcagcatcctgcttctgaacgtcctccgctcccactgcttcacacaggccatgatgagccagcccaagatggagggcctggataatcacgccacctacttcctgggccttgcactcctgggtggggcatcgtatttgtgctgtccagcttctttgcactggggttcactgggacctttctaggtgactactttgggatcctcaaggaggccagagtgaccacatttcccttcaatgtgcttagataaccccatgtactgggggagtacagccaactaccctaggctgggcacgttatgca

SEQ ID NO: 3157331 - DNA, 711 bp, Cricetulus griseus
ctgttcttacccactgaggtggtcttacagacacagccgacgatatttgaccgcatcaagcgcaaggacttccgatggaaggatgccagtgggcccaaagagaaattggagatctacaagcctactgcccgatactgcatccgctctatgctatccctggaaagtaccacactggctgcccagcactgttgctatggtgacaacatgcagctcatcacgaggggcaaaggggcaggcacgcccaacctcatcagcactgagttttctgctgagctccactacaaagtggacgttctgccctggatcatctgcaagggcgactggagcaggtataatgaggcccggctcccaataatggacagaagtgcacagagagcccttctgacgaggactacattaaacagttccaagaggccagggagtactaaagctgcactgatctgcccactgtcacccagtttttttaatccacatttttgtatatttgtatattccacatgagtattttttttaagtacactaggggtatgcaccaggtctgggggactatgtccgttgtctgcaaaccgtgttggaagtcatccaagtggctgcgtaggcaggaagaggaacctggaggctgtagtgggtgtgattccatccccacctccatccagtgcacaagagcacagagactgaggttgtaaacattataagctagttttatatata

SEQ ID NO: 3157332 - DNA, 158 bp, Cricetulus griseus
cagaatggggctacacatacaacggacccacatctgtcatgtcttctcggaccaagtatcaaggtggagaaggagattttaaaaccacaagcccttcaaaacagtttgataaaacgcttatgtctaaaagacctcctggcaagccacatcttgagttt

SEQ ID NO: 3157333 - DNA, 1447 bp, Cricetulus griseus
ccgctgcgcagccatggctcagcacttctccctggccgcctgtcgacgtggtgggcttcgaccttgaccacacgctgtgccggtataaccctgccccgagagcgcccggcttcattttataacagctttgctcagttcttagtcaaggagaaagggtatgattaaggagtttgctcactctgacgccagaggactgggatttctgttgcaagggtttggccttggatctggaggatggaaccttcattaaacttgcagctgatggcactgtgctcagggcaagccacggcaccaggatgatgactccagaggagctggtggagacctacggcaagaaggactggaggcactgtacgacagacagacactgttggaaaaattaccatgttgatcaccagtttctcacagtgattactgtaaacttcttggcacttatatccttgggaaggatttcgcagacctttttgacattgtgattacaaatgcattaaaacctggattcttctcacatttcccaagccagaggccttttccacacactcgagaacgatgaggagcaggaggagctgccctctctggataaacctggctggtactcccaaggcaatgctgcccacctctatgagcttctgaagaaaatgactaacaagcctgaacccaaggtcgtttactttggtgacagcatgcactcagacattttcccagctcatcactatagtaactgggagacagtcctcattctcgaggagcttcgagggcaagaagtgaaggctgaagaagcagagcctctggagaagagaggaaaatacgagccaccaaaggttaagcctctaaactccttatctaataaatggggctcctattttattgactcagtctcaagacgagggaatgcagaagactctttggtttatacgtggtcctctaggagaatcagcacctacagcaccattgcaattccgagcctcgaagcaattgcagagttacccctggactacaaatttacaagattctctacaaacagttcaaaaacagctggttactatccattggttcattataccttgtattctcaagacacagacagtaaaatagtatttactgaaaaatgaaccaaccgtacgtgcaacagacatactgttgaaaaaatgttaattttcaaaaactacaggtgttttataggaacaatttttcaatgaaaattgaccaaatgggtacttgttaatctgtcttttttaaaaacatgtatcattttatataaatcactttaatgtttaacagttcttgttatagtaaaaattttagtaacctaaactagaaaagaacatgattaatattttctattgatgttggtcaataagtatacatacacagtgatgtatttgatatccaaatgtcatttgagtgttatactgagcactcacaatcaagcttagggccaaataaa

SEQ ID NO: 3157334 - DNA, 402 bp, Cricetulus griseus
atgaattcgtttcatactgtcatgtgtgaccagggcctggaccctgagattatcctgcaggtgttcaaacagctcttctatatgatcaacgctgtgactcttaacaacctgctcctgcggaaagatgcctgctcttggagcacaggcatgcagctcaggtacaacataagtcaacttgaagaatggcttcgaggaaaaaaccttcaccagagtggagcagttcagaccatggaacctttgatccaggcggcccagctcctccagttgaaaaagaaaacacaagaggatgctgaggccatctgctctctgtgtactgccctcagcacccagcagattgtcaaaattttaaacctttacacccctttgaatgaatttgaagagcgggtgacagtgtcctttata

SEQ ID NO: 3157335 - DNA, 381 bp, Cricetulus griseus
caattatcaaaagcatcggtttatgtcttgggaccctcatctggggatcatttaataccttaactggctgggcaagctcaaggtttggctggattgggatggatacagaagtatcaagcaccatcctgaattactttggagctgggctctcagtagcaactgctttcacagttttgttcaccaaaagtgaatttctgaataacccatgcagcatggacaacacactgatgacagagcctgtgatcaacacaactggagacccctgtgccgtttcctcctaggtggacactttctactacgcaccactgcactgtgggctgttgccctgcagtggtatctgggatactctatagatctacatttgtgccaatcatttacatc

SEQ ID NO: 3157336 - DNA, 512 bp, Cricetulus griseus
atccagagcctggtaccagtcaagtacgagatcatcgtgacgacgggctacgaaccaggggcaggcacggacgccaacatctttgtgaccatctttggagctaatggggacacgggcaagagggaactgaaacagaaaatgcgcaacctcttcgagcgtggcagcactgaccgcttcttcctggagacactagaactgggagagctgcgcaaggtccggctggagcatgatggcagcggctattactcaggctggctggtggagaaggtggaagtcaccaacactagcactggagtggccaccatcttcaactgcggcaggtggctagacaagtctcggggggatggactcacctggagagatctcttcccatctgtctaagatgctctggccacaccttttacctctgtgttcatcagccatctcccaagacctccagggctggggctacggcctcagacctgagaactggtactcatcagaggctgctccttgcaagtgactctttgtgg

SEQ ID NO: 3157337 - DNA, 262 bp, Cricetulus griseus
ttctgggtctcggttacttcatctgtgtaaacatgcaatgttcctcaccaggctgtgaagattccctgaatatgcctaccttcatgaagtacccggttaggagaatggctcagtaagcctcagttctgaagtctggagtcctgttggttgtatcgttcagaaagcatcatggcagctcacggatcagcttctaagattacagaaatgaactagacactcctgcagtagactattgtcccataaaggcaatggaccagtaata

SEQ ID NO: 3157338 - DNA, 721 bp, Cricetulus griseus
gactgggcctcggcaggtaaatcctagctgccttgtcatcatcctggggcatctgcagcaccggaggccctgagctctgcccatgctgtagttcccgtcattctccagaagtcacacaacagcaaggagttgtaagaaagtccttacgagtttcgccaaaaacgtcagtctggagtgaatcagatgtttctgcttagcaggcaggaagctatgtgaaagaatcttctgatgtcataatttctggtgtcactggaacattgatcaacattcctttggcaagtctagccttctatggaaagtcagttgaagcaattgatttattcacctctacaggaatcagacttggcctattttggatttcagtgaattatgccttttcggtttgggacccagccaaggaggtttccagtggaaggaggagattcttcgattgggctagaatcaggcctgagctccagtgctgcctgtaatgggaaagagacgtcacccaataggcaactccgaagatgccctggaagtcattgcctgacaataactgatgttcccatcaccgtctatgcaacaatgagaaagccacctgtgccaagcagcaaggaaatgcatcccaaatagcatcattaagtcttctgtcgagggttggctaggtcaagggtaatgggccagtatcatcttctggtctgtctcgtaaacaaataaaggtggtggcacgacttgggtgatg

SEQ ID NO: 3157339 - DNA, 241 bp, Cricetulus griseus
agcctcatcttctgctgctacttcatcagtaaactccggaaccaggcacagagcgagcgatatggctacaaggaggtggtgcttaaaggagatgctaagaagttgcagctctatgggcagacctgtgcagtttgtctggaagacttcaaggggaaagatgagctaggtgtacttccatgccagcatgcgtttcaccgcaagtgtctggtgaagtggctagaagtgcgttgtgtctgcccca

SEQ ID NO: 3157340 - DNA, 221 bp, Cricetulus griseus
  modified_base (201)..(201): a, c, t, g, unknown or other
tccgagctgctgggtcaagcagctcgaaacatggtctacaggaggatgccatcttgcactcagaagatagtttaaggaaaatggcaataataacaacacatcttcagtatcagcaagaagctattcagaagaatgttgaacagtcacctgacctgcaggaccagttgagtcatttattgaagtagcagctacaaaaaaaanaaaaaaaaaaaaaaaaaaag

SEQ ID NO: 3157341 - DNA, 196 bp, Cricetulus griseus
tgtcctgagccttgtcctcctcagccatgccagcagaaatgccctcctgtgcaacctcctccatcctgtcagcagaagtgcccacccaagagcaagtgagtgcttcaacagtcaccaggaccaagagaagagaagaaaatccatctcacctactaccatagcaacacctccatcttcccttcaaagactctcatgg

SEQ ID NO: 3157342 - DNA, 3341 bp, Cricetulus griseus
  modified_base (601)..(601): a, c, t, g, unknown or other
ccatctcctcagaggccacggattttagttcagttatcactacacgataatttgattctcagtcagcctgtttcttcacctcttccattaagtggtgggaagttttcaacactacttcagaatcttggccctgaaaatgctgtgacactactggtctttgctgtgacagaacataaaatcctcatccactcactccggccctctgtgctcactagtgtgacagaagcattagtgtcgatgattttccctttccactggccatgcccatatgttcctctctgcccactggctctagcagatgtcctcagtgcgccatgtccattcatagtagggattgattcaagatactttgatctttatgaccctccaccagatgtcagttgtgttgacctagaccaaagaagccatgtaaaaatctgatgaatacactgaataatttgcaccagcaattggcaaaattgcagcagagacctagagatgaaggactaatggacttagcaatgaatgattatgattttaattctggaaaaaggctgcacatgatagatttggaaatccaggaagcattcttgtttttcatggcctctattttaaaaggttntagatcatacttacggccaatcacacaagccccatctgagacagcgacagatgccacctctctctttgctcttcaagctttcttaagaagccgagaccgatcacatcaaaaattctataacatgatgaccaaaacacagatgtttattcgcttcattgaggagtgttcttttgtcagcgataaagatgcaagtctggccttttttgatgattgtgtagataaagtggatatggacaagagtggtgaagttcgacttatagaactggatgcatcattcaaaagtgaacatactgtttttgtgacaccacccgagatcccccacctacccaatggtgaagagcccccattacagtacagctatagtggatttccagttctcaggaacaatttatttgagaggcctgaaggatttctacaagcacgaaagaacaagctgccttcaaaacccagcagtcctcgtagcccttctcccatgttcagaagaacaaagcaggaaatcaaatcagcccataagattgcgaagaggtattcttctatccctcagatgtggtctaggtgtctgctgcgtcactgttacggattgtggtttatttgtctcccagcttatgtgaaggtttgtcattccaaagtcagggctctgaaaacagcatatgatgtccttaaaaagatgcagctgaagaagatggatccacctgatgaggtgtgctaccgaattctcatgcagctctgtggacagtatgaccagcctgtgcttgcagttcgagtgctttttgaaatgcagaaagctggtattgaccccaatgcaatcacttacgggtattacaataaggctgttttagaaagtacatggccttcaagaagtcgcagtggctattttctttggacaaaagtaagaaatgttgttttaggagtcacacagtttaaaagagctttgaagaaacatccacacttatcacagagagatctctcaggtggccggtctgatcttggatataattcattatctaaggatgatgttaggaaagagggtacatctactgaagacattcaagggggaaaaggtccatttaattacaaaaaagtgataactcatttaaccaggaactgttgaaaagtatggtgaaaagcattaaaatgaatgatgtctatggacccatgagtcaaatttagagacactgaataagtgtccacattttaaaagacagcggagtttatatagagaaatattatttctctcgcttgtggcactgggaagagaaaacattgatatagatgcatttgacaaagagtacaagatggcatatgatcgccttacacctagtcaagtcaagagtacacataactgtgacaggccaccaagtactggggtgatggaatgccgaaaaacctttggagaaccttacctttaagacgtgtgtatttgtataaatccaatatatattgtatagtctgtgtacaaagtaacacttttagactctaaacttcactttttgagaatgcatttgtaaatggattgaaaagtggaggtcacttgtgtacaaaatttcacccaaaatattgggtataaagcaaattgtactataaaatatgtatttgaaatatgatttaatggggtattctgttaatagtatgtatagagagagattcaaagtattttttgaaagcagaaaaatagtaaccatctaaaagtacagccagaaagaatttcccatattgaggagcttagctttttcaacgagcttcagaatctgaagctcatggagtctaaaatgtagaactatacataatcagacaataaattcaatgtccaagcaccataagtgttaaattgacttttaaaatgtatttttagttatattatttctaagatcaatttctttgagcaatttctcataaagaaaaagcatctttggttctttaaaattattcatgtcttttcagtgtacgtatgtacatttgcaaaggttgtcattcataaaggaaggctattcatttttttaaaaagagaaaaggggacggtcccaaacctggtgttgaaagccaacaggcatgatgcttgacctggaagtagcttagagccctgagacccaccagttcagcctcttcatactcactcagaaagctgagcacgatctctgtctcccggccctaccctgagttttgttttctgtctctgaataaagttgtgtttctcctgcttttaatctccaagaaatactgtatgaagacaatttttaaaataatatctaaaacatggaatagaactcaactcagttagttctgctccaaagaaactaaaataaggatcatcttttgaaacaatttaatacaagccgtttttcagtttttttattaaaacacatcttggaaaattgtggccaatagtgctggatctttttcattcttagttctgtttatgtttaaattgtggaaataaaccatgctcttgctgttatagcttgtttaagactcttattatgtttgaatgttattttgtgtatgtacatactattttaaatattcaaaattttcctcctgttgccagatgtcatagtacataactattcgtcttctgattttgtctttttcttaacttcttttttttaaacttttaaatcccaaaactatcaacttatctataataagattgtctaatatgttttctcatttttgtatatagagaaatgaccctgaaaatgttggttcagcattttaggcaataaatacttatttttaactt

SEQ ID NO: 3157343 - DNA, 370 bp, Cricetulus griseus
agcaaaggcaaggaatactatgtgtccaaaatcgtcatccatcccaaaaagagtgatacatatggagacattgccctgctgaaactgtctaccccagtcaccttcacctctgtcattatgcccatttgcttgcccaatatctcaaagcatcataagcttccagcttcttgctgggtgactggatggggacaaaacatgaaaggtcagtaccctgctttcctccaagaagttgaagtacccctcattgatgatgtggagtgtgagcaacagtacaaccccctcagcatgttcatcccggggctggaaccggtcattaagaaggacgaattttgtgctagtgacattaagatgaaaaaggatagctgcaagg

SEQ ID NO: 3157344 - DNA, 283 bp, Cricetulus griseus
ccctgaagtcttcatttctgtgctcttggtgtggtccagtggctccatgatttttattctgtacagacacaagcagagggttcaacacatcagcagcactcatgtttccagtagaaaatctcctgaatccagagtcacccagaacattctgatacttgtgtctacctttctggcttttcatactccctcctccatcttatgaggctacattattttttatataatcataattggtggctggtgaacaccaatcgaatagcttctctctgttttccatcatttt

SEQ ID NO: 3157345 - DNA, 630 bp, Cricetulus griseus
ttccaatggtgatgatgcccctgtttggtgatcagatggacaatgccaagcgcatggaaactcgggagctgggatctccctgaatgtcctggaaatgactgctgatgatttggaaaatagcccttaaaaaggtcatcaatgacaagagctacaaggagaacatcatgcgtctgtccagactgcacaaggaccgtccgatagagcctctggacctggctgtgttctgggtggagtacgtgatgagacacaagggggcgccacacctgcgcccggcggcccatgaccttacctggtaccagtaccactccttggatgtgattggcttcctcctggccatcgtgttgacatctttcttcattgtctataaatgctgtgcctatggctgcaggaaatgctttgggaaaaagggacgagttaagaaatcacacaaatccaagacccattgagaaagggggtgggaagtgaaggggaggtatcggtccattctccaatcagtttgaaacttgaaaacagaatcagtgttaaattattttgtttttattagggaaataattagtcaaacattacatacctagaacatttttaaaaaaataaaaacaaaaattgctggccacacccaacagggaaggt

SEQ ID NO: 3157346 - DNA, 387 bp, Cricetulus griseus
atggaacagaacaaccagacatgggtgcatgaattcatcctccttggcctgtccagagactgggacactcaagtctccctcttcgtcttgttcttattcatgtacctggtgacagtgcttgggaacgtcctcatcattcttctgatcagactcgacagcagactccacactcccatgtatttctttctcaccaacctgtcccttgtggatgtgtcttatgccacaagcatagtcccccagctgctggctcattttcttgcagcacacaaagcaattccgtttctgagctgtgcagcacagttatttttctctctgggcttgggtgggattgagttccttcttctggcagtgatggcctatgaccgctatgtggcagtgtgtgaccct

SEQ ID NO: 3157347 - DNA, 514 bp, Cricetulus griseus
tgtacgtgatcgtggggtgcgttccgcctaagggaaacctgcgggagttcctgcgggcccggcgccccccaggccccgacctcagccccgacggtcctcggagcagtgaggggccgctctccttcccagttcctggtctcctgcgcctaccaggtggcccgaggcatgcagtatctggagtcccggaagtggatggctcctgaggccttgtttgaccgtgtatacacacaccagagtgatgtgtggtcctttgggatcctgctgtgggaaatcttcactctcgggggctccccataccctggcatcccagtggaagaactgttctcactgcttcgagaggggcacaggatggacccggcccccgaactgccccccagagttgtacgggctgatgagggagtgttggcatgcagtgccctctcagaggccgacatttaagcagctggtggaggcgctagacaaggtcctgctggctgtctctgaagagtaccttgaccttcgcctgacctttgga

SEQ ID NO: 3157348 - DNA, 243 bp, Cricetulus griseus
agcgcaaccagcacctgctgctgagcctgttgcggcgtgtacaccgagtgcatcgcaccaccaacttcatccgccggcagctggcacagttgggcaacttcctggaagatgacgccctgattctgagtaacagggcacaggagagtgaggttgccccggaggctgagacttggggtgggcagggccaaggtgtcttataaaggagttaaataaacgctgagcccaggcctgacccacctaaca

SEQ ID NO: 3157349 - DNA, 680 bp, Cricetulus griseus
cggccgcactggttacggcctgccgcggcccgcgatgaagccgcccatttcaatacaagcaagtgagtttgattcttcagatgaagagcctattgaagatgaacagacaccaattcaaatttcatggctaccactgtcacgagtgaactgttctcagtttctcggtttatgtgctcttccaggttgtaaatttaaagatgttagaagaaatattcaaaaagatacagaggaactaaagagctacgggatccaagatgtatttgttttctgcaccagaggggagctgtcaaaatatagagtcccaaaccttctggacctctaccaacagtctggaattgtcacccatcaccacccaatcccagatggagggacccctgacattggcagctgctggcaaatcatggaggagctggccacctgtctcaaaaacaaccgaaaaaccctgatacactgttatggaggacttggaagatcttgtcttgtagctgcttgtctcctcctatacttgtctgactcagtatcaccacagcaagccatagacagccttcgagatctcagggggtctggagccatacagaccatcaagcaatataattatctccatgagttccgggataaattagctgcatatctatcatcaagagattcactatcaagatctgtctcgagataatgaagat

SEQ ID NO: 3157350 - DNA, 741 bp, Cricetulus griseus
  modified_base (738)..(738): a, c, t, g, unknown or other
cagtcagatacatttgtttgaacacttattgtacatgtctgttttgttcagtaattataggtcaagtctaattacagcaaccaaaacagattaccagactcttttgttgtgctgaaattttcttatataaatgaccagtgtttttgacttttagtgatatgggggtttactttaaaacttaaaaaaaagacattccagtgattttggtaattgggttgggcctataaatatagaacaaattcagggattatttaaaaatgtttgtgttactactgatatatgctggtattttttcctttttgaactattatggaatttattttactaaaaggcaacactacattatttcttaaaacttccatttatcttttatgggggtggggatttgcttgtagaaaatatttattcttcatattaagtgttgggacacaatacagccacagagctacagtatttgtgcccaggtcgggagctagttgaaaagagaagtgaacaaaataatagcagcaagatatcttatagcttgtactaatagttttttaggtgggggttagatagctgtaacttagaaatatatactcttttctattaaattttggagcataatgtagccaaggagctacagaatttgtgctcaggtcgggagcgtattgaaaaaacgtgtaaaataaaagaaacaaaaaattaataaaaacaaaaaaaaaactacacaaaaactaagaaaaaaaaaaaaaaaanaaa

SEQ ID NO: 3157351 - DNA, 578 bp, Cricetulus griseus
ggaaacaaatctggctttgccggaaagagcaggctcatcagacactccataccagcacacacagtgtgtgaagagcccggagcagccctcataccctgctctccctgagaaggaccacgaggaggagtccaagaactgcagtattgatgacgacgacttttttttcattctccagatttaaacccttacaatgtcttgattgtgacatgacttttccttgtttctcggagcttgtttctcatcaaaccattcatgacatggaaaaacctcataaatgtaaaacatgtgcaaaaacttttgctttagattcagaacttgcatcccatgagaagacccacatgagagaagaacctttcaaatgtacggtgtgtgggaagagctttaaagtgaatatgcatctcatcactcataaacgaacccataggagaaacaccaagtaaatacaagcttttgctgctactgtgtgggctttttagtatctttatgatgggaaacactgcttatgtgcggggcactaggctaatcaagcactttacacacattccaaaacctttaaaattcagcttttgactgctggg

SEQ ID NO: 3157352 - DNA, 311 bp, Cricetulus griseus
tggcagtttctaggatcgctctgtggaggttgatgtctgtgatctttggaataaaatgtcttctgctgatggctactttgggatttttgatgaaaaactcatttactatatggagtattcaaccaataccttctccaacttccattgtagaacttcaggaagtttccaaatgctgcgcttgcttagaaaagtggattggttatcagtgtcactgttacttcatttccaaagaaggaaagtcttgggaagaaagcagagatttctgtgcctctaagaattccagtcttcttcagctcaaaaccaaaaatgaa

SEQ ID NO: 3157353 - DNA, 464 bp, Cricetulus griseus
gatcttgggttgtcttctgtctacacaccaaagatcctagcaacctgtatctctgaagacaagagcatatcctttgctggctgtgtggctcagttcttcttctctgctgcactggactacactgagtgttaccttttggctgccatggcttatgatcgttatgtagccatcgcaaagcctctgttttattcacaagccatgtccttaaagctatgtgcatttttagtggcagcttcatatcttggtggcttcattaactctgttatcatcaccaaagacaccttttccttgactttctgcagtgacaatgtaattgatgactttttctgtgatatcccacccctggtgaagctggcctgtggcaagaagggcagcttccagtctgtgttgttcttcctcttggcttccaatgtcatcatccccattgtgtttatcctggcctcttatctcttcattattgccac

SEQ ID NO: 3157354 - DNA, 430 bp, Cricetulus griseus
caggatgtgggtgttcaagtttctgctgctacccatgttgagcttcgctctgtaccctgaggagatgctggatacccagtgggagctatggaagaagacccataggaagcagtataacagcaaggtggatgaaatctctcggcgtttaatttgggaaaaaaacctgaagcatatttctatccataaccttgaggcctctcttggtgtccatacgtatgaactggccatgaatcacttgggagacatgaccagtgaagaagtggttcagaagatgacaggactcaaattaccaccttctcactcccacagtaatgacactctctacatcccagagtgggaaggcagagccccagaatgccatcgactatcgaaagaaaggatatgttactccagtcaaaaatcagggtgagtgtggttcctgttgggcttt

SEQ ID NO: 3157355 - DNA, 419 bp, Cricetulus griseus
attgccatgaggtatgcaagcagcgaacttggcatcgactttgatggttttatggcttgtgtgatccgcctggagaacctgttcaaaatgttcaggcttttggacaagaaccagaacggcattgtccagctctctctggctgagtggctgtgctgtgtgctggtctgagctggtgttttggacatcaatagcttccctgtcttccgcttgtctctttgcaatcttatgaacacggatcctcaagtgacattttctgattgttgtattgttccagctaatcactgttcctgagacactggtctgtcccaacagagcaggctggggagccccagatctctcagcagctcggagctatgtgctgtttgagctgatctcagggcccagaggaaggaaatcaatcagttgaagttgtgggtcag

SEQ ID NO: 3157356 - DNA, 1741 bp, Cricetulus griseus
gaggaaccaacagttttagaaactatcccactattggacaaatggaagttcattcccaaatccagaatccttagtaccagaaataacattggtgaactttccagcgctgggagtgccttgccagacgctgaccacatagtgaaatttgtgaatgggcagatgctctatagttgcattgtgtgcaaacgtagctatgtgactttatccagtctcagaaggcatgctaaatgttcactcgtggagaagaacataccccttgccattactgcaacaaggtctttgcactggccgagtacaggacacggcatgagatctggcatactggagagaggcgaggcagtgagcagtcagcctctgtgatcagctacagtggctcggtgccctcggtcattgtgcacagcagccagttttcatcggtgattaagcacagcaatacatttgctgccctgaccagcagcaatgacaaggccccttcacaaccagtcatcagtccatccctgaaagaagatagcaaacctgaggacagataaagccagtaattgctgacccaggagggtctttggcaaaaccacaaatgccgttgaagaaaccagcaaaattgaaacttacattgcaaaacctgctctgcctggcacctccacaaatagcaatgttgcacccctttgccagataacagtgaaaattggaaatgaagccattgtgaaaaggcatatccttgggtccaagctgttttacaaaagagggaggaaacccaagtatcaaatacaggaggagtcgttgcctcaggagagtgacccagaaacccatggggacagcccccttgggctttgccaggctgaatgcgtagagatgagtgaagcatttgatgacgcgagtgaccaggattccactgataagccgtggcgcccatactacaactacaagcccaagaagaaatccaaacagttgaagaaaaatgagaaaagttaagtggcggaaggagcacggggtcagaagccccagcggtaggtgcagatacccagcggaactggatcgtgcagaggtaaagccacctccggataaggctttgaagaagaagaagaagaagaagaaaataaagagatgcccaaactccagtgtgagctctgtgatggcgacaaagcaggggggatggaagccgaaggcaagccccaccagcatctcacgttgaagccttacatctgcgagctttgcgcaaagcagttccagagcccgtccacgctcaagatgcacatgagatgccatactggagagaagccataccaatgcaagacctgtgggcggtgcttctcagtgcaaggaaacttacagaaacacgagcgcatccacctgggtgtgaaggagttcatctgtcagtattgtaacaaggcattcacattgaacgagactcttaaaatccacgaaagaatccacacgggggagaaacgttaccactgtcagttctgctttcagggctttttatatctttccacaaaaaggaatcatgagcggaggcatgttcgggaacatgatgggaaaggctttgcttgcttccagtgccccaaaatatgcaaaacagctgctgccctcagaatgcaccaaaagaaacatttgttcaagaccttaactaagcaggagaaaacagatgacatgtgccatgaaaactcagatctcttggagagtcaactttgcactgattcggaagacagcgaccaaaaggatgatatacaaacctttgctaaaa

SEQ ID NO: 3157357 - DNA, 735 bp, Cricetulus griseus
aagcaacttcacagtgagggtgccgctacattccccaggacctcggtcctccagccccaggttcagcggcttggacctggaagaagactcagaggtgttcaagatgctgcaggagaaccgtcagggacgagccgccccgaggcagtccagctcctttcggctcttgcaggaagccctggaggctgaggaaagaggtggcacacctgcctttgtgcccagctcgctgagttcccaggcctccttgcccacctccaaggccttggccactccacccaagctccatacctgtgagaagtgcagtgccaacatctcgaaccaggctgtccgcatccaggaggggaggtaccgacaccctggctgctacacctgtgcagactgtgggctgaacctgaagatgcgtggtcacttctgggtgggcaatgagttgtactgtgagaagcatgcccgccagcgctactcaatgcctggcactctcagttctcgggcctgagcctctaggtgctcagcctgtctttgctctcagcctctgcagacatgaccagactgagagcagacaggaaaggaggtgatggcaggtgatggctcttataccaactaaggttgggaaggcccctttgtcctcgctgggtgaagccaagggttgggactagtctcagactgcaagtgctggggacagttccactctctctggcctttgtcctgcaggccaggtactgcactgcagtctgaagtggc

SEQ ID NO: 3157358 - DNA, 1376 bp, Cricetulus griseus
gtgaagacgatgagcacactcggcggcgctcctaaggacgatggtgaggagaaggatgaggacgtgagtgagcacggtgatactgagcaaaaacctaaaggcaaaaaagaatcggagcagcacgcgaaacgggaaccggacgagagggccgtccgcatccccatcccggaagtgctccagcagcggctggcggacgactgttactacataaaccgcaggcggcggttggtgaggctgccgtgccagaccaacgtgggggccatcctggagtgctacgtgcgccacttctgggcgagcgcgctggcctcgggggaccgccggccgcagccccagcgcgcggcgcccgagaggagcgtgggcctctgcagggagatggcggacgggctgcgcatcaccttcgaccacgcgcttcccttggtgctgctctacccccaggaacaggcacagtatgaaatggtgacttcctccacctttttctttcccactgaggaaaaagccgccgatacgggcaggagccaggaggcgccctggccgggcccatccaccccgcaaccctccgagagccagcccgtggcggggccagccgcccccaagaggcgcaaggcggaggcggaaacgccgcgggctcccaggcggtccatgcgacacaccacccactgccactggcagtctgaggaccgggcctcacctcaggccaagcgcagtgtgcccaagctgttcccgcacttgcaaaagacacctgtgcccggcatctcaccttcccccatttctctgaccccagggaaggaaggtagcgctatgtttgctggttttgaagggtcaagtgaggaaatgaatgaggtcctctcctggaagcttgtgcctgacaattacccaccaggacaccagccacctcccccctcctacatttatggcgcacaacatttactgcgattgtttgtaaaacttcccgagattcttgggaagatgtccttctctgagaagaatctgaaagcgttactgaagcacttggatctctttctgaggtttttagcagaataccaggctgacttcttcctggagtcggcttatgtctcagcctgtgaggcccactataccagcaagaaccctaggacaatctgctaagttttgatggttctgttaagcacagctgccccacctggcttggtgttttcctttctaggtgggcccactgggagaggaggggttatgagagagggcaggcttgggtatttgagttgttcacatactgtaggttttttgttaagaattacttcctgagctatgtgtgcttgtcatgcttgtagagatgtaaagttgcttaattagttaattagaaacaatacatgctattgcacaggctgtgtgtgatagca

SEQ ID NO: 3157359 - DNA, 1245 bp, Cricetulus griseus
  modified_base (1240)..(1240): a, c, t, g, unknown or other
ggatcggggccacggtggccggcgacctgctgactttggggtacggagccctcccggaggcggcgtcgcggggccccgcgtgtgcggacttcagggcgctgtgcgcgcggctggcggccgagctgacggctctgggagctgtggagaggcgagaggagggcgccctggggctgggcgctggccacggcccggacgcagaggaggaattcctgcggcagttggccggcctgctgcgggcgttgcactgccccgatcgcgcgctcggcggcggaaactgcgccaccgcgttgcgggagcccggcggcggcctgcgcctgctgcggtttctttgctcagagctccaggctgcccgtctcttgcatctgcggctcccgctagatgctagccccgcacagtccattggagaggggacaaaagagggaaatggcatggttcaggagctgatgctaactcttcaagctctgggccttcctagacccgtgcgtggaaccctggccagccagctagttcgggagtttcacggcaaggtctctgagctgctgccttcgctgcccccagagtccatgcagcccctcctcagctccccactggatgcgtcacagtgggaagccctggagtctctgtcccaaagcctaacagaacagtactgctgccgccgctgcctcctcctgaagcgtctggaccttacgacatctgctttccactggggtgaccgggcagagggccaaggagaggccatgaaggcagtgctgttcccaatccgaggacttctgactccagaatctgatgtctctgtcgcacatgttctggctgctcgagctgacctttcccgtctggtcccagctaccagtgtggctgcccgccaagggaccagctgtgccatcaacaaggtgcttatgggtgatgtgccagaccgcggggggcgcccagatgagctggaggcgcccatgcctgcctggcagagccgaagggaagacggaggaagggggaaggctggcccacagcgctggggtcgcagaaagaagaagaagaagtaaagggtcttggacggtcggtcagaggttctgccaggtgctgatgccactggtcgtctttgagagtcactgtgaagagttttccttggcacctaagcccggcattccctgtcgtagaggccctaaaaacgcccaccactcaatactatgaaccatgttgtctgaaaaataaatttaattcttttgataacgtaaaaaaaaaaaanaaaaa

SEQ ID NO: 3157360 - DNA, 498 bp, Cricetulus griseus
cagagcctttgtatcaggaaccaccttgcctggtacacaaccatgtctgtcctggggccactacaacaacttcttcttcgctgctcatctgttggatattgcaatgggctttaagaccttgaggacgatcttgtcatctgtaactcacaatggcaaacagctggtctgaactgtgggcctcctggctgttgttgtttacctctatactgtggtggctttcaacttcttaccgcaaagttctataacaaaagtgaagatgacgatgagccggatatgaaatgtgatgacatgatgacatgctactcttccacatgtatgtgggagtgagagcgggtggaggcattggtgatgaaatcgaagaccccgctggtgacccttatgaaatgtctgaaatatcgattaagtgaccttaaaatctctttagatatagctatgctaagttttttatgtttgtgttcccgaaggacaactccattaaaacagctgtgctgatcctct

SEQ ID NO: 3157361 - DNA, 292 bp, Cricetulus griseus
gtaaaggccttggcaagggcggcgccaagcgccaccgcaaagtcctccgcgacaacatccagggcatcaccaagcccgccatccgccgcctggcccgccgtggcggagtcaagcgcatctccggcctcatctacgaggagacccgcggggtgctgaaggtgttcctggagaacgtgatccgcgacgcggtcacctacacggagcacgccaagcgcaagaccgtcaccgccatggacgtggtctacgccctcaagcgccagggccgcacgctttacggcttcggcggttaagc

SEQ ID NO: 3157362 - DNA, 1350 bp, Cricetulus griseus
aacctcagtgctctgcagctgctcaaaatggacagcaatgagctggccttcatccctcgggacgccttccgcagtctgcacgccctacgttctctgcagctcaatcacaaccgcctgcatgctttggccgagggcacctttgcgccactcacggcgatgtcccacttgcagatcaatgacaacccttttgactgcctgtggcattgtgtggttcaagacgtgggccctggccacagcagtgtctattccagaacaggacaacattgcctgtacttcaccacatgtgctgaagggcaccccgctgagacgcctgccacccctgccctgctcagcaccctcggttcaactaagctaccagcccagccaggatggagctgagctgcggcctggctttgtgctggcactccactgtgacgtggatggacagccagcaccaatgagctaggcagtgctgagagctctgtgaatgtggcattggccactccaggtgagggcggagaggatgtactggggcgtaggtttcatggcaaagcagtggaaggcaagggctgctacacagttgacaacgaggtacagccctctggccccgaagacaatgtggttatcatttacctcagccgttccggagccccagaggctgcaatcgcagcagaagggaagcctgcgcagcagctctcgggcctgcttctgctgggccaaagcttgcttgttgtcttccttgcctgcttctaaccacacccttcctggctggctggagcagccccggggccttcctaactcctcctgaccctgccaatgttccttctaagtaccctgaggtctggagttggtgaggcctgaggttggcctggggacttcacattttcctacctccctttctaagctcttccaggccacttattatttcaacttgtagatttgctcagagctagcaactaggatggaaccatatcccagaactcatcatctctggtgctgattgctgctaacagcattgcccttgctcctagtaggggcagcatgctaatgggacaacaataatgccggaatcctggcccattttgagagttctaggcactgaggtaaggagtttgggaggccacctaggtgggcattggggcagggctggaagggaacctggagtggccagtacaggacctgaaaaggaggtactacaggcaagggctgggaaggctaaaagctttcttgatgcccctgatgaaatgtggaaactgtccccggttgggcctctgtctcttctcaccccaaatcccacagcctgtgcctgcctctcgagaaaaactaaataaataaataaataaataaataaataaataaaaaaaaaaaaaa

SEQ ID NO: 3157363 - DNA, 411 bp, Cricetulus griseus
agagttcaaagaggccttttcactgtttgaccggactccaactggagagatgaagatcacttatggacagtgtggggacgtgctgcgggccctgggccagaaccccaccaatgcagaggtgctgcgtgttctgggcaaacctaagcctgaagagatgagttccaagacactggacttcgagatgttcctgcccatcctgcaacacatctcccgaaacaaggagcagggcacctatgaggacttcgtggaggggcttcgggtctttggacaaagagagcaacggcacagtcatgggggctgagcttcggcatgtccttgctactctgggagagaagatgagtgaggcagaggtggaacagctgctgtccgggcaggaagatgccaatggctgcagtcaattatgaagccttt

SEQ ID NO: 3157364 - DNA, 236 bp, Cricetulus griseus
gcttgcttccctcatcaattacagggataattaagaagaagccccacccaatatggaggctgaagaccaccacccctattgattctctgacttctcccctgccctgcccaccgggccttagctgggtcggtcatgcaatgctgagcagtaaggaagacttggggtcatcttgcctggctacagggcaagaattgtgggcatcatgggggtgtgtgtgagcggggctccgagggtga

SEQ ID NO: 3157365 - DNA, 177 bp, Cricetulus griseus
gtgggtgctcctggagccctagaggaagtgatgcctcaaaggcccttgtaggattctttaaaacctcgctaatgtccagactcaagtctcagatctatggagcccaccagaaactttccactattcggaggcgccttctccgccgttctcccccctggggccatggatgtgaggtga

SEQ ID NO: 3157366 - DNA, 450 bp, Cricetulus griseus
tgctgatccagccccactacatctctgatctagacagggtggaggcccttgtcttccagcatgacttcctgactcggataaagaacccacctcctcggaccatccgcctgaccctaccccggctggaaatccaaggatcctacaacctgcaggatctgctggcccaggccaagttgtccacccttttgggtgctgaggcaaatctgggcaagatcagtgaccccaaccccagagtgggagaggttctcaacagcatcctctttgaactcaaagcaggtgaggaagagcagccaaccgagtctgctaagcagtctggctcacccgaggcactggatgtgaccctgaacagccccattcctgtttgccatctatgagcggtactcaggtgccctgcactttttgggcagagtgggtaaccctcagagtgtgctgtgaggcctggtgccatag

SEQ ID NO: 3157367 - DNA, 523 bp, Cricetulus griseus
ctaacagcctgatggcgactcttgttgccgcccttcactctgggaatcttcgagaggtcttgtacgtcaggagagcatgctgaggtttccacagctctacaaaatcacccagaatgcagaaggcttcaacactaaggttttctggggtcactgcatcaatgccttggtccactccctcatcctcttctgggttcccataaaattgctggagcacgatactccgctagccaatggtcacgccatagactatttgtttgttggaaatattgtttacacgtacgttgtggttacggtttgtctgaaagctggtttggagacaacagcgtggactaaattcagtcacctggcggtgtggggaagcatgctgacctggctggtgttttttggtgtctactcaaccatctggccaaccatccccatcgctcctgacatgaaagggcaggcaactatggtcctgagctctacttctggttgggattgttcctggttccaactgcatgtttgattgaagatgtgatgtgga

SEQ ID NO: 3157368 - DNA, 373 bp, Cricetulus griseus
ctagaaacaaggtgatcacggttcacagagtgtttccaaatggcctggcttcccaggaaggcacaattcaaaaaggcaatgaggttctttccatcaatggcaaatctctcaagggggctacccacaatgatgccctagctatcctccgccaagctcgggacccaaggcaagctgtgattgtcaccaggaaagcaactgtggatgccactcatgacctgaactcctctactgactctgcagcatcatcttcagcagccagtgacatttcagtagaatctatggaggccactgtctgcacagtgacactggagaagacctctgcagggctgggcttcagcctggagggaggaaaaggctccctgcatggagacaa

SEQ ID NO: 3157369 - DNA, 1826 bp, Cricetulus griseus
gagactggaggcagagccctgcagaagccagagacctgagttccagaccagcagaggctcagaaatggaggctgagccctggagaaactccagaggagagtctgagattggcaagtcctggagaccacagtcccaagagaaaagaggtatcggaaagcagactgagcctgggggagtctggtgaccagaaggcctgcctgcctgaggcccataaatggaatcttgacccgaaagaaccccagaaacagagcttgatacagccggaggccgcagagtggaggctgaactcaagggaagagagaaaagactacttagaggagtctggaagaaaggaagagacactgagtccagggattgcccactgagggctggaaatggaccctgaactctgggaaggctcgagaacgggcgtctcgggacatagagactcctcagaagccaggtcctccagcatctccagagaaacacctggggcagtctggtgtggaggctgagagggagggacggaggaggcggaggctcagagcaggcctctgagagctcagcagaacctctgctctgggccctcccccctcccaccggagcacgcaggggccgggacggaaggctccagacaacaggagaaccgcggaccccaacaccagcccctctgtctcccccacccccagccccaactgccccccagccccccggggatcccctcatgagccgtctgttctatggagtgaaggcagggccgggggtgggggcccccgccgcagcggacacaccttcactgtcaacccacggaggtgtgtgccccctgccagcccagcccctccggccacccctgccaccgctgatgctgcagggcctggacccgggaagaagcggtacccaactgctgaggaaatcttggtgctggggggcgtacctccgtctcagccgcagctgccttgccaaggggtccccggaaagacatcacaaacagctcaagatctccttcagtgagacagccctggagaccaccttccagtacccttcagagagctcggtactagcggatctgggcccggagcctgaggcccccagtgctcccatccccttggcgacccagcctgatgacgacgacgacgaggaggaggaggagttgctgctgcagccagggctccagggcgggctgcgcaccaaggccctaatcgtggatgagtcctgccggcggtgaccatctcccagtttgggcacatacctcttcctaccagaagatcctggagtctggaagattcagagccaacagaccctggcaatgagcctggcagggaagggcaatgagcatattccgacttgcttttcccatcctgtttctggggcagagccagtagcctaaatttacccctaacccaaggtcaccccttttcccaggtcactaccctttgtttacagttccttctcctcgcttgatcacagcctggtttacatgcccaccagctcccggtcccgcctctcaaagtcccaggtttacaagctatgcctatttgcagacttcccgaggaatccaccaccctccgtttgtcctactgagagtgacctgcggagattatgtggctttcttcaactttgctcagtattactgtgcctcagtttcccccaagagggaaggctggggatcctcactctgaaccccatgagaattatttaattctgttcccccacgtggttcacattgaattgaattgcagtgtggggggactaacgggggtgcctcacccctccctgttgctccttcaccaattgcctggtttgtttctttttgtacctttccataataaaatggagctcttttcaac

SEQ ID NO: 3157370 - DNA, 656 bp, Cricetulus griseus
gaaacggacagccattgaacatggacgaaggaatccctcatttgcaggagagacagttactggaacatagggattttataggactggattattccgctttgtatatgtgtaaacccaaaaggagcttgaagcgagacgacaccaaggatacctacaaattaccgcacagattaatagaaaaaaagagaagagaccgaattaatagaatgcattgctcagctgaaagatttgctgcctgaacatctgaaattgacaacactggggcgctcctgacgccacacggtgcccccgggcagggtccccggccgcgcgccctgcagcacgggggctgcggctgcccctggtcccgatcgcgccgcccgctgcgtgccggtcatccagcggactcagcccggcacggagcccgagcacgacacggacaccgacagcggctacggaggggaggcggagcagggccgcgccgccatcaagcaggagccgcccggggacccgtcgcccgcgcccaagaggccaaagctggaggcgcgcggcgcgctcctgggcccagagcccgcgctgctgggctcgctcgtggcgctgggcgggggctcgcccttcgcgcagcccgccgccgcgcccttctgcctgcccttctacctgctgtcaccggccgccgc

SEQ ID NO: 3157371 - DNA, 426 bp, Cricetulus griseus
aacaaagaggaacatcattattctgtctagtcttttccagattgatggacattgggatgcactatgatggcctcagaaatgtgaatttaattttgttaaattaaaccccccagagtttctcctcttgtcatcattggtttatattcgagcaacagagaaataaatatagactgatgctgaataaaattgttctcccgcttgccccatgctcccctagatgaagggctcttgttctgtatatacttggtatccaaggaaacagttcaactatactagtttcagagatgtatttttcattgttttgccccaggtaaatgttttatatggaagatctatgcaaaaaatgtatttttaagtattttctgggttatttttatataagcatatgttatgttcaaataaaatgtatttcgcgaaaaaaaaaaa

SEQ ID NO: 3157372 - DNA, 584 bp, Cricetulus griseus
gcatgcctatgatgtggttatttttaacaacaacttgcttgatacatgaaactttaagtgttagtgaactcttcgatttggaaaatgaagtgaatccggaagtgtggatgaatactagtgaaatcatcatctacaacggctaccccagtgaagagtatgaagtcaccactgcagatgggtacattctcaccctcaacaggattccccatggaagggcacaagctggactcacaggtacccggccagttgtgtatatgcagcatgccttgtttgcagacaacgcctactggcttgagaccgatctgatgaattcagagcttatgactggggaagtgaagcagaaaatatgaatcactacaaccagagtcgtcctcccatctatgacctgactgccatgaaggtgcccactgccatttgggctggtggacatgatgccctcataacaccacaagacgtagccaggatacttccccaagttacaaatctccgctacttcaaactatttccagattggaaccattttgatttcgtttggggccttgatgcaccccaaaggctgtacagtaaaatcataggtttgatga

SEQ ID NO: 3157373 - DNA, 339 bp, Cricetulus griseus
caggtgctgatgcagagtcatgagctacagcggctacagagtcgcaacagggcactggagagcaggctgcagactttggaagcacagcaccaggcccagatgaacagcctccaagacaagagggagcaactgcagagcctcctaggccaccagaccggggctctggctaacctgaagcacaatctgcaggccctggtcagcaattccagctccctgcagcagcagcagcaacagctgatggagttagtacagcgtctggttcaaattgtagcccaggaccagcgccctgtcgtaccctaaagactccccaagcagctgttccaggactgtgcagagatc

SEQ ID NO: 3157374 - DNA, 287 bp, Cricetulus griseus
tcacttttggaacccgtgggaactgctacttcatggtggaggttaagtgtagagaacaagattttcattctgggacctttggtggcatccttaacgaaccaatggctgatttggttgctcttctaggcagcctggtagattcatcaggccacatcctgattcctggaatctatgatcaaatggcccctcttacagaggaggaaaaaacatgtatagaaacattgatctggacatggaagaataccagaagagcagccaagttgagaaatttctgtttgataccaagg

SEQ ID NO: 3157375 - DNA, 600 bp, Cricetulus griseus
gagagaaccgtatggctgtaacgagtgtgggaaagccttcattcagatgtcaaatcttgtcaggcatcagagaattcatactggagaaaaccttacatatgtaaggaatgtggcaaagcttttagccagaaatcaaatctcattgctcatgaaaaattcattctggggagaaccctatgagtgtaatgagtgtggaaagccttcagccagaacaaactttattacccaccagccctatgaatgtaataaatgtgggaaagtccttctcccagagctcatcccttactatacacatccgcgggcacacagccgagaaacccttcgactgcagcaaatgtggaaaagccttctctcagatctcatctcttactcttcatatgaggaagcacacaggagaaaagcccctataactgcattgagtgtggcaaggctttcagccaaaagtcacacctcgtaagacaccagagaatccacactcactaggaactccggaacgctgtgaatgtggggactgccttccagtgaaatgaacacctcgtagcactctacaccatcatgcatctacacacacacacacacacacacacacacacacacaca

SEQ ID NO: 3157376 - DNA, 434 bp, Cricetulus griseus
tctagaaacagaagctgtaaacgaaagtacattgataattatcaagaacccccaaggaagaagtcaacattgcataggaaatgtagagaaaaggctagctctgaagatgtccaggaaacatttggatttagcagacccaggctttcaaaggattcaggtagaactttgagacttttcccttttaattccaaacagctggtgaaatgtcctaggagaaatcaaccagttgtggttttgaaccatcctgatgcagatgctccagaagtagaacgtgtaatgaaaactattgcaaagtttaatggacgtgtactgaaggtttcattgtcacaaacaactattaatgctttactgaaaccagtttattataacacttctgaaacaacttacaatgacttttccaagagacacaagatgcttaaacctgctaattctgt

SEQ ID NO: 3157377 - DNA, 883 bp, Cricetulus griseus
ttttggaaatgatacttagtgtgcttttctgctacattgtgtatgtacagcagtttcaacagttgtgttgttaatatgaaaaattgctttaaggaagtgaagagaatctttcggtcctgttcatattcactgaggattcaacttgagtctcactgcagaattcatttgctgttacaactaatgacagtgaagaagtaatacattaagtttgggaccagtcctaatgtagttcccagctgccctgacttcccattcccacctacctccacagacttcctaacaatcacgaacatcaagatgtgtttgtatcgagtcatgttcaagacctgggctggccccaggcaattttatacagtgtgagaagtgtttgatcaaatgtctgtcccagatgaatcttacttgggatttctgggtgattttgaaaacaaatgtgtttttaaaagctataatagcttttgacattgtaaaaatctgtatgtctatataatttttattaccaaattttgtaagtgccagtgatccagcatcgtgtgcatgtggagatctgtacctgggtatttctcaggacaggtcagtcctgtttccagccacagcttcctggaaccggggcatggcttcctcattgtggcttcatcacagataggaaaagcagaagtgtccctcaggccagtgccaagaagtgagtcaatgtctttaagcagctcaaagccaggatgctgggcacagggtacccacaaatcgcttcttcagccacggaaatgggagtttgaaagacttaggacaaaataggtagaaacttgtaactagtcttagattgtttttaaaaaaatagttatttgatttcttggtaaaatgctgtgaatctctatttgtcattttgtat

SEQ ID NO: 3157378 - DNA, 445 bp, Cricetulus griseus
ctggctgtccagaactctgtagaccaggctggccttgaactcacagagatccgcctgcctctgcctcccgagtgctgggattaaaggtgtgcgccactaccagctggcgggaattgaattcagggccttgtgcatttttaggcaagtgctctaccagtgagccatgcccccagcccttgcctttctcatctgaaggtcattaacattacctactcacagggtttaaaacgtcttagagtcagtgttctaaagattatgcaaggcatgttcatgcagcagaggaatgcaaagctttaaggattgtaagaattctccctgctccaagcaagagaagccaaggtgactgctattttgtttgattgtttttgagaggtgtccaggctaacctcaaactcactatgcagctgaggatgatcttgaactcctgatcctctggtttcccttc

SEQ ID NO: 3157379 - DNA, 252 bp, Cricetulus griseus
  modified_base (218)..(218): a, c, t, g, unknown or other
  modified_base (222)..(222): a, c, t, g, unknown or other
  modified_base (226)..(226): a, c, t, g, unknown or other
ggcagggctcgcgcccccggcccgccccgcctggcaccgcgcctcggggctggggccgagcaacgagcaccaggtgggccggcacgagaacgaacaccaagtgaagccggccctgggacccccgccccccgagcccccgcccgatggggaacctccgtcccaagaaacaaataaataacttaaaaaaatagaaaaaaaaaaatatatatatatataanaaanaaanaaaaaaaaaaggaatgtgccctacct

SEQ ID NO: 3157380 - DNA, 342 bp, Cricetulus griseus
cagacacctcaaccctggatcccacgactctacattaagcactggagtatttattactctactgtgggagaaagcctttgccaatgcttacaaggaactctttatgcctctttctctggatcctgtttgatggaggcctcctaacccacttcagccacagccacagccacaacagacttcagctgcggaaccaaaagaaaatgttaatccacctgtcggggagacgatcccatttccaacgggttaaacgtggctgggtatggaatcagttctttgtgctggaagaatacatgggactccgaacctcaatatgtgggaaagtgtttattttctaaatacatt

SEQ ID NO: 3157381 - DNA, 1170 bp, Cricetulus griseus
gacagtgactatgaaaatccagatgaacattccgactccgagatgtacgtgatgcctgcggaggagactggcgacgattcctatgagccaccgcccgctgagcagcagacaagggtggtccacccagccctgcccttcaccaggggcgagtatgtagataatcgatccagccagcggcactctccacccttcagcaagacactccccagtaagccttgctggccctcagcgaaaacaaggatgacttctactttgccagctcccacctgtctgcagaagcctcagatcccccccaaacccaaagacctccttgaggatgaggctgattatgtggtccctgtggaagatcacgatgaaaactatatccaccccagagaaagcatcccactgcctgctgagaaagctcctatggtgaatagatcaaccaagccaaacagctgctccaagccaatgtcacctccagggactgtcacaggtcgaaacagtggggtctgggactccaagtcatctttgcctgctgcaccatccccactgccacgtgctgggaagaaaacagctacaccactgaagacaactccagttacctctctaccgaatgcatcaaatgtttgtgaagaaaagcctgttcctgctgaacgccaccgagggtctagtcacagacaagacactgtacagtcaccagtgtttcctcccacccagaaacctatccatcaaaagcctgttcctctgccacggtttccagaagggggaagcccagctgtagatggaccattatgtagcttgtcatctaattccacttttgcagaccaggaggcagaacttcacgggaagccctggtatgctggtgcctgtgaccgcaagtctgctgaagaggccctgcacagatccaacaaggatggatcatttcttattcggaaaagctctggccatgattctaagcagccatatacactagttgcattctttaataagcgagtatataatattcctgtacggtttattgaagcaaccaaacaatatcctttgggaaagaagaaaaatggtgaagagtactttggaagtgttgtggacatcatccagaaccatcagcacaaccccctggttcttattgacagtcagaataacacaaaggattctacaagactgaaatatgctgtgaaagtttcataa

SEQ ID NO: 3157382 - DNA, 396 bp, Cricetulus griseus
gcacccctctttgaggctctgctgcccccctggggcccctgtgtgcatgctatttgtagctcttgaccctgatactgtgttagtactgtgaccccttcaagctcatatttcccaagccttctcaattgtgtcagcttttactaagggggaaaaaatagtctgtcagaaaattctatgtaccccgagaagtaacctgtctaatgtacttatgtttggtgtcatcctgacagtatgtatgtacgactttaatacatttgtagcagcagagattggttagcgttttctcatgtgtgtttgagagggaaggctgatgtctattaggttggtcaccaagtgtatttctatactctgtgaaagaaaaacattttaaataaaaattaaaaaagctttttctga

SEQ ID NO: 3157383 - DNA, 400 bp, Cricetulus griseus
ctcggcttcctgcgctacttccgcccggccaactgcttcctcatgagcggctacgacgtcgcgcagcagccggcggcctacgacgggctcgcccggggcctggcggagcaggccgtgggcttcatccacaggcacgcgcacacgcccttcatgctgctcctgtccttcatgcacgtgcacacggcgcacttcgcggggcccgagttcgcgcggcgcagcctccacggggcctacggggacgcggccgaggagatggactggagcgtgggtcaggtcctcgacgccctggaccgcctgggcctggcgaacgacacgctcgtctacttcacgtcggaccacggcgcacacgtggaggaggtcagcgccaagggcgagatgcacggcggcagcaacggggtct

SEQ ID NO: 3157384 - DNA, 1079 bp, Cricetulus griseus
gccatctccctctgtggtggcctcagtgaccacagagacatcaccaaagatgcgttttggtaacaagctgtgtcctatcagcagttcgctgacgatgggaccatcacgagatcggatacccttggtcatattttgcccacgctgggaaaggattggacccaccagggcattgcaaagctgtaccataaagtaagccagaacggctacaagtttctctactgttctgcgcgtgccattgggatggcagacatgacaagaggctacctgcactgggtcaatgagaggggcacggtgctgccacagggaccacttctgctcagcccaagcagcctcttctctgccctgcacagagaagtgattgaaaagaagccagaaaagttcaaagtccagtgtttgacagatatcaaaaacctgtttttcccgaacgcagaacccttctacgctgcttttgggaaccgtcctgctgatgtgtattcctataagcaagtgggagtgtcactgaacaggatcttcactgtcaaccccaagggagagctggtgcaggagcacgccaagaccaacatcagctcgtatgtgaggctctgtgaagtggttgaccatgtcttcccattgctgaagagaagccattcctccgacttcccctgttcagacactttcagtaacttcaacctttggagagagccactgccaccttaagaaatgtagtctccagaagttaaattattttctttgcagatattatttattactttgatctcaccaggctgctgttgtgctcatcctagccacgtccttaggattgcagctgttatgagtacattaaaagttaagtgtgctagacaatccaaagagccttattctgtctatgtcacacaatgttcttctggaattctgaaccattaattttccttagctttttccattcagtctaagggcaagaaaaaaaataggaatttgagtgatgttctttaagttgatagaggtagttgttgaactgtctcagaaaatgtagaaaaaaaggaaagaagtatttaggtaaagtattttgctttactttggtaagttttattattttaaag

SEQ ID NO: 3157385 - DNA, 458 bp, Cricetulus griseus
cctttgagccacctgctcctgcctctcccggtaatgggtcaggccacaacagcgctcctggcccagatcccacactggtaagtagatcccgaggccacagcgtcatcaacgtcattgtcccagagagccacgcacatttcttccagcaactgggttatgtgttggccacgctgctgctcttcatcttgctgctcatcactgtagtcttggctacacgccatcgtggaggatgcgaggcctctgacaaaaaagctgggaaatcaaaggggaaagatgtgaacatgatggagtttgctgtggccacaagggaccaggctccttataggactgaggacatccagctagattacaaaaacaacatcctgaaggagagggctgagctgaaccacagtcctcttcctgccaagaatgtggatctggataaagagttcaggaaggagtactgacaaataaatgga

SEQ ID NO: 3157386 - DNA, 660 bp, Cricetulus griseus
tcttcctgctcctcaagtacaggagggggcaggtgacaagtagggcagaaattttgcatgcggtcatcagagaatatgaggcatactattctgcgatctttagtaaggccattgactgcatgagactgatgtttgggcttgacataatagaaaggaatccccttgtccactcctactctcttgtccatgctctagggatcacctatgatgggctgcagcatggtttcccaggcataccaaagacaggcctcttgataatcatgctgtgtatcatcttcatagaggacaattgtgtcagcgaggaggccttgtggcgcatattgaatggtttggggctgtatgctgggagggatcatttcatatacggggagcccaggagactcatcactgagcattttgtgcaggaaagatacctggagtgcagacaggtgccaggcagcgatcctcctagccatgagttcctatggggccccagggcccatgcggaaaccaccaagatgaaaatcttgaggttttttgccagcataattaggcgggatcccagatcctacccctacagttatgcagatgctttgagagatgagctgcagaggacctagacctgaatcgcccagcagatgatactactgtcctgagcagcacccattctagcgcactggc

SEQ ID NO: 3157387 - DNA, 2195 bp, Cricetulus griseus
  modified_base (2161)..(2161): a, c, t, g, unknown or other
  modified_base (2172)..(2172): a, c, t, g, unknown or other
  modified_base (2183)..(2183): a, c, t, g, unknown or other
gcagccatgatcacctgactcttttcttgaccttggtgtctgggctggagtttattcgcttcgacctggatctggatgccccttacttagatctggccccctacatgcctgactactataaacctcagtacctgttggacttcgaagaccgtcttcccagctcagtccatggctcagacagcctgtccctcaactccttcaactctgtcacctccaccaacctggaatgggatgacagtgctattgccccatctagtgaggatgagagaccggcatctcagcccctagaggacatgcagggggagactcaggaaccagagccacaggaacgggacacccagttatcactggtcagccaggagcctgtgcctgaacctgtgtcccagcctgaacttggaacccaggaggctctttgcaagctcaagcgagaccagcccagtccatgatcaaaggctgccgggaaccaccctaccctagcatcttgactgatgccaccatggagaagttggcactagccaaatttgtcgccccaggaatccaaatgtgaggcatccacagtgagtgtgcatttctatgggcttgtgcactgggaagaccccatggacaagaccctgggccctgtgtcctgcaactgctcaccccctgagggcaccatcaccaaagaaggcatgctgcactacaaggctggcacctcgtatctgggcaaggaacactggaagccctgcttcgtggtgctcagcaacggaatcctctaccagtatcctgatcgcactgatgtcatccccctgctctcggtgaacatggggggggagcagtgcggtggctgccggagatccaacaccacagatcggccccacgccttccaggtcattctggctgaccggccctgcctggaactaagtgctaacagcgaggccgagatggctgagtggatgcagcatctctgccaggcagtgtccaaaggagtcataccccagggggtggctcccagcccctgtatcccttgctgcctggtaatcacgggggaccgcctcttcacatgccacgaggattgccaaaccagcttctttcgatccctgggcatggccaggctggctgacatcagtgcaatctccacagaactgggcaaggagtactgtgtcctggagttctcccaggatagcccacagctgctccaaccttgggtcatctatctgagctgcacttcagaactggacaggttcctgactgccctgagctctgggtggaaagccatctaccaggttgacctccctcacaaggcgattcatgaagcctccatcaagcagaaattcgaagatgctctgagcctcatccacagtgcctggcagcggagcgacagtctctgccgaggcagagcctcccgggacccctggtgctgaggcgtggctgagcagcactgcaggcaggcaggcaggaaggaggcaggctgaccagtgtgtacactgtgctgtgccaccatgctgtttcggagccaggtgtccacagagtgactagaggtcactgaggcagaaggtctgagccctgtgggctctgtagacatatggtattccctgggccaccaccttagttctcaccatctgttcagggtggccatgagaataatagcatccatttaaaggggagtaaagagaccagtagggtgggtgtaccatcttcctttcctgggccagggtcctgggcagatggtcaggtcccccgggggtcgtgagtgcccagccacccttgttcattttcgaacactgttcccactgcacaggaaaacgggaacactgggtatctgtgcatgtctcctactcacgcatccacccagtgcacagcaagcggcctgcctcacatagcagtcctctgtggctgctaggaggccctgcatgtccacagccctgcctctcctctccctcaaatacagcagagcttgtaggagccagggatcagttggctccttgccaggagcaaaggagaagaatggagaacagagcccatgagcctggtggctactttgacacctgactgacccaggcttggctggagctggcccttcctgaagtctctgttaggtccctccggggagtggggcgagatggattgggccgtttgtttttaaaataaaattgacattatattgaactaaaaaaaaaaaaanaaaaaaaaaanaaaaaaaaaanaaaaaaaaaaaa

SEQ ID NO: 3157388 - DNA, 388 bp, Cricetulus griseus
tttaaaaaaaaaaaaaaaaaaaaaaaaaaagtgttaaataaaaaaaaagtagatcggttcttgtctttggatttcagaggagatgtgtctaaggccagaacactgcctcagtattggtttttacagtttctttttaaaaactgacaggtgctacattcatgtctgctggtctcaattctgccatgctcacatctagccttcagagtggcaaatcatgtgttactttcacttaaacattggtggtgtggagtacctggcacaaggagtaatcctataattgagttttgtattcaccatgtacggatcattctcatctataacgtgccccaaacgcagcttcgttttccaggtaccttgatacagaataaagttttcatcataagccaca

SEQ ID NO: 3157389 - DNA, 399 bp, Cricetulus griseus
attaagctctacctcaaaggcaaagagcctctgcttcaatgggacaaagaattgatccaagaagtcctctttgatgctgtggtgagcgcccctattgaagcctattggaccagcctggccctcaataaatctgagaattctgacaagggtgtagaggtcgccttcctcggcacccgcacaggcctctcaagaatcaacctgtttgtgggagccgaacagctcaccaatcaggactttctgaaggctggagacaaagagaacaatctttaacgcagaccatttccctctctggtaccgacgggctgctgagcagattccagggagctttgtctactccatccccttcagcacaggaacagtcaacaaaagcaatgtggtgacagcaagtacctccatcca

SEQ ID NO: 3157390 - DNA, 1099 bp, Cricetulus griseus
aaaggaactggaggtcagaggagaagtgtttggatgagatgatggaagtagaccggttgaaatcccttgaaaggcaccatgatcgggaaaggaagaggaaggaggaaatggcgaggggaaagacggcacatcttgaatcagataaaaaagaacgaagaggagcgatcgctgaattccgagcaccgcgagcaggagaaggagcagatgctggcgtatatggagcggctccaggaggaggatttgcagggtctggagcggcagcatcaggaaaagctgaagatgcaagctgaaattaagcgtatcaacgatgaaaaccagaaacagaaagcagagcggatggcacaggagaaactggcagaccagaatggtgatggaattcaccaagaagaagatggcccgagaaagcagagtttgaggcgtgagcaggaaaaagtccggagggagaaagataaggagattgcccgcctgagggccatgcaggagaaggcccaagattaccgggcagagcaggacgccttgcgggacaagcgcaaccaggaggttgcagatcgtgaatggcgcagaagaagatggagatagaggaaaagctacgcaaaacccggctggagcaggtggctttcaaggaacacatgttggccgttcaggtgcaacgggaccgagatgagttcgagaggatccttcgggctcagagagagcagattgagaaggagaagttggagcaggagaaaaaggccgcagggtccctacagcatgccaacgagctccggcggcaggtgcgtgagaaccagcagaagcacgtgcagaaccggctcagtaccttcgaagagggccggcgcctcaaggaggaagcccagaagcgccgcgaacgcattaatgacatcaagaagcaaaagctggaagagctgagagcaaccggccttcctgagaaatactgcatcgaggctgagcgcaaagccaacatcctgccgaccacttctgtgaaaatgaaggggagatgttatgggctttgggagggcacagattccgcccagaccctggggcatccacagttgctgctaacctcatttcatagtaacagattaaagctattctattttct

SEQ ID NO: 3157391 - DNA, 844 bp, Cricetulus griseus
agcaggagcaggagctactctcgcagaatgaaggtagacagcagtagagctagggtgaagctgagagacaggaggagatctaatagaagtagcattgaaagagaaagacgaagaaaccggagtccttcccgagacagacgtagaagcagaagtcgctcaagggatagacgagccaatcgttccagtcgcagtaggagtcgagataggcgtaaaattgaggatccacgtggaaatcttagtgggagcagtcataagcataaaggtgaggctaaagaacaagacaggaaaaaggagaggagtcgaagcgtagataaagacaggagaaagaaagaaaaagaaagggaccgtgaacaggacaaaagaaaagagaaacagaaaagggaagaaaaagattttaaattcggcagtcaggatgatcggttaaaaaggaagcgagaaagtgagagaatgttctgtaggagtggttctatatctgttaaagtcataagacacgactctagacaggatagtaagaaaaatgctaccaaagacagtaaaaagcattcaggttctgattctagtggaccaaaatggctgtttacagtgcatttagttccagtatttataaagttgccatttcacagaataaaatagtttggagttctatatagtttactcattagtaacacctggagacaaaatgtgcaatattttttatgtaggtgagctaacacagtgtaactaattgaagacttctgattaatttgtaatagataagttgtataaaattttcataccttaaagtgttttagatcaaacttcaagtgaaatattattttcaaaataaaattttactgaaaaattc

SEQ ID NO: 3157392 - DNA, 265 bp, Cricetulus griseus
gagattcgggtccgtgtccgataccagaagcgacagaagctgcagtttgagactaaactgggcatgaactctcccttctgagccattggccatggtggccgtcattgccctggttcctggggctagagccagactgactcgtctggggagttggtatcatgaatgtttcagggtttgtctttgtgcctcatggcactggaggctcagctccgggcactggagaccctgctgtcttcctgactttttttttatttattttcttact

SEQ ID NO: 3157393 - DNA, 1367 bp, Cricetulus griseus
cgcaggtgcggacagagcccaaagcgaaaggaacacccctggtgttgccgctttcgccgtcccgctcctctgaggcggcgcggcttgctctttgccagctcctttccttccttccccacagaagccgcgagcgtccatggcgggcctggaggttctcttcgcgtcggccgcgcctgccatcagctgcccgcaggacgcgctcgtctgcttcctgcactgggaagtggtgacaaacggctactatgtcttgggcacaggcgaccagccagattccagtgataagaagtcagaactcctgccccctaagtggagcagcaataaagaactgtatgtcctccggtatgagtctaaagatgggaccaaaaaactccttctgaaagctgtgtctgtggagagtgccatgatcatcaatgtgctggaacatggcacacagcaggtggcagacttgactctgaacttagatgattatattgatgcagaagacctgagtgatttccacaggacctataagaacggtgaagagcttcggtctcggatcagatctggaattatcacacctatccatgaacagtgggagaaggctcgtgtaagcagtccccatcgggagttcccacctgccactgccagagaggtggacccactccggattccctcacaccaccctcaccctagccggcagcctccttggcgtgatcccctgagcccatttgctgtcgggggagaagacctagacccctttgggtgtcaaagaggtggcatgattgtggatcccctgagatctggcttcccaagagcacttattgacccatcctcaggcctcccgaaccggcttccccctggtgctgtgcccccaggagctcgctttgacccctttggacccattgggaccagcccatctggacctaatccagaccatctccccccaccgggctacgatgacatgtacctgtgaaggcctcaagaatgtaacatctcagcctcccttgcactctcctggagctgccatcactggccccatcagtgttcctgttcttgtgggctcagggcagaggattctgcccatgtgtttgcaggcttgctggggttatatccccagcccttgtcagaaccgaggcgcctgctgcagcaccccacccagctgcatataggtcccaaggagaaatcagtgtgtgtctatcatcaccagctcctccccacttccaagggagactccggcaacataaaccctccacccgatgcagtcccggtcacagcgctataagaacagaacgcattttggatgttattattaagaaccaaatgtcaatacagaattcatgttgccggtcttccactttgctttttatgttaatgcacaaaacgcttaa

SEQ ID NO: 3157394 - DNA, 2471 bp, Cricetulus griseus
tgccataatgctgtcgaggatcaggcacggcaggagcaggcaggacagatggcgttctggaggtgacttgagccaggaggtggagccagtagaggtcctagaggatgagatggcaggccacagccatatgatgcaacgtgtactgagcaccatgcagttcctgtgggtgctgggccaggccacagtagatgggctaacacgctggctgtgcacattcaccaagcaccaccgcaccatgagtgatgtgctgcgcgcagagcgctacctgctcacccgggaacttctgcggggtggagaggtacaccgaggggtgctagaccagctttatgtgagtgaagccgagaccacactgccagcaggtcccatggaaacccgtgatggacccagcacagcctcaagtggactgggagccgaagagcctttaagtagcatgacagatgacaccagcagccccctgagcacaggctaggtacccccaaggatcacatccaagggaaagggaatgttaaatccaaggatgggatccaggagcccctagaggaccttaagccccagaacacgaggcacatcggcatacgcttcaggaggaggaaaaagactctaagacccaaaggagcagcagctacggaggctgaggaagaggaggaggaggaggaggaaggaaaagaagctgcagggagaaaagcccacatcacactcaaggaggattgaaggttcaggaaagaatgaaggcagctgggcgccggctgcagagcttttgcctgtcactagctcagagcatatatcaacccctgcggcgtttctttcatgacattctgcacaccaagtaccgagcaagccactgatgtctatgttctcatgttcctggctgacattgttgatttcatcatcattgtctttggtttctgggtcttttgggaagtcactctgcagccacggacattgcgtcctcactgtcagatgaccaggtgccggaggccttcctgttcatgctgctggtccagttcagcaccatggtcattgaccgtgccctctacctgcgcaagactgtactgggcaagctggccttccaggtggtcctggtggtggccattcacctctggatgttcttcatcttaccagctgtcactgagagaatgttcaaccagaatgcggtggcccagctgtggtacttcgtgaagtgcatttactttgccctgtctgcctaccagatccgctgcggctaccccacccgtatcctgggcaacttcctcaccaagaagtacaatcatgtaaacctcttccttttccaggggttcactgttacccttaagttgggaggctacgagccgctgttcaccatgagcgctcaacagccatctatagtgcctttcacgcctcaggcctacgaggagctgtgccagcagtttgactcctacccactagccatgcagttcattagccagtacagtcctgaggacatcgtcactgcacagatcgagggcagctctggggcactgtggcgcattagccccccaagccgggcccagatgaagcaggagctgtacaatggcacagctgacattacactgcgattcacctggaatttccaaagggacctggccaagggtggcaaggtggagtataccaacgagaagcacaccttggagctggcccccaacagtacagcacggaggcagctagcccaactgcttgagggcagacttgaccagtcagtggtcattcccaacctcttccccaagtacattcgtgctcccaatgggcctgaagccaacccagtgaagcagctgcagccagatgaagaagccgattatcttggtgtgcgcatccagctgcggagggagcaagtgggcacaggggcttctggggaacaagcagacacaaaggcttccgacttccttgagtggtgggttattgagctgcaggactgccaggctgactgcaacctgctacccatggtcatcttcagtgacaaggtcagcccacccagccttggcttcctggctggctatgggattgttgggctatacgtgtccattgtgctggtcattggcaagtttatgcggggcttcttcagtgatatctcacactccatcatgttcgaggagctgccatatgtggaccgtatcctcaagctgtgccaggatatcttcttggtgcgggagacccgtgagctggagctggaggaggagctgtacgctaagctcatcttcctgtaccgctcaccagaaaccatgatcaagtggacacgtgagaaggagtaggagcccagctcctgggcaccgggaatgaaggagctgccccagggcagcatggccaccagggctgacagagctccttggataggagtgtagctgcctgaggccacgagctgtgacacatcctcctggcccatcaagccctgatgatgctgctgtcaaagggatgctgtgtccctacctgttgcgtccccacctattgggctgggggcc

SEQ ID NO: 3157395 - DNA, 360 bp, Cricetulus griseus
gccaccaagaagagtgtggcagagagcatgctggatgtggcgctctttatgtccaatgccacgaggctgaaagtggtgctggagcaagggccatcctcgcagtactacaccaccctcatcgccctcatcagtgtctctctgctcctgcaaatagtcattggcattcttcttgtggtcattgccaggctgaacctgaataaggtagaaaaccaatggcgtctaaaccagctcaacaatgctgccaccaccttggtcttcattactgtggtcatcaacatttttatcactgcttttggggcacacaagacaggctccatggctgccaggacctccagcaatcctgtttaattcctacctagg

SEQ ID NO: 3157396 - DNA, 878 bp, Cricetulus griseus
gttctgcagatcctgtattgcgaccagtataaagaataacaaatggacatgtccatactgccgggcatacctccttcagagggagtgccagcaactgacatagccaaaagaatgaaatcagaataccagaactgtactgagtgtgggactctggtttgcctcagtgacatgaggacacacataaggacatgtgagaaatacatcgataaatatgggccactgcaagaacttggcgagacaacaacaaggtgtgtatgtccattctgtcagagggaactggatgaagactctttgctggatcattgcattacccaccatagatcagagaggaggcctgtgttctgcccgctttgccatttactacctaatgagagcccaagtaccttcaatggcagcttaattagacatttgcaagtcagccacactttgttttatgatgatttcctagattttgatataatcgaggaagcccttatccgaagagtgttagacagatcacttcttgaatatgtgaatcactcaaacactacataattttataagtatcaagggacgattcacttgtaccatttaagatgctgcttgaaggactggagggaaattgtcagtgtttgatgacgaaaaatgtactacagtgttacatgcttgtctttgttatgttgcattcaaaatctgctttcgttttggtttagatctgcctttacattcttgagtttcttagacatttaaccacatttaaccataggctgttaccagatggaagagacacagacggagtaatgtgatgaaagagctctgtgtgcacattggtgatactgtgcataattctacgtgttagtgactaccatcatggctaggcaagataaccaatctctgtt

SEQ ID NO: 3157397 - DNA, 305 bp, Cricetulus griseus
ggactatgagaaagccctgttctttccctgcaaggctgcagagctggtcaacgactatggcaaaggctggagcctcaagtatcgggccatgagccagtaccacatggctgtggcctaccgccttctaggccacctgggcagcgccatggagtgttgtgaggagtccatgaagattgccttgcagcatggtgaccgaccactgcaggcactctgtctgctctgctttgctgatatccaccgaagccgtggggacctggagacagccttccctaggtatgactctgctatgagcatcatgaccgaga

SEQ ID NO: 3157398 - DNA, 818 bp, Cricetulus griseus
ctgctgacctatgtgtccctcgattgaatgaaggggaccaagtggtactgattaatggccgggacattgcagaacatacccatgatcaagtagtcttgcttattaaagctagctgtgagagacattctggggaactcgtgcttctagtccgtcctaatgctgtatatgatgtagtggaagaaaaattagaaagtgagccagacttccagtatattcctgagaaagccccactagatagtatccatcaagatgaccattctcttcaggagtcaatgatccagctagctgaggggcttatcactggaacagtactggcacagtttgatcaactgtatcggaaaaacctggaatgacaatgtcttgtgccagattacctcagaacatttaccaaaaatagatacagagtatatttcgccttatgatgctacacgggtaccttttaaaaggtaatagaagactacatacaatgacaaactatataaatatggaaattccttcttcaagtattataaatcagtacattgcttgtcaagggccattaccacacacttgtaaagatttttggcaaatgacttgggaacaaggttcctccatggttgtgatgttgaccacacaagttgaacgtggcagagttaaatgtcaccagtattggccagaacccacaggaagctcatgctatggatgctatcaagtcacctgtcactctgaagaaggaaaccctgcctatatcttcaggaagatgacactgtttaaccaagagaaaaatgaaagtcgtcaactcactcagattcagtacacagcgtggcctgaccatagga

SEQ ID NO: 3157399 - DNA, 492 bp, Cricetulus griseus
caatctccctgaccaggccccctccacccgatgctcagatgaggaccttttggacactccccctttcccaacggacacctactccagacctcaatgaccctttcttttccttcaaagtggatctggggatttcacttctggaggaagtcctacagatgctaagggagcaattccctaatgagccccacttctgaccccccccagagggcagagggaactggggtgactggagcacatgccatcactctagccacattttaaggattgttttaaaattatttttttgtgtgtgtgtgtgtgcatgtacccaagtgtatactggtgcctacagaggccaaaggtgttagatgcccctggaactagagttccaggtagttgtgagtcacctaatatggttgctgggaattgaactcaggtcctctggaagagcagtgtgtgttaattgatgggccatctttccagcccacctagccatatttaaaccaacagcca

SEQ ID NO: 3157400 - DNA, 1968 bp, Cricetulus griseus
ggaaggcgctggcgggcagtgatggcggcgggtgatggggacgtaaagctaggcaccctggggagcagcggtgagcgcggcggcgacggcggcgacgggagccctggcggcgcgggagccacggcggcggggagcagttgggcggcggcgctgctggcgacgggctgggagatgctgctgaacgtggcgctggtggcgctggtgctgctgggggcctaccggctgtgggtgcgctgggggcggcggggtctgggcgccgggcccggggcgggcgaagagagcccggccgccacgctaccacgcatgaagaaacgggacttcagcctggagcagctgcgccagtacgacggggcgcgcacgccgcgcatcctgctcgcggtcaatgggaaagtcttcgacgtgaccaaaggcagcaagttctacggtcccgcgggcccatatgggatctttgctggcagggatgcctccagggggctggcgacattctgcctggataaggatgcacttagagatgagtatgatgacctctcagatttgaatgccgtgcaaatggagagtgttcgagaatgggaaatgcagtttaaagaaaaatatgattatgtaggcagactcctaaagccaggggaagaaccatcagagtacacagatgaggaggacaccaaggatcacagtaaacaggattgaactttgtgaacaaccaaagccaggggccttcagaactgcaactctcactcctttcagagaatgtccagtctttgggtgtggtgcacctgctgtgagaaacacttcaccagagtgtacactatgatgtgcttcactgtgaagatctgaatatgaggcattcattatttgcgctgccggatggatctgttgcagttgtttgtaatgtctggtgggcttcatcatcctgaaaaggagacagggccttcttaactgcaagaaagtcaccaggttatttttaccccctcacctccttcctctctctgccttcctgttccccaccccttcaatatctctcttttaaaacaaaaaagtatcaaagacaaccagataggtatttgctactcaagtgtacagatctctggaaacagcaagggatcctgtttcacaggctgttttatttgtgttaagggaagaaccctgggcaggggattggcggttacacattcgtttaagaagtcaggctactgaaaaattaaaggtgaattcccaaacttttttttctgggcttcgtcagggaagagggaaaaaaagtttccttctaagaaagatttggaaattagagggacttccagtggcttgaagtcagcaatttcccagctaagatcatttgaaatcagttttatttccttcccttccttccgctaggtcaaatcaatattaattgtgccttatttcacttccataaacttgaattatttttaggaaaagcccctctgtgaattcagaagtcactacaagcagcattgagactgaggttgatgtcattctgtatgtagaatgtaagaggaatactcagtgttaactgccatgtgttaatacacaaacatagctagcattgtgatggccaaatgcatcccctatgcttttttcttttccaagaaaaattgaaaaatcaacagcttccccaacagctgcctaattttaggagtctgaccctcacatgtcactggtgtgggtgcgtggggccgtggtatgaatgtctgtgtgggtgagtctgatgtgtgtgagagcaccttgggagggactctttctgcgatgctgtaaatacgagtaccgttttaataaagcatgtacaataaaccaaataagctcgagttggactctaaatgtaaatgcagagtggtgagccagtgtgtcatatactactaagactgcatttgattcaggatgaagaaaaaactcttggaaatgaaaatcagacactggttagccaagctgtatatgtaccatgttcaatgtaacttc

SEQ ID NO: 3157401 - DNA, 413 bp, Cricetulus griseus
ccatctgtaccattatccaatttgtgctctgtggaatttggctgagcatctctcctccctttatttactcagattttcactctgaacatggccacatcatcattgtatgcaacaagggctcaattgttgccttctactgtgttctgggatacctctgctgcttggcacttgggagctatactatggcttatctgtccaggaacctacctgacacattcaatgaagccaagttcttgtcattcagcatgttggtattcttcactgtttggataaccttcctccctgtctaccacagcacccaggaaatctcatggtggccatggaagtcttctctattttggcttccagtgcagggtttcttggctgcattttgtccccaagtgctatattatttgtcaagaccagataggaac

SEQ ID NO: 3157402 - DNA, 923 bp, Cricetulus griseus
cgccaccgcctcatgcactgtgtaggttttgagagtattttagaagggctttatggaccacggctacgaagagacctcagtttatttgaagactgtgaaccagaagagctgactgactggtctatggatgaaaaatgttcattttgtaacctacagagagaagcagtcagtgattgtataccatctcttgattcttcacagtcaacgccaacagaggagctatcatctcagggccagtcccacactgataagattgaatgccaagcagaaaattacctaaatgcactctttcgaaagaaagatcttcctcagaactgtgatcctaacattcccttagttgctcaggaattaatgaaaaagatgatacgtcagtttgccattgagtacatttcaaaaagtggtaaaattcaagaaaatagaaaaaagtataccaaatgaaccaagcagagaactgccttcaggatgagcaggaacgccccttagacctcactgtgactcgaacgcaagagcaaactgctcagcaaggggatggagtgttagatctctctacaaagaaaaccagcataaaatctgaagagtcgcccatatgtgatccttcttctgaaaatgcagttgctggagtactacaaatgaaaactgatgagaaagtggatttgtctgatgggaacacagcaagctgcccattgagccccattaagatgtgccttaatcatcctattgaatggaatctaacagcagcatctctagcaagctgtacagttcataaccaaaatctcaaaaatgaagaaaaatagtctgcagtccttgcactatctttattttgtatgtcaatattctctcatgaaaaccaattgatcctaaaatatttctagtcctgtgatctgtctttatattaaatcattagcattaatcattttattata

SEQ ID NO: 3157403 - DNA, 280 bp, Cricetulus griseus
cgacgcgacgcactagcagcggagcaccgattcttggcggactctcgggcgctgctaggagcagcgtcactctttacaccggaaagctggcgggtactatggggaaaaacagaacaagaagaaagtggaggaggttctagaagaagaggaagaggaatatgtggtggaaaaagttcttgatcgacgagttgtcaagggcaaagtggaatatcttctaaagtggaagggtttctcagatgaggacaatacatgggagccagaagagaacctggattgccct

SEQ ID NO: 3157404 - DNA, 1668 bp, Cricetulus griseus
ttggtatctgttgatgaagaatcatatggtgcactttcatgctccttcatttaagtttctttctaattcatggtatataccaaaggaagacaaagcagttgatacatcagatttagaagttgcagaagatcccatggacctccaaggaatagacctgattacagcagcgttactgttttgtctgggagattctccaggtgggaggggtatatctgatagccgcatggttgatgtttatcacattgactttgggacacagactttctcacttccatctgcaatattagctacaaatacaatggttggagaaatagcttcagcttcagcatgtgatcatgccaatccacagctttcaaatccaagcccctttcagacacttgggctggatttagttttggaatgtgttgctaggtaccagcctaagcagcgttcgatgtttacctttgtatgtggacagttattcagaagaaaagaattttcttcccattttaagaacgtacatggtgacattcatgctggactcaatggatggatggaacagaggtgtcctttggcttactatggttgtacctattctcagcgtagattttgtccatcaacacaaggagcaaagattatacatgaccgccatttaaggtcatttggagttcagccatgtgtatctacagtattagaagagccttcaagaaactgtgtgttgggattacgtagtgaccatctaagtagtctcccatttgaggtactgcaacatattgcaggctttcttgatggcttcagtttatgccagcttgcatgtgtatccaggctaatgagggatgtttgtggcagtctacttcagtctcgtggaatggtaatattgcagtgggggaaaagaagtatccagaaggaaattcatcatggcagataaaagaaaaggtatggcgattcagtactgcattttgttctgttaatgaatggaaatttgctgacatcctaagcatggctgatcacttgaagacttgcagttacaatgttatagagaaacgggaggaagcaatcccattgccatgtatgtgtgtgactcgagaacttactaaagaaggacgttcactgcgctcagttttaaaacccgtgctttaaaactgtatttacttgcacatacatgcaagcacctggtatgagttctttgtaatatgtgacacttattaatgtattaaagactacaactagaaaactttgattcagatttttcctgcatagattttctttccacagaacacattcagttgtttaaacactgccataagattgttatgaagtatttctgatacttttcttttgtaattattgatcatatgtgatctccagtacttacataaaggcacaataatgacttcatgcatttaaaacaactcacaaaaatgttttcatcctcttttcttactagtcttatgctgaaactgatcatatgcagttctttttcattaaattccttatctgaggagtcatgacacaatgtattatatgacagattaagtaaaaacaaagcaagcctatgaatttaacttgaaattttcatggtgttttatattttcctaggtatctaatgtttgaaaagaaaatatacctcactataagtttgaattttgcatattgtttgaataaacttcaaatattcagaaataaaaa

SEQ ID NO: 3157405 - DNA, 783 bp, Cricetulus griseus
ctgggacatggctgagctcctgcccaaccagagccacagcaatcagtcagatggcaaagaccaggcctttggggcctggcttctgaccgccaatggcagtgagatccacaagcatgtgcatttcagcagcagcttcacgtctattgcttccgagtggttttaattgccaaccgatcttacaaagtcagtgcggccagctcctttttcttcagtggtgtgtttgttggcgttatctcctttggtcagctttcagatcgcttcgggaggaaaaaagtctacctcacaggagccaccggcctggcctcaggcctcctgagcctgctgttgccagagactctgaacagccctttgctggagacattttcggaccttcagatgtactcatataggaggttaggggaagaagccttgtctctccagaccttggatcctccacaggccctggacaaggccagcaccttggggagcgaaagtgaggaggaggagttctatgatgcagatgaggagacacagatgatcaagtgaagagctccacatccctgcccagaagcaaagcatcattatcatgagtgccgtgtgtagctgtcaggaaggttatggaactccctgcagcatcatatctgaaaatctcagcaaagtgtgccctacatccccaaactgtggtagtcctgcttctctcctctcttggaaatggagattggctctccttagaaaaggaagaaaagagcttccagaaacacttgattcttgtcaaatacagtgtttaaaataaagaagtaaatt

SEQ ID NO: 3157406 - DNA, 1998 bp, Cricetulus griseus
ttcagagggcgctcaaggagatcactacttttgaaggttgcaagatcaacgtgactgttgccaagaagaaactaaagaacaagtccaaggaaaagaggaaaaatgaaaattcagagtccccaaagaaggagccaaagcccaaaaaagccaaggtagcagataagaaagccagattaattatccggaacctcagctttaagtgttcagaagatgacttgaaaacagcatttactccctatggaactgttctggaagtgaatatcccaaggaagccagatggaaagatgcgtggttttgcttttgttcagttcaaaaaccttcttgaagcaggaaaagctctcaaaggcatgaacatgaaagagataaaaggacggactgtggctgtggattgggctgtagcaaaggacaaatacaaagatacccagcctgcttctgccccagatggaaagaacgtgagcagtgaacgtgagcacaaggactcaggtaagaagaatggcagggtggaagagcaagaagaagaagtgggagcagtgctgaggaacaagaggatgaagatgccccagtctcaaagaaaagaagaggaagttgccctccgatgtgaacgaagggaaaactgttttcatcaggaatctttcatttgagtcagaagaagaagaaccaagggaggtccttcagcaatttggtgatcttaagtatgtccgaattgtcttgcatccagacacagagcattctaaaggttgtggatttgcacagttcatgactcaggaagcagctcagaaatgccttgcagctgcctctccagaggctgagggtggtggacttaaactagatgggcggctgctcaagattgacttggctgtgacccgtgatgaggcagcaaagcttcagacaaagaaggtgaagaagccgactgggacccggaacctctatctggcccgagaaggcttgatccgtgcggggacgaaggctgccgagggtgtgagtgctgcagatatggccaaaacgagaacggtttgagctcctgaaacatcagaaactcaagaaccagaatatctttgtctcccagacccggctttgcctgcacaatctgccaaaggccgtggatgacaaacaactaaggaagctgctgctggacgccactcgaggcgagaagggcgtgcgcattaaggagtgtagagtgatgcgggaccttaaagcagttcatggaaaaacgaagggtcagtccctgggctatgcctttgcagagttccagaagcacgagcacgccctcagagccctccgccatatcaacaataacccagaaatctttggctctcagaagagaccgatagtggagttctctttagaggatcgaaggaaacttaaagtaaaggagctgaggatccaacgcagcctgcaaaaaatgtcatctaagcctgtaaccggtaagccccaaaaggagcaaaaagaacatgggaaagacaagcaacagaaagcagtgaggcctacacagaatcccagccaggcttctggagagcagaaagggaaggcccgccccacctcgtggacagggttccagaccaaggctgaagtggagcaggtggagctgcctgatgggaagaagagaagaaaggtcctggcactcccttcacaccgaggccccaaaattaggttgcgggacaaaggcaaagtgaagtcccttcctcctaagaagtcaaagccccagacaggccagcggaaacagaagcagcagcagttaccttctttgcaggcacctaagaagaaagctaaggaaaataaggcagaagcccacttcaaccaactggttgaacagtataagcagaaattgttgggtccttctaagggaccaccccttatgaagagaagcaagtggtttgatacctgatgccgcctgcagactgcagaaagctgtgtctttcacagaggggaagtgcatcccgatgataccccattcttggggactctgtagggtgtgtacattcttggtcccttctccag

SEQ ID NO: 3157407 - DNA, 1289 bp, Cricetulus griseus
cgcgagctgttgaaaggcagttggtgtgggttcggttacttggtccggctcggcggccccggcccagccccatggctgaccccgaggaatttcgggcttcgccgccgccgccgcctccctcgtctccgtcttcaggcgcctcttcgtcgtctctcagcatgccagtgagtttgggctggcggagtccgagtcgaacccacgccccaacggtggaccctctggagcaagtggagctgcagatcggagacgcagcattttcattaactaaacttcttgaagccacatctgcggtatccgctcaggtggaagagcttgccctgaaatgtacagaaaatgcacgcttccttaagacgtggcgggacctcctgaaagaaggctatgattctttgaaacccgacaactgacttgcagatgtggttggttaatgactcacacataagatatttgcacatggaccacatttatggggctgcctgtctctagacatttagactgagaatgaaatttttcttggtattcttaacttctgagagagcagaatactgaaggcttgtttgttttcctttctctgttaggtcagtgtttaccttaaatactttctgccctctacacttttgcagactcctttatgggagctaattccatcagtaagaaatggattttattagtgcctcagtgcaatcagatcattatttggtttttgagaagacgccaaggttggctgagtttggagttgagcttggtttgttccctaagggtgggggtggctcacacctttaatcccaacccttgggagacaggcaggcagatttctgtgagtccgaggccagcctggtctacagagtgagttccaggacacccagaacggctacacagagaaactctgtctcgagcccccccccccttacctgtgctgtattttatgtaatttgtgccatctgttatcaagccatgtactaccttgatacatatgacctttaagtatctttgatgtgatgtctgtgtagatacagtgatgtaaacaaatttctcttaagtctcacagtgaagctgtgataggggacaaacagatggacaaagactagtttcaacatagtcatagttaatgatttttttaattctttttagttaagatcacaaacatgtatggtgtaatttttgtaccaaagagatacttattcccgtataagagaaatacttatatattctgagaattgcaatttaaaaatgtataaaaataaatattacaagtaaaaaaaaaaaaaaaaaaaaaaaaaaaaaaaaaaaaa

SEQ ID NO: 3157408 - DNA, 471 bp, Cricetulus griseus
ctgtgaagcatgtacatgtccatattcttcccaggaaagcaggggacttccgcagaaatgacagcatctatgatgagctccagaaacatgacaaaagaggaggaggactccccagccctttggagatctgaggaggagatggctgcagaagctgaggagctgcgtgtctactttcaggcatgaaagtaactcaaacaaatcccaaggcataaggaaatgggcctcgctcttctggactctgcagcattggaaatgaagctgagcagactttattacatcccatggttctgcagccttttgcaaagcattttattgcacttgtggaagccactggggttatgtttcaatcacgatgactgacaggctaacttcacaaacagtagcaatgacagcctgccacagtttctcagttatgttacttagaataggaccttttcaaactgtcccttagcctggatgaaaataagtggt

SEQ ID NO: 3157409 - DNA, 670 bp, Cricetulus griseus
cacttacctcagactgacaacaaaagaagattatcatcacagaggacggagagttcaaggccctgcaagagtggatcttggagactgatggtgtgagcctgatgcgggtgcttagcgagaaggatgtggaccctgtgcgcaccagtccaatgatattgtggagatctttacggtgctgggcattgaggctgtgcggaaggccctggagcgggaactgtaccatgtcatctcctttgacggttcctatgtcaattatcggcatttggctctcttgtgtgacaccatgacctgtcgaggccacttgatggccatcactcgccccaacctctcccaaatactcacctacaagccctaaatattcacctacttctcccaagtattctcctacccagtcccacctactcacctaccacaccaaaatactcgccaacctctcctacatactcgccaacctctccagtctacaccccaacctcccccaagtactcacccaccagccccacctactcccccacctctcccaagtactcacccaccagccccacctactcccccacctcccccaagggctccacttactcccccacctcccctggttactcacctactagccccacctacagcctcaccagcccagccatcagccctgatgacagtgatgaggaaaact

SEQ ID NO: 3157410 - DNA, 2116 bp, Cricetulus griseus
gagcgcagccatggagtctgtatccttcgaggatgttgctgtgaacttcaccccagaggaatgggctttactgaattcttcccaaaagaggctacacagagatgtgatgcaggaaaccttcaggaacctggctgccatagcaaaaaagcaagaagaccagactcttgaagatgactatgaatatttaaggaaaattcttcccattgcagttcagactggatacaaaccatgtgaaaatcaagaatatgcagagaagccaggttttagtagacacagttatgttcaaatccctgtaaagaatacacgatacagaagaatcttgtgttttaaagcagtgtgggaaagactttttgactctcactgatactcaacagcacataacacataatggacatgagccatatatatgtaaagtatgtggtaaagcctttctctcttccagttctttcttgacacatgaaagaacacatactggagaacagctttatacatgtaagcaatgtggcaaaaccttcacttattccagtggccttcgccgccatgaaaggacccatagtggagagaaaccctataaatgcaagcaatttcttagagaaacctatatatactaagcaatgtggaaaagcattcgcttgttctagtgccttgcgaagacacgaacgaattcatactggagtgaaaccttatgaatgtaaggtatgtgggaaagctttcattgctttcagtactcttcaatgtcatgaaaggatccatagtggagagaaaccttatgtatgtaagctgtgtgggaaagcattcagttgtcaaggttctcttaaatgccacgaacggattcatagtggagagaagccctatgcatgcaagcaatgtgggaaaaacttcacgtatcacaatgaaaaaacatgaacgaattcacagcggattaaaaccttgtttgtgcagggtgtgtggaaaagccttcacgtttcatagttcccttcattgccatgagaggactcataccggagagaaaccctatgtgtgtaaacagtgtgggaaagcctttatgtatcacagctctcttcgttgccatgaaagaattcacagcggagagaaaccctatgtgtgtaagttgtgtgggaaagccttcacgtatcacagctctcttcgatgccatgaacgaatccacaggggagagaaaccctatgtgtgcaagttctgtgggaaagcattcgctgatcacagttcccttcgatgccatgaaagaattcacactggtgagaaaccctatgtatgtaaacaatgtgggaaatcctacagtactcatggttctcttcgataccatgaaaagatgcactgtgtgtaaatacattggaaaaccttctctttgaatacgttttaatcttattaactaaaacaacagcaacagccaaatatggttgcaagcaatgtgaataagcctgaacatgttctggttcccgtcaaaagaacactaatggagacacattggagcgtatctctaaatatagaacaaaggaaacctccattattgtaagttctttgtagcaaacatgatggcataatgaatttaacctgtgtcaatgtaaagcatgcgggattatctctacttgttcagttctcaaaacaacactaaaggggatggggagatggctcagtctgtatagtgcctgccaccgaagcatgagatcctgagtttaaatcctcagcacccatacaaaagccagacatggtggcacatgcctgtaaataatcccagtgctggggagacagagacaagagattcctgagcttgctggttagctagtcggtggcgcacgcctttaatcccagcaatcaggaggaagaggcaggtgcatctctgtgagttcgaggccagcctggtctctagagcgagtgccaggataggctccaaagctacacagagaaaccctgtctccaaaaaaccaaaataataataataataataataataataataataataataataataataataataaaacaaaaaaaaaaaaaaagttttccttatgtaatggaatcctactaactaatgctcttttcctacataaactttatcatatttatggtacagatttttatcataatttcccct

SEQ ID NO: 3157411 - DNA, 2309 bp, Cricetulus griseus
ggttacggtctctggtcaaacagttagagcgaggggaagcctctgtggtcgatcttaagaagaacctggaatatgcagcaacagtgctagaatctgtgtacattgatgaaacaaggaggcttctggatacagaggatgagcttagtgacattcagtcagatgctgtgccttctgaggtccgagactggctggcctccaccttcacacgacagatggggatgatgctaaggagaagtgatgagaagcccaggttcaagagcatcgtccatgcagtgcaagctgggatatttgtggagagaatgtataggcggacatcaaacatggttgggttgagttatccaccagctgttattgatgcgttaaaggatgtggacaaatggtccttcgatgtcttttctctcaatgatgccagtggagatcatgcgctgaagttcattttctatgaattactcactcgctatgacctgatcagccgttttaagatccccatttctgcacttgtctcatttgtggaggccctggaagtggggtacagcaagcacaaaaacccttaccataacctgatgcatgccgctgacgtcacccagactgtgcattacctcctctataagacaggagtagcaaactggctgacagaactggagatcttcgcaataatcttctcggctgccatccatgactatgaacacaccggaactaccaacaatttccacattcagacccggtcggatccagctatcttgtacaatgacagatctgtgctggagaatcaccacttgagtgcagcttaccgccttctgcaggaagacgaggagatgaatattctggtcaacctctcaaaggatgactggagggagtttcgaaccttggtaattgagatggtaatggccacggatatgtcctgtcatttccagcaaatcaaagccatgaagacagccctgcagcagccagaagcaattgagaagccaaaagccttatctctgatgctgcacacagcagacatcagccatcctgcaaaagcatgggacctgcaccaccgctggaccatgtctctcctggaggagttcttcagacagggtgacagagaagcagagctggggctgccattttctcctctatgtgacagaaagtcaaccatggttgctcagtcacaagtgggttttattgacttcattgtggagcccaccttcactgtgctcacggatatgactgaaaaaattgtgagtccattaatcgatgaaacatcccagactggtgggacaggccagaggcgctcaagtttgaacaacatcagtgcctcagatgcaaagcgaccaggtgtcaagagttctgggtcagaaggaagcgctcccatcaacaattctgtcatccctgttgactataagagttttaaagccacctggactgaggtggtgcacgtcaatcgggagcggtggcgggccaaggtgcccaaagaagagaaagccaagaaggaagctgaagagaaggctcgcctggctgactagaaggaaaagcaaaaggaaatggaagcccagttcacagtcagtgtcaccaggggcatcttttctgtagtggtcagcttcagccattgcctccgagatgctcatgcacatccttcgtaagagctgatgtctatgcttgcaaacgcactcacagagaagctcacaagagcccggtgactggaatggcttctaagcaggtgctcaggaagcacaaccctgcttacctttgctcctctgtgtgctctgtactggggaaggggctgtgtacactgctatccttgtcttcaaataggtatgtgtcacatgtgtgctgatataaaagtaatccaagattaatatatacaactttacattgaaaatctacagccatacctatcatctagtgatggattctagaaacagactatagagaattcttccttttttcttttttctgtcacagggttttctcctctggatgttaggttgttaccatgagtctgtagactcacttccttggtgtgaatgagtctcaggcaggcagaatgcagctttaagcttgcatggatgttttgcagggctagggggatggccatccatgctaaggaagagcattctgttccccatggtgctgctgcttcatgctacaacttgttcacacactgtaacatcacacctccaaaaaaatcaaagcatgggatgcgtgtcaaacagagagtgccaaactgctgttacaaacattaaaatatgtctattagtaaatcttcattgcataaaagagcctgataatccttcatgtctaactctccctagcatctagtcataaat

SEQ ID NO: 3157412 - DNA, 788 bp, Cricetulus griseus
acaaaagtttctattttccaacattcagcagaattgatcaagcatctgataaaagctggggtgaattacactctgcaggtctatccagatgaaggttaccatgtctctgacaagagcaagcatcatttctacagcacaatcctcagattcttcagtgattgtctaaaggaagaaatatctgtgctgcctccagaaccagaagaagatgaataacagaccctattagacacagttgaaggggatattgaggctcaatgaaaccgaaccaagagactgtcatgttgtagacactccagaatttcaagggcagcttgaggagatgaaactggaacagcacactcagagagtgaactagaacttgaagacagcatcatggatctcagcaccttccaaaagttcaggcagttgtcagtagatagaatacctttaattcaacacacaggagtatatgtctcacaatataatatatatatatatctatacacgcacgtgtgcatatgcagacagtgagtctatctttacatgttactcatgctacaaagggtacactttaatgaattacaatggatactcttttacaggctgcaatggacgcttcctttaatgagccaaatatgatgagacccttttgtttccaattcagagtctagtgattgctttcctataaatgtttgggttgtgtttggtattgttttagtggttaatagttttctagttgcagtttactttttgtaatatgtatatcttgtcacatgtaaattagatacttaaatattaaattatagttt

SEQ ID NO: 3157413 - DNA, 487 bp, Cricetulus griseus
ctccttctggtccagtgaatgggtctcagatgacatctctttacctggcgctaccagcctgaagggggccgagatgccatttcgatcttccactatgccaagggacaaccttatatcgacgaagtgggtaccttcaaagagcgcatccagtgggtaggggaccctcgctggaaggatggctccattgtcatacacaatcttgactacagcgacaatggcactttcacttgtgatgtcaaaaacccaccagacatagtgggcaagacttctcaggttcacactctatgtctttgaaaaagtgcccaccaggtacggggtggtgttgggagccgtgatcgggggcatcctcggcgtggtgctgttgctgctgttgctcttctacctggttcggtactgctggctgcgcaggcaggcggctctgcagaggaggctcagtgccatggagaaggggaaatttcacaaagtcttccaaggactcctcgaagcg

SEQ ID NO: 3157414 - DNA, 285 bp, Cricetulus griseus
cattgttggaagcttaccaagagattttgaattatccaattatgactgttatggaaaacccattgaagtcaacaatggacttgggaaatcacaggctaagaacaacaagaagcctcctcctgccaagccggttattccaacagcagccaagcgaattgacctttatgcaagagcactatttccttttgtttcttgttcttcaatgttatatattggtctatatatttatgatgaaccatttccatttgtatgaaatacaataccatttcattgtgaccaatgcaa

SEQ ID NO: 3157415 - DNA, 568 bp, Cricetulus griseus
gcccgcgcgcacggtggctgcagcagctcctcgcgtccctcccatcgcgtgcgcccatggcggtcgcgggccagttgtgcctgctctacctgtccgcagggcttctggcccgtctgggcgcagccttcaacctggacacccgtgaggacaacgtgatccggaaatcgggggatcccgggagcctcttcggcttctcgctcgccatgcaccggcagctgcagccggaaggacaaagcggctgtattgccctgtggctcaagactctgccattggataactgtgtctctgttgaaagttctgtcttaaatgtgcaatagaaggtgatgttgccatcttgccttctctctccatttccccagaagtgagaatccttgctgatgccaaacgcacagaggttcccttctccctcgtcactaaagcacaggctcggcagacttgaatgctagttacacttgtttatatataatatatttttttttcttcaagccatcttgctattgactgataggccaaagatacttcaggtttgtttaggcaatcagaatgagaacttgggaggtcgtttgtt

SEQ ID NO: 3157416 - DNA, 733 bp, Cricetulus griseus
aggagagtaaagattgttctgtcgcccttaacacagtgtgaaggctcttgaagaacttgcaaaagtgagtgaagaattatgcacctttcaagaggaaatccgaaagcgccctaaccacagaaggatgaagtcagattctgttctccgggaaatgccaaatgcaatcagtgcacctcatggggaccactttataatagccagggcattcttccaaccaatttggagaaagaaaaacagaaaaagaatcagagctgggccaacagattccaaaacaattcaatgaaaaactgtggaactggtgtaattgacttacaaagatgtgaaattccaccaattcctcctccaagaagtacctctcgaaatttccccagctcatactctatcttgatcttcatgtgaaaagtgactttcttcactcagtgacacagacagacccacgtagaagttacaactgcaatttagaaaggactccaaggaatgaaaagctggcagcaaagattgatgaatttaacaggactgtatttaggacagacagaagttgtcaagcagtacagcaaagtcaaagctattcaaaaccacctgataatctcaatctctgtgacagctctcctgctgataaagacgacgtatcagaaagtgacgatgggactaatggcttgaaagctagtgaccacatacctgtgcccatggaaaaagtgttcagttttttttgtaaaataaaaatgctaacagg

SEQ ID NO: 3157417 - DNA, 203 bp, Cricetulus griseus
ggagccggtgcagacttcgtcatgctgggaggcatgttctcaggccacactgagtgtgcaggggaggtgatcgaacggaacggacagaagctgaaactcttctatggcatgagctcggacacagccatgaagaaacactcgggaggagtcgccgagtacagggcctctgagggcaagactgtggaagtgccttacaaagggga

SEQ ID NO: 3157418 - DNA, 441 bp, Cricetulus griseus
gctagagcggctgaccagtctctacaaggggggataagccggaagtcctgcctactcctcccgatggactctgtcttttctgtaatttcattttgcagtgaggctgaagaaaatttgattaaagactaagctgagtagttgactcctgaaatcttggactgttaatgatctactggctcatttcaatagtaagaactgaaaactaaatattttagtatgcttctgcaattactttcactttaaaaccttacatgattccttatgatgtctggagaggattattacacctgcagcaattgccagttttagtgattctctattattcctttgccatgtaaatatttttagaatgattttgtgtatatatgagtgcttgccttttatttaaattattttagtgtttagctccatgagacacttggcttaggctgatggaatgga

SEQ ID NO: 3157419 - DNA, 1029 bp, Cricetulus griseus
agaacctcctgagtcagaagagtgataagcaatgagttccaagcagcagcttgtgaagctaaacgatggtcacttcattccaagactgggatttggcacatataaacctgaagaggttcctgaaaataagccactggaggctataaatttagctatcgaggctgggtaccgccatatcgatactgcttatgtgtatcaaacagaaaaggatgtagggcaggctattcgaagcaagattgcagctggtcttttgaagagagaagacatattcgtcactacaaagctttggtgtactttccatagaccagagctggttcaatctaacttggaaaaatcattgaaaaaccttcaactggattatattgacctctatattattcattacccagtgcctatgaagccaggagaggatctgtttccagtagacgaacatgggaaagcattattggacactgtggatatctgtgccacatgggaggtcatggagaagtgtaaggatgcaggattggtcaagtccatcggggtgtccaactttaatagcaggcagctggagaaaatcctgaataaacctgggcttaagtacaagcctgtctgcaaccaggtggaatgtcatctttacctgaaccagagcaagctgttaaactactgcatgtcaaaggacattgttttagttgcctactgtgctcttggatctcaacgacctaagcgatgggtggacccaagttccccagttctcttaaatgatccagttctttgtgaagtggcaaaaaagcacaagcaaagtccagcccaggttgctcttcgttaccatcttcaacgaggaattgtggtccttgcccagagttacaaagaaaatgagataaaagagaacttacaggtatttgaatttgagctgccttcagaggatatgaaaatcctagatggcctgaatagaaatttaagatatgcacctgctccatttggggagggccaccaagaataccccttttctgatgaattttagtgtggaggcctgtgacatgacttcta

SEQ ID NO: 3157420 - DNA, 697 bp, Cricetulus griseus
gactcgggcgttcatcacacactctggttctcatggtatttatgaaggaatatgcaatggcattccaatggtgatgaggcccctcgtttggtgatcagatggacaatgccaagcgcatggaaactcggggagctgggatctccctgaatgtcctggaaatgactgctgatgatttggaaaatgcccttaaaaaggtcatcaatgacaagagctacaaggagaacatcatgcgtctgtccagactgcacaaggaccgtccgatagagcctctggacctggctgtgttctgggtggagtacgtgatgagacacaagggggcgccacacctgcgcccggcggcccatgaccttacctggtaccagtaccactccttggatgtgattggcttcctcctggccatcgtgttgacatctttcttcattgtctaaaaaatgctgtgcctatggctgcaggaaatgctttgggaaaaagggacgagttaagaaatcacacaaatccaagacccattgagaaagggggtgggaagtgaaggggaggtatcggtccattctccaatcagtttgaaacttgaaaacagaatcagtgttaaattattttgttttattagggaaataattagtcaaacattacatacctagaacaatttttaaaaaaaataaaaacaaaaattagactggccacacccaacagggaaggt

SEQ ID NO: 3157421 - DNA, 431 bp, Cricetulus griseus
caggaactgtatgacaccaccttggctctgggccatgcagcagccttttcggatgactgtgatttgccctccgctcaagacaacaaccgacttgtaggactgcagaacacatacatgggctatctggactaccggaagaagaccatcaaggaccttggcatcagccccagcacctgctcattcaatcctggtgtgattgtcgccaacatgactgaatggaaacaccagcgcatcaccaagcagctggaaaaatggatgcaaaagaatgtggaagaaaacctgtacagcagctccctgggaggaggagtggctacctctccaatgctgattgtgtttcacgggaagtattccaccatcaaccctctgtggcacataaggcacctgggctggaaccctgacgcaagatattcggagcactttctgcaggaagc

SEQ ID NO: 3157422 - DNA, 1431 bp, Cricetulus griseus
gagcccacagaagagcaacagagattggcagccaacgaaaatggtgaagtaaatcatcaggactccatgtctttgtctctcatctctacatccacgttggaaaacgagcacagtttccagtctcagcttttgggggtcagcctgactttgctcttatatgtcaccttgtggatgtttggggccatggctgtttctttgtattaccctttggatttggtttttagcttcttttttggagccacttgtttaagtttcagtgcattcatcatggtacaccattgcgtgaacagggaggatgtgagacttgcatggatcatgatgtgctgtccagggcggagctcatactcagtgcaagtcaatgtccagccccctaactcgactggaactaatggagaggcaccaaagtgcaccaatagcagcgcagagtcatcgtgcacaaacaaaagtgcatccagcttcaaaaactcttcccagggctgcaagctaacaaacttgcaggctgctgcagcacagtaccacagcaatgccttacctgtgaatgccacaccccagcttgataacagtctgacagaacactcaatggataacgatattaaaatgcacgtggctcctttagatgtgcagttccgaacaaatgtgcacccaaaccgccatcataaaaaccgaagtaaaggacaccgggccagcagactcacagtcctgcgagaatatgcctatgatgtccccacaagtgtggaaggaagcatgcagaatggcttacctaaaagccggccaggaaacaatgaaggacattcgaggagtcggagagcttatttagcctatagagagagacagtacaacccacccaacaagatagcagtgatgcttgtagcacacttcccaaaagtagccgaaatgttgaaaagcccatttcagctagtagtaagaaagatgcaccaaggaaaccaactgcggccgaccttgaaagtcagcagaaatcttatgggctgaacttagccattcagaatggaccagttaaaaccaatgggcaggaaggacccttgctagctactgatagtactggtaatgttaggactggattatggaaacacgaaacaactgtgtagcattgcaggggcgtccaacacagaagttgatataaactgtgatactcacattcctttaagctatgaactcttagaaacaaactgtttacaaccaccttagggattcagaacagttccaaatatgctcgtgagtttggggatttacatattttatattcctaaattgtcaccccctcccccaagaattttaaaatccttgaaaacattgttttatttgtcaaagctccagtaaggtattttgaaagttgaaaatctaatttcttacaatctgttatatctacttaaaatttcaggcttgtatttaatgaaataaatagaagtttgt

SEQ ID NO: 3157423 - DNA, 204 bp, Cricetulus griseus
gagattctaagatgcctgagccagccaagtccgctccgccccgaagaagggctccaagaaggccgtgaccaaggcccagaagaaggacggcaagaagcgcaagcgcagccgcaaggagagctactcggtgtacgtgtacaaggtgctgaagcaggttcacccggacaccggcatctcctccaagttttttttttttaattacaa

SEQ ID NO: 3157424 - DNA, 638 bp, Cricetulus griseus
  modified_base (621)..(621): a, c, t, g, unknown or other
atggcaggaactgcacgccacgaccgtgagatggcaatccaatccaagaaaaagctctctacggctactgatcctattgaaagacttcgattgcaatgtctagccaggggctctgcaggcatcaaaggccttggcagagtgtttcggatcatggatgacaataacaaccgaacccttgatttcaaagaatttttgaaagggttaaatgattatgctgtggtcatggaaaaagaagaggcggaggagctttttcgaagatttgacagggatggaaatgggaccatagacttcaatgagtttcttctcacattaagacccccaatgtccagagccaggaaagaggtaatcatgaaagcttttaggaagttagacaaaactggagatggtgttataaccattgaagacctacgtgaagtttataatgccaaacatcatccaaagtaccaaaatggggaatggacagaggagcaagtctttcggaaatttctggacaactttgattcaccgtatgacaaagacgggttggtgacccctgaggagttcatgaactactatgcaggtgtgagtgcatccattgacacggatgtgttcttcatcatcatgatgacaactgcctggaanctctgaatgcctgaccc

SEQ ID NO: 3157425 - DNA, 1531 bp, Cricetulus griseus
tgaagggtgactcccacaagcttgactttcggaacgacctcttgccctgccttccggggccctacggggccctgccccctggggcaggagctctctcacccggcctccctcttcactgcaactggagccgtccatgctgcagccaatcctttcacaacagctcccggggctcatggacccttcctgagccccagcacccacattgatccctttgggcgtcccacaagcttcgcctccttggctgccctctccaacggggcctttggagcctgggcagccccacattcaactccagcgccgtctttgccccagaaagaaagcccccgcagtcctcttgcctttcctgcttggggtccgccctagtctgccagagcgctgtgcaggcttcccagagccagcttggttcggcagggcccccacgcctggccaggccaccacgcttctatgagggggcaggggcaaagctccaccccctttccccattccttgtgacaaaagtcctagggctgaagtttttaagccaggggttagaaggcaaaggtcacaatctcatggccatcgtctgaagtcatggacctgggaatagaatccccaacacccccgcatgagggggtcatttcagaggttatggctcatgacctaaggtgcaccaatgccccctctaagggcctctaggcccttggcctgcctccccaagggctcactaagccagaggccaaagtgcccccctctctttcacctaacacccaagtcctcatgccctcctagggctgaggaaggaggaactaaaggaaaaggggttccatgtacatatttatcaccccttccacaaatgccccagaccttttgtacatttttacaggggtgcccctcccaacaatccccttcctggttaattaaatcctcagactggtgctgtgttcctagcctctggcctctctgtaggggagggtgtcccaggggaagagcctggaggggacaggcaggaacccagggcttgaccctgggtatgtggggtccagcaggaggtagaccaacagggaaagggacctagaatctaggctggaaggaagggcaaacactatttggctgtcagcccaggttccctcagacttgttctattcattctgtgtggcccatagctctaaaaggctcagccttcaagccttagactcctcttaatggctaagtccctgccaccaccaccatttccaagtgcccccaggactcctgggccctgttccacagaaccctgtcccaaactaagggagggaggggtggccagagaaggtcaccatgaaacacacaccaaagaagggggttggttcaggggtgggcaacacaggcagcttcttcagcagcctcccagcagcagccccagccttcccaaagcagcagcacctccaggctggggcccaactagaaggcagggctcagtttaacaagaccggaactttgtactttttccccagtggggcttattctgtaacatgacttgcgaatatttatataaaaatgagtgttacaatga

SEQ ID NO: 3157426 - DNA, 453 bp, Cricetulus griseus
gaaagatccagtcaaaatagtgcgatgccatgaacacatggaaatccttacagtcaacggagaattactgtttttcaggcagagaaaaggacctttttatccaacgctaagattacttcacaaatacccgtttatcctgccacaccagcaggtcgacaaaggagccatcaaatttgtgctcagtggtgcaaatatcatgtgtccaggtttaacatctcctggagcgaagctctacgctgctgcagtagataccatcgtggcggtcatggcagaagggaaagagcatgccctgtgtgtcggagtcatgaagatggctgcagcagacattgagaaaatcaacaaggggatcggcattgaaaatatccattatctaaatgacggctgtggcacatgaagacatataagtgagccttagatgcaacctgagctaaatataaatattgtgttgtatct

SEQ ID NO: 3157427 - DNA, 380 bp, Cricetulus griseus
aggagtagttttgtagttcattcataaaaaagtatctgaaaacatccaagatattcctgaaagtgtccgagcaagccaaaggctacatgggggtatttgatggtggtatttcaatgctcagcaggctgagtatgtgaagacatgtgtctaatttgtatgtattttactttataacattgtaagctaattttgaattctttgttttttttggcatctgttattactttcagtgataaaatgccatgaatgtactgtattgtatgtcacttgtgaagacactaggtcctcagagaagtgtggtggcacttaggaaggacagggctcaacagggccaaagttttgaagatttacctctaggcttttgtttgttgtttgttttg

SEQ ID NO: 3157428 - DNA, 1093 bp, Cricetulus griseus
aaacagcagcatccatgccagaagtgccctcgggtcttcaacaaccgctggtacctggagaagcacatgaacgtgacccacagtcgcatgcagatctgtggccagtgcgggaaacgcttcctgctggagagtgagctgcagctgcatcgccagacagactgcgagcggaacatccagtgcgtaacgtgtggcaaagccttcaagaagctctggtccctgcatgagcacaacaagattgtgcacggctacgcagagaagaaattctcctgcgagatctgtgagaagaagttttacaccatggcacatgtgcgcaagcacatggtcgcccataccaaggacatgcccttcacctgtgagacctgtgggaagtccttcaaacgcagtatgtcactcaaggtacactcgctgcagcactcggagggtcctgcaggagaatgagctcccaggggtgggccctacaggagcctcaggcaagtagttcagggtttcacggtgctatctgtgtgtcaggggacgaggagctgtccacgagggcacccctgtccctcaccagtccttgcctggctggactcccccaccaggagacacgtgcatctgtgtctgttccccggaggcccacatgaggcctcctcttctcctggggccaggccactacctgcctctggctggctcctggcccctcctgcactctgcactgtctggtgtgccacagcccagacagggagagaagtcagtgtgtttagacccctgtgggagcgggagctcagccagtgcccagtgcttgcccttgggaggcaggcaataataggtgacccttctctgttgtcatttcccagcatggccacactgggaagaggcctgtgcccaaggggactggcacagggtaccagacccctctggcctcagaaacccatggagctgggacagggctggggacattttaatcatcaataaacgatgcactttattctgtacagatgtgggcaggcccgaggtgccctgctgacttggctgtcctctggactaggaaggactgagtgatcagggaccccgatgtaggcttcctttcccagcctggagagtcaggctacaa

SEQ ID NO: 3157429 - DNA, 809 bp, Cricetulus griseus
ctgttgattgaggaccccgaaggtccccggttgccataccaagccgaattcctggtgcgcagccatgatgtagaggaggtgctgccctccacacctgccaaccgcttcctcactgccttggggggactctgggagccaggggaactccagttgctcaacatcacttctgccttggaccgtggaggtcgtgtccctcttcccattgagggccggaaggaaggggtatacatcaaggtgggctctgccacacccttctctacctgcctgaagatggtggcatcaccagacagctatgcccgttgtgcccagggacagcctccattactgtcctgctatgacagcttggcaccccattccgtgttgattggtgcaatgtgtctctggtggacaagtcagtgccagagcccgtggatgagatgcctactccaggtgatgggatcctggagcatgacccattcttctgcccacccactgaggccacaggccgagacttcctggcagatgccttggtcaccctcttggtgcccctgctggtggctttactgctcaccctgctgctggcttatatcatgtgctgtcggcgtgaaggacggctgaagagagacatggccacctctgacatccagatggttcaccattgtaccatccatgggaatacagaagagcttcggcagatggcagccagccgtgaggtgccccggcctctttccaccttgcccatgttcaatgtgcgcacgggagagcggttgcctcctagagtggacagcgcacaggtgcccctcatcctggaccagcactgagagctctgc

SEQ ID NO: 3157430 - DNA, 544 bp, Cricetulus griseus
aagggaaggaccatgaggttgtacttgtttttcctgggcctcagtccgtctcaataaaagatgtttcttctcatctgcaaaaacggattgagagtaaaggtagaagcaaacctgatgagcttgatgtgccaccttttaaactcaagcgaaccaaggcagagggaggctctggtttgactgagagcgtgtacaaaggcccagcattgaagagagtggtcttcattgacagcacctggagccagacaaaccagatagcctctgatgagcgccttcgggagttattacaagttgaactgaaaacaagaaaaacttgcttttggcgccatcaaaaagggaagccagagactttcctttccacaattgaagccatttattacttcctggtagactaccatagtcacatgctgaaagagaagtacaaaggacaatatgacaatcttttattcttctattcttttatgtaccgcttgataaagaatgccaaaggctctggagagaagacaaaaccaaagctcatccattagttccgcacactcagcttgtc

SEQ ID NO: 3157431 - DNA, 259 bp, Cricetulus griseus
atttttttttttttactttaataatacttacaagtttctagttctcacgaacgtaggttaagggatttttttgcgtaataagcaggttgctatttaggttagcaactttaattgaggttttttagttggataaataattcctgtaagttttttatctcctgttgtagtaattgctataaggataatgactatgtattagtcaccctggtgcatgagatgtactgtacctttttatatctaaataaagacatcttgaaat

SEQ ID NO: 3157432 - DNA, 395 bp, Cricetulus griseus
acctatttccacatcaccatcgggaatctggtccgtgggagcaagctgctctgcgagacatcgctgggctacaaaatggatgatctcctgacttcctacatcagccagatgctcacagccatgaacaaacagaggaactccaggagcggcaggtgaagagtaaaggagatgctggctcaggccctggtcatataggcagggaggcttgactgaccacatctgctgggctctgatctgtttgccatggagtcagaacttccctgcacccacctctggtgcctgcgttagcttcacctactttgctgtggcctcttggtgtaagagacaatgctccctggacacctctcctgattgagaccagctcaccaagcaactgagctcttttgactttctgt

SEQ ID NO: 3157433 - DNA, 517 bp, Cricetulus griseus
ccatgagcaagcggaaccaggtgtcgtacgtgcggcccgccgagcccgccttcctggcccgcttcaaggagcgagtcggctacagggaggggcccaccgtagagaccaagaaaatccagcctcagctccctgatgacgatggtgatcacagtgacaaagaagatgagcagcctcaagtagtggttttaaaacagggagacctaacagctgaagaagtcatgaaaatcaaagcagaaataaaggctgccaaagcagatgaagaaccgcctccagctgatgggagaatcatgtatagaaagccagttaagcgtccctcagatgaaaagtgtttaggtttaacagcaagctaccaaaaaaaaaaaaacaaatgaagatgatgaaaataagcagaattcagttagaaagaactcacaaaaacaaataagaaatagtagtctcctgtcttttgacaatgaagatgagaatgagtaagtataaatattatgggcttggcctaccttcaccctgccttcctctg

SEQ ID NO: 3157434 - DNA, 808 bp, Cricetulus griseus
taactgaatttaaacacaatcatggcgcctatcagttcttccgagaggcactgcagtttgaaattgatgactcttcccccagcatgtctggttgctgtggggaggactgctcctacgagattctgagccggaggaccaagtttggggacagtcagcattcccacacaggcggcactgtggtggctgttgccactgaactcccagaaccatttacagtgaagtcactctccttaggcctgtcctcttcctggtgttaagccacttgccaggtaccccagagctgtggttgccttagccctgaatgacgccaggtactaccccgagagtacagaacccgtggggagcagtagaaggacccctccttcttggtatagttgataccatttcctcctactcttggtgctgatagctctctgaaggtggggttacccctacaccctccctgtctgaggagccccagccagcagcaggccccttgcctgttctccccagccccagtcctcactgcctcaatgaggcacctgtgccgctctcctggccccactgggatacatcaggaatgcctttcagtggctcaccgctgcttgtctgtcactggtgtcaccctacagtggctgccttcttcaaaggatgaagagagtgcaggcttagaacttgaactcatcctgacctgggccatgttcttccaaggaagcaaaaccaaaccctcacctaggaacacacacttgccacttccccgttgccgtccctgagttctgccttgaggcatggcaaagaacttgcctttgtgcagttgctctctgagact

SEQ ID NO: 3157435 - DNA, 796 bp, Cricetulus griseus
  modified_base (788)..(788): a, c, t, g, unknown or other
gtgtgacctaggtggccaccatgacgaagctcctggtggccaaggtcctctgcatggtgggcgtgttcttcttcatgctgctgggctcgctgctgcctgtgaaggtcatcgaggcggacttcgagaaggcacaccgctccaaaaaggtcctgtccctctgtaacactttcgggggtggtgtcttcctggctacgtgtttcaatgcgctgctgccagcagtgagagacaagctgcagcaggtgctgagcttgggccacatcagcacgagcccacggcgcacacgcacggcgcagggctgcggctgcgagagctgggacgcccgggcccgctgcggctgctcagcctggtcttcgcgctgtctgcgcactcggtgttcgagggcctggccctggggctgcaggaggagggcgagcgcgtgctcagcctgtttgtgggcgtggccatccacgagacgctggtggctgtggccctgggcatcagcatggcccgcagcgcggtgcccctgagggacgcggtcaagctggcggtgaccgtgagcgccatgatccccgtgggcatcggcctgggcctgggcatcgagagcgcccggagcgtagccagcagcgtggcgtcggcactgctgcagggcctggcgggtggcaccttcctgttcgtcaccttcctggagatcctggccaaggagctggaggagaggagcgagcagctgctcaaggtgctgttcctggtgctgggctatgccgtcctggctggcatggtgttcctcaagtggtgagtttaaactaaaaaanaaaaaaaa

SEQ ID NO: 3157436 - DNA, 373 bp, Cricetulus griseus
gcgccaaatcttaaaggcagaccacgcaaaaagaaaacatgtccccagagacgagattccttcagcggctcgaaggacttccaacaataactgtgatggtaaagcgatcaacaaggtgaaaggcgaggccaggtcagccttgaccaagccgaagaataaccatagcaactgtaaaaaagcctccaatgaagaaaagccaaagctgtccattggcgaagaatgtagggcagatgaacaggccttcttagtggcactttataaatacatgaaagaaagaaaaacacccatagagcgaattccctacttgggtttacaaacagagtaaagggtttttttttttttctttttctttttttttgttttttttggtttg

SEQ ID NO: 3157437 - DNA, 1341 bp, Cricetulus griseus
  modified_base (1158)..(1158): a, c, t, g, unknown or other
gaccgatgcagaattatcaagcaaatcctgtcaacaccgtccctgattccaacaattgaggaagaggactctgatgaagactgtccacagagaagccagccaccttctttaccagatccagtgtcccgccttcctgttggtgatcacctcacctactctgagacagagcctatgaggaccctgctaccagatgagaagaaagaagggaagcaaccagctctctccatgtccaacttacacgaggccaccatgccagtccttcttgaccatctccgagaaactagggctgacaagaagaggctacggaaagccctgcgagaatttgaagaacaattttttaaacaaacaggaagaagtccacagaaggaagacgcacataaaagccaaactgagactactggaggtcctcatcagcaagcaggatgtggccaaaactatttgagatttggctctgatcacttccacccaagataaagtcaagtttattttcctctactgttcttgctaagtagttttaatgtaccggaaactaagcactttagagatagtagtagctgtttttacaaaggaagagctagtgtaattatactcaaggaggggatttaagtagggaaataataggtaatattgggtctggcaaaaacattcagcttgctccacaccaaactgaaaaatccacagtaaaatgtaatagttttaaaagaaaaatctatcttgtcaaacctaacacataggcagactacctgctagggaaggttcattagtgcccaaagatggacttcattgatgtctggcaaagagcagggtttaaataaggtctgtacttcataaagtgaaacaaattttcttgtgagttgcattcattctgcgcagggtaaagagcttggaaatcaccaagacaccttttatttgctttatttagtgtatcttgctttttctccattcatttaaaacatatttatcagttttgtgtaaaatcaagtaacagacactttctcatcttcaactttgttcatatttctgttttctgtaattttaagcatggtgttaaggaaatcatatactcatattgcgtgggcaaggaaaaaaaatctgattccagaagcggactaaatcagaggcatattgttttctctgtattcacctgatgttttaaancttatatgaatcagagtaatggccttcataaatttgtttaattgaagtcatctactggtaacaggacagatacacaactatttaaggtttacaaattacatctttgataagggaaatggtttcatgagatgtatacaattgctattaaaatgtaactatattctatatgattgtaaatatttt

SEQ ID NO: 3157438 - DNA, 1689 bp, Cricetulus griseus
gttggagacaaagaagtaagagctgcttttattcgtgacgaaatgatgccaggagagtgggacgtatgtgtgacttcttatgagatggtaattaaagaaaaatctgtgtttaaaaaatttcattggcgatacttagtcattgatgaagcacacagaataaaaaaatgaaaaatctaagctttcagagattgttcgtgagttcaagtccactaatcgcttacttcttactgggacacctttgcagaataacctgcatgaactctgggctttacttaacctttaattgtccggatgtctttaattctgcagatgactttgattcttggtttgacactaaaaattagccttggtgatcaaagacttgtggaaagactccatgcagttttaaagccatttttgttacgccgcataaaaactgatgtagagaagagtctgcctcctaaaaaggaaataaagatttacttgggcttgagtaaaatgcaacgagaatggtatacaaaaattctgatgaaagacattgatgttttaaactcttctggcaagatggacaagatgcgactcttaaatattctgatgcagctccgaaagtgttgtaatcatccttatctattcgatggtgcagagcctggcccaccttatacaacagatgaacacattaattctttattatcggaagactataggttataaggttccaaggaatcctgagatccctaatccagctgtagttcaaaaagaagagcaaaaaagattgatggagctgaacctcttactccacaagagactgaagagaaggataaactccttacacaaggtttcacaaactggactaagcgagattttaaccagtttattaaagctaatgagaaatacgggagagatgacattgataatatagctcgagaggtagagggcaaatcccccgaggaggtcatggagtattcagctgtgttttgggaacgctgcaatgaattacaggacattgagaaaattatggctcaaattgaacgtggagaagcaagaattcagcgaaggatcagtattaagaaagcattggatgccaaaattgcaagatacaaggctccatttcatcagttgcgtattcagtatggaaccagtaagggaaagaactatactgaggaagaagacagattcttgatctgtatgttacacaaaatgggctttgacagagaaaatgtgtatgaagaattaagacagtgtgtgcggaatgctccccagtttagatttgactggtttatcaagtctagaactgccatggaattccagagacgctgtaacactttgatttcattgattgaaaaagaaaatatggaaattgaggaaagagagagagcagaaaagaagaaacgggcaactaaaactccaatgctctttggtttttgatttcttgcatattttatacattttacaatgctttctatctgaaatgtgtagctttctattttatgcattgtagtattttgtgtactgtattttgtgcatttcctgtcttcatcgaattcctctcagtccttgtttgtttgatgcttgtgctgaggttttagcttttctatgttttatatgccgctgctttgaaagagaacttagattctatagctgtattattgttgtttcagactttaaatttatatggctgtggaaaatgaattaaaatgatttgaggagaaa

SEQ ID NO: 3157439 - DNA, 1532 bp, Cricetulus griseus
aatgacagcagtaggcaagtttcttctgatcattattttgctgctggagcagccaagaagaggggcacacttaaaataacaacctgcagcagagagatcatgccgtgtcacgtaagagaggcactattgaagttccaactacacccttgaactctgaagagtgggatcaacttaaagaagatttcaaagggaagatcagttttgaagataaggtcatttcacagatggtacgaaaccgtagttctgtagatgtagctaagtctctcctggcatgggtagcagcaaagacaatggcattgtagggtataatttactcgtcaagtatttgtatctctgtgtctatcataaggagacatcagaagttattgatgtctatgaatcatgaaagccaagtacaagtgttagaaactgggactaacagcattctcatcccgggattgatccactcagacagatggagagaggccttgctgcggttagaagagattaagaaagtcacgatcccttcaaaaaagaactacaatgactgtatacagggagccctctttcatcaagatgtgaacttggcttggagtttgtatcaggaattgatagatcataatctcattcctctgttggacacttttaaaaggccttctttgatttttggcaaacacataaaatgatgatcactattcaaacaaactactggacattcttttgtatctaaggaataatcaaatgtttcctggagagtcattggcacatagtataaaaacatggtttgaaagtattcctggaagacaatggaaaggacaattcactacagtccagaaaagtggccagtgttcaggctgtggtagagtcttagagtctattcatctgagtccagaagaatatgaatttctcaaggagaaaatcatgaggcatgtgatagatggtggtgaccaatataaaaagacaacaccacaggaactgaagagatttgagaagtttgtaaactcctgtcctccttttgatattgttattgatggcctcaatgttgcaaaaatggtttttaagaatcgtgaatctcaaactctcctggatgtagtgtctcaactagcccagcaaaatctacgactgctggtcctgggccggaagcacatgctaacaccgagttcccagtggaaaaaggatgagatgaaacaggtgcaagagcaagcggactgcttttttgctgataatatatcgaaggatgatccattcctgctctacgccaccctgaactcaggcaatcactgcaagtttatcacgaaagatctgatgcgggaccacaaggcctgcctacctgatgcgcatacccggcacctcttctttaagtggcagcagggacatcagctgacaatcatgaattgtcttcagagatcaaagctggctttccagcatactttcagctatgacacagtggtgcagacaactggcgattcctggcacataccttatgatgaagaccaggtgcagagatcttcttatgaagtgccaaccaaatggctgtgcctccagcggaagac

SEQ ID NO: 3157440 - DNA, 727 bp, Cricetulus griseus
cgtggggaggtggtggacctgacccggcgcgccagcagccagcgggcgcgggaggccaacctggcttcgccggtgtgctgcatggcccgcaggacggcgtcatcgacctgacagtgggccaccgcgcccggctgcacaacgtgatccaccgtgcgctgcatgcgcacgtcaaggcggaacgcgagccgggcgccgcggagcgcaggacctgcggcggctgcagggacggccactgcagcccgcctgccgccggcgaccccggcccgggcgcccccgcgggtcccgaggctgccgccgcctgcaacgtcatcgtgaacggcacccgcggcgccccggccgaggccaagggcgcagaaccgccgcccgagcagcccccgccccccttgccacccaaaaagctgctgtcctcggaagagcccgtggtgaatgagctggacgaaccaatgaaaacaagagggaaagtgagaaagatcacccgggattctgtttcactgtttgctttctcctgtcatgcttaagagaaatgtgcaattcgatcctcagtcagtgggtggagggtaacagggtagattttcttgtgtgcacttgtacagttgtagctgcgagtccagaagtcctctagaacatgtggactggcactgagttggtgagacagttgtggagtgccccagtctgatgagtacgaaaaaaaaaaataaaacaactaataacgaaacaaaaaaaaaaa

SEQ ID NO: 3157441 - DNA, 263 bp, Cricetulus griseus
gttttttccaacaagacacattgacctggaacaccaaatccattgttccttttgtgaaatcaagcaagaaacagctgtgagagccactatttccaaggcaccaaaataattgtttttcacttaaaaaggttttgacatccagggctccgtgaagaggaagctgaggacagacatccggtacccactcaccaacctggacatcactccttacatctgtccagttttccggaagcatcctaagtacaacctctgtgcagtggtga

SEQ ID NO: 3157442 - DNA, 262 bp, Cricetulus griseus
gcccacatcaatgcactaggataagaaggggacacggcactccatgaggccgtacgatatgggcaccacaaagccacgaagctactgctgctctatggagccaagctgggcatgaagaatgtggcctccatgacaccagtgcagctggcacgggactggcagcggggtatccgggaagcactacaggcccatgtggggcactcccgtacccggtgttgatgactaagacctgtgggtcactcaatagcaccattccacaccc

SEQ ID NO: 3157443 - DNA, 173 bp, Cricetulus griseus
attttctttttcttagactgactttcactgtatatgccctgactgtcctggaactcactctgtagaccaggctggcctcaaactaacagagacccacctcgcctctgcctcctgagtgctgggattaaagacatgagccaccactatatataataaataaaaaaaagttaatt

SEQ ID NO: 3157444 - DNA, 402 bp, Cricetulus griseus
actgcaagatggcgtcgctcgtgcctctgaaggagaagaagctcatgcaggttaaacttggagagctgccaaactggatattgatgcgggatttcacacccagtggcatcgttggagcctttcagagaggttacgaccggtattacaacaagtacatcaacgttcggaaaggcagcatctcggggattaacatggtgctggcagcctacgtggttttcagctactgcatttcttacaaggaactcaaacatgagcgtcgacgcaagtaccactgaagaaggatcaccatggagggcactgcacacctgagcataattgcctgtcccactcccatccatgaagaatttaactgtggctgagtcttcaaaactttgattaagaactagtatccaataaaaggtg

SEQ ID NO: 3157445 - DNA, 422 bp, Cricetulus griseus
  modified_base (297)..(297): a, c, t, g, unknown or other
  modified_base (302)..(302): a, c, t, g, unknown or other
  modified_base (307)..(307): a, c, t, g, unknown or other
  modified_base (311)..(311): a, c, t, g, unknown or other
  modified_base (412)..(412): a, c, t, g, unknown or other
  modified_base (415)..(415): a, c, t, g, unknown or other
aagaaaccgagaaaagcggctcagtttaaatctgccatgaagttttcaccgatgtatcccacggcttcactcagtgctgaagacagcagctatgtgcctatgagccccaaaggcactactagtcttagaccctattactgccaggatgactacataccaatgagctcaagcatgctgccagagttacctgcagacttggagccacctccagtgaacagagatctcaagccccagaggaaatcacggccacctcccttggacctgagaaacctttctaccattggagaacacacatcnctacngcctncctntgtgccttgcaatcgaaccagctttctctctccacaaagaaatggtattaattctgcaagattttgccactccttcgaagaagaagaagaagaagaagaanaanaaaagta

SEQ ID NO: 3157446 - DNA, 927 bp, Cricetulus griseus
gcaaacagtccaagaagaattcttcaaaatattggtacaatgaacaaatttaaggctgttggaaaaattagaggaaagcctctcccattactcttgttttttgaggctatatttagcaggagtcatgctttcaaacgtcctgttaatgctgacctaaccctggagggaatcaaatgtggactatctgaaaaacggcttgatttagttacccactgggtcacccaggaaaagctgacattttctgagaaggctggggatgttattgttgcttatggggagcagaacacatactacaagcccaggtgcctggctttagctcagattatctacaatgaatgtcatctacacaagaaagctcttctttgcctgtgtaaacagggtcggattcatgaggctgtggaacatatacaacagttcaaggactttacctctgatgacctgataatgctgataacagtatgtcctcatattgagttaattaaatgtcttactcaagaaagatatgggaaaccaccaattttttcttttgtccttactgtacttcatgtgttttccgcggatatgaaaaaagtgggcattaaactacttcaggaagtcagtaaaggtgggaaagatttaatagagcatcttgtgatgggtgattcattttgctccttcgaaaagtggcaagaaatggcaaatatatgtttacagaatggctttgaaaatttgtttaatgatatcatgtccgttcttcgatcccaggctggagtttcagaaatttctgaagatgattccttctacttaatggaacatgtttttggtagttctttattttaaccagctgagggcgcttgtacaactatttttaggcattggctgggcaaaaggggtttagcatagttaacataaatagatgttgagtgtaacactatcggcaataaatca

SEQ ID NO: 3157447 - DNA, 341 bp, Cricetulus griseus
gagtttcagtcgccggccggctttgtaaattacccgcctggccaaaccacactgagaacgtagcagcaaggctgagtctttgtttgggtttattattatggcatttttgtttgtaagtgaaaaataaaagaaagctagaaagcaaccaactttgtcttggggaacctttggaatttggatattcggtccccctttcttcccattttagttttcagtttcgttggttttgagggaaagcttgtaagggagagacagctgtggatatccacactacacacacacacacacacacacacacacacacacacacacacacacacacacacacacacgaagataaa

SEQ ID NO: 3157448 - DNA, 1697 bp, Cricetulus griseus
cagtggaaagaatttggtctggattcagttgagttgtcccattatgatgtgctattgtcctacccaaataagactcatcctaactacatctcaatcattgatgaagacagaaatgagattttcaacacgtcattatctgaactgccacctccgggatatgagaacatctcagatgtagtgccacctttcagtgccttctctccgcaagggacaccagagggggatctattgtatgttaactatgcacggattgaagacttctttaaactggagcgggacatgaagattaattgttctggaaagattgtttatcgccagatatgggaaagtgttcagaggaaaataaagttaaaaatgactcaactggcaggtgcgaaaggtgtcattctgtactcagacccctgctgactatgttgttcctggggtgaagtcctatccagatggctgggaacctccctggaggtggtgtccagcgtgggaatgtcttaaaccttaatggtgcaggtgatccactcacaccaggttatccagccaatgaatatgcttataggcatgagttgacagaggctttaggactttccaagtattccggtccatccaattggatatgatgatgcaagaaactcctagaacaccatgggtggtccagcaccccctgacagctgagggaggcctcaatgtgccttacaatgtgggacctggcgggatgcagaagaatttggccttcttggttctactgagtgggcagaggaacattccagactccttcatgaacgtggtgtcgcttacattaatgctgattcctccatagaaggaaattacactctaagagttgattgcacaccactgatgcacagcctagtgtacaacctaacgaaagagctccaaagccccgatgaaggctttgaaggcaaatctctttatgacagctggagagaaaagagtccttcaccagaattcagcggactgcccaggattagcaagctgggatctggcaatgattttgaagtgtttttccaaagacttggaattgcttcaggcagagcaagatatactaaaaattggaaaacaaaacaaagtcagaagctatccactctatcacagtgtctatgaaacatatgagttggttgaaaaattttatgatccaacatttaaatatcaccttactgtggcccaagttcgtggagggatggtgtttgaactggcaaattctatagtgcttccctttaactgtcaagattatgctgtagctctgaaaaaacatgctgaaagtatctacaacatttcaataaaccatacacaggagatgaagaaatacatggtatcatttgattcactgttttctgcagtaaagaattttacagagattacatatgaattcaacaaaaaaattcaagacttagacaaaagcaacccgatatcactgagaattattaatgaccagctgatgtacctggaacgtgcattcattgatcctttagggttaccagacaggcctttctacaggcatattatctatgctccaagcagccacaacaaatatgctggagagtcattcccagggatttatgatgctctttttgatattgatagcaaagtggacccttctaaggcctggagagaagtgaagagacagatttctattgcagccttcacagtgcaagctgcagcagagactttgagagaagtagcctaaa

SEQ ID NO: 3157449 - DNA, 454 bp, Cricetulus griseus
  modified_base (361)..(361): a, c, t, g, unknown or other
ctgaacaccaacaggccaggatgtcctgccaacagagccagcagcagtgccagccccctcccaagtgccctcccaagtgccagacaccaaagtgccctcccaagtgccagacaccaaagtgtcctccaaagtgtccccctaagtgcccccctgtgtcatcgtgctgcagcctggggtctggaggctgtggttccagctctgggggctgctgtggttccagctctggaggctgctgcagctctgggggtgtggctgctgcctgagccaccacaggccccgcagatctcttcgtcgccatcgtcacagctctggatgctgtagcagtggtggcagcagtggctgctgtggaagcagtggccgngcagcagcagcaggtggtggcagcagctgtggcagaaaaataaagcatgaaaaaattaaaaaaaaaaaaaaaaaaaaaaaaaaaaaaaaaaaa

SEQ ID NO: 3157450 - DNA, 454 bp, Cricetulus griseus
aagcttgcattccagaaagatctgatgaagcctctggccccaacttttctttcctctcctctggcggctgcagctgtgtcctctgcactgtccctaccacctcggccatctgcctctctgtttcaggctgcagccatccctcctgccctgctgaggcctggccacgggcccatccgtgccactcctgcctccatcctctttgccccttactaaatacttgcagcccgcaacaggccaggccagtggaaaggtatagaagaaaagcccaaaggattcagcagtgtaagctttgtgtgtgactgtaagcaccccaccacccacttacaaagtgcaggccaccgcccagcccaacctccaaagacaagaggaggccaggctcaagggcactgttcccctacttcttgtgccccctcggtcctaccccagcccaattggtgtacctgagatatttaag

SEQ ID NO: 3157451 - DNA, 751 bp, Cricetulus griseus
atgtatatgatactggtaacagcaggattcaccactggaatgcttgggaatgtgttcattggattggtaaacttttctgactgggtcaagaaccagaaaatcaccttcatcaacttcatcctgatctgcttggcagtttccagaatcagctctctgcttgtggtatttgttgatgcaaccatactacaagtagctcctcattcctacgattcttacagtccagcaaaatgctctgatccattatggattgtgactgatcaactgtctacatggtttgccacctgcctcagcattttctacttcctcaaaattgcccacttctcccatccccttttcctctggttgaagtggagaatgagtaattgtggttgttatctttcttgtgttttctttgctcctactgatttttcatttttctactgcttgaagcacttcctattttgagggaaatttacataatcactagaagtaatctgactttattttcagatacaaccaaggttattgctgttaaaaccctaattgcttttgacctgatgtacttggtcccatttttttgtgtccctggcatcattgttccttttatttttgtccttggtgagacactccagaaacctccacctcatttccaccagctctgaagattctagaacgaaggtccacaagaaggccatgaaaatgctgttgtatttcctcattctttttatacttcacatatttttcatgcagctggcacattggttttattttt

SEQ ID NO: 3157452 - DNA, 3274 bp, Cricetulus griseus
  modified_base (2177)..(2177): a, c, t, g, unknown or other
ggactgaccaaggccaagtggcattcggccgggcactacatggccgagggcgaagggtactttgccatggcggaggacgagctgacctgcggcccctacatccccctgggtggtgacttcggcggcggcggcagcagcttcggcgaccgctgcttggactattgcgaaagccccacggctcactgcaatgtgctgaactgggagcaagtgcagcggctggacggcatcctgagcgagaccatcccgatccacgggcgcggcaacttccccacgctcgagctgcagccgagcctgattgtgaaggtggtgcggaggcgcctggaggagaagagcataggtgtccgcgacgtgcgtctcaatggctcggccgccagtcatgtcctgcaccaggacagtggcctgggctacaaggacctggacctcatcttctgcgcggatctgcgtggggaagaggagtttcagactgtgaaggatgtcgtgctggattgcctgttggacttcttgcccgaaggggtgaacaaggagaagatcacaccgctcactctcaaggaagcttacgtacagaaaatggttaaagtgtgcaacgactcggaccggtggagcctcatatccctgtcaaacaacagcggcaaaaacgtggagctgaagtttgtggattctctccggaggcagttcgagttcagtgtagattctttccaaatcaaattagactctctcctcctcttctacgagtgttctgagaacccaatgacagaaacatttcatcccacaataattggcgagagtgtctacggggatttccacgaagcctttgatcacctttgcaacaagatcattgctaccaggaacccagaggaaataagagggggaggccttcttaagtactgcaacctcttagtgaggggcttcaggcccgcctcggatgagatcaagaccctccagaggtacatgtgttccaggttttttatcgacttctcagacattggagagcagcagagaaagctggaatcctacttgcagaaccacttcgtgggcttggaagaccgcaagtatgactatctcatgacccttcatggagtggtaaatgagagtacagtgtgcctgatgggacatgaaaggaggcagactttaaaccttatcaccatgctggcaatccgggtgctagccgaccaaaatgtcatccctaacgtggctaatgtcacttgctattaccagcccgccccctatgttgcagatgctaactttagcaattactacattgcacaagttcagccagtgttcacatgccagcagcagacatactccacttggttaccctgcaattaaaaatcacttaaaaatgtcctgtggggaagccatttcagacaagatagaaaaaaacaaaaagaaagaaagaaagaaaagaaaaaaaaaaaagaaatgtgaagacgcaagcaaaaccagctgtagccaagaaaatatgctcaaggaccaaagatttaacagaaatccccaagtagaagtgatagactagggtacagaaagagttactatatttgttacacaccaatacacatcaaagtgcctgttgctttcagaggatttgaagtggaaaaggttattttatggtttaatgattattttattttatcagggactcaagaaaaataaaacaacatataagcttgtgaatggtgaaggaaatgccctattttttcttggcaaaaacctatataaagttgataaagtttgctagggtatggtatcataggtacgtgtgcgtatattgtttgtgtgtatatacacacccatatatgtgacatatatatgatatgtgtgtgtatatacacacactcctttgtctattacctaaaacaatgtatcaaataggaaattttgaaatactgtgcattttatgtttatggtaggatcatagaagacatgggcatattgcaatgacaaattaaaacccatataaaataagatagtgagtttttccttcttttcagtgaaccagagaatttcacaaatgggagaatatttggtagaacactttttaattgacttgacctgacattttgacagtctgagccccttccccttaagtaaacagaatcacatgcctttcaaggcatagaacttgtagatcatggaccagatataggataattaatccataattgctaaaaaagatttcngggacctgaacatacttaatatttagatgaacatacaaatgagtacattctgcattttggaccactagaatttaataaatgtgaaatgtccctttttaaagagtatttgtcacaactacataaagtttatatataggatatcaaagtccagggaagcattgctcatcttgcagattaggcctagcactcacctatcagaaaccacagtccagcctgcttagctcttagcaagttctgtggaactgctgtggagcagaagctcatctggtgacctggtttctgcttgcgctaattctgcatacatgtgttatccactgttttgaaaagtctggagatttctggctctgccacagcagcaacctgctgttaattcacaacacaggtttttgtttgaaggagccttattagaaaatatgcctttcatttactttctcaagaatttatattctttgcttgatcacttcattcagatagaacaggctgtgttcaagacaacttctggcatttactttaacccttgtataatttatttctattttgtgcatactatagtcctgtgcatatgtagctgaacatacagtggaatatatgtctctttgtggatgtgtggcctaaaaatctgaatgtcggagcaaagaacagcattccgtgtctgatcagtgcccgtgatttgtttgcttttgtgtttatctgcctagtgcactgttactttgaaacaggaagaagttttgccttctggaggctcttctcatgtgtccagtctggcatgtcagagaacacttagcctgtgactgtgtccttttacaaagtttacttcatctgcagtaaattcagctgcctcaagaactcttatgggggatgaactttgaatcaagcactcgtttctttgatacagttagactgttttgacccgggtccaaaagaacacaaagatgggcagaatatctgtaattcaagccaagaaagaaatgaaatgaaaagtgaacatactgtttatgccacccctttctgtttgctgtcgttggttgctttactgtgcatatccttgtttccaatgcaatgcttgttaaataaatattgtgaactattttagtaaa

SEQ ID NO: 3157453 - DNA, 652 bp, Cricetulus griseus
aagagcctagagtctcttcttgcttcttctagacctctgcctgcaaaactgactgatcctaaaaaatggtctacgtacagtggggttggtcttctaacatttctacggcatctgtgacatcagccaatgctacccaaaggaagagcctacccagagaactagtggaagccacctctcagcatcttattgatgagcttccaccaccagctcaggagcttcttgatgaaattgagcatctgaagcagcagcaaattctacccatggtgtcacatgagaacacagcacatgatctgagtaccactgaaaatgataaaaagcatttggaagaaccagaaaccaacagtagcaaagatagcagccttactttctacaaaagaaattcaggatctggaagacacagagagagctcattcttctcttgatgaggacctggaaagattgctgcagtcacctgaggagaacatggcactgctggacccctccaagggctctacaagggagaaaaaacccaaagatcaagatgctgttgaacagaagagaaaaaggaaagaaagcaccaagccagagagaaggaaatcagacagctttttagggactttggaagatgatgaactaaagccctgtttttggaagcggctgggttggtctgaac

SEQ ID NO: 3157454 - DNA, 248 bp, Cricetulus griseus
acagaggacatggacagcctggaggatgccgttgtgccccgggctctgtatgaggagctgctgcgaaactaccagcagcaacaggaggagatgcgccactccagcaggagctggagcggactcggaggcagctggtacagcaggccaagaagctcaaggagtacggggcactggtgtctgaaatgaaggagctccgagacctcaacaggagactccaagatgtgctgctcctgcggcttggcagcggt

SEQ ID NO: 3157455 - DNA, 494 bp, Cricetulus griseus
tggatctctcggacatcagctgtgttcaagatgtggccaaagaggtcctggactgctatggctgtgtggacattcttatcaacaatgccagtgtgaaagtgaaggggcctgcccacaagatttccctggagcttgacaaaaagatcatggatgccaactactttggacccatcaccttcaccaaagttctgctccccaacatgatctccagaaggacaggccagatcgtgttagtgaacaacattcaagcgaagtttgggatcccgttccgcacagcttatgcagcctccaagcatgccgtcatgggtttcttcgactgcctgagagccgaggttgaggagtacgatgttgtggtcagcaccgtgagcccgactttcatccgttcctaccatgctaatcctgagcaaagaaactgggagtcatccatttgttaaattcttttgctaggaagctggcctatggcgtgcacccggtggaggtggctgaggaaagtg

SEQ ID NO: 3157456 - DNA, 1142 bp, Cricetulus griseus
  modified_base (215)..(215): a, c, t, g, unknown or other
  modified_base (222)..(222): a, c, t, g, unknown or other
ccatgtacttccccaaggtggtacagtctggccagaccacagtgtcaccctcagaggtctgtaattgtcatggggctcagggacacagacagcagggtcctagaagtaggtgtgatatcctgagggccgggagatttgatctgttttctttggcactccagtgatgatatggaaacatggctagccttctcaggcagcacacagaagcaaacccnggtttcnccttgctcctggattcacaagcaggctaaccagcagtgggcaaaaggaagctgcagtcacccggtgtcagacaagatgccactttctcagcacctcattccagagagcaagctctgaggatggggccgcagcttgtgttacagctggaacctaaggaagagatggcactcagacgagtcctactggtctgtggattacctggcccacaccctctctgcatccacacaggccagtctcacctcgcagttgttggtgtggtgggagattcttggacttcttaatttatgacagttatttttatgttatttatgtgtataattaactgctttgtacacagtacccttaacagatgaacttgggctagggatgaactgttttctaaaatattgcctttattttccaaataaatataactagtccaggaaaccacggaagcagtgggcaatccacagttcctaaactatttttttaaaaaatacaatgacaagtcctctttgtctaaagatgaaaaagatgaacaaggtgaacccaagtgaccattgagctcaatcaaacacttactagcatttggcttttattctcttccctatgaaataaaagcttttgaaaacacatttttattaaaggtgtatttttgtgcctccagccaggctgtcaaatcctgttgaatgacagagcttaggttgtgcagtctttcctgctgccactgtttgtttaaatacacagaggcacctacttcctgctgttgtaagcaggaactcagataaaaccagcctttctccccaagtgtctgtgacacatggtcttaccagagtcattcattggctgaggcaagcaggttgtcttagcatggttacagctattctgcatatagaaaccaattagtaaaacagacatctccacactccagctgccctaca

SEQ ID NO: 3157457 - DNA, 454 bp, Cricetulus griseus
agtacaagttcagggatttgactgtggaagagctgaagaatgtgaacatgtatttcccacacttcagatattccatggacacctacgttttcaaagatacttcccaaaaagacctgctgaatttcactgggactattcctgtgatgtaccagggtaatacatacaacatacccattcgcttctggatcttggattctcacccttttgctccacccatttgcttcttgaagccaactgcaaacatggaaatctcagttggaaaacatgtggatgccaaaggcagaatatacttgccctatctccaaaactggagccatcctaaatctgtcattgttggattaattaagaaatgatcgccaagtttcaagaggaacttcctctttattcggtgccatcatccaatgaagcgcaacaggtcgacttgctagcctatattgcaaaaatcactgaaggt

SEQ ID NO: 3157458 - DNA, 311 bp, Cricetulus griseus
  modified_base (284)..(284): a, c, t, g, unknown or other
gatgggtcaccagcagctctactggagtcacccgcgcaagttcggccagggctctcgctcttgccgcgtctgctccaaccgccacggtctgatccgaaaatacgggctgaacatgtgccgtcagtgcttccgtcagtacgcgaaggacataggcttcattaagttggactaagcaaccttgaatggattattcaagactgtctacccagtgtaacagatcatgctagtctttgtacataaagataaaaaaaatggagaccttcaaaaaaaaaaaaaaaaaaaanaaaaaaaaaaaaaaaaaaaaaaaaaaa

SEQ ID NO: 3157459 - DNA, 250 bp, Cricetulus griseus
atcccagcttcctgctgctttgttatggccaataaaagattcccaagccactactgaagaactacaaaaagatcaccaacagcagatgcaccctgaaagccataatcttcaggaccaagttgggaaaagagatctgtgctgaccccaagcaggactgggtccaggatgccataaagcacctggaccaaatcctccaaactccaaaaccataaacaatcccaccttttgagactaaaccagagccgaagaa

SEQ ID NO: 3157460 - DNA, 382 bp, Cricetulus griseus
ggtcaaccctttcagagatcgaatctgcagggtgttctcccacaacaatgtgttctcctttgaggatgttctcggcatggcatcagtgttcagtgagcaggcctgccccagtctgaagattgaatatgcctttcgcatctatgattttaacgagaatggcttcattgatgaagacgacctccagaaaatcgtgttaagactgcttaacagtgatgatgtgtctgaggacctgctgatggatgtcacccaccatgtcctgagcgagtcagatctggacaacgacaacatgctgtccttctctgagttcgaacatgcaatggaccaaatctccagatttcatgaattcatttcggattcatttctggggatgttgatatggagg

SEQ ID NO: 3157461 - DNA, 1039 bp, Cricetulus griseus
gtggaggtcccagccctcaggacgggagagtcacaggctccaggtgaccaacacagctaccgcagccacatggaatacactgtcagtgaccacaagcccgttgctgcccagtttgttctgcatttttgcctttagggatgatgtgcctttggtacggctggaggtagcagatgagtgggcacggccggagcaggctgtggtgcggtatcgcgtggaaaccgtgtttgctcggagctcctgggactggatcggcttataccgggtgggtttccggcactgcaaggactacgtggcttatgtctgggccaaacatgaagaagtagatggtaatatctaccaggtcaccttcagtgaggaatcactacccaagggccacggagacttcatcctgggttattatagccaccaccacagcatcctcattggtgtaactgaaccctttcagatctcgctgcctacctcagaatcggccagcagcagcacagacagctcaggcaccagctcggagggtgaggatgacagcactctggagctgcttgcacccaagtcccgaagccccagccctggcaagtccaagagacaccgtagccgcagccccggcctagcccgcttccccagtcttgctctccgtccttcatcccgtgaacgtcgcggtggcagccgtagtccctcaccccaaagtcgccagctgcctcgggtagcccctgacagaagtcacaatagtggcagccgaggtagcagtgaggaggggccctctgggctgcctggcccttgggccttccaccagctgtgcctcgaagcctgggcctgcttccagccttgcggcctgcctctctcttgctgctgctccagtcgttaaccacacctgccactctgtcttggccaggagtggccaactgggggctcccctaactcagtcctggcaccacctcaactgtgacaatcagcaaagcctcgcctgggaccccattcttgcacaggtgggggaaactctggcagatgttctgatcttggaggtcatccattaggaattaatttc

SEQ ID NO: 3157462 - DNA, 1225 bp, Cricetulus griseus
gagtagctccaaagtaggagcccagaacttggagcagcatgggcaccgagaaggaagagcccgactgccagaaacagttccaggcagccgtcagcgtcattcagaacctgcctaagaatggctcttaccgcccctcctatgaagagatgctgagattctacagctactacaagcaagctaccatggggccctgcctggttccccgacctgggttctgggaccccattggacgttacaagtgggatgcctggaaaaacagcctgggcaagatgagcagaggggaagccatgtctgcctacatctctgagatgaagctggtggcacagaaggtaattgacacagtgcccctgggcgaggtgacagaggatatgtttggttgtttcgagcccctgtaccaggtgatccctgacatgccgaggcccccagacaccttcctgagaagggtcacaggttggaaggagccagtgctgcacagagatgacgatcagaggactccagagccttcttgcctccccagggagccagttcctccaagtccagagtcccagccacccagggacttggacctggaggttttctgtgactccctggaacagctagagccagagttggtgagacctcccctcttgtcccccattcctgctgtgtcagaactgtcccacctctaccctgggacctgggactcatctcagcaggtttgggcagagcagaggggagccccctggcagagagctggacaccagaagcagccctgagtcccctagtgagaaagaggggttggaaggcagcctaactgggccccaggaattggacagatggttggtggcgacagtccgggccatgcaggaaagcatgaagaatgtccaaaggagactcgagagcctggaaagcaaggcccagccatgtgagcaaaggccacccaggactcggccttggcccctagggctctcggctcccgcgctgctcttctttatcctgtggcccttcgttgcccagtggctcttgcgacagtttcggacccagaagaggtgacgcaaggaaggggtgtctctagcaatggagaaagctgtgaggagtccccgcacgtcctgctgtgtcctgagcctccctaggtttagggaaacagcattagaaatccccctccaatgctccttcgctctggcacgccctcctttagtgggggccccacaagaccccaccttctctgcagttcgcaccgacgccc

SEQ ID NO: 3157463 - DNA, 276 bp, Cricetulus griseus
gagcgagcgagccagccaccaggagagcgagcgccggtggaagccgcgtggagggagccgcctattgatgccaaagatgaacaccctgttgtcgcgggcaaactcgctgttcgccttcacgctgagcgtcatggcggcagtcaccttgggctgcatcctcaccaccgccttcaaagacagaagcgcgccagtgcgcctgcacgtctccaggatcctgctacaaaaagtggaggacttcactggaccccggacaaaacgcgacctgggcttcatcac

SEQ ID NO: 3157464 - DNA, 268 bp, Cricetulus griseus
ctgcattccgctccttctctggataccgccctcaggaagacttccaggattgcctctacccagtctcagcaccctcctctcaggagcctttacagtggcaggggcctggggcctggggacttggtgtactctgaattgctttccataccctgcattttactttgtttatacagggaacctgagagactgtcagctagccgagtgtgcagcaaacatggccggtgtgaccatgagaaggatttcttcttaaagacagagtcctcattct

SEQ ID NO: 3157465 - DNA, 2226 bp, Cricetulus griseus
  modified_base (2164)..(2164): a, c, t, g, unknown or other
aggctccttccacaccttcattccccgtctcccctgcctactaccctggcctgagcagccctgcgacctccccctcaccagactcagcagccttcagacatgggagtcccacaccagccttgccagagaagcggagaatgtccttgggagaccgggcaggcagcctccccaactatgccaccatcaatgggaaagtgtcctcctcacccattgccaatggaatgtccagtcccagtgggagcagcacagtctccttctcccacactcttccagacttttccaagtactccatgccagacaacagtcctgagacacgagctaaagtgaagtttgtccaggacacttccaagtattggtacaagcctgagatctccagagagcaggccattgcactcctaaaggatcaggagccaggggccttcatcatccgtgacagccactcattccgaggggcctatgggctggccatgaaggtgtcctcacccctccaaccctggtcattccaagccgagaccccacagatgaatcaaaagatagctcaggccctgccaactcaaccaccgacctgctgaagcaaggagcagcttgcaatgtgctcttcgtcaattctgtggatatggagtcactcaccgggccacaggccatttccaaagccacttctgagactttggctgctgaccccacaccagctgccaccattgttcacttcaaggtctctgcccaaggcatcacactgactgacaatcaagaaagttggcttatcccaggagcctgcttcccaaagtcctatccagggcacccggggaggtctggatccccccctccccctctgtgttttggggtctgactgttgcagacacccttctggctgggctgtccagggtgacatcatagcacctctggggatgctgctggagaaccacatggtcctcctacaatgccaaagcttccctgttccccttctgcctcagtttccccagcagaaccatgctttctatgggacagaggacagaaggtatgaatttaggccaaaggtcctatgatccatttatggtgttgggaaggcccctgtcaccactcaggcttccactgaagcccatgggagtccctaggggtggcattgtattgatatataaatatatataatatatacatgagacatactgatagaatctgtaagctaataaaaatataagaaaaggttaaaaaaaaaattttgtgagtggtctgttttgctgttctatattgttgagactgtatgtcagcagagagagtgctgtctgctcctaaatgtgagtaaaagagggctaaggaaaacaagagaacatggccacctgtgatgccatcaacaagacccctcagctacagcccaggtcaatactgcctctggcaactcagaagattgctgagattggcctggggccttatcctcccagatatctggaggtgagatatcagagagggctctgggttttctccatcctaccttccaagatttctgatccccctttcccagcttcagaccttggggagatccatccaagggaaccagtcctctcttgcctccatgccttgggtccttgaagagcttggatccaaagctagggccacccctgcacttaggccgtggcagaagatctcgagactggtgtttccgtggtcattggtgacaggatgtatgtgtgtatgtgggtgtgggtgtgtaagtgtgtgtgtgggtgcatggtttgctctctttagggaacttcgatgggctgggagatggagggatgttgagttcagtgtgacccagtagttagaagaaccaggaggtgaggcctgatgggccacagattattagtgttttagtgctggtgatggagggcagtgttcacagcccagccctccctgtgcaacccacatttggctcgtatgtgtgtgagcacgttggggtgtgcatgcagtatctccccactttctcattcaaaacaaatgtaagaagttcctcatgttcttggttattccaaccctgcctcccaggccttctgctgggagtgtatttatagatggaaatatactttatattttgtatcattgtgcctatagcctctgccaccttgtataaaatcctgttgtacgctaagtgttctggatatgaatgtatgtacactgatgctacaccccnccctctgtacagctgcttagtctcttacaatccattgttatggctttataaaatgataaagt

SEQ ID NO: 3157466 - DNA, 485 bp, Cricetulus griseus
tgcctgggtcccatagcagggaccccagaaccagaaggtggtgacaaggatgacctgctgctgttgaatgagatcttcagtgcttcctgcctggatgaaggagagttcagccgagagtgggctgccgtgtttggagatgaccgactaaaggagccagcacccgtaggggcccagggagagccagaccccaagccccagctaggctctggattccttccttcacaacttttagaccaaaacatgaaagatctccaggcctctcttcaagagcctgccaaggctgcctcggacctgactgcctggttcagcctctttgctgacctcgaccccttatcaaatcctgatgctgttgggaaaaaccgataaagaacatgaaattgctcaatgcatgagtctgcaaaccttcaacagggagccctcaggccactccgcagcacctgatccagggcttgcagaagtctaacttgctcagtatgctgttttaa

SEQ ID NO: 3157467 - DNA, 358 bp, Cricetulus griseus
ttcctccggaggcgtctatctgacagtagctttgtgaccaacctgcccaatggctacatgccggacctgcagcgtccagagagctccagtagctccccagcatcgccagccacagagaggaggcacccccagcccctggctgcctccttctcttctccaggatccagcctgttcagctccttctccagtgccatgaaacagagcccacagccccctcggggttaatggagccaccaactcctgtcacacccgtggttcagagaccccggattttgttggtgatcgatgatgcccacaccgactggtcaaagtatttccatgggaagaaagtgaatggcgacattgagatccgagtgga

SEQ ID NO: 3157468 - DNA, 319 bp, Cricetulus griseus
ggtattcaatgaggatggcacggtacgctacttcatcgatgccagccaggaagaccaccgaagctggatgacctacatcaagtgtgccaggaatgagcaggagcagaacctggaggtggtacagatcggcaccagcatcttctacaaggccatagagatgatccctccagaccaggaactgctggtgtggtatggaaattcccacaacaccttcctgggcatccctggtgtgccaggactggaggaggagcagaagaaaaacaagcatgaggacttccaccctgcggactccgcaactggcaccgcgggccgcatgcgc

SEQ ID NO: 3157469 - DNA, 1425 bp, Cricetulus griseus
gcaactcatcagcctgaacgagaaggatgaagaaatgagcacaaaagtgtacttagacctggagtggacagactacaggttaagctgggatcctgcagaacacgatggcatcgattctctccgcatcaccgctgaatccatttggctcccagacgtggtgctgctgaacaacaatgacggaaatttttgacgttgctctggacattaatgccgtggtatccttcgagggctctgtgcgctggcaaccccctggcctgtatcgcagcagctgcagcatccaggtcacctacttcccctttgactggcagaattgcaccatggtgtttagttcctacagctatgacagctctgaggtcagcctgaagacaggcttaagtcctgatgggcaggagacacaggaaatctacattcatgaaggaaccttcattgagaacagccaatgggagattatccacaaaccttctaggttaatccaacgaccaggggatcctagaggagggaaggaaggacttcgtgaggaagttaccttctatctcattattcgacggaagcctctcttctacctggtcaatgtcattgcaccatgcatcctcatcactctcttggccatcttcgtcttctacctcccgccagatgcaggagagaagatggggctctcaatcttcgcccttctgaccctgactgtgtttctgctgctgctggcagacaaagtgccggagacctccctggcagtccccatcattatcaaatatctcatgttcaccatgatccttgtcactttctcagtaatccttagcgttgtggtcctcaacttgcaccatcgctcaccccacacccaccaaatgccctttttgggtccgccagatcttcattcacaagctccctccatacctgggtctgaaaaggcccaaacccgagagagaccaactgcaccacatcactctctttctccaagaagtggctggggccgaggaaccgatgagtatttcataggaggaccacgacgcactgaaggaggactggcagtttgtggccatggttgtggatcgtcttttcctgtggacattcatcgttttcacgagcgtcggggaccctgatcattttcttagatgccacgtaccatttgcctcctccagaaccttttccttgaagaccggagggccatttttgtcaagagttgccggtgctctcaagctgtagctacttgcttcttaacccctgtaacgatctagtttctgggaaggcccggaagtgggacttgggctgggcaggtgccttgaaaccacctgaaatgtcctcattatttagggtttcatccttctgggtttttgttttggttgtttttgagagtctcactctgtggtccaggctagctggaactatgtatcccaggctggcctcaaactcccagcaatgttacttcct

SEQ ID NO: 3157470 - DNA, 606 bp, Cricetulus griseus
ggaaaggtggaggaggtagggcggactggcaggctgggttggccggctctctggaggagcagatggcaggtctacggcagcaggaacagaacatcatcaattacaagagcaacattgaccggctggagggtgaccaccagctgttgcaggagagcctggtctttgacaacaagcacacagtctacagcatggagcacattcgtgtgggctgggagcagctgctcacctccattgctcgcaccatcaatgaggtagagaaccaggtattgacccgagatgccaagggcctgagccaggagcagctcaacgagttccgggcatccttcaatcactttgaccggaagcgaaatgggatgatggagcctgatgacttcagagcttgcctcatctccatgggttatgacctgggggaagtggagtttgctcgaatcatgactatggtggaccctaacgcagctggggttgtgactttccaagccttcattgacttcatgactcgagagactgctgagacagacacagctgaacaagttgtagcctccttcaaaattctggcaggagacaagaattatattaccccggaagagctgcggcgagagctcccag

SEQ ID NO: 3157471 - DNA, 808 bp, Cricetulus griseus
cttagtctcacttgtctcccacgcctctccttgtcccctccctcttccacggcagcctttctcttcgccggggccacttccttcttcagcttgttcctccccagagcgcggaagccgagaactgggtccagacccacacggcatcagttcttccgtgaagaaggaagcaatcggagagtcagcaatgaatgtggatcatgaggttaacctcttagtggaggaaattcatcgcctgggttctaaaaatgctgatggaaagttaagtgtgaagtttggggtcctcttccaagacgacagatgtgccaacctctttgaagcattggtgggaactctgaaagctgcaaaacgaagaaagattgtaacatacacaggagaactactgttgcagggtgttcatgatgatgtggacattgtattgctgcaagattaatgtagtttgcataccatggtgtctctggtaaactggaataattaagtcaaaagacaaacataagcttccttatgtatttttatagaactttgtaaacaaaggggacttatcgagaagtcctgtttttataccttgaaagaaaacattacattttaaagtaaacaaaacctattattttcttaagaatgtgattgggaaagaaacatttttggaggtgtgagaggagttttggttttcttaaatcattcttagagaatttctacaggcacttgactttctgtcagagcaagaagcaaactgaagatcagctgccatgaggaatgttgtgtttatgtaataaaaacatgtaactgacctttaaaaaaaaaaaaaaaaaaa

SEQ ID NO: 3157472 - DNA, 560 bp, Cricetulus griseus
caatctactaagctatatcaacatagacatagacccagtgtacttaaagacagccttaggccttcaaagaagctgtctactgactgaaaataagatacgttctctaatatacaatgccttgaatcccatgcataaagagatttcccagaggtccacagccaccatgtatatcattggaggctattattggcatcctttatcagaggttcacatatgggatcctttgacaaatgtttggattcagggagcagaaataccagattataccagagagagttatgggcagtggtggcacacacctttaatcccagcacttgggaggcagaggcagacagatctctgagttcaaggacatcaaggccaacctggtctacatagcaggttctaggccagccatggctacagtgagaacctgtctttgaaagcctatgttgtacctgtatatgttatgggtctctaactgacaggaatttgaaatgtaaagagggaaccttctctacctctacaaaaccaacactttaaaatgtttccctttagaattcctcagaatgtggatttac

SEQ ID NO: 3157473 - DNA, 3097 bp, Cricetulus griseus
gggccgcagcggcagaaaagcccgcgggcggggcagccgagttcccggaggccccgcctgagcgcgcgcggaggagcccgaaagcaggatggcggcgtcggccctgtatgcctgcaccaagtgcacgcagcgctaccccttcgaggagctgtcgcaaggccagcagctctgcaaggaatgtcggattgcacatcctattgtaaaatgtacttactgcagatcagaatttcagcaggagagcaaaactaacacaatctgtaagaagtgtgctcagaatgtcaagcaatttggaacacccaagccttgtcaatactgtaacataattgcagcatttattggtaccaagtgtcagcgttgtacaaattcaagaaaaaaaatatggaccacctcagacctgtgaacagtgcaaacagcaatgtgcttttgatcggaaggaggaaggaacagaggaagagtttggggtcttcacattccaattcttcgtcttcatctctcactgagaaagaccagcaccattcaaaacaccatcaccaccaccatcaccaccaccatcgccacagtagtggccaccacaaaatcagcagtctaagtcctgagcaggagcaaggactgtggaaacagagccataaatcctctgcagcaattcagaatgaaactccaaagaaaaagcccaaattggaatctaagccatctaatggagatagagcagatagtgggggaacagtacaatttttgtcctttataagtcaactgaaagaagaagtgatgtcacttaaacgtctcttacagcaaagagaccagaccatttttagagaaagataaaaagttaactgaactgaaggcagactttcaataccaagaatcaaatttgagaactaagatgaacagtatggaaaaagctcacaaagaaactgtggaacaacttcaggccaaaaacagagaactactcaaacaggttgcagccttgtcaaagggtaaaaagtttgacaagagtggaagcgtgctaacgtctccttgaaaaggtctcttgtttagcatttctgcttgacagtgtgtatttgaggcgtcctgtgaagcccttaaattctgtgcagtggaaaaatatttttacatgccaagtaaattggtgtgtttcctattcacttttgtaattgacacacagcattttttaagttgtaaacatacagataaaacttcagctggtttggagtgacttcttaattctttgatacctagaactttttctagcaatagtattaaaggttgtggagtgcacgtgtgtgcactgtatacaatgcaacatgcaataatggagtggttggaagaacagcagcagggggtttgtgtcttgcttttgtttaacatgatgctgatttcaaataaatagttttcaatttagaaatgcaaaacttttaaacaaggaaaatggtgaacactgatttttttggggaattgtatttttacttcgcatcaacatgaatttagagaatcatggtgcttttattaaaagagcttcagagtatatgtgaatatgtttttaaaagttacatcactaacattagtttagtaatctaacatttcattgctgttataggattgatgtttactgtacagcatccaaggtaaaatgtgtttttgttttgtaaaaactgtagatttttacttacaagtgccttttgccacctaatgtttttatttataggaatgctgattttttgtacatatggtttgtttaaaaatcatgttaataagtgtttgtatataagtgcatatgtacagaacccaatttcaaaaagaaatcaattagtaacatgcaagattgcatattaagaattaactgataatgcatatagacttaagtgattttgtgatttgattctgtatcataagggaagctgttggtcattgagttcatttaattatgttgaaatactttcctaaagatttaattttaactccattttgatagagtgattttatttttatgttgtgtgacttcatgtttatattttgtgagttacatgttttgctttatttttatataaaatttctttaaaatttataatgtttctataacggtccatatatctgctttttttataatgtgttgctaagttaatatttatgtacaccatacttactttgtaaacttattacaaatctggaaaattaaataactttataatcaaatccatgcttgtgtctgaataattgaaatctgtaagattcagacactacttataagtaatttgtttcaaagtataaaattgtctataaagatttcagtagtatggaatagagtctgtgaaattacaaattagtttctgatttagataagtgtttatatggtcttcatatcaagattagtgttgtagataatgccttaatgtggatactaatatttggaggatttgtgcattcataaagttgtcgttactttgctttaagttttgtaacgattcatattacagtttcctggccatttttcaaaccacagtagtcaaaattctaagtgaactacaatagttcttacaccttgttggagatgatagaaatgaaatccccttttcccctttaactaacatggaaattgagaatcagtataaaatagtgaagctttgtaaagtgaaaggctaaaacctaaatttaggggcctcacagtattcagtcctaataagacaaactctttattctgtgaccttattttataacttaattgttttgcaattgtataaattagtaattgagtcccagtcccagatatgtagtgtattggcctaatgagttgataccatttaaatgtggacctgtccagaaatactatggtgtgctgtattgtacttttagcctgtttgctgcagttagcatatcccagtgagggtcatttggactccagtttatcatgtattaatagcctgtgaatattatggtcatctttaagagtgtattggtctaaatattcattttacaatgaacctgttaatgctggtcacatgtataaattaacaaaatattgtacctgtacacatctgactgttgacattttgtacttttttctaaacccaatatttcacaataaaaatatgtcaaaaagctt

SEQ ID NO: 3157474 - DNA, 301 bp, Cricetulus griseus
aggcaagaacatgagccgtccctatgcaagtgacaactgttcgttcgatgacgtggataagctgatgagtaccttgcagctggcagtccacatccccaccttcctccttggcctggtcccttaatctacttggcgatccgaggcttcagtaccttccttaagaagaaacagctagaatacattgccacttccatctacatgattaacttggctgtcttcgacttgctgcttgtgctctcgctcccattcaagatggccctgccgcaagtggagtaattgttcatttctatgtcaaaattgt

SEQ ID NO: 3157475 - DNA, 403 bp, Cricetulus griseus
accagaagtatgtctatgtagctgatgtaacagctaagaacattcatataatggaaaagcatgataattgggatttaactcaagtgaaggtcattcacctgggtaccttagtggataatttgaccattgaccctgccacgggagatattttggcagggtgccatcctaaccccatgaagctattgaactacaaccccgaggatcctccagggtcagaagtactacggatccaggatgttttgtcagataaacccagggtgaacacactctatgccaacaatggttctgtgcttcaggccagcactgtggcttctgtgtaccatgggataatgctcataggcactgtgtttcacaaagctctgtattgtgaactctaggtctttctcaaaaatcttcataattt

SEQ ID NO: 3157476 - DNA, 375 bp, Cricetulus griseus
  modified_base (365)..(365): a, c, t, g, unknown or other
gccttacttcttgccctggccactgtggaactcttcagcagcttcatattctactggcaacagttagccatctttcttggcctgacaacttcgtcctggatgcccttgtccatcactctctgctgctgctttgtgttatcaactcagccagcactactaaatgtgggtagatattcagtggtgtcagcatctagtttccacagcttataaagttttcaagactgaccaggagatggaagtattggactaaggaatgaacacttccgttcctgtccaaggctgctttgggagccatatatatatatacatatatatatatatatatatatatatatgattttgttgtttaagtacaataaaaaaanaaaaaaaaaa

SEQ ID NO: 3157477 - DNA, 447 bp, Cricetulus griseus
gctggggccccacctcacaaccccacgaccagaagagcaggaggcagctgggccggtggagccggcattgtgcctctcaagccatgggccacagggaaccacaacccgcaaggctgtagagaagtgggtgagtcccggagctgtggacagcactgagccccccatctcttccctggtggccactgccatggccgggctggtggtgccaggcatactgctgtgcatgctgagtgctgggtcaggcacctcagatctggaggccgctctgccccctgctccccacgactgccccaataactgcatctgtgctgccgatgtgttaagctgcgctggccatggcttacaggacgtgccggtagcattgcctgccacggctgcagaactcgatttaagccacaatgcactcgaacgcctgcaccctggctggttagcacccctctcccggct

SEQ ID NO: 3157478 - DNA, 631 bp, Cricetulus griseus
aaaaaactagttcagtattgagtggggggttatttacttgttgatcaaggttaacctctttggaacagcttagtaaaggagatcactaatgatagaacatagaaaggctgttgcctagaaatatgagactgagttttgaaacagaaagtgatagtttataatctagtgtgtcagtgtccattggtacttatcaatgaattattgggcagttagtttataattcttttaggcaatcaccataaattataattgtggacattggcaatatacaaaacagaatgaataaccacaaaagtacataattgtatataaacatttattttattatttttagtctagattttgttttacaaatccatatgcactcactatgtgctaggcttccttttaaatgatttttaaaatattaacttattcaattcccttaactctatataaagtaggcattgttgctatcccagttttacaaatgataagtagaagcagagatattacgtaacttacccagtggacacatctagtaaggagaacagttgagactgtttggctccagagtttgtgtttttaaccactctgttttctcacttttgttcagtgtttttataataaagatttgataataaaattcaag

SEQ ID NO: 3157479 - DNA, 733 bp, Cricetulus griseus
aaatatagaaggttcaactccaccagtcacagttttcaaaggttccaagagaccttacttaaaagaatgcattttgattattaaccacgatactggggagtgtcgcctagaaaaactcagcagcaacatcactgtgaaaaaaacaagggttgaaggaagtagtaaaattcagtatagactagaacaacagcaacaacaaatgtggaatccacctaggacttccaatcttgaacaccattctccatcagaagacaagatgtctccaatgtctctcatggatgacattgaaagagaactgaaggcagaagctagtctaatggaccagatgagtagttgcgacagttcatcagattccaaaagtacctcatcttcaagtagtgaggatagttctagtgattcagaagatgatgaccaatcctctccttcaggtccaggggcatatagctcaggacatcctagcatgtctgccaggtcacagtacaggactccagatactgaggctagctgcaatagatttcatgacagcagtgcccttctgatgagtactttacgaagtgatttgcagctgactgaatcagaaagtgacagcgatgactgaagcaatgttgagttaaaaataaaacatttgtaagactgtgccaatctactttgaattaagattaaatactcctgtgactaaggaaaatatgtcacatttgctataaagaattaaattgattcagaattttcaact

SEQ ID NO: 3157480 - DNA, 530 bp, Cricetulus griseus
tgtatgtgtatgtgtgtatgtgtgtgtatgtgtgtgtgtattgcctttagtacattgttagtactgtcttgtcacctcagattggggttgtgcactttatattgacttgtgtggtgttgcaaatcaacatgtgttgctgtaaaagcttgcacaattgtcagtatgtcttctatgtggtagccatattgaactttgagctttgagaccatgagaactacatttgcatctgttccagttctcacctctcttctccctcaccctctcaccctgtcccaagctgtatgccctgtacatcagctcttatagagaacataacctcagctaagccccaccctaagaaatctctttgtgaattctgtgatcgaacacaaaatggcacgtgcttttctgtttcaagtgataaatgcaaacactgtgtattaattagttgtgtgtgccaagatcttgttaccaaatggtgtttctaaataatgtcaatatttccccagcaccccttctattgctaaaagacagaataaaaataaaataaa

SEQ ID NO: 3157481 - DNA, 804 bp, Cricetulus griseus
caacaggacactcctacctccacaggcccacagctgctcatcgacagtgtcacagactcagtgctgggccctaacactgacatcacaggcaccccccacgtgtcctctgatggacgcttcatcgtcagtgtctccaacaagggcccctggatgcacgtgcaggaggtcacagtacggggggaaatccagaccctatatgacctaaaaataaacccaggcatctcagacttggcatttcagcattccttcactgaaggcaatcagtacaacgtctatgccactctcgacaaggagccagacctgctgttcctcgagctgtctaccgggaaaatgggcaggctgaagaacttaaaggagccacccactgggccagccccaccctggggcggaccccgcagaatcctgagggacagtgggctctttggacagtacctcctaacgccagctcaagagtcgctgttcctaatcaacgggagacaaaacgccctgagatgcgaggtgtcgggcacaaaagggtgtggccacagtggtgtgggtcggggaggtatgaaaaaaccctgtacttcgctttgtggttcaacactgatctccttgcaagttccctagtataaggtatgcgcttcaaccaagatgggggggtttccaatcagaagtatgactaatgccttgagctgtaatgagaacacatgctgctgtgtgcaaggaaatcatctctgttcctggttgcacaccacgtcgcctggggacaccacagaaccgagggatcctgctgcccaggctgacacttccgtcgattgccttcac

SEQ ID NO: 3157482 - DNA, 311 bp, Cricetulus griseus
gaggtggacatctgccgcctgccgcacgcccttgccatccccctgagcaagctggaacgcggggatgccgacagcctggcgctcctgggggacgccctccggggagagaagcggaggtcgcgggaaggggctgctctgtccgtgtatgtcatctgcaaacaggggaatgactcccagaaagccgtcagggtcctgcagtccttaacggcagtgccagagctgggctctctaaccgtccgggatattgtcgggggactcatggcctgggccaccaaaattgatgcggcatttccacagtactgaagggacag

SEQ ID NO: 3157483 - DNA, 1150 bp, Cricetulus griseus
  modified_base (1124)..(1124): a, c, t, g, unknown or other
ggagagtccggtcctcaccagattctgaggagcctggtccggctatctgtggctgcttttgcggaacggaaccccgtggaggagcttgctggagattctcctcctgtccagcaaatctcccagctgctgtccttgctgcatcagggccaattccagcccaaaccaaaccaccgaggaaataaatacttggccaagcccggcggcagcagggctaccagcccagacgcagatggcccagatatgaggctcggtggccaaacagaacctgacctggaagaaggtcccttaggccctgaggaggacctttctgtgaagcgacttctagaagaagagctatccagcctgctggaccctcatacaggtctggccctggacaagctttcgtctcagagatgagctcgctgctggagatgctgttggagcagcacacggtgccagtggaggctgcatccgcggctttgcggcggctctcagtgtgcggcaggaccctcagtctagacctggccaccagtggggcctccagctcggaagcacagctgggtagaaagaaggcggaagagggccgacttggccatggcaggaatctatgaacatggttggttccgatgccttggatccaatgtcccctggatgttagagtaactcaggccttgaggatctcagagagcgagctggtttactaaaattgtaggaattcactgggagtgaggtctattggtcatctaattcctggcatgaaaccactgttgggtcatggcaggagtgggtcacacggttcacggtgacaggcacacagatgatggacatgtgtgtccttgaccccactccactatgtgatccaacaatatgcttctcagctggaaaatcaggaccaagtaaagcaagactgtaaatagagtatttatatgagccaggcactaggctttcatttgatttgagcagggaatagaggcagagccaggatttgtgctcaggttggccaaacaccaaagcccatgccatcaaccatggcactagattgccaactaaggaatagaaaaggtaaagtccctgagatgaagacttgcagatagaaagtattcaggcccatatgtctgcctgcttacaagcatgggttaaaaggngcttgcatctgcccaatgccagtccc

SEQ ID NO: 3157484 - DNA, 433 bp, Cricetulus griseus
  modified_base (307)..(307): a, c, t, g, unknown or other
ttgagatgttggtgagatccatcaggcaactgaaagacctgcacgacgtcttcagcttcagatacacggttttcactcaaaagaagacatcatctttggaccctcatcagaaggaacagttccagcttgtacagacaacagccaatgaactggacagaatgagaaaggaagtgctggatacgtccagaacactagtaggccgattaaccaccctggttgacctgttgctgccaaaattggatgagtggaaggtgcagcagcagaaatcttgcattggagccccactgccagagctgcagctggaacngctggaacagtggttgacggctggagcaaagctcctgttccaccttcgacagctgctgagacagctgaaggaaatgagccacatgcttaagtatgacggggacatgttcagcaaaggggtgacctg

SEQ ID NO: 3157485 - DNA, 2014 bp, Cricetulus griseus
gccctgctgagctcaggggctgtggactattgtctccatgttctcaagtctctgctagaatactggaagagccagcagaatgatgaggagcccgtggctaccagccagttgcttaaaccacacacgacatcatccccaccagatatgagcccattctttctccgccagtatgtgaagggtcatgctgctgatgtgtttgaagcctatacccagctgctcactgaaatggtcctgaggctcccctaccaaatcaaaaagaattgcagacaccagctctcgcatccctcctcctgtctttgatcactcctggttctactttctctctgagtacctaatgatccaggttctgattggaaccgactccatcaaaaaacctgcataaactagagcaggtgtccagtgacgagggcattggtaccctggctgagaacctgctggaggcccctgagagaacaccctgatgtgaacaagaagattgatgcagcccgcagggagacccgagcagagaagaagcgcatggccatggccatgaggcagaaggctctgggcactctgggcatgacgacaaacgagaagggccaggtggtgaccaagactgcactcctgaagcagatggaagagctgatagaggagccgggcctcacctgctgcatctgcagggaggggtacaaattccagcccacaaaggtcttaggcatttacaccttcaccaaacgggtagctttggaggagatggagaacaagccccggaaacagcagggctacagtactgtgtcccatttcaacattgtgcattacgactgtcacctagctgctgtcagattggctagaggccgagaagagtgggagagtgctgccctacagaatgccaacacgaagtgcaatggtctccttccagtctggggcccccatgtccctgaatcagcttttgccacttgcttagcaaggcataacacttacctccaggaatgtacgggccagcgggaacccacgtaccagctcaacatccatgacatcaagctgctcttcctgcgctttgccatggagcagtcattcagtgcagacactggtgggggcggccgggagagcaacatccacctgatcccatacatcattcacaccgtgctttacgtcctgaacacaactcgagcaacatcccgggaggaaaagaacctgcaaggcttcctggagcagcccaaggagaagtgggtagagagtgccttcgatgtagacgggccccactacttcaccatcctggccctgcatgttctaccccctgagcagtggagagccactcgtgtggagatcctacgcaggctgctggtagcctcgcatgcccgggcagtggctccaggaggagccaccaggctaacagataaggcagtgaaggactattctgcctaccgttcttccctgctcttctgggctcttgttgatctcatttacaacatgtttaagaaggtgcccaccagtaacacggagggcggctggtcctgctctctggccgagtacatccgccacaatgacatgcccatctatgaagctgccgacaaagccctgaaaaccttccaggaggagttcatgccagtggagaccttctcagagttcctcgatgcagcaggtctcctgtctgaagtcaccgatgcagagggcttcctaaaggacctattaaactcaatcccctgaccacccccacgggagtgagattgaagctagcttgccttcctccctcgttcctccctccgtgtgcattcatttccccacagatgctgcattagcaccccctcctccctcatttttctcggagtgacttggggtttgtaggtttcctgctctatctatcacgtgtgtatgcggcgtgggctatgaattgtttgtagcccaagccattgaaggacctatacatacctaggggctgtgagttgtcctggccagcttgagtgtgcacatcttgaaataaatgaatgacttagtacacattagaaaaaaaaaaaaaaaaaaaaaaaaaaaaaaa

SEQ ID NO: 3157486 - DNA, 276 bp, Cricetulus griseus
aagggctccaagaaggccgtcaccaaggcgcaaaagaaagacggcaagaagcgcaagcgcagccgcaaggagagctattccgtctatgtgtacaaggtcctgaagcaggtgcaccccgacaccggcatctcctccaaggccatgggcatcatgaactccttcgtgaacgacatcttcgagcgcatcgcgggcgaggcttcccgcctggcgcattacaacaagcgctcgaccatcacttcccgggagatccagacggccgtgcgcctgctgctgccc

SEQ ID NO: 3157487 - DNA, 308 bp, Cricetulus griseus
tgctttgcgacataatctgtggattttatatatttctggcatcaatcaacacttcccatttgactctttgaccatcagctgggaggccggactgtttctgtgaatgaacaagccgattttaacttgcttggagcgatgctgaaattccgagagactgctaagtgtgtgagtggatccacagccatttccaagtacccaaataccttgatttcaagaagatatgttctgcaacagaaacttggcagtggaagttttggaactgtctatctagtgtcagacaagaaagccaaacagggagaagaactaaa

SEQ ID NO: 3157488 - DNA, 481 bp, Cricetulus griseus
ttttgcctaaaacaaacaaaacaaattaggaaagcttgtgactcaaacagaccacctctctgttatatacgccacatctctgcactgatacctaaaatgtccataagagtacgtgcctatacctctaaaataataataattattaataataataataactaccatactgttattctgagaattccagaacatgtctaagaattttgctaaatgtgattaaatactccaaaatatagaatcatgccctaactcttgactctttgaaggcatataacctcaaagagtttctgttttttctaagcaacaagtatatcctccaaacagtcccttagtctgtccccagattctaacttggcagacatcctgttagcaagatgcacatctgagcctctcaggtgaggttgtctggtcaccaggagacagagtatcctgaaggattgaccatattttatcatgtcttcctgttacaaccaaaaaagaa

SEQ ID NO: 3157489 - DNA, 369 bp, Cricetulus griseus
tgagtgatgactttaaaaattactgatataaacatagactttacccagctgaagcttgatgataaagaatacaaaagcgttcgtgaagtaagtgaagactggtttgacgcaacggagaggctgactggagttgacttctcgggacctcaggaaaatgaaagagaacatgacgaatggaacccaaagagtccattagaatcagaaatgaagaatggtgaactgcttcgaagaagtaaaggctttttgatacatgttggtggtctttgcccctctgtatctgaggctgatttaaggactcatttccagaaataccaagtttctgaaatttcaattgatgattctactaattacagatatgcatctcttgct

SEQ ID NO: 3157490 - DNA, 285 bp, Cricetulus griseus
ggggaaacacctctagtatatcactctccatcctgttcttccatggggtctgttacggccatattctattactgttgttaagagtttaattagccacagtttttgttttagcaagttatgtaaatgccgtaaattgtgtatatgttaaaaaagtaacttaacaagaaatctatacccaaagttgtttgtatatttaaatgcttagctttattttttgtaaagtgcagtatgctcccacatttgtgtaatcttgttggtcagatgtttaaaattatttcaaataca

SEQ ID NO: 3157491 - DNA, 639 bp, Cricetulus griseus
gggatgatctcttcatttttattagtaatcctgtcagctttgcttatcaattttgcatttggagaaacagaaataaggtttgcaggacaaacagaattgtttgttaatgaaacaagtaccacagttattcgtcttgtcattgagagaataggagatccaacaaacgttactgccatcgtgtcgctgaatggaaaagacactggtgacttttttgatacatatgctgcggcttttatccctgctggaggaacaaacaggactgtgtacatagcagtgtgtgatgatgaccttccagagcctgatgaaactttcacttttcacttgacattacagaaaccctcagcaaatgtgaaacttggatggccaaggactgctactgtgacaggtgcactgggagctaagcagtgagtttgatatcactggagactttctttccaccagtggatttttccccattgctgatggagagagtgaagcgagctttgatgtccatttgctgccagacgatacacctgagattcaggaagagtatgctgtccggctggtttctgtagagggaggagcagagctggacctggaaagatgtaccacatggttctctgtgtctgcaaatgacgatcctcatggtgtgtttgccct

SEQ ID NO: 3157492 - DNA, 837 bp, Cricetulus griseus
gaagagaaatggcatatcatctgtcagaaatgggagcccatgtggtattgactgcaagatcagaggaaggtctccagaaggtggtatcccgctgccttgaactcggagcagcctctgctcactacattgctggcaccatggaagatatgacgtttgcggagcaatttgttcttaaagcaggaaagctcatgggcggactggacatgctcattctcaaccacatcacttacaccaatatgggtttcttccaagatgatatccatgctgtgcgcaaagccatggaggtcaacttcatcagctatgtggtcatgagcgtggctgccttacccatgctgaagcagagtaacggcagcattgttgtcatctcctccatggctgggaaaatggcccatcccctggttgctccctactctgcaagcaagtttgctctggacgggttcttctcttccattagaaaagagcacgcagtaaacaaggtcaacgtgtccatcactctctgtgttcttggcctcataaacacagaaacagccatgaaggcgacctctggggtactcacttcacaagcctctcccaaggaggaatgcgccctggagatcatcaaaggtgctgctctgagaaaagatgaggtgtactacgacagctggagctggacccctatcctcctggggaacccaggcaggaagatcataggaaatttcttgcagtaaagagcttaaacgtttgacaagtttgtcagcagctaggaattcctgaggcctagtgagaggtcttagaacagctctgcctcatatctctgtgagccctatccacaaaagcctattcccagagatgcacaaa

SEQ ID NO: 3157493 - DNA, 633 bp, Cricetulus griseus
ggcttactgcctgggccagatgcaggactcgcgcgccatcccagtgctggtgggtgtgctgtgcgacaggaaccaagagcccatggtgcgccatgaggctggggaagcactaggggccatcggtaacccggaagttctagaccttctgaagcagtattctaccgaccctgtggttgaggtggcgttgggcgtctggagtggctgcagcagcacccccgggaggctgccagttcaggaccctacctctctgtggacccggcaccccctgcggcagagcgggatgtggggcggctgcgggagaccctgctggacgaggcacggccactcttcgagcggtaccgtgccatgttcgccctacgcaacgttggtggcaaagaggcggccttggccctggctgaaggcctacactgtggcagcgcgctcttccgccacgaagtgggttatgtgctgggccagctgcagcacgaggcagccgttggagagctggcggccacactggcgcggaccaccgagagcgccatggtgcggcatgagtgcgcggaggccctgggtgccatcgccaggcctgcttgcctgacggcgctgcgagagctcatgccaccgacaccgagcgcgtggtgagggagagctgcg

SEQ ID NO: 3157494 - DNA, 209 bp, Cricetulus griseus
tacatggattttgtctttcacgaaatcatagaggagtggcagaaaagaggtggccagccgtggcagcttattgaacctgtggatggattccaccccaatgaggtggcttcactgctgctggcagaccgtgtctggaagaagatacagtcccaatggcctcagatcctaggaaaggagaatccattcaattctcagattgaagaagtgtt

SEQ ID NO: 3157495 - DNA, 1014 bp, Cricetulus griseus
ccgtactgccgcgagttcggcctcagctcgcctcggctgtcgctgcgctcgctcaccgctgtcacctgcgccgtgtggctggtggcttacggactcttcaccctgtgcgagcatgatcctctctgccgccatcttcatcaccatcataggcctgcttggttacctccattttgtgaagattgatcaggagactctattaatcattgactcacttggcatccagatgacttcatcctatgcttcaaggcaaagaaagtaccaccttcatagagatggataaggttaaggatgttatcattaatgaggcaatttacatgcaaaaggtgatttactacctctgcatcttattgaaggacccagggaagccacatgagatatcccaagtagtccctgtcttccagagtgccaagccccggctggactgcttgattgaagtatacaggagctgccaggagattctggcacaccagaaagccacatcaacaagcccgtgaatctcagcattcaaagaccagcattgtctttgagcgaggactcctagaccagagttgctggtttaaggaataaaatgctttccaaagggctagcctctggttcacctagctcctataatctgtgcaagatgattcaatccacagcttaactagggatggtgtggatgccagcaattcagcacctaggggtatcaacaggaggattgaaacttttgaggccagcctgggctacatggcaaggcacggtctcaaactgtaaaataaatatccaaaacacaccgtaaccgcctggttcactgacagctttattgacaggcatacatagcatttcagccatgagtgtcaagcacattagtacctttctgttacttggtattttctattgtttcaaaagctgcttttggccaagagggcttagatgaaaagagatttcatgttggtcccagaaatgggactgtcatattaaaggatgaaaaagccaatttacagaagctgttgtttctaaggcagtttcttagat

SEQ ID NO: 3157496 - DNA, 208 bp, Cricetulus griseus
  modified_base (193)..(193): a, c, t, g, unknown or other
  modified_base (201)..(201): a, c, t, g, unknown or other
aaaagtacaggctgagattgacagagtgattggccttaggaggcagccaagcacagctgacagagagtccatgccctacactaatgctgtcattcatgaggtgcagagaataggtaatatcatccccttgaatgttcccagggaagtaacaactgaaaaagaaattaatttcaaaactaaaaaaaaaaaaaanaaaaaaanaaaaaaa

SEQ ID NO: 3157497 - DNA, 844 bp, Cricetulus griseus
gaaagacgtgcctagtccgacgattcactcaagtggagattaataggtgaaaaggtaaagttctagatctgggacactgcgggtcaagagagatttcgttcaatcacccaaagttattaccgcagcgccaatgccttgatccttacctatgacatcacctgtgaggaatccttccgttgccttcctgagtggttgcgagagatagaacagtatgctagcaataaggtcatcactgtgttagtgggcaacaagattgacctggctgaaaaggagagaggtctcccagcagagggcagaggaattctcagaggctcaggacatgtattacctggagacatcagccaaggaatctgataatgtggagaaactcttccttgacttagcatgccgactcatcagtgaagcaagacagaacacactggtagaacaatgtactcttccacccgttacccggagagaggaaaagcatcagtcttatttgtactttgttgatctgcaggagcatgttgtcttttgtttttaaaaagtcaagtaaaaagtgcattcctgaacacagtgcagggggattgtgtactgtaggaatccctacctgtgtgtcagcgggtgcatgtggggctgttctttaggcttaagtggtaatctggtgcccatggttttcttgtctacaaggtaaaaccaaaactggaaaaggccaatactgtctctgtggtacttattgataaccccatggagattttgaaaagtgttaattacttttgtccacaacaaaaaaaaaaaaaaaaaaaaaaaaaaaaaaaaaaaaaaaaaaaaaaaaaaaaaaaaaaaaaaaaaaaaaaaaaaaaaa

SEQ ID NO: 3157498 - DNA, 435 bp, Cricetulus griseus
ggcaccgagggtgggggctggtaccctggctgctggctaccagaatttcctcatctgcattgagatgctatttgcctcacttgcgctgcgctatgccttccccagccaggtgtactcagagaagaagaactcaccagccccgccagcacccatgcaaagcatatccagtggcttgaaggagaccatcagcccacaggacattgtccaggatgctatccataacttctcaccagcataccagcagtatacacagcagtccacacacgaagctcctgggcctggccagggtgagcacccatcacccaacaccccaccctcggcccagccagtggctctggagggggtaagaagagtccgcaacatagagaagcgcatgctgattccctcagaggacctgtagaggcatggggtgtgtggagcctagctggggaccca

SEQ ID NO: 3157499 - DNA, 462 bp, Cricetulus griseus
ctcaaggtagcagcaacggagagggagtttggcaactaccttttccgccagaatcgcttctgtgatgccaaagtgagatacaagcgggccttgctgctgcttcaccgacgcttggcaatctgtaaggagcagcacctggtggagcctgctgagcttctagtcctccttaacctgtcttttgtgtacctgaagctagaccgaccagccatggccctgcgttatggggagcaggctctgctcattgaccaaaggaatgccaaggccctcttcaggtgtggacaggcttgtctccttctaactgagtatgagcaggcccgggattttctagtgagagctcagaaggagcagccctgcaaccatgacatcaataatagaaactgaagaagctgtaaaaagtagtatctgtgtgtgtgtgtgtgtgtgtgtgtgtgtgtgtgtgtgtgtgtgtgtgtgttgttgttt

SEQ ID NO: 3157500 - DNA, 458 bp, Cricetulus griseus
agggtgcccctcgcagggctatcacaagtggccaaaattgttctccacagtgacctcttggtagtcctggcatgccaatagcagcccctcagggaggtttctagtccttctctaaaggctcagaattggagttatgccttctgccctatcccagggaggtgatgatttaaggaatcctaaaatcctagggactctgtccctagctcaggttgggcttcactggacactcatgctccacaccaaagcaggacaccctactgctccctggcgatccctctactctgaggaggcagagaccttccttgatgcttatctggcttttacaaatatcccctttcctaccagtccctcttctaagccacttaccatgctcccctccctgccactgtgttacggcatgccaggagagcacaggtacattctggagaggagcagaagtccaaggacccaggaactgt

SEQ ID NO: 3157501 - DNA, 502 bp, Cricetulus griseus
actgaccacagcggcttcatgaaactgaggaacttagaaacttctaaaggaacctgctagagaaagcaaacaagactgtggatgatacaaaactagctgagtacacagacctcatgctgaaactatttgattcaaataatgatggaaagctggaactgacggagatggccaggttactaccagtgcaggaaaatttccttcttaaattccagggaatcaaaatgtgtgggaaagagttcaataaggcttttgagttatatgatcaggatggcaacggatacatagatgaaaatgagctggatgctttactgaaggatctgtgtgagaagaacaaacaggaactggatgttaataatattactacctacaagaagaacataatggccttgtcggatggagggaagctgtaccgaacagatcttgcccttattctctctgctggggacaactagggttggtggccacaaccatttgctagtgatacattgtatctaaaacataa

SEQ ID NO: 3157502 - DNA, 467 bp, Cricetulus griseus
ggcatgaagcagcagaactggtttgggctgacagccaagatgggcgacagtgctgtcaggggtcttttccatcatggccacccacatgcacctcatctttgaaaggaaacatctcgagaacagcaactgcacggataacctccagagtcagttcaccaacgtggtgagccacttcatcatctgctggagcttcaaaatcgttctcctcctgtccctcgtcaccatggcggtcagctgcttcctcctgtattctgtgtatgcccagatttacgggggtctcatgagctacaccatctggatcttcacctatgagtccatcaacctggctgttcagatcttcaccaatgagttcagcgtggcgctggtcagagccatgcgctggttcggctgggtgtcccgtgcatccctacacagcctctgtctgtactttgtcgttacccatgcccaaatcatctaccagagtaaaa

SEQ ID NO: 3157503 - DNA, 787 bp, Cricetulus griseus
gacctgagtgcggtgcagagctggctcgcccgccgctggctgcccgcaggttgtgaaacagcgattttattcccgatgcggtccaagaagatttttggaagcgtgcatcctgtaagaccaatgaagcttgaatcttttagtacttgcatttgggtcaaagccacagatgtcttaaacaaaaccatcctgttttcttatggcacaaagtggaatccctatgagatccagttgtacctcagctcccagtccctagtgtttgtggtgggtggaaaggagaataagctaactgcagacattgtggtttccctggggaggtggacccacctctgtggtacttggagttcagagcaggggagtatgtccttgtgggtaaatggggagagggtggctaccactgtggagatggccatgcttcactctgttcctgagggcggaatcctacagattggccaagaaaagaatggttgctgtgtaggcgggggctttgatgaaacattagcgttttctggaagaatcacgggcttcaatatctgggatcgtgttctcagcgaggaggagataagggagagtggaggagtcgagtcttgccacatcaggggaaacatcgtcgggtggggagtaacagaaattcagccacacggaggagcgcagtatgtttcttaagtgttgtgaaactctacttgaagccaaaggagactcacactttaaatatatgcctgttgggaaagtctaaaaacttcggtgcgtaataacttttttttttttttattttaattaattttatttt

SEQ ID NO: 3157504 - DNA, 502 bp, Cricetulus griseus
gctgtgaatttcagttcggagtggtctgtgggccaagtcagcaccaacaccacatacaaagccttcagtcccaagtgggtcagcgtggacgtgggactacagattgggctcggaggagtcaacatcacactcacagggaccccagtgcagcagctgaatgaaaccatcaactacaatgaggagttcaggtggcgcctgggtgagagctacgcagaggagtatacaaaggcactggagaagggacttccagacccagtgctctacctggctgagaagttcaccccccgaagcccatgtggcctgtacaaccagtaccgcctggcaggacattatgcttcagccatgctgtgggtggcattcctctgctggctgctggccaatgtgatgttgtctatgccggtgctgatttatgggggccactgctggctactggcctcttccagctgttggcacttaccttcttctccatggccacatcactcatatcaccctgtcccctgcg

SEQ ID NO: 3157505 - DNA, 644 bp, Cricetulus griseus
cctggatccgtcgtcccttcttccctttccactcccccagccgtctctttgaccagttcttcggagagcacctgttggagtctgacctcttctcaactgccacttctctgagccccttctaccttcggccaccctccttccttcgggcacccagctggattgacactggactctcagagatgcgtatggagaaggacagattctctgtcaacctggacgtgaagcacttctccccagaggagctgaaagtcaaggtgctgggaagacgtggttgaagtgcatggcaagcacgaagaacgccaggacgaacacggtttcatctctagggagttccacaggaagtaccggatcccagctgatgtggatcctctgaccattacttcatccctatcatctgatggggtcctcactgtgaatggaccaaggaaacaggcctctggccccgagcgtaccattcccatcacccgtgaagagaagcctgctgtcactgcagcccctaagaagtagactccctttctctcattgcattttttaaaacaagaaagtttcccatcagtgaaggaaaatctgtgactagtgctgaagcttattaatgctaagggctggcccagattattaagctaataaaatatcattcagacaac

SEQ ID NO: 3157506 - DNA, 419 bp, Cricetulus griseus
ctttgccttctcgggccttggattcacaacattctacctggctggcaagctgcactgcttcacggagagtgggcggggaaagagctggcggctctgtgctgctatcttgcccttgtactgtgccatgatgattgctctgtctcgaatgtgtgactacaagcatcactggcaagattcttttgttggaggagtgattggcctcatttttgcctatatttgctacagacagcattaccctcctctggccaacacagcgtgccacaaaccctatgtcagtctccgagtgcccacttcattgaagaaggaggagaggccgacagccgacagtacacccagcttgcctctggaggggatcactgagggccccgtatgatgggtgtctaggaagatggacgctgagcctgtggctcattcttcta

SEQ ID NO: 3157507 - DNA, 1621 bp, Cricetulus griseus
ttttcttttttttttttttttgccagcaaatagaaaatacattatttagatatactttatgctgagagtgagtatatatgctttgtcctatttaaacttgtgagaaaaaagtggtatccctcaatacatttagaaacatgggggttatcttgtttcacagtagggttggggcaaaagaaggagaatgaacaaaggatgaccctgtttaactgaaccttagcatggccaaggggtggtcccagctgattacggaaacacaggctgtggggtttctcctggtggtgtatcttgaatttgaaatcccaaagcctaggcaggggaaattgtccgcccaatggaaaggtgatctagccccggttttgctattgcacgacatcggtagaagtcacgcctttgcaaacaagcaagtcagtaaatgcaatgatcacaaaatatgggaaattgaaagcattccagaaaaaaagaatggttttatatattcgtttttatgatgtatagtagtaaaaaaaaaagtcctcctcatcccacatcagaggctaatctggagtagcagagtttcatttcagaggcacccaccgtttcactgaaaccaaacttcaaagcattgaattcctttacctttatttatatgctcaacactctcagtaatatccagatatacgctttttattaatagttacaggtttgtgggttagtgggatttcagtaagggaacaaaaaaaaatcccttctaagatggatccatagaaccaaaataatactgcatgtactacagtcaaggaaatcaagtgatcctgtaataattccagttagtcctaacgacattagcagttctaatgtcatcttagaaatggtgaattctgtggttcttctagcatttgtctctaacaaatggcgaaataattactcatggccctctctgccattgtctttcattttcactgtgcaattagacccttttgcttcactgtcatgccaccgcagattaaagtttaaaaaaaaaagaaaaagaaaaaaaaaaaaaaaagcatgaagggaagccctggagtcccccatcagccccatttggtcaaaccccagcgacctttgccccaaaaaaaaaaaacaaaaaaataaacgcgttctttaattctgtattattagcaacctctgttgtatatagtgtttgataataaagtattaatttgattcttatgtcttttgtaagtgagaacaatagactttcaggatacaaaacttgcattgaggctttgaaacatccagtgtatacatggctgagaagtcacacgtgactggaactggttctgtactttggtttggttttctgtttgttcattcccccccaggaagtcttgtcactaccaagtgcggctcagactcaggatggttgcagaccagtccctagaggaaggctcagtggggctgttccctctgtgtccttgtgaaaggaaaagccacagtacctgtgggctttcagggactctgtttttctcctgtgccttagcaacggctgcagccatttttatagtttcacaaaattaggaaaagttttaaactccttcccattcattgttctcagagttgtggtcaccagctttttctttgaaaaccacctccacca

SEQ ID NO: 3157508 - DNA, 349 bp, Cricetulus griseus
gatgggatttcatcttttgagaacctcttggcaagcatcatccagagagtctttgtgtgggttgtgtctgcagtcacgtgctttggaaacatttttgtcatttgtatgcgaccatacatcaggtctgagaacaagctgcacgccttgtccatcatttctctgtgctgtgctgactgcctaatgggagtatatttatttgtcatcggagcctttgacctcaagtttcggggagagtacaacaaatatgcccagccgtggaaggagagtgctcattgtcagttcatggggtctctggccattctgtccacagaagtatccgttttacttttaacatttctgacgctggaaa

SEQ ID NO: 3157509 - DNA, 2605 bp, Cricetulus griseus
cgctttcaaagtcgcagggcgggccgagtggactccgcggcggctcgcgggccgggctgcgccgccgcgtgagtcggatgctgatgcctccgcgccggggccccctgcgaggaatcggtaaaggtgatgaaaactccaaactaaaatatcgaaatggccacagaatccgacttactgagagacccacgtgataaaatgaatgatattcctaggcagcttcaaattgaacatattttaaaagacccaaatatgcagaacagcatgtctaaaggaggcagaggtgatgtactagtaaactccacagatgaacaaagttctttacctcctcttattgttgagtatgagaaacatctggaagagctaagcagacaattgacctattaccagaaacacatgggtgagatgaaactacaacttgaaactgtcatcactgaaaacgaaaggttgcacagtaaattaaaagatgctgttgaaaagcaattggaagcccttcccttttggcacagggataggaaatgacatctgtgcagatgatgatgagactgtgaggaaccttcaggaacagttgcaactagccaatcaggagaaagcttgggctctggaactctggcagactgcttctcaggagttggaaagtatacggaaactctaccaggaacatatgactgaagcccagattcatgtatttgaaaatcaaaagcaaaaggatcagctgaataattttcaacaactaaccaagaaacttcatgttgctaatgagaacatagaaatgactaaccaacacttcctgaaaacagtaactgaacaaagtatggagattgagaaacttcgaaaacatcttaggcaagccaagttagatctgagagttgcagtaacgaaaagtggaagagttaactaaagtgactgaaggtcctcaagaacagatgctgaagaaggatgaagatattatatctgcccagggaaaagaggaagcatcagatagacgattacagcagttacagtcaagtataaaacagttagagtcaagattgtgtatagcaattgaagaagccaacgtactgagaacagggaaaatacatttggaaaagcaaatcaaagagctgcaagcaaagtgcaatgaatcagaaaatgagaaatatgaggctatttcaagagccagagatagcatgcaactcttagaagaggctaaaccttaaaaagaatcagattctgcttgaagagaaaaagaagttgaaagcacaaaaaaacagtatgaaatactgatttcacaattaagggaagaactttcagccccttcagatggactgtgatgaaaagcaaggtcaaatcgatcgagccatcagagggaaaagagcagtggaagaagaacttgagaagatttaccgtgaaggcaagcaggatgaaggtgattacagaaaactggaagaaatgcaccaaagatgtcttgctgcagagcgtacaaaagatgatcttcagctaagactaaagagtgcagaaaatagaataaaacaacttgaaattaattcttcagaagagatatcacgttctcatgaaatgatccaaaaacttcaaactgtactggagtctgaaagggaaaactgtggctttgtcagtgagcaaaggctgaaacttcaggaagaaaatgaacaactacagaaagagactgaggatttaagaaaaattgctctggaggcccaaaaaaaagcaaaattaaaggtcagtacaatggagcatcagttctcaataaaggaacatgggtttgaagttcagttgagagagatggaggacagtaatcggaattccattgttgaactgaggcatctattggcagctcaacaaaaggcagccaataggtggaaagaagaaacaaagaaacttactgaatgtgcagaaatgaggatcaacagtctaaagagtgagctgaatcgacagaaatttcatacacaagagctactttctcagctggaaatggcaaatgaaaaggtagttgagaatgaaaagttaattctggaacatcaagaaaaggcaaacagacttcaaagacgtctaagtcaggcagaagagagagctgcttcagcatcccagcagctcagtgtgattacagtgcagagaagaaaagcagcctccatgatgaatctggaaaatatttaaacataatcatagttcactgacagaactgtagagttgggaaagctgttgtaccaaagtgcattgacatggagaagcctgcagagaatggtgaaagcttgtgtcattttccataagcattttccattctgttttgagggttattggaaaacagaacagtgacagcttcctgtaagtaaaaaatatatatataatcttatacttgagattcagtggagaataaagccagctgagaagaacacactgccttcatcaatgtgtctaaatttaaatccccttttttcccttgaaagaatatattttcaaaagaggtttaataaaaaccctaggatttgatatttcaggttctaaaatttggagatttaatatctcattgttatttctaagtcatttttatagttcttaagattctctactatgaactctaatataataaattatgtaattttaagtaaaa

SEQ ID NO: 3157510 - DNA, 700 bp, Cricetulus griseus
cttctttcattttcaactctctggtagttactctgctggcctcatggtcctgtctgaagcagaaagtctaccatctacttctgtagtatcaagacttctgttctctggctaaagcttcctgactatgcaatagcatgtgggaggggccaaatacaccccactgcagccacaccctctggtaaagatacaaatagtgatgcttgggactgctcatcagagccactctgccttcaccatgaagtccagtaccttcttccctttcatggtgctccttgctctggggatcctggcatcctggactgtggaaggaggcaaaaatgatgctatcaaaagtggtgcctgcccttctagaaggcctgtcaactgcctgaggaaggagaaaccagagtgtgattctgactggcaatgcccgggaaataagaggtgctgccaatttaggtgtggtttcaaatgcattgatcctcttcccatccgcactgcagtgaggtcgaagcctggcaagtgcccaaagattcaaggacaatgtttgatgctgaatcctcccaataggtgtaagagggatggcgagtgtgctggcaactataagtgttgcctgggcatgtgtgggaaactctgccttctcccacagtaagcctgactccctggcatttcaggcagctctgaaccgtgctgtgtgtgctctggacctccttctctgctc

SEQ ID NO: 3157511 - DNA, 284 bp, Cricetulus griseus
ggcacaagatcctcaacggagaggccgcccccacggcaggggtggggcctcggcgtcctaaggattggagggaatcctggccttgagcatcaagagggtcttccttcccttctagaattttcttttaatcataccttttgatccctccctcccattcattaatttttctgccccttgggtccttgtcaattttctagcccaagtcgttcctctccctcctggatttgcagtagcagaggagtgaagaagtagcctcctgctcccagcacggtcccattgagagg

SEQ ID NO: 3157512 - DNA, 553 bp, Cricetulus griseus
gaaggacccaggagaccatgggcgcctccaggctctacacgctggtgctggtgctgcagcctcagcgagttctgctgggcatgaagaagaggggctttggtgctggccgctggaatggcttcgggggcaaagtgcaggaaggagagaccattgaggacggagctaagagggagctgcaggaagagagtggcctgacagtagatgcactgctcaaggtgggccacatctcatttgagtttgtgggttccgaggagctgatggatgtgcatgtcttctctactgaccatgtgcatgggacgcccacagagagtgacgaaatgcgccctcagtggttccaactggaccagattccctttgcagacatgtggcctgatgacagctactggttcccactcctgcttcagaagaagaagttctgtgggtacttcaagttccaggatcaggacaccatccttgactactcgcttcgtgaggtggatgaactctaatacagaggtctggtgggttccagccacactcaggttgctacacagccacaaggtgtcagtccaag

SEQ ID NO: 3157513 - DNA, 2739 bp, Cricetulus griseus
  modified_base (2324)..(2324): a, c, t, g, unknown or other
ccggcgcggagggcgcgagcgcgcggcgcgggccgagggccgagggcggcggcgcggggaccccggggcccagcggcccatggggcgcgaggcgtgaagccgcggcctgccctgcggtggggggtggggggagcggggcggggcgatggataaactgaccatcatctcaggatgtctctttctggccgccgatatcttcgccatcgccagcatcgccaacccggactggatcaacaccggggagtcggcgggagcacttactgtgggcctcgtgcgacagtgtcaaacaatccatggacgagaccggacctgcatccctccccggcttcccccagagtgggtcaccaccttgttttttatcatcatgggaattatttccttgactgtcacatgtggtttgctggtggcttcccactggcgaagagaagctacaaaatatgctcgatggatagcattcactggaacttctctttgctggcaaagtctgtttaccaggctgacgaatgtctaaacggcttaactcgcttttacattttaatattttttattattattatttttagaggttgagaggacagagagaagtcatctgggcagtcctctcataggaagatgcttagatgaacatgatgctggaaggaaaacgttttgatttgttctcactatgcactttggaatttaaaaaaaaaaatgagagccctttccataaccaaatacaatattgaactaaatctcctgagcatattcaggcagtcagtctgcactgtgatagcaacctagtgaaggagagtgctttatactgaaagcatgtggccccttgtgactctgttgatctgtttttaatgtctaatgattcatttggggggggtctagtatttatgaatcatgatggaccagaggagtgcaggaggttcgtgtggggctggcctcacctcctaagacattagtgttctcaacttctttgtcatgttatgagcctttggcaccacaatggattgccgttgcattactgcaccgagaagccaatagatcaaaacttgttgctaaaatgtatgtaaaaattctaaaactccctaatcttgttactcacctgtttcagtatttagttgtggatggaaatccagtgtttgggctcatacaggaaccctggaggagacccttctgtgtgagaccctgtagtaaatcagaggaaggacatttcccagcaagtattaatcctgtcagttctaaggccaccactagacatgttctgtggacattggggactgggctctgattggtcctcagtcaaatgggtcactctgaaggaaagctttggtagttggcattataccactgatatgaagggttagcaaagtgtagttcaaactaactgacatgaccaagaacttttctctttcaaaagatggattttactgtaaatagtttctcaagaagtttttaactggatcatgagcatggggagagaaagtttctcagctgctatgaatttccccgctgtttacttctctcaacagtggtattgcatataagattacaaaattttaggatttatttgtatctattacccaaaccattaaattgtctttaatttcatcattgtcttggaggaccagtgcatgaagagctccctctagccactcagcgctctaagccaggacctaagaccatcccatcaagtagtgtgtgaagtcccgtctttgtaaactctcccagaccaaatgttgttaaagtggactcatctgtataatctgtcctggaagtagaaggacacccagctgtcagcagctgctgttaaaaggtcactatgagtactacatagcacagtattcatttatagcaggaatcatatcttgtaaaatgtatataaaacacttttatggtgcaatcatttgtcaaatttttgtctgttacattgttcttagagtgtatgttcttctcatgcctaaggatatcactgtaaaatctgctgaaaactatttttaggttttatttgcacaaggctgaattagtttgagtttttgggaagctcctattgaacaagcctaaacatctgtaaagataaaaatcttcaattcattaaaagccaacatttcagtacaattctttccaaaggtaatccatgttctgtgttgttagtgtgtgggtgtgatagttctgactcttcatctctcacagacctattttctgttccatctgttttgtttttgaaaaatacctttttttcctttgtaatgttctagatgaccaaaacacatcggtttttaccttttgcctacagctttgatttctctgtgtggtgttctgtgaggtcactgtttaanctcttcagtgaaatagcaaatagccctggtgacaggcaatctattgagaacatgttgcatttattttgtctttattaaaagactactagtcaccagttactctggttatagtaactgttttatcagcccactttgattttcttttaaaattaaattttcactcacaagtcaaaacagtaagctgtctttcagaaaaatttttgaaggataaaaatgtatgaagaaaaaaggtggtctgtgtagaattacctactcagagattttagttgtattgccttgagaggttttagtttgtgggttaaggtctgtatattatcccaactttattaagaattgttttctaattggttataacatttttcaattaatagtttcaaaacaaattgttaatatgactgtataaagtgaacataat

SEQ ID NO: 3157514 - DNA, 468 bp, Cricetulus griseus
caggaacaactacacaggagctgatggtgattcagcctgagaaatcagtttctgttgctgctggacagtccgccactctgaactgcactgtgacctctctgcttcctgtggggcccattaaatggttccacggtaaagggcagagtcggcatccaatatatacttccataggagagcagttcccaaaagtcacatatgttagagatactgcaaagagaaacaacctggacttttccatccgaatcagtaatgtcacacctgctgacgctggcacctactactgtgtgaaactcctcaaagcagaagctgacaaggagattcagtctgggggaggcacagtgttgtatgtgcttgaaccgaaaacatcagatactgctgaagtgcttgtagctgtgcttcttggactcaaactgctaatggtaattggtgcctctgccatctacatgcacaagaaagcagaaggcctga

SEQ ID NO: 3157515 - DNA, 684 bp, Cricetulus griseus
gatcccaccactgctaaagagtttcctccaggagcgcctgggtatccgcttagttagaaggaaactggtaaaaactaaacatcatatgttgatgcctcggaaagaatcacgaaaggtgaagacccacatcccaaaggtgccaaagtattctctggtcccccataacctggccatgaccacagacaagccccctcaagtcttatgagggagacagagccctacatcgcatgctgaagcagccactcatctgccgttccagcaagcccaggctggacactttccagaaaccctacacccccacggaagacccgagcgcagctgctggattgacatcctcattcgtatgtcgagaccctcggaacgtcaccgaagctccgctgagtagtgtgttgcagcggcgaggccgcccacccgccgtgcgctgagcgcgagccagccaaaattcgccgctcctcgagttcatggaagagttctgtcaggagcccacggccagcgactccaaagagtagagccgtgcaccgccctccccaggggctctgtgccctggactgtgcccaggcctgaagagagggggtttgggctccatgtcgctccgtggtcagcatgtggagctcggcaggacctcgcctccgcgcccggccaggctgcacctggtggctggcccagcagcaataaagagtggtg

SEQ ID NO: 3157516 - DNA, 361 bp, Cricetulus griseus
  modified_base (31)..(31): a, c, t, g, unknown or other
ctgcctccctggcctcctgacttcgggtctnttcccagcaaagtcggctcagtggtgctgtgcccaaaggctggtgattcctcctgaattgtccctgagatggaccagaagagcacccagaccattctcctgcctgtcctcaggccttcccacaggtgtgggtcttagcctatgcttctctgtagcagaggcccattatcactgggtttctggagagttctgtcactgggattgttaaaacagaagaaagtaaaccaaactgtgatctagggagccttggattcccactgagagcaagacagcatcttcatacactagactctctcccacaaccagggccttttggcctaagtaagcctgg

SEQ ID NO: 3157517 - DNA, 252 bp, Cricetulus griseus
gtttggagacggctacattgtcacaatgaaaattaaatccccaaaggacgacttgcttcccgacttgaatccagtcgagcagttcttccagggtaacttcccaggcagtgtgcagagggagcggcaccacagcatgctacagttccaggtctcctcctcttcccctggccaggatcttccagctgctcgtcacccacaaggacagcctgctcattgaggagtactcagtcactcagaccacgctggaccagg

SEQ ID NO: 3157518 - DNA, 901 bp, Cricetulus griseus
gcaagaccaagaatgtatcccatgtacaaagcagactccttcttctgaggttcagtgtacctttcagttgagcttagtgaaggtggatgcacatactgttcctggtaaggaggccacacttgtggcactggtgggcagtctgctggtggtgtttacgttggccttccttggactctttttcctctactgcaagcagatcttcaacagacattgtcaatgtgttgcaggaggttcactgcaatatgaagctgagaaagcagtagaagaggattctcttttccccatgccagctggccaggagaccagtcctgaattcccagtgaatgagagcatctttgagatcaagccacttaactctgtcctggatgatgactgcagctccactcgtggccttccccacccaggagtcctttaccatggcgtcctgcgcttcagagagccattctcaatgggtccatactcccaattgaatgtacagagcgaagaatccattataaatgtattcaacctaactctgagcctggacgtagttccattttacatatttgaattagcaaaagaatgttgatcttgtttacaaggctgaagtaggtgtttagtggaggtgagtcaggcttcagtgttcactttttcctccacttacagtttccctggaattttgaaaggttttaagtagtatgggagatcaactttcttccataaatacctctactcaatttattactaaggtctttggtgttttgtgtttaatgtaggaagattttaattactacttttcttaaaatgagctatttgtagagattttgttaaatcttgagcaagatgcatgtgtggatactgacaagttgtgtttggtttatgaaatctgcaaacagttcatatgaatcaataaaagatgtac

SEQ ID NO: 3157519 - DNA, 519 bp, Cricetulus griseus
cagcatccactcagaaccacacagagcctgactttgaccttctaatgctcaacggatcctctgaagccacctcagactctctgtttgcagtacctgaggacatgaacctgctgtgggcatatgcttccattggcacgtatgttttagtggtgtctgtctttctgtttggtctgttttgtaaaaaaagctcaaggcaggaaaaagccacagcatctgctcagaaaactcgaagagctaaatatcacagggccctgctctgtctcctcttcatcttcttcttcttttatgttggagccgaggtgacatatggctcgtacatattctccttcgccaccacccatgttggcatgaaagaaagtgaagcagccggcttgaactccatcttctgggggacctttgctgcctgcaggggcctggccatcttctttgcaacagtcctacagcctggaaccatgattgtgttgagcaacatcggcagccttgtctcatctttctttctggtgctttttgacaagagcc

SEQ ID NO: 3157520 - DNA, 492 bp, Cricetulus griseus
agcgtctatctcagaaagaacaagagtgtggaagtgtttctcggtcacacagacgtagacgagctgctgaaactggggaaccaccctgtccgcagggtcgtggttcacccagactaccgccagcacgagtcccacaatttcaacggggacatcgccctccttgagcttcaacacagtgtccctctgggccccaacctcctcccagtctgcctgcccgacaatgagacactctaccacagcggcctgtggggctatgtcagcgggtttggtgtggagatgggctggttaacgacaaagttgaaatactcacagctgcctgtagctccccgggaggcctgtgaggcctggctccaccagaagcagaggactgaggtgttttctgacaacatgttctgtgctggggacgagaatcaggtgaatagcgtctgccaggggacagtggcagcgtctacgtggtatgggacactaaacaaaaaaaaaaaaaaaaaaagt

SEQ ID NO: 3157521 - DNA, 192 bp, Cricetulus griseus
tggcttcactcaagtctaacctttcatgtgtttcttatgagtaaagttcactggaaagccagttacactaataatagtttatttccttataagaggcatttctgtagcctgatttaaagttttactttcttttgattttatgactcatgctgcttatatgcagttgtcggaacaggagagcgcacgagggag

SEQ ID NO: 3157522 - DNA, 842 bp, Cricetulus griseus
aaagccgccccggatagattccaaagatgtcttttgtgcaattcaggtagactcagtaaacaaagccagaacagctttgctcacctgtcggacgacgtttttagacatggaccacactttcaacatagagattgaaaacgctcagcatttgaaactggtggtgtttagttgggagccctctccaaggagaaaccgagtgtgctgccatggcaccattgtcctgcctgctttattccgagtgacaaagacacatcagctggctgtcaaacttgaacccagaggccttatttatgtcaaggtgaccctcatggagcagtgggagaattctctccatggcctggataaaagccgtgaatcagtcatgtttggtgttgacattcagaaagtcgtagagaaagaaaacgtagggctccatggtgccactgttgatccagaaatgcatcgtggagattgaaaggaggggcgtgccaggtcctgctgaattgcttgccggatgttgagaaggcaaccctgaagatgctgttagatcacctgaaactggtggcttcgtaccatgaagtgaataagatgacctgccagaatttagctgtgtgctttggaccagtgttgcttcaccagaggcaagagacttcgacccacagcaacagagtcttcaccgactccgaagagctcgcaagtgctttggacttcaagaagcacattgaggtccttcactacttgctccagctctggccagtgcaacgcttagctgtcaaagaaccccagacagtctgtgcctggagcagtcatctctgaatcatttgaggcgaaagagagaacgaccgtgtgtattgaatctgagc

SEQ ID NO: 3157523 - DNA, 803 bp, Cricetulus griseus
gggacgcgcagagctgagaggcctgtgcgccgagctaagggaggcatgcggcggacgcggagcgccgtggtcaccgatccgcgggagcagcggcgctccggtccctccgggggcctgggcggcagcgaaagccgcgcgcggcgctcggggagcagggctcgggccgggggcgggggcggggcgaccggttcacagcggtctgcaaaaccgcggcccaagccgccaccgccgccggcccaggaggcggctgccgaggagccgccgccggcggacacccccgccgcctcggtgtctgcgctcgacctgggggagcagcgggagcgctgggagacgctccagaagcggcaacggctcagcttcgagggcaccgccaagctgctgctagacacctttgagtaccagggcctggtgaagcacacaggaggctgccactgtggagcagttcgttttgaagtttgggcttcagcagacttgcacatctttgactgcaactgtagcatttgcaaaaagaagcagaatagacacttcattgttccagcttctcgattcaaactcctgaagggcgctgagagcataaccacatacacgttcaatacacacaaagcccagcacaccttctgtaagagatgtggtgttcagagcttctacactccacgctccaaccctggaggctttggaatcgccccccactgcctcgatgaaggcactgttcggagtgtggtcaccgaggaattcaatggcagtgactgggagagagccatgaaggagcacaagaccataaagaacatgtctaaagagtgagc

SEQ ID NO: 3157524 - DNA, 255 bp, Cricetulus griseus
ggggatgaagccctacaagtgcggcgtgtgcgggaagggcttcatacgcatgctatgagtgcggcaaggcctttgtccagcactcgcacctcatccagcaccagagagtccacaccggagagaaaccctatgtgtgcggtgaatgtggacatgcttttagtgcacgcaggtctctgatccagcacgagagaatccacacaggcgagaagccctttcagtgcacagagtgtggcaaagccttcagcctgaaagcaa

SEQ ID NO: 3157525 - DNA, 517 bp, Cricetulus griseus
  modified_base (172)..(172): a, c, t, g, unknown or other
gagagtggtgtgcacggtgccctgctggccctggatgagaacttcgatcacaacaccctggccttggttctgcaaatccccacacagaacacccaggcccgtcaagtgatggagagagaattcaataacctgttggccttgggcacagacaggaagttggatgacggggaangaaggtgttccgccgagcaccttcctggaggaaacgcttccggccgtcggggatcaccacagtggtggcatgctgggcacctcggcagagaccatcctactatccgagtcctacttcgtgttcttttgtaagtctctggtggatgtggccaaggtcttctgtgtgtggcggcacccaggttgttggtgcttgagattctgttggaaggagagaagggcaacgctgagtgagtgtgtcaccaccttccctcttctggacctagtttggtctggactacgggttcatcaggctcgcaatcccagaccaaggactgagatggcccttcaataaaaggccatttcggac

SEQ ID NO: 3157526 - DNA, 1421 bp, Cricetulus griseus
tgtgatgctcagggtgaggccatgggctccgtgcccgagttttactccaagaggaggcactacgatgcacagccctccaactcgctggaccaatatggattacgattgggcatgtggtactggaaagatgaaaccaaaactctggaatttagaagtttcacgcctgcagtagagctcaaggataaaggcaagaaagggaaggcggttcacttcgctgaaatggacggtccggcttctgaaaggttgacagataaaaggtttccctcaagggacgaaaagtcactgaaagtcttggagaaacgatatcagctgggcaatatcacgctggatgatgtcaagtttgttgctttgcttttcctccaagacactgaaatgcagcgggtctgttctttcacaacatttatgagaaataagagtcttgacagcttccttatggcactgttgtactatctgtcttattacttggagaaaatgtcaatgcaaaagaaaccccaaagctacatggtaggcctggtagagaagaaagagatggaactggttataagcaagttagaagatgcacagaagtacctggcacagaagtactgcttccttgtgctgggcgtgggcatggcggataagcatcacatgaactgtggaaaagagaaaatatcagatactcaaaaagactggaaattctttgagtccttttatactttctgtacatgcatcgcttggattgtcttccgacgtcagtacctgacagagatcgaggaagaaataggaaggctttttcgtaccaatatgttcaacattcctcgaaggaggcgtgaggatgaagaatcaggaggagaaaagaagcgcatgacattggtacaatttcggaaaatgatggcaaaacgtccagcgattaaaaaggctgtggacatgcgctcccctgttttgtctacactgctgccatcactcagagaaaaagctcaaaacatcgttgaaaaaaagtatgtgacaggcatcaaactcccaccccgaatgcagaaggaaacagcaagtctggattctgtggtcatgccagtagttggcattttgggggagcctcggcatctcttcaaccctcatacgctcctcccccttgaatcagaagaaaatgggaaacagagtggaagaaattcttctgtaatagagagagatagcatagctattcaggacacactggacttggtcatgacaacactaccttcacaaaacactaagtaatccagtttgtttcagttctttattcaggttcctatatttgaagtaaactactttgacttaacactttagattaatatttattgtcataaaatagcagcttaaaatgttaaagaatttcttggctcaacctgttcttttaaaagctaatagctgattaataaagaattttagaaagctacttaaagaag

SEQ ID NO: 3157527 - DNA, 541 bp, Cricetulus griseus
ggaatattggaaacagctagaggaaatccggcaacaataccacagtgacatgaaggaaattaaagagaggatggggagagagctgaagagaggggtgaagtttgaaattagcctggataagtgtattcccgaggaagacgtcgtccaagagaaagaggcagtggataaactaaatgatactttgagctttgaagacgggatgaagattcgggagtgtagacctataaaggagcacgaagattacacagacagagcctttgaggaactctgtggcccagaaccagagggtttctttccagataccgttgctgtggagaacaggaggcagtgggatactagagcacctcaggctctgctgcaaataatggcaacagcagatgtcacctccacctgtcccaccatgcctgatgatggccaagttattgtgatggaaggcagtccagaaaatgggaagcagtggtggtgtgatgtgccagggaccctgagtgctttgacagcaacacacacctgcagtagctcattgtgggccaataaaggagaa

SEQ ID NO: 3157528 - DNA, 259 bp, Cricetulus griseus
gcagtggtttttccagtatgacattttccttgctgtttttcaggcctatcaaagagtttacatattccaattcacatttttacatctaagacgggttttttaagttcataattatgaaagaaatatgtatattaagcttggggaaataaaaaatggtcttttcttaaattattgtcattggaaacacaacctcttcatgaattagcaatggagcatgaaaatttatgattgaaatatagttttcattcaatattaaaaa

SEQ ID NO: 3157529 - DNA, 2648 bp, Cricetulus griseus
  modified_base (116)..(116): a, c, t, g, unknown or other
ccgccgccgcctgctgccgcgaggtcatccggatcctcgcgtgccagccactgccgatttccccatccccatctggatgggaattggggaagatggacaagatggacagggtcgtnttcgggtggaccgctgtgttctggttaacagccctggtcgaaggccttcaggtctcagttcctgacaagaagaaggtggccatgctcttccagcccaccgtgcttcgctgtcacttctccacatcctcccatcagcctgcagtggtgcagtggaaattcaaatcctactgccaggatcgcatgggagaatccttgggcatgtcctctcccagggcccaggctctcagcaagaggaacctggattgggaccccgagtgggtgtttgttggcctggtgatcctggggatcttcctcttcttcgtgctcgtggggatctgctggtgccagtgctgcccgcacagctgctgctgctacgtccgatgcccgtgctgcccggattcctgctgctgccctcaggccttgtatgaagcagggaaagctgccaagtccgggtaccctccctctgtctccggtgtccccaggcccctactccatccccctctgtcccctttggggaggaggagccccctcttctggcatgctgatggacaagccgcatccacctcccttggcaccaagtgactccactggaggaagccacagtgttaagtggtctctctttttccattcggaagacataggctgcttttcatctttctgttgtacacagtaacatcttcccttttcaagttcctgtgtcatggactttgtcctttcttgctgctcacagactctatcaaatgtacccgtatctatcctacatggcaagagaagagcctggtcactactgtcactgtatgtgatggttttaccaactcagcagacacagaagagcatctagccacaaccaacaaaagaactgcctagctgagccgagcccaaactgggggttcccacttgagagaagtttggtactcctgtgtgtctatttatcaccaaggataaacctctaggtctggtctgtctgtttgggtctctaaatcaatatgacaacaaaacatcatttcttaatcaccagcttttgatttcaacttgctcaggcactcttgaagaatattggatagctgtggtagctattgttatactgagcactgtgtcaggcttcttaccaccaaagagccccatagcacaggctacagagaccaaatatattgctttgtaaagccaggggcatgtatgagcttggtgaagactgaggggagcaataggaaaatactgttaaaattggaaacataaagttccaaaggcaacaagactataggccgacaatttaaaaaaaatacaatgtaaagatgatagcaggcttttgaaatgaatggggagggggcacagattgctcttcgtgggtctgcatgaatcatttgggcttccaggccttctgtagagagagaaagcagttgtttctgggtatgtggataggagataatgctgaatggagaaggcgaagctggctgtcctctgtgcccttgacttttctttatacatcccttgttttttttctccaaatagtgtgtcctgcataggaagtgcctatacatactagttccttttctgtctttctagggcatcaaacaagtctggtataagatgtgatctccatccactcaagtcccaatttaataaggaagctaagacatgcccaagaaaggataaggatattttatgcatatgataggaaatagtgctatggaaaattataataaacccagagatttaaatttttccagttcagccacacacacacacacacacacacacacacacacacgctgaaaggaaacattctaagggagagagttggaagtcctccccaggagtctgcttgatatgttccaactcccagaatagtgatctgttgtgacaggctcagatcagacaacaggaattacaggcaatttcttattcccttggtgccatcctgaataaacttagatcatgaatagaatcagtggtgaggagaagccacgaagacaggaatttgccgcttcatctgtcggcatgctgttcctagaagtctgccctgagaagggggtgtctttgctgggagagtttgatgctgagcaccatgctgtgatgggggaaggtttgaagaatgtgtcgaaactttctggattcttctcaaagatgaattcctaagccaagctacaagttcatccaggctcagaattccaggattgtgggcaggagccatcatcttcactatatttttagatgattttttaaaaggtggaattgaggatccagatctagagggagacaaggaaggtaaggagaaagttgtagcagttgagctagaaagtcttgttagaatttttgatggggctgactggacagggggaaatgtggtcctatcccttttatctagaaggctaagaaagatgcccatagcttctctcctgccacatatattaacaaaggtgttaggcactactccgtgagacatttccttgtggaaatgaagaatgtgacattaagacagtgagatgaagagaagacgcctacttcatgagagtcacctcccagttgtttctgtgcctcgtctgtgacatgaaa

SEQ ID NO: 3157530 - DNA, 446 bp, Cricetulus griseus
ctagtgaaccccgagaagaacaagacaggaaagccagagagaagctgaagaaagccaaaatcagtctttgtggtgggcgggcctggctcagtaagggcacccagtgcgagaagattgcacagaaatatggctacacccatctcgtccaccgggggacctgctgcgggccgaagtcagctcaggatcggagaggggcaagatgctgtcgtccaccatggaaaaggggcagctggtgccactggagatagtgctggaattgctccgggaggcaatgatggccaaagtggattcttccagcggcttcctgattgatggctacccgagggaagtgaagcagggagaagagtttgaacaacggattggacagccctcgatgctactgtatgtggatgcaggtgctgataccatgacccaacgactcctgaagcgaggggagactagtggcc

SEQ ID NO: 3157531 - DNA, 304 bp, Cricetulus griseus
ggcaaagccttcaactgtacttcataccttactaagcatcagcgaattcataccggggagaaaccttacgtatgtaaagagtgtggcaaagcctttaactgttcttcctatctgtctaaacatcagagaattcatattggagacagactctataaatgtaaagaatgtggcaaagcctattacttttcttcacagcttaaccgacaccagaggattcatactggagagaaaccctacatatgtaaagaatgtggcaaagccttcaactgttcttcctatcttaataaacatcaacgcccccata

SEQ ID NO: 3157532 - DNA, 1036 bp, Cricetulus griseus
gcttccacaaagtcctatttggcaacctagaagtgaaaggaagtgttcagtttgcaattgactacatggagtccctgaaagagctgcattgtttttgtggcccagtgtaaagacttagcagcagcagatagttaaaaaacagcgctcagacccatatgtaaagacctatctgttgccagacaaaaggcaaaatgggcaaaaagaaacattcgtggtgaagaagaccttcagaggtgaaatgaaactagctctccagtatgttccagagccaagcccaggcaaaaaagcttcctacaactggagaagtccacatctgggtgaaggaatgctttgatttgccactgctgaggggggagccacctaaattcttttgttaaatgtaccatccttccagataccagtaggaaaagtcgccagaagacaagagctgtaggaaaaacaccaaccccatcttcaaccataccatggtgtatgatgggttcaggcctgaagatctgatggaagcctgtgtagaactcacagtctgggacctggacaaacatcctcaccccttgtcactgtgattactatgcaagcatcccccaagtcattttgcatgcatttctttgactgcacagctcaagagagctaaaaatgacaagcggtatgccccacgagatgtgtgatgccaacattcaagaggatagttgaacaagttaggaaaattgaactgttgcttccacaccaaagaaaaagccacccatacaggtttcacactacaatcttgcatggcaattcaggccttcagtttggttattaaaatgcttgctgggcatacaaataggaagattacgggcaaagtgacaaaaaatactcctgggatagggtaaagacaggaagaacaacagtgatgacagacaacttcataataagacaactattacttggcagcctctaataagacattgaattccatccttctcaatctcaaatggactttggtgccacctactggttgcatatggaattcagctctggggctattttggcttaattt

SEQ ID NO: 3157533 - DNA, 195 bp, Cricetulus griseus
gtcagcttcaagtacataaaagaacacataccggagagaaaccgtatgtatgtaatcaatgtggtaaagccttttcacaggtccagtaatctactacacaacataaaagactacatactggagacgaaaccctatgaatgtaatcaatgtggtaaagcttttgctgagaacaaaaaaaaaaaaaaaaaaaaaaaa

SEQ ID NO: 3157534 - DNA, 455 bp, Cricetulus griseus
gtgataaaatatttcgacactggttctcttcaactcacaggagccctgccatctccccacagctgcggctgcagttacagcaggctgttcaggagtgtgctcaccatgggggtccctcaggaaactccaggactgcctcctccagtgtgttctggaagcttcggtggctcctgcaggccactctgagagagctgcaggaggtggagaagtagctgctttcttgccttagtcatcaagaatggatagaggaagtgacctttgagtgatttcttctgtagttgccatgcaaatgcgctgtctgcaccgttgacatggccttttgaagtgtgcaattaacttccccttctgtggctgtgatgtggattacccttgctcctgcccagcttggtttgatcttatttggtgctgacttctgtcctgtcactccctcagaagtgagcaaagggagaagattc

SEQ ID NO: 3157535 - DNA, 325 bp, Cricetulus griseus
cattgaagaaccaccaatcttcttgatctctaacaaacatttatctgactatgatttcccaatcctgatggaaaagttgatgaatgctctccctgtacacaaacgacacaattttatgctttccttgcctaatattacaagtgcagccattgaaaggaagcggcagtttctgaagcagaggatttggctcgaagccttttgggactgacctactgagtatcatcccttcactgaccctcttcatggaaagtgatgtggagactcttcagaaaagcatgaaatactatcgaacagtgtttggagtagatgatgcatccttggagag

SEQ ID NO: 3157536 - DNA, 307 bp, Cricetulus griseus
aagaagacatcgtgaacccagccaatgagctgatcaaggagggcaacatccagaaattgtcggccaagaacggtaccacgcaggaccggcacctcttcttgttcaacaatgtgatgctctactgtgtacccaaactaaggctcatgggccagaagttcagtgtacgggagaaaatggatatctctgatctccaggtgcaagatattgtgaaaccaaatgctgcacacacgttcatcataacaggaagaaagaggtccctggagcttcagactcggacacaagaagagaagaaagaatggattcaggt

SEQ ID NO: 3157537 - DNA, 234 bp, Cricetulus griseus
aagtgtgaagagtgtcctttcggctatagtggcacggattgcaaagaccaattccagctgatcctcaccatcgtgggcaccattgccggagcccttattctcatcttgctgattgctcttatcgtctcagtgagctcaaagaagaaaagaagaacgtggaggaacagcagttgattgaggacacacacacacacacacacacacacacacacagaaaacaaccataaatataaa

SEQ ID NO: 3157538 - DNA, 1083 bp, Cricetulus griseus
tttgttataaatagtgttgaaaactttattttatgtatttgattttattaaatattatacaatatattttgacgaaataggtatattgtaaatgtataaatatttgaatccaaatcaaatataattttttaacttacattcacaaacacttggacaaaaaaatcctatatttttttctgaatactggtaatgagtgtttaaagcacacattatctgagactctccaacaagaaactagaagtctgagaaacagatcatgtaagacagtgccattaggtagcaacactgaatgtgctgttatttaacttgtaattagtatcagtgtatttatgagttacaagcgagtcatttcaagcgcagaggacaagacattgtgtcagccatcttccaaacttactcataaacctttgactggcattagttttctattatgaccacccaacctaggaaaagggatggttgtcaaattctgttttctgtgtcatatcattggcagcaatcattaaagccatccaggggttaaaagtaaatgttctgaaagcagagaactcaaatgttgctttctttgacagatatgtacttggtcttgctgggtgaaaatcaagtatgcactttatacaatggcaaggttaagcatggtatgatttatcaaacctagttcatgttttggaaaagggaacaaggctatcaagctgctatgtgaaaaatcagattacacctctcacctgcttgcaggtcatccaagtgtttttctacatttgttcattttgagttgctgttatttctctttagactcctaaaagttgttcatataatgtagaaatgaatttcaaacaaagatgaaggaatgaaattatgtctaacatgattatgttaagaaagataatagggtggtcaggacactttccctttttgaagcagaaaaaatctacaaatatgtatgtgttactgtatcatcttgtgtgctgggtagaataattttctaagcatgatgacactgatataccttttcagtgtgccagataatattattagtgaccattatctataattgctttgtatgagattacaaccttccggaat

SEQ ID NO: 3157539 - DNA, 273 bp, Cricetulus griseus
tatttgacttcagaattcagcctctgatgtcattactacaaaatactttaaatccaattcagaagcagtctgcccatataatctgtggtttctgcagacttgtacacactgccttgtttagatatttgggtggttaatggataagttaaatagtttgccattcttttttcctctagttctcctcttttgacctttccactgacagtctttggcagctcttcgataaattcaacctgttggcataaggggagcagggagttagttcagcacttg

SEQ ID NO: 3157540 - DNA, 468 bp, Cricetulus griseus
cctgagtgctgatggctccccccgagtgtctgaggctgccccccctggacagcttgttgctcgaatctctgtgtcagatccagacgatggtgactttgctcacgtcaatgtatccctggagggtggagagggccactttgccctaagtacccaagacagtgtcatctacctggtgtgtgtggctcggaggctggacagggaggagagggatgtttataacttacgggttacagccacggactcaggctcacccccactacgggccgaagctgcctttgtgctacatgtcactgatgtcaatgacaatgcgcctgcttttgaccgccaactctaccgacctgaacctctgcctgaagttgcattgcctggcagcttcgtggtacgggtgactgcccaagaccctgaccaaggtaccaatgggtcacctatagtttggctcctggcactcacactcactggttctccatt

SEQ ID NO: 3157541 - DNA, 2934 bp, Cricetulus griseus
  modified_base (605)..(605): a, c, t, g, unknown or other
  modified_base (2419)..(2419): a, c, t, g, unknown or other
atgtaaaagaaaaaaagttaatgctgatggaaggaagacagctgagatggactcactaatggtccctattttttcagctttgagggaaagttggtcctgggactcaccttggaagatttgtcctcaagtcacaaatcttgttcaaaagccaagtcacagattgattgactctttggagactattgtacaaacagagcattccctacgacttattcctctacaacactctaaagcggccagttttgttagagatcagaatctctcaaatgtatggacagttgaatatgcactcgaattattacttattggtggcctgattccagaggctgtgtggttggcacataaacttggagactggaagacatctgtttccattggtgtggccttccaggttttctgtaagcatgatctcaattttgtgaggttcaagaaaagggtatgaacctaccatttaatatgataccagcacagattttccaaggaaaactacaatatttttagtcagccagtctctttgaaaaggactcgaagtggaatttgattcttgtgtggttgagcactgttttcatgcactggaatgggcctatagaatgttaccattctcncggttttttaatatggaagaacttattcaggatataattttgagcctcattggagaactaccaccagtcaggaaggtagcagaaatttttgtgaaagcatttcccaatcctgaggccataagggttcctttaagagaaaagtaccactctcttcaacagaaactcagacatggtgttgtgaaaggtcctcagactgaagaactgatgtctgtggtcatgcgttctgtccataaagtgagggtgaaagccctgaaacgtgtgcagaggaacataggtgcttctgagatgaacatctgggaaacctgatgaagaggaaaaaccagatgctgctcctgcgggaatttgagcgtgatgatgatgaatacattaactccttgagctcttcttgagttacgttcttgaaagagatctttgttccagtgatcctgtccatttctgacaagttttctgggcacctcagagaacacgaacttaatccttacttttgatatgcatacatcattaaaacgacgccagagcaaaaccagaagcgagagtgtgtatagagctggttcttgctttgctgttattcctgagtcacatgaatgtgaaaactgttctctctaaacaggaaagaaaggcgggattgtttggcttaaaacaaaagccaatttatagaattcaggatgataaaagagagaaacctttaatgcagagaccatcaaaccaatccttttccattcccaagtccattgacactggaggataccgtttccaagcagttgagtacagtgctgccagccttcaggaagatgttcctctggcacttgagaacatgttccgccatgttgggagactggtggagtggatggtacgatggtctgaccgaagactcctctgtgactctggagttactcagtcatcctgtaaatacagtccagtcattcgtgtaaagacctcgacagctgctattcttacctcattatggcttctggagcaaccctactgtgctgcatataggacaaaaatggcattattaaggttgtcccactccaagccctgctgcacaaaagttagagcatcttactgccaagcttcagaagatggatgagcagctgttaacagtgcaggccattgcagagaatatagagcaggacttccctgcaccagaagtgctgaatctacactgggaagaggctggaaaggtacatcacgttgaattgtcttctggtcctgaaattgaaaaaccaccagcttcaaaagccattagcatttctgaagaagtgtgcttccagactcatgaagatgtggaagatcaaaacgatacagaggaaacttcagagacagaagtttcagttacagaaaatcattctagccagaaaacctacgcatgcccttctgcaggctcagccatctgttctcccgtggactggagtatcacttctcctggtgtgaataacaacaatgaattatttgaaagtgtttcagaagatcaactccaggtgactggattgactgatattgctgacattattgatgacctcataactaagagtggagtttccagtgaagagcttggcttaacaaaaaaacaaactagaaatatatccaggattcagcaatcttctggcagatgcccccaaagaactgaggaggagagaagagagattaaaatctggatgaaaagaaagcgaaaagagagaatggcagaatatttaaatcagctggcagaaaaagaggggacaggaacgtgatcctttctgccccagaaacagtccattttatatgacttcaaggcagatcaggcaaagacagaagatgaaacatgaaaaagntagattgctgctgtctaaccactatagtcagcggatctcggaagcataccatctgatgaatgaactgctgtctgactcagtacagctaacagcacctgcagatcagcccttaccttggggtggctcctccaaagaagcaggtgtgcatagagtatgagagagaagacacggtagtgagtccctggactctgccttcagaaatccacaggattcttcacgacaggcccaagacccttctccaggacatatcaccagctgaagaggaagagcctgagtcctctgttttggtggctggcatggacagcgtgtctgagagcactggcagcatcctcagtaaacttgactggagagccattgaagacatggtggccgacgtggaggacaagaacttacccgttcactgggcctcagaccagtagggcctgatctactaaaaaaaaaaaaaaaaaaaaaaaaaaaaaaaaaaaaaaaaaaaaaaaaaaaaaaaaaaaaaaaaaaaaaaaaaaaaaaaaaaa

SEQ ID NO: 3157542 - DNA, 256 bp, Cricetulus griseus
aggagctgcacgctgctgaggtgcgcaggaacaaggagcagcgggaggagatgtctggctaaggggcgttggatccagcggcaacgagaacactttcgggtttgttttgtttgttcagttctgtctagatgcaaatttcgttcctgctcctacccgctcccctgcacccctagcttcctgcttctcttcccacactctgaactgtccagtccttataaatgtctgactctgagctctccctaaaggagttccctag

SEQ ID NO: 3157543 - DNA, 836 bp, Cricetulus griseus
  modified_base (12)..(12): a, c, t, g, unknown or other
agcgaccatganagggccagagctgggccccaaagtagcatggaggggacgtactggacaccctggaggccctcgggtataagggtccattgttagaggaacaggcactctccaaggcagcagagggtggactgtcttcgcctgagttttcggagctctgcgtttggtttaggctctcaaataaagtccttatgcaacttggaagaaagcatcacttctaccgggagagatgacctagagagcttccagcttgagataagtggatttttaaaagagatgtcctgtccatactcggtactcgtatcaggagatattaaagaccgcctcacgaagaaggacgactgcttgaaacttctgttgtttttaagtacagaacttcaagctttacaaatattgcagaagaagaaacataaaaattctcagttagataaaaacagtgaaattttccaggaagttcaagctgtgtgtgatgcccttggggtccccaagtcaaacacttctgacattccacttctactgagccaagtggaatcaaaaatgatgctctttcctgtgaatatgaatgccgccggcggatgttaatgaaacgattggatgtgactgtgcagtcatttgggtggtctgatagagctaaggcaaaaacagataatatagcaagaatttaccagcccaagcggtatgccttgtcacccaagacaacagtcacattggcacatctgctggctgcccgtgaggatctgtctaagattatcaggacaagcagtggcatcagccgggagaagacggcatgtgccattaataaggtgcttatgggcagggtgcctgacaggggagga

SEQ ID NO: 3157544 - DNA, 1592 bp, Cricetulus griseus
accatagactgtcatacagttctcaagaggaattcctgacttatcttgaacactaccagctaactattccaataagagttgatcaaaatggagcttttctcagctttactgtgaaggatgataaacactcaaggagaagaagaagtatggaccttattgagccacagcaggcggtgtctaaattatttttttaaactttcagcctatggcaagcactttcacctaaacttgaactactcaatacaaattttgtgtctaaacattcaggccgtggtacttgccttgataatgagcctcccaagcgtgactttctttatccagctgtggccccaggtcaggtgtatgatgctgatgagcaatgtcgtttccagtatggagcaacatcccgccaatgcaaatacggggaagtgtgtagagagctctggtgcctcagcaaaagcaaccgctgtgtcaccaacagtattccagctgctgaggggacactatgccagactgggaatattgaggtgtccagagacaagaagtggtctgtaaaagattggatgacaactccatcgtccagaacaatttctgtgaccctgacagtaagccacctgaaaatcaaagagcctgcaacactgagccctgcccacctgaatggttcattggagactggttggagtgcagcaagacttgtgatggtgggatgcgcacaagggctgtgctctgcgtcaggaggattggaccatctgaggaggagactctggactacagtgattgtttaacacaccggcctatggagaaagagtcctgcaacaaccagtcatgtccacctcagtgggtagctttggactggtctgaatgtactccaaaatgtggtccaggattcaagcatcggattgttctatgcaagagcagtgacctttctaaaacattcccagctgcacaatgtccagaggagagcaagcctcctgctcgcatccgctgcagtctgggccgctgtcctcctccccgctgggtgacaggagactggggccagtgctctgctcagtgtggccttggacagcaaatgcgaactgtccagtgtctctcctatactggtcaggcatctgttgactgtccagaaaactagttacggcctccatccccttacacaagcattaccctgtggaaaatgtaaccactggtcagccccagctgacaggatttcaatattattttaacttctgtgaagtgggatttattgatccaaagttctggacacggtattaggagggaatgccagatctgagagagtcaaacaacgcagggagactcgcttcctgtggaacgttggtgttctttcgagtaaacctaacagcccgtttacctccttggaccattaagataatttttatatggacttagcaatgacactgaatccatttgtatttaagactgtttaaaatgtagttgttatgacttggtcaactatggaagtagaagagattcagaattcttaagtcatagctcaaaaatatctactatactttatctcaccacagtagcagcacaatttaaattataaaatgggctttgaactgtaatttaagaacaaaattataaatcgaaag

SEQ ID NO: 3157545 - DNA, 387 bp, Cricetulus griseus
ctggccaaggacttcattcggaagcttcttgtgaaagagacccggaaacggcttaccatccaagaagctctgagacatccctggataatgccggtagacaaccagcaagccatggtgcgcagggagtcggtggtcaacctggagaactttaagaagcagtatgtccgcaggcggtggaagctctccttcagcattgtctccttgtgcaaccacctcactcgctccctgatgaagaaggtacacttgaggacaagcgaggacctgaggaactgcgagagtgacacagaggaggacatcgccaggaggaaagcccttcacccccggaggaggagcagtacctcctaactggcctagttttcagtggctgccagggaggcccaagtccct

SEQ ID NO: 3157546 - DNA, 1434 bp, Cricetulus griseus
  modified_base (595)..(595): a, c, t, g, unknown or other
gagctgcagtgcctcccaggacccagggggactgcccctttgtgatatcagcacacttcctcctggctgaccacctgcagactagaagagagagcatcggaaagcaaacctctgaaagcgcaagtgaatattatgagcattacattgaagacctgaagagacaaggatttctgctccaagaacactttacagctgaagcaacacaattagcgtctgaaaaactgcaagcactgcttttggaggaggttataagttcgggcactctgagccaggaggtgagcgatttggtggagatggtctgggcagaagctctgggacacctggagcaaacacttctcaagccagtgaacagcataagcctgaatgacgtgagtaaagcagagggggttctccttctagtaaaatcagccctgaagaatggagaaacacaggagcaactgcaaaaggcgatggccgatttctaccgattgattccccacaaacacccggcatcagaagacgttaacctaaggttgttagctcagaaagaggatctttgtcagagctgtgtgtggcttcgaggcatttatcaacgggaaacacatagtaggagagntaaaggagaaggaggaagccaagcaggaatacagagaggctatcagccaaggccatggcgctacttgatggaccaggacacaccggatgtcttcactgtgagtgttggaaacttacccccctcgggctaaggttctcatcaaaatcacctacatcacggagctcagcatccaaagccctgtggccatcttcttcatgcctgccactgtagcgccctggcaacaggacaaggctttgaatgagaaccttcaggatacagtggagaagatttgtataaaggaaatagggacgaagcaaagcttctccctggctatgtccattgagatgccctacaagattgaattcatttccagtgacaatggagggtgtgacattctatgcaagccaagcaagttgccctgtacgctttgtctctggtgggtgaggagcaaaaagtaaatattatgcagtttggcacaggttacaaggagctattttcatatcctaagtatattgcaaacaataagatggccacagaattcattatgcaggatacgttccccgagctgccactctgtctctgtgaagtggcagcagctcagcagagacgcccctgagcctctgcaggctccagcccaggtgccctccttgtttcataatgaccgactcctcgtgtacggattcattcctcattgtacacaggcaactctgtgtgcattcatccaagagaaggaatttcatacaatggtgtcaactactgagctgcagaagacgactgggactatgattcacaagctggcagctcgagcgctgatcagagattatgaagacggtgttctccatgacaatgaaaccagccac

SEQ ID NO: 3157547 - DNA, 1427 bp, Cricetulus griseus
acagtgtttgcagatccatgtgtacctgggagtggtgaaaggccgtgggcacagcagcaggggcaccatgagcctcagtgaggaacaggtacgaagcttcctagatagggaaccccactttcgtccaccaatattttgggaagaagctgagccctgaaaatgtggcaggggcctgtgaagatggtttgctggtggactgtggcagcctgcgagagctgtgccaggtggaagagagtgcagcactggtttgaactggtgcaggacatgcaggagagcatcaatatggaacgtgtggtcttcaaggtcctgaggcgtctctgcaccatcctgcatgctgaccgctgcagcctctttatgtaccgccagcgcaatggcatagccgaacttgccacacggctcttcagcgtgcagccacacagcctcctggaggactgcctggtgccccctgactctgagatcgtattcccactggatattgggattgtgggccatgtggctcagaccaagaagatggtgaacgtgccggatgtggccgaggacaaagatgaaatccaggaaatcttgccaacagggatcgcctggggaaagagcctgctgactgtgaggaggatgagctggggaaaatcttgaaagaagaactcccagggcctaccaagtttgacatttatgaattccacttctctgatctggagtgcactgagttggagctcgtcaaatgtggcatccagatgtactatgagctgggtgtagtccgaaagttccagatcccccaggaggtcctggtgcggttcctgttctctgtcagcaaagcctatcggagaattacctaccacaactggcgccacggtttcaatgtagcccaaaccatgtttacgctactcatgacaggcaaactgaagagctattacacagacctggaggcctttgccatggttacagctggcctgtgccacgacattgaccaccgtggcaccaacaacctaagaactatgaagacaagaaaagttggatagagtacttatccctggagaccacccgaaaggagatagtcatggccatgatgatgactgcatgtgacctgtctgctattaccaagccctgggaagtccagagcaaggtggctcttctggtggctgctgagttctgggaacaaggggacttggagagaacggtcttggatcaacagcccattcccatgatggaccggaacaaagcagctgagctccccaagctgcaagttggcttcatcgactttgtatgtactttcgtgtacaaggaattttctcgttttcatgaagagatcctgcccatgtttgaccgactgcaaaataacagaaaggagtggaaagcgctagctgatgagtatgaggccaaagtcaaggccctggagaagaaaagaaaaggaagaagacagaatagcagccaag

SEQ ID NO: 3157548 - DNA, 300 bp, Cricetulus griseus
cccaagtgccctcccaagtgccagacaccaaagtgccctcccaagtgccagacaccaaagtgtcctccaaagtgtcccccaaaagtgcccccctgtgtcatcgtgctgcagcctggggtctggaggctgtggttccagctctgggggctgctgtggttccagctctggaggctgctgcagctctgggggtggtggctgctgcctgagccaccacaggccccgcagatctcttcgtcgccatcgtcacagctctggatgctgtagcagtggtggcagcagtggctgctgtggaagcagtgg

SEQ ID NO: 3157549 - DNA, 184 bp, Cricetulus griseus
cggacaacctgattccgagagttcaacacaatgtcttaccaacagcagcagtgcaagcagccctgtcagcctcctcctgtgtgtccacctccaaagtgcccagagccttgtcctcctccaaagtgcccagagccttatcctcctaccaaagtgcccagagccttgtcctcctccaaagtcgccc

SEQ ID NO: 3157550 - DNA, 566 bp, Cricetulus griseus
cgctgctggcgtggacaagcagacatggcgagctccggctgtgaggaccatgcgggccaggagggggagacgttcctgtattttcgcctatggcagcaacctgctgaccgagaggattcacctgcgaaacccctcggccgtgttctgctgcgtggcgcgcctgcaggactttaagctcgactttggcaatttccaaggcaaaacaagtgagaggtggcatggaggtatagctaccatttttcaaagtcctggcgatgaagtgtggggagtagtatggaaaatgaacaaaagcaatttaagttctctggatgagcaagaaggagttaaaagtggagtgtatgttgtaatagaaattaaagtttcaactcaggaagggaaagaaataacctgccgaagttacctgatgacgaattatgaaagtgctcccccatccccacagtataagaaggttatctgcatgggtgcgaaagaaaacggtttgccactggagtatcaagagaagttaaaagcaatagaaccaaatgactataaaggaaagatctcagacgaaatggaagaaatcatca

SEQ ID NO: 3157551 - DNA, 541 bp, Cricetulus griseus
tccagtcatcttatcagccattgagaagatccacacaggggagaaaccttatccatgtaagcattgtgggaaagctttcattcagcgtaaggcttgttacaatcatgaacgaactcacactggagaaaagccttatgtatgtaaacactgtgggaaagcatttaggtgttccacatatcttcggaaccatgaaaggactcacactggagagaaaccttatatatgtaagcattgtggaaaagccttcacacatcagagtgcccgttaccgtcatgaacgaattcacactggagagaaaccgtatgtatgtaaaaaatgtggaaaagccttcagtgattgcagctatctcgtgaagcatgaaagaattcattggagagaaaccttacacatgtaaaaaatagggaagcttttatgtgtcccacatccctttatatgcatgaaagagccaaaacagaaaagaactgaagtgtttacagcagtatatctgatggccttgtctgtggacaacttgcgtgattaattaattttattagcgggtgtt

SEQ ID NO: 3157552 - DNA, 629 bp, Cricetulus griseus
ttgtaccccagataggtgtctttaggaaaaacagtggaaagctagctgaacccctttgtttcacagcagcatgaccagcatgtgtacaaagctgtttatacaacctcctacccgagtttacagcaggaaaaggtgctcaagtttgtactggttggggaactcctgatacaagtggaacgcttgaggttgagacaccagcgaatgctgagggaacaggagaaggaaatggaaccctaagcccggggacacggacttctcccaagccccccacctactgttgggagaggtcttcacagaggctgaaaaggccaggatagaaaattctccccaacccttctgtgaaggagagtaagttttgcataccccgaagctcagagtctcactgatagttaagttggcttagaattcaaacttctttggttttgtggtgctgggaattgaactcgggtccttgtgcatggtaagcaagcactctgccactgagctacatcctcagccctaggatttaaactttgtacagtcataattcaagtaatattttaaaagttttaacacaaatcgggtcctgaactcgttgacagatgtgcctgacataggctgttcttcgactgagaaagggcttaaataaa

SEQ ID NO: 3157553 - DNA, 851 bp, Cricetulus griseus
gcgactatccaggtagctggatgcggcggcaaggaggagatcgaggcgcagattaaagctaattacgatgtcctggagagccaaaaagggattgggatgagcgagccgctggtggactgtgagggctacccccgggccgatgtggatttgtaccaggtccgaacagcgaggcacaacatcatctgtctacagaatgatcacaaggcagtgatgaagcaggtggaagaggccttgcaccaactacatgctcgggacaaggagaagcaggcccgggacatggctgaagcccaagaagaggccatgagccgcaggctgggctccaacagccctgtcctaccccaggcctttgccaaagtgaacagtatcagccctggttcaccagccagtattgcgggcctgcaagtggatgatgaaattgtggagtttggctctgtgaacacccaaaacttccagtctctgcagaatgttggcagcgtggtgcagcatagcgaggggaagcccctgaatgtgacagtgatccgaagaggggagaaacaccagctcagactgactccgacgcgctgggcaggaaaaggactgctaggttgcaacattattcctctccagagatgactgtcccccggggcctgcgagaaagctgcttcagccaggccctgcacttgggcctggtgggatttcctcattctcttttaatcctagcactcaggaggcagagtcagaggcaggcagacctccaagttagaggccaactggtctacagagtgagttacaggacagccagggctacagagaaaccctgtatcaaaacaccaaaaataaaactaatttaaaaaacaaaaaaaaaaaaaaaa

SEQ ID NO: 3157554 - DNA, 317 bp, Cricetulus griseus
atggactggctcctgttcctcttgctaccagggctcctcctggttttgtatgagtctcatgaaatgggggaaaatactctatgcacttcttgcgaagaatattttaacaagacctgcaaaaagaactctggggtctgtcaacccagatatcctgacttggcatgccaaaccaaagaagtatattttcaacgtggtactggagaatatgtgtacaaatattccatcttgagctgcccaagaagatgtatggagtatgtccgcctcatcgggttggagaaacatatcttctcatgctgcaatcacagctactgtaacag

SEQ ID NO: 3157555 - DNA, 390 bp, Cricetulus griseus
atgtggcaaagcctttagctgttcttcatatcttaagtatcaccagagatttcatactggggcaaaatcttacacatgcaaagaatgtgacaaaacctttaggtcatcttcataccttaggaatcatcagagatttcatactggagagaaaccatacacatgcaaagaatgtggcaaagcgtttgttaattcctcgagccttcttgtacaccaaagaattcacactggagaaaaaccatacaaatgcaaagaatgtggcaaggcctttaggtgttcttcttattttaaatatcatcagagacttcatactggagagaaaccctacacatgcaaagactgtggcaaagcctttgctaaatcttcatgtcttattctgcaccaaagaattca

SEQ ID NO: 3157556 - DNA, 1034 bp, Cricetulus griseus
cccagactctaaagaactggatggccccgtgtatgagaaatgcatggccggaggcgactactgtgacagcccctacagtgagcatggtacattggaggaagtggaccaagatgccggcacagagccccacaccagtgaagatgaatgtgagccaatcgaagcaatagccaagtttgactatgtcgggcggtctgctagagagctgtccttcaagaaaggtgcctccctgctgctgtatcaccgagcctctgaggactggtgggaaggcagacacaatgggattgacgggcttgtgcctcatcagtacatagtggtgcaagacatggatgatacattttcagacactctgagccaaaaagctgacagtgaagccagcagtgggccagtcaccgaagacaagtcttcatccaaggacatgaactctcccactgaccgccattctgacagctatttagccaggcaaagaaaaagaggagaaccacccctccaggaagacgtcctggcaggaccagtgatggccattgcccctccatcccccacatactctttctaactcctcaacttgacctgggatcccaaacctagccagtcaggccatggcagcctgaccaacatcagccgtcatgactcccttaagaagattgacagccctcctatcaggaggtctacatcttcaggccagtacacgggcttcaatgatcacaagccactggacccagaaacaattgctcaggatatcgaagagaccatgaacactgccttgaatgaactccgtgaactcgagagacagagcacagtgaagcatgcccctgatgtcgtgctggacaccttagaacaagtgaaaaactcgcccacccctgccacttccatggaatctctcagcccattgcacaatgtcgccctcaggagctcggagcctcagattcgccggagcacaagctcatccagtgataccatgagtactttcaagcccatggtggctcccaggatgggcgtacagctgaagcctccagcccttaggccaaagcctgctg

SEQ ID NO: 3157557 - DNA, 205 bp, Cricetulus griseus
aggagctagagcctcaggttggtgaacagttgctccagttatgggaacgccttccattgggagaaaaactccagctgattgacattgacattcagaactcctggatgtggaagaacattattcctgttgtaactactgaatgcactgacttgtttaagccttggtgaggtgttgtatgtcatgagtgggttctgtagcttagagt

SEQ ID NO: 3157558 - DNA, 742 bp, Cricetulus griseus
ggccagttcagaatctgccagctctcactgaagccagctctcctttctccaccatgaaggtctctgtcatgcttttgtgcctgctgctcacagctgctgccttcatcattcacacacaggcccagccagatgggatcaattcatccacatgctgctatgtcaagaaaccaaagatccccaagaagtatcttgagagctacaaaaagatcaccagtagtcactgtccctgggaagctgtgatcttcaagaccaagaagggtatagaactctgtactaaagccgatgagccgtgggtccaggatgccatggagtacttggacaggaaaacccaaactccaaagccttgaagactcgtacctgaacaggaaccaacccaggagacaagaaacaaaaactctgcacccttgtcttttctgagaactgtgctaagataggctgattctacctctaaggggtagaagctgtctgaaggaatgtgaagcaataacacttaaggaattatctctaagttattaattatttttatttaatttgtctgtgctactttggtgtgatttgaatgtaaagccctggacacctcccatcactttaatgttgttttatctgcagaataaattatttttgcacaaaaaaaaaaaaaaaaaaaaaaaaaaaaaaaaaaaaaaaaaaaaaaaaaaaaaaaaaaaaaaaaaaaaaaaaaaaaaaaaaaaaaaaaaaaaaaaaaaaaaaaaaaaaaaaaaaa

SEQ ID NO: 3157559 - DNA, 371 bp, Cricetulus griseus
  modified_base (362)..(362): a, c, t, g, unknown or other
atcttgagctatcttagctccttaaatagtcacttgtcatccacatctgtgtgtgtcctaacatgctgtgactcttggggaaaggttttgggacatgtaagcagattcctactgctaaggaagtcatcacacagcatctgggacccatagcaaggtctccctgctttgctataaccagcttacctgatgtatcaccaatatttataaagcgactttctttattctgtcactataaaacatcacaaaattattaccacgttggaacatggttatttggggcaaactggatctgtatttctgggccatgatcattcatatttggctccacataaactatttcttcatacaaaaaaaaaaaaaanaaaaaaaaa

SEQ ID NO: 3157560 - DNA, 3436 bp, Cricetulus griseus
ttttcttctttttgctggcatattgaagatcactggagttactccattaactacttacattggggcgagccaaaacatggtatggtgtaccatctcatgctgcagaacaactggaggaggtgatgagggagctggcccctgaattatttgaatcacagcctgatctccttcatcagttagtaaccatcatgaacccaaatgtgctcatggaccatggtgtgcctgcgccattgtgtcttttcacatgaggaactcattttcaagatggcagccgatccagaatgcttagatgtagggctggctgccatggtttgcaaagagttgactctcatgaagaagaaacaagattaagggaatcagttgtacaaatgggtgtggtgatgtcagaagaagaggtttttgaacttgttcctgatgatgagcgacagtgttcagcatgcagaaccacatgttttctctcagctctcacctgctcctgtaatccggagcgacttgtatgtctgtaccatccaactgatttgtgttcctgccccatgcagaacaaatgtcttaggtatcgctacccactagaagacctcccttctctactttatggtgtaaaagtgagggcacagtcctatgacacttgggtcagtcgtgttacagaagcattatcagctagcttcaaccataagaaagtgggctctagtctctatgtagaactacctgaattgcctcgactgaagcaagagctacagcaggctcggtggctggatgaagtaagactaaccctgtcagatccacaacaagtcactttggatgtcatgaagaaactgattgactctggggtagggttggcacctcaccatgctgtggaaaaagcaatggctgaactgcaggagctcctcacagtctcggaacgatgggaagagaaggctaaggtctgcctacaggcaagacctcgacacagtatggcgaatttagaaaatattgtgaatgaagccaagaacattccagcctttctacctaatgtgttgtccttaaaagaagctttacaaaaggctcgtgaatggacagctaaagtggaagctattcagagtggcagcaactatgcttatttggagcagcttgagagcttatctgctaaaggctccaaaaagcagctgctaatccaggcttacagggacatttacctagcttccagcaatcagcttttaaccgggtggcgagcagtgtatcatcttccccccgccaaacaatggactatgatgatgaggaaacggattctgatgaagatattcgagagacatatggctatgacatgaaggatacagccagtgtgaagtcctctagtagtctagaacctaatctcttttgtgatgaagaaattcccatcaagtctgaggaagtagtgactcacatgtggacagcaccttcattctgtgcagaacatgcatattcttctgcttctaagagttgttctcaaggttctagtacaccttaagaaagcagcctcggaagagccctttggttccccgaagtttggagcctccagttttggagttgtctcctggagcaaaagcccagttggaagaactcatgatggttggagacctcctagaagtgtctctggatgaaacacaacacatatggcggattctgcaggccacacatccaccctcagaggacagattcttacatatcatggaggatgatagcatggaagagaaaccactaaaaatgaagggaaaggattcttcagagaagaaacggaagcggaaactagacaaggtggaacagttttttggagaaggaaaacagaagaccaaggagctaaagaaaatagataaacctaaaaagaagaaattaaaattaaatgtaggacaaatcaaaaagagactgaataaattggccaagaagctagcaaaaagaagaatgtaggctacattctcaatcatctgtgcagaggatgtcttctttggtacagcagccagtatttcagctcttgactccttcgagtatgggttgcttcattaaggccaggttcttgatggaactcttggaaggctgtttggaattaacacattgatatgcttagtgggtgtataagatgtggcttgtgaccaattgaaaccttctacaagaaggttacacctagaggtggtgccatcagaaggccctgattatttgaatctccttaggtaattggaaaagagtcagaggacaactttttccataattactggcatttatgctctgctgatccagttaggaggaacaggccaaaagttatcccttttagaagtcttggggtgtcaatgcaatctttagacctcagctgcttgtgcttattatatcaataagaaaatcctccaaaagagcccctcactttcctcaggaggatgtcagcaggttagaaagtctgactatactggattctgggaagaaggttttttcttatttggttttttcttatttcaaggcaggcagcccattggtttgagaagtctgtctgggtctgttttagaggagagaggtacatggatccaggttcctggagggagtagagatgactaatgagatcctttttctgagcctcagtgatgcatgcttatctgggaaacccttattcacaagtattccagactccaccatgcttcaggcatggccataagcaagactggacaaataacagtcttttgccttgcataatatatttaaaggtacaaaagttttttctaaaatatttatcttcactatcctgtgttctttattttggtttaagaatctgaagtttgacttaaactcatcagttgtctttttaaaggggtgaacaaacctagaaagtttctagtttctgctccccttttgccccagtctcttaagaaaaatgtcttctagtaactagaagtgagatgtactgtccagttacagactgtgtgggtatgagggttacctcaaaaaggcatcttaagggaaaaggttttcttacaaaacgccttctcccaagtgctaaccaggcttgaccctgcttagcttccgaggtcaggcgagacatacacatgcaggtggtacggttgtaggtacaacatccagtttctggttatcaacagaacagggttttgaggatgctgaaaggtgactgtttggggaataatttgtgtactttgtacagtgtttgtccattggagacctcagaaataggcagtctgtacctgtgaccagctgcctgtcatcttctgatattttgaaacttttaaatatataatttaattgattcaattggctctttctgtacttatttgaggaatttggtttgtcttaaccatagatttataccaaaagaacacaagagaggtgctggaaagatgtctcaacagttaagaacactggctgctcttccagaggacccaggttcaattctcaacactacatggtggcccacaaccatcagtaa

SEQ ID NO: 3157561 - DNA, 1260 bp, Cricetulus griseus
ctttgaattccctgaaaactgccttttgacgaacatgaggaggacaccttgagtcaggaggcacaggactggctggtgctacaggccattcaggacaaactaaaagaacaactctgcaagagaggtgttcgcattctgactggattgggaaaatactttcatcatttggacaaggcaggaagtgggctgttagagaaggcagattttcagcaagccctgaaagtctttaacttacaagtgtctgaacaggattttgagtcttcctggctaattctgcaaggcaatggccatggcaagaataaggttgattatggagaattcaaacgtgccatttttggagaaatgaatgaatataggaaatcgtttgttcgaaaggccttcatgaaactggatttcaacaaaactggacattgtgtctgttatagacataagaaagtgctactgtgcaaagaagcatccgagtgtgatttcagggcattcagcggaggaggaaatcaaatctatcttttctagagacattaagagatgcctgcagcaagtctgatgaagtttcatacggtgaatttgaagattactatgaaggcctaagtatagagatagcagacgatgaagattttgtcagcatcttacgtactccatggggaatttagttttaaataatgcacagtctcatcagttccaagtattttatagaaaagtttaattttatataaaacgtgattgacttgtaatatatttttcaacgattctttacaatttttttcaaaaatttaagtctgggaagacctatttagaaatagattctcaatttaatgacccaattcagatcaaaagctgaaaaagtgcgaacttgtttgaagcacaaaaattttaaacatatatacaaaaagcaatgtcataatcagtatgattataggtgttttctgtgcattatattttgaatggctggtgtttacccctcagtgtttcttgaaaaagacttgtcatatatatttttgtcttcaaaattacatactgctctctgttcagtgggaaaaattccactgtacttttcattttagctgtcatattttctgtatacaaatgttatatataaacaataaaatgtagaaaatattggaatgtagaaatatcttctgagactactaagtgaagaattcaaggataactcaacagttttttagacaaagtgtaaatcatattttgtgtcacaaaatgaagatgtgatatcctaagtacctctgtttgttataataaaca

SEQ ID NO: 3157562 - DNA, 1064 bp, Cricetulus griseus
  modified_base (308)..(308): a, c, t, g, unknown or other
  modified_base (738)..(738): a, c, t, g, unknown or other
ggcccccaggctggtttctgtccagatggaccccaatcactaaaagccagttggcagattctcttctccatacttgagttctcaggaagcctggaggagctggacctaagtggaaacctactgagcaactatgcagtacagagtctttgtaggaccctgagacagcctgggtgtcacctaaagaccttgtggcttgtcaactgtggcctcacatccagccactgtgtggacctgacctcagtgctcaaggccagctccagcctaactgagctcgacctgcagctgaatgacctgggcacagtggggtnaggctgctgtgtaagggactcaaggaatcctgcctgcaacctcagaatcctactgctggaccagggctctctgagtgacaaggtgagacactttgttcccatcacttccatcacactgatctactatcacctcaatctcaaggacgtcacccttcatctctacctgatccccaatgactgcaccattcggaaggccattgatgatgaagaaatgaagttccaattcatgcgaataaataagccacccccacaagactcattttacattggctcacgctacatcatttctggttctgagaaactggaaatcatgccaacggaactggtattatgctacaggagccccagggaatcccagctcttctctgaaatccctctcttggacaagctgcatagtctggtgctgagtgaacaggagtatgaggcagtncgggctgaagccacacccaagacaagatgaggaagctcttgagccacagccggtcctggaccagggcctgcaaagaccaagtctaccgagctctgaacgagacccatcctcacctgatcatggacctcgttgacaagtagcacagggtctctgtgtgatcctgacatctgagggctgagcactctcctttgagtcctggctctgcttgagcttctcttggctctaagtttctccatctataagccagtagccatctgaaattgcctttaatgatggcagtcctgaccctcgatgatacaagcaggactggggagcatgggaatgga

SEQ ID NO: 3157563 - DNA, 1755 bp, Cricetulus griseus
agagtcagcgaatgaggcacagcaaccattctacagagaactctcccattgaaagacgaagcctaatgacctctgatgaaaattaccacaatgagagggctcgtaagagtaggaaccgcttgtcttccagctcacagcacagccgagatcactaccctctggtggaagaagattaccctgacacataccaggacacttacaaaccccacaggaaccgaggctcacctgggggatacagccatgactcccgacataggactttgagggtgctacatttacatgataacagtaccttttaatttcttcatagactttagacacatcaatttgtaatttagggtacttatcaaggcacatagtaaaataatttcccatgtaggaaattccaaatgaccagttccagttggaaccaatttataaaccaattcctgttggaatttgggtgaattgactggaaagtctacttgagcatgttgaaatcaattgaaaagtcaaaaaatatgaaaatcatttcatccttaatggaatgaattttaaagtctgaaaccatttgagacaactattagttccacttttaaaaatgtgttatttactctaattattattgttgtttgcaaaaatgtatttttagaatgttaacctcttttcatacctgcatacttgaacttgtcttttgtgtgggggccttaaatttcataatagagaatgggggaagtaaaaagggaatgaagacaaggaaattgtggcaaaagatagctcacaatcttcagatctttaaataaacatatcccaaaataatgagacacagtatgtcagttaagaatgttttctaggcaaccttaatttgcaagctagtatattttcttatataattttattttgatattttgactaaaaaaaaaaaaaaagtgttaaatatgcctgccctttagatgttacatggttttcaaatgcgctaaccacaatttcatttcttccatgttagcaaggttttcttggaattgattcgtggcttatcatgaagtgagtttaatttaacaagaagccatcctagggaacaaagcaaactgaaaggaactacctctgtgtgaaaagtgtcacctatagctcaaggtctaaggaagagaaatccagagacttgctgtttaaaggcagagtgggttgatcctcgacttgtatgggcacctagggtatgctgtagccacttactgggtatgcatctgcactgtctagaactcttgtgtaattggaacaaacttcatatcaatgtttcaaataaatgcttatgtaacctctattcctttatatttgcctttgtctttcatgacaatgttactatttttatatatgaaactcatccttgttacttactccagctgtgcctattgtggcaaacagcagtccttctcctttaaatgataatgatgattaaaccagtcaacattagagctgttagatggacattaagaataacttcttgttgagttaagcaatctagttaatcaaactagtaaaactggcttatatgggcagatagctacagcattcagaaattactcttcaaggtttcttctcatgttaaaagaacctttctccaatgaaacacatcctctgatagcaatgtctttatctacttgtggataatttaataccaaatgctgcatgtatgaaggtgtattataaggagattagaaagtatctcatcagataatcttaattaagggctagtaactcctacttgccataaatacatat

SEQ ID NO: 3157564 - DNA, 825 bp, Cricetulus griseus
tggcccagcagacgagccctgccccagagcaaggagacactactgcagtcttacacaagcgactcaaagacgacatcaagtccatcatggacaacttcactgagatcatcaagaccgccaagattgaggatgagacacaggtgtcacgggctactcagggtgaacaggacaattacgagatgcacgttcgagctgccaacatcgtccgagctggtgagtcactgatgaagctggtatctgatctcaagcagttcctgatcctcaatgacttcccatctgtgaatgaggctatcgaccagcgtaaccagcagctgcgtgccctgcaggaagagtgtgaccgcaagctcatcacccttcgggatgaggtctccattgacctctatgagctggaggaggagtactactcgtccagttgcctaagtcacatggccttgtttgatggcatcctttctttggatgcaagtgtggccagaactggtagcagaggggtcagccaagaggagaggaaggggaggcagtcaggtgatgttcatttcttaactcttgcatctgtcttgctttccccaccctggctttcctctgcctgctcctgtcactcctgggggtttcttgtggcaaagctcaagtctctgcgaagctaatgacctgcctctatgtgaagcttactggaggctggacctcgacacagattctgctgatggcctctcagcccctcttctggcgtccccggagactggtgctggtcccctgcaatctgcagcctctgcccactcccacggtggtggccctggtcccatagaacatacctgagcttcttggggtacc

SEQ ID NO: 3157565 - DNA, 603 bp, Cricetulus griseus
ggcggccgtggtggcgctgctgtcggccgcgatcgcgctccactggccgccgctgcacgcagttttacagagagcattctccctccatacagcacattccacaaaggacatggagaatttttttcagttggtgagaaacattgtgcctgctctgacctcgaagaaacacaaagggcaagacggaagaataggcatagtcgggggctgtcaagagtacacaggagcaccatattttgcaggaatctcagctctgaaagtgggtgcagatttgacccatgtgttctgtgccagggaggctgcaccagtgatcaaatcctacagcccagaactgatcgtccacccagtccttgacagttctaatgctgttgaggaggtggagaaatggactccccaggctgcatgcccttgtcgtgggacctggcctaggtagggacgaccttattctcaacaacgtcaagaggcattttggaagcaaccaaggccagggacatccctgttgtcatcgatgcggacggcctgtggctgatagctcagcagccggccctcatccacggttatcagaaggccattctcacccccaacgtgtggaattcagcaggctct

SEQ ID NO: 3157566 - DNA, 260 bp, Cricetulus griseus
  modified_base (140)..(140): a, c, t, g, unknown or other
aacgcttcccgcagagagtccaggccctacgtgaggcctacgtgcgcggtggaggccgggacccggagttctgaacaaatacggcagctacaagcggaggcttcagccctggagttgcagcgttcgcagaaccgcaaggntaaagcaagtgctgcctctgaggagcttctagtggtggaagccgaaaaccggctcctggaagcagaaatccaggccttgcagaataaaggcctgagtctggagccctggggacccaggga

SEQ ID NO: 3157567 - DNA, 510 bp, Cricetulus griseus
ctgaagtgacccaagtcaactgggagcagcagggtcagcttctggcggtttacagtgctgaccaggggtggtatgtctcttcagtcttcagtgagcgggtggttccaggccctagcctaggcctcaccttccagtcactgacaaggaatgacacgggggagtacttctgcatctatcacacctatcctgatgggatttacaaggggagaatattcctgaaggtccaagaaagctcagcggctcagtcccagactgcattgcttggaggagccatggccactgtgctaggactcatctgcttaatgatcacaggagtgactgtactggctagaaagaagtctcttagactccagtctatggaaagtggccgttgggagaatggcagctgagccccaggaaatgagccccaggattctctcatcccctggagggcctgtccagacagaagctgcccctgctggtctctctctgtctctgttctgtctctctctctctctctctctctctctc

SEQ ID NO: 3157568 - DNA, 392 bp, Cricetulus griseus
gttggactcgtgatgggccttatccgtatgatcgcagagttttcttacgggaccgggagttgcctggctgccagtaactgtcccaagatcatctgtggagtgcattacctatattatgccatcattctcttttccgtgtctgcgttggttatcctgggagtttcgttcttaacaaaacccattcctgatgtacacctgtatcgcctgtgctggactcttcggaacagtgaggaggaaagaattgatttggatgcagaagaaaaaaggaacgaaggagctgatgatggcactgaagacgaccaaactgagaaaccccgtggatgtctcaagaagacttatgacttattctgcggtttgcaaaaaacaggacccaagctgactaaagaagagga

SEQ ID NO: 3157569 - DNA, 323 bp, Cricetulus griseus
cgggcagccctgcgcagactggctgacctgctgaagccagggggccatctggttaccatggttactctaggtttccagaactatatggtgggccccaaaaagttctctggggtcttcctggagaaagagacggtagagaaggctgttcaagatgcaggctgccaggtgctgaaatgcaactgtgcccccctcaaatactcacaggcctgctgcaagggtctctgctttatagttgcccgcaagggctccagtgcctgaggtcactggcagagaagagccttccctgaggaagctatagccagtatttataaaatcttgctcca

SEQ ID NO: 3157570 - DNA, 321 bp, Cricetulus griseus
ggagagtgtgccctgccgcctcctgggcttcctggccacgctgtccacggaggtctccgtgctgctgctgacattcctgaccctggagaagttcctggtcatcgtattccctttcagcaatcctgtctacctgggcaagcgccagactgccgtggtgctcgccggcatctggggggtagggttcctcatagcagccgttcccttcaccagtgaggattattttggcaacttttatggggaaaaatggagtctgcttccctcttcattacgaccaagcggaagattttggaagtagagggtactcccttgggatcttcctag

SEQ ID NO: 3157571 - DNA, 453 bp, Cricetulus griseus
gaaccaagccaagccaaagaggcccacagaagcaaggctctccacatcaggagtggtttaccaagtacttttcattctaaactggttcttaggatcttgttccaagtagtatattggaatcatttcaaccatctgaaggaatgaattaaaatcacccaaccaggtaacaagctggtagtgacttacatgtgatagctaaaacaaagtatggtcattaacattccagtttcattgtgacacctgcttagtttacaactcttatagttaaagatgaaacaagccagttactataaagtatcccttggaaaatgctattagtctctgatgaccaaactacccattgtatttctagtgcctgtaatgtcacactccacttggtgaaatatcagacttgtggctgccatggcctgctttaaaagtattctcattttttctgggtcatctccactcaaa

SEQ ID NO: 3157572 - DNA, 2281 bp, Cricetulus griseus
agagatctcaacaagaggcttgagaaagagacagcacagagtaaagacttcaaactagaagttgagaaactcagtaaaaggattacggctctggaaaaactagaagatgctttagataaaagcaaacaagagtgctactctctgaaatgcagtttagacaaagaaaagatgacaacaaagcagttggccgaagaactggagagtttaaacaccaggatcaaagagctagaagccattgaaagtcggctagaaaagacagaattcaccctaaaggatgacttaacaaaactgaaaacattaactgtaatgcttgtagatgaacgcaaaacaatgagtgaaaaattaaagcaaactgaagataagttacaaaccactgcctctcagctccaggcagagcaaaataaagtgacgacagtgactgagaagttaattgaggaaactaaaagggcactcaagtccaaaactgatgcagaagagaagatgtacactgtaaccaaggagagagatgatctcagaaacaaactcaaagcagaagaggagaaaggacatgatctattgtcaaaaatgaatatactgaaaaacaggcttcaatcactggaagcaattgagaaagattttgtaaaaacaaattaaatcaagactccagtaagtccacaacagcattacaccaagaaacaataagattaaagagctttctcaagaagtggaaaagttgaagctgaagctaaaggatatgaaagccattgaagatgacctcatgaaaacagaggatgagtacgagaccttagaacggaggtatgcgaatgagagagacaaggctcaatttctgtctgaagagctggaacatgttaaaatggaacttgccaagtacaagttagcagaaaagacagagtccagccatgagcaatctctgaccctcaagtattttctaaagttaggttcaaacagaagtagcagacaatgagccaccagactacaagagcctcattcctctggaacgagcagtcatcaatggtcagttgtatgaggagagtgaggaccaagacgaggaccctaatgaggaatctgtgctgtccttcaaatgcaatccatctacttcccttcctatgaacaggaaactatggattccttggatgaaatccaaggagggccaccctcagaatggaaaaatacaaactaagtccaatggcaactttgtgcaacctggagatctagtcctaagtcacacacctgggcagccccttcacataaaggttactccagaccatgcccaaaatacagccactcttgaaatcacaagcccaaccacagagagtcctcactcatacaccagcacagcagtgataccaaactgtggtaccccaaagcaaaggattaccattctccaaaatgcctccataacaccagtaaagtccaaaacctctacagaaagcctttcgaacttagagcaaagtatgcctcctgttaccatggcaacctttgccagagcacagaccccagagtcctgtggttctgtaactccagaacggacaatgccacctattcaggttttggctatggctggttcagctagttctcctgagcagggtcgctccccagagccgatagaaatcagtgccaagcatgcaattttcagagtctccccggaccggcagtcatcatggcagtttcaacgttcaaacagtaacagttcaagtgtgataactactgaggataataaaatccacattcacttaggaagtccttacatgcaagctgtcgccagccccgtgagacctgccagcccttcagcaccactgcaggataacagaactcaaggcttaactaatggggcactaaacaaaacaaccaataaagtcaccagcagtattactattacaccaacagccacacctcttcctcgacaatcacaaattacagtaagtaatatatataactgaccactctcaccctcatctagttcatactgatactcttgcaaggaactcagtcctttttttaatcatccctccaaacccctaaagaatgactaaacatgtactttgggaagatgtgcatggactatccaagagtatctggaactaacaatgtgttgcctgccatcgagtgtgcacttactgtgtatcttttcatttacatgcctgtatggaaaatatttagtctgcacttgtataaatacatctttatgtatttcattttccataactcactttaatttgactgcaacttgtcttggtgaattacttaacatgataaaacagtaaatagtttgttaactttt

SEQ ID NO: 3157573 - DNA, 433 bp, Cricetulus griseus
ggttctcctccagcagcagcaggccctcatgcttcaacagcagcagcttcaagaatttataaaaacaaacaagaacagttgcagctcaactctccaacagcaacatgctggaaaacaaccgaaagagcaacagcaggtggctacccagcagttggctttccagcagcagcttctacagatgcagcagctgcagcagcagcatctcctgtctctgcagcgccaaggccttctaacaattcaacccgggcagcctgcccttcccctccaacctcttgctcaaggcatgattccaacggaactgcagcagctgtggaaagaagtgacaagtgcccacactgcagaggagactacaggcagcaaccacagcagcctagacctgaccagcacatgtgtctcatcctcggcaccttccaagacttccctcattatgaac

SEQ ID NO: 3157574 - DNA, 1203 bp, Cricetulus griseus
  modified_base (276)..(276): a, c, t, g, unknown or other
tgctacctcatgacgaagattcttcagatgacattgctggtttaacatgccagcacgtcagtcatgctgtcagtgtgaatcatgtgaagaaggcagtagctgagaacctgtggtcagtttgttcagagtgtttgaaagagagaagattctgtgatggacagccggtacttccttctgatgtttggttgtgcctcaagtgttggtttcagggatgtaggtaaaattcagaaagccagcattcactgagacattccagagccttgggaccgagttgtnttgaaaaattaaaaaaaaagttaattaatgcgtggccaatgcctttgggttactccagggaggcagaggcaggtggatcctaaaatctgtatgattttacacattattctagcaatgatatgcaaatgaaatacttttatctataacctagtgctaattgagattctgaagtgtacttttttatggtctaaagttggagtgtttttcttgtcatctaaaaatggcagaaaatgatttgactatggtatctagaaatttcttatcaagcttttgtaatagagaaagatcactcaattctacacttaaatttttgtttttattttgaagttctccaaagtgaatttgaaaagtaaaagagagaagcttttagctagaaactggtttacagggtacatctacgccccaatttcccctggttttccatatttaaaatgataaaatgtcaatgatgtgccaattatgtgaatgtgacataaatatacatctatatttaagatatgttgttaattgtttaaaaattcctgaagatttagctgtgaaatgtcattacacattaaatttttgtagtataaaataacatccttcctactttcatgaactttgaatactcagtttatttttctgcttgacatctgatcaaataaacccaagccaaatatgtgcaataaaatcaagctattagattgcatccattgctttattggaaaaattatttctgtattaaaatatttttgttcatgtagaaatcatcaattcaaatgtgtttaaaaggcagatgactattttcaagtataataaattcatggtatcattcctactcttatccatttttacagtatttaaaaaatctgtttaacttattgagcatcattttgccattgctgtatgtataaacatcataataaatactaaattcttaatagttaa

SEQ ID NO: 3157575 - DNA, 357 bp, Cricetulus griseus
tttagaagcttagtctgtttcctctccagtttctcaatcaaagctttctcattcttcttttcctggcccagatagggctcccttctcattcacaaagtgccccctccatgtccctggacccttaggatatcccctgggactcccgggtggtcagagactctgtctgactcaggttatgcctgcagagtgctttggaagaagtggcactgtcttaggggcttttgagggtcaagtaggagttgccaacacccggaaaggactctttccgctccatccctggacaattatggaggactgggaggttagagagaggaagatggtttccatctcgtgcctctcccagtggggagtggggga

SEQ ID NO: 3157576 - DNA, 219 bp, Cricetulus griseus
gtccgcctcccgccccgaagaagggctccaagaaggccgtgaccaaggcccagaagaaggacggcaagaagcgcaagcgcagccgcaaggagagctactcggtgtacgtgtacaaggtgctgaagcaggttcacccggacaccggcatctcctccaaggccatcgcgggcgaggcttctcgcctggcgcattacaacaagcgctcgaccatcacgtccc

SEQ ID NO: 3157577 - DNA, 372 bp, Cricetulus griseus
  modified_base (50)..(50): a, c, t, g, unknown or other
gtgcccctgagtcgctagaggcctccagtgggcagaagcactgatcaggngaaagaccacagccagcttaagaactgtattcagctgggaacctgacagtgctatcaactgaccctctgcttcaccaagattcagttcagttagatttccactttcatcccactccccattcctctgctcattggcatggtcttctgtgtgaccatcgactcttcctggatatcccatatcaggccttagatcacggcaaccgagaaagtttgacagcaacactggagtatgtggaggagaagaccaatgtggactctgtgtttgtgaacttccaaaatgatcggaaggaacaaagaaggtagccctgcttcgagcctttag

SEQ ID NO: 3157578 - DNA, 2069 bp, Cricetulus griseus
gttttccagaatgccacgagctcctttgtaagatcttcctctgttatatgaacatgaggcccagcattacttaagcaaagcaccagaatcatctgcacaatttactgaagcagttcctaatcatcaggaaatagacccatccagtaatgagaaccaaatgatttatcagccggtttctactaataaatcaaggaaatattctacagaaccaaagacatatatagacactatggaaaagaaaatggacagtttagttcagaatggaaatgaacattctgatgatactgtttcaaatataagcttgacagaccaaaagatagcctgccatagaagccaaatacctgaaaaaagtcatagtaccagtgacttagtcaatggacacagtgaaatagagcaaacactgttagttgcatcagatcctactctgaaaatagatataaatagaaacaggacagaaaatggttctattttacccagtgttgtatcacaagaacacagtgccctgtctgtatctcaggcaccatccaaaccaaatcttacaagtgaacatacttcttatggcttaattttaacaaagccgtatgtcagacctttgcctcccagttaccttgatgaacgataccttagtatgccaaaacgcagaaaatttctgactgatcgagtagatgcctgttctgatcaagataacgtatgtaaaaaaccagtgaaaccattacgatgtggcaaatgcctgaccacttactgtaatgcagaagcacttgaggctcaccttgcacaaaagaaaatgtcagacactctttggatttgattcagatgatgaaagtgcctgataatgtctcagaaaaacaaaacactacaagaaaatgcatcatcagttttgctatttccctgatggccttaattttagagtggtctcggattactaaagaaaagacaaagcacattttctggaatgaacttgcagaggagatgtgccggctaaggactccaaaagggttataaaactcccaaagtaccagttatccatgaaaccacactttttaaaagtttatggtgattaatagcagcatgttcaagttttgctttctgtgaaatccatttgggtaactagtcaaataaaaaccagctatggccttattgaagaaggaagaagttgattgattataatataaggtggaggggagctggtttacaataaacaatgtaaaacattctgaaaacgggatttgtttcttctcatgcatattcattatgtcttccctttggtcaaacatattttttttattatttaccatgggcatttgcaactgtgcaatgatggtcattaatccattccaatcagatttgagtttgatttagttttgttaggtagcctacattaggctgtgggatttacattgcagataacagataagtacaactcctaagttctaaatcctttaagttcaactcaaaatgttttccatatttcctgacactaaaaatgtaatagacttttagttctattttaaaagtatatcttgtaataaacattctagtttggaaatttcaaatctttgttttaaaataaactctgtgtgtcagtggtgaggcaaagtgcatacttgaatccttgctgctagacacaagacgcacaggaggaagtctccatggacaagaacactggtactttgggcactagccatattcatttttttaaaaaccaccaatatataatgaatacataatttatagcattgatcatgtgattcttttcaaatcacactgaacgtttagctgtattttcatgtttggtttaatgttgtatgaatgagaagcctaaaagggatgatagtgtttattttttaatttatttggtactgtcaaacaccttttcagaatgaagcaaatgctgcatatgcattttggaatttgttattatgtgaaagatattacagattcagcaagaagggaaatttgtgcttccttgttgaacgataaaaaaaaaaaaaaaaaaaaaaaaaaaaaaaaaaaaaaaaaaaaaaaaaaaaaaaaaaaaaaaaaaaaaaaaaaaaaaaaaaaaaaaaaaa

SEQ ID NO: 3157579 - DNA, 1916 bp, Cricetulus griseus
ctgctattgtactttctgtcaagcccttctctccgtgggcgatttagagatggcctgtctgctggatgctgggtggagtgtagcatggagggtgtggacatcatgatggacaacctgaagagccgccctgcagtgcctgaccagagcagaggtttaaggaagttgaaaagattgaaggagatatgaccgtccagtgccactactacactcactattcctcagcctatcattgttgcttcctacttggtccggatgccacccttcacacaggccttctgctccttacagggtggaagttttgatgtggctgatagaatgttccacagtgtgaagaacacatgggagtctgcctccaaggagaacatgagtgacgtcagggagctgacacctgaatttttctacttgcccgagttttttaaccaactgtaatgcagtggagtttggctgcatgcaggatggaacaacactgggggatgtgcaactccctccctgggctgatggggaccccaaggaaattcatcagtttgcatagacaggctctggaaagtgattttgtcagtagcaacctccaccactggatagacctaatttttgggataagcagcagggaccagctgctgtagaggcggtgaacacccactcacagtcctccttcacaacctgccagcgctgagaccttctcaagtcacagtcaaagatatgtaccttttctctctagggtcagaatctccaaaaggggccattggccacattgtccctaccgagaagactatcctggcagtggagaagaacaaaatgctgttgccacctctctggaacaggaccttcagctggggctttgacgacttcagttgctgcctggggaactatggctctgataagatcctgatgacattcgagaacctggctgcctggggcccctgtctgtgtgctgtgtgtccatgccctacgatgatcgtcacttctggagctagcgcagtggtgtgtgtgtgggagctcagcctggtcaaaggtcgcccgaaaggcttgcgccttcggcaggccttgtatggacacacccaggctgtcacatgtctgacagcctctgtcaccttcagtctcctggtgagtggctcccaggatcgcacttgtaccctatgggacctggaccaactctctcgagtggcctgcctgcctgtccaccgggaagggatctcagccattgccatcagtgatgtttcgggaaccattgtctcctgtgctggagcccatttgtccctgtggaatgtcaatggacaacccctggccagcattaccacagcctggggcccagaaggaaccataacatgctgctgtatagtagaggggccagcgtgggatgcaaaccacttcatcatcacggggagtaaggatggcatggttcggatttggaagacagaggacatgaagatgtctgttcccaggaaagcagtgacagaggagccctccactgagcctctaagccccagagggcacaagtgggccaagaaccttgccctgagccgagaactggacgtcagtgttgctttgagtggcaagcctagcaaggcaagccctgctgtgacagctctggccataactagaaaccagactaagctcttggttggagacgagaaggggagaatcttctgctggtccgttgatgggtaggagaaaacaagtgctggaggcacctgcattaaagctaggtgtcccagggtctgcatcatcaggcttcagacatcaaggtgatgtgtagcctaggctctatacccagagcaagcttttgggggctcgcctccctacagtcctcaaggaatctctgatgatttgcactgtgtaccccgagcgtctctgtggtccactagatgtctgtataaaggattctgggagacattcatgctgaaaactgacctgca

SEQ ID NO: 3157580 - DNA, 688 bp, Cricetulus griseus
  modified_base (661)..(661): a, c, t, g, unknown or other
tctgatgacaaaaatcagaaatactgtcaaatgccatgaagtttcagggagatcttgcatcactatggggagagtgatacttgatggggccaagtgggatgatgactgtaacacctgccagtgcctgaacggacggatcgcctgctccaaggtctggtgtggccctagaccttgccggctccacaaaggtcacagtgaatgccccagtgggcagagctgtattccggtcctagatgaccagtgctttgtgcacccctgcaccggtgtgggcgagtgtcgatcctccagtctccagccagtgaagaccaagtgcacatctgactcctattaccaggataattgtgcaaacatcactttcacgttcaacaaagagatgatgtctccaggtcttaccactgagcacatttgcagtgaattgaggaatttgaatattctgaagaatgtttctgctgaatattcaatctacatagcctgtgagccttccctgtctgcgaacaatgaaatacatgtggccatttctgcggaagacatccgggatgatgggaaccctatcaaggaattactgataaaataatagatctcgttagtaaacgtgatggaaacagctcacttattgctgctgttgcagaagtcagagttcagaggcgtcctatgaaaaacngaacagatttcctggttcctctgctga

SEQ ID NO: 3157581 - DNA, 271 bp, Cricetulus griseus
caggctaaggaaagagatcatccagcgtgtgaacctggtggccactgacttccgaaaggtggccaccaaccagatgtgggagacaaccaggcgggccatcctagagaacaacaatgtgacattgcagctgtcctgggtgactcagcaaggtgtgcagctgcttcaggagaatgagcagctcaaaggtatccaggataaactgtaccagcaggtggagatgttggagaacacccaagagatcatggctagaaacagcagaggccatcagaag

SEQ ID NO: 3157582 - DNA, 2785 bp, Cricetulus griseus
tcttactaaaatcactcaattattgaagtctacctttagtaccatcccagactagttctgaatgggacataaaaaagttaaccaaaaagctcaagggggagttagccaaagaatttgcacctgcaacaccaccttctacacctcacaactcctctgctggcagtttgtctgagaatgaacaaaatcctatagaaaaagaagagttcatgttgaagcttatgcgagatactgtgaccttaaggaacgccatggttgtgccagaagtccctcccagcccctttaaaacagagtgtatgtgctagtgctaagccaggttcacaaccaaaacttggtagtatccaccagaaatcgagaatttttacatcttgatgtgcctcaaattcatgttaatcttgataaaagggcagtgcttgcagagaaaatagttgctgaagctattgaaaaagcagagagagagctgagcaatacccagtcctggcagccgatagtggaattggacaagatggcattagctttgctgagagccttaccacagaaatcatgacatcagctgtgacaaatgctgagttgttagcagtccaaaagaaatagaagattttcagtcaactgaatcacttggcagccagcagctgaatctgagtgttggtgaggacagtactggtagctggtccaacttaagttttgagtttagaaggagatttgtatgaggacaatttatcctttccaacatcagacagtgatgaaccagacgatagagatgacgatcaagaggatggtgcggaagatttgcgacaaaatgggaagacgctgctaattgtgaacattgacctggagccgggagcagtagatcctcagctaagggttcttcttcagtggctcgtggcctctgaggctgaagttgaagaactttatttccaggactcttcgaagaaggagtttatattactttcaaaacaattaaaagagaaaggatggagagtgggagatgtccttcaggctgtctttaaatactacgaagtgctggaaaaaacttcaagtgagggaagatgcaagtcgttgttcgattggcttttggaaaatgcctagaacaaactccagaccagtatttgtttaggaagtaaagaaaccgatgacttatgtttaggataaaactcaaatacagaattattaacattttaattgaattgagaggaaagtaagaagccttttaaatgctttctgtcatcacactgtatatagttcatacttttgtaatctttcaaaatattctctttacttattcttctatacatgtgtttgtgttatgatgctaagaaatgtctgtgaaggagaatctaaccctgacgctgggggcattgtctgacagcatttgtttggatccacatagtgctgctgctgctgcaaacagggctgaggcggctggcctggcccaagtgatgattttgttcctttgaaaacaagtggcatctgatgataagtcatctgacatcaagaaagaaaatggaggatgatattttgttgtttgtttatttctggataagtttgtaatttttactgtttattcaaatcagtttaatttccatagttcagctatgggtacttctaggtttccccagacatttaatttgttagcatactcattagtgatttaggattctgtgaacacctaaatgagtaagtgagtttccctagccttccatcaagtgatgctacttgctaatgctgccagtcattctggaatgagaaggagcaagctctgacttttctagaagctgcaatgagtagaagacatagtgcctaccagggcacttacattaatttgaattagtaattatggtggagaaatatattttatagagaaagcctcacctttactttaagtccagaaacaatttaagtattttgaaactacattataaactctactttttctcagtttaacatagagacacagagccagccataaatacacatttttctaaaattttctcaagtatttttcagagtggggaaatgcagggaattttctccacaactactgtcaccagtttctaatcagtgtattattttgtaatttttcagagaaatctttacacagagtttaaatatgcagagtccacacatgggtagggcaaatgctttccatttaaagtcctgtctgcctgtcaccagcacacaagaagtagagagtgtctgtgggaattagaagggctgtactcaagtgcagtgtgcttttctcatttgcagcacaagccctgtaggcgtcccttgtttactgtgtgcctgctcttcacaagcaggcgcggtgctggtcactcttgccactttatttatttattttgaccatctgtacattcctttcatgtagttagaactgtcattctacaagttcttatttcaatttgttgtaccatttgaatactatttaatgccaggtttatatgttgctggattcttgctgcctttggttacttgtgctgtgttcaaagtaatctgcattcttgttcagttactgaatatatagtagaagcaactttgaataatggtggccatttatttgggtttgctcaattagtgcattatggtcttataatgtgtaatagtaacttctctttttgctcttgagtaatttaatgttcatttatcaaaataggagcttcaagatgcacttgagttttgttttagcagtggctcaaaaatgtttacagaaattacttttagtaataatttgctaattaattgttcttttctctaatactcttgttcaagcttgtgatctttcctc

SEQ ID NO: 3157583 - DNA, 686 bp, Cricetulus griseus
tccaggagaaggtcctttcccaggggtcattgacttgtttgggagcactggtggactgattgaattccgggccagtcttctggccagtcatggctttgcagccttcgctctggcttactgggcctatgatgacctgccttcttatctggagaagatagatctagagtattttgaagaaggtataaagtttctcctgagacatcctaaggtcttgggcccaggtgttggcatcatttctgtatgcaaaggagcagaaattggactgtctatggctattaacctaaaacaaattaaagctactgtacttatcaatgggcctaattttgttaccagtgatccacatgtatatcatggtcaggtcaacctgcccgtcccatgcaacgtagaatttgtaaccaccaatgccttaggaaaactgcagataaggatagcaaatattgttttccccattgaaaaagctcagggacattttcttttcgtggtgggagaagatgataagaatctcaaacagcaaagtacatgctcatcaagccacagcacagctagataaaaagtgggaagaagaattggactctgctgtcttaccctggggcaggtcacctgattgaacctccctatgccccattgtgctctgcctcaaggatcccctatgtgatcccaagcatcagcgtgggggggatacgtta

SEQ ID NO: 3157584 - DNA, 166 bp, Cricetulus griseus
tttttatctccaaaccaaagaaaaggaaagagaactttccagacattcaggagcacatgtggttgaacaaaatcaagtacaggctgaataggaagacatacctttcggtacaacatttcgtgaaggacatgcgtctcatcttttggaaccacaggataatttataa

SEQ ID NO: 3157585 - DNA, 396 bp, Cricetulus griseus
gattctcttagagaagaatggttctgacaaacagctctctggtaacagaattcattctcttgggtttaacagacaaccctgacctacaaatacccttgttcttagttttctggtaatgtatatgatcactgccttggggaatttgactttgatccttctaattgtgctgaactctcaccttcatacccccatgtactttttcctctttaacttgtccttcatagacctctgttattcttctgttgttacacccaaaatgctgatgaactttgtactagagaagaatattattggttttgtcaggatgcatgactcaactctatttcttttgctttttgtcatctctgaatgttatgtcctgacagcaatggcctatgatcgctatgtggctatctg

SEQ ID NO: 3157586 - DNA, 496 bp, Cricetulus griseus
gcttgtcgaagatggcggcgctctgtgtatgccggtttgctggaagaggctggctgtggaaggctcccttggctacacgtagagacttttggtctcgatccagaaaggagaaagagccggaggtacctgagacagtggaagaagtgaaaaaagaacctgttttggtgtgtccacccttacgaagccgatcgtacacaccacctgacggtctccagagtcgcttggaatcacgtatcaaagaagttcttggttcatctcttcctagtaattggcaagatatctccctggatgatagtcatgtgaagttcagactcttggcacatttagcagatgacttgggccatgcagtacctaactccaggcttcatcaaatgtgcagggtcagagatgttcttgatttctatagtgttccagttcaagatagatctaaatttgatgaactcattgccagtaatttgcctcccaatttgaaaatcagttggggttactgagcagt

SEQ ID NO: 3157587 - DNA, 734 bp, Cricetulus griseus
agagtaaatggagcctcctgagaccttcatgagaaactaccatcacaccagggtacggtggcttcataccgtggctcagttgccagggacccttcagcgaggatgacatgaatcactgtgtgaaagccttccaggagaaaacgcagaggtacaaggagcaacagcaggaattgaactgctctgtgaataggcatcccggccctgaagcccatctgctccgagaacacagtcctgtggaagctgcatgagtatgccaagaagtaccaccccctgactctggaatgcaagaatgtgaagaagcccctaaaggagccccccatccctggctgggcaggctacctgcccagagccagagtcactgaatttggctgtgccacaaggtataccatcatggccaaaaagtgctatgaggacttcctggatctgatggagcaggccaagagggcccagcagaagccctatgagcaaatatatggtgtgagctctgaacagcctccccaaccttctccaaaagtctcgcagctccaaggtctcccacctgaatacccggaatcctctgtgccaggtcaagcacttccaagtgaggactcccgagctcccggaacctgtggctgtgctcagtggtccagtctgtcatgcagcaggaatgcatatgagagatacccaccccaagagatgcaatttgcagtgggccagagccttacaccctcccaagagatttgagcctcaaggga

SEQ ID NO: 3157588 - DNA, 512 bp, Cricetulus griseus
caaaaacaccgtcaccttcagcaagttcaacttctccaagaccaatgccttagacacctgggacagcacctatttcaagcattgtcgctatgatccacactccagcccgtactgcccagtgttccgcattggggaccttgtggccatggctggtggggactttgaggacctggcattgctgggtggcgctgtgggcatcagtatccactgggattgcgacctggactccaggggccctgactgctgtccccggtactccttccagctgcaggagcgggggtacaacttcaggacagccaatcactggtgggaaccctcaggtgtggaggcccggagcctgctcaagctctatgggatccgctttgacattcttgtcactgggaaggcagggaaatttgcactcatccctacggccatcacactgggcacaggagcagcttggctgggaatggtcaccttcctctgtgacttgctgctactgtatgtggatagagaagccagcttctactgga

SEQ ID NO: 3157589 - DNA, 296 bp, Cricetulus griseus
aaagaaaaactaaaagaaaaatttaaaaagaaaaaggaaaactcattgtacatgtagttgaaacgagactggagtcaagaggaataagccccattcccaagtgtggagcttgctttcccataatgaacactagtcaccagcctggaataatctaccaacattttctaaattctaattgccaactggtttctatttctatttgatttatatttcatttagagccagttacatggcagcttcggcagtctagatcgtcgttgttttccagtgcagcataaaagctatgatctatttct

SEQ ID NO: 3157590 - DNA, 520 bp, Cricetulus griseus
gaggaggagggaaagaaagaaagagagattttgaaataatggatcctggattactaggttatctctacttgcaatggaacctccgtggttattgaaaatttaaggaatgcacactagaatatgagttaaaataccggaatgttgatagtgacatttggaagaccatcattactaggaatctaatttacaaggatgggttttgatcttaacaaaggcgtcgaaggaaagatacgtacacatttgtcagagcaatgtacaaatggatcagaagttcatagttcatggatggaagcttcttatcggatatcagatgcaggaagcctggaaactagaattcaggatatgaagtgtgtatattataactggcagtatttggtttgctcttggaagcctggcaaggtagtacattctgataccaactatactatgtttttctggtatgagggcttggatcatgccttgcagtgtaccaattaccttcaggataatgaaaaaatgttggatgcaaactttccaactt

SEQ ID NO: 3157591 - DNA, 244 bp, Cricetulus griseus
gctcagagacacatggtgcttcctcccgtggatgttattcatttcctgggcttcgcaccatatccgagacggaattcgtcatggcctgtggatatgcccatttggaaaaacttctcctttgcccttctggctttatgtgataaccacattatccttaccacatatgtgttcattcctcatgtatttaacagggaccagacaggtgatgtcttcaaaacaggagatgcgcattgatgtctgagat

SEQ ID NO: 3157592 - DNA, 275 bp, Cricetulus griseus
tgaccagtggagcagatgtgaccaccgtgtctgcagtgaacgacttttattcccatattgtactcacagctggtcgggacaggagtgtggaagtttttgaccttaatgttggccacagcgctgcagtgatagctgaagtccattcacggcctgcccatcaaatctgtcaaaataaaggatcatcatttaccactcaacagtctctggcatataatcttttcctgaccacagctgttggtgatggggttcgactgtgggacctgaggactctgagg

SEQ ID NO: 3157593 - DNA, 852 bp, Cricetulus griseus
gcttgcggagcaagatggcggccaccaggcccttgtcgctaacggccgcggcgttcagggcggtcataccctggccccggggcaggctcctcgcgccctctcccgggcttttgacccgctgggaagcgacgtcctccaatccagaggctggcgagggacagatccgcctcacagaaagctgtgtccagaggctgctggaaatcaccgaagggtcagaattcctcaggctgcaagtggagggaggtggatgctccggattccaatacaagttttcgctggatacagttattaaccccgacgacagggtatttgaacagggtggagccagagtggtggttgactctgatagcttggccttcgtgaaaggggcccaggtggacttcagccaagaacttatccgaagctcatttcaagtgttgaataaccctcaagcccagcaaggctgctcctgtgggtcatccttctctatcaaaatccgacacaatgacagatgacccttgggattgccatcaaattgtaccagtatgaaaaacctggaatagtagaattctgtaggtttctttcttatcatgtcacgttctcattttatttaatttaatccaggagtgttctattttaccattattaattatggaacatgaagcttttcgtcttggccacagtactctcccctccccccggcacaatgttaaggccaagtccaaatgctgttacctcaactttaatcactggttggaacccagtataatttgtagcacctcttaggctccaaaatttggagttaacgcctctaccttcagagttgtttgtatatatatgtatagctttgtataaagcatcatcttaaaacta

SEQ ID NO: 3157594 - DNA, 236 bp, Cricetulus griseus
gatatcgatagcgatacctccctcaccagcctcagcgactgcttcctcggctcctctgatgtgggctccctgcaggcccgtgtggggaaccccatcgaccggctctactccatgcagagctcctactttgcctcctgagagccagctgggccgcatggacgcttgggcctaggcctagggtgggaccacaggcctctgcagccagccggcccccagcccaccacccactcagactc

SEQ ID NO: 3157595 - DNA, 701 bp, Cricetulus griseus
cccagctcaaatcggacaggtcctagggtctccgggcccagcttcaccagggccacccctacaggtacccattttttgattccctgagatacgaggctctgctgtctctgtgctgctaaggtccaacaagctggagtatatggtatggccagcctcatcccagcaccaagcttggctaccctcctggtgcggacccacaggcctagcatagcagtgcccatatccaaccctcttactccatctggcgaaatgcccacagttcctagcctgggcctgccagcctgtgccgcatgcacacgcacacagaggcgcccacccctacccaccatgggccccctcctgccccactaactaagcagcacaataaccgacttagcgaattcaggtagaaggaacgtttaggtagcacctattttgtactgattctacaagtagggcccgaggtgcgggggccctcggtgggggctgtggctgccggcccgccccgccccaccccgcctgcgccccgccaccttgtacatactcctggcccgcaacaggccgggatttttactcgggccgtgtccctcttctgcccccgtttggggccgggccggccggacagacggacggacggacagacctccttcctaagcacaatagcaccagctcctcggagcgccgcacctccacgaggagaataaatgccactcttgatagaa

SEQ ID NO: 3157596 - DNA, 336 bp, Cricetulus griseus
gggtgtcatctataacccagtggattatgcttgggagccgcacagtaactacgtgactcgctactgccaaggtcccaaggaagtgctctttctgggcatgaacccaggaccctttggcatggcccagactggggtaccctttggagaagtgaatgtggtccgggactggttgggagttggggggctctgtgcggacccctccccaagagcaccctaagcgaccagtgttgggactggagtgcacacagtcggagtaagtaagtaagtaagtaataataataagtctaagcattaaagactcgtaggctttcttgtgctggttctctcttcccttcc

SEQ ID NO: 3157597 - DNA, 252 bp, Cricetulus griseus
ttctgctcaaagataaaatgcctgggacattttgttaagattcagtgagagccatcttggaggcattaccttcacctgggtggaccactctgaaaacggagaagtgagattccactccgtagaaccctacaacaaagggcgactgtcagctctgccgttcgctgacatccttcgagactacaaggttattatgggaacattcctgaaaaccctctgaagtacctgtatcctgacattcccaagacaagcctt

SEQ ID NO: 3157598 - DNA, 254 bp, Cricetulus griseus
catctcaatggtggagccaggcccagttgccactgactttgaagggaaactcctggctcaagtttccatgacagagtttccagacactgaccctgacactctgggctacttccgggacttgtacctgccagcctccagggagctctccgctctgtaggacagagcccacggggatggtggcccaggtcattgccaagggtcatcgttcaccagaccccactccgaagacagaccaacgctcgctacctcccact

SEQ ID NO: 3157599 - DNA, 260 bp, Cricetulus griseus
gggccaatagagaagacagaaatgaaaacttaatcactgttacagcttctggacgagtggtgaaaagaaatgtcaaccttctggatgatgacccagaacaagagactttcaaaattgtggactatgaagatgagttggacttgctctctgtagtagctgtcactcaaatagatgccgaaggaaaagctcacctggatttccactgtaatgagtacgggaccctactcaagagtatcccactagtggagtcatgggatgtg

SEQ ID NO: 3157600 - DNA, 238 bp, Cricetulus griseus
ctctgtcttttgtcagacaggttatttttgtttgtttttaagtctgaaatgtaccagcaagccttttcaaacaattgactaggcacacacaggtgaccgtacatgaccgaatttgtattgtactgcacaattattttcttcagggatggcttttccaacctaagaaactgcctgtcacaggagccctccagctctggagacccaagtaactgccttgctgccttaagtgtccttctgg

SEQ ID NO: 3157601 - DNA, 267 bp, Cricetulus griseus
gagagcaaccacctgcacgtggacctgtggcctttctaccccgcaacggggtcatgaccaaggacacgtggctggaccaccggcaggacgtggagttcccggagcacttcctgcagccgctggtccccctggccttcgcgggcttcatggcacaggccccaaacaactaccgccgcttcctggagctcaagttcgggcccggcgtcatcgagaacccggagtaccccaaccctgccctcttgagcttggcaggcggctgaaaccctg

SEQ ID NO: 3157602 - DNA, 433 bp, Cricetulus griseus
tcaggatggctcgaaccatggaaccgctggcaaggaagatctttaaaggagttttagtcgctgaacttctgggtgtttttggagcttattttttgtttcaaaagatgaactccagccaagatttcaggcaaacaatgagcaagacatttcccttcattttggaagtttattacaaatccactgaaaagtctggaatgtatggaattagagagaaagatcaagaaaaatggttggatagcaaaaattaaggtttatcctcacaagaaaccaacagtatcccccaggatcaaatttccacagctgacatggatggagtttgtaatacgtgaagcaaaatataaattataattcaagttttattctttgagcttgaaaagctgactgaagtatgtttattgtgttatcaataaactttgtttatgctactgtaaaa

SEQ ID NO: 3157603 - DNA, 406 bp, Cricetulus griseus
gagcagctgagaaagtcgttccagacccgctgcgccctggaggagagcgtagcggaggggttgaacgtgccgcgctcgaagcggctctaccgagacctggtgagtctgcaggtgccggaggagcaggttctgaaggcggcgctgagggagaagctggcgatgctgccgccgccgccgccggcccccgccccccgaaggaggtgctcgggcaggggccagacgtgacggtgctgtgcaacccggactctctgtgttacgaatttccgcacctaacggtggacgggctgcccccgctaaggcttcaagcccggccccgcccttcagaagacacctttctcatgcatcggatgctgaggcgctgggaagcatagccttcacaactccctgcgttgctagtcagtacttt

SEQ ID NO: 3157604 - DNA, 254 bp, Cricetulus griseus
ctgcttgagaatggcctcagctgctctatcacctgatcccagtttggatgctgaatgggaggaatggaagatgaaatttgaaaaaacatacagcccggatgaagaaagatacagaagaccggtgtgggaggaagagaagaaaaaggttgaaaagcataatgcagagtacgagcagggcaagaccagcttcttcatgggcctgaatgaattcagcgacatgaccttcgaagaattcaggaaaatgtgctgtggaa

SEQ ID NO: 3157605 - DNA, 223 bp, Cricetulus griseus
ggatcttagaacagctcacttgtctctacgactgccaggaagaggagattccagagctggagatagatgtggatgaactcttggacatggaaagtgatgatacccgggctgctagagtcaaggagctgttagttgactgttacaaacccactgaggccttcatctctcggcctgctggacaagagtccggggcatgcagaagctgagcaccaccccagaagaa

SEQ ID NO: 3157606 - DNA, 982 bp, Cricetulus griseus
ggccagaaggcaacagctaatcatgcagcacaactactggcaaagcgattctgcagccaagggtcccaacaggagaccactgtgctgcttgtggatgagcttgaccttctttggacttccaaacaagatgtcatgtacaacctctttgattggcctactcacaaaggagcccggctgatagtcctggccattgccaacaccatggacctgccagagaggatcatgatgaaccgtgtatctagtcggctgggtctaaccaggatgtccttccagccctattctcacaaccagctgaaagagatcctagtgtcccgactcaagcatttaaaggcctttgaagatgatgccatccaaatggtagccagaaaggtagcagccctctctggagatgcacggcgctgcctggacatctgcaggcgtgccaccgagatttgcgagctttcccatctctgggcccagtgactgtgtcccacttaatggaggctatagatgaaatgttctcctcatcctacatcactgccatcaaaaactgttccctcctggaacagggcttcctgagagccattattgcagaattaccgtcgatctggactagaggaagcaacatttcaacagatatacagtcaacatgtggctctgtgcaggatggagggactgccttaccctaccatgtcggagaccatggctgtgtgctcaaatctgggttcttgtcgcctcctcctggtggagcccagcaggaatgacctactacttagagtaaggctcaatgtgagccaggatgatgtgctctatgctctgaaagaagagtgaagagcttcacagacttctgctgtttctcagcctatttatttttcttcagaacatgaataatagcaaaatatacagaatggaaatgattgttgtagattttggcatttatgttatttagtttgctttttccagagtgtttgagaaatttgtggtaatgtactatgtatataaa

SEQ ID NO: 3157607 - DNA, 382 bp, Cricetulus griseus
gctgatgtcagagtgacttcttccaaagagaattgcagcccccaaactgaagctgcatgggtcaaggacattgtagatgatgctgaaagtctgtaccaacaagcccagatgggaaacttgcctgggactattccagaaagttatccacctccaagtaaaacaaatggtcgagtaaatacccagtggccaatggaataatcaataaaccccaactcctggaaagttgggagcgaccaaagtcatcagacatcctggaagagttaattgtccaaggaatcatacagagccgaagcaaagtatttagaaatggagagtcgtatgatgtcatggtggacgctactgaaaagccactgagaaagccacagccagattgaaaaagctt

SEQ ID NO: 3157608 - DNA, 717 bp, Cricetulus griseus
ctatgtggaatatcttcgagaacaggaagtatctgagcggtggttccggtataatccccgtctcacttgcatctactgtgccaaatctttcaaccaaaagggaagtctggaccgccatatgcgcctgcatatgggaatcacaccatttgtttgtcgaatgtgtggaaaaaagtatacccggaaagatcagctagaatatcatatccgaaagcacacaggcaataagccctttcactgtcatgtttgtggcaaaagtttccccttccaggccatcttgaatcagcactttcggaaaaaccaccctggctgtattatacccctggaagggcctcatagcatttctcctgaaacaactgtcacatctcgacaggctgaagaagggtcacctacgcaggaagaaacagttgctcctggggaatctgcccaaggctcagtgtctactactgggccagattgaaatattgagggggagggggcagactcccgtcccctttgggctgtaaccagcccatatcaggaccatgggctggtacttcgattcacaaaatgccacatcgctcaactagaagatgttcccatggtgttgacctaaattagagggtcaacatgcagcaagcactaaaggctcttctctttcccacctcacactttggaaaataatcaagcaaatcagcttctaattcagggatcaacagccttggtttgttaactttataa

SEQ ID NO: 3157609 - DNA, 268 bp, Cricetulus griseus
tgcaactccgattttgcacaccgctccactgtgccccacccccagtgcacacccgttcacactcacgccgacactctcgctgaacacttttataattgttgggctggccgagggaacttggggcgcagcgcgcctgctgctgcagccggaggattgatatttatttttgcattgcaatagctgaaggcgttttatttaacggtctttttacctggatgttgtctgtgagacgtccgaatggacacaaataaagccaatatatttacac

SEQ ID NO: 3157610 - DNA, 963 bp, Cricetulus griseus
  modified_base (337)..(337): a, c, t, g, unknown or other
tattcatgacaaaacagaaatcaacctagtctcatttcgccgtacaatatatcttgctattcagtcaagtttagattttgaagagtgtgcgcacaagttgctgaaaatggagtttgctgagagccaaacaaaagaactctgcaacatgatacttgattgctgtgcccaacaaaggacctatgaaaaattttttggcttgttagctgggcggttttgcatgctagaaaaagatacatggaatcatttgaaagtatattcaaagaacagtatgataccatccatcgcttagaaacaaacaaactgaggaatgttgctaagatgtttgctcaccttttanacactgattcccttcatggagtgttcttgaatgtataaagctcagtgaagaaaccactacgtcatctagtcacagagagctagaagacaagcatggtgaactaaagaagaagcgtcgagaaagaagagattctttttctgaaaatgagaagcaaagaacccgaaatcaggacagtgaaagtgttagaagaaaacatcgctccaagtcaagggaaaggagtagaaaacactcaggccataaaagcgatgatgacaggtatcagaatggtgccgagagacggtgggaaaaatctaccagatactctgaacattctagagaatcaaagagaaatcaggaccggaggagagaaaagtctccaacaagacaaaaataattctaatgacaactgagtatgccttacattcacttgcgaagtctttttttacatggatggattttatagtagtaattcttgtataaagtacctgtttgtatctgtaaatgtaaattaaagatgttttctttttgacatgttttataattgacacatctcaaggtctgtaaaatcatcaagaaaagggtctcaacaaaagggtaagtcttatgttttgtgaataaaagaacaaatgctcaattagaaaaaaaaa

SEQ ID NO: 3157611 - DNA, 199 bp, Cricetulus griseus
  modified_base (177)..(177): a, c, t, g, unknown or other
cagctccagccttaggcctcctgtgtgggatgctgagcaacagtgaggaacagatgattatgtgtcaatcaccgtgggcaggagatggcaggaatcttgctctccagagacactgaccctatctgtgcccggacactctcaccgaccactgtgaggccctccagcaaaaactttttnttttattatttactattatttt

SEQ ID NO: 3157612 - DNA, 1007 bp, Cricetulus griseus
gatagttcaagttcctcctcttcctcctcttcatcatcatcctcctgtgtatcacttcctccagtgctgtcagatggagaggaagatgtacaagttgagaaggacaataagaattttcctcttaaaacaaaagatgagttgcttcttaatgaactgccttctgttgaagaactcactgttactctgcctgaagacattgaattaaagcctcttgggaaggtttcaagcattattgagcaattagtaataattgagtctctgactaacatacctccagttaatgaagatactgtcattttcaaaagtgatcgacaagcagcagggaagatatttgagatatttggacctgttgcccatccattttatgtattacggtttaattcttcagatcacattgagagtaaaggaatcaaaataaaggatattatgtattttgctccgtcaatgaaagacttcactcagtatatattcacagaaaaactcaaacaggacagaggatcggatgcctcctggaagaatgatcaggaaccacctccggaagccttggatttcagtgatgataaaaaaaaaaaagaagctaaacagaggaaaaaatctcagattcaagggcgaaaaaagctcaaatctgaattgaatgaatcaagtgaggattgtggtgaagtgcatcagaattggaatgcttatcgatcttcttccgaatattcaaaaggatatcacaacagagaattcacaagaggctttcccaggggcagatattcccgaggaagccacagtaggccttcacctcaggagttgtataactcaaatcatatgacatctcaagagactttgggatttccacctcagagacaagataatcctgtcatgccccattatccctttccccctcctatgtttgatatgcataacttttcactccctcccccacccccacccccacccccacctgtaagcatgggatgggctgcacctaacatggctgcacatcacttgcttaatttaccata

SEQ ID NO: 3157613 - DNA, 530 bp, Cricetulus griseus
  modified_base (509)..(509): a, c, t, g, unknown or other
  modified_base (520)..(520): a, c, t, g, unknown or other
atgtggcttctgcttccacacagccaagacatccttcgtgctgcccctggaagaggccaagcgaggactgtttctgctcaagcaggctggtatggagaagatcaacttttcaggaggagaacccttcctgcaggacaggggtgaatacgtgggcaagcttgtaaagttctgcaaggaggacctggccctgccctccgtgagcatcgtgagcaatggcagcctcatccgtgagaggtggttcaaggactatggtgactatttggacattcttgctatctcctgtgacagcttcaacgaggaagtcaatgttctcattggtcgaggtcaagggaaaagaccatgtggaaaacctcaaaagctgaggaagtggtgcagagactacaaggtggctttcaagatcaattctgtcattaatcgcttcaacgtggatgaagacatgaatgaacacatcaaggctctgaaccctgtccgctcaaaaaaacaaaacaaaacaaaacaaaaaaaaaaanaaaaaaaaaanaaaaaaaaaa

SEQ ID NO: 3157614 - DNA, 183 bp, Cricetulus griseus
gtgaggcggctgaggctgaggaggacctgggctatggagggcaaggccttcctggccagtgccaagaccttcgggaagcctacaggtatacacatggccgtgccagtgaggagtatgaatgctacgtcatcccagaggaggaagatgaagaagagcctagactagatgtcttctgtgtcactt

SEQ ID NO: 3157615 - DNA, 765 bp, Cricetulus griseus
cctctcctgggcctgtttgtctaggcagacttctcatctcagagaacggaaaaggatgagtcctgccttgttctgcaaactgaccacagtacccagtggagagagccttcgagagtcgtcctgtgttagaccccaaaagtatgtgctggcaccagagcacaggacacatcttgttcagtgtcttcatgaggatcgggggacgagtgtggagcccaagtccttggagtttgaaaaggtcaccagttccctccaggacatgggtttcgatgaagcccatgttaacagtttgctcagcctacagccaagtgtccatcctcaacagttgctggacataatttcagaatttctactcttagggttgcacccagaacctgtatttgtggccgtgacgaaaagtccacagttactgaaactgtccacgatgcagatgaagaggcgttccagttacctgcggaagcttgggcttggagaaggcaaactcatctggacatagtctaggagtgatttcttccagtattcagtaaccaagatcaagcagaggcacatgtacttggagcgccttggacggtaccaaacccctgataagaaggggcagacacagatccctaaccctttactaaaggacattctcagagtttctgaagaggagtttttggccaggacagcgtgttcctctgctgaggagtttggagtttttaaaaagctcctggatcgagaagaggaggaatccaagagccatgcatctgaggaggaggaagaggagga

SEQ ID NO: 3157616 - DNA, 454 bp, Cricetulus griseus
atggagtctttcttcattttctggggtttcctcatcttgctcagtgtcatggtgcccatggccatgtttatcagtgccgagttcatctacctaggcaacagttttttcatcaactgggaccttagtatgtactacgagcccctggacatgccagccaaggcccgaaacaccagcctcaatgaccagctgggccaggtgcagtacatcttctcggacaagacggggacactgacccagaacgtcatgaccttcaagaagtgctgtattaatggctctatgattcagacgatgagcatggtaccctccgaaagcggaacccatatgcctggaacccgttcgccgatggcaaactccagttctacaataaggagctggaatccctcgtgcgaggccagaagaatacagtagtgcaggagttctggcgccttttagccatctgccacaccgtgatggt

SEQ ID NO: 3157617 - DNA, 612 bp, Cricetulus griseus
cagcctagcagctttagccctgggcaaagtcaggtaactccacaagatcaggaaaagcagctttgatcatgcaggttcttcagctgactgcagatcagattgccatgctgcctcccgagcaaaggcagagtatcttgattttaaaggaacagatccagaaatccactggtgcttcttgaaaggcttttggttaggaagtacttagttatcccttcagtgtttattgtgtggcatgaaaagtggtgcaaaaagctgtcttctgtgttcccatactttaatgattgaaggttaaagaagcacaagctcccatatggccaagtgaccttcctctgtaggttaataaacacccagctgctgagcaaagagtaacccttagggagagctgacacaaagggttgtccccttgcagagttcttgaattttaagtgtacaaagttttcatccctaggctattttcctacgatttagttgttctgtgctagtgttaagcttcctgtgtttcctctgcctcctctctgctggagtggattagtgttcgtacttttgtgctagttctggctaattccaattgcttgtttcttttaaaattgtagttgctaaccccaaacttct

SEQ ID NO: 3157618 - DNA, 359 bp, Cricetulus griseus
catgataaattggtacttccagattacaaacagtggaaaatagaagggacaccgttagaaacagtccagaagaggcttgctgtgcgagggctgaaggatccatgggctcgcaatgaggcttggagatatatgggtggctttgcagagaatatcaccttcatgcacgtgttgctgaaagggttcaaatggggatctgctgcatttgtggcagctatagggattgaatatttcctgacttcccagaatgataagaagaatcactgaagacagcacctggaattatctggtgacttctttctcataaaaacaagatttcctcactctagcgtccttggctgtatgtttgtccttgaaagaat

SEQ ID NO: 3157619 - DNA, 289 bp, Cricetulus griseus
gctgaaagagacactggacatctctgtgggcctcagagacaaatacgagctgctggcactcaccatcaggagccatgggacccggctaggtcgactgaaaagcggctatctggagggtggggggcagaggacgggctaaattttccattgtaaatgttttattttatccaaatttgcactttcagaatgcgtctgaagttgtcttttcaaaagaaagaaaactttaaaaggttgcattattctgattctggtttagttttgtgcattatttatgttattactgaggatt

SEQ ID NO: 3157620 - DNA, 699 bp, Cricetulus griseus
ccgcggctttcttctgtccccggactcgctagctccgcccgtcgcgtgctcccgtctcccactcggaatgcctgtctggggcggtggaaataagtgcggggcctgtgcgaggactgtgtaccacgccgaggaggtgcagtgtgatgggcggagcttccaccgctgctgctttctgtgcatggtttgcaggaaaaattttagacagcacgacagtggcaattcatgatgacgagatctactgcaaatcctgctacggaaagaagtatggaccaaaaggctatggttacggtcagggtgctggcacgctcaacatggaccgtggtgagaggctgggcatcaaaccagagagtgctcagcctcacaggcctacaacaaatccgaacacttcgaaatttgcccagaaatatggaggtgctgagaagtgttccaggtgtggggattctgtctatgctgcggagaagataatcggagctggaaagccctggcacaaaaactgcttccgatgtgccaagtgtgggaagagtcttgaatctacaactctgactgagaaagaaggtgaaatctattgtaaagggtgctacgcaaagaactttgggcccaagggatttggctatggtcaaggagcaggggcccttgttcatgctcagtgatggtgtaaacccagaatgaagcaacgcacacagaatcgtcactaccaaa

SEQ ID NO: 3157621 - DNA, 1444 bp, Cricetulus griseus
gagaaaggctgtcaaactgaagtcagctctgagcggccctttagctgtgaagtatgtggccgtacctacaagcatgctggcagcctcatcaatcaccggcagagccaccagactggccactttggctgccaggcctgctccaagggcttttcaaacctcatgtcccttaagaaccaccggcgcatccatgcagaccctcggcgcttccgctgcagtgaatgtgggaaggcctttcgcctgcggaagcagctggccaaccaccagcgggtccatactgagcgacggaggggtaagggcacccagacccggagggcagcagctgtgcgttgtaccctttgtggctgtggctttcctggccagggggtccctggagcagcatctgcaggagcatgaggagggcaaactggagctggcccgcagccagggaggcccacatgatacggaaggcagtaaggaaaaccttgctgatgactggggcctggaggccaggtcagaaggtcttcagtcagtcctgcagctggagcatggaacccagaggcctagggagcacattcagagtcccagcaggccagcaggttcagaagtcacagaatccagtgtggaaagacctactgccaacctgatggcctcttgaatcccgacattaacaagaaagactgtcacagttgtttgcgctgttccaaagagctattgagtgctgtgaccactacagtccacaaccacactgctgcccagatctttgcttgtagtaactgtagcaaagtgtttgagtcccacattgagctggccacacacatgcagactcatgctgttgaccataatcaggcgccaagtcagacagaggagaccagagatccacaagctgggatggtagaggtggatccccctggtccagggaaagctcaggaggccccatccaaacctcctagagacccagaagagaatggggagccagctgatgtaggacaaggagcaaatttgacagcagctgaagacaaggaacgtcccttttgctgtgctcagtgtgggcgctcttaccgccatgctggtagcctgttgaaccaccagaaggctcataccactggactctacccctgctccctgtgtcccaaacttctgcccaacctactatctctcaagaatcacagcagaacccacacagaccccaagcgctacagctgcaacatctgtggtaaggctttccgaacagctgcccggctacagggccatggccgggtccatgctccccaggagggaccattcacctgttctcattgtccccgccattttcgccaccaaacgagcttcctgcagcaccagcagcagcaccaggaggagtggaccatgtctagctcaggagcttcagtggcatcagtaacaagcagaggggattcctctacagcctctctcttggacccctcaccccagtggcctgcagacctca

SEQ ID NO: 3157622 - DNA, 266 bp, Cricetulus griseus
aggtaggcctctggaagagccagtcggacatcccggaagctgctgcgcacaagctgcagcgagcgcagggcgcgctggcagaggcagaagcacgcgcccggcggctgcagcggggacaggtggaggtgcggctgcgcaccgaggaggcccggcaggcggtgcggcgcagcttgcaccgagtgcgggagctggaggcgctggcgcggcgcgttccccgcatgcagcgccaggtgcagcgattggaggcggagcttagacgttacagg

SEQ ID NO: 3157623 - DNA, 399 bp, Cricetulus griseus
ttgatcactatttctgtgatttgcagccactgttgaaacttgcctgcatggatacctatgtgatcaatttgctagttgtgtctaatagtggtgtcatatgcatggtaagtttcatactgctgcttatctcctatattgtaattttatactctctgagaaaccatagtgcagaaggaagacgaaaggccctttctacttgtacttctcatttcattgtggtggtcatatttttggtccctgtatatttatatacacacgtccaccaaccttttttccaatagacaagatggtggctgtgttttatacaatcgggacacctttgctcaaccctcttatctatactctgaggaatgcagaagtaaaaatgccatgaaaaaattatggtgtggtaaaatatga

SEQ ID NO: 3157624 - DNA, 439 bp, Cricetulus griseus
gttcctgctgcagtcggacgaggagcctgagctgcgagcctggcatcgcgcgctgcgggcggtcatcgaccggctggaccgggagaaccccctggagctgcgtctgtccggctcgggacccgcagagctggcggagctgagcgccggcgaggatgacgaactggagtcagagcctgtgtccaagccactgatccggctcagcagccgcagagtctccagtcggagtgcagagggcactgagcagaagaaccgtgtgcgcaacaagttaaagcggctgatcgccaagagaccaaccttgcagagccttcaggagcggggcctgttccgagaccaggtgtttggttgccagttggagtcgctgtgccaaagggaaggggacaccgtgcccagctttgtccggctttgtgttgaggctgtggataaaaaaggtctagatgtg

SEQ ID NO: 3157625 - DNA, 209 bp, Cricetulus griseus
tgtagaccagtggttctcaacctgtacgtcatgacccctctggggggggtcacatatcagatatcctacataccagacatttacattacaattcaaaacagtagaaaaattacagctataaagtagcaacaaaataattctatggctggggaccaccacaacatgaagaactgaattaaagggtcacagcaataggaagaattgagaac

SEQ ID NO: 3157626 - DNA, 628 bp, Cricetulus griseus
ctttgctccatggcaggaacctcctgctcctccgatctctggaatccacatggcccttctggttgactttggccatggctgtaatcctgcagaacatagcagcccactggatcttcctggagactcgccatggttacccagaactgaccaacaagcgcctgctctgtgttgccacttttcttctcttccctatcaacatgctggtgggagctgtagtggccatctggcgggtgattctttcttccttgtacaacactgttcaccttggtcagatggacctcagcctgctgccatcaagagctgcttccctggatccaggctatcacacataccgaaacttcctgaggattgaggccagccagtcgcatccagcagtcatagccttctgcaccctgctcctcccctcccccagcggcagctctaccagccagcagatccctgcggatcaggagactggagtcactgtgtctacaccaccagcctcaagaggactttggtctgtgcttgcccaccaggctaccagctagggctctagagaaaacagctggtggactctcggccttggaactggcagaacaggggtggccacatttaggcctttcctccccgcactggctctgccctcagc

SEQ ID NO: 3157627 - DNA, 524 bp, Cricetulus griseus
aggagttggtggtgttcagggacgtggctgtggagttctgtaaaagacgagtgggagtgcctgggccctgatcagaggtctttgtacagagatgtcatgttggagacctacagtaaactttgtgtcgctgggactcgccgtttctaagccatcagtaatttcactactggagcaaggcaaagaaccctggatggtggagcaggcaggatggtatccagatttgctgtctgtaaatgaggtcagtctggtctacatagtgatatcctgtctgtttggttctttctcggatgttataaagctcccttccctatacctttgctgacaattttttgcttgttgaagcattgattttgccagtctgttgagtgaagcgtgttatgacagctttaatttgcatttttctgctatatgtaatttgcatttaataccatattttcctattttcaaatactgcattttctgtgcaatgtcttaatgctactttctgttgaatgattgtttttctagtggctgtgtaagaatta

SEQ ID NO: 3157628 - DNA, 194 bp, Cricetulus griseus
taactgccactgtgctgtaggctgggatccacccttctgtgacaagccaggcttcggtggtagcatggatagtggccccgcacagcccgcaaaccgagatgccttcccagtggccatgctcctcagcttcctgctgcctctgctccctggggctggcctagcctggtgctactaccagctaccaacactctgtc

SEQ ID NO: 3157629 - DNA, 366 bp, Cricetulus griseus
gaaaaggagaggcagatccttcaaggagaagctatggaacatgcgacccagctggcaaaagagaatgttaggtgtttctttgactgcacaaatccgaaggattgcagcaccccaagcagtaaagcctggcagcaaatctctgcactttacacgttcaatcccaagaaccatttctacagcatgttgcacaagtacgttaacagaaaggacatgagtggcagcctccgctctgtggaaggagatgcagtggtccctgtccttggctttgtagatgcctcagggatggccaccactcatggggtatgatcttacaatgaacaggaaaaaatacatttgtaattagttgtcttcatataaaaataataa

SEQ ID NO: 3157630 - DNA, 196 bp, Cricetulus griseus
ctgacccagaaactgaaaaaacactgcatagtcaattaccaagttaaaacattttctgggcaaactcatggctttgtgcatcgtaagagagaagactgttcccctgccgacaagccctacattgaggaggcgaggaggaacctcattgaatggctgaacaagttcatttagcagcactcaggcacagggcagctgt

SEQ ID NO: 3157631 - DNA, 3098 bp, Cricetulus griseus
aaaagttgtcagaaattttgtcaaagcagacaggtcagtgataaatagctcctagtaatagggttaggcctgaaactaaagtaattaaaacaaattggatctgaatgaagtttattttcattaaaaataaaacttctgaaaatattaaattagaattaaattttcttcagatttccatttccctgttcagcataaagcaagtatctttcagcattcacgccagcttttctcattcatgtcttagaaatttcagagagcaaccttacttgaaacaacctgatatttttgttggaaatgtctgattgtaaggaggacagaaatccagttacaaatgaagtagtaaattctcccaaaggaaagaagcgtaaagtgcagcaccagacatcttctacttgtggttctcagtgcatccaaggatctgagaagtgtttccagaagactactagaaaagaagaagcaaaacctgtgcctgaaacttctgagattagaaaattaaaagcagctatttcagtggtctctaaaaagaatgaacccaggaaagcagctcatacacaagtgaataatagcacaaaatccccccagattccacagccattagtgcctgaacaaagtattgatcatgaattggagcaagctgggaagagcaagcgaggaagcattctccaaccttgtgaggaaattgctggtgaaattgaatcagatactgtagaagtaaaaaagcgtgctaaatggaataaatagctcaactaagaggaattccacctggactaaaattaaactatcaaaatttaactctgtgcagcaacataagttggactctcaagtatctcctaaattgggcttattaccaactggttttcaccaccagttttagaaatgcctcattcagtgtctcaaagtacatttttagagatgaaaccacatagtaatgtaacttgccaacaggataatatgaaaggaattaaatctgaagaagttaaagctaataatattgcaattgaaattaataaagccacaaaaagggcttctggaaattgccatttggataatcatattaaacactctcctgactcaccattggataatcagatgaaacattcttgtgattcagcaccagataagaatttcagcttatgttcgttatctaaggtggaaaatagctcattagaagatattgctgctgattcaactcttcccagtcaagcaaagattgatggagaagaaaattgccaggctcagctcctaagccgctccatagtgtactcagtagtgaagcttctatcaacagcaagcacagggctataccaccaaatcattctcagctgaagtgtaattctcatttggagataacaattccaaaggccttgaaactgaaagaatcagagaaagtggatgaaaaacagctggtcatagatgcaggacacaaaagatttggagcagtgtcctgtaatatctgcggaatgctttatacggcttcaaatccagaggatgaaacccagcacctgcttttccacaaccagtttataagtgctgtaaagtatgtgggctggaaaaaagaaagaattctggctgaatatcctgatggtaggataataatggttcttccagaagacccaaagtatgctctgaaaaaggttgatgaaatcagagagatggttgacaacgatttgggtttccaacaggctccgctaatgtgctattccagaactaaaacacttctctttatttctaatgacaagaaagtagtgggctgcctaattgcagaacacatccagtggggctatcgagttatagaagagaaacttccaattatcaggtcagaagaagaaaaagtccgatttgaaaggcaaaaagcctggtgctgctcaacgttgccagagcctgcaatatgtgggatcagtagaatatgggtgtttagcatgatgcggcggaagaaaatagcttctcgaatgattgaatgcctaaggagtaactttatttatggctcatatttgagtaaagaagaaattgctttctcagatcccactcctgatggaaagttgtttgcaacacagtactgtggcactggtcagtttctggtctataattttattaatggacagaataccacctaatccagatcttgcctactgtaacagaagacatcttttgaagagaaagaattggttgctgactttaaccaggaactagggccatttttattacaaatgaactcaggactggcaacaaccatatggttgttccattttcataaaattggaaacaatgcagtaatagcttgttattgttttgtttttttaaagaagatattttattatcttttacagaaatttatgattgtattttatctatacttatttagacatgtttacatgcagcagataattgttcatagtggactgaaaattaattcaaggactatggtctcagtgataagtatattttgaagttcttaatatggaaatataccagtgtagcttggtactgtattttttatattgatctgctgataccagttataggtttaaagattgtattttcagagtggaaaccaatgtttttgagttattcgaggacagtacagtattatgtgctccagaatttgaagctactaaagtgtactctaagaaaatccctaggaaaaggagagttccaaaggaaagaacttaaaatagagagtctccattgcttacttttctgtcactgatggtggcagtgggaagctctctcatgtggcgccataaatgactagagtcacaaagaactacagaatagttgtaaactaagtgtgggtggcttggtatcggcgttgttattcctcagaaatactgcactgagtataagccctcattactggacttcattttgatacttgtctatccttcatagtgccctctacttttaaagggtttatatgttgaaaaactgctgtggccttttatgacctgtatataatgtagaataaaacaataaaatacttgatagctttttctaaatgataaatgtactgagatgatgttgtgttgaatgtttgttaccctttcagggagtttcttagatttgagactagaaataagaattaaaacatagacttctta

SEQ ID NO: 3157632 - DNA, 2190 bp, Cricetulus griseus
aaaattccaactgcttcctttgaagagttaagaggggaattagtagagaaaattaaagagttggaaaaatgaaactgcaggtattaacaccacaaaaattggaattggtaaaagcccaaatacaacaagaattagaagctccaatgcgagagcgtttccggacacttgatgaagaagtggaaaggtatagagctgaatataataagctccgctatgagcatacatttctcaagtcagaatttgagcaccagaaagaagagtttattcgtatttcagaagaagaaaaaatagaaatatgaattagagcttgcacggctggagaaggataaagaggaactacataaccagctgcttagtgttgatcccacaagagacagcaaacgaagtggagcaacttgttcgtgaaaaaaacccttttgcttcagaaattgaaaggtttagaggctgaagtagcagaattaagggctgagaaagagaactctggtgctcatgtagaaaatgtccaaagaatacaggtgaggcagctggccgagatgcaggctgcactcaggtccttggaggctgaaaagcagtcggctaaactacaagctgaacgcttagaaaaggagctacaatcaagctaatgaacaaaacaattgtttaatcgtgagctagaaagagaaaggaataagattcaaagtgaactggatggattgcagtcagacaatgaaattctcaagtcagctgttgaacaccacaaaatgctcctggtggaaaaagaaccgtgagttaatacgtaaaatacaagctgccaaagaagaaggttatcaaaaacttgtagcattacaggatgaaaagctagaacttgagaacagattatcagacttagagaaaatgaaagtggaacacgatgtctggaggcagtctgaaaaggatcagtgtgaagagaaacttcgggcttcacagatggcagaagaggcagcgcgaagggagcttcagagtattaggttaaaacttcaacaacaaattgtgaatacagagaaagcagagaaagaaaaacttgaaaattctgaactgaaacagcaaatcagtcatttgcagatccaggtgacctcgctgacacagtcagagaatgacttgttgaattcaaaccaaatgctgaaggacatggtggagagattaaaacaagaatgccgaaattcaagaagccaagctgaaaaagtgcaactagaagttgaaaagacattggaggaaaaacagatacagtggttggaagaaaagcataagcttcatgagcgtatcactgacagagaagaaaaatataaccaagctaaagagaaactacagagagctgcaactgctcagaaaaagagaaaatctcttcatgaaaacaaattgaagagacttcaggaaaaagtggaagtcttggaggcaaagaaagaagaattagaaacagaaaaccaggtgttaaatagacaaaatgttccatttgaagaatatacaaggcttcaaaaacgactaaaggacatacagagaagacataatgaatttcgaagtctaattttggttcctgacttgcctccaacagcatcactccatcctgctaactttcagtcatcagcaatagttcctggaatggagctctcctttcctcctcatatgcaggaggaacaacatcaaagagaattctctctacttcgaaaaagactggaagaactagaaactacacaaagaaaacaactagaggaacttggatctcctggggaatgatgctggaagaaaggcaaagccagaaattcaataaagcatgaagtttaacatgtggcattgagatgctttattactgtttgccaaaatccacgagctgcctcaagaaaaggtactatgtgttgcactgcatgggttccaggattaatcaagttttcatatttttattttgttgattttttctggcattttgcctaaaatatatacattttgaattccttcatctttgagatgtctgcttgacaataatatccgtaaatatcccctttattgtaaacagaagttataggaaaagatgaccatttaaaagtataaaaacacacttaaaagtttctaaatatatgttcattatagaaatctttacctttttaaaaagctgtgcacttaatttattaaacaacttaataaatatttttatatctataaaaaaaaaaaaaaaaaaaa

SEQ ID NO: 3157633 - DNA, 674 bp, Cricetulus griseus
  modified_base (654)..(654): a, c, t, g, unknown or other
tttacaggggcattttagagccagacaaacactgctccactagccctgccggcagcagcctcccggaataccccaagttcccttgcagctcggctgcttacactttttccccaaactatgacctgcgacgcccccactcattatatgcgcatttagcatttcctccttccttcactagttagcctatgattttcacagaggcgttgttgcactgtacaaggagctgcatttccaaatctagagtgatatcagaaaggcctattaaatagttaaagacatggagcacttaatggcaaaagtctttaaaagtccatgaaacccatccaatgggacttgcgattaaaaagaaaagaaaaaaaaaaaactaaactaaaaactagaagctgtttgtaacccactgtataaaagggagaagatggcgcaaataattggattgtttgattgagaaatgtgtggaagtttttggttataacagagaaggctgaaaattatttttattagtgaaccaaaatgatgtattgatttgactactattgtagccgatttttgattgtgtaaccaaacccagttgcatttgtacagttcctcgtgcccttgcacctcagaagaccaaatgacgggctgtacaagtctatgtacgatgtctttatcctntgggcagatgctggtgacaa

SEQ ID NO: 3157634 - DNA, 211 bp, Cricetulus griseus
gtcattggcagagtttggctcacagtccttttcattttccgcatcctcatccttggcaccgcggccgagtttgtgtggggtgatgagcagtctgatttcgtatgcaacacccagcagccaggttgcgagaatgtctgctacgatgaggcctttcccatctctcacatccgcctctgggttctgcagatcatcttcgtctccactccatcgc

SEQ ID NO: 3157635 - DNA, 469 bp, Cricetulus griseus
  modified_base (409)..(409): a, c, t, g, unknown or other
acctcagacacgaaccactttgcaaatcagaaggctttttatactcctgttatcggaatggtctgtttttcctgcgacaggaactatgggatccagagaaaagctctccaaggagacatgactcctgggtctttttttctcctagtcttcagcaaactctccaatcactgccgatgttttaagttatcaaattcaagagaatttgtatgttgattacttatgaaaaagtttaaaattttcaactgctagcaaagccaaaatttgtaactaactgtcaagtttggtcttctgtacatctatcttatccatagcatcatccatctagtcttctgtcacctgtctgtcatctcgtgatgttagtaatgtcacatttttgtggcaattgctattaacagagaggaatcaaagnttcttaataaccaaagcaggagaaaatcaatttttaaattttaataaattattttaatgg

SEQ ID NO: 3157636 - DNA, 203 bp, Cricetulus griseus
ccaggaatcacagttggggacatagggcccaagatgggcttggaacacatagacaatggtttcctgaggttaaaccatgtgagggttcccagagagaacatgttgagtcgctttgcagaggtcttgcctgatggtagctatcggaggctcggaacaacacagagcaattatctagccatgttggtgacacgggtgtggctgct

SEQ ID NO: 3157637 - DNA, 813 bp, Cricetulus griseus
cgccgagggagcgtgactgctgggctcagggctctaggacgccttgtcgctgcacagacccctttgtgagcagcagaccagcctggaggctgggagccggacccccacgtctgcatgctgaggaagatgggtgaggccgtggccagagttgcaaggagagtcaacgagacagtggaaagcggctccgataccttggacctggccgactgcaagcttgtttctttccccatctgcatctacaaggtcctgaggaacgtctccgaccagatcctcctcatcacactggctaacaatgaactcaagtccctcaccagcaagttcatgaccaccttcagtcagcttcgagagctccacctggaaggcaactacctccatcgcctccccaatgaagtcagcagcctgcagcacctcaaggccatcgacctgtcccggaaccagtttcgagacttcccagagcagctaaccaccttgcctgaactggagaccatcaacctggaggagaatgagatagtggatgtgcctgtggagaagctggccaccatgccagctctgcgtgtcatcaacctacgtctcaacccactgagcgccgaggtgcgcgtcatcgccccgccactcatcaagtttgatatgctcatgtctccagaggatgcacaggccactccgccttaggacgcactccctatgctcacccgggcaagggacaaaggctaccggcctgccaacctgagaggagggaagcctgtggaaggccaaacttggggagcggggtgggagggccacacagcgtaaagtgggagggatgaagctaagcca

SEQ ID NO: 3157638 - DNA, 1910 bp, Cricetulus griseus
ccttcactcaaactttggttcacctacatacttctatgccttttatcatcattgccaaacagatcaagttccagcttgggctgatgcagctcacggagatgaggttccctatgtgttgggaatccccatgattggccctacagagttgtttccttgcaattgggactactccacagagctgagtgtcaccattgctgtgggagcatctctgctgtttctgacatcttggccttcgcagcactgtactacaagaaggataagaggagacatgacgtccaccgtaggtgcagccctcagcgcacagcaaccaacgacttgactcatgctccagaagaagagatcatgtccctccaaatgaagcacactgacttggagcatgagtgtgagtccatccatccccacgaggtggttcttaggacctcctgccccccagattataccctagctatgaggaggtcacctgatgatgttcctttaatgacacctaacaccatcacaatgattcccaatactataccagggattcagcccttacacacattcaacacatttactggaggacagaacaatacactgccccatccccacccccaccctcattcacattcaacaaccagggtatagccagatgagagaaacaaactgattttttttctgatggagtgcagtaaaagattattgaagattccttggctttcaacttggaagactctcactatttaactaaggaggaatattatgtgaatatacatatcaagaacttgggggttttgaaaaatgaattgtatatagatatacacacaaatcaactttaacaaaacaaatttcaattgcttgaagcaattgttctgaatgataccttttcattcacattcaagaatttaatttgttgaagattaagttacatactggaattaggcatgtggaactaccaaacaggaaagtactgtgtctgaaatacttaaaaaataaaaaaaaaaaagaacaaaaacaaaaataaaatcaactatgaatatgcacaagggacacaccaatggaatgtcagataattttcgtcagttttcatttggagcccttttattgtgttagtaccatatttgcataagtacacagagcaccgatgctgttaatgacaaaggctcatgctgaaattgccagtaaaaaataaaaaaagaagttaaaagactggcagggtacaacattatcacataagtgctgtcagtactaagtcgtggggatcaaggagactggatctttttagcacgaatgtgcatgataatttatatgcttggtggctgtgctgctgacagtttttcagggtgtaaggatgccccaatagtattgctctgattacagttctcagttaattgatttactcatgttgcatgacaaaatgcttactactaataattcaatataagttcagtccctcttcacattgcttctctttctcactgaggctaacttgaatttactcatgagatctcagtagaggacaatataggtgcagaaccttaggaaagtcaacagctggagggtttgtcttttcacacatgtgcaatttaaaatgaattatctaagaccacaggaaactctgaatcccctgttgtttaccagtaatatcagtataccacagacctttccaaatgtttgtatatgtaatcagatgtacatttatattaaaactctgactaactgaagtaacagaaacctttctttccagctaccctttttcaagaattgaaagcttattatacaaaagaaaacacttgtatactacttgatgggaagaactttgtgtatctatctcgaccacatcagtggtccttgggtgaaataaagataatctggataatgacaattagtcaaatgctaagagacatggttctttgctcattaaagagactaaa

SEQ ID NO: 3157639 - DNA, 212 bp, Cricetulus griseus
aggcccccagagagaagccctacccatggacacagaggtgtacgagagcccctacgcggaccccgaggagatcaggcccaaggaggtttacctgaaccgaaagctgctgacgctggaagacaaagaactgggctctggtaattttggaactgtgaaaaagggctactaccaaatgaaaaattgtgaaaaaaaaaaaaaaaaaaaaaaaaaaa

SEQ ID NO: 3157640 - DNA, 1416 bp, Cricetulus griseus
cgcgccggcggctgggcaaggagggcggcccggagggcagcggccctggcccgcgtgtgcggccctctctcgcactcctacaccgtgctggctgtgccccggccccgccacacgcgcagccatggtgggccggctgagcctgcaggatgtccccgagctcgtggacacgaagaagaagggcgacggcgtcctcgacagcccagactcggggctgcccccaagccctagccccagccactgggggctcgccgcggcggcgggtggcggtggggagcgcgctccggtcccaggggcgctggagcccgacgcggcggcgaccccagcaatcccgaacccagcatctctgacccagtctctggctgctgtctgttcaccacgtctgtgtcccctgtcctttggcgaaggagtcgagtttgacccgctaccacccaaggaaataaagtatacttcctcagtcaagtatgactctgagcgtcacttcattgatgatgtgcagatgcccctgggcctggcggtggcttcctgcagccagacagtcacctgtatccccaattgcacttggcgaaactataaggctgaggtgcacttccagccccgccacaaggccgcgcgcttcctcagcaccaccatcatctaccccaagtaccccaagaccatctacaccaccactctggattacaactgccacaagaagctgaggagatttctgtccagtgtggagctcgaggctacagagttcctgggtagtgacggtctctcagatgaatgctgactcaagctagctacttggggttgggccagctgttcacacactgccccggtccctagaccaccctggacaagctgggtaacattgctcttgcacatcatcccagccccagaggagtcttacctggagatacctctaaacctaaccagggggaaagcttgccctccattttctgatgaagaaagtgggaaagtctctggagtagaaaagtgagttttaagaaatttcagccattcatatcttcattgctggctttttgagaggaacggcattttaaaagaatgctttgggaaaaatgcatgttggaactgcttggaaagggactccactagaggcagcctgcccgaagagcagctgcgatagaaggagacagattcggatgtgacttgcaccatcatgactacaagtcttgatggactgattcttaggactctgatagcgtcataactgggaaggactgggtttaacccccccaagcaaggaatattgcttaccacccagataagctaagatgaattcagtagggagtgacaattcaaacaccacagccttgcctctgtggtgataggggaacatttcttttgtgccactgtatacgcagaagtgactatggtggagttgagtatgaatcaaaggtgtttcccagc

SEQ ID NO: 3157641 - DNA, 407 bp, Cricetulus griseus
taactgtgctgagtgttgtgcgtttcctggccactgtccacccttttcaacagctccatgtcaccagcgtcaggagtgcctggatcctctgtggggtcatatggatttttatcatggcttcctcagcgatgcttctgaagaatggctatgagaagaaggacaacattatattgtgcctggagctgactccccaaaagtttagtaagctactgatcatgaaccacattgcattagtggcaggcttcctgcttccatttgtcacactcaccatctgctacctcctgatcatccgggtcttgttgaaggtggagattccagagtcgggtctgcgggcttctcataggaaggcgttgatcaccatcatcattgccatgctcatcttcctcctctgtttcctgccttaacca

SEQ ID NO: 3157642 - DNA, 388 bp, Cricetulus griseus
  modified_base (48)..(48): a, c, t, g, unknown or other
tcaacgaccaacgacccccgcccttcaccacaaacctacctacacccncgtttgtccaggagaacaacagccccgccctcgcacataggcaccatcagcgccacagactacagactcaggctccaatgcccaccatcacctactcgctgctgcccacccacgacccgcagctggccctctcctcgctcatctccatcaatgccgacaattgggcagctgttcgcgctcagggcgctggactatgagaccctgcagaatttcgagttccgcgtgggcgccacagaccaaggttcgcctgcgctcagcagccaggcgctggtgcgcgtgctcgtgctggacgccaatgacaatgctcccttcgtgctctacccactgcagaacgcgtctg

SEQ ID NO: 3157643 - DNA, 549 bp, Cricetulus griseus
  modified_base (512)..(512): a, c, t, g, unknown or other
agcctcgtgtaaggatgagtcaaggcttcatcaatcagcacacggtggaacgtaaggggaagcaagtgtgcaaatactttcttgaaaggaaatgtattaagggagaccagtgtaagtttgatcatgatgcagagatagagaagaaaaaggaaatgtgtaagtattatgtacaagggtactgcaccaaaggagagaactgcctgtatttgcataatgaatacccttgcaagttttatcacacaggaacaaaatgttatcagggtgatcactgtaatttttctcatgctccgctgactgcagaaacacaagaactgttggctagagttttggatactgaaaagaagtcatgtaaatagactaaaaaagcttgtatagaggacaaatctaattcctggtcaagacttttgaagactggctagcgacttggaatagttcgaggttctcagttaatgcaccttcctgtgtggttgtgatcacgtgcagctcccgatatttattactaaaaaaaaaanaaaaaaaaaaaaaaaaaaaaaaaaaaaaaaaaaaaaa

SEQ ID NO: 3157644 - DNA, 455 bp, Cricetulus griseus
gctgttcagatggaacgagtaacagggacagttttcgactggatgatgacagtccctactcagggccattctgtggccgtgccagagtgcacactgatttcacaccaagtccctatgacaccgactccctcaaaatcaagaaaggagacatcatagacattatctgtaaaaccccgatgggaatgtggacaggcatgcttaacaacaaagtaggaaacttcaaatttatttacgtggatgttatctcagaagaggaagcagctcctaagagaataaaggcacagcgaagcagtaaaagagagagcaccaagactctgcaggagttcctggagcagattcacctgcaggaatattcttcaacacttctgctcaatggttatgagaccctggaagacttgaaggacattaaagaaagtcatcttgttgaattaaacattgccaatgcagaagacagg

SEQ ID NO: 3157645 - DNA, 995 bp, Cricetulus griseus
ggtgggggggggcgtggggtagtttactttgttgtaaggacttgatacctggcttacagtcgttttctatgaaacctacttggatcccatgcctgaaatttggaagcatatgtaacaaaaaaaatcatttttacgttttatttttaataaatcattgtgtttgaccgtacatgtctaacatatttttttcctaggatccactccttaccgttttaaaggatgttttgttagttttgatgtgtactttgagaaacttaaaaaagaagtcttggttggggttttttttttccattctccttgtaacaagcggtttgcttatcatcttgacatggttggtcactttctatgggaatttacttctaaatatgtactgtgtagttttaaaaaatagtttgtgttaagcatgtgttctcattcatataaactgtttaaaactttttagatgacctagtttcatccttattggtttgtctgtaatgaatggttacaaataagggttatgtttaccctaacactaaatgatttttttttttttgtgttttcagagcaggtttaaaaacgtttctttcctaaaatctgaactttgcctttcaagtccaacctatgtagcgccatctactggtggcagtatagctgcaagacagctggttaagaaaaatctgtgtaggacaatttcttcagatttagcagtttgccatcagaagtctgtgcagacttgaaagttccacatttacttgtaactgagatgggcttcacaggaatgtaattaacagcccttatcagtcttttctacatgagatttgaaaatgtaactgctatgcatagcttgggcagtagccccaaactgctctgatagctactgaagcagctatgtgtactggggttttaggtgcaagttgtaaaacaaaatatatgtattctgcttggttaacgtgtatttgtagcccttcatgcaatagaattcaagttgttgtttataaaaaaacaaaacaaaa

SEQ ID NO: 3157646 - DNA, 403 bp, Cricetulus griseus
tccttctggatgaccaggtggccctgctcagagcccatgctggtgagcacctgctgctcggagccaccaagagatccatggtgttcaaggatgtgctgctcctaggcaatgactacatcgtccctcgacactgcccagagctagcagagatgagccgagtgtccattcgcatccttgatgagctggtcctgcccttccaggagctgcagatagatgacaatgagtatgcctgcctcaaagccatcatcttcttcgacccagacgccaaggggctgagcgacccgggcaagatcaagcgactgaggtcacaggtacaggtgagcctggaggactacatcaacgaccgccagtacgactctcggggccggtttggtgaactcctgctgctgttacccaccctgca

SEQ ID NO: 3157647 - DNA, 369 bp, Cricetulus griseus
attaaccagagcctaggtcctggggattgaggtgggcaagagcagcagcacacaccaaagcactgagaaagttttgcccccaagattaaacctttgcccaagagctagctattctagtttatcctctccaggcacgtccccatctggctcctcagtaagctcccaggacagcgctttctctcagatctctgaacactctgtgtttacacccaccgaaacctcctctccgatagattgcacttttcaggctcagagaaaacaggaagagctgtcttctgactttcccagtcttgtatctggaatgcccagtccctccacagggcaggccagcagccatctagcttatttaagaaagggtaccatagagca

SEQ ID NO: 3157648 - DNA, 757 bp, Cricetulus griseus
aggcagagatgagcttgaccctcacggctctggatggcgggtctccacctaggtcaggaacagccatggttcgaatcctgatcctggacatcaatgacaatgcccctgagtttgtgaacaccccctatgaggtgcaggtcctggagagcagtccccccagactccccagtcctgactgtcctagccaaggatgcagatgctggcaacttcgggagagtttcttatggattgttccaagcctcagatgaaattctacaaactttctcaataaatgaagtcaccggagaaatacgactgaaaaagggattggattttgagaaaatcaaatcttaccatgtgaaaatcgaggccacagatggaggaggcctttctgggaagggtgctgtggtgatagaggtgttggatgtgaacgacaatgccccagagctgagcatatcttcactgaccaactcagtcccagaaaacgctccagagactgtggttgctatcttccgaatacgagatagagattctggtgataacgggaaaatcatttgttctattccagatactctaccattccttttaaaaccctcaaacaagaacttttacaccttggtgacagagggccctctggacagagagagcagagctgagtacaacatcaccatcacagtcaccgacctgggcacacccaggctcacaacccagcacaccataacagtgcaggtgtccgatgtcaacgacaacgccccggaacccactctgggtggctgct

SEQ ID NO: 3157649 - DNA, 1056 bp, Cricetulus griseus
cccccacaagatcctcacctgaacttctctccacccccggaagggcaagtctgagccaggagcatgatgggcgggggaagactcctgcctgtacttctacccacgggcggcttcctgcctggccatgctgccactctgtcctccagactggggacttcagctgcaggagacctcacctgttgaccacgtgagctgagttttccctgcctgtcacattaggtatcatggaagctgctgaagacttggaggttttttcatggcttccttagtgtcaacagtagtgaaggagatagagaaggggactgaggggaagccccctcttcctgctctgccctcctggagactgttgcaaaattcccaacagcctcatggcagaggcccaaagcatgctccgcgcccaggcgggggcagctgctaacaagagccttggcgcagctgcagccatggcaggcgagggccttggagctgggagctgggtgccaggctggagctccagctggttcctctctggcgccttctgaacccatcttagcaagtccacacacctgggcagaaaggtcgttgaccaggggtgggttggccttgtcctctgaatcctgcccagcacccagagatcccagtgaaatgcactcctggggagcacaggcactcaaggtacaaatgggatagggtaccccaactccagacccctgaagcccagagaggaggggctgagacacaagcagatagctctagtattgttcttcatgtgtcctccatggctggggctgccaccccacccggcctgaatctgtctcaacctgcaagaacacatgggcggtgccaggcattacctcacaacaagcctgaagttgttggcttcgctcctgggcaaggaggagcaggccagagccccttttgcttccttttcctgcccatgccgcctctcgaagctgggcacaggttgccaggaggtgacatgaaagaggaggaaactcagtgacctctacctctcctgaattcctcccagcgggggagacttgtctgctgctctgaagaacatcacgcactcctgtg

SEQ ID NO: 3157650 - DNA, 338 bp, Cricetulus griseus
caggtacaaaagtttggtcactgggacccgagcaagagggatcattgctgtcctctgggtccttgcctttggcattggattgactccattcctgggttggaatagtaaagacagtgccaccagcaactgcacagaacctggggatggaatcacgaataaaagctgctgtcctgtgaagtgtctctttgagaatgtggtccccatgagctacatggtatatttcaatttctttgggtgtgtccttcctccactgctcataatgttggtgatctacatcaaaatcttcatggtggcctgtaatcaacttcagcgcatggaactgatggatcactcgagga

SEQ ID NO: 3157651 - DNA, 285 bp, Cricetulus griseus
tttgagaacttgaacatccattgtggggaatccatggagctgagcttagagactgtctttgatcttataatgaggaagaagaggggcaggtggtatctccagttaaaactctattttctactgggctcttaccatgataggttttgagatcacaatgttgggagtacctgtttataactcctcagcctgcaaatatggcaactccatgattcaccttctgctacacatgaccctcagtggcaaaaaaaagtgtactgtagattctgcaattcccatttttctgcc

SEQ ID NO: 3157652 - DNA, 198 bp, Cricetulus griseus
  modified_base (194)..(194): a, c, t, g, unknown or other
tcaggtcctccctaagatgacatcacatgtggtaaatgagattgataacatactgcgcaacaagccctacagcaaaaaagactatagatcataaggcaatgcatgagccccagacactgcatgggtaaaatatggtgggtaggcagtgcagaatgaccttatgcaatcttcaaaaaaaaaaaaaaaaaaaaaanaaaa

SEQ ID NO: 3157653 - DNA, 292 bp, Cricetulus griseus
ctcttcttcctgttggctaaatagctggtccttcctcgggaattgggtgcatggcatgttttgtctgtaaatgtttcttgtaggtgtcaccatgaacaaaggtatattttctatttatttattatatatgcacttcaagaagtcactgtcagaggagtgaagagtcctcttaagtattctgttagaggatgtcctttaaagagcccggggaaagggtgtgcccagagccaaagacaccagctctggtttggaaaaatcctgctgtaccatattaaacatacaaaggatgtca

SEQ ID NO: 3157654 - DNA, 447 bp, Cricetulus griseus
ggagcagagagcaaagacaactcatttctcgagccttccaagagcgaaccaaacaggatctattgaagtccttgcaggcagcactctctggcaacctggagaaaattgtggtggctctcctacagcctgcagcccaatttgatgcccaggaattgaggacagccttgaaggcctcaggttccgctaaggatgtggcattggaaatccttgccaccagagcagcacccagactgcaggagtgcctggcagtatataagcatgatttccaggtggaggctcaggaagatatcaggactgagaccaatggcatcttgcaagacctgcttctggccctgagcaagggggccgtgagagatattctggagtcattgactacagcttggaagaacgagatgtccaggtacttcagcagaccggaggatccagtatggcaggtcaatgggtcct

SEQ ID NO: 3157655 - DNA, 1098 bp, Cricetulus griseus
  modified_base (1086)..(1086): a, c, t, g, unknown or other
tgtttggtagtcgatcttctaaaacttttaagccaaagaagaacatcccagagggttctcaccagtatgaactcttaaaacatgcagaagccacacttggcagtggcaaccttcggatggccgtcatgcttcctgagggagaggatctaaatgagtgggttgcagttaacactgtggattttttcaatcaaatcaatatgctttatggaaccatcacagacttctgtacagaggagagttgtccggtgatgtcagctggaccaaaatatgagtatcactgggcagatggaacaaacataaaaaagcctatcaagtgctctgcaccaaagtatattgattacctgatgacctgggttcaagaccagctgggtgaaaacggctctttagagtttatgctcacatttatcaccaacattttgatcctgtgatccagcttcaggaggaagcacatctcaatacatctttcaagcacttattttttttgttcaggagttcaaccttattgacagaagagaacttgcaccactccaagaactaattgagaaactcacctcaaaggacagataaaaggataaaaagctgcaaattcttcctccactggagctgtgtgggtgtatttgggcttttgttatattttgtttttatctggattatttgtctttggtttgggggcttgcttgggttcccttttctcttttgaatatataaaatcatattttgttgctagagaaagctcttaatatctgtgatattgaaatttgaggatgttgaaatgtaataactattgcatttcaacttctttttacatgttaagtgcactgtaagtgtaaaacttcaggttatatatagacttgccatcttcagaaagaatgctgaactgtgaggtttcctagcaattgccaaatgagccataagtgcagaatctccttgtacttcaaagagggaggaaaaataagaatggttggtggcaggcattagtttgggaaatcaaaagagaaagattaagtatggggagtcaaattctagaaagtcctgttttaaaaccctgggatagaatagtgtttattacttacagacttttttttntttttttagtat

SEQ ID NO: 3157656 - DNA, 2014 bp, Cricetulus griseus
cggagcacggttgagtcagtcagtctgtcggagtcagtcttcgcaacagccttcgcccggtacctgggagagccagctgctggattattctgcgtcccctcccactctccggtcccgcgtctctcttcacctctctcccgccctcgctcgtacagccatggcggagtcgtcggcggccactcagtccccgtcaatctcctcgtcgtcctccggggccgagccgtccgcgctcggcggcggcggcggcgggagcccgggagcctgccccgccctgggggcgaagagctgcggctcctcatgtgcggcgatctgattttctggcgagatgtgaagaagactgggtttgtctttggcaccacgctgatcatgctgctctccctggcagctttcagtgtgatcagtgtggtctcttacctcatcctggctcttctctccgtcaccatcagcttcagagtctacaagtctgtcattcaagctgtgcagaaatcagaagaaggccatccattcaaggcctacctggatgtggatattaccctctcctcagaagctttccacaactacatgaatgctgcaatggtgcatgtcaacagagccctcaaactcatcattcgtctcttcctggtagaagatctggttgactccttgaagctggctgtctccatgtggctgatgacctatgttggtgctgtttttaatgggatcacccttctgattcttgccgagctgcttgttttcagcgtcccaattgtctatgagaagtacaagacgcagattgatcattatgttgggattgcccgggatcagaccaagtcaattgttgaaaagatccaagcaaagcttcccggaatcgccaaaaaaaaggcagaataagcacatggaaaccagaagtgcaacagttactaaaacgccatttaatagttataacatcgtcacttgtaccatgaaggaacttgctcagtgtcagcttgagcctggttccaagttgtttgttctttttaatttggtgttctctcccctgcttttccctttaccctcagtaccaagcacaagatgtgttagactgaaaaaagaactggtctcttagaacccaaaagaataaggagtgaatcaaattaatagaattaatcagaccataacagtggtagagcttttacctgtaccgtgaaaggggagaaagaagagagaaatgtctctagggtcctctatccagtttcaaggactcttatgcagttcccatttatatttttgcccttatttttaagctaggaaataatgattaacttatgaattgtctggggcaggagtgggattccttccattgggtttgtgcagccctccagtcctaccttcctgccttagagctaagcagccactctccctaatgaaagaactgtcaactctaaataacttacaggtgatagaggtaattccctttttccagaatgccatctgagaagtacagagggaacagagtagggtggagcagtcagcaggagggcagcagtcatcttcctgctgctcttctagagaaggaagggctctgccagctgggagggcagtgtccaagccattggtctgggataccaatgtgagtgttggtttgagaaatcattccagaatgtgcttctccctcttttccctgcccaccttacctcaagtttaataaatatggttgtacttttcttattatgaaataaatgtctgtaactgctgtacactgctataaacttaagaaaaataatctgcatgtgggctcccagccattgagttattgtaaccctgtcttagtctgtggggaatgaggcacaagaacacaaaaagccttccttctgtgtcttccctgctgctttctcctttttttaagtaaaaatctataggtgaaaaagttactaatgaaattgtgtacgtgtctgtgcgtgcagcataaaaatacagtagcctcaaggagctcttttggtccctgtaaaactgcaagttgatgtattaattataaataaagaacacagtgactgtc

SEQ ID NO: 3157657 - DNA, 2181 bp, Cricetulus griseus
ctgctaaacattcccttgctatctgctcgcagatccaagtcttcccagctagattccggagttcctttgtctcccagtagcaggctggccactgagaaaggctccaaaaagctgtcgtctagcatgcaaacctctgcacggccttctcaaaaacctcagtgatcttctgcaatccgggtgttttatctgtacagatgtttgtttatttatttagaactcttcccttcccactaaagccctctatgcttttattttgtattttttggggggtcatgttgcctgactttgtgagagagtatgagtgtgcgcgtgtggaattcaaattgttaaaagcgtcgccttattctgccattgaaccaaataacagccataggcaaagcattgataccaagctaactggaataactgtagaaaataatctggatagtcccttaacaattgtacctatttctttctagaaactctaatgacttttgttagacactagggtttggaaacctgtgaccaattaagctatcagtgtgtagacagatgaactgtttgacttaggttttcatctgagcaggatttatcttcatgtagattgtttgaatggcatcaacctgtcttgactccttggatatgttctaagattgcgcagattttggatagtcagaaagccagtcactttttttttttttaattctaaatttggtctctaaggccattggaatttcaaactgtagcagaacagttaatgcctttgaaagattcccagaaaaaattctattccaagatggaagcctgagttgatagcattttccttccctgatgtggtcttttttctgtcagatgttgaggatctctactgccccttgtgtgcatgcttacagccttgtcttgttgcttggaaaagaaagaagttgcctcctgccaagagctgcttgacggtgtgttgacatgacatgagacaaagcattgcagtgcactttggatcctgcccatcagtcttctttttgactgcttttcgggaactcttatgtctgctctgttctgaagagtttatctcagacctagaactctagcagagtctggcatatattccctctggcttgtagttgcaaattgcattattatatatcaagaggggaacctcactgaattctcacaggaatacctcttgggaagtatttccagtaggttacttaagtttattttgctgctaatgtggacattatctggtagcttgcagggtcagagtggctgggattttcagcccttgtggtggtttgagggttagatgttcagccttgtgcatattaccacagtgctccacgaaatccagtgtgtgtgagccagtgtccactgcactcagtcctgtactggctacttctgtgtcgtgtcgtctcccccccccctttgtggcttcccaagcattgaggctctctgctctgccttgatgtgactgaggtgacagctgcctttgcatgccatcattgttcagtggcacaaggtcagcccaaacaatgtttagccactaatcttattttctcttattgtctttattttctgaaaaagcaccaaatgtgaggccatcagtatcaggaattgagcatttgtgtaatttgagcctctgaaacagtcttagaattagagtgtagtaagacaaaggactttaataacaagctgttttgccataattaagatgaatagaaactagtttaattttcacagtactacaaagttttattcttgaatgcagtaggaatggatcttccctcccacatgtatcatgttttcttaaaaaacaaaacataaggatatcaggagaaatcagagctggaacagctttggcacagcctcccagagtcgagctctctgctgctgtgaacacgcagcacgaactttcctaggtgctattccagactgggggactgtgtttctgcacttgcggttctgtggtctttcctgtaggcatttatgttctgtgtaggtcagctcaccgactgtgcctctcaccattggttaaaatggaattcaggccccgtttccaaaatggtttttaggtcaagtgcatgaggtgtgtcactgccttctgttattttatttgtatattttactattccaggtgtatgcacttttaagaagcagaatttatatttttataaagtttaaaaacaattttatttctgagacagcagt

SEQ ID NO: 3157658 - DNA, 815 bp, Cricetulus griseus
gttcgcggcggtggcgtcgaagcatgcacgcggcaggtttggcggcgccggcggggacgccccggctgcgtaagtggccctcaaagcggagggtcccggcgtcccagccaggcatggctgatccccaccagtttttcgatgacacaagttcagccccgagtcggggctatggaggccagccgtcacatggtggcctgggttacccctccccttcctcctcacacgaggcagccttcctggccgaccctatgtccaacatggcaatggcctatgggagcagcctggccgctcacggcaaggagctggtagacaagaacattgaccgcttcatccctgtcaccaagctcaagtattactttgctgtggacaccgtgtacgtgggcaagaagctgggcctgctggtctttccctacctacaccaggactgggaggtacaataccagcaggataccccagtggccccccgctttgacatcaacgctccagacctctacattccagccatggctttcatcacctacatcctggtggccggccttgcactggggacccaggacaggttctccccagacctcctgggcctgcaggcgagctcggcactggcctggctgaccctggaagttgttgccatcctgctcagtctctacctggtcactgtcaacactgacctcaccaccattgacctggtggccttcttgggctacaaatatgtcgggatgattggtggggtcctcgtgggtctgctctttggaaagattggctactacgtggtgcttggctggtgctgtgtgtccatctttgtgttcatgatccgg

SEQ ID NO: 3157659 - DNA, 1236 bp, Cricetulus griseus
agacactctgtgaagctgcaagaaaaagcaccttgtttagctgccaatcaggttaacattggtgttgaaatcatcgttctcaacagtgttctgttaagttacagggacgtttttagaaattgatctatgtgccaaacttttctttctgttaacattgatcatgtgacagtttgcaagtgtagaggtaggtgagtgctgtgaaaatacttgacatggattcaggaaacatagtcagactttgttttgtgatgctaactcccgtatgaatgccgaataccaggctttcagtactaaggaaggtgtttggtttttaaagatgagtgtttctggaaatgtaggattttaaagttgagttttatagtaaactagagattcctgtgtgaacagtgttagtttaacattgtagtacaaaggcaggttttatgtaacctttagaattatgtttgccatcagggatttattttacaataaaaatactaaaatgtactgtgaagcttacagacaggaagaataggtattggagagtgatactcaaacaagagcgttgtttgatgaagtacttgcattatgtgaacacaattttcccttctgttaagactataaactacactgtatgaatatgtgtactgcatgtttacataaaacagtttcattttaaaggattatttaaactatgtttatatgtaatacctaacaggctgtaaatattgtatactattgatttttaattttatatgagcgattttttatttcccaagtcatgtacaaatctcattgtgtatatagcataactccctggagaacacaaattttgcagtgaattttaagtattttaattgcagtaagcatcgggttagcctcagagatgctggtcctcattttgaattatttttcaccacacattttcttcaaagggcagcaataaacatatgcaagttattttgattcttgaaagttggcctgcgaaaataagagcgcagttcaattcagtgctgtaaaggaatgatgcacaactcacaccatcccgcgtctggtcccaggatggacaacttctgagatccgcacatggctctcctctttgtaatatacagggtgaactgctgacaacacacagaacatctgttaaagtgaatccagcacttcaatgtcattacacagaatttattggattaaaatttgtaatatacagtattttaataaagttttctgtattcaatttcattgcacttatatata

SEQ ID NO: 3157660 - DNA, 369 bp, Cricetulus griseus
ggcacagtgaccggcaggtggctgctgctggatacagacacccatgacctggtggcgatccacacagatggcaatgagcagatttccgtggtcagcttttccccagacggggcgtacctggctgtgggctcccacgacaacttggtgtacgtgtacacggtggaccagggtggccgcaaggtcagccgcctgggcaagtgctcgggccattccagttttatcacccacctggattgggcccaggacagcagctgctttgtaccaactccggagactacgagattctgtactgggacgccgccacctgtaagcagattaccagtgcagataccgtgaggaatgtggaatgggctaccgctacttgtgtgt

SEQ ID NO: 3157661 - DNA, 775 bp, Cricetulus griseus
  modified_base (760)..(760): a, c, t, g, unknown or other
gaaaaggaagctgagaacggcaaggagaaggaggggacagctgcgaccagggacccacagggatgctgccatccgcccagggagcaggtatgtggccctgagggttcccgctctgtactagacctggtcaactacttcctgtcccctgagaggctgacagctgaaaaccgctactactgtgagtcatgcgcctctctgcaggatgcagagaaggtggtggagctgagccagggtccacgttacctcatccttacactactgcgcttctccttcgacctgcgcaccatgcggcgccgcaagatcctggatgatgtcaccatccccctcttgctgcgcctgccactggctggggtcagggtcaggcctatgacctctgtagtgtggtggtgcactctggcgtatcctcagaaagtggtcattattactgctacgcccgtgagggtgctgcccggccgacccctgtcctgggatccacggacaggcctgagcctgagaaccaatggtacctgttcaatgacacccgggtgtccttctcatccttcgagtctgtcagcaatgtcacctcctttttccctaaggacactgcctatgtgctcttctaccgccagcggcccagggagggtccgaggttgagcctggctctcccagagttccgagcagagcccaccctccacaaggacctgatggaggccatttccaaagacaatgtcctctacctgcaggagcaggagaaggacggcccggagcagggcaggcttanatctccacactccct

SEQ ID NO: 3157662 - DNA, 337 bp, Cricetulus griseus
ttttattgtgccttgtcagtttgccaaggctatgcaggattgcactagctccacaatgcagtaatattgataaatgaagatactgagtttaaaaaggatcttccattattttggaaacaaaagaattttataggttttgttctatgcattctccaagtttaaaactaggttctcctggatttggagattgccagaggtggctctagtctcagttctgtagatacttaaagagcctgttactgttgaggtaagtgatggccatacactgctctgattaatttatttttcattttatagagcagataagcaatgagttggcctaaacttcgtaaaattt

SEQ ID NO: 3157663 - DNA, 437 bp, Cricetulus griseus
gatgagaagatgtacgatgcctatgtcttatacccaaagtgcccaagagaaagccaaggccatgatatggacacgatggtgttgaagatcctgcctgaggtgctggagaagcagtgtggatacaaattgtttatatttggcagggatgaattccctggacaagcggtggccaacgtcattgatgaaaacattaaactgtgtagaagactgattgtccttgtggcaccagaatcacccagctttggctttctcaagcacatgtcagaagatcagatcgctgtctacaatgccctcatccaggatggcatgaaggtcattctgattgaactggagaaagtcaaggactatagtggcatgcccgagtccattcagtacatccgccagaagcatggggccatccagtgggatggggactttacagagaagtcgcagtgtgc

SEQ ID NO: 3157664 - DNA, 539 bp, Cricetulus griseus
ccatggtgggaggcagcttgacgaggttcctgcttcgatcgatgctctgacagaagtggtggccgcagtcaaagggaaagttgaagtgtacatggacggtggggttcgaactggcaatgatgtgttgaaggcactggcccttggggctaagtgcattttccttgggaggccaatcatttggggcctcgcctgcaagggtgaacatggtgttaaggaagttttaaatattttaaaagaagagttccaaacttctatggtcctttcaggttgccggtcagttgctgagatcagtccagacctgattcagttttccagattataaggaactactgagactgcctacaaggggaagacaggccctcaatgtggtgtgcaatgctgttcttcttaggctctatcctattgagtagtttgagccctgtatcctcaaaaatagagagggatgtagaaaagataactaccgccattgtgacatttggatgaaggaataccatctaatgttctactggataactatagttgacaacaattaattgact

SEQ ID NO: 3157665 - DNA, 470 bp, Cricetulus griseus
  modified_base (463)..(463): a, c, t, g, unknown or other
gggctcagtgggaccaatgagtcaagggacatggaggtggccccgctgccaaggacatcccagctccgctgctgcaaatccctctctgctccccatcacctgggagagagaagacaccctaactcatcccaagggggccaccagggggcaggggatccccacagagccttcctgtggagaccaacctgaggaaccttatttatttattcgcctagctctaatttgttggggtgtggggagggaggtaattgctcccctacaaccttcccagcgctgagcaaccctgggggcaggcaagggcaccagtcccttccgttaggctgcacatttcgccctcgggccctggcttgtccctggtgctacagacctctcacggcttcctccaatctggggtcactgaccctgggagtgcttttacagaccgctaataagacgatcttcgtgaacgaaccaaaaaaaaaanaaaaaaa

SEQ ID NO: 3157666 - DNA, 352 bp, Cricetulus griseus
ccgagggagagagagtggactttgatgacatccacaggaagcgcatggagaaggacttgaatgagctgcagacgctgatcgaggctcactttgagaaccggaagaaggaggaggaggagctgatctctctcaaagacaggatcgaaaagcggcgggcagagcgggcagagcagcagcgcatccgaaatgagcgggagaaggaacgacagaaccgcctggctgaagagagggcccggcgtgaggaggaggagaacaggaggaaggctgaggatgaggcccgcaagaagaaagctctgtccaacatgatgcattttggagggtacatccagaagacagagcgcaagagtgggaa

SEQ ID NO: 3157667 - DNA, 1778 bp, Cricetulus griseus
gagggcagtgactttgggaagcctcggaagaacttctctggtggcagtcactccacccgaggcgccaccagcctgctgaggcggaaggaagttactgaggaggaagctgagaggtttatccaccaggtaaaccaggcggcagtcaccatccagcgctggtaccgccgccaggtacagagacgccaagcaggagcggcaagcctcgaacacctgctggcgtccaagcgagaggggcagaggcaacggctgggtagggggaaccttctggacctgcaccggcaggaggagacagcaaggaagaaggcccgggaggagaaggctcgccgggccaggcaggcagccattcaggaactgcaacagaaacgagcccagaaggcaagcgaggctgagcacaggccacctaaggacagaccggagaccagagcaccaggacagcctcgacccatgcaggagccaagaaactcaaagaactcatgagtgccactgagaaaatccgccgtgagaagtggatcaatgagaaaacaaaaagatcaaagaaatcacagtcagaggtctggagccggagatccagaaactcattgccaaacacaagcaagaggtgaggaggctcaggggcctgcacgaggctgagctgcagcagcgtgaggagcaggccgcacagcgccacctgcgccaggagaagagctgcgggaacacctagagcgcgagaaggaggcgctggccaggcaggagcgtgaacgcgcccagcagaggtttgagcagcacctggagcaggaacatcaggccctgagcagcagggcagagctggaggagagcagcgcgactctgactcaaaccctgagagccgagtttgagaagagccgggaggaacaagagcagaggcatcagatggagctgaaagccctgaaggaccagctggaagctgagagacaggcgtgggtggccagctgtgcctaagaaggaggaagcatggatgctgaacagggaacgggaactgaaggaagagatccgaaaaggccgagaccaggagatcgagctggtcatccatcgactggaggccgacatggcactggtcaaggaggagagcgagagggcggccgagagccgcgtgaaagcgtgttgcgggacaagtatgaactggagctctccgagctggagcagtcagagcggaagctccaggagcggtgcacagagctgaaaggccgcctcggggaggccgagggggagaaggagcgcctgcagtccctggtacggcagaaggagaaggaactggaagacgtgagggtggtgaacacacagatgtgcggtgagagggccagcctggcccaggtggtccgacaggagtttgcagaccaactggcagcctcccaggaggaaaaccagagggtgaaggcggagcttgctgagctgcaggcccgccagcagatggagctagatgaggtgcatcggagggtgaagacggctctcgccaagaaggaggaggccgtgaacagtctccggaaacagcacgaggccgctgtgaaacgggcagaccacctagaggagcttctggagcaacacagacggccatctttgaatgctaagtgacatcacccttaggatgaaaaaccaagcctgaagcagatgctcagcgctgcagctggtgtccaggttccatcccaagacacagggctaagggtaggatagcagccggtgtgagaggcacccctcatggaaccccagtgctcaggacattactgtcagcatgcctgcaggtgttttatagtaaaataagttag

SEQ ID NO: 3157668 - DNA, 561 bp, Cricetulus griseus
cacccatatttcacccaaccaaaactcttgaaattttgccagcagcatgacattgttattgtcgcttatagccctttggggacctgtcggaatccatcatgggtgaatgtatcttctccatccttgttaaaggataaacttttaaactcactggggaaaaggtacaataagacggcggctcaaattgggttgcgtttcaacatccagcgaggggtggttgtcattcctaaaagctttaatccccaaaggatgaaggaaaacttccagatctttgacttctctctcactgaagaagaaatgaaggacattgaggccttgaataaaaatgtccgcttcgtggagttgctcatgtggagtgaccatcctgaatacccatttcatgacgaatactgaacatggacagttcttcaaaagaggtctttccctcattcaggatcttgaagtgagcaaccctctccaaatataaaaatgaatggggtcttgctaccctcagattgagtagaacacaccatgcttaacttttgtgtagtatgaactcaacaaagctctgatgaaagaaaa

SEQ ID NO: 3157669 - DNA, 414 bp, Cricetulus griseus
cttgttccagctggatttggagcagttgcatctggtgattcagcagtttgtgaagaagtatggaaacctcattagcctggattatggtaacatcccttcagtggtcataactggactgcccttgatcaaagaagctttcactcacatggaacaaaatttttgaaacgccccattacaccaatcagagaacgtgtctttagtaacaatggattgatcatgtcctatggccagacatggaaggagcaaagaaggtttgcactaatcacattgaggaactttggactggggaggaagagcttagaggagtgcatacaggaagaggccttccacctaacaaatgccataggagaggaggaaggacagccttttgatcctcacttcaagataaccaatgcagtttccaatatcatttgc

SEQ ID NO: 3157670 - DNA, 321 bp, Cricetulus griseus
tcctttgaaaatcctgagttattttacattccaaaaatactgttgtgagattcttgtagtcaatgagttctatgggctgaatttcacttgtgttggatccaatacctacatgccaaatcacccaatgtgtaccatcacccaaggaatccacttcatcgagaagacctgcccaggcgccacatctagattcacagccaactttctgatcttatttgcattcatccctgtgcttgtcatcctagggatagtggtttttaaagtccgggactaccttattagcagatagttaagattgcagccaggaaagggtttaatgggcag

SEQ ID NO: 3157671 - DNA, 1257 bp, Cricetulus griseus
ggactgtgtccaataagtgggaagtaccttctgtatatagtggtgttatcctcggaattaaggacaatttaacaagagatttggtttacattctcatggccaaaggtttacactgcagtactgtcaaggactttccccatgctaaacagctatttgcagcttgtttggagttggtaacagagttctcaccgaaactacggcaggtttatgctgaatgagatgttacttttggatattcacacccatgaagctggaatgggccaatcaggggagagacctccttctgatcttattagtagggtaccgaaggatatctggaaatgaggcttcctgatattcctcttcgtcaagttgtagctgaagagtgtgttgcttttatgttaaactggagagaaaatgagtatcttactctgcaagttcctgcatttttacttcagagtaatccatatgtaaagcttggacagcttttagctagccacctgcaaggaacttccaggccctaaagaaagtaggcggactgctaaagacctttgggaagttatgttcagatctgcagtgtgtctaaccagcacaaacgaggaaatgatggcagagttagtttaataaagcagagggaatctacactaggcataatgtatcggagtgaactacttcttttatcaaaaaattacgggaaccactggttttgactattattttatcactctttgtgaagctacacaatgttcgggaggacattgtgaaatgatatcacagctgaacacttttctatttggccatcttccattcctaacctccagtctgtggattttgaagccgtagcaatcacagtgaaaagaagactagttcgatatacactcagttttaataaggctgtgccccctgatgtatataccgatcaagtgataaaacgaatgataaagtgctgttctttgctgaattgtcacacacaggtggcaattttatgtcagttcctcagagaaattgattacaagacagccttcaagtcattgcaggaacaaaacagccatgacgctatggactcctactatgactacatttgggatgtcactatcttggagtacttgacttatcttcatcataaaagaggagaaacagataaaagacagattgctatcaaagccattggccaaacagaattgaatgcaagcaaccctgaagaagtactacagctggcagcacagagaaggaaaaagaagtttctacaagcaatggcaaaaactttacttttaagca

SEQ ID NO: 3157672 - DNA, 366 bp, Cricetulus griseus
tatcagagtcctcatagttttctgataagtactacccaatcttattcctgttcttctgttattttcagggcccatgttcagtgtggccatgtgtttttcctttttgcctcaactctggtactcaacccggtttttatagatgctttgcaaagacattgtgcattggtatctggatggaccctttacaccagtggcttagttagatccttatttaggaaaaagtttgtaattcagtagtaaactgtttggcttttacagttattttgatggtgctagtgatgaattcatttgctttttattttgccccatatgctcacatatacatggcaaacactgagaatagctgggatctgttggcatcacttg

SEQ ID NO: 3157673 - DNA, 192 bp, Cricetulus griseus
gtaggaaaccaacctcagagagacaaacaggatggctagctcagcccgggagcatttgcttttgtacggcgtcgaaatccacagatgcggtacacactgagcccagagaacctccagagcctcgcagcccagagctcaatgcccgagaacatggccctacagagagccaatgttgtatttattaagattatg

SEQ ID NO: 3157674 - DNA, 462 bp, Cricetulus griseus
cgccatgatctgcctggtgctaaccatcttcgccaacctctttcccgcagcctacagcggcgtgaacgagcgcacgttcttggcagtgaagcccgacggcgtgcagcggcggctggtgggcgagatcgtgcgtcgctttgagaggaaaggcttcaaactggtggcactaaagctagtgaaggcctccgaagagctgctgcgggagcattatgcggagctgcacgaaagacccttctacagccgattagttaaatacatgagctctggtccggtggtggccatggtgtggcaagggctggacgtcgtacgtgcctcacgggccctcataggggccactgacccaggggacgctatgcctggcaccatccgtggggatttctgcgtggaggttggcaagaatgtgattcatggcagtgactcggtggaaagtgctcacagagagattgcggcgtttggttccgt

SEQ ID NO: 3157675 - DNA, 1405 bp, Cricetulus griseus
tgtgtgtctgctgctggcctctggctttgcccaggcaggcaggctgctggtggtccccatggatgggagccactggttcaccatgcaatcggttgtggaaaaactcatccacaaaggacatgaggtggtggtaatcgtgcctgaggtgagttggcaactgagcaaaccactgaattttacagtgaaaacgtattcaatttctcacaccctagaggatttaaaccgggagttcaagatttttatggacgctcaatggaaattttgtcactatcttgaagagggtgcccacgtgccccagccctccttcttatgttcccagagcgctctttgaaattaacagacaccatgactttcacggagagagtctggaaccacctcgcctacatgatggaacgtacattctgccatgcctttttcaaaagtgctacagacattgcctctgaagctctccagaccccagtgaccatgaatgacctcgtcagtcaagtgtccatatggttgttacgcactgactttatgttggaggtccctaaacctgtgatgcccaacatggtcttcgttggcgggatcaactgccaccagggaaagccgatttccaaggaatttgaagcctatgtcaatgcctctggggagcatggcatcgtgattttctctttgggatccatggtctcggagattccagagaagaaagccttggaaattgctgaggctttgggcagaattcctcagacggtcctgtggcgctacactggacctaaaccatcaaatcttgcgaagaatacaatacttgtaaaatggctaccccaaaatgatctgcttggtcatccaaagactcgggcgttcatcacacactctggttctcatggtatttatgaaggaatatgcaatggcattccaatggtgatgatgcccctgtttggtgatcagatggacaatgccaagcgcatggaaactcggggagctgggatctccctgaatgtcctggaaatgactgctgatgatttggaaaatgcccttaaaaaggtcatcaatgacaagagctacaaggagaacatcatgcgtctgtccagactgcacaaggaccgtccgatagagcctctggacctggctgtgttctgggtggagtacgtgatcgagacacaagggggcgccacacctgcgcccggcggcccatgaccttacctggtaccagtaccactccttggatgtgattggcttcctcctggccatcgtgttgacatctttcttcattgtctataaatgctgtgcctatggctgcaggaaatgctttgggaaaaagggacgagttaagaaatcacacaaatccaagacccattgagaaagggggtgggaagtgaaggggaggtatcggtccattctccaatcagtttgaaacttgaaaaca

SEQ ID NO: 3157676 - DNA, 961 bp, Cricetulus griseus
attccgggatgaagcatttaatggattaccaaatttggaaaggattgatctgagcagaaataatatcacttcttcaggcataggtccaaaagccttcaagttttttgaagaagttgatgcgtctgaacatggatggaaataatttggtacgcattccttcagaattaccatctacactagaagaacttaaaataaatgacaacaatctccaggctatcgatgaagaaagtttatcagacttaaatcagcttgtcaccttagaattggaaggaaacaatctcagtgaaatcaatgtcaatcctttagctttcaaatctttgaagagtctatcatatctacgtctgggaaaaaacaaatttagaattatagcacgaggtcttcctgcttactatcgaggaattatatctagaaaataatcagattgaagaaataactgaaatttgtttcaatcataccagaaaaatcaatatgattgtactacgttataataaaatagaagaaagtcggattgctcctttagcatggataaatcaagaaaatcttgaatccatcgacctgtcctataacaagctttaccatgtcccctcctatctacccaagtctctgctgcacctagtactaattgggaaccagattgaacggatccctggctacgtgtttgggcatatggaaccaggccttggagtacttgtacctgtcatttaatagacttgccgatgatggtgtggacctagtatccttctatggtgcatatcattctctgagagaattatttctggatcacaatgacttaaaatccataccacctggaatacaagatatgaaagcactgcattttctgaggctgaacaacaataagattcggaatatccttcctgaacaaatctgtaatgttgaagaagatgaggactctgactctagaacatcttcatcttagaaaacaattacattagaactagag

SEQ ID NO: 3157677 - DNA, 1302 bp, Cricetulus griseus
gtccgagagtgaggaaagccggacagcgagacgacagaccatcattttcctgagactgattgtggtgacgctggccgtgtgttggatgccaaatcaggttcggcggatcatggctgcggcaacacccaagcatgactggaccaagtcgtacttcaaggcatacattgatccttctccccttctctgacaccttcttctacctcagctctgtggtcaaccctctcctctacaatgtgtcctctcagcagttccggaaggtgttctggcaggtcctatgctgccggctgactctgcagcacgtcaaccatgagaaacgcctgcgtgcccagttcagctccaccaaggacagcacccgctctgtccgaagccccctcatcttcctaggcgccaggcggaactcttcctctaggagaactaataaggttttcctaagcacttttcaggctgaggccaggccgggagaggctaaggcccagtccttgagtcccgagtcaccacagactgactcagagaccaaaccagctgattccatcacagaaaatggtttacaggagcaggaagtgtgaatgccatgttcagaagccttgagcagaaactggctcttccgtcccgcagaagcaaagttaccttcacgcagcagtccccaaatagactgtgactccatcagggacagaatggaagctggaggctttgggaagggcagatgcctatctcaatgatgtctaagggctgattcttccaggctggccttggtggtggctacacggatcgggatgggaagacctgggctttctgctccatacttttgcttcaactacacacagaaattcaagacccctttgtctacccagaataaaaggacacccagaagaggctcaaggaggtgagagagaaagggccagacagatgacgcagcaggggttggcatctccttaagcttcagcagtgcgccaagcagagggctaagttgaagagcagggctgtggtgagaagccctggcctgatggccgaggcagagctgcctcttttcttgggcctcggcccgttgcaaagaggagtgttgcagcagctgatacacacggagttcagtttcccaggagaacagaaggactggtacccagccgaggcgatgagacaggctgctgaggatgcacacgacttccggtacatgatccctgcaacacagggccacggaagtggggttagcatgtgtggcctacaatccaaacatcactttgagcccaaatctgaacgcatagcttttcctaaattcctcacagagaaaaggttcttgtcccctga

SEQ ID NO: 3157678 - DNA, 1223 bp, Cricetulus griseus
  modified_base (776)..(776): a, c, t, g, unknown or other
aaagtttaactgtagctcagaccttattgtacatcagagaattcacatggaagaaaaccaacatcagtggtctatgtgtgagagtgatttcttcctaggcatggactttgttgcccagcagaaaatggggacgcaaacagaggaactgcattataagtacagtgtatgtcataaaagctttcatcatagctcagcccttcttcaacatcagacagtacacattggtgaagaatacatctgtaatgtgaatgaaaaaggtcttgatctcagctctcatgcatcagaagcatcacggatgtcttgacaagaaatcacgtaaacctaaaaaacaatgaagcattcttaatacaggaacaggacactgattttgagggtcctgactccaaagcttctttgttcttcattctattatcctgatgcttgcagcaaattaagctttataatgacacaattttttcatttatttcagttctatcaaggaaagaaaatacagtttaatcccagggaaaggattgcaatcaacacaaaacaatataaggtatattcttggtttggaatgaagaattctaagtgttagaataagtggttggcacattcacctaaggtttaacgataagcatttgtttctactacagtagggttgtctttcacattcgttggctaacttatgacccaagcatcttatggtcacttctaatttttcttctttggcttaaaagcttttaattgaatatttcaagttcctgtagtatttgggactctctagaatgtaattntttattgtctaatcaagtatacaaaagaaaaaaaaaaagttaattatagagagaccatggagaaagagacaaagtttaaaacattagtaggttggtgacttacccttccttcagcctgtctcactggtaattgtctatagtctctaactaaactaacagtggaccattcctcaaacagaactttgaggatgtaaagcaggcctgaggcctgttaactatggtgagatggtgttggtattacatagcgtaacctgaggttggagaggaccacttgggagcctgtaaccaaagctagaaggtaacttctgggatggatggaggttcccttgaagcagtgccaacccagatctacctcaggtaagtagttagagtaactttttcaagatttcagaccaaatgagatgaattatattccgtccatgtactcctctatgcttctttgttttt

SEQ ID NO: 3157679 - DNA, 469 bp, Cricetulus griseus
ttcccattccatccactcccctctccccacccaacccccacacactgcagcaggcgggccagggcgggtgtggggctggctggctgagtgggtctgtttctgagttgatggagtgtgtcatggactggccggctggtatcaacccctgtatagctcacatggatggattgacggtgtttagccagcttttatacacttcctccaggtctgtaggagctcagattttttaaaacatagatgtaaatatggagcaatcatcacacctgatccccgtgagtggggagaggggaagcttttattatcttgccaagcctggttgtaatttgtaatcattttctatttgtgcaaactctgtaaatacatgtttaaaagtgtaatattttgtacaagacacactggagaacaaagggaactcaaaactcttccatattcttcaccggaaatagaagtccatcccacagagtgggac

SEQ ID NO: 3157680 - DNA, 212 bp, Cricetulus griseus
gcaatgactacatgtccctggagggcccccgttgggcaccgtccatacagcaggccttgcgctggaagttcacacccatgggacaggatgcagctggccaggcgtggctcaccggcctgaccaactcggaaccgcgcgatgcctggtacatgctgcccagatcgctcgacagcccgtttcgcgaggccctcacgcgctggaacggctgactt

SEQ ID NO: 3157681 - DNA, 1028 bp, Cricetulus griseus
gcggcggtagatatccgagataatctgttgggaatctcttgggttgacagctcttggattcccattttgaacagtggtagtgtcctggattacttttcagaaagaagcaatcctttttatgacaggacatgtaataatgaagtggtcaagatgcagaggctaacattagagcacttgaatcagatggttggagttgaatacatccttttacatgctcaagagcccattcttttcatcattagaaagcaacagcggcagtctcctgctcaagttatcccattggctgattactatatcattgctggagtcatctatcaggcaccagacttgggatctgttataaactccagagtgcttactgcagtgcatggtattcagtcagcttttgatgaagctatgtcatactgtcgatatcatccttccaaagggtattggtggcactttaaagatcatgaagagcaagataaagtcaaacctaaagccaaaaggaaagaagaaccaagctctatttttcagagacagcgtgtggatgctttacttgttgacctcagacaaaaattcccacccaaatttgttcagcaaaagtctggagaaaagcctgtcccagtggatcagacaaagaaagaggcagaacctctcccagaaactgtgaaatctgaggagaaggagagtgcaaagaatgttcagcagactgtgagcaccaaaggtccccctgaaaaacgaatgagacttcagtgaatagtggacaagaaagaagctggcacattccttgtccgtcactatacctcagcaccatgggaggttcttgaatcttaaaatactatggaagccctctcatttatatggaatgcacttgttatttacaaaaggacattctccctaccataatttctgtgtgcatatttcttacatatcttttgtaacctttcctctactggacatgggtagtgcacctaactcacagatacactagtatatatctttaaaaacaataaagttatttgtatatattaaaaaaaaaaaaaaaa

SEQ ID NO: 3157682 - DNA, 1118 bp, Cricetulus griseus
tcaaatactgccagtcaaggcacaccaaaataaggtggcacaagagaagctagtaattgaagaactgcaatcaatgattatatttcacattagaagtagaacctggaggaaaaaaattcttttttaagcagttgtaatggcagaaaaaagacagttttataatgtagaggaagcaatggggcaactgataggacctggtggacaaaaatgggccaatatgggtccagaagaacgaatgttagctgctgctacagcttttacacacatctgtgcagggcagggcgaaggagatattaggagagaagctcaggctacccaatatgatccctacagtaaagcctcagtgacatcaggaaaaagacctgctcttcctgtgcaactgcactacccacctataagaagtcgtgtgacttcatcatcagtttcagaggcttcccaaaaatccagaaagccagtgatgaagagaaaggttctgcgcagaaagccagatggggaagtactagtgacagatgagtctgttatcagtgaatctgaatctggtacagaaagtgaagtggatctctgggacttaagacacaggctgatgaacctgcaatttcaagacggcacagaatctctaagtgatgctccacaaaaatttaacctaccacgtgactatcaaggaatttcacaagaagatcagctcatttgctatctacaaagagaagaaatgggccctcctgtttatgaacaagacttgattgttgccagcagacccaagtcctttattctccccaggctagatcagttaagccgaaaccggggcaagacagaccgagtagccagatattttgagtacaaaagggattgggattcaatgcggtttcctggggaagatcacagaaaggagctacgctggaatgtccgaggacagatgctttccaaaacagaaccccagtacaagcctcaacatgtgtatgttcctaacaattacctagtaccaactgagaagaaaagatctgcccttcgatggggtgtccgttgtgaccttgcaaatggtgtcatgcccaagaagtttcctttccctctatctccttcttaagtcttttttttttttttttttctttttttaagttaag

SEQ ID NO: 3157683 - DNA, 361 bp, Cricetulus griseus
agacgaggctgtgtatcaggccatccaggaggggatccagagggtgaatgcaaacgcagcagcccggccctaccacatccagaagtgggccattctcaaacgtgacttctccatttccggtggagaactgggccccaccatgaaattgaaacggctaacggttctggagaagtacaaagatatcatcgatgccttttaccaagagcaaaaacagtagtcaggggctatgcttgtggcatctactggagggaagacagcctgtcaagcatcttactgagctccaagtgtcttcctcctggacacaggaacctctgacaagctggtttcacccctagttcagggcatagcactgacatctcca

SEQ ID NO: 3157684 - DNA, 329 bp, Cricetulus griseus
tgagaatgaagtgtcaatactgcgcaaagtgaagcatcccaacatcatcctgttggttgaggagatggaaacagcgaccgagctctttctagtgatggaactggtcaaaggtggagatctcttcgatgcaattacttcttcaaccaagtacactgagagagatggaagtgccatggtatacaacctagccaatgccctcagatatctgcatggcctcagcattgtacacagagacatcaagccggagaatcttctagtatgtgaatatccggatggaaccaagtcttgaaactgggagactttgggctggcgacagtggttgaaggccc

SEQ ID NO: 3157685 - DNA, 663 bp, Cricetulus griseus
gcacctaaagtctcctgatcatgtcaaagggaagcaggcttataaggaacagataaaaagagagagtgtgctgactgctacaagcatcttaaataatccaattgtgaaggccaggtacgagcgcttcgttaagggtgagaatccttttgaaattcaagatcattctcaggatcagcagattgaaggggatgaagaggatgaagagaagatcaatgaacctgttgaagaagaggaggacgaggaggacgatggggaggaggattgaatagcagttagcattaagatggcttaacagcttttgtgtacagttacctttgtagcaataaaatgttttctttctttttctaaacaaaaactttctcctttgattgcaagtaataatacatttcatcaattaaatgagtatttaaaaatcagtatctgccttaatgtatgagtttattagctcacaagtatttcaagtgattgagaagacttgaattaaaacatttttcctcaatcctattttaaaacgtgtgactactgtatattttctaacacatttcagaggtcagcctgtaactgatcttgtttatactagctttagtatgttcttttctctgtgcctatgtcaaaccttggaatcttcctgaaaaattacaatttaaataacaaaaaaaaaaa

SEQ ID NO: 3157686 - DNA, 1275 bp, Cricetulus griseus
  modified_base (189)..(189): a, c, t, g, unknown or other
ttttgattttttctttttcaaataacacagcaacaatctaggcatgttggcacacacctgtaatcccagcagtcacgtggctgaagcaggagagtcaagagttcaaagccagcttgggctacataaatacacccgtcttaaaagcaaaacaaaagaaatcaagcaacagcagactgtatgttccctttntaccccatgtccatccactacataaagaaccccgtgagtcagccagtcttcaagagagcagtgtaccttctcccagctcacagcctagccaactgccctgatccctctgacatcacaggctcttctcatagcctcatggttgcctaattcaagatggcccctggatgtctgcacatggctactatgaattacattaattattgcaaatcagtggaattcttgaaacaaaaaaagtcttgtgtatatttgttaccaatttcctccccctccagcccttctcccccaaccttagctttcctatatgtcaaatcacagggcttctaagtcctagcattggtcccacaaatggaaagcctaacgtaccaaaatgaaacttgtaaatttttgtgtctttgtatgtaagtttactttttaacagaggaaagactctagataatgacaaatgaagattacaaaatgtattttactcctgtgattaggttacaccatgtgggtgagaactcatgtgtgagccccctctgctgaaggaaagcaccctgcctcagtggccagcatctggtggttcaggttcattagtcagttgagtaaaaaatcaccttttcttttctttgttttaatctgtttgttgttgtgggaaagtatggatttgttattacgcattgattttctgtgtccttaagtactgcctaaagatgaagcaaattttgaactggcaattacgaaaaggaaatcctttcgctctggagaatttagtagactctgttagattagggaggcctcacaggctggccggctcagaggacggtcactcactgtcagtgtggtgtgggcttcatttgcttaaataccttcatttgtatagtatgtctcacttgaaattgctttgtatacattttgtaaaaatatttataaaatgttttagtaaaaaaaaaaaaaagtataacaaattgcagtttattttgttatgttggataaatactgttaaaccagtcagtacctatattgttaatccatggttaggaaatgttcagttggagattacaaaatgaaacaaccattgcaatacagccaaagatttagggaaaa

SEQ ID NO: 3157687 - DNA, 348 bp, Cricetulus griseus
gacgtcaggcgcgccgctgcggctcagtggctcgcggcaggtgcggtgttgttggcgtagtcgggtccagtcttcttcagtcgagaccgggtcagcacccggcggttgcgaggagcagagaggtgcattgccaggttcctgatgaacccagagaatcctccaccgtatacggggcccggcccaacagccccatacccaccttatccacaacagccaatggggcctatgggagccgggagccccacctcctcaggggtacccctacccacctcctcaggggtacccctaccaaggatatccacaatatggctggcagggtggacctcaggagcctcctaagaccacagt

SEQ ID NO: 3157688 - DNA, 1555 bp, Cricetulus griseus
  modified_base (978)..(978): a, c, t, g, unknown or other
cagctgttgaacaactatcctgtctacataacgagcaaacagtgggacgaggctgtaaaattcttccaagaaagatgggagacggctccttcgatacctcatcagatttgttttcacaaccgatgagcttaagtactcatgcggccttgggaaaaggaaaagtcaagattactgtgtgctttgtggaaccaagagctacagggacagcatttattgaagactgtgaatgacatctacgaacacagtgaagagttttggaaatgggatagaaattcatactgtatccatttagaaaaggacttttggggaggccagttttgtcaaaataaatcacatcctttatattcaatatttagcatcagatttttgaacaaattggctgggcagtttagaagtaaaagaagttgagtaaatgagctgtcgcttacaatgggtaagagcagtgtccttggctatccaagggaagggggggtgctactcaggtcatgctgggctcctatgtggtcacctgagtgttaaatcagcctgcaaaaggtgccatgtctgacagggattcagagctcaccattaatcaggctaccccgatctctccacaagcctttgatttaatgtctggaggttagaggatgtttgtcttgtcagcttggtttgattttccacatcattctcgaagtcagacacattgctctcccaacacaaaactcagtcctctgtcaacttttagaattaccctgagtcatttagtgttggtttgaagtagacttgagttaaaaacagctcaggatgcagctgtgcagtttcattggtgagagaaatgtggttgccaggctgtcgtgactaaatgtgatgtttttgtctgttattaggtaaagtcttgtgtcctggctttcagaagttccatggttaatagtgacattgccgtggtgtattattctttttccaaatttaaaatgcctgcttctcacaactttttttttntttttttttattttagtagtttatcagccagggggttctgtgtgtgtgtgtgtttgtgtgtgtgtgtgtgtgtgtgtgtgcgcgcgtgtgtgcctctgcagaatggcatgtagcagctaacactggggccagttgcctttactctattttctatgatgaatacttgtggagaaactgtgacaaatccattgatcctaatatttttattgttggagtcttgtggcttctctgaataatttctatttgattgtactgtgtggaattcatacacactagggatatgttaataaaggtaaaatgcatagtataatatagaatagcaaaaaattttgtgaacaatttatatagaagagtaagttgttttttaagtgttaggccatttcttttaggaacctaaaatgttataagagttttttaaacattcaatatttttaattataagagacatttgttactagagctaattatttcgggtgttctaattggaatattgattttcttacctcatatacctctagaatgccacatgttctgttggggataaaattgcacaataaatgtcaagttacctagttaa

SEQ ID NO: 3157689 - DNA, 987 bp, Cricetulus griseus
tcccatgccagaggtgaagatgaaggagagtgaggcccctgatgcccacttcacagtggacaagcagaacatctccctctggcctcgagagcctcctcccaagccagatctgtctccagtcctgaggaaacctctcagcctccgtgtggccttcatctgtctgtcattggtgctggtcgcctctattgtgcttcaagctgttttctatcccaggttggtggacaaaatattggatgtgaagagcgatgctcagatgttgagagatcgtgcggacaatatcagcagtctgggttctgttctggagaaggacagaggccgtgtggaggaggctgaagttcagattcagatcctgaacacaagcctaacccgggcgcgttcccagattctgtctttgcggatcatcatggagcaagccagtgctcaaatcagtgtgttaacacgaaactgggaagaggttgatagtcttagttccaaaatctgcaaagagatctggataagtccagcgccttgaatgcgaaggtccgaggactgcagaacagcttggagaatgtcaacaagctgctccaaagacagagtgacattctggagatggtgtcccgaggctggaagtacttcggggggaacttatattacttttcttatacccccaagacctggtacagcgcggagcagtcctgcatttctagggatgctcatctgacctcagtgaacctacaagaaatcggagcaagagtttctctacaagtcagcagataggcttccatgctggattggtctcaccaaggcagggactgaagggcactggtactgggtggatgggacgttattcaacaaggaacaaagtaaaaggttctggattccaggtgaacccaacaatactgggaacaacgagcactgtggcaacatcagggtgtcctccctccaggcgtggaatgatgcttcctgtgactctaagttccctttcatctgtaagcgacccttcatcca

SEQ ID NO: 3157690 - DNA, 330 bp, Cricetulus griseus
agacgcaaatgacaggcacgaatttgaagttcaggtgctggaagaacaacatcaaagagacttaaaggctgtagaaaagaaaaccaagatggagatgtttacaaaacatggaagaggaactaaagagagagaactctgctgcagaacaacgtatggtccatagaatccagaggataatgatggagtgccacagagagaagatggaggctgtgaagaaagccagggaagaagagagagagctggcccagaaagctgttgaggaagagacaagaaaggtcatggaggaacttgtgagttctggcttgacagcccttagagaccataagacaa

SEQ ID NO: 3157691 - DNA, 395 bp, Cricetulus griseus
ttctcctgaaggaactaaaaggaaagatccctgatgtaccaggattctcctgggtgactccctgcatatctgccaaggatatcgtgtacatcggcttgcgagatgtagaccctggggaacactatattataaaaactctgggaattaagtatttctcaatgactgaagtggataaactgggaattggcaaggtgatggaagagacgttcagctatctactaggcagaaagaaaggcccatccacctgagctttgatgttgatggacttggacccagcgttcacaccggctactggcacacctgtcctgggaggcctatcctatagagaaggtctctacatcacagaagaaatttacaagacagggctactgtccaggacttgacatcatggaagt

SEQ ID NO: 3157692 - DNA, 543 bp, Cricetulus griseus
atgaagctcatggcagtaactgtattttttcttttccactgtttgtaaagtgcagcaaattaatatttcaaaggacttttaaaatagttccttaaaaatcaactttaaattacttctgtgcaatcgtacacagtaccaacattagaaacttgatatttctttgtcttcttatcttccatcttactttggctgcttttgttgctagtttcaaattgccagtatttttccttttttgcttcttaagcagttacaatatctttcattatagccacagtagtgccacagtttattataataaagggggttctaatttgatttagagcattcaaagtgtttttcatcacgtttgtgtttatattataatctttgtgtgtatgttgtgtgtatgtgtgcatgggtggttatacgtgtttataggttaatgccttcctgggactgtattaatgttctctcagtttgttatgccatccaaatggtgaatgagaacgctacaattgcaattagctcacaatttttaaataaaggataccacagtgcatggtg

SEQ ID NO: 3157693 - DNA, 406 bp, Cricetulus griseus
  modified_base (392)..(392): a, c, t, g, unknown or other
tacgatgaggtccccgacggcacccagtgtcaccgcaagacctacatcaccactgccctcggcggcctcatcggcgccataggctcagcttacagcgtcgtactcaacccggcagattcccacgtggaagcaatggccagggctggccggtacacgttcactgcagctgccattggagctatgtttggccttgccacctgtgtcagtgcccaagtccgagagaagccagatgaccccctgaactacttcatcggaggctgcgcagcaggcctgaccctgggagcacgcactcacagctatggtactgcagccgtgggctgcgtgtacatgggcactgcggccacgctgttcaagattggcaagctggaaggctgggacctctttgccacccnccgagggtgtgagc

SEQ ID NO: 3157694 - DNA, 207 bp, Cricetulus griseus
tgtagacacatcaaaacaaagctagaaaaaaacatcaaatagttcatactggagagagaccttacaaatgcaaagaatgtgtgaaaaaccttacaaatgtaaggaatgtgacaaatcctttacatatgactcacaacttagaagccatcagagagttcatactaaagagagaccttatagttgtcaggaatgtgacacatcttttac

SEQ ID NO: 3157695 - DNA, 188 bp, Cricetulus griseus
agctgactttttctgaagccataagaaacaaagccaggttatccatcactgggagtgtgggagagaacggccgtgtgctgacccccgactgccccaaggccgtacacacaggaactgcaattagacaaagttcgggattggctgtcattgcatacggacctaccataaaaaccaaaaaaataatcgag

SEQ ID NO: 3157696 - DNA, 583 bp, Cricetulus griseus
ggttttcaaaataaaaatagagttgcaattttggctgaactggacaaagagaaaagaaaattacttatgcagaaccaatcttcagcaagtcaccctggagctagcatctccctctccagaccttctcttaataaggacttccgggaccatgctgagcagcagcacattgcagcccagcagaaggcagctcttcagcatgcccacgcacattcatctggatacttcataactcaagactcggcattcgggaatcttatccttcctgttttacctcgccttgacccagaatgaagaaagtatctgtgataaaagggacctcatactatcaaatgtcaaagctctcactcagctctgtacaaactctgactttgagaattttggagaacttagcttttgttttttaaagaaaggaataaggaagtgagtgaagaaagaagggctggggtcctgagaactttggaagcggtatcgttggtggggttggttgtgctggtcgtgactaacttttttgattaccacatgactcttcactctcagactcagaattgcttagtttcataaaatctgcaccaccttcaacaag

SEQ ID NO: 3157697 - DNA, 199 bp, Cricetulus griseus
tgacaagtcccggcctggtcaatacatccgctctgtggacccaggctcacctgcttcccactctggcctccgtgcccaggaccggctcattgaggtgaatgggcagaatgtggaggggctgcgccatgccgaagttgttgccagaatcaaggcacgggaggatgaggcccggttgctggtggtagatcctgagacggat

SEQ ID NO: 3157698 - DNA, 529 bp, Cricetulus griseus
atagaatacttcagggacaacttattttactaggattttttgaagtaggtgttttatgggatttgtgttctgagaaatttacttaggagaacatttagtgttttgttctctgtgctcattacaaggtttctgcttttgtatgcttctctggtgatggtgagggtaactaaacaagctttatttcatttctgagtatgaaccacctaaccaatgaggtgtgtggcattttgtcagcctctgcaacgtacatagttgcaggcttggtgttccagggtttggatgtacagttgaagcataactggcctttgggttctgagtgctggtgtaatggtaagcatctagccacatgaaaaactcttggatcttagttctgatgcttcagttttcctcttgtaaattagagcaatgctttttaatcatgtagtttacatatcccagatccttggaaatcacaggcaatgaccacctgccagagcttgcatcagccctctgagagcgatttgagatggagacggccatgctggctgct

SEQ ID NO: 3157699 - DNA, 897 bp, Cricetulus griseus
ccaagagctcacagctgagtgccctgtctgctggaaccccttcacaacacgttccacacccctaaagtactagactgctgtcactccttctgtgtggaatgcctggcccacctcagcctggtagccccagccaggcgccgtctgctctgcccactctgtcgtcagcccaccgtgctggcttcagggcaaccagtcactgacttgcctacagacactgccatgttgaccctgctccgcctagaaccccaccatgtcatcctcgagggccaccagctctgtctcaaggaccaacccaagagccgttatttactgcgtcagcctcgggtctataccctggaccttggcacagagcctgggagccagactgggccccctcaggacacagtccctgacaccaggcctgtgcccatcccaatccccagccactactctctcagagagtgcatccgcaaccctcactttcggatctttgcctacctgatggactgttatcctcagtgtaaccctactgctcatcttctccatcttttggactaagcagttcttttggggaatggggtgagcactctctctgttccagcacaaggaacagagcctttcactgtggttgctggaatggggactacggagcctcctttgaggttgtcttccttgtagtattgctcatttgacagcccagagacatgtgtctactttggagaacagggatggctcaacacgaagagctgagacctgaaagtaaactatggggtcatggagtctagagaagcagttctgtggttccatggctacatagcaagttgtgccaaagggctggacagcactgtccagacatctgactagttgagatagcttgtggcatctttcactggagctgtgtttagctgttcatgtgtt

SEQ ID NO: 3157700 - DNA, 712 bp, Cricetulus griseus
cgagggttgtggtcaccgctgccgccctgccgcgatgggcatgcctgcaaccatgtcactggcaaatgtacgcgctgcaatgcgggctggatcggcgaccggtgcgagaccaagtgcagtaatggcacttacggtgaggactgtgccttcgtgtgctctgactgcggcagcggccactgtgacttccagtctgggcgctgcctttgcagccctggtgttcacggacctcactgtaatgtaacatgccctgccgggctccacggtgtggactgcgcccaggcctgcagctgtcacgaggaatcatgcgacccggtcaccggtgcctgccacctggagaccaatcagcgcaaaggtgtgatgggcgcgggcgcgctgctcacgctgctcctcggcctgctgctatcgctgctcggctgctgctgcgcctgccggggcaaggacccggcgcgcacgcttggaaggaagaaggcacctcagcgcctttgcgggagcttcagccgcatcagcatgaagttgccccgaatcccgcttcgcagacagaagctacccaaagtcgtagtggcccatcatgacctagagaacacactcaactgcagtttcctggaaccgccttcagggctggagcagccctctccatcatggtcctccagggcttccttctcatcctttgacaccacagatgaaggccctgtgtactgcgtgccccacgagg

SEQ ID NO: 3157701 - DNA, 309 bp, Cricetulus griseus
  modified_base (299)..(299): a, c, t, g, unknown or other
ccaaggacccaggagtgcggctgttgattcttccagttaacagtagaaggatggggctgtttaataattttggacattgaacttaatggatgataagttagtgatctgatagtttgagattttgagattttggacaccattccctttgccacagtaacttgtcttggttgtcccataatctgctcaggaggttgttctagagtggcaatatagtgtgttgcatttcaaaaatgtactagtgggctggagagatggcttactgattaagggtgcacatttaaaacaaaacaaaacaaaanaaaaaaaaaa

SEQ ID NO: 3157702 - DNA, 2211 bp, Cricetulus griseus
gcggagtcgtgggtgagcgcccactggagcggctcccgcgcacacgcgggcgcctcggcgagcaaacatggcggccctgactaccgtggtggtggcggcggcggccacagcagttgccggggcggtggcgggggcgggcgcggctgcggggaccggcgtgggagcggcgccgacgccgcaacagaatgagggtgcctgtggtacttctgctggaactcgtccttctcagctgcagaattggaagcagaaagttagtcggatgaagaaagcagaattcatacgcacagcagaaaaattaagaatcaagttattgtcatagaaaaagataaacacagtcatttctacaaccaaagaggtgacttcagaactgagcattgcatgctggaagagttggaaaataaactgataaacagcaggaagacagaaagagcaaaaatccagcaacagttggccaaaatacataacaatgtaaagaaacttcagcaccagctgaaagatgtgaagcctacacctgactttgttgaaaagctcagagaaatgatggaagaaattgaaaatgcaatcaatacttttaaagaagaacagagactgatatatgaagagcttattcaagaagagaaagcaactaataatgagttgagtgccatctccaggaaaattgactcttgggctttgggtaattcagaaacagagaaagctttcagagccatctcaagcaaagttcctgtagccagagtgataccaagtactcttccagaagaagtgatagaatttgaaaggtttcttcagcaaacaggagggcgacaggggggctgggatgactttgaccaccagaactttatgaaactgaggaacaaacataagggcaagccagcatttctgaaggaggttgttgagcaccttcctggaagaacactggatgaggttcagcaacatgagaagtggtatcaaaagttcctggctctagaagaaaaaaaaaaagagtctattcaaaattggaaaacgaaaaagcagcaaaagaaggaggaaatactgaagttaaaagaaaaggcagacactgcacctatgccttctcatagcaaaccagaagacaatcaaaagacagaaagaggaacagagaaagaagcagaaactggcagttgaagcttggaaaaaacagaaaagtatagagatgtcaatgaagcatgcttcccagctcaaagaagaagaagagagagagaggaagcagcagaaagagcgtcagcggcagtgtaagttaaagctgctcttagaaagctacacccagcagaagaaagagcaggaggagttcctgaggcttgagaaggagataaaggaaaagacagaaaaggcagaaaaaggaaaactgctgctgatgagatttccaggtttcaagaaagagatttacataaactcgaattaaaaattctagatagacagtcaaaagaagaggaaaaggcagaaaaacaaagacgactggccaaattaaaagaaaaggttgaaaataatgtcagtagagatccttctaggctttataaacctaccaaaggctgggaagagcgaacaaaaaagataggcccatcaggctctgggccacttctccatattccacacagggccattccaagttggcgacaaggaatttagagggactatgagataatgtaattgctagtcacttggtgagaatgttagtattgctatttcaggagtaggtgattaactttgctatttaaatgttactagcttagtgaggttggttattgtgctgtatatgaattgagaggttttaagtgtcaatttaaatactcaaaatatttcaaagatgtttttatcatatcttagtgaaataatttgggagaatcagtctttttaagccaaaattttgtaacttttataacttggaagtaactaagcttgagtaacaaaacgtaaagtgtctttttaaaaagaattgttcaataacttagtactttttctaagtttaacaaaatggtagtttgttggttgtttcatttttgtgtaatgaatattttgtatttgattaaagcatgctttgttttatatggagactattttaaataacctcccttgctacatgtacctcatttattatttattatgatgtcatccttcaggtttcctgcaactgtatcaaatttcctttcaggctttctggacccacagatttataaaatctttgtgtttttagta

SEQ ID NO: 3157703 - DNA, 1969 bp, Cricetulus griseus
  modified_base (1914)..(1914): a, c, t, g, unknown or other
atgggttattcccaagagattgttgaaaaggtacatcagggagtatggcccttctacagagccattattgctcttggaggaaaattgaaaaagagaacaaaaggctccaagaggaccgagcacttccacctggctctgtgtatccagatgctgctcagagcagaagtatgggtgctgggagcagcacaaatgagctcacaacagactctactccaaagaaaacacagagtcacacagagcaaaatatggtggaaaaattttcccagttaccgttcaaagactctaaaccgtgtacctcaaactgcagaaattaattctttcagaacagtgccagtaggacagaaacatgaaatgtggggctcaccccagaactaaaagttgtaatgtagaccttgagaccgatggcctctcaccctctgttgcctcttctagtcctaaagaagtcagctttatttcaaggggacctgcaggccaccaacagagaagcccagcttttcctgaaaatggctttcaacaacaagcggaacccccacttccaaataatacaaagcctgcctgtgagaaacgttctggctgttgtaactctcctcagcctaagccaaattatccccccctttctccaccgatgcctcggccccagccccatctgttaccctcagttactgatacgcgattggcaggatcctctgatcatattgattcctcagttacaggggttcaaagatttcgagataccctgaaaataccgtacaagctaggaattaaaaaatgaaccagggagagcagatttgaagcatattgttatagatgggagtaatgttgcaattacccatggtctgaaaaagttctttagttgccgtggaatagcaattgcagttgagtatttttggaagcttggcaaccgaaacatcactgtgtttgtcccacagtggagaacaaggcgcgatcctaatgtcacagaacagcacttcttaacccagctccaagagcttggaatattatctttaactcctgcccggatggtctttggagaaagaattgcttctcatgatgacaggttcctgctacacttagcggacaagactgggggtataattgtaacgaatgataacttcagagagtttgtgacggagtcagtgtcctggagagaaattattacaaaaagactgcttcagtacacgttcgtgggggacatatttatggttcctgatgaccccctgggaagaaacggacctcggctagaagaatttctccgaaaggaggtctttcttagagacatgcagccgatactcaatgtcctgccaaatgtgggcacgtttgatcctggcttccggagccccaacacccagatagccaacaccagccaccagcctccatcccggaaccagggagcctcttcaggctcttggcttcctcagcagccccacttcacacccctggccacccttcccagtatacagcagaaccttcccatgccagcacagagatcttctgcagagaccagcgagctgagggaggccctgctgaagatcttccctgactctgagcaaaaactgaagattgaccagatcctggtggctcatccatacatgaaaagacctgaacgccctttctgccctggtattggactaaaggctaggctgagggcccacttgttttgtacatacaaaaatctggattttcaaagccagcttttttctatatataaattatgctgctattacagatttaacattttctgtaaaaggaaagtacattttctgcctgttcagaactgtttaatagcagttactcttgagtgtattttacaaattttatgttttttaaactattttccttaaaagcttgaagaaaaattgacaaatgaatatggttagcctttctaaataaaatttaaaaaagaaaaaaaaaaanaaaaaaagtcgtgtgtgtgtgtgtgtgtgtgtgtgtgtgtgtgtgtgtgtgtgtg

SEQ ID NO: 3157704 - DNA, 203 bp, Cricetulus griseus
tttttttttgtttttaaagattcatttatttatttattatgtatacagtgttctgtctgcatgcatgcctgcacaccagaagagggcaccagatctcataacagatggttgtgagccaccatgtggttgctgggaattgaactcaggacctctggaagagcagtcagtgctcttaacctctgagccatctctccagcccctat

SEQ ID NO: 3157705 - DNA, 355 bp, Cricetulus griseus
ccaaccatggtgaatttgggcctgtcccgagtggatgacgcagtggccgccaagcacccgggactcgaggaatatgccgtgtgccagtcgaacgccttcatgaagggcgttttcacctttgtcacaggcactggtgcgactttcggtctgcagctgttcattaagcggaaatttccataccctgtccagtggaactttctggtgtctgccgttgtagggtctgtggccagctacaaggtgacaagaatggagtctcagaaatgcagagatctctggctcttcctggagacagggaaactccccaaagacatgagcacagaccatcaagactagaagagctctggctgctggggtg

SEQ ID NO: 3157706 - DNA, 999 bp, Cricetulus griseus
tggatagctctgctgggagtcctctcactgcagaggatacagcaggacccctcagctcacatttgtcagaggtggaaggtggggagacccttaaagatgaggagcccacctgtgaagggccagagtccatcaacactccagggtctttgaaggagctgaaagagttgttgactgtgacagtgtccgtggagcccaccccagtgattgacaatgatacacatgaggagacacctgttacccaagaaaatgaaaaagaagaagacaagatcgacccagaagccagccagccagctgccagccagcaggacaactgtgaagaaaggcaagtcagagagtggggcggccagcctacccctctggaagttgaggcttctggagaagacttggggacattgccagaagctagcagcactatctctcagtccactggtggggggcgccacaagaaagaggaagtcatgagcaccaggtactcctgccctgtgaagcaccccagagccaatcatggctggcagatctgaggcaatgcagaacaaaaatgcaagctggaaggtctgtgggactgtctaaggccctgttcccaatcctgctatcaattccttgttggttcattttgttgatttgtattagttaatcaccttttgaggaaattcagatgggacaagagatttcattggcacaaattagcctcgggttgtgcaaagtgctcagctaaattttctagctcaaaacctaccaattacacagacattatttgaacagctagtgcatgctctgttaggcacagtaataagtaaaagatcaggtgttttgcttcatattaattaaagggctcatgagaatttagtctagaagaaaagatttttttttttttcaatttttaagtttcaaaccatgacagctttcactctctccatttacacagtcctggttttgctctcagaagggaacaagtgaatgcatgaatgaacaaaggaatgaatgaaatcattcaagttt

SEQ ID NO: 3157707 - DNA, 352 bp, Cricetulus griseus
aaatactctcgatgaactgaatattgaattactgcgcaataaactatacaagtcttaccttgaggcattctataaattctgcaaggatcatggtgatgtcacagcagaaattatgtgccccattcttgagtttgaggctgacagacgtgctttaatcatcaccctgaactcatttggcactgaactgagcaaagaagacagggagaccctcttccccacctgcggcaagctctatcctgaggggctgcacttgttggctcaagctgaagactttgagcagatgaagagagtagcagataattatggagtatacaagcctttatttgaagctgtaggtggcagtggggggaag

SEQ ID NO: 3157708 - DNA, 1683 bp, Cricetulus griseus
gccagatcctgccaactgggagtataaatctctctaccgaggggatatagcaaggtacaagagaaagggaactcctgcctgggcattaatcctaagaaacagtgtatatcctgggaaggagctcctgcggctaagaagcattcacacaagcacttggagcgctatttcaccaagaagaatgtgggattattgcacactgagggcattgccgtgtgtgctagcactgagcccctctcctctgagccagtcacatttatcccagtgaaggactctgctgatgcggctactcctgttgcaacgtggctgaatcctctggggatttacgatcagtcaactacacagtggttacaaggacagggtccaccagagcaagaatcaaagcagtcagactcacagcaggacagggagagtgctgctcttaaagccagggtggcacactaaaaagaagcgattaaagtactcagggaaagaactgcaaaaaactaagccaagaatctcctcaaagagccagaaaaccgcaacaacttttgcctctggaagcagtatgcacacctggagtggttgcttggcaacatagaggatgccagaaaagtgtttgacacagcactcagcctggcaggcagcagtgagctgaaggaccgtgaactctgtgaactcagtctgctttatgccgagctggagatggaactgtcgcctgactcgagaggtacctccacaggccgagctgtccatgtgttaactcgactgactgagagcagtccctatggtccctacactgggcaggtcatggccactcagattctgaaggctcgaaaggcttatgaacatgcgctgcaggactgtctgggacagacctgtgcctctggcccagctactgcagagtccttggactgcctggggagcttggtcagatgcttcatgcttttccagtatttgactatagggatcgatgctgctgtgcacatatatggacaggtgttcgccaagctgaagggctctgttctcccagaaggccttgggcccaaggacagcaccagctcccagagtttgagcagtgttctcgaagctgtcaccctgatgcatacaagtctgctgcgattccacatgaacactagtgtgtaccctctggctcccctccgagagacgcttgcagaggcactaaagctatatccaggcaatcaggttctctggagggcatatgtacagattcagaataagtcccacagtgctaacaagaccaggaggttcttggacggagtcaccaggtctgccaaacacctggagcctcggctgtttgcaatcgaagctgagaagatgaggaaaaggctagtggaatctgtccagagggtaggtggtaaagagatccacgccaccattccggagacaggcctcacacatcggatcagggccttgtttgaaaatgcaattcggagcgacaagggcagccagtgtcccctgctgtggaggatgtatttgaagtttttggtttccttaggaaacaaggagagaagcaaaggtgtgttctacaaggcgctccagagctgtccttgggcaaaggtgctgtacatggatgccatggagtacttcccagacgagctgcaagagatcctggatgtgatgactgagaaggagcttcgtgtacgcctgcccctagaggagctggaactactgctggaggactag

SEQ ID NO: 3157709 - DNA, 573 bp, Cricetulus griseus
  modified_base (566)..(566): a, c, t, g, unknown or other
ggagtatgatgggaacaactcctatgaggatgctgggaattatatcaagagccagttccttgacctcaacatgaaaaaagatgtcaaagaaatctacagtcacatgacctgtgctacagacacacagaatgtcaaatttgtgtttgatgcagttacagacattatcatcaaaagaaaacctcaaggactgtgggctgttttaatgctcagttcctcagatgtacattctacaagcaggcttagaaactgagaggctgtttacagaaaactaatcaacaagaaccagcacatgacgaataagcccattttgttggagacacagaaggcatgcttacaactgttttcaagtagtgtggctagtacagtttaaagaatgtgtggccaagaatcgtaagacccaggctccagtactggttctgcttagcacagtagaaatttttctgtagcaaaattccctcgcctatataatgaaggtcacttccttacctacttcgcagggccattctcaagagcacaaatctaactgaagggaaagcacatggaagctgtattaaaaattaaaaaanaaaaaaa

SEQ ID NO: 3157710 - DNA, 485 bp, Cricetulus griseus
ctaatcttgttttgtgaattttcttgtaagaggacttttccataatctttgccagccaactcacaaaggctcaaaatgtttttctaaagatgtaatggaaaagctggttttagtattggcaaatctgtttggaagaagatatcttccggcaaagttccaagatgtgaacatcaagttttatcaatcaaaggtgtttcttgatgacctcccagaggacttcaatgaggcactgaatgagtacaacatgaaagtgaccatggactttgctgcttttctgctaattgtgtccagattagctgacatgaaacagaatatcaactccccttgtcaaaaattgaatttgcaggtaaagaatgtgaagattcgccacttgtgtctcatttgatgagctgcagggaggaagggtggcagtgtcaccattgtttgtctctctggaactttgacgaggatttgcttcacccaggagtttcagataatgtcgttct

SEQ ID NO: 3157711 - DNA, 377 bp, Cricetulus griseus
gtgtacgccgaagactgggtggcccatccctgtttcctgattggttttgccttgtggctagcaggcatggtgataaatatccattcagaccacatcctgaggaatctgagaaaacccggggaaacaggatacaagatccccaggggaggcttgtttgaatacgtctctgcagccaactacttcggggagattacggagtggtgtggactttgcactggccagtgggtccccccaggcccggagtgtttgccctgttcacattcagcgcattgtttaccagggtcgaagcagcatcaccagtggtaccatgagaagtttgaagattaccccaaatcaaagaaaaatgctaaattccatttgtagctttagctgctgtc

SEQ ID NO: 3157712 - DNA, 3480 bp, Cricetulus griseus
gcccagaaaactaatagaaaaaaggaaggactaagactgaaagaaataaaaacgataattggaagaagaagattactccaactaattacaaaaattaaaagaaggaaagatcttcatacttggagtaccaaaaagtaatgcgagaaatagagcacctgagtcgcttatatattgcttatcagtttttgctggctgaagataccaaggagcgttcagcgggggagctaaaggaaatgcaggataaaatattaaagcttcaagaagtgctgtcagagaatgaaaaaaaataaggctctcacttgtgagatagaagagcttgagaaaagagagataaggaaactggaggtgttctccgatctttagaggacgcttttgcagaggctcagcgagttaatactaagtctcaaagtgcatttgacctcaagaagaaaacctggccagtgaagaaaacaaacgcaaagaactagaaaaaaacataggttgaggaccactaaaacattaagcagacaaagaaaaaaaaagttaaaaagataacagctgcacagccttcaagaagcaagtcataaagatgctgaagctttggccgctgcacaacagcacttcaatgctgtttctgctggcttgtccagcaatgaagatggagcagaagcaactctggctgggcaaatgataacctgtaaaaatgatataagtaaagctcagaccgaggccaagcaggcacagatgaagctgaaacatgcccaacaagagctaaagagtaagcaagcagaagttaggaagatggatagtggctacaagaaggatcaagaagcttttgaaactgtgaaaaagctaaggaaaacttgaaaccgaaatgaagaaactaaattatgaagaaaacaaagaggagaaacttctggataagcacaggcagctctcacgtgacattggtaatctgaaaggaacttacgaagctctcttggccagatttcccaatcttcgggttgcatacaaggatccagagaagaactggaataggaattgtgtgaaaggacttgtagcttctctgataagtgtgaaagataattctgcagctacagctttggaattggtggctggtgaacgactctacaatgttgtagtagacacagaggtaactggtaagaagctactagaaaagggggaattgaagcgtcgatacacaatatgtattgctcctgaaactgctgaaggttgctcagaatcttgttggtcctaacaatgttcatgtagctctttccttggttgaatacaaaccagaacttcagaaagcaatggaatttgtctttggaacaacatttgtttgtaacaatatggataatgccaaaaaagtggcctttgataaaaggataatgactagaactgtaactcttgggggtgacgtatttgatcctcatgggacattgagtggaggtgccaggtcccaggcagcttccattttaaccaagtttcaagaactcaaagatgttcagaatgagctcaggatcaaggagaatgagctacatgctctagaagaggaactagcaggtcttaagaacattgctgaaaagtatcgccaactgaaacagcagtgggagatgaagacagaggagggagatttgctgcaaaccaaacttcagcaaagctcttatcataaacaacaagaagaattagatgcccttaaaaaaaccattgaggaaagtgaggagacattaaaaaacaccaaagaaatccaaaagaaggccgaagaaaagtatgaagcattggagaataaaatgaaaaatgcagaagctgaaagagagaaagaactgaaggatgcccagaaaaaactggattctgccaaaacaaaggcagatgcatctagcaagaaaatgaaagaaaagcaacaggaagttgaggctatcagtctggagttggaagagctcaaaagagagcatgtgtctaacaaacagcagcttgatgctgtgaatgaagccatcaaagcctatgaaggtcagattgaaatgatggcagcagaggtagctaaaaacaaggaatcagtaaataaagctcaagaagagctgaaaggtatccaaaatgtgaatgattatgactggattaatgctgagaaacacctctttggccaacctaatagtgcctatgattcaaaacaaatagccccaaagaagctggtcagagacttcagaagttacaagaagtaaaagagaaactagggagaaatgtcaacatgagagctatgaatgttctgacagaagctgaagagcggtacaatgatttgatgaagaagaaaagaattgtagaaaatgacaaatccaaaatccttgcaactatagaagatcttgatcagaagaaaaaccaggccctaaatattgcttggcaaaaggtaaacaaagactttggctccattttttctacccttttgcctggtgccaatgctatgcttgcaccaccagaagggcagacagttttagatggtctggagttcaaggttgccttaggaaatacatggaaagaaaacctaactgagcttagtggtggtcagaggtctctagtggctctgtcactaatattgtccatgctcctcttcaaacctgctccaatttatattttggatgaagtggatgcagccttggatctttctcatacccagaatattggacagatgctgcgtactcacttcacacattctcagttcattgtggtgtccctcaaagaaggtatgttcaacaatgcaaacgttctcttcaaaaccaagtttgtggatggtgtttctacagtagccagatttactcagagtcaaaatgggaagattccaaaggaaggaaagtctaagggaaaaggacccaaatgaaacacatgctagacttctcatcttgacctgctttttatacatgaactttcaagaatttgggatctaagttgttaatataataatattatcattattttcattatagttatgattacatgaatatcaatttttttctaacaaatctttttacatattaaggaacctgttgatatgcctagttggtaaactcagtattcaaaagctgaaatacaaagaaacagattatgttataggaataatacagctgacagtcatcttttaactagttttattgctaaggcagtattaatgaattttcttttgcttataaaatcatctgagtacagaatatttataaagcatgtcactggaccaacaaagggaacctagcaattatgcatttttggtgaatgtaggatgtagcagattaagtgaaaaatatattttataagaggctgataaacctaaataaatctgtcttttctaccaaaatagctcaaaggattaatgattgatgtgattcatagtgccatcttcttgtccaggtcaaagggttaaagtcctttagaaagcaggaggcagggttaatactcccctgagatcatctcctgcacttttcagtctgtctaaatacattaccacatcagcacctc

SEQ ID NO: 3157713 - DNA, 312 bp, Cricetulus griseus
caagactgtggccaatatgattaaggggaaaactcctgaggagattcgtaaaaccttcaatatcaaaaatagactttactgaagaggaagaggcccaggtacgcaaagagaaccagtggtgtgaagagaagtgaagtactgtgcctgacactgtaacactagaagggttgttctaaatgctagttgcactgctttgtttataattgttaatattagagaacagtagacaaacacagccttgtcctcactgcatgtgtagttccagtacagatctgacctatggctgagtttcttctatatgagtagaagttt

SEQ ID NO: 3157714 - DNA, 433 bp, Cricetulus griseus
  modified_base (415)..(415): a, c, t, g, unknown or other
gaaccacataaataagtgtgtcaccgatttactctccaaaagtgggaagacaccgagtagtgagcatgctgctgtctgggttcctgactctgaggccactgtgtgtatgcgctgtcagaaggcaaagttcacgccagttaatcggcggcaccactgccgaaaatgtggctttgttgtttgtggtccctgctctgaaaagagatttcttcttcccaaccagtcttctaagcctgtgcggatatgtgacttctgctatgacctgctttccactggggacatgtcttcgggtcagccgactagatcagactcttacagccagtcattgaagtctcttttaaatgacgtatctgatgatgatgatgacgatgatagcagtgactaaggacatgttttgaaatatttaattgtaactttntttactttactttacttt

SEQ ID NO: 3157715 - DNA, 317 bp, Cricetulus griseus
cacctcaaagatctggctcactgtctgaaatgaacaagagcttgttggagattttgaagatgtcactaagaacatgccaaggcaaaatcaacatagacaacctcaacctgagctttcgcaaagaagattggtcattatctggctgtctctctctgcccaaggtcagagctatatgtggcaagcatggattgtatctaaccttgagccaactggaaacatttcttaaccaccaagatttgggttaccaaggtgaaataaagtggcagaattttgttaagtggctgaacagggcttcttctgctttgttgtgtgatatg

SEQ ID NO: 3157716 - DNA, 1097 bp, Cricetulus griseus
agatcgacagagttaccttgttatgtctttgattttatgtgttatcttgggactgatgctctgtaacgttgtcgaaacacttctcaatttgatggagattacatttcaaagcttcctaaaagtaatcaatatccaagccctaaaaggtgtttctcttcctatgatgacatgaatttgaaaagaagaacatcattcccactccctttttaaaaaggagataggattgtgtcaatcttggctgatgagctacagttttacaaggctgttctcttcctataaggatgatgatagacattttataaagttttttttttctacagataattactgggacaaaagtaatttggaagcccagttccttgggtaggataggaatgaaagcctaaccctcttccttcagcttggttcctatttcttgcaccttcccatatttatgtgccttttgtctatttataatgccactggaagaggagggaggacttttctgtcatttgttttgtaactttataggtttttgaagctgcaaacactacaaggctttaaggtggttggtgcctgaagctcagcagtgtgggtcatttgcataaagatcctaaagacttgccaacttagagttgctcagtaatctcactggaaataaacactgcggaaatgttcgaaagtccttttacataaaaggtgatgatttcatccttgctttcatttaatttagttggattgggctttttttttttcctgagtttttaactcagtgaaatggtaagatattttcttggaaatgacaggtatctgaaaacaaatttattataaattcacctttaaacacacttaactatttgtgaagatttttttatgttgcattctaaatgttcacagtaaacactaatcctccaaatgttcacatcaccaagaccaggtttcccatggtccagtcactgcctttgtacatagtcacatgagcagccagtgagtgtgtcaggccttactcagttaaattggttaagtctaaaaggattatgattccttgatgtttgcttttgttggctacagtgtgcagatatatatgtatgtgttgtcgacatctgtcttcgtttgtt

SEQ ID NO: 3157717 - DNA, 366 bp, Cricetulus griseus
cagatggtgatgatccatatcactccagtagatgaccagcttccaaaagaagctcctggcatttcccggcatttggttgtcaaggaaacggaggtggcctacatcactaaaagcatttacatttcctggatacggaatcacatgatggggagctcatctatacaataacacgccctccgtgtttctccttcagccacagtctctgcaaatcaacacatatatccatctcaatttgctttccagcatgccgtgaatcatatgaaagtggcctacatgccacccatgcaagacataggtcccactccccgacatgtgcagttcaccgtgtctgtcaggaaccagcatggaggcaccttacacggaatc

SEQ ID NO: 3157718 - DNA, 362 bp, Cricetulus griseus
tggtctgagaagtcaagaaaatcagtgagtgccatgatgacccagaagaaacttgagccgtgatgaacagcgtgctaaagacctgcatatcccttttctgtagatgaaattgtccaaatgcctgttgactctttcaacagcatgttaagcagacactacctgacagatttacaagtttctctcatccgggacatcagacgaagaggaaaaaacaaagttgctgctcagaactgtcgtaaacgtaaactaaacatcattctaaggctagaagatgatatctgtaacttgcaaaccaagaaagaggctcttaagagtgagcaagctcaatgtcacaaagctattggcatgatgaaacagcagct

SEQ ID NO: 3157719 - DNA, 681 bp, Cricetulus griseus
ccccaggatctgttgacattcggggagtgtggctgtggacttctcccaggaggaatgggaatgtctggagtctgcttcaaaggcctggtacattgacgtgatgttggagaattaccacaatctagtttttgttgagaaatatcatatgtatgtgaaaaatatgaaagtcttggatcaagaatcaaagcacattgtctatcaccctgtgaatatccaagagaagtcttatgaaaagactgcattctggagagaatatttacaaatatagtgaagatgacaaatactcttatcacaaaggaccatcttggacctcacccgagacttcacacaggagagaaaccttataaatgtaatgaatgtgacagatcctttacccagagaagcagtcttagaactcatttgagaattcatatgggagagaaaccttacaaatgtagtgaatgtgagaaatgctttacccagagaggccatcttacaaatcaccagagagttcacacaggagagaaaccttacaaatgtagtgagtgtgacaagtccttcaccaagaaagatcatctgagaattcactacagaatccatacaggagaaaaaccatataaatgtactgactgtgacaaatcgtttactcagaaaagcagtctcataactcatcagagacttcatatgggagagaaaccttac

SEQ ID NO: 3157720 - DNA, 2528 bp, Cricetulus griseus
  modified_base (461)..(461): a, c, t, g, unknown or other
atcacaggtgtatcttggtctgtctcctcgagatcttgtccttcattttcgacacaaggtcttgatcctgtttaagctaattcttcttgaaaaaaaggtcttttttacatttctccagtgaatagattggtgggtgcactaatgaccgtgttatccctttttccaggaatgattgaacatggcctcagtgactgttctcagtatagaccccgaaagagtatgtctgaagatattggacttcaacaaagtaatccccctgcaagaaatagattttatttctgagtccacttctcaggaaaccatggaggagacactgtcctccagttggaaaagcctgtttccaggtagaagataacaacaacaaagaacaagaacccagtgatactggccgctatttgaaactcccacctcggccatctccagagtcttcagaaagtgactgggaaactttggatcctagngttttagaggactctagcttgaaagaaagggaacagatggagtcagaccagacaaacatatttcaaaaagactctgtgccctccgacagtcctccaattactgtacaacctcaagctaacaccaggcaggtggtcctgataccaggactcatttctggtttggaagaggaccaatatggcatgcctctggccatctttacaaaggggatatctgtgtttgccttacatggcattgcgtgcaagcatggctacctgagttccatccctggaacccacataaattagatatcattcatgtagctacagcatgacaatggacctgtggtagttggcattgctaggagccctgactcgttagtcaataagataataattcattctttagtttgcaccactgcttttgtatcacattccccatttgagtgtgtgtatgggtccctctgcataggatcttacagtctgactacacaagtctctaaattgccatcctcctgcctctgtctcccaaataactgggattataggagtttaccactctgctaagcttaagtgtgtattttaattaaatcttctcttaatgtaaattaaaacttaactcttaaaatggtcactttactggctttcagcatataataacttatcttggaatataaaacatcctagaatggtacagagaccatatgcctgcttccttcaggttcagggaagcattgacttttcaagggccatatgccattttcttgttggtgctttccaggttttgaactaagcagttactgttctttagaatagctttccttagaaactcaaggagaaagcaaatccggaaaacaaaaatgaagtgttgcacagctggggagcagggcactcaaagtctgaatgagagtattttgtcatcagtgtttaacctatttcaggtatgagttctttagaggagttagaactgtaatcagctatttgcgtttctaaatgaagctgtaacattcttttcctgataggcagggtttattgaagctgtatattctctggagaaaattttgtgggagttaacagtcagtggcccctttccctcccatgttgataggtttggaagtcctgcaggccatcatcctcatctatacccacaggcagacatctgctgcagcctccacagaaggcagtctgctagggcagaagctgctgactggtctgtggtgctaagtgcaccagcctgttagtgtattggggcattgcttgggatttctgaagtggcaagattcgcacactctggttccttattgaaaatggcccagcattcctggctttccatgccatctctcgggagcctttaactgtgatggatactccccaaagcactcgaagatagccatcataacatgctgtgccgctgggtctttctcattccaagtcttctgtcttcgttgctttggaattgctttttcatatttcccaacattccacaaacttttcagaaacaaagaaaaggaatgtgcatcttattttttcatataaaaaacttcataaaaatgacttcctacctatatgttatgaagaagaaactggctcccttatgtgttagaacactccaaaattaaaaggttatgcatgtctaaggggttggatatattttgtaaaactctgaatacatttgtatttctgtgctgttcataaatttacctttttacttatactaattaaagatatagaaagctatatatttaaatcatgtaaatggaacacaatttaagggggtttcaaatcttatttctcatcagcttctcatgcacatactatgctgctcaagtttcttttgtgtgcaatataaacatttgaacatttcaagtcaggtactgagccagaaaaggtcattgaagttttcagaaaactgcttagaaaatattttattttcttgaaatactgttcttttatagctagaaaaacaagattgagaattgcatgtttcagtccacttgataatcatttctaaatttaggaagcatttgattaatgaattggtgaaggcacttagtggttggaaagtagtttctaaggaagtttagctatagc

SEQ ID NO: 3157721 - DNA, 413 bp, Cricetulus griseus
cctgtgtgcctttgggctatgggctcccagtcctggtggttgtgatctctgccagtatacagccacaaggctacgggacacataactctctgctggctgaatacaaagactgggttcatctggagcttcctggggccagtctgtgggatcatcacgatcaactccatccttctcacctggacactgtgggtgctgaagcagaagctttgcagtgttagctcagatgtctcgaaactcaaggacaccaggttgctgaccttcaaggccattgcccagatcttcatcttgggttgctcctgggtgctgggcattttccagattggtcctatggcgagcattatggcgtacctgttcaccattatcaacagcctgcagggtgccttcaatactttactcattcactgtctgctcaa

SEQ ID NO: 3157722 - DNA, 251 bp, Cricetulus griseus
gggcatgagagcagcgactggaacagctactacgccgacacgcaggaggcctactcctctgtccctgtcagcaacatgaactccggcctgggttccatgaactccatgaacagctacatgaccatgaacaccatgaccacgagcggcaatatgacaccggcttccttcaacatgtcctacgccaacccggccctacgagccggccgtcgagtccgggtgctgtggccggcatgcccggaggctctgccggc

SEQ ID NO: 3157723 - DNA, 346 bp, Cricetulus griseus
gttttgtattaaatgctcaaggcagaaaaatccacagcatctgctcagagcactcgaagagctaaatatcacagggccctgctctgtctcctcttcctcttcttcttcttttatgttggagccgaggtgacatttggctcttacatattctccttcgccaccacccatgttggcatggaagaaagtgaagcagccgtcttgaactccatcttctgggggacctttgctgcctgcaggggcctggccatcttctttgcaacagtcctacagcctggaaccatgattgtgttgagcaacatcggcagccttgtctcatctttctttctggtgctttttgacaagagcc

SEQ ID NO: 3157724 - DNA, 1014 bp, Cricetulus griseus
cctggtgctaggaattgcctgcagtgtcatcctcatgtacactttctgcactgactgttggctcatagctgtgctctacttcacctggctggcgtttgactggaacacgcccaagaaaggtggcaggagatcacagtgggtgcgaaactgggctgtgtggcgctattttcgagactactttcccatccagctggtgaagacacacaacctgctgaccacaaggaactatatctttggataccatccccatggcatcatgggcctgggtgccttctgtaacttcagcacagaggctaccgaagttagcaagaagttccctggcataaggccctatttggctacattggctggtaacttccggatgcctgtgcttcgggagtacttgatgtctggaggcatctgccctgtcaaccgagacaccatagactacttgctttcaaagaatgggagtggcaatgctatacatcatcgtggtgggaggtgcggctgagtccctgagttccatgcctggcaagaatgcagtaaccctgcgaaaccgcaaaggctttgtaaaactggccctgcgccatggagctgatctggttcccacctattcctttggagagaatgaggtatacaagcaggtgatctttgaggaaggctcctggggccgatgggtccagaagaagttctagaagtatattggtttcgccccatgcatcttccatggccgaggcctcttctcctctgacacctgggggctggtgccctactccaagcctatcaccactgttgtgggtgagcccatcaccatccccaagctggaacacccaacccagaaggacattgacctgtaccgtgccatgtacatggaggccctggtgaagctctttgacaatcacaagaccaaattcggccttccagacgacagaggtgctggaggtgaactgacccagcccacgagggccatctctatgagattgttgtgccatgtcacacttttgtatattcctagactaataatggaacaaagaa

SEQ ID NO: 3157725 - DNA, 989 bp, Cricetulus griseus
ggcggcgataagatggctgcccacgggggctccgcggcgtcgtcggcgctgaaggggttaattcagcagttcaccgctatcaccggcgcaagtgaaagtgtaggaaaacatatgcttgaagcttgtaacaacaacctggagatggcggtcactatgtttttggatggtggaggaattgctgaggagcccagtaccagttcagcaagtgtttctgctgtcagaccacacacagaagaagaagttcgtgcccctattcctcagaagcaagaaatattggtggagccagaacctttgtttggtgcccctaaaagacgaaggcctgcacgttcaatatttgatggtttccgagattttcaaactgaaactattaggcatttaggtaaagtgctctagcagggcagtagtgatttggtgggaaaatcaaaactttaaactggttataaaaccatttctatagaatgacctttcttgtcaagtggagattttgattgattcttgtacttgaggaacatttattgtaattgttcaaagacctttgggttcctgtgtacttgcagattgctctcttggcaactaggggattaaaaatataagctaaagagatgtggtatgttactagtatgtgatgatagaatatggttgttaatggttggattttgagggacctccctaaagaatgggttatgtatctcctcaaggaaatcatgggaaactgttatttttcagtgagtcctttcgaattaatgttcttacatttttttctaagtctgtgtaagtgcttatgtataagtatatgattgtatgaatatttataaatatatttatataattacaattttcatttttttttttttttgtttgtttttgtttttgttttttttgtttttttgtttttgcagtcaggctgacctcagactcatagagatcttttttttttcctttgagatagggtttcgttaagtctatgtagaaaataaatggaaagaaaa

SEQ ID NO: 3157726 - DNA, 995 bp, Cricetulus griseus
gatgaggcagatgagagagctggagggatcgctttgccagcgaggccagtggctatcaggataacatcgcacgcctggaggaggagatccggcacctgaaggatgagatggcccgccacctgcgggagtaccaagacctgctcaacgtgaagatggccttagatgtggagatcgccacctaccggaagctgctggagggagaggagagccggatcaaccttcctatccagaccttctctgctctcaacttccgagaaaccagccctgaacaaaggggttctgaggtccacaccaaaaagacggtgatgatcaagaccatcgagacccgggatggagaggtcgtcagcgaggccacacagcagcaacacgaggtgctctaagccagacactgtcctggcccccagcctcactgcctcctgaagccagcctcttccactctcggatgtcacacccagccactctccttcactcacagcctctgacccttcctcaccgatcaccccttcgtggtcttcatgctgcccaggagacaccccagtccacctctgcagactttaccatgagtcctggctgttggcagtcgtacaaacacctaggctcttcagataggacctagttcaagtcatcaaccctttccctcccacctttgtaacctcaggctctagccccacacctgggtcgagagatggagtgaagcctctcagctgaggtggggaggaggggctaaaaaatgtccgtatgccccctcctctttcccacccccagcccaggatgggcttagaaaagctggggctgtaagagggaacccgaaggtgctggatgtgggagcaggagctgcagaaggagagtggatgggtgagcagctggagggaaagaagagagaggcagagagtgggctcaggctggtgggagggtaccgcctctcacgcctgctcctcccgctgcaggggccctggacagaaacaataaagagccaagcaacaaaaaaaaaaaaa

SEQ ID NO: 3157727 - DNA, 389 bp, Cricetulus griseus
gaaaaaaggcgaggctttgatatctcgacaggctcctggaatgtgctttgcttttcaccccaaggacaccaatgtctatttggttggcacagaagaaggccttattcacaagtgttcctgttcatacaacgagcaatacctagatacctatagaggacacaagggtccagtgtataaagtcacatggaatccgttttgtcaagatgtcttcttgagctgctctgcagattggggtgtcatggtctggcgtcaggagactttcaaaccggttttgagtttttacccaactacttatgttgtttatgatgttgcctggtctccaaaatctgcctatattttgctgctgcaaatgagagcagagtagagatttgggaccttcagataagcac

SEQ ID NO: 3157728 - DNA, 3014 bp, Cricetulus griseus
aggagaaatagcacaggtgaccgagagaaggctcttcaggtcatgctccaagttctgcagagctgtgaccacccagctcctgacatgttctgcctgtgtgggaggatctacaaggacatcttcctggattcaggctgtgaagaggatgcaagcagagacagtgccattgagtggtatcgcaaagggtttgaactccagtcatctctttattcgggaattaaccttgctagttttgcttgatagttgctggacaacagtttgaaacttcaatggaactaaggaaaataggtgtccggctgaacagtttattgggaagaaaagggagcctggagaaaatgaacaattactgggatgtaggtcagttcttcaccgtcagtatgttggcaagtgatgttgggaaagctgtccaggcagcagagaggttattcaaactgaaacccccagtctggtacctgcggtcactagttcagaacttgctgttaattcaacgcaatgaagttactaatggactcagatttccagttctggtaatagagccaaccaaagtctatcagccttcttatgtttctatcaacaatgaagggaaagaactgtttctttatggcatgtctcccccacagaaatgaaacaaatccatgagtggaattttacaccctcttctattaagggaataagcctatccaagtttgatgaacggtgctgttttctttatgtccatgataattctgatgactttcaaatctacttttccactgaagaccagtgtaatagagtatgagtatgaccatgatgtgaatggggaaagaattgtcttggggaaaggatcttatgggattgtgtatgctggccgagatctcagtaatcaagtacgaatagccatcaaggaaatcccagagagagatatcagatactctcagcctctgcatgaagaaatagccctacacaaatatctcaagcatcgcaacattgtccagtacctgggctctgtttcggagaatggctacattaagatattttatggaacaggtgcctggaggaagcctttctagatcctggaaggcctgaagtatctccatgaaaaccagatcgttcacagggacataaagggtgataatgttctggtgaacacctatagtggagtggtaaaaatctctgattttggaacatctaaacgccttgcaggaattaacccatgcactgagacctttgcagggactctgcagtacatggcacctgagattattgatcaaggacctcgagggtacggtgctccagctgatatctggtccttgggctgcaccatcattgagatggcaaccagcaggcctccattccatgagcttggtgagccacaagcagccatgttcaaggtagggatgtttaagattcatcctgaaattccagaaagcctttcaactgaagccagagccttcatcttatcttgttttgagcctgaccctcacaaacgggccactgctgctaacctactccaagaagggtttttaaggcaggtgaacaagggcaagaagaatcgaattgctttcaagccttcagagagtgtccggagtgccactggtaccctggccctgccctcagcaggtgagcttatgtgcagcagcagcagcgagcatggctctgtctccccagactcagatgcccagcatgatgcattctttgagaagacccaggtgcccaagcatcagctcagccaccttctcagtgttccagatgaaagcgcggccctagaagaccgaagcacagccttatccccagaggagagggatcctggtctttttctgctccgcaaagacagtgagcgcagagccatcctgtacagaatcctttgggaggaacagaaccaagtggcttccaacttgcaggagtgtgtggtccagagttcagaagagttgctcctgtcggttggccacatcaaacagataattggaatcctgagggacttcatccgctccccagagcacagggtgatggcggctacaatatcaaaactaaaggtggacctggactttgacagctcttctatcaaccagattcacctgatcctgtttggattccaggatgctgtcaacagaattttgagaaaccacttaattaggcctcactggatgtttgcaatggacaacatcattcgcagagctgtgcaggctgcagttgccattctcatcccagagctccaagcccactttgaacctgcctctgagactgaaggggtagacaaggacacagaagtggaaggggactatcccttagtagacctgcttggccaagtacacatgacacccagaggtaccagacctggctcagtgggtatccaggagggccagcccaaccagcaggacccaactctccaattgagcaagctcaggcaagagaacaacagacttagggaacacttagttcaaaaagagagagagtaccagaatcttctacggctaactctagaacagaaaactcaagaattacatcatcttcagttacaatacaaatccagtggtggtacagagaatccagtacctcctgatgaagtgggaacagacagagagcttatagactggttgcaactacaaggagcggatgcaaatacaatagaaaagattgttgaagaggattatacactttctgatattctcaatgatattactaaggaagacctaaggtgcctcagactacgcggtggtgtcctctgtagactctggcatgcagtctcccagcacagaagacaaacgcaggagtcctcacactgagccaagctggagagaatacgcaaataccctacctgcttattgccaaagcttctgttcatgtacacacaaatcctgcatttacacagaaggacccctgttcacttaattcaagcatgcataatttaggtcatccttgtgtataaacaggattgtatgtaacatcaaccatgatctagtgtgccttgcaatgggaatacaagttcacgtttgttaaatgtctaaatggaagaaattaaattattttacctttga

SEQ ID NO: 3157729 - DNA, 356 bp, Cricetulus griseus
ggctcgtacacattcacgctctttaattactatgaaatcaactggactactgggacagcaagtggtggtgaccccctgacaggccttggaggtgtgatggcacaggcgggatttaatggtggaaacctcacgaatttcttcagccttccagggtcaagaactcctgagattgtaaaatatccaagagaccacgaatgtcaatgttccaggccgctgggcatttaaaagttgatggaaaggaaattgacccggccaatggctgcacctccaggggacagttccttcggcgagggaggtgttttgggatgacctgaactgcaccatcaagtgccgctgtctggattttaacaaatgag

SEQ ID NO: 3157730 - DNA, 485 bp, Cricetulus griseus
tattcgtcgggccgcgtcttctggacgctggcgaggcccgaggccactcagagccagcggcggcagaagaccgtgcgcctcctgctgatcaacctcgtcatcttcctgctctgcttcgtgccctacaacgccacgctggccgtgtacgggttgctgcgagccgacctggtggagtccagccctgaggcccgcgaccgggtgcgcggtgtgctgatggtgatggtgctgctggccggcgccaactgcgtgctcgacccgctggtgtactacttcagcgccgagggtttccgaaacacccttcgcgacctgggcaccgcactccataccaggcccttggctaccaatggggctagaggggtgctcaccgaaccaccctcggaaaccacccaaaacaccggggcaggatgccaccagtcagggggctactccagcccgccaacctggcaacacccgtcacccagtgcccccaggattcagccctctga

SEQ ID NO: 3157731 - DNA, 367 bp, Cricetulus griseus
tctgtagagaagcaggaagatggttccgggcagccactgcagaagtggaattcccctggcccctctgtgctgtcgtcggaccgggaacttcatccccatcaatgaagaaggctgccgagtgggccacctggactacctgtttaccaagggctgcttcgagcacatcggtcatgccatcgacagctatacatggggcatatcgtggtttggcttcgccatcttgatgtggacactgcctgtgatgctgatagccatgtatttctacaccactctctgaagacgaagggaagtcatgtgtgcacctctgccagaagctcctgcctctcagctgcaccccgggactcctcaacccccaccccaccccacc

SEQ ID NO: 3157732 - DNA, 283 bp, Cricetulus griseus
gactcggagaaggcctcggcctccctgccggggggctcccccgaggacggctcgctgaagaagaagcagcggcgacagcgcacgcacttcaccagccagcagctgcaggagctggaggccaccttccagaggaaccgctaccccgacatgagcacgcgcgaagagatcgccgtgtggaccaacctcaccgaggcccgcgtgcgggtgtggttcaagaccgccgcgccaagtggcggaagcgggagcgcagccagcaggcggagctgtgtaagggcggcttcgc

SEQ ID NO: 3157733 - DNA, 404 bp, Cricetulus griseus
tttcacatctggccgaaattttgggatggctatgggaactcaggcaaccatccagatcagcccaatgtgacttgcaaaatgattcctacagagacaagatgaactaagattgaacactactgtaacccaatggaatttctgacacctccctacggaagagaaacctttctaagaaagcgatggctcagggagacaagcaatatgttgtcaggactgtgaaaatacttgtgaaacaaccaagatcatttcattaagtgaggacaaaaaaaaaatatattatttattgtccatttctctaggtagagaatcaggccatctagaggatttggaaattaagatttagttggctagatttcaatatcactcagattatttcctcttaacacaactactctgtgcaaata

SEQ ID NO: 3157734 - DNA, 422 bp, Cricetulus griseus
tcattggctggttgtgggacacaaatgtttttcttttctgtgtttggctgcactgactgttttctcttggcagtcatggcctatgacagatatgttgccatcagccatccactgcactatagcctcatcatgacccagaatctctgtgttaagatggtgctgggttccttgggcctggcactccttttctccttgcagcttactgccttcaccttcacgttgccattctgtagacatcacctggaaatcaatcacttcctttgtgatgtggctcccatcatgcgcctggcctgtgctgacatccatctgagccaggcagtcctctatgtagtgagcatcctggtgctgacagtcccattcctactgatttgcatctcctatgttttcattgcttgcaccatcctgcgcatgcagtctgcaga

SEQ ID NO: 3157735 - DNA, 3324 bp, Cricetulus griseus
cggagccagagcagcaatggcggccggtggcggcggaggctgcgaccccttggccccggcgggggtcccctgcgccttctcgccggacggccaggcctacttcgccttagcctctagtgacggtcacttgcgggtgtgggagacagccaacaaccggctgcaccaggagtacgtgccttccgcgcacctcagcggtacctgcacctgcctggcctgggcgccagcgcggctgcaggccaaggaaagtcatcaaaggaaaaaaaggaaatcagaagttataggaacgagtgaccaggttgatttgttggctcttggcacagcagttggtagcattttattgtatagcacagtaaaaggagaattacacagtaaattaataagtggtgggcatgaaaacagagtcaattgcatacagtggcatcaagacaatgactgcatatatagttgttcagatgataagtatattgtggagtggagtatacagacatgcaaagtaaagtgcaaatggaaaggagacaatagcagtgtcagttccctgtgtatcagcccagatggaaagatgttactttcagctggtcgaacaatcaaactatgggttttggagaccaaagaagtctacagacacttcacaggccactcgacacctgtttcatcacttaggttcactaccatcagacctaatgagagccagcctttcgatgggattacaggtctctatttcttatctggagcagtgcatgaccggttacttaatgtctggcaggtccggtcagaaaacaaagagaagagtgcagtgatgtcttttacagtcacagatgaacctgtctatattgatttgactttgtcagagaacaaagaagagcctgtcaagttagctgttgtttccagagatggtcaagtccatctttttgaacacatactgaatggacactgcaaaaacctttgacttcaaattgcacaatacagatagcaacacctggaaaaggcaaaaagtcaacaccaaaacccatccctattctagcagctgggttttgcttagacaagacatccttattgcttgtgtatggcaactggtttcagcctaccattgagcgagtggctttgaactccaaagatactcatatatgtttggaaagagacatttccaattgctgggctccaacagtagaaacagctataaccaaggtgagaacaccagtgatgagttcagaagctaaagttctggtgcctggggttcctggacatcacgcaccgatcaagccggctccactctcacagcctaaggaggtggagaacaagaggaaattgggcagtaatgaggccagcatcgaggaacgccttggagccatgggtctagatagaaaaggaaggaaggacgaccttctgcagacaaccagctttccagtccttctcacacagggcttagaaagcaatgattttgaaatgttaaacaaagtgcttcaaactaggaatataaacctaataaagaagaccgtgctaaggatgcccttgcatgctgttatcccattgttgcaagagcttacaaagagattgcaaggacaccccaatagtgctgttttaatggttcagtggctgaagtgtgtgctgacgattcatgcatcatacctatccacgttgcctgacctggtgcaccagctggggaccctctaccagctcatggaaagcagagtcaaaactttccagaaactctcacacctgcatggaaagctgattcttctcatcacacaagttacagcatcagaaaaaacgaaaaaaatgccttcccctggacagaaggcaaagttggtgtatgaagaagagtcttctgaagaggagtctgatgatgaaattgcagaaaaggattccgatgataattgggatgaagacgaagaagagaaagacagtgaaaaggatgagggagttgatgaagacaatgaagaagatgaggacactgacgataaagaagagaatggggaggacagagatgggtcaagtgaaaaagaattaaatggagattctgatttagatcctgaaaatgaaagtgaagaagagtgaagacaagcagccagtcacactgtgaaccctggctcatcttgcccagtgctgccgcatcctcccagggaggctcgccctgtgccaggagacaagaggccgtcatatgcttccaagttcacagaggccacaccaccttcctgtcctgagtgccccagactttaactgtgtaaataagagtgtttcattcaaatgttaataaactttacacagtaaatagatacactttgccatgtactgacctgagtgtccaatatatggtatatttttataatataatactctagtatgattggttctatcataaactgacttgggtgaagacagaaggagtcggctctcatttctcaggttggtatctttcatctagtccacatgaaggaataacaaaattcaaatgaaaatggttgtgatttacagaaataaaatcctagtgttcctagtttgtttactaactggtaatctgatttgggtcagattggatatttggagtgcttccccaaaataacacttattttttaaagtgtcatgagatatttttttaaacaaaacaaaataatggtaattaaagaagcaaaggtttagccatattaagggtgttcttgtctgtagattgtaaagaattatccgtgtatagatgagacatgctcttatctgcgactttttaaaacgtcacccagctgcttttgaagaggttgccatttttatttaaattactaatggatcagagaacaattgtttattttttctctttggttttagatatgataacctttgctggaatttttttccaaagaaactatttttataattcagtaatttaacgtcttctttccttttcattacccactcttggcagggctagggtatgtgtttatctttaaaaatggtaaatcttactcaagatttttttatgtatgtataaaaaagtattttggtgtgctacacagctttttcaaattaccagtaatttgtcttgtttttaaaagagtgagctaatactgacttagtgctcactaaggggcagatggagagctcacttctgcagaagggctgagcagatgcggtgactttcccacctgtgaatgtgtaagaaccctgttactgggaggactctatcaggcagagcaggctgcacagctggagcaggaagagcatcttgggcaagctgctggtgcgatgtacagttgttatttgtctataaatggagttgtttatggcaatttaataccattctctttgtaaagtgaataaatactcatctttatccag

SEQ ID NO: 3157736 - DNA, 275 bp, Cricetulus griseus
  modified_base (266)..(266): a, c, t, g, unknown or other
agatgttcatttagcaatacatttctgaagcatagacttcagccaaatgaaccttactgcaacttctaagttcaacatgtacgaagctttgccgggttccactcctgagaatgaagacagccttatgacagtgaaggtggaagatcccacctggaagcagccaggcaattcacaggagagcagggtccacactcaggaactttaccacttaagatttctgcagttctgttaccaggagtaaataaataatatcattacttctaaanaaaaaaaaa

SEQ ID NO: 3157737 - DNA, 361 bp, Cricetulus griseus
agacacaaacgcaaagaaaggaagtcatcacgaggcagaagtcactcaagatctaggtctcgtgaaaggcgccatcgaagtagaagcagggaacggaagaagtctcgttccaggagtcgggatcgaaaaaagtctcgatccagaagcagagacaggaagaagtcaagatctagaagccgcgatagaaaacgaaggattagaacacgttcccgatcaagatccagacacaggcatagaactagaagcaggagagaattgaaaaccaagaagatttagcagaagcctaagccggacaccaagtccacctcccttcagaggaagaagcacagcaatggacgcccaggaagcttttagctaggag

SEQ ID NO: 3157738 - DNA, 357 bp, Cricetulus griseus
tggtggcccagagcgaggaacaagccattaggaccggaccgttgtaaatacagtcgcttgccccgctggtccccatcaggggccggctcggttttccactgtaaatactgcctcgcccctcctttgaactccagggcatcagacctcaaagggtaaactagacccaccagtgaaagaaaccggagaggggagaacgctttcacacacaccccactccggcctgagtaggtcccccgggacccggattgtgaataaaatgtagcatcttcgctggctgcagccgcgcgctccccgtcccatccacttctgaaactcttgttcctaacgacaacgtggctatgtgcaatggatataaac

SEQ ID NO: 3157739 - DNA, 164 bp, Cricetulus griseus
tttttttttctttttggtttttcgagacagggtttctctgtagctttggaggctgccctggaactcactctggagaccaggctggcctcaaacccacacagagaatcagcctgcctctgcctcccaagtgctgggatcaaagacatgcgccaccaacacccagc

SEQ ID NO: 3157740 - DNA, 1178 bp, Cricetulus griseus
aaggtgctcctgctggcatgctcaaacccgaagccaagaggggaatcaatgacaagtgaccacagcgttctctggagcccagggcttgttagataattgaatcctcaggccgcacactagcccagcatcatggagagaaacagttccttcttcaactctatctgggaaaccatccggaccagacatgaaaggggcatcttcaacaccgtctgcctggctgtcctcctggggctgcccctagtggtggttcttacactcctcttcatctgctgccattgctgctgcagcaggccacccaagagtggtcaacagccagaccaaaacaagaagaagaagaaaaagaagaagaaaaaaaaggatgaagacctctggatctctgctcaacccaagctcctccagatggagaagaggccatcactgcctctctagtgagcaaggaagcagagtgtcctcccctttgagtccagcctatgtatgtatatttagacaataggtacatgggacagcatattctgtttatcatgtggccatttaatatgtactttgctcaaatatgcacacttacaaaaatgtcttatgggaagacgtgtccagacttagtcacatatgcacaattaaatagccatgcaaggccctatgcactgtctgtattccattcaggttggagaggggtgctttcctatccttacacctacatagtattttactggaaatacatggggaacctggtacagtcccccatcccagtgtatattgatacagacatagatagtggttcctgtatgcttctgaccttttacctgtgcctaaaagtttaaagtatgattccaaatccattcaaagctcttggtttgcaactctcaacaaggtcctcattaccactggcaggcatttaatgtggttcaagacctctcggggacattatcccataactactcagcaaggtgcccttttctaagcagtgatgaacagctcttggcagtgactactagaaatctatggaaacccatgtattctcttcaatgggctgcagttatgtgcccgtgcaatgtatatacatatagaacaggtaaggagagatgccccatataagctaattatgttctgtgtggataaaggctttcagaaaggaaaaagacataaggtcatcacaagtccagtctcaaaagcagaacaca

SEQ ID NO: 3157741 - DNA, 191 bp, Cricetulus griseus
aggaggagaaagaccagcctgccgagatggagtaccttaactctcgctgtgtccttttctacttatttccagggagacattgggtcagtagtggatgaacacttctcaagagctttgggccaagccagcaccttgcatccagaatctgccatttcaaaaagcaagatggggcattcaggtaatgggtctca

SEQ ID NO: 3157742 - DNA, 948 bp, Cricetulus griseus
  modified_base (617)..(617): a, c, t, g, unknown or other
tctgggactggcggcgagagcagcggccggctggagttcgggccgaggccagcgcccctgagaactccgggcccttaaacagagggtgaacccggagaggagacggacgtccgaccgctgagaagctgctgctggtgtcacaatgcctcccactcaagcagaaagtgttataaagaatattatacgtgaaataggacaagaatgtgcagcgcatggagagattgcttctgaaacagtggttgcttttatggtgaaagctgttgtcctggatccaagcaaatggctttaatatggataggaccctcatcaaaaaatgacgtgcagaagcttgttaagctttgtgtaggctcgactattggacagtaaaaaatccaatctctggacaccattaagatgcaggttctacggactttcttgaggaacatcatcgggtcttggagtccagattaagtgcctttagcagagaaattacagacagcagagcgtgcactagagaagaactggaaaatctgtacagaaagatcgtcagctatgtgttactgcggtctgggcttggatcccccacggacatcacgatcgtcagagaggcaacagctgctctgcagagtgtttttccncaggctgttaattcagtaccgtgggttttgtggctacacgtttgcttcaacagatggtcttcttctcccaggaaatccagccattggaattttgaaacataaagaaaaatattacacttttaacaccagagatgcggcatgttcattcgcagaaaaccctgaacattatattaacttgattaaagaaaaagccaagaagaatgcagaactaatccagctactagaacttcatcaacagtttgaaactctcataccatatgctcaggtaaatgtggtgaacagttgcagttacctgggtttgtaatttctgaccccattaaagtggtgtctc

SEQ ID NO: 3157743 - DNA, 636 bp, Cricetulus griseus
ggaccagataggatttgttggtgacctgcagatcagtactggagccctctgctttcatcttggtgtgtttggtttggcaatggagtctttctctgctgacacaaattcaactgacccacaacccctgcctctgtttaaacctcaagacatcctctccatgatccttctctgcctcacttgtctattgggactgccaggcaacgggttggtgctgtgggtggctggcctaaagatgaagcggactgtgaacacagtttggttctccatctcaccctggctgatttcctctgctgcctttccttgcccttctccctggcccacctgattctcctgttggagtcctatttactgattgctgacccaggaactcctttgagggaagctgcgttatcctgggattacgtgtccattgctttagctatctgccaacagttgcttcaaccccttcctttccttttggggaaagactttaggaagaaagcaagacagtccataaaagggcattctggaggcagccttcagtgaggagctcacacactctaccagctgtacccaggacaaagcctcctcaaaaagaaacaatttgagtacagatgtatgaagatgcagagctgggggcctaagctgctgttctca

SEQ ID NO: 3157744 - DNA, 366 bp, Cricetulus griseus
agatagtcagagggcagaaggttccagctaatgaaaggactggagctgcagaaaatcagagggtggaggtcccagctgaccagagggaggaggctgggcctcaggctatagcggaagcctcagctggctccgttaccctaggaacagccccaggacctagggcccagaaacaggtaaagactgtgaggtttcagaccccaggacggttctcgtggtttcgcaagcgcagaagggctttctggcacactccccggttgccagccttgcccaagagagtccccagggcaggcgaggctaggagcctcagggtgctgagggctgaagctagagcagaagtggaacacagagaagaagaggaacagctgt

SEQ ID NO: 3157745 - DNA, 1099 bp, Cricetulus griseus
gtggaagcgggaggtcgaggcaccagaagtcagggatcaaggctacctgcgcttgctacagactcgatctcctggggagactttccgtgttgaacagagcgccttcaaggcccaagtgagcaccttgctgacgctgcttccccctccagttctgaaatgccggcagttcactgtggctggaaaacacttgactgtgctcaaggtgctgaacagctcttcccaggaagagatctccatctgggatatccgaatcctccccaacttcaatgccagttatctacctgtcatgcctgatggctctgtacttctggtggacaacgtctgtcaccagtctggggaagtctccatgggctccttctgtcggcttcctggtacctctggctacttcccttgtccacttagtgccctggaggaacacaacttcctgtttcagctgagaggggggagcagcccctcctggggccaaggaggtcttgaagtcccttgattgccgtggttcctgccacacacctctcaacaacctcggcttctcccggaaaggcagtgcacttaccttcagtgtggccttccaggccctgaggacggggctctttgagctgagccagcacatgaaactgaagctccagttcactgccagtgtgtcccaccctccacctgaggcccggcccctgtctcgcaagagtagccccagcagccctgctgtccgggacctggtggagaggcaccaggccagcctaggccgctctcagtccttctcccaccaacagccttcccgtagccacctcatgaggtctggcagtgtgatggaacgcagggccatcacaccccctgtggcctcccctgtgggtcgtcccctctacttgcccccggacaaggctgtgctttctctagacaagattgccaagcgcgagtgtaaagtcctggtggtagaacccgtcaagtagcaccaatctgcttgctcagctctgtacactccagaaaccctaagcccccggagggctccttgttcctaggctgtgcctcccactgtaggcagagaggccatgcagggctgcctgtctgtgtctgctggtgagagatgagggcagaagctgtgaaa

SEQ ID NO: 3157746 - DNA, 809 bp, Cricetulus griseus
cctgagccgacggcacgattggcccgggcgttcgggccgtggttgcattgtcaccggcaatgagcggcgcgagggcggtagcggctgcttccctgcggcgcctgcgcactggcgtccggaggcccttctcagcctatggaagaggcaatgtcaggtttcacagttcaggaatgaccttagacaacattaaccgggcaactgtggatcgaataatccgggtggatcacgctggtgaatatggagcaaaccgcatttatgcagggcaaatggctgtgctgggccggtccagtgttggccctgtcattcagaaaatgtgggatcaagagaaggaccatttgaaaaagttcaacgagctgatggttgcgttcagggttcgacctacaattctgatgcccttgtggaatgtggcaggctttgcactgggggcaggaactgccttgctgggaaaggaaggagcaatggcctgcaccgtggcagtagaagagtccattgctcatcactacaacaaccagatccgcacactgatggaggaggatcctgagaagtatgaggagctactgcaggttatcaagaagtttcgagacgaggagcttgagcaccatgacactggcctggaccatgatgcagagttggctccagcatatacgttgttgaagagggttatccaggctggatgcagtgcagcaatatatttatcagaaaggttttaaagtgtggctgatgatccatttctagaaaagatggtcacgtagggaatggcggttgcagaggaggaactgtataattatcactgtgtgtctttttttaat

SEQ ID NO: 3157747 - DNA, 832 bp, Cricetulus griseus
gagcggctgctgcctcgcgcggggccccgggagggccgaggggctgccacgatggagcaattatcagatgaagaaattgaccatggtgcggaagaagacagtgacaaggaagatcaggacctggataaaatgtttggagcctggcttggggaactggacaaacttactcagagtttggattctgacaagcctaaagaaccagtgaaaagatctcctcttcgtcaggaaacaaatatggccaacttttcttaccgtttctccatatacaacttgaatgaagctctgaatcagggagagactgtggatctggatgccctgatggccgatctctgctccatagagcaagagctcagtagtattggctcaggaaatagtaagcgtcaagtcacagaaccaaaagtaacatggcaccctgagaggattatcatcttcctctactagaacaactaaaccttcccctgctaactactccctggatgacatcactgcacaattagaacaggcttccttgagcatggatgaggctgctcagcaatctgtagtagaagattctaagcctttagtgacaaatcagcacagaaggactgcgtcagctggcaccgtgagtgatgctgaagtacgctctattagcaattcctcccgttcaagcatcacttctgcagcttctagcatggattctttggatattgacaaagtgatacgccctcaagaactggatttgacaacacatcaggggcagccaattactgagcatgctatttctctgagatgtcccagtaagcaggccaagcaccactctgacgtcacagaagagcaggctgaactgacacct

SEQ ID NO: 3157748 - DNA, 459 bp, Cricetulus griseus
tggaaaaccacaaggagcagctgtctgtgaaccagaaagccatagagattctgaatgagatttcacagccagtggtagtcgtggccattgtgggattgtaccgcacagggaagtcctacctgatgaaccgtctggcaggacagaatcaaggcttccctctgggctccactgtgcagtctgaaaccaagagcatctgatgtggtgtgtgccacatcccaccaagccagagcacaccctggtcctcctggatactgagggcctaggggatgtggaaaaggttgaccctaagaaggactcgtggatctttgccctggccatgcttctgagcagcaccttggtctacaacagcatgattaccatcaaccaccagaacttggagcagctgcattatgtcacagaactcaatgagctgatcaaggcaaagtcttctccaagtcctgttggaataaagaattccac

SEQ ID NO: 3157749 - DNA, 1381 bp, Cricetulus griseus
  modified_base (1214)..(1214): a, c, t, g, unknown or other
  modified_base (1218)..(1218): a, c, t, g, unknown or other
gaggtgtttggccactgctggcaactccaaggtaaagatgacagtgatgaatcacctgagagggattctgcaagcatctccaaggacattgctgtggagaaggtcccaggttcctaggtctatgccagtaaggtcctgcagtctctacacctgcacattcagaactcggaaccgagtcttacctccactctgggagaacttggaccttgttcctgcgggtgatcggcagtcacccatcaacatccgatggagggacagtgtttatgaccctggcttaaaaccactcactatctcttatgacccggccacctgcctccacatctggaataatgggtactcattcctcgtggaatttgaagattctacagataagtcagtgattgagggaggacccctagaacacaactaccgactgaagcagtttcattttcactggggggccattgatgcttggggttccgagcacactgtggacagcaaatgctacccagcagagctgcacttggtgcattggaatgcagtcaaatttggaagcttcgaggatgcagcactggaagaaaatggtttggctgtgattggtgtatttttaaagctaggtaaacatcataaagaactacaaaaattggtggacactttgccatcaattaagcacaaggacaccctggtggaatttggatcatttgacccttcctgtctgatgcctacctgcccagattactggacctactctgggtctctcactacaccacccctctcagagtctgttacctggatcatcaagaagcagccagtagaggttgatcgtgatcagcttgagcagtttcggaccctgcttgtcacctctgagggggagaaagaaaaaagaatggtggacaacttccgcccactgcagccactgatgaaccgtactgtccgctcatccttccgccatgattatgtgctcaatatacaagtgaagcccaagccagcagccagccaagtcaccccttaagatgttcatatttaggcagcatattgttttaatgtatatttgcttaaaatcttaactaggttattttaaaatgtcgcatttaataatacttatatgtatacatgtatgtttttttctttcatttttgtaacagcatttcaaaattcctatccttgtaaagcaaagacttggagatgaaacaataaaaacaaaaacccataaccacataacatcactttttttntttntttctttcttctttctttctttctttctttctttctttctttctgtttttgagacagggtttctctgtgtagctctagagcctgtcctggaactcactctatagacccaggctggcctcgtgggattaaaggcgtgcgccaccacgactcggcagctttgctt

SEQ ID NO: 3157750 - DNA, 655 bp, Cricetulus griseus
  modified_base (10)..(10): a, c, t, g, unknown or other
  modified_base (19)..(19): a, c, t, g, unknown or other
  modified_base (92)..(92): a, c, t, g, unknown or other
gccctgactntgggaagcngttaattatccatcccaactgaaatcacattatcaaatccacacaggagagaagccttgtaaatgtcttgatntgggaaatcatttgtaaaacatctcaactgaaggcacattctcgaattcacacaggggagaggccttatgtgtgttctgtgtgttggtaaaaggcctttaagcaattgtcaacattgagcagacatgaaaaattcacatggttgagaagccttgcaaatgcagtttttgtgggaaatcattttgttctccatctgaactgaaggtgcatcttctaattcacacaggagagagaccttacaaatgcagcaactgttggaaagccttttgtactagagaaggttttggaatgtcatgattgggaaatcgctcattactatgtcacagatcagtcccatcatcagttcatgggtggggatgccctatttgtgttctgaatgaaggaggggtcttaacaggacagaattcaacatagactacatgattcataccacagtcagtttttacaggtgcagttttacataacagggtttactgagaaatgagttcctagcttactagtgtattccaaaatgaaatttatttatctacttgaagttcattttatgtgggatctaattccaca

SEQ ID NO: 3157751 - DNA, 654 bp, Cricetulus griseus
cagcacgtggccacatctggcacgcctcggaactagtggctatggacgtaggtgctgacgagtttgcagagaccctctcattcctgcatgatatcattaatgaggcagactttgtgagtctcgacatacagttcacaggactgtgttcaaactcatcccggccccacgcagatcagtctctttgatttaccatccgagtggtatatgaagacccggcagagtgttcagcaatttacaatatgtcggattggattgtctgtgttttccagcattgaaggagaatcaaacaaatatgtagcccattcctgtaacttctttctcttccctacaacgtttgggatcttggactcggagttctctttccaggcgtctagtgttcagtttttgaactttatcaagatgttggtgagagcccagaagtctctggtaggacacaatatgatgatggacctactgcatctccttgagaagttcttcaaacctcttccagaaagctacgatgagtttaagcagaacatccacagcctatttcctgtcatcatcgacaccaagaatgtgacagaagacatctggaaggaaatgcatttcctacaagcctccaacctctcagaagtaagtgtatgatgtgctgagcagtgacttgaatgccactaa

SEQ ID NO: 3157752 - DNA, 438 bp, Cricetulus griseus
tgtacaagagagtgtggcggcgtgaaggggagtctctgtctgtgcagtgctcctacaagaaccgcaggaaccgcacagagggcaaggcttggtgcaaggtcaggaggaagaagtgtgaccccagcttcacgaggagctgggtgaaggggcccagctacacgatgcaggatgatgccaaggccaaagtggtccacatcaccatggaggccctcagagtccaggactccggaagatactggtgtatgcggaacacagctgggaatctctaccccttggtgggtttcctgctggaagtatatccagccctcacaactgagagaaacattcctcgcacgcatctaaccaacaccctcaagagtggatttgtcacaacgggcaaggtccccatgtcaggccctcacgcccccttcacccctgacttgactgtgttcacatctg

SEQ ID NO: 3157753 - DNA, 1516 bp, Cricetulus griseus
gagcgccgcagccactttccgggctgccgcggctctgccatctgtcaccctggcccttctctgcttggacggtgtcttcctctcctcggccgaaaatgactttgtccaccgggtccaggaggagctggatcgcttcctgctgcagaagcagctatccaaggtccttcttttcccccctgtctccagccgcctgcggtacctgatccacagaacagcagaaactttttgatctcttgagcagcttctctgttggggagggctggaagaggagaacagtcgtctgtcacttggacatcagggtacccagttcagatggcccctctggtccctgtcgccctcctgcctcccatcccagcaagtaccgtggtggtcctcggtactcctcacatcaagggaggaagcccgatcagcctttgtatgtgccccgggtgcgacgaaggcaagatgagccagtagcaccctccatgccaggccccaagggagaggccccaactggtagagtttcagaagagcctacagggtctggggaccctgaagctgatcagggagttcccatgttggtgactcatggaacagagctcccgaagagcccagatccaggctacgcaaatgattcacggttggagctgggtgattctgagccctctgagaatcctgagaaggaacaaggggtagagacagccatgcagcaggcgtccagcccacagctggccatggaggaggaaagtaggagtctgctggtgcagagcctggtggaccaagaggaggaagcggtagagggagaggagaaagagaaggtgggtaaggaagatgagaatgtcggcaagcagaaagggaaggtggaggaagaggaagagaagacagccaacctgaccgaaaaggagatcgaggtagagaggatccacctggacacatcctccttcacagaagagctacctggggagagggacctggcccacgtggtggagatctatgactttaagccaacactcaagactgaagacctgttggccaccttctctgggttccaagagaacgggttcaagatccagtgggtggatgacactcatgccatcggcatctttccctgccaggcctcagctgctgaggccctagccaaggatttctccgtgctcaagatccgtccgctcacacagggaaccaagctgtccaagctcaaagccttgcagaggccaaagctcctgcagctagcgaaggagaggccacagacagattcagcggtggcccgcaggctggtggcccgggccttggggctccaacacaacagaaagaaagagccgtctgctgctccgagtctcctgccatcttgaggcaccagacccagctgtccagactaggctggaccccaacaccactcacgcctttacagacccaaggatagccccttgttcccactggaactgctgtggggcacaacaggcttttgttgatctggttccagaaattgagaagaaataaaaatttaaaagttagtaaaaaaaaaaaaaaaaaaaaa

SEQ ID NO: 3157754 - DNA, 609 bp, Cricetulus griseus
cgggcctttcaaacatggaggagcgcgagtggggggcgaggtcggctcgcgccggcagcccggccagcccgcccagcccgcgcctggacgtcagctcctacagcttcgacccgctgctggccctgtactcgccgcgccttcctcctatcccctaccccaacgctccctgctttaacaacgtggcggagtacgagagcttcctgaagggcggacgatccgggcgcggccgggcgcggggcacggggggagccggcctcggcgggaacctccaccggaacctccacgggagccggcacctcgaccagggctcgtcgccgcgccgcgcccaccccagatcccgagcgcatccagcgtctccgccgcctcatggtggtcaaggaggacgcggacggtgcggccggggctcgacgccagggcccggggcgcagtaagaaggcgccacgcaacgtgctcacgcgaatgcccctgcatgaaggtagccctctgggtgagctccaccgctgtatcagagagggagtgaaggtgaatgtccacgatccgcactttcaagggacttcggggtgtctgcacaggcttcctggttgcatttgacaagttctggaactatgg

SEQ ID NO: 3157755 - DNA, 370 bp, Cricetulus griseus
aatacagaataagtctagaaacccagtaagaattgctgtgactggagactcgggaagtggcatgtcatccttcatcaatgctcttaggttcattggacatgaggaggaggattcagctcccactggggtggtgaggaccacccaggaaccagcctcttacttctcttgtgagtttcccaatgtggagctgtgggacctgcctggcacaggggtcacatcccagagcatggagaactacctgcatgagatggggttcgacaattacgaccttatcatcatcatcgcttctgagcagttcagttcgaatcatgtgaagctggccaaagccatgcagagcatgagaaggaagttctatgtcgtctggacaagc

SEQ ID NO: 3157756 - DNA, 360 bp, Cricetulus griseus
gggatatgatgccagctatcaatttggaatggccatcttcatataaggggacactaattgggccacctcccaccctagctgtacaacagttctggggtctctgcctttgcctgtctggagtcacccactatcctgtgtatggagccttgtgaagacagcctaacggagccactgcataggaaatgactcagtctgttccttgcaatctgtgcctcgctggaccttcagagtcagcctttgaatgcctttttcaaacatgaacctctctactgtccattgcctcctccagggctgacatcccactctgggtatctgcctacatctgcatctcctggtgttctgggggtctggctaccccta

SEQ ID NO: 3157757 - DNA, 1137 bp, Cricetulus griseus
agtgtcctggcaggtagaggaagaaccaagtgtccccagagaaaataagacggccccagaccttcaggctgtccccactgaggaggccccactgcctgagctgtttggggacaatgacgactgggaccagcttctgaacagctttggagaccggtcccaccaagccctgcagctctgctggagcccaccccaaccccgactagtacctcaggcccccagactccccgaattgttaggcagatctccatttccaatataggggctttacagtttgctcaggagccagcctcagatccagacccaggcccaggaagccccgcccgggtgcctcccagtgtcaaagataggaatggagtggaggctcctcaccttggctgaaccggaagcccagcccaggcccatgtccatgcctgttcaggtggagagaaagcctggcacccctcagcccatggaaccaggggcagagagcaggccggaggacccaggaacagactcgggggaggctgaactgacttcccttggggacctcactgctggcaagcctcaggctgaccccgactacctctaccatgtcatcttcttggggactccaatgtgggcaagacctcatttctacacctgttgcatcatgatgcctttgccactgggctgacagccaccgtaggagtggattttcgtgtcaaaaccctgatggtagacaacaaaaccttcgcactgcagctgtgggacacagctggacaagagaggtaccacagcctcacacgacagctgctacgaaaggcggagggagtggtgctcatgtatgatgtcacttcccgagagagcttcacccatgtgcgctactggctggactgtctgcaggatgcaggtgcagacatggtggccatggtccttctgggaaataagatggactgcgaggaggagaggcaagtgcccaccgaagccgggagaagactggctcaggagctgggggtctcctttggtgagtgcagcgctgtcctgggtcacaacatcctggagcccctgatgaacctggctcggtcacttaagatgcaggaggatcgcctgaaggcctcgatggtggaagtgaccaccagcagccacccaagagagccggctgctgccgatgatcaccag

SEQ ID NO: 3157758 - DNA, 2799 bp, Cricetulus griseus
actcagctgtgtgagagcttgcatagaagaaagacgggacaattccaacaagagaattctgatatttttcaagaaacaaaagttcagagccttagtatagaaaatgaaagtgaaaagcatgatttatctaaagactgaaacggaaaggttggtgaaggggataaagaacgggagctggagattaagcttctgaatgaaaagaatatctctttaactaaacagattgatcagttgtccaaagatgaggtcggcaagctcactcagattatccagcagaaagacttggagatccaagctcttcatgccaggatttcctcggcttcctgctctcaggatgttgtgtacctccagcagcagctgcacgcctatgctataggaaagatgagaataaaaaaatgtccactagatttgaaagtagtggccaagatatgtttaaagaaactattcagaatttatcacggattattcgagaaaaagacattgaaatagatgcactgagtcagaagtgccagaccctgctgacagttttgcagacttctggcacaggtagcgaggttggaggagttaatagtaaccagtttgaggaactcttacaggaacgtgataaactaaaacaagcaagtgaagaaaataggaagagtggaaacaacaagtgatgaccactgtccaaaatatgcaacacgagtcagcccagcttcaagaagaacttcatcaacttcaggcacaagttttggttgacagtgataacaattctaaattacaagtggactatactggcttaatccaaagttatgagcagaacgaaaccaaacttaagaattttagggcaggaactggcacaagttcagcatagcatagggcagctttgtaacaccaaggaccttcttttagggaaacttgacatcatgtcaccccagctctcttgtggctcatcacttaccactcaatcaggagagcctcttaagacaagccagtctactggcccatgtgagtcttctcagttgcttcaacaagaagtggatgatctgaggcgatcactgcaggaaaaagatgccatgattaaaacactccaggaaaacaaccacagactgtcagagtccatagctgcatcctcagaggcaggaagaagagaacacgagcagactgattcggaaatgaagcagctgaaggagaaacaagaggctttacaaaacttacttaaggaaaaagacctcttaatcaaaagccaagagtgaccagttacattcttcaaatgagaatttcacgaacaaagtgaatgaaaatgagcttttgaggcaggcagtgacaaatttgaaggagagaatattgattttagaaatggacatttctaaattgaaaaggggaaaacagaagcaaatggaaaacagtacccttcagaatgaggttcagcacttacgtgacaaagagtcacggttaaaccaggagcttcagagattgcgtgaccacctcttagagtctgaagattctcatacccgggaagctttggctgcagaagatagagaggccaaactgaggaagaaagtcacagtgttggaagaaaagctagtttcatcctctaacgcgatggaaaatgcaagtcatcaagccagtgtgcaagtagaatctttgcaagaacaattgaacatggtctccaagcagagggatgagaccgccttgcagctgtctgtctctcaggaacaagtaaagcagtatgctttgtcattagccaacctgcagatggttctcgaacacttccaacaagaggaaaaagctatgtattctgctgaattagaaaagcaaaaccagctcttaactgaatggaagaaaaaagcagagaatctggaaggaaaagtattgtcgctgcaggaacgtttggatgaagcaaatgctgcattggattcggcttcaagacttacagaacagctagacctaaaagaagaacaaattgaagaacttaaaaagcaaaatgccctccatgaagagatgctggatgatgcgcagaagaagttgatgaacttagtgagcagcacagaaggaaaagtggacaaagtcctcatgagaaacctcttcattggtcatttccacatacctaaaaatcaacgtcatgaagtgctgagactaatgggaagcatcctgggtgttaaaagggaggaaatggaccagttgtttgccgaagatcaaggaggtgttactcggtggatgactggatggcttggaggaggatcgaaaagtgtgcccaatacacctttgagaccaaatcagcagtctgtgttcaatagttccttttcagaacttttcgttaagtttctggaaacagaatctcatccgtccgcccacccccaaagctgtcagttcatgacttgaaacctctggattctccaggtagaaggaaagttgacgccagcatacctggaagctccaaagatacagcagaacccagggcaggaagaaggacagatctgagtccattcttggctccccgctcagcagctgtgccccttatgaacccagctggacacggacctggtgggcctgggcatcttcttttgaaaccgatctcagatgttctccccacgttcacaccgttgccagtgtcacctgacaacagcgctggccttgtactgaaagaccttctaaagcagtaggaagctttcaagccagagactatccagcactttaggaaatcatgaacaccgtatgtgtgaacttgatcacaaagtggccttctggaaagagtcattatttgtttgtagttgtaatttctctgttaataaaaatattcttaatgacttttagaaa

SEQ ID NO: 3157759 - DNA, 437 bp, Cricetulus griseus
tgggtgaagaatgaattactaccaaacctagagaaagatgacatacgggtttgcctccacgagaggcattttatccctggcaagagcatcgtggagaatatcatacatttcatcgagaagagctacaaatccatctttgtgttgtctccccacttcatccagagtgagtggtgccattatgaactctactttgcccaccacaatctcttccacaaaggatccgataacttaatcctgatcttgctggaacccattccacaatattccattcctagcaactaccacaagcttaaaactctcatggcacggaggacttatttggaatggcctgtggagaaaagcaagcatgggcttttttgggccaacctaagagcaaccattaaggtcaagttagggaaccaggcagaaaccacatgtcacttacagggataagaata

SEQ ID NO: 3157760 - DNA, 967 bp, Cricetulus griseus
  modified_base (418)..(418): a, c, t, g, unknown or other
attttgtaaagacaggaagattcctactgattggtaatagcaacatgtgtgtgaaacttggagagaagaatttaacttgcaaaaatatagaaatatccaagatagttaaacctgaggctccttttggcctagaagtagtttatcgaaaagaagcaaatgactttttggtgacatttaatacaactcactcaaaaaagaagtatgtaaaacatttaatgcatgacatggcctaccgcccaaaaaagggtgaaagtaactggacgcatgtacatttaatgaatacaaaaacaacaatactagaacgaacgctaaaacctaaagcagtgtatgaaatcaaaagtccggtctatccccggtaccagatactttaaaaggcttctggagtgattggagtccaagttctaccttcaaaaccccngatccctggagtcgagtgagatgggatcctgtttgccaagtatcagcattctgtagttttttctacttgttggttttgttggtctgagatttcagtcagcataccagaaactgtcagaagagactcacccctaagattcctgagcagaaatctgagtgcatgcaataccccgtacattcccttcctctaggtcccttgactacagagatgatgacaggaatggaccccatgtgtatcaagacttgctgccaagccctggaaatacaaatggtaccctccctcaactgtttcctctccagtcaggaatcctgataccagtttgtcagagacagcccatccccacttcctcagtactgaatcaagaagaagcctatgttaccatgtctagtttttaccaaaacaaatgaattaggagaaaccggagacccttctatcacaaaaagaatgatcactgggatggaaagtctagaatgcctactctccctcatagttcacaagagataaagttgatgcaaccttgctacacatcatcagcattctgagaaatca

SEQ ID NO: 3157761 - DNA, 711 bp, Cricetulus griseus
atgggtcctactatatggataaaaaatatatggcatatgtacaaaaggctttagtgtcaagagggatcagtgagctgctcatgactgcagatgatggtctgaatgtgagaaagggccacttgaaaaatgtgctggccactgtccacatgaagaatataaagaaacaaacatatgaagatctcaaatccattcaaggtaaaagccctatactgatgatggtatatacaacaaagacttttgacacgtggggggctctccgcaactttggagatccacagatgctgatgaaagacgtgcgtgagatgttcctcctcggattttccttcaacttctacatgttccatggtggcaccaactttggcttcataggtggagctcagtcttcacatggttatcaacccgtcgtaaccagctatgactactgtgcactgctgacagattgcctattcatcattgacagtcatatatttcatgaccctgtgggaagtcctgccccttctggaccggccaaccaagtctgccaagccaatctccatggagcagctacctgtgaaccaacggaatggccagtcctttgggtacacactttatgagactaccatcttcagtggaggccgcctcttttcaaggggtcatattcaagaccgagggcaggtgtttttggacaacaactacataggagtcctggatcattaccacaatgagctactt

SEQ ID NO: 3157762 - DNA, 794 bp, Cricetulus griseus
tggaaagagcgcgccggcgggtaacccagcaggtcaggaccatgtctggctgtcacgctcaaggaaactgttgctcgcgtccctgcggcgtgcaggacaaggaacatcccagattcctgatcccagaactttgcaaacagttttaccatctgggctgggtcaccggcactggaggaggaattagcttgaagcatggcaatgaaatctacattgctccctcaggcgtgcaaaaggaacgcattcagccagaagatatgtttgtttgtgacatcaatgaacaggacataagtgggcctccagcatctaagaagctcaaaaagagccagtgtactcctcttttcatgaatgcttacaccatgagaggagcaggcgccgtgattcatacccactctaaggctgctgtcatggccacccttctgttcccaggacaggagtttaaaattacacatcaagagatgatcaaaggaataaagaaatgtacctcaggagggtattacagatatgatgacatgttagtggtacccattattgagaacactcctgaagagaaggacctcaaggaacgaatggctcatgcaatgaatgaatacccagactcctgtgcagtgctcgtcaggcgtcacggggtgtacgtgtggggagaaacatgggagaaagcaaaaaccatgtgtgagtgttatgactacctgtttgacattgcagtctccatgaagaagatgggaatggatccagcacagcttccagttggagaaaatggaattgtatgagccaagtggatgcctaagtatcttcaa

SEQ ID NO: 3157763 - DNA, 382 bp, Cricetulus griseus
gacatggtactgaatcgcatggcaaaaggagtgaaggagattgacattgctgccaccctggagcatgtccgtgaccagcggcccggccttgtccgctctaaggaccagtttgagtttgcgctgacagccgtggcggaggaggtgaatgccattctcaaggccctgccccagtgagccccctgggcacctcagtgggcatgctggcctctgctccttctgcctgtatgagcatctgcgcacccactcttcagcccttacccacctgccatcttggcccatcttgggcatggcagcccttccagcccagtgtggaaggaagtggggaaaatctacttttgtatcaatgtgaataaagttagtgtggttgtctgtgcagctgcaa

SEQ ID NO: 3157764 - DNA, 276 bp, Cricetulus griseus
cacagtcactgtgtctgtcccaggcactaagaaggacagagcccacacagtcaagtgcccaggtgggtcaaagccaagccagccaggccccagagagcatctctcgagcagcacccaaaaggctatttcccaaggatcctctagacagcagctgtgcaacagagaccaagagagccagcaccaaccaggacgacatctctgaagtccctgaaagtgtcgtcagtgatatggaggaagggccaggtccttcacaactcaggaagttttcctgcatgt

SEQ ID NO: 3157765 - DNA, 1398 bp, Cricetulus griseus
  modified_base (1385)..(1385): a, c, t, g, unknown or other
cgggccgcaccgcccgggccggcgccgagcgcgggaagctggcgggctaaggcgcccctctcctctgctcttccccgctcccggctccgcgaggccgcacggcgccgcccgcgcgatgatgcaggacgtgtccagctcgccagtctcgccggccgacgacagcctgagcaacagcgaggaggagccggaccggcagcagccggcgagcggcaaacgcggggctcgcaagcggcgcagcagtcgacgcagcgcgggcggcggcgcggggcccggcggggctcctggcggtggcgtcggaggcggcgacgagccgggcagcccggcccagggcaagcgcggcaagaagtctgcgggcggcggcggaggaggaggaggaggaggcggcgcggccggcggcggcggcagcagcagcgggggcgggagcccgcagtcgtacgaggagctgcagacgcagcgggtcatggccaacgtgcgggagcgccagcgcacgcagtcgctgaacgaggcgttcgccgcgctgcgcaagatcatccccacgctgccctcggacaagctgagcaagattcagaccctcaaactggcggccaggtacatcgacttcctgtaccaggtcctgcagagcgacgagctggactccaagatggcaagctgcagctatgtagcccacgagcgactcagctatgccttctcggtctggaggatggagggggcctggtccatgtctgcgtcccactagcaggcggagctcccaccccctcggcaggccggagacctagatgtcattgtttccagagaaggagaaaatggacagtctagagaactctggagctggataactaaaaataaatctatatgacaaagattttcttggaaattagaagagcagagcccaaattcaaaagaatcggggcgtggggcacacttttaaaagagaaagccagacaggccggtggaccgagattcccagagaggcagcggcactaccctcatacctctgcattctgatagaagtccgaaccattgtttgtgccccccccccgacgaagaatgttttatttttttcatacatgtatgcattctcaagaggtcgtgccaatcagccactgaggggaaaggcatcattgtggactttctccattttaaaatggtaacaatcagaggaattttaacaacacctgtagaaataaaaacagtgggatcaaactggcctacaaaaccatagtcagtgaattcctttaaaaatatttatttattgatgacccatggtaaaatgcaaatagatccggtgtctaaatgcattcatatttttatgactgttttgtaaatatcttttgtatattatttttctgcaataaataaatatgattgaaaaattttaaaaaaanaaaaaaaaaaaaa

SEQ ID NO: 3157766 - DNA, 167 bp, Cricetulus griseus
atgaggaataatacataactagctcaaacctttaattccagctcttgggagacagaggcaggtggatctctgtgagttcaagaccagcctggtctacagtgagttccaggacagccaagccacacacacacacacacacacacacacacacacacacacacacacac

SEQ ID NO: 3157767 - DNA, 484 bp, Cricetulus griseus
cctgagtatagcaagagaagaagagaaaatacgcttgataatgaagttgaaaagacaagcaaatcttgttattaacaactggaatcagcaaatcaaggctaagaaaaattaaatgatgagtaccaagaagcatgaagcacttttccaccttgtagaaagctccaagcagtccgtgacccagaaggagaaacagaagctcctcaacaaactgaaaaaatcgactgaaaaattggaaaaggaagatgaaagttactaccaaaaaaacatggcagggtattcgactagactgaagtgggagagcacgctggaaaacagctacaagagcatgctggagctggagaaggaaagaattcagcttttatgcaataacttaaaccagtacagccaacatatttctctttttggacagacgttgaccacatgccacacacagatccactgtgccatcagcaaggttgacgttgagaaagacatccaggctcta

SEQ ID NO: 3157768 - DNA, 326 bp, Cricetulus griseus
tctttcagaggtggggttagtttgttctgtttccatatttttaatcacatttccaccccccacgtgggcattttggaagctagtgagctagggggttttctaggctgtcaggaaaacctagctgacctcattgggtgcaatactagctaagtaaaagctagaaacctacactgtcactttactgagatttctgagtctacgtttcatattgccttaatgtagcagtaacgtctttatgcatttgtttctttgcacagacattttgtcagatattaaaactctactttttatggcacatattagcatataagcctttattccaagag

SEQ ID NO: 3157769 - DNA, 374 bp, Cricetulus griseus
cagtggttccctcctgcccgtctcctgtgatttataaatgaattttaatttttatagtgaatcctaagagatcatcccacctttgatcgcaggaagggacccctagccccaacccataaggagctcaggggaaagagggaggggtttacgaagagaaccttcgggcaaccaggtggttcttgatgctcacccaaagcccccaatgctgctaggaggagggcaccctcaagggtgctcccaacaggtcatctgctttgccgctaacacccctgcagtccagcgagtgagtatctgccctgcgtatgccacctgctgtgtacgtgggccccgccacggcctcaataaactctgcttggtgtaagaaaaaaaaaaaa

SEQ ID NO: 3157770 - DNA, 323 bp, Cricetulus griseus
ttttttttttatttttttttaagtttactctttaaatatttaaactcagactgtataaggaaatgatggatgactgactgttcaggtttggcactttaattgctacctgcctgcagaattcccttttgtttgagatattgtgtgaaggtctcctattaattttaaatggttcagaaaatgaacatactgtaaatttgaattttacttatgtgaaaggcttaggaacttcccaacatttgtgttcacaactttgaaaaagttttataaaataaaattgcaactgaaaatacttaaaaaaaaaaaaaaaaaaaaaaaaaaaaaaa

SEQ ID NO: 3157771 - DNA, 292 bp, Cricetulus griseus
acagtggatgaggaaggaaaggctgaaggagacaacagtggacaagataaggcagactcagatgctcaaagaccaccaagaccagaagtgacaataaccagccctcaagaaaatgaagagaatgaacaaaacaaggactcttctgctgtggcataggtggtttaaagcagggcatacatgggacgtaagagcatgaagggatgcaatacttgaataatatatatatatatatatataatatatatatatatatatatgtatatatatatatatatatatgcatagatacata

SEQ ID NO: 3157772 - DNA, 2098 bp, Cricetulus griseus
cgtatggaccatcatgcccactttggaggagtgggaggcactgtgtcagcagaaagccacagaggcagcaacccaatcccaggaggcattgggggaagcagagcctactgaacaggcccctgatgcatcagagcaagcagacacttctaaacagaacacggagacttcggaggccaccacacagcaagacgtagacactgatgtcccagaggcccctccgcctcctctagaacctgctgtgatggcacgtcctggctgtgtcaacctgtctctccatgggattctggaggatcggaggccaaaaaaaaggatctcttttgaggtagtggtgctggctgagctgtttctagagatgctgcagagggtattttggttatagggatttataagatgctgctgagccttccagaaaaagttgtatctccccctgaacctgagaaggaggaggcaaccaaggaggatgtggtcaaagaggaggatgtggtcaaagaggaggtggcgaaggtgtccaaggatgaggtacagaatgagggcacagctgccgagtcagacaacccactgaaggaggatgggcttttgcccaaacggccctcttcagggggagaagaggaggagaagccccggggtgaggcagctgaggacctctgtgagatggccttggacccagacctgctgcttctgagggatgacggagaggaggagtttgcaggagcaaagctggaggaaacggaggttcgctctgtggcctcaaaccagtcagagatggaatattcatcccttcaggacatgcctaaggagctggatccctcacagtgctgagcaggccaagcagctggttagtagggtggtgacacagaacatctgccagtaccgaagtcttcagtatagccgtaccgaggtgctggatgatgggcttccggaagaggtgctctttggaaacctggatctactgcccccttcggggaagaacacaaagccaggggctgtccccatagagcacaaaggcctggtgccgcacaatggcagcctcatcaacgtggggagcctgttacagcgtgcagagcagcaagacagtggccgcctatacctggagaacaagattcacacactggaactgaagcttgaggagagccacaaccgtttttcagccaccgaagtgacgaataagacactggcagcagagatgcaggagttgcggacccggctggtggaggcggaggagacagcccggacagcagaacgacacaagaaccagcttcagcggcagctgcaggacttccgcaggcgcctgaccccgctgcaccttgagatgcagcggatggttgaaaaggctgacagctgggtagagaaagaggagccagcacctagcaactgagtggctgtctagtgaggtctgcgatggagcctgatgacattagagcctttttggtaccagaaagcagctggagcagggcctgggagccacagcagaggtggctgagttctgtgcttggcctctgcaggggtgatcaagctatcagaatggggtttgtgctatgtggatggatgtgtaaccccagttccagctacaactaaatacaacatcttttgcacccctagaatgtcattttgccctcaaccttggaaatttctcctagggcccttgtagtcttgtgctgtctcctgtcctcgtccattttagagcaagacgggaggaaaaggcttttccagcccagaataaggtctgatgccaacaaatgcaaggaacgggtgtagagcctggcacagccaagaatgtccttctagacggcacgagtcctgtaggctccagtatccgttaggtggtggagcccatggtaggaagcacttggtgttgggtcaaggttgccaatagaacactgtgttccagccacccccaacttgccagaagaaccagcacttctttctctagctcttgtgttcagaatgtggtattggctctggcccagccctcttccgtttcccataattcttgcctctttccataatccgtggtttcagtttgattttgtatataaagttgtttgtttgtttggttttttttttttggctttttttagtttttaaaattaaacctaaa

SEQ ID NO: 3157773 - DNA, 1974 bp, Cricetulus griseus
cctattcatgctgcagacaaacagctgcttatagtggcaaatgcccacaatgcattgggacccagagtattctgatgtgaaacttattcagaccatgatgtttgtctcagaggttaaaaacattctggagaaagcctcaagtaggcctggcagcccaaccgcagatcctaattccatcccgctggtgctatgtgcagatcttaactcattgccagattcaggtgttgtggaatatttaagcaatggaggagtagctgacaaccataaagacttcaaggaactgaggtacaatgagtgtcttatgaacttcagctgtagtggaaagaatggaagctcagaagggagaatcacacatggcttccaactgaagagcgcctatgaaaataacttgatgccttataccaattacacctttgatttcaaaggtgtgattgactacattttctatttccaagactcatatgaacgtgctcggtgtcctggggcctttggatcctcaatggctggttgagaacaacatcaactccaccctccactcctgcctcttgtcaatggtgttcacttgcctaaccggaggtagtggagtacagccccgccaagacggggatctgttgctatggacctgtacagttgtaaatcaaagtatgtaggagtgaagtatggccgtccttaagctgctgcttcaggttcctttcattatgtgtttgctataagactttgtatatgttttgtgcatattgatatcatttggcactagggctggaaccaaagtattactgtctgtctgtatccaaaagtttaatatactttaaaattggatttcttctcttcctattacattagaaaacagcattcacaattggtaaatcactaatttgaggcccaacaccagtgttgttctctaaaaacaaatacattctttggaattatttcaaataagccaatcatttttgtaaaaagtgatttttaaaaaactccaaatacaagattttcaatagaatgatggcatgccttataggaaaaacttttgagtttctgttttccttcataacaagctgatttttggctcccaagttgtttgcacattaacaaagcacttaaatttgcttaatttgtacgtttaatgtgatatagtcattagccataacaagacaatttgagaaatgaaaataattgcacaacatgctttcaaaatccaagcatagtatgtgacagtttgttggctgaatgctggttgttttgtttgaggtcttttttggtctgcctattagttgtaatctttttagaaatattaactctaagcctgtctctccagttcattttataaggaaatagcagatatatactgccatacatcttgaaagtagaatttggtatttttaggatgcccacaaaattagtgtctgatatttttcattgtcgcaccctactcttcctggctggtcggactggacaaaaaaaagatgatccatacataccatctttaccactacagtttaatgtttaaagaagattgctgaatgaaaagcccctggtcaaagtttcaaaaagggaaagccatataatattacacgtgttttccaaaataagttaaatggctgttttgtttgtttgttgtttgttggtttttgtttttgttttgaggtaacattagagaggattttgaggagaagacagatttaggaaagtagttgaaaactttggaatattttttctgactctagctgccaaatggccatcatatgcttttaatctttgttgccatatctgtctagatttgaattaagctactggtttattcccacagtttgatgcctctagatgttttggaaaccaacccccccttggttgtcgttggcccagaggggccacttgaaaaatctgacttgagaaggcagagagcataaataacattttgtggggagaaaattagttggctgcttgatgttaattatggcacagtaacattggaaa

SEQ ID NO: 3157774 - DNA, 278 bp, Cricetulus griseus
cctccccagtcttgatggaagcttggctacctaccctgctgctgcttcgtgattatgagatccctacaatgattactgtttacagccaacaggaattggaagcctctctgcagatcctggtgaacttggatatgcacatcattgcttgtggagctaatcctttcacatccctcaaacctgaacaagtctattctaaccccaataagcagccagtatacagcagtgcctactacatcatgtttcttggaagttcctcctgccaactagataagaaacaa

SEQ ID NO: 3157775 - DNA, 648 bp, Cricetulus griseus
gggaaccgtgccgccgtcagtctctgcctttgcccaccagggcgcacaggagccacgtgtgacctggattgcagaaggggccgctttgggcctggctgtgccctgcactgtgactgcgggggtggggctgactgcgactccatcagtgggcggtgccgttgtgtggacaactacacagggcccacttgccgggaagtggccacacagccatcctccagcaggccagtggatccacacctcttctgcaaagccatggctgtctgcggagggctgcggatagacgcacagctatccaccaaggccttgtggccatggagaaagggtctcaagtggacacaaggaacccagggaagtagaccaggctccaggccaccgtttacatggggatcctgcaggctgtgctgagcaaccctggccctcttcagggacctgggttggtaccgaggcaggagtaagcaaggccccaccagcctgtcaggtccttctggtgctaggccgtggactgctgcagccagccgaatgtttacctggaaacgtagtccggcctgtatttatgtaaatgtatttatgggtagcttcacttgccattgtggccctggtcagctggaagctgccccatcccagaagcttagtggggagcaagtcagt

SEQ ID NO: 3157776 - DNA, 1116 bp, Cricetulus griseus
  modified_base (590)..(590): a, c, t, g, unknown or other
gccgtatgcatgtcaaggagtgtggcaaggcctttcgggtgcatcagcagctggctcggcatcagagaattcacactggggagaaaccctatgagtgcaaggactgcggcaagaccttcagacagtgtacgcacctcacccgacaccagaggcttcacacttctcagaagctgtacgattgtaaggagtgcgggaaagccttcgtagtgtggcccagaccttcgagtgcatcagaaaatccacttcggtgagaagccctatgcctgtaaggactgtggcaagtcccttcaggacatgccaacagctgaccgtccatcagagtattcatactggggagaaaccccatgagtgtaaggactgtgggaagaccttccgactgaggcagcaacttgttcgccaccagagaatccacacccgtgagaaaccctatgaatgtgtagactgttggaagaccttcagcagttacccccagctcatctcccatcagagtattcatgccggtgagagaccctttgagtgcgaagcatgcgggaaagccttcagactctactcccagctcactcagcaccagagcatccacgacggggganaacgccgtaccaatgcaaggagtgtagctgtgttgctgtaaaagccctccattctcacttgagtgtaacctatcttcagcaaattcctgtggaagaataatttgatgaatggaggaaaatctttagtcttctctgttgtcatctccatttaactactctcttcctgttgtcatactggataggacactaaatattaattgccttgttttgctcactgtcaaaatgctgataacagtatttacaggttatatttattcttctgtaacaaattactagaaaaacagtagtttaaataatatatatttattatctaaaaatttctgtagattgaaagtccaggcaagccttagttgggccttgaggtttcagctagggctgggctgtcatctgaaggcttaaaactagagaaggatccacattgtaggtaccaggttagacacctcaaacacctgaattctttgagagctgataaaatcctcagtttctggatggtcatcggctgagagatgagtgaagttcctggcca

SEQ ID NO: 3157777 - DNA, 3250 bp, Cricetulus griseus
ccttgtctcgaaggagccgcgtaaccgcccgagccacaagaggcctcgctgctgcagctggtgccgccgccggcgccctctcctcagactgcgccgccggactccggccaaggcgtccccgcagcccgcggcggcggcccggagccgggactgcttcttccgcgggccctgcatgctctgcttcatcgtgcacagccccggcgcgcccagcagcagccggagagcggcgacgcggactgtcaggacgcccccgaaaacccctgcgactgtcacagggagccgcccccgaaatcccagacatcaaccaactcgccgccgtccactcctgctgaagatattttccaatttgtccttggatgaacgttgcctttctgcctcattggtctgcaagtactggcgtgacctttgtttggatttccagttctggaagcagctggatcttagcagtcgtcagcaggtcactgatgaattattggaaaaattgcatccagaagtcagaatataattgaactcaacatttctgacccgccgcagtatggtctgacaccggagtgtgtgttttagcatttaagtgtcctggactccttaggtacacagcctacaggtgtaaacagctctctgacacctccattactgcggttgcctctcactgtcctttactgcagaaagtacacgtaggcaaccaggacaaacttactgatgaaggactcaagcagctgggctcaaaatgcagagaactcaaagacattcactttggccagtgctacaagatctcagacgaaggcatgattgttatagctaagggctgcctgaagttacaaagaatatacatgcaggaaaacaaattggtgacagaccagtcagtgaaggcatttgctgagcactgccctgaactccagtatgttggctttatgggttgttcagttacttccaaaggagtcattcatctaaccaagctgagaaacctgtccagcttggatctgcgccatatcaccgaactggataatgaaaccgtgatggagattgtgaggaggtgcaagaacctgagctctctgaacctctgtctgaactggatcataaacgacaggtgtgtggaggtcattgccaaggagggacaaaacctgaaagagctgtacttggtgtcctgtaaaatcaccgattatgcactgatcgccattgggcgatacagcgtgaccatagagacggtggatgttggatggtgtaaagaaatcacagatcaaggagccaccctgattgcacaaagcagcaaatccctgagatacttggggctgatgagatgtgataaagtcaacgaagtgaccgtggagcagctggtacagcagcacccccacatcactttcagcactgttctgcaggactgcaagaggaccttggagagagcctaccagatgggctggacccccaatatgtctgccgcctcctcctaacgctcttgcccgtgcctgggcctcctgaggccgttgagcagggcagagaaatgggccccaggtgagctggcttgttttccttaaaatggaaaattatgaaaaccagaagtgatgtcgctctaactagaagcctggagatgagaacccttcaaaatctgcagttccactctcaagtatcctcatgcttgtgcacgcgtgctaagtgaatttcttgataagttatttcctaacagagggaccttcctggaggccatggagggagcatcccatccctgatggtaatggctgactcactgtgctcacaggtggtcaacttgctgtcccgtgggtaacttaggaactagggaaaataaagccttttgtaaatttgtatatggaggcaacaatctgaagttccctggccagctcacaaaagttaattattcattattctgtaaatgcattctgttgagtaataaatattttagttggttttacattaacactgtgttagcttttactttgtgggtagttactggtcagggtatattttagtgacatttggggctaaacttagcattatccacatcgaagccacgaatgtaaattaatggtatgcagttattttaaaaaattttacagatcatttcattattttggtaattatgaaaatatattctgaggtgcagtagtcacattaatagaagattaatgaatgggatgtaagtagacaatcttcctattgaatattttcttttgctttgggatttagaacaggttttttggatatgtgcatgttttaattttgaatagttcttacactactgcaaaggtctgctgttagctaatgtatgaattaaggaaagatttagaaaatctttacacttgccagaaataagtatttagtttaattaaatattaccaacatttagttatctgagtacctatcagaaaatgagtatctgttttgatttcagacatctttacagttaattccttgtagggacttgggctccaatagtctctcctatgtctagatctataatcagaccacagggagcctttttaagctaaagagtgattatctttcccagttggagaagcaaaaccttgacttttgaacttgctatttattctccccttatgtggtctttggtctttaacaattataatgaggtttgactttattccctataaactccgatgcagcagacgtgattggagctgtaagaagcagaaagcagccttgcgtgtttgaatgtatccacacatgtatgttgactgcttgtctgtagaagacatttgtctccttcaagtgtgtcaacatgcttcgggtgtggcttctttttcttctgttttaattccaatcagttcaaaagtgtgtgtgtgtgtgtgtgtgtgtgagagagagagacacacacacacacacacacacacacacacacacacacacacctctacatcagctcctggctccaggttcctgccctgtgtgagttcctgccctgactgccttcagcgattgaagagaacaaagatatggaagtgtaagccaaataaaccctttttcacagatctcagcctgttcacaaagaagaataggaatgcaaagaatacattttagggtaccactttgctctcaaatattgtgctgattttttagaggctggaaccagtcacgaatacaagtgaaacacatttttcccccaatgctgagcctgagactgtgaattgagacagggaaatggttttcttttctagatgactattttcaaactagaaatatgtttgcatcaatgatgtgttaaggtcaagtcaaggaa

SEQ ID NO: 3157778 - DNA, 517 bp, Cricetulus griseus
ggtttctgctgttggaaggattcttgaccgcagaggagtgtgtggccatgcaacagaggattggtgagattgtggctgagatggacgtccctctgcactgtcggacagagttttccacccaggaagatgagcagcttagagctcagggcaacacagactatttcttgagcagtggtgacaaggttcgattcttctttgagaaaggcgtttttgacaagaaaggaaatttcttggtccctccagagaaatctgtcaacaaaatcggtcatgctctgcacgcccatgaccctgtcttcaggagtgtgacacattctcccaaggtgcaggctttggtcagaaatttgggcctccagctgccagtggtggtacagagcatgtatatctttaagcaacctcactttggcggtgaagtcttccctcaccaagatgctaccttttctgtacacggagcccccggccggtgtgctgggcggtgtggattgcgatagaggatgctacgctggagaacggactgcct

SEQ ID NO: 3157779 - DNA, 497 bp, Cricetulus griseus
cccagctccgccgccgctgtccagtccattcgctgctattctcatggatcacatgagacagatgaggagtttgatgctcgctgggtaacatacttcaacaagccagacatcgatgcctgggaattgcgtaaagggatgaacacacttgttggctatgatctggttcctgagcccaaaatcattgatgctgctttgcgtgcatgtagacggttaaatgattttgctagtgctgttcgcatcttggaggttgttaaggacaaagcaggacctcataaggacatctacccctatgtcatccaggaacttagaccaactttaaatgaactgggaatttccactccagaggaactgggcctggacaaagtgtaaacccctctatgggcttcccaaggactcactgctatgctacttgattgaaacagtcgtctggaaatgttttatttgaactaaattttcctttgagtatcaaaccatgtaatagtaacttggactttaat

SEQ ID NO: 3157780 - DNA, 1357 bp, Cricetulus griseus
tttttttttttaagtattgagtggtacactaataaatgagagtttgaaattagaggtaatttatgttttatatacagatttcaagacatttgctaattttgtagtttcatgtgatttagttttcctaaaggttacagataataaagaaatcagaagtggtacctttctaagaattgcatattttttagacaactattagcacattaagagggaagccaaaagttactgtctacttaaaactgtgagcagttcctctcctgactccactcccttgttacctgaactgcctggttcgcacaagcagccttgtacagagggagtattggattgagaagacaatgttactggactatcgactgaaagtaaatttagataaaattaaaataaactttttcctatgggcatttcattttgtttctagtgttgcattgctatcagtgggtacagacgctttgctctttgaaaacaatttttttttgtcaaagttcttgtgtgaattattattaaaaatagcccacttcactttaatggaggttgtctttcaggagtcttcaaagaacactatttgctaccaaagtaaatcagtattttgaatgtgcttctcttggtttttttctagttcctataagcatttccaccacaacttgaggcagatcataaggaagctgtttcttttaaaataaaaccccccaccaaaaatataaatgtacagactgctttacttatttggctggtttttatttttaaaaggtttaaatgacaaaaaaaaaaaaagaaatgcttcttcaaacacattttcattatgaagtctcaccacatatactcttagatttgtgtattgcagggtgtttgttttgtatttttgtattgtatatgggcttttttaatgtgacagttaatgcatctttaatagtcacagataaaagaaataagatttccttgaaaattacaatgttaaatttggaggcagctttggtgagtttcattggtggtaattattcactaggcatttttaacataataacttccaagaagcagcctttggatattcctaacactttgttcactacatttaggtttactaataagccccaagtaaaacaatggaaatgtacatagcactgttagttcttacatgatttaagtatatcaagatacagaaatttaacttttatgtaggcaaactgttcatttgtccattttactgtttgttgaaataacatctctcctacatattctttacttgactcaaatgacatattaacttgaggtcaagatgaggagagagacgactgagctgaatgtctttactaagattacaataaattttgtcaaacttaaaaaaaaaaaaaaaaaa

SEQ ID NO: 3157781 - DNA, 335 bp, Cricetulus griseus
  modified_base (323)..(323): a, c, t, g, unknown or other
ggctgaggctccatgaagaaaaggttattaaagatagacggcaccatctgaagacctacccaaactgctttgttgccaaagaactgattgactggttgattgaacacaaggaagcctctgaccgagagacggcaataaaactcatgcagaaattagccgaccggggcatcattcatcacgtgtgtgacgagcacaaggaattcaaggatgtaaaactcttctaccgcttcagaaaggatgacggcaccttcccactggacaacgaagtgaaggccttcatgcgaggacagaggctgtatgaaaacattaacttaaaaaaaaanaaaaaaaaaaag

SEQ ID NO: 3157782 - DNA, 3169 bp, Cricetulus griseus
ggagctggctcctcgcagcgctcagcccgctgcagcttggatgtgggctcgggacaagtgctccgcgccaccgctcgagatggacagccgctataccagcgccgcgggcataggggacttgaaccagctgagtgccgccatccctgccacacgcgtggaggtgtcagtgtcctgcagaaatcttcttgatagagacacattttctaagtctgatccaatttgtgtcttatatatacaagcagttggaaataaagaatggagagagtttggaagaactgaagtgattgataatactttgaatcctgattttgtaagaaaatttattctggactatttctttgaagaaagagagaatcttcgttttgacttatatgatgttgattcaaagagtcctaacttatccaaacatgactttctgggacaagtgttttgtacattgggggagattgttggttcactagggaagtcgtctggaaaagccaatagtaggaatcccaggcaggaaatgtaggcacaatcatactaacagccgaggagctgaactggatgtcagttttgtgacaaacaaattggataagaaggatttcttcgggaagtcagatccttacctcgtattttatagaagtaatgaggatggaagttttacaatttgtcacaagacagaagttgtcaaaaacactctaaaatcctgtgtggcaaagccttcaagatctcagtcagagcattgtgcaatggggattatgacagaacaatcaaagtagaagtgtatgactgggaccgagatggaagtcatgatttcattggagaatttacaacaagctatcgggaactttctagaggacagtcacaattcaatgtctatgaggtggttgaataccaaaaagaaaaaaaaaaagagggactcagatcaacttcacagtggctattgacttcacagcatcaaatggaaatcctgcccagcctacttctctccactacatgaacccttaccaactgaatgcctatggcatggcgctgaaggccgtaggagaaattgttcaagattatgacagcgacaagatgttcccagcccttggttttggtgccaagctgcctccagatggaaggatatctcatgaatttgctttgaatggcaatcctcagaatccctattgtgacggaattgaaggggtcatggaagcttattacagaagtctgaaatctgtgcagctgtatgggccaaccaactttgcccctgtaataaaccatgtagcaaggtatgcatcttctgtaaaagatggctcccagtattttgtgctcctgattgtgacagatggtgtgatctcagatatggctcaaactaaagaatccatagtaaatgcctcaaagcttccaatgtcaataattatagtaggtgttggacctgcagaatttgatgcaatggtcgaattggatggagatgatgtaagagtttcctccagagggaaatatgctgaaagggacattgtacagtttgtgccattcagggattatatggacagaagtggaaaccacatattgagcatggctagattggccaaagatgtcttagctgagatccctgagcagttcctctcttacatgagagccagaggaatcaagccatcacctgcacctcctccatataccccacctacacacgtgctgcagacacaaatatgactacgtccagatgctgatgttcaccacacatcagtcagaactgctgagcctctgttttgcacctggtgctctgctatgaaccagggaacgggacactttctcagtttggtttcagcagtactcgacaaatgtgctttcttggatccaaaactaattctcttcctaaaccaaaactgtaaatagggtggttgcatgagcaacaggaaaattgtttaaatgcttgaagcaaagtagagatgtcttctctaattttcaaaaacttttgttttgttcttgacagaatagcagatttccaatgtattattgggacaaagcacaagttgcatttttaacacaaatattgtcatcgactgctatatacatatatgggacagcagtctctgtatcaatgtttacatgttactactttttaaatttcaatacttttataactgttcttaagaataagttttgaatattgaatcctttgtcttctaaatcgcaatagctataatcacaagagcaatatctctttgaatgactgtctggacactcatggtatgaataatagaaaagtaggaggaaaaaaatctatttactgattaatatcgtgggggtttaaagttataaacagatgtgaccttgtaagaatacacatttttcatggactttgggtttaaatttagactgactgcagtcaacttatgttttataatgctaagtagaagcaatgaaaaggcaaacatagtgaattgtaaatgcacagaacatactttgtataaaaactaccaattattaatgctatctaacaaataacaccaatactcttactccaaaccatgtagcaggtgttttgaactttgtattcagttgtatcctgtctagatactttaattcaaagggatactgactctcttgcttgagatttcttgttctcaccattccactttgccacacgggttgctcaggctggaatctcttgtgaattctcagttcaacatacacaaccctgtgacttagcacataacacatttgtgaaagaaattcgttcctgtcccctgatctgcctgtttgcaaaatagcccctccctgtcccctggcctgcctgctcacaatcaattctaaatagttttcaatgtacagttttgatacgaattacagttttgtgacattatgtctaaacttctttagaacaaatggccttaaattctcacagaattcctggaaatgattgtgaattgccttcaacatacagagatgtgtatttatttattgttctttttgtgtccacagtgtgactgctttataacctctctatcttcccctctttgctacttggagtattcctaccatgtgttctcttgtcacaacttgatgaatagtgacttttataagcatgaagatgttttattggaaaataatgtataatcctcacagataacagactcacagtcgcatagctgtgatgtgaattgtccatttttaagtacatattaaaatctttaaaagg

SEQ ID NO: 3157783 - DNA, 632 bp, Cricetulus griseus
ctcggaccttatcagatgaaaagtatatcacttccaaaatcaacttggtagatctggctggttcagagaggcttgggaagacagggtcagaaggtagagttctaaaggaagccacctacatcaacaagtcgctgtcgttcctggagcaggccatcattgcccttggggaccagaagcgggaccacatccctttccggcagtgcaagctcacccacgccctgaaagactccttagggggaaactgcaatatggtccttgtgacaaacatctatggagaggccgcccagttagaagaaacggtgtcttgaagaagcagtaccgaaatgagtaccaagaactgcgagacctcagagctgagatccagtactgccagcgcctggtaggatcagtgccgcaatcgcctgctcatggaatttgacatctggtacaatgagtccttttgtcatcccagaggagattcagacagcactgaagataggcagcagtatccggccaggcatggtgcctgtcagcaggattgtgtctctgggagaagattgaccaggacaggttcagccagctgcagcagactgtactacccgagggtcctgactccatctccttctacaatgctaagtcaagacagacagaag

SEQ ID NO: 3157784 - DNA, 2308 bp, Cricetulus griseus
  modified_base (1460)..(1460): a, c, t, g, unknown or other
cagagctaccagatactcagttagcagggctcccagacacatgccagcctgagtctttaaatgaagtcaaagcaaatgaagttaaagagagaatgtcttccgaccacaacaggagaacatcgcctgaaaaccctgagcaagagcagagttggatggtcttgggccacaatgaggatggtgatccatcctcagagacaagggacactggacttgggtctcctgacaaaactgtggagcagttcttgagtctcagcttggacaagggtcctcagtcccagattctgggaggaaataagcctctagactccttagcactggaggaagtcactgatttgaacagccaatcaaggaagagcaagagacgagggcaagctggtctagatgcagttccagagattgacatcaatgtggatgaactcgatacccctgatgaagcagattcctttgagtacactggccatgaagatcccatggccaacaagagctctggtcaagagtcagaatctattccagagtatacagccgaagaggaacgagaagacaaccggttatggaggacagtggtgattggagaacaggaacaacggattgacatgaaggtcatcgaaccctacaggagagtcatttctcacggaggatactatggggacggtctgaatgccatcattgtgtttgccgcctgttttctgccagacagcagccgggcagattaccactatgtcatggaaaaccttttcctatatgtaataagtaccttagagctgatggtagctgaggactacatgattgtgtacttgaatggtgcaacccccagacggaagatgccaggtctaggctggatgaagaaatgctaccagatgattgacagacggttgcgcaagaatttgaagtcattcatcattgtccacccatcttggttcatcagaacgatccttgcggtgacacggcctttataagctcaccttccattttaatattctgttaacccttggtgcagtgggacttggttccttagactggcttttaccaaaagcatagcctaactctgctgttagacagatgaggatgcatgtccgtagtctgactgaatttccctgtagagcttgttctagatttaaaatgcaaagggcttgccttgtcctgggaatgcagttctctagaaactctatgaaaagctgaatgcttcaggccacaaagcaggttcaaacctttaaactccaagtgccaactccaaggtggccaactcaaacataatttggtaacattgaatcatccaaaattaacactcatgtgcattgcaaaagcaacctgctttcagaggtataaaattaaatgcaagtgtatactagcctttatgaaatagttcgtttcttgtttttctatatcaccttaaattgccagtgtaatttctaatctgtggatctctagaggttggcaagcttctctctctcttttttttntttttttttttttcactcaggtgacatgacatagtaaatttagtgtgagtctatctttcaaataaatgatgtttggaataccctgggctgtaataccattccaatgtttaggcttatgctatcttattatcttcaaaaaaaagttactttaactgcacgtactagagaaaagctaccatgttcatcaactcaatagacttctggcaaatccctgaaatagcccataaacaggtagatataactcttgcattgctccactctagtgcctgcaccctcagcattcttgctttggttcagactgccaggaactgctttgcactttttcctgtcaatttgtagttgagggaacaccaaggcatcatcagggccaaagtggtgttttcattctaagtagcagctactgtttagctagctttagactaagggatggaacaacaatctgcacagaaagtagttgatgaagagtgcccaaagttcctgttgaagccatacagtgttatataaggttcctccctagggcatactgatgagcaaggacgtcactctccttagcctccaatcttaggatgtagttttgaggatttctttatggttctgcataactactgtcttatcacaatgcccctgtggtctgctactttaggatatctgtgtgtgcacaaattaaccttttatatattgaaagagttttctacatgtattggattgctcagagtaaagtatatattagacttgttttggtaaacaaatactacctaaatagtatggatcaaaaatatgaaaatatgtaagaacacatatagctatataccctggctgtgtaactcagaaataaaaatagattacca

SEQ ID NO: 3157785 - DNA, 2149 bp, Cricetulus griseus
  modified_base (517)..(517): a, c, t, g, unknown or other
  modified_base (638)..(638): a, c, t, g, unknown or other
gctgagtggaggagttgatatgtctcattataacagccaatgcagccgccatccacgcacaagcaaagaagcatgtcccatttaaaatacacccacgcagccccagcgcccttagccgatcagggcgcgcagcccacacgcaccgcggctccgggcttggagatccgcgcaggtcgggctccgggatcccgcggatcgacactctcggaagatcgggatctcactctggttggggcccgggtgggcgggggaggctgggccccgggcctctctggcggacagccgcatgaggacgcgagcgacatagaccagggtggaattgccaaggcagacgtttctggctggttttggtccatttctcccgcgaagagtcgacatggcgagcgactccccagctcgcagcctggatgaaatcgatctctccgccctgagggaccctgcagggatctttgagttggtggaacttgtcggaaatgggacgtatggtcaagtgtataagggacgtcatgtcaaaacnggacaacttgcagccattaaggttatggatgtcacaggggatgaagaggaagaaatcaaacaagaaattaacatgttgaagaaatattctcatcacaggaacattgcaacatactacggtnctttcatcaagaagaaccctcaggcatggatgaatgggctggggcgagaaagctattgagatccggtcagtggaaacaggacatttggatggagtatttatgcataagcgagctcaaaggttaaagtttctatgtgaaagaaatgataaggtctttttgcatccgtgcgatctggaggaagtagccaagtgtttttcatgaccctcaacagaaattccatgatgaactggtgacagaagagcacttggcacttatcttcatggcgtaatttctaatgagctgaggttatatgacaaccatgctctggaatgccagcccaagggtgccactttatcaagattttaaactgtgacaaacaaagaagaatcactaagaaatacttctgagctgctgtgtcctcactgagtcaagggactagactcctgagcctgcacagacactgcaggctccaacagctcaggtcttagggaacctgaaggcaaggctttggccaaaattctgagaacctattcatgttatgttcctccaaacttcccaacatactgttaacaacatctgtgcagaggtgtgtgtgtatttagttcaggttgacttgtgtctgtaaaacgcttatttggatgatttgaacctttatgtgactggctgggatgtttcccatagctgtaagcatggccgcctatggtatccaggtgttgcaaaatggtatctgtgctgtgcttcctgttttaacctacctcgttttgtttgtttttgtttctctgttcatcacagcagtgttatctccaggagacatatagagagctcaattgggcaatctcagctctattgaatattttcaaaataatagttcaccaaattgttctttaaaaattggagggagaaaaaaatcttcaatgacaaaaacctaatgaggtttggttttaagaatgcaattactgtaaatggatcaaaaaagaaaaacaaaaattagtgatcctactgattttgcctaaacaaatgagcagctaatgtactattaatgagaacgaaacacatgctaggaaaatttgcagttatctaaagcaggtgacaccaggaatgtaatgaagggtggtcttcaggtgaccaccagatatgcccatcatggtccctctagttctcaaaagcaatgaaatcctcccgttctcatttttactgctggggttatgctgctgaacgacactgtcttctcaaattccgtgggaaaaattcagcaaaattcagcaactactggaattggatgctgatgtggacaaaaataacagatcttgtctccaaatgtgattgccaccagctctttatattgctgctgtgacagtttgaaccagaggcttctttaaattatgttgcaaactgatctttgtttttatgttttgttttgtttcattccttatttctaagttgattacatccaaaacacacagctttaaatgattttttattgtgggactttgggtacagttaagaaataaagggaatcattgtagtttaaa

SEQ ID NO: 3157786 - DNA, 307 bp, Cricetulus griseus
ggctccttatcagcaagaggctagctcagtgtttgcatcctgccctgcccagtggtgtgcacctaaaggccctagagacctacgagatcatctttaagattgtggggaccaaatggctggccaaagacttgttcctgtacagctgcggcctgtttcccctcctggcctatgccgccatgtcggtgcggcccgtgctgcttggcctgtatgagaggtacttcctcccactgcagaagctgctcctgcccagcctccaggccttcctggtgggcctgctgccgggcctggaggagggctctgagatcta

SEQ ID NO: 3157787 - DNA, 460 bp, Cricetulus griseus
aaagatggaagacttccaggctgctgaggagactgcatttgttgttgatgaagtgagcaacattgtaaaggaggctatagaaagtgccatcggcggcaatgcctaccagcacagcaaagtcaatcagtggaccacaaatgttgtagagcagactttgagccaactcaccaagctggggaaaccatttaaatacattgtgacctgtgtgatcatgcagaagaatggagctgggttacatactgcgagttcctgcttctgggacagctctacggacgggagctgcacagtccgatgggagaacaagaccatgtactgcatcgtcagtgcctttggactgtccatctgacctcctcgccagcctgtagcctgctgtgtctcagcatttctgtttcatcttaaccaccagctacaaattgggtgaacacctctctcctctttgtgttttgtggcactctcaaaa

SEQ ID NO: 3157788 - DNA, 1705 bp, Cricetulus griseus
ggaaagaggcgtaaggaaacaatttccaggcccgccgcgtccagcccgaaatatgagaaaaaattattagaaattccgcgggcggtgtaaaggcggcggacgggccggagggaggatgttaaagccccgcggttgcctctcgtgctgccttggtgggattgggcacccagaatgcttcattctgtgatggtctattaataaggtggccttgctagagtttggaacagggcctcagttactttactgtcatttatgggaacagcagtgagtaaaactggcctgaccctgccctgagctgcctacagttgattgttcattctctgaagattggccaaaatgggaagggctggattctgctctcttccacgaagagttaatggaactggctaagatcaaaatctgaggcttttcccatccggaaagaccattgaagaatcacctgcatacacacgaccccaacaaagagacctttaaatgcgaagagtgtggcaagagctacaacaccaagcttggctttaagcgacatttggccttgcatgctgcaaccagtggtgacctcacctgcaaggtgtgtttgcagacttttgaaagcacaggtgtgctcctggagcacctgaaatctcatgcaggcaagtcatccgggggcgtgaaggagaaaaagcaccagtgtgagcactgcgagcgcaggttctacacccggaaggatgtccggagacacatggtggtgcacacaggaagaaaggacttcctctgtcagtactgtgcacagagatttgggagaaaggatcacctcactcgacatatgaagaagagtcacaatcaagagcttctgaaggttaaaactgaaccagtagatttcctggacccatttacctgtaacatgtctgtgcctataaaggatgaactcctgccggtgatgtccttaccttccagtgaactcttgtcaaagccattcacaaacacgttacagttaaacctctacaacactccatcatataggagcgccattatcactaaattctacaagttcctgtagtccaaattacgtattagaccttaaaattttcatttttgtctaatagcaatgggcattggacatttggctcattttttttcaaatatgcagtacaatgtaaatcttatgacatgtgtgtgaataactgaagtgttttatatttttttactagccactaaatggattcatgatcaagtgttttaaatgaactaagaatccagtttggggagattatagtggtttcttaaatataccatcacttcagatcaatatattttgaagactgctattgtctggctaaaatatttcacctttcatacccaggatggcttcggtataccagcattcttatgctgcatgttggcccatagttagtccagagtcttagagccattgtgggacagtagtaaatatgtgaaacccagagtaggctgcctcaattgccagggtgatagactcctcaacaggaagatggatgtaaaacatacagccaaacctcagaacttgtctagagaatttccactgttgccagaactgaaaactggactctttgggggcaaactaaaagcctgtcccaccacttgtaaaacagcagtctaccccctgtagctctcttgactcagtgcccatccatcatatatatatatatatatatattccttaatttgtagtcttgtatatgtctatata

SEQ ID NO: 3157789 - DNA, 1269 bp, Cricetulus griseus
agaacgatttatctgaaaacagtttggaaagcaagtttgtggaatcaatgtataatgcattttgggaccacttgaaagatcaactatcaagtactcctcctgactattcttgtgctcttgaacttataaacaacataaaacagattttggtatcgctgctattaccacgtcaaaaccgtttaaaaaacgagaattgaggaagcattggacatggatctcctaagacaagaaacagagcatggggctctggatgttcctcatctctccaactatattctcaacttgatggccctcctgtgtgcaccggttagagatgaggctgtacaggaattagagagcataaaagatccagtagagttactgaggggaatcttccatgttcttggcctgatgaaaatggacatggtgaactataccatcaagaacattcgaccatacttgcaagaacattctatccaatatgaacgggctaaattccaggaactccttgataagcagcccaatttccttgattgtaccaccaaatggatgactagagctgccacagatattaccacaccacttccaagtacatctgtgtttgcgagttcctcttctagcacaataagttcatctccaaattcaaaaactgacctagagccacctagtctaacaacagtgttataccaaggctatctaaaccttgttctcagggactatgggagtgaagaattccctgagactctgctgatggataaagcacgactgcagaatatgaaatccaaattacgccacttgactattctagcttcagttttacttgtggcaagaagtttctcttgtggtgttttattcagctcaccagaatttgtggataaactgaagtgtataaccaaggctctaacagaagattttagctccaagccagaagagtctatgctcagtgtcagtgaccaagtatctcaggaaatccatcaagggctcaaggacacgggcctcactgctttgagcagtgaaaacagggcatctcttgtaggccaactccggaacatcgccaagaaggagaactgcattcgtaccatcattgaacaacggatacatttgtttcttaaatgctgtttgattcgaggcatgcaggaatctcttctagacttccccggaggacttcttttcattgaaccagagttggcagaactaggctggaagtttgttaatttgatgcatcacaatcagcatgtatttagtccatactatgctgagatactaaagcgaaatcatctctcaaacaaa

SEQ ID NO: 3157790 - DNA, 1715 bp, Cricetulus griseus
  modified_base (1165)..(1165): a, c, t, g, unknown or other
gtcacgttattcattgtaaattttcattctgttttgcatgtcaattagcattatgtaaaacatttataattaggttacattgtttttaagaacttgtagcataagtgaagcatgatccaaaatacttgattattgcattttcagagcataaaccagtgaccctgctgctggcattagaaaggaagcgcacatgctaagtatatgtgaggtacagattgtaaacatctgttaaaacaaaacattttggaggagtgaatgtattagtataatgctaagtattaaggcgggtttatgctctgaaccacaacagaaataccgaggaagtacaattttttactagaagtccatttagaaatacatatatatatatatatatatatattaaaatacctacacctagtgttatcacagacagttctcacaaatacataaaaaccccagcagttgtacatgtcctgttttttaaaattgtggtatgtattttgggtggaaatcattagagtgagagctgtctaaaggttttctgtgttcatacatggtatacagatagctcatgaagtccagaaccttcccaagtgaaggcattgtgaattctcctcagataaacccattgttccaaaagcaaccataaactgactctagtactactacagtaaaaaagtaacaatgaaccttctgcttcctggtttcagatacactggattctttagtctgtgcccacatgagagcacgctgctgggctgctcctgttaaggttgtgtgtgagtttttctgtcagtgtggttgcttgctgtgctgtacctatgtatgggttcttgtcctttccacgtccgtcatgagagacttgggtgtggcttgatcttgtgccttacttgtacacttaaaatgaaacatcttcattccctcctgcttcctaaaaccttaactttgtcccttttgtaagagaatcagaactattccagaagcatcatgaaggatttcagatgggcatggttccatagttccctctctttgtagttattatatacttgtatgagagacaattttgaatgatctttgagtaatcttactacatcccttctctggcttttgtgaagttgtcatgcatctctctgatgtttgacttcatttgcttcttagcaagtctgcattacagaaaggtgtncattcatctgcttgaaagtgactattttgttttccagaactttttaggagaagagtacccatttttgttttttttttccacatgttttacgacactgtactccactgcctgctattgtcttcttgccatagagtctgtcccatagcatagcatttgtggttcagtgactccggagctgccaacacagaagggcaagaattcaaagtgtttgttctatggtttggcagcctcttcaaatagttgtgcttaggatcctgtctgtgatatgatcataaatactccatagttttgtttattccccacccccagctggagctgtgacactttattggattcagtcttgtctcttgtctagaaagcattgtatcttgttcacgcatgagctgtttaaaaatgactcaacgttggttaatagtcgtgcagttctcctttcaggagaaggccatacacaggttgctttgttttctgtcaccctctaacctgtctcagcacttgtagtcagacacagaatcatcagtgtatgcagcaccctttgtaatttaaaataaaa

SEQ ID NO: 3157791 - DNA, 511 bp, Cricetulus griseus
ggaacggaaactgcagaaggcggtggagagctttacctggaatattacaatcttaaagggacaagcggatcttttgaaatatgctaagaatgagaccttggagaatctgaagcagatccattatgcagctgtttcatgtggactgaacaaaccaggcactgaaaactctgaggcccagaagccacgtcggagcctggaagtcatccctgagaaagccagtgatgaaaacggagactaaggggcctccccatcactgtagagccacaaccttagaccagtcaccaagtacgctgcgatcactaaggagagtatctgggatttcaaagcacagctggaatacccgattgcactctgttacagctgtgaatgtatgtagcaacccttgtgtgaaggcgaataaactcttgaacaagaaattctatccctggcccaaatatgctgtatttgtacgcaaaacatccgagtcccactgtgaagaacagtgcattcgctctagttccagaagaaacag

SEQ ID NO: 3157792 - DNA, 336 bp, Cricetulus griseus
ctgtaaccgctaccctgaacccatgactccagacaccatgatgaagctgtacaaggaagaaggattagcctacatctggatgcccacaccagacatgagcactgagggccgagtgcagatgctgccacaggcagtgtgcctcctgcacgcccttctggagaatggacacactgtgtatgtccactgcaacgctggggtggccgctccacagccgcagtgtgcggctggctccactacgtgattggctggagccttcggaaggtgcagtacttcatcatggccaagaggcctgcagtctacattgatgaagaagccttggcccaggcacaggaagac

SEQ ID NO: 3157793 - DNA, 3447 bp, Cricetulus griseus
agcctgtggagcgattaaaccgtgcgcggagctgcttctttggcggcagcggcgacagtggtagccagtgcaggcacgcggagctggccggggacgccaggtggccggagcggtggagcggcggcggagcgggcgccgcgggggtgtggcgcgaagaatgacaaacctagaaccaaagaacaagatgcactagcagacagacttggagctagagactggagagctgggttctgttttccctcctcaaactgattttgtcagccacggagaggaaggggaaatggaaggtgaggcagttgaagccattgtggaggagtcttgtaaacttttctatttaaaggaaaggagagaaagacttaccagagacgtcgggaagggggccaggaagaagacgcttgccacttgccccagaaccagacagatgggggtgaggtggtccaggatgtcaacagcagtgtacagatggtaatgatggaacagctggatccaacccttcttcaaatgaagactgaagtaatggagggtacagtggctcctgaagcagaggctgcagtggacgatacccagatcataaccttgcaggttgtaaatatggaggaacagcccattaacataggagagcttcagcttgttcaagtacctgttcctgtgactgtacctgttgctactacttcagtagaagaacttcagggggcttatgagaatgaagtatctaaagagggccttgcagaaagtgaaccgatgatatgtcacaccttacttttgcctgaagggtttcaggtggtgaaagtgggggccaatggagaagtggagacactagagcagggggagcttcctcctcaggaagacccaagctggcaaaaagacccagactatcagccaccagccaaaaaaatcaaaagaaaacaaaaaagagacaaactacgttacacggaggagggcaaagatgtaggatgtgtctgtctatgattttgaagaagaacagcaggaaggtctggctgtctgaggttaatgctgagaaagtggttggtaacatccgctctcatactggagagcgcccgttccagtgcagtttgtgcagttatgccagcagggacacatacaagctgaaaaggcacatgagaacccattcaggggaaaaaccatatgaatgttatatttgtcatgctcggtttacccagagtggtaccatgaagatgcacattttacagaagcacacagaaaatgtggccaaatttcattgtccccactgtgacactgtcatagcccgaaaaagtgatttgggtgtccacttgcgaaagcagcattcctatattgagcagggcaaaaaatgtcgctactgtgatgctgtgtttcatgagcgctatgctctcatccagcatcaaaaatcaacataaaaacgagaagcgcttcaagtgtgaccagtgtgattatgcttgtagacaggagaggcacatgatcatgcacaagcgcactcacacgggcgagaagccttatgcctgcagtcactgcgacaagaccttccgccagaaacagctccttgacatgcacttcaagcgttatcacgaccccaactttgtccctgcagcctttgtctgttccaagtgtgggaaaacattcactcgccggaatacaatggcaagacatgctgataattgtgctggtccagatggtgtggaaggggaaaatggaggagagactaaaaagagcaaacgaggaagaaaaagaaagatgcgttctaaaaaagaagactcctctgacagtgaagaaaacgctgagccagatctggatgacaatgaggaggaggaggagcctgctgtagaaattgaacctgagccagagcctcagcctcagcctcagcctcagcctgtggccccagccccaccacctgccaagaagaggagaggacgacctcctggaagaaccaaccagcccaaacagaaccagccaacagccatcattcaggttgaagaccagaatacaggtgcaattgagaacattatagttgaagtcaaaaaagagccagatgctgagcctgtggaaggggacgaagaggaggctcaagcagccaccacagatgcccccaatggagacctcacgcctgagatgatcctcagcatgatggaccggtgatgacggggcccttgctcgtcaccaggactattggggctgtgtttaaacggcccacatcttaatttttctcttttcttttggctttgggaacggcataattttacaccattttaccaaacatactgagaacgaaaacttcaaggatgatgttagaaaaatgtgatttactagaacttgttgtttgatgttagcaaatcatggaatgttccaagtctctgagggtttactgtgaagtgctgaggacagtgttgatgcctaactagttttcttagatggaaacagagacattgagccctctctcttgatttagtaaaccactccagaatggccacgggtttcccagagttctatggtcttcccaagaagagtttttaattgtaaatgcagacttgggaaagacttaagacttttaacctggtttttgcttttgcttttccctgactccctttgctaggagtcagctgcacaccagtaggatggcatgctacgatcagtttctgtcctgaatgctttgcctctttcttggcaaagtttctggtatggtcaagcttgtaaataaccttttttacattttaatcttttccattaattaagaggttgaaaagaagcgcagtgtaagaaaacccagcattttaattacttgcaaattaaggtaccagggactgggtggtgtgtaaatgttgtatctatcacaatcatgtggcagaagggcatcgggcctgctgcctgctagtgatggacacccatgtcgaaagttgtgatttccagctcatggagccagcatttgaaccttgaacaaataactctcatttatgatttcccatcaacatttcctttgctctgtttgtagctgaatgttatattttttaaatctttgttaaagccagaagagttgattatgaatgggtcacagcagccctggcaagctgggccaaaaaatttcactaggtcagtaatttaaactttggatctaggaaaaaaaagttaataataatgtgaagcaaaccaacttaaaaagtgattcttgcacatgaattgtcacatgttgatatgtgtttttaaaaagagcctcagtctgactgatttcaaacacttttttcttccgtgtattgcttttaagagagccatcagttagctatcagactctaggttgatgcatttttgtacttagctgtactgtgtgatatttttcattattttaggacgccaacatgagacctgtaataaaatatgtaatggggttgaaagctggggagaggatctactgctgtacagctaataaatcataacggattaacaggacaaaaaaaaaaa

SEQ ID NO: 3157794 - DNA, 2378 bp, Cricetulus griseus
  modified_base (309)..(309): a, c, t, g, unknown or other
catcaaccaaatcacagaaatcctcctgggggagaccaaaagcctatgtgttctttgagcggagctatggagacatgcattcctttgtccgcacttgcaagaagctaagggaggaggaggcagcccgactgttttaccagattgcctcagccgtggcccactgccacgatggagggctggtgctgcgtgacctcaagcttcggaaatttatcttcaaggatgaggagaggactcgggtcaagctggagagtttggaagatgcttacattctccgaggtgatgacgactccctttctgacaagcatggcngtttttcccagcatatgtcagcccagagatcttgaacaccactggcagttactctggcaaggctgcggacgtgtggctacagattttagcgtctcaaattcgggatttggtgctaaagaggcatctgaccagctggtaccagatgtcaacatggaggagaacttggaccctttctttaattgagctcaaggcccacggacacttagcaggtaccaggagcaagagagggtcccagaagggagttctgggacacaggtggcctggctgggaagcaagacggacactcgtatgtacacatttcttggttcagaggaggaataccttgcaggagctgaccgaacacttagcatgggaacaagacatatgggatgggggttgggtttagatggttgggagcccctcccctaagtttctcttccctggggtatcctgagagtcccccttgccaactgggctacttcatctaccccacttttcattttgttcagaaaaatttacagatctcaatacaattaaaactcttctgacctcaaacacataccttggcattgcactgttagcatttaacttcttgttatgattcagggaagggacaattgatcgaagatttttttatttttttttaaacaggccaaccacctatgtaataattaatgggattcacttataagaataataattcggtgcacacagactgacctgaaacctgggtgctaagctaaaagaaaacgaaagttccagttgttgtctctcattcacactttcaactcatttcttctaaataaatgatttcctattctgcctaggaagtgacatgttaatgctttgttccctgaagtggagagggaaaggggtagatctgttctgtgacagacgtttctgttttgcatcacttggtttttgtagcaggaaactattagaagtcaaacttccagatgtgctatcacagtccaggggaaggggaaaggaaaagagaaaaatccaactcctttctgctttttgttcttttgaaggaagaaggttcatactgtagacattgcttttgactctgaatacagggaggggattccaggcggcaataggggagctcctggagttagatctcattgatgacgctgatctcaaagttttggttttgctctatgggaaactagtaaaacaagacagtttgtcccatgtgtataaaatatagggcagctatttccttttctttgctaagaatgatcctctgggcgcttggaaaagccctctggtttgaacaggagggatgatataaatacaaacagctctctgtcccaatacacacctttgtatttttcaagaactcttgtatttattaaggaaaatgtcacattgtgatgtattaagccagtacttcaattacgggtcgacgggatgacatgttacatgctgtagttaacatttataattttgttcccctgtttgagtaattctgtcccctggagtaacctttcattttggctttctctagataaaacttatttgatttcaaagtggcaaaatgttttccttttgtattctggcttttctattgctgtatgatacagaactcttttggcataaatatttgtgttcccagtacctcagtcgtttgggttttactgcctgcatatgttttgtgaaatggtcctgtttttgggtaggtaacacgtggactctagtatgtaaatgttacttgaatctgtgcttcactctagtatgtggcatgtgtgtgcggactcttggatgcttcacgcctactccacaggagcccctgtccccaggagggtggcttccccattcataatcaggagacaaagctgccatggattcttgattctattttgataatggaagatacagaaagagggtttttacactcggaagatggtgctgtggcaagaaggactttttatcttccctctccccatctttccaagtactgggtgggaggaaagattggaaacatgcatggtggggactaatggcctctggtgctttgtcctgtatttgatttaatgtttttgtcctaatctcttcaatcaataaaattgtgcgtatttaactaa

SEQ ID NO: 3157795 - DNA, 233 bp, Cricetulus griseus
ctggctgtcattccagctgctcaaggccacagagccagggctgttcaccgtgtgggctcacaatggcgaggtgcgcacctccaggctgctgagtgagcgcgatgctcccaagctcaagctgctgttgctggtcaaggacaatggcgatcctcctaggtctgccagtgtcactctacaagtgctagtggtggagtggcttctctcacgccctacctgcctctcgcccgaggtgg

SEQ ID NO: 3157796 - DNA, 402 bp, Cricetulus griseus
tgcttgcaggagcaccgtgcagatgtccaagggacaggtacaggatgtatgggctcactgccgctgggcctccacatctgagtccaacagcagtgaagagatgatttttggggacatgccaagatcctatagacggagaaacgattatctgcttggttttctttctgatgaatctagaagagaacgattccaggagcgctcacttgagacagtgagaagggggcatcctcctgcacatagaaggttccagaaccttcaacacagagcaagaataaattctggctttgagtgacatcctggagaacccgtgaagaagcagaagtggcagtgaagaaagacgtgtgtcggattgtgtcattttctccttgataagctccactatgcaataaacatctttcgctt

SEQ ID NO: 3157797 - DNA, 3254 bp, Cricetulus griseus
cagccgtgatggactcatcaccacagcccttctgtaccgtggggcctgaatctgacagcagtgacggtcactgccgagaatggccatattgtcgccttcctgggcacctcagatggccggatccttaaggtgtaccttgccccagatggtacttctgcagagtatggctctatcctggtagacatcaacaagaaaatcaagcaggacctggcactgtctggaaacctgtccagtctgtatgctatgacccatgataaggtgttccggctcccagtgcaagaatgtctgagctacctaacctgtgctcagtgtcgtgactcccaagatccctactgtggctggtgtgtcgtcgagggacgatgcaccaggaaggctgagtgctcacgggctgaggaaactggccactggctgtggagccggagcaaatcctgtgtggccatcactgatgctaatccacagaatatgagccggcgggctccaggacaggtacggctgtctgtcacgccccctacccaccctgactcaggaggatgagccctgaagaacctgaggcttacaacctcactgcattgatacagatggatggtcatcgtgccctgctcaggaccgaagctggtgcctttgagtatgtggcggatcccacctttgagaacttcacaggtggcgtcaagaagcaggtcaacaagctcatccatgctcggggaaccaatctgaacaaggccatgacgctggaggaggctgaggcatttgtgggtgctgagcgttgcattatgaagaacactgaccgagactgacctatacgcgagacacaacacacaacctgcctgagttcattgtgaagtttggctctcgagagtgggtgctaggccgggtggagtatgacacacgtgtgagtgatgtgccgctcagtctcatcctgcctctggtcatggtgcccatggtgtttatcattgcggtatccatctactgctactggaggaagagccagcaggccgagcgggagtatgagaagattaaatcccagctggaaggcttggaggagagtgtgcgagatcgctgcaagaaggaattcacagacctgatgatcgagatggaagaccagacaaatgatgtgcatgaggcaggcatccccacgctggactataaaacctacaccgaccgcgtcttcttcctgccctccaaggatggtgacaaggatgtcatgatcactggcaagctagacattcctgagtcacggcggcccattgtggagcaggccctgagcccctgtacaagctcttcaaggccatcaaacaccaggtggaaaaggggccagtggacgctgtgcagaagaaggccaagtacaccctaaacgacacagggctgcttggggatgatgtcgagtatgcacctctgacggtgagcgtgatcattcaggatgaaggagttgaggccatcccagtcaaggtcctcaactgtgacaccatatctcaggtcaaagagaagatcattgatcaggttgttaccgtacacagccctgctcttgctggcccaagcctgacagtgtggtccttgaatggcgtcctgggtccacggcccagattctgtctgacttggaccttacctctcagcgggaaggccggtggaaacgaatcaacacccttatgcactacaatgtccgggatggagccaccctcatcttgtctaaggtgggagtctcccagcaaccagaggacagccaacaggacttccctggggagcgccatgcccttctggaagaggaaaaccgtgtgtggcacttagtgaggccaacagatgaggtagatgaaggcaagtccaagcgcggcagcgtgaaggagaaagagcgaaccaaggcgatcacagaaatctacctgacacggctgctctcggtcaagggcacactgcagcaatttgtggacaactttttccaaagtgtgctggctcccgggaatgcagtgccacccgcagtcaagtatttctttgatttcttggatgagcaggcagagaagcatgatatccgggatgaggataccatccatatctggaaaaccaatagtttaccacttcggttctgggtgaacatcctgaagaaccctcatttcatctttgatgtccatgtccatgaagtggtggatgcctccctgtcagttattgcacagacattcatggatgcctgtactcgcacagagcacaagctgagccgtgactctcccagcaacaagctgctgtatgcaaaggagatctctacctacaagaagatggtagaggactactataagggcatccggcagatggtgcaggtcagcgaccaagacatgaacacacacttggcagaaatttccagggcacacacagactccttgaacacacttgtggcactgcaccagctctaccagtacacacaaaagtactatgatgagatcatcaatgctttggaggaggaccctgcagcccaaaagatgcaattggccttccgcctgcagcagattgccgctgcgcttgagaacaaggttacagacctctgaccaccaggactgcctcaggatgcaggtgtgtggtaccatggcattgggcagcctcttggcgtgagattgcactggctgtagctgagttcttctctctctccagtagaggatgcacccaaggcgtctggagtgggtatagtgggcccacctcctgtagacttgtagcgtctttctcctgagcaatactgcccggggcgcccgagtcagcaccagctccttccaatggcaccagcatcgggtgctctctgtgttgtctcctgagtaattcgcaaatgtgccttacaaagccacactgggccactgggggctgtggagccttggcttccccttcccatgcaccagcagcctagcctcctcagatactctgggtttggtctgtagctcccatggccagttcctggactgtatctgcctgccagatggaaggagaagaaaagcggtacaatgccttcctgacctcactgagcctccccatggggcgcaggcactccaggaggactttgagggccatcactggctccacctctaaggtcaagctggacgtcagacgtcggggcccaggtggccagagggacccagaaaactgaggtcctggtctcagctgtcaaacaggctgtcctggaggccctgcctggatctggggtgctggagcagcatctccaccaggaccacccacccctttttgtaaatcttgattgtaaatccaatacagttgtctttttcactctc

SEQ ID NO: 3157798 - DNA, 765 bp, Cricetulus griseus
acagcgtcaggaaatgactgctttcttttaaatttatttgatgacgatttaattcaagatttcctgtggatggactgctgctgtaaaattgcagacaagtatcttttggctatgacctttgtttatttcaagagagctaaatttactataaatgagcataccaggataaatttctttattgctctgtacctggctaatacagttgaagaagatgaagaagaagccaagtatgaaattttcccatgggctttagggaaaaactggagaaaattgtttcctaatttcttaaagttaagggaccaactctgggacagaattgactatagggctattgtgagcaggaggtgctgtgaagaggttatggccattgcaccaacccattacatctggcaacgagagcgctctgtgcatcacagtggagctgttaggaactacaacagagatgaagttcatctgccccggggtcctagtgccacaccagtagattgtttactgtgtggtaaaaaaggaagatatgtgagactgggactgtcttcatcatcatcttcatccagtgacacagtagagctaatggaaaaaaattctcaggaatttcacaattcattatcaatggacatgataggtgaaccttctcaagctaatagctattcacaagtagccaatgaccatcaatcaaacagagaaaaggaaactaatttatgaagaaagacaaagctatggagtggtttacaggaagtgaagaatgacatgactcaactaaagcaa

SEQ ID NO: 3157799 - DNA, 272 bp, Cricetulus griseus
ccgacagccccatcaccaccgtagtggggaagccccatcgaggtgcagatgacaccacagccctcagaggaggaggtggatcagcttcaccagctctacatcaaggagctatgcaagctctttgaggaacacaaactcaagttcaatgtccctgccgaccagcatctggagttctgctaagcgcctccagccagaggacagctgcgtctgagagcctgcaggagtgttgtgataagaggggacttccacagccaccctgaactcctacaaac

SEQ ID NO: 3157800 - DNA, 319 bp, Cricetulus griseus
tgcaggacttcatttgcgtgtcatacctggatcccgagcagcagtcacggacactggcatcacgggcagacacagaagcccaggcactgtgtgcacagtgtgccgagaagtttgaggtggcccagccccaaggctaccggctcttcgtgctggtggatggacgctgcttccagctggctgacgaggcactgccacaccgcatcaagggctacctgctccggagtgagcccaaacgagacttccactttgtgtaccgacccctggacagtggcagggatggctcaagccacccctatctagtggtgcgggagcccaactt

SEQ ID NO: 3157801 - DNA, 379 bp, Cricetulus griseus
gagaaccgtagtctccagagcttgaacattgaatccaacttcatcagcagcacagggctcatggctgtgctaaaggcagttcgggaaaatgccactctcactgagctccgtgtagacaaccagcgccagtggcctggtgacgcagtggagatggaaatggccactgtgctagagcagtgtccctctattgtccgctttgggtaccactttacacaacaaggaccacgagctcgggcagcccaggccatgacccggaacaatgagctgcgccgacagcaaaagagagataacatcacctgtccttataccagcaagagatgagaggcctggacatataactcctcatctctcccatttcctagtaaataaaatccctttt

SEQ ID NO: 3157802 - DNA, 2743 bp, Cricetulus griseus
tcggcgacgacgtgtggggtcgagcgcagcctggcggtggcgcggcgcagggcgagccaagtgctgcgagtggacctggaccccgtggtgaggctgcgccgcttcccggtgccccgggcgtgagccagcgagcgagccagccagccagcgagccagcgagccagcgagcttcggcgccagaacggactcccgtcagtcgaatgtttacagaaccggcccctttaggtgcactttatgcgcgaacgaggcccggatgcggtgcggcgccgcgacaggtaccgccccgcgcccgcggccacccggcaccgcccgacccgggcggcacaggtccctcggcttcccacccctgatggagacgtctccagaactggagggacacctgcgttttctccctctcggactctacctcacaggtctggaaggcctccgaagacttagcatttttgttcctttctccaaaggaatttgttttcgtgcttgcgtaataaagccagaattctacttgctctttattctccctctcctgtttttcttttggactgtcagccccactttctggacggaagatcgactgtgcttcacggtgttgtgttgatgtaagctcagggtgttctgaagcccactcgtttcctgatttttactggattccaaagctttggtcaaggttgtcttttaagaggttcaagtttgtgactgttaattgtgagatttgtgtggctttgaatttcacgagctcagtgataaccaagagatgcaaagtacaactgtttaagaagaaagttaaggtgtttatatataaagttttatattgaagtttcacatttatgtttactgagctcctaaagaaaatggtagaatattctttaaaagttttatttaggaaaagttgacttgctctattctttttaatttaataaaattgaagtgttttggaaccactttttcccttccttccattcataattttgttttgcaatctttgatagctaaaggtcacaggaatcaaaaatcgagccacacagtactgacccttcttgtacacttttataatagtagcgtgtataccatatgacccagtgtggagttcttgattatccaagtgcctttggtcattggtggcagcaagacttggtggtttttagccagtggtgccacagccagctttttctgcaatacctaaagggtcagatagtgttttctaccactattatttccgatttcagtgttctgccgtgggacatccacactgggctggggcttgttaaaccctcagtgctaaggcacacacacacacacatatatatatatatatacatattttatgccagttttccacaagcctcaatcttttattaactgctcaatgataatacattgttagaaacactgttacttgagtacataaaaagtgaataattaccagagggagagtgttaagttgtgtcatgggaagctgagacagtcttggttattagcttccattgccaaatgtatttcagatacataggattttcttcccaaaaatatattaacttttatagctaactagcacctgatgaaaatgcatttgtaccacttcacttgtatatagttttataacaattaagaaatacatccaatggccatattagaatgtaatttcaacatggaatttatctagatgcttcccagagggttctgaaactagacatgactgaaaggataactttcctcagcacacagtggacatgtcaccggtgacaccatgcatttatttttactgaggttttagacatttgtgtctcttatgacttggctctttagtgacattgaccttccgcataaatgtttctttggcttattcatctaactgattaaagtttagatatggttgcccaccctgagtttgatatggttcaaaaatacaacctttattttactagattttctgcagcaagacctgtgttgcaattttgaaaaatatgaagacacatctaatgtaattagggagtcttttataaggaggtgagggtatttcctggatacctttggacaggctgtggaaagaaacttggccccgtggcctttaaggtgaagcctgggttttgtcctggaaagactagcttggtttgtgcatggttttttaaaggcgccccattggttctcctgctctctctcatctctcatatggcacaaatagagaggtcagctgggaagaactgcatcaccttgctaagcttttatttagtttttgacttttgagttcctacttgtgaccagcacctcaaggtcacctagggcaagctttgttgttggtagtgcagagtgctgctgttgtggtgcctatttattttgtctgtcccggtactctgtggacaagtgtaacttaagctggtagctcatacctgttgatttgccatgtgtacataatactactatttttcaaaaaactttataaaaaactttaaaatatttgaataaaaaatcacaattttgaacttatttttctgttgttgctttaagggttgctatggcattctttaaattggtgatttttaatgaacatacataacatttgctttattggtgtgttcagatattttttgataaactgttatgtcttaagtgcattagaaagcaattgtttgtaatggaactgaactttttctcccctgaaccgtttaatgtgcatatgaatgagatttgcaatttggttgtgtgttgctttttaacttattaactgtaaataaattttgagcatata

SEQ ID NO: 3157803 - DNA, 1961 bp, Cricetulus griseus
gtgcgtgacaaactgtggaccttcctggttcagtctttctatgctgtccgccacacagagagctggggacagatgcacatcggtgatcagcagaaaatccaagcagctgcatttgacaaaggtgatgatcgaagacttgggcaggaagcctgtgcttaccagctcccagccaaggagacaccttctgacattttccatggtgtttcttatgagcaccatggaaggacaggttactccagacttttgaaagaaagtgaagatgctactgtacattgtaagcacaatgataaaggcaatagtgtatataaaaatgaaagtgttctcctgggtcctagtagcaaagacttttcaagaaaagataaacagagtgtctcaacagcccaaaagaacagattatatgtcccacccaaaggaagccaacagttttctcccgaagatgaggaaataaatagtagaagcaaggtggctaatggcttccagcagcacaacacgttcttggatggtgacacaaaatctcaagaaagaccgtgtcatctggagcttcatcagagagaactcagctccaacataccaaagatgagctcagcaaaatctctagactcctatctgagtcaggttccacctcaggaaggtcaagggaaagagagccattccaacatctcccaagaaagctaataaattatatttagacgcagtgataatatatgaaaaggcgcagtcgtatttcacatgctaagataatttcttgtcttattgttttgtgtttatgtctttcttatttcaataattcaggctaatgacttaaaatatgcaatagtatagctggttgagtaactattgtgtatggtacttaagaaaaatatttatcagaaatccctattcagtaaaatgctaagaataggtgttcttccaaagttgtgttttttgtttgtttgtcctggctcacatcctccttcgcatgtgcaatatacaaataagcctttagatagagtatttgtcccccaccccaggaaaccaggttatttttaagacacccccaattgactgtcttttcttcctccttgagtttctattgtagcgaagtagatttgtgtgtacttttatgtttaaataatttgttattttctgtattctaagttttcaaattaaaatgtggaaaattattgttagttcacctgtgttgattttgctgctaaacagtacccttgtttcaggagacatagatgattgtgacacactggcacaaacctgcatgtatgaccaccggccttcaaaaaccctctctccaatatatgagacggatatagcagaagcatttgagcagaaagtggaatcacaaaacaggactggacactgctgagacagctgctctcttgaacaagacgcaaacttaaatgtcacacattctcttcctgaagacctaagcttagcacagtatttaatcaagcagacactccttttagctggagatagctcaaaacctcagggttcagcacatgctgactcttggaacaggtggagtgaactctcgtccccacttgacggttcctggacaagtgacaccacggctggtgttccctctgaaggttgttcacctctaggggagtggacaatcctggagctggaaacccagcattaacagtttcagcattcaggaaacatttagccagatacagactgtctttaaaactgatggagtcttcaatttactgaggtaaatatagcttatttattaatatgatgtctcatgttaaaatggttttctaaattttgagcatgttttccataactgttagaaagactagaagacttgtagaaaatctgtgctccagttttctttcctagctgataatttgttcatttattcaggaatttccatgtcagtgcacaaggagatcaaccccttacagttttgattctgcatatggtaccataatatttaacaataaacttactgtgtg

SEQ ID NO: 3157804 - DNA, 247 bp, Cricetulus griseus
  modified_base (223)..(223): a, c, t, g, unknown or other
ttttatttattttattttctagacagagtttctctgtgtagctctggagcctatcctggcactcactggtctcgaactcacagagatccccctgactctgacctcccatgtgctgggattaaaggtgtgtgccaccaccacccaggagttacaagtgcttgtgagttgcttgctgtgggtgctgggttggccctcggaacaccgtgaccctcataaaaaaaanaaaaaaaaaaaaaaaaaaaaaaaa

SEQ ID NO: 3157805 - DNA, 1553 bp, Cricetulus griseus
attagaacttggtggtatttatctccacggttatgacaaagaaggtaacaaactattctggatcagagtgaagtatcatataaaagaccagaaaacgataatggacaaaaagaagcttatagcattctggttggaacgatatgccaagagagaaaatgggaagcctatcacagtgatgtttgacatgtcagaaactggactcaatagcatagacatggactttgtacgctttatcatcaactgctttaaggtgtattaccccaaatacctctcaaaaatagtgatctttgtatatgccttggataatgaatgctgctttcaaaattgtgaaaagctggcttgggcccgaagcagtaagtctgttgaagtttacaagtaaaaatgaaatccaggagtatgtcagtgtggaatacctgcctccccacatgggtgggacagatcctttcaagtatagctacccaccactggtagacgatgacttccagacaccactgtgtgaaaatgggccgattgccagtgaggatgaaacctccagtaaagaggatatagaaggtgatgggaaggaatccttggaaacaatttctaatgaagaacaaccagttctgtcagaaaagactaacccaactgagtctgcttccaaaacagatgaaacaaaaaaaagttgattcaaagatgaaaacttttaaaaagccattgagtgtttttaaagggcccttgttacacatcagcccagctgaagaattatattttggaagcatggagtctggagagaagaaaactctaatagtgttgacaaaacgtcacgaaaaaatatagtggcctttaaggtgagaactactgctccagagaagtacagagttaagccgagcaacagcagctgtgaccctggagcttcagttgatataattgtttctccacatggaggcttaaaagtctctgcccaagaccggtttctgataatggctgcagaaatggaacagccatctggcactgggccaacagaattgacccagttctggaaagaagttccaagaagcaaagtgatggaacacaggttaaggtgccatactgttgagagcagcaaaccaaacaccctcatgttgaaagacagtgctgcgaacatgtcagataaaaccagtgaagatctctatctgcaactcaatcgtgtttctttcttttattcattatacagttaaagaaatggtgcctgctcagaaacataactccttcaaatattatctgaagaaagtatacagaccccacccaccttctagatctactgtaaacctgggcttcctaaaaggaaatgcgcagcacatagaagggcacctagcttgaaaacaaattgttcggatagaggaatgttcaaggcattgattattagagactatagcttgttagaaaactaagtaaaggcttatgtactgtgtaaattaatagcttaaatataatttatttttctttttgatttgaatgctttcaaagcaaagctttatcatgtaaatatacaagctgacctgaaaagtcgaagtaatatgtgctttgttgtagcc

SEQ ID NO: 3157806 - DNA, 1415 bp, Cricetulus griseus
gccatttgtctgcaaaatgttgatatgatgaattcagagagcctaaagaatctaaaaatgaccccgcctcccattcctatgtctgaggactgcctgcatctcaacatctacacaccagctcatgcccatgagggctctaacctgcctgtgatggtgtggattcatggtggtggactggttataggaatggcttccatgtatgatggatccatgctggcagccacggaagatgtggtggtagtcactatccagtaccgcctgggtatcctgggcttcttcagcactggagaccagcatgccagaggcaactggggcttcttagaccaagtggctgccctacgctgggtccagcagaatatcgcccactttggaggcaaccctgaccaggtcaccatttttggcgagtctgcaggtggtataagtgtgtcttcacatgttgtgtcccccatgtctaaaggactcttccatggtgccatcatggagagtggagtagccctgctgcctggtctcatctccagctcctctgaggatggtttacacaatggtggcaaacctgtctggatgtgagaccatggactcagaggccctggtgcacgtgtcgtgagaggcaagagtgaagcagatgttctggccattaacaaggtcttcgaggccatttctggtgtggtggacggagagttcctacccaggcatcccctagagctgttggcttctgtggattttcaacctgtccccagcatcataggtttcaacaatgatgagtatggttggatcatccctacggtggtaaacagtgcccagacaataaaggaaataaccagagaaaacctgcaggctgttctgaagaatgcaacagcacaaatgatgttgcctcctgagtgtagtgacctgctaatggaagaatatatgggggacactgaggatccccaaaccctccaaatacagttcacagagatgatgggagacttcatgtttgcgatcccagcactccaagtagcacattttcagcgctcccatgcccctgtctacttctatgagttccaacatcaaccctcctttgtaaagaatgtcaggccaccccacgtgaaggctgaccatggtgatgaggttccttttgtcttcgggtccttattctggggtgtgaaacttgacctcaccaaggaggaggagctactgaacaagaggatgatgaagtactgggccaactttgcaagacatgggaaccccaacagcgagggtctaccctactggcccatgttggaccatgatgagcagtacctgcagctgaacatccagcctgctgtgggccaagccttgaaggccagaaggctgcagttctggaccaagactctgccccagaagatccaggagctaaagaggtcacagaacatgcacaaagaactgtagtgccctgt

SEQ ID NO: 3157807 - DNA, 762 bp, Cricetulus griseus
  modified_base (687)..(687): a, c, t, g, unknown or other
  modified_base (748)..(748): a, c, t, g, unknown or other
ccagaatgtggactcagattcggagagcactgtgagccttcgactgcgggagagcaagctaccccaggatgatgacaggcctgctgatgagtacgaccagccttgggaatggaaccgggtcaccatccccgccctggcagcccaattcaatggcaacgagaagcggcagtcttccccatcaccttctcgggaccgacggcgccagctccgcgctcctggaggaggcttcaagcccatcaaacacgggagccctgagttctgtgggatcctgggagagagagtggatcccaccatcccactggagaaacaaatatggtatcatggagccatcagcagaagtgatgctgagaacctgctgcgactctgtaaggagtgtagctaccttgtccggaacagccagaccagcaagcatgactactccctctccttgaagagcaaccagggctttatgcacatgaaactggccaagaccaaagagaagtatgttctgggtcagaacagccccccttttgacagtgtcccggaagtcatccactactacaccaccaggaagctacccatcaaaggggcggaacacttgtccctcctctacccagtggctgtgcggactctgtgaatggaccagcctcaccctgctctgtgaccaagcctgatacttggaggagctagcagggcaccggccagctntctgtgttgccaccggtgtccaccagtgtgtgtcatgtatgtgtatggtactagcacaccnctgcatgtcttaga

SEQ ID NO: 3157808 - DNA, 892 bp, Cricetulus griseus
gttttcatgcagcagctggctagtgccctgaagttcctgcatgaacgaaacatctctcacctggatctgaagccacagaacattctgctgagctctttggagaagccccatctgaaactagcagactttggctttgcacagcacatgtccccatgggatgagaaacatgtgcttcgtggctccccactctacatggctcctgagatggtgtgtcagcggcagtatgatgctcgtgtggacctctggtctacgggggtcatcctgtatgaagctctctttgggaagccccttttgcctccagatcattctcagagctagaagaaaagattcgaagcaatcgggttattgagctccacttcggccccaactctccttagactgccgtgacctgctgcagcggcttctagagccgggacccagcccaaggagcaggatgccctggacctgtaccagcacagcctcggggagctgctgctgttgttggcagcagaagccccaggccgaaggcgggagctccttcacacagaggttcaaaacctcatggctcgagctgaatacctgaaagagcagatcaagataagggaatctcactgggaagctgagacactggacaaagaggggctgtcggagtctgttcgtagctcttgcacactacagtaacaacggaaggactagcggatggaacacaggcctagagagaagctttgtaccaacccaggttcacacctgtgcacctgggaccttcctggatgaacacctcctttctttctttccttccttctttcttcctttcttccttccttccttccttccttccttccttcctttctttctttctttctttctttctttctttctttctttctttctttctttctttctttcttctttc

SEQ ID NO: 3157809 - DNA, 1876 bp, Cricetulus griseus
ggaacaagtaatcttattttagaagatgttaaaaagttatctgacagttacttggtaacagtgaatgacttagttcctggcaaagaaagtaaagttattttttctattcgaaacactggctccagagcagcctttgttaaagcagtatgttttaaagattgtcaaagaaaagttttgctggatcctaaagtattgaggatttttccagataaatttgtgcttaaggaaagaacccaagaagatattactttaatatacaatccatcaatcagaaagaatgacaaaaatcctgcaacagaactgctaagtgtatacttctttggtggtgatgaaatctccagacagcagtaccgaagagcactgttgcataaaccaggagtcataaagcaggtacttccagaacatagtgtgctgcaaaacgttgattttgctgaagcatttcaggatgagctactcatggatgaagcatgtgatcttcctcagcggcctaatgacattcagctcttttatggaagcatgcgtaaaattaccctttcagtaattggagaattcagagattccgtttctagcagagaatttcttcagccttcttccagtgctagtaaaatacaaattcttgtgagtcccaattcttccctgtccacaaaacaatcaatgttcccttggactggcttgatctatattacactgtgataacggagagaagaaaatggtaaaagttcaaatacgagaagatttgagtcaacctttacttcatttggcctcgagcacatttggacctcttgccccaggacctgagccttccattagtcatttgacaaaaccaatagcaaaaccaccttccacaaaagttgaaattagaagcaaaaacagtgatttttcctccaacagaacctggtaaaacttcagagaactatctggagctggagaattgtggccccaatgatgtgaagtggcacctgtcatcttttgctcccccatatgtcaagggagttgatgaaactggagatgtttttagagctacctacacagcattcagatgttcacccatttctggaacactggaaggccaaagaatccaaaaggtctccatcatgtttctgcccagagatagaggggattactcccagttttgggatgttgagtgccaccctgctaaagagcctcacatgaaacacaccctgagattccagctctccggacagagcatcagagcagaaaatgactctgaagactcatgctcctccagcgataccctcattaaagtagatgctgcaggcgtgtctcggaggtgtgctgtgcccgagacctctgctcacatacctgggcagcttgacttgagtcaccatggagtatatgccccaaaggacgtctacatgttcttgccaacgaaacttggggaatccaggacactgaaagtcaatttgcgaaataattcttttttcactcatgcactaaagtttgtgagccccagagcacctttctatatgaaacattccaaatactctttgagagcccggcactatatccacatcccagtgcacttccgaccacggtcagtgggcagattcgaagctttacttgtgatccagacagatgaaggcaagaacattgctgttcggctaattggtgaagcccttggaaaaagttaaccagaatacattttgtgtaaatgacctgtggcagtcttatttttctacaccaaagttaatgttgttgtatatattttgtatgataaattcaatgtgtataaagtatacatttgttttagagaattcagtctggaagccctgactatcatgtatctagctcacagtgttaacatgtacagaggaaaagttctatttttgaattgattatgacattctgaataaat

SEQ ID NO: 3157810 - DNA, 443 bp, Cricetulus griseus
agtgtgatcaagacgcagccagccaagggcaagtcccgacggcgcaaggaggacggcgagcgctcacgctgtgtgtattgcagggacatgttcaaccatgaggagaaccgcaggggccactgccaggatgctcctgatgctgtgagaacttgtatccgccgtgtgagctgtatgtggtgtgcagacagtatgctatatcactgtatgtcggaccccgagggagactacacggacccttgctcgtgcgacactagcgacgagaagttttgcctccggtggctggcacttattgccttgtctttcttggctccctgtatgtgctgttaccttccccttcgagcctgttatcactgtggagtgatgtgcaggtgctgtggcgggaagcacaaaagccgcagtgtgactcgcgtttccccgcttccccctcttccatccacagccac

SEQ ID NO: 3157811 - DNA, 410 bp, Cricetulus griseus
aggtcatcgcagagcccggccgcttctatatggagtctgtatgcacaacggctgtgaacatcatagccaagaaggctacactggagtcaggaggccacaggaagctggcatactatctcaatgagggctattatggtgccttccgaatcttcctcagggagcctgtctccaggatacccattgtggtgaaggagttcccctcggagccccgcctttttccctgcaccctctatggccccacatgtgatgcctttgacaggatctccttgaaggaggtgcagctgccggagctggatgtgggtgactggctgctttttccctaacacgggcgcctacaagagctccatgagttccaccttcaacggcttccccatcataactgtctacgatgtcatgggcccccagctcag

SEQ ID NO: 3157812 - DNA, 168 bp, Cricetulus griseus
ccagctcttggcgtcactacattgccatcatggcagctgcccgccaccagtgttcttacctggtgggctcccacatgaccgagttcctgcagactggtggtgacccggagtggctgctgggcctccaccgggcaaaacaaacaaacaaaaaaaaaaaaaaaaaaaaaa

SEQ ID NO: 3157813 - DNA, 600 bp, Cricetulus griseus
gcgcgtgaagagttcgcagcgcctctgaggagagggcccgcggcgagctatggcggtcacgctgccggaggtcgtggaggagctcctgagcgagatggccgccgctgtgcgggacggcgcgagaattcccgatgaacatctctcatcgctgaagtttgtgtttgggtcgtcagccatccaagccttggacttagttgaccgagagtccgtcactttaatctcatcacccagtggaaggcgtgtttaccaggtgcttgggagttctggcaaaacatacacatgtatgacttcctgtcattactgctcatgcccagcatttgccttctcagtgttacggaagagtgacagtctgctgtgtaagcatctcctggcaatttatcttagtcaggttatgagaaactgccagcagctcagtgtgtcagacaagcaactgacagacctattattgatggagaagacacaagaagcataaaaggtgcaggtggaacagctttcaagacagaagcctaccaggaaatatgttcaacatctcatggttcacaggatggagggacaagatacacttccggacttgttactgtcactttgccttcataggct

SEQ ID NO: 3157814 - DNA, 262 bp, Cricetulus griseus
tctcgggtaggagagcctcctcctagacgtaggtgtttggcttttaaggggaactcagctctgactctgctttctttgtgagcccatcggaataggtccacagactatcatgagccaaccctaaaaaggacccattacagtgccactccagaagatgcaataggaagtgtgacctctctacatcttaagacagtcactaacttgtcacttcccagacattagcacatgggatttgaactctgcacagtctctgagagttggg

SEQ ID NO: 3157815 - DNA, 234 bp, Cricetulus griseus
ctgcctttataggttacttaacctttttattttgcagcttttaatattctgtctttatcctgcatattttgtattttgattgttatgtggtgagaggacttttcttttggtccattccatttggtgttctgtaagtttcttctctcttcttaggcatatccttctctcggttgggaaaagttatttttatgattttgctgaatatattttctgtggatcaattcccaaataaaa

SEQ ID NO: 3157816 - DNA, 459 bp, Cricetulus griseus
ttgtgcagttttatttcaggtgtttgacttgtaactggcacaggattgctctttttttcttcccaaaccttctaaaatctgagtccgatccatttgcatggaaagatatgcattatatatgtgaggtgataaaagcaaaggtatatacatagcatcccatttttgtaaaaggaaaacacatttatatattaatattcaaagaaaagctaaaaactatatatgtaaaggctaacattggttatctgtgtggtaaagataataggtgatttttatactttttaaattttgcttcatgtaaagtctcacttttcatgatgaatacattttctttatgttgcataacaaacaatataatgaaaaagtgaagcaattctgaaaaacaaagcttattagtcagctcataaagacaatgtgatccttaataaatatttatcagaacttaaaaaaaaaaaaaaaaaa

SEQ ID NO: 3157817 - DNA, 202 bp, Cricetulus griseus
gggttctttttgcgtggttcctgataaggtaaaaggcaaaaaggccaccagagaggaggctcccatctttgtcacggcgccacactccaccttcttcgacgcaatcgcagttgttgtggcaggactcccttcggtggtctcggcaagtcataatgtgcagatcccattggctgggaaatgcctcctgtcaactcagcctgtg

SEQ ID NO: 3157818 - DNA, 799 bp, Cricetulus griseus
cttttctcctggacccggacaggtgcgtggtccaacggctgctgcctcttacccagtacacagacctcctcagtgcgggaggggaggagtggtgggaacacttcggaattgctgtttcgagcatcgacaccacaagtggttgctcgggccccaagtcgacattcttcccttcttgctactgcccttggctggtcctgaggagttttcagaggaagaaatggacaggctgcctgttgacctgcagtacttgtcgccagacaagcaacgagagccagatgctgacatccgaaagatgctcattgaagccatcatgctgctgacagccactgcaccaggtcggcagcagatacgggaccagggtgcgtacttgatccttcgagagctgtacaattgggagccagagcctgatgtgcgaatggcttgtgagaaacttatccaggtgctcattggtgatgagccagaggttggcatggaaaacctgctggaggtgcaggtgcctgaagacgtggagcgacagctgcaacacatagaccagcaagaacagctagagcttgctcaagagctcagaggcaagggtgccccgcagacctgaagatcctttggcctaagtgccggctccagatctactttgcctgtgatcctacagggctctagggtaaacgcccagtaaatgttgagaagctcaaggacactgaccaatcctgtgcctgcttgtaaccagcaaaaatgcaagttgttcggtgcttgcactattgagctggagctggctaggtcctgtgccatagctgcctacatatga

SEQ ID NO: 3157819 - DNA, 484 bp, Cricetulus griseus
aaggggaaggagtgggttggctatgatgataccatcagcttcagttacaaggcaatgtttgtgaaaaaagaacattttgggggagccatggtgtggacgctggatatggatgatgtcaagggcactttctgtggcaatggccctttcccccttgtccatatattgaatgaggtcttggtgcaggcagagttcaacttgacccctttgccacaattttggtttacactgcctgtgaattcctcaggacctggctctgagagtctgccagtgacagaggagttgaccactgatactgtaaagattttgcccccaggaggagaggctatggccactgaggtccacagaaagtatgaaaaggtgactacaatccctaatggtggatttgtgacccctggaggaacaacatctcctgcaacatatgctgtagctctagaaagaaacactgttgctcctggggcaaaactaccacctcactggaccttct

SEQ ID NO: 3157820 - DNA, 814 bp, Cricetulus griseus
  modified_base (415)..(415): a, c, t, g, unknown or other
tttattaggtacctgatgtactttgtaaaacttccatatatgatctgatacgaaaagggacccacattttcttacaacccaatctcattctctacattttcagtattaggtttacatgactgtttagtttgcaaggtagcaggttttgtgagtggtctcttaggcttgttgtctcccaccaacgaccagtgagcagatgttgctgttattagttttagaaaggcctcctccccaaaccaaagtcatccactcattttggtgataaatgcacaggggcgcaatgggaacaagatctctgagtcaagatagaaatgggaagaagagagcaattcacttaatagtcgaggaatagacatttcaacacacttagccggacactggagaccacagatgaaaaagaaagaaagaaaaaaanaaaaaaaaaatttagctcagctaatttcagaaaaaattctgtattaaaatgaggatctcaatcatagaacagaatgttgaatttgtagattacacataaaaaagtggtttgctggactgagtgttatttagaacatatcccagaatattcaaagggttggatgtttctttccatcacagtgaacattctggcagaaaagtctgtgatagactgatttacaacaggtaaagtgagctaaggacaagcagaaacagtgttcctcatataggagatagaagtgtttgtcactgtattgctgtgttggaatttttgccttagtctagcatagaatatgtgtttactagctttgaattgcttgtgtgtgaatttatatgattatctctgtaatatgacctttaa

SEQ ID NO: 3157821 - DNA, 390 bp, Cricetulus griseus
aagcccacttttattgtgaaaccagatagcggttgtcagggtgatggaatctacctcattaaagatcccagtgacctccgcctaactgggaccctccagagcaggccagcagtggtacaggagtacatctgtaagcctctccttattgacaagctcaagttcgacatccgtctgtatgtcctgctgaagtccttggagccccttagagatttatatagccaaagatggactgtctagattttgtacagagccatatcaagaagcaaccccccagaatctgcaccgtgtcttcatgcacttgaccaactactcgctgaacatccacagtggcaagttcatccactccgacagtgccagcacaggcagccaagaggacgttctccagcattc

SEQ ID NO: 3157822 - DNA, 364 bp, Cricetulus griseus
catgagttcccaccagcagaagcagccctgcactgcaccccctcagctgcaacagcatcaggtgaaacagccttgccagccaccaccccaggaaccctgtggccccaaaacaaggatccctgcaaccccaaggttcctgagccctgccagcctaaggtgcctgagccctgccagcctaaggtgcctgagccctgccagcctaaggtgcctgagccctgccagcctaaggtgccagacgccctgccagcctaaggtgccagagccctgccagcctaaggtgcctgagccctgccacccaggcacctgagccctgccaccccaagggcacctgagccttgccacccagttgttcctgagccatgcc

SEQ ID NO: 3157823 - DNA, 654 bp, Cricetulus griseus
ggcaggatgttgcggacagctctgagccgcgtgcccatactcctgcgtagtgtgcggacccggaatcccggcccggggcggctctgggattcagaggctcgcctgaggaccgcggagagacgacggggctgggcctggggctgggcctcgggctggcgtagctcgagcaccgcgcagggatcagggcctgtggtcagcgctggggcgcgtggaggcggaccgctaccagctcgtctacacctgcaagcctaggtctgtggtactcggtcatccaagagcatctcaaagttggcctaccaccacggtgtggtcattgtcacctgccctggctgccagaaccaccacatcatcgctgacaacctaggctggttctctgacctgaaggggaagaggaacatcgaagagatcctggcagccagaggagaggaggtacgccgagtgtctggcgagggtgccctggaactgattctggaggctgctgaaccacctgctgccccagaagggggtgaggatcctacccttcccggcaagattgaacagaactgacttgtacactctgcggctgtggactccagccccccaaaagttactgcatccacttggaacctctcaggcctggcctgttccttgtcagtaaacagctgtcacctacca

SEQ ID NO: 3157824 - DNA, 2103 bp, Cricetulus griseus
ggccgaggcggaggccgtggctgccggtccgccactacctgcgcctggagatcagcgagagccgcgtgcccatcagctgccccgagtgcagcgagcgcctcaacccacacgacatccgtctgctgctggctgacccgccgctcatgcacaagtacgaagagttcatgctgcgccggtacctggcctcggacccggactgccgctggtgtccggcccctgactgcggttatgctgttattgcctatggctgtgccagctgcccaaagctaacctgtgagagggaaggctgccagactgagttctgctaccactgcaagcaaatatggcatccaaaccagacctgcgatatggcccgtcagcagagggctcagactttacgagttcggaccaagcacacttcaggtctcagctatgggcaagaatctggaccagatgacatcaagccatgcccacgatgtagtgcttacattataaagatgaatgatggaagctgtaatcacatgacctgtgcagtgtgtggctgtgaattctgctggctttgcatgaaagagatctctgacttgcattacctcagtccctctgggatccggaagaagaagattctttggcagttgggcacattgatcggtgctccagtggggatctctctcattgctggtattgcaattcctgccatggtcattggcattcctgtttacgttgggaggaagattcacagtagatatgagggaagaaaaacctccaaacacaagaggaatttggccatcacaggaggagtgactttatcagtcattgcgtccccagtgattgctgctgttagcgttggtattggtgtccccattatgctggcatatgtttatggggttgtacccatttctctctgtcgtggaggtggttgtggagtcagcacagccaatggaaagggggtgaaaattgagtttgatgaagatgatggtccaatcacagtggcagatgcctggcgggccctcaagaaccccagcattggggagagcagcattgaaggcctaactagtgtgctgagcaccagtgggagccctacagacggactcagtgttatgcaaggcccttacagtgaaacagccagctttgctgccctttccgggggcacactgagtggtggcattctctccagcggcaagggaaaatacagcaggttagaagtgcaagccgatgtccaaaaggaaattttccccaaagacacagccagtcttggtgcaattagtgacaacgcaagcactcgtgctatggccggttccataatcagttcctacaacccacaagacagagagtgcaacaatatggaaatccaagtggacattgaagccaaaccaagtcactatcagttggtgagtggaagtagcacagaggactctctgcacgtccatgctcagatggcagagagtgaagaggaggggaatggcggtgctggcggtggtggtggtggcaatgaagaggatgccccttgcaaacaccaaagctgtgaacaaaaagactccttggccagcaagacttgggacatcagcctggcccagcctgaaagcatccgcagtgacctagagagctctgacacacagtcggatgatgtgccagacatcacttcagatgagtgcggctccccccgttcccatgccgcagcctgcccctcgacccccagagcccacggtgcaccgagcccaagtgcccacaggaacctcgctgctccagctgagggccagactgtcttgaagccagaagaggatgaagtggagtgaaggctgctgctctgagaagcacacttgttgtaactgcatcttttggaatcttttttgggggagggatggggatttatgtattttgattcaaagattctctggtcagggttcccccagggaagttctgagaaatttgcaatttcttaccagataaaaaatgaaatttttgcctctaatatcccgccccttatccccttgttttagttttaatttattggttaaactgatgttggcaatctgtgaggtgtgtcaaagaatgtacatatgtatgtgtgtatattgtatgtatgctaacatattattgatgacacattttaataaagatttctgt

SEQ ID NO: 3157825 - DNA, 251 bp, Cricetulus griseus
aaatgtactgactgtgacaaatcgtttactcagaaaagcagtctcataactcatcagagacttcatatgggagagaaaccttacaggtgtagtgaatgtgacacgtgctttacccagacaggccatcttaaaattcatcagagaattcatactggagtgaagccttacaaatgtagtgattgtgacagatcctttaccacaaaggaccatcttagaacgcatcagagacttcatacaggagaaaaacctta

SEQ ID NO: 3157826 - DNA, 1222 bp, Cricetulus griseus
gatgaaattcatgaaagagatattaatactgacttccttctggtagtacttcgtgatgtggttctggcttatcctgaagtccgaattgttcttatgtctgcaactattgataccaccatgttctgtgaatatttctttaattgccccatcattgaagtttatggaaggactttcccagttcaagaatattttctggaggactgcattcagatgacccaattcattcctcctccaaaaggacaagaagaagaaagataaagaagaggatggtggtgaagatagatgatgcaaattgcaatctaatatgtgctgatgaatatgggccagaaacaaagttgagcatgtcccaattgaatggtttgatccagtaccagatggagtaaccaaggttatttgtccacaaatattgctgaaacaagcatcaccataaatgatgttgtttatgttattgactcctgcaacaaaaagtgaaactctttactgctcacaacaatatgaccaactatgctactgtatgggcatcaaaaacaaaccttgagcagaggaaaggacgagctggccgtgtacgacccgggttctgctttcatctttgtagtcgagctcgttttgacagactggaaacccacatgacaccagagatgtttagaacaccattacatgaaattgctttgagtataaaacttctgcgcctgggaggaattggccaattccttgcaaaggcgattgaacctccacctttggatgctgtaattaaagcagagcatactcttagagaacttgatgcttttagatgccaatgatgagttgactcctctgggacgtattctggctaaactccccattgagcctcgttttggaaaatgatgataatggggtgtatcttctatgtgggagatgctgtttgtaccatctctgctgctacctgctttccagagcccttcatcagtgaaggaaaacgtctgggctacattcaccggaattttgctggaaacagattttctgatcatgtagctcttttatcagtattccaagcctgggatgatgctaggatgagcggagaagaagcagaaatacgattttgtgagcaaaaacgactcaatatggctacactaagaatgacttgggaggccaaagtacagcttaaagagattctaattaactctggctttccagaagattgtttactgacacaagtgtttactaacactgggccagataataa

SEQ ID NO: 3157827 - DNA, 1436 bp, Cricetulus griseus
ggatatcatcaaagggttgaggcagagacacgagttgcagtgaagactgtcaatgagtcagccagtctccgagaacgaattgagttcctcaacgaggcatcggtcatgaagggattcacctgccatcatgtggtccgcctccttggggtagtgtccaagggccagccaacattggtggtgatggaattgatggctcatggagacctgaagagtcacctccgttctctgcgaccggatgctgagaataacccgggccgtcctcccctaccttgcaagaaatgattcagatgacagcagaaattgccgatggcatggcatacttgaatgccaagaagtttgtgcaccgggacctggcagctcgaaattgcatggttgctcatgactttaccgtcaaattggagactttggaatgacgaggatatctacgagacagattactgtttccccaaaactgagggaggaccgtttggtttggattcatcaagagtgtgtggaagaccaaaacaaaacaaaggacacacacacacacacacacacacacacacacacacacacacacacactagcccttcaggacatggtgaggtcttgtggactatatgggaaactggatttttgactggttctgctagcaagatggactggatgtttcttgcttggatacactggtggttacctggagctgagctgacctttcagaacacctgtgttcatctctgggtttttctctgcttgtgtacctcagctcttcaaggcctacatgttgctcagtcattgtataaacacggcaaactcatcccaaagaccaacgacacagatggactttgagaacactaagcaatatataaggagatgtacccttggggtggctgttggtctcctccacccttggggcatcggctattctccacactaaaccccagagctgctcttggtgcccaggggcctcagctcgggcaggtgtggtgcctgagtctattattgctcaggtgcttatgttgcagtcgctagagactacagcttggaggagaccacctcagactttcttcaaatcctgattgccagttgctatcaaatttatattagaaaaatgacaggtttaaaaatgttaccagggaactcagtgattggtacaagaagcaagagtcacagtcattttcacccaaatcactttgtaaatagagggtctttgcatcaacggaagacatgcaggtctgatatttgttgtttatttttcctcttcacagtcaatttgtagtggtcagatgctacactagcaggaatttccacatttttctaattcaaaaggttttcttatattactggggaaagtatttattttaatatataaaatcactcttgaaaatcacttttgtaaaaaaatggtgtgcatgtaaattttttttttatcaaggaaaaataaaacaggtgagtgt

SEQ ID NO: 3157828 - DNA, 638 bp, Cricetulus griseus
gcctcagcaagtggtagaactgcctaaaacaacctgcccattccccaacaggccatctctgatgactacaaatagcccagggacagaggtgggccaagtctaagtcatcgtgtcttctaacgcttgatgtatttatttgtctgcttggactagagtgacgtgacagttggtctctccaaggtggacagaaccgttgttcgcctcctaaccctctctgtgctctcccaatatgtccatggctggcctgggaagctggtgcctgtctgggatgctccaagacaggaagaagaccactgtgttggttttccttagtgcctgctttcccagggcagacaaatctgccctgagtcaacactggactcattagtctttggtgcggttactgtgaagctaagaaagaataagtgactggttgtaagtttataactggcactgttcgggttgcctgtatgcatatgcctgacacactgcctgtgtggagagcacagggcagatgtgtgtatgagtccgggtgcgttctgctgtgtgggggttcttggggccaatcaacccagctactgtccctgctcgtggtctcactgctgctctgcccctggagggaccaccggggaaatgactacacgggacaattcttccca

SEQ ID NO: 3157829 - DNA, 391 bp, Cricetulus griseus
catcacgatgggacgtatggacagttctagacccattggcggtggtttatagtggatactttccttggggcgggcttgcacataatggggaggactcctattgcagatgcagctaaactctactggatgtttgtgagaaccaaacactcagccatccttggtgtcgtgatcacagtggtgctttacactctgctgtttgttcatctcttccttgattttgttatgtgtattgcctcaggttgcacaatgactcttggatattagatgcatttcaaagaatccacagtgaagaagccaagttcttcataccgtacgatttggaaatttccaatcaggagctaagtcacatcatgaaaaggtctgagcagtggagagggatccatggcgagag

SEQ ID NO: 3157830 - DNA, 280 bp, Cricetulus griseus
ctgcctctgcctgaggtggcacgcgactctgtccaggatgaggataagctcactctgtacctggtcattgccttggcatctgtgtcttcgcttttcctcttgtctgtgctgctgttcgtggggtgaggctgtgcaggagggccagggcgacggccctgaggggctgctctgtgcctgagggccactttcctggacacctggtggatgtcagtagcatgggcaccctgtcccaaagctaccagtatgaggtgattattaaatttaaaaaaaataaaaaaaa

SEQ ID NO: 3157831 - DNA, 1176 bp, Cricetulus griseus
caaggatcaggtgacatgatgtcctttctcatgactgaagcccggcaacacaacactgaaattcgaatggcagtcagcaaagtggctagataaaatggatcatctcatgactaaggtgccaacccactgcctccacaggctttccccattccaacagaatggtacacagacaaggaaagagaagtcctcagaagcagagataccctcagaaatgaaagacagttccctcctacctgaaccagctggcatcccatcccccagagtcctgggccccccaacttcaatcccacctaaacctccaggaactgtaactatagactctaagtgtgaggaaccacttgctgatggtcagagagcagcgcagcccaacaatgtattgggagaacatgttggggaagtagcctcagatggtccgccgcaaggagactccaggagattgtcactgacactagaccctgagaagggggagccaccagccttagaccctgcaagcccaggaggagaacctcagcctcctgagttcaaagaaattgaggatgtcagtagctctggtccccctgaggcattactggacacagaacttgcttctgcagctgtaggagcatctctcagacacaaccaggactcccagcacagcagtctatctggagatgaagatgatgagctgtttaaaggggcaactctgaaagatccgaagcccatagtccagcccgaggaagaggatgaagatgaggtgagcatgaagggacgcccgccccaacacccctttttggagatgatgatgatgacgatgacattgattggctggggtgaagacctaggaaacaggcatgcaggtttctctcccagcccttccctaagcatgattttgcacaaccggcttcaggtctaggtgagcctcagggtgaggtcctggtggacattctgaggacagtggttcagacgtctgagttagctgccatctgagccctgactgacctggtgaagaggatcatgagtctgtctgaagaactggtggtataagagccctcagtgagtgacccctaccatgggggaagggctgggagggtcacctgcagccagtcacaagcatcctgccatttctcccaagtctttttattcattctcaagttgacctgtgagccctcctgctctcccagggctcaccagagctgc

SEQ ID NO: 3157832 - DNA, 2554 bp, Cricetulus griseus
gtcctcagcacagattctcggtgatggtgacccagtcttctcccgcatcagtccatggaggtatccagaagatgatgggtaaaccacagacctctggtgcctacgttcttaacaaagttcctgttaaacatcgtcttggacatgcaagcactaaccagagtgacacacctcacttgctaaatcagtccagtggttctggagaggacagcccggtattttctactccaggtcatgcaaaaccaatttacagctcctctaaacttaaaggcaccttcttaaactttgctcagggtcgaaatctcatgatgttcaagaagttcttaagaagaaacaggaagcaatgaagttacagcaagacatgaggaaaaagaggcaagaaatgttaggaaaagcaaatagaatgccagaagatgctaatctctaagctaagaaaaaacaaaacatgaagccagaagaaagagacaaatataatgaagaccttagaagatctcacaaattgaaagatgaattaaaaacaatcttctgcagtctccacaccatccaaagtgaagacaaagacagaggcccagaaggagctactagacactgaactggacctccacaagaggctgtcttcaggagaagacacaacagaattacgaaaaaagctcagtcagttacaagttgaggctgcaagattaggtattgtacctgtggggcgaggaaagaccatgtcctctcaaggtcgaggaagaggccgaggtcgaggaagagggaggggttcactaaatcacatggtggtggaccaccgccccaaagcactcacagttggaggattcattgaggaggaaaaggatgaattgcttcagcatttctcagctgcaaaccaaacgtcaaaattcaaagaccgtcggctacagatatcatggcacaagcccaaggtaccgtctatatctactgagactgaggaagaagaagtcaaagaagaggaaacagaaacttcagatttgttttgcatgatgatgatgatgaagatgaagatgaatatgagtctcgttcgtggcgaagatgaaatttgatgcgagctatgtaatttttagaaatacgtttagaagaacaactttttaaaattatttaaagaagtcaatgagccaaaaatttttttatttttctcttcaacacagtaggtttaaggacagcaagttgctattcaaacacatctcataattgtctgtgatatcaaattaccaaaggccgtgactttatgcagttgtgaagatccacaggagtgactggattctctagaaccttaccttccgcaccatttgtttctgctcttggtgctggattacaatgtaaagacagggtgttcagtaaattttattttgaattataaatctgctgataaaaatttcattaaatgtacaaaatgtaaatttatgtccttgtgttctgaatgttagatggaaaagcagaggagcaacactacgctgtactgaccactggggaaatgaaatgattactgtacataggatgtcactttttcaaggaagatacacatctgtgtttttataatatgtgtggtgtgaaatttaaaacttcctgttggctgcagaaggttcttggtgatcactaaccttgtcaggggttttgttccctgaggtaaacattgtttcttaaaatagaaatagttcactcagaaacataaaaccatcaggattctagattaacatagtgacaaggagttagatcccaccttctgatcatctttttcctcttcatattgtcttggaatgacgagtcaaactccgggaatctcgaatgaatttttcttgatgcctgtggctcagtcagtatatatttggaaagattcattgtggtgaatattttgagtcctgaccatttaaacgtgatagagggaacaaaggatttatatattttttgtacaaagttttttcttaaactgtataattttgtaaataatttgtttggtttttttttcttttgtgtactaaaactaccagcgtatagatttcaatacgaattgttgtatttttgtatttggaaactgaaaattacagtaaattagtgaagccgtaagaaagtctccgtagactgacattcgacagaatgagattccttttcatatgatttttttttttgggaaaatgtcaccagctgaaatattggaaagtccttttacagtgaaaaagatccatggtgatggatgattatttcaaaaagaaaaaaaatcatgtgaaaaggaatagtgtttctttcctcttgatgtatagtatgcctgtatgatagtttctacaagattgtgaacttgtgtaatagtacataggagatactgttggatttctaactgtttatacatttaaattcatatatgtaatgtttgttttatcgattacaatctgaatttctaagaagcatgttgacttttgcaataaagatgcaatatggaatggttcacaattgggggggagaaaaaaaagatgaaaatattacaaatttaaaaagaatctggaaaatttatgaaccattccaaaaattataacaatcactaaaa

SEQ ID NO: 3157833 - DNA, 464 bp, Cricetulus griseus
aaagcaatcagatctatgaaaaagaattactactttgtgagaaccaaggtggatatggatttagacaatgaaaagaaatccaaaccacgtacatttgacagagaaaagatcctgcagaagatgcgaagctactgtgagagcacctttagtcagaataacatggatgtaccacagatttttttgatttcaaacagtgatttgtctgactatgattttcaagtcctgatggattcactgataaacgatcttcctgctcagaaatgccacaattttacactttccattagtaatattacagaggcagccattgacagaaagcacgagtctatgcagcagtatatctggctggaagccttcaagtctggacttctggctactcttcctgcagtgggcatcctcagggatgatgtggagaagctgaaggtgaagttaagcactatcaagaatcttaggagtggatgatg

SEQ ID NO: 3157834 - DNA, 515 bp, Cricetulus griseus
actccatgtgccttagagagcgaggaaatgaacacagttgtgggttggtgacatttgaggatgtctgtgtggacttcacctgggatgagtggcaggacctggatgatgctcagaggaagctctacagggaggtgatgctggagacctacagaagcctgctgtccttgaaccagtgtgatgccaaacctgagttgatcctgaagttggagcaaggagctgggccatggaaggaagaagatgccccaaaccaaaggctcccagctatggagaatggaaagagcctgaacgacaccagttgggacaatcaaaagagatatttgaactacctggtaatcactggcaactcatcaactgaggagagggtcaaatttggggaactatttaatatgagttcaaaccatgttttacgcctggctattaagaataggaactcttccctgttaaaaaaaaaaaaaaaaaaaaaaaaaaaaaaaaaaaaaaaaaaaaaaaaaaaaaaaaaaaaaaaaaaaaaaaaa

SEQ ID NO: 3157835 - DNA, 1640 bp, Cricetulus griseus
ctgcatgcagtaacacaggatggtctcttctcagaaaacaaggaaaagctaatcaataatgccataacagcattgttgtcccaagaaggagatgttgttgcttcaaatgcagaacttgagagccagttccaagctgtgaggaggcttgtagcctccaaagctggattttagccttcactcagcttccgaagtttcgggaacgcctaggagtgaaggtagtgaaagctctgaagagaagccacaatggtgtggtccatgcagccgtcgatatgctttgtgcccttatgtgtcccatgcatgatgactatgacttaagacaagagcagctaacaaagcttctcttctctcttcaaagaagttctggaaacttattggagaattttttttatcatgatgtatactaggtttcctaacgtgcttcctgttgctcgggatcaagtcccaccattgggccatcttcccaaagttctccaggcgatgaatcacagaaacaatgccatccctaagagtgctattcgggttatccatgccctgtctgacaatgagctgtgtgttcgagccatggcatctttggagaccattggtccactgatgaatggaatgaaaaagcgagcagatactgttggtctggcctgtgaagcaattaaccgaatgttccagaaggagcagaatgagttagtagcacaggctctgaaagcagagttggtcccatacctcttaaagttgcttgaaggtgtaggccttgaaaacatagacagtcctgctgccactaaggcccagattgttaaagctctcaaggcaatgactcgaagtctgcagtttggagaacaggtgaatgaaatcctctcccgctcttcagtctggagtgccttcaaagaccagaaacatgacttgttcatttctgactctcaaacagcaggatacctcacaggccctggagttgctggctaccttactgcaggtacatcttcatcggccatgtctaaccttccgcctcctgtagaccatgaggcaggggaccttggctatcaaacttgaaacactcagagacaataaatgctgaaaggccagtgctgcgtccacattcctccagccaacatgttgaaacagactcctgctgcctttctcctggtttcatgacagtgttattcctttttctatagatatattttatttaggaagagagtcagtgattctggagtatcatgttttgagaaagcactctgggtcagcctccatgggtacacaagaatttcttttcttgatgtatgtaagcacattttgttcctttatatctgtttacaagactgtgaatcaaaaagacatactttcttcctagtttttataatgtttgtttggtccctccacctgtgaccagatcctcaatcattaactaactctctgagagctcggtgcacaatggtgtgtatgacaggcttcatcaaactgaacgacaaggagcttgtgcaaaaaattaaactaaaatggatgtcaagatgttatgtaagagattagtgtaattgtgaaatgttctatacattatcaaatatataaagctttctatattgaatgtacattatacagatcattcatatgtgtacataaaattttaaaataaagggaattgactgctttgttaa

SEQ ID NO: 3157836 - DNA, 428 bp, Cricetulus griseus
ctactgctagatggcctggaagaatatctagctgaagactcaggggtccaggaagccgcctacttagctgcattgcttctggatactgctgcctactttagccaccgtcttggagccaatggcagctgtgggcttgtggtggccctagagacccaaaaagaagaagacaatgatgccccacatctgacattgcttcaacggtattttcctgcactgtgctggctgcagccagatgccctagacttgggacagcaccattgcctgcgggccagcctggagttggggcaagctgagccccaggacggagtggtcagtgaccttcttacctagtggagagatgaagatcatcccatggcctaccaggcttctaagcccagcccagataaaagtgttacaagtgctgaagccagtcattaactctggaatgt

SEQ ID NO: 3157837 - DNA, 1573 bp, Cricetulus griseus
  modified_base (1404)..(1404): a, c, t, g, unknown or other
atgctttgcttgaggaagaagatgcatctgaacaggacatccatctagctctggaatctgataactcaagcagtaagtcaagctgttcatcatggacaagccggtctgttgctccaggctttcagtaccaccctaatctgcctatgcatgctgtcataatggaaaagtccaatgatcatttcattgtgaaaatacggcgtgcagcaccatctacctcccctagccttaaacatggtatgatagctgaggagtcattgacatctttgcctagaattgaaaaggaagctgatgtggcaacagagaaagaacctactccatttcagaatacagtttttaagtctgtcgaggacttggacaattgtgacaaaatgttgataacagacaaaccaactcatgaagaacagaactctatagtgccactgagactaaaaacttgggggagctaatggaagtaacagttttagatattgaccacttggaatgttctggaaccaacttagatcaagatgcacagctaattggtagttctttacagcctgatactatagatgcttttattgatttgacacatgatacttcaaatgagggtaaaaatgaaggtagtgaacctgtgttagctggtgaaggcttggaatgccaggtaatatgtatagatgaggataaccccaaagaagcaaagatggaacgggcaagcagtcctgcagaatgctttgttgaagaaacatgtattgatttgaccccagagtctcctggctcatgtgaaataaagagacatgctttaaaatcagagccaccatcaaatttgaattgcttagagttgcctgggactctgggtaattttcaaaagaagagaaaaaacagtcctgttttgaatcactcttctcagaaaaaacaaagaaaggaaacagacttaaacagtaatgaaaagactaagagactttctcagaattctgatagaactggtgatgctcacagaaagcaagccagcaagaaaagggaatctgcagtaaatgacaacacatccttgtcaccagaggccagcctaggggtgaagggttcagcaacagcacttgctacttttccaacaagtctttctgcaaagaatgttatcaaaaagaagggagaaattatagtttcatggacaagaaatgatgaccgagaaattttactggaatgtcagaaaagaatgccatccctgaaaacttttacatatttagctgtcaagctgaataaaaatccaaatcaggtttcagagaggttccagcagctgaagaagctctttgagaagtcaaaatgcaggtagtagtaattccaccacaggaagctaatactatgagttgctggattttacggcgtttcatttatttcttctacacagaagctttgattcctcatgttttaaangaggaagtaggtggaggttttgtgtgcttggcttactcagatcaacagtttcacttacctgttattggtcagaatatttatttttaatcattaaaagttgttgtcaaaatgaaagaataaaagcaacagggatgtaatactgaaacttagttttgatattggatgaaat

SEQ ID NO: 3157838 - DNA, 412 bp, Cricetulus griseus
ttttgagagagacagagagagagagagagagagagagagagagagagagagagagagagagagagagattgtggatctagtccaactttagtgacatgcaaaagccagccaagtccacgatgaaatgaaatgtaagccctgagcaggctcttaccaggttacttgagtaattgataccgttgttaacctgttacttggcagtgactcatctgtctatttcttacccagtaatcctatcagaaagcattccttactttattgttaacctcttgatggctgttcttaagaatatatacatatatgtgaatgtagtcaaggggacatccttcccctcagtatttgtatgatttgcttattgttactgtactgagtgagctcccttgtgcatcaggaacaaataaatgagattttg

SEQ ID NO: 3157839 - DNA, 651 bp, Cricetulus griseus
ggctggagatggagttccagcgttgccaatatgtggtgggccgtgagagaaccgagctggctcggcagctcaatctttccgagacccaggtgaaggtctggttccagaatcggcgaaccaagcagaagaaggaccagggcaaggactccgagctgcgctctgtggtgtcggagaccgccgccacgtgcagcgtgctgcggctgttggagcagggccgcctgctgtctccgcccggcctgcctgccctgctgcctccctgtgctaccggcgctctcggctcggcgttgcgcgggcccagcctcccggccctgagtgctggcgctgcggcgggctccgctgctgccgctcgccgccgccgccgccgctactgccccgggccccgcaggcgcagcgtctcagcacccgcctgccgtgggcggcgctcccggcccagggcctgcaggcccgggggactgcacgcgggagcacccgccgcccgccacggtctcttcagcctgccggtgccgtcgctgctaggctccgttgcaagccgcctgtcctccgccccgttgacgatggctggttcgctggccgggaatttgcaagaactttcagcccggtacctgagctcctcggccttcgagccttactcccggaccaacaataaagaag

SEQ ID NO: 3157840 - DNA, 1423 bp, Cricetulus griseus
  modified_base (120)..(120): a, c, t, g, unknown or other
aggaaggtcaagagtggtcatccacctgaaacctgccccttctttgaggagatggaagctctgatgagtgcccaggtcattgcattgcccattagtgtcatggaagaagccacttcccancctagccaggcagacactgaaactgaggagccagggcagagggcctggcagcatgaggaaggagaagagactgtggctgaagggtctgacagtgatgacctggaggccatcccccaggaccctgacaatccacctgcatctgtcgtcttccgaagcccaagtgaatttaaaagcctacaaaccagctatcggaaagtcaagaatggtcaagcaccagaaacttgccccttctttgaagaaatggatgctctggtcagtgcccgtgttgctgtccaacctagtgatgaccaggaaaaagaaacagcttcttgctaccttcaggaaaccagtgaagctgaagctgaggagcaagccgaggacacagaagaagattcagatgatgaagatgacactgagatacccccaggggctgttacaacccgtgctccagtcttattccagagccccagtggttttgaggctggatttgataatgaagagaatctaaaacgagatatttctgaggaagtacagctgcataggacattacttgcaaggtctgaaaggaaaatttcccgtcatgctaatcaaggtaaagttagtaagaatgaatgtttatcagcaaaccaatggggaaagactcaaaagagaaaaaaaaagaaaactggcactcccagagaagagtataggtacagtcctgacttatcagagaccaggcttgggagacagaccctataaatatctcagatatggcaaaagttttggcccaaactcccatctcctgtatcaggtatcccatcaggtagagaatccatataaatgtgctgactgtgggaaaagcttcagtcggagtgcacgcctcatcagacaccaaagaatccacactggagaaaaaccttataagtgtcttgactgtgggaaaggtttccgagacagttccaatttcattacccatcggagaatacacacaggagaaaagccttatcagtgtggtgaatgtggaaaacgcttcaatcaaagctcaagccttataattcaccagagaacccacacaggagaaaaaccttaccagtgtgaagagtgtgggagaagctttaataacagttctcatttcagtgcacatcggaggacacacacaggagagagaccccatgtgtgtcctgactgtggtaagagttttagtaagagttctgacttacgtgcacatcacagaacccacacaggagagaaaccttatgagtgccacgattgtggcaagtgcttcagtaagagctctgcccttaataaacaccgagagatccacacacaggaaaagctgctgtca

SEQ ID NO: 3157841 - DNA, 360 bp, Cricetulus griseus
atgaacttggagcgggtgtccaacgaggagaagctgaacctgtgccggaagtactatctgggtggatttgcgttcctgccttttctttggttggtcaacattttctggttcttcagagaggccttcctcgccccagcctacacagagcagagccaaatcaaaggctatgtttggcgctcagccgtgggcttcttcttctgggtagttgtcctcaccacctggatcaccatctttcagatctaccggccccgatggggcgctcttgggggactacctctcgttcaccattcccctgggcactccctgacagcttcacaggctgctctgcgttctttctcccgggatgcgcttctctgctct

SEQ ID NO: 3157842 - DNA, 1094 bp, Cricetulus griseus
  modified_base (808)..(808): a, c, t, g, unknown or other
cagagcccgaaccctcggcgcgcacacgccgtgccgcccaccctggtgcctctggtgaacggctccgccgcattggggctaagcggccgtgctgcggccacactggccgcggtgagtggaacaccgggcctgggctcccagcccgccgagctgggcacccacaaacggccggcgtcggtgtccggcgcggcagagcacgaggctcgtgagccgaacaaggagaaggcacagcccgcgcaccggagcccagccgacagcttatccggcgcgtctggggcgagcgagctgggcgccgacggtgcaggcaagggtcgagcgcccggggagcaggactggtccagcaggcctaagacggtgcgcgacacgctactggcgctgcaccagcacggccactcgggcccttcgagagcaagttcaagaaggagccggccctcgactgcagctctatgaaccaaagaaggcttggccccagagaggtggggggccaggccacgggcagcacaggaggactggagcctgtgcaccctgccagcctcccagactcctctctggcagccagcgcccccctatgctgcaccctctgccacgagcggctggaggatacccattttgtgcagtgcccgtctgtcccttcacacaagttctgtttcccttgctccagacaaagcattaaacagcagggcgctagcggagaggtctattgtccaagcggggagaagtgccctctggtgggctccaatgtcccctgggccttcatgcaaggagaaattgctaccatcctcgctggagatgtgaaagtgaaaaaggngagagactcgtgactttctgcattcagaaaagcccacggttacccttaactcaaacttctgaactgtatataaatctccatatatatatatatatatatataatatatatataagggttttttacataatcaagccccacctctccaactattttagaagccttttgtaaactaattcttttgatcactgttttgcattggtgaagtgattgtttttaatgtaacaacattaactttttttttttccttgagtagttttacttttaaaagtataagagaaatttaa

SEQ ID NO: 3157843 - DNA, 206 bp, Cricetulus griseus
  modified_base (163)..(163): a, c, t, g, unknown or other
caggtctgacagctctcctgaagatggaccgtcacaacatgtcctggatccgctaccctagccatgtgtccccagatgtggaggatgtcattgcagcacagagcatcatttcgtaggtgcatgcatgtgtatgtagcactgtgtgtcccattgagcctttagngacggggctctcaatctgagcgtgttcatccgagaccgcacta

SEQ ID NO: 3157844 - DNA, 173 bp, Cricetulus griseus
ggggccacagcattttgtgttgctcccaatgcactatttccatttgaactgtacaatgaagaatatttagagcaaagagatctctacctgactcagtgccaagagcagcttcaacagtttattgccacatgtggacctgggacaactctcttttctagtgatgaataatcaat

SEQ ID NO: 3157845 - DNA, 837 bp, Cricetulus griseus
gatgttcctgctcctgagcatcctggtggctgtcctgccagtcagcactgaaggaggagaaataatgtggggtacagaggccaaaccccactcccatccctacatggcattcttaaggatttatagaaacgaatcgggtaaaattcgatgtggtggtttcctggtggcaaaagacatagtaatgacagcagctcactgttatgcaaggaatataagtgtaatcttgggtgctcatgatatcaagaaactgaaaaacacccagatcctcactgtccttaatgccaccaagcacgagaactataatagtaaaacaaaggccaatgacatcatgctactcaagctggaacacaaagctcaactcaataaagctgtgaagaccattgaccttccaaagagccaggattgggtgaaacctaagcaggtgtgcacagtagcaggctggggaaaactggccaattgtactctgcctaacaaacttcaggaagtcaagctagaagtccaagaaagatgtgtgccgaaaaatgtcccaaagctacaacaattccatccagctctgtgtgggaaatcccaaggagaagaaggctactggtaagggagattctggaggaccctttgtgtgccatagtgtggcccagggcattgtcagtcatcaacttcgttccaagaatcctccacgggttttcaccagaatctcaagctttataccttggattaagaaaacaatgaaactccttcaacaaccatagaagacaagccctgtgcctgggacagtgtccaacatcctgggatacagctatctgaaacttaataaagagatctgtctgcataaaaaaaaaa

SEQ ID NO: 3157846 - DNA, 402 bp, Cricetulus griseus
  modified_base (11)..(11): a, c, t, g, unknown or other
ttttttttttntttttctttttcttttctgattttctctcccaatcttgcctaatgctcttaagttaagtaactaatatttaatgttttatttcttgtccttttggaaataaatatcaaagcacttcggtcaggtttaaatccatattacctgttgaagaaaattttaaatatttgaagcagtcctgttttcatgcagattgagaaatatcttttgtatcattcatatttatatgcagtgtgctcttttctttattttaatacctgtgttaacttttttttattttataataacaaaaatatctgtaaaattaaaattccagaccttgttatgtcaggtttgctcaagtgtaatgtagggtttttgtttttgtttttgttttttaaggctcaaatacctcag

SEQ ID NO: 3157847 - DNA, 314 bp, Cricetulus griseus
atcaaaagttcggaaaaggattgtcagaaatcctgatgttttgatgaaagactagtaccctttggagacctggacagaattcccgactgagagccgttggcgttgctggtcatgtttatatgttgttgttaatgtgtgggaaaatggtgtctctcgtcatttgctctgttaagggaacaaatgagcccttttaaagtctgacaaatgtaaacaactattagctttcccaagctaaaagagtgtctcagggaggggaaggattaagatttgaagtcacagagatcagtaagcagtgcccacccttcagccacagc

SEQ ID NO: 3157848 - DNA, 220 bp, Cricetulus griseus
agcagcagagagagccacaaggcggcgactgtgagcttttgggtactgcgtagactctatggagactgatgtctggggatgcgaccagaagcttggggagaggcagcagtcccccagggccagtccctgagggtgtcatccgaatctacagcatgaggttctgcccctactcgcaaagggcacgcctggtcctcaaggccaaaggcatcaggcatgaagt

SEQ ID NO: 3157849 - DNA, 786 bp, Cricetulus griseus
ctgtgtggatttttgttctcacatgtaacattaagctggcctctgggccttttcctctctacctcccctgtgacctttcctagcctcagagttgttaatgcccttggtcctggcctacactgtatcagaccagaaccctggggccaggctcccctctcctccagctgtccagcacatctgacaggcttctttttgagatggcctcaggttttctcagcaaagagctgcctttagtccaactgtttatgtccatcattctgactagaaacatcttatgatcatgtggagaaatgacacaggtgatgtgtgttcagagccctggggtttggcctccctgctccccagccccaggccaagaggaaagagccaagagatcttgctggagggaaggtagagtgagcctgtttttgtatgatggctctcttcccaaggtacaagttggcaagatcacctgcccctccacctccttgacatgctggcccatttcaggacagctttccaaggaatgaaacagtccacccacccccagatctatgggatggaatggccgggagccctggagtggcttcatgcctccttttgcctagcctgagtggctttgagggttgtctcagagcagtgccccatgtcctgctgctgggacctagcatgggtaagagatggtcgcaggcaagaagcactttatagagttccctattgctgggaaggttgtgtttctcccacagtttgtttgtgaatatttccctgttttataaatgtctgcccctgtctagaaaaaaaaaaaaa

SEQ ID NO: 3157850 - DNA, 577 bp, Cricetulus griseus
attttaagtgccaattatgagaggcctgttctgcatctggttgctctgaacacaccagtggctggggacatccgagctgatttccagtgcttccagcaggcccgggcagcaggactgctgtccaccttcagagctttcctgtcatcccacttgcaggatctctccacagttgtgaggaaagcagagagattcagccttccaattgtgaacctcaagggccaagtgctttttaacaattgggactcaatattttctggtgatggaggtcagttcaacacccacattccaatatattcttttgatggccgagacgtgatgaccgatccttcttggccccagaaagtcatttggcatggatccaaccccgaggtgtccgtcttgtggataagtactgtgaagcctggcgaaccacagacatggcagtaacgggatttgcctccccactgagcacagggaagattctggaccagaaagcttagtttacccaatcatagttgagcgtggcatctgtttatgtaattctgactttctgggaaagtcaagactctagaaaagacacaacacataatcattacct

SEQ ID NO: 3157851 - DNA, 528 bp, Cricetulus griseus
gagaacacaccaggcccttgacctgttggctggaggaatgttgtctgaggaagtaaaagggaacgtcacagttaccagaagatttactcagagtggagtccacgacagttggcccttcaggccttggaccatctccttgccttccagaccttgttgactttgtcacacggacatctggagctccaaaagagaagccgtgctctccgctctgtgagccaggtgactttcttacgtgtaattccttgggtatgggatcaccacctctagaaattgtgaatgtatctgtctcagaggtagtttctcaagcaagtgaagacaatgacagtgctttgaatttggtgaaatctccaacctcagggtccccctcaagggatcaggtggttggaggcaatatggacccccaggaaataactgaacaagaagctgcagttgatgtcattccagaccacacaagatctagtgttcatgactacagcagccaggactacctgaacggatgaatcattgggttttagaaattggacccca

SEQ ID NO: 3157852 - DNA, 1175 bp, Cricetulus griseus
gtcctaaaccaggaagtgatggcgcctgaagccatcaagaacttcgtgcccctgctggaaactgtagttcgggacttcatcgatgtcttacacagacgcatcaagcagcagaagtctggaaatttctcaggggacatcagtggtgacttgttccgctttgcctttgagtccatcaccagtgttgtatttggggagcgcctggggaatgttggaggagatagtggaccctgagtcccagcggttcatcgatgccgtctaccagatgtttcacaccagtgtccccatgctcaacctgcctccagaactttttcgattcttcagactaagacctggaaggagcatgcagctgcctgggatgtgatttttgaaaaagctcatgattacaccaagaacttctactgggacttaaggcagaagcaagagtacagcaagtaccctcaagctgcccttcaagaacatccaggccaacattacagagatcctgccaggaggggtggacacggcctccatgaccctgcagtggaacctttatgagatggcacacaacttggaggtacaggagatgctgcgggcagaggttctggctgcccggcgccaggcccagggagacatggtcaagatggtgcagttggtcccactcctaaaagccagtatcaaggagacactgagactccaccccatctccgtgaccttgcagagatatcttgcagatgacctggtacttcgaaattacaggattcctgccaagatgctggtgcaggtggctaactatgccatgggccgagtacccagcttcttccccaacccaaacaagtttgacccaactcggtggctggaaaaaagcaaaaatatcacccacttccgttacttgggctttggctggggtattcggcagtgtctgggccggcggattgcagagctggagatgaccatcttcctcattaatgtgctggagaactttagaattgaagtccagagtttccatgatgtggggaccaagttcaacctcatcctgatgcctgagaagcccatcttcttcaacttccatcctctcaagaaggaccttggcacaaccatgatcagatagggtggcactgtctgaacttcagtctggagtcacatggggagatgacctaatggggacatttgggtgggtgtctctgtatctccagaaa

SEQ ID NO: 3157853 - DNA, 1481 bp, Cricetulus griseus
tcagctctgcactttttaatccctttaatattcttttaaaaacatctttccagaaattgacctgaccatttataaaacttaccaaggtgaaaaactgtaaaagcccagttggccatgaagcctaaagaaccttagattactgagcgtaaaagtctgtgtcaaaagactttaaaaccaaaaaaatctgaagtttaaatgacaggagccagtcaggtcaggtcataccctgtaggctcctgagtccttccttctcacgtgtctctggtgcctgagaatgttgggatagcattaaagaaatctacctcagttgacaggattcctcccacccttagggtttcttcagctcgtaagtctaacctgctgagtgtcactctggcagagcctggcttgttggaccaagcgggctagtgaagcatggcagagcggaagtgtgtaagcgttcctgtgatgacctctttctagcatgttgcagttttatatttgataagttggtaagtgatatgaatgtataggtaattgtgtatgtttttaaaatgacaatgaaaattgaaaatgtagcttccacactttgttcataattccaaagtatcttattttatcagtgttaaatagcttttggacagcttcagtccatttttcagaggtgtgctgttttatacggaaagaatctcatcatctcacatctcatggagctgccgtttacacatcacaactttttaacttactgtatttttcagaattaactttttttggagggaggaaattccccacttgctaaacgatactaaattgtctgagcttttaaaatcaggtcttcagattttataaactagtacgtagctttttaggttcttcgttggatgtacataaagaatataaatgaccctcaaattgttttaaatgtctggagttttttccactgatgcacactcggggttgttgtgttctcgaatactttcatcattaattgaaaaagcccatagcttcttttaatgtgaattggttttctagatttttttatattgtgcttggtggagaggacattttaatacaattttttgcctaaagcagcccctctgaatgttaatttttaaaacgttaaaatttggtgaacatctggaacatgtgtttgcattatgtttaaatttcggtgttttaaaaagaaaattctggaatgtattattattgaactttcattaaaagaaattgataggactgtttttggttttttgtttttgtttgttgttgttctttttggttttaagacacagagtctcttctctgtagtctttggaggctgtcctggaactaactcgtgtagaccaggctggtctcgaactcacagagatccgtctgcctctgcctcccgagtgctgggattaaaggcgtagcgccaccattttcttacagcaacattcatgtattattttaatccatttttctgtgacatttggtgcaataaactttttgaatttatcttg

SEQ ID NO: 3157854 - DNA, 1258 bp, Cricetulus griseus
ccgcgcctcgggccggaggatgcccaggaagctgctgctgctgccccgctgtctgcgtgctcggctctccgcgtcccgcgggctcgccccgccgccccgccggccatgaacgccgcccgcaccggctaccgagtcttctcggccaactccacggccgcctgcaccgagctggccaagcgcatcaccgagcgtcttggtgctgaattgggaaaatctgttgtgtaccaggagaccaatggagaaacaagagttgaaatcaaagagtctgttcgtggccaagatattttcattatacagacaatacccagagacgtgaatacagctgtgatggagttactgattatggcctatgcactgaagactgcctgtgccaggaatatcatcggtgtcatcccctacttcccctacagcaagcaaagcaagatgaggaagagaggctccatcgtgtgcaaactcctggcgtccatgctggcaaaggctggtttaactcacataatcactatggatcttcaccaaaaggaaatacaaggctttttcagctttccagtggacaaccttagagcctcacctttcctgcttcagtatatccaggaggaaattccaaattacagaaatgcagtcattgtagctaagtctcctgatgctgcaaaaagggctcagtcctatgccgagagactgcgcctggggctggctgtgatccacggagaagcgcagtgcacagagctggacatggacgacggtcgacactcgccccccatggtcaagaacgccactgtgcacccgggcctggagctgcccttgatgatggccaaagagaagccaccaatcacagtggttggagacgtcggaggacggattgcaatcatagtggatgacattattgacgatgtggagagttttgtggctgctgcagagatcctgaaagagagaggcgcatacaagatctatgttatggctacacacggcatcctgtccgctgaagccccccgtctgattgaggagtcctccattgatgaggtggtggtgacaaacactgtccctcatgagctccagaaactgcaatgtcccaagataaagactgtggacatcagcttgattctttctgaggcgatccggagaatccacaatggcgagtccatggcttacctcttccggaacatcacagtcgatgactaacttggagctgccttgaccctggacctacacagcagtgtatcagcctggaataggctgcagctaggaagtctctacaaggctg

SEQ ID NO: 3157855 - DNA, 341 bp, Cricetulus griseus
agcttaatacagcaccagttggtggcactcctaaaggatcctctctgaagtctttgtatgtaaagatgatgtctgcaaaagccatggctaaagtaacgatcatcatgctggcactttgtcttcttacccaaacagatgggaaacctattaagaagagagctgtcagtgaaatacaacttatgcacaacctgggcaaacacctggcctctatggagaggatgcaatggctgagaaagaagctgcaagatgtacacaattttgttagccttggagttcaaatggctgcccgagacagtagttaccagaggcccaccaagaaggaggaaaatgtccttgttgat

SEQ ID NO: 3157856 - DNA, 773 bp, Cricetulus griseus
gtgatagatgtgaatgacaattctcctgagattgctgtgtcatcatttatcagtccagtcccagaaaattccccggatactttagttatgatttttagtatccaagacaaggactcaggagagaacagcaggatggtctgttctattccagaggacctcccgtttgtgctaaaatcttcgattgaaaattactaccacttagaaacggagggagcactggacagagagagcagagctgagtacaacatcaccatcacagtcaccgacatgggcacacccaggctcacaacccagcacaccataacagtgcaggtgtccgatgtcaacgacaacgcccctctgccagtgtcactctgcatgtgctggtggtggatggcttctctcagccctacctgcctctgcctgaggtggggcacgaccatgctcaggacaaagatgtgctgactctgtacctggtcattgctttggcgtcagtgtcttcgctcttcctcttgtttgtgctgttgttcgtgggtgtgaggctgtgcaggagggcaagggcagcctctctgggtggctgctctgtgcctgaaggacactttcctggtcacctggtggatgtcagtggggcgggaaccttgtcccagagttaccagtatgaggtgtgtatgatgggaggtactgggacaaatgagttcaaattcctgaagccaatttcccccaatctaccaccccagttccctgggaaagtaatggaggaaagtcctactctttacaatagtttggggttattt

SEQ ID NO: 3157857 - DNA, 506 bp, Cricetulus griseus
aaggtatactggattcatcctgccatgtctgggagttcacccagttcaagaactttcaccagaagaaccaagaagtgtgacattaaaggatttggatgtagctttgcctattattgagaagtacaaggatcgggtgttggcaattggagaggtggggctagacttctcccccagatttgctggcactgaggaacagaaagaagaacaaagacaggtcctgatcagacaggtccaattggccaaaagactaaatgtgcctttaaacgtgcactcacgctcagcaggaagacccaccatcaacctcttacgtgaacaaggtgctgaacgggtcctgctgcacgcatttgatggttggccgtccgcagccatggaaggagtcagggcaggctactacttctcaatcccgccgtccatcataagaagtggacagaagcagaagcttgtgaagcagctgcctctaagctccatctgcttagagacagattcgcctgctctgggaccagaaa

SEQ ID NO: 3157858 - DNA, 323 bp, Cricetulus griseus
atccgagggcggctgggaggaggtgagcaaccaggcccgagaccgcttggaagaggtacgcgagcagatggaggagctgcgcgccaaggtagaggagcaggcccagcagatgcgcatgcaggccgagatcttccaggctcgcctcaagggctggttcgagcccctggtggaagacatgcagcgccagtgggcgaacctggtggagaagatacaggcctccgtggctaccagccccatccctacctccgtgccaaaggagagtcaatgagtatccctctcccagccgccgcggcgacacccatggccagcaggtggccctcgtc

SEQ ID NO: 3157859 - DNA, 973 bp, Cricetulus griseus
  modified_base (468)..(468): a, c, t, g, unknown or other
gtggtctcctcctccggcgggcgctgcggcggcctcccgagagtggcgcgggacggccgggcgggcgtggagctgtctgcacggactaggattccagatggcaaattctatgaatggcagaaaccctggtggtcgaggaggaaacccccgcaaaggtcgaattttggggattattgatgctattcaggatgcagttggaccccccaagcaagctgcagctgatcgcaggactgtggagaagacttggaaactcatggacaaagtggtaagactgtgccaaaaaccccaaacttcagttgaaaaatagcccaccgtatatacttgacattttacccgatacctatcagcacttgcgacttatattgagtaaatatgatgacaaccagaagcttgttcaactgagcgagaacgagtattttaaaatctacatcgatagtctaatgaagaagtcaaagcgagccatccggntcttttgtttgctaactcagcatttctcacaccaaggacacatgcaaagatttcttcataatgtgaagtccttaaattgttcagttccagaagcatttcctacattttgaacatgactttgtctcttggattttcaacttgaagctttagtttgcactgaattatctcacctggttttaaaatgtttcagatggactgatttggaagtaaaatacagtatattttaaatattaatgcagctactgcctgtaagcctggaatgtcagcatttcaaggaagaggttctggaaaaagacagcaatagaaagaaaggttttcttcccaattcccatttgtattgtttggaaatgcattttttaaacttgtttaatgtggcaaaatagttatgtgttcaattaatttatattggattcattcatatcttcaattctccattatggatatgtaacctcaagtactctatctcttcttttaaggtattttataaaaatagaatgttaacaaa

SEQ ID NO: 3157860 - DNA, 603 bp, Cricetulus griseus
tctctggaactcactgctggaagtgtggacacgacatcagtgccgttggtaatgacctgctttgagctggctcgaaacccagatgttcagcaggcacttcggcaagagagcctggcagctgaggccagaattgcagcaaatcctcagagagctctaacagatctgcccctgttgcaggctgccattaaagagaccttgaggctctatcctgttgctgcctttttggagagaattatatgctcagacttagttcttcagaactaccatgtccctgctgggacggtcctccacatgagtgtctactccatgggccgaaaccctgcagtatttccaaggccggagcgctacacgccccagcgctggctggagaggaaaaggagtttccagcacctggccttcggctttgggctacgccagtgcctggggaagcgcttggcacaggtggagatgcttctcctgctgcaccatgtgctgaaatccttcaaggtggagacacgagagcaagaggatgtgcagatggtctaccgctttgttttgatgcccaactccagccccctcctcactttccggcctgtaagctagtcagttttgcatctagggtcc

SEQ ID NO: 3157861 - DNA, 1036 bp, Cricetulus griseus
tttataaatgttattttatttaatacagattttcagtgaggggctttttccaaccccattggttctattttcttgtatttttttttttctattttattttgcttcataacttaaaaccaagtgtcttctgtcttagatattattcttaatttgtgctgataggcgtgtttataagaactggagaggtaatttattggaatgaactaagtgactcccctgtcctcccttcctttttgacatgaattttactacttcacaaatgaagaatgatgttgcgaagttgccatggtgaagctgacacataccactaaaatgattatgacttagaagtgactttctgatgtagatgacttattactgttaatttaaaatgttctataattgtccattgccttttatgtcgtgttgtgacaggattttggctatatttttttacgtcatctgagatatactttaaaaagtttgtttttaggtaatccaaaggaaaaaaatgtttatactcttgaacatatatttgccctcagcctatataaaagtttctttgaagaaaacactttaccagaaacagaattgacagatttttctacttgctgactgcctaagttatctagatctttttttaaaaatagttttagtactaaggtatactactggacgtttctatttttttaagtatattccttttctgacaatacaactgaagttgataaattgcttaagaacttttgattggtctcagaaaggtaatggattgaatactcataattttgtctggagtctggcagagttatgttgtacatttggtgaagtttttcttgtaatttatattttaaataaaatatttttagagtttttaattttaatgaaggggaagagcatacactttcatattccacagtgataataccatgtcataaattcagatcacatgttatttctcccagatatacttccataatggtccctcatttgtcatggttcttaactctcatttttttcttatttctagactaagctgctaaattttagcacccta

SEQ ID NO: 3157862 - DNA, 2352 bp, Cricetulus griseus
  modified_base (165)..(165): a, c, t, g, unknown or other
gccaatgatgctggagagatcacactggttcctatttctatgaatacaactcaggaatgcaaagctgagagccctgtatcactgactgcgcactcattacttggtgcttctccaaaacagacccatctgactaaagcacaagatgctcatctgactggaataagnaaacccaagagaacagggtccttagcactgttttatagaaaggtctatcatttggcaagtgtgcgcttacgtgatttatgtttaaaacttgatgtttcaaatgagttacgaaggaagatctggacatgttttgaattcactttagttcactgccctgatttaatgaaagataggcatttggatcagctccttctgtgtgccttttacatcatggcaaaagtaacaaaagaagaaagaacttttcaagaaataatgaaaagttataggaatcagccacaagctaatagtcatgtatataggagtgttctcttaaaaagtattccaagagaagttgtggcatacaatggtgattgtgaaatgacagatggtgatatagaagatgccacaaagacgcccaactgttccagtgaaccagtgaaagaggaaagaggtgatcttatcaaattctacaatacaatatatgtaggaagagtgaagtcatttgcattgaagtatgacttgtccaatcaggaccacataatggatgctccacccctctctcctttcccacatattaagcagcagccgggctccccacgccgcatttcccagcagcattccatttatgtttcaccacacaaaaatggatcaggccttacccccaggagtgccctgttgtacaagttcaatggcagcccttctaagagtttgaaagatatcaacaacatgataaggcaaggtgagcagaaaaccaagaagcgagtaatagccatcagtggagacgctgaatcacctgccaaacgtctctgccaagagaatgatgatgttttacttaaacgactacaagatgttgtcagtgaaagagccaatcactaacagcactctttttctggtcaaagcacttgggggttgttctagagaaagttgggggctccatccttcacccttttatcactgagttatacaaaaacttgcaccaaaagtaagttccttcttaaaaaattttattcaaaatgtatctgacaaacatgtatttccagttagattagaaaaaaaaattttaagtgcctttataaatattaatattttttaaatgtttgttccttggcttactttttaggatgaattaaggagaaactattttttagctgtcttttcaaaatgatcaaatgtctcctgtactttttaatatgaggtcaatgagtcttctttgagatgcttgtgctgtgtgctcatgttgaaggttaggttagtgagctcagtgatgcaccagcctgccttgggcccgctgtagtaactgcacatcaggtaccaccatcgtgctagactggctgtgcctttgtcttcttccgctccttaagtacaagaggctttgtacgctacatagcaagatcctgactcaaaaaaagatcagttttcattctcattgtttgttaaatttcctgagaatatttgaagctttcacattaaaatcacttcatgccttataaatcggaatgtttcagttcaagagttgctttttctttctatcttatatcactctttgtcccaataattatggtttctcttgagttttccactggggtttaactcctgaatccctgaagatctttccacactggaggtacagccctctaaagaatcaggtctttagtgttcaccttttcttgtgggtttctagactctgaaaggatgggaataagccattcttaattaatatctagatgatgtgctagtataaatattatagctgcaaacttatttttttaatataaagtgttgacctggcagtctagctaaccataatgtttaacttttccaaaaactagctaatttgaattagtccaagatttggctaccaattaatgatgaatggtaaccaaatttttatttttaaattttaaaatttgggttatgttttgtttttctgacaattgtattcttgtgttttgtgtagtatctacacgttgtaataagccaaataatagtctgtcttgcgtccttgtacatatttctctgtagctgtaactactgtatcactttcattattaatgtacaaaatataaatgtggatttattcaatgactgtgttaaaaacttgagacatgtttttaccaattttcaggactttgtattaatgtacataaaacagttaataaaaattagaattttaaaaactaaaaaaaaaaaaaaaaaaaaagaaaaaaa

SEQ ID NO: 3157863 - DNA, 577 bp, Cricetulus griseus
gcccagagtatcaaacagctggaaaccgtagctgccaggctctctatctcactcctgcgccacacccagttattacctgcagacaaggccttttatgaagcaggcactgcggcaaaggaagttggctgggaaaatatggctttcattttcctcaaccgatttttggatctgactgatgcaatcgaagaagggactctggatgcccttgaccactcagatttccaggacacagacattccctttgaggtgccactcccagccaagcagcacgtaccggaggcccagagagaagaggttcgagactgggtgctcacagtctccatggaccagaggctggagcaggttctgccccgggatgagcgtggagtctatgaggcttccctagtagcagcgagcactggggttcgggcacgtgccctgccttattacaggttaccccatactgaggaacaaaattgaatttaagcggtccagggaaggctgctaacaaagacaactggaacaagtttcttaatggccatcaagacctcccgacagtccagtgtgccaggacgtgctcaaattcatcagccagtgg

SEQ ID NO: 3157864 - DNA, 3960 bp, Cricetulus griseus
caaaccattggttgaaaatagtatacctagttcgatcactgtcagtagaattccttatagataaacaactggatttttttaacagaagattgtgcctttcagccataccaggatgacattgacagtctaaagccggtactcagggacaacccacagctgcatgcagaagtgaaagtctgggtgaaggaacaaaaggttcaggagattttttatgcaaggccaccaatccatcacagtttggaaagaaaggaaagtagctatagtagcctttcccctccaactctgaccccagtgttgcccgtaaatgctggcagcaaagttcaagaatcccagaagcctccaactctaattcctgagccaaaagaatcccaggcaaattttaagagttcttctgatcagggtttatcagaaatgtggaagtctaacaacaacctcagcaaggagaaaactgagtggcctgtggaaaagagcaatggaaagtcacaggctgctgtggcatctgtcattgtccgtccaccttctagtacaaaagttgatagtgtgccatctgtaccattagcttccaaagatcgagtttgtgagagatcttcatctggggcaagtaaaacagattacctcaaaccagaagctggagagactggaagagtcattctaccaaatgtgaatttagaaaatgctcatgtgaaatctagaaaaaaaattcgaagctgtctcccaggaagttgcagacagcaatagtgctggcattcctcgttctgtattgaaagactggcgaaaagtcaagaagctaaagcaaactggagaatcctttttgcaagatgactcttgctgtgagatagggcccaattttacaaaagtgccgagaatgtagacttattcgtagtaaaaaggagaagaatcagctcactcaccagttattttgtagattttactactttagaagattgtcatttagtaagaatggagtggtcaggatagatggtttctcttctcctgaacaatatgatgatgaagccatgagtttatggacacattgaaaattatgaagatgatgaagtagatatcgaaacctctaaatatatcttggatataataggtgataagttctgccagttagtaacatctgaaaagacagctttgtcctgggtgaaaaaggatgccaaaattgcctggaaaagagcagtgcggggtgttcgggagatgtgtgacgcatgtgaagcaacactgttttaatgtccactgggtgtgccgcaagtgtggattcgtggcttgcttggattgttacaaggccaaggagaggaagagttctagagataaagagttgtatgcttggatgaagtgtgtaaaaggacagcctcacgatcacaagcattttaatgccaactcaaattatacctggttctgtgttgacagatcttcttgatgccatgcacattcttagggaaaaatatggtattaaatcccacctgaatctcagcagcagagcacccctcagaaatctcagagcaatggtagtagcagccctggaagtgtaagcacagacagcaggttgacccctccagagtcccagtcaccactgcactggctagctgatcttgctgagcaaaaagccagagaggaaaacaagaaaacaaagaatttgctcttgaaaaggaaatcaaagaagaaggagaacaagatgcctctgattctccaaatggcagcacatcacctccagcctctcagaacaatgaacagggctcaaccctccgagatttgctaaccaccacagctggcaagcttcgagtgggctctactgatgctggaattgcctttgctccagtgtactcaatgggagcctcgagtggcaaaagtggacggagtatgcctaacatccttgatgacatcattgcttcagttgttgaaaacaaaattccaccaaataaaacagccaagataaatgtaaaatcagagcctaatgaagaacctaaagaaagccgaaaatctgccgtgaatgaaagcaataaattatacagtgatataccacattcttggatctgtgaccagcatattttatggcttaaggattacaagaatagtaataactggaagcttttcaaagagtgctggaaacaaggacagcctgcagtggtttccggtgtgcataagaaaatgaacattagcctgtggaaggcagaatcaattagtctggattttggagaccaccaagctgatctcttgaactgcaaagacagcattgtttcaaatgccaacgttaaggagttctggggatggttttgaagaaatttcaaaacggcaaaaaaacaaaagtaggagaaacagtggttttaaagttgaaagactgcccatctggagaagactttaagaccatgatgccagcaagatatgaagactttttaagaagtctgccattgccagaatattgcaacccagaagggaagttcaatttggcctcccatttgccagggttctttgtacgccctgatctaggacccaggttatgcagtgcctatggtgttgctgctgctaaggatcatgacataggaaccacaaatcttcacgtagaagcttctgatgttgttaatattcttgtctatgtcggaatagcaaaaggaaatggtgtcctttcaaaagcaggaatacttaagaaatttgaagaagaagaattggatgatattttaaggaaaagattaaaggattcaagtgaaatgcctggtgctctgtggcatatttatgctggaaaagatcttgacaagataagggaatttcttcaaaagatttcaaaagaacaaggccttgaagttctgccagagcatgatccaatacgggaccaaagctggtatgtgaataggaagctccgccagagactgcttgaggagtatggagtgagagcctgcactttgattcagttccttggtgatgccattgttttgccagcaggaacacttcatcaggtacaaaattttcacagctgtattcaggtaacagaagactttgtctccccagaacatcttgtacagtcatttcatttaacacaggaactgagacttttgaaagaagaaatcaattatgatgataagctacaggttaagaatatcttgtatcatgcagtcaaagaaatggtgagagctttgaagattcatgaagatgaagtagaggatatggaggacacttagtgcggttggaactgggataccccttgagtgacaatagggcctgacttgagctccattaaaccatcagtgccaagaaattctctttgcagtaattacttgctactgacaaccataccagtatagcattatgtcactgcccctgtgattcaatgctagctataaaacaagctaaatttaaaagcagcactatatagctgctcctgtatcataatgtatatgatgtttgtgaagatgccagatttaaaatgatgtatttatttttggtaaaaaaaaaaatctatgctatattgttgatcaagtgtaaatgtgctcttgtacagtttaataaaataactgatatttttcactacattgagacagttactgtgagaataggacataaacaccagctgttgcctgcgtttggaaaattgctggattgcacagcagtcatgtcataatcagaaaattactgccaaataattgtaaaatgtgtaaaatagaaagtatatagatactaaactcagacacttcaatattttgttgaagctattgactgtacaattaaacattttcaaaaggtgtaatttatttaaaattgtctcattttggtaaaatttatgtgaagttttaaagctaaatattaaacttaatatgctatgtaaatatatacatatatacatttaaggatgtattttttaaaacattggcttgcttttgttaaagtgcaagtgttacatatggctttgtacattacagttgaaaggggttttacattttccattaaaaagactttatcaaagaa

SEQ ID NO: 3157865 - DNA, 2057 bp, Cricetulus griseus
aatgctaagccatctgaacgcttgtgaagtagcaacaaagtagcagcgtttattctgaaattttgtggctgccagtctgtcctgggcaagcctcttcaaagtgctcatccctcacccaggggtttctgagcatcacgtttcagcgagtggagaatggcggggcagcttcggcttacgtcaggcaaggatgaagatcacttccaacaccagggagcagtggagctgcttgcctttaattttctgctcatccttaccattttaacaatctggttatttaaaaatcatcgattccgcttcttgcatgagactggaggcgccatggtctacggtctcataatggggttaattttacgatatgccacagcaccaactgatgttgagagcggaaccgtctacgagtgtgggaaattgtcattcagcccatcgactctgctagtcaacatcactgaccaagtttacgaatataagtagtggtatggatttgatcacaaatatctgaagcccatcttaacccactcgggtcctccactgacccagcacattgcccgcatggtgtggccccgtctccaggctgcttaccagtcctcaggcctatggggaacacctgaaagaggatgatgtggaatgtatcgtaaaccaagatgagctcgccatgaattaccaggagccaggctcctcgcccagcagtcctgccacaaagctagccctagaccagaagccttcactccagactccaggcaaggaaaacatctacgaaggagacctcggcctgggcagctatgaactcaaactggagcagactcggggtcaaccccaggtggattaattaccactgaggaatgccaacaagcctaaaaggcagtgcagagagagacagaacgagtattaaggaatgtaaattggacagaatcaaaaacctggtcgcatgtatcctcccgtgccttcagagatgagaatccattaccttccctctgtattatgcaacctcattgaattatccgacagccatttttactgctggattgggggccagacgagtcaggtctagctgcctttgggaatgaaccaaatgtgtctggtctgctgggggctcctcctcctgctcctcagatggctctccaggcctttcacgtggattttggattctagccccttaattatggagcatttataacatgaaaaagatgttcagtgcccactattgatggcctcagagaattttccatgagttaggggccctgttgttttgctggcactctctccatactgttccttcccactgttccaaggagctgcttgcctccaggtgtgtctatgttaagcaagggcctcttgccagccttaagggactctttccaggaaaactggtttctttcccaaattctgtgttttacccaaatgatgagcctcccttccttgtgcactggagcaacttcttggctcttgaagcaggttccctctgcatgctgggaagtcatattttgcagcatgacccttccacatgggggagactgtacagggccctgatcttttcaatttcaatattggtgactgcttggcagcaaaaaaaggcaaaaataataggactggtggcatttagaccacactgaggcaccaagggcaagcaccaatctggactcaccccttcccagcgtggctcaaggttgaattggagagaccaacacaatagtttttaattcagctgcatgacctgtgcctttgaagccataagatacctcaagcctagcttctcttgaaatgcagatgttgctattaggctccaaagagcaggcttcagacttaagagcccaagacatgatggacttgcttttgagggagatggagaatgatgtctttctcaggcccaaagcttaaaactaatgcatagctttgctgaccacttcttaggccttagacctgaagtatcaggtataacgactactagcatgccagttttcttgcttccaaatggtagaaattgggggaaacttttatattcaactgagtaaaatcttgtcatttggggtaaatatggcaagtagagaatttttcctaat

SEQ ID NO: 3157866 - DNA, 1810 bp, Cricetulus griseus
aagctggctcaggacaatctgcaggctcagtgaataccagagtgccattcaactacgggtcaagaacacagttcaaacattctccctcaagtaggaacgagcatggccacaccacaggaaggcaccagaactatcacagtgaaacttccaacatgtccatctatgacatcctgagaccaggaactcctagagaaggtttcaaaaccttttctcctaggacaaagacaatttatgatatgtataggaccaaggcgcccagagtcttaaaagaggactttatgcaaaagaatacgtttggcagtacatcgttgtgcttcgacagccggcaacgatcagcctcgccagccacggggcgttttactgcaaggagtttacactttccagccgatactctaaacaagaatagttttacaccagggaatagggcagattcttctagacataggcagaattgggaagagtctccgggggcaccatcaccaatggacatggaccctgctgatcagtatgtggttcctaagtgttttcaggagagtaggatgtatgagtggcatcattcacagagtgcttaccaaggcatccctctaaatgcccccatggatattgccatgagtcctgacactttagagaactcagagaatatgccattctaccatcagaacaatccatttgcaaggtctttcttcagcagtaccttcagacagagtggagaacagagatttggacagaatccttttggagccaacaggaagaacattctttctggtcagacttacaccagagcaggaagccattcccttctgacagggactttgaaatgatttctgttgaaacaaccaggacaccatctacttatagccacggtgtcccttctcgacactggaggccacattctaatcccagctaaggatttaggtcccagaagacacgtagccactgtcttctcccaaagtgaaagccagtctggctttaggaggttatctctttgcagatcagaggacagcccactgtcccctgaacttgtaaaatccacagagtccgcagatgaaagcagcctggtgaatgtggacaaatgtgagacccctctccaagctacagcaatatccaactcagaacctccttgtcagtcctgcaatcagaggtctgctaacatttcacaaccacttcagaatgagcctaacagtgtcttagaaccactcgcgaagagtggggattctagtgcccagattccgggagagttgggagccccagctcagctcacactgaccagccccatagaaaaagcgctaaccaccaacagaggttgagtctgcctttgcccctggaatctacgcagaaatctacaataaacctgtcccattatcagctgcgccacaggagtgtgggaaccttgaagaagtccttaaaatgctaggtcagatgtgatgtctagggaccgcttggcttctctgctgaaccatctatcaaaccctcaggaacatctaactcagaactcctaatttattgtaaatatctcgtgatacccattgctaatttggcttcctacctctttagttgacacataggcatttggagctttatctccttgtaattcaaggcaaatgtaatatataaactgctggaattaatgctcattttggaatagctgtggtaactttaataatagtcattttatattgtgtttttttttctaaaatatataatcattattaagctttcttgtaaatggagtaaaatactaatgaatcgatactaataagtgcctaataaataatcagcttgcttaaatgtgaggctaacactagctata

SEQ ID NO: 3157867 - DNA, 341 bp, Cricetulus griseus
caggtcgaatacagagaaaacaatatgcctctgatttagtccgcttctggaatcagtattttttttcctgcccacgcaatatgagtatatgatttccttaacaccatgcttaaaaattacagaaaacagaaatatgaacaaagttgaagatgagaaagtgtctgttacttgattttacacaaaactgataaatatgttttaaatgaatggagaaaaagcaagatacactaaataaagcaaataaaaggtgtcttggtgatttccaagctctttaccctgcgcagaatgaaatgcaactcacaaagaaaaattttgttttcactttatgaagtacagacctt

SEQ ID NO: 3157868 - DNA, 306 bp, Cricetulus griseus
taccggagcaatgtaacttcagggaccatggggtagtgaagcggtgtgtggggacaatcacccggagccaggacacagagtcttttgacatcgactgtcaagggcctgggacacaaccccagccagtcaagaaaggttcccagattgctggactcctccaaaaaggtgggctgaagattggtgaaaagcttaagaaaattggccagaaaattgaggatatttttcagaaaattgtacctaaggcagagagttaggcctgccttggcttgtttctggattccaaaaatataaatttgatgaaggaaa

SEQ ID NO: 3157869 - DNA, 398 bp, Cricetulus griseus
tttcagggtgacagcagtgtggacagatgtgaagcacccttttctacatttccttgtgtgtgagcatgttgctgctttttacatgtagaaaagctgcgcctgcatttgttttgttttgtttgttttgtcaatgcgggtattaaaacaaatgaaaattttcagtgtgaacaaatggtaaactaaagcataatcaaaacatttcagtgcttgttttctgtaggttttatcaaaatgtttataaaccagtgacaaaatatttgtacattaagatttacatagactgcaaactgaatcttttccattgtctcctttctgagtgcaatgtttgtaacattggtagaagatggacactaggcagctgcttcttccaaaaaaaaaaaaaaaaaaaaaaaaaaaaa

SEQ ID NO: 3157870 - DNA, 1245 bp, Cricetulus griseus
aggaagaaagtgagatccctgccagtgtgtttgtgaaggagccggttcccggccccgcagaaggcaaggaggagctcgctgaggagaacaagtccctggaggatactctacacaacgtggacctctcctccgatgatgaactgcccggtgatgaggaagccctggaagatagcgcagaggagaaggtggtacggtatcctcaataggatcatcagaaaacctaaaggatatttaagacagtagtcatgaaatgtgattttttctcatcatactatcagcttgctgaatagtgtagcagtaatatagtgaattcttactaaagtctatgaatgattattcttcaaatatgtgatatagaatacacataagtccgtaagctgcagatataactctgtattttaagaaaaaaacatttacaagtgatagagcagaattctcggctgattattctctcacagaggccactgtttattacaaatgggggcactaaaaggctatgatggtcaggtaagagcatgagggatgctaggctagaaactagatggaaggattggaaaatgagagaaagacaaagagaaacaaaggatgtgcttaaaaagtgaactgttgagatttttaaatctattttgctcttcagataacaatatgaaagaagttcatacgtcttgcaagaatatgtcttatcttcccaatattttcatagtctagtataaaataatataaccagatatcctgatataaaagttgtggttcttcttgctaaataaatgacagaacacatcctcctgtgaagaagtgaaaaaggacattgtctctttaacattggcatactatgtctgtaatcagtagcatgtactcttctgtgggaaagccagtcacatgattcttcaatattttttcattttgaagtcacctttccactccaaatatgatataggtttatgaggtgttcaaacctgcatgtttaggaagagaaaatttcagttttcccatttttatatacacaatggtagcgtcattccaggcaatgttttatttatacattaatttcacaggatcttaatgtgttttaactcctaaaagcatactagtattttatgccatgtgtatgctcattctgtctaacatactaaaaagttgctttattctttttctattacaaaattgccgatgttttctaaattacagtagtaaaataggagaccggcttgaactctctcctctgagtgtgcagtacaacaagtg

SEQ ID NO: 3157871 - DNA, 528 bp, Cricetulus griseus
ttccctgacaaacactggctttctcaggagaagttatctcagctggaggctctgcttccccctaggcagaaggtgaggatcacggatgacatggatcaggtggaactgaaggagttcaatcccaacgagcagaactggcgccaacacagggaggcgtatgaagaggatgacgatgggccccgtgctggtgtgcaatgccagacagcatgatggcaccatgtagcatggcctggtcggactagtacatgatgaatgtaaacttggcacaatgaaaatggcatcgctttaatagcctcgtgtttggggtgtcctgtgtgttcagcagtctccattgctgagttgtctttggggttttcttgtttctcttctggttgtaacttaagttacagcttgatttatatttaaatgttttaagttcaatcatgtctagtctgcatatggaatctgttcatttgtactttcaggacatactctggagatgctagtaccacactgaccctttgtgacttcttagtggcttcgccatgg

SEQ ID NO: 3157872 - DNA, 460 bp, Cricetulus griseus
tgctggtggcttcagtgtatccccgaaagcctcaggcggtggagcggcacatccttccagttctctggtacttcctgaacaaaatgatcggcaacggtgtgctgcctgggcgtggcgggaatgtccgcacggtggtgtgcaggctggccggaagcctccaggagcaaatggggtcccggctgcaggactttgctgccaatcagccccagcatgtcctcaagacactccagggacttttagactctgagtccctgggggcaatgacaaagtcacctgtagaggaacgttcctcgacagcaagatgactggaaccgtctgcctgcagcagccgggttaaagatgagtctgaaacgggaaattattatttttactttatttattttatgatggagtcacctcatggccgactctccccattagggtcccccatgtatatagtatattttgaagtagaaataaa

SEQ ID NO: 3157873 - DNA, 294 bp, Cricetulus griseus
gttccagatgctgtacagaatatagagtgtgtggcacataactggcagtcagtattagtgatgtggggtccacccagaaaaacaaatggaatgattatccactatatgataacagttgaaagggattctacgaaagtttctccccaagaccacatgtatactttcacaaaacttcttgccaacacaacatacatctttgaagttagagcatcaacctcagctggtgaaggcaaggaaagcacatgcaatgtcagcacattccccgagacagagaagggtctggaaaagcagagc

SEQ ID NO: 3157874 - DNA, 286 bp, Cricetulus griseus
tgggccccagggccacacaattctccatcacacaaccagatctacagccgggctttcatttacttgcaggatagtattgaaagagcaatcattgaattacaaacaggaagaaactcccaggaagttgctgtccaggttcaagcagttccctatccctgcttcatgaaagagcttcctcaccagtgtctcctattcccttccgatcgtgctcatggttgcctgggttgtatttatagctgcctttgttaaaaagcttgtttatgagaaggaccttcggctccatgag

SEQ ID NO: 3157875 - DNA, 202 bp, Cricetulus griseus
ggcttggactgtgggattcgtagagaaccacctacatcacacagagaccggaccaaggcaactcacaggacaatgacgttactgcttcctgcccctgccacccatcctgtaacatgactggcatggtgctaagaaatgtctgtaccctgtgttggggacccaggggtgccctaggaatggataataaacatacaagataact

SEQ ID NO: 3157876 - DNA, 843 bp, Cricetulus griseus
  modified_base (331)..(331): a, c, t, g, unknown or other
ccacctcctcactgcatccctccaagaactagagaaattcaagtttgtcctcgactacaaaataaaaggagctgaagaagcaaatagagcctcgggagaacgagatcaaaagtgatgaaggagcagatccaggagatggaagccgaactggagcgtttccataagcagaacacgcaactggagctgaacatctcggaactgttacagaaactgagagccacggatcaggagatgcgcaaagagcagcagaaggagagggacctggaagcgctggtccgacggttcaagacagaccttcacaactgcgtggcatacatccaggagccccggntgctgaaggagaagatccgtgatctctttgagaagtatgtgcagcggcagacatggtggaaattgcagggttgaactcagacttgcaacaggagttatgccccgccagcgggaacacctggagaggaaccttgccactctcaagaagaaagtggtcaaggagggcgaactgcatcgcgccggctatgtccgcatcatgcaggaaaaatgtctctctgatcaaggagattaatgagctccgcagggagctgaagttaacccgatcccaaatctacgaccttgaatcagccctgaaactgtccaagaaattacgagcacaagatgtcccagagacagtaggtacaagcaaggacatccccagcgttagtactaccatgagactgaacgaaaaggaggaaaccgggagaatcatcgaaatgcagcgtctggaaatccgccgcctcagagatcagatccaagagcaggagcaggtcccaggcttccacaccattgccggggttcggctcccttcca

SEQ ID NO: 3157877 - DNA, 476 bp, Cricetulus griseus
gactcgagctctgcaaaatcaactttatattagctcacatcgtaacaaaatagatagtgacgattcagtaatcacccttcttgtttggaaacaaaatgtcagctctgccttaatatttgctttaaattattaagaatttatattgtaaccagagcccaaaattccttcatagacttctgttccatgaatatttttcttaattaagaagtgttaccttgttaaaatgaccaccattctaaaacatcttaagtggtctggacagtgagtttacagtttcatatcaactatctaaaacctaactgcaaattgaccacagacctctgacctcctacttttatagactttaatacataagtaatttaaattagggttggtatttgtttgttttcttatctaaatcttaatttcctggaataataatgtttgatgttcagcaagaaaactgcttgagtttaagccattttcaaaagaaactt

SEQ ID NO: 3157878 - DNA, 468 bp, Cricetulus griseus
agaacatcagtactggaatggccatagttggaataatgctactaataagaagtgttcgcctgacatcaaaatttacaacctctgcagatattccagtagagtttataagaaagaaagttaagctacgtggccgattacaccggataactgagtgtggtctagaaattgaacatagggtggatattttaatgtgaatctgaatgaggaaattttgagaaaaggcttgggcaaaacggttcttgtcaaagggctaaattatgactcaaaatcccactggaaaatccacagacgcttacttaaagctgaactgacagccttaaagaaaggagaaggaatatggaaggaagaatctgaaaaagaaagttattttggaaaattcaaagattcctggagagaaagatggaaaaaggacagattttaaaacaactggaccagatttcaacttgaccaaagaagttattatgacag

SEQ ID NO: 3157879 - DNA, 581 bp, Cricetulus griseus
ctcaaacacaagactcttcattttcaggaactgattgtgaaaaactctaaaagaaatgaacctttgaacttgaagtcagaaaaacttttcatatatgaaggcaagttagaggaaaagcaggataagaatacttttgactatagaaagaagccataaaaacaatgaatttagcccaaagtcacatagagaaaaaaggtcatcagaatgtgaaaaacaaattcacactggggagaaattttataattgtaatgaatgtggcaaagccttaagttcccattcaactcttattattcatgagagaattcacactggagagaaaccatgcaaatgtaaagtttgtgggaaagccttcagacaaagttcagctctgatccaacatcagagaatgcatactggagaaagacccttataagtgtaatgagtgtgggaaaacattcaggtgtaactcatccctcagcaaccatcagcgaattcatactggagaagaaaccataccgatgccaggaatgtgacatgtcatttggccaaagttcagctcttattcagcatcgcaggattcatactggtgagaaaccctttaa

SEQ ID NO: 3157880 - DNA, 531 bp, Cricetulus griseus
gtgggaccatgctagtctcttcctgcccatggcacttggcctgaggtccctgcccaagcacggtgggcattgctgaggggaggcagtacctaggcttttctctttgccttggccatcgggaggctccttcaaacccaagctgggtgactagacgttgggctgggcatctttttttgccacccctttctcatcagggacagtatgggtgcctcaggtaaccccgatttctggcctgagcctttttttggccaggtccagctctgccactcatctgccagtgttgcctagggagggctgggcttgggctgagctaggtttggggaattttttttaatatagtaatatacgagagttcaggatagctctgggcatacaggaccaacaggcctcttggcccatgggtcctgcctggggtgtctagtggattgtggaggacatagcagttgagtcctccccactgtgggcttgtgcacactaacccagacccatgctccaatctccttccctcatcccaagtgcctggcagatgaa

SEQ ID NO: 3157881 - DNA, 499 bp, Cricetulus griseus
ctggaaccttttctggaaaatgcacgattctgatccaagtcgtggatgtgaatgaccacgcaccagagattgttctgtctgcatttaacaaccccatctcggagaatttaccagaaactatggtggcagtttttagtgtatctgatctagattcaggagaaaacggaaaataacttgttacattcaggacgatctacccttcttcctaaggccttctgaggaaaacttttacacgttattaacacaaaaaccactggacagagagacaacagcagagtacaacatcactatcaccgttgtagacatggggagtcccatgctgagaacacaagttaacgtaacagtggaggtgtctgatgtcaacgacaacgcccccgcttcacacaaacctcctacaccctgtttgtccaggagaacaacagccccgccctgcacataggcaccatcagcgccacagactcagactcaggctccaatgcccacatcacctactcgctgc

SEQ ID NO: 3157882 - DNA, 523 bp, Cricetulus griseus
ccgccgcttcgacaccgccttcctgctctgctgcctgcgccacgcgccgcccgtggagcccgaccgcaccgaggtggtgggctacaagtggttgtccccgtcagaggcaactgagtgtttcctgtcccaagaaatctggctggcaccaccgcagttctatgaaatgagaagacttgaaacttttgactctctctccgctctgcacagattttcttcagattacccgttagagataactgagaagtggctgccgatcaagcttttaactgctgacggcaccatcatgcttttgccaggagatgagctatacaggaaagactcacatttcctagaaaacccaatgtctactgacagaaagacggaagaaatcttgaaggagggcagagtagttaaccgagtagtgatccacagctcccatctctatgaaatccacgtgtctctcctgtcagagggtaagcacgtgtaccctaagagctatgtggtgaggaagagcccgactgcccacttgtaagctgctcttctt

SEQ ID NO: 3157883 - DNA, 465 bp, Cricetulus griseus
  modified_base (20)..(20): a, c, t, g, unknown or other
  modified_base (22)..(22): a, c, t, g, unknown or other
  modified_base (24)..(24): a, c, t, g, unknown or other
  modified_base (27)..(27): a, c, t, g, unknown or other
  modified_base (29)..(29): a, c, t, g, unknown or other
  modified_base (31)..(31): a, c, t, g, unknown or other
gaaaaaaaaaaaaaaaaaanananaanananatatatatatatatatatatatagttattattgttcctgggatggagtgtcagccactattggggagaaaagctgtgtttcagtgtttgtctgtacagttagaactgaacttagtgtggaatgctgttttccttgtccacctcccagttagagtggcctgaaagtaaagagataaaattgaaacaataaccatgttctccccgagtaatatggaaacttggtgtccataaggctgacatccctggtactataatcattgagtgtacctaagctgtagtaatttaaaatgagaaaacatgtaaactcagatttacaaaactatggagtcaaaatgtccctaagatacagattttatttattttcctttggtctacaatgaatttatagataaatgtaatggaaagttttatcttaataaagtatcttcaaacaat

SEQ ID NO: 3157884 - DNA, 403 bp, Cricetulus griseus
aaaggaagatagtgatgatagcctggttgactatggagagggggtgaatggccaattcaatgaggatggctcctttatcggacaatacagtggtaagaaagagaaagaaccagccgagggaaatgagagctcagaggccccttcacctgtcaacgccatgaactcctttgtttaagtcgttaagctcttcgtcaatgtcccatttctctggaaggtttctgctgagcacttctcatccctctcattccatgggcatatgggtagaaaggatgttttctgctgtatgtgaatattatgggaacaaagcaagaacttaactcagtcaaacgatacgttgatatgaactggggtgcaaagtgcgtccttttttgaattttttttcttttccgagacagggtttctc

SEQ ID NO: 3157885 - DNA, 1542 bp, Cricetulus griseus
gcttcctctacatcgctgtgacatttatggcaaagcttgtgcagaatgctgcctcgcccgggacccttactgtgcctggatggttcatcatgctcacgctattttcccactgcaaagagacgaacaagacgtcaagacataagaaatggagacccactgacgcactgttcagacttacaacaccatgataatcaccatgggcacagccttgaggagaggatcatctatggagtagaaaacagcagcacattcttggaatgcagtccaaagtcccagagagccttggtatactggcaattccagaggcgaaatgatgatcgtaaagaggagatcagagtgggtgatcacatcatcaggacagaacaagggctcctgcttcgcagtctgcaaaagaaggattcaggcaattacctgtgtcacgctgtggaacatggattcatgcaaactcttctgaaggtgaccctggaagtcattgacacagaacatttggaagaacttcttcataaagaagacgatggagatggctcgaagacgaaagaatgccgagcagcatgacgccagccagaaggtctggtacagggacttcatgcagcgatggatgagttctgtgaacaagtgtggaaaagggaccgaaagcaacgccgacagaggccaggccactctcaagggagccccaacaaatggaagcatatgcaggagagcaagaaaggtagaaacaggaggacccacgaatttgagagggcacccagaagtgtctgagatgcaccacttcccaaaacctcaaacaagtacaaacttgcctagataataactggaaaaatgcaatacacatggacattttcatggcattatgtggatgtttacaatggtgggaagtcacccgggttccatcaacttaaattaagtccatgcggaactttcccagcaggctttcttcggaataccaaacacctgacagagatcacaggtgagcacagatgttcacatcatccaacttagtgtttcctctaagagttcgtttttgctttcttctttgcctgagaaataaaaatgtcacttgccatcgaaggagaaaaactacatcagcaaagccattttattgaagcaagagttgaaaataaactgcatggatttagtcagcagatgaatattccaaaaacgtgattggattcaaggatagttttgtctaccagcacttgtgtctgtgtgtactggaggagtaagataaggcaaatgagactaagtgaaatagtgtgtggaaatgtacaagcataaaccatccatcacccagaagaataatggaatacactgatctactactgatgtcttcttgcagcgttgatctaaagatgtattttattaaaactataatttaaatgtaccatgacaaatatgcagtaaaaattagctgttttctaagctagagtaggattttttgtcttacacttattgtgctatctaatttgtttaaaaattccaactgtgtgctgctctttttcacactttgttttcagttctgtaagggttagtatattactttag

SEQ ID NO: 3157886 - DNA, 587 bp, Cricetulus griseus
agcattccgcccttttaagatgcagcagattgaagaggtcagtattttatttgcagacatcgtgggcttcaccaagatgagtgccaacaaatccgctcatgccttggtaggtctcctcaatgatttgtttggtcgatttgaccggttgtgtgaggagaccaagtgtgagaagatcagcactctgggagactgttattattgtgtggcagggtgtccggagcccagggcagaccatgcctactgctgcattgaaatgggcttaggcatgataaaagctatcgagcagttctgccaggagaagaaagagatggtgaacatgcgtgtcggggttcacacggggactgtcttatgtggcatcctgggcatgcaaagagtgtatgaggcagcgttgagagctgccgaggtgctctgctcatccaaacacaataatatttgtagtgacaggctggcgtgctatctagcacctccatttctgttcctggatgtggtgtcatgtggtcatttcagccctaatctctgtgtggatcacagttattcagggtccatttccacccatttctttcctttactccctttcctggaagcct

SEQ ID NO: 3157887 - DNA, 312 bp, Cricetulus griseus
caacaaatagcatccgagacttaattccaaaacaataatgcatcttatgatcataatgttaaagacttcatcaactctgagctcctagcacaactatattcttctgaggaccaaaacactctgatggaagagtctgctgagcaggctcagcgccgggatgagatgctccgaatgtaccaggccctgaaagaagcccttgtgatcattggtgacatcaacacagccactgtgtcaaccccagctccacctccagtagatgactcctggctccagcattcccggaggtcacctcctccaagccccaccacccaa

SEQ ID NO: 3157888 - DNA, 2427 bp, Cricetulus griseus
aaaatgggaacttgacgagaggagtcgggagattcagagagctctcagagcagtggaaacgagaacgacacagaacctgcgaatgacaatagccaggcagctggcagagatcttgctgcggggcatgtgtgagcagagctactggaaccccctggaggaccctccctgccagtcccctctggacgaccctctccggaaaggagccaacaccaaaacctacacactccctcgcagagcccgtgtctactcaggagagaacatttttgtcctcaagaaaacactgaagaggcgctgctgttactgctcattagtgaatctatggccaaccgagatgctgtgctaagtaggattcctgagcacaagagcgaccgcctcatcagcctgcaaagcgcgtctgtggtctatgatttactgcccttcactggttggtaagaggctgagtaagtttgccaaaactgtcgttgatgtgggagagaaaacgtcagaattcaaggccaaaggctacctagctctggggctcacatacagtctgcaagctactgacgcttccttgcgagggatgcaggaggtcctgcagaggaaggcgcttcttgcatttcagagggcccatagcctatcacctacagatcaccaagcacgctttctacctggctctgcagctcgccatctccagacagataccagaaggctctagggtatgtccgacaagctcttcaactccaaggtgatgacgccaactccctgcacctcctcgctctcctgttgtcagcccagaagcattaccatgatgctctcaacatcatcgacatggccctgagtgaatacccagaaaattttatactactgttttccaaagtgaagctggagtcgctctgccggggcccagatgaggcactgctcacctgtaagcacatgttacagatatggaaatcctgctacaacctcaccaaccccagtgactctggacgtgggagcagcctcttagatagaaccatcgctgacagacgacagcttaatacaatcacattgccagacttcagcgatcctgagacaggctccgtccatgccacatcagtagcagcctcaagagtggagcaagcactgtcagaagtggcctcatctctgcagagcagtgcccccaagcagggtcctttgcatccctggatgacgctggcacagatctggctccatgcagctgaggtctacattggcattgggaagcctgctgaagccacagcctgtatccaggaagctgccaacctcttcccaatgtcgcacaatgtgctatacatgcgaggccaggttgctgagctccgaggaaacttcgatgaggcccggcggtggtatgaagaagccttatccatcagccccacccacgtgaagagcatgcagcgactggccctggtccttcaccagctgggccgctacagtctagctgagaagatcctccgggatgcagtgcaggtgaactcgaccgcccatgaagtctggaacgggctgggtgaggtcctccaagctcagggcaacgacgcagcagccaccgagtgcttcctgacggccttggagctggaggccagcagccctgctgtacccttcaccgtcatcccccgagtgctctgagaggacagcccaccttacctgccacacaggcccaggatgctccgtccaggctgccaggagtcatcctatcacccagtgaatggatctgcagtaccaaggccctggatggatgtttgaccacagtggagtaaccatgccaaccctgatcatcgctctcccctcttgcattcattcattcttgttgtttttgccagatccatggtcattttttgaatctactgatgtcattcaaaatggattatgtgccatattcagttagttgtcacctgggttttaagtaaaatgattaaggacttaatcagcgaatgtagaagaatatattccaggttaaaattcagcggcagaacagattatttttatcagtgctgtaaggaaagcaactgtcctgtcctccgtccccttcgccacctctcctgcccctcccttggcccaaaaccaaatgtgaattttctgtttcccacctcagtgctcgtccatgccgggacaccagctgacaacttctcagttttattgtcaacagttgtaccaagtggtgaattactgttctactgttctcctagagcaaagcctgagtctaagaatatttatattttaccaatatatggctgttacaagagaaggaaatatgagttatttaagtttaacttttttatgtgaattcagagtttatttatcgatggaaatatgtacaaagaaacttcaaatggaatatttaccgacattccttatacatgacagacacttggctaaacaggaagatgatgttaataaaaaaatgatttttaaatggaaaaaaaaaaaaaaaaa

SEQ ID NO: 3157889 - DNA, 312 bp, Cricetulus griseus
tccaactctgattgttcctagttatagagggtctgtcctgcttctcatctatacttgcttgagtgatacctcaagtacagtaggtcctttttaggaacatttcaaattcttttagttaggtctttcactaaagctcccttgcatatattgcaagtaaatgttgtatcccagactaaccatagtaggaatatacatttctgtgtgtgctcatttgtctttgcaaattttttctccaaattatttaattattttgtgtttatatgttacagtggacaaaaatgttaaaaatcaatgaaataaattttcagttaa

SEQ ID NO: 3157890 - DNA, 1059 bp, Cricetulus griseus
ctatatctataatctagaagtaattggagctatctcaaatataattagtaacaaattgtgagtggtgatttggagtctcagatttctccctggaaaatgctggcatttcttagtggagttttatgtgcattttcatcagatttttctttccccttgaacaagggccaattttaacttcttacattgttcaccatacaatatagcatgagaggtgagcactaagtttagcatgatacacttttctatataattcttagggtgctagtggtttattcagttatttcattacccactaaactgaatatatactttgcaaacttttaatccattttgactattgtttaaagctttctattctcctctaatgatttttgaataacaacaacaaaacactctgtattattacgctatgtaaaggtcacattttacatttttaacctttcccaatgtggtgctttgatatattcaacggtgacttgagtttaattattcatgtttttgttctgggctgcatcccaaaatatctctttgaccctgaaaaagagaggattctttaattcttcaactttgcaatcaactgaaaactggcatacgaaaaggttatgtcagaatggaattttgatgccataagagtctgtgaaggtgatttaaatcaagcacagaatccacagatctcattctcagcatgagtacatctcttacattagaggaatttattacctgaacctgagttacctgacgtttactcaaacttgagaatgaatattaattcagaagtttcaaagttcattctctgcctgttccatatcataccaggttgcctaagaccttcctggagcaatgatgacttatgtggtagatttaaatttatggggacttaacatttctgtcagattccaggcttttaggctaaagaatcctctcataccccatttgctggaaaaccctgattttatgtaatcatattcttttaagtaaaaacatatagctaaatgtagaatcggttatgactttgtgttttaaataactgtacacaacatttcataaaaataaaatcat

SEQ ID NO: 3157891 - DNA, 1454 bp, Cricetulus griseus
ggtggcagcaggcagcctctgatgctcccatgagttgaagaaaaaggatctttatgccttccagaaggaagctcattctgcgaggctgaggaaacaaagggaagaattgtgtgtcactctagtccagacgtctcaaacaaacagttccctgcagtccaccggggatggtatggtgcccttctcacttctcctaaggtcccatcttccctctgccataaggagtctaccaaaggcagcgcacatcagaaacacatccagcatgactgaaggactccaaccagctagtgtggtggtcctacccagatccctagcaccagactttgagagcttctgccaagccaatcgtggcccctgcccctgctgggccgctgtgagccagagaaggtgctgcctcgcctgagcacggtccccgacataagggccatctgtccacagtttcagaaatacgagtttggtgctctcacgggcatcctggcctcactggaagagtactcagagcagctggaggacatggtgatcttcaccatagactgcagcttctccatagaagaggccttggagcaggcagggatctccagaagagacccagcaggtcccagccacgcaggcgcatacaagacaacagtgccatgtgccgccattgctggcttctgctgccctctggtggccacaatgagacccattcccaaggacaagctggaaaggctattgcaggtcactcactccctgggaggacagcaaggacagcccatccacattggagacccagaacttttgggaatcaaggcactttccaaacctgactatgggaattatgtggaatgtgagcccgaggacgtcccagtgttctggccttcacagctgaccggtctggaagcagtcagcagctgcaaggctccactggctttctccagcactccaggctgcactgtgatgatcctgaaggacaccgtgtctccagccagttgtctgattcccgagatggttccagaagtccacgccatttccaaagaccctttgcactacagcatagtgtcagctgctgctgttcaaaagattagaaaactagagtccataatcggcatagacccaggtaaccggggaatcgggcacctgctaggtaaagatgagctgctgcgggctgctctgtcactgtctcatgcccactcagtactagtcaccactggattccccacacatttcaatcatgagcccccagaggagacagatggcccaccgggagccattgctttagccgccttcctgcaggctctggggaaggagacctccatggtggtagaccagagagccttgaacttgcacacaaagcttgttgaagatgctgttaaacaaggtgttctgaagacaccaatccccctgctaacttaccaaggcaagtcagtagaagatgctcaggcatttttgtgcaaagatggggaccccaagtctcctag

SEQ ID NO: 3157892 - DNA, 3333 bp, Cricetulus griseus
tgtcagttgttgagctgtaatggcgactgggccgccgctgccgaagtgactcccgggcgggggagcggggccggacctgcgcctgagaggactgcggagagccgcagctcggggagggggctcgcggccgggagagcaggccgcctctgcgcctctctttaccaaatccaagaagctctcaaaacaaggagactgttcaagatgtagtctcatcgtgggatgcactttctcagactaaggctgctctgagacacattgagaacaaattagaagtaacccctacaagcacagctgtaattgattctgtgatggatgagaatgggaagcaaataatagaccattgggaagatcggaatatccattgctgtgattttgagagctctcaaccatctgtcatcggtgatacagttgttagatttttaaatgatggaccaggaattgatgcatttcacagttctgaatgtttaattaaaatgggagtacatgtaagaactgaggaagaattgcctaacagagcaaaaggaagtgaaaacacttcaaagctttctcttaacatgggacacaatgttgatccaaaagtgttgctgctgtctgactcttctccatcctctactagtgcctgtaattcccaaagattagatatttcaaagaggcgacaacatgatgttaaactggaaaaactcaaggagcggattagaaaacagtgggaacattcagaagaaataaatggccaagtccagactctaggtcatattgaccatccagtaatggttgttaatgttgataactcagtgacaacaaaagtcaggaaagtggcaacagcaccacctgctccagcatataaaggtttcaaacacactgaagaatcagttcagttcatccaaaagatgacaggcatttacaatgtcaccccgtgacagcaggagcgggagaggacttgaaagatgctgtaaagtttagtcctgcctctcttgcagcattgcatcttacaactgttacctgtccctgagaaaaatctccagacttcagctgctacattagagcacacggtgctcccctgggccccttagcacttgccttctagactggtttctcttcatcagtcctgtcctttcagtaatccccggaaatgtgtatgatctaggctgaatgtaatgccttaaccttacagttccgactagagcagcatggtaagtcatccactgggttcacactcacagataccttggacattagcttcaaaacacaattagaaaacccaaagacagcgtaacccttaagtagtgtacatttgttcttttctgcatctttcttccaaacttgcctttgtgtctcaaatatttcactatgcacacttcattcctcctcactttcatcctgtcattcatgagatttgctgaaatcattattgggatatttgcattttgcacagtgactggtgtgctagctcttgacaataggaaagcactgaactgttagaattgggtctctgaatgctcaggtgggtgtctcaccagcatctcttctgtgcatttgctgttgagctgtctttagccataatgagcaccttgactaagagaagcaaaggtttcctgggttatttatcagtagtgtggaaatcatgttttcatgtggccagtgaaagcaaagatatttctcttcagtttgtattctttggaagacaggaaacatctgtgtacatcccttgactgtttgtaggatcacattgtctttatgatactgaactttacagctgctatacctttttacaaatgaatatcaaattataataggaatataggttgttttccacatcttcattatttggacctaaagttaatttttaataagaaagtatctttactctttacattaaaatgtcagaaaacgaaaaacatactgataaaaaaaagtaccatgggctcagtaacctggacactgccgtacctaggcagtgaccatcctaacttcctccagctgtcttcactatccaagaatcctgcattacagaaaagagacaagaatagaccagtctcatcctttgctagcaatcatatctacagtttggtagcaaacaaaaacaaaacaaaaagaacctagagttaacaggtttcttactattgtaactatttggatctaactgagatgggtttattgttaggatcaggaatgataaatgtggatacccagccacttgttccatactgggatctttttaatgaagccctgcctcataaccaagaacctaattgtccctctttctaatctttgctccctctcccatgccctaccctttccgtcttcctgcataattcctccagaagatctttgcatcagcagtaataccgtttagaatagcactatcagaactagtagtaaaccaccatgtaggcttcagatttacttctgagtccaaaacaatttgtgctatccagggcagttaactctgggttaaacaagtacagggtatcgattcccttttcaggtctaaacaggaatttttactctagggaaaagtgggaagagctcaaaagtagttaataaggaaggtgaattccttctgtgactacaggtctctgagaaattatctttcaaaagagattgcattgctcataagagtgttgtggcctattgatacaaacaattttgttcactttcttgtcttgaaaaaagtggccttagctttttgcaatacttgaataaagtgtgtacttgcaaaagaatttctgtagcacagcattagagactcataacttttctgcaagaaattcaaacttacatcttccttttactaccttaagaatactagtgagtaaaatatcaattcaaagaacaagtgatagaaactacaatgatgtctaatgcaaattgtaggaattttcatgtttacaaatcatcttaaactggttgtgcagcaattcaataaaatctttgtattataaaaatgtgaagaaaaatgtaaactggtgtaaaggaggtactgtcattttaattaacctatgtttgaaagcttttccttctggactttgcaaagctgtcttggttacacattgcaaagcattctctagggggctcagcctccttgtgtgtactgtactgtgcagacatgaaaaataaacccgtttactgtgtgtgtgtaaatagcctggtcatcaggccatcttcagccaatagtcacacccgtgcagctctgcacagaagactaagggtgtggtttgtaagtaatctgtaaaataactggggtgaattcccatgtatacctgtgtaaatagatttgttaactaaaatgtactttaagatgaaatctgtaaataaattgatttataaaattaa

SEQ ID NO: 3157893 - DNA, 356 bp, Cricetulus griseus
tccaggagaatatccagtgcccttcatccttggctgtggttaaagacagaagcctgcctgagaaccaggaggaggatgaagaaatctttgatcccccgatagatctctcatcagatgaagaatattctgttgaagaaagcagatctgccaggtttaggaagtcaggcaaggagcacattgatcatatcaagaaggcattttccaaagaaaacatgcagaagacacggcagaattttgacaagaaagtgagtggaattagaactagaatagtcacgcctgagaggagagagaggctgcggcagtcaggagagaggctcaggcagtcaggggagaggctcagacagtcaggggagaga

SEQ ID NO: 3157894 - DNA, 695 bp, Cricetulus griseus
cagtccaagatggcggccaccatgaagaaggcggctgcagaagatgtcaatgttacttttgaagatcagcaaaaaataaacaaatttgctcgaaatacgagtcgaatcactgagctaaaggaggagatagagatgaagaagaaacacctccagaatttagaagacgcttgtgacgacatcatgctggcagatgacgactgcttcatgatcccgtaccagattggagatgttttcattagccactctcaagaagaaacccaggaaatgttagaagaagcaaagaaaactttgcaagaagagatagacgccttagagtccagagtggcatccatccagcgggtattagccgacctgaaagtgcagttatacgcaaaatttggcagcaacataaacctcgaggcggatgaaagctaaacattttataattactttttttttacacctgtttaataaacttgaatattgtcttaaatgataatttcccttcttcaaatgaaacgaaaggaaaactttctttttaagaatttttcatttaattaatggaaacttgcctattttcacatgtcttgcttatttattttatatttttaaaagaagacagtattcatgtatgtattttgcataatgattatatcaactttaggggctttatgtcatgttattaaaatcagttaaacagtcaaaaaaaaaaaaaa

SEQ ID NO: 3157895 - DNA, 360 bp, Cricetulus griseus
atcagtatggcgactcctcaagaaaatgggaatcagtctaccacaagatccagcaattccactcctaggcatatacccaaaagaagcacattcatataacaaggacatatgttcaaccatgttcatagcagcattatttgtaatagccagaaactggaagcagcctagatgcccctcaaccaaagaatggatagagaaattgtggtacatttacacaatggagtactactcagcaaaaaaaaacaatggaatcttgaaatttgcaggaaaatggatggaactcgaagaaaccattctgagcgaggtaacccaatcacaaaaagacaaacatgatatgtactcactcatatgtggatttta

SEQ ID NO: 3157896 - DNA, 405 bp, Cricetulus griseus
gaaactggtgcagaccagagccattctcctctatgggaaggacatgaaggagagagccctcattgacatgtatgcggaaggtatagcagatctggatgaaatgcaattggcactatgtcccccagatagaaaagaagccaagattttctttgataaaagacaggaaccaaaaaccggtacttgcctgcctttgaaaaagtgttgaagagccatggacaagactaccttgttggcaaccggctgaccagggtggacattcacctgctggaacttcttcttcgtttggaagagattgactccagccttctggccccttttcccctgctgaaggccctgaagagcagactcagcaacctgcccaatgtgaagaagttcctccaacctggcagccagagaaagcctccc

SEQ ID NO: 3157897 - DNA, 728 bp, Cricetulus griseus
atttatgcatatgtttttgtagaacatcaagtctgttcagctagaagcactgctcttatccttgctgagcattgttgtccttgttctcgttaaagagctgaatgaacagtttaaaagaaaaattaaagttgttcttcctgtcgacttagttttgatcattgctgcctcatttgcttgctattgtaccaacatggaaaacacatatggattagaagtagttggacacattccaaatgggatccctccaccccgtgctccaccaatgaacatcctctccgcagtgctcaccgaagcttttggagttgcacttgtaggctacgtggcctcactggctcttgctcaaggatctgccaagaagttcaaatattcagttaatgacaaccaggaatttttggcccacggcctcagcaatgtgatcccttcattttttcttctgtatcccaagtgctgctgccatgggaaggacagctggtctatacagcacaggagcaaagacacaggtggcttgtctaatatcttgcattttcgtccttatagtcatctatgcaataggacctttgctgtactggctgcccatgtgtgtccttgcaagtattattgtcgtgggaagggaatgttaatacagttccgggatttaaaaaatactggaatgtggataaaatcgattggggcatatggatcagtacttacatatttacaatatgctttgctgccaatgtgggattgtt

SEQ ID NO: 3157898 - DNA, 422 bp, Cricetulus griseus
tgtatcacagtgtcactcacatccagaacaaaggaccatgggtctgggcgagaggttccttcctccttggactgggcagggggaagctaactaatgcagtctacctcatgccctgctcctcggggcccagttgtggggagaggcttcaacggatgggtgctgggcagaaggtgctgaatcccagcttccgaggaacctggaagttgggtgccttccaggcagaacttcagggaccttggcccccctaatggaggccacaggctgctggaagagccatggcctgctgcttggcaccctcaggtgatcccagagctctgagctatccctgaacaaggcagggttctcacggtgctttcagcctttctttctttttgactgatgtggacctaactaaaattgttcagggttcctagaagaccaaa

SEQ ID NO: 3157899 - DNA, 306 bp, Cricetulus griseus
tgggtctgggcagtctgaccggaatcctgagccaggataatctgactatcggggaaatccgcggtgtctctgtgacgtttggagaggctctgtgggagtccagcatggtcttactttggctcactttgatgggatcctgggcctcggtttcccatctctggctgtagatggagttcagcctccactggacgcaatggtggagcaggggctgctgcagaagcccatcttctccttttacctcaacagagacgccgaagggtctgatggaggagagctggtacctggggggctcagacccagctcact

SEQ ID NO: 3157900 - DNA, 1080 bp, Cricetulus griseus
atcctttccctgctgcaggaggagggacatggagattacatcaatgccaacttcatccggggcacagatggaagccaggcctacatcgcaacacaaggacccctgcctcatactctgttggacttctggcgcctggtttgggagtttcgggtgaaggtgatcctgatggcctgtcaagagacagagaatggacggaagaagtgtgaaaggtactgggcccagaagcaggagcctctgcagattgggcctttctgcatcaccctgacaaaggagacaccagtgaatgcagacatcattctcaggaccctccaggttacattccagaaggaatcccgctgtgtgcgccagctacagtatatgtcttggcctgaccacggggttcccagcagtcctgatcacattctcaccatggtggaggaagcccatcgtctccaaggagctggtcctggacccctctgtgtccactgcagtgccggctgcggacgaacaggtgtcctgtgtgctgttgattacgtgaggcagctgctgctgacccagacaatcccacccaatttcagcctcttcgacgtggtccttgagatgcggaaacagcggcctgctgcggtgcagacagaggagcagtacaggttcctgtaccaacacagtggcccagctattctcccgctcaggacctccccagccctgtctgtccacatcccgccctccaggcggggttctcaggagcatctcggtgcccgggcccccgacccttcccatggccgacacttacgccgtggtgcagaagcgtggcgcccccgcgggcacagggccggggacgcgggtgcctagcagcgcggacgccccaatctacagccaggtggctccgcgttcccagcggccggtggcacacaccgaggacgcgagggggacgacaccacccggccatgttcctgcggatcaaaaccctccgggcctgatgcctatgaagaagtaacaaatggagcgcagacgggtgccctcggcttcaacttgcgcattggaagacccaaagggccacgggatcctccagcggagtggacaagggtgtgagggctgtgccag

SEQ ID NO: 3157901 - DNA, 1258 bp, Cricetulus griseus
gagcggagtgggcgccgaggggtcccgcggctcctcagtgcaaacacagccatttgtcttgtacaaggggcttcagtaggaagtgagagtgcagcagtagatgagcagctgactatgaattctgaggaaaacatgcatctattagacaaggaagtcacatctgaggaccttaaactaccagggaataactccagcaatttacaggccattggtccttatccagatgaaggggcatcaacaaagtgcagtattatggaatgtgaaaagaattatgaatctggaactcctcatcaagttccccagacttaaataaagagataacagtagactgtcttcaaaaagaattggaaattctcagaacaagcaataaaaagacttcaagaaaaattagactaaagaagataaagaaaagagaaaattaaagcttaagttggaactccacgagaaagcggcagaagctgaaattgctgaaaggaccgcagctttggttgaagaagtttattttgcacagcgagaacgtgatgaagctattatgtgcagactgcagttagcccttgaagagagagatgaagcagttgcacgtgtgaaacatatggaaatgtcactaaaaatgctagaaaatattaaccctgaagaaaatgacatgacattacaggaattactgagcagaataaacaatgcagacactgggctagctattcagaagaatggagctataattgtggatagaatctacaagaccaaggaatgtaaaaagagaataactgcagaagaaatgaatgcagtgatagaagagcgggatgcggctttgtctcagtgcaaacggctacaccaggagcttcatcgtctgaaagagcagaagcagacttcagcaaacaacatgagacatccgactgctgaaaacaatcaggaacgtgctctgaaggtaaaattactgtcaatgaagcaagccagagaaactgcagttgaacagtacaaaaggctggaagaagaaatacagacattacgagtttactacagtttacacaaatcattatctcaagaagaaaacttgaaagatcagtttaaccatgccctaagtacctatgaagaagccttaaaaaacagagagcacgttgtttccatcactcaacagcagaacgaagaactggccgcccaacttgagcaggctctgactcagcaagcaaacatggaattgcagcttcagtgtgctgtagaggtctcccaagcagccaatgaaaaagttcaaaagtagtaa

SEQ ID NO: 3157902 - DNA, 1558 bp, Cricetulus griseus
caagaggatggaaggagctgcaaagatcttgatgagtgtgcaaccaagcagcataactgccagttcctgtgtgttaacaccatcggtggcttcacatgcaaatgccctcctggctttacccagcaccacactgcctgcattgataacaatgagtgcacatctgacatcaacctgtgtgggtccaagggtgtttgccagaacactccaggaagcttcacttgtgaatgccagcggggattctcactcgaccagagtggtgccagctgtgaagatgtggacgagtgcgagggcaaccaccgttgtcagcacggctgccagaacatcatcggaggctacaggtgtagctgcccccagggctacctccagcactaccagtggaaccagtgtgtagatgaaaacgaatgcttgagtgcacatgtctgtgggggagcctcctgccacaacacccccagagccacctgccagttggtgagatggatgacaattcactgtccccggaagcctgctatgagtgtaagatcaatggctaccccaaacgaggcaggaaacggagaagcacaaacgaaacagatgcctcggacatccaggatgggtctgagatggaagccaacgtgagcctcgagagttgggatgtggagaaccagctagctttgcttcaatatttcccacatcaaccacaaggtccgaatcttagagctcctgccagccctcacgactctgacgaaccataacagatacttgattgagtctggaaatgaagatggcttctttaaaatcaaccagaaagaaggagtcagctacctccacttcacgaagaagaaggcagtggccgggacctactccttgcaaatcagcagtactccactttataaaaagaaagaacttaatcagttagaagacaggcatgacaaagactacctcagcggagaactgggcgacaacctgaagatgaaaattcagatcctgcttcattaatttaccacccagagaccaaataattaaaatgaaagcaactttaggtaggtagaattctattttccccaaaccagaccttcacatgtctatttggtgctagtaaattctcaaaatagatttattgatgcactgtaataagtacacaagttagaaaccaaattgccaagtattcagtacacataattcattcatttcaatcaaccaaagttagttcagtagcttatctcacttatgagtataatacattacatgtaaattaagtgtgtgtatactgtaatcgtgttatttttatcattgaaacatttataaactagataataaagcccttaatgtgagggtttgtaatggtagcttattaagaccaaagacttgttaaatgtctacaccaagtggtagtggaatctgtgactggcccacttgtgcactgaggttggggaagacgaggaagcagcctcagccaccagaggatcaccagtgcaccctacatcacaccgcatgtgcaatatgccaaagtcactctcaatcattcctgtcaacaaggggttaatgtcataatgtcacaataaagtgatcctaccctccc

SEQ ID NO: 3157903 - DNA, 439 bp, Cricetulus griseus
agctgctgctgtactgctgagcagcacagctttggttgagcttctggagaagatgttggccctcacctggacagaagcaggctctcccaggactccactgctctgctctgcctggctgctcgctgcctccttctctgcccagcagcacaatggcaatttgcaggtccatcagacattatctgtagaactgaaccaactattaaaggctctcagctttccaaagaaaaagtctagcactgctgtcagctgccatcctacgattcctgcggacagccctgcagcaaagattttcgtctgccttggtgcaccttcccagcccagccaccccttcaagacatgctctgccttggaggtgtatctgtttctctgtcccacatcagagactgagccataaggacataaagacccagaaacagatgttgagacctgtagacaaatt

SEQ ID NO: 3157904 - DNA, 1240 bp, Cricetulus griseus
cctgagatctgaagaaaaacaaaaaaggtctaggtccaaaaccaactctgaactgccagggccaaagggctaatttttaagcatatgagctttattgaagtcttaaaacatattaaccatagatccacctagctgttttatttatctcttaattcccaggtggttggttttaaaaatgggtctactctcagtagagtgagtatgattatattcacaaaccatactccataattatggttattctgtagaaactgtacagcagtagagtagctttaatggaaatacagttttttccagtgctggggattaaacccagggcctcgtgcatgctaagcaagtgctgtcactggcttatttccccagtccctaatttaaatttttaactaaaaaaatttacttcaattgcagtaaaagtgggtggctatgttttttgttgtctgagatggtaagtctgttacttaccattgctttatgggcaattgtgtttttaaaaatagtagttttgctttttttggttaaatatggtgtgaatgtcaaaattatttctatactagattcttgattttgtttaaagtgtttcttagaccctaggaccataaccagatctgcctctgagaagacactgttgctaactggggtgtatctggcaacaggaaaagactgcctatctttgtttttactttttatgttttgattaaagaaacagttggcttttcctagaagaaggtctaaaaaaaaggcagaatgtttagctttctctatgcctgggattagaactgagatgttatggttttcaaggaaaactaaattcaaattgttactactactaaatttgtaaaagttgaaattcattccttaatgttgggtttggggtgtgtcaaaactagaccaatggaagtgctgaatttgcaaaagaaagccaagatacttaactgcactttaaggtttctgggtactctgccttcattagtgacctgcagagtggctctgaacagtattttgtttatacagtcctgttggagatatataatttatgttttttaaactctgcatctttgtctctgttgatgtaaatcttttttaatgcaattttttaaagttataacaaaattctccccctaaaagaagcatttccaaccataagtattgttgttgtggactgtgtccctgcagccgagtgcttcctgctgcctcacagggaatagaactcctatgttcaaataaagtctgttgttacttg

SEQ ID NO: 3157905 - DNA, 818 bp, Cricetulus griseus
agtcctttcaggggagtcaggggcgagcctacctcttcaactctgtggtgaatgtgggctgtggccccgctgaggagagagtccttctaactgggctgcatgcagtggccgacatctactgtgaaaactgcaagactaccctcgggtggaaatacgaacatgcctttgagagcagtcagaaatacaaagaaggaaaatttattattgaacttgcccacatgatcaaagacaatggctgggagtagagcgaagcggtccactcctgtccaagtactgttatgaaagatgagtgtgacgaaggcctggcttctggggacaatacttcttgaactttgacctcacgggccagcccagttcaacacttggaggcctctctctaggctgttttctgggtaaggtgtccccatctgagcccccttcatgtacactgttgtttctggaagtttgcaattctttttctaccttcttccattctagagaaagaattaaccaactgatgactcaccttaaatcaaaagaactgaccatgagctggcttcaggggaagtgatgcaaaaccacaaccagatgtgctgataaactgtgaaacgatcccaccttcttcagtttctacagtatcgttctgtgactatgtagaaatgttttcttcagagcactgggaggtgactgacaccaggtcacaaacgccaccccgctttagaaatgtgggttattttgttgctgtcttgttagcatagtcatagtatttttatatttaatgcttattcttgatggcatcagtcgggtatttgaaaagctcagaaatgagattttctttt

SEQ ID NO: 3157906 - DNA, 387 bp, Cricetulus griseus
aatgaagaagaagcccgacgcctcatctgggaaaagaatctgaaaacttgtgatgcttcacaatctagaatattctttggaaatgcattcatatagcctgggcatgaaccatatgggagacatgaccagtgaagaggtccttggtcagatgagacccctgagagttcccagccagcggcatagaaacagcacctacaagtcaaaccctaatcagaaactgcccgattctatggactggcgagagaaggggtgtgtcacggaagtgaaataccagggttcttgtgggtcctgttgggctttcagtgccgtaggggccctggaggcgcagctgaagctgaaaacagggaagctggtgtctctcagcgcacagaacctggtggattgctc

SEQ ID NO: 3157907 - DNA, 808 bp, Cricetulus griseus
ggatggtgattttaacccttctgctggttggttaacccgctttaaacagcggcacagcattagagagattaacattagaaatgaaagattaagtggagatgatagagctgtggaagatttttgtaagaattttagagattttatcgaacgggagaatttgcagccagaacagatctacaatgcagatgagactggactgttttggaagtgcctaccttccaggacttcggtaattaaaggtaaacgcactgttcctgggcacaactcgtttgaagaaagagtcactgttatgtgttgtaccaatgcaacaggcttacacaaacttaaactttgcgttgtgggcaaagcgaagaaacctcgatccttcaagtcgactgataccttaatgctggataattccccagcacatccaaatgaaaatgtcctgaggtcagatgatggccaaaatatttgcaaaaatgttttaccaccaaatatagcctcatcgattcagccttttggatcaggggaggtcatagcaactatgaaaagaaactatcgcgcaggtcttctgcagaacaatttggaagaaggtaatgacctgaaatcattctggaaaaagctgactttgttggatgcacgtttatgaaatagccaatggcatggaaccttagtaaagccggttaccattagcagagcttggaaactgctctccaatggactgagaatttgttagattatctagaacaacaaggtgatatgattctacctgacagactggtagtacgaaaacttagagccaccatcagaaataaacagaagatgacaa

SEQ ID NO: 3157908 - DNA, 1333 bp, Cricetulus griseus
agttgattttcacaccttgcagttgctggcattcacagctcttgccattttaatcatgcggttgaagctgtttttgacaccccacatgtgcattatggcttccttgatctgctcccgacggctctttggctggcttttttgcagagttcattttgagaatgttgtcttcggtattctgacaatgatgtcaatacaaggttgtgcaaacctccataaccaatggagcatcatgggagagtttactaacctgcctcaggaagagctcatacactggattaaatacaacaccagggcagatgctgtctttgcaggtgctatgcctacaatggcaagcatcaagctatctacactgcatccaattgtgaaccacccacattatgaggatgcagacttgagggctcgaacaaaaatagtttattctgcatatagtcgaaaatctgcagcagaagtgagagataaattgttggaattacacgtcaattattatgttctagaagaagcatggtgtgttgtgagaacaaaacctggttgcagtatgcttgaaatctgggatgtggaagatccttccaatgcagctaatcctcccctctgtagtgtcctgctcaagaatgccaagccttacttcaccacagtatttcagaatagtatgtatagagtcctgaagattaactgacaacaaggctgccaatcatctgtagtgcaaagacttatgtcagaaaagaacacttctggccttccaacaacaacaaaaatcacaagctttactaagagacactttaaaagcctcatttgtttttagtttatgatgaagatggcattgttttataaattttaatctctcagtgaaagctgtctgtcataaatgctttgaaaatgccaattaccttgaaagcagagtgggtacatgcaaagagtaaccctctttctttttgtgataagttttaaacatgcccggtgtttgaatatgcatctgctacaaattaagcatcttggagtttttatacttatattttccttatatttttggacagccataacagatgagtcaatttcacagattagtttgcttgcaataggtaagcaattatatataaaattaccataaaagttggaaaatattttaatgctggacagaaaatagctaagaaagaatgctgtattgtgctgattttaacactttcaagtaatttcttttgctgtggagcaaagaagggaaaagatataacattcattaaagtaacatgttaaggataatgtcaccatggggatattttaaattaattatcagaattcaacaaaaatgatacaagctatgttaaccaataaattgttc

SEQ ID NO: 3157909 - DNA, 4174 bp, Cricetulus griseus
aatacgggtcctgttggaagctgctgtacgaaattagtgatggcttttaatgaaaaggaagatgttatgaacatttggactggaaaccaacaaagcaatgttgaagtgccctttttccctgcccgtgttgttcttcaagattttactggaataccggcaatggtggattttgctgctatgagggaggcagtgaaaagtcttggaggtgatcctaagaaagtccaccctgcctgtccaacagatctcacagttgaccattctttgcagatcgacttcagtaaatgtgcaatacagaatgcaccaaatcctggaggtggtgacctgcagaaagcaggaaagctctccccacttaaagtgcagcctaagaagtttccatgccgaggccagactacctgccgaggatcgtgtgattctggagaactaagccgaaactcaggaacattttcttcacagattgagaatacgcccatcctgtgtccttttaaaaggacctgctcttcccagacagcgtaattggcacagactctcatataaccatggtgaatggattggggattcttgggtggggagttggaggcattgaaacagaagcagttatgcttggcctgccagttactcttactttaccagaggtggttggatgtgagctaactggatcatccattttgttacgtccatagatattgtccttggcattacaaagcacctcaggcaagtaggagtggctggaaagtttgttgagttttttggaagtggagtttcacaattatctatcgttgatcgaactactatagcaaacatgtgtccagaatatggtgctatcctcagctttttccctgttgacaatgtgacactacgacatttagaacatacaggttttgacaaaaccaaacttgagtcaatggaaaaataccttaaagctgtgaaattgtttcgaaatgatgagaattcttcagaacctgaatattctcaggtgatacagattaatctgaattcaatagttgacatctgtcagtggtccaaaaaggcctcaggatagagttgctataacagatatgaaaagtgatttctaggcttgcttaaatgaaaaggttggatttaaaggttttcaagtttgttcagcaagaaaaacaaagtagatactgtctctattcattatgatggaagtgagtataaactgtcccatggaatccgtggtcattgctgcagttatcagttgtaccaacaattgcaatccatctgtcatgcttgctgcaggtcttttggctaagaaggctgttgaaactggtctaagagttaaaccttacataagaacaagtttatctcccggcagtgggatggttacacattacctcagttcaagtggagtgttaccctatcttagcaagctaggatttgaaatagttggctatggatgttcaacatgtgtgggaaatacagcacctttatcagaagctgttttgaatgcagtaaagcagggtgatttggttacctgtggagttttatctggaaacaaaaattttgaaggtcgactttgtgattgtgttcgtgccaattatcttgcctctccacccttagtggtggcttatgccatagcaggcacagtgaatatagatttccagacagagcctttaggtactgactctacgggcaaggaaatttacctgaatgacatttggcctagtcgagaagaagttcatcagatagaagaagaacatgttgtattgtccatgtttaaagctaggagtagtgctgccgctaagtatttagacaaacagaggccttactcctcgagaattcaactcttatggagcccgaagaggtaatgatgctagtgatgacaagaggcacgtttgcaaacatcaagctttttaataagtttattgggaaaccagctcccaaaacaattcattttccatcaggacagacgcttgacgtatatgaagctgcagaactgtaccagaaagaaggtatcccactgataattttagcagggaaaaaatatggttcaggaaattccagagactgggctgccaaaggaccctatttgctgggtgtaaaggctgtttttggctgaaagttatgaaaaaatccacaaagatcatttgattggaattggcatagctccacttgagtttctcccaggagaaaatgcagactccttgggactctctggtagagaagtattttctttatcatttcctgaagaactctctcctggaattacattaaatatgaagacaagtactggaaaagaattcagcgtgattgcatcatttgagaatgatgtggagataactttgtacaaacatggaggcttattaaactttgtggctcgaaaattctcatagtatctacttgccatggtatcttttgtgactggtaactgcaaagccttttgtgctggatccaggaacctttgccatggagctgcagataattccagtacacttgtttatgtcatccatggatgtaaatgattatgaatcaatgtagtgactgaaatgaaatcttgattttaaataatatacgaatggtgctattaacattgctaaaaatcaacgtgtgaagtgtgtcgtggaagaggcctgtaagtatgagggttatattttatcagaacattttgtaaataaagacagaatttgaacttgtgttgaagattcatatgagtagcctttctgaagcagtttgttttgttttgccctataaaattggactactgtttgttggtttaagaatagcaagttgaaatacaagaatccagattagtccctaaaatattgggaatggctacctaatttataaagaaatttttaagtgtattctttccaggattgattgggacacagttagcattcccaatttgtaatgtaagtcaaatttacccttagtctcagtatatcttgagtaatagaacctgccccagatcacagtccctctgaccaatccagccaaagtttacaccatgtctgaggataaataactgcaaaatatagatgattgtatggtatcatgtattagtaaaaaatatctcctatggtacagccctgtaatttttcagtaatttgccactgtgactctctgacaagccttgaatactggtatattaatttagactagattttgcttattttacatgatactataacttctgtaacctcaattaggtattatcaactgacattccacactccttttctaaatgctgaaaacaacttcaatcaactctagatttcccctagactaataaataaattatctacccaaaattatatggatatgcacccctaagtatttttttaatgctatttttacagtcctttaagttgacttactgctatttgagtctttattttttaaagggttaggaaatttgttttagaagtccctataacattttaatgaagaaattaaacttggcagcaagatgttaaatgtaatgatttttaaaaatgttttcttcatctgatctgtttttgtgcatagcacaaaacaaaagtacttgttttatgctaaaattcagcaactaccaaaccagtgggtgaagagcactgagaactttgcacataatcagtcatatagtctgttgagaatatttttcaaatatgtacttagttgaactagagtttgacaaaacaaagtctctgtactaagtggttttttttaaattaaacgcatgtctcaatgcgtatgtatatttgtaattctgcctccagccaaatgttacaaaatatgcctgttttcaatgtgttatttccttcattgactattttagtacttttgtgttatttctaaacattaccaatatttgggaaaggaagtgaacacaaaaagcaaatcagtattgtgaatgtagcgcagttaccaacagcagcattttagtctcaagcattgtgttccatgctgttgtgtgccttagttgtgttgctcatacaaatgatttgttttgtttatcaattttatgcataatatgtggctataaaaccatatatatctcttaagtaactacaaatcattgttatttaaagccaacaaaatagcataagttttaagttcaataatgttaagtattgtatagaaatatattgaaggtaaagttcagttaatgaaattgtgtatatgttattgatgctgtaaattatttttaataaagaaaattgtattatcacacttg

SEQ ID NO: 3157910 - DNA, 315 bp, Cricetulus griseus
agcaagaaacacagatgtttctcatttggtattggagaaggagcctccaccagtttaatcaaaggcattgctcgggtatctggggggcactgcagagtttatcacactccaaaaggcaaatggctcctgggagctggatgaggaactgactaagattctgggcactagtttggaagacatgaaggaggcaaatcctgccaaggatcaggatccctcagcctgggcaacagtgctggctctgctctggctgcatgccaatggcaaagacttgaagtgtcgaatgggaacttctggaaaggaggcagtggcctggct

SEQ ID NO: 3157911 - DNA, 293 bp, Cricetulus griseus
gacagcaaggaattccccaaccctagtaggttattttgtacccttggtccactttctagataagaatggaaactttaagaaaagtgactacttcatgcctttttcaacaggaaaacggatatgtgcaggagagggcctggcacgcatggagctgtttctattcctgaccacaattttacagaactttaagctgaaatctctggttcacccaaaggacatcgatacaaacccagtggtaaatggatttgcttctctgccacccccttccagctctgcttcattcctgtctaaag

SEQ ID NO: 3157912 - DNA, 574 bp, Cricetulus griseus
  modified_base (237)..(237): a, c, t, g, unknown or other
tgggcaccacagctggcacgctctggtacatcagctggacagagggcactagcacccgccctcatcagtggcctatggagacctaggggtagagggtgtagacctgtggctggctgcaagtggggatcagcgggtcagtgtctgggcctctgactggctccgggaccgctgtgaacttctggagtggttgagctttcctgcacctgccacctcagaggctctaggcctcctgccccncctcttcttgctcgtccttctgcccttgggatagggcgatactggtgtgcgttggtcttggtgcacatgaagaggtgatcttctacagtctccgccaaaagcaggtggtacagaagacaccgctgcccttcttgccatgtccttgagcctgtccccaggagcccagctcatggtggttggctttgctgagtgcatgctgaggctcctagactgtgagtcagggactgcccaggactttgaaggccatgatgactcagtacacctgtgtaggttcaccccatctggcagactgctcttcacagctgctcacaatgagatcctggtgtgggaagtcacc

SEQ ID NO: 3157913 - DNA, 2302 bp, Cricetulus griseus
tgaatgtatccactgttaggctaggcaccatgggacgacgaaactcccggaccatcttactcaagttcagagcaagtacatgttggtatgtcttcccttttaaattcttcagacagttcagatgaagaacttgtccccacaggagccacctctcaggtacaggaagaacagaccaatgacgacctaaataatgacagtgattcatcatcagataattgtgtcattgttgggtttgttaagccactggctgaaaggaccccagaacttgttgaactgtcttctgattctgagttgggctcttatgagaaagtggaaacagtgaagacacaagaacaagagcagtcttacagttctgatgatagtgatgtttgtcagtgttcatctccacgttctcttcttggaaaggacgagcaagtgagtaaaagcccttgtgattctgatagaagaataaaatcaaagaaagaagagaaacgatctacatcatcgtcaactcccaggggacagttcatctacaagaggagacagagtatattccccatataaccatcgacacaggaagaggggaagatcgagaagttcagattcacattcccagagtagaagtgggcatgatcagagaaatcataggaagcatcatgggaagaaaagaatgaagaataaacaatccagaagtagggagagtagtagcagacctagagcgaggagggacaaaaagagatcaagaactagagagagcagctggtcaagaagaagccagaccctttctctgagcagtgggagcagcagtagatcaagatctcgtagcagtgatcatgacaaaagaagatcacgaagcagaaatcgagatcgctattatttgagaaataattacggaagcaaatataagtgggaatatacttattatagcagaaacaaggacagggatggttatgaatcatcatataggaagaggactctttcaagagcccattattctagacaatcttcaagtccagaattcagaattcaatctttttctgaaaggacaaatgccaggaagaagaatcacagtgaaaggaaatattactactatgaaaggcacagatcaagaagcctgtctagtaataggtcaaggactacatctactgggcctgaccgagtgagaaatgaaaagcctggagggaaacgaaagtacaaaacccggcatttggaaggtactaatgaagtgggtcagccatcccgtgattgtgctaccaaagtgaaggacagtcattaccaaaaatcatcaaaactggatggaaattataaaaatgagagtgacagcttttcagatagccgatcatcagacagagagacaaagcacaagaaaaggaaaaggagggcacggagcctaagtgtagagatagtttatgaaggaaaaactattgacacaactaaacaccataaaaagaaaaagaagaaacataagaagaagcataagaagcaccatggagataatacttcacgttccccagttattataaccatcgacagtgaagcatttgaaactaaagatgttgtcacaatagaagatgagcttggtgtcttggacaaagaatgtgatgttactgcacttgctgatgacttgaataccagccaaactctggataatagtgtaccacccgcagtctcagttgaacaaactcttgatgtaagagaagaaagcacctttgcttcggatttggagagccagtccagtaatacatctattcagtcagagccatcaggaccattgccatcgccacggacctcattattgtcagtgtctcttggtggagactgatatgtcttaaaactgccaaagcatctcattgataattcagaggcttgtgtgtgtggaatttgtaacattatttgttcaaaaagttatgtatgtcccatccccagatatatgcacttttaagtgaagaaaatgttgctagcagtttatttaaaacttgggaacctttttaaataaaaataaaaatttagaagttatttcataaagccatatggtattgacatatttttatgctagtatttttgaattttttttgagagttattctgcaaatgtgttataagctgggagaatgcttttggacagttatttttcataaaaaatttgtatgattcaaaaccatttcttaggctgaaatacgtcattttattctacacaggctatcttgacatctgccaaaagcaagagtttagttatttttttttgtttatatacttgtttatccagactggcagtgaaacaaatgtgtattcaacaaaagacaataaaatagtacactgtaaaa

SEQ ID NO: 3157914 - DNA, 377 bp, Cricetulus griseus
caagtgatggaaaaagaatttgaagatggcatcattaactgggggaggattgtgactgtatttgcctttgggggtgttctcctcaaaaaacttgcacaagagcagattggcttggatgtgggtgcttacaagcaagtttccaattttgtggctgaattcataatgaataacacagcagagtggatacgtcagaatggaggctgggaagatggcttcatgaagaagtttgaacctaaatctggctgggtgactttttctggaaacgatagggcagatctgggaaatgctcttttctcctcaagcaacactactggccagagaggaccctggctccttcgacaatggtgaccatcacttagtacttccatttgcaaaca

SEQ ID NO: 3157915 - DNA, 277 bp, Cricetulus griseus
  modified_base (67)..(67): a, c, t, g, unknown or other
aaactaaaattaaattaaataaaaaaaaaagtaagttaatgtttttttttttttgtttttttttttntttttttttttgtttttttttgttttttttttgtttttttttttttttttctttttggtttttcaagacagggtttctctgtggaacacctctggagcataccctataacaactccctctatagaccagactagcctcaaactcacagagatccacctgcctctgcctcccaagtgctgggattaaaggcatgtgccaccacctcctggc

SEQ ID NO: 3157916 - DNA, 761 bp, Cricetulus griseus
aaataccatattgttgtccagctggggaacatgagcaaggagtccagcataaaaatcaccacagtttcattatcagcacctgacgccttaaaaatcataactgaaaatgaccatgttcttcttttttggaaaagcctggctttaaaggaaaagcagttcagtgaaaccagggggtatgagatccatatgtttgacagtgctatgaatctcaccgcttaccttgggaataccactgacaatttctttaaagtgactaacttgaagatgggtcataattacaccttcacagtccaagctcgatgtctctttggcagccagatctgcggggagcctgccgtgttgctgtatgatgaactgagctcaggtggagatacagcagccatccaggctgccaggtctactgatgttgcagctgtagtggtccctatcttgttcctgatcctgctgagcctgggtgtcggcttttgccatcctctacacaaagcatcgtcgcctacaaagcagctttactgcttttgccaacagccactacagctccaggctgggctcggccatcttctcctctggagatgacctaggagaggacgatgaagatgctcctatgataactggattctcagacgatgtccccatggtgatagcgtgaaggagcttttctcattagaaaccaaatggtgtaaatattttatttgataaagatagttgatggtttattttaaaagatgcactttgagttgcaatatgttatttttatatgggcc

SEQ ID NO: 3157917 - DNA, 186 bp, Cricetulus griseus
  modified_base (167)..(167): a, c, t, g, unknown or other
  modified_base (170)..(170): a, c, t, g, unknown or other
  modified_base (176)..(176): a, c, t, g, unknown or other
tttgtttttggtttttgacacacagggtttctctgtgtagccctggctgtcccgtaactcactttgtacatcaggctggcctcaatctcagagacccacctgcttctgcctcccaaatgctaggattaaaggcatgtgtcaccacatataataaataaattattaanaanaaaaanaaaaaaaaaa

SEQ ID NO: 3157918 - DNA, 405 bp, Cricetulus griseus
gcgcctcctggaccgacgtggctgcagccgcgtggagggcggtggcacatccctgcacgtggcctgtgagcttgcacgccccgagtgcctcttcttgctgctcggccacggagcttctccaggcctgcgagacggtggtggctttacaccactggagctgctgctgcgccagcttggccgggacgccagctcagctcccgctgctgctgtggcctcctctgccaccggcaacgcggccactaccagcaccactccacctgaggagctgtgtcagcgccgcctgctgctgcttgacctcctggtgctgtacaccaaagtgggtgccgccagccccgctcgatgtgagctgctgggagaccggctacgctggcaaaggctgctgggtgaggacaaattccagtggct

SEQ ID NO: 3157919 - DNA, 523 bp, Cricetulus griseus
ggcctggccagcctggtgatgctctgccgctaccgtgcctctgtgccagcctcctccccccactgtaccatacctgcatggccttcgcttgggtgtccctcaatgcttggttctggtccacagtcttccataccagggacactgacctcacagagaagatggactacttctgcgcctctgctgtcatcctgcattctatttacctgtgctgtgtcaggaccgtgggactgcagcacccgtcagtggccagggccttcggagccacactgctgctgatgctgctgctacacacctcttacctgagcctcgtccgcttcgactacagctacaacatgatggccaatgtggctataggcctggtgaacctggcctggtggctggcctggtgcctacggaaccaccggcgcctgcctcacacgcgcaagtgtgtggccgtggtgctgctgctgcaggggctgtccctgctggagctgctcgacttcccaccctcttctggtccgtcgacgcccactgccactctggc

SEQ ID NO: 3157920 - DNA, 409 bp, Cricetulus griseus
  modified_base (296)..(296): a, c, t, g, unknown or other
gatcatccacaccggggagaagccgttcaagtgcgagcagtgcggaaggagttcagctggagcgcggggctcagcgcgcaccagcgggtgcacaccggggagaagccctacacgtgccagcagtgcggcaagcgcttcagccaggcctcgcacttcaacacgcaccagcgggtgcacaccggggagaggccctacacctgcagcgtctgctccaaggccttcagccagaggtcgcacctggcctaccaccagcgggtccacaccgcggggaacccataggtttttttttttttttntttttattttatttattttatttatttaaaacttaaattattaaaaaaaaaaaaaaaaaaaaaaaaaaaaaaaaaaaaaaaaaaaaaaaaaaaaaaaaaaaaaaaaaaaaaaa

SEQ ID NO: 3157921 - DNA, 244 bp, Cricetulus griseus
cagacatggaaggaacaaagaaggttcaccctgatgacactgaggaactttggattaggaaagaagagcttagagcagcgcattcaggaagaagctggacatcttgtggaggccatagcagaggagggaggacagccttttgaccctcactttaagatcaacaatgccgtttccaatatcatttgctccatcacttttggcgagcgttttgagtatcatgacagacaatttcaggagctgctga

SEQ ID NO: 3157922 - DNA, 161 bp, Cricetulus griseus
tggaggaggggaagaagaggttgcagaaggagatcggagggcctcagccagcagtatgaggaaaaggctgccgcctatgacaaactggagaagacgaagaacaggcttcagcaggagctggatgacttggtcgtggacttggacaaccagcgacaactggt

SEQ ID NO: 3157923 - DNA, 394 bp, Cricetulus griseus
agaaattaaaattacagaccctgacatcagatcacaaatctaaggtcaagagattgtggcacagcacacaaaggagtggtcagaaatgatcaacactcatagtgccgaggagcaagagatccgggatctgcacttgaaccagcagtgtgagctgctgagaaagctgctcatcaacgctcatgaacagcagacccagcagctgaagctctctcatgacagggaaagcaaggagatgcgagcccatcaggctaagatttctatggaaaatagtaaagccatcagtcaagataaatctatcaagaataaggcagaacgggaaaggcgagtcagggagttgaacagcagcaacactaaaaagtttctaagaaagaaaagaaaagagactggcgatgaa

SEQ ID NO: 3157924 - DNA, 1594 bp, Cricetulus griseus
  modified_base (1549)..(1549): a, c, t, g, unknown or other
cgaggtgcagagcctgctcacgagaacgggtagtgtgagatctactctctcagaaagcatgcagcttgacagaaatacactacccaaaaagggactaagatacaccccatcatctcggcaggccaaccaagaagaaggcaaagagtggctgcgatcccattctactggagggctgcaggatactggcaaccagtcgcctctggtctcaccttctgccatgtcatcttcagccacaggaaaataccacttttccaacttggtgagtcccacaaacctttcacaatttaaccttcctgggcccagtatgatgcgctccaacagcattcccggacagcatgaggaagttcatggctcttcactgtcattggtctctagcacatcttctctttactctacggctgagaaaaggctcattcggagcaaatccacaagctacggagagaactcgttgcatcccaggagaaagttgctaccctcacatctcagctgtcagcaaatgctcaccttgtagcagcttttgaaaagagtttagggaatatgactggccgattgcagagtctgaccatgacagcagaacaaaaggaatctgaacttatagaactacgggaaaccattgaaatgctgaaagcccagaactctgctgcccaggcggccattcagggtgcgctgaatggcccagaccaccctcccaaagatctccgcatcagaaggcagcattcctccgaaagtgtttctagtatcaacagtgccacaagccactccagcattggcagtggtaatgatgctgactccaaggaaagacctatttagtcaaacaaacttgcagaatatgtaatagccaaatctgggaggaaaaaaactgaggatgcaattgctacctttaatgtggaccacaagtcaagtaaggaattgcagcagtatcttgccgaacctggctgagcaatgcagtgctgacaataatggtgtgggagctccctgttgtcataattctagataatcttcaccacgtgggctctttgagtgatatcttcaatggtttcctcaactgtaaatacaacaaatgtccttatattattggaacaatgaatcagggagtctcttcatcaccaaatttagagctacatcacaatttcaggtgggtattatgtgcaaaccatacagaaccagtgaaaggctttttaggcaggtatcttcgaaggaaactgatagagatggaaattgaaaggaatatacgcaataatgacttagtcaaaatcattgattggattcctaagacatggcatcatctcaatagctttttggaaacacatagttcttctgatgtcaccattggtcctcggcttttccttccatgccccatggatgtggaaggttctagggtgtggttcatggacctttggaattagggatccccttgatgaatatgctaatgaaactccaggaagcagccaactactcgggcacacaaagctgtgacagcgatagcattcaccaccgcgaagacattttggattcctctcttgaatccaccctctaatggatgaaaagngttaggcaaaggacaatgctgttcaaagatgttttaaaagaaagg

SEQ ID NO: 3157925 - DNA, 1297 bp, Cricetulus griseus
accaacagaaggagaaaatccatctggagttttctgaagactgtctttacctgaatatttacactcctgctgacttgacaaggagcagcaggttgccagtgatggtgtggatccatggaggaggactgatattgggcggtgcatcaacctatgatggactggctctctctgcccatgaaaacgtggtggtggtggccattcagtaccgcctgagcatctggggattcttccaggctctgtgaccatttttggagagtcagcaggaggtgaaagtgtctctgttcttatgttctctcccttggccaagaacctcttccacagggccatttctgagagtggtgtgatccttgttcctggcttgtttaccaaagattccaggatagtcactgagaaagttgctgttactgctgggtgcaaaaccaccacatctgctgtcattgttcactgcctgcgccagaagacggaggacgagctcttggaggtcatgcagaaaatgaatctgtttaaacttaatgtacaaggagacaccaaagagaaccacgcttttgtaccaactgtgcttgatggggtgctgctgccaaaggcacctgaagagatcctggctgagaagaatttcaacactgtgccctacatcgtgggaatcaacaagcaagagtttggctggaaagaaaccctgttcatggacttgattgcagatgtggtatttggcgtcccatcagtgatggtatctcgtggccacagagatgctggggctcccacctacatgtatgagtttgagtatcggccaagctttgtatcgagcatgagacccaaggagatcataggagaccatggcgatgaaatcttctcagtatttggagctccctttttgaaagatggtgccacagaagaggagatcaacctcagcaagacgatgatgaaattctgggccaactttgctcgcaatgggaacccgccccattggccagagtatgaccagaaggaagggtacatgaagattggtgcctcagtccaggcagcccacagactgaaagacaaagaagtggtttttggactgaactcagggccaaggaggcagcagagagggcaacacacagagaacatgctgagctctgatcaggagtttcagctatgtttgagagcctggagccaaataagaggtatgccacagataatctcacagagatatatggtttcttatctttaaagccatacaattgtatggtattttgtaaaaatgcattaaagaggatccttgttgcttcaacttgtaaaaataaaacattgttttggaaaa

SEQ ID NO: 3157926 - DNA, 837 bp, Cricetulus griseus
tctgctgctgtgagctcagtgctggaggaagcatgccaccacctagtccaggcatcttcccaccctctgtcaacatggtgataaaggacaggccctcagatggactgggagtaccgtcctccagcagtggcatggcatctgagatcagcagtgaactatccacctcggagatgagcagtcacagcctcagctgcagccgcagccgcaaccgcagcggcagttccagatggaccacctgccagactgttacgatacaccactatgacccagtttgagtactgttttaaacaataaactaaccagaaagactgagagagtctcccaggctcacattaaaccaggggtgttactccatgcccttctcccagacactgccccatctgtctctgcagctcatcttgtaggttctctttgtattggttacttttaataattaccacttttcttctagtgatactttaacaatatgatttaaatttgttaactcttttccctaacatatcaaatgtgtaaagacaaagaacaaaaggtttaatatattacagagaaacaattaatgataatgtaatattttaaaaaattagctttttgttgttttgtttatttggaaggcagggcaagttgccattgctaaatgacttaataatattgtaattgtgtatttctttgtggggaaaggcttttttttttgttcttgaaaatgatagacatttgtagaatatggagactaactcctaggagttgctttactctgtcaggtgacttaagtcactgggattcactaattttctctgagagaacagttgattgagaaatttctattgtaaatagctcagt

SEQ ID NO: 3157927 - DNA, 695 bp, Cricetulus griseus
gaaaatacttggacaagcatcatgtgaaagacttcaaattgatattcaacacttgtgtttgaacaggattcctgtgctacaagaaggaagactgcctgtggtaggaattgggaagcatctgtgtggggtcgcgacagatcttgcattacgatgtttggttgaaacctatgctgccagttttgaagaaaggaatgaagaacctttagccaaacgcgtaaagaatgataaaacagaaaaagaaagtaacattttgttcaaggaaggaattctactatttccagagaatgagtagttgggcaacatgtggaatgagaaggacatctttggaagcctcagatattactacaaagagaaaagatgatcagaattctgacaatgacgagcatgatgatggggagatagactcacagatggcagcactgatggtgtgcctgggattcttactgctgaagagaaaaagaatataggacatctttgcaaattgctgattgaccaaggccgactccagtatttacaacagaaaggcttcagtcctgctttacagtactatacagacccatcggtatctctggaaaacgtgttactaactgctgtaccagctcatctgtcatcgcaggaagcaactcattaatggaaaagaaactgaacatcagttaccttctgcaaacaaaaatatttcattctttttaagttat

SEQ ID NO: 3157928 - DNA, 393 bp, Cricetulus griseus
  modified_base (329)..(329): a, c, t, g, unknown or other
ggaagctcacatatgaagacttcgtgtggttcctgatctcggaggaggacaagaccacgcccaccagcatcgagtactggttccgagtcatggacctaggacggggacggggccctctccatgttcgagctcgagtttttcacgcagagcaggcgcagcgcctggaggcccggggctggagccgccgcccttccgggacctggcgtgtcagatgctggacatggtcaacccgcgcgtgcccgggcagatctcgctccccgacctccgccgctgcggcctggccgccattttctcgatgccttcatcatgacaagttcctggctcgggancagcgcgagctgggggcgggcccgcgcgggacgcggaccccgttttattcctaggaatgacaga

SEQ ID NO: 3157929 - DNA, 501 bp, Cricetulus griseus
gaagacttcagcatgaataaggacttaaaaattgaagtgggaaaaggcagaggaaaaatggaaggagataaaaagacaaggagctatcccaaaggtttcagtgattatcacggaacagcttttagtaacttatactggggccatctacttagattttaacaaagctgttagagaatttaagaaaaatcccagtaactttcattacaaggccttccattactacttaacaagggctcttcagcttctgaataacaagaaatgttacacagtttaccgaggcaccacaaacaaatttcattacagcgggaagggctctgtgcgcttttgggcagtttgcttcctcatctttggaagagagagtagctcttaatggttttggtggtgctagtgggacactgtttatcattgaaacctgcttgggggttcacataactgaattttcccacaatcctgaacaaaaggaggtgttaattccaggctatgaagtatatcacaaagtca

SEQ ID NO: 3157930 - DNA, 638 bp, Cricetulus griseus
gccaatgaagaccttgaccccatccaaatccaagctcaacaccatcgaggccaagagaatcatgacagtcctggatgaggccatacaaaaagtggggctggtgaccctgatgtcctacgtggagtcccacccagatgctctggagggagtgttccctgaagacttgatgagggccatcagagaacatctggacatcggccaggtctttctggagggtgccagcaacctgcaggagaaacaaaaactgctggaggaaaagaaggcggatgctgaggaagcctggtgccgggaccgcctaatgtctatagaactatacaaggccaacctgtggccactggcacaccagttccgagattccaccaaggccatcctgaggctcctgtccagccaatcccaaatcatcacactgctgcaggcacgtgcaccaggcagaagccggggggcgcagcgcctccttgaggccctgatagagcttcggggctacctctttgaaaagctcctcaccagccctatcggaagtaagggagaagaaccaattcatacaggacatcgaaccggaggaatgaaaggaaccaagaagtcattgatgctctccaggccgagctggcggaggtgctaaagaataaggaggcagaggt

SEQ ID NO: 3157931 - DNA, 840 bp, Cricetulus griseus
ttttcagctttccacaaccacaaaaacctgctgctgaggctcccgagagatcaagatgtggacggcgccagcgttgttctgggttttggggagcgcgtggttgtggcactttgcgcagggagcggccataggcccactagaagatgatattgtgaccccgggtacaagagatggcctggtgaccccaggtctagaagacagaatagcaaccacaggggctactggaagactggatgaatctactggcaagggacctctggtaccacacacaaagatccctttgaggaactgccaactccaggaacctcagaccctgatggagaagaacataagagtacaaccactgtcagaatggtgactagccactctgcagataaggaaacaagtcaccccaacaaagataacacagctgatgaaacacagacaacagataagagagatggcttggcagtagtgactctggttggaatcatagttggagtcctactagccatcggctttgttggagtgatcatcattgtggttatgaggaaaatttctggaaggttctcgccctgaagagctgaacagatcaagctgttctcccaacatacctgaaaataagagtgcttccaacatcccctgcttcccatcctctgcttatggaggaagatgacccatggaacgcccccctcacccacagccatggcgactcctccacttgccagaggtgccaaaggacagacacatgacaagccatggcccctcaaagcatatgcctttggaaaacagacatttttaatatatgttttgtaataaatgattcaaaagacaccatgcatagaaaatggaacaaaacca

SEQ ID NO: 3157932 - DNA, 300 bp, Cricetulus griseus
  modified_base (287)..(287): a, c, t, g, unknown or other
tgaatgtaaatcagagatctgtagccctcattaaggcagaaaggcctgggtggtgataaatggtacttagagatgagatgtcatgaggaggagatgcattattgatcacagatggataattaggaagtaccttgttatatatacagataattttatggtcattttgtatgtgtattgaaatagtggaagcatttctgtagcttaaagtctctagtgtgtaatgtgcataaagtaacttaaatagtgttgagttttccgatgtgttttgattgcaaaattaacttttnttttgttttgttt

SEQ ID NO: 3157933 - DNA, 496 bp, Cricetulus griseus
gctttggctttgtgtgctttcctctccagaagaggacaacaaggctgtgacagagatgaatgggcgcatcgtgggcactaagcctctgtatgtggccctggcacagcgcaaggaggagcggaaggccatcttgaccaaccagtataggcggcagctctctcgccctgtcttgagctccttccagcagcctaccaactacttactgtctgctgtatcccagtctacagcacaggctgtgtactatggttctggctccatggctccgatgcaacctgaccccaggtgggcagtccagccacatggaccacgggcatgctgctggagatggacaacctggagcttctgttattgctggagtccccagagtccctccatgccaagatagaagaggctgtggcagtgttgcgggcgcatcaggaaatggagccaaaggcaacaggaactgaacacagcgggtggctggaggcgggagaacccacgaccgagcagctgagct

SEQ ID NO: 3157934 - DNA, 1241 bp, Cricetulus griseus
ccccatcgggtctgggaagaccattgttgggaagaataccagacacattgatgaacatgatgtgcacgaagatggcgcagaccttaagaccacgtctaataagcgcttcattgactcctcgtggggtaacattgctttcaggtcctggatctaggatgatctcaacccataagcccaagaagaagatcaaagagtattatagtctgctgaatctacgtgaaggatgctctgtagatgacgtcagagagtcttttcataagctcgccaaggtgtatcatccagacagcggctccaacgatgccaattcagcaacatttataaagatcgaagaagcttataggaatgtgctttcccatgtgataaaacaaacacaggccagacagaaagctgaagacacagaagaagagaagaagaagacaaattcaaatacaacacgcctcagcaccggcattatttgagctttgaaggcgtgggctttgggacaccgagtcaacgagagaaacagtacagacagtttagggcagaccgtgcaacagagcaggtgatggaatatcaaagacagaaacttgagagggagctctttgctaacagcataactgtcaaagacgtaaggcagagcaaagaactaaagataactcaagccatggagcgcctggtagaggacctcattcaggagtcaatggcaaagggagactttgacaatctcagcgggaaaggaaagcctctgaagaagttttctggctgttcatatattgatcccatgactcacaacctaaacagaatattgatagataatgggtatcagccagagtggattctgatgcagaaggaaatcaaagatacgattgagcagcttcgagaagcacttctagtgtctaggaagaagcttgggaaccccctgacacctgggggacagaaacagtggaaccaagtgtgtgagaagtttcaagaaaacatccgaaagctaaacaagcgaattagtgatttcaacttgatcgtccccattctaaccaggcagaaagtccattttgatgcccagaaagaagtgatcagagtccagaaaatgtatgaggccttcatagaagcaaaagaaatcacagaagaaaacccaactgacattagcaaggaagaagaaaaaacacccagagtcaagacaggctttctaaactggttgaatctgtggaaatttattaaaatttgaatattttggctcacaactgcctgtaactccagctccaggg

SEQ ID NO: 3157935 - DNA, 497 bp, Cricetulus griseus
gccccggaccttgctatttgttggattccaaagtaactcgtttttggaatgtctacctgcccccaggtccccatggaggagcgcatctccaacatacggtataccaccaccccaggcccctgccactacagcgttgagaagattcagccccctggggaacgtactgttccccgttaaacgtttggctgccggtgtccatatagagtgatggatcccaacccggctcccaaccagtacaagcttccattctcactggggtccaacaccccagtcttccgagatgctccctgccatagtctgggttcttcaaaaaaaaattggttctacaaagagaatatagcaggaggtcctggacctgctgtgtatacccgacctgagccatctgtctaccagaaccgcagccctgtgttcagcatggccaagcgctttgcctatccactggaccacacacttaggcctggccctggctcccacaacgttcagcaagtcactttgca

SEQ ID NO: 3157936 - DNA, 2200 bp, Cricetulus griseus
  modified_base (1391)..(1391): a, c, t, g, unknown or other
cagggttgtcgcctggatactatcgagacaacaaaagcttaccggctggaaggtgtgtccctgcaattgcaatggacattcaaatcgctgccaggatggctcagggatatgcattaactgtcagcacaacacagctggggaacactgtgagcactgcaaggaaggccactatggaaacgccatccatggatcctgtagggtgtgtccctgccctcataccaacagttttgccactggctgtactgtggatggaggaattgtgaggtgtgcctgcaaaacctggatacacaggagcacagtgtgagaggtgtgcaccaggctattttgggaatccccagaagtttggaggtaactgccagccatgcaatttgtaacagcaaatggccagttgggcacttgtgaccccctaactggagactgtgtaagccaagaacccagagatggtagtcctgcagaagaatgcgattgactgtgacagctgtgtgatgaccctcttgaatgacttggccaccatgggtgaggaactccgcctcatgaagtcaaagctgcagggcctgagtgtgagcactggtgttctagacagatccggcacatggagacacaggcgaaggacctgaggagccagctgcttggcttccgttctaccatctcaactcatgggtccaaaagtggaaggcctggaaaagaactgagtcagtctggaccgtgaatttggaactcagagacaaatgaaagaaatgaattccctgaagaatgactttgccaagtacctggccacggcagatgcttccctgctgcagaccaacaatctgctgcagcagatggacaaaagccagaaggaatatgaaagcttagcagcagctttaaatggagcaagacaggaactaagcgacaaggtacaaaaactctccagatctgcaagcaaaacatccctggtggtagaggccgagaagcatgcacagtctttacaggagctggcaaagcagctggaagagataaagagaaacaccagcggggatgagctggtgcgctgcgctgtggatgcagccactgcctatgagaacatcctcaatgccatcaaagcagcagagatgcagccaacaggccaccagtgcttcggagtctgccagcagcagggacagcagcagcccgattttcaagtctccacagacctacatggatggcttactgcatcacgtgtctgtgataagcgacacctcaggcctccgactcctcattgatgaccaggttcagagaagaaatcaaaggctccctggattctccaatgcccagcagtccctccgtctgggaggcggttatttcgagggttgtatcagcaacgtttttgtccaaagggagagataccatgacgggaagtggcacacggtggngtttggacaaagtggaggaaaagcgcacttggtcgtggatgggctgagggcccaggaaggcaatttgcctggaaattctaccatcatccccagagcacaggtttacctggggttttcattgccaaggaagttgaagagcctcccccagcacagctttgtggggtgcctgaggaacttccagttgaactcaaaacccctggattccccctctgcaagctttggggtgtctccctgctcaggtggctctttggagaaaggcatttatttctcccaaggaggaggccatgtggtcctggccaattctgtgtccctggggccagagtttcagctcattttcagcattcgcccaaggagtctcactgggaccttaatacacattggaagccaatctggacagcacttaagtgtctccatggaggcgggaaaggtcacagcctctatggagagtgaagcaggtgggaccttggcgtccatcacaccaaagcagtctctgtgtgatggacagtggcactcagtggcagtctccattaaacagcacgtcctgcacctggagctggatacagacagtagctacacagctgggcagctttccttcccatctaacaacacccgagggtcactacacattggaggtgtcccagacaaattaaaaatgcttaggcttcctgtgtggaactcattttttggctgcctgaagaatattcaagtcaaccacatccctgtccccatcaccgaagccacagaagtccagggatctgtcagcctgaatggttgtcctgagcactaaccctacacagcaagaaagcacc

SEQ ID NO: 3157937 - DNA, 697 bp, Cricetulus griseus
gctacttgaggacgtcaggctacggtgtgagcttgtcctctgcctcctcagaagatatcctggccatgctgcgacggaatgatgtgtggcagttcctacgtcagcacctggtgggcccaccgggtcccccagggcccccaggagttggtggagatgggtccctcctgtccttggactacggagagctgagcagacacattctcaactatatgtcaagttctggaatcagctttgggcatcctggcccacgggcccccctggccctgccaggaacatcctatcgaggagctactcaccatgctccgaggggccaccaggccctcgagggcagaaaggagagaaaggagacaagggcgaccaagtctacactgggagaaggaagagaagtattgccatcaagccataagctgcacttgagccaccaagttctcagaccagtgctcgggcgcctatgtctaagtgtccccattcaaagacacacaatgaaaaacagctgcactgattgggtgggcctttggaatcgctacaaaatttaatatgagacttaacctctctgctatatagactgagcttcctagcctggcctcacttagctcagacctaaacctcagaagccaattacataaatgttggctggggagtcttgatgctttgctcatttttagaaatgagcccagaaaatggaaaatgggcatgg

SEQ ID NO: 3157938 - DNA, 372 bp, Cricetulus griseus
tggaaggcccagaagtggacggatttgtcaaagacatgatggagctggtccagcccagcatcagcggtgtggatcttgataagttccgggagattctgcttcgccactgtgatgtgaacaaggatggaaagattcagaagtctgagctggcactgtgtcttgggctgaaaataaacccctgatccccggctgctctgctctctgcttgtgtgtctgtgctcttgctgtgggaagtacgtttgtgctttgttcttggggacccagtcagcaaaccttctctactgatgactgtggtactcttgggcagagggagggaccccagggtgctgctttgtagtaggctagccatgatcctgtaccatgggaatcccc

SEQ ID NO: 3157939 - DNA, 154 bp, Cricetulus griseus
catggtgactcacaaactgtaactccagttcctccatgggcattgcatgcttgtgtacagacatatatacatacaaaacacccatacacattaaataaatatattttctagaggacagttttatacaacaataaagtctctgtatttaaggcaa

SEQ ID NO: 3157940 - DNA, 556 bp, Cricetulus griseus
atcattcaagcacgcagcatataccctatcttgagaacccagcagcttgccagcattgttgcaggtgcctttcctccctccgctgtctatgcaagaaaggacttgctgcaaagatcttcccacatcgctaccaagacttttcaagcacttcgaatctttgtgaacaatgagctgaatgagctctacacaggactgaaaacagcacagaaatttctgaaaactggtggccgccttgttgctctgtctttccattctttagaagatcgcattgtgaaacgatttttgcttgggataagtatgactgaaagatttaacctaagcattagacagaaggtgaagcaaaggtcacagatggattcactctgtaagagctcctctgaattgggatctccttcacaagaaggtccttactccggaagatcaggatgtccaagaaaaccccagagggcgctcagccaagctaagggcagctatcaaattatgaagatcttattatttgatcctcaaattttcctcctatatttctatttttttctaatttaaaacagtgtttctg

SEQ ID NO: 3157941 - DNA, 457 bp, Cricetulus griseus
ggcatactttgaaaaggcaattggtagtgtcatcatggccaagggttatggcacatcagagctgattagcctatatgaagaaatcgctcagattgagcagctgaggaggaaccatgagcaagccatccagtatttgcagcaggcctattctatttgtgtttcttcattttctgaaatcagcccccaaactgctgaggcgagtgctctactagctaaagcttatgccatgtccggagaatcccagcacagggatgctgttgagatatatttcataaaaagtattagtacatatcaaacactgggctctgaagactatgagagtctcaccgccattgaagacttttgtacatggctcatccaaaatggtgaaaaccaggaggcttacagattgctaaagtctacactgaattctggcatctatgatgactgtggtggaaaagtagccgaaaccttttat

SEQ ID NO: 3157942 - DNA, 241 bp, Cricetulus griseus
ccctgaagcgccagtgggctaagctgaagatccggtggagccagcgctggggaaggcgccgccgccgacgcaacaacaaccgcgtggttgcggctcctcgcgctttggccttcgctgagacaggtggcctccccatttacatctgccatcaggaaccgaggaatgctcccattaacaacaatcaaggcgaagagggtgtggaaaatgatccccatgaatgtcatccagcaagacccatccg

SEQ ID NO: 3157943 - DNA, 2062 bp, Cricetulus griseus
caagaaaaggaagaactcattaacactctgcaaacccagctcagccataacacaagctgtggtggtgaacaactcgagactgacctaaaggctctagagagctgactggtagattgcatgatgaaatccacatgaaggaacagaagattgtaagcctgctttcaggcaggaggaggcagtacaggtagctgtcgctgagctgtgccaacaacacaataaggaaattaaagaattagaacatctgttgtctcaggaggaagaggagaatgccaccttagaagaagacaacaaaaaggctgttgagaaaaccaatcagctcatggaaacattggaaaatatcaggaaagagaaccttgagcagaaagcccagctgaattcctttttaaatccatggcctcgctccaggatgaccgagaccgcataataagtgactatcagcagctggaagaccgacatctctctgtgatcttggaaaagaccaactcatccgagagagtgacgttctttcccaggctgcttttcccctaaccaaccactgagaacagcttgtcccaccttgagaaacttaaccagcagctcatatccaaagatgagcaattgcttcacctatcttcgcaactagaagattgtcacaacaaagtgcagtccttttccaaggccatgaccagtttacagactgagagagatcacctgtggagtgagctggagaaattccggaagttggaggaagggaagcagagggctgcagccccttcatctccctccagcccagctgagatgcagagcttgaagaaagctatgtcttctctccagaatgacagagatcgattactgaaggaactgaagaatctgcagcagcagtacttacagatgaatcaagaagtcaccaacttacgtccactgaaggctcaacttcaggagtatcaagagcagacaaaaaccctacagatgatgaaggagaaacttaggcaggaaaacctcaactggcagcaagagctgcatcagctcagaatggagaaggatgcctgggaacttcatgagaggcagatgaaggagcagtacattatggccatctcagataaagatcagcagctcaatcatctgcagagtctcctgagggctgagggcttcctcccaaactgagattctctccacacagagccaaagacaggtatccttggagacatcagcttccctcgatgggtacacaaaacctcattcatgaggcagaaactctcaggactcagctcaatgacaccttaaaggaaaatcaccagaaggaactaagaattcagcagctgaacatgaggctctctcagctgctcgaggaaagaatatcctctccatccagctcagtgatgccaaccagagtctccgtgaaaaccagcaccactatggtgacctcttcaggcactgtgcagtcctggagaggcaggtgcaccaactgcaggctagggggccaacaaatgtagatgttgctccaggagcgccccaggaaatgagtgaagtttgcagaaatagtgatcctgaggccacagtggagccacagccaagttttggctgaagtcaacaagaactgggtgagttaaagaagctgctggaagaagaacgagaccaaagactgactgctgagaatgcactctccctggccgaggagcagatcagacggttgcaagagcatagtgaatgggattcagcccggactcctatcattgacgcctgtggctctcatgagactgcagtgttaatagatctcccaggcagcacctgtcgaaggacccggagtggtgctggatggaagcgggttctgcgttcactctgccattcccggacccgagtgccactgcttgcagccatgtacctgctgatggtccatgtcctcctcatcctgtgtttcacaggccatctataaacttgtcacttgaccacaactctcagaacttttaattattccatctataatgacagaattgccagttccagaacagccttcccactttcaacccatctcacatctcattggaaagttcctagtaacgacagaggtggctatgaagacagg

SEQ ID NO: 3157944 - DNA, 155 bp, Cricetulus griseus
ttttttgcttttagagacagggtttctctgtgtagttctggctgtcctggaacttgctccgtggaccagactggcctcgaactcagggatccacctgtctctgcctccaagtgctaggattaaaggcatgcaccaccatgcccgctttatctttt

SEQ ID NO: 3157945 - DNA, 271 bp, Cricetulus griseus
ctgtcaaaatgaaaacaaagacctaattcatcaaagtccatagatctgggaaagtctctaaatgtactaaccttactttttggcttctgtagttctgcttctggctattcttcttgttaaatgaactatgtcaacccaagacatagtttttgtgcttaaaagttaccctgagatagggttggggctactctgggattcccaaacactcagtgtagttgcaagctagctaacagattttctattggcttaaacccatgttcaagcagccttc

SEQ ID NO: 3157946 - DNA, 423 bp, Cricetulus griseus
agatcgagttcacgcctgaacagattgaagaattcaaggaagccttcctactgtttgaccgcacacccaagggcgaaatgaagatcacgtatggccagtgtggggatgtcctgcgggctctgggtcagaatcctacccaggcagaggtgctccgtgtcctggggaagcccaaacaggaagacctcaattccaagctgatggactttgaaacgttcctgcccatgctgcagcacatttccaagaacaaagacactggcacgtacgaggactttgtggagggactgcgggtctttgacaaggagggcaacggcacagtcatgggcgcagagctccgccatgtgctggccacactgggtgagagactgactgaggatgaggtggagaaattgatggctggtcaagaagactccaatggctgcatca

SEQ ID NO: 3157947 - DNA, 985 bp, Cricetulus griseus
tcagcctcagtgatgtccatgaggcctgtcccaggctctctatcatctctgctccatctccacaacagacagaggcagcccatgccggcctccatgcctgggaccctgcccgaactgagcaccaactcgggcgacatgatggaggatgatgggctcccggcaagaccagacgcaacaccaccacatgcactcacacccgcatcagcaccagacactgccgccccaccacccctatccacaccagcaccaacaccccgctggagttcattcaactcttgccttttacaaaatagtaaccaggagatgtttaatgtgcctgatttaatgtttttaataaccagagcaaataaaaagtggtttggttataggtgaagcactattgaatgccagctgtggagacactagggaaagggactttgtaagccccaactgtgaaagttcaaattaggatgtgggctctgacatcacaccctcgaattacaactcatttctatggcctgtctataatgttgaaaaatccatgtactctataatagttcagaagggctctgttcactacacagattacattgttcaatcatcagctgctaatagcctaagatttatcattattatttttcctaagcctatggaactgtgctgttctggtgggcaaaaccaggctcactcctggagacagagagggagaaagcaaggccagtgtttctgcagggtgcttgcagtctgtgagcacagaccgactcggtggccaggctgatgcactcctgtgaacagttctgatttatattttcagcaacttccatggacttgtccattatgaaaagcagatcaaacccgagccacagttgtgcctccttgaaacaagccattccgctctgctggtgttttaatatcgtgtttcacaaataacaggggctaatgtttctcactagcagcctaggcatatgctggtgtttcatctccgcccaaatacttcacctcctaa

SEQ ID NO: 3157948 - DNA, 242 bp, Cricetulus griseus
agcgtggggaacccacccattgggggctggaaagatggatcagttgttaagagcactggctgcttttccataggttctgagatctcccagcaaccacatggtggctcacaaccatctataatgaaatctgatgccctcttctggcttgcaggcacacatgctgacaagagtattcatacagaggcaggtggatctctgtatgttcaaggccagccagggctacacagagagagaccctgtct

SEQ ID NO: 3157949 - DNA, 477 bp, Cricetulus griseus
ggagcaccagtgacaatgacattgcactgctccgcctggcccagccagctactttctctaagaccatagtgcccatctgcctgccggacaatggcctggcagagcgtgagctcactcgggctggccgggagacagtggtgacaggctggggctatcaaagtgacaaagacaaagatggcaggaggaaccgtacctctgtcctcaccttcatccgcatccccgtggtcccacgaaacgagtgcatgcaggtcatgagcaacatggtctcagagaacatgctgtgtgcaggcatccttggtgacagtagagatgcctgtgaaggtgacagtgggggctggtgggcctggtgagctggggtgagggctgtgggcaactcaacaactatggcgtctacaccaaagtaagccgctacctcgaatggatccacagcaacattggcgacaaggatgcttccctgaagagccaggggctgtagca

SEQ ID NO: 3157950 - DNA, 1453 bp, Cricetulus griseus
tttcagaaagtctccttccgtcatcctggaaatgagctatggaatgggtaagtgtcagatcgcagtgaatatactagaagagaaggtattctatgactctggaataggaagagacaaatttaagcatgatgtgcaaactctcttgcttacaagacaacgcaaggagcacggagccgaaacagattactcggtttcccccctaaattgaagatctacagaatgaggaaactgtaaagatcctgactgcaggaagcgatcgattcccacaaaatgcattcatctgtcaagctttagcgagacatttctatattaaagagaagaactttagcactgctctggtgtgggcaaatctggccaagaaaaaagctcctaagaattcctacatttcagatacacttggtcaagtttacaaaagtgagatcaaacagtggttgggcaaaaatgagaactgtagacttattagtgtggatgatctaacacatttgctagaaattgctgaaaaggcagccaaagcattcaaagattctcagcagcaaactgatagtaaagactatgaaacagaggcctggtcaccacggaagtcccaaagaaggtatgacacatccaaaccacaaaggggttgacaacatggaaaagtatagtgaaagactatgccttcctgttacagcacagcctaagcaagcgagtgacgaagggactgacaaaggagacacaaaatttcattttggccaacattattctcagttgtctaaagcccagttccaagtacatcctgccatttaacacactgaaaacaaagctccgagaagtcttggaactcgtgggcctcggtcatccatatcctgatccctatttcttggcctgcctcttattctggccggaaaacaaagagctagatcaagactccacactcatagaaaagtatgtctcgtccctgaatcgatccttcaggagacagtacaagcacatgtgcaggtccaagcagccgagcacactgttctacctggggcagaagaaggggcttcacagacttgttcacaaggccgaaatcgagcgctatgtcagtgaagttcaaaattcaaattccttctggcagagtggagtagtgtgggaaaaacgggagtcaaagacctcttgcgcctactggatggtcaggctgaaggcaagctaatctctgtagaatatggaacagaggcaaagataaaaataccagtgacttccgtgtactcgggtccactcagaaggggaaggaatatcgagagagtagtcttttacctaggattttctattgagggccctctggcatatggcataaaagtaatctaagaaggcacattagttcacaggtgttaatttacatctattattggagacactctttctagtccatagcatttgcatgacattattggctcaactgtaatcacagtttgcttctttttctctaatcagt

SEQ ID NO: 3157951 - DNA, 1543 bp, Cricetulus griseus
tttcttttgatctgagcaattttgagaccagtgacactgatgaggcatccctagaagacaacaaactttcccaggattcagagagtagagaaaaggacattttgcttacagatgattcgtgtgttcaaaagaactgtggggatataggctgccaagaaattgcacggcaacccttgccactcctgccctttgccagtggcaggcctaaagagatccttcctgctaatgaggctctgttgtcagagttttgtgacagaacctgtgtgggtttttatgcaggacttcatgaagatgcaaacactggaaaagcagtacaggagcagtgtggtgatacagggagcagttcagactcatcgcaggggtgcaatgaggatgtactagtagatagcaaagaagatgctaatacatctatccacagggatggaattagttatggtctgcctttgaaaggctatttcccttctaattggcccattaatgtaacagtccatgctttattggtttgtaatgccagcacagagctgacaactctgcaaaacattcaggattactttaacccagctactcttccaataatgccatacctgttagcaatgtctccgccagctacaattagcaataaaaatgtcaataaaagaagatttatcccaccagccattgcaaatactaaaacaaaatttgaactcaccgagatgcgaccctgcagttagctagtgagttgattgacatacacaggttgaacaaagatcaagctacagcactaattcagatagctgaaatgatggcctcccaagaaggtggtgaagtttatgtgagaaaaagcattgagcagcataagctggggaccaacagagccctactgaagcaggttcgagtcgttggcatcacctgtgcagcctgcccattcccatgcatgaatgaccttaaattccctgtggttgtgctggatgagtgcagccagatgacagaaccagcctcgctccttcctattgcaaggtttgagtctgaaaagctaattcttgttggagaccccaaacagctgcctcctacgattcaaggttctgatgcagctcatgaaaatggattggaacaaactctttttgatcgactttgcttaatgggtcacaaacccgttgtgttgcgaacccaataccgctgtcaccctgtgatcagtgccatagctaatgatctgttttatgaaggaacctcatgaatggctattcagagacagagagtcctgtttgaggaaaaatcgactgtgggagcgtgtaattcaacactgtgaaggaagggaagacggattgcaacatgcaagccactgtgaacaacagctggaccatcttcttagagactattttgaaaaacaagcagaagaaaaacagaagaaaaaggaaaaagaaaaacctaagtataactctcattaataaaaacagcaacaaaaaacatggccaggagtgttggtattgtaaattcagaatcttttttacactgtatatttttctttattgtaaagcccctgatacaaaacgttacattatttaaa

SEQ ID NO: 3157952 - DNA, 795 bp, Cricetulus griseus
ggaactcgcagaagccggccgcgctcccagcccgcccgaaaccaatgctccagggctggcccgagctgcggctggagtgggggtccggctctgcatggccccggctgcagctatgacttctttgccactcggtgtcaaagtggaggactccgcctttggcaagcctgcagggggaggcgctgtccaggcccccagcgctgctgtggccacggcgaccgccatgggcacagatgaggagggggccaagcccaaagtgccggcttcgctactgcccttcagcgtggaggccctcatggctgatcacaggaagcccggggctaaggagagcgtcttggtggcctccgagggggcgtcaggcagcgggtggctcgttgcagcacttgggcactaggcccgggtcgctgggcgccccggacccgccctcctcgccccggcctctcggccatttctcagtcgggggactcctcaagctaccagaagatgctctggtgaaggccgagagccccgagaagtcagaccggaccccatggatgcagagtccccgcttctcaacgcccccataccagactctacagtgcctctggccctttccagcgcgcggcgctgcctgtagcgcctgtgggactctacacggcccatgtaggctacagcatgtaccacctgacataggtgggttcagagtcgcctccctgtggtgccactaccccacacccccagccacctcttctagcagctggaatccttcgtaggaagccccacaccgcctggtcccttctcttaagcccccttactaca

SEQ ID NO: 3157953 - DNA, 192 bp, Cricetulus griseus
aggttttactggctcaatgcaatccttctgtgagggattctttgaccagaggagaatactgcaaaaaggaagaagacaatcttctcttctacagtttgtctgaagcagtggcttttgcagtggactctcagaagcagaaaggagtgtgtgttctcaatggcctgagtctttctggtgactgagaaagtaaat

SEQ ID NO: 3157954 - DNA, 3352 bp, Cricetulus griseus
ccagaaatacattttcaaagcatatagaacaactcaaacaggaacatataagaaaaaggagagaagaatatataagtactttaccaagggcttttaatactctcttgcctgatctagaagagattgaacatttgaattggttggaagctttgaagttaatggaaaagagagcagatttccagttatgttttgtggtgctagaaaaaacaccttgggatgaaactgaccatatagacaaaattaatgatagacggatcccatttgacctcctgagcactttagaagcagaaaaggtctatcagaaccatgtacaacatctgatatcagagaaaagaagaatagaaatgaaggagaaattcaagaagactttagaaaaaattcagttcatctcacctgggcaaccatgggaggaagttatgtgttttgttatggaggatgaagcattcaagtacatcactgaggctgatagcaaagaagtatatggtaggcatcagcgagagatagtgtccttttgtagatgtacctgctggtacatatcctcgtaaatttaatgagtcacaaataaagcaagctctaagaggagtattggaatcagttaaacacaatttagatgtggtgagcccagttcctatcaataaggatgtgtcagaagctgacttgagaattgtcatgtgtgccatgtgtggtgatccatttagtgtggatcttattctttcacccttccttgattctcattcttgcagtgctgctcaagctggacagaataattccttaatgcttgacaaaattattggtgaaaaaagaaggcgaatacagatcacaatattgtcataccactcctcaattggagtaagaaaagatgaactggttcatgggtatatattagtttattctgcaaaacggaaagcgtcaatgggaatgctccgtgcatttttggcagaagttcaagataccattcctgtacaactagtggcagttactgacagtcaagcagatttttttgaaaatgaggctatcaaggaattaatgactgaaggagaacacattgcaactgagataactgctaaatttacagcattgtattctttatctcaatatcatcggcaaactgaggtctttactctatttttcagtgacgttctagagaaaacaaatatgatagaaaattcctatttgtctgataacacaagggaatccacccatcaaagtgaagatgtttttctcccatctccaagagactgttttccctataacaactaccctgattcagatgatgacacagaagcaccacctccttatagtccaattggggatgatgtacagttgcttccaacacccagtgaccgatccagatacaggttagatttggaaggaaatgagtatcctgttcatagcaccccaaactgtcacgatcatgaacgtaaccataaagtgcctccacctattaaacctaaaccagttgtacctaaaacaaatgtgaaaaaactggatccaaaccttttaaagacaattgaagcaggtattggtaaaaatccaagaaaacagatttctcgggtacctttgccacaccctgaagatgtggatccttcagataactattcggaaccccttgacacaattttcaaacagaagggctatcctgatgagatttatgttgtcccagatgatagtcagaatcgaattattaaaattcgaaactcatttgtaaacaacactcaaggagatgaagaaaatgggttttctgatagaaccttgaaaggtcatggggaacgtaggccttcaaaatacaaatataaatctaaaactttgtttagtaaagccaagtcatactatagaagaacacattcagatgctagtgatgatgaggctttcactacttctaaaacaaagagaaaaggaagacatcgtgggagtgaagaagatccactgctttcacctgttgaaacttggaaaggtggtattgataatcctgcaatcacatctgaccaggaggtagatgataagaagatgaagaagaaaacccacaaagtaaaggaagataaaaagcagaaaaaaaaaactaagaccttcaatccaccaacacgtagaaattgggaaagtaattactttgggatgcccctccaggatctggttacagctgagaagcctataccactatttgttgaaaaatgtgtggaatttattgaagacacaggattatgtactgaaggattataccgtgttagtggaaataaaaccgatcaagacaacattcaaaagcagtttgatcaagatcataatatcaattctttagttatctatggaagtgacagtaaatgctgtagctggagctctcaaagctttctttgctgatctgcctagatcctttgattccatattcactccacccagagctattggaagcagcaaaaatcccagataaaatagaacgccttcatgccttgaaagaaattgttaaaaaatttcatcctgtaaactatgatgtattcagatatgtgataacacatctaaacagggttagtcagcaaaataaaatcaacctaatgacagcagacaacttatccatctgtttttggccgactttgatgagacctgattttgaaaatcgggagtttctatctaccactaaaatccatcaatctgtcgttgaaacatttattcaacagtgtcagtttttcttttacaatggagaaattgtagaaactacgaacactgtgcctcctcccccaccttcaaatccaggacaattggtggaatcaatggtaccacttcagttgccaccaccattgcaacctcagctaattcaaccacaattgcagacagatcctcttggtattatataaacagaatgtgattgcaaatgacctgaaattggacaaaagcaaatctagacatgcatgtttcagggtttagtagtatatttcatgtttcatacagatagtccacaatcaaaatgacaagacattttctctttgaactatatggtattccctgttcacttacattacagatctaaaaccgtggtaagcatgactggaaaggtttaatttttataaaacaaaaaaaaatagttataaaaatgcaaagctgctgctgcatgcaaccttattgcaatcagaatatcattcctgtggcaatttctgtcacattatattgtgaataaaatttttctatagaattaaatgatttaaaaactcatatgaaacgtttaatgctttcagcctgctttatggctggttttgttatttgatgtgctaatttgggaatttaatttacattcaagcagtctgtagataactaaagcccagttaagtattttataatttcaggctactatgccatgcttggatgt

SEQ ID NO: 3157955 - DNA, 816 bp, Cricetulus griseus
cagctaagcacgacccttacgaacaacgtgactcttcccagcggtcctcggtgggacacttgaggaacaatttccagcagaagcattggagcaacacagaactggagcaggaggagggtgtctccacttacccccaaaggaacatctgggcgccaaagcccggaggcactcctgcccccacagtgccaggatcagccagcgaagcccagggagcaatccccagggccaaggaaaggctttgtcttccttgtcaagccctccgccccggtatcacaaagcaaacgaccaggacttcattccctttaggaagaagcgaattggcgtggaccgggcatacccactgaaacccatggtccaccggaagtctctcagtacaggcgaggcaggcactggtgatggagaccagaatgtctacccaagacttcctgagttttcagacagcaactttggtttgaggagctgggtgaattcatcttttaattcttgcctctgtgccaggcaggaggaggtccctcggaagagcacctggagacagaagcatgagtcttttatccgtaccctccgccacgctcgccaggtccagcaggtcatcgccaaaggtgggaacccctcagacttgcctcctgtcctgccagccgaaaacccagactatgtccagtgtcttcactgcagccgccactttgctcccaaggtggctgaacgacacatacctaagtgtaagaccatcaagaaccgtcctccacctccaaggaggtatgacagctgagcagacaaaggcagaaattctcgcctaagtctcggtaggtgaggactgca

SEQ ID NO: 3157956 - DNA, 867 bp, Cricetulus griseus
aggcccggactgttgctctgacgacctgagtcctgaggcctcaggcatgcacccggacctcctggagctggcagtggacagagagaagtgccgcagcatccgcaggcagtaccgacagctcatctacaatgtacagcagaaccgcgaggacatcgtgaacacagccagcgactcgctgaccgaggccctggaggaagccaatgtgctgtttgatggcgtgagcagaaccagagaggccgcccttgacgcccagttcctggttttggcctctgatctgggtaaagaaaaggcaaagcagttaaactctgatatgagcttttttaatcacgttgtgttctgtgacttactgttggtgtttgtgggcctgaattgggtggaagaccagtgtgaagagctgagcgactgcgatgacaccattgcacttgccttttgggggatggtgcagaaggaagcaacatcctggatgcgctggacatgcatgctaatcaggagacgacagaaaaagaagtagaaagaatcttgggattgctgcaaacctactttcaaaagtaccccgataccccagtgtcctattttgagtttgtggttgacccaaactcattctctcgcactgtggagaatatcttctatgtttcttttattataagggatggctttgcaagaataaggcttgaccaagacagactgccaatattagagccaactaacgttaaccaggtggatgaagaaagtgatccctgttcctatggcaggaagcaaggagttatatctttgagtttacaagactggaaaaatattgtctccacttttgaaatttcagaggctatgatcaaaaactcatgctaaagatttttgtttgtagtgtat

SEQ ID NO: 3157957 - DNA, 150 bp, Cricetulus griseus
tctataacagtggttttcaaccttctaatgctgctacccctttaatacagttcctcatgctgtggtgaccccaacgataaaatcattttgtagcaatttcataactataattttgctgttgttatgaatcatagtgtaaatatctgatat

SEQ ID NO: 3157958 - DNA, 669 bp, Cricetulus griseus
  modified_base (662)..(662): a, c, t, g, unknown or other
gttagagatgacgtcacttccccaaagtgactgcagtagctgagaagtgacaacagagaggcagaagagaacccagggcattgaagcagacaggactttctgagggtcacaaagaaacatggcaggcagcccagaggtggtggccatggactgtgagatggtggggctagggcctctaagggtaagtggccttgcccgctgcagcatcgtgaacctcaatggcacagtcctgtatgacaagtacatccgacctgagggagagatcacggattatagaacccgagtcagtgggatcacgcctcagcacatggtgagggctacaccatttgtcgaagccagactagagatcctgcagcttctgaaaggcaagctggtggtgggccatgacctgaggcatgacttcaatgcattgaaggaggacatgagcaactacaccatctatgacacatccacagacagactgctatggcatgaggccaaggtggaccattgcaagcgtgtgtccctgcgagtgctgagcgagcgcctgctacacaagagcatccagaacaactggcggggccacagctctgtggaagatgccagggccacaacggagctctacaaaatctctcagagactcagaacaacaacaacaacaacaacaacacaaaacaaaaaanaaaaaaa

SEQ ID NO: 3157959 - DNA, 243 bp, Cricetulus griseus
ccaggcctgaggtccaacaagcacccaatggatgacaaaaagaagaaacggagtcctaaagccctgcctggcccaaccagcacaggcctcaggcacactacggagagtccctgtgcccaccagccacagtggttccttggccctaggactccctcatctgccatcacccaagcagcgaaccaagttcaagagaataggcaaggagaaatgccgaccggtgctggctggaggtggaggcggctc

SEQ ID NO: 3157960 - DNA, 2282 bp, Cricetulus griseus
  modified_base (2275)..(2275): a, c, t, g, unknown or other
agaggagcactaaaactgaccacagggaagtgcatgaagcaataaagcacatattgaaggatcaaaactggatagaaactttttctaaagatgcttctggagatttagaaacaggatccaaaacaaggctggggttcagcatccacactgactgaatagctgaaatggaagtccatgggaatccaccaccagctgatgaaatacctgccaagtgctctaactataaaatattctgacttcaagggtcctagtaagtgccacttccacgaagaatacagtttgaatgtattatcagtagtgttttacaagatccaacagtgcactcatcattaattagcaaagcaaatatgttcgtcactgtggggcagccgctgtaatgccaagcacactggaagaggaactcaggagcatcacgactcggagcttgggaaattaacatccttatccgcagaaatgaagaagaaaaagaattcaaacagtgaaatccatgagatgaagtaacttgaaggaatgtcttcagtcaggacactgagagtgatcatgtgtgtgttttgcttgtgttttgtttgtcttctgaaacttgttttctcttagatgcattgggtagtgccttttaacgtcttcaacccattcttcagccctgttttgtgttctctaaacgcttgcccagttaggaaaatgctcagcatcaaaagggcttcagatttgaaagaaaactacttttgttcatctcagggaactttcaatacacaagaatgaaatcagttaaaggtatttagcgctcagagaagaagtactgtgtgagatacttgaagtatctgtgttttccttaatatcatatgcccacagctttatggttttatttccttttcatgatttaaccatgcacctgggaatgcccaggcagctgactgtgatgtatcccagtcacggaggtaacatggttgccactgtgctattgacacgagtagaccatgggaatgctctcattattattactcagcatgatctatacttaccaatcagttgctgaaagaaaatgggaaccagtaacagatttttcagggcaaatcttgtgattcagcccacaggaataatgaaactactgtggaagattttttcactgggagacggtgctgggcattcaaatgtcttcatgtgttgtatatcatacgaactgtatatctactgttaaaggaaatatctacatatatgcttacagaaatgctttatttaacaaatgctaagggtagtgtacagaccaacaagttcctcagctactcctcaggaaggggcgagcaaagcgatttatttctagttgtgccagtgagtcataaagcatactatgtgatatctttggttcacagagttgttttcatgtgtttattgtaaggactatctatagctgtgcaagggggatgggaaaagttgtgtatagttagccgttctctctacaagtttggaagtttccccattaaatgttatcagtataccaaggttttaataaaaacaggtaaaggtgattgtttgtatttgataaacaaactccaaatacaacccatctagaaatagatattttattatatatgtgctataaatatatctctatagtacaaatagacatgtgtgatgcatatataccatgctatatatgtatatctgtgtatacacacggagtctgtaatatgtgcacaaacagatgtgtgttatgctgacgtcttcagggtctgcactgtgaacttccctggagatcatgaccactttaaaaacagaagttcttttgagacttcatttactactctgctttaagaaagacctactttatagctgaattacatgttctttcctagcgtaatagtaagagattagtatgttcaaatctttccagacaaaagtaaagaaaatatatatatatcttcaagttggcaatgtatttaaattgcgtattttctgattgtgggtctaggctgtgtgtttctcctttatgtagcaccttttaagaaatactgtgtgtaggtaaaagcacaagtgttctaaatgtatatagcaggaagaaaaaaggagtttacagatagctctgctgcatatgataattgctactgagtctttcttataccatcagtggaatgggaagatgaagcttatgccgtaggttcattctggtcaacactgttccctgtcatgtgtgtatagtgattagctattcttgctttatcatttgtacaattgtaaaataaattaaattacttttttccaaataaaaaaaaaaaaaaanaaaaaaa

SEQ ID NO: 3157961 - DNA, 614 bp, Cricetulus griseus
ggctgggctagcagatttgaccttccatgttcttgtgctttcacaagagtctgtctcttccagagttcattcccgcagagcccagaatcttgagttgcgtccacgatgagcagcatgactcagaatatacgggagctgatgaaggtcttgttcagagttcccggttttgatagagttttggaaaaggtgacacttgtctctgctgctcctgaaaaattagtttgtgaaatgaaagtggaagaacagcatgctaataagttcggtactctccatggaggcttgacagcaaccttaatagatagcatatcaactgtggctctgatgtgcacagaaagaggagcacctggagtcagtgttgacatgaacataacgtacatgtcacctgctaaaataggagaagaaatagtgatcacagcacatattctgaagcaaggaaaaacacttgcatttgcctcggtggatctgaccaacaagaccacaggaaagttaatagcacaaggcagacacacaaaacacctggggaactgagggaccagcagggtgaccggaaaaagcccaataacaattaagagtatgatttgtaaacaaccttctgaaaataaatatttaaaacc

SEQ ID NO: 3157962 - DNA, 4088 bp, Cricetulus griseus
aaggccagcacctacggactcaacttactagcctgctgcagcccagcggaggccacgcggccgggggacggccgggcggacggtggcgggggcgtgtacagcgggaccccgtggaagtccggaggaactacaaccagggagtcgtgggtctgcatgaagaaatcagtgatttttatgagtacatgtctcccaggcccgaggaggagaagatgcggatggaggtggtgagcaggatcgagagtgtgattaaggagctttggcccagtgctgacgtccagatatttggaagttttaagactggcctgtatttacctactagtgacatcgatcttgtggtctttgggaagtgggagaacctgcctctctggaccctggaagaagcccttcggaaacacaaagtcgctgacgaggattccgtgaaagttctagacaaagctacggttcctattattaaattaacagattcttttactgaagtgaaagttgatatcagctttaatgtgcagaatggcgtgagagcagcagacctcattaaagattttactaagaaataccctgtattgccgtacttggttttagtattgaaacaattcttattacagagggaccttaatgaagtatttacaggtggaattggttcttatagtctctttttaatggcagtcagtttccttcagttacatcccagggaagatgcctgcatccccaatacgaactatggtgttctcctaatagagttttttgaattatatggacggcacttcaattatttaaagactggcatccggataaaggatggtggttcctatgtggccaaagatgaagtacagaaaaatatgcttgatggctaccggccatcaatgctttatattgaagatcctttacaaccaggtaatgatgttggaaggagttcttatggggccatgcaggtgaaacaggcctttgattatgcctatgtggttttgagtcatgctgtatcaccgattgcaaagtactatcccaacaacgaaacagagagcatattaggtagaataattagagtgacggatgaagtcgccacatacagagattggatatcaaaacagtggggcttacagaataggtctgagccatcatgcaatggaaatggtgttcccttgatagtagatactcagcagttagataaatgtaataataatctgtctgaagaaaatgaagcccttggaaaatgtagaagtaaagcctcggaatctcttagtaaacactcttcaaactcttcatcaggtccagtgtcctcctcctctgccacgcagtccagctctagtgacgtggattctgatgcaacgccctgcaaaactcccaaacagctgctctgccgtccacccgctggcaaccgggtaggctcacaggatgtctccttggaggtctcacaggcggttgggaaagtgcagagcacccaaaccactaacacacccaacagcaccaacaaatcacagcatggatcagcaaggctcttccgttcttccagcaaaggcttccaaggtacagcccaaacaagccatggttccttgatgacaagcaaacagcatcaaggcaaatccaatactcagtattaccatggcaaaaagaggaaacacaagagggacgcgcccctctcagacctttgtagatagtcggcgctgtgcgacggactgtcttctgtgtgcaatgatctcgtgctcaggacagttgcacagggactcctgggacggcaggagcctcacactgttcagacgttgatttagcaactgcgttttttcccagctcgccacggaatggatcatgaagactgacaactgcaaaaacaaaaagcaagcaaaaagggggaaaaaggctgcttatttgataagtcatgtgctacaacagggtcattttaagatttaaagcttgaatgtaaaataaatatatttctcattggctttatgcagagttctagggactagtactcagtgtggggagggtgagaggaacaaaaagcagtttcaaggagatgggtgggaaggccaacaagagcatctcataggaagccagattccaagagggaaagtgatttgtgcatgttttttttaaataattttgcatatatttgccattttattgtgtgtatatatagaagaccatataggaaattgatatttgtaatagtggatttgttaatactttttacataacattactgtttgaattgtaaacagattttttctcaggattagtttgaagaataatctgagttgtcatcctaacactcattcacagggaagtgattagctctgttcctcggtttgttttcctcagcattgagatgacttcattgaacccgtgtgacctgctgcaaaattctttcctctctaaagaaaaggtttatggtggcaaatgatgtttattttattttgtaaaaaagaaaaaagtgtactctgtacttcgtgtatacactgaacattctctggtcatctccgagaattgactcagctgtgctcgccaatgctgctgtcttcttgggtgctgggcagtagcaggactgtgtgtgtgattccttcgcagtctcttccctcccctcttctgcctcctaggaaacgaaaggccaccctgggcctgggctgttcctatcacagtgtgacctctagctccacagacctacctcgcatgctggctcctctgcccccgtgtgctatgtgcttgtggtgtcatctctcattctttttaagttcatgcttactactgtgggagagagtaattgtaaacagctttaattaaatcacacttataaaaactattttcttatactccactttatgcttttggtattgtcgatctttaaaaattaaatggtctttgataatggatcgattttgtattgccttattaagaccaaatacttctgtcatcccattctttatcctctctgttaatggaattgctgtctttaattaaactttgtaaacactggcttgttttaatcatcctgtaacttttggctgtggtcagctgtgagtgcaaacgtgtaaccctgttattcatcgcctgctgagtctgagactcaggtgggatatttaacataatggattgtacgcttgtcatcaaagtggtttttggaggtgaaagccctcatgtctagcatcagtgtgtgtggctctgttcagtatggccatttccgagatgagattcctttatatatgtatgtgtgtgaagtactgttggcttttagggatttcttttatatatacttatgaaatactgaagaccaatcagaccattaatggacacttagtgcaactttctgtaatgagaataatgctataaagtaagaccaaaactggtgtcattgctgaaattaacaattttcaatatgttcatattttaatttacaatggaaaaatgtgttccacaactggaaactcacagtactgtgtaaactgtggaagattttaaatgtgatattattttgactgttttaaattttagagtcacattttattctgatcagaatttttatcaagatgttgaagttctgttgttttaaaactagtttgtcataacatattgtgcataatcacagtatttattttgtagggcttgtgaatgtgtagacttatgtttactgctaagggaacaattatttataaaataatattaaatccagtattagctgcctatttcagacacttaacacctgcagagatctgtgttacatttaccacactgaagtttttttaaagagtcaccctcattgttgaaagtaaatgtactcttagggtgggatattagtgtccaataagcatgtgattatattaaggtggtggtagcgggaagataatcttgattccattgggaatcttaggttttcgtaaatttattgggaaaatagtttttcctgtactgctgacgtttctttttggtaaacagtatctttctaaaagaaaaagcatgaaggagaattgaggtgtatacgtttcctcagatgaccagcattgtactcgtgaatactgtgtatctggaatgaacagcatggaagctgttcatttttcaatctgaagtaaaatactttcaagaaaaaaaaaaaaaaaaaaaaa

SEQ ID NO: 3157963 - DNA, 1734 bp, Cricetulus griseus
ccttggagttccaggcccagatcaccaccctgctggtggacctgggcacccccaggcagagatcgcccgcaacatgcccagcagcaaagactcccgaaaacggtcccgggatgatgcagactccacgctgaagaagatgaagctggagcccaacttgggagaagatgatgaggacaaagacttggaacctggcccatcagggacttcaaaggcctcagcccagatctcaggccagtcagacacggacatcactgctgagttcttgcagcctctgctaacacctgacaatgtggccaatctggtcctcatcagcatggtgtacctacctgagaccatgcctgcctccttccaagccatctacaccccggtggagtctgcaggcaccgaagcccagatcaagcacctggctcggctcatggccacacagatgacagctgcaggactgggacagtgaagcagtgtctgtatctctatctggctctcctgcctcagaaccacaagctgatccacgagctggcagccgtgtacactgaggccatcgccgacatcaagcggaccgtgctgagggtcattgagcagccgatccgagggatgggcatgaactccccagagctgctactgctggtggaaaactgccccaaaggggcagagacgctggtcacccgctgtctgcacagcctcacggacaaagtgccgccgtccccagagctggtaaagcgggtccgagacctgtaccacaagcggctgcctgatgtacgcttcctcatccctgtgctcaatggcttggagaagaaagaggtcatccaggccctgcccaagctcatcaaactcaaccccatcgtggtaaaggaggtcttcaaccgcctgctgggcacccagcacggtgaagggaactcagccttatcccccctgaacccaggagagctgctgattgctttgcacaacattgactccgtcaagtgtgacatgaaatccatcatcaaagccaccaacctgtgttttgcggagcggaacgtgtatacgtcggaggtgctggctgtcgtgatgcagcagctcatggagcagagcccgctgcccatgctgctcatgcggaccgtcatccagtccctgaccatgtacccccgcctggggggcttcgtcatgacatcctggcccggctcatcatgaagcaggttgttggaagtaccccaaggtttgggagggtttcatcaagtgctgccagcgcaccaagccccagagcttccaagtcatcctgcagctacctccgcagcagctcggcgccgtctttgacaagtgccccgagctccgggtgcccccggcttcctcccccgtcagcggccccggccccggctcctgctcctgctccgcggccccctcaggacctcatcggcctgcgattggctcaggagaaggccctgaagcggcagctagaggaggaacagaagctgaagcccccaggcgtgggggtgcccacggccccggcaccctcctccatgcccttggtgctgccggcagcccgagccggccccaccccggctgaggaggccatggagtaccgggaggagggtcccgagtgtgagaccccggccatcttcatcagcatggatgatgactcagggctggccgaaaccacgctcctcgactccagtcttgagggtcccctgcttaaggaggcagcagcagtcggacctggccccaaggacgagcggagtccccagagtctcggccacgctg

SEQ ID NO: 3157964 - DNA, 444 bp, Cricetulus griseus
agaaggagcagacattggaaagaaatctacaaagcctccaacacaatggcccttggggtgacctcctctgtgccctgtcttcccctccccaacatcctccttatggccagagtcaaatggcatcaggggcagagccagacatggaacagaccatccacagccccgagcatcatcctgaagagcattctccctttgaagtttgtggagctccagatctgtgaccaccatgaacgcatcctgaggttgaggacagtcaccgagaagatctacttcctaaagctccaccctgaccatcctgagactgtcttccttttttggatccgcctggttcaaattctgcagaagggtctgtccatcaccaccaaggaccctagcatccttgtcactcactgcctggtacccaagagcctctgcaacccatgtgggaagtctgagttagtgcag

SEQ ID NO: 3157965 - DNA, 602 bp, Cricetulus griseus
ggcttagaagggccagttgtggctccattgggtggaaaccttgaactcagctgtcagttattcccatcacaagatgcacagcacatggagattcgttggttccggcaccattatacacagccagtacacctttacagggatggtaaagacatatatggagaaactatcttgaagtatgtggaacggacagaactccttaaagatgccattggagaaggaagagtgaccctcaggatctttaatgtgactgttgatgatgatgggccataccactgtgtcttcaaagacagcaatttttatgaagagcacatcacagaggtcaaggtcacagctgtgggcttgcaggtacagattcatgttcatcctccaataccaaaggtgtaatagtggaatgtaactctggaggttggttcccaaagcctctcatggaatggagggacagcagaggagaggtcattccagctgcaacaaaatctcattctcaggatgaaggcaaactattcaatataaagatgattcttctcattagagacagttcctccccaaaagtcacttgctaccttcagaaccctttgacaggccaagagcaaaggaccagtgtt

SEQ ID NO: 3157966 - DNA, 1224 bp, Cricetulus griseus
tggcccagcggccgtggatcttaggctgagggagtgaggggtactcgctgagtgagggcctcgcggccgtgccctgcgatggagcgggcgaagatggcggatgagagcctggagacggcggcggagcacgagcggatcctgagggagatcgagagcacagacacggcctgcattgggcccacgctcaggtctgtctatgatggtgaggaacatggacgattcatggagaagttagaaactcgcatccgcaatcatgaccgagaaattgagaaaatgtgcaactttcactaccagggctttgtagactcaattactgaactgctgaaagtacgggggaagcccagaaactcaaaaaccaagtgacggatactaatagaaaactgacagacatgagggcaaggaactggtaatagcaatggaaaaagctgaagcagtgtcggctacaacagagaaatatttactgccactgggaggacacgctgcagttggccttcatcgacttgagacaactattggacctcttcattcaatgggattggtccacataccttgctgactatggacaacccaactgcaagtacctccgggtgaaccctgtgactgctctgaccctgcttgagaagatgaaagatactagccgcaagaataacatgtttgcacagttccggaaaaacgagcgtgacaagcagaaattgattgacactgtggccaagcagctccgaggactcatcagcagccaccattcctgaatgtcggccttgggcccacaaaggacatttgccgtagcccatggtccaggatctcccctggactggccctgcatttgtgcattcttcctcaaagagagcatatgtattttttataacccctgtacagtattcacataacctttccctatagtaagagaggcacaatccaaggccccacaaattcagtgggtacctagtactgggagttgaaatgaggaagtaaaaggatcataatatgtatcctatttgctctcaagtactcgcttaagtgcataggagagcctggcagacatacctatgtactataccaaagccagccttagtttaggatatccatctgcctcattggctgacttattggctcataagtgtgtgtcgtgtggcaaaatgacagtttcactttggaccccataggtggcagtttcattaatatagtctaacccagccttgtggctggagagaggtagttagctga

SEQ ID NO: 3157967 - DNA, 871 bp, Cricetulus griseus
gagaagtccaggccttctatgaggacttgagtggaagacagtatgtgaacgaggtcttcaacttcagcgtggacaaactctatgacctgctgttcaccaactcacccttcctccgggacttcatggagcagcggcgcttctctgatatcatcttccacccatggaaaaaggaggagaatggaaaccagagccgtgtgatcctctacaccattacccttaccaactcccctggcctacccaaaaccgccactgtcgagggagacacagaccatgtacaaagcgagtcaggagagtgaatgctacgtgatagatgctgaagtcctcacccacgacgtgccataccatgattacttctacaccatcaatcgctacacgctcacccgcgtggctaggaacaagagtcggctcagggtctccacagagctccgctatcgaaaacagcctaggggtttgtaaaactttcattgagaagaacttctggagtggattggaggactactttcgccatttagagtctgagctaaccaaaacagagagtacctacctggctgaaatgcacagacagtcacccaaggagaaggccaataagtcttcagcagtccggaggaggaagcgtccccatgcccacctgcgggtacctcacctggaagaggtgatgagccctgtcaccacacccactgatgaagatgtgggccacaggatcaagcacgtggcaggttccacgcagacgcggcatatccccgaggacactcccagcggttttcacctacagagtgtgtccaagctgctgctggttatcagctgtgttctggtgctgctggtcatccttaacatgatgctcttttacaagctgtggatgctggagtacacc

SEQ ID NO: 3157968 - DNA, 240 bp, Cricetulus griseus
cagttgtcacttttcctttctcctgtctttttgccatgggtagaatccatttctcaccctcccaacatgactgtttctctaccactcaggaatttggaagtgggggttctgggagcctgccttcctaccaagttctccgagtaattctgatgccaataaaacaggagaacgttggttttgaggcctatttggtttcgttctttctttctttctctctctctctgtctctccctctccctc

SEQ ID NO: 3157969 - DNA, 360 bp, Cricetulus griseus
ccttaccatctggtgaacctggtggaagcgggccgcgcgctggcgggctgggaccaggacgactccgcggggaagcgtctgaagctggcccgctacgtgctcatcgcgctggccttcctgagcagcagcgtgaacccggtgctgtacgcgtgcgccggcggcggcttgctgcgctcagccggctttggcttcgtagtgaagctgctggaggccaccgcttctgaagtctccagcacccgccgcgggggcaccctgtgccagaccccagaagtccatacccgcctgtcctgagccaggccccactgacagcttcatcgacctcctccaacccctcctgagcgaagtgaactgtagtaggct

SEQ ID NO: 3157970 - DNA, 607 bp, Cricetulus griseus
tcctccagcagttcagagctctgcctcagctaaagatacaagaaagaagaaacgagggaaggccagaagtgaagaagtagagaaagtagtcaggggccagcaaactcgtgacaggaggagagaaggaggaagggaggaacaaaggcaccaggaagggaggactgacagagaaaggtctgacagacacagagctcaaaactcacgaaatgctgactgtagagatcccctagcaaagtacatgacggacagaagccgaactaaagaagaagcgtcgagaaagaagagattcttttctgaaaatgagaagcaaagaacccgaaatcaggacagtgaaagtgttagaagaaaacatcgctccaagtcaagggaaaggagtagaaaacactcaggccataaaagcgatgatgacaggtatcagaatggtgccgagagacggtgggaaaaatctaccagatactctgaacattctagagaatcaaagagaaatcaggaccggaggagagaaaagtctccaacaagacaaaataattctaatgacaactgagtatgccttacattcacttgcgaagtcttttacatggatggatttatagagaattcttgtata

SEQ ID NO: 3157971 - DNA, 804 bp, Cricetulus griseus
cccatcatggaacggccttggaagtatccccagcacagacatctatagaagtatcgcacattacaaaaatcttgaagagcctgaaggagtgaagattctgagtattttctagtcccattttttatggcaatgttgatggttttaaaaaatgtgtcaagtccacagttggatttgatgccattagagtatataataagaggctgaaagcattgaggagaatacagaaactcatcaaaaaaggacaactaagggcaacaaagaatgggatcataactgatgttggctcttcaaataatgcttttgaacctgatgaagacattgacgagccagaggaacttgatatcccaaccaaagaaattgagattcaagtggactggaactactgaactcccggttaaagtgaatgtccccaaagtgccaatccacagcctggtgctggattgtggagccgtgtctttcctggatgtggtcggagtgaggtcacttcgaatgattgtcaaagaatttcagagaattgatgtgaatgtgtactttgctttgctccaagacgatgtgctagaaaagatggaacagtgtgggttctttgatgacaacattagaaaggacagattctttctgacggttcatgatgctatactctatctgaagaaccaagttaaatcccgtgagggccaggattcccttctagagacgatcactctcattcaagactgtaaagatcctcttggtctgatggaagcagagaagaatgaggaagaacttgatgttcaggatgaggccatgcgtagacttgcttcctgagag

SEQ ID NO: 3157972 - DNA, 354 bp, Cricetulus griseus
tttcaagagctgatccaggtaggagaaacccaaagccaagtggaccttgcagttggataagaacattttacctaatggcatggcccagggatggaggcagtaccagcagacaggaattggcaggttcctgtgttccatatgtgacagatactgggtttctgcccaagtgaaaatcctgtgccacctgtaccgggagcctgggaaatctcagggccaggtgctcatgaggatcttcggtcagaggtgccagaagtgtactaggtctaagtttgagaatcctgaattctccatggagaacatccaaaggattctggagaacctagttagttatattctgcggaaatactatggaca

SEQ ID NO: 3157973 - DNA, 1032 bp, Cricetulus griseus
agcagcgaacaacttcgactcttcgcatttgaggcagaagtcaatgagaactacgaaatggcagcagtatattatgaagagaggttggtccgtgagccccagaacttggatcactggctggattatggtgccttctgcctcctcacgaaagacatcactaaagcacaggagtgtttcaggaaagctctttccctgaatgagaatcacattcacagcttgttgctgtgtggtgtcctggctatcttgttggagaactatgagcaagcagaaattttcttgaggatgctacatgcttggaacctacaatgttagcccctgccacaatcttcatggagaccattcgcttcttgatgaaggtcaatgcggtgcagtttgtacacagagtactggcacatgagctgctgtgacctcaaggaggacccagctgtgaatattatttggttctggcccagacacaccttctcaagaaggactttgccaagacagaggagtaccttcaacaagcggcccagatggactatctgaaccctaatgtctggggtgtgaagggccatctctatttcctgagtggaaatcacgctgaggccaaggcatgctatgaacgaaccgttagttttgtagttgatgcttccgagatgcacttcatcttcctacgactgggacaaatctacctggaagagaaggagtatgaaaaggcaaagacaacctacatgcaagtctgtaagagatcaccttcatgcctgacatggctaggactaggaattgcctgttaccggctggaggagctcactgaggggatgctctctctgaagcaaatgcactgaataactacaatgctgaagtgtgggcctatttggctctggtctgcctgaaggttggacgacaactggaagccgagcaggcctacaagtatacactaaagctgaaactgaaaacgaggctctgcttgcagaaatcaacagtgtgcaggaaatggttggctttggagatccgtctttctgacgttcggacaagtaggagtattcagtatgg

SEQ ID NO: 3157974 - DNA, 2507 bp, Cricetulus griseus
ccacttcagtgaccccatgtacaaatgtgagtgccagactggctatgccggtgacgggctcatctgtggggaggactcagacctggatggctggcccaacagcaacctggtgtgtgctaccaatgccacctaccattgcatcaaggacaactgccccaaactgccaaattctgggcaggaggattttgataaagatggaattggagatgcttgtgatgaggatgacgacaatgacggtgtgagcgatgagaaggacaactgtcagcttctcttcaactccccgtcagttagactatgacaaggatgaggttggagaccgatgtgataactcgcccttatgtgcaccaacccagcacagattgacaccgacaacgaacggggaaggcgatgcctgctctgtggacattgatggggacgatgtttcaatgaacgagacaactgcccctatgtctacaacactgaccagagagacacagacggtgatggtgtgggcgaccactgtgaatgatgatggccaccagaacaaccaagacaactgcccatacatctccaactccaatcaggctgaccatgacaatgacggcaagggtgatgcttgtgactctgatgatgacaatgatggtgttccagatgacagggacaactgcagactggtcttcaacccagatcaggaagactcagatggcgatggccgaggcgatatttgtaaagatgactttgacaatgacaacgtcccagatattgatgacgtgtgccccgagaacaatgctatcactgagacagatttcaggaacttccagatggttcctctggatcccaagggaactacacaaatcgatcctaactgggtaatacgtcaccaaggcaaagagctggtacagacagcgaactcagaccctggcattgctgtaggttttgatgagtttgggtctgtggacttcagtggtacattctacgtcaacactgaccgggatgacgactatgctggctttgtctttggctatcagtcaagcagccgcttctatgtggtgatgtggaagcaggttactcagacctactgggaagacaagccaagtcgggcttatggctactctggcgtgtcactcaaagtggtaaactccacgactggtactggcgagcatctgaggaatgccctgtggcacacagggaacacagaaggccaggtgcgcacgctatggcatgaccccaaaaacattggctggaaagactataccgcctacaggtggcacctgactcacaggcctaagacaggctacatgagagtcttagtgcatgaaggaaagcaagtcatggctgattcaggaccgatctatgaccaaacctatgctggcggacggctgggcctgtttgtcttctcccaagaaatggtctacttctcagacctcaagtatgaatgcagagatgtctagagagcaaggctacagttccatccatgtgctacagacactgtttcctagaaaagtcggtccgtcttgatacttgcagcttctttctcttttggcatttcctgtttcttgaccttaactgagtggatcttcacctccttcatcagcaccaagtccaagtgccttcaaatgacaaataatcaagggagctgcaagataggcatctagcctgcttctgggaaaagttaaaggaactatgagactcactgtggagtgaaaaccgagcatgttgctgcattgcctttccttgtttgtttaaaaagaatgacgtttacatgtaaaatgtaattacttgcagtatttatgtgtatatggagttgaagggaatattgtgtataagtcattctcataaattaagcatgaaaaatattgctcacctactttcaatgcttaatgttgtcactattcttggattcgtgctgttctacaatgacacacaaatcctgtaaggtctaaattttaaagaaagatcaggtgaacttggctgcagtaaggaagaggccagaagatagtcacatgactgtggccccttgtccagtgatattaaaccctaatccggaacatagaaaatgattgcaaaattagatgaaaagcacttcttactctctgtataatgactgctaggatctccatctgggcatcctttcttgctcctgttactaggaaacagactgggagataagttggcaaatgcactttggtaccctactcctagtctaggcttctgaataacgcagaagttgctcttgcctaatttggaaacttatttcattaagtttccaagtgcaactgttttgttaatatttattaaatgaatttgcaatgtagccccactcagcaataacttatttttaccatacaaaataacaaatatgtagaataatttctagaaataagcatatgacaaggatataatgatataaagatacacttatcaaaatagctgttggttgaaatacaaggctctaagccatgacaaaatgggaccttaatacgcacagttgccaatgattttaattatagttagttacttggtcattg

SEQ ID NO: 3157975 - DNA, 367 bp, Cricetulus griseus
gcaagctccggctcctgtatgaatgcaaccctgtggcctatattattgagcaggcaggaggcatggcaaccacaggcacccagcctgtactggatgtgaagcctgagactattcaccagcgagttcccctcattttagggtccccagaggatgtacaagaatacctcacctgtgtgcagagaaaccaggcaggcaggtagtgagcctggactcataagctcacttctctttgccttatactctgttgtatgaaggattaggcgaaggatcactggagatggcaggaaaggcaagtgaatcaagtttgccaggtcactttcagacatcacctgctgctaagggcaggtttagaagccagaggtaaaga

SEQ ID NO: 3157976 - DNA, 222 bp, Cricetulus griseus
ggccgggagctctacttctatatctacaaggggtccgcaaggctgctgacttgagtaaaccaatagataaaaggatatacaaaggaacacagcctacctgtcatgacttcaaccacctaacagccacagcagaaagtgtctctctcctagtgggcttttccgcaggccaagtccagctcatagaccccatcaaaaagaactagcaagctgtttaatgaggaa

SEQ ID NO: 3157977 - DNA, 1031 bp, Cricetulus griseus
  modified_base (461)..(461): a, c, t, g, unknown or other
gcccagcaccggcgtgcagccactcggcggatgtccggggtcctgggcgtgattatgggtgatgagagctcgctcctgcttcagtcccagtcatcatgactacacccacctcccgcagaccatgttccatgtttcttttagatatatctttggaattcctcccctgatccttgttttgttgcctgtcacatcatctgactgccacattaaagataaagaaggtaaagggacaaaatgactggaactgtaagcaattgcccaaataatgaaccaaacttttttaaaaaacatccatctgatgatgcaaaggaagctgcttttttaaaccgtgctgctcgcaagttgaagcaatttcttaaaatgaatatcagtgaagaattcaatatccacttgctaacagtttcccaaggcacacagacgctggtgaactgcacaaacaaggagaaaagatttaaaggacngaaaagaatgatccatgtttcctaaagagactactgagagagataaaaacttgttggaataaaattttgaagggcagtatataaacataggatatgttatttgcaacctccaagtacctacccgtttatacattttgaggagctgaaatccttccagaagttgttggatacctcctggtcaaatgaccagagcaactgggaaaaccacaatgaggatattgttcatgaaaactagtcatatctcaaagcagtggcagcaagaaaagcttaaggcacttaagacagatatcaagaaatgtagttcaacatgaatgtataacacgtatcttcagtaaagagcatagcacatctttttaaataaaagaatttttaaagatagaaattcacttagtccaaagacactgaaacttagtattcagtcactattgccatttatgtatactaaggcttctgtaactgaattttcaatttgggaagtatattttgaagataataatatatgttagacttttaattaatgtatatatttaattttgacattgcttcactgtcttttcatctcatttaatt

SEQ ID NO: 3157978 - DNA, 171 bp, Cricetulus griseus
agggctggagagatggctcagcggttaagagcactgactgctcttccagaggtcctaagttcaattcccagcaaccacatgatggctcacaaccatccataatgagatctggtgccctcttctggaataaaataatttagaaacaaaaaagaaaaaaaaaaaaaaaaaaaa

SEQ ID NO: 3157979 - DNA, 694 bp, Cricetulus griseus
ccgccagcctgtctatgtcctcgagagggggctacgagtgcttctctggcctgtaccacttcttccggacccagaagatcatctggatgccccaggaactggatgccttccagccatatccaattgagataattccaggcaagatcttcctgggcaaattcagccaagcctgcaatgctaggattcacaaggatttgaaaattaaggcgcatgtcaatgtttccatggaggcaacaccctattttgcaggtgatgcagacaagctcctgcatatcaagatagaggattcttcagattccaaccttttgaactccttccgccacatctgtcacttcatggaacttcacctccagttagagtctgtcatcctggtcttttccacccggggcatcagccgcagcagtgctgctgtggtggccttcctcatgcattataatgaggagaccttgaagaggtcctgggcccacgtgaagaaatgcaaaaacaacatgcgtccaaatcggggcttggtggctcagctgctggaatgggagaaaattatccatggggagtatatcacagacatcactgagcctgtctactgaccttcgcctgtggcccacttgggcctgaggaaccttgtttaggacttttggggggtggggttaggtatgcacttggaattgtccagaagacctctgtggcctgaagtttc

SEQ ID NO: 3157980 - DNA, 428 bp, Cricetulus griseus
gaaggtgacatttgaaatttatgatccaaaccttgcattccttcgctttgtggtctatgaggaggacatgttcagtgaccccaacttcctggctcatgccacataccccattaaagggatcaagtcagggtttagatcagtccctctgaagaatggatacagtgaagacatcgagttggcttccctcctggttttctgtgagatgcggccggtcctggagtgtgaagaggaactctactcctcctgtcgccaactgaggagacggcaagaagaactcaataatcagctcttcctgtacgacacacaccagaacctgcgtggagccaaccgcgatgccttggtgaaggagttcaatgtcaacgagaaccagctgcagctgtaccaggagaagtgtaaccggaggttgagagagaagagagtcagcaaca

SEQ ID NO: 3157981 - DNA, 486 bp, Cricetulus griseus
cagccatcttccagtgactcgccaaaatgacgaacacaaagggcaagaggaggggcactcgctacatgttctctaggccttttaggaagcatggagttgttcctttggccacgtacatgcgaatctacaagaagggtgacattgtagacatcaagggaatgggcactgttcaaaaaggaatgccccataaatgttaccatggcaaaacaggaagagtctacaatgtcacccagcatgccgtgggcatcattgtaaacaagcaagttaagggcaagattcttgccaagaggattaatgttcggatcgaacacatcaagcactctaagagcagagacagcttcctgaagcgggtgaaggaaaatgaccagaagaagaaggaagccaaggagaagggcacctgggttcagctgaagcgccagcctgcaccacccagagaggcacactttgtgaggactaacgggaaggagcctgagctgctggagccca

SEQ ID NO: 3157982 - DNA, 192 bp, Cricetulus griseus
tatttcttttttttttttttttttttttttttttttttttttttggtttttcgagacagggtttctctgtgtagctttggagcctatcctggcactcgctctggagaccaggctggcctcgaactcacagagatccgcctgcctctgcctcccgagtgctgggattaaaggcgtgtgccaccacgcccggct

SEQ ID NO: 3157983 - DNA, 379 bp, Cricetulus griseus
tttgacaatggccaagaacaaatttaaaggacagaagtccaggaatgtatttcacatagccagccaaaaaaccttcaaggctaaaaacaaagcaaaaccagttactactaatcttaagaagataaacattatgaatgatgaaaaagtcaacagaatgaacacagcttttgtaaatatacagaaagaacttgcaaatttttcaaaaagcctttctcttaaatctatgcagaaagagctgcagcatcacgaaaatgaaccagctaatgttgatgaagctacaagactaatggctcaattgtaatacagtgacagtatatcatattcccccaaagatcaataaattgaatgttttatacaaactttaaaaaaaaaaaaaaaa

SEQ ID NO: 3157984 - DNA, 416 bp, Cricetulus griseus
aaaagacggtctgcgggaatttccacgagaaccatggctacctacagcctggcgaacgagcggctgcgcgccctggaggacatcgagcgcgaaatcggcgccatcctccagaacgcaggaacggccatcctggaactgtccaaggaaaaaccaacgagcggcttttagaccggcaggcgtcagccttcaccacttctgtacagcacgtggaggcggagctgtctgctcagatccgctacctaacccaggtggccacaggacagccccatgagggctccagctactcttccaggaaggattgtcaaatggcgctaaagcgagtagactatgcccgcctcaagatcagtgatgtggtacgaacctgtgaacagatgctggagaactaagtcaagacgatatagagtgtgacctgcacc

SEQ ID NO: 3157985 - DNA, 351 bp, Cricetulus griseus
tcgcgcctccgtctgggcgtggccccggagcagctctgtgcccagctgttggacacgtgcctgtgcagggaagtctggatacatgacttgcatggtggtctgcttcccagggccccgggccttgtgagaggcaatcaggagggagatggcattggacgaagtcctgagccgcaaagttgctgagctgtatttgtctgcccaggaacccccatgcctaaacacggtcttcaggaccctggagtcagaggacatcccaggcctgcctcccggaggagggctgcatagcaaggccactgtcattgccgaagcttactctaaactctgtcaagaactccagaggagtgtcaagag

SEQ ID NO: 3157986 - DNA, 398 bp, Cricetulus griseus
ctcagacacacacacacacacacacacacacacacacacacacacacagtgcccacttagacatggataaacactatgcttggtgacagtccaaggagaaacctgttcaagttgatgccaaagtatttactgccaaccttgttcccccaagggaaaaatacacaggtataaaatatttagatcaatgtttataaaacaatcgctttgtgaatgtcatgattcctgctttggaacaaaactgatatcctctagttcagtttgttttctgtaaatagcagctcctatgccattttccctgttttattagttaatttaaactgacactctagactgttccagtcttataaataaaaacatataatgtgtttacttaagttaaaaaaaaaaaaaaaaaaaaa

SEQ ID NO: 3157987 - DNA, 872 bp, Cricetulus griseus
gggaccggcctaccagaagtatttatggtggaaaaagcatttgacatctttacagcttgtccagtttgtccttgtcaccatccacataggccagtatcttcttcatggaggactgcaattatcagtacccagttttcctgtacatcattatgagttatggatgcatcttcctgctactgtttctccatttttggtaccgtgcttataccaagggtcagaggttgcccaaaactatacaaaatggaaattgtaaaacaaagcctcactaaaagacaaagcgcagcctatatttacaattgagactgatatcttgccttcctcgtacaatcaagacatacttacctatgcagtgcattttgtatatttttcaaaaccaagagcttgtattttttatgataagttatttgggtttctgatctttgagagtccaaagctcccagtaagtcttctcagtggagccattaagtggcctttagtgattccacttgcttgagatgagaagcagagaataatagggagcttctaatgggatttcacctacttttcaggactttgttgcctttcaacttgcttgcctaataagcaaaaagcccagctattaagtatagtttattataaaagttctatgagtccttgaggaccaacatatatgctataaatataaatttttaaatatctatggggtgttacgatttttctgtcttcatacttaaggagaaccctaaattgagtatactacattgtttaatagtttgggaaattatgagattatttctcttggttacctcttatttctgttaacttcttaatgactgtggaagtgagaatttgagtttgttctctgtgctataataaatttgtggcatcacatg

SEQ ID NO: 3157988 - DNA, 420 bp, Cricetulus griseus
  modified_base (156)..(156): a, c, t, g, unknown or other
tggagcaacctggctggaagagctacatcatcctgaacatgacagagaacatagactgtgaagtgtttcggcggcatcggggactacagctcctagccctggtggaggaggtactgccacgtcaccgcagtggccaccgtggggactggcacatcnctttgagcaagcccagtgagaaagagcagcacctgctgatgacacttgtgggagagcagggggtggtacccactcaagatgcctttccatgctcagtggcatccgaaggagtctggaggagattggcatccagaactactccaccaccagcagctgccaggctcgggccactcaggtgcgcagtgactacgggacgctctttgtggtgctggtgatcattggtgtcatctgcttcatcatcattgtgcttggcctactccacaa

SEQ ID NO: 3157989 - DNA, 322 bp, Cricetulus griseus
tttgtccagcaaaacctacccccacgttactatcaatcttcaagcaaattcccatcagccactttattgaatatccagacaacaaagataccttcaggagctggccagaagcccaaggaatgcctaggactcctagaatgtatgtatgccaacctccagcttcagacccagcttgcccaacaacagatggctattttagaaaacttgcaagcatccctatcacaactggaacctgggaaggaaagcaacaatggttctctcccagccttatgttgcaatatgtttttaaatcacctgccccaattccataaatgaactgtgg

SEQ ID NO: 3157990 - DNA, 1068 bp, Cricetulus griseus
ccaccagcaatgcctagcttcaatgaaacaaacacgcgtaagggaaaccagaatgaggaaagacgacaatactaaagtctggcccttgaaacgtgagcaagttgttgcacattgaggaccatgatttctccacaagacctggatttggaggttccccggtgccagtaggtatagacgtccaggtggaaagcattgacagcatttcagaggtcaacatggactttacgatgacattttatctccggcactattggaaggatgagagactcgcccttcctagaactgacaaacaaaagcatgacattcgatcacagattgattcaaaagatttgggtgcctgacatcttctttgtccattctaaaagatccttcatccatgacacaaccgtggagaacatcatgctgcgagtccatccggatgggaatgttctcttcagtctcaggataacggtttcggccatgtgcttgatggacttcagggattgaccggagagctgttcctgcaagagtgtccctgggaatcaccacagtgcttaccactgtccacaatcgtcactggagtgagtgcctccatgcctcaggtgtcctacatcaaggctgtggacgtgtacatgtgggtcagctccctcttttgtgtttctgtccgtcattgagtatgcagcagtgaattacctcaccacagtggaagaatggaagcaactcaacaggagaggaaaggtttctggagtgtacaatatcgatgcagttcaagccatggccttcgatggctgctaccatgacagcagcgagactgatgtagatcagacttcattctctctacagtcagaagacgactccatgagagccaaatacacaggaagcccctgtacagatttgtctcggataaagagaaaatctacgggaggaaacgttggtagaatcatcctagaaaacaaccatgccattgatacctattctagaattgtatttcccatcgtttatataatatttaatttttttactggggtctatatgtatgaagaggacttttttgtttgattttttttcctctcttttcagttacttagg

SEQ ID NO: 3157991 - DNA, 390 bp, Cricetulus griseus
tctggcatggctcacctgatgacaatgcagttgctgctcctgctgatatgggtatctgagtgtgcccaatcaagagctactcgggccagaactgaactgctcaatgtttgcatggatgcaaagcaccacaaagaaaagccaggccctgaggacaatttacacaaccagtgcagtccctggaagaagaattcctgctgttccaccaacacaagccaggaagcccacgaggacatttcctacctgtaccgattcaactgggaccactgtggaaagatgacatcggaatgcaagcgacactttatccaggatacctgtctctatgagtgttctcctaacttgggaccctggattcagcaggtggaccagagctggcgaaaagagcgaatcctt

SEQ ID NO: 3157992 - DNA, 491 bp, Cricetulus griseus
agaatgagccgattgactttcaggtcaacaaagggccattggatgacaaacctcagcaggccgcgttctcacagacctactgggttatttgtgccgccaagccctcctttggaccctgagaagatcaaagagttacagcgcttcattaccctttccaagaaacttatagtgatgacaggcgcaggaatctccaccgagtctgggatcccagactacaggtcggaaaaggtgggtctctacgcccgcactgaccggagacccatccaacacatcgattttatccgtagtgctcccgtccgccagcggtactgggccagaaactttgtgggctggccgcagttctcctctcaccaacccaacccagcacactgggccttgagcaactgggagaaacttgggaagctgcactggttggtgacgcagaatgtcgatgctctgcactccaaggcgggaatcggcggctgacagagctccaatggatgcatgcacag

SEQ ID NO: 3157993 - DNA, 162 bp, Cricetulus griseus
tgtgcataggaacagaagttaacttttttttttaacttttaaaattatttattagcatattgtggtgacccccaaccataaaagttaaacttttgttagactactaaataactgtaattttactacctgttataaaattagtaatgtagatatctgatatgc

SEQ ID NO: 3157994 - DNA, 259 bp, Cricetulus griseus
atgaggtgcctgggaatccccacaggagcctggatacaccttcccttcgacccagtgatgttgtccaggtctctctgaagtttgagctgcttgacccacccaatatgggccaagacataaactttgtcctgttggctgtcaacttgtcacctcagttcaaggatctcaaactcaatttgagtgcccagtctctgttgcatgatggcacgccccctggccccattctggcaggatgtagcattcatcacactcgttccct

SEQ ID NO: 3157995 - DNA, 776 bp, Cricetulus griseus
agcttctaccatacagagacatggcttggcctccagcattgatgcattctttaagaattttaagagggaaagccaaatcctctctgaggaaaccatcaccttgattaaatgccacattcagaaaaatgacctccagggtgcactttctgtaatccacagtgcactgagagacatcgagagcgcccccctgaacattgctgtgacaggagagacagggacagggaagtccaccttcatcaatgctctgatggggatagggcaggaagatgaaggtgcagcccctactggagtgacagagacaaccaaggagagaatgtcatacaaacacccaaagcttcctcaggtgacaatatgggacctgcctggcactgggtccacttccttcccaccagaaagctaatgaaacattccatctctacaggtcttactttgggctggatgaacatttcctcagttactggtgggccagttgctacttgcatttactacagaaagacttactatctgcagaatctctttcttgatactgcagcaaatgatgcaatagctcttcttaataagaaagatctctttgaaaagaaggtgggaccatatgtatctaaggccccggattactgggaatgattgggaatgaggcacaagctccaatcagtgatcacttctgttcttgctttgggcactgagtcataacctattcctgagtaacaaaccttgtctgtggagtgccagagagtttatccttttcctcatcctgagccagaacatcactgtggcaa

SEQ ID NO: 3157996 - DNA, 1055 bp, Cricetulus griseus
gtttggcgttgtgtgtctggcacctggcggccccggctggcggctggcgcacggccgagagatgcaggcttcggcaccgaggcccggggtcggcctcaacctcaaggttccagcaagtgcaaggacgcagtggaggaccagcccttccccgggcttctgcgaacagagaacctcggcccggaggagctggctgaggtgctgagggcagctgtggtggatcagcaaggacctctggtgacactgaacaagccacagggtctgcctgtgacagggagacctggggagctgaccttgctttctgtgctgccacagctgagccaggccctggggctcaaacaccgggagctccaggttgtgcgagcacctggaaaggaggcgtctgggcttgtgcttctctccagctgcccccagacagcaagccgcttgcagaagttcttcgttcactcaaggagaacacagaggcccacagccacctactgtggcatcactgatggcatccctgagccttctgaggggactatccacgtggccctgaagctggaacgcatggatggcattgatcttgccatccccgtgacatccccatctcgaaaggacatcctagaaggtgtcaagaggaccctcagccatttccatgtgatggccacaggctgtggctgtgctctggtccagctgcagccactgacagtgttccccagtcagcttcaggtgcacatggctctacagctctgcccagtgcttggggaccacacctatgctcctcgagtgggcaccgttctgggccagcgctttctgtggccagccaagaccaccaagctccagagacaggtgctggacgaagctctcctcagacgccttcgcctgcgtccttcccaggtggcccagatgcccttgcacctgcacttgcaccgcctcctcctcccaggcaccagatccagggacccccctagtgaacttgtggcacccctaccctcgtacttctctcggaccctgcagtgcctgcggctctctcaccgatagacagtgcttaacccccaattggaaaatagaaagaa

SEQ ID NO: 3157997 - DNA, 435 bp, Cricetulus griseus
aaaccctatgaatgtaatcagtgtggaaaagcatttgctcagcacagtaaccttagtttgcataaaaagacacattctggagaaaaaccgtatgaatgtaatcagtgtggtaaagcctttgctcagcacagtactcttcaaatgcataaaagaacgacatactggagagaaaccctatgaatgtaatcagtgtggtaaagcctttgctcaccacagtaatcttcaaatacataaaaggacacatactggaaagaaaccctatgaatgtaatcagtgtggtaaagcctttactcggaacagtactcttcaaatacataaaaggacacataatggagataaagccttttcacaaaatagttacctccgagtacatgaaagaacacatactggagagaaaccctatgaatgtagtcagtgtggtaaagcttttgcacg

SEQ ID NO: 3157998 - DNA, 844 bp, Cricetulus griseus
ggggttattttcttagcagctgacaccatgtgcttttgcatccctggtggtgcttggtgcttctgcccttctgggctcaatgagaataaggattatgatatgattttagggactctcaggtgggctggtgttccctgtgtctgtatgagctgttaccatagtcatgtgacgggcatcataataaaccttccagggcatctatgctggccttcttgaaaggtcccagcaggatactgcgtagtggctgctagaaggcatgccaatgccccaaaataggagagctggccctggtctgcagatacaaggagattctattagagaaaactttgaaatttctgccatttcatacattccctttatgatcctagtaattattattggaaggaaggctagtcttactgggtagtagcaaagacacttatttttccatgtgccacccttttatatgtcactaatcattagaaaaacacttccagttggaattaagttttggttttggtaaaaagataaaatatttttaatagatgaatatatatatatatatttaaatatccccattcccctagttactaccttgactggtggttgtgacttattccacctgtttgcattagaatcagagaaggggccctgcatcctggtggcctgccactgctgtctgtacccccttgactcaaagagccttttgacagaggacttgggacaaggtatgccctgtcagggatgcttttaccttaatgaaatgctgtggaatcaagtgggatgatgtgtgattaaaacagtaccaaagtgcattcttcaatgtgtatgtgcctgttgcgaggcccaagttgaaaatgcagta

SEQ ID NO: 3157999 - DNA, 560 bp, Cricetulus griseus
ggcggcggcggcggagggcgtcccggcgacgcgacgcgaggagccggctagagatgatgctgcagtggagacagccgaggaagcaaaggagcccgccgaagctgacatcaatgagctctgccgagacatgttctccaaaatggccacatacttgactggggaactgacagccaccagtgaagactataaactcctggaaaatatgaataagctaacaagcttgaagtatcttgagatgaaagatattgctataaacatcagcagaaacctaaaggacttaaaccaaaaatatgctggactacagccgtatctggaccagatcaatgtgattgaggaacaggtggcagctctcgagcaggcagcctacaagttggatgcttattcaaaaaaactggaagccaagtacaaaaagttggagaagcgatgaaaacatgtttgtatggatcaggtgttttttttaatatggaagaatgttttataaccactaattcctgaggctgatgaatcatcacagctcctcaaaagaaaaataaaatagtaaaacaacacaaaaaaaaaaa

SEQ ID NO: 3158000 - DNA, 281 bp, Cricetulus griseus
tctcatttgttgtttgcatagttccccaaacctaaaaaaaaaaaagaaaaaaaaaaaagagtcctaaatagaccccagcttgcttggctatcagatgtaggcttaaatggaagctgtgggaaaggccagggcctgctccaaacccaagaaaaatgtgctactggtggaagttagtcttccaaaccctgaagccagccctgccaaagggttctcttgctctttgatgacctttttcttagatgaaatataataggtgataatgtttttaactcaaatttcca

SEQ ID NO: 3158001 - DNA, 272 bp, Cricetulus griseus
cgagtcgcgtgcagcccatcaagctggctagggtaaccaaggtgctgggcaggaccggttcgcaggggcagtgcacgcaggtgcgcgtggaatttatggatgataccagccgctctatcattcgaaacgtcaaaggccccgttcgggagggtgatgtgctcaccctgttggagtcagaaagagaggctcggagattacgctgaccttgctgctgggtcctggatatccaccacttggcccatgatgacctgcagatattgaataaagcattt

SEQ ID NO: 3158002 - DNA, 223 bp, Cricetulus griseus
aaaaacttcattacccgggagaacctggaggctcggatagaagaagcattgaactctccaaaggactataactgggccatcaccagagaagggaatgtggtcaggaactgagcacagagggtcctaggagcccaaagtaaggacagtgcttgccaaggacccaagtgtattgggacaggaattggtgcaccctatgtgggatggctcagccttttccagagca

SEQ ID NO: 3158003 - DNA, 1184 bp, Cricetulus griseus
gaagaggtttctcttgtctggaggatcaccggccttcctccttgtgttttaccacaggtctcttcacagggtgaaatttctgatacgactttggtgaagttttgtaaacccctcatcctgagatccaaaaggtatgttcatcttggcttggttagcacatgtgcctttatacctcactgtgtgatcctttgtggaccggttctgggtctcgttcagcaacatgagagtgctttccatggagcgtttaagatgcttaggcagttatttactgaccttgacctaaattatatcatacaaaccaacacccagagtgactcaagtcctcttgcttatcacaacagcagagaatgtaatcgcctaccagaaattggtaagtatcaggacataatagtaaagagtgaaaataaattgaaaaacactcaaacacatttaaaagtatattcaaatgtggtggcttcagatacagaattagaaacacatgtgccatggtcagcacacaaggagacaccaatacatacatctcaaaccaatgatatactcaagtgcttgtctccagaaaaaaactggaaaattgatgactgtgaactattcattgagagtaaccccactggaaatcctacagcagaagacactagaacagaaatttcttatgaaaatgtacaggtcacaaataatcctggaaaagaatacacgttgccagtgatgtactaagttcactagatgcatgtacttctcagggttattgttcatcaactataccagcaggctgtgttctgccagtgggtggtaactttgagatcttgttacattactatctcctcaactatgccaaacaatgccggcaatcagctgaagccatggtcagtatgttaatatctgatgcacttttaggcctccctaaaaccctttacaagcctaagaaggggaaggacagctttccacaaatatatattcgatctctccgtgcactgcagaccagtcaagccatggtaagtggtcagtcaggcttggagccagtagctggtaagtaccagttagtagcttcagttattcagtgtttggcaaaaatactaaccattgatttaataatcaatattaagagacagcctcagaaaattgatgaccaagattcagaagatgaacttgaacactaagctttttgttgctcaaactttgaatctggg

SEQ ID NO: 3158004 - DNA, 2017 bp, Cricetulus griseus
  modified_base (380)..(380): a, c, t, g, unknown or other
atggggggctgcagaggcaagagggcctggtggagatagtaatgtcaatggatccaggggccatgcgcttcctgcagctgtattatgaggaccttcttgctagcctggaagatgttgcccttttcccacttgaaggagtagatgtgactggctttcggctttgcggacctagggccccatgccaggcagcccaggagttgctgcagagtcttctgggcagcattagctgccatacactggacgtgaagtacccaggcagtgccaagttcctgttgggtgtggaggggcagcaccttctcatggactggaggctcagttccagtgtgtctttggaacagaacatctagccagcgccatactggacatagatcctgaaaggntggatcccactgaggctctccaggtcctccatggccacagcacagacagtgatgaggacaacatgagactggaggaagtccaagagctgctggctaccctgaaggggctacatgggaaggactggctaccactggagatggagaaggagaaacctggagagcagccagaggaaatcacccttgagcaggaggaggaaaaacccacacttgagactggggatgagcccactgccctcagcactgggatacccagactgttagaagaagaggccacactgcagctggctatccaccgatccttggagtctcaaggccaggtggctgagcagcaggaggctactacactaaggcgagccctggcgctctccctgttggaagcagaaaagcccctggatgaggacactgggggcagagcgcagctggtggtgcacatatcctttgagcaggatatggatgaggtggaccgggcgttatcggctgccttggaagtacatcttcaggaggagacagtgagtctccaaggccgtacgctaccctcagagcttggggctcgcctggagaggtgccacgatgtgagcattaccctgcatggtgaccgcatcatcctccgtggctttggggtccagcctgcccaggcagctcgtcacttagctgcactgcttattggcccctgggaccagaatttgacctttcctttggaggcttcaaacaacaacttgtcagagcaggagctgaaagaacctttgggcaggctagaggccctggaagagaagtccaaggagttccaggatgtggtgcaggccttctatgacacactggatgctgcccacagcaggatccaaattgttcgagtggaacgagtgtcacacccactgctgcagcaacagtaccagctgcatcgggagcgcctgatgcaatgctgccagcaacgccccgtggagcaggtcctctaccacggcacatcggagtctgcagtgcttgacatctgcgcacacggattcaaccgaagcttttgtggcagaaacggcacactctacggacagggcgtgtacttcgccaagcgtgcttccctgtcggtactggatcgctactcgcctcccaacacagaaggccacaaggcagtgtttgtggcacgggtgctgaccggtgactatggacaaggcgcccgcggtctgaaggcgccccctctgagggcctcgggtcaggtccttcgctacgacagcgccgtggactgcctccaacagcccagaatctttgttatctttcatgacacccaagctctgcccactcatctaattacctgcaagaacatatcccgggataccccctgataactgccttggtctcttgaatcttttttcctggacatttgacctaagaggacaacttctgattcccttaagcgtcagggcttccccctacggggcgctccttgctgctggctggaaagccaggataaaactggactagggagggccagacctaaccggttccttggcctgctcgaccgccaggggtcagtagaacacggccggagggtgcattgccaggcacgcccgtgttggttggaccgcgccctagcgtggctctgtctttgaataaacgtgtacttgaaaccacgtacaaaaaaaaaaaaa

SEQ ID NO: 3158005 - DNA, 1141 bp, Cricetulus griseus
  modified_base (1053)..(1053): a, c, t, g, unknown or other
aagctatggctacactacggatgacattgaattttactggcgtggcggggacaaggctgtcactggcgtggaaaggatcgagctcccacagttctccattgtggagcaccgtctggtctccaggaatgttgtcttcgccacaggtgcctatcctcgactctcattgagttttcggttgaagagaaacattggttacttcattcttcagacgtatatgccctcaatactgatcacaatactctcgtgggtgtccttctggatcaattatgatgcatctgctgctcgagttgcccttgggatcaccaccgtgctcaccatgacaaccatcaacactcaccttcgggagactctgcccaaaatcccctatgtcaaagccatcgacatgtacctgatgggctgcttcgtctttgtattcctggcccttctggaatatgcctttgtcaattacattttcctactttctgtcatctagaaattaagattgaatctacaatgtttctactgttcacttttgaaaacttaagaaacatcctcacagcctttatttctgtactgacatgtctcataagcacacccaactcctcctagactgactaggattctgcaggaacacgaccagtacacaccacgatcatgcaacaacccatgaccgttcctgaggcaaggagggcaacctgacacaaacacagtctcttttggttccttctgatccacagcctcatcagtatttggacttttaaagctcgtagaaacatgacaaggtgcaccggtttcatagactgaaccactggttaaaatattttgtcactcttggaaagactgctggctttcatgtcagtgtgaacttaccatcagaataccattgactcttggggcaaagaacagccctggtggagtaaatttcccaggacactggtgagtgtgccttggactgattacctcttctactgcattgaaaggtgccatgttttcctgaatgactaaccctcctccccttgtaacagtgacctccagagtggctcatgcaccatacctcttctagggatggcccanaaacatgtcattcatgactcattttcacttccaagtcagtagatgtgttcaaggtagtacaggattgttctagtaggaataggcggtt

SEQ ID NO: 3158006 - DNA, 833 bp, Cricetulus griseus
aagtaatggcttcaacagatttacagacaaatcaggatataggtactgccattgtttcagacactacggacgatttgtggtttttaaatgagtcagtgtcagaggaattaggtgttggaataaaagttgaagctgctagttctgagcaagcaagtgaagtagggaaagcaagtgacaaaaagatggttgaagtgggaaaagatgatgatgctgaggaccttaagtcgttgagtgatgataccgatgtggagcttacctctgaggatgagtggcagtgtacagagtgcaagaagtttaattctccaagcaagaggtactgttttcgttgctgggccttaaggaaggattggtattcagattgtcctaaattaactcattctctctccacatctaatatcactgccatacatgaaaagaaagataatgaaggaattgatgttcccgattgtcggagaaccatctcagctccagttgttaggccgaaagatacatatttaaaggaagaaaatatcaagtttgacccttgtaactcagtgaaatttttggatttggctcatagttctgaaagccaagagaccatctcaagcatgagagaacaagcagatatcctttctgaacagaaaatggatacagaaagtatggaagattatcacaatattttgaaactgtgtagtttatgtgaaaaaagacctcgggatggaaacattattcatgggaggacgagccatcttacgacttgtttccagtgtgccagaagattaaagaagactggggcttcatgtccctcttgtaagaaacagattcaattggttattaaagtttttatagcatag

SEQ ID NO: 3158007 - DNA, 383 bp, Cricetulus griseus
tcttttctcatccagactctcaccaccctgtctgctgacccacagcaatgaggtcccggcttctgctgcctgtgccacacttgccgacaattcgggaacttgcgaagagttatcacatggggcacctggacaggaggagcccccaaattctcccagcctggatgactatgttaggtctatttgccagctggcacagcccacctcagtgctggacaagatccgaagccgacctcatagaccataccggccagcctggactagagagaagagatgccaggccgagtctgtagcagacagctctccttgcttcagcagcctacagcccccgctgccctctcctggcactgacaaccctctggactggctcttcgggaagtcccagg

SEQ ID NO: 3158008 - DNA, 395 bp, Cricetulus griseus
tcagcaaggttgacactgtatatgttaatgaaatgctatttattatgtaaatagtcattttactctgtggtgcacgtttgagcaaacaaataatgacctaagcacagtatttattgcatcaaatatgtaccacaagaaatgtagagtgcaagctttccacagataatatactgtattctgtaccattatagatagtgtggatgctgtcaatgcatgttgatattaccatgttgcggtatctagtttctcccatcactcagaaaaccattcatgagaaaccataggtcagtggctaagtcaaggaaactgttcagcagatttcatttctttacatcattaagcaatagtttgcagcattttaacaatgtttgggttatttttaaaatttaagtgga

SEQ ID NO: 3158009 - DNA, 389 bp, Cricetulus griseus
cggcggcggcggcggcggcggcagcggctgcagcgggcgcggcagactgaaactattcctttgactctaactacgtgaatagccgtgcccatttaatcaaaagctccaccttcaaggacctggagggcaacagcctgaaggatagtggacatgaggagagcgaccagactgacagtgagcatgatgtccagaggagcctgtactgtgatactgctgtgaatgatgtgctgaacaccagtgtgacctccatgggatctcagatgcctgaccacgaccagaatgaaggatttcattgcagggaggaatgccggattcttggccactctgatagatgctggatgccacggaatcctatgcctactcgctccaagtctcctgagcacgtgagg

SEQ ID NO: 3158010 - DNA, 545 bp, Cricetulus griseus
aagttggacactgtcccaacttataaagatgattatagatcttgggatattcagaaatgtgaactgtgtaaaccagagcaagtttatcagaccccagatgtgaaattcggaaattcaactacatttcaggatgactatgttccccgggagataaagcctacgcaaagctttaagccttgctctgcgatcaagtgttctgtaggcccctttaatggtgagacaagtcatcgtcgagattttgtgccttaccagctagaagtcaagtttgcaaggccaaaagaagtttataagcctgcccaccagccttttgaggaactcaccactcaccggaatgactttaagggttttgctggcccagctagctatccttctcctccagattatatatttgaaaatacagattcccaaggacataaattctttcgcaagatcattcctgaaatgaaggccttttagcaatcaaataattttataagaaagctaatgagagctcagtttttaaagagaaaacccaaattttatagtgaaaaattaatagagttata

SEQ ID NO: 3158011 - DNA, 1267 bp, Cricetulus griseus
tatggcttatttctatatgtgtgaccgtgcaaacctctttatgaaggaaaacaaattttatacacactcatcattcttttattccaattatctacatcttggttttgggagtattttacaatgaaaatacaaaagagactaaagtattaaatagagaacaaacagatgaatggaaaggctggatgcagcttgtgattctgatttatcacatctcgggagcaagtacatttctgcctgtgtacatgcacattcgggtgctggttgctgcatatctgtttcagacagggtatgggcatttctcttacttttggatcaaaggagactttggaatctatagagtttgtcaggtcttatttcgtctcaatttcctggttgtggtgttgtgtctcgtaatggatcgaccttatcaattctattactttgtccccttggtcaccgtgtggttcatggtcatatatgtcactttagcactgtggccacaaataagaaggctggcgtgtacagttgcattcttttgtggactactcatcttatcctccattcaagataaatcaagactctaggctcctaaaatcctaaaaacagactctttgggcttactttgcatctgcctagaggagaaaataatctgcccgagctatcaatgactgtaaatataaacatttggcaaggggacggttttgtgatgtccatcaaacttgtgtgtttgtatatatcagcactgtacatatccaatgtgaaatgcataaaaccaatgaaccaggttgcatcatataggaatgcatgtagaaagacttttctactggatctgtgtctccatttataggtgattatagctaacatatgaaggcagggaaatgatggattttccagtaaacttatgtaagtaatttacttagcttagtgatgccactgagtgttttgatatcccctaaatttgtagtgattgtcccatctgcatcagtacttaagagcttcttgcttcactgagaacttagtgctgaagtgacttgcaaggtccttttctgtcatatgtgcaatgacgtggaaatgagaaacggtatgaccttaactcacatgtgttcgtatccactgtgtttcctgatgtgattttttttcctagctgtggttttcaggtgtgtaagcctaaatctgtacattttgcccttcacagagttgttgtaaagctccgtgacaaggttttgttattgtggatatcatcattatttttttaaaggccaaattttccttccaatccagacattct

SEQ ID NO: 3158012 - DNA, 435 bp, Cricetulus griseus
caagaaacagaggaagaaaacaagaactccagcagctccagttcagaggaagaggaaggtgaagatgaagtttctgaatcagaaactgagaaggaggcagataaaaagccagaagctactgtcaaccattccaactctgaaagcaagagtagtatcatggagcagatcccagccccagctcagaataccttctctgcctcttctaccaggagattgtccagtcttttcaacaagacagaagagcccaaagacgaatctccttcttcatggagactgggactcaggaaaactggcagtcacaacatgctgagtgaagtggccaactccagggaagcctttagagatcgaggttcttccatctaccgttcctcatcaagccctcggatctcagctttgctggatgacaaagacaaggaaagggaaacaaaactattt

SEQ ID NO: 3158013 - DNA, 764 bp, Cricetulus griseus
ttctatttttgtcaaaaacgtcatggttcctttccagatcttttttgccaaaacattttgatactacagcattgtacatttgaaagtagcatgctagactctaagccaatgagcttctacacagcccgtaggaagaaattcagcaaaactcttgctctgccaccaaaagtatggatgataatttgctagcccaagcaggtttgtttttttcttagctttcatttccttttcttcttcctttttttttttaaaagaaaaccatattagtattctatagcagttttctttgaagaatgtaaacccctttttatgttttcttagacctggtaacccacacgattacattgtggattttaaaatgtacacttctgtacggttctgtacactgaggaacttttgtaaatatataaatataaatagacatcaaaatactgtatgtgaccgcacacagagtagttttcccacaccaaagttactttttatgcatgctctaagcgtctattgggatgggcacaaatgggattatccatacatttttaagaagctacaagtttgcacagctagagtggttttgtaaataactgtatttgtataacacagccatgtaacatacaggactgtaagcggagacttggcaaaactaaataaagggctgcatgcttattatttttgtaccttgtcgttgtaactaactacttcctagtcagagagcatgtaagtattgcccagggtctcagctctgagggcattctgagtaacatgta

SEQ ID NO: 3158014 - DNA, 382 bp, Cricetulus griseus
gctgacactagatgtcactcctgctacaaggtccccgtgctggggtgtgtggatcgccagtcctgtcgtctggagccaggccaaagatgcctgaccacaaacgtgtaccttgggaagatgtgggttttctctaacctgcgctgtggcacaccagaggagccttgtcgggaggctttcaaccaaaccaaccacaagctgggcctgaactacaacaccacctgctgtgacaaggacaactgcaacagcccagcgccaaggcccacacctgcgctggctctcctctccctcacctccttggctggccttggcctctggttattgcattgagagtcgctccatgtctgcacgcctcccacacgctgtagcctgagcctttctccct

SEQ ID NO: 3158015 - DNA, 396 bp, Cricetulus griseus
cagataaactgagggaggtgaagctgagaatcatggataaagaggcctgtaaatactatccgaactacaagtatgacttccaggtctgtgtgggcagccccaggaagataagatcagcatacaagggagactccgggggacctctactgtgtgctggggtggcccatggtattgtatcttatggacgtggtgacgcaaagccccctgcagtcttcacccgaatctccccatatgtgccctggattaatacagtcataagggcaaatagctgaagagccttgccagcctgagtcagggcctccaagccagagctcttctgtaccccttgggcttaaaagaccaatccccagcctgtcccagcctgcccccagcctgttcccatcttgtcccagcctg

SEQ ID NO: 3158016 - DNA, 395 bp, Cricetulus griseus
gctattgggaaacagggctggtgtgaaccgggatttctattcttatgcaacatagcagattgccttctagtgtagtgctcctacctcagtttgtagaacacagtgtctatgcagtgagtgatagcctcgcctctgacccttcatagccaagagagggaggcagcctgccattgcctggtgtttcttgtgtcttgagtcttaacagtgcagcggtccttgccatttccaacatctaacccggaaccttcaggttcttttttccaaggcttatcccagaaaataaggacaaaaaaggcctccttcgatttggttcccaaatagttttcaatagttcaacaacaaaccccgttactggtgactagtgtctttcagtatttcccatcattaaaaaagtt

SEQ ID NO: 3158017 - DNA, 512 bp, Cricetulus griseus
  modified_base (64)..(64): a, c, t, g, unknown or other
tccagggctccctctcgccgcttctgctcctcgctcagtctcccggagcgctctctccctcctntccctccctccctcctccatggcgtccctcctgtgctgtgggcctaagctggccgcctgtggcatcgtcctcagcgcctggggagtgatcatgttgataatgctcgggatatttttcaatgtccactctgctgtgttaattgaggacgttcccttcacagagaaagatttttgagaacggccctcagagcatatacaacctgtacgagcaagtcagctacaactgtttcatcgccgccggcctctacctccttctcggaggcttctccttctgccaagttcggctcaataagcgaaaggaatacatggtgcgctgagcgcagcccggtgctctccctccccgccccgcccctctatttaaagactcctcagccccagtctagtcccacccatctggcgtcctctgggaccgagtcaccctggcgagaccgcatccctggccctgcaaa

SEQ ID NO: 3158018 - DNA, 1438 bp, Cricetulus griseus
ctatatgatcagtgttactgcctataatctaatctacagcaaaccctgatgtgacattccatgacaacatacatgctactatttagttctgtgcagtgaaggtctttgttatgacagtgaatctctagttttgttatttattctaaagcaattgctattttcctagcaggcaacactgttacttttctcacgttcccctcttatttttctaggcactgttcaatactatatgccttctgttaccatggagtggatgggcattgtttccttttacagggcaggaggttaatgggagcccataagaagtctgataatgtccattccatttgtcatggttgagggatccactaagaagttaagagggcttaagagttgcttcatgtgaacatctcttattagttaccgagttatattcacagttgaaatgtgtcaaaataaagaatcattctgtattacagatttcacaaagcctacacatccatcttactggactatgagcagttgctaggtgaccattttgccaaaatggtccacacatccttcactgaggagagttactttcagccatcctcagtcctcactttcaccacaatatgtgtcttcactgttctttgctgttggcaaaaatattttgcatctttccagaggcagagagttccaaagatgttttctttgagacataagcgcattgcttaggtacatactaagggtataaccacttacagtcaaggggaaggatacagctattgctaaagctaatgtgcaagtttatatataaatatatatatatatatatatatatatacgtaactctccaacatttggggtagtgactcctttttgttaggacatttgaaactagcaagcagccattgtttctacagagccccactttcatgtcgactcgtgtttgtttcgcttcattttcaaatagctaaaatcattaaaattgtaaatattttgttgcttgagtaagcatcttcttcgaactttgtatctatggtatataatcatagaattttatattttcatataaagctaatttttttctcagtttcaactacgtcatagttttcggttttgttttgtttttgtggtggatatgtgaacttacgtgtactgaagtagcaagaaccatctttgcattccaattgaatccaacctgtgttcttcctttgaggcagtgattgtgaaagtcgggttttctttttaattccattgaccattagtgcaaaagcaattagacatgactagtcactgaatacatttgtcacattgactcattttggaaaaagtggattttttttttaaagatttgttccgtggggacggggttttataacctgaaattttcccttttccttctgttttaactatatcaaatcattctattatagtgttatttaatatgttaaattgttattgctatacataaaat

SEQ ID NO: 3158019 - DNA, 362 bp, Cricetulus griseus
tggggggtcagtggtggaggtgcaccgtctcaccaaggcctgtcatcaggctatggtagaggacaaggccaatggcattgaggccgtgtggcatgatgagagccatctgaacaagtaccttctataccacaagccaacaaaggtgctgtccccagagtatgtgtgggaccagaagctgctgggctggccctccatcatgaagaagttgagatatgtggctgtacccaagaaccatcaggcaatcaggaattgatagatacgtttctgttggagagcacaggcccacctcagatgccagcagacccagtaccacctgtcttaccacatactgagcccttggactggcaaccaccttcagctcc

SEQ ID NO: 3158020 - DNA, 251 bp, Cricetulus griseus
aatttgtttgcatttatttttaaactgaaacatttagattcccttttctggtcctttttcttgcccctttttatcacagaattttgaggagatcaatatccattactgtaaaatataattttattaaatttatatcaatcctcactttaaattatatggctctaagtgggacacttgttaatttagctacctgaatatttattttgctggagtaaggaggcaactgtctgtgaatcttttgttaatattac

SEQ ID NO: 3158021 - DNA, 2897 bp, Cricetulus griseus
cgccgcgggccgttggggatgcttgctgcttccgctgctgctgctgctgctgtcgggcccgagcggcgcctccgagatcaccttcgagctgcctgacaatgccaagcaatgcttctacgaggacatcactcagggcaccaagtgcaccctagagttccaggtgatcactggtggtcactacgatgtagattgtcgattagaagatcctgatggtaaagtgttgtacaaggaaatgaagaaacagtatgacagtttcaccttcacagcctccagaaatggcacatacaaattttgcttcagcaatgagttttctactttcacacacaaaacggtgtattttgattttcaagttggagaagacccacctttgtttcccagtgagaaccgagtcagtgcccttacccagatggaatctgcttgtgtttccattcatgaggcattgaagtccgtcatcgactatcagactcatttccgactgagggaggcccaaggccgaagccgagcagaggatctcaatacaagagtggcctattggtcagtgggagaagccctcattcttctggtggttagcatagggcaggtgtttcttctgaaaagctttttctcagataaaagaaccaccacaactcgtgttggatcttaactccgcttcagatgcaccattgccactgtaatatcactgtcctctaattttaggtactgaagaactttacattggcaacattctaaaaccctactcattcttgttgggagagatgtacaatgcatatccccatggagagaggacaccttttttatttgtaaaggtggaaaaactttggaccttaatgcagctattcatatgaaatatctaacaccaatgatctactttttcttggtttatatctactcttcatacactaaactttggtaatctgattccttttaaccatttaaaagtacttttcttaataggtagttgatacttttaaaaaatcttagatttaatgtctgtattacagaggaagaaaactgccttttaattgtttatagtgaataaagttgtgtttttaagaaaaccaaatgtgattaactgtagccaagccctactctgcactgcttaattttatgggggataaataatctaccatagaactattagttaatattgataaaattttcattaatacatcatgatataatttatttcttgctagtttggaaaatgtacaggtttttttctgtgtcattgcattaccaggacttttacaaagaagaaagggtgtctgggtcatttgatcattctggtgaactagttctagtcaagtcattcgcagcttcagtcgacagtcgtaagccaggatcacataagtgccatacatacatgttgtcctcatgatgtgatgcactgagaagttaagtttctatctctttcatttttgttgtttctacagtctctgattagcaaccctaaagttaaaagtagagaatgctgtgaatatttcctatttaaattctttagaattggtttgtactgtttgtctcttacaccttgtgtggattaagctgactgaaatgagattttgatccaagtattcagaatagaatacataatgatggaaaattacatagataagcaggcttctctgctgttttaaaaaagaaaaaccatgtcagttgcttttcagccctgcctcttcaccacaagtgatgagaactaaatgactctcatgtagtggagactttaacatgtaccatcataggatagtgactgagtagctaattctagtcacttaaccattactgactagaagtaggagttaaacatgttttcaaccttttaggattcttgaagaccagttcactacttcttaaataacatttacaaaaagattaagaagaagtttaagattttgcagatttatccatctgagttcttatactgaagttgtcctgtgacattttaaaaatgtcccatctacttagctgtgagtgtcttaagcaccaatgttaatgtgattactaagcatgggcacatgtaaaacactgtatctggttgccagtgggtgatttggctacttacactgtaattaaatggagtcaggtatagattttgttagatttggcataaataatgcccttatttaatctgtgcctctggaaagtcatgatagtaagctaatactataagtctttttaaatgaaaccatgtgtcaaacttgaaaacagcagttacctattgtcagaaatggtatgaatttagtttcatctctcagtagctggctaaattttgacagctatctgttcaactggtatgaatagataagaaaatacataaacaaaagctgtgtgatatttttttctcctgtgacataatttgcagcttgtctttttctgtaatctttatataagttgttgcaggagtttggattttccaaatatttttgtttggtcatatgactacatatttgaatatcataattgtatttaaagtaaataatggaaagcaacttgatacgttagttaataccaaaatttcaactgggtgaagatatattttaagatactgctttgctaataatctaaatattctttcgttctattaaaaaccatagtttgtggcttataacttttcctctgggctcaataatcacctttgaaaatacaatggactgaaagcagtttactgaaaggtctcatttatgtctctgtactatccatctcttgtttcaatttctaagtgtaacattcatagttaaataggataaagctgactatgagttttgttttcaaaaattagacaaattaataatatataaataattcaaaggatttttgtttacttttgaaaaagaattttctctaaattaaagatggttccacaggattgcaccaatcagttccatgtaaaataaaaa

SEQ ID NO: 3158022 - DNA, 590 bp, Cricetulus griseus
ttgggggtttcattgtgtattgtgtaattgatttaccagtatatcctcttaaaacaaatgctcatttattttagatcaagttagcctactgtgtatattttttccactttggctatatttacgtgtgactttaagtgcccaagtgtaacttagctattgcagctgctcaaccacagtattttatgaaaggtggtgtgttctgaatggtgtagctcagattagcttgaacttcctatttctgctctcattgtagctgtaactaccgtcctaatgttgacctgtaatttctactttcaatccaagtgaatatcgttttaaatatccttaattaactttaaaatgtaaaattgtactgtgattttcataacccgttgcctttttggtaccagagctacgtggtttgaatcctggctttaacattgttttagtaagaaaaaaaaaaagaatgtatttttgcttactcaacagacaacctgtaaaaatatatggaaataattacattttacatgtgctgtaaaagggattaattttaaaaaagcatttgttcaatttcaataaaagaataagtgtgccaactaaaaaaaaaaaaa

SEQ ID NO: 3158023 - DNA, 663 bp, Cricetulus griseus
atgaacatccgccgtgctcggccagatgacctgatgaacatgcagcactgcaacctgctctgcctgccggagaactaccagatgaagtactatttctatcacggcctctcctggccccagctctcctatattgctgaggatgaggacgggaagattgtgggttatgtcctggccaaaatggaggaggatcctgatgatgtccctcacggacacatcacttcactggctgtgaaacgctcccaccggcgtctcggcctggcccagaagctgatggaccaggcctcacgagccatgatcgagaacttcagcgccaagtatgtatccctgcatgtcagaaagagcaaccgcgcagccttgcacctttattccaacaccctgaacttccaggttagtgaggtggagcccaagtactatgcagatggagaggatgcatatgctatgaagcgagacctctcacagatggcagatgagctcagacggcagctggtgctgaagaaaggcagatatgtggttctgggttccaaggagaatcagggcaacactcctggttctgaagaggcctgtcagcaggagaacctggccggagatgatagtggcagtgacagcaaagacatcactgatgtccaagacagcctgcaggacttggattccacctcttagagc

SEQ ID NO: 3158024 - DNA, 541 bp, Cricetulus griseus
actctaacttaaggcactttgatttttgccaacaaataacagacattaagagaaaacgattcactacaaaataacaaattgctaatgcacctgaattttcagtaaagagacctttctctcactatcagttgccagctgcctagtgtccatcttctaccaatgttacaaacattgcactcagaaaggagacaatggaaaagattcagtttgcagtctatgtaaaatcttaatgtacaaatattttgtcactggtttataaacattttgataaaacctacagaaaacaagcactgaaatgttttgattatgctttagtttaccatttgttcacactgaaaaattttcattgttttaatacccgcattgacaaaacaaacaaaacaaaacaaatgcaggcgcagcttttctacatgtaaaaagcagcaacatgctcacacacaaggaaatgtgaaaagggtgcttcacatctgtccacactgctgtcaccctgaaaaggaggctttacaagtacaaatgggacttctttataactttaaaacct

SEQ ID NO: 3158025 - DNA, 336 bp, Cricetulus griseus
gtggagctggcctttctggcaattgccaaggaactgaaataccgtgcaggcaggcagcctgatgagcccagcttccagatccgagactatgtggagtcccagaagaagcgccccagctgctgctcctttgtgtgactcccagggggctaagaggaggagcagagacccttgggaatgcagttattctaactgctgagccaattaggagagagctgggattccgtgggaagccctggccagggaagtaactgccaccctagtttctctagcttcctgtgtcatggaaagggtaaaataaccatactttatcttagtatatataaactaaaacaaaaa

SEQ ID NO: 3158026 - DNA, 336 bp, Cricetulus griseus
gccttcgctatggaagaaccagagatgcagctgaagggcaagaaaagtcacagacaagttcactgagagtgtctatgtcctggccaatgagccgtcagtggccctgtaccggctacaggaacatgtgcgccgctcactgccggagctggcccagcacaaggctgacatgcagaggtgggaggagcagagccagggcgccatatacactgtggagtatgcctgcagtgctgtgaagagtctggtggacagcagtgtgtacttccgcagtgtggaaggcctgctcaaacaggccatcagtatccgcgaccacatgaacaccagcgcccagggccacag

SEQ ID NO: 3158027 - DNA, 1030 bp, Cricetulus griseus
atgcagaagagaagacatttagaagctagttttcagcagacagacccaggctgtagttctgattcacagccacatgcatttctcatcagtggaccagcgtcaccaggtacttcatctgcaacatcctcaccattaaaaaaagaacagcccttatttactctaaggcaggttgggatgatctgtgaacgtttgttgaaagaacgagaagagaaagttcgagaagaatatgaagaaatactgaacacaaaacttgcagaacaatatgatgcatttgtgaagtttacgcatgatcagataatgcggcgatatggagaacagcctgctagttatgtttcatgaatcacccttttgcatttgtgggctgccttgttccttgttgagttgttgcaggaggtcccaactatgacacgcagcaatgccagtacccatctgtgaatacaggttatttcaagctttcgtcaatggcaaccactcttaggcagcagcaattggttttggaaatttccgtgatgtcattaccacctggatgtggacctttgctacttgtattaataccagtggcctcgttttgctgtatcattacaatttggcttctttatattaatgtttaaaagggattaaagttggcattctagaacatgcccttcactggttatgtaaataaaactgtagaatgacacgtcagatgaagttagtgtgattttaattgtgcactacaaccaagctgtaaccagttattaataatttagaatgtaatcccaggacaattaagcagttagtctacagtacttctgtgaaatagtggaggaggagggcatttctgtatttcaggacttttcttggggtttcagaatgggtttatatgatttcctttattattattttttggtagttttatttattctatcagtctttttaacaaatgtttattgcctgcaccccctcccccacgtgtatcattgttttactgcccttgtagcactggagtttagttggaaaaataaaacatttaacttactaaaaaaaaaaa

SEQ ID NO: 3158028 - DNA, 354 bp, Cricetulus griseus
gagagctcaacacacctatcacttcccagatggacgctccttacctaaaggtatcacagttgcaatctccatttatggtcttcaccataatccaagtttatggccaaatcctaaggagtttgacccatctagatttgcaccagattcttctcggcacagctatgctttcctgcccttctcaggaggagcaaggaattgcattgggaaacagtttgctatgaatgagctgaaggtggccgtggccctgactctgctccgctttgagctgttgcctgatcccaccagggtcccagtactcatacaaagaactgttttgaagtccaaggatgggatttatcttcgtctcaagaagct

SEQ ID NO: 3158029 - DNA, 404 bp, Cricetulus griseus
atggcggcgctggggtccccggcgcgcacgctcagaggcctgctgcgggagctgcgctacctggacgcggccagcgggcggccgtatcgcgacacggcggcctaccgctacctggtgaaggccttccgagcgcatcgggtcaccagtgagaagctgtgcagagcccaacatgagcttcacttccaagccgctacctacctctgcctcttgcgtagtgtccggcagcatgtagcccttcaccaggaatttcatggcaagggtgagcgctcagtggaggagtctgctggcttggtgggcctacagttgccccaacaacctggagggaagggctgggagccgtgatggaaagtcctcagatatcccttcatttaagaacttaaccatttctaccaatatgtattatc

SEQ ID NO: 3158030 - DNA, 366 bp, Cricetulus griseus
tggaggacttcaagaacaagtacgaggatgagatcaacaagcgtaccactgccgagaatgagtttgtgatgctgaagaaggatgtggatgctgcctacatgaacaaggtagaactagaggccaaggttgatgctctgatggacgagatcaacttcatgaagatgttctttgggagctgtcccagatgcagacacgatgtctcagacacatccgtggtcctctccatggacaacaaccgcagacctggacctggacagcatcatcgctgaggtcaaggcccagtactgaggacattgccaaccgcagccggacagaggctgagtcctggtaccagaccaagtatggaggagctagcaacagacagct

SEQ ID NO: 3158031 - DNA, 721 bp, Cricetulus griseus
ccatggctcctgcgggttctccagcctcccttcctctgtgtgtgtgtctgctgctggcctctggctttgcccaggcaggcaggctgctggtggtccccatggatgggagccactggttcaaccatgcaatcggttgtggaaaaactcatccacaaaggacatgaggtggtggtaatcgtgcctgaggtgagttggcaactgagcaaaccactgaattttacagtgaaaacgtattcaatttctcacaccctagaggattttaaaccgggagttcaagatttttatggacgctcaatggaaaaccttgcgaagaatacaatacttgtaaaatcggctaccccaaaatgatctgcttggtcatccaaagactcgggcgttcatcacacactctggttctcatgggtatttatgaaggaatatgcaatggcattccaatggtgatgatgcccctgtttggtgatcagatggacaatgccaagcgcatggaaactcggggagctgggatctccctgaatgtcctggaaatgactgctgatgatttggaaaatgcccttaaaaaggtcatcaatgacaagagctacaaggagaacaatcatgcgtctgtccagactgcacaaggaccgtccgatagagcctctggacctggctgtgttctgggtggagtacgtgatgagacacaagggggcgccacacctgcgcccggcggcccatgaccttacct

SEQ ID NO: 3158032 - DNA, 471 bp, Cricetulus griseus
tcaacaagccatccagggtacctagcatcagaggcctttcgagaccctatttggtctacctgggccctgtacgggcgcgctgtggaccagaacaaggtgctgcagttcgcccagcagatccgccagcaccgcttcaacagtagccacctggaaatcgatgacatgtacacacctgcatatggcgacttcgatttcgacgagggcaagttccccaatgccactgacatgttccgcagcctgcgagaggctggcttccgcgtcacactttgggtgcatccgtttgtcaactacaactcgtcgcgcttcggcgagggcgtggagcgtgagctgttcgtgcgcgagcccacgggccggctgcccgcgctggtgcgctggtggaacggcattggagcggtgctggacttcacgcgcccagacggcccgagactggttccagggacagctacggcgcctgcgcttccgctacacgtg

SEQ ID NO: 3158033 - DNA, 900 bp, Cricetulus griseus
  modified_base (229)..(229): a, c, t, g, unknown or other
ccccccttttctaacttaggataatgatgctctattttgtttatttgtttctaaagtgacttgtggacttgtgctgtataaactgtattaaaaggttctgtttttaaagattgattgtcattcctctggggacagtggctgctaagaaatctacgttgtaagagaacacaatgaaaaagccctggccctgtctctcaaaacttaactttctctgtatgattaaaaaatnttccatttattttacttcgtgtttacttcgtggttacttgattttgagggagtttaaaatattcaactttgtattaaagagctaggtacaagggtgtcttttgcagtgggaggtgtatatatcgtatttgggtgtataagtagtgaaaactcaagcttcgtgcatctgtatttgggatgtgtcaatgacgtgaagtgaaatctgctattaaagaccctggaggcaaatgagttgtacaaggttttatggctctgtggggaattttaatgacctttctgggcaccttttgtcccctatttttaaagtgatggtgaaatggccctattggagggcctctctagtcgaactctcctggcaggaccatatgctcaaaactctttgtacagttttaaaaattgaggagtatccctgctcggaagcatctctggtggtgtgtgttgtgttgttctgtgtactgtacgtgacacaagcctacagtgtttgcactaagaaaagcttgttgggagaagcttgctgctatggagaaaagaacatattaaaacttattttcccttggggtttatttttgttttatgtttttgttgttgttgttagctttcccactttccattgagtagcattttgtagaataaatttaattaagaacaaaaaaaaaaaaaaaaaaaaaaaaa

SEQ ID NO: 3158034 - DNA, 923 bp, Cricetulus griseus
ggtctccaccagttgaccagccctcggtacaagttcaacttcatcgctgatgtggtggagaagatcgcgccagctgtggtccatatagagctcttcctgagacatcctctgtttggccggaatgtgccgttgtccagtggttccggcttcatcatgtcagaggctggtttgattatcaccaacgcccacgtggtcaccagctccaacaccgcctcaggccggcagcagctgaaggtgcaactacagaatggagatgcctatgaggcaaccatccaggacattgataagaagtctgacatcgccactattgtaatccaccccaagaaaaaagcttcccttatgttgcttctgggtcactcagcagacctgcggcctggcgagtttgtggtggccattggcagtccctttgctctgcagaacactgtgacaacgggcattgtcagcactgcccagcgagatggcaaggagctgggcctccgagactcagacatggactatatccagacagatgccatcatcaattatgggaactctggaggacccctggtgaacctggatggtgaggtcatcggcatcaacacactcaaggttgcagctggcatctcctttgccatcccctcggactcgcatcacacgcttcctctccgagttccaaaacaagcacatggaccccagtacagccaagactggtcccatgaagaactgcaattgaggagcctcgttctgttccaagtggccctgtgtgaagatgacaggagcaggcagagcctgtccctcccaagaaaccaaggcaccttctgggtgaacagtgggaactagccaccttttctctcagctagtaggaagctcagaactagcccagggttccacctttgctccattggtagccttggcccctttctctagtgaccggagctttccag

SEQ ID NO: 3158035 - DNA, 383 bp, Cricetulus griseus
tggtacagacccaccttcaggacttgaaagaggtgacccacgagctgctctacgagggcgaccgggctcgctgcctacagaatctggctcgacctggggcccgggatcgagccagccgcagcaagctttcacggcagagtgccacagagatcccgctgcccatgctgcctctggctgacactgagaagttgattcgcgagaaagacgaagagctgcgccgcatgcaagaaatgctggagaagatgcaagctcagatgcagcagaaccaggctcagggcagcagtcagattctctgtgagatcctcacggccgcctaacctgcatctgctctccgccaatctccggtcccatcccggctttagactgcccagcgcccaatccgg

SEQ ID NO: 3158036 - DNA, 365 bp, Cricetulus griseus
tgtgtcgatcagaatcaccagcgacagtttgctttgctgtttggagtggatgagcaactgttgagtgctctgatcatgggagcaacgggagcagtaggcagtacctataactacctggggaaaaaggcaaaccagatgctggaggcttttgaacggaaagacttcactacagcacgcaattaccagttttgtatccagagatttatcaactatgtgatcaagctaggttttggagtgtcacagaccaaagccatcatgacgctggtctctgggattccaatgggcccaccccggcttcctctgcagaaagccacacaggaatttactgctaatgctaaggacaagctgaagagcctgaatttcct

SEQ ID NO: 3158037 - DNA, 432 bp, Cricetulus griseus
catagtgaagaaagaactgctgtgcgatgtggccggggggacaagtaccacgtcaataacaaacatgacagcgaatacaccccactgcctccaaacaagatcatccagcgggctgaagagctggtggggaaggagattcactacaagctgaccagtgagaactgcgagcactttgtgaatgaactacgttacggagttgcccgaagtgaccaggtcagagatgcggtcaaggtggtaggcattgctggaatgggcttggcaaccttgggcctcattggagtcctggtctccagaaacaagaaacagaagcaatgagttggatgactatccagcccaaggagctcttcttttgctagaggctttgaagtttgatttatagattctactgttttattattagactatttccacagcatacaataaagcacaaga

SEQ ID NO: 3158038 - DNA, 176 bp, Cricetulus griseus
ctccagatccaggtccgaaaggcagctatagccagctatgagaaatcagatgctgtttacacgggcctgagcacccggaaccaagagacatacgagactctgaagcacgagaaaccaccccagtagctttagaactcacgtccttggttgcattctttttctgcttctagttctct

SEQ ID NO: 3158039 - DNA, 235 bp, Cricetulus griseus
caggcgcaagaggcaaaaatgaaaatgaaatcgtgaaaaaagagagttggtgtttaaagaagatggccaagagtatgcgcaggtgatcaaaatgctgggaaaatggacggttggaagcaatgtgtttcgatgggtgtgagaaggctatgtcacatcagaggaaagttgagaaaaaggtttggataaatacatcagacattatattgattggtctgcgagactatcgaaggataac

SEQ ID NO: 3158040 - DNA, 1027 bp, Cricetulus griseus
ggctgcggcagccctggagatgttgctccccactgcgctatattcgcgcctggccggggcgcccggggcagccgaaccgctgcccgtggagcgaaaccctgcagctggggcggcgcccttcctgttcacaccgcgcctcgtccgcttcccacgggatcacgagttctttgaggatggggatgtgcagcggcacctctacttgcaggacatgctcacgcaagtgtccgagacgccggagaagtccatggtgcctgagttcacctgccaggtggctggctgctgccaagtgttcgctgccttagaagactaccagcaccactaccacatgtctcatggaaacacctgctccctctgcagccgtgccttcccctctgggcatttgttggatgtgcacatcctggaatggcacgactctctattccagatcctggcccagaggcaagatatgtaccagtgcttggttgaaggctgcccagagaagttcaggaccagccaagaccggaaggatcacatggtgaggctccacttgtaccctgcggatttccgatttgataagcccaagacaaacagaggcccagccatgccagcagcagcagacccaccagccagagccctgaaagatgacagtgatgctatggaaatctgctctgaacctgctgccccacctccctgcaggcggacctacagtcacagaataccttctactgtctagttttggccagggtgcagctagaggctttaaaagcactaagaaaagaaacaaacacccctgatggatcctggtgaggaaagccagacagactttcaaggagtggtgtgccagggcctttctcttgcttctggatagctgccctgagctggacccttgccaccttcttatttccatatctgatcacatgaagcagccagtgtgtagaaacccagaatctgcagattccagaaataaccaggacacactgaaggaatgagatggagaaaccactacctgcttcgtgggagctgctctaagatgtcactattaaacata

SEQ ID NO: 3158041 - DNA, 1598 bp, Cricetulus griseus
gaaatgaagacttagaaaaggaaggaaatatgcctttagaagacctactggcattctacggctatgaatctacaattccaacggttacaaattccagtgccaacagccccccaagtgaacttgcagacgaactaccagatatgactctagacaaggaagaaatagcaaaagacctattgtcgggtgatgatgaggaaacacagtcttctgcggatgacctgacaccgtccgtgacttctcacgaaacttctgatttcttccctcggcctttgcgatcaaatactacatgtgatggagataaggaatcagagattgaagacgttgaaacggacagtggtaactcacctgaagatttgagaaaggaaataatgatcggtttacagtatcaggcagaaatccccccttatcttggcgagtacagtggtgatgagaaagcgtatgaaaatgaagaccagttaaacttttttttttctttctttcttttctttttcttttttttgtgttgctgtttgtgtgtaagtcgcttcaaggttgtgctgctgactaggtaggatgtagtggtcttagtgatggaggggagggtatttattctaaaaactgtgaactgcaatgacatccttagttttggatgatgtgtattgttttctttgcagcattttaatgaagattgctttgaagtgtttatgcagtagcacattgactataaaatttagtttagcacagaggacaaagggtagttaaattaataacttaaaattggtctctaacttatacatctaaaatctagtattcctgtatgcacacagtaaataatgggtagcctgggctccagtttatctatgcattgctggggtcttgatacaagatggaaacagtgtttcttatctgagttttgattatcagcaagttgaatggacactttagttatttaaatagaattttgaccaaaatccagaaaatgatatgagagaaaaataaattccagctagtttaacagatttttaaatgctaacctgaatttagcctcttagagagtgctacctagctggtaacgtttacttttaattccttgttaaaatgaggcaataataaaaatactaaagtctgtacaattaggtctaaagtaattgtgctaattgtttcctttttaatttttaaaattgaaggtcataaatatttgagaacatcagacctaatagagtagtagtactatttaatttaaccaaagtctagtaaatatttcaactttgaatgtaaactaacaaacccgaccaccaaggagattgtttgcccagagtttcaaagcacattgtctacgaatggaaattgaaataatttataaaatattgacattactatgttttttaaaaagttcctaattttttcactaaaaggagggaaactattagttttattgttaaatatggtagatattaatattcctcttagatgaccagtgattccaattgtcccagtttgaaataagtatcctgtgagtatgagataaattagtgacaatcagaacaagttttagtatccaatgttcaagaggaagttgctattgttgcattgattttaatatttgtacataaacactg

SEQ ID NO: 3158042 - DNA, 394 bp, Cricetulus griseus
tactccgaggcttggggctacttccatttggccccggctaggcccggacacccgacgggcacctgggccacctgccgcctgtgcggggagcaagtgggcggccacccgggcttccagacctggacgcgggcgctgtggcgacacctgagcggcgcgcacctgcgggagctggagaagagcggtgctcggagctcgccgcccgccgcaccctgccctccaccacccggcccggccaccgcggctgccgagggcgactgggcgcgcctgttggagcagatgggcgcgctggccgtgcggggtagccggcgagagctggagctagagcggcgcgaggcagcccttcggcaggcggaacgtgcgctagagcgcaggcgcagggctctgcggcaggagg

SEQ ID NO: 3158043 - DNA, 594 bp, Cricetulus griseus
atgttggcagcaatgtcatatgaccgttatgtggccatctgtaacccattgctttacaatgctgtgatgtcatatcaagtttgttcctggatgatatttggggtgtatagcatgggtttgattggtgccacagctcacacagtctgcatgctaagagtgcatttctgtaaggctgatgtaataaaccattacttctgtgatctttttccattactggagctgtcttgctccagcacttttatcaatgaagtagtagtattgtgttttagtgcttttaatatccttttccctacactgagtatcctgagctcttacattttcatcattgccagcatcctccggattaaatctactgaaggcaggtccaaagccttcagcacttgcagctcacacatagcagctgttgctgtcttctttgggtctgctgctattttatgtacctgcagccatcatcagtcagctccatggaccaagggaaagtgtcctctgtgttttatactattgtagttcccatgctgaatcctgtgatctacagcctgagaaataaggatgtcaaacttgctctaaagaagttgtatgaaaaaagtttctcat

SEQ ID NO: 3158044 - DNA, 309 bp, Cricetulus griseus
cacacacacacacacacacacacacacacacacacacacacacactgcacatgaatcaattttaatcttttaataaggttagtaaaatacatgtagaagatcacatcacttgggtttgcagtgactaagttattctatataaagaggtcagaggtcaccaggcactgtctgatctgaaccgttctgcatgtagctccactgaatttcatgatatcctattctgacaagtgggaagaagagttctgtcctttgtagggttctggaacattctttcttccttccaaactcctgacttaggagagacaaaaa

SEQ ID NO: 3158045 - DNA, 525 bp, Cricetulus griseus
ctttgtctatgctttggagcatggagaccacgtctatttcttcttccgagaggtctcagtggaggatgcccgactggggagggtgcagttttcccgggtagcccgggtgtgtaaacgtgacatgggtggctcacctcgggccttggatcgccactggacatccttccttaagctgaggctcaactgctctgtccctggggacgtctaccttctactttgacgtcttacaggccttaactgggcctgtgaacctgcatggccgctctgctctctttggggtcttcactactcagactaatagcattcctggatctgcagtctgcgcattctacctggatgatattgagcatgggtttgagggcaagttcaaggagcagaggagtctggatggggcctggactcctgtgtctgaggaccgagtcccctcacccaggccagggtcctgtgcaggtgtgggcggagctgctttgttctcctcctctcaagacctacctgatgatgtcctgctcttcatcaagggcacac

SEQ ID NO: 3158046 - DNA, 1539 bp, Cricetulus griseus
gtctgcgggggcctatgccttggcctctacctgctctcggcgctctacggctgctgccgtcgctaccagggcaaggaggaggtggtgtgaggccgcccgctctactgcggcccagatcggtgcggggatccctcccgagcccttcctgccgcccccgccccgtgccggtgcgcccctgcgccctctccctgtctgtgtttccactgtccgcgccctggatccccgacgttcagttccagtccgactgctgcaccgcagcttagcccagacaccagcttccagggaccagcgcagctatccgaggcgctggcgcacacactcagatgggccgccccaggagaagtctggaaggccctttccccattccttgtcctgagctagacgtggacaggcgccgccgcgtagatccggcggaggctcccaaattggaaccagtctttggacgtggtggatagcaaaggcccgctggctgtaccttactaaacaacgcaagtctctccgcatttatccttggggttcattcagaccaggccaaatgtgctaacttctctggcctttcagatgtcactcaccagcttctgctgcaccccacccttaaatatgtttgtattagggatcctgcgggaccaacagcgattattaagatgatgcccatccctttgggggcccagagcctgctcctgggaacagccattttaagataagagccacattttttcctctaaagcagtaggttgtctaggaacccactcaggtactacctccaaaaagaaggcttagaatgcaaatgggcctgtcaatggtgcaagagatcctggcattgactctgagcagctggtggggtgagctctgccaccaaattgagagttctctggacctggggtggacagcaggtgccacctctaaggtttccaggtagctgaggcctcaaagactcccagagtggtcaaactgccacagccctgcctgcttggctgcattggtctacctgggataagctcaggtccagttccctgaggagctcagccccagtgctccagacctgtggtcaggtgaccttgctcagggtcacacatcctggccctgatggtgcctcatctacccagatgtgcttgtagcattccagagctcactagctcttcctgatgtgccttccagcttggcttccagcagccttgtggtccttcagtctgccaaatgtgagaaggacggatgagactgctgtgccaccctccttccatcaaaagccatacaatgatcacctgatgtggcccagagcatttggatactggcagtagtctcctcggcttacttctctgacaccaggactggggccaagccaagaccacccagacagctcccaagcaaagtctggggccccttgtgggcccaggagacaaatccaacagtgtgcacaaaggccaagcaggggtggattttggtatagggagggtggctagagggaggagccatgtgccttttccagcaatgtagtcatggttaccccaggatgcctttggaataaagtttggtttgtct

SEQ ID NO: 3158047 - DNA, 746 bp, Cricetulus griseus
tagacaggcataaatgcaaagtgtgtgaggaaacatttcctaatgctgaagcccttcggggacataaaatcattcactctggagagataccggaatgtaaggattgtgggagaatgttctggacttccagttccctcgaggtacataaaaggcttcatacaacagaaaaagctttatgaatgtaaatactgcgggaaggccttcacaagttacagttcctttcagctgcacaaaaggagtcacactggagagaaaccttacgagtgtgagcaatgtgggagagccttccgacattccagccatgttcaagcacataagagaattcacactggagagaaaccctatgagtgtaagcagtgcgggaagacctttacttctggccattgtgcaaggagacatttagggacacacagtggagcctggccttacaaatgtgaggtgtgtggaaaagcttatccctatgtctattcgcttcgaaaccatcaaaaacccataccgaagagaaacttcatggatgtacacagtgtgggaaagcctttaaatatgtcgcttccttacgaaaccatatgaccactcacactggagagaagccgtatgactgtaaggagtgtgggaaggctttcagctgttccagttacatgcagagtcacatgaggacacacaacgggcagccctatagatgtgaagaatgtggtaggtcgttctcgtactccaaaagtcttcgtagacacatgactatacacagt

SEQ ID NO: 3158048 - DNA, 714 bp, Cricetulus griseus
agcagtatttagaagttgaactttgtccacatggacagcatttagttcttttactctctggaagaagaaatgtttggaaaaaagagcttccattatcattcaaagtgttcagaggagagacaaactgggaaggcatagcttttcttccttggagttattttccacccaatgtgacaaaattcaactcatttgccattcatgggtcaaacgatcaaagaagttatgaagccctgtaccctgtgccacagcatgaactgcaacaaggacaaaaacctgatttccatcgtctagaatatttcaagcctttcagtttttaacacactgcttggagaagaatggaagcagccagaatcagacttgtggctaataatataataaatcaatagttcctctcacataaatgaaacatgcagacaaaaatgtcaacataaggagcctcagagtgaaactgcaccacagatcaaatagacacagctgcagaatgttccaccaacagctgaaaaatgaactttattttcaggtgctcatggaacactttccagaataagactagtaacatgtttgctgcaattatgatggctgtagctgcttgggttatctataccagaagacttttagatctgataaatcaattcagccaagtggtacatagcacagtcagcatatatgcagaaataatagcgtttccacccatcaataaccagttgctgagaa

SEQ ID NO: 3158049 - DNA, 435 bp, Cricetulus griseus
tgaatgaacaggcccagcagctacaggagttgaactacagacttgaggtacactcctgtgaagaagctgacaaaaaccagactcttggagaagctgttaagagtctctccgaggcaaagatggagctgagaaggaaagatcaatctcttcgtcagctcaatagacatcttacccagctggagcaggacaagcgtcgactggaggagaacatccacgatgccgagagtgccctccgcatggcagccaaagacaaagaatgtgttgctaatcacatgagaacagtagaaaacatgcttcataaggtcagagatcagatctcgctgtcacggactgcagcaagtaggaatgacttcaccctgcagctacccaaactgcacctggagacctttgcaatggaggggctcaagggtgggccagaggttgtagcatgccagg

SEQ ID NO: 3158050 - DNA, 435 bp, Cricetulus griseus
ctgtgtctgcctctctgaaaggcctgaaatcactagagtaccttgacctgagcttcaatcaaattgctaagcttcccttctggcctcccagcctctcttctaactctctacctagacagtaataaagatcagcaacatcccagatgagtatttcaagtcgctttactgggctacagtatctgcgtttatcccacaatcaactggcttgataagtggagtaacctggaaactacatttaatatatcatccttgctcgaattggatctctcctataataagcttaaaagcataccgaactgttaatgaaaaccttgaaaactactacctggaggtcaatgaactcgaaaagtttgatgtcaagagtttctgtaagatcctgggaccactatcttactccaagatcaagcatttgcgcttggatggcaatcccctcac

SEQ ID NO: 3158051 - DNA, 234 bp, Cricetulus griseus
aagcatccctttccatgatacactccaagatgatgagtgctaatcctgaagaagaccctttggacacttttctccagtatattgaggatatggggatgaaggcatacgatggtctggttattcaaaatgcgtctgatattgcccgtgagaatgaccgcttgagaaatgaaaccaatctggcttacctgaaagaaagaatgagaaacggcgaagacaggaagaaactatcaaacg

SEQ ID NO: 3158052 - DNA, 1333 bp, Cricetulus griseus
aagctgggaagttatcaattccaagccagatgaaaggcccaggctgagccactgcattgcagaatcatggatgaatttcagcatatttcttcaagaaatgtctctttttaaacagcagagccctggcaagttttgtctcctggtctgcagtgtgtgcacattttttacaatcttggggagttacattcctggggtcatcctcagctacctactgttactgtttgcttttttgtgtccactgtttaaatgtaatgatattggacaaaaatatgcagcaaaatcaagtccattctattgaaactagattttggaatcggagaatatattaaccagaagaagcgtgagagatctgaaggagataaagaaaaaagtcacaaggatgacagtgaattagacttttcagctctttgtcctaagattagcctcacggttgctgccaaagagttatctgtatctgacacagacgtgtcagaagtatcctggactgataatgggaccttcaacctttcagaagggtacactccacagacagacacatctgatgatcttgaccggcccagtgaggaggttttctctcgagatctttcagattttccatgtctggaaaatggcacgggaacaaatgatgaagatgagttaagccttggtttacctgctgagctcaagagaaaaaagcaaccgttggatgctggtcacagaccaagcaaaggtgggccatcagcagctggcctctcccttcctctgaacagtgaccaagcccttcacttgatgagcaacctggctggggatgtcatcacagctgcaatgacggctgccatcaaagaccagctagaaggggcccagaaggcacttgctcaggctgcacccattataggagaggacacagacaccgaagaaggtgatgactttgaactacttgaccaggcagagctagatcaaattgagaatgaactgggactaacacaagaccaagatgcagaagcacagcacagtaggaaaccttcaggcttcctttcaaatctacttggaggccattaatctgggaatcagcttgcagaaaagcacagacaaaccacccaaaaatctcagacaagcagggggaaaaaaacaaacaaaaaattggaaaaattgaattgtaagctttaattacttttgatttttgttttcttttcccttctgtagtgagttggatatgtatcagctgataatgatagactgacatttctgatagctatttttatgtaataagcatggaaatgaactttatagttacatatacacatactgtggtgtcataagtgaataggggttgtttttaaagagaaaaaaaaaa

SEQ ID NO: 3158053 - DNA, 414 bp, Cricetulus griseus
gtgcaagtgccctacacctgtcctgctgctgccgctggggacaagccgccaagaccctggggcccagagcttcttcctctggccagctgcagatgatgcaggctctggagaggaaacaggatgctctgtggcagggcctggagctgctggagcacggccaagcctggtttgcagaccacctcagggaggcccagcaacggcagctgcacctgggggccctcggtgaggattttctcatggactttgcctcagaggctgactccccacagctaacccagatccaaaaggtgaatgctggtttgcgcagtctgattcagacggagttgtcaaagcagcataaagaagtcacacagtccaagggagaggtggctctgtcaggctgcccccaagggcagaggggccctacccatgtgt

SEQ ID NO: 3158054 - DNA, 450 bp, Cricetulus griseus
ttttgattttagccattctgacaggagtaagatggtatcaattgttttgatttgcatttccctgctgcagttccctgttgaacactttcttatgtgtctttcagccattttagattcctctattgagaattgtctatttagttctgtaccccattttttaattggattgtttgatgttttggtgactagcttcttgagttctttgtatattttggagatcagccctctgtcagatgtggggttggtgaatatcttttcccagtctgtgggctgtcgttttgtcttgctgactttgtcttttgccttacagaagcttctcagtttcaggaggtcccatttattaattgttgatctcagtgtctgtgctactgatgttatgttcaggaagtggtctcctgtaccagttaattcaagggtatttcccactttgtcttctaatagattcagtgt

SEQ ID NO: 3158055 - DNA, 477 bp, Cricetulus griseus
agggctgtaggggcaccttcagatcagcatgagggagtgtctctccattcacattggtcaagctggtgtccagattggggatgcttgctgggaactatattgcctggaacatggaatccagccagatggcttcattctggacagtcaacaggatcatttggaaaatgctaagatggaacataggaatctttagatactttctttcatgagacaacagccggaaagcatgtgcccagagcacttttcatggacctagaaccaactgttatagatgggatccgtgtggggaagtaccactcactcttccacccagaacagcttgtgaatggaaaggaggatgctgcaaacaactatgcacgaggtcgatactctgtgggctcagaggccatcgagcttgtgctagaaaggatccaaaagctggcagaacgtgtgtgtgtgtgtgtgtgtgtgtgtgtgtgtgtgtagatgcatgtttgt

SEQ ID NO: 3158056 - DNA, 1154 bp, Cricetulus griseus
tggcacattgacaccatcttgcacgtgctgaccacggcaggcacccatgtgagggacgacgcagtagccaacctgacccagctgattgggaggcccaggagcttcatgcctactctgtgcgccgtctctacagtgccttagcagaggacatctcccagcaaccactggctcaggtggcagcttggtgcattggcgagtatggggacctcctgctggagggtaactgtgaggaaatcgagccttttcgggtggaagaagaggaggtgctagcgctactggaaaaactgctgcagtcccacttgtccctaccagccacccgaggctatgctatcacagctctcatgaaactcagcacccggctccggggagataacaatcgtatccgccaggtggtgtccatctacgggagctgtgtggacatagagcttcaacagcgggctgtggagtataacgtgctcttccagaagtatgaccacatgagggctgccatccttgaaaagatgcctcttgtggatcgaagtgactctcaagttgttgaggaaaggaaggaaaacaagcaggggcccagctcttggaagcagcagcccccgtcccacagagccccaggccgctaagctcttggatctgctagatctcctggatgacactctgggcatgcccagcatcttcctcctctggctccttccccaggggaggccttagtacaccttctcgaccttccctgtgtacctccaccccctgctcccatccccagtctcagagtgtttgagcgtgacggcgttcaactggacctttctttcgtgcggcccctggaaaccccaggcttactcttagtcactgccaccaccaccaactcctcaaaggaggatgctacccactttatttgccaggcagctgtgcccaagagtttccagatgcaattacaggctcccagtggggacacaattccagctctagggtggccttcctgtcacccagctcttcagaatcctcaatcctaacaaggcgactttgcgactaaagctgcgcctcacctacaaccactttggccagccagtacaggagatctttgaggtggataacttgcctgtggagacgtggcagtaacttgctgtggttcctgtctggcctgggtttttccaggctcttggtgt

SEQ ID NO: 3158057 - DNA, 912 bp, Cricetulus griseus
ctggaaaaaattagttgacattaataaacagagccgaacaacatgtgtgaatgcaaacatgggaataagaatcattgaaacccttgaatcccattcttccctacatcgaatttgtgctgagaacttaattgcaattcatggttccttgggaagtcagtctgtgagctcagaagaagtccgtcgactactacgattgctgagagtagatgaatctgagttaattcacccttataccattcctgtgactcgtgcaatcctgacaatggcccggaaactcagttttgagagtgcactgcagtattttaatttgtcacatagtatggcaggaatttctgtgcctgccattcagaaatggcctgggtctgcattttctttcaccgcttggttttgcttagatcaggatcactgatgaaatactgagtgtgggcatcagcactgaactcgacatggcagtatcagggtcaagggatggcactgtgattatacataccattcagaaagggcaatacatgaggactttaagaccaccttgtgagagttccctgttcctgaccattcccaatttggcaatatcttgggaaggacacattgtcgtctgttccagcttggaagaaaagcccaccctcaaggataagaacatgttacatgtgttttctgtaaatggaaagtatctggggtctcaagtcctgaatgagcaaattcccttaaatctaagtagcaaaatttaagttatttctaataaagtagtgttgataaaggagagttgagagatgtggcttttcatgtattctttagataatcactttctgtttactgaccattacattaaaaacataagcttttatatatatatatatatacacacacacacatatatatacatatatatatatatacatacacacacatata

SEQ ID NO: 3158058 - DNA, 844 bp, Cricetulus griseus
ctcatttgttctgtggctggttaccccagtggaaaagtagtaatgtcctgtggtgggatgatcccccaacatggccacaggccacagtccgagcctgttcaccaaatcacagtgagtcagatgaagttcaaacctggagaccagatccaagtcactttatcagggcctcagtttagaggctttctcttagaagctcgtgatgccgaggatctgagtggccctcctgttggctccttcacactgattgacagtgaagtgtcgcagcttctgacttgtgaagatgtgcagggttcagccgtgagtcatacgtctccatccaagaagacagaaattaaagtctactggaatgctccaagcagtgccccaaaccacatacagtttcagtcacagttgttgagaagtataaaatctactgggtgaagattcctagtcacataatttcacaaccaaatgctcctaccttcacgacgcctaaagctacaacagagaggagtcatcatgtgatggacagctgctagaataatagcagtggctgccatgttcctaggaatggatttaccgggactgaatctccccagtccacagaagacctatgcaatgatggggtttgtggtctggcacattggcacagaggtgcttctggagatacatgcttatcggctctctcgaaaagttgaaatattggacgatgatagaattcagatccttcagtcactaactgttgctgaagcagagggccatgtttttaagaaggtggtgttggtgatttacatatgtggaaatatgattttcctcgtgatattcttatctgcaatcaaccaagtatgagcaagcgaagactttt

SEQ ID NO: 3158059 - DNA, 160 bp, Cricetulus griseus
gtggtatcttggctaatctctcttcctgtgtggtgttggaccgattccaggcagtggaggctgtttgacaccctggagacgaacggcacatgaactaatggcgagcagaatagtttcttggccagtgtcgatatttcaacagttccttgggacacagaca

SEQ ID NO: 3158060 - DNA, 607 bp, Cricetulus griseus
ggcctcctcggccggcggagcgatggctctcggcggggcccgcgacccgcctgaccccgagcccggagagcagcctgccccgggggcgtcagccggaggagcggaccggtggcgacgccgccccgccgccccgggccgcagatcacattggcgccaagtttgacatcgatatgctggtttcacttctgaggcaagaaaatgcaagagacatttgtgtgatcaaggttcctccagaaatgagatacgcagactactttgtagttggtagtgggacttccagccgacacttacacgctatggcctactacattgtgaagatgtataaacacctgaaatgtagaagtgatccgtatgtcaagatcgaagggaaggacgctgatgactggctgtgtgtggactttggcagtatggtgatccatttgatgcttccagaaaccagagaaacctacgaattagagaaattatggactctacgttcttttgatgatcagttagcccagatagcagctgagacattacctgaagacttcattcttggactagaagatgatcctgactccagtggagttcaaatgtgaataaacaaagttgatgcctttcataccct

SEQ ID NO: 3158061 - DNA, 191 bp, Cricetulus griseus
gagtttgtccgaaaacaagccagcacaaagctgcctgacccggaagtcatccagttctgtgtcgccgtcttcaaatgctcccggctcctgctccccagacggagttgaccagcaattcttagaagactatcacaagatgatcaaaggaggctccgttgaggatgccagccagtactactgtgacaaggtga

SEQ ID NO: 3158062 - DNA, 789 bp, Cricetulus griseus
ggagctgactttcgcctgcgcccaggcggaagcgagggaggaggagctgcgcgtgcgcgagagcgtgcgcagggataaaacgctgcagaaggagaagaggaagcggcgcgaggagctgttcatcgagcagaagaaaagaaagctgcttccagatgctgttttagagcaactaactacagcctcagaagctgacataaaggaatcaccagaaaatgtaaaagttcatttgaaaaagaaaagtgaacacattgcaaaaggaagaaactccaagaaagttaaaatacaaaaagtgcactcaggcagtcagactaaaagctacttggctgtaaggctaaaagatcaagaactgagagattcaaggcaagaagcagctaaacacttcatccacaattgtttatatggttcagaatccaagaggactactgtaaacaagttcctgtcactgaacaataagaggttaccagtgaaaaaggctgcagcccagtttctcaatagcacctggggtgctcagaaacaacaaaatgccaagaggtttaaaaaacggtggatggctagaaagatgaaaaagaaaacttacaagtgaattgaagtaaaagcaccgtgaagaacctgtactttgtctatatagaatttaagtgtatttggtgtaaagaggactgatgtctcaaacttcaaccattcgtaaatcattttgtaaaggatcattgcaaaaaccataaacgttcttgtctggaaaagacaatatcactacattttattgcaatatagtactcatttaagcacttaaaa

SEQ ID NO: 3158063 - DNA, 433 bp, Cricetulus griseus
aaaaactttaaggatcatcaaagaattcattctggagagaaaccctacaggtgtaaagaatgtggcaaagattttagaagttctacagcacgttctaaacaccggataattcatactggagagaaacgttacaagtgtgaaaaatgtggtaaaagctattaccagtcttctggtcttaagcaacatcaaagaattcatttgtgagagaaaccacacaagtgtgaagatgtgcctagatcttttgtattcactaagaacttttgaaaagacctgataattcttactgggcattaatgccacaagtgtgaatagtgttacaaaccctttaataagctttccaatatttctcaacacatggtagttcatattggagtgaaatggtacaaatcttaaaatgttcatgaaatgtttacactgcttgataccattaaaa

SEQ ID NO: 3158064 - DNA, 1320 bp, Cricetulus griseus
gaggctcggctctgcgccgccaggggctaggagcgcactaagaactctactttctcgtgagcccgagcccggcaaatgggcgaatgaggaaggagagcagggacatggactgctatctgcgtcgcctcaaacaagagctgatgtccatgaaagaggtgggggatggcttacaggatcagatgaactgcatgatgggtgcactgcaagaactgaagctcctacaggtgcaaacagcattggaacagctggaaatttctggaggcacgccggccttcagctgccccgaaaactcacagaaacagccggaatgcccttgctggcagggtagcggaggtcctaccgggcctatggcccatccttcctccatccagccttcttttgacagcagccccaagtttccatgccataggagtgtctgtgggaaggatcttgctgtccttcctaagacacagcttcaggagcacaatagctgtaccccctccacgttggatgtcccgggcagaaatcggcagcctctggtattaggggacaatgttttgcagacctggtgggcaactggctagacttaccagaactggaaaaaggaggggaaaagagtgagactgggggacccagtgaacccaaaggagaaaaaggccagtccagggagctgggtcgcaagtttgccctaacagcaaacatttttaggaagttcttgcgtagcgtgcggcctgaccgagacaggctgctcaaggaaaagccaggctggatgactcccatggtctctgagtcacgagcaggacgctcccagaaagccaagaagaggagcctttccaagggctctggacggttccccttctcaagctccggagagcctagacaatttatgtgtgtgtgtgtgtgtgtgtgtgtgtgtgtgtggtggtggtggtggtggtggtggtggcaggtgtgtgtgtgtgtgtgtgtgtgtgtgtgtgtgtgtgtgtgtgcttttttttctttttccttccttccttccttccttctcacctgttccccagaggctccagagaggaccctatctttctcaagtcaccccaacattctctgcaggataaaatcaagagtacagactgtctgggaagctgcagcctgtgtgcagcttctctggagaagtgtccattcacctcaggtgaactccccaaccagggcagttaggagtttctgccagcaccaagcatttctatgaattcctgatctgagagtcaagtaaataagaatccagacccaggcctgtttttgtgtgagcctgagcatgttgcctgccctgttggagcctcctctactctcgtgtgaagc

SEQ ID NO: 3158065 - DNA, 1746 bp, Cricetulus griseus
  modified_base (352)..(352): a, c, t, g, unknown or other
ctgaaggtgtggattgtcacctctgaaactggtggaatgcaggatactgagccaatatttgaggaggaatcaaaaccaattcattgtcagaattgccaaagcatctctttttgtgcattcacacaaagatcacttttggttgtatgttcaaaatactggagggtatttgatgctggagactactccctgttatgttcgggtcctagtgaaaatggacagacatggactggaggggactttgtgtctgcagacaaagtcatcatttggactgaaaatgggcagagttacatttacaaactccctgccagttgccttccagctagtgattcattccgcagtgatgtggggaaancagttgaaaatttaattcctcctgtgaaacatagcctcttggatacaaaaagataaagagttggtaatttgtcctcctgttactcggttcttctatggatgctgctagcattgataggcagttattcaattccatttcctagaatttagccactgccttgtcagtaacaccaatcctgatttgagattaatgagaaaatattaaaatacatgtgtatttttccttttagaaaatacttttccagatagctagctttctgaaatgctcatttcctgcttaaatgttagtatatctcctagtttaaaatgcagatcacccctactcaccatgtggtgactatagctaaccttctaaggaaactttcaacaaagaaccaagtttggaagcatcacagatttgtacagtggaggctctcccgtgtgtcactatagattcttctgttctggaaaggcctcctcttcaggaacttcacaacctgcagttctcgtgtgtatggcgatatcactcacagtggtcatttcaacctcgctttccaaatactgaccaatgaaagaacactaggaaggcatttgtgggggttgatttgtatgttggttgattggctagttacacaagatggtttattaaatacaaaaatagaaagggagttattgagttcaaagcaaatatgtaatattaacagaggaacaaaaatgataatgatagcatttagtcttaaacacatagattgtcaaagtttgtgtaatatgtaggaaagtaggagcaaggtccgtgaataaatacatagtttacaatcctttaaagaacctatgaaaaagctaacatcctcagaatgtcttttgcctactgacataggttattttcattggtcaaaactctatactgtctcttggttttcgatgttggggctctttcaaaagtgaatgtatttcacatgcatgtatattgtatttataatgattatatatgtagcttccaagaaagaaataaaaaactgtacagtgtagacttcggcgaacaagctgatgtattttgatgtagatggagaaatgtgtggcaggctccagagattgctgtctgcccagcacgggtttactttatggacttcagaggaaggagttaaaccatagtgtctcactgattttgttgacacagcatttggacctatccttgtaagtataaagacctatgtggcttcactggtgatttgcaagcaaaaggtgacatgatgtgacacctatatgaaaatgctgtcatgtttgaactgcatatagtgaatgaattaagatgtctgtctcctaagacatttctagatgactccatttaatagactctgtatgcgtttaaaattgatgtgtatatacttgtgttaaataaaactgaattgtactaaa

SEQ ID NO: 3158066 - DNA, 3823 bp, Cricetulus griseus
  modified_base (1350)..(1350): a, c, t, g, unknown or other
tctggatacaactacctggcatatgatattggaaatcatttcaatgaatttgcaggtgtcagtgatgtagactatagtctctatccagatagagaactccagggccagtggctgcgctcttaccttgaagcctacaaggagtataagggctttggcagtgaagtcactgaaaaggaagtagagacactcttcattcaagtcaatcagtttgcattggcttctcatttcttctggggactctgggctttgatccaagccaagtactccacaattgagtttgacttccttgggtaacactcatttaatttggttatcttgctttacaaattatgcctctaaacaaccaatctatttttaaatagaatgatgttaaaaatatgcttactgttgtcagtatgtggcaggctagagatttgtccatcagtggaaagagtagagtcagctttagcctttggcaatacagtccatgttacatgtgaattatttattacagacttgacatgactgactattgttgtatttgaaacaaacttacacagagctcatcatacgtggaatccaggaacagcatttagattctttctatgcagattcacgattcactccttaggttttgtgtctgtagagtcagccagtgattgctgatccctgtaatttcagaataatattgttaaagcagttagaagaatcagtaaggaatatttaggtaggtcattgagcttgaatacttaaaatcttaacaaataagaaaatgtgaattaaacagtagtcgtggtaggaggacttgttttatcttgtttttgttagtctggtttttatttttgtataggtgtaagagggaggcaactattctatggaaggaagttaggtctttgaggtagacaaagaaggctttaatctttgaagactgtgggcttgagcgagcagtcacagctaacttagattagtcagacaggctttgcactttgggtcacataagtgcttttgtacagagttagctccatggatctgcatatttaaagtatgcaatacagatctatcctaagacatcatctgatatattgttccacattacttaagttctcagacaagtgctttaaaatacttggattgtttcagtgtgttcaaactaataaagaaagtagaaacacttacagaccatggccatctgagatggtaaattctagccacataatagactcctaagtatgtgtctctaacagtgttagacctggatttggtttctactccccaatgttgtaacgttcacttttgtttttatgaaccacgttactgtaagatcattacaattctgctgacttccttgaatggaacaaataatgactagcncttttcaatgttaaagcaaacctccttgttcaccctgctagcatggaagaggtcttgggaaaaagattagcacatgcaaactgttgtccccattccctggccagattttgggtgctctgatgcgcctgcttcccatacagcttttggggatcatggtgtagattatcaacaggattcaaaatgtctttcctttgtattgaccatgtaagggattctaaagagggtacattgggacagctctgaagggcatccctctaaaatgtgtcctgtggctttctagaatatcagttgccttcttttgttaagctaaggaacttgaatgccttacctcatcactcagctggtggtaagctcattgtgtaaatagggaagtggatgttagaagtggcattcatggatgtccaatgttaatcaatagaccgtagtggcctggatgctgtgacaagcaaaatcccacattctgctctctaccccgatcctgtctccccggcacacctgtgtgatgttgaacctgaccaatgagaattgattttcctaccctcttctaatctgtgctaccacccttttccggaaatgagatgtggtggcctcgtcttactgttgacgtgatccgcctgagatcaacatgagcacaaacctcatcaactaggtctgcctggagtgtaaataggacaatgtaaataagcagtgtaattagtgtgacttgtgtcccgaatacaagagcgtgcagtttgcattctcctttgtacaagtttttctgtcactggatccagcctgttgctgtttggctggaaacgcagtgaaatggcaagaactggaagtaaggtttactgagttttagttaatgttggttggtatttatttatttagcctctcagtgcctaataagacttttctccaatttttccttagctattaatttttggtggattagatactggggagcagtgaatttataaggctcattctgagtcacaatttgaaggtaaaggaaactaaaaatgtaatttcctgtttgtaaactgaagtgtggtccctttttctattttcagtttgctgacactttcaacaaaaacctgaaatgcaatgtgaatgtaaatcccatccatacaagacgtagggcagatggcatctcttagtttgtcaggtggtttctctggagtgggtcagtttacaaactgagttagatttgtttgcatagttttttatgctgaaaaattttaattttggctcaatttgatatgggaagaaaccccaaatgtatttggattagaaacaaatactgatgctttactcataagcacttttctctcctggactgtgccctgtggtaccaccaacacacctttgtccactgtgcattgtatggcgtatgtacttaacaaaaataaaacaaaaaaaacctttaaaagtattttatctttcggttatcttacccactgtggtgatttggatcccattaattaccccttaataaaacactagatccttacagaactgaaatatcacattgtcttttgattagtttgtcaaagtggagcaggaaaacctattggattggaatcacaggcttcctagccaggaactttgagagctaggttgaaacccagtgacacctgtagagccacagagggaactgaatgcctgctcgccatgcctgcactgtggcatactgctgctttgtaggtagtgacatcctgagtgttcattgtcaataatctaaagtcgtcttctgtatttacctgtaactaaagaaagtgtaaactaatggaacctagaagaacttttctgtatttaggagctttgtacagcaaggtcaaacgtcctgattgaaggaagcagacacggtattacacacactagggaaaagctgacatgagtaactgtattgcgttagctgtctgttgaattgggaagctgtggcatagatcttaagtttgtgtttctcaaatgtgaattgtagtctaaagctgctttgtatagactgtaagtgctatggatagtctcagcactgaacatgcatcgatacctcgcagatgagtgcagcccttgccccaggtttccctgtgcctcagccagtgtctgagtgccggggaacctgctcatctgttgctagtcgagatacttcctgctttttcctttgttgttacatatttttatgtttgaaatttaagttttactactgttaatttaagtaaaatttgtttcgtggataaaatggcattgccagcgaaatcaacagcctcattcatgtagctgctgaagtgacatttgtgttctgtgttgatgaacttgcaatgaagccctgtttctgttaggatgcaagtgcggcttaggctttatttctgtttaataaggctttctaccattgattaaatgaaggaatgtatctttttgaagagatttatattctgtaaataaacattggttgtaacaataaagttaagttctaactataaaaaaaaaaaaaaaa

SEQ ID NO: 3158067 - DNA, 404 bp, Cricetulus griseus
accaagaaaggtgccctgcagtccagagcttcccagagacacaggggttccatcaagaacagggagccacagccttcagacctccctcagcttgtcacctctgccagagaaagtacacccagttccctgccacctctcccagataaggaggctcctgtctggaacaagacttcctctccctcccaccagaaatggccacagctcaggaaaactccagtggagatgggactcatccagtggatctaaagggccccaggtgggctgcttctcagaaacacaaccagctagcaccaacctggataagaatatgttgccataccaatcctttaacctacactacatctactagggcctaacccagcgggttaagtgtatctctagaactctgagaatagaagcacctc

SEQ ID NO: 3158068 - DNA, 720 bp, Cricetulus griseus
gtccctgtggccaaccgctatgagggcaccgaagatgattatggcgatgacccttcaactaactcgtttgagaaagagaagcaagactatgtctattgcctggagtcatcgctgcagacctacaatccagactacgtctggtagaggatgacgccattccagaagaacagatcttcccagtattggagcaccttctgcgggctcgcttctctgagccacacctccaagatgctctgtatctaaagctctatcacccaggcactacatcaacccagagcctatgcggatcctagagtggattggcgtgggcatgctgctggggcctgtgctaacctggatatacatgaagtttgcctgccgaccaggcttcagttggcctgtgatgcttttcttctctctgtatagcatggggctggtggaactggtgggccgacactatttcctggaactgcgtcgcctgagtccctccttgtacagtgtggttcctgcctctcagtgttgcaccccagctatgctcttccctgcccctgcagcccgcaggaccctcacctacctgtcccagatgtactgccacaagggctttggcaaggacatggcactgtactctctgttgagagctaagggggagcgggcctatgtggtggagcccaaccttgtgaaacacattgggctcttctccagccttcgctacaattttcatcccagtttactctaggagtg

SEQ ID NO: 3158069 - DNA, 339 bp, Cricetulus griseus
gcggcggctgctccggtcacgaggggcttgcagcggcgaggtcggcggctaggggggtgcagcgctcgcggggtgttcgcgatgagtttaccccctcaatccccaagcctttcctcaatggcctgacaggaaagccagttatggtgaaactcaagtggggaatgggaatataaggggctacctgggtctctgtagatggctacatgaacatgcagcttgcaaatacggaagaatacatagatggcgcgttgtctggacatctgggtgaagttctaataaggtaaaaaaaaaaaaaaaaaaaaaaaaaaaaaaaaaaaaaaaaaaaaaaaaaaaaaaaaa

SEQ ID NO: 3158070 - DNA, 2027 bp, Cricetulus griseus
  modified_base (306)..(306): a, c, t, g, unknown or other
ctcgctggtcttctaccagcacaagaaccttaaccagcccaaccacgggctggcgctctgggaggccaagatgaagcagctggcagagcgggcacggcagcggcaggaggaagctgcgcgcctgggcctgggccagcaggaggccaagctctatgggaagaagcgcaaatggggggtgctatggtggctgagccccaacacaaagaaaagaagggggctgtccccacccggcaggcgctggccatgcccacagactcagcggtcaccgtgtcctcttacgcctacacaaaggtcactggcccctanagccgctggatctaggtgccaggagccagcgtacctcagcgtcgggcccggccgagctgcctctgtggtgcttttgccctcatgcccgggggcggttgggggtgcagaagtctctctatatctacatatatggatatgcctatcatatatatgtatttatggtccaaacgtgtggacgtgtgtggtgagtggggggcttcatcaggacacacacagagtagcagccaatccccgagacagcagttatcaagtagttctagccaggtgtggtcttcataaactgagcgtagcaatcccatgacaatgctgaaggcaagtccgagtccccaagctttgcggtgccttgtgccagagctgagagccgagcggctgggtgttgactgtagcccttcggaagcactggccttgactgcctcaagatgtcaaagcaaggccaagctggtggaaaactgatagataatccctgacgtgcctcaacctatctccttccttttgttactgaagtgttttctggactcggaagcatttttatgaattggaatagtctaataaatggtgctatggtgtttcaatgtgactgtccctgatcttgtctccctgaggtgctataaacaggacattgtgacaacttagattccatgagggtatgttacctgaaggttatccattggatgacttccttgaccttgacaccgctggggttattctctctgctcattctaaagcagttaatggcagagtgcctaagggaaggagtgtggttggtatttttttttttttcatttctaagttttgcttttgaataaaatgtgaatctcctttgcccatctcatcgagctttctgtcatggttgctgtcatttgaaaactcccacgcctggttttatctgctgttccaggccaacttcatcacataccctggaccaaataacacattggaagtgcatgtcattcatgctctccttgctctaactgcccatcattcagggggaaccctcattcttcatatggggacttcagatactaattggctcatctggacatcccaaatcttcttgatcccaatacaggtttgttttgttttcttttgaggggggaaaagacagacaggagtgatgtcatttcttttcttgtgtttaaagaagcaaggactggctgtctcagcatactaatgctatagatttgatctagaacccttgtagcttttggatgtgttttatttcttatctctttgaattcctgtttggttacctggcttccaatggagtgaacttaacaaccatacttgaatattccgtcttgactttgtaaactgtggctacttgaaatgaagtttatctggggttgatggatgaatggtaggtttttgcaatgtctcaaggcaataggatgtgtattattaaactgtagatatcttagtacagtaaatttatgctgataattttattttgtataatttttacctttttgttaatattttccttccactttattggtttgtctcctgagctaccgccttcctttccctttccttctcccccagtgtttcagtaaatttaatttagggtgcctagaaattgcaagtatgtatcctttttttgatttgtattttattataattttacacaaacaactgggtttgtgaactgtattactcctggcatctttaaaaatattgtgggtgttttaataaatttttatatttattttttgcactacaaa

SEQ ID NO: 3158071 - DNA, 681 bp, Cricetulus griseus
ggtggcttggagggtggagcagcggtagacatgcaagcagcacacagtttaggccacactgcagatggcgccgattccccgaccagctgctgctgtcccggtgatgcaggcgcagtggcagttattcccagtggagctcaccctgctgcacgagcatcggaagtctccggttggagcaaaagcactgttcctttaacccaaaggccgggaatccgacatcatagatttgcccttacagtgcctttcccgacctctttggaggcagaaatcgcctgtgggtccctagctcctgatgccgaaccgcaccgaggagggaaagaccttaaagtcagcggctgcatgctggaggtacactggatctcagaagactctcgcctcctccgaatttccatcatgaactttcttgaccagctcgccctagtggtgaacaccataaagcgctttgggcccccagtttctcgttaagcctgcctgggaaaaggaaaacagactcagatccttatgtcggttccctcctaagcagacaattttctggaaaacattccagaaatagtacctgctacttaaatgtggggcctaattatttttttgtgcctgacttggtcctcaggcacttaggggccacttgcttagtttggtgctcaaatgttgctgaagaaaataaagctgtgcttctaatct

SEQ ID NO: 3158072 - DNA, 519 bp, Cricetulus griseus
gcccactcactgtacctctgtgctttcggcctgtccccgctgacagcccagattgctgctatacgtcgccccggtctgtctcatctactacagcttcctcctgcccacaccttgagtcaggcatggtccttcctgtgctggcctacgggctggtcctgttctccatgctgtggcgcagcctggtcccgggtgggagtgctgcctggggcggtttgctcttcaccgtctccgatggtgtgctggcctgggataccttcatccactccgtgccttttgcccgcctagtaaccatggccacctactatgcagcccagctcttcctcgccctgtcagccctcaggaagccagggctcaaattccactaatgcaggacccggacagcccagggtctcccgaatgcgtaccttggctcttcacattgacccagcctggcaagcggatgcttccggtcatgtgcctgcagatacttggccatcttaaacatctgtgtaccgttggcagtttcgaatctaccactga

SEQ ID NO: 3158073 - DNA, 656 bp, Cricetulus griseus
ccctcaggtcctgagaaaggtaattgagtggatgaaagtcaaaggaattaggaactaagtacaaatactgcatattaacagatggctcctgggatatgagtaagttcttgaacatccagtgccagctcagcaggctcaaataccccccttttgctaaaaagtggatcaatattcgaaagtcatacggaaacttttataaggttcctagaagccaaaccaaattgacaataatgctggaaaaattaggaatggattatgatgggcggcctcacagtggtcttgatgactctaagaatattgctagaatagcagttcgtatgcttcaggatggatgtgaacttcgaatcaatgaaaaaatacatggaggacagttgatgagtgtgtcatcttcctttccagtagagggcgctccagctccacaaatgccacacactaggaaatagctgctttttagtctggatcgattgctacaaagaagtagcagatgaactgacctgaactagtcaaccatcaagcaccttaaacgtttaaaatcttactacagttacagatagatgggtatgtatgcaaacattttgtgggaggacacactgagttctttgtcaccagcacttttgatatgagcagtatttgttaaagtaattgttgtatcattt

SEQ ID NO: 3158074 - DNA, 1480 bp, Cricetulus griseus
caaaaaggagaaggcaaggatgaagagaagtatattgacgtggtgattaataagaacatgaagctgggacagaaagtgttgattcctgtgaaacagtttcccaagttcaactttgtggggaagcttttgggtccacgtggcaattctctgaagcgcttacaagaagaaacgttgacaaaaatgtccatccttggaaaaggttccatgagagacaaggcaaaggaggaagagctgaggaaaagtggagaagcgaagtacttccacctcaatgacgacctgcatgtgctcattgaagtgttcgcacccccagcggaagcttatgcccggatggggcacgccttggaagagatcaagaagttcctcatccctgactataatgatgaaatccggcaagcacagctccaggaattaacatatttgaatggaggttcagaaaatgcagatgtcccagtggtccgagggaaatcaactctgcgtacaagaggtgtgaccacaccagcaataaccaggggaagaggaggagtcacaaccaggcctgttgcagttggggtaccacgtgggacaccaactccccgaggagtcctttccacccgagggccagtgagccggggaagaggacttctcactcccagagcaagaggtgtccccccaactggttacagacctccaccgccacccccaacacaggagacctatggagagtatgactatgatgatgggtacggtactgcatatgatgaacagagttacgactcctatgacaaagctgattactatgtatttacgggtcatggactcggtgaggaggcttacgattcctatgggcaagaggaatggactaactcaagacataaggctccttcagcgaggacggcgaagggtgtctaccgagaccagccatatggcagatactgattgtactgtctgatgttgtgaaatagccaatctccaccgtcctgtatactgttcaaagtaaaatttttctatgaacaatccctttttaaataaatcaaaatgcttaaaatctgaatggatggaacttaaaaccactttgttgaagcatctatttggcagggagacgaaggacatgtaaaattttgttatttgcagtctgtatatgaaaactaggtcatgaaaagaaaaaaaataactttgattaactagtgttaaacataaagataggtttactaaatatagttaatccattcttttaacataagcctcaccttttactttgaaggtttccatagaattttagttattttatctttcagccatatgcttagtttttttttttttcttgccaacttgcgtaaaaggtagccaattacaagtgcaaacaatgtggtattcttttgtaactcgagtcttgaaatgttctgtagtgttaagcaaagtatcctcttgcttgatactaaataaactgttagaaagaaaaaaaaaaaaaaaaaaaaaaaaaaaaaaaaaaaaaaaaaaaaaa

SEQ ID NO: 3158075 - DNA, 480 bp, Cricetulus griseus
atgacttgtcaagctcggacatcatacactgaggatgaagttctttgggtctatcgtttttcccgtaatttctttagaagaaggtttttaaagtttgattactcccagttccatgcaacatttgaagtccccacccctccatacagtgtgaaagagcaggaggaaatgcttctcatgtcctcacctttaatagcaccagccataacaaacagcaaagaaagacacaattcagtggagtgcttagacggactagatgacattagcacaaaacttccatcaaagctacagaaaattactgggagagaagactttcccaaaaaaactcctgaggatgagttctacaacttcagaaaaagcctatagtttgggtgatttgcccatgaaactccaacgaataagttcggttcctggcaactcggaggaaaaactggtctctaaaaccaccaagatgttatccgatcccatgagccagtctgtggc

SEQ ID NO: 3158076 - DNA, 631 bp, Cricetulus griseus
gggcttttctccagagtccaaactccagttgtctcagggaaaaatttttccacatcacagtccctgcagcacgtgtcaggtcctgtgtggaacctgggccggctcaatcatgtggccatagcagtgccagatttggaaaaggcctcggcattttatagggatgttctaggggcccaggtaagtaaggcagtcccacttccagaacatggagtatctgttgttttcgtcaacctgggaaacaccaagatggaactgcttcacccactgggaagtgacagtccaatcgcaggcttcctgcagaagaacaaggctggaggaatgcatcatgttgcatcgaggtggacaatataaatgcagctgtgatggatttgaagaaaaagaagattcgaagtctgagtgatgaagccaaaattggagcacatgggaaacccgtgattttcctccatcccaaagactgtggcggggttcttatagaactggagcaagcataatttataattgtgagacacttaattgacctgaacaagccttatcaacactatcagatgtattgtgctactgcttctactacttaaaacttcagattaattacagagagattaaaatatatggacatgtaaaaaaaaaaaaa

SEQ ID NO: 3158077 - DNA, 496 bp, Cricetulus griseus
tatctgctgattggcgataaccgatgtatgtgccctgctgaaaacactggctgcagagaccagcccttcaccatcttgtttcgggtacgatggatgtagtatcaggacgttctgttcctgctgacatcttccagatgcaagcaacaacccgttaccctcggtgcctattatattttccagatcaaatctggcaatgagggtcgggagttctacatgcggcaaacagggcctatcagtgctaccctggtgatgacacgccccatcaaagggcctcgggacatccagctggacttggagatgatcactgtcaacactgtcatcaacttcagaggcagctccgtgatccgactgcggatatatgtgtcacagttcccattctgagcctccagctaaggcctctgacactgcctttcactagcaccaagggacaggaggagagaggaaaccagcaagaatgagagcaggtggacactgcacctttcctggctcaatatct

SEQ ID NO: 3158078 - DNA, 183 bp, Cricetulus griseus
  modified_base (146)..(146): a, c, t, g, unknown or other
  modified_base (151)..(151): a, c, t, g, unknown or other
  modified_base (156)..(156): a, c, t, g, unknown or other
  modified_base (162)..(162): a, c, t, g, unknown or other
  modified_base (167)..(167): a, c, t, g, unknown or other
cccttgctgtcctggaactacactctgtagaccaggctggtctcaaacacagagatccacctgcctctgcctcccgagtgctggaactaaaggcatgtgccaccaacactctgcttatataataaataaataaaataaaataaaanaaaanaaaanaaaaanaaaanaaaaaaaaaaaaaaaa

SEQ ID NO: 3158079 - DNA, 282 bp, Cricetulus griseus
gctcgtaaagcggtggccgcggtcgcagtgctgggcgcgggcgctggcgtgggctccattctgtttgctcttgtggtcccgggagaagcacagaagcaggcaatgctgcaggagatgccggaacgggacccgcggcgcagggacgaagctgttaggatcaacgagctcgtgatggctaccctgaagaaagcggcggccacggaggagaacgtgacctggaggaagaactggctgcagttaacggaggcggcaggtcagcgtgacagcagggctcgccggtgg

SEQ ID NO: 3158080 - DNA, 858 bp, Cricetulus griseus
  modified_base (828)..(828): a, c, t, g, unknown or other
aagcggcctccattctgtgctgcagcttgcccagcaagacaaagcatctacctctgatgcctggctccatgccctctgggagctattaagaagggatgtggggattggagcctctgtggaaggagcctctccgctgtcggcaagctgtcagtcacagctccgagacctgtgtgggcagctgagccagggggtaggggttgaaattggctctggctcgagatcctgaacaggaggaccagcactcacagctgtgtgggaaacgcaggaaggagccagaggaagaccccggcagccctgagtcagagagagcctgtaaaaggttgcacggtttggaggaggaggaggagggaaaggaccaggaagagagacccagcctggaaccatggaagtccccgtcggatgcaggaggcatgtgccctcacctccttctgtgtgaagtacacctacagtgtctgcaaggccgtccttgttccccttctccaggacccaggcatgggtcccatgcagactgaggtgctgtgctccctcataaaggatgaggccctggagccagacatgcaggtccagattctggggcaggtcctggagctggcctggaaggaggagacgttcctggtgttgcaggcactcctggaccggcaggtggagatgacctctgaggtgttcaatgtcttgctgcaaaggctctgcaaacaggggccgacagccaccacctccatggcctacgccaagctgctgctgacagtgatgaccaagtaccaggccagtatcacagagcagcagcgcctggacctggctgtggccctagacgcccaacgccaccttccngaacgaagtccctgcaggcagcgctgagac

SEQ ID NO: 3158081 - DNA, 1100 bp, Cricetulus griseus
  modified_base (1096)..(1096): a, c, t, g, unknown or other
cgccatcagtaccgcgctctcatcaactccgtccaacaaaatcgggaggacatactgaatgccggtgacaaattaacagaggtccttgaagaggccaacactctgtttaatgaagtatcaagagcaagagaagcagttctagatgcccagtttcttgttctggcttcagacttgggcaaagagaaagccaagcagctgcgttctgacctaagctcatttgatatgttaagatatgttgaaactctactgacacatatgggtgtaaatccactagaagctgaagaattcatccgtgatgaagacagaaatgatattgaattaattgtctatgactcctggaaaatatcaggcaaaacagcagaaaacacctttaataaaacccatacattccactttctgttgggttcaatacatggagaatttcctgtgccaaagccacgaactgatcgcccaagacaacctcgcatgatagaagagcagagggcaatgcctgctcagttgaaatgcatggaagaatctcatcaagaagcaactgaaaagaagtagaaaggatcttgggattgttgcagacatactttagagaagaccctgatacgccaatgtccttctttgattttgtggttgatccacattctttcccccgtacagtggaaaacatctttcatgtttccttcattatacgggatggttttgcaagaataagacttgaccaagaccgactaccggtaatagagccagtgattaatgaagaaagtgacggaattgaacaaaacacacaaattaggagtcaaggaattatagccctgagttaccgtgactgggaggagattgtgaagacctttgagatttctgagcctgtgatctcgatgagtcagagccagcagcgattaagtgcctgatgcctgctgaagaactgaaggcaatagtgaaatcctgaaagggaagcagcatatattgtatatatgtatgattaaatgtttttaaagatgaagattgtttagtaaaatgtagcttttgatagttaatgtacttgtcatgattgtctttgattaaaggaattcactgccatattaaaaaaaaaaaaaaaaaaaaaaanaaaa

SEQ ID NO: 3158082 - DNA, 349 bp, Cricetulus griseus
ggttcctcaagatgtcagcttcagtcccacaaggccataactggacccgacagctgaggaaggatgatgaggaagaagacccgctggaccagctgatcacccgctctggctgtgctgcctcccactttgcagtgcaggagtgcatggcccagcaccaggactggcgtcagtgccagccacaagtgcaggcattcagggattgcatgagcgcacagcaggcaagacggcgggaggaactgcagaggaggaaagagcaagcgagtgctcaacactgagactctaaaccatcatccccacagggccggccctgaagaaataagcacccagagagaccctggcaagaagaaac

SEQ ID NO: 3158083 - DNA, 689 bp, Cricetulus griseus
ccatcctccttctacatggtccgcatcatttccaagaccccgtgcatggttctccgtctggggtttccaattggcacaccagcccaggcccggcacaagattgtgtcagacctgcaggaagagatcctgcgccttcgtttccctcaccgtgtgcaaagtaaggagccgacacccaaggtgaaacgaaaagggctagggggcattggtgggggcaactctccctccaagtcacccccacactggggccacagcaggccctgtctgacaggccctgccttgtggtccttcataaaccactggacaagctcctcatcaggtatgagaagctacccctggactacagggcacccttcttgctgacactggaaccaccaggaccattgcccctggtgtcaggccgttcagcctcatctagcctcgcatcgctgtcacgctacctctatcatcatcgttgctgtggagtgtccatcaggcctggacagaagctcggtgcctgtgtgacatgcaagtcctgacatctcagaccattttcagagcccggacttgggaacccagtacctggttgtgctgaatcagaagttcaccgactgttttgtgttagtgtttctggactcccacttgggaaagacgtctctgacggtggtgttccgagagcccttcccagtgcagccccaggacagtgagagccc

SEQ ID NO: 3158084 - DNA, 341 bp, Cricetulus griseus
gatgtcctgccaacagagccagcagcagtgccagccccctcccaagtgccctcccaagtgccagacaccaaagtgccctcccaagtgccagacaccaaagtgtcctccaaagtgtccccctaagtgcccccctgtgtcatcgtgctgcagcctggggtctggaggctgtggttccagctctgggggctgctgtggttccagctctggaggctgctgcagctctgggggtggtggctgctgcctgagccaccacaggcccccgcagatctcttcgtcgccatcgtcacagctctggatgctgtagcagtggtggcagcaggtggctgctgtggaagcagtgg

SEQ ID NO: 3158085 - DNA, 486 bp, Cricetulus griseus
tttggctcctccctcttctggtcttactacctgctcctcaaattttgatgggagtccctgtccctcctggggagagctgccgccactgcatctcaatacaacagcactgcaacacgacagcgacaagtcagaatccaatgaaattcagagaatcacagccaatgggacagaaattcaagggaggggaacaaacaatactgtgggaaagaaaaaagtttaaaaaaaaaggaatttgaaaattgaccttgcagatatttaggtaccactgggttttctttcttttcccaaatgggaagaaggcacacctggcttggacccacccaccaagactgcactgtgtgacctctctgttgccagggtgggcaagggctcagccactctgcccactaaagtgccccacatggaacattctggagtcggccatcccaaattccatcggtccatagagacaagcacagagtgagaacaggggcctagacgtgccac

SEQ ID NO: 3158086 - DNA, 405 bp, Cricetulus griseus
cctctgttaacctcaactaaggtccttgccggaagccagaggagctagactccagcatggaggcactgacgctaaccctgacggaagtgctgaaaaggcagaacccctaaatccaaaaaagggctttaaccagatcagtacgtcccacatcaaagtggacaaggtgctagatcatcggctccagcagctgccccctttgccgtgtgtctagacccaggatcgagagaaagatcctacagagcgtggtcaggtgtgaagtgtcaccctgctacaagccggagagagcagccactcacacacacacaaactcacacacatacacacactcacaaacacacacacatacacacagagatcacacacaccacatacacacacacacacacacacacacacacacacaca

SEQ ID NO: 3158087 - DNA, 462 bp, Cricetulus griseus
atctagccagctggtaaccatgagtgaatggatgaagaaaagccccttagaatgggaagactacgtttataaagaagtcagagtgatagccagtgagaagaaggagtatcaaggatggctgttaactacagacccagtctctgccaatattgtcctggtgaactttcctcgaagatggcagcttgtctgtgactggaattatgggacattgtgtgcagactgtggaaactttgagtgaaggggaccacagagtaagggagaagctgatgcatttgttcacatctggagattgtaaaggatacagccccgaggatctggaaaagagaaagaatagcctaaagaaatggcttgagaagaaccacatccctgtcaccgacagcagctctaatgagatcattctgtcccgtgttcaggatctcattcaaggacatctttcagcttcccagtgagaggcccaacact

SEQ ID NO: 3158088 - DNA, 249 bp, Cricetulus griseus
tttttttttttgttgtgtgtggtgtgttgtttgtttgttttgttttctttagttaaattttagtactgtaaatttggcataatttccaagttcactactattgctactgctggcatccatctttctccttctctcaccttttattcccataaatgtgcattgtggggtgcataggtcacagaccaaatgagaccaccagcatgttcttgtccatacttcaggaacggcgtacactgttgtgtacacatc

SEQ ID NO: 3158089 - DNA, 349 bp, Cricetulus griseus
taacacattgatccagaggaatgaagcacagaaatcaaactgccgtgactgagttcttcttcgtgggattaaccaactccttcaagctccaaattgtcctcttcctgatatttttctgtgtttatcttgtaactctcctggggaacctgggaatgatcattctcattcgtctggacactcgactccacatccccatgtactttttgctcagtcacttgtcccttgtggatgcctgctcctcttcagtcatcagccctaagatgttgtctgacatctttgtggagaaaaaagtgatcaccttcttaggttgtgctgtccagctttgtttattcagccagtttgtagtgac

SEQ ID NO: 3158090 - DNA, 371 bp, Cricetulus griseus
cagcagaggtgatgatggacatcctcaggaacaagcagagtggcatctgcatggactctggaggcttccgcaccacagccagcatggtgtcggtcctgccccaggatcccacaaagccctgtgtccattttctcactgccacaccagacccatccaggtcagtattcaaacctttcatctttgaagtggggtggcccaggccccccaggtgctgtcccccatatttggagcccaggaccctgttcggatcctcccccgattccagactcaggtggatcgtcgacacttactctatcgtggacaccaggcagccctggggctgatggaagacgggcaggatcagggaaacagctcaggcaaatgcagcagag

SEQ ID NO: 3158091 - DNA, 478 bp, Cricetulus griseus
atggtggaagccagtcccctcaccatagatgatgaacagcacgtcacgtccgttacaaacctccagaacttgagcattcacaacctgcacacccaacggctgccaggtggtctgactgacagcttgggtaatctgaagaacctcatgaagcttgtactggaaaacattaggatgaatgagaaagatgctaaaaacctagccaaaggcctgggaaacctgaagaagatgtgcttaattcatctgattaatttatctgacattggggagggcatggattccataattgagtctctatcaggagaaccctgtgacctacaagagatgaagttggtggcctgctgtctgacggcaaattccgtgaaaaccctagcacagaatcttcacaatttggtcaaactgagcattcttgacatatcagaaaattatctggaaaaggatggaaatgaagctgtacaggaactgattggcaggctcggcg

SEQ ID NO: 3158092 - DNA, 169 bp, Cricetulus griseus
tgtattcaggagcccctgggaggggcctcctgaggagtggttgtaggatggggaagaaagagaatttgctgaatagacatcaagaagactccttccctgggcaaagtccctcaagcacccagggacagagctgggcagtgagcagagcagggtgctggagcctacaggg

SEQ ID NO: 3158093 - DNA, 644 bp, Cricetulus griseus
gtctcagtggtcccacccagtcctgtcaatggcagccagcaaaggccttggaagtgaccttgactcgtctctggccagcttagtaggcaatcttggaatttctggtaccacaacaaaaaagggagatctccagtggaatgctggggagaaaaagttgactggtggagccaactggcaaccgaaagtcactccagccacatggtcagcaggtgttccaccgcagggcactgttcctccagccagctcagttccttatttatcactgctatattaagatatattattttaattatatttgcaggttttgcatctaaattgacctatttattcattcttgatcaaaggccctgacaagtggagtctttcttttgtgtctgtgaatatgcgattagcaatgtgctctttatgtgactatgaacgtggcccaagagacatctgtaacttaaagataactgcaaatatctttccttcactgtgggtttacggacatctgttcagttagtgtttctttgtgtgtcctatagactagtatttctccatcctttgattgagctcaaagtgacttctgttgtacttttgtgataggattgaaaccaattcagcgaattgtatcttttaatgtacatactgtattctctgatttt

SEQ ID NO: 3158094 - DNA, 886 bp, Cricetulus griseus
tggacacgacttccgctcacgcaccaatccaacgccagcacagttagtggccgcctgtcacccatcctggcaagcacagagttggatgacgtccaggacgacgatgcgccactctcccccatgctgtatagcagctctaccagcctgtcgccctctgtaagcaagccgtgtactgtggagctcccacggctgactgacatggcaggtaccatgaatctgaatgatgggttgactgacaacctcatggatgacctgctagataacatcacgctccccccctcccagccgtcgcctcctgggggccttatgcagcggagctccagcttcccatacacctccaagagctctggcctgggctccccaaccagctccttcaacagtaccgtgcctcacactgacagaagactacacagaaaccctttagccaaatctgctcctagcaagtggacagtgacaccgtttacagcttgacacctttgtgaatcccacgccatttcctaacccagcagtagactgttagcagccctggccctgggtgaagcccatacccgtggaacagaactctgtaatgtatgcaaactctctgagtgacctgccagcaaggacagcacccttcagcaccaccactctccttcagagcacaccgggagccccatcagcgattctgtagtgcctttactatcatggtttatgggatatgttaagcgttgttgttgtgtgtgtgtcccccctttgaccctcttgggtttttttttttctactacagtaacttgcagtatttttctgttaaaatgttaactgcccttcccctagcacacttataagcggaaggaaaagtgctgtaccagttcccagtctggctttgagcatcccaagcttcggagcc

SEQ ID NO: 3158095 - DNA, 1699 bp, Cricetulus griseus
gacaacaactttgcagatgagctggtggagctgaaggtccttgtggatagcttggtggaagatgaccgcactctgcagagcttactgaccccacagcctcctctcttaaaagccctttatacctatgagtccaaaatggcatttctcacaagagtggctaagttacagcaaggagcattggagctgctaaggtctggggtggttgtgaggctagcacagtgccaggtatatgacatgcgcccagagatggacccacatggcatgtttggcatgagagatcccccaatgttcataccaacgcctgtggaccgatatcggcagattctccttccagccctacagctatgccaggtcatcctcacatcgagtatggcccagcacttgcaggcagcagggcaggtgctgcagtttctcatttcacattccgacaccatccaagcaattctgcgctgtcaggatgttagtgcgggctccttgcaggaattagctctgctgacaggcatcataagtaaagcagcacttcctggtatgctaagtgaacttgacgttgatgtaaatgaaggatccttgatggagctccagggacacattggaagatttcagcgccagtgcttaggactgctaagtcgctttggtggctccgacagactgcggcagtttaaatttcaggatggcaatgtggagggagaccgggtgagcaagaaagatgaagttgagctggccatgcagcagatttgtgccaatgtaatggagtattgccagtcactcatgctccagagctcccctgccttccagagtgccgtgtgtctctttaccccgagcctgtcagagaccacgaacagagatggacctcggcaagatacccaggttccgatggttccatattggcgcctgcctggcttgggcattattgtctacttgctgaaacagagtgccagcgatttcttcagctattatgacagtcaccgacgcagcgtcaacaagctacagaatgtagaacagcttcccccagatgagataaaagagttgtgccagtcggtgatgcctgctggtgttgataaaatctctactgcgcagaagtgtgtcttagcaagacggcgtctggtgaagctgatcaataaccgtgccaagctgctgtccctctgttcctttatcatagagacctgcctgtttattctttggcgccatctggagtattacttgttacattgcacgccaacagattcccaggactccttgtttgcttgtaggagtttctttaaaaacagaagactacaagaacccaatctggacttcagaagtgggctggctctagtgagccaacacgatatagaccagcttcagtctgatgccatcaatgcttttggagaatcactacaaaagaaacttctggacattgaagggttgtattcaaaagttcgatcccgctatagtttcatacaggctcttgtcagacgtatccgtggcctgctgaggatatcaaggagttgagaattgtgcttttactcttctgtggaagagatgaactgaggaaaaccatctcctttttatagatgactttatttctaaattatgaccaaaagatattttgctatttctttcttgatatatggacatcttttctgtaaacctctgccttatttcaccctcacttgtgaacaataaaatactttttaaaaataaaaaaaaaaaaaaaaaa

SEQ ID NO: 3158096 - DNA, 422 bp, Cricetulus griseus
ggccagctgcggtaggaggaaaatggacagagaccttgtcagcagatgagaagccggctagctcaggagcgcagtgtgaagctagatgccttccaccgtgtgcgggagctgcagagtcagcttcatgacatggagcagccatctctccagatgggctcctcgagtgggcttatatcccagatccactgccccctaaactctgcttcagcattatctagatgctctcaccattttccaaagaccaatcttcctagcaataaaatgacaagacggactcaaagaccaaagactgtaccaattaagaacaaaagaaggattgatgatggctttctacccaatgtggcagaaaatgttcaacttacaacttcccaagtccaaacagctccatccaggatttccttcaggcatgatagcttttcttc

SEQ ID NO: 3158097 - DNA, 353 bp, Cricetulus griseus
agagatgtgactcctgaaattctagttcttgagtcgaccgacttttaaaagcatcccagataatgtcatttttagggaatttatttgggaaagactgaaagaagctgatgtggatccaggggctccaccgtatgactcgctgcagacctatgcatttgaaggaaatggctcagttgctgaatctcttagttctttagattccatcagctcaaactctgatcagaattatgattacctaagtgactggggtccccgctttaaaagactggctgacatgtatggaaatggccaggagaccttgtactcatagccttggacagttaatttgaaatgtactgaataaaaaggcagca

SEQ ID NO: 3158098 - DNA, 719 bp, Cricetulus griseus
aagaaagggagaacattatcgcaaggaagtaatacagaagaaacaggagatcaaaaacctccgggaagatgtggcgtccaagcagaagcagctggtgaaagagcagaaggagctggaggagctgctggaattccaggttggcctgaaggatgacgtggtccaccatcaaactgttcctgtacaaattgcaaaggagatagaaaaatgatacgcaaaaaatagagatggaaaagaaaaattctgtcttggaatatgaagtcaaagagctaaatgagtctttaaagaagtttgagaacaaagtccgcttcattccagggaaagatctgactgaagaagaaatgatcaagaaactggatatgctggaacttcagctggccaagaaggaggagaagttactggagaaggatttcatctatgagcaagtgacccagctcacaaacaagctcagaggcaaaacccagacttgcaaggaggacacactgctcttagccaagaagatgaatggctaccaaaaaaggatcaaagatgctactgagaaaatgatggctcttgttgctgagctgtccatgaaacaagccctgaccattgaactccaaaaggaggtgagggagaaagaagaatttatcttctcctgcagttccaggatagaaaagggcctaccactacaacagagaaatacgagaaggactggctagaaggtacttcgagatagaagaaat

SEQ ID NO: 3158099 - DNA, 456 bp, Cricetulus griseus
atctgacagcagaagaagaacctctcaagatgtcttccaatgatgaccctgttgcaatcccaatgatagaaagaaagcccaatgaccttcctggaatggacaccagtgacctgaacacattcactggagaggctgtgttaagttttcataacatcagctatcgagaaacagtgcagagtggctttccatttcgtaaaaaaacttgtgtgatagaaagactatcaaatatcaatgggatcatgaaacctggcctcaatgccatcatgggacctcaggatgggagcagaactttgttactagatgtcttagctgcaaggaaagatccacgtggattattgggagatgttttgataaatggaaaacctcgacctgctaatttcaaatgtacttctggttatgtcccacaaaatgacatggtgatgcacacaatgaccgtgagagagaatgtagagttct

SEQ ID NO: 3158100 - DNA, 1087 bp, Cricetulus griseus
agaagcctatcccacggcccctgaacaagtaccaggggcttcatcttcgacatcgtgaccaagcaggccttcgacgtcaaccatcatagttacctcatctgcgcatcgccaagcccaaccagataagcctcatcaacatggacttgcccatggtgagcggggaccgtatccactgtatggacatcctcttcgccttcaccaagagggtgctcggggagtctggggagatggatgctctcaagatccagatggaggagaagttcatggcggccaacccttccaagatctcctacgagcccatcaccaccaccctccgccggaagcacgaggaggtgtcagccacggtcatccagcgggccttccggagacacctgctgctcattgcctacacgctgaacgagaacttctcccggcgcagtggtccaccctccagctcctctatctcctccacgtccttccccccctcctacgacagtgtcacgagagccaccagtgataacctcccagtgcgagcatctgactatagccgcagtgaagaccttgcagacttccctccctctccagatagggaccgagaatcgatagtgtgagcctggctaccgctggccgggacacaccctgttggctggtggggcctgatcaggcaggggctcggccgcccaaatcttgctctccagcagagccaccctctggctggggacacccacctcataggccacatcagtctcgcctgcccgctgcgggctggctgctcctacctacctcgccgagctgtcggagggctggatgctcctggcagtactgaaggggggcactgcgggcgagtcaagtattatgtccccgtttgtcacctcagttcccttggtggcaaccagccccaaccccacccgcccctggagacttatccaatgtccccattgagtccagtgtggggagcttggttttaactgtcctggtgacgcttctctgagtggaaatcttatttttgtagatctgtgctttgctctcaaggcttggagagatgtgtgtccctccctggcactcgcaccaggctgcataggcaggaatgtggctggggctggcaggg

SEQ ID NO: 3158101 - DNA, 372 bp, Cricetulus griseus
tacaaacatacgaacagccaatttctctattttgcaccagacctagtctttaatgaagagaagatgcatcagtctgccatgtatgaactgtgccaggggatgcgccagatcagccttcagtttgtgcggctgcagctgacctttgaagaatactccataatgaaggttttgctgctgctgagcacagttccaaaagatggcctcaaagcccaagctgcatttgaagagatgagggcaaaattacatcaaagaactgaggaagatggtcaccaagtgtcacaacagttctgggcagagctggcagagattctaccaactgaccaagcttctcgactccatgcatgatctggtgagtgacctgctggaattctg

SEQ ID NO: 3158102 - DNA, 2220 bp, Cricetulus griseus
  modified_base (321)..(321): a, c, t, g, unknown or other
agaatgaagttaaaggaattttgagagtgtcagttgtacctttgtcttacatgataaccgaatggctgatgctattatattagccatagcaggtggacaagaacttttggctcaaacacagaaaaagtactttgcaaaatctcaaagcaaaattaccaggctcatcaccgctgtggtgatgaagaactggaaggagattgtggagtcctgtgatcttaaaaactggagagaggccttagctgcagtgttgacttatgctaagccagatgaattctacagccctgtgtgatctcctgggagccaggcttggagagtgaaggngatagcctcctgcagacacaagcgtgcctctgttatatttgtgcagggaatgtagaaaaactggttgcctgttggacaaaagctacaagatggtagcaatcccttgtctcttcaggatctgattgagaaagttgtcatcctccgaaaagctgtgcagctcacccaagccatggacatgaatacagtaggagctctcttggctgagaagatgagtcagtatgccagtttgttggcagctcaagggagcattgccgcagccttggcgtttctgcctgacaacactaaccagccaaatattgtgcagctgcgtgacagactctgcagagcacaagggaagcctgtgccaggacaggaatcatctaaaagcccttatgagaggcaaccgctgtccaagggcagacctggaccaagtgctggccacccgcagatgcccagagttcagacacagcaatattatccccatggagaaaaccctccgcctccaggtttcataatgcatggcaatgttaatccaaacaccgctgctccgccgcctccatctcctggacatatgcacaaccagctaccaccttacccacagccgcagccttaccagccagcccagcagtattccttcggaacaggggggtcagcagcttaccgacctcagcagcctgttgctcctcctgcctctaacgcttaccctaacccccagtacatatcccctgccacttcctactccgggcagccccagatgtacacagcccagcaagcctcctcacctacctccaactctgctgcttctttccctcctcccccttcctctggagcgtccttccagcatggcggaccaggagctccaccatcatcttcagcttatgcactgccccctggaacaacaggtacaacgcctgctgccagtgagctgcctgcgtccccaaagaacagaggtcctcagaatggttggaatgaccccccagctttgaacagagtaccgaagaagaagaagatgcctgagaacttcatgcctcctgttcccattacatcaccaatcatgaaccctgctggtgacccccagtcacagatgctgcagcagcaaccgtcagctccagggccgttgtcaagccaggcctccttcccacagccacaccttgtgggtggccagcccttccatggtgtacagcaacctcttggtcaaacaggcatgccaccatctttctcaaagcccaacatcgagggagccccgggagctcctattggaaacaccatccagcacgtgcaggctatgccaacagaaaagattaccaagaaacctattccagatgagcacctcattctaaagaccacgtttgaggatcttatccagcgctgcctctcttcagccacagacccccaaaccaagaggaagctcgatgatgccagcaaacgcctggagtttctgtacgacaaacttagggaacagacactttccccaaccatcatcaatggcctacacagcattgcgaggagcattgagaccaggaactactctgaagggttaaccgtccacacccacatcgtcagcaacagcaacttcagtgagacgtccgcattcatgccggtcctcaaggttgttctcagtcaggccagtaagctgggcgtctgagaacagctgcactgtcagctaacattgccacttctccaaagaaagctatgctaagactggaccaacccctcattagcacgtttccatggcagccacccaggagctttgacatcatttctgcaggtaccctcaccctagaactgcttgaaccctggtgctttcttttgttttaatcttctgttgcccattatgattttctgcaaatagtgtctttcctggattacacgtagtgtggtttcccgagggactctgacaaaaagtggcttttaaaactt

SEQ ID NO: 3158103 - DNA, 837 bp, Cricetulus griseus
tcactcgggctgaggagttctactacccgccctggaagcgattgctcttccagctgctcgtcagcctgcctctgtgtctggcctgtcttgtctgtgtcttcgtcctgatgctcggctgcttccagctgcaggagctggtcctgagcgtgaagggtctgccccgcctggtgcgcttcctgcccaaggtcatgctggccctgctggtcagcgtgagcgcagagggctacaagaagttagctgtgtggctcaacgacatggagaattaccggctagagagcgcctacgagaggcaccttatcatcaaagtcgtcttgttccagtttgtcaactcgtacttgagtctgttctacatcggcttctacctcaaagacatggaccgcttgaaagaggctgcatgaagaagtatgaggacacgttccaggactaccaggagatgttcgtgcagtttggctacgtagtgctcttctcctctgcctttccactggctgccctgtgtgccctagtcaacaacctgattgagatccgaagtgatgccttcaagctatgcaccggcctacagcggccctttggacagcgtgtggagagcattggccagtggcagaaggtcatggaggcgatgggcgtgctggccatcgtggtgaactgctacctcattggccagtgtggccagctgcagcggctcttcccctggctcagcccagaggcagccatcgtatctgtggtggtgctagagcacttggctctgctagtcaagtacctcatccatgcagccatccccgacatcccgggctgggtggccgaggagatggccaaactggagtaccagcgacgggaagc

SEQ ID NO: 3158104 - DNA, 285 bp, Cricetulus griseus
taaataaatattcctgttcagcaataggtgacctctgtctgaatgtacttgaacttggaagagttctattaagtccttagagccaagcagatgtcataaagccataattcaactgagtaatgcaatgtacactctcactggatgaggtagaacccatacccagtttgaatcttagcacagctaaccttaggctacttctttttacctttacatgtggcacaagacaaacatacctttctactatacaaaataaattaaaacttaattttgtacaataagtgaaaa

SEQ ID NO: 3158105 - DNA, 299 bp, Cricetulus griseus
ggcggaggctgccatcttacaatcggaacgaagctagacctggggtcgtgaccccggaaggacctacgggattccgagcttgcagttctgcttccgggtctggccgtccttctgcgtcaggatgaagaagatggcggcggccgtggcttcgttcgccacgctggcgacagaacctggagaggacgccttccggaagcttttccgcttctaccggcagagccggcgggggacggcagacctgggagcggtcatcgacttctcaaagaaaagaaaagaaaagaaagaaagaaaaaaaaaaa

SEQ ID NO: 3158106 - DNA, 448 bp, Cricetulus griseus
gaaacaccagcgaatacatagtgggaaaaccctataaatgcaaagactgtgacagagtcctttaataactgttataatctaaattcaacaccaaagaattcatactggagagaaaccctacaaatgcaaacactgtggcaaagcgttcaattatacttcaagcctttctcaacatgcaagaactcacactggagaaaaaccctataaatgtgaagaatgtggtaaagcctttaactcttcttcaaaccttaagcatcattggagactccatactggagagaagccctacaaatgtgaaaaatgtggcaaagcctttaaaaattgttcaggcttcactcgacactacagaactcacatcacagaaaattcagattagtgtaaaaacccggtctcatagctttcaataattgtttattgatacttcaacactaaagaattcatatagaga

SEQ ID NO: 3158107 - DNA, 484 bp, Cricetulus griseus
tacagtgaacatggcaatgtttgttcagccaaaacagaagatgtgggataatgactcatctcttttctttgggggaactcttatatagtatcccagccattcttctctccacccatatccatgaggcttgggctctctgtaaatgccctcaaacccttctaatgacctatcttggtctccccccagaaagcagggtggcagaaggggttgggctgctcatttctatagactgacgggactgcagaaggtcctaggtcatcaccttccctgctgggtgaggacctggtctcagatggtgctcggctgaaaaaggaggctgcaggggccaaagcagggacaggaggagcccttcctgcagcatctctgatttctactcgtccccagcacagagcctccgtcttttccgtagcaaagaagcctggaggcctgcggccacttgttcataggtgaccaagtcaataaagcattacctaccccccaaaaa

SEQ ID NO: 3158108 - DNA, 1618 bp, Cricetulus griseus
cgctggccttggggggatggtttcatcatggcgtcaatgcagaaacgactacagaaagaactgttggctttgcaaaatgatccacctcctggaatgacattaaatgtaaaagagcgttcaaaattcaattacacagtggatcgtagacatggaaggtgcaccaggtaccttatatgaaggggaaaagtttcaacttctgtttaagtttagtagtcgatatccatttgactctcctcaggtcatgtttactggtgaaatattcccgtccatcctcatgtgtatagcaatggtcatatctgtttatccattctaacagaagactggtccccagcgctctcagtccagtcagtctgtcttagcattattagcatgctttccagctgcaaagaaaagagacgaccgccagacaattccttttatgtgagaacatgtaacaagaatccaaagaaacaaaatggtggtatcatgatgatacttgttgatgccactgttatcatcctcgtagcagaagatagtcctactgagaaaatgagcactttgatcattcagtctttgaactttaacctttgactggaagtgacctataggcaatgaagactacttccttttactgcatttttactcgtgtgcattctgggcgcatgttgatcgctggctcagtccaggcaactgacatgcttttattagtcatacagtattaatgcaggtgtcaggaaatgtcaaatataattccattttttatttttatttttttaagcttttggaaaagttccaggtcctcatgtattgtgcaataacagtgacttcctcagtggtttggggacgttcattgccggcaatggacgttgtaacaggaagagttttcttaactcctgccactcggtgattaatgcatgatagggcctatgagatgaatttatcggctatcgtgggattataaggacagtgagggatccaacattacattgaaagtcaccccaactgtttatatttggattctatgcactgtgatcctaaggcaaacagcatgaaataacatgcatctttacaggaccgtaagaaagatcattgcgtatttatttaattgtttatatctgctgtcaaattgttttgacatggaaagttttcaaggaacattggcagagaggtacaatatgttatccctatggtgaaactcaattcatttgttgtatatagtcctcaatctctgaagtaaaggtgtgaataatatagggtgtgaatggtttaaccaaggctgcatttaggaaggaaaaaaaaatatggcagtgatgcttgaattactgccactcatcatttgggcctgttattttttcccaagtatattacactctgttacttcccgctagccatcagcatgagccctactgcctaaacactatttcatttatttatgtttggaaatccataaacatttttgtttgtaatcttgtttcttttgttacattttaagttgtttgaatgttataatactttaattgaaagacttttgtcaagtttttttcttgtaaattttctttacttgtatcatcttgtccttcaatcctgtaccgtaaaatgagaaatacatttttgacagaggcttaatgttttaacaaaa

SEQ ID NO: 3158109 - DNA, 607 bp, Cricetulus griseus
ctcctcacgcagaaggtgattgctcacagtcagtatcaaaattccaaaagaatttccatctttttgagcatgcaagatgaaattgagacagaagagatcatcaaggacattttcaaacaaggcaaaatctgcttcatccctcggtaccggttccagagcaatcacatggacatggtgagattagcatcacctgaagagatctctttacttcccaaaacatcctggaatattcatcagcccgctgagggagatgctcgagaggaggccttatccactggtggacttgacctcatcttcttgccaggccttgggtttgacaaagatggcaaccggctagggcggggcaagggctactatgacacctacttgaagcgctgtgtgcagcaccaggaagtgaagccctacaccttggctttggctttcaaagagcagatctgcccccaggtcccagtggatgagcatgacatgaaggtagatgaagtcctttatgaagactgcccagcatcttaagtcatatgatgacagccatcctcactgttttgtaccagtgtgaagaaagtatgcggatttcccccttgtcaaaaataaatcaaatggtacaattaaa

SEQ ID NO: 3158110 - DNA, 749 bp, Cricetulus griseus
tggccggtttttacaagactaaaagataatgctgcatccagcaattaccttcaattgtgtcaatataagaggggaagctactgtgaaggtttcaattaatcttttgagcactatattagagtagtggttatgcacttgcgttgcttacaaacgagctgtacagagggtattacccccaaatacttagtgtagttgacttgtttgggttgcactgtaaggggagtacacagaatagttggaaaatgcagaatcagttgtataattttttaaagctgtagtgggtctttgatcatggtgagattcacagcaatatcaaacagttggttctcatgtagcagctaaacgtttcagattttgtttttattaaatttggcatttcacactgagatctgtattcctatcgaataaaacacagctactgtgttcagagggattccgtttcaaattgccaaatagatattttaggacatgggccacaaactgtactcctttcccagtgtcctcctgttccaaactgtgcagtttatcggttacattttctaatagatatttgtgtaaaggtgtatgtaagcttgtgcagttatttaaaaaaaagcagttttggaaaacagtgtatttattaaagaaaaaaatacacttatggggcatgtacaaaactagtaaaaaaattaaaaatacacttacaatttgcccagtaaagttgtttttgtgaaatttctgtgttgttaaataaaggactttagtattca

SEQ ID NO: 3158111 - DNA, 512 bp, Cricetulus griseus
agcaagaagacctcatcctcctgccagagggaagaaacctgttgcgagaagaaaatccaagccccctcaccatcagcactcccaccctgcacctccttatcctcccaatcccagggagacccgtagacagtgccaaaaaccagttccaaactccagcgggaaagagctagaaactgcctttcctccccatcctgactccccctcccccacctggccaatactgtgaagtccctttctgctcagcccggtttcctggggagggtcctgcagtcgtgggccctgggggacccctcaggagggaagagaccaagggcatccttgggccaactatccacccctttctgtctttaaaggctccttcctggggatggattggggtgacaggaggacagccgtctagtccaccagctctcctcgccctgtgtcttatttcagacatgagaactgtacagtgtaaacttacaaagtgtttttaatggttgtagattggaaataaagtatgtcatataaac

SEQ ID NO: 3158112 - DNA, 371 bp, Cricetulus griseus
ggctgagtaggttgctctgagggtaatgagacagttctgcaaacacagaacacacactggaaacatttccagcccatttccgctgctcccatccctgacgattagaggtagcagacaaatgctggtgctcccatctaccttgtagacacctggtcatcaaaagtcaaggcacaaaaggtgcactcgctgttctcagtaaagatttgcaaaatattcagtttaactttcagcatcatattgtcctatccagacttcaaatccaaaagaccacaaccctttaatgtgatacaaaattaaggctatttttacagttctgaacataataaaattctattggatttcaaaaaggaactaataatcaattgacttat

SEQ ID NO: 3158113 - DNA, 720 bp, Cricetulus griseus
gtctttcctggagaacatgaaggtggagtgccactaccagtgctaccgcgagaaggacccggacggttgctataggctggtggactatctggagggaatccagaagaattttgatgaagctgccaaggtgctgaagttcaactgtgagggacaacgggcacagtgacagctgctataagctgggggcctattacgtgactggaaaaggtggcctgactcaggacctaaaggctgcatctgcctgctttctgatggcctgtgagaaaccagggaagaagtctgtggaatcctgtcacaatgttggactcctggcacatgatggacagatcaatgaggatggccagcctgacctgagaaaggccagggactactacaccagggcctgtgatggcaactatgcagccagttgcttcaacctcagcaccatgtttctacagggtgcccctggctttcccaaggtacatgggtctggcatgtaaatattcaatgaaggcctggtcgaccgtgggccacgtcgtcgggcctgcgacaaatgccagccgaatgtaacaaactgggggatggtgttgataaggatgaggccaaggccgaaatgctgaaaaacagggcccagcagctgcacaaagaacagcagaaaaatgtccaacctgtaacatttgggtaatgtgtgatccactctcccttccaagcaacagacagcttgacactggcacctcttct

SEQ ID NO: 3158114 - DNA, 206 bp, Cricetulus griseus
tataatgtaaatgcagtaaccatagaccatgtcaccccactccatgaggcctgcctgggtgatcacgtggcatgtgcaaggactctgctggaagcaggagctaatgcaaatgcaatcacgatagatggtgtaactcccttattcaatgcatgctcacaaggcagtgcaagctgcacagaacttcttttaggaatatggtgccaaag

SEQ ID NO: 3158115 - DNA, 489 bp, Cricetulus griseus
agtcaccatgtgataaggtgacagatgccccacccccactgcttctgacatcagaccatggtggtggctgccatgtttgggttgacctttgcagaaccccttctggttaggagcaactctaggtggttgtgacctgagatcaaggtagcagcaggggacctggcaggcaaaagcaaatagaagcttagtcagggagtgactgaggacaattaatgtttcctctgcttcatggtgtaagtacagtgactgctttatatgtgcactggttttcaacactgagcctttctgatgaaaaagtgcgaattatcaatcaaaacattgatgtctgggtatggtgtttgtaaaaatgtcgccatgtttaagtatcacaggccattcaatggaatgagccagatgcttccccttgtgttgttttgcagggctggaggtgggacctgggagcctgttttttgctaagcaagtgctctaccactgagctacacccctgcc

SEQ ID NO: 3158116 - DNA, 2018 bp, Cricetulus griseus
cgatcgagagccacaggttgcaaacgcagggagctgtgcccatgacagtggcgctgtgaagctgctggtgagcagtggctgctggtgggtaccagagctcgggaagacaggagcggccctgaaacccgacaccagcgccctcgctgtggctgtttcccgggctggcccaccaagaccaccactatgactgatggagattatgattatctaattaaactcctggcccttggagactcaggagtagggaagacaacatttctttatagatacacagacaataaattcaatcctaaattcatcactacagtgggaatagatttccgggaaaaacgtgtggtttacaacacacaaggagtagatggatcttcagggaaagcatttaaggttcacctgcagctttgggacacagctggacaagagcggttccggagtctcaccactgcctttttccgagatgccatgggcttcctgttaatgtttgacctcaccagtcaacagagcttcttgaacgtcagaaactggatgagccaactgcaagcaaacgcttactgtgaaaacccagatatagtattaatcggcaacaaggcagacctggcagaccaaagggaagtcaatgaacggcaagcccgggagctggctgaaaaatatggcataccatactttgaaacaagcgcagcatcgggacaaaatgtagagaagtctgtggaaacccttctggacttaataatgaggagaatggaacaatgtgtagagaagacacaggttccggacactgtcaatggtggaaattcgggaaagctggatggggaaaagccagcagaaaagaaatgtgcctgctagagacactcctaagaaccagtgatgaagagcacacccaaatactatgtcctgaaataatgcaaaccaccaagtttttgtggagtagttcatgagcaatggcatgtctttctcttcccatcccaaactattttaataaaacacaatagtcaatagtgttaaaagattgtactgttaaccctgagtcccttactgaatggctccctgtttaaccagcaactgttgtcctcatgtcaaactctatataataaggggctcagtcatatatgcttatcattttgttccatgtggttcttgttcccagatgctctttgatggagagtctgttatagaaaggaaaacagccagaaatgacaacttcaggaccatgtggcttttctcatacagagcttaacaaactttgaataactcacggggttcaagttaggttccaaataaagacacaaaagaaattgacccctttcataaacagacaccattatcataaactaaagaataacaaatttgcttctaacttggaccacttgtcatggtaagatgtattgcagggctaacatagtaattgtagtaggctgctaaatggattgtcagtcaccttgaggtcactgcatttgattgaaaatgtataatgtatcttactgttggaaaaaataatgagctctgtttcaactaatgtgtcatcttgtatttcaaggagaccaattagattcaatgtaggatattataagttggttaaaatccatgtacaaataaaattttatgtctaaaagtttgttgtatttgaacttaagaaaaataaattatcctactttatgtgctaaaagtagattttctgacaacactgaagtgctttatagtatctcaccaatttctgttccagtaatattatctatctctttaacttgagcatgtttgttttgtctgctttcaatactgatctcagtttttgtctaatgctttcaatgtaacataagactttgagtgtggattacttattgtgctcccaaacaggcagtggttccagacagaccctgttaggtcattattcgttgtatcaaagttccagtggcttcagaaatcatagcagaccatgattttgtggtgtctgggtttgagtagtactgttgagaactatacttagtgattgttcctgcacagttttcaaataaaatgatgttttt

SEQ ID NO: 3158117 - DNA, 422 bp, Cricetulus griseus
cagaacgagaatcttgtgcgcatgctccttgatgctggcgtcgaggttaatgctactgactgttatggctacactgctttgtcattatgcgtgccaaatgaaaaaccagacgctcatccccctgcttctgaaagcccgtgcagaccccatgatcaggaacaagcatggtgagagttcactggatattgcacagagactaaagttttcccagattgtatcaatgctaaagaaagcctcatagttctgggacttctcatgttgcaacagagacacagctgaagaactagatgttgtccctgtcttgggtgattgctatgtgagctctcaagctggatgcatcagtattgtgacaagccctggacttcaaaaggcttttattcaggggaagtcagcatggccagaatccctccgaaggacccatt

SEQ ID NO: 3158118 - DNA, 720 bp, Cricetulus griseus
gagacagacctgagaaaagtatggagcaggctaactaacgatggagtacgcgcatctgtgtgaagtcatgggcatgtccctgtatgcttctgaggtatttaattgttctgcgccagatacggggaacatggagctcctggtgcggtatggcactgaggagcagaaggcccgctggctggtgccactcctggagggcaggatccgctcctgcttcgccatgactgagccccaggtggcctcatcagacgcctccaatattgaggcttccatcaaagaggaagatggctcctatgtcataaatggtcacaagtggtggatctcaggcatcctggatccacgctgcaaactctgtgtgtttatgggaaaaacagacccacaggccccaaggcaccagcaacagtccatggtcttggttcccatggacactccaggaatcagtgtcatccggcctttgtcagtgtatgggctggaagatgctccagggggccatggtgaagtatggttcaaggacgtacgtgtgccaaaggagaacatagtcctgggccccggtcgaggctttgagatcgcacagggcaggctggggcctggccgggacatcgagcaggcacggctgctggtgctaaaagctgcccacctcatggatgtgaccggaaacaaggctgcagctctagagattgccatgatcaaatggtgccccatccatggcctatcaagtaattg

SEQ ID NO: 3158119 - DNA, 577 bp, Cricetulus griseus
cacagtatcttttttcaaatcacctgatgaggatcatggcaacagtggtaaaatgggtgacatcaaacagaactatctggaaacgtttgtttccaatccaaaatggagctttatctagtgcttgtcgtaaatctacatactcctctcttccagatgactacaactgcaaggtagagctcgctttgacatccgatggcaggacaatagtgtgctaccacccttctgtggacatcccgtacgaacataccaagcctatccctcaaccagatattttgcataataatgaagaaacacacgaacaagtgctgaaagccaaattaggaataaaaagcgaccaacttgagcaaggacccatgatagaacagctcagcaaggtgttcttcactacaaagcaccgctggtacccacacggacagtatcacagacgtcgtaagaaactgaatcctcccaaagacaggtgactgttcttgatttgcggagcatcaaggagagtttgtgtcttatttgtcagctgagaaacgaaaatggtatactcattaagatgtcatgtaggaaaataataaaaataccctttcat

SEQ ID NO: 3158120 - DNA, 566 bp, Cricetulus griseus
gcttgaaggagctctagacaagggacacgaagtgaccctggaagcactccccaaagatgtcctgctgtcaaaggatgccatgggggccgtcctctatttccttggggctctaacagtgctaagtgaagcccaacagaagcttctagtaaaatccttggagaaaaagctcctcccagtgcaactgaagctggttgaaagcaccatggagcagaacttcctgcaagataaagagggtgttttccccctgcggcctgacctgctctcctccctgggggaggaggaactgaccctcacagaagccctagtggggctgagtggcctggaagtccagagatcgggcccccagtacatgtgggatcccgacactctcccgcgtctctgtgccctctatgctggtctctcccttcttcagctactgagcaaggcttcctaatgccccttctctgccctctcccctaatgccttcctgaccttactgtgctctctgtaacactccaagtcaccgcagagcctccacgctgaggataactgaaaagccatggtggtcaccacagcatgaggaactg

SEQ ID NO: 3158121 - DNA, 3735 bp, Cricetulus griseus
  modified_base (3706)..(3706): a, c, t, g, unknown or other
cactttaatctcctgtctatgccatcaggccaactgaagacagggttttaaaatctcagctatagagatatccagccaaagtctcaatcttgccttaacaatgtttcagagactgaacaaaatgtttgtaggtgaagttgctacttcttccaacgaagaaccagaatttagtgagaaagaagatgatgaatggattcttgttgacttcatagatacttgtcactggtttctcagcagaagaagaggaagaagatgatgacatcagtgaagagtctccagcagagcacacatcagtcttctcctgtttacctgcatctctggagtgtctggctgataccagtgattcctgcttcctccagtttgagtcctgtccaatggaggagagctggtttatcacccctcccccatgttttacagcaggtggattaaccactatcaaggtggaaacaagtcctatggaaaaccttctcattgaacatcccagcatgtctgtctatgctgtgcacaattcctgccctggtctcagtgaggccagctgtgggaatgaagaatataactcaagcagtcccagaatggaagcccaaagtgaaattggggagcacattcactgctgtgttgcagctcttgctgctcaggcaacgtttttggaacaacccaagggcttccgcccttcacaatggataaagggacacagtgaaagacagtctctgaacagaaatggccttcgtcgccacaaccttaccagggattgccacgctcgacaaatgaagcacagtggctgggtggttcaccagccctgcccacgccagtataattactgagaacactgaattctgctggttggtgtccttgggtttgtgcctatgtatgtggatgtgtgtgcatacgatggaaatgctgtctctttccagccaactgaagaccaattgcctagtgtatcagtgtgtctagacattgtcacacccagattgttgtgctgtgtatcacataatgccttgctcctgacaactactttcactaacatgagcattaacaggtgattttgccatggatataatggaattgatggctgaacttacttttgaaagaaaacttgacgtattttgtatgtatggttctttttcccagattagtcattgcagtttattgtggaattcaggtacattctctttggtgaacaatgcattcagtaattctgatgtgactccacaagatggtacagatactagagctgtcatggacaaaagcacttgcctcctatgccaagagaaaaatgggagctgcaaggtgatattggaattctgtctgtatgtaggtagcccacagagcagtcagtatttggaggtctctagagtcttaactgccagctcagctgagaatgcacaagcacagagttgtgaggattacatactaattagaagtggagctgtcagaactgaactttgtgtgaacttccagggcctttctactgaacctagtggtgggaggctgtggcactttttatgccatgattattattcagggttggtgctaatgataatcaaacagctcacttccctatctcctctgcaaccctcattaaacacttgttcatgaactaatttcaaggaaaaggcagcatactgttacatgaagtattgtccctggagcagcctgacacagggaagcttgggagactttcagggaagagctgcactcgctctcctctgacaaggctgggggttagagctgcagttagatggtgaagggtgttcttacactggctgtgtaagtgccacgatggctctcttagaacaggaatctagattccttgtccttccgtaaaccttttccatatggacttccccttttatttatttgttttctaattaggggccaagtctgtaaagtttgtcaaactgagaagttatttgttactatttgtgttttcatgaaggtgtgcatgtttttttgaaacatggccggaatgcattttatgagttgattactcactgattaccattatcattattttgctgttgtaacaacttctagtggtttacaatgtacttcagtgcattaaaagtacaagcagtaggaagacccccaagggttggggatgtggcttagtggtataactcttgcttagtatatgcaacgcgctgagttccacccccagaactgtagaacaaaacaaagtaagactctcctgcattaggagcgctgaccatttctaaactgatagcctagaatgcttggaaagtctggaatacatggtgtacatcgccacatatctggggtatgtcttttagcttttatagtagaccccacattcctcgaagtttgtgatttgtgttaaataaacatttagagtgtgtattctgttaattactatttcctgagttatattctgcactgtaggaagacgctaggctcgccatacttatcttgtggctatttgtatttgtgtggttgggtaggtgtgcagagatgctaagagatttgatttatacttccattacaggaacttaaaaaaaaaacccaaaactcattaattttctgtatatttttccaattcccatgcagattgttcctgttttatcagttctttggttcctatcaagaagagtgtttacttaaaacttgccagggcccataagcctgcccaacggtttttgcttctcaaatctgtacactggtttttagttttcacttttttgatatctgaattgctttgctattttgctccgtcctcatagaagcatacagtctttgtatacactttttttaaaaaaagctaggcagggtattgtctattctcattttctttgagttggaaacaaatataagtatgaaggaaggactacaacgagaagacagacatttaaatgcatttaataaattagtgggaaaagtttctaccattttcaattttagagacagttaagagactgctccttgtgctgggagatactactatatgtctctattgttcccttgaagttatctttttattttataaggcctatagatactattagtttaaaattctttaaagttaggtagttccatgccattagtctatgatgtattataaatggcaaccctatctacttattatacggaaattttacatgaatacttgtctatttaacaaatctacacatatgacagttgtgtctactttgtcataggccgatttctcttgaaatgtgacaccaattcaagcaatttaggtgcagtgtgtgtgtggtttcgttttcctctagaagttttgaactttagttaataattttatgtgttttttttaaaaagtggctttatttctttccttagtaaaattgtgaacaaacttgtcttctgaaggcagggtatgagttatggatacagaaaagtattgtaggttgtactgtgtgcctttgtaatgtgtttatgggcacagttttttctctcatcaacttgaaaactttaaaagggacattttggttaggttatacatactgtaaatcaatctatgcataaatggcagcttgttttcttgagccactaattgtttttctgtttttataaattttttatactgattgggtcacagatggtcagttttatacagaatgaacagcaccaaaaacacatgtagcattgcttaaacattgtgtactaacaccagttctttgtaatgggttcagtagtgcattttgcactgcctggagctatgttttttaanctgtcagtaaataaaatgtcctttaactt

SEQ ID NO: 3158122 - DNA, 439 bp, Cricetulus griseus
agcatgtcgtccataatcagaaaggtgatcagcaccacgaaagcaccggcggccatcggtgcctacagccaagctgtgctagtggacaggaccatttacgtctctggacaggttggcttggatccctccagtggacagcttgtgccaggagggatagtggaggaagctaaacaggctcttacaaacttgggtgaaattctgaaagctgcaggctgcgacttctctaatgtggtaaagacgacggttttgctggctgacataaatgacttcggcacagtcaatgaaatctacaaaacgtatttcaagagtaactttcctgccagagccgcttaccaggtcgccgctctgcccagaggaagtcgaatcgaaatcgaagcaattgctgtcatggggcctttcaccaccgcagggctataagtggccacactgatgtcgactc

SEQ ID NO: 3158123 - DNA, 689 bp, Cricetulus griseus
acacacacacacacacacacacacacacacacacacacacaccacacacacaattgcttggactacctataaatggacttgcttcttgtgtttgaaacacttgtgtgcatgagaatgtcatttgctaatgaatttacaagcatatattatacaacaaaaccaactaacctgccacaatgtgattcgtgtaacatcatttcattcaaatacatcttcctccaaagcctgggcagaagcgtgccgcaaagagtttctatgatttcttgtacatgttttgctaatgcttgtgtctccttgattatataatgttagtagcactgagactccccacggtaatgtaacttaattatgggctgtgtcaccactctcctgtaaaatagcactggacagacatacaggaggagcccttgactccctgtctggcccatacacagcttgtattatcagtgaatataaatgtactacatttgcatgccttttgggtttgccttaattcttacctcatttgtaccctatcaacctggaaagaactgttttggatgaatgcagtataaaacttaaaaatcctgctaaatgataaactcattatgtatatctatctatatatatatagacacaaaggtattatttattgaaagtaaaaacataaaggagtatgtataaatttctgcttgacatttcaaaggctt

SEQ ID NO: 3158124 - DNA, 866 bp, Cricetulus griseus
ggaatgcagtcttccatgcctgcggaagagcagagacccagcaaaccgctgttaagtggaaacccagagaaacctctcggtatgattgacaggttaaatagccctctgctctcaaataaaacaaacgcaggtgaagaaaacaaagccttcagcagtcagccagtgggacctgaatcggcacttcctgggtgtgagatagaaaacctgctagagaggcgcactgtcctccagttgctcctgggaaattccaacaaagggaagagcgaaaggaaagagaaaatgacttctcgagatgagggtcctcaggaacattcagagagacctggaagcgaacaaatactgatggtgaaagtcaaatctgagccttgtgatgatgtccagattcaacaacacaaatacttcctgtagcagagactaaaggttctttctttaatctaagaagtccttacagtagccatatgggaaataatgctcctcgcccacacagtacaaatggagaaatttatggacttctgggaaatgtgctgtcaataaaaaaagaagtcagaatagtgtgaacctcccataccactttggagctttttaaaattaatcagtatgaacttgagatctgtataaataagagcatgatttgagaaaagcatggtataactgaagcttcttcattttgaaagtattggttactggtgatgtttaaatatgcatactactttttgcttaacattagatgtcatgaggaaaactattgagctagaagttggttgtttaatacttctgtatgcatcagataacaactgtgagtagcctacgaatgaagctgttttataatcataagttaagaggcatccatgttaaaatgcaaaact

SEQ ID NO: 3158125 - DNA, 849 bp, Cricetulus griseus
  modified_base (838)..(838): a, c, t, g, unknown or other
gcttctctggatcgaatccggacacctccaaaatgccggcttaccattcttccctcatggaccctgacacgaagctcatcggcaacatggcgctgttgcccatcagaagtcagttcaaaggacctgcccctcgagagacaaaagacaccgatattgtggatgaagccatctattacttcaaggccaatgtcttcttcaagaactatgaaattaagaatgaagcagacaggaccttgatctatatcacactctacatttctgagtgtctaaagaaactccaaaagtgcaattccaagagccaaggcgagaaagaaatgtacacactaggaatcacgaactttcccattcctggagagcctggctttcccctcaatgccatttatgccaaacctgcaaacaaacaggaggatgaagtgatgcgggcatatctacagcagctgaggcaagagactggactacggctctgtgagaaagtgttcgaccctcagaatgataaacccagcaagtggtggacttgctttgtgaagagacagttcatgaacaagagtctctcgggacctgggcagtgagtggaacctgggcagcactgcctgccctgggcagcatcacgtgaaggtgtacacagtcctttgtgtctgttcataacgtatcatggagcagaagagaatgtgtctttgccggaaaagctcttgatcaagaagtttggggggtgggggtgggtgatatgaattttcggcaatttcaggctggtacttaatatgtaataaaggtcactgctgacttagacattgaattaaaacatttttgaaaaaaaaaaaattaaaaaaaaaaaaaaaanaaaaaaaaaaa

SEQ ID NO: 3158126 - DNA, 2126 bp, Cricetulus griseus
agcagcgacttgaaatgcctgagaagatggtcacgatcttgggagcctcaacggtgctttggatactgtttgcagcctctcaagcttttaaactcgatatctcccctcaagacaaaacgatggctcaaattggggacattttgtccctgacttgcagcaccacaggctgtgagactccatctttctcttggagaacccagatggacagtccactccatggcagggtgaggactgaggggtccaagtctgtcctgatcatggatgctgtcagttttgagaatgaacactcttacctgtgcacagcaacttgtggatctaagaaactggaaagaggaatccaggtggatgtctactcattccctaaggatccagagattcagctgagtggccccctggaggtcgggaagcctgttatggtcaagtgtttggttcctgatgtctacccgtctgataggctggaggtggatctattcaaaggtgaccatctcctgaattcgagagggtgacactgtgatgatgacatgttccagtgagggtctaccagctcctgagattttctggagcaagaaattagataatggaaatcaacagctcctctcaggaaatgcaactctcaccttaattggtatgagaatggaagattctggaatttatgtgtgtgaaggagttaatctgattgggagagacacagcagaggtggaattaattgttcaagatctttttgttgaagacccctgacagatcccttttaaccatctggagattgaattgctgaagggggagactacattgatgaataaaagttttggggaggaaatgagcataaaatccctggagactaaaagtttggaaatgaccttcattcctaccaccgaagatactggaaaagatcttgtttgccgggctaagttacacagtggtgaattggaatctgaacccaaacaaaggcagagtacacagactctttatgtcaacgccccagggaaatcaccatctgggtcagcccctctcccgtcgtagaagagggcagtcctgtggtcaaagagggagacactgtcattatctcctgcacatgcggaaacgtgccaagaaacctggataatcctgaagaagaaagcaaagacgggagacatggtgctaaagtccgttgacggagcgtacaccatcctcaaggcacagctgcaggatgcgggagtgtacgagtgcgaatctaaaactgaagtcggctcacaattaagaagtttaacccttgatgtaaaaggaagagaaaatacaaagagccatttttctcctgaactccttgcactctactgtgcatcctccttgataatacctgccattgggatgatcatttactttgcaagaaaagccaacatgaaaggatcatacagtctggtggaagcacaaaaatcaaaggtgtagctaacattggaaatgttctggaaaagacattatttataagccccaaatccttaatacacaaaccaaggctagtgcgttcagagttcccagaactcttctcagtaaagcgaaagtggatgcttgagcttttgctgaatgcaagaagccaaccagaactgttcttcttgacaaatccccatcattgtgaggaagtgactggaacagacccatgaggtgtatacgaccagcataatctgtatatatgtgtaaaataaaattatgtcatcacaaagttgtttagaatggcagcactccatatgcaggtcagaatataatcaaacagtgttgcttggactgactgttgtaacttaatgcatcttaagaaaagtttaatattaatattaatattcaataggcagactgaccagtgtcaccttctttcctgtgaatttttattgacaatgatttcatattttaaaaagaagccagggttttatattcttatagataattgataaagagggcactgggttgactttcaggtactacattcctaattcatggcataatgattagccagttttctctacatggtactgtatggtacggggacatgtttcttcgtcgggaatcttgtataatgactaatatggtttaaaatgcgactgcttttgacttatcttttataaatagtaatagtaaagtgaaagtttctgaacattgaa

SEQ ID NO: 3158127 - DNA, 427 bp, Cricetulus griseus
  modified_base (323)..(323): a, c, t, g, unknown or other
ggatgatgaggatgaagatgagaatgatgagtttcgggagccacagctgttggacttcgatggttttctggaattcgatgacctggatggggtacattctctgatgccccgcatggttcggaatgagaccccctacctcatctggaccactcggcgagatgtactggattgtcgattcctcgccaaggatcagatgataaaccattatgcccgtgcaggctccttcactacaaaggtgggcctgtgtctcaacctccggaatcttccatggtttgacgaggctgacgctgactccttcttcccacgatgctatcgcctgggancagaggatgacaagaaagccttcataggtaaggggtctccatccccatgcctggtcccctcatgctgtcttccccacagtggaaaacaacaggcctccctcttg

SEQ ID NO: 3158128 - DNA, 387 bp, Cricetulus griseus
tgctgagttgcagtcatgtttctccagtattacctcaacgagcagggcgatcgcgtctatacgttgaagaaatttgaccctatgggacaacagacttgctctgcccatcctgctcggttctcccctgacgacaaatactcaagacaccgaatcaccatcaagagacgcttcaaggtgctcatgacccagcaaccgcgtcctgttctctgagggttcgttaattttcatgtgctgccctaccccaggccgattatcaataaccaaaggcgtcagtccgtgagcagtgaagccttcccatgctgtttggaatcctatcttactacgtgactgagtctgtcgtgatgggcatcgcctgtaaaaggaacagttctttaacttttttttttt

SEQ ID NO: 3158129 - DNA, 525 bp, Cricetulus griseus
cagggccaagcgggggcgtggctggcccttcaggtctaggccagtgggcctggtagcacatgtctgtcctcggcaggggccagatgacttctctcctggtttgcagctgtcttcagatccccaagacttgctcttttccgctccaagttgccctcataaaccaatgtggcaagactactggacttgtatccatggtactatactcagtcttattatctcagcttgctgaggggcagggagagggcctcttcctctgggcagcactatctagataggtaagtgggggcagggaagggtgcatagctgttttagcctagggactcgatgcagatgtccccagatctagctaggctaagttgagatcaacaatccagggttggtaggtgttggatgaaacattcatttttaccttagtggatgctagtgctgtagagttcactgttgtacacagtctgttttctatttgttaagaaaactacagcatcattgcatacttcttgatggtaataaatttgaataatacaa

SEQ ID NO: 3158130 - DNA, 1670 bp, Cricetulus griseus
atgagctctcggacatcacggagcttcccgagaagtcagacaaggatagctcgagcgcctacaacactggggagagctgccggagtaccccactcaccctggagatctccccagacaactccctacggaggatggccgagggaagtagcgaaggggccacggccaacgtcgaagcatacagaccatcccccaagaacctgctcgccatcactgaggatcctgaagtaagcaccccaaactacagccctagtgccaaagagctggaccccagccaggccttggagagcaaagagcgccgagttagtgatggcagcaggagccccacggccagcccaaagctgggcagtgcctacctgccctcataccaccactccccgtacaagcatgcgcacatcccagcgcacgcacagcactaccagagctacatgcacctgatccagcagaagtcggcagtggagtatgcgcaaagccagatgagcctggtgagcatgtgcaaggacttgaactcttctaactcggccgaaccccggatggagtggaaagtgaagatccgcagcgacgggacacgctacattaccaaaaggccggtgcgtgaccggctgctgcgggagcgtgcgctcaagatccgcgaggaacgcagtggcctgaccacggatgacgacgccatgagtgagatgaagatggggcgctactggagcaaggaggagcgcaaacagcatctggtgaaggccaaggagcagagaaggaggcgcgagtttatgatgcagagcaggctggattgtcctggaactgagccacaaaagatgatgaagaagaggaacaaaagatctttgacaattggatgaccatccaagaactcttaacccatggcacaaaatcgccagacggcactagggtatacaattccttcctgtcggtgactactgtttaactctcactgtgtatagacgagagaccactaccgttggtgtagacatccctgcctcgttcaatgcggcaagtttttgtatatatataagcccggccatcatgttgatagtctaaatttgccactcctacaactttgggtgtcctggctctgttttcagtggaggaaaattacacccttactctcttagaaggcaatattaacaagcagctttttttcaaatagcaatggtaattttttacttgttaacctttttcataaagtgtttaaatttccaaaagatcttttattaagcatactttcacagaataatttgtttaaactatattcatataaaagaaggttaaacacgctttttttctgcctaaaacacaaaatgcaactgccagtatgtatttttaatgggaccctattttgtaatgtcacttcgctgaaatgtgtttcatacaagtcaccattcatacatcttatatcagttgtggtttggcaacacaacctgccaaagtctagttggcaatttcacacacacacacacacacacacacacacacacacacagactagcaacatttccagtcaagatatccattttcattattttctggttaaggttcccaagaagagtgtcgaggttttaacagaaagcaaaatttcctgcagctttacggacgcttgaagcatgtttgcgaatattgccgcctgttggaagatttgcatgtacagggaagttgtggatggagac

SEQ ID NO: 3158131 - DNA, 2265 bp, Cricetulus griseus
cgcggcacggcgggaacatggcgcgcgggagcggggcgcgcgcctagctggcgggaccgttagctctaggcggacgccgaaggggccccgcggggatggaacagccgctgacgctggcgcccgagccgtcctcggcgcggagccgcaggcggcgggagcctgagtctccgccggcgccgattcctctctttggtgtgaagactattgcccagagaagtcctgatgaaccagcactgagcaaagctgaatttgttgagtaaagtccgtcagagcaaccaggcctgtcatgatggagacttccacacagctattgttttgtataatgaagccctggcagttgaaccctcagaactgcattttatatagcaatagatctgcagcctacatagaaactcagcagtaccacaaggcattggatgatagcaatcaaagcccgactcctacaactcccaaatcggaccaaaggctgctctgaagattggcacttgcagcctcaaactgagaggctctgtcttctctgccctgagcagcgcacactggtctctagggaacacggagaagagcacggggtacatgcagcaagacttggacgtagccaagaccttaggtgaccacacaggagaatgccgagctcacgggaagcttcctcagccctgagcagtctgggccatgtgtacacagccatcggagactatccaaatgctctggccagtcacaaacagtgcgttcttcttgccaagcagtccaaagacgaactttctgaagcccgggaactcggcaacatgggagctgtgtatattgccatgggcgactttgagaatgctgtgcaatgccatgagcagcacctgcggatagccaaggatctggggagcaagcgagaggaggcccgagcctacagcaacctgggcagtgcctaccactaccggaggaactttgacaaggccatgtcctaccacaactgtgtgctggagctggcacaggagctgatggagaagtccattgagatgcgggcctatgccggcttgggccatgctgccaggtggccctgaccgagaggacggtgtggtagcagcacccaacagcaccaccgtcttcagagcttcggaaaccagcgccttcagcaagcctgtcctctcccatcagaggagtcagctgtcaccactcactatcaaaccccagcccccagccaggagctcatcgctgcccaaggtgagcagccctgccacctcagaggtctccagcaaggatggcctgagctctcctagcagcagccgcccatcacctggccgtaacaccccagcctccccggcaagggcggggtagacagactagaaactgaaggagttgcctgtgcaggggcgtgatgaggtgccacccaaagtccccaccaacggccactggtgcacggagacagcagcactgacaacatctggtggacctcagcaccacagctgccacccgccctctgagaggagcgcaaacagctcttgttgggcttccaggtgctggtgggatatagaatgttctaagttaagttctgcactgatgcattacactagccaaaaggagaactatggtttttaaaatgccaattctttgtgattaaattgtagccattttggtggataccggaaatcacagccacaatgcaataactcatgctgaaagcacttgcatccccagctgctccccatgagctaaggccagggggtcttttgaccccactgttggccaaacttgaattttacttaaaaaaaaataaaaaaaaaaaaaaatctgtactcttgtccaggcatttctagaactatgcaattgtggtttaaaacacaacgttgtgcttttaaaacataactgatctttttgttacatggataaacacttggttttattatcatagtgctttgcatttatagctattatttttaaaagctcaagaaattttaaatgtcaaaatttgaatattcatccgtaagtaataatcaagtttcttgggtatggttgaaattattcaatttacttaaagaaaaatcggtccacactgatcctgggcacctccccacttggcattcacactccttatatgcattgttagccacctttggcctacatggtacttttttttgtaaattacacagtttccagacagcatttaaactttttatattacgaaatttgtcatgtaaaaagacttcattatttttattgaggctgcggggcgctttggcccctttcctttgtgatttcagttgtctattaaagcatgag

SEQ ID NO: 3158132 - DNA, 612 bp, Cricetulus griseus
ttttaatggatgtagagaaaagtcacattcagaaacaaaaggaaaattgacaagcttatgttctaagaaatacagtaatgtttctgatattcacaaattagaaaataagcaatattatagatggtcaaagaaccaagatgacaattttacaatatgccggaaacttacgtatcctttagagactctttgccatagtccaaataatacaaatacagcaaaagaattacctcacaggcctatcaataataacttaacacaaagttattctgctgatcatgaaggtagctacaatgcttctgctgatctttttgatgatgttgctaaaaataaggacattggaacagaaattaccaaaataccacaggatattttgttaccatgggaagcatcttgcacagaaaaccatcctatagatgaagaaggcagccaagccttcacaaaaactacccttgcaaaacatagcaacatcaaggtatctgagagcaagttctcagtcagattcagaatgtgattttgaagaaagccaagactttgttccctgttcccagtcaactccagttgcaggcttccaccaaagaattcatggcttatttgtttgtttctcccgacata

SEQ ID NO: 3158133 - DNA, 340 bp, Cricetulus griseus
gtacacggtgcagctggaggaggaacctcggggccctccgcagcgcgaggccaccccgggacgagccgggtcctcgaaagggctacagctgcccggagtgcgcgcgggtctttgccagccccctgcggctgcagagccaccgcgtgtcgcactcggacctcaagccctttacgtgcgctgcgtgtggcaaggcctttaagcgctccagccacctgtcgcgccaccgcgccacccaccgcgccggcccaccccacacctgcccgctctgccctcggcgcttccaggacgcagccgagctggctcagcacgtgcgcctgcactgagctccacccgcctctcc

SEQ ID NO: 3158134 - DNA, 719 bp, Cricetulus griseus
caggatccagatgtcatcaacacagctctgcccatagaatatggcccggtggtggaggaggaggaaaaagtgcccatgagaacccaaagaccccgaggggatgcctcctctgctggtgtctcccccagcccgcgaagcacgaggaggtgcccgctgccccccagcccgcagctctggtggcgccaggccccttggtgaagaagcccccgggtgcgggcgcgggagcgggagcgggagccggcgcgggccgggcgccccgaggggcggccgatcgtggccacgtgaacatggcgttctctcagcccaaccctcccccggagctgcacaagagcgctggctccagaaacaagccaaccaagtctgtggaacccgacctacggctcgtggttcacgagagaagccggaccaaaaagcaggcgagggcaggagcggcagagggtggctggaccgggccgggcgcgggaccccgtagaccgggccgtgcgctgctgctcgagccactcggcaaaaaaagtgatcagtacaaggcccagattggttgcgtaaagttttcgtgcatggtccgctgtacagtcccctaaggcttctttccaattttgtgtgctctctgcttcggtgtagtcagaaatagctgcttccgtgtctcacagggaaagtcgtggatgtttccttgccttgtggacatggcccattcgaggggcgagggaacagaaatgaag

SEQ ID NO: 3158135 - DNA, 418 bp, Cricetulus griseus
gaaatgagtgcccaaagctacagcctcctgcgtatgggaaaatcgagcccttgcaagccctgtattccttcaaagaccaagtgcttatcagctgtgacacgggctacaaagtgctaaaggatagtgagataatggacacgttccagattgaatgcctgaaggacggtacatggagtaacaagattcccacctgtaaaattgtaggctgtggagtcccagcggggttgaaacatggactggtgaccttctccacaagaaacaacctcacgacatacaaatctgagataagatactcctgccagcagccctatttcaagatgcttcacaataccacaggtgtatatacgtgttctgcacatggggcctggacaaacgaagtactgaagagaagcctgcccacctgccttccagtgtgtgg

SEQ ID NO: 3158136 - DNA, 288 bp, Cricetulus griseus
ttcttatttaacccttgatgaaccaatgaataacatcaccacgtccctgggacagactgctgaactgcactgcaaggtgtctgggaatccacctcccactatccgctggttcaagaatgatgctcctgtggtccaggaacctcgtagaatctccttccgggcaaccaactatggctctcggcttcggatcagaaaccttgacaccacagacactggttacttccagtgtgtggcgacaaatggcaagaaagtggtttctaccactggagtcctgtttgtcaagtttgg

SEQ ID NO: 3158137 - DNA, 878 bp, Cricetulus griseus
tggtggactactacgaggtgctgggcgtgccgcggcaggcctcggccgaggccatccgcaaggcgtaccgcaagctggcgctcaagtggcacccggacaagaaccccgagcacaaggaggaggcagagaggcggttcaagcaggtggcgcaggcctacgaggtcctatctgacgcccgcaagcgcgaggtgtacgaccgctgcggcgaggcgggcgaggtgggcggcggcggcgcggccggcagcccgttccaggacgccttccagtatgtcttctccttccgagaccccgccgaggtcttcagggaattcttcgggggccgcgaccccttctcgttcgacttcttcggagacccgtttgagaacttctttggggatcggaggagctcccggggaagccgatgccgaggggctgtacccttctctgcctccttcaccgacttcccaacttttggaggcggctttgcctcgttagataccggattcacatccttcgcttctccgggaagcccaagcctttcttctttctccatgtcctgtggcggtggggcggcaggcaacttcaagtcggtgtcaacctccaccgagatcgtcaatggcaaaaaatcaccaccaagagaatcgttgagaatggccacgaaagggtggaggtggaagaagatggacagttaaagtccctgataattaatggcaaagagcagttgcttcgcatcgatactcagtaacgacataaagtgcgttttaaggacgatcaaggacttttttgctcattctggtgcctcttactgttgggactgcagggataggatctctcttggtctttatgcctgttgtaaatatctgtatgcctttggcactcattaaatttaatcccgaggc

SEQ ID NO: 3158138 - DNA, 624 bp, Cricetulus griseus
gagagccccagacagaactttggagctacaggtgcctcctgacttctctgccccctcccccaatctgggtttcccttactgccctgctggtgtggccaggccccaagtgtaggatggagcttcccatacgagggccggtggcagccagaactgatacagcccccctgatctgggaccaggacaccagctgaggagggcaggagtttctgaagcgatggctggtgcctcagtaaaagtggcagtgagggttcggcccttcaatgcccgtgagaccagccaggatgccaagtgtgtggtcagcatgcagggtaacaccacctccatcatcaatcccaaacagagcaaggatgcccccaagagcttcaccttcgactattcttattggtcacacacttcggtggaggatccgcagtttgcatctcaacagcaggtgtatcgagacattggagaagagatgctgctgcacgcctttgaaggctacaatgtgtgcatctttgcctatgggcagacgggggctgggaagtcctacaccatgagtggggcggcgagggaaccgggcagcgagggcagttgtgcctcagctctgagttggaggccagcctgatctacaagagctagttccag

SEQ ID NO: 3158139 - DNA, 1031 bp, Cricetulus griseus
ctaagcagcagttgaaagcagaagcagcacctgtaagaggagccatctaaggaagaatctacaaattctgcactatccattctacttgaacggattatatgtgatcttgaaaaatctcttgggacagctttatcttcaatattagaaacagaaatgaaaattgcttttggaaatctttggatggaggtgctgtacttgaaaccaccatggactctaataaatctattgcagtgctttaaaaacattggctggctgtatttggattagttatggaaaataagttgcttttaattattgagagcctatctgaaaatctctctaaagctaataatgcagtggattttaaaacagtaaaattcctgcttcaggattctaaaagtttgttacatgcctttagtataaggtcaaattatgatggtattcttccacagacctttgctcaagtaaacagactacttcaagtacttgcagaggtcaggacaaaactaaagccaaattcttcagaaagcacagtgaataaaaagcaggaagacacttactttgatgaagcttacatagtcaaagaagtcactgtttccttggattctcatcttccccagttcaccaggcatcaggattgaatctgctgtaggataaactgtagacccagctcttctggagttgccaatacttcctacctctaaggagaagagagccatcttcttagtgttcctgaggcaggaatcactgtgacatgatggcagcccacagccttagtatctctcctaactctgaatgtgggcatatgaccagacactgccaagccctaagacttaagacatgaccatgctaccacattccattaatgggttgctttcatgaataaaccgtcatttatataaaactggtgggaaaaaccaccagctccttcagggatatgaagcagaattttaatctagcaccttctctgtagctgctttgggagttgtgtcatttttctgtacatttccagtcgggaagagcccctctgaggattccccttaatatgaagc

SEQ ID NO: 3158140 - DNA, 560 bp, Cricetulus griseus
tggagaaacaaaatcagaaattaagattctgagcataggcggaggtgcaggtgaaattgaccttcagattctctccaaagtccaggctcaatacccaggcatctgtatcagcaatgaagttgttgagccaagtgctgagcaaattgtcaagtacaaagagcgtgtagccaagacatcaaacatggagaacgtaaaatttgcttggcacaaggagacatcatctgaatatcaaagaacgaatactgcaagaagaacctcaaaaatgggactttattcatatgattcagatgctgtattatgtagaggatatcccagataccctgagattcttccatggtctcttagctgccaatgctaagattctcattattcttgtgtcaggaactagtggctgggacaagctatggaaaaagtatggatcccgcctacccagggatgacctctgccagtatgtcacttcctctgatctcactcagatactggatgacctggggattaagtatgagtgttatgaccttttgtccaccatggacataacagactgctttattgatggcaat

SEQ ID NO: 3158141 - DNA, 188 bp, Cricetulus griseus
gggctccaagaaggccgtgaccaaggcccagaagaaggacggcaagaagcgcaagcgcagccgcaaggagagctactcggtgtacgtgtacaaggtgctgaagcaggttcacccggacaccggcatctcctccaaggccatgggcatcatgaactcgttcgcaacgcatcttcgagcgcatcgcgggc

SEQ ID NO: 3158142 - DNA, 421 bp, Cricetulus griseus
aaaaatccagtatatgaagactttgacttcacggaggcccccatgtttactcagcctttggttaacacctacgccattgctggttacaatgccaccctgaactgcagcgtccgaggaaatcctaagcccaaaatcacctggatgaaaaacaaagtggctattgtggatgacccaagatacaggatgttcagcaaccaaggagtctgtaccctggaaatccgcaagcccagtccctatgatggaggcacttactgctgcaaagcagtcaacgaccttgggacagtagagattgagtgcaaactggaggtgaaagaattaaaaatagcaaacaaaaaaaaaaaaaaaaaaaaaaaaaaaaaaaaaaaaaaaaaaaaaaaaaaaaaaaaaaaaaaaaaaaaaaaaaaaaaaaaaaaaaaaaaaa

SEQ ID NO: 3158143 - DNA, 702 bp, Cricetulus griseus
ggaaagccagtgctgtgggaaccactggtgcatgcgcctcttcaggcagctgctgtgacctccaacgtggccatagccctgactcaccagcgaggtcctctgcccctctcccctgactctccggtggccctccttgcacgatctgctagacgttcagcaggctccccagcctccccactggtgcctgtccgagcaggtcctctgctggcccgaggaccctgggcatcgacgtctcgtctacctgctcctcctgcccgaacccttcatgccagtctatcccgggcagggcgttcccaggtgtccctgctgggccctcccccgggaggaggtggtaggaggctaggacctcggggccgcccactctctgcctctcaaccttctctgcctcagcgagcaacaggtgatggctcccctgggcgcaaaggctctggaagtgaacgcctgcccccctctgcgctcctggccaagcctccagggacagtccagcctcccaggccatcagtgcctgagccagttaccccaagaggtccccaaatttctgccaacatgtgaaatcctaggttacactggccttagctattggcatgcaataatgtgtgcctgagggtaaaagcgctttggggaaggctgtcaggatctaaaatactgccctttactaccatgaagctgttctgtatcctcagctcaagcagctgcagcctg

SEQ ID NO: 3158144 - DNA, 417 bp, Cricetulus griseus
cggaagtggatgcagacaactcaggttggccgctgccttgggatctttgggcgtgtgcgctcgccgctgctttcggctggaaagatgccgggtctggccgccgccagccctgccccgcctgaggctcaggagaagaagccgctgaagccgtgctgcgcctgcccggagaccaagaaggcgcgcgatgcgtgcatcattgagaaaggagaagaacactgtggacatctcattgaggcccacaaggagtgcatgagagctctggggtttaagatatgacgtggtggcctactttgtgagtgaatgatccctgaagaatgaagaagagtaaatattttggaagttctttggtgaactttgataaatggataaagtatttataatttattaaaaaacaaaaggaaagaaaatgtggtgaac

SEQ ID NO: 3158145 - DNA, 813 bp, Cricetulus griseus
gtaaggatggtgtgcgaaaaatgtgaaaagaaactcggcacagttatcactccagatacatggaaagatggtgcacggaacaccacagaaagtggtggaaggaagctgaatgaaaacaaagctttgacttcgaaaaaagcaaggtttgatccatatggaaagaataagttctccacttgcagaatttgtaaaagctctgtacaccagcctggttctcattactgtcaaggctgtgcctacaaaaaaggcatctgtgccatgtgtggaaaaaaggttctggacaccaaaaactacaaacagacctctgtctagatgctctggtgaaccctctgaccttctgtagttgtactttctgccttgacttctcaaggtataacatggatgttccatcttacaaaataacctgcttcaagatgagtgtcagtctaaagcagggaaattgatcaatatccatgcatttgctatcatgaagctctgaacagcagtgttataaccaggcttctgccttaagaggttattccttgtgagcattttactgaactagaataagtgacaaaattaacggaaaaggtattcctgagttccatatgcactttctatttaacattattcatataattcttatctgatccatgtattttatttatagatattgcaatctgaaattactgatactttgctctgaatttgatatccagacttagaattccttccttactcacaaatgtcacagttcttaggatcagcagtcccttggttaaatgcattttcattagctatatggtcccttagtaaccagtcctgccacaagtc

SEQ ID NO: 3158146 - DNA, 919 bp, Cricetulus griseus
  modified_base (775)..(775): a, c, t, g, unknown or other
tgaagccttaggaagaaatgagttccaacgaacacaacttgaacttgggacagttaggctctttggagttgcatctatcataaaatattgtttggaaattcatgtggggcataattttatctatgctccaaaatgttaatactaataagacagagagagactgagtggtgagcaaggcactcacttgctttaagcacttctgtcaggagaggctgtgactactgcttcagatatctctgaatgtcattctgcttacaacattgctggtttcttgacggaatttctggacagctgatctggtcctcctctgtgtgacaggacacagagcagtgttgtctgcagatgtgctcacactgccctcactgggcccatacgggagcataacctattctgatgtctgctgacatctgtagcatagtgcaagtgtccgcacgttttttgtttttaaatactgtattttttttaagtgccatcatttaaatttcacttagtaagtggcagaatacattcgtcagtcccacaagcacacgacatagtaacactaggagatatttgagcatttattttacaatcgactgaatatattatgtaaatgaggtaagcaacttttgtagagattgtatgtgtgagataatgtaatgttcttttccagtttttggactacagttgaataaactttttaattatttaaaaacatctttaccgaataacatgtgatggtttttgtataatgtatttgattttgtaaatacgtatttcctgatgtgatttttgngagaaacgctaaatcttttagtataccatgtcctctcaagattggcaggagctaaatactagtttgtgggcgatttgtattgtgtactgtacaataactggggaacttttataattataaaatatatattaactttagtgtgtt

SEQ ID NO: 3158147 - DNA, 1222 bp, Cricetulus griseus
acctcctggtgccacagagaaatcccttcagatagagctcatggtgtttagtgatgtacttgcagtatcgttgaagaattgttttgtcttaaggaaaataagatgttgcacctgatttgtactgcagcaagtcagcaaaggcgatctgagttgggtatatttgaaggtattttgagagttacgtttaaggctaacacctgagctttgtgtgatgtaaataagaccttgtgtttatgaacctttcagctaattttatttttttcccttacatatcaagtgatgttcaggttttgaaagttttgtatcagttttttcctttgtaaatggcattaacattgttacttgaggtcttgcttattcacttctgttgtcctgaggacttgaatttacagtgcatcagattcgttgctaatctgtctgtagatagtctagcttcagctgtttatggtgatgctacattttcgtttataaatatgtttgtaggtaaaaaaaaaagaaaatagagtataaccataggtttgaacaatttcctactattttcatactgtataaactgagatgctcatatgcttccccttagaacaggcaatgtgctatgcataacatagttgtacattatctttgcagttgctttgagttttattctttattatttaaaattgtagttataaaacttttcagtatagtacagtacatatactgtgaggcgcgtgctaaagtgaataagcgagttttcatgctgacccactcaatgctcttcagaactcaattggcttagcactttctcatatccttaggtgcatttagattgtcagagttaaccttcgttaaaaaaataaaaaataaatacatgtatatacttaaaaaaaaaaataaggtttcccttgtgggaaaacagcagctacacgcttctttcctgtactactgtagcaaaccaaggcattgatgagagggcatgcaaattgtgcttcactttacagtgttcatcggagcacttaataaaatgtaaggctggtatttatttgaagttgtacagtatgacttaattcacatctgttggaatagaaaatatattctgttgagtatttaagaggctgtacatgttttcttttgtgtttggattctttgtgctttttcatgttcggtacatcaataaacaaagttgaagggaaaaaaaaaaaaaaaaaaaaaaaaaaaaaaaaaaaaaaaaaaaaaaaaaaaa

SEQ ID NO: 3158148 - DNA, 1184 bp, Cricetulus griseus
  modified_base (670)..(670): a, c, t, g, unknown or other
gtcctttgacctcctctcttgtgaattgcagaaatcagaccagactactgggtaaaatgacctcttgtgttgctgaagaacctattaaaaagattgctatctttggagggactcacggaaatgaactgacaggagtgtttctagttactcactggctaaagaatggcgctgaaattcagagaaaagggctggaagtgaaaccattcattaccaacccaagagcagtggagaagtgtgccagatacattgactgtgacctgaatcgtgtttttaaccttgaaaaccttagcaaagagctgtctgaggatttgccttatgaagtgagaagggctcaagaaataaatcacttatttggtccaaaaaatagtgacaattcctacgatgttgtttttgaccttcacaacactacttcgaacatgggttgcactcttattctcgaagattccaggaatgactttttaatccagatgtttcactatatcaaggcttccttggctccattaccctgctatgtttatcttattgagcatccttccctcaaatactcaaccacccgttccattgccaagtatcctgttggtatagaagttggtcctcagcctcagggtgttctgagagctgatattttggaccaaatgagaagaatgattaaacatgctcttgattttanacatcatttcaatgaaggaaaagagtttccttcctgtgctattgaagtctataaaataatggagaaagttgattatccaaggaatgaaagtggagaagtggacgctgtcatccaccctaatcttcaggatcaagactggaaaccgttacaccctggagatcccgtgtttgtgtctcttgacggaaagattattacactgggtggagactgtaccgtgtacccggtgtttgtgaacgaagccgcatattatgaaaaaaaagaagccttcgcaaagacaacgaaactaacacttagtgcaaaaagcatccgctccactttccactaaaaatcactgcaagctcacagttctggggagtcttgtgaacctctaggaccgtgcaatcccccaagagcagggctgtgccttattctagttctttgcctcagcacttggccccgtgcctcaagcagtaaacatccaggccagtttctgaaaggaagaataaattaatgaatgtctttcaaatgtattttg

SEQ ID NO: 3158149 - DNA, 629 bp, Cricetulus griseus
cgagaggcctccagaagagtatgtacctagtccgttggtagtggaagaaggaacggatctccaaagccttcgctgcccaatttgaaggatcggagaagaactgcctgtcacctggccgggaggagaagggacggctacctccccggctttctgctgggaaccccaagtcagccaagcccctgggcatggaacctagcagccccctgggggagtggacagatccagcactgcctctggaaaaccaggtctggtaccacggggccatcagccgaacagacgccgagaacctgctccggctatgcaaagaggccagctacctggtgcgcaacagtgagaccagcaagaacgacttctctctctccctcaagagcagtcagggcttcatgcacatgaagctgtcccggacaaggaacacaagtatgtgttgggccagaacagcccacccttcagcagcgtccctgaaatcgtgcatcactatgccagccgcaagctgcccataaagggggcggagcacatgtccctgctctaccctgtggccatccggactctgtagctgtgaggccagggcactatgatagacctggatccagctttgtcacctgccggagggctgtggttcttaccaagga

SEQ ID NO: 3158150 - DNA, 474 bp, Cricetulus griseus
cgggctccagcggaggcaatggcggagaggcccgaggacctaaatctgcccaacgccgtcattactaggatcatcaaggaagcgctcccggacggcgtcaacatctccaaggaggcccggagcgccatctcccgcgccgccagcgtcttcgttctgtatgccacatcctgtgcgaacaacttcgcaatgaaagggaagcgaaagactctgaatgccagtgatgtgctgtcagccatggaagagatggagttccagcggttcatttcaccattgaaagaagccctagaagcttacaggcgggagcagaaaggcaagaaggaagcttccgagcaaaagaagaaggacaaagcaaaaagacagattccgaagagcaggacaagagcagggaggaagatgatgaagatgaagaaagactagaagaggaagagcagaatgaagaggaggaagtagacaactgagtcgagagaatgggca

SEQ ID NO: 3158151 - DNA, 649 bp, Cricetulus griseus
  modified_base (630)..(630): a, c, t, g, unknown or other
tcccccacggatctgtaccatgcgcgatgtctgtgtacacactgtgccagcttacagaggggctcccacatgggccgtaatgggcaactcagtaccactctaccacaaccagacggtcttctaccggcggccatgccacggacagcaaggttgtcatcatggctactgcctggagcgcaggctctaccctgtctcctttgcttgtgtttgtgtgcggcctcttctaaagtcgtcttagtcacacttgccaccttcctgaggctgatcaagtcctccagagtcctacttgaagcatcagagtccccggacaagacggagaacttggaagaaaccctgacttttgcactttttgaaagaacttttgggaagaagcagtttttgtggctgttgaagatgctgttgtgacattccctctcaaaaaaggtctccaaaggcctgctgatccctggaagccacactactggctcttccttccctctgaattccccgcccagcacaggcactttctccatatttcctttgcccttcattttgtttgcttgtgaacaccaactctgtaggcagccaggcgtaattactttgacgtgggtaattctgaggagaagaaagctgttgttgaacgtgaaaatntttatccaaataaatatct

SEQ ID NO: 3158152 - DNA, 356 bp, Cricetulus griseus
ctctattttggctccaaggtcctttctcgggacagtgggatcctgtttaataacgagatggatgacttcagctcacccaacttcatcaaccagtttggggtacccccctcaccagccaacttcatcagtccagggaagcagccactttcatctatgtgcccctcaatcattgtggacaaggacggcaaggtgcagctggtggtgggagcctcgggagggacgcagatcaccacatccaccgcactggccatcatcaacaacctgtggtttggctatgacgtgaagagagcagtggaagagccccgactgcacaaccagcttttgcccaacaccacaactatagagaaagacattga

SEQ ID NO: 3158153 - DNA, 713 bp, Cricetulus griseus
ttattgcacagggcctcctgaagcacaacgctgaaggccggatccagagcataaggctcctggaccgcctgaatgtctcggggatggcagccccagggatggtgggctggctgattggtggcatgaacttcaagcagcaacaagagatcagcatcaacatcaccaatgtgcagctgtactgtgatggcatccagatggctttccctaaagagtggttctccacaaacatcacactggaatttgatgtcgaattccaactgcccttcaattcaaatatcatcaaaacgcatgcccgcatgggccttactgcagagtcctggctggagaaagatgagtttggccggagggaactggtgatgggcagatgccacatggagcccggcagtgagggtgcatccatgtccactgaggcagtcccacccaagatgaaacattttctccacaacctccgagaaagcctggggaaagttatcccgaacctagtagaaagtcaggtatgtcctctgatcggtgacattctccggcagctggatgtgaagctattgaaaggccttgtggaacaggtggctgctcgtaatctcggtcaactctgaatcagtcaaacctctcgggtgccaggctcgaggggcctgcctcctgctgcctgccattggtcagaagaaggtacttctggttgagaccttatgtctctcttaatgtgtgtcttctgctgt

SEQ ID NO: 3158154 - DNA, 347 bp, Cricetulus griseus
gtaaaatctgagaagctggatttcaaggacagagtccagtcgaagattggttccttggataatatcacccatgtccctggaggagggaataagaagattgaaacccacaagctgaccttccgagagaatgccaaagccaagacagaccatggagcagaaattgtgtacaagtcacctgtggtgtctggggacacatctccacgtcacctcagcaatgtgtcctccacggggcagcatcaacatggtggactcaccacagcttgccacactagccgatgaagtgtccgcttctttggccaagcagggtttaaaagaaaagaaagaaaaagaaaaaaaaaaaaaaaaag

SEQ ID NO: 3158155 - DNA, 256 bp, Cricetulus griseus
actaaaacgactgtcctaacttagacaatgaagtgaattttccgaggatgccatatttaaactcacattttatttaaataataatcaaccacatagcttttgttttcatgcttggaaagtcttttctttgcaaaggcaaactgctgtatgagggaaataaccttttggggctcaaccagatgtctgtagtgttattatttgctcctgaatttaatttggttgaaaactatttttttttctttttttttaggttttc

SEQ ID NO: 3158156 - DNA, 463 bp, Cricetulus griseus
gccagagccataagcttacagtggaggaccccgtcactgtggagtacataactcgcttcatagcaactctaaagcagaagtatacacagagcaatggacgaagaccttttggtatatcggccttaattgtaggctttgatgatgatggtatcccaagactgtatcagacagatccctctggtacttaccatgcttggaaggcaaatgcaataggccggagtgctaaaactgtccgggaatttctagaaaagaattacacagaagatgctatttctaatgacaatgaagctatcaagctagcaataaaagcgttgctagaagttgtccagtctggtgggaagaacattgaactggctatcataagaagagatcaacctttgaagatgtttagtgccaaagaaattgaattgcaggtaactgaaatagaaaaagaaaaggaggaagtagagaagaaaaatcaaag

SEQ ID NO: 3158157 - DNA, 1752 bp, Cricetulus griseus
gacaaggccgggagtccgaggacgatgacctcacccgagccctcggacagcgatgcggaatgggagcagctggaacctgcgcaaaggaacttaagcaatgatgcaatgctagagaactgccacagtcccgcctcaatgggaaatcaagatcccaaagaaggtacggtctctaagtttaaaaaaagaagaagtcatcattgggagaggcgaaagcacccaacccaagtagtgtgaacaaaatagcaaagcccaagaaagcagaagccaatgcaaaagtccaacaagatgagcagatagaggaaaagaagaaatctcaagacaatcgcattaagggaactacattcaagaagaaaagttcaaccagcaagaaaagcagtgactgtgctttgttggagaaaaaagagaaagcacgccatcaaatctcatcccatagctaaagaagacaaaatccagactagagagaaacggaaatcatctagccgtagttcatctaatatatctgacaaaactacaacttctggaaaaccctatgaatgcaatcaatgtgggaaggtcctcagtcataaacaaggactcattgaccatcaaagaactcataccggggagaaaccatatgaatgtaatgagtgtgggatagcttttagccaaaagtcccacctcgttgtacatcagagaactcacactggagaaaaaccatatgagtgtgttcagtgtggcaaagctcatggtcataaacacgcccctcactgaccatctaagaattcacactggagaaaagccctaccgaatgtaatgaatgtgggaaaaccctttagacacagctcaaaccttatgcaacatgtaagatctcacacaggtgagaagccttatgagtgtaaggaatgtggcaaatcctttagatataattcatctcttactgaacatgtgagaacacacacgggtgaaataccatatgaatgtagtgaatgtggcaaagctttcaagtatagttcatcccttactaaacacttgcgagttcatactggtgagaaaccatttgaatgtaacgaatgtgggaagactttcagcaaaaagtcacacctggctatacatcaaaggactcacacgaaggagaaaccttataaatgcgatgagtgtggaaaagcctttggacatagttcatctcttacttaccatatgaggactcacacaggtgattgtccctttgaatgcaatcaatgtgggaaagccttcaagcaaattgaaggccttattcaacaccagagagttcatactggggagaaaccctatgaatgtgctgaatgtgggaaagcctttagtcaaaagtcacacctcattgtccatcagagaactcacacgggcgagaaaccctttgaatgttatgagtgtggaaaagcattccctgcaaaatcacagcttgttatacatcagagatcccacactggagagaaaccctatgaatgtaatgaatgtggtaaagccttcaaacagaatgcctctcttaccaaacatatgaaagttcactcagaagagaaatctcaaaaaagaaaattaatgtagagaatctcacaactgactggtttggtcttctttaactttagaagatgttctcaacttgatgaatgttagcaaaactttttttagaaaatcattccttgtatataagagaatttgaatatagtatatttagataagatgtagaccaggctgaccttgaactcaagagataacaataatttatttgtcttattt

SEQ ID NO: 3158158 - DNA, 297 bp, Cricetulus griseus
agaagacaagatgcccatagtcacacggcggctgagagatccagacataaacccttgctgtcggaatctgatgcgtctaccagatgtatggatgaaaataactatgacagggagagatgttccaattacttcttgaagtcaaaaactgccggcgattctggaattctgtcatgatccaaagaagcaaaatggagttcagccatctatgcctacagcagcagaaagagatgaaatcttgagagcaatgcaaaagatgccctattgagtatttgtattaaaattagtttactataactt

SEQ ID NO: 3158159 - DNA, 2731 bp, Cricetulus griseus
  modified_base (882)..(882): a, c, t, g, unknown or other
gcagagcgtgacagcatccggaccctgtgtgacaatctgaggcgagagcgggatcgggctgtgagtgagctggctgaagcccttcgtagcctggatgacacccggaagcagaagaatgatgtcagccgtgaacttaaggaactcaaggagcagatggaatgccagctggagaaggaggcccggttccggcagctgatggcccacagttctcacgattcagccattgacactgattccatggagtgggaaacagaagttgtggagtttgagagagagacggaggatattgacttgaaagcacttgggttcgacatggcagaaggtgtgaatgaaccttgttccctggggactgtggcatatttgttactaaagtggacaaaggaagcattgctgatggtcgcttaagggtcaacgactggctgctgagaatcaatgatgtggacctcatcacgcctgaaggtgcagtaccgccatgaggagttcaccagagtcaagggcctgcctggtgacagcttctacatcagggccctatatgaccgtctggcagaggtggagtctgaactgagttttaagaaagacgacatcctgtatgtggatgacacattgccccagggcatgtttgggtcctggatggcttggcagctggatgagaatgctcagaagatccagcgtgggcagattcccagcaaatatgtgatggaccaagaattctcaaggaggctcagcatgtctgaggtcaaagatgacaacacagcaaaaacattgtcggcagctgcacgtaggtccttcttccgaaggaaacataaacacaaacgcagtgggtccaaagatggcaaggacttgctcgctctggacaccttttccaatgactccattcccctntttgaagattcagtgagcctggcctagtggcttcaataaaggagatcacagaaagaaccggcactgtctcctggacatcgccccgtgacgcagaggcattccaagagcaattgagacggcacagaagatcgatcaagagtacagcaggtacttcacaggggttgttcaaggtggagccctgacgggtcatttgcactcagatcctggcaatggtcaatcaagaacaaagtaaagtcctgtggatccctgcttgcccaccctagcagaaagctgtgccagaggcacctccatgaccagatggtggggacagctggctggctcttttgcagcccctagaggtctgtctgtctggacctggaaccaggactccaggaacacctcctttgtagacggagagcccccaagatttgggcccagctggtggatggcaccactcacatgtccacttggaagcaaaaaagcagaaacacaaaagacttgatcctccatagccagccaagcagaggtgctgtgcccaggaccttgctaatcacaagtttacaagccttttctaagtatttggttgtttatgtttacttgaatggctccatttcggtgcccagcccctgatcccaccccctctgtcactccctgttggtttgatgttcctgtctcttgggcaggacaattggaacctcgtttggggggagctgctttgttacaggaagtttctgtcagtgggaccagagctttgatagacttcctgctccttggtggcccctctcctggaagacatcacaactgcaggtgctcacaccactgttggtagcagaaccagtgccctggtggggcccacttgccattgcagcatgctcctcccgtacacggaaggcagctttggcattcttgcagcttcacctcttggcctttctattgcctccctggccccttgtttcttctccagctgcatttatatttaagcatcatcctcagcaggaggcatgggcatgccattcgttcctgtagactctgagatgcccagcagcctttgtcagtacaaggtggcagggtaaccctaacactggcacaggtgtttcagctctttctggcatgaaactattcatgtcacagactttgaaataagagcttgtagtggatgtaatggttagactctaagaagaaaatctaggcggttttttcatcttggttgcaacaacattctcagcctgactccacgaagacatctccattctttgttgggtatcttttctttttaaaaacaaaaaaaccaatcccccaaccccacccccaccacacttctgatgccagatctgctaaagagctgatgcggtgtcccttcttcaactgtgtgtcctattaataggtactgtattgggttctgtgtgtcattggggtaggacctatattttaatactgttcctaacatttcattttattagtaagaaatctctgatttcattttattctttgtaattctagacattagattgtagtttagccattattgaaaattttttaaaagggatatattttcttgcacagctgtttaaaagaaagagaacgagagttgcagtcaaggctgttctgtgccttacaggcacaccttttctagctcagacaactgagagacgctgctgaccactttcaaggtcttacttgcacagttgcgggacaaggactatttccctggtcatagggccctgttccgacgtcagtggataggcaggtatggatctgacaggtgggacatgctgtactaaaatgttactttgtatcaaaaataaaacagacttcagtacaacaaataaaggtcagtttgtagtaaaaaaaaaaaaaaaaaaaaaaaaaa

SEQ ID NO: 3158160 - DNA, 200 bp, Cricetulus griseus
  modified_base (114)..(114): a, c, t, g, unknown or other
agtttcttaaaccagtgggacttggaagactatgtgaaacaactgctagtcttgctttgtattttagaagactggtaaggttgcacagatagaactgcaggtctgtttttcccncctctccgtaactgcaaactctcaggaaatggaatgatgtcactcagtggcagtgtgcttggctaggatacacagggccctgagtt

SEQ ID NO: 3158161 - DNA, 237 bp, Cricetulus griseus
caaatgctcagtttttggaatctgttaagagaggagagattcccctggagcttcagcgactggtccatggcagccaagtgagtctggatatggaggatcatcaagaccaagagtacataaaacccagattgcgattcaaagcttttagtggagaagggcagaaacttggaagccttacacctgaaatcgtcagtactccttcctccccagaagaagaggataaatcaatacttaatg

SEQ ID NO: 3158162 - DNA, 604 bp, Cricetulus griseus
aagtctgtttgggatgtattgtaagattacatcttcgacgcttcttagtgaacaggctagaaagccataatgagatcaacaattcacagcaaagagttgaactgaaaaatcaatgtatgaagcaactcctcctgctctacccagaatcagaagtgcttatcaagtaccaaaacatccagaagagactgctggctaaatttctacagaactccttcccttcctgcaatagagattcagatttagaaggaaattgctcatggataccaaagtacaatgcccatgttatattcaaatgataaaagaggactttaacatactatgtgaaattttagctccctcctcaatagtgcagttcattaaagaaacttacctggatacagttacagaagaaatggcaaaaattcttgaaaatttttgtgagctgcagttgaaagaaaatgctgtttctggagttaaaacaagcaagagctgcagcaaacacagtggaaccgtgcatgctttgggtcagtgacatttacatttctgtttgattttatatcagccttttacttctttaatttttcaggcttttctgttgtcaatatatggtgaaatcccattgcaa

SEQ ID NO: 3158163 - DNA, 366 bp, Cricetulus griseus
catgcagtgacctgtgacattaaattcagggactacttcatccccacgggaacaacagtaataacatcactgtcatcagtactgcatgacagcaaggaattccccaacccagaggtatttgaccctggccactttctagataagaatggaaactttaagaaaagtgactacttcatgcccttttcaacaggaaaacagatatgtgcaggagagggcctggcacgcatggagctgtttctattcctgaccaccattttacagaattttaagctgaaatctctggttcacccaaaggacatagatacaaccccagtgctaaatggatttgcttctctgccacccgccttccagctctgcttcattcct

SEQ ID NO: 3158164 - DNA, 5775 bp, Cricetulus griseus
gcagaattggacttcagccagcagtgctacggagagcctactggctggaagctgggtcagccaacttaggtcttataacagttgatattgcattagctgctgatcatcattctaaacacgaggcacaaagacatttcttggaaactcacgatgccagaactaaaaggttgtggtttttgtggccagaagataccttgaaaaacaagaggtgtagaaacaagtgtggctgtcttggtggttgcagattttttggtggcacagtaactggcttagatttcttcaaacttgaagagctgacaccttccagtagctctgcattttcaagcacaagtgcagaatctgatatgtattatggccagtctttgctacagcctggagagtggatcattactaaagaaatccctaaaactgtagatggtaatatgaatggtatgaagaggaaagaatgggaaaacaaaatcagtgggaatagaagtagagagaaaaactcagcaccttagtcttcaggtgcccttgcggtctcacagttcatcctcttcctcagaagagaatagcagctccagtgctgcacagccattgctggctggtgagaaggaaagcccctcttctgttgctgatgaccacttggttcagaaagatttcttacatggtaccaaaagagatgatggtcaagcaagtgttcctacagaaatttcaggaaccagccctgtgtctcctaacacccaagacaagtcagtaggacagtctccgctcagatctcctttgaagcgacaagcctctgtttgttccacccgacttggtagtactaagagtctcactgctgctttttatggagacaaacagcctgttactgttggagtccagtttagtagtgatgtctctcgaagtgatgagaatgtactagactcaccaaaacagaggagaagttttggttcattcccatacacaccatcagctgactctaattcattccatcagtatcggtcaatggattctagtatgtcaatggctgatagtgaagcctacttttctgcagctgaagaatttgagccgattagcagtgatgaaggccctggaacttatcctaggtaaagaaaaaaaaaaagagaacttctaaagtatctaggaaaggttcaaaagatgtggtagatcacatgaccattcatatggatgactctgattcaatcacagtgtcagagcaaagtgagccatcggctgagtgctggcagaatatgtataaattgcttaacttttattcacttatttcggatccaacaggaatattggaaaagtcttcagaaacatttggaccggcaggtgttcggagtcctacagagccaacatgtagagttgtattcgagaatgaacaagacaacaacagtttgactaaaacacagaggaaacgtagtctggtaacctctgaacctcagcatgttactttaatagtgtttgggattgggatggtgaatcgcacacacctagagcagatattggtgggctgacaataggaatcagagctgaagaggatccatctgctaccttacacagcatgatggttcgaagttctcatcaactatccaaacaaatctcagaccttattagacagccttccacagccccacagcctatgaaagaagatattgcaaccccactgccttctgaaaaaactccaacaagtgttaatcaaactcctattgaaacaaatgaatttcctcaactgccagaaggcttagagaagaagcctattgttcttaaatttagtgccatgttagatggcatagctattggagcagcactcttaccatcactgaaagcagagtacaagatggggagaatgagaagccatggaatgacaggtgcacagacaaggtttacattttgagttaccaaaccacagattgcgttttacttcaaaagtttctgcaacagatatgtcaactatccctccttctgcaagtctgaaccttccacctgttaccatgtcaggaatatatcatggaaggatcctgttcagtgttcagctctcccaaaaccacaggaggcttttaccaagtgttcctttccaatccgaagatagccgaagggatgacagtctgtcttctaccagtgaagactctgagaaggatgaaaaagatgaagaccgtgagagggaaagattctatatttacaggaaagcatcacatacctctaggaagaaagcaacaggctttgctgctgttcatcagctgcttactacccatttaataacgggcaagaaagtgccatcctccctacagacgaagcccagtgacttagaaacaacagtgttttatattcctggagtagatgtaaagttgcattacaattctaagacattaaagactgaatcacctaatgcctccagaggatcatccttgcctagaacactctccaaagagtccaagttgtatggtatgaaagataacgcagcatctccttcttctcctcctttaccttgcactgtccagagcaagactaacaccttacttcctccccaacccccacctattccttcagactagacactttgggaaccacataccctgcagagaccttatctcctggcggtaatgctccagtggaacaaagacctctgccggcaaagctggaataccaggttcttcaggattaggcagcccacttggcagaagtcgacacagtagcagtcagtcagatcttactggctccagcagcagttcttctggcctgagcttcacagcatgcatgtctgacttttccctatatgtgtttcacccctatggtgcagggaagcagaagtccactgtttcaggtctcacatctggatcaggaggactagggaatgtagatgaagaacctacttcagtcactggtcgaaaagactcattaagtataaaccttgagtttgtaaaagtgagtttgtctcgaataaggcgctcaggaggtacctcatttttgaaagtcaatctgtgagcaagtctgcaagcaaaatggatactacattaatcaatactgtttgtgatataggatctgcttcatttagtatgatatgcgccgactcagtgaaatcctagcatttccaagagacctggtataggagaagtattggtcaaggcgcctattccttggagaccaaactgtaaatttgccaacatctggtccagggactcctgattctattgaaggggtgagccagcacctttctcctgagtcatcaagaaaagcatactgcaggacctgggatcaaccaagtcagtcagcctctttcactcatatgcctcagtcacccaatgtgttcaatgagcacatgaccaacagtaccatgtcaccagggacagcagcacagagcctcaagtccccagcctccataagatcaaggagtgtgtcagactcttcagttcctcgaagagactcaatttccaaaacatcaactcctgttaacaaatcaaacaaagcagcaagccagcaagggactccgtgggagacacttgttgttttcgctatcaacctgaaacaactaaatgttcaaatgaatatgagtaatgtcatgggaaatacaacttggacaactagtggtttgaaaagtcaaggccgcctttctgtaggaagtaaccgtgatcgagagattagcatgtctgtcggtttgggaaggtcacagttagattccaaaggaggagtagttggtgggaccatcgatgtcaatgctttggagatggttgctcatatttctgaacatccaaatcagcaacccagccacaaaatacagatcaccatgggttctactgaatctcgggttgattacatgggctcaagtatcctcatgggtatcttcagcaatgctgatcttaagcttcaggatgaatggaaagtaaatctatataacaccctggattcaagcatgactgataaaagtgagatttttgtgcatggagatttgaagtgggatattttccaagtaatgatatcaagatcaaccacaccagacctgataaaaataggaatgaagctccaggaatttttcacacaacagtttgataccagcaaacgagctctatcaacctggggacctgttccttatcttccacccaagacaatgactaacaacctagagaaaaattcacaagaacaattgcttgatgctgcacaccatcgacattggcctggggtgttgaaagtggtatctggatgccatatatccttatttcagattccattaccagaagatggcatgcaatttggaggatccatgagcttacatggaaatcacatgaccttggcttgttttcatggtccaaatttccgttcaaaatcctgggcccttttccatttagaagaaccaaatatcgccttttggactgaagctcagaaaatctgggaagatggctctagtgatcattctacatatattgttcaaacactggattttcatctgggtcataataccatggttaccaaaccatgtggtgctctggaaagtcccatggcaacaataaccaagataacaaggcgtcgccacgaaaatccacctcatggagtagcaagtgtaaaagaatggttcaactatgtcactgccacaaggaatgaagaactaaacttacttcgtaatgttgatgctaataacatggagaacagtactactgtgaagaattctagtttgttgagtggattcaggggaggttctagctacaaccatgaaacagagactatctttgcattaccaagaatgcagcttgaatttaaatcaattcatgttcaagaaccacaggagccttctttacaagatgccaacttgaaacccaaggtggaatgcagtgtggtgacagaatttactgaccacatttgtgtgactatggatgctgagctcatcatgtttctccatgatctagtgtcagcatatctgaaggaaaaagaaaaggccatttttccacctcggattctatctactcgaccaggacaaaaaagttcaattattatacatgatgataattcctctgacagagatagagaagacagcatcacttacaccactgtggattggagagattttatgtgcaacacatggcatctggagcctactcttagattaatttcttggactggaagaaagattgatccagtaggtgttgattatattcttcaaaaattgggctttcaccatgccaggactactattcccaaatggcttcagagaggagtgatggatcccctggacaaggtgctgtccgttctcataaaaaaacttggcactgcactgcaggatgaaaaggaaaagaaaggaaaagacaaagaagaacactagaatagtagcttaatctgtgaaaaacctgattatatccgttaagttttattacactggatttttttttcagcataacttttaagtattactttaaaataattctaattttgtggccattgtaacagtttgtaagttaatctgtttattctagttctaccattctgtatacagtaaagtattgcatgaaaatgtaaattttgtggaaaactacattaaaatatatgcataaaatttatgattgttttatgtgcaatatgattactgcatttaaaatatttgaagagtaactgtgaatttttttgttactggccataacttttagaaaaaatcttgttgataatgtgattggggggtgttattttttatgtagacttgtataaatacctatttgtatataatttgagtaattgtgatgattgtataccacaaaaatattgtttgtaactattgtaataaagtcaacaataatggcttcagtc

SEQ ID NO: 3158165 - DNA, 961 bp, Cricetulus griseus
ggacggttggaagcaatgtgtttcgatggtgtgagaaggctatgtcacatcagaggaaagttagagaaaaaggtttaggataaatacatcagacattatatttgattggtctgcgagactatcaagataacaaagctgatgtaatcttgaagtataatgcagatgaagcgagaagtctgaaggcatatggagaacttccagaacatgctaaaatcaatgaaacggacacatttggtccaggggatgatgatgaaatccagtttgatgatattggagatgatgatgaagacattgatgatatctaagctgaactaagcatgttacattccaagttttctgaagatagttctacatacttgggatcttgaccttcggctgttaagtaaaacttcttttagcatgagtatgacttgttaaagcagattgatgtatttttaatttttaaggtattatatttctttgaaaaccaaagatgttgagttatcttagttgacaatgtttatatgtaattttacttttctaatgcatacccaaaaatagaaaatgaaaattgaaagagaaataatgtgttgtgatacttgcgtagagaaattttcaaagaaggtggatgttgatagcacataacatttttttactttgcaaagtaggttgggtaaaaaaaatacattttcaaaaagttagctactgtattgaagctttgagtaatttaatgctatagataggttaaagttaattacataattgtataaatgaagttttccttaaactaagcttaggttaaaaggaaaggagtcacagcttaatgaaaaggcagtttctattttctgaatggaggagtccagaagtagaaacacaataaaaatatgttgatttaaaaaaaaatacttttctttttaatgtgttcattatatctctggtatgtaacaaaaataaatgactagatgatttctaaaaaaaaaaa

SEQ ID NO: 3158166 - DNA, 543 bp, Cricetulus griseus
tcagaagtatataagataaagtttatatttccaaatggcgacaagtatgatggtgactgtacaagaacacctgctgggagctatgagagaaacgggacaggcatccacaccactcctgatgggatcatatacacagggagctggaaagatgacaagatgaatggctttggaagacttgagcatttttcaggagctgtgtatgaaggacaatttaagaacaacatgtttcatggactggggacttacacattcccaactggggcaaagtacaccgggaatttcaatgaaaatagggtagaaggtgagggagagtacactgatatccaaggcctgcagtggagtgggagcttccacttcacagctgctcctggcctcagactaaagctctacatgtagacatgctgtgttaatgccaaagtgtggccactgcaactcccctgcaggcaaagcaactaacccttcaactgaaatggcctgcatccctctgtaagttcaccaataaaactgtcactacaatacaaaaaaaaaaaaaaaaaaaaaaaa

SEQ ID NO: 3158167 - DNA, 197 bp, Cricetulus griseus
tcactgtgaactttaggatctctgaggaaggtgcctgtaacatatccctgatgtgctccgtagagagagcaggcatggatgtgacctacacctggctttcaccacaggacagcgctaacatgtctcatgaagacgctatcatcagtacatcttggaggcctggtgacagagcgctttcctatatttgtagggccagc

SEQ ID NO: 3158168 - DNA, 594 bp, Cricetulus griseus
  modified_base (473)..(473): a, c, t, g, unknown or other
gccgccgccgccgccgccatggcggaagtccacagacgtcagcatgctccggttaaaggagaagtccccgcgaaatcctccacacacagagatgaggaggagctgggggatggcgccggccgaaacgctgacggtgttcctgaagctgctggccgccggcttctacggcgtgagctccttcctcatcgtggtggtcaacaagggactgttcagcacaaagaaactgaacttgcccatgtttacagttctgagaaggttctccattctgtttacaatgtttgctgaaggagctctactcaagaagactttttcttggggtattaagatgactgtatttgcaatgattatcggagcctttgtagctgccagctctgacttggcatttgatctggaaggatatgtttttatttgatcaatgatgtcctgacagcagcaaatggtgcatatgtgaaacagaagttagattcgaaagngcgtagggaaagtatggcctgctctattacaatgtttctttcttcttcttttcttttctttcttttcttttcttttcttttctttctttctttctttctttctttctttctttcttcctct

SEQ ID NO: 3158169 - DNA, 681 bp, Cricetulus griseus
  modified_base (642)..(642): a, c, t, g, unknown or other
caagaggaagtctagtgcttaggggagggagaggaagaggggtcaagagctctgggagtccccttcctaaatgtccatatttcctgggcaatgttcttccagggaagacctcttgagagggtctcagagcctgccctgcacactgatgccagccctctgtctcaagcccagccaacctgtggctcatggtattggggaaggagcatcttgtttcttagtggtctctgcaggccagctctgttctccctctctgcctgccctagggaacagggaaggtggcaggagggggtgggaccaggccagaacctgagaatgggccctagggttgtcttgtggagataaacttcaaaagagctaatccccttctcatacccacccacccaaccctatattccctctgtgaaatctacctcagagtcgtcccctcagaaagacaggggagcgggaggctggggccccaggctgaggtgggagcctcctgagggagcctgctgcccgctatgaatccacccctcactttgagcctccctggggccttggccagctggtggcagtgaaaaccactgtccatcgaatgtgccattctgatccaaatcttccaggccctctccccacacccctccttcctctgtgcagggggtnaggggtgtgtcagcagggaagggccaaggactccagaga

SEQ ID NO: 3158170 - DNA, 832 bp, Cricetulus griseus
atcacatcagagctcatcgtacaggaggtggaaactcagcggaatggagtcaaggctatatttgacctggaaggctggcagatttcccatgctttccagattaccccatctgtagccaaaaagattgctgctgtacttacagatttcctttccattgaaagttcgtggcatccatttgataaatgagccagtcattttccatgctgtcttttccatgattaaaccatttctgaccgaaaagattaagggccggattcatctgcatgggaacaattacaactcaagcctacttcagcacttcccggacattcttcctctggagtatggtggtgccgagttctccatggaggatatttgtcaggagtggacaaattttataatgaagtctgaagattatctcagcagcatttctgagacttcattgcacagggtgttttctttgtaagaaaatgagttgaatcagatgagctgatccttccaattctctgcacacacacacttacaaaatcaaaaggaggtgcaggtgttcttcagagaacgtgtttaactttcatgtagcaattacacgctaactttactatttaattttactaaaaagatcttgcttttttcttaaaacattagccttccttatgaaaccataaaattaaaattgtataaataacagataatcagctaaaggaataaagagtacaaaacgcctccagcttttcaaacttttaatcatagacggaaactcaggagtcactttatttgcgtgtggatgttcagtcatttgccctgactctgtggaggaatggtacattacaataaaggctagtgtcttaaatgt

SEQ ID NO: 3158171 - DNA, 218 bp, Cricetulus griseus
ggaggcactagcaatggacgcgcagaaagacgtccaacccccaaagcagcagccgatgatatatatttgcggagagtgtcacacggaaaatgaaataaagtccagggatccaatcagatgcagagaatgtggatacagaataatgtacaagaaaaggacaaaaagattggtggtttttgatgcccgatgaagagtgggaattcaggagtgtcttcatt

SEQ ID NO: 3158172 - DNA, 362 bp, Cricetulus griseus
gaggcgtgctccgggctggcgtccgccccggggcctgcggaagccttctgggcgccgctggctgccggcgcgccaggcctccaggcctcactgtcgtagccctctctcaccccagatgccggtggccgtgggtccctatgggcagtcccagcccagctgcttcgaccgtgtgaagatgggctttgtcatgggttgcgccgtgggcatggcggccggggcgctgttcggcaccttctcctgtctcaggatcggaatgcggggtcgggagctgatgggcggcattggtaaaaccatgatgcagagtggcggaacctttggcacattcatggccattggaatgggcatacgatgctaatcagggc

SEQ ID NO: 3158173 - DNA, 1019 bp, Cricetulus griseus
ccaggaactccagaaaattgctgctcatcagctacctgtgcatccataactgtgtatggagcgctgacctgcccagctccgctaagatgctcctgtcttcgccctccacgccatcgaggggacgaactcccagcgccgtggagaggctggaggctgacaaagccaagtacgtcaagacgcagcaggtgatagtacgccgtcaggagccagccctgcgagggggaccaggaccgctgacgccacacccttgcaatgagctgggagcctctgcatcgcccaggacgcctggacctgcccgccggggtagcggcaggcgacagccaaggcctgactccctcatcttctaccgccagaagcgggactgcaaggcttcggtgaacaaagagaacgccaagggtcaggggctcgttcgacgcctcttcctgggcggcccccgggatgctgccccgagcagcccgggacctacagagagacctgcggctcccgcaggctgggctgggtccccagatgctccagaggcgtcagggaagagagagcgctgtgtcccacgtgctcgctgccactgtcggagaaggagcgcttcttcaactactgcggcctggagcgcgcgctggtggaggtgctgggcgccgagcgcttctccccgcagagctgggggcgccgagcatagcccgcaggtcgcaacgccgccgctgcccggctccggggacaccagcgattggacatccagcgacggggacgcgggcaccccagactgtgcgggaggctgcggcggcggctcgcaggcggcggggtccgcgcgagacggacgcccgtcggtgtccgtggtggaacgcaacgcgcgcgtcatccagtggttgtatggctgccagcgcgcgcgcgctccgccgcgcgagtccgaggtgtgagcatcacagccctggagacggctcccggagagcttgcctcgtcggtgaacaaaccctttctctagatctcagtttccccggctgcaccctgagcaggcgggaccacaaggc

SEQ ID NO: 3158174 - DNA, 883 bp, Cricetulus griseus
ggggtcgtggctggtgggttggatttctgtttgctcagaagctgcagtaaccaagaatgagcggaaccctgggaaaggtgctgggcctgtggaaagataccgtttccaagcaagccttctctctcctaagattcagaattttgggagagaatcccatttgttctgcaggtggtattctgctgaggcccaggcagcactacaagacaaagcccactcatggaattggcagatacaaacacttggtgaaagtgctagagcctcagaagaagaaagcaaaggtggatgtgagagccattaatgtggggacagattatgaatacggtgtcttaaatatccacctgactgcttacgacatgactctggcagaaagctatgcccagtatgtccaccgcctctgcaaccagctctccatcaaagtagaggaaagttacgcaatgcccaccaaaaccatagaggtgatgcggctaccagaccaaggcaacaaaatggtcctagactcagtccttaccacccatgagcgagtggttcagatcagcggtctgagtgccacatttgcagagattttcttggaaatactccagcgcaatcttccagaaggagtcaggttgtcagtgagggagcactctgaagaagacttcaagggaaggttcaaagctcggccagaactggaagaattgttggccaagttgaactgaacactgcagccctttcatgtcatcgtcattctccgagaagttctccctgcgtggtcagacatagcaggagaatgaatgtgcacactgaggtgcctccagagtctgtgacatgctgtgattgtcagttaccacttaaccttaaaaaaacctggggtattctccacctaatataaaatctgctgttacca

SEQ ID NO: 3158175 - DNA, 190 bp, Cricetulus griseus
tctgttaacatggccatccagccaacctgggagaagcttagagaccatctctaagttagaatagtttttaataatacaaagcacctttataaattaagctgcaatctgagtttttgaacattaaatactttgtacagtgtaaatagattaaatgtattaaacgtgttatataattataaataaaggattt

SEQ ID NO: 3158176 - DNA, 705 bp, Cricetulus griseus
taatgttcaggagttgattgtttttgttctagcagacatgctacagttgactgaagttgttaatctttgctgtgaatttctgaaaggacaaattgatccacagaactgcattggactctttcagttctctgagcaaattgcctgccatgatcttttggaatttacagaaaactatattcatgtccatttcttggaggttcatagtggagaagagttcctggcacttacaaaagatcagctgatcaaaattttacgaagtgaggagcttagcattgaagatgagtaccaagtcttcttagctgcaatgcagtggattctgaaagacctgggaaagagaagaaagcatgtggtagaagtggtagatccaattcgatttcctctattaccatctcagaggcttttaaagtacatagaaggagtatctgattttaatcttcgagttgcattgcaaacacttttgaaagaatattgtgaggtcagcaagtctcccaaagagaacaagttttgtagttttctgcagacatccaaagttcgacctcggaagaaagcaagaaaatacctgtatgcagtaggtggatatacacgcttgcaggggggccgttggagtgatagcagagccctcagctgtgtagaacgttttgatacctttagccagtactggaccactgtatcttcgcttcatcaggctcgatgtggtcttggagt

SEQ ID NO: 3158177 - DNA, 415 bp, Cricetulus griseus
cccgggagtctggagtgcaatggcattgcttgggaagcgataagagtgggacttttgctaagatttacatcaatacaactaaggaagaggaagaggaagagagaagggtccaccttatttatgcactgagctgcagtaaagagccatggacacttaacagatttatggagtatgccatcaccgtgtctccatccccttttaatgaaacaaatataatagaagctgtggcaacatctgaagttggctgttatgttgcaaaggaatttctaatcaacaattggctagctgtgattgaaaggtatggcccacaatcactagatgctctagtgtgggtcatagggaggactgtaagtacagatctacaggttatggagttgcagaggttcctgggtaatgtgttggaggagcaccagag

SEQ ID NO: 3158178 - DNA, 501 bp, Cricetulus griseus
taattccactagacaaccactaagacctcttgtctatacttccacacagcagccacggttacctgttcctaccgattctggaaaaccagtaccacagactgttcataatccacccataaaaccaacaccaaggatttattcacctaggactagcatcgcacaaaggaacattccatcgttcacttcaaaaccaaagagtgataaaggaactgcacataaaaccaaccacaatgaattagctgccataataattggtgcaataataacttctatgttggtagctatactcatgattatactgtggaaatacttgaggaaacctgttttaaatgatcaaaactgggcgggtaggtctccattcgctgatggagaaacaccagacatgtgtatggataatattagggagagtgaagtatccacaaagcgacacatcagttgtttcacttatgacttaggaaaccaagcaaaagtacactgttagcagatgacttagaagttaag

SEQ ID NO: 3158179 - DNA, 3209 bp, Cricetulus griseus
gattaaaatctgaagaaggagctgcatgattctgaaggccagcaacttgctactacaataaagagattataggttttaaaagacaaactggagaaaaccagaagagaaagtcaaagtgaaagggaagaatttgaaaatgagttcaaacaacaatatgaacgggaaaaaatgttactaactgaagaaaataaaaagttaacaatgaacttgataagctgactgccttgtatgagagcttaagtttacgcaaccagcacttagaggaagaggtcaaagatctagcagacaagaaagaatccgttgcccactgggaagcccaaatcacagaaataatccagtgggtgagtgatgaaaaggatgcacgaggctatcttcaggccttagcttctaaaatgactgaagaattggaagcgttaaggaattccagcttggggacacgagcaacagatatgccctggaaaatgcccagttcacacgccaaccttaaggaaaaagggattgtcccttgcttcagctgccttgccaccttaagcgcaagagtcatcagtttttcgtgaagtctttcactgcccctacaaagtgccatccagtgtacctccttgatggttggtttgataagacagggctgttcctgtgaagtgtgtggggttctcgtgtcatataacatgtgtgtgcccggttcctcctgagcagactaaaggtccgcttggtatagacccacagaagggagtggggacagcgtatgagggccatgtcaggatccctaagccagcgggagtgaagaaaggatggcagagagcactggctgtggtctgtgacttcaaactatttctctacgatatcgcagaaggaaaggcgtctcagcccagctctgtcattagtcaagtgattgacatgagagatgaagaattttctgtgagttcagtcctggcttctgatgttattcatgcaagtcggaaagatattccctgtatatttagggtcacagcgtcccagctctcagcgcctagtaacaagtgctccatcctgatgctggcagacagcgagagtgagaggagtaagtgggtgggaatactcagtgaactacacaagattttgaagaaaacaaattcagagaccgctcagtgtatgttcccaaagaggcttatgacagcactctgcccctcatcaaaacaacacaggctgctgcaatcatagatcatgaaaggatagctttgggaaatgaaagaaggattatttgttgtgcagcttgttgctgtgatctcgggccgaaatcgccatgtccgacttttcctatgtcagccttggatggtcgagagacagatttttataagcttccagaaactaaagggtgtcagaccataactgctgggaaagtgcgtcatggggctctgtcctgcctgtgtgtggctatgaaaagacaggttctctgctatgagctgttccagagcaagacccggcacaggaaatttaaggaaattcaagtcccatgtaacgtccagtggatggccatcttcagtgagcagctctgtgtagggttccagtcaggcttcctgagataccccttgagtggagaaggaagtccatgcaatatgctccattcaaatgaccacacactatcgttcattgcacatcagccaatggatgctctctgtgcagttgagatctccaacaaagagtatttgctgtgttttaacagcattggggtatacacggactgccagggccgaagatccagacaacaagagttgatgtggccagcaaacccttcctcctgttgttacaacgcaccttatctctccgtttatagtgaaaatgcagttgatatcttcgatgtaaactccatggaatggatacagactcttcctctcaaaaaggtccgacctttaaacactgaaggatcattaaatctcttagggttggagactattagattaatatatttcaaaaataagatggcagaaggggatgaacttgtagttcctgaaacatcagataatagtcggaaacaaatggttagaagtatcaacaacaagcggcgttactccttccgagtccccgaggaggagaggatgcagcagaggagggagatgctacgagatccagaaatgagaaataaattaatttctaacccaactaattttaaccacatagcacacatgggtcctggagatggaatacagatcctaaaagacctgcccatgaacccacgtcctcaggaaagccggacagtattcagtggttccgtcagtattccctccatcaccaagtcccgccctgaaccaggccgctccatgagtgccagcagtggcctgtctgcacggtcatcagcccagaatggcagtgcgctaaagagggaattctctggaggaagctacaacacgaagcggcagcccatgccctctccctcggagggctctttgtcatcgggaggcatggaccaaggaagtgacgcccctgcgagggactatgatggagaggactctgattctccaaggcattccacagcttccaacagctccaacctgagcagccccccaagccccatttcaccccgaaagaccaagagcctctccctggagagcacagaccgcgggagctgggatccgtgagcccaggaccgcagtggccacaggcagggactcaacaccccgacaacgtgcctggcagcagcgtagtgtccgcactgctgcaataaggattcctccgcagccaggcccgcttcaccaccacccccaccagccccccaggtagcttccatagacagactgcgcagacgcagcgctaagagtagacgggttgtgttctcaccgtagtcctcacgtagcgcccagcagcctccatgagcgtcagcccgactgttgccaggaaataaatcctcacgactgaaaacaatgcatattttactacaatacagagtttaaataaatacataaatgtagaagttaaatactgaatgtacatagtcaaggaagcatcttgtgttcagtgaaagatgatgcacatataagaaagctcatttaaatttaaaaaaatcagtcagccttgatgccattgaaaacaaaatgacctgcctttttattttataccatttattttatacatttttaggatttttttctcattgtaatattattgtacagttttgcatggcctgggtgtaatcatttttgtttagactatgatgctgatcagtgtgtgtgtgtgtg

SEQ ID NO: 3158180 - DNA, 369 bp, Cricetulus griseus
ccgccgaagagtcgccatgagcaaggcccaccctcccgaacgtgaagaaatttatggacaagaagttatcattgaagttaaatggtggcagacacgtacaaggaatactacggggctttgatccctttatgaatcttgtgattgatgagtgtgtggagatggcaactagtggacaacagaataacatcggcatggtggtcatacgaggaaacagcatcatcatgttagaagccttggaaagagtctgaacaatggctgctcagcagaggagttcacatccttccccaaaggactgtttgactggggtgtataattgggtcatgtacattttcataagaaactttttgctaaataaacctttgtgatact

SEQ ID NO: 3158181 - DNA, 244 bp, Cricetulus griseus
gaggacatgttcgagcagggtaagtgggacgtattctccgagaacctgctggccgacgtgaagggcgcacgggctgcactcaacgagatcgagagccgacaccgagagctgctgcggctggagggtcgcatccgggatgtgcacgagctcttcttgcagatggctgtcctggtggagaagcaggcggacacgctgaacgtcatcgagctcaatgtgcagaagaccctcgactacacgggtgagg

SEQ ID NO: 3158182 - DNA, 718 bp, Cricetulus griseus
gctgtggttccgtttccactcgagcgaggtggttatggccggaccgccggaccgagagagccgagagaagccggccgccctggcgttggcccaggctcgcttcgccaggggcgagtttgccgaggcgcaggcgctgtactcggcgtttattggccagtgcgccagtcgcgggagcaaatgcagccctgaggatttggccaccgcatataacaacagggggcaaaccaagtacttcagcgttgatttttatgaagccatggacgactacacatcggctatagaaatcctgcctaactttgaagttccgtattacaacagaggtttgatacgctataggctggggtattttgacgaagctttggaagatttcaagaaggtgttagacctaaatcctggatttcaagatgctgtgttgagcttaaagcagaccattttagacaaagaagaaaaacaaagaagaaatgctgaaaaaagttactgaggcatataagttactgaaattttaacttaagatccttaagcctacatctgattgactctaagatatttatggaactattttgattatatgtgagagactgcattttagaagtgaaagtaaaataatatgtttaatcaaagttatttcaagagagactgtgatgaatagatcttttaatagagtaaataaataatatcaatgtacattattatagcaaaatatttaaattaatatgta

SEQ ID NO: 3158183 - DNA, 1517 bp, Cricetulus griseus
  modified_base (766)..(766): a, c, t, g, unknown or other
agaccaattgctcctccccagctgcttggcgttggacctacttacttgctgatccaactaaatgcaaactccatcattggcgatggccccattatcctgaaagaagtagagtatcgaatagacctcaggatcttggacacgaaacccatgctgtcaatgctccaacatacaagttgtggctgtcccagggctgccctcagtactggccagaagaagggatgctgagatacggccctatccaggtggagtgtatgtcttgttcaatggactgcgatgtgatcagtcggatttttaggatatgcaacctaactaggcctcaggaaggttatctgatggtgcagcagttccagtaccttgggtgggcgtctcatcgggaagtgcccggctccaaacgctcgtttctgaaactgatactgcaggtggaaaaatggcaagaggaatgcgaggaaggggaaggccggacgatcatccactgcttgaatggtggtggccgcagtggcatgttctgtgccataggcattgttgttgagatggtgaagcggcaaaacgtggtggacgttttccatgcagtaaagaccctgaggaacagcaagccaaacatggtggaagccccggagcagtatcggttctgctatgacgtggctttggagtacctggagtcctcatagttaggtgaggctatttgcagagcatccaaggagaaacacattcgtctgttgagccagcaactgttgtacctgttacacctgcacagagagattttaanggtggggggttggaggcttttacattggagaggcaaacgtatttttcttatgaagttgtgtatcttatatatatatatatatatatatatatatatatatatatatgtgtgtataaatacataaatacatatataaaactggcttattttcttttaatgtgcaatgatggctggatcatttaaagttctttttagaaaacaccataagccaaagactcaagtgtaaatatgtctatatggaagaagcacattatatttattggttacttacattactttttgatggctaaaatactaccaccacacaatcatttttgtttcagaagaaagctttttccttagctgaaatcaatggtaaacaatttttgtagattattttttgtatgtttagtgtaagtagaggataaactttttattcataaaccaagaagcaatgttctttgtagtggttaccttgtgtacatgcttgtgaattaaatttatgtaaaacatcttggcaattgtctttgaatagaggaccaaattaaaatgttttgctgaaaatgtagtttttcccagtgttcattaggtaaatgatggcttgatgattacataggagaaatctgcacagcagaagacattgtggttagctttcccagtgttgaacaccttgaagtgtttaaactttaaagaagttgggcttctgagcctgtggccttgtcctgttctggaacaggagatggcaacactgaagctctcaggggcaagtttt

SEQ ID NO: 3158184 - DNA, 776 bp, Cricetulus griseus
cacttccacagatctggggcaccctccgtcctgccccattgaaggaccaggctgggatccctgcgttgtcgcatcgcagagatccactctttgtccgtggaatgtggctgctggttctctcttggattttgttggaattctccctgtcgcatcaccctatcattgtcatctctgtacctgcatcacgaaaatccgctccttcacaaaagccatcacaacatcaaagcaaatggccagctctttccagatccatctctcactgtcactttcttcctgccagtggggatctgcttcaggcttgggtacccaggatgctggcccccaggaacccccacccccagccactcgttgttggcctggcctagatttggctgtaggtgaggaggccccagctgtgtgtttaccaggaagtgaggaagaggagggcaagtgtggaactgctgctctcatctgctcccctcctatgctggccctatgttgaccagactgtccactatgggggagggggtgggctctccccttcaggcaccccactgactgtcccagtccttctgtgaagtttgcctccagtgttaacctgcccccttccatcctccaacgtccttggagaattccagcttcttctgtgtgaggagagagctgatggtgtttcaggggcaaagcaagcaacatttaggtatcacttctacttggacgcatgcctttttacagccaaacttctgtgtatttcgtaaatggattttgcgttaacgggtatttatgtataactagacctc

SEQ ID NO: 3158185 - DNA, 485 bp, Cricetulus griseus
tggggagatttctgacttggaccagcaggtgtggatccttcgtggtcaaagccttgtgacagttccacggagtagcaatataaccccagtcaccatcgctgtccttccatgcaagtatccagagtctcttgagcaggacaaagggattcccatttacatgggaatccagaatccagacaagtgcatgctctgtgaggaagttgatggacagcccactttgcagctcaaggaggagaatattttggatttgtacaaccaccctgagcccaagaggcccttcctgttttaccacacccagactggtagaacgtctacctttgagtcggtggctttccctggcagcttcatcgcctcctccaagaatggccagcccatcttcctcacgtcggaacaggggaaatactataacattaacttcaatttacaaatagggccttgaactcagcatattggtagagggttggttagaagtctttgtcttaaaa

SEQ ID NO: 3158186 - DNA, 170 bp, Cricetulus griseus
aagtgccctcccaaatgccagacaccaaagtgtcctccaaagtgccccccaaagtgtcctcctaagtgcccccctgtgtcatcgtgctgcagcctggggtctggtggctgctgtggctccagctctgggggctgctgtggttccagctctggaggctgctgcagctctgg

SEQ ID NO: 3158187 - DNA, 2780 bp, Cricetulus griseus
gaacaagtcggagggtcttgttcaagtatagaaggcagaccaggctatcagaaattttatacgatagcacaagagtcagttttttacctatgatgaaacagcaggagtgactaaaaacagtaaaccttcagagtgatggttttatttgcaccattagatacaggcaaattggccccctgaattgacagacagattttccgactttagtgaagatggaatggtaaatgcaagatttgactatagctatgacaacagctttcgagtgaccagtatgcagggtgaaatctttgaatacagctccaaggggcttctgactcgagtttacagtaaaggcagtggctggacagtgatctatcggtatgatggcctgggacggcgtgtttccagcaaaaccagtctgggacaacaccttcagtttttttatgccgacctgacataccccactaggattactcatgtctacaaccattccagttcagaaatcacctccctctactacgatctccaaggacatctttttgccatggagatcagcagtggggatgagttctacatcgcctcagataacacggggaccccgctggctgtgtttagtagcaacgggcttatgctgaaacagattcagtacactgcctatggcgaaatctactttgactccaatattgactttcagctggtaattggattccatggaggcttgtatgacccgctcaccaaattaatccactttggagaaagagactatgacatcttggcaggacgatggacaacaccagatattgaaatctggaaaagaattgggaaggacccggctccatttaacctgtatatgtttcggaataacaaccctgcaagcaaaatccatgatgtgaaagactacatcacagatgttaacagctggctggtgacgtttggcttccatctgcacaatgctattcctggattccccgttcccaaatttgatttaacagaaccttcatacgagcttgtgaagagtcagcagtgggatgatgtaccgcccatttttggagttcagcagcaagtggcaaggcaagccaaggctttcctgtccctggggaagatggccgaggtgcaggtgagcagacgcaaggcgggcggcgagcagtcgtggctgtggttcgccacggtcaagtcgctcatcggcaagggcgtcatgctggcggtgagccaagggcgcgtgcagaccaatgtgctcaacatcgccaacgaggactgcatcaaggtggcagcggtgctcaacaacgccttctacctggagaacctgcacttcaccatcgagggcaaggacactcactacttcatcaagaccaccacgcccgagagcgacctgggcacgctgcgactgacgagtggccgcaaggcgctggaaaacggcatcaacgtgaccgtgtcgcagtccaccacggtggtgaacggcaggactcgcaggttcgccgacgtggagatgcaattcggtgctctggcgctgcacgtgcgctacggcatgacgctggacgaggagaaggcgcgcatcctggagcaggctcgccagcgcgctctcgcccgggcctgggcgcgcgagcagcagcgcgtgcgcgacggcgaggagggcgcgcgcctctggacagagggcgagaagcggcagctgctgagcgcgggcaaggtgcagggctacgacgggtactacgtactgtcggtggagcagtaccccgagctggccgacagcgccaacaacatccagttcctgcgacaaagcgagatcggcaagaggtaacctccgggccacccctgcgcagcgtctcctgtagcacaatccgaagtggactctccaaagagccttccagaacgacactgctctgcagacacacacaccgcagacacacacgcgacacaaaccagaaacaaagacaactttttctgaatgaccttaaaggtgatcggctttaaagaatatgtttacatacgcatatcgctgcactcatttggactggaagtatgagaaggaaaaaaaaagcataacgaggcaacgttttgctctggccctctgtaccttcgaggcactgtatttaacaaaggttttaaaaagaaaaaatgcgtacaatgtttccagatattactgaattgtcgacctttgcttacaggaagtaatctctacttaggatgtgatgatatacatagatctgttcattttaaaatgtggggcaaagttactgtttatagaacccaactgctttcccgtgctgctttgtaaaaggacattggcacaagggacgtctgcttcggcggggatttaataatggattttactaacatggcttgccctgggagggaaaaactgacgaatagaatccttgtcactgataagcaaaggaaaccctgatttttttgtaaattatgtgagacaagttgtttatggatttttatatgaattacaatttactgtacatcaaatattagtctcagaggagttaatttatgtaaagtgtttaaaaagtttatacttaaaaataaaatgataaaaacatgtagaagtacacactgttttcctctatgtataatggtgataaatatagcaagtgaacatgtcgtaaatataaaggttcaagtgatgtattgaaaataattttctaactgctttgtatgtatcacatactctaaactgcacagtaggcgtgttatcaaacattggctgggaaagtttcgaaatagctactgaatttacagtctcagtgctattcttgtcgctgtgtatgtggtagggcataccgaagtaattaatc

SEQ ID NO: 3158188 - DNA, 5094 bp, Cricetulus griseus
  modified_base (5086)..(5086): a, c, t, g, unknown or other
gaagtagtcaatctccttttgcaacatggtgcaagacccaaatgctcgagataattggaattatacccctctccatgaagctgcaattaaaggaaaaatcgatgtttgcattgtacttttacagcatggagccgagccaaccatcagaaatacagatggcaggacagcattggatttagcagacccatccgccaaagctgttctcactggtgactataagaaagatgaactattggaaagtgccaggagtggcaatgaggaaaaaatgatggctctgcttacaccattgaatgtcaactgccatgcaagtgatggcagaaagtcaactccattgcatttggcagcaggatacaacagagtaaagattgtacaactgttactgcaacatggagctgatgtccatgctaaagataaaggtgatctggtaccattacacaatgcctgttcttatggtcattatgaagtaactgaacttctggtcaagcatggtgcctgtgtaaatgcaatggacttgtggcaatttactcctcttcatgaggcagcttctaagaatagggttgaagtgtgttctctcctcctgagttatggggcagatccaacactgctgaattgtcacaataaaagtgctatagacttggctcctacaccacaattgaaggaaagattatcatatgaattcaaaggccactcattgctgcaggctgcacgggaagctgatgtgacaagaatcaaaaaacatctttctctggaaatggtgaatttcaaacatcctcaaacacacgaaacagcacaaaggctggtgatgtagagactgtaaagaaactgtgtactgttcagagtgtcaactgtagagacatagaaggacgtcagtcaacaccactccattttgcagctggatacaacagagtgtctgtggtggaatatctgctgcagcatggagctgatgtgcatgctaaagataaaggaggcctcgtgcccttgcacaatgcatgttcttatggacactatgaggttgcagaacttcttgtcaagcatggagcagtagttaacgtagctgacttgtggaagttcacacctttacatgaagccgctgcaaaaggaaaatatgaaatatgcaaacttctgctccagcatggtgcagaccctacaaagaaaaaccgagatggtaatactcctctggaccttgttaaagatggagacacagatatccaagatctacttagaggtgatgcagctttgctagatgctgccaagaagggttgtttagccagagtgaagaaattgtcttctcctgataatgtaaattgccgtgatacccaaggtcgacattctacacctttacatttggcagctggttacaataatttggaagtcgcagagtacttattgcaacatggaagctgatgtgaatcgcccgtacaatgcgtgtgtcaatgccacggacaaatgggctttctacaccgttacatgaagcagcccaaaagggacggacacagctttgtgctttattgttggcccatggagctgatcctactcttaaaaatcaagaaggacaaacacctttagatttagtttcagcagatgatgtcagcgctctcttgacagcagccatgcccccctctgctctaccttcatgctataaacctcaagtgctcaatggtgtcagaagccctggagccactgcagatgctctgtcttcaggtccatccagcccttcaagcctttctgcagccagcagtcttgacaacttatctgggagtttttctgaactgtcctcagtagttagttcaagtacaacagaaggtgctgccagtttggaaagaaagaagatccaggagtggattttagtataattcagttcataaggaatcttgggcttgagcacttaatggatatatttgagcgagaacagatcaccttggatgtgctagttgagatgggacacaaggagctgaaagagattgggatcaatgcttatggacatcgacacaagctaattaaaggggttgaaagactgatctctggacaacaaggtcttaatccatatttaactctaaacaactctggtagtggaacaattctcatagatctgtctccggatgataaagagtttcaatctgtggaggaagagatgcaaagtactgtccgagagcacagagatggaggtcatgcaggtggcatcttcaacagatacaatattctcaagattcagaaggtttgtaacaaaaaattatgggaaagatacacgcaccggaggaaagaagtttctgaagaaaaccacaaccatgcaaatgaaaggatgttatttcatgggtctccttttgtgaatgcgattatccataagggctttgatgaaaggcatgcgtacattggtggcatgttcggggctgggatttattttgctgaaaactcttccaaaagcaatcagtatgtatatgggattggaggcggcactggatgtccgattcacaaagacagatcgtgttacatttgccacaggcagctgctcttttgccgagtgaccttaggaaaatctttcctgcagttcagtgcaatgaaaatggcacattctcctcccggccatcactcagtcactggccggcccagtgtgaatggcctagcgttagctgagtatgtgatttacagaggagaacaggcttaccctgaatatttaattacttaccagattgtaaggcctgaaggtatggttgatggctgaaaccaattccaccaaacctaaagtaccgaagcagctgatggcctcttcagtttcactccttggctggaaaaaaattcatcctgactacaggcctgtggcaaaaaacgataaaaatgtgaagaagtttaacattctgactcgataaagctttaataatgtacagtgtttctaagtatttcctgtttttcagcactttaacagatgccattccaggttcaactgggtttatctgtactaaattataaacagttaacttgaatcttttatacgttgtgtattgattctaacaaaaatggtaatgccctcaacagaactcattttactaatcagtactgtgttctttaaaacacagcatttacactgaatacagtttcatttgtaaaatgtaaataagagcttttgtactagcccaatatttatttacattgctttgtactataaactgttctagagctgcagcggttacagagtattttcatatgtgttgctcatctgtgtttcatctgtcattgcctgagtgatcgttacatttgattccagaggctgctcggttgctggtgcagacttagtggggaaacgttgatttatcaaattcaatttgctgatggaagcatttctctcacataaaaatattttctcatttaagaattttatgaatactctgggaatttaatttgtggtgcctttgtatctacaaggcacacagttccatagagctctggtgtgttgatgtggagactgatggctaaagaagtgtcttcgatggcctcaaactctggttcttgtctcagaaatctttctgatgttatggacatcagagtttaagtttttcattgattttatatattatagccgagtctatttatcatgagtaaacacaacccagaaccataaatataagtgtatctatttgtgggtagcctctggaatgcacaagcccagtgcttcctactcctgtcaaggcattctgcccagttaaaaatactccatcacaggctgatggtcagtgtggcagctatggaagaaattactttccctgaaaggccactcagactgttctctaatgtaagccctgtactcagcatcttgcaacactcaggagtcaaggagagggtcttatccacctaagtctttgtaaatgaggacatcctcttcactgtctgtaacaccttatctttgttggcatttatttgtctctcaattaactgatccttgatagaaatgtgtacatatagttgctcgaaagtcaaatttattgtcctatgagttaagagaaatgtatttctggagttgttactatgatgcaaattgtgggcaaggtttaagaggtcaaaaaatcctgacctggatatgcttttatacagctctctgttaataacaaatgcaatcctaaaatcatttcttggaacattaaaaggagcatgccaaattttataaaatattcaggttctgaaagcttctggattttataggtagaagataatgaaatgaattgatggagtttatatttgcatacttctaaaagtttggccaatattactctattcatggatctggaaattttctcatataaaatcatggtctagttatgagctatgttacttcctctaacccattgcatatttgtgttgttttccactgtgattaatgcgctagcatggcaatgttaattgggagatgggagtttgggggtgtgggttagtgctttgcatgaaatacttatatataataatggaattgctttctttgccttgtgattttctttgaagtgaaaattcattgagattacaaaaagtcataattgcaggaaaacaatgtagttttgagtctgatagtgtcagggtgcagcataaacgtaaaacgttgagtgttatggccattcttactcagatgcttcatgatagaagtagaatgtgtttggacgtttataccatccaatgtgacggaagtcctaaatactcactcatgaaaatcagtctgtttaacttagaaagagaaatatatttttgttttctatgtcataaaaacattcttgataagtttccaaatctcagttagtggtatttttttctctaaaaggaaaaaaagtagtgtattttatatttccatatgctaatgacctgtatgtaatcagtcctcagcgttccataagaagagagtgatggtacaagtatccctacgtctcactttaagtctgtgtaagctgctttatcttcctgcttcatttaagatgatattgaagtgtttgcttgctgtttcctgagtgtgcatgcccacgtatgatgtgatccaattgtttgcagattgaggcaagaaaacatgcgaataaatttcccaaagactaaaaactaaaaaaaaaaaaaaaanaaaaaaaa

SEQ ID NO: 3158189 - DNA, 347 bp, Cricetulus griseus
gtgacctatgatgatgtgcatatcaacttcactcagaaagagtgggctttgctagatttttctcagaaaagtctctacaaagatgtgatgctggagacctacaggaacctcattgccataggttacagttgggaagaccataatattgaagaacattgtcaaagttctagaagatatagaaggcatcatgaaagaattcatactggagagaaaccctatgaatgtaaccaatgtgataaaaacacacactggagaaaaccctttgaatgtaatcagtgtggtaaagcctttgcacactgcagtcatctgccaatcaataaaagaacacatactggagagaaatccta

SEQ ID NO: 3158190 - DNA, 691 bp, Cricetulus griseus
aggtggctttgtggctcatgtggagagcacctgcctgctggatgatagtggaacgccaaaggatttcacatactgtgttgccttcaacaaagatctgctggcctgctgggatccagagtcaggacaaatagtccccattgaatttggggtgctgtataatttggctgtattcatttcaaaaagcctgaacacaaacgaggccctgatccggcgcttgggcaaagggcttcaggactgtgccatgcacacccagcccttctgggatgcactgacccacagaacgagaccgccgtctgtccaagtagcccgaactgctcctattaacacgaaggagcctgtgatgttggcctgctatgtctggggcttctacccggcggatgtgaccgtcacgtggatgaagaacgggaatcttgtcataccacacaacatcaaagagagtactgcccagaccaatggggactggacataccagactgtctcctacctagccttgaccccctcttatggggacatctacacctgtgtggtacagcacagtgcgacctccgagccggtccgtcaggactggacaatcgggctgtcccccatccagacggtgaaggtgtctgtgtctgctgtcaccctgggtctgggcttcatcatcttctgttttggctttttcagttggcggaaggctcgcctctccagctac

SEQ ID NO: 3158191 - DNA, 197 bp, Cricetulus griseus
gataaagattctctacagttaaatctgtttaagtgacacctggagactcacctggggtggggaggcactctctgtcttgagggatcaaacccattctctccttccatgggagccacacatatttagacatccaagtgaagatccatgtgctccagaagagaagggacttggaggtgaaagggggaggtgggagagtt

SEQ ID NO: 3158192 - DNA, 362 bp, Cricetulus griseus
agaaactgctttcctaaacagacagccgcccaggtgaccctcaaggccatatcggccccatttcgacgactcgagcgcatcctcactgaagaatgtgtacttcctgctctttgacagcgagagcatcggtatctacgtacaggagatggccaaactggacaccaagtagctctccagtggggacggaggagaatcaatgtcacatcacaagagcagggggtttatttttcaaaaggattgaggaacggtgacatggcaggggagcagagggtggctaagggtagcaaaggcagtgggaacaggtcctgcctgcctggagaaggggcccagtgcattttatattctctttacaaagggcctct

SEQ ID NO: 3158193 - DNA, 216 bp, Cricetulus griseus
cgcggggcacgccgggagcaggtattctctccacatggctgccgaggaagcaaccgtcacagttcgcctcatccgttcatttgagcatcgaaatttcaaacctgtagtgtatcatagagttaatttggaccaaactgtgaaggaatttataatatttctaaagcaagatgtccctttgagaaccagcttgccaccgccactcagaaattacaaata

SEQ ID NO: 3158194 - DNA, 873 bp, Cricetulus griseus
gatgcatcgagtagctccatacatttcataacacgatctctttatttgtatgcaaaaaattactgtattaataaagtaacagcattttgtaacaaagagactggagctatttggtgcttgaatgtgaccatcctttttacttttgctaagccttatttaaattttgtataccatgaaatatgtagagtctgtcagatcattttagtgccgagggtttttctgatttgtttctgttgtcgcgtttttttttgttgtgttttttttttttttgccatacagttctagccactccccatcactacattgtgaaactgtataacaaatatttttacaagaactcaaatgggtctcagaaatggtctcaaagcttataatgcatatctggttggcagatctaatagcccgatccttctccactcagacatcaggacgggtctgtccaggaggtagttcatggtttacagcctttgctttctaactgtctggttttctttaaagcacaactcgctgcttgtttacaaaggatatttttatgtatattttgtatagtgtattatcatttgccaaatatgtttttgcattttggatgagtaaagagtacttaaggttgcttacatgtgatacctgtttgttgttgtgaatctcccccaaccagctggtagaatttctctgtgttctatttggtcagtctctgtgtggttgtaagatgtgcccctcagtaggactcccagctgtagatttaccagcttcagtttgttaggatctgtgcaataaaagtgtttgcagtcttattttctccaagaatccccccatgaatgtcataattgttgtatattgaacaaatatttatacttatgcagttgcataacattg

SEQ ID NO: 3158195 - DNA, 426 bp, Cricetulus griseus
atcttttcgaggacgtcaacacgtcttagtttgagacgctgcctttccggcggtgctgtgacagcttgcggctctacctggctgttgatactctgtatctgacgctgtgtcgccctcgcaggcgaccgacctttagagatactcggaggaatcctgcggtaacctcccacagcccgccaagatggcgatgcaagcggccaagagggcgaatattcgactcccacctgaagtaaatcggattttgtatataaggaatttgccatacaaaatcacagcagaagaaatgtatgatatatttgggaaatatggacctattcgtcaaatcagagtaggaaatacacctgagaccagaggaacagcctatgtggtctatgaagacatctttgatgctaagaatgcatgtgaccatctatcaggattcaacgt

SEQ ID NO: 3158196 - DNA, 363 bp, Cricetulus griseus
caccccccgacgccctcggtccggccgaccgcagcccgcgtcgccgcaggtggagcggccgtggctcgactgcctgtggatcgtgctggcgctgctggtgttcttcggggacgtgggtaccgacctgtggctggccctcgactactaccgcgaagggggactacggctgcttcgggctgaccctgttcttcgtgctggtgccgtcgctgctggtgcagagcctgagcttccgctggttcgtgcaggactacacgggcggcgggcgcggcggcccgggtgcggggggctcggccaccccgggggcgcagcgtctgtgccgcctctccgtgtggatctggcagtcggtcatccacctgctgcaga

SEQ ID NO: 3158197 - DNA, 284 bp, Cricetulus griseus
tgagcatttgtgacaagaagacaggagctacaaattttttctttgttctttggctcccgaaaagctgtcaactttcaggctcttgatggacttctttatcacagtcggcttttaaatacagtctatctcatgagccaatacttcccaacatcttatttctccataggattacaagtagattacagagttttagagctgcaaggagctttctcatcctagcagaagaagtcttcctatcatgccacagacttgagcatccagccttccacatatacacaccacca

SEQ ID NO: 3158198 - DNA, 887 bp, Cricetulus griseus
gtcgctatgagaggtgtcctatgttctcggactgcgggagcggtccgggctctgcggctcgtgggctggacttcgcggagcctgcacccgccgctccatggcgggtctccagcccagcctacagacagggaggaggaggaagaggaagacctcaatcatcccctccagttttcctccagtaaagccaccccaatccgctggacggtggagcattccctggggaagaatcagcggcggccctggtggaaagtgctgccggtcaccatcactctcacggttctgatcctatggtgctatctgaggcaggagaccagcacggacgagtggttgagagaggtgatgggcgaggtggaggaggaagagccggacggtcgtctggaggaccccgaagctccggctttctacggagctagaacgtaacaggtttcctgctgaggaaggaaacaggcagccgtccttctgtttcattgtcgagtttggcgatttctgacccggttctgcgtgtgtcttcgatgcttttaaaggacttggatggcgctcttggcgccgagacgcgagaacacagcacggaattggatcctcgaaatctgatccttgccagacaccaatgcccagtgattatgtcccaaggacttttgaggctcatagaaaaggttttggctgcaccgtgtgctgttgaatttgcgatgtgtttgtacaacctaatcatgtttccagagccgttctggtgggggtggttgtctgcaggtcatttgctttctgagacagaataactgcagaagtcttctgatctgcatccccgcatgtcagtttctcacctcacatagaaatgctctctctcccgctctcctttctcgccctccttctctttctctccctctctgtct

SEQ ID NO: 3158199 - DNA, 521 bp, Cricetulus griseus
atgtgggacaagaatatggaggatttacaccgtcatattttctgggagccagatgcaagcaaattgaataagaattattgccggaatcctgatgatgacgcccatggaccttggtgctacacggggaatcctcttattccttgggattattgccctatttcccgttgtgaaggcgataccacacctacgattgtcaatttggaccatcctgtaatatcctgtgccaaaacaaaacaactgagagttgtaaatggcattccaacacgaacaaaacgtaggatggatggttagtttgaaatacagaaataaacatatctgcggagggtccttgataaaggaaagttggattcttacagctaggcaatgttttcctgccagaaacaaagacttgaaagattatgaagcttggcttggaattcatgatgtccatggcagaggcgaggagaaacgcaaacaggttctcaacatttcccagctggtctatggaccggaaggctcataaagaaaaaagttaattaatc

SEQ ID NO: 3158200 - DNA, 245 bp, Cricetulus griseus
caggagtttgaccactttttggccaccaagtttgccacagtgaagagatatggaggtgaaggggctgagagcatgatgggcttttttcatgagttactgaaatcgtcagcctatggcggtataactgatatcattattgggatgccccatagaggaaggctgaacttgttgacaggcctcctgcagttacctccagagctgatgttccgtaaaatgcgaggcttaagtgaatttccagagaatgt

SEQ ID NO: 3158201 - DNA, 416 bp, Cricetulus griseus
  modified_base (369)..(369): a, c, t, g, unknown or other
tgatacagtgtttgattggattcgaaaggagaggaaccaatatggtgaagtgagggtgaggttcaacacctatttcttccgcaatagctggtactggctctatgaaaatcgaaacaacaggactcgatacggggaccccctccaaatcctcactggatggcgtggaatccccatgcaacgtatagatgccttcgtccatgtctggtcatggggaagagatgagcgatatttttttaaaggaaccaatattggagatatgacagcgagaatgaccaggcacacacagaagatcaacaaggaaggagctaccccaaactgatttcagaaggcttccctggcatccccagccccctggacactgccttttangagcggagacagcaattaatttacttcttcaaagggtctttagtatt

SEQ ID NO: 3158202 - DNA, 2263 bp, Cricetulus griseus
ttactgagctgaacagttgggaggatccaccctcatcatgaatcgtgctttcagccggaagaaagacaaaacatggatgcatacgcctgaagcattatcaaagcattacattccctacaatagcaaagttcttggcagtaccgaagtggagcagccaaagggaacagaagttgtgagagatgctgtgaggaagctgaagtttgcaagacacatcaagaaatctgaaggtcagaagattcctaaagttgaattgcaaatatcaatttatggagtaaaaattcttgaacccaaaagcaaggaagtgcaacacaactgccagcttcatagaatatcattttgtgcagatgataaaactgacaagaggatattcactttcatatgcaaagattccgagtcaaataaacatttgtgttatgtatttgacagcgaaaagtgtgctgaagaaataacattaacaattggccaagcttttgacctggcatacaggaaatttctagaatctggaggaaaagacgtggaaacaagaaaacagattgccggaatgcagaaaagaatccaagatttagaaacagaaaatatggaacttaaaataaagtacaagatttagaaaaccagttgagaataactcaagtgtcatcctctccagctggcagtgtgacagcgaagtctccttctactgacatctttgatatggttccattttctccaatatcacagcagtctccaacacctactcgaaatggcacacagctcccaccagtacctagcagatctactgagatcaaacgggatctttttggagctgaacctttcgacccatttaactgtggagcaggggacttccctccagatattcagtccaagttagatgagatgcaggaggggttcaaaatgggactaactcttgaaggcacggtattttgtctcgacccgttagacagcaggtgctgacgtcaagaatgagtgattctgacttatgcttgttttgttcatatacatatatagcatcattagtttaagacagttattatacttgtgctgatatatttttaatatctaaatgtttttaaatctgttgaagtaaaaatctcctcactttcaatgttgatttatcttttattttaagcagaacttagtgtaatgtttattggacttttatgttctcttctgtgttatgggtgaattttattgaaagacaagttttctaaatatctgccttgtctgtgttctaaataatcatcaattgaaatttatgttcattctccaagacattagttcattatccttgtcccaaagccataccttgatgtctttcaaatttctgttctattttgataccaataaacagcataccagtcattagatggatgtcattttgtgtctgaaatgttcatctcattatgaaaatctaaaatttagttattatgctaccagcttactaaattctacttggtaaaataagaatatatgttccaatagtaattatataaaatatatttagaatattgataaatataaaagaataacattgctcttttaaactatattctaaaaatgtttaatttgcctcaaaagtaacagttgtggggaaacagcttccctgaaaaacttaaaattttgtttctatttaatgtgttgtcatgtagtaatataacattgggccaacatctgctctggtactttaagaaatgaaaattatgctttctatagattcaatgcctactgtctttgtattttaccaatatttctcagatattctgtgatgtaagcatttctcttaccaaccttatggctcctgtttacgttctgttatacctgctaagttaaaccttaattagcgggtagaatgtgtttcaccaggaagtctttactgttctatttgtcagatagtattttggaatttgtataatgaggatgtttagaagccataaaaattggcttttttttaaacagatagagtttgtatttttattgtactttaaaaagctttatgtactgggtatatatttagcaaacatttattatcaattataacacaatagaatactaaaatggtatttgcacatttatgatatgatacttaccaagttttaatggtgatcagttctgctactggcatgatcatagtacataattggtcattaatatgaacatttacttctccagtgagtttttatgaagacatgattggaaattgtatttctatgtaaactcaatgatatgtttgattttactgagaataaaaagattttaaataaaatta

SEQ ID NO: 3158203 - DNA, 3908 bp, Cricetulus griseus
tcatgggcatgggtcgcatggaaatggagctggattatgccgaagatgctaccgaaaggcgtcgtgtcctagaagtagaaaaagaagacacagaagagctcagacaaaagtacaaggattatgttgacaaagaaaaggcaatcgcaaaagccttagaagatcttagagccaacttttactgtgaactctgtgacaaacagtaccagaagcatcaggaatttgacaaccacattaactcttacgaccatgcacacaagcagagattaaaagacctcaagcagagagagtttgcccgaaatgtctcttcaagatcccgaaaagatgaaaagaagcaagaaaaagcccttcggaggctccacgagttggcagagcagagaaaacaagctgaatgtgctcctggaagcggtcccatgttcagaccaaccacagtggctgtagacgaagatggtggcgacgaggataaagatgagtcatcaaccaacatttccgttttgagcaaggatgaaagtactgccctccagtggccgtcagaactattgattttcaccaaagcagagccctctgtttcctacagttgtaatcctttatactttgactttaaactttcaagaaacaaagatgccagagctaaagggacagaaaaaccaaaagatgatggcggctcctcaaaggatcggatccagagccttgatcctagagagccagacaaaagcaaggaagccgatctcggagtcatactagggagcgctcaagatcccggggccgcagccgaagcagcagctgcagtcgcagtcgaagcaagaggagaagccgcagcaccacagcccatagctggcagcgaagccggagctatagccgggatcgcagccgcagtaccaggagcccttcccaaagatcaggctccagaaaggggtcgtggggtcatgagagcccggaggaaaggcgctccggccgtcgggatttcataagatcaaagatctaccgctctcagtctcctcactatttccgatcaggtcggggagaaggtcctggaaagaagaagatggcagaggagatgacagtaaaggaacaagcctacctcccagaatagcagcactggcccaggaaggggtcggaaagtgactgcagtcctgaagataagaattctgtcactgccagactgctactggagaagattcagtccagggagaagtatagcaagctccagcaggccgcacagcagcacatccagcagcagcttctggccaaacaagtcaaggcctttccagcctcagcagccctggccccagccacaccagccctacagcccatccacattcagcaaccagccacagcctctgccacctccatcacaactgttcagcacgccatcctgcagcaccacgctgcagctgccgccgccgccgccattggcattcaccctcaccctcacccccagccccttgcccaagtacatcatattccccagccccatctgacccctatttccttgtcccacctcactcactcaatcatccctggccaccctgccacctttcttgctagccaccctatccatataattcctgcttcagccatccaccctggacccttcaccttccaccctgtcccccatgctgccctctaccctaccctgcttgcaccacggcctgctgcagcagctgccactgccctccatcttcaccctcttcttcaccccatcttctcaggtcaggacctgcagcacccctcccagccatggtacttgagttgggagtcgtaagctcaagttgggccagggaaggtgacctattcttcccttgggggtgttgagccatttataccagcaagtaaaaagctggaatgggcagtgtcttgacagccaaagaaatgagttttggcttagcagggatggatttagatttgaggttttgctttgggtttactatcagggatatcttccccctttctattagttcctcctgtgtttctaagctagggaacaccagtaagtgctacccacactcctctgcagcagactgtccagactgtcaagtattgatacttccttctctactttctaatcctctgctcttccccttctgtaagtttaaaaggttttcctcctctaatgggttgtcaccaaagcacttgccatgggcccatctggccttgccttctcagtgcctcaaggaaggccaggctgtctcttcaacggtgaaaacgccaccacttttgggcagtgtctttgaacattggtgacctgttatcccaggtgagatggaagagggagtctaacctagaaccaaaagcaactcaggctgcaatttgatcattttccttacaaacaaagccacacatgtggccctgctgtcctcatgcccctcatcccagaagaggcatctacatagcccagaaaagaagatcctgtcatgagtagaagctatgcggaacagagtcacccacgtgcttcccagagaggagctcatgtctggagggtatatttccttctgttatgttgatgttttcttcttaatttataggattttttaatgtaaaattgcactgaactctaaacataaatgctgctttttgtagcccatattaaaaaggttccgtatttgtagtatactgcaataatattttttacatccagctctttaagtgatccttgttctggtggctttctgtaaatatgtttgccctagttgaattaagaaactttaaaggttataaagttaaaaaataaaaataaagtatttgttttctgctagatgcaaaaatgactaagcatgtatattttatcaagctccctgtatctcctgtatagttatgaacttataaaaatgataaaaatgttaagacttttttttgtttctgggccaaatgttaagtaatttgcagtaattggttcatcctgcactgggatttttgaattaacgagcagcaagcagctgcaggcatcaggagggtgctcggttgcagtcgtctccctgacatgctttgttgtacagagaaacagtggactccatggaggaggggaagattgattcaacagctttgttctctggaagcagtgacacacactctggttgtctgggaagagggaccctttggtttccctgggtaccttgttctggacagtctatttgccttcctagtatttagcccctctgacaattttttaatgtgccttttgggttggctagaaactaacatagaagtagaccagaggataatagagttgggacagttttctcctctttttgttgggaggtgagcacatctgtaggttcttggagggctttggctttacagttccatgccgtctgcccagctcgattccagcagtagaggctcctttgttcttttctcctgtgacactgaccagaacagtcagctgacaagataaaccccacttgcctaggccaagggtctctatccatgccttctcagatccccagaaggaagaggttttgactttatgagaagcaagtactgggcaaatgaggcacttggctgagcctctcccacctgctcagtcctcgtctgattcataaggatcactttttggataactagccctggaaaaatgaaatcatcgatttgaagtgaagggactcattttccttgctttcagcccatgtaaatatttaaataaaacagtattaacattttgtgctgcttcccattaggttgtagattgagccgtactctggccacctctctgtcttcttggaggcagttttctttaacttccagaatagtagttttaaagcttcaaagaaaaacaaaataacctatccttacttacaagcataacagattgtatttaactttatcacacatgatagagatatatatgctgtaaaatgagggaaaggaactttctaataaaccaatgctttagtaaggaaaaaaaaaaaaaa

SEQ ID NO: 3158204 - DNA, 611 bp, Cricetulus griseus
ccagagtcaaacagggagacctccgcgcgcaccatgtcaaagaaaaaggactgagtgcagaagaaaagagaacccgtatgatggaaatattttttgagacaaaagatgtatttcaactaaaagatctggagaagcttgctcccaaagagaaaggcatcacggctatgtccgtcaaagaggtccttcagagcttggtagatgatggtatggttgactgcgagaggattggaacttccaattactactgggctttccaagcaaagctcttcatgccaggaacgaaagctggaggctctgacttctcagctgtcggagggaaaccaagaggcatgcaaaccctacagaagagcatttgagaaagctagaattgggaggcaagagacagaagaacgagccatgcttacaaaagaactttcttcatttcgggaccaaagggaacaacttaaggcagaagtggaaaaatacagagaatgtgaccctcaagttgtggaagagatacgtaaagcaaatatcgtagccaaagaagccgccaaccgatggactgataacatatttgcaataaaatcctgggcccaaaaagaaaaattttggggtttagtaagaaagtaaaa

SEQ ID NO: 3158205 - DNA, 1690 bp, Cricetulus griseus
ggcggcggcggcagcagctcccgcggcgatatatacttgatagattggtatcttctacgctatacagcaaatcactgccacttgtagtctggcttgtcgtgtctgggatgtgttttgccagagatggagaggaatttttatttaggactggattagggatcctccggctatatgaagacatactcctacagatggactttattcatatagcacaatttcttaccaaattgccagaagatatcacatcagaaaagcttttcagctgtattgcagccattcagatgcagaatagcaccaaaaaatggactcaggtctttgcatctgtaacgaaggacattaaagaaggggaaaggaacagcagtcctcctctgaagagctaacatttgagccagggacaaactgaaatgcaaaagctagttttgagagaaagcttcctgtttcctatgcagggagcatggcgggaagtgttggagagaagaatcaagagctggaaaactgctaagctgacgttccatggctgaagtagatgaaatgtgtaatttatagacagtattaacaaaaaagtacctgtaaagccatttctcagaggaaaaggcttagatggctattacatactccataatttggagtgactcttttaaaatgcaaataattttttaaaaatagcttcaaagaaacttcaatttttttatatcttttcttttttaaagatctttttgcactttagtggactaaagacttgactttgagagtaagaataaaaaagcaacgaattctaagagttctaggtaacactacttacaagacttgaattttttagttaaaatccatcttctatctatagaaacaaattttattaatttcagtttgaaatttgaaatcttatatagctaagtctaagacttgtgaaactctatgcatatttttttctaattgatgggaataatagtaaaagtaattttaccttttttcttagtctttttgatggcatctcagataaattattaatcattggtaaacacattaaatttattatacttaatttttgaacctaacctaaatcatttgagtattatgggtaaacctgtacaaaatactatttggttattaattagatttatactgttttgttattgcagttgatttaaagcaacatagaaacacacatttctgttagtggtggatatacatatatgtagtctttagactaataagccagaggttcttccttatgttatacaataaacagccataagagtatgggatcagagggtgtctatatatttttaccctatgggttgatcattctagcctcgggagcgaagaagaattaattcctatcatagggactggctcagtgaaactggtagtgtaataaaatatcgaaggagtttctagagtcttaataggactatcccttgatattggtgtcccttataaagggtatataacctctggcggtaatctctttgaatttatactacttggcctgcatttaattttactctcaggtattagtttcctgaggtggtcctatgttctgtatttctttttcttattttttttattgtacagtttctttaccttccaattataaatgtgtatataaaatgtaaatacaagaaattcactaaaaaccactattacaattactatgaaaataaaacttgtaagcagaattatgaaaaaa

SEQ ID NO: 3158206 - DNA, 2992 bp, Cricetulus griseus
gtcaagtttgggaagcattgccaccaagtttaacttcttcattcataaccttgctcagctacgtttttctggtcttccttctaatgatgaacccatcctttcattttcaccaaaaacatattcctttagacaagatggtcggatcaaggaagcctctgttttcacatatcacaagaaatacaacccagataaacattatatttatgtagtccgaattctgagagaaggacaccttgaaccatcatttgtattccggacatttgatgagtttcaggaacttcacaataagctcagcattatttttccactttggaagttacctggctttcctaataggatggttctaggaagaacacacataaaagatgtagcagccaaaaggaaaattgaattaaacagttatttacagagtttgatgaatgcatcaacagatgtatcagagtgtgatcttgtttgtacttttttccatcccctacttcgtgatgagaaagctgaaggaatagctaggtctgcaggtgcaggtcccttcagccctactctgggccaaataggaggagcagtgaagttatctgtgtcttaccgaaatggcaccctcttcattatggtgatgcacatcaaagatctcgttactgaagatgggactgacccaaatccatacgtcaaaacatacctgcttccagatacccacaaaacgtcaaaacgtaaaaccaaaatttcacgtaaaactaggaacccaacattcaatgaaatgcttgtgtatagtggatacagcaaggaaaccttgaggcagagagaacttcaactgagtgtactcagtgcagaatctctacgggagaatttcttcttgggtggaataaccctgccactgaaagatttcaacttgagcaaagagacagttaagtggtatcagctgactgcagcaacgtacctataagccacggatttctgagctttggaagaagcaaagagttataaatatgtgtacacacacaaacacacacacttgggaactttatgtatttttatacttgggcagaaattataaacttaagaagccattgctgtttcaaagtcattctattgaataataccaatcccagacttactatattaagacctggaaaagactttgaggtaatactgtgtcattttggccaccttgtctgcattcttcccacacagacacagcaaattggttttcctgttatgcacctcacagcctttaccactgtgtatgctcacagacaccaaaggaatgatgcagctgctactcaacaggctgaaaagcaaagcacaaatagtagacagaatgctaagaactactaagtagtttgcagaagtagagaaaaaaatactatttttattcattgttaaagccttttcagaataagtgccaatcactggagttgtaaataatgtgccttaactttatatgcttcattggcacttcatttctgattaaagagtaactagttttcattcatcttcagcttaataaggacaaaatattgggtacatttactaatgatttccccacaaaaatactattttctctacttctgattgttttaactattaagctatttgatttaatgttcgttgcccaataattgaatgagattcactgatataattgtattctaaattctgtcattccactaatcctacatttatatgcaaggaatgtgaactgaaattggtgtttcacttccatgtatttatactgtaatctctcattaaacaaatagaaattgtttttaatatagacatttatggaaggtgttgtgtaaactgtcttgtatttgtaaacattgtacattcacataaaagaattattttctgtaatacaaggaaattcagaattacatgaaagaaatttaaagttattatggagtaactagttaaaaataagattcatttttatctgagttcgaggccagcctggtctacaaagcaagttccaggacaaccaaggcaacacagagaaacccagtctcaaaaaataaataaattcagatataactgtgtcttgttttggtaaacatgtaaatataataaatttcatggttagaataggagttcaaatatttttagaatggtaatagagatgtagcaaatctggtgatcatgagaaaactgacaaactacttaatgaagggtaccaagagaggacaatctgattcagtttgctagaataaaatttttatgaagtgtacaaagtgattagcagaaatgatgatgcttacagagctaaatgaagaatcaagggtgttatcatttgaacagatttttaaagaaatcaaaacttgaaatttttggtgcctaacactatggtccatttatagagaaaatctaaaagtatatattgtgattaatactgtatagttaggaattcagagcaaaaggtaatattttctcttaatttaactcaatctgcgcctcctttggtcattcgagcacatatattttaatataagttatttctttgtaaaatgctaatcttcagcccataccaaaaaaatagcaatagggagaatgagagtagcatctttgcactaccactgcagtcaattatataaatcagcttgttttcaaaaaacctcttaacacttaccttaaaataaatctgaaaaataaaactctaaactggccaagacactaatttttatgtataatcacatttataactacctttgtcaggtaaaaataattctgctacatacaagtcctgtgccggaattctttgttcttgacagtgctctacaatttgaagatgatggtttatcccaagaacctattttctctgagggacccactgctggcaccaatgctttttattgctgtgtttatgtgagttgagttgttaaagcatgtatatcttttttatacttttttttcaaattaaatttctatatgaaattcaaaaatcttgccttaaattgtttaattctttctaggattcatgaattgtggcatttaaaaaattcacttt

SEQ ID NO: 3158207 - DNA, 897 bp, Cricetulus griseus
ggacgccgcgcagcgccgccactatgagccagggcaccgcggatctagcctcggagacgggagatgacagtctgtctgcaattacctttgattctgactttgagacgaaaacaaaagaaaaggtttaccacaaacctccttccacatcaccaaagtcaccttactactccaagcccaaaaaagtgacatcatggcggtctctgaagacagcagggagcatgcctctgagcagcagaatatccttgaccccacagaagctgtggctgggaacctcgaagcacggtgaggagaaccagagcctgaaggaggacctggaccgcatgctgagcaattcccccactgtctccaaaataaagggttatgtagactggagcaagccccggctgctgagacgcatcgcagagttggaaaagaaagtgagttccgcagaaagcccaaagccatctgcttcagagctggtcaagccgaatcccctggtcagctcctcctccaacatctcggtgcaaaagcagccgaaaggggaccagcccaaagaggacctgcctaaagaggattcatctgaggaccaggagcatctccgaggagccctgaaggtcctgaaaggggagcgaagcgtactgcaggcacagctgctggagaaagatgaggagatgaataagctgctgcaggccaagatggacttggagaaggagctggagatggccagagaaggcgagaaggagagacaggagcacctgtgcacccagcctggccagtgagcagtgaggtcaaaatgggcccctgcacttgagttttctgagaacaagcccctgaaaacagaagagctatataccacctgacctttggtgcagccgctaatctattaaaggtaaacctgtcttgaagctacctcagtaa

SEQ ID NO: 3158208 - DNA, 1077 bp, Cricetulus griseus
gcatggaggcgccgctgccgccgcgggagtctgcgcgctgggtggcggggcgcagtcgggacgtgcgcgtggaccccgcgggcgtgcgccgggcggccgagctgctgctgcccgcggcctcggcctggcgcgtgcagcactggaaggagctgcacgcgctcaacccgcgcggggcagacgaggcggcgctcgcctgggtcttcgtggtggactcgctcaacttctccttctgggccgagcgcgaggagcgcaggtgcgaggtgcgccacggcggcgccgtccacaccggctactgggcgctgtgcgccgccgtcaaccgagcgctcgaccgagggataccagtaaccagcgcctcctactacgccacggtgactctagatgaagttcgggatatatttcgttcagatacagccgtgcccatgcctttactagaagagaggcatcgaattctcaacgaaactgggaagattctgctggagaagtttggaggctcttttcttaattgtgtccaaaaaagtgaaaaaagtgcacagaagctaatgcgcctggttgttgaaaattttccttcttacagagacgaggcacagtttgaggggaaaaggatttccttttacaaacgagctcagatccttgtggcggacacgtggagtgtgttggaaggaaagggtgacggctgctttgaggacatatccagcatcaccatgtttgctgactacagactgcctcagattcttgtttaccttggtgccctgaaatactcggacgatctgctgaagaggctccatagaggagaaatgctctcgaatggagagagacaagaggtggaaattagaggctgctcgatttggtgtgttgagctgattcgggattgtcttctggagcttcttgaaaaaaggggagagaaaccgcagggtgaggtcaactccgttcttctggattattacctgtgggactatgcccgagaccacagggacgacatgagaggaattccatttcatcgcacacgctgcatttattactgaccctgaatgtaaatgggtccagtggaaataattgcacttttagatcatacagtca

SEQ ID NO: 3158209 - DNA, 1954 bp, Cricetulus griseus
atagagtttacactcatcagagtgatgtctggtcctttggggtgttaatgtgggagatcttcactttagggggctcaccctaccccgggattcccgtggaagaactttttaagctgctcaaggagggacacaggatggacaagcctgccaactgcaccaatgagctgtatatgatgatgagggactgttggcatgctgtgccctcacagagacccacattcaagcagttggtggaagacttggatcggattctaactctcacaaccaatgaggaatacttggacctcactcagcctctcgaacagtattctcctagttaccccgacacaaggagctcttgttcttcaggggacgattctgtgttctctccagaccccatgccttatgaaccctgcctgcctcagtatccacacataaatggcagtgttaaaacatgagcgaacatgtcttcctgtccccacatgggacagcaccaggaacctacttacactgagcaaagaggctgtgcctccagagcgtgtggcacacctccagttgtatatatggatcagaggagtaaataatgggaagcatatttggcacatgtgtaaagatttatacagttggaatcatgtcaccttcccaggacagggagaatgtttcctgataagtggacagccgaaagccatcacaccaccctctctgacccactgtgtgtactggatcgtgccccagttggactcaaggcagacatgtgttctgccttccttgttaattttgtaataattggagaaaatatatgtcagcacacacttacagagcacaaatgcagtatataggtgctggatgtatgtaaatatattcaaattatgtataaatatatattatatatttacaaggaattattttttgtattgattttaaatggatgtcctgatgcacctagaaaattggtctctctttttttaaatagatatttgctaaatgctgttcttagaatttcttaattttcacccagcagaggtgggaaaaatacttttgctttcagggaaaatggtgtcacattaatttattaaccaattggtaatatacgaaacgattaatcatttatagtttttttttttgtaatttaagtggcatttctatgcaggcagcacagaggactagttaatctatgcttggacttaactggttattggatcctttgagaagagaaatatttacgatagatgactaatttggggggaaatgatgtgtttgatttgtctgtgtttcaatgctgctgtccgatgactatgtttagacacctcaatgcccacttacaagaaacctgttaagctctgtcaccccagtgtaacgtttaaccacgcttccaagacaaatggtaccagcgccctcatcccaagatgccttaatccatgtctggggacagacttccattggaatgctagcagggtgggttctgtctggcagctggccttctgcctgagttacacatccatcacattggcctcacatctcctccgtgagttttaataacagcttcaggaccttcatcatcagaacaccctttggggactctgttctctcagaatatcaaaagcccagtgttactccaatgagagtttgggagctccttctgtcttcttaagggtttgcttctggcttctgccttcgtctgacaagacctcacccaaagatctggcctcatagctacatctgacaagataacggttcttgttgatctccatattcaagtagtgtgttttgctttggacacacccactcactttgctacagtcatgcgacctgaatgcagattacactgattttatgtgttttgaaattggagaaagtatttaataaaacctgttaattttatactgacaataaaaatgtttctacagatattaatgttaacaaaacaaaaaaaatagtcacgcagcttattttttaaaaaaaataaaaaaaaaaa

SEQ ID NO: 3158210 - DNA, 228 bp, Cricetulus griseus
tttgtcatctgtatataagtaatattgacagtgacataattttgtatggactaaatggtatagatttgttagtgtgtcaggggcaataggcagtaattaaaaaaaaattgtgctatttaatcttttctatgtgtgacatggcatgaagatttttgtattgaatcaagatttgtatatttgacaagttctaaaatgccatagtgattgttcttcagccaccactaagaa

SEQ ID NO: 3158211 - DNA, 343 bp, Cricetulus griseus
agctgtgtgaggagatcgtggtctacgggatggtcagtgacagctattgcagtgagaagagccctccttccgtgccttaccactacttcgagaagggccggctggatgagtgtcagatgtaccttttgcatgagcaggcgccacggagtgcccatcgcttcattactgagaaggctgtgttctcccgctgggccaagaaaaggcctattgtgttcgctcacccatcctggagggccgagtagtttctgttgccagtggccaccaggcttctgccaggccaaataaaattttaattaaaaaaaaaaaaaaaaaaaaaaaaaaaaaaaaaaaaaaaaaaaaaaaa

SEQ ID NO: 3158212 - DNA, 2457 bp, Cricetulus griseus
  modified_base (106)..(106): a, c, t, g, unknown or other
ccgggagatccgagctggcacggccttctacattgaccagtgtgctgttcgagctgccacagaaggcaggtacactggtttttggaaggcttggagaaagcagagngaaacgtgcttccagtattgaacaacttgctggagaaccgggagatgcagcttgaagatgggcgcttcctgatgtctgccgaacgctacgacaagcttctccaagatcacactaaagaggagttggatgcttggaagattgtccgggttagtgaacatttccgagtgattgccttgggcttgccagtgcccaagtaccctgggaataccattagacccccctctccgttctcgatttcaagaagggctgcgggaaaacggtcatcgctaagaactttgctgatatcttaggatacaacatagaacccatcatgctctatcaggatatgacagcacgtgacctgctacagcagcggtacacactccccaatggtgacactgcctggcgatcgtcaccccttgtgaatgctgctcgagaaggcaagctggtcctgttggatggcatccaccgggtcaacgctggcacgctggctgtattgcaagactcatccatgaccgggagctcagcctgtacgatggatcgagactgctgagatctggcagatgctgcaatagaaataaatactaatgatagcctggagccagaactggagagctacaagtgtgagatagtatccgggtctctgaggattggcgctgtcagtgcaccagtgtacaatgcccaggagaagatgaaagtgcctgatgttctcttctatgacaacgttcagcacatgatagtgatggaagacatgctcaaagacttcgtcctcggagaacacttgctgttggtcggtaaccagggtgtaggaaaaacaagatcatggaccggttccttcacctgctcaacagaccccgagaatacatccagctgcacagggacacgacggtgcagactctgacccttcagccctcagttaaggatggactgattgtgtatgaagactcacctctggttaaagcggtaaagatgggtcatattctagtagtagatgaggcagacaaagccccaacaaatgtcacctgtattctgaaaactctggtagaaaacggagaaatgattctagcagatggaagacgcattgtagcacatgctgccaatgtggatggaagagaaaacgtatcgtgatccatcctgacttcaggatggtggttctggccaaccctttggagagctgaggtaactttggctgaccaagggattattaactacccttattctaccagagaagttgtcaacattgtcaaacatttacagaaatttcccaccgaaggtctcgccagtgtggttcggaatgtatttgattttgattcttacaacaatgacatgagggaaattttgatgaacactttgcacaaatatgggatcccaattggagcaaagcctaccaatgtgcatctggcaaaggagttgcctctcccagagcagacattcatgggctactggattactggtcaggcgggaaatgggatgcaaaagatcttgtgtccagtccaaacgtctcacattgacataaagggtccagtgcttgcaaacatagaagagtacccaatagaaaagcatgaagccagattcctaaacttcaccgaagagtcatggaggccttcgagaactatgaggagaagttcaagtatgacatcgctggacactcaggagatggttacaacattagccttgttccagctaacaaaatccccaaagacaataagcagagactggaaattctgaagaccatgcatgcccactctcagttctgcatgagtggggaccataccctcgaaggtacagaacatgccatcaaggacattaccaaagaagaagctgatgaatactttgtcatcattttaagtgatgcaaatctgtctcgatatggaataaatcctgcccggtttgcccagatcctaacaagtgaccctcaagttaacgcctttgccatttttattggttctttgggggatcaagcagccaggcttcagagaactctgccagctggccggtccttcgttgctatggacaccaagaagattcctcagattttacaacagatcttcacctccaccatgctgtccagtatctaagaagcacccttcaccgccccaggactggaagcaagatagcagtagaaagaattctgaagagacagcaaccaagaccaaacctgtgccatgtccagcagtgagcagacttgtaaatggaaatgtactcgggaagggctggagggccgaaaaggaaatggggttgacctgcatttcttaaaaggtcagggttgaaggaagtaggtgcaggaactacggggcttggtctggttccaaacctaaaggataaaaaatacccacttttgccttaatatgtcatctgttgccagatgccat

SEQ ID NO: 3158213 - DNA, 203 bp, Cricetulus griseus
gtgttctagcaactgtataaactgtggggcatgtctgttactactatataatgtcatgaagaagggtctcagaattttgtggagctttgaggtggtggattcttgggcctcaggtgctgtgtggatgggggagaaggcgagagcatatgcaatgaattgtaaagaactctgctgtgcaggtgctaagattaaacaactaaaag

SEQ ID NO: 3158214 - DNA, 213 bp, Cricetulus griseus
atcatgggtgcaggctgcactgcccttgtggtagctgtggttgcccggaagcttgagctcaccaaagcagagaagcatgttcacaacttcatgatggacactcagctcaccaaacggatacaagaatgcggcggccaatgtcctccgggagacgtggttaatctacaacacacaaagctgctaaagaaattgaccaacaaaatcagaataggt

SEQ ID NO: 3158215 - DNA, 251 bp, Cricetulus griseus
gaaaccttataaatgtaatgaatgtgacagatcctttacccagagaagcagtcttagaactcatttgagaattcatatgggagagaaaccttacaaatgtagtgaatgtgagaaatgctttacccagagaggccatcttaacaaatcaccagagagttcacacaggagagaaaccttacaaatgtagtgagtgtgacaagtccttcaccaagaagatcatctgagaattcactacagaatccatacaggag

SEQ ID NO: 3158216 - DNA, 505 bp, Cricetulus griseus
gagattgaagaacaacatgggggctcacgaggagaaaaggaagactggaataatgtcactaaagctgagtcgatggggctgttgtcagaggaccccaaaggcagtgactcagagaacagtgtgacaaagaatccattaaggaaaacagattcttgtgacagtgggattacaaaaagtgaccttcgtttggataaagactggtgaggcccggagtcctctagaacacagccctatccaggctgatgccaagcacctttttaccccatccctgagcaggccttacaaaccacactgcaggaagtaaaacacgaactcaaagaggacatacagctgttgagctgcagaatgactgccctggaaaagcaggtggcagaaattttaaaactactctcagagaaaagtctaccccagaccccctctccaaaaccccaaatgccactccaagtacctccccaaataccatgtcaggatatttttagtgtctcaaggcccgagtcacctgaat

SEQ ID NO: 3158217 - DNA, 1773 bp, Cricetulus griseus
aaggccacaaggccatggaagtccttcattttagaatgtcccttcagcaagtaggtagaaacccgcttacactataaggagactaattagagatgagaaggtaaaacctagatgcaaaagctccttggaggtactgatgagtcttcaatctgcctttccaagggacgagaaagccatttgctttttgacccctcatctcaaatgagaggaacagaagataaacttcctcagatagcccagcatggctaccagccacaagagaaaggtcagatagaagggaaaacatctggggttgctttgtgactttgtaggaccaggactcagcagtcactggcaccctagcaaaggtgactatgggctggcaggagattagtgttataacttggtcgctgtctgcagtgggaggccatgttcaatggcagtcaaaattagtgttctgcacattgctgtatctatgaatatgataagcaagtggtggcagaattatagtataaggtggtatattataagcagatcataaaggatttggtattaggacgtaagtagaaaatcttactcctggcttgttactcaacagtaatcagataataagcttgtggggtgtatttttctccctatcactaggaaggttgacctgggaactgtctaaagtctatacagatatttccaaagcctttaaatgccaactgtagcatagagagggagtggcaggagccaaaatgcctcaaaagccatttaagtgttatgtcgcaggattttcagtcctactcattatgtaaaagtacataaatatagacatttttcccaacactaccctatcgtatcacaatggtccaaatgccagcgcttacagataatgtcatcacagtgcctagaaactcaaactgtaacataccgtagcatcttcttggtgtttcttcacgtttctttccacgaaacaaggctccctctgcctcgtgtttctaagagcgttcaccccactgaggagcccgccttccctgttggactcagtcacttggggaacagtcacagaagcacatatcaaccaaggaagaaacttcctggatatctgtctcccacttgcccaggtataataaacactaaagaaggggaattggaagagctgccaactggtcaacttggaagggtagttctgccctggattggtgtctttctttttcttcctttgtttttgtttttttaaaaaaatctatttcttaaataataataaatgcacatgatgtgttaaatatgtacatatatatttcaaaaatgggcacaagattgtcttacaagtccttctggctaatttttagtttgtattcataagtggtttttaaaagccttttttaaagtgtaatttgcatgtcctactttgattgtatgtaaacatattttagaacaaaaaatgtatttgtattttattgaatatagaggcaagaaaaattgtacattgtttgaaatgttctttttgtaacagtttttattcataaagcatttttgtacatttaaatgaacatggacttgctgtcatttgaggcgtagcgacatctggcatgctttactgtcatgctctcccatggtcttagatgttgggttttaaacattttttttctaaaagaatgctcggtgtcttcgctaccagatcaggttagcacagtacagagcacttaactattaaaaaaaaaagttggtcctattcatatgttattcattgtgtgaaattaaagacattcaattcagtctaaaaaaaaaaaaaaaaaaaaaaaaaaa

SEQ ID NO: 3158218 - DNA, 4830 bp, Cricetulus griseus
  modified_base (511)..(511): a, c, t, g, unknown or other
ctcgccgggggccgagccgtgacagacggggtccgggcgtctggtgtgtgagcagcgcagggtttgtggatgcacttagatgtttgcaatgagcactgtggctggcatgccccagtattttggataccaatgcataggactccatagtaatcgaatttaccagaggcgaacgtcatgagcatagcaatcccattgggggttggtacaacagaaacatcatacttggaaatggctgcaggctcagaaccagaatctgtagaagctagccctgtggtagttgagaaatccaacagttatccccacagttatacaccagcagctcccatcattcacacagttatattggtttgccctatgcggaccataattatggtgctcgtcctcctccaacacctccagcttcccctcctccatcaggtctcattagcaaaaacgaagtaggtgtgtttgccacggcaaacttcgatgacacttccagtgctactaccatcagcacatctgaggacggganctacggcactgacgtgaccaggtgcatatgcggtttcacacatgacgatgggtacatgatctgctgtgacaagtgcagtgtttggcaacatattgactgcatggggattgacaggcagcacatccctgacacatatctatgtgagcgctgtcagcccaggaatttggataaagagagggcggtgctactacaacgccggaaaagagaaaatatgtcagatggtgataccagtgcaactgaaagtggtgatgaagtccctgtggaattatatactgcatttcagcatactccaacttcaatcactttaactgcttccagaattcccaaggttactgacaaaagaaggaaaaaagtggggagaaagaacaaaacttttcaaagtgtaaaaaagccttttcgtgaaggatctcggaaatcatcaagagttaagggttcagcaccagaaattgatccttcatctgatggttcaaattttgtatgggagacgaaaatcaaagcatggatggatcgctatgaagaggcaaataataaccagtatagtgaaggtgttcagagggaggcacaaagaatagctcaaagactaggcagtgggaacgacaacaaagacatgaataagtcagaattgagtaccaacaactcactcttcaaacctcctgtagagagccatatacagaagaataaaaaaattctgaaatctgccaaagatttgcctcctgatgcacttatcattgaatacagagggaagtttatgctgagagaacagtttgaagcaaatggatatttctttaaaaggccatacccttttgttttattctactctaagtttcatgggctagaaatgtgtgttgatgcgaggacttttgggaatgaggctcgattcatcaggcgctcttgtacacccaatgcagaggtaagacatgagattgaagaaggaaccatacatctctacgtttactccatacagagtatcccaaaagggactgagattactattgcctttgattttgactatgggaattgtaaatacaaagtggactgtgcgtgcctcaaggaaaatcccgagtgccctgttctgaaacggagttcagagtctacagaaaacatcaacagtggttatgagaccagaaggaaaaaagggaaaaaggagaaagatgtttcaaaagaaaaagatatacaaaatcagaatattactttggattgcgaaggaacaaacaacaaaataaagagtccagaaacaaaacagagaaagctttctccactgagactatcagtatcaaataatcaggaaccagattttattgatgatatggaagaaaaaactcctgttagcaatgaagtagaaatggaatctgaggagcaaattgcagaaagaaaaaggaagatgacaagagaagaaagaaaaatggaagcaattttgcaaagcttttgccagaacttgaaaaaaaaaaaaaaaagacgagaacaagctttgaaacagaaactgcagcagcagaaataattactgaagtggaaattccagcacttaataaatgtcccaccaagtaccccaaaacaaagaagcacttggtcaatgaatggttaagtgagaagaataagaagacaggaaaaccttcagacagcctttcagaaaggcctctgcgcataactacagatccagaggtgttagctacacagctcaattctttgccaggtctcacttacagcccccatgtatactctactcctaagcattatattagatttacatcaccattcctttcggaaaaaaagagaagaaaagaaactactgaaaacatttctggctcatgcaaagaagcgatggttgaaacaagctctagaagaagaaaattcaacaattttacatagatatcattcaccttgtcaggaagaatccagaagccctacagttaatggtgaaaataaaagtccactactgttaaatgactgctgttccctcccagatttaactacaccactaaaaaaagaagactttatcagttgctagattctgcctactcagaaagctccacccctactccttcaccatatgctacaccaactcacacagacatgactcctatggacccagcatttgccactcctccacggataaaatcagatgatgaaacttacagaaatggttataaacccatatattcacctgtgaccccagtaactcctggcacaccccggaaacactatgcactttgagaatatttcttccccagaaagttctccagaaataaagagacgcaacttaacaatcaagagggatatgacaagaaataaagactattggttatactagccctaggagtaggactgaaatcaacaggccttgcccaggggaaaaagaatcggtgtcagaccttcaactgggactcgatgcagtcgagccagcagccttacaaaaaacatggaaataccagcccatgacaggactgagcccaacagccaactggactcgacccactctggacgaggtgcactgttattcttcctggggaaagagtcctgatagaactggagttaacttctcagtcaactccaatttgagggacttgacaccctcacatcagctggaaattggaggaggcttccgagtaagtgagtccaagtgcctgatgcaggacgacgccagaggcgtgtttatggaaacagctgtcttttgtacttctcaagatgcacttgtctctggtttcggacagactgttaatgacaatttgatcgacgggagttgcacaccccagaactccaccacaaaaaaaaaaggtttctctattagaataccgtaagagacaacgagaagctaggaaaagtggttctaagacagaaaactttgctttgattagtgtatcacctcacacaagtgggaacctgagcaacagtggtgatgcatgtgtccacggcagtgaaaatggggagcaggtagaaaaccaggctagcttgcctttaccaccgcccctcctccagccagtgttctggttttctgggcatcattcaacatcaggtcaagccttacaccacccacctcatcaaggacctccactttttcctgcaagtactcacccagctgtcccaccgtatccctcacaagctacacatcataccactttgggaccgggaccccaacaccagccttctggaacagggccacattgtccattaccagttgcaggtcctcatcatcagcaccaaggacctaacagtattccaacacctactgcttcagggttctgtcctcatcctcatcctggctctgtggccctgccacatggggtgcaaggacctcagcaggcatctccagtgcctggacagattccaattcacagagcacaggtgccaccaacatttcaaaacaattaccacggttcagggtggcattaaattggactctaaacattttttaaaatgttctgtaagataaactgtatatttcatatgtacctattaaggtactttttaaagcttgtacatgaaactttgtataaaaaaacaaaaaaaaaacaaacaaaaaaaaaacaaaaacaaacataggcatctttattttgtaagtgaacattccagctgtttttctggccatagatccgaagctacatgacctttaaattttattgttgcagttcaattcatttcgtgaatattttctatattttatacatatgcattaagtaaggaaagcactatgaggattttcttccttttttattggtcagcagttctgagagtgcatcttaggtctgaaaatgcaatacaggtttttataatttggtgtggacatggctcattttgttttatcagtttttttgcaagcaaaatgtaatttaatgtaagataatttctagtgacccctgacagactgtaaatactgcatttcttttgcatatataattgcttccagctcttttcatttggtgtatagcattgtatatatgacaagtcttttgcaaaagtgtgatctctgtgaaagtagttcagtaagtacagacctttcctttttatttcaaatatgctgtcacattgaagcactggttggacattttaattcctgttaataaatcacaattatgtcagttttactaaattgttctgtacaacttctgagattgaggtctgcttaatgattttacaaaagttaacgattttcaaatataatttgtaaggaaagaaccttccattttctttagtaactactacctcaattgctaggcaggctaccagcagtgagtctgggtggttcccacagtccttcctatcatttgccttttcttgataggcatgagtcacaggtaattaaatagccaagcctatgtgactta

SEQ ID NO: 3158219 - DNA, 2165 bp, Cricetulus griseus
tgtttaagaatattcaaaagaggttctgcttcctaacctgcgatgcagccagttatcttggagataaccttcggggaatcgggtccaagtttgtcagctcttcccagatgctcacctcttgctctgaatgccctacactgttcgtggatgccgagactctcctttcctgtgggctcctagacaagctgaagttcagtgtgttggaactgcaagagtatttggacacatacaacaatagaaaagaggccactctctcgtggcttgccaactgtaaggcaacgtttgcaggtggttcgagagacggagtgattacctgccagcctggggactcagaagaaaagcaactggagctctgtcagaggttgtacaagctgcacttccagctgctcctgctctatcagtcctactgcaagctcattggccaggtgcacgaagtgagctccgtgccagagctgctgaacatgtccagggaactgagtgacctgaagagaaacttaaaagaggccactgcggccattgccactgacccactttacatcgagggagcatggtcagagccaaccttcacatccactgaggcagccatccagtccatgctggaatgcctgaagaacaatgaacttggcaaagcactacgacagatcaaggagtgcagaagcctgtggcccaatgacatctttggaagcagttctgacgatgaggtccaaacactactgaatatttacttcaggcaccaaactctgggacaaacgggcacttatgccttggtgggttctaaccacagcctgactgaaatctgcaccaagctgatggaactaaacatggagatccgagacatgatccgccgagcccagagctaccgggtcctcactgcctttctcccagactccagtgtttccggcactagtctctgacaggagcctcccgtcccccatgctttccaagctcgcagtgctgccatgctggggcgacgtcattcagtgtcttctcagccttcgcaaggcttggacagagtgttctccttcttgttacctgtaggactctttctgaagaagattacccaacttccaatgtgtagcaatactgtccacagcgaggcagcgtaggctcctgagacaaactctacccatcatgctgtgtggctgtcgttcactaagaaaatgcaaccaacccactactgaagaaatgacttctgttgcattaccaaagttgactacgctgaacgatactgtcctttctagaaacagttttagactggcaaaagtgcaatgtttttcttcacatgaaaaaaaaatttatattctaaaacttgtacattcgttctctttctcctatttttcttccttttctttctcctatttttcttcctttttgtgggattttgttttttaatgggttggaaggggggcaggcagaatgaagctggccactgaaaacttgtaagacggtcaaaagctgatagcctgtgtgcttgaaaagggaattgtaaatggactacaatttaatgtacactgtatctaaatgaggctgctatgaagtacctttcttatgttgctaggctactgtttccaaatctggatactggatgtctctgccccaggaatggtccagataggttcttttaaaggatcttggctgctttttacaagaaggttgctttaaagagtgttatttatactacagaagaatgagtgttcatttgagttaactttgctgttttgtagagaaacaaattcttcacataaaccccaattcctcgcatctgtcgtgcatgcatcttttcgtagccatttggatggccagaagtagagtcagaaagggaagacacgagttgccacttgaagagtaatatcctgttttatttgtaatatatgtgtaaagggccattcttacagtttcttccttaaaccccatgctgccgagtgttagatgtgggcatgtgactctgttgcacatccaaagcatattcagagtttatctatgtaacttattcactgtgtaaatacatttaaaatttttgtgatgtaatcttgattgataattctgttcagaattgcctttagactaaaacaaacaaacaagagaagacaaactgatcatgttgatcatggattttactactagttaattaaaatatttgcctttgaaacaaaaaaaaaaaaaaa

SEQ ID NO: 3158220 - DNA, 351 bp, Cricetulus griseus
gggctgcgtgccccgagcgtgatggagcagcagcagcagcaactaagaaacttgcgagatttcctgttggtctacaatcggatgacagaactgtgcttccagcgctgtgtgcccagcctgcaccaccgagctctggacgctgaggaggaggcctgtctacacagctgtgctgggaagctcatccattctaaccaccgcctcatggccgcttacgtccacctcatgcccgcccttgtccagcgccgcatcgcggactacgaggctgcctcggccgtgccaggtgttactgcagaacaactcagagactcgccatcaggcagctagccatcgcctgccccaggagagaaggtg

SEQ ID NO: 3158221 - DNA, 1364 bp, Cricetulus griseus
gatatcctaacaaatcagaaagattcttttggggatattgacagtgaaaagggttcattaagaactgttgaggatcaaggagatgtaccaacattagaagaagatctgaagaaacttcagctctctgagttctttactgtctttgagaaagagaaagttgataaagaagctctggctttatgtacagaaaaagaccttcaggaaatgggaattcccttaggaccaagaaagaagatactaaaccatttcaggaccagaaaaaattcaatgggtgttaatagaccagacacatctgcttcaagaggtaaacagctccaaggaaaatggtgactatctggatgttggcattgggcaggtgtctgtaaaatacccccggctcaactacaaaccagaaatattctttgcctttggatctcccattggaatgtttcttactgtccgaggattaagaagaatttgatcctaattacaaatttccccacatgcaaaggtttcttcaatatttaccatccttttgatcctgtggcgtatagaattgaaccaatggtggctccggaagtagaatttgagccaatgctgatccctcatcataaaggcaggaagcggatgcacttagaactgagagagggctttaccaggatgagtatggacttgaagaacaacttgctgggttcactgcggatggcctggaagtctttcaccagagctccataccctgccttacaagcttcagagacaacagaagaaactgaggcagaacctgaatcgggttcagagaagtccagtgaagttaacacagaagagacgcctgtggaggttaaagaagagcttccaatcaatgtgggaatgttgaatggtggccagcgcattgattatgtgttacaggagaagcccattgagagtttcaatgaatacttatttgctttacaaagccatctatgctactgggaatctgaagatacagtattgctggttctcaaagagatctaccaaacccagggtatcttccttgatcagcctttacagtaaaataggcccgtctgtggctgcttaatatggacactgagggaccctttcctgaaacccacaggcttattgctgcagctctcttcccagctatgtctcgtcctgcatgtgcctctgcttcatgagcactggaaccaaaggcgtgcgccaccacgcccgagcaatctactgagaagttccaggtatatggaatactttagttttgtcaagttgctgtcttcaaatttgtttactcttgttagcagaattgttaacgacttaagagtaaaccaaagtacaatcaagaatgagttcttgtaaccaaagatgggtgggttggcctggagagcagataaacc

SEQ ID NO: 3158222 - DNA, 726 bp, Cricetulus griseus
ttcagtgttggcaacttctattttgctgtattttgcttttacagaaagatacagcccagaaacaaggcttcttcaagtatccagagaatcttgtcaacattaaccctggcactatttccgtaccctctatttctttaacttcctttattatacagaacctgggtctgtgttcttcactctttttgcttacttgatgtgtctttatggcaatcataggacttcagccttgcttgggttttgtggcttcatgtttcgtcagaccaatatcatctgggctgccttctgtgcgggacacatcattgcacagaagttcagtgaagcctggaaaactgagctgcaaaagaagaaggaagagaggcttccctccattaagggaccattttcagaactcagaagagttcttcagtttctcctggtgtattccatgtcattcaagaacctgagtatgcttttcctgttgacctggccctacatccttctgctggttgcatttttgtttttgtgatagtcaatggtgggattgttattggtgatcggagtagtcatgaagcctgttttcattttccccagttattctactttttctcgtttactgtttttttctccttccctcacctactttctcctacaaaaatcaagactttttttagtttaatttggaaacgtagagttcagttctctgtgattatgttaagtctcagtatttttggtttggaaattcactta

SEQ ID NO: 3158223 - DNA, 370 bp, Cricetulus griseus
ctaaaagtggagataaccagggagtaaagttccttcgtcgctttaaacagttgctcaacccggctcaggtgtttgatttaatgaatggagggcctcacttagggttaaggttatttcaaaagtttgacaacttccggattcttgtctgtggaggagatggaagtgtaggctgggttttgtcagaaattgataaactgaacttgaacaaacagtgccaggttggggtattgcctctggggacggcaatgaccttgctcgagttcttggctggggagctcctatgacgatgacacccagcttcctcagattctagaaaagctggaacgagccagtaccaaaatgttggacaggtgagtataatgacgtatga

SEQ ID NO: 3158224 - DNA, 943 bp, Cricetulus griseus
gacaactgcctattccgtggcagagacttcaaatctgaattcaggctggaaggcgaacctgtgactctgaggtgccctctgaagtggcctcattcagatgcttctgccagtttctatccttttctgacctggcataaaatgaactcctctcagctgatcccaggagatgagccaaggttgtgggtgaaggatgccaccctctgggttctacctgcagtgcagaaggactctggtacctacatttgcacattcagaaatgcatctcactgtgaggaaatgtccatagaactcaaggtttttaagaacactgaagcatctctgccacttatctcctactcgcaaatctcatctgtctcaaccaccgggctactagtgtgccctgacctgaaagaattcatccccaacaaagctgatggaaaggtgcagtggtataagggctccggccttttggatagaaacagtaagaaatttctaagagtgggagacgggacacacatactgatagccaacacatccatggaggatgccggctattacagatgcattgcgacatttatccacaagggcaaggaatacaacatcactaggaatattaaactccgtgtcgaagaagcatccacggaaaccatccctgtgattatttctcccctagagacaataccagcatccctggggtcaaggctgatagtcccgtgcaaggtgttcctgggaactgatgcatcttccaacaccattgtgtggtggatggctaacagcacaatttaatctccgtggcctacccaagaggccgagtgaccgaggggctataccacgaatattcagagaatcatgagaactatatggaagtgtcactgatttttgatccagtcacaagagaggatctgaacacagattttaaatgttgttgccaagaattcaaggagtgttcagtcactccatacca

SEQ ID NO: 3158225 - DNA, 1653 bp, Cricetulus griseus
agggatttgcctccattgtcatctttagaaatggaagaattcttaactcaggaatctaagaaacatgaaaatgaatttaatgaagaagtggccttgacagaaatctacaaatacatcgtaaagtattttgatgagattctaaataaactagaaagagaacgagggctggaagaagctcagaaacaactcttgcatgtaaaagtcttatttgatgaaaagaagaaatgcaagtggatgtaagcaccctggggcctggctttctttgacaaagttcttcagacagcttgggagcaaaatggctgcttgacctgagctactctttgtcattaatttaagtttgcacatgggttccactctgagcactgtcttttaagataccaaggcacatacatgcacagcttttagaaagcatatcaaccactgtgcctgtgggtaaccgtgggaacctttctgtaaatagagctgaagtggttgttgcaaacagcctccttgtttacagagaatacagggccagtaagcaagtgtcagtattgtaactacagtctccacttaagcacaatgatatctaagtggtttggttggaatactacagctatgtagcacttgtgactacactgtacttctgcagaagaaaggggatactaacaatgctcaaaaagtgaagtgagtcatttggaaacaaggtgggggtgttagggcaaccctgaggatctgcagcattcactttccccagtagttcttggaaaagccgaaggcagactttggtagtgtgtacacttagcgttcgtgagtgtgtgtgtttaaaccaaaaactaacagtgttgccacattgttgaaagggctcgtgtttttcagtggttgccagccgcactcatcaactcacctccatctcatcaaaggagctctaaagcaaggagagtgagtgggtttcactgaaatgcaacagcatttttccagactcgtcctagtgtgtgtttcctttctatctttaaatgtatctggtagtggacatgttgggtattgtaagcaaagagttcatgacttacttctgtttgatcagaactgtctgtggatgtgtaagtcactcctgtaatcttacatttctatgctagtgtctccttgctttagatttctggtgaaccctgtggttataaatacttgtgtgtgattaaaataaaagatacattttacatttcatcaaattgttgttcacattggagtattatatataaatatataatttgaggcctaaggcctggaaaatattagtacaacttggtatcttagtcttactatgtactttttgaaagtattccttacaggagaaagatttaaaatactcatttattcgtgcctcttttttctttttcaaaaaatttcctatccagttataatgtagtcttttttattgctgatttttttattcccagatttttgctgctcatgaccaattttaataccactgtgttttccttctattaaacagaagtaaaaagtataatctgagaactctcactttccttgtggcaggcaccttttactcttggtgttccaaacccccattgtaggaaggaattttcttcaatcagcaaaataacacattgagcacacattccttacaactatttaccagcactgtatggaccatctaga

SEQ ID NO: 3158226 - DNA, 185 bp, Cricetulus griseus
tttttttttttttccttttcatgttgtttctttttctttcgagacagggtttctctgtagcggcgcaggctgtcctggaactagctcttgtagaccaggctggccttgaactcacagagatctgcctgcctctgcctcccaagtgctgggattaaaggtgtgtgccaccaccacccggctcattt

SEQ ID NO: 3158227 - DNA, 235 bp, Cricetulus griseus
atttcctctccccaacccctacaacatctcatttgtcaactcagacattgaagttctcgagggtttccttctgatttctactgacctggcgcatgagacatcctcaagacaacagccaaatctccacagttggggaggtctgaacctggtcaatagaccatggagagaacagccaacccattgatggctgggtcccaatccccccaggaagtaaacatccttctgtcccacagaa

SEQ ID NO: 3158228 - DNA, 243 bp, Cricetulus griseus
gcagaatagttaccagaatgcacgagaccttctgaacactggaggcctgcagaaaatcatgaccatcagcataggggaaggctatgcccccaacaaggccagcaaagctgcttctgtccttctgtactctctgtgggcacacacagaactccataacgcctacaagaaggctcagtttaagaagacagactttgtcaacagccgcaccgccaaagcctaccactctcttaaagactgatgaag

SEQ ID NO: 3158229 - DNA, 1037 bp, Cricetulus griseus
caaaggatagttttgtactagttcaagtatacgtacagttcttccaagaatctgagggtcccggatgctgaagaactaagtttgtaccggatattcaacagggtgtttaatcgtttgctctggagtcatggtcaaggactgtggagctgtttctgtgattcgggatcctcttgggagagcatcttcagtaagagcccggatgtggtgactcctctgcagctccagtgttgccagcgcgtggtggagctttgcaagcagtgtgaatggaagattgccatgggctatgaataatagcaattcattcattttctccagttgaaccttaaggaagtgacccttacgtgatattttatgtatatatgtcatataagtgtgtggaatacatacacacatgcactcaagtaacatacaaatatatatatatatttattatgtgtaagaaaaattagcagaaaactgaatataagatttaacgtttctggaaatgtaataaaccatgttaaagttgtttacacaaatatgcaaatgtgtagaatttgctaggtttatacttaattgcttcctactagaaatgttatttttgctgcagagtacattagaaattctcaccctggtaaactactactatttaagaactaagagtaaattttaaatgcatagaactgccaagtatttggtgaacaaacatcgtttccctagctactcaagcaaggccttagtttgagcagtaggatttcattgcctacattttcctgtttcaactagctggatatgatgaagctgtgcagaaagccatgtgctcattagttatgtgcattacctggtgtgctgtggacggtggttgtcatagcaccatcccctaatgagcagctaagagaagacatgataatgaaccatgcaagtctcaggaggccatagacaggtattagaggtataaaatattccctggtttttgttatcaatttcttatgtgtatggttaaaacatatttgcataagagacagtgtagacctatctttaatggtagagaaagaaaa

SEQ ID NO: 3158230 - DNA, 738 bp, Cricetulus griseus
ctgatcttgtggacctcatgtcaattgggacattgcttgcttactccctggtgtccatttgtgttctcattctcagatatcagcctgaccaggaaataaagaatgatgaagaggaagcggaattgcaggaggagaagacacttgaagcagagacgctgactgtccaggctctgttttgtccagtcagctccattcctaccctcctttctggccgagttgtctatgtttgctcctcgctgcttgctgtactgctgactgttctttgcctggtgctgacatggtggacaactccacttagttctggtgacccagtgtggatcaccgtggttgtgctgatcctgggactcattcttgggattgttggtagttatctggaaacagccacagaacaacacaccccttcactttaaggtgcctgttctgcctctactcccactggtgagcatctttgtgaatatttacctgatgatgcaaatgacatctggcacttgggcccgatttgggatctggatgctgattggatttgctatctactttggctatggcatccggcacagtgtggaagaagttaagaatcatcaaaccctacccaaaacaaggacccgaactgtggaccttgatctcactgcttcctgtgttcacaccatttgacctaaccatacctgagtgctgtctagtccccctacacaataatggagagcactcttgaccccacagagagctgggcctctcatgtgg

SEQ ID NO: 3158231 - DNA, 385 bp, Cricetulus griseus
gagaaagagagagacagaaagagagagagagtaacaaaagagcaaatcagaaaacccttaggtttttgctttaaagcaaaaggagaaagagttttaaaaacaacaaaaatccacaattgaactttcaggaaagtgtgaagacccaaaacagctttgtctccaaagaagatagctctgtgaccactatggatagtctcctgcactccgttttttcaggtgggagatatggaacagacatgcaggactctagactgttgggacagccattttccaacaaacaaggggccaaaatatctgcaatatagtaacagccttaataatacatttttcgttttctacagctgttctcagctatgtccacaatgtttcatcaacttccatactc

SEQ ID NO: 3158232 - DNA, 888 bp, Cricetulus griseus
atcacaagttcacgataccgtgggctccctgcacctggccctggcccggctgataagaaacgttcagggaaaaagaagatcagtaaaagctgatatcggtgcaccaagtggattcaaacatgtcagccacgtgggctgggatccccagaatggatttgacgtgaacaaccttgacccagatctgcggagcctcttctccagggcgggaatcagcgaggcccagctcactgatgcagagacttccaagcttatctatgacttcatttgaggaccagggtgggctggaggctgtccggcaggagatgaggcgccaggagccactgccaccaccaccgccaccttgcagcctccaccccctcctccagccaccggaagatctggaccgccacctcctccactccctggagctgggggaccatccagtgccacccccgccgccacctccaccaccaccacctccaccctgcactggaagtgggccaacccttcctccaccccctcctacttcggtgtctgccgggggaccagcacctggtggaggccggggtgcacttttggatcaaatccggcagggaattcagctgaacaagacccctgccgctatagaaaactcagtacagcaaccaccacctcagaggtcagagggcctagtgggtgccctgatgcatgtgatgcagaagagaagtagagtcatccattcttcagatgaaggggaggatcagaccggggaggatgaagaagatgatgaatgggatgactaaagccatgttccttccggcaggccagtggcagaggcaggtgggatctctgtgcatttgagattagcctggtctacagagccagttccagagcagccagggctatacagagaaaccctgtctcaaaaaa

SEQ ID NO: 3158233 - DNA, 413 bp, Cricetulus griseus
  modified_base (345)..(345): a, c, t, g, unknown or other
  modified_base (353)..(353): a, c, t, g, unknown or other
cagaccactactgccaccaccaccactgccttccgggtcaagaacaagcctctagggccagcagggtctgagaatgaaatccccacacacgttctgccaccttgtgcaaatcttcaggcacagaagctgaaatccaatgtgtcgggcagtacccatctctgccttgctgatcatgattttggaaaagatggtcttgctggtgcctccaaccacataaccccaagatcaatggctgctcctcccagttgcggtctgagctcactgccggtactggtggccaccactctggccaccctattttctgtatccttggcagaaacatcgtagctgcattcaggaaaaaanaaaaaaanaaaaaaaaaaaaaaaaaaaaaaaaaaaaaaaaaaaaaaaaaaaaaaaaaaaaaaaaaaaa

SEQ ID NO: 3158234 - DNA, 491 bp, Cricetulus griseus
tctcctttctgtactagagttaaccacaggcaatgcaagaacaaagtttcatgttctgaaaatgctgttgaacttgtctaacaatcctctggtggcaaaaagctattcagtgccaaagctctgtcaatatttgtgggtctctttaacatagaggagacaaatgataacattcagattgttattaagatgtttcagaatatcagtaatattgtgaaaagtggagcaatgtctttagtggatgaagatttctgtcttgagccactcgtttctgcattccatgagtttgaagaactagctaaacggctgcaaatccaaatagacaatcaaaatgatcccgatgagggacagtaaagtccatgtgattaaccaccttccagtgatcagccttatgttcccaaagagccccaaatagtgctttggtgttcacagtctggttttgtgttgtaacttatattttaatgtctaatgttaacttgtgaaactcttgttgt

SEQ ID NO: 3158235 - DNA, 726 bp, Cricetulus griseus
gataatcaacactgcttcaaaacaatggtcggccaccgaactgaggtgtgggcttggttctagtttcagaagaaaagcgactaataactggggctgcagacagtgagctgagagcctgggacatcgcctatctgcaggagattgatgacccagaagagccagagcccaagaaaatcaaagggtgtcctggaagacaggacacacctgaagcagaggatcggccccttgaagcagatgaagcatctgaagattttctatgttgacactttaaagttttttctctcactgtatggacacaaactgcctgttatatgcatggacatctcccatgatggagcactaatagtaactggttctgctgatagaaatgtgaaaatctggggtctggactttggggactgccacaggtctctctttgcacacgatgacagtgtgatgtacctacggtttgtgcctaagggattcgaacttctgtgccggtgcctctttttctcctcaggattcactttggccagatcacaagcaaccagatgcttgtgcctgtgatagagaaactaaaggaaacaactatttcaaaagtcaggcaagtccaggatgtcattggcttcaatatggcaggtctcgattatctcaagagagagtgtgaagcaaagagtgaagttatgtttttgctgaagctactagtcacttggaagagaagaggaggaaaacgaaaaaaaagaaaaa

SEQ ID NO: 3158236 - DNA, 1428 bp, Cricetulus griseus
gtcagccaaggctgccaaggaggctgtgcgacgcgttcagattacaatggatgtttgtcatgtaagcccagactattttttgttctggaaagaattggcatgaaacagataggagtgtgtctctcttcatgtccaagtggatattacggaactcgatatccagatataaataagtgtacaaaatgcaaagctgactgtgatacctgtttcaacaaaaatttctgcacaaaatgtaaaagtggattttacttacaccttggaaagtgccttgacagttgcccagaagggttagaagcaaacaaccatactatggaatgcgtcagtattgtgcactgtgaggccagtgactggggtccttggagtccatgcatgaagaaggaaaaacgtgtaggcttcaaaagagggaccgaaacacgggttcgagaaatactacagcatccttcagccaagggtaacctgtgtcctccaaccagtcgagacaagaacgtgtatagtacaaagcagcaaaggttggagtccagcagagagacccagagcagcggaaacaaagacagacagcagcagcagaagagaaaagcccaagagaaacaacagaaatcggtatcaatcagcactgtacactagagggtcctgtgaggtgattgtagactcatgatgctgctatctcaaccagatgcccaggacaggtgttctagccattaggaccacaaacggacaacacatcagttaccgctctgtctaaacaacattccgaatagttgctatattcttcatacaagcatagttaacagcaaagagccaaacgttcaaagaagggatactttcagatggttatcttatgtgcttctgtgtatttttaaaagatgagaaaatctgtacataattatcaataacctataagctatcctcaatgtaatgatgacacccagagaagaaacatcttttccctataaaaatctgcaagaaactgagtgtgcataacagagttaaatatactgtgtgggattgaagtaaggcaaactgtggaagaaatcatagaactggagatcgtctgtgctttccagactgggaagggttgtgattacctggaacaggtctccaatctatcttagcgctgtgtggttgatcgtctgctacacctcggtttatataagtctgtaaacatgtacctgtaactttcttccaaaagcaaaaccatacatattagaagaaaattctgactttatagaaaacaaaagctagagtgaggagaatgtgacatgtttgcaaaagtgtgttttctttcttaatgaagggaaaacaaatttattacctgcttaagggtccatctggaactaaagggatactactttctaacaaggtgtatctagtaggggagaaagccaccacaataaatatatttgttaaataagttaaaaaaaaaaaaaa

SEQ ID NO: 3158237 - DNA, 489 bp, Cricetulus griseus
gagcaggcggccatggggagcctccgcggcctgcgcctggcggctggacattgctttaggttattcgaaagaaatgcttccttgtctctaaggtctaccaggaacactgacttgaagaggatcaacggattttgcaccaagtcacaggaaagtcccaaagccccaaccgaatcttacagacacagagtgccgcttcacaaacccacagacttcgagaagaagatactattgtggtcagggcgcttcaagaaggaggaagaaatcccggagacgatctcgtttgagatgcttgacgctgcaaagaacaagatccgggtgaaggtcagctatttaatgattgccttgacagtggcaggatgcatctatatggttattgagggcaagaaggcagcaaaaagacatgagtctttaacaagcttgaacctggaaaggaaagcccgtctgagagaggaggcagctatgaaggccaaaacagagtagaagtatttg

SEQ ID NO: 3158238 - DNA, 1609 bp, Cricetulus griseus
tatgaactgggagcatcgtgcacgcccggaagaaggcagggggggccaggccgcgctgtgtctttaagaatgctctcttgctcataacagagactatgcagaggcctccatggctgtgataagcctgctgttcttggcagtgatgtatgttgtacaccacccctgatggtcagtgaccggatggacctggacacactagccaggagtcggcagctggagaaacggatgaccgaggagatgcggcagttagagttagagtttgaagagagaaggcgggcagctgagcagaagcagaaggcagagaacttctggagaggagacacgtccaagtgaccagttagtgctggggaagaagacatgggatggccgttccaagccagttggcccttttattaaacattatatccaaaatgccatccgtgacctgccctgcacctgtgagtttgtggagagctttgtcgatgatctcattgaggcttgtcgggtgctcagccgccaggaggctcacccacggttggaggactgcctgggcattggggctgcctttgagaagtgggggaccctccatgagacacacacgtttgatgtcctggtgcccattgtccctccacagggcactatgtttgtcttggagatgagagatccggccctgggccgtcgttctggctgtgtgaaagtggactctaaatgcatgtgcaaacaagagaagctcctgggggacgtgctgtgcctggtgcaccacgacagggaccactcggccatccctgagcaagtgtactggctccatcaaggcagctctctgcactggctcacacctggacgtgtgtaaggccgtgcagtggtttgcaagctcaggttggattaccgctcaggccgcttcctgtcgatcagtttggttcttggggtgcaacgggaagacaccttggtctacctggtgagtcaggaccccgactcgagaacagctcaccagtgtggactggcccgagtcctttgtcggcttgtgagcacttgtttctgaagctggtggggcgctttgcccctgagaacacctgccacctcaagtgcctgcagatcattttgagtcttcaggaccatcagatattacccccgggagcaacccgccccatcctcaacacctaccacttcaaaacggccctcatgcacttgttgctccgactgcctctaacagactgggagcactgcatgctctcccgcaggctccaggaccttctctggttcttaggccaaggcctccagcaaaggtctctccatcatttcctcattggtaacaccttcctgcccctgaccataccgatccctaagacatttcgaaatgctgaacctgtgaatctttttcaacacctggtgctgaatccaatagcacactcacaggcaatggaggaattccacaatcttttggcccaggtgaaaacgctgccttgcctccccactggctggaggactttaatggaaagcccattaaaattttttttttttttttttttttttttttgagacccagtttctctgtgtagcgttacagatggttgtgagctgccatgtaggtcctaggacttgaacgaggatcctctggaacagcagccagtgc

SEQ ID NO: 3158239 - DNA, 1736 bp, Cricetulus griseus
  modified_base (1639)..(1639): a, c, t, g, unknown or other
agccgctacctgggaagaagagaatttatccaaagattaaaacttgaagcaaccttaaatgtgatggctgtgttaatacaatctgttggaatgacactggagaatatattttatctggctctgatgacaccaaacttgtaattagtaatccgtacagcagaaaggttttgacaacaatccgttcagggcatcgagcaaatatatttagtgcaaagttttttgccgtgtacagatgataagcagattgtgtcttgctctggagatggagtcatattctatactaatatcgagcaagatgcagaaaccaacagacagtgccaatttacgtgccattatggaactacttatgagattatgactgtaccaaatgacccttacacatttttgtcctgtggtgaagatggaaccgttaggtggtttgacactgatagctcagtacggatttatgaccgacggatgctgggcacaagagctacagggaattatgcaggtcgaggaactactggaatggttgctcgctttatcccttctcatcttagtaataaatcctgcagagtgatgtctctgtgttacagtgaagatggccaagagattcttgttagttattcttcagattacatctatctttttgaccccaaagacgatacagcacgagaacttaaaactccttctgcggaggaaaggcgagaagagttacgacagcctccagttaagcgcttgagacttcgtggtgattggtcagatactggtcccagagcaaggccggggagtgaacgagaacgagatggagagcagataacaataatgaaaggctgagccccaaaccagggacaggtgaaccagttttaagtttgcactacagcacagaaggaacaactacaagcacaataaaactgaactttacagatgaatggagcaatactgcctcaagttccagaggaaatgggagccattgcaaatctgagggtcaggaggaccccttggctccacagagctctatgcaagcacctgaaggagacagcgaaacaagagctcctgaagaactatcagaaaaaggaacattttcagaaaacctcactcaaaaccagatagatatagcacaatctgataccttccccactgagccattggatcctaactcaggagaaaggagtaatccaagtcttgatagcccttgggacaatgaataaaagaagcctaatttctggggtgctaactttgtgtggccatatcttcatttgggatcggcacactgctgagcacctgatgctcctggaagctgataatcacgtggtcaactgcctgcagcctcatccattcgacccatctagcctcatctggcatagattataactcgaaatgaactcatgctggaagagactcgaaacaccattactgtcccagcatctttcatgttaagaatgttggcatcactaaatcatatccgagctgaccgtttggagggtgacagatctgaaggttcaggtcaggagaatgaaaatgaggatgaagaataaatgactctttgcaagcacttagatgttctgaaatttgtatacgacatttattatatttttttttctttacagaactttagtgcaatttaaggctatggtttttttgtccaaaaaaaaaaaanaaaaaaaaaaaaaaggaaaatgttggttcaaataaatttctacacttgccatgtgcatgtttgttgctttctaattaaagaagttggttagttttaa

SEQ ID NO: 3158240 - DNA, 1592 bp, Cricetulus griseus
tagtagaactactaagaagaaaataatgaactattggttgttctttaagtatttagagtcaaaagtatacaggtttgttgccaaggccaaagaagatggcaaccccttacgtcccagttcctatgccaataggaaactctgcttccagttttacaaccaacagaaatcaaaggagttcttcttttggtagtgtctccactagctcaaactcttccaaaggccagttagaagactcttaagcagaccaatgttcaggatcggatggacagtacatcatctgtctgtggcagtcctctcattaggactaagtttacaggtgcagattcatccattgaatattctactagaccaagagacactgaagatcagcatcctgacacagtgaattgggaagagagaccttctacgcctacaattctgggttatgaagttatggaagagcgagccaaatttactgtatataaaatactagtaaagaaaaccccagaagaaagctgggtagttttccgaagatacacggacttctctaggcttaatgacaaattgaaagagatgtttccaggatttcgattagcactccctccaaaacgctggtttaaagataattacaatgctgactttctagaagatagacaattaggattacaagcatttcttcaaaacttagtagctcacaaggacattgctaactgccttgcagtgagagaatttctttgtctggatgatccaccaggtccatttgatagcctagaagaaagcagggcattctgtgagactctagaagagactaactaccatttacagagagaactgctggaaaagcaaaaagaggtagagtccctgaagaaactgctcggagaaaagcagcttcacatagacacattagagaacagaatgagagctaatagtaaagcacacttcaactcaagagaagctagaagtgtgatagcagacatagaagttgcacagttggcatataatgtggaagatgactaacatactggtgacagttcctttaagttattcgtaataagaactatattcactgctgtcttttaactgttcttttatccagcattgttatttactatactggaaaaaaaaaaaaaaaaaaacaagttagatttgttatcagggcccatattcgtaaatactttacataaattattacagtgtcttgcctgtatattgctccaaactatgtgtgtgtgcgtgtgtgtttgtgtgtgcttgtcttaaatcaccagttatattaggtgaaaactaattgcatgctagaatctgggtaatgtttctatgacataggtttaaatcagtgaacaccatcgggaagataaagatgaatccagtttaagatgttgctgtgtttatcatctctaaataaaaattgcttatttggaaggttagtactacttaagaagatgactttgtacagccaaagattaatgtgttctgaagaactataattagataggcaaagtgataaaagagctttgatttaaatgatgattagttaatgtcaagatacttattgtaagtgtcctgatttattaatatactaggatattttctgcataatcttcaactcaatt

SEQ ID NO: 3158241 - DNA, 825 bp, Cricetulus griseus
ggcggagactgcaccatggccccggacccctggttctccacatatgattctacttgtcaaattgcccaagaaattgctgagaaaattcaacaacgaaatcagtgtgaaagaagaggtgaaaagacacctaagctaaccctgaccatcagaactttgctgaagaacctgaaggtaaagatcgacactttgaaggacttactgctaagagctgtatcaacacgtcagataacacaactggagggggatcgaagacagaacctgctggatgaccttgtcacccgagagcgcctgctcctggcatcgtttaagaatgagggtgctgagccagatctgatcaggtccagcctgatgagcgaagaagcaaagcgaggaactcccaacccttggctctgtgaggagccagaggagaccagaggtttgggttttgacgagatccggcaacagcagcagaaaattatccaagagcaggacgcaggcctggatgccctttcctccatcattagtcgccaaaaacaaatgggccaggaaatcgggaatgaactggatgaacagaatgagatcattgacgaccttgccaaccttgtggagaacaccgatgagaagcttcgcactgaagctaggcgggtgaccctggtggacagaaagtcaacttcttgtgggatgataatggtgattttattgctgctcgtggctattgtggtcgttgcagtgtggccaaccaactgatatcaataaagggaccacccgctgtgacacctgccagtgatgaatgaaagcccagcacccttttggtatacaacacctgctctcaataaatttcccacc

SEQ ID NO: 3158242 - DNA, 3612 bp, Cricetulus griseus
aggctatatcaaaaactactgcagctgttccaagcttgtgaggacctagaaaacaatgaaggcttacaccatctgtatgagattattagaggaatcttattcctaaataaggcaactcttttgaggtaatgttttctgatgagtgtatcatggatgtcgtgggatgccttgaatatgaccctgctttggcccaaccaaaaggcatagagaattctgaccaaaactgcaaagtttaaggaagttataccaataacagactcggaactaaggacaaaaaaggaagatgagaagttttgtctgaagtttttgcacagttaacagatgaggctacagatgatgataaacggcgtgaattggttaatttcttcaaggaattttgtgctattttctcagacactacaacctcagaacagggatgtcctttttacaaaaccttggacaaaagttgggaattcttccagctcttagaaattgtaatgggcatggatgacttgcaggtcagatcagctgctacagatatattttcttatctggtagagtttagtccatctatggttcgagaatttgtgatgcaagaagcccagcagagtgatgatgatatacttcttattaatgtggtgattgaacaaatgatctgtgatactgaccctgagctaggaggtgcagttcagttaatgggacttcttcgtactctaattgatccagagaacatgttggctacaactaataaaactgaaaagagtgagtttttaaatttcttctacaaccattgcatgcatgtcctcacagctccacttttgaccaatacatcagaagacaaatgtgagaaggataaatatgcttggatctaacaaaaccaatacaatttgccctgataattatcaaacagcacagctacttgccttaattttagagttactcacattttgtgtggaacatcacacataccacataaaaaactacatcatgaacaaggacttgctaagaagagttttggtgttgatgaattcaaagcacactttcttggccttgtgtgctcttcgctttatgaggcggataattggccttaaggatgaattttataatcgttacatcaccaaaggaaatctttttgaaccagttataaatgcccttttggataatggaactcggtacaatttattaaattcagctgttattgaattgtttgaatttataagagtggaagatatcaagtctcttactgcacatatagttgaaaacttttataaagcacttgagtcgattgaatatgttcagacattcaaaggattgaagactaaatatgaacaagaaaaagacagacaaaatcagaaactgaacagtgtgccgtctatattgcgtagtaaccgatttcgtagagatgcaaaagccttggaagatgatgaagaaatgtggtttaatgaagatgatgatgaagaaggaaaggcagttgtgataccaattgaaaaatctaagaccgaagatgattttccagatagttatgaaaaatttatggagactaaaaaagcaaaagaaagtgaagacaaggaaaaccttcccaaaaggacatcttctggtggcttcaaatttactttctcccattcccccagtgctgctaatggaacaaacagtgcaaatagtaagtctgtggtggctcagacaacatcagcaagttctaatgggtcatcttccaaaactacaaacttggctgcatcagtgacagccactaagggaagtttggttggcttagtggactatccagatgatgaagaggaggatgaggaggaagaatcatctcccaggaaaagacctcgccttggctcatagatacttgctggggcactcccaacacatggtcttactaaagtgctgcagctactcactgagctcaagtctgaatcggaaagctttctcatggaacttaacacacatggagtagcagagactcagttatcaggtagaaaagtgtagttgtgtaagaaaccaggctccccgagaacttaattgtttcctagtgattaaagggtttgccttttgaactgtccaaaataagaagaaatgattgttggagcctgggtgtaagcttcccagcttcgaaagtctcaggtttgggggaggaagggttaagggttgttaatgcagggttggttccagggagagacttcagtacccaataacattgcttgtataatggtgctggccatgttgttgttttaatccgttgcctctttttaaaagaaatttttatggaaaacaaattgaactgtcattagaaatgaagttatgctgttgggaccatttctttcaagagttcacagaagtcagcctttggtgtttgacaggacatataccctaggtaacaggttccaaatgaatagttttcttaatagaacttttaaaatcagcactttaggggtaacagcagccaagaaacacaacagcagtattctgaactggtcctcttcactactcaggagtggctggctgtacttcccccagtacagtcactttctgctttctcactaaagttaggtgtctgggtcttcttggctgccgacagcatttataaagaccaataaagaatggtgctgaattaagtggcatttactatctagaagccattttatcctagaggttatagaagtgtcagagtcatgcagcatagcacggggagcttttccacagacaagggtgtaacatgaaagctgcttttttaagagagtaaaaagcacattccatgttgtacgtaaatgaatttaaaataattgaggcaaatattaagagattttatttttagaacagcaagttaattgtaaatattttaatgttagtttgctcatctatgatctgagatcattgctgagatgagaaaaatgaccccaaactacaatttaatgcattgggaaaaaaaaaaatctaaaacatagtaattccagctccagtcttgcgatcagctctgtaatgtgttgtgggtccatttttcctggaatagcttaaaagcagtttcctgtgttggagattttggagttaattttaattttggctattgtttggaaaagatgggctgtctgtgtagatatgaagtatagtttttccataaaacagatgtttattttgtattaaaaataccactgtacttgttttacaccatttgtatacatgtggtgatattaatgtaaaattcaggaattaaaatgtgaccctgtaattccatgattgaggcttgtgtttgttttgttgtaaatataagttaccttataaagactcctttgattttcctctctgaggaacttcacactttcaagtcattattatgagaagtgtttcttacagcagaaatgattgttttcataaaatacaaggccaacagttgggtaatgtgtaaactaaccaacgagatgaaaggatccttggaaggaaggcacaactaggaagatcccacattaactgctgttctatgtgaagaccctcatgcaggctggggtgcttatagcattatctccaatcagttcaggtcagagtacacatttgtatgccttaggtctcaaaacatatctgtaaacatgtacctaataaaaagctatttttaataaaagttatgtgaacataaaa

SEQ ID NO: 3158243 - DNA, 1270 bp, Cricetulus griseus
tgcgcgcttgcgcgaatgcaccggcggtcgcccttctcccacctgcagtcgcgagtgggtgacagggcccccttctccacgagcgtcgtgacccggaaccgcgagtggagctaagcccctccagtgcctttgtgctgctgtgcctttaccccaaccacagaaaatgatgaggtcccagggttcagtttcatttactgatgtaactgtggacttcacccaggaagagtgggagcaactggacccctctcaaaggattctatacatggacgtaatgctggagaactacagcaacttactttcagtggaagtgtggatggatttgggaaaccacttctgtatctgaagcaagagaagccccatgatggagtagaatactcagaatataatgggaatggaaaggttctcagccataaagaagtcatctttaaacatcagaaaattaagaacttggttcagccttttgtctgtaattactgtgacaaggccttctccttcaagtacgctcctcattagccataagaggatacacacaggagaaaagccctatgaatgtaatgtgtgtaagaaaaccttctcccataaggcaaacctcatcaaacatcagcgaattcataccggagagaaaccctttgaatgtcctgagtgtggaaaagcatttacccaccagtcaaaccttattgtgcaccagagagcacatatggagaagaagccgtatgaatgcagtgaatgtggaaagacatttgctcaagaagtttagaaactacactacacaccagattcacacaggagagcggccctatgagtgtaacgaatagtgcaaaaaccttctttaagaaatcaaacctcattatacatcagaaaattcacacaggggaaaaacgctatgagtgcagtgaatgtgggaaatcgtttatccagaactcacaacttatcatccatatgagaactcatactggggaaaaaccctacgaatgtactgaatgcgggaagactttcagccagagatcgactcttagattacatctgagaatccatacaggagaaaaaccctacgagtgtgctgaatgtgggaaagccttcagcagaaagtctcgactcagtgtccatcagagggttcacacaggataggtcctgaggctacagtcagattgtaccgtggaaaaccatcaaaccagaattcttccagtgagagagaaaccttcatgaagatgctgaaggaacttgggaaatcacattgagatgcaagctaattcaaaaacttaagaaaaaa

SEQ ID NO: 3158244 - DNA, 195 bp, Cricetulus griseus
ccctgtcagcctcctcctgtgtgtccacctccaaagccttgtcctcctcagccatgccagcagaaatgccctcctgtgcaacctcctccatcctgtcagcagaagtgccccacccaagagcaagtggagtgcttcaacagtcaccaggaccaagagaagagaagaaaataccatctcacctactaccatagcaac

SEQ ID NO: 3158245 - DNA, 1266 bp, Cricetulus griseus
gctcgctaatggtggacgcgtgaggcgaggcgcgagcgcgcagggaggccggagcgggctgcgcggcggcgccatgtccgtgaacatggacgagctcaagcaccaggtgatgatcaaccagttcgtgctgacggctggctgtgcggccgaccaggcgaagcagctgctgcaggcggcccactggcagttcgagacagccctcagcgcctttttccaggagaccaacatcccctacagccaccaccaccagatgatgtgcactcccgccaacacccctgccacgccccccaacttccctgatgccctcaccatgttctcccgtctcaaggcctctgaaagcttccacggtggtggcagcagcggcagccccatggccacatcggccacatcacccccaccacacttccccaatgccactggcagcttcgcaacacccagctggccgactgcagcctcgcccccaggacggcccacacaagggcccaccctgccatggaggcagagagataagggaggcccctcccccctcccggaggccagggccccgtggggtgggggagaggatgtctctgtgggccccttcatccctcctctgtctgcacccacacaccccagagccctggaggggagagactggactctagccgggcagtcttgtgccagcatgcacagctgcacgcaagcaagttcacagcagaggcacccccagctcgcatggatttgactcaaaagtggcttgggtacctggtgggcagcgccttggagaccaagcagtcatcccaacgaagactcatctgcctggccccaccacctggagtgtttcagagaatcacttggtggcagagatgtggttgactcctgtcttggggcctactaggcctagatccccaccctcgggaatgcagagctttctccgcatgtgtgcgtgtagctgtgtctgtatttatacgtatgtcgctcttcaaaagcaacctagttatggggcaactggactttgcatgttagagtgagccccaagccccttggcccaccatcccctcttcccaagggccctgcctcactccacctccttatctgccagcattgctatttcctgcaaaggattatgggagactccaggactcttctacacatcccccagcgcctgcctgctggggtttcctgcatgcctcttccccggagccgaggggtacctgatccccatttcctattccccttttaacaaaagagaaaagaattccaaaccaaaaaaaaaaaaaaaaaaaa

SEQ ID NO: 3158246 - DNA, 338 bp, Cricetulus griseus
  modified_base (325)..(325): a, c, t, g, unknown or other
cccaggactgcctggaacatgccaagcacagttctaacacccccaaaatcacagataatatgttctgcgctggctatgtggacggtaccaaggatgcctgcaaaggcgacagtggtggcccacatgccacacactaccgtggcacgtggtacctgacaggtgtggtcagctgggggggagggctgtgcagctgttggccatgttggggtatacaccagggtctccaggtacgcagattggctgatcaggctcatggactccaagctccaggttggggttcaccgagtgaaactactctagctccttggacagcccagccttttcncaaggaggaagct

SEQ ID NO: 3158247 - DNA, 2358 bp, Cricetulus griseus
gaagagcaagtgcagaaggtaagcagtttggcttccctgtccatgagcaagcaccggggcctgagcctcacagagacagagctggaggaactgagggctcaggtgctcccagctggtggcagagctagaggagacacgtgagcttgctggacagcatgaggatgactccctggagcttcaggggctcctggaggatgagcggctggccagtgcccagcaggcagaagtattcaccaagcagattcagcagctccaaggtgagctgcaacaataactaaacgggaaaggagatttccctgtgcagctttgcggcagcagctgctgggaactgaggaacagatgcagggcatgaagaccaagtgtaaggacttgtgttctgagttggaagagctccagcatcatcgccgggtcagtgaggaggagcagaagcggctgcagagggagctcaagtgtgcccagaacgagatgcttcggtttcagtgcaggcgctgcaccagtgcagtgagcatgagaaggaaaggctgctggagacgcagcaccacctgcaggacaagctgcgctgccatgagacagagctgcagcgtctccgaggcattgtggactgcttgcaggagaaaaacgataagaatgcagggttgcaagcccagcttcaggagatgaagggactgtatcagtgcagccacgacgagctggagcggcagaagcacatgtatgaccagctggagcaggacttccagctctgccagcaggagagcagggccagctgcaggaagagctgcacaggctcacattcccacagcccaaatgtggcctcttgcagaagagtaaggagctgctttcaaagttgcaagacctatgtgagatgcagctgctctaccaaagcatgcaggaccagcagagaaagctgataaagaatcaggagaacttactgaaggaacagctagaggcccacaaagaactccgagagtttacagactctggtttccacgatgtggtggcgaatcctcaggacaccaaagggcctaaaatcctccctttgtgagaataagtccaaggtgcttatggaccagctgcaggctctgcaggtgctatatgacaccagtcagaggcaacaggagctgctgcagcaggagcatgggcggctcatggaggagcggaagaggctgcaggctgagctacagctctgcatggaagaaatacagctgctccaaagtcagtcccccaccataaaaatgagtcttgagtcctacaggaagaccccaggcagcatggcccccagcaatgaaagctttaacaggagttatgacagcaccatcgaggacaatgaatgctttcaaaagagttacgtaagctcccaggccagcaatgacagcttcctcaagagctatgagagcagcgccagttgcaatgaggcctatcagaagagttaccgctccagcaacacaagtgttgcctataagaagagctatggtagcactgctagctctgaaacctttcacaagagttatgttagtgttgctgatgaggacccagcagagcctggagacctagagaactttgaggagacagtggccaaggtgctgaccaagttgcaggctgtgaaggccctgtaccaggtgagccaggaggaccactgccaggtgcaggagcagatgaacaggcttctggtgaagcagagagagctgagtcacgagctggaggactgtgagaaggagttgaaggagtgcctggagaagcctggagaagcctgcagcttcccagagcgacaagaatgagatcaaagaactgcagactaagctgcgggagctgcagcttcagtaccaggctagcatggatgagcaggggcggcttctggccgtgcaggagcagctggagtgtcagctacagtgctgccaggaagaactccgccagctcagggagaacaggccctctattagctcagaagccaggggcaagaatgtacaataagaatgtgaacaagaatgtcaatgaagtgagaagtaagaagacaagcaaggcgtgctcagagagaacatgtttggcatgtggaagcctatagtattcttggctatcgcagctgtggctttgtatgtgttgcccaacatgcgaccacaagaaacagaatactgctacatgaagtgatggcagacctgggccacctcagaaggcagatccccagaggctaccaccctcacctttgggcagaacacactgtgccagagcccccaacccactcatgtgccccatcctctttgcctcagccactcagactggaaaggcttatgggagttgtagctcccaacctcctgcctgtgtaagaacctgggttccttgtaattaaatgtcagcctaattaca

SEQ ID NO: 3158248 - DNA, 656 bp, Cricetulus griseus
ccgctccggaggtgcagtgagctgctgcagcaactgcagcggagctggaaaggcgttgccagtcctcagtgggcaccagcattagcagtccagggcccatctgtactcacagaactatctcacgaggccagtggaaataaagaagattccagctttttagataatatcttttggatggcagctcccaaaaacagacgcaccattgaagttaacctgtgtaggagaagaaactcccagaagcttattaaaattaagaacaatatagacatttgccctgaatgtggtcacctgaagcagaagcatgtcctttgtggctattgctatgagaaagtacgcaaggaaacaacaaaaatcagacaacaaatatgggctcaagaagggggcccctttaaagctcctaccgtagagactgtggtactgtacacaggagagaaaccatcagaacaggatcagggcaagaggattgtggaacgaaacatgaagaggccatcttggttcacccagaattgacactgaagaagttaaaaggataatttcattgtaaggtgtgcctgttttcatatcattgtattttaaagtggactttattagctgttaattttaaatgaggtaatttgaagagtgtatcttgaataaactcaacatatttatgcaaa

SEQ ID NO: 3158249 - DNA, 442 bp, Cricetulus griseus
  modified_base (432)..(432): a, c, t, g, unknown or other
aaagaagtgaccattaatcccgacaccacttgtggcaatgactgggtctgtgaacatcgatggcgtcaaataaggaacatggttgccttcagaaatgtagtcagtggccagcctttctcaaactggtgggataatggcagcaaccaagtagcttttggcagaggaaacagaggattcattgtctttaacaatgatgactggtctttgtcaacaaccttacagactggtcttcctgctggcacatactgtgatgtcatttctggagacaaggttgatggcaattgcactggaattaaagtcaatgttggcaatgatggcaatgctcacttttccattagtaactctgctgaagatccgtttattgcaatccatgctgaatcaaaattgtaagagtcaaataaatacatataaataaagtaaaaaaaaaaaaanaaaaaaaaaa

SEQ ID NO: 3158250 - DNA, 469 bp, Cricetulus griseus
cccctctccactcaactctcggaccctgatgacttcactggccttgagacatccagcctcctacagcatggagacactgccttcatatcagtgaggacaatggcatcggagaaccccctgctgtccagccagttcactttcacgcctccgtgaggtgggggagaaagacacagcactagatgagtcccatgtttagctctgtatcacaggagcaggacacagaagactgctaacaacggaacgattttgatgacaaggattaattccaaaacatcactttacaaccagtgggtggcattaagtctgagaggattttgctgccaaaactcctaatgtgtcataaccatcttaaaaaccagtagctaaaagctttagtcatgtgaagaccataaaagcagggaaggataaggggaaagagccatttcactgcacattgtgaatagctcgactttgagcagctaagaatata

SEQ ID NO: 3158251 - DNA, 329 bp, Cricetulus griseus
gggatggacgcggtgcggagaagcgcgcggggccgcgcggagagcccaccagacaggaaggtctatatggactacaacgccaccacacctctggagcctgcagtcatccaggctgtgacagaggccatgaaggaagcctggggcaaccccagcagctcctatgtggcaggaaggccaaggacattataaatgcagctcgggagagcgtggccaagatgataggcgggaagcctcaggacatcatcttcacttccgggggcaccgagtccaataatttagtaatccactctatggtgagatatttccacaaacagcagaccctgaagggg

SEQ ID NO: 3158252 - DNA, 209 bp, Cricetulus griseus
aggtggggcggctgtctgccaggacccggaacatccgtattattaacactcttacgtcgcaggagcacacactgaaggtgggggctctggaatcaatgtgggaaatcctacaccgatacctcccctataatgcacatgctgccagctatacgtggaaatatgatgggaagaatctgaacatggatcaaaacctggaagaaaatgggatc

SEQ ID NO: 3158253 - DNA, 373 bp, Cricetulus griseus
ttccaagatgtaagtctctgaaagaaacagacttaattaaaacgacggtgtcagactgttactgctacaatcaaaattggcaaatagagtggacatatatgtggtcgactgtgcaggtgacagttaccagtcgaggcctgctcagatttgtctatatcacaggaaatcataattgccagcatccagaaggcattctgtcattcatcagatgtgttattcataacttttgggcaccagaggagtctaacaaaatgacctcatcactccatacggagaaaccgtatgcttctctgtgaagcccatcgggagggtgtttacctacacagtaagcatggatcgaaacattgtggatttcaaactcctccttgtgttt

SEQ ID NO: 3158254 - DNA, 505 bp, Cricetulus griseus
cagaaggctggcgggcagctgggatggcagatgaggaggaagaccccacttttgaggaggaaaatgaagaaattggaggaggagcagaaggtggacaggggaaaagaaagagacttttctccaaagaattacgatgtatgatgtatgggtttggggatgaccagaatccttacactgaatcagtggatattcttgaagaccttgtcatagagttcattactgaaatgactcacaaggcaatgtcgattggaagacagggacgagtgcaagttgaagatattgtcttcctgattcgaaaggacccaaggaagtttgctagagttaaagacttacttactatgaatgaagaattgaaacgggctagaaaagcctttgatgaagccaactatggatcttgacactgtttgtaatatctgaaattttgattattttgtttggaaaccatacattacaacttgtctacagtaatatcatgatagctaggtacgcaatgaaagaggtattc

SEQ ID NO: 3158255 - DNA, 2197 bp, Cricetulus griseus
tcccgtcccatatcagatgcttcagaaatgttggaagaattgggattggaccttgaatctggagaagaaagtaatgaatcagaggatgacctgagcaacttcacttcacctccaaccacagcctccaagtcttcaaaaaagaaagccagtgtctaaacatgaacttgtatttgttgacaccaaaggagtggttaaacgttcttctccaaaacattgccaggcagttttgaaacagctaaatgaacagagactttccaaccagttctgtgacgttaccttgttaattgaaggagaagagtacaaagctcataagtctgtcctgtcagcaaaacagtgaatattttcgagatctttttattgatgcaaaatcatgctggagaaagacactctgcagtttcataaccaaggaactcaagtggaacatgctgtcagcatcttaactgcagacatgcaagaacaagaaagcactgggcctcaagagcttgagactgtggtggtgacaggagaaaccatggaagttcttgaagcggtcgcagctactgaagagtgtccatcagtatctacgctctctgaccaaagtattatgcaagtggttaactatgtgctggcacagcagcaagggcagaagctgtctgaggttgcagaagccattcagactgttgaagtcgaagtggcacatatgccggaagcagagtgagtactgcagccacaaagacgcctgccattgagctcacagagcacgcgtttacagcttatgtcaccaccatgtagacttcatatgtgaaacagggctgttggtgacattactaaatttcttttctggccaatgagttctgtaggaaagtcactttctgtaaagaaattgaaaacaatctgttggatcgaaggtagttgaatcatggtatgccttttatgaattaatgtttatatacagaggttctgtgactatttgctgtttgtggatttaaaaaattctaatataaagtatatctgtaagatgcataagtatattacattttaaaaatgctttagatctatgatacttgacttatttattttaactgcttctaagtcaggaatctagtctgtcttgaagcacttaatgagttctgtgttgtaatcaagtttgcataatttatttatctgtatgggagacccacaaatgcaaagctaattttaaaataccatttaaaatgcatgagatgtgtattaaagccttactatactatctcttcaaggcaagtaattggccatgagaaaagagtactgttattaaacactgttgatgggaagtttctgcttgataacattggactataaataggaaaaaaaatcaaaactgattcttttgctgaagaatgaacaagttaacgaagaagttaagtttggtatgttttagcttttatatcatgtttgtttaaatttgttgaaaactacatctatagtggtaatatggatgctatataactgttagataatttcagaatgttgaaaatttaatgcagccctcattatactgtgttacataaaaaattgattatggtaatatcaaatttctgtaagtatttgaaaagttaccttaaatctaaattatattcattcatgtgtttttttttttaaatttctcacctttctgagttgtcagatccagatatttgaaaataactatggagatatgccacatttctctctagaaaactattgttcaagctataattgttaaaattaagcttttaggtattagaagctttcttcaagtgtaaaattaagatatataaagagattatatgtaaatcattcctaaagcacaagaagtgaatgtgccttgatgtacatacatgatactaagatgcttattccactttacttcaagtggctgtaaggttaaggagtaaatgtgatagccctgcatgcatcttcttgcatatgtaatgtgtgcatttgcaaatttgttgttgctttaatagctgtgtggctttcagttttaaaagtgaatctatagacagcccacaacttcatatgggctattcactggtcatgtccaacagttaacgaaaaagtatttcaatgtaattaacatttgaaattgtcttttatgttccattttcaccattgttaaatttagttaaatgtataagatcataaatgtatgtcagaaatatgtaaataaaagatgttcagtcttattaaaagcaaa

SEQ ID NO: 3158256 - DNA, 2958 bp, Cricetulus griseus
  modified_base (688)..(688): a, c, t, g, unknown or other
atcgagcgtttggaagtaagcagcctcgcccagacttccagtgccgtggcctctagcactgatggcagcatccacaccgagtctgtggatggaataccagaccctcagcgcacaaaagctgccattgcacacctgcagcagaagatcctaaagctcacagaacagatcaagattgcacaaacagcccgagacgacaacgttgctgaatacttgaagcttgccaacagtgcagacaagcagcaggctgctcgcatcaaacaggtgtttgagaagaaaaaccagaaatctgcacagaccatcctccagctgcagaagaagcttgagcattaccaccgcaagctccgtgaggtggaacagaacggaatcccccggcagcccaaggatgttttcagggacatgcaccagggtctgaaggatgtgggcgcaaaagtgactggcttcagtgaaggtgtggtggacagcgtcaaaggtggattttccagcttctcccaggctacccattcagcagcaggggctgtggtctccaagcccagagagattgcctcactgattcggaacaaatttggcagtgcagacaacatccctaacctgaaggactcattagaggaaggacaagtggatgatgggggaaaggctttaggggtgatttcgaactttccttaaagcaggagttggccagcatggaagngaaaattgcctatcagtcctatgaacggcccgggacaccacaggaggccctggaggcctgtcagacccgcatctccaagatggagctgcagcagcagcagcagcaggtggtgcagctggaagggctggagaacgccactgcccgaaaccttctgggcaaactcatcaacatcctcctggccgtcatggcagttctcttggtctttgtgtccacagtagccaactgtgtggtccccctcatgaagacacgcaacaggacgttcagcactttattccttgtggctttcattgcctttctctggaagcactgggacgcactcttcagctatgtggaccgactcttctcaccccccagatgatgctgatgcagaaagcagtgctcctcaccgtctggcgagtgcatgccaagagagctagacagcagcattacccactctgaagttttctacaagagagttgagtgaatctgtttacatttagaataatgttttttcttcaagagacgaaattgcaatagtattttttagattttatccaagaagttttttgggcaaaatcttggatcatttttatgtagcatgattttccttgggatgcaaatctgaaacagtcctttaacatgaaccaacaatctgcaacaccgaagggcattctgaattgaggcttggaggactgcactaaacccactaaacagatgctaaaaacctgaccaggcccaacacctgccctgcatgggctcctctcctcctctagactaattctactgtgaagtcccaccacattccaggttggaattttagatccagggtggattttccctgccatggaagaacatctcccaggctttctcatgctaaccctgaagtatgatcacttctgaacctgcaccttccttaactctgccaggattggaagcaagaacatcaagcccacaggatgattgtgcagtcctgttcagtattgtgaagcccttaatcctaactttaagcaaaatcccttggccgcacttttaaggtttgtttattttatatatatgtgtgtgtatagttaccaacttaaaaataaaaaatcccaacaacatacttgaagaatgtaatactcaaactctcagtgcttccttataatttctaataggattttttattattgttattattattggggtatttttgtttggttgggcctgattaatctcatattattggaggtcacaagtgccacttccaatggcctcttcctgtgtgcccacatgatgcaaaggaaaaggaactttgtacagagaagcgaaatatgttttttgcctatgtctccacaccaggaccttctttcagaactagggtagcaatgcccagtctgttggaaagtgtggtttacataacaattgcagcctccttttgtttggccagatggccttctcactttgatgttttaactcaggtactgtctttttgctgcccatccctgttgcctttgagtttcttggaattgtggctgtccttgcatcctcttttctgtccacagtccttcaatagccttgctctgatggtttagcacttgatctaagacaagcttgcccataatttaatgctgcttctccttaaaaaaataaaaattttcaaaaataaaaaattcccgctaaagtgaagcattccttgattcccttgtccatgccggtgcctccaccggggtgagtgagactggctctgttggccccggtgactgttgcagttgtagagttggccatcactctgcattgttgatgggctgtctgctccagtttcaggtccttggtgtgatcagtgcctggcaaggaaggctttttactccttaagaggtgcagttggacccatcgctgacagtgctgctttagccccatcccaactggcataaaaacaaaaccaaatagcagtcatcacaagccagcataggcgaagtgatagttcccacacacccccataaaactgggattttgaatgtggctctacaagttgaacatttctgtgtgttgtgtatgctaggtaataccctcaaaaggggctgactactagaccataagtgtgttttatacaagtgtgtaagctaaaaattcacgtgcacgaattgcagagtaaagagatgatacttgtgaaagcgtgaacattaacactgtagttgctcgatcttcagctgctgattgttgagagagaattcagttatgttgtctggctgctgtggagtgtcagcagcacctttgctgtacataaaatgaaaataaagacctcagctaagaaa

SEQ ID NO: 3158257 - DNA, 396 bp, Cricetulus griseus
acttggacctgttccatagacacagcccaggaaaatactctgaagtaatcaaaaagtccagtgcaattgaactgttatttacactctaccctcctcgaggtgccaaagtgaacattagcacaagactccggtccacatggctgagacccatagtgaatggagaagaaggttataagtacatagtgagtggacatccaatactcaagagagctaacatccggactgctggcaagttggtggctagatccataagggaaaggaaaatgagacaattttataaattatgagaagtgggataaagttttcaacacagcactcctttacctagttgaactgattgcctaagaaatgcatattagtaatgaccacagaatgatttgctatcaacaggataaa

SEQ ID NO: 3158258 - DNA, 330 bp, Cricetulus griseus
tttaggagtgcaaagcaatgaagcagctagggtgtaggtcatacaaggaaatgtgaagtcatgctcactgagatgaccaggctatttcatttggtgttgacagtgaactgtacaatgtacctcagatcagttatgaatttatgagtccaaattaaatcccagcaggctggaatcagattcatttggtacgagaccgtgacacgaccatgtgggatatatgctgtacttattttctggccaacagcttctttctaatgttttgtgaactattactttaaatgtcttatataatggtgcttttatggttattaaaattgtatatggtattga

SEQ ID NO: 3158259 - DNA, 974 bp, Cricetulus griseus
ggggttgagtgacctgaggacacttgtgcagcaagaaacaggggacctgagcaacaggcaccgtattttcctcagtgtgtggagaccgtttgtccaggctgggacaggagagacttggaggcccctgcaagattcagcccaggggcctgatcttcctgcaccttcacagagaggagcatggcaatgctcctgcagctgctgctgggcctcagtctgggctgtgtgggagtaggtggctttgtggctcatgtggagagcacctgcctgctggatgatagtggaacgccaaaggatttcacatactgtgttgccttcaacaaagatctgctggcctgctgggatccagagtcaggacaaatagtccccattgaatttggggtgctgtataatttggctgtattcatttcaaaaagcctgaacacaaacgaggccctgatccggcgcttgggcaaagggcttcaggactgtgccatgcacacccagcccttctgggatgcactgacccacagaacgagaccgccgtctgtccaagtagcccgaactgctcctaattaacacgaaggagcctgtgatgttggcctgctatgtctggggcttctacccggcggatgtgaccgtcacgtggatgaagaacgggaatcttgtcataccacacaacatcaaagagagtactgcccagaccaatggggactggacataccagactgtctcctacctagccttgaccccctcttatggggacatctacacctgtgtggtacagcacagtgcgacctccgagccggtccgtcaggactggacaatcgggctgtcccccatccagacggtgaaggtgtctgtgtctgctgtcaccctgggtctgggcttcatcatcttcttgttttggtctttttcagttggcggaaggctcgcctctccagctacattcctctccctggatctacttacccagaaggacggcattagaggcagaa

SEQ ID NO: 3158260 - DNA, 279 bp, Cricetulus griseus
ttagagtcagaatgacttttgattatcaattctgaagagaaattttcactgatagcttgagatctctcaattccaagatctttgcctatcataaagaatcatggaaagtgtttgttaaaatatacacatttaaggtgaatagacacattaagagggcacacaatccattttcaagtgatgttgctcctttaaaaggtgtgttttatttctggtgatgttagggcaacggggcaccttagaagccttaagtgaaagctaatataatccagacagcaatgg

SEQ ID NO: 3158261 - DNA, 220 bp, Cricetulus griseus
tcacctccaggtgtcctgcagaagggccaacaaggtgctctggctctctgtggtcttcatcgtactgtttgcagcgctgatgagtttcctcacaggccagttcttccagacggctgtggaggctgcacccacacaggaaggaacctcctggatgtctctagaacacgtgttatggccccttaccagactcaggcacaatgggcccccgccggtgtgactg

SEQ ID NO: 3158262 - DNA, 356 bp, Cricetulus griseus
aggtgatattcttcagtagtcaagatgtcgtcagcacccgagcctccagcagttaagaaggaaccaccaaaagagagaaactttgaaagcccaggcctccgagggactcacacaacaaccttgtttcgagctgtaaatccggagctcttcattaaacctaacaaacctgtaatggcttttggactggtaaccctttcactttgtgtggcttatattggttatctacatgcaacacaagagaacaaaaaggagctctatgaagctattgatagtgaaggacatcattacatgaggagaaaaacatctaaatgggattaaagtgctggttccctcagatggagcattattacaggctc

SEQ ID NO: 3158263 - DNA, 395 bp, Cricetulus griseus
gacccggttgcagcgggaccctgacatataccatcatctgttttggaatcattttcagataaaactcccactaacaccacccaactggaagtcattcctgatgcactgtagttagacaggccctggcatgtcccaggaccccagcccataggatgatgttccccactttcaagacgggtcttccacgctcagttgaacctttctggaaacactctcatagacacacccacaactactgttattcattggtagtatcttttattgagaaatggcaagaaatgcacaaaattcaagtatttgctcttatatcttgaacacaacacacacacacacacacacacacacacacacacacacacacactgtataacccacctaggaaaggcaagaatgag

SEQ ID NO: 3158264 - DNA, 387 bp, Cricetulus griseus
ttgccgcaggtgtcttcatgcccattggcatcgtgctgcagccatggatgggctcagcggccatggcagcttcctctgtgtctgtggtgctctcctctcttcagctcaagtgctatcgaaagcctgacctggagagatatgaggcacaggcccatggccgcatgaagcccctgagtgcatcccaggttagtgtgcacgttggtatggatgatcgtcggtgggattctcctagggccacgtcgtgggaccaggtcagctttgtgagccaagtgtctctgtcctccctgacatcagacagactgtctcggcatggtggcacagcagatgacaatggggacaaatggtctctgcttctgagtgacagggatgaagagcagtgcatctgag

SEQ ID NO: 3158265 - DNA, 1919 bp, Cricetulus griseus
gaaagtagatgtcctttgtggaattggaattaaaaaggttagcttgtggaactcagtttctgtggctttgaccaaggatggtcacgtgtatactttcggtcaagaccgcttgataggcttacctgagggacgtgcccgaaatcacaatcgaccccagcaaatccctgtactggctggagtggtcattgaagatgtggcagttggagctgaacacacacttgctttggcatcaactggagatgtttatgcctggggaagcaattcagaagggcagcttggtctaggccacaccaaccatgttcgagaaccaaccctggtaacagttctgcaagggaaaaatatccgtcagatttcagctggccggtgccacagtgctgcatggacagcaccacctgtccccatcatggaggctgctgaatctcagtcccaacaaccagaacagcacatctcattacaatgctggaacctggggcattgtacagggacagctacggcctctgttagctccaagagtctacacgcttcccatggtacgctccatagggaaaaccatggttcaaggcaaaaattatgggcctcaaattactgtaaagagaatatccaccagaggacggaagtgtaagcccatttttgttcaaatagcaagacaagtggtaaagctaaatgcatcagacctccgtctgccctcccgagcatggaaggttaagttggttggagaaggggctgatgatgctggaggagtgtttgatgacaccatcacagagatgtgcctaacagcatccttcacattgaagacagcggcattactgaggagagtttccatgagatgattcctcttgattcttttgttggccagagtgctgatggcaaaatggttcccataatccctggtggaaatagcatcccactcacattttccaataggaaggagtacgtggaaagggccattgagtatcgactgcatgagatggaccggcaggtggctgcagttcgagaaggggtgtcctggattgtccctgtgccattgctgtccctcctcacggccaagcagctggagcagatggtgtgtgggatgcctgagatctgtgtggaagtcctgaagaaggtcgtgcgctaccgcgaggtggacgagcaacaccagctggtgcagtggctctggcgcacgctggaggagttctccaatgaggagagggtgctcttcatgcgctttgtgtctgggcgctcccgcctgcccgccaacaccgccgacatttcccagaggtttcaaatcatgaaggtcgataggccttatgacagtctgcctacctcacagacctgcttcttccagttgcggctgcccccctattccagccagctggtcatggctgagcgcctgcgctatgccatcaacaactgccgttcaattgacatggacaactacatgctctcaagaaacgtggacaacgccgagggctctgacactgactactgactgatgagggtgctgtcaccgcccctttctcaataatgctcacttccgacttgatgttgatacacttttatggtaactgcatagatgttttaggaacataagccgacataaacagtggccatgtttagttacttcaaatgaaacaaagaaattagatgtttttatttttctgtgattgtacaaaaaaaagcagaaactgctcagtcaggtttccctctgtatttttggtcactttggataagtttgcatggaaccattttggtgccatttttagttgggaatgatacatttttgtaagcccacccagtgaacatgaaattgtacattgtgtataattgttcattagaaaggacagttttacatgaatattcatatatttattttgttttagtttgattcacctgtgcagggttctttacgcagagaaataaaacagattcaggaatca

SEQ ID NO: 3158266 - DNA, 215 bp, Cricetulus griseus
gtcagcaaaagaaagacatctggttgagatcaaacagaaacttggcatgaacctgatgaacgagttaaagcagaacttcagcagaagctggcatgacatgcagaccacaactgcgtacagaaaacacatgaaaccctgagccatgcggggcagaaggccacagcagcttccagtaatgtgggcaccgccatcagcaagaagtttggagatatgag

SEQ ID NO: 3158267 - DNA, 719 bp, Cricetulus griseus
cagttttgcatttggctccctgatatctgcggttgacccagtagccactatcgcaattttcaatgcactgcacgtggaccctgtgctcaacatgctggtgtttggagaaagcattctcaacgatgcagtctccattgtcctaaccaatacggctgaaggtctaacaagaaagcatatgtcagatgtcagtgggtggcaaacgttctcacaggccctcggctacttcctcaaaatgttcttcgctctgcggcacttggcacgctgactggcttgatttccgcattttccctctgtcctacctgctgaacttcttccgagatcacaaaatcacccccaacgatgatgtttatcatgtggttcagtggcctccgaggggccatcccctatgcactgagcttgcacctgggcctggagtccatggagaagcggcagctcatcggcaccaccaccattgtcattgtgctctttaccatcttgctgctgggcggcagtaccatgcccctcatccgccttgtggacattgaggatgcccgggcccgccgcaggagcaagaaggacgtcaacctcagcaagactgagaagatgggcaatgccatcgagtcagaacatctatctgagctcaccgaggaggaatacgaggcccactacatcagacagcaggacctcaaaggcttcatgtggctagatgccaagtacctgaaccccttcttcacacggcg

SEQ ID NO: 3158268 - DNA, 417 bp, Cricetulus griseus
cactccagtgcgctcacctgcctgctgctgctgctctactccgtggccagcaccatgcacgtggtggtctttcctctacacttctgtccttctccaccagcatcgggagaacctgtgtcactgacctccagctgagtgcaggcggggcccaggccagtggcactgtcataggtgtgggccagtctgtgacagcagtgggccgtatcattgcccctctcctttcaggagtggcccaggagatcagtccctgtggccccccaagcctgggtgctgctttagccctggtggctattttaatcatgtcactaaacaaaccacattccagtggggatgggagtaaggtcctaaaaagggagtaggatggattgggaccaattggagaggcagaattagaactgggcaaatcggggacaaaga

SEQ ID NO: 3158269 - DNA, 1221 bp, Cricetulus griseus
aagcagttctaaccattcattacttgtgaacagatccttgacttttgtgcttaagttatgggagaggggactgtaatttggagctgttcgtagaggtgatgacactgctagaatccaatcactgctggtccaggcgcagttggaaagctctacaaggcctcagctacagaatgtccagggacagcaagtaacacctttcatgacccttgaccatcaggtattcaaccagactctcaagaggacaccacctccaacaccaagctgtatgcctctggcagagcatggacccatgagcccagacagcgatgctggctgtgcaggaaacccattctcaaaactgctggctcttgggagagaggatggtagtacagaatggcatttatctagtagtattttggatgtgtacagtggtgagcaggggatttctccagttaatgcaaatctgatgagtgcttcctgtccaagcattctgcccatgaaaaaggaagttgcagaaactgacactagagctttggtgaaagagagacagaaaaaggacaaccacaacctcattgaaagaagaagaaggtataatattaattaccgaatcaaggagcttggcactcttattccaaagtctaatgatcctgatatgcgctggaacaaaggaaccattctgaaggcatcagtggagtacatcaagtggctacaaaaagaacaacagagagcccgggagttagaacacagacagaagaaattggaacaggctaaccggcagcttgtgctccggattcaggaactagaaatacaagcgcgtgctcatggcctgccaatgctggcttcacttggcacagctgatttcagtccctacatcaccaaacagcaggcccatcctgagaagaactcagtaggctgctgccagcaactgactccatctcaggggacaagcccagagttctgtgagcaagctgtggccttctctgatcctttgtctcacttcacagatttatcatttagtgctgccttgaaagaggaacaaagattggacggcatgctactaagtgatacaatctgcccctttggaacagacccattcctctctgctacttcccccgcagtctccaaagcgaacagtcgaagcagctttagctcggaggacagtgatgagttataagccataaacaggctcaagtcctcaaaccggaagcaactccatgctggtgctatgcaatcacgatctgc

SEQ ID NO: 3158270 - DNA, 727 bp, Cricetulus griseus
gacatggcctttcattattaaaagccctaagcaatataaaaacctttctttcatggatgcaatgaacaagtttaaatggactaaaaaagaaggtctatccttcaataagcttgtcctcagcctaccagtgaacgtgagatgttccaagacagacaatgcagagtggtcgattcaagggatgacagcgttacctcctgatatccaaaggccttataaaacagaacctttggtgtgtgggacaaactgcttcctctcctctgcatggcgttttctctctcaggttgctgctgtgctctctgcttcttgggagtttgctgagcacccagggttttgtgactactgtctcaccactggtgttccacgctggctcaatttgaatcatatttcctatgatagatttatttttatattagttaataaactgacttccaatttaaaatttccaccaactgaagatcttatcattctttgggttctctgtattagctagttaaatcttcttttctgtcctatctttatcaatatgatccatgtttagatcatattaataaacttaatggaatcaaagtttttgtatagtatcttatgttatcctagagagaaccaagtgattgtatactgatgtcaataaaaccagctgagaaactgaatttttttcactttaagtcctttctgtcttacaatcctgaactatattgtgttttaaataaatattatattttagagt

SEQ ID NO: 3158271 - DNA, 678 bp, Cricetulus griseus
ctgttacctcgagataacccacggaatacccgttctttgccatcaacttcttcactttccataggtctttggaggtttaacggatgaactgcgagagcatctgaaaaatacacccaaggttaattgtagcacagaaaccccgaaggcgagcaaaagaaccgcctctgacctcttcgtcttcagcatcctctcggagtccgattcctcagagtccgactctgacagcagcgagagcagctcagctcttccagtgaagggagcgactcctcatcctccagcagtcagagactctgcctcagctaaagatacaagaagaagaacgagggaaggccagaagtgaagaagtccaagaaaatagttatagtagagttgggaatggtcgagaccaagacatgcacagagagctagaagacaagcatggtgaactaaagaagaagcgtcgagaaagaagagattctttttctgaaaatgagaagcaaagaacccgaaatcaggacagtgaaagtgttagaagaaaacatcgctccaagtcaagggaaaggagtagaaaacactcaggccataaaagcgatgatgacaggtatcagaatggtgccgagagacggtgggaaaaatctaccagatactctgaacattctagagaatcaaagagaaatcaggaccggaggagagaaaagt

SEQ ID NO: 3158272 - DNA, 209 bp, Cricetulus griseus
tggaaaaccacaaggagtctagctgtctgtgaaccagaaagccatagagattctgaatgagatttcacagccagtggtagtcgtggccattgtgggattgtaccgcacagggaagtcctacctgatgaaccgtctggcaggacagaatcaaggcttccctctgggactccactgtgcagtctgaaccagagcatctgatgtggtgtgtg

SEQ ID NO: 3158273 - DNA, 779 bp, Cricetulus griseus
aaatgcctctgaataaaaagaaaaagagaaagaacgctgtactgcccttcaggacaagcttcttgaagaagaaaagaaacagatggagcatgtacagcgagttctgcagagactgaaactggaaaaggacaactggctcttagcaaaatctactaaaaatgagaccatcacaaagtttctccagttgtgtatatttcctcgatgtattttttcagcaattgattctgtttactgtgctctattttgttgagttggttcatcagcagaagactccaaatttctccacacttctctgctatgaccgagttttctctgacataatttacatggttgccagcttttactgaaaatgaagctagtcgatatgggagatttctttgctgcatgttagagactgtgactaggtggcatagcgacagatccacttatgagaaggaatgtggaaactatccaggttttcttactatcctacgagcaactggatttgatggtggaaataaagctgatattataaactaaccaaggcatcagtacattgccttgaaactggtgaatacactcatatcaggaatatcttgattgtgctaacaaaaatactgccatggtaccccaaagtttttaaagtctggggtcaagctttggaaagaagagtgcataaaatctgccaagaagagaaagaaaagaagccagatctgtatgcactagccatggtttactctggacagctgaaaagtagaaagtcacacatgattcctagaaaatgaatttcatcacaaaga

SEQ ID NO: 3158274 - DNA, 393 bp, Cricetulus griseus
ctgagagaagccatgcctgcagcaccaggcaggccaaagattcatccagagccctccctgggtctgggaggccagagccgatggcttggtcacctgcttgtgctcctgtctctccttggcatcacctggacagaggtgcagacaccccaaatgccaaagcagggtccagctctccaagccctgagcaggaaggagagtttcttaatcctctccctacacaaccgtcttcgcagccaggttcagcctcctgcagccaacatgcagagaatggactggagcgagagcctggcccaaatagctcaagccagagcagccctctgtaacacttcagtcactcccaacctggcatctgccccacggcataccccacaagtgggctggaatgtgcagcta

SEQ ID NO: 3158275 - DNA, 919 bp, Cricetulus griseus
atggaaatttgatattgagtgccgtaaaagtatggaaaatatgggggttgtttgatggtcaaacaccgctgttttctgtcacagacacagagatgatcaagaatgtactagtgaaggaatgctattctgtcttcacaaaccggcgggattttggcccagtgggattgatgagtaaagcagtctccatatctaaggatgaggagtggaagagaattcgagccttgctgtctcccactttcaccagtggaaaactcaaagagatgttccccatcattgagcagtatggagatattttggtgaaatacttgagaagagaggcagagaaaggcaagcctgtcatcacaaaagaagtgtttggggcctacagcatggatgtgatcacaagcacggcatttggtgtgagcgtcgattccctcaacaacccaaaggacccttttgtggaaaaggccaggaagctccaatatatgagaggttaaatgtctccctgttcccaaaggattccatagaattttcagaaaatttgtgtacaaaatgaaggaacatcgcctggattataaccagaagcaccgagtggatttccttcagctgatgatgaatgctcacgacaattctaaagacaaagagtctcacaaagctctgtctgacatggagatcatagcccagtcaattatctttattttgctggctacgagaccaccagcagcacacttgcctttgccctgtatttactggctactcaccctgatatacagaagaaactgcaggaggagttgctctcactaaagtcctccagaattttctcttttccagccttagtaaggaaacacagatgccaatgaaattaagccgaaaagcaatgcttcaaccagaaaaacccattgttctaaaggttgtgccacggtctgcaatcattactgga

SEQ ID NO: 3158276 - DNA, 1530 bp, Cricetulus griseus
acgaccacgagaagccagggccaggagaaggtctggggaaataattcagagattcccgcagcaggactgggatgacacaccttttccacagggaattgaattgttttgtcagcctggtggatggcatctgtccagagagcgtaaacaaccaacattctttgtggtggtcctaacggatattgactcagatcggcattactgctcatgcctaaccttctatgaggcagagatcaatcttcagggaacggccatgctatgacgacatcagctgcagccagccagatgccctcaccagacttttcagtgaaattgaaaaattggagcataaattgaaccaaactcctgagaaatggcaccagctatgggaaaaagtaaccatggacctgaaggatgagccaagaacagaccatacccaaagtcactcatcggggtccccaggtcttgtgtccaccaatgtgccttcctatcagaagaggcctgtgctccacccactggaccgcagcactgtcgaggaccagagtgccaccatcgccccatccaatggtgtagagcacagggcagccacgctttacagccagtacacatcaaagaacgatgacaacagatcctttgaaggaacgctgtacaaaagaggagcactgctgaagggctggaagccccgctggtttgttttagatgtaacaaaacatcagcttcgatactatgattcgggagaagacacaagctgtaaaggacatattgatctggctgaagtagaaatggttctccctgccagagtgcccagcaatggatggacaggatccagagctgcatctctgatgtctgatgaccatgattggccaagcacatgagcagaggaacatctgccagacaggagtgcacagtggtcatcccagggtctgaggttctgcttatcctggcccctcttgaagcagttgccttgtcacacaggtctgggtaggagcccagaccccctcatggcatcattccaacaggatttaagtgtgtttgttttgaaatgttaatatgttaaataccaaactaatatttcaaaatatgtatatatgatttctataccctgatttttcagatagcttgcttataatttaatataaaaataactaaactgattcataagattttagtattaaaagattgttccctttttaaagaaaactactttgtagattaaaaataaatcagattttcaaatttaaaattatcaacacactagaaaatagaattgtattaatatataagaaattgggaaataaaaatgaaggaattttttatcacattcattttataaatttgccacctgtgaaaatggtttttgcacattatttgtatttttctttgtatatgaaataattttttgtactttgtaaactatggatcccattgtactttagctctttgagactgtgcccactactgcttttataactggatccttttaactttcatgaaggcataacaaagccttgagtccactaaccaccggaattaaatttatttcttaaagaaaaa

SEQ ID NO: 3158277 - DNA, 272 bp, Cricetulus griseus
  modified_base (253)..(253): a, c, t, g, unknown or other
  modified_base (257)..(257): a, c, t, g, unknown or other
  modified_base (261)..(261): a, c, t, g, unknown or other
  modified_base (265)..(265): a, c, t, g, unknown or other
tttgacagcccggaggagctggaatttctgaagaggtacaaggggaggcatgaccactggatcggcctccacagaaagtcctcagagcaccattggatgtggacagacggcactgaatataacaacttgattccccccgaggagaaggagagtgtgcctacctgagtggcagtgacatcagcagtggcaggaactatactcacaggaggtggatttgtagcaagagtgtactaaattcacttaataaataaanaaanaaanaaanaaataaa

SEQ ID NO: 3158278 - DNA, 823 bp, Cricetulus griseus
aaagaacacataggagagagaaaccctatgaatgtagtctatgtggaaaaccttttgctaattatagtcaacttaaaacgcatgaaaggactcacactggagagaaaccttatgaatgtaatcagtgtggtaaagccctttgctcggcaaagtactcttcaaatacataaaggacacacactggagagaaaccttatgaatgcaatcagtgtgggaaagccttcgactacagcaaagtactcttcaaaatgcataaaagaacacacactggagagaaaccgtatgaatgtaatcaatgtggtaaagcctttgcacaacacaataaacttcagagttacataaaagaacacacacaggagagaaaccctacaaatgtaatgaatgtggtgaaggctttgcacgccacagtcaccttcaaaggcatgaaagactccatactggagagaaaccctatgaatgtcttcaacatgatgacgcctatgcacatttctatactcttcagcatcatgaaaaaattcatactggagaaaaaccttatgaatgcactcagtgtggtaaaacctttgcacataacagacatcttcggatgcataaaagaacacatactgaagagaaaccctacaaatgcaatcaatgtgggaaagcctttgcacaaaaagagtcatctcagacatgtcataaaagaacacatactggagaaaaaccctacgaatgcaagcaatgtggtaaaaccttttcaaattgcagtgctcttaaaatacatgaaagaattcatacaagagagaaaccctatgaatgtaatcaatgtgggaaagtgttttca

SEQ ID NO: 3158279 - DNA, 606 bp, Cricetulus griseus
gagaacattctggcaataccatgcagagtgtgatcgtcattactcaacaacctggttgcttacaaagattccaacatgaagctgctttatgagcaaggactcgttggtcacgtctgtcacatgttcatagaaaccgccacgctgtgcttggatggtgacataaaaacagcacagagccggcagccgcgctgctggtgtcgttgcttgatatcctgctgggcatgctgacacacacctctaatgtcgtgcggcaggctttgcaggcccagaagtcaggctcaagaggggacacgcaggcagcagaggacctgctgctgctcagcaaaccgcttacagacctcatcagcctgcttatcccgctgcttcccaatgaggatcctgagatctctgaggtttcgtccaagtgcctgtccatcctggtgcaaaggaccagaagcttctgctgaggatcctcaggaggatggtcacttccaacgggaaacacctggaagcctcaagagcacaggcagcctgctgcaggtcctggagcgtctggctccagctcacagctcgcctatcgacactgtcgtggcttccttggccctagaactcctccaggctgttggg

SEQ ID NO: 3158280 - DNA, 626 bp, Cricetulus griseus
agtcgcaggacgctgcgagaccggccatgggattggtatcatttgaggacatagctgtggtcttcacctgggaggagtggcaggagctggatgctgcccagaggaccctctacagggatgtgatgctggagaattacagcaacctggtgttcctggagctctgcacagtcaaacctaagttgatcttcaatttggaacatggatgcgggccatggagcctagcagaagcttcagtgtggagtcccccaaatgttcataaagtgagtgacctgattgacaccagcaaggaaaatcctgagatacatttggggcaacttgaaataactaaccaaaagacaccagatgaagacacgatcgacataaaaaaattcatttgggtgaaaagccttataaatgtgaagaaataaaggtttttcccgcaagtcaaagctcgatatacatcagaaaacccacactggtgagaagccttatgaatgtacagattgcgggaaaacctttttccataagtcacaactcactgcacataggatagttcattcatctgagaatttttatgaatgtaaagaatgtaataaatctttccactggaagtgtcaactcacagcacatcagaaaagacatacagg

SEQ ID NO: 3158281 - DNA, 206 bp, Cricetulus griseus
ctgctgggagacttcttccaaacatccatgcgctcagcctactgccctccagataccaaacgaaaaagagaacctttaacttttctttgttgcagagtagcttgcctgagggcacaggtgaattagattttttaaccacgaaccaaaagatgatgaagccgcatggaatagttcgagccaaaatcacagaagaattgttgcagaag

SEQ ID NO: 3158282 - DNA, 627 bp, Cricetulus griseus
  modified_base (553)..(553): a, c, t, g, unknown or other
gcgagcgagctggagactgttggacggcaggagcggagcaatgcctaaatcaaaggaacttgtttcttcaagctcttcaggcagtgattctgacagtgaggttgaaaaaaagttaaagaggaaaaagcaagttgttccagaaaaacctgtgaagaagcaaaagcctggtgagacttctagagcattggcatcttctaagcagagtagcagcagcagagatgataacatgtttcagattgggaagatgagatatgtcagtgttcgggactttaaaggaaaattctaattgatattagagaatattggatggactcagaaggtgaaatgaaaccaggaagaaaaggcatttctttaaacatggagcaatggagccagctgaaggaacagatctctgacatagatgatgcagtaagaaagctgtaaaatctgagccatatcaaatctgtactgttgtagttgtctttttacattggcttttgttttctaaatgttgttttccaagctgttgtatatttggattgcagaacaatttgtaaggtgaatactttttttntttttaatgtgcattattaaatgttctgagtgaagactaatgtcaactttattaagaggattgctttgtgtccc

SEQ ID NO: 3158283 - DNA, 1795 bp, Cricetulus griseus
cagtgtgtggagatttcaggtctgcaaaagatgattttacatcagttattgggaaatgtcaagttccaaaagtacccaaagccccagtcggagaagggtggcatggagttatgactgcacactctggtgacttgagctatgccattgctgggttggtatttttagaatacaaagcaagtgcacagtggtctgcagagctcttggtcatcaactaccgaggagaacttagaagttaccttgtcagtgttggaacaaatcagagctaccaagagagtcacagtttcagcttcagtgatcattatcctcatgggataaatactgctgtttaccaccctggccatagaggttcctgtggaaagctttgctgaagtgttgctgagaactgggaagctggcagaggctaaaacagaagtgtttccaaccacggaagttcttttgcaactggcaagtgatgctttggcgaatgacatgacactggctctggcttatctccttgccttaccacaggtgttagatgctaacaagtgttttgagaagcaggctcgctcagcattgtctctccagctggcagcatactactacagcctccagatctatgcccgattggctccatgtttcagggacaggtgccatcctctttacagggttgatcccaaagagttaatcaagatggttaccaggcatgtggctcaacatggacatgacgcctggcctgaggacctggtgtcattgatcaaacagcttcactactacaataatttctgcattaagtggcagtagtgctgaactctgtgggacacgtgaccccctccaggtcctggaaggtgttgttggggcagtccataccagtgtggacaaaggggaggagctggtgtccgctgaggacctactgcagtggctacggcccttctgtgctgatgatacctatcctgtgaggcctcgaatccaggcactccaaatctttgggcagtccttccatctgagtgaggaggacagcaagctcctggtgttcttccgaacacaagccattctcagagccgcatggcctcggagacaggtagacatagctgacattgagaatgaagaaaatcgctactctctgttcacggagctcctagaatctagtcaccatgaggatgaatttcagcacttgattttactcttgcaagcctggccacctatgaaaagtgaatgtgtcacagccagcaatccatgggtgagactggcgatggtgatgctgaccagatgtacagcagagaacaagcaggaacttggggatgaggtgttgaagatctgccgctctctctacaacaccaagcagatgctacccatggagggtgtgaaggagctgtgcctactgatgctgcagcagtccctcctgctcccatccctgaagcttctgttggagagtggcaatgagactctacaggccatggccctggagcaaatctcagctgtcactaaggtggatgagtccaattgtgaccaggagctgcttgaactgctcgtggatgccaagctgttcgtgaaatgtatctccacacccttctatccacgtattgttggtcatcttgtggccaccaaacagcaaggaggctgggatgcagaggaactggctagacacctacaggaagctggtcatgaagctgaagctgggtccctccttctgactgtgcaggggactcaccaggcctttaggactttcagcactgcccttagtgcaatgagacagtggatgtgagcacaactacccatgaccctgctcctggcagtagagtgcatcaggccccaaagc

SEQ ID NO: 3158284 - DNA, 169 bp, Cricetulus griseus
  modified_base (163)..(163): a, c, t, g, unknown or other
agctgggtggtggtggcccacacctttaatcccagcactcgggaggcagaggcaggcggatctctgtgagttcaagaccagcctggtctacaagagctagttccaggacagcctccaaaatacacagagaaaccctgtctcaaaaaaaccaaaaaaaaaaaanaaaaaa

SEQ ID NO: 3158285 - DNA, 347 bp, Cricetulus griseus
  modified_base (337)..(337): a, c, t, g, unknown or other
ggcactagaagaggtagtctgatccactggcaaagcaaccatgaacaatcactcccaggatctccagtgagcccatggcacaatgggaagtgaggaaccacacctaccaaccaaacagagagccggaccagcactgcttcccctgccagccagaaacgcctggacaagaagcgttcagcacatataaccactgaagaaccagaagaaaagaggctcagagctctgcctctagtgccaagtccgctccaagggctatcaaaatcaggaatcacaagagggagaaaactgggtgcctgatgaagatgaagatggagatctggttgcttctaaaaaaaanaaaaaaaaaa

SEQ ID NO: 3158286 - DNA, 645 bp, Cricetulus griseus
ctgagagctgatcatgccactgaaccaacttcatagctggctgaatgctatgctcgttggactcctgcttctcctcctccatgtgcagggtcaggattcatcagaggccagccccatcaggaacacacacacaggccaggtccgaggcagcctcatccaactgagtgacaccaaagttggtgtccacagcttcctgggaattccctttgccaagccacctgtcggaccactgcgctttgcacctcctgaagcccctgaaccatggagtggtgtgagagatgggacctcgtatccagccatttgtctgcaaaatgttgatatgatgaattcagagagcctaaagaatctaaaaatgaccccgcctcccattcctatgtctgaggactgcctgcatctcaacatctacacaccagctcatgcccatgagggctctaacctgcctgtgatggtgtggattcatggtggtggactggttataggaatggcttccatgtatgatggatccatgctggcagccacggaagatgtggtggtagtcactatccagtaccgcctgggtatcctgggcttcttcagcactggagaccagcatgccagaggcaactggggcttcttagaccaagtggctgccctacgctgggtcca

SEQ ID NO: 3158287 - DNA, 1388 bp, Cricetulus griseus
tcctacctgctggctcctgtgggaggcgtggctggcagatgtgtacctgggccgctttctcaccatctcgctcagcctggtactctacctggctacctcgggcttgttgctcgccaccatcaccgacgatggccgcaaatccttctgcggagagatacccttgtttccgctggaaccggcctgcccatccgcagactgcccaagctcctggtccagcccctactgcgcaactaccctctacttggtgctgctgctcctggcactggctgccagctccgtgaggagcaacctcacttcattcggagctgaccaggtgatggaccttggacgggatgccacccgccgcttcttcaactggttctattggagtatcaacttgggtgccttcccgggattgaaggtgcccacctgctgcctgaccagaggtctctccagtggggtccttctccacaggaagacatggccaacttccaggtgctggtgaagctcctgcctgtgatggtgacccttgtgccttactggatggtatatttccagatgcagtccacctacgtcctgcaaggtctccacctccaaatccccaacatcttccagaccaaccctaccgatagctcttcgtctctgagctcagaaaagagttactacaggatcccagaagcctggctcctgctggccaatgttgtggtgatactggttctggtccctgtcaaggaccacttgattgatcctctactgcttcggtgcaagctgctgctgccctcagctctgcagatgatggctctgggcatgttctttgggttcacctccatcattgcagcaggagtcttggagaaagagcgcttgaagtacattgctgccaaccacacagtgcctcaactgattgggcaggacttgtactatgcggcaccactgtctatctggtggcaaatcccccagtacctgctcatcgggatcagtgagatttttgccagcattacaggtctggagttcgcctactcagaagctccacgctccatgcaaggtgcaatcatgggtatcttcttctgcctttctggggtaggctcactgctgggctctggcctggtggccctactgtccttgcctgggggctggatgtactgccccaaggacttcgggaacatcaacaactgccagatggacctttacttcttcctgctagccggcattcaggctgtcacagttgtcctgtttctctggattgctggtcgctatgagaggactcgtcaggacccagcctcccagagctcatccagcagggtcaggggctgacttagtctccaagcacacggatagacagtgtcacatcagaactggctgtacccattctcatttattctgtacccaacattagaatgaagtggttccca

SEQ ID NO: 3158288 - DNA, 162 bp, Cricetulus griseus
ctaagaagagactgttcaagcaagttcgacttgcagaaagacacaacccagctcggaagacttcaggccttgaggatgggttacctgcttcatcctgtgctgtatttggagacgttcagatgcaaccaagaacaacctgaaaactgtggatgatggaaataa

SEQ ID NO: 3158289 - DNA, 159 bp, Cricetulus griseus
gtgcgcgcgcgcgcgcgcgcacggcagcctggtagtggtggcacacacctttaaccctgcacttgggaggcaggggcaggtggatctctgagtttatggccagcctggtctacagagtgagttctacgacagctagggctatacaaagaaaccctgtct

SEQ ID NO: 3158290 - DNA, 288 bp, Cricetulus griseus
cccatagacttttactacttcatggctaaaattttcatccacaaaaggcagagcttgccgagtagtagcgaccactttgtctttaaaatcccagggtttagtttattgctagatgtattttgtgctcttcatggaccaagagaaaaatgtgttgaaatcctgaggagtggccatttgctagctatttcaccaggtggagtccgagaagccttacttagtgatgaaacctacaacattatatggggtaatcgtaaaggctttgctcaggttgcaattgatgcaaaagtg

SEQ ID NO: 3158291 - DNA, 437 bp, Cricetulus griseus
gcctcagcctcagcctccgaggcttctagtgccagtgagaccagcacaacacagaccacctccacgcctcttccctcccctcttggggccaaccaggtgatggtaacagcatctggcttgcaaacagcagctgctgctgctctccaaggagctgcacagttgccagcaaatgccagtcttgctgccatggctgctgctgcaggactcaacccaggcctgatggcaccctcacagtttgctgctggaggtgccttactcagtctcaatccgggaactctgggcggtgctctcagcccagccctaatgagcaacagtacactggctactatacaagctcttgcttctagtggttctcttccaataacgtcactggatgcaactgggaacctggtatttgccaatgcaggaggagctcccaacatcgtgactgcccctct

SEQ ID NO: 3158292 - DNA, 313 bp, Cricetulus griseus
atctacatgagacctgggatggagagaagtattgtgatccaaagttcaaggccagccttgactacataagagtctgtcttgaaacataatggcacagtgtaacagagaaggatagtggggatgttacaggtttggatttacaacctgacaccactttctgtccagactgatattgttggttttttattttttttatttttttccttttttgctactggttcagtttgtatctaacaagaaatgtttccctctttataggatctgtcttggtgacagaaggaccatggtcttctaactcaatgatgttctagaa

SEQ ID NO: 3158293 - DNA, 407 bp, Cricetulus griseus
acatcgtagctcttcgaagggcaaagagaagaaatctcgaaaggcttacccttgcttgtggaggaatagctgtaaactcatttgaagaccttaatgaagattgcttgggacatgctggccttgtatttgaatattcattaggtgaggaaaaattcacttttattgaggactgtgtgaatcctctctctgtcaccttgttgatcaaaggaccaaacaagcatactctaatacagatcaaggacgctttaagagatggacttcgtgcggtcaaaaatgccattgaagatggctgtgtggttccaggggctggagcagttgaagtcgcaatagcagaggctcttgttaactataagcaccgagtgcagggaagagctcgccttggaactccaagcctttgctgatgcctt

SEQ ID NO: 3158294 - DNA, 648 bp, Cricetulus griseus
aggatacagcctgttccttgtggcagcccatgagttcggtcatgcattggggctggagcactcacaggaccctggagctctgatggctcctatctacacttacactaagaacttccgcttatctcatgatgacatcaaggggatccaggagctctacgggccctccccgctgatactgacactggtactggccccacacctacgctgggacctgtcactcccgagatctgcaaacaggacattgtctttgatggcattgcccagatccgtggtgagatcttcttcttcaaggaccggtttatttggcggacagtgacaccacgtgacaagcccacagggccgttgctggtggccactttctggcctgagctcccagaaaagatcgatgctgtgtatgaggccccgaaggatgtgaaggggcgtggctaccctgccttcagctctgtagttaatcagccttctccctcacctggtgattgaagagttaagagagtgtcttctttctgtacccaaagaaaggtgcttattgtaccactcccaggtgcttctcctcttcctccccaccttaagggatgcttggatcttctcaatgcagccctcctgtaggctgccctggtgcttcacacttcaggctcttcccatccatga

SEQ ID NO: 3158295 - DNA, 426 bp, Cricetulus griseus
ctgtctgtcctcggagtcatggagagagccagtctgatccagaaggccaagttggcggagcaggccgagcgctatgaggacatggcagccttcatgaagggggccgtggaaaagggcgaggaactctcctgcgaggagcgggaatctgctctccgtggcctataagaatgtggtgggcggccagagagcggcctggagggtcctgtccagcatcgagcagaagagcaacgaggaggggtcggaagagaagggccccgaggtcaaagagtaccgggagaaggtagagacggagctccggggcgtgtgcgacactgtgctgggcctgctggactcccacctcatcaaggaggctggagaggccgagagccgtgtcttctacctgaagatgaagggcgactactaccgctatctggccgaggtggccac

SEQ ID NO: 3158296 - DNA, 2415 bp, Cricetulus griseus
aaaccaacaatggatacagtcaattcagggaaggaagaaaaagaggtgtctgaagagagtgtgagctccggtgactctgaagaaagcacaaattctgatcatgagtcaggacaactgaatagcctttcagtagagccatgcttattaaccaagactcacaggcagttatgtcggtctccctgcttagagcctcacctgcttaaacacagtgacattttgcaagactttaaaccagatgtgtcccagactccatccaaggaagtgaagaaaccccctgatgtggttcgagaataccaaacaaaactggagtttgcactgaagttaggttattctgaagagcaggtccagcttgtgctaaacaaacttggtactgatgcttaatcaatgatatattgggaacaccatcacggcgtgtccagggcgagacgagtggtgtgctatgacgaccggttcatcgtgaagctggcttttgtaatctgatggtataattgtgtccaatgataactacagagatttggcaaatgagaaaccagaatggaagaagttcatagatgaacggttgttaatgtattcctttgtcaatgacaagttcatgccccctgatgaccctcttggaagacatggcccaagtctggacaattttctgaggaagaaacccattgttcctgagcacaaaaagcaaccttgtccatatggcccacctggcgaatcccatactgtggaatgccacaagatcctcctaggtatcaggacaaccgagagaagatttatatcaatttgtgcaacatcttcccgcctgacctcgtgaggctcgtcatgaaaaggaaccctcacatgacagatgcccagcagcttgccgcagccatcttagtagagaaatctcagctgggttattgaaaagatgatgcatctttgtggtgttgagtagttttttgttcagctcagatgctgagggaggtttgctacaatagcacatgtaatctccttctgggcaaggaggttatatagtattttaaatttaaactttttttttttttttttaactttttttttttaaagctatatacacttggctggaagtttctccagtttgatttaatagatgtatctgtgatctttgatattcctctttggtgcatcaggggtttatatgcagcactttttatccttgtttcctgtcttactaacttggtgtttgtctgtcaactgcaagcaattgcagtaccttcagaatgtggaggtactggactagacctagcaaactatttcctcaagccaagcttaactagaatcctttacagctttttaagttatttttatttggggaaagtgggcttctttgtgctataatcattatttatagaaacaaagatatactacagcactgactttatatttaaaaacaaaatgtaagttaccagttatattaaaatgagtaatagtatatattaaaatgatttccagtatggcactttttattagtttggggggggggtgtttcctgttaagaaaactagttaattttaaatggtcagtttaaagaaagcagatgcaatcaatggaaaaaagtttccattttctttttatgaataaggcaaaagccgtaactatcacaggttaaagctttgttttccagctgaaatgtacttcttgatagtagaaaggagatcgaggttctagctttccattcatgtattattttaatgtctgttctttttgtgggaggcacaaactggatgaataaccctttcacagtatttgcctatttttaatgaatcgaagtattctcaatgcaacttttatatttaataccttctagctttcctgctatgtatcaaagctggcctgaggtggtctgatgtgttgaggatatgcaacatttattgatactgcactatagaaatggcaatggaagacttgtaaatggtaacttaaatttttgtaagatattgtatattttccattttcctgaaggtagttttgggggcctgttatattattaaggccagactcttgccacaaatagtgtagttttagatacagactaaagtctgttctagtattagtaagggatatttctggttgcaaagtcacaggttttgcttgctgtagtgacatttctgagtttttaacaataagaactattttgatttgtagatctagttaaaaacacaaatgtgtaactataattagacttttgggcaacattttatcccttatttaaatacaaaattttaaagtaaaattgaagtctagaataggatagaaaataaaagtaacaattaaggtaaataaaggtgtctgtcttaatttaatacattaaaatatattaaataaatttattggcatttttttctcctaaaacttacttagtgtgaacctaacttaaaataaaggtaaaatgctgcctgaaaa

SEQ ID NO: 3158297 - DNA, 437 bp, Cricetulus griseus
tgaaattgaggtaccaggagcccaatctacacagaccttataaggtgtttttggccattcttattcataacaatggccatcagcctgtgcttggtcttgattcccctggtcaagtctccaaagatgcattatatttatgtgctcctcttccttctcagtggactgctgttttatgtgccactgatacggtataaagtgaagttggtttggtttgagaagttgacttgctatctgcaattactgtttaatatttgcatccctgatgcatctgatgaaaaaatcacaagaagtaggaaattgaaaaataataactctttataaccataccatgttccagataaaggttaaatataggctagaataatgatggcaattcttgaaactgagttggtgtatagaaaatacccaggaagttcctgggttttaaaatgacaaag

SEQ ID NO: 3158298 - DNA, 1432 bp, Cricetulus griseus
tcttgctttccagaggtccaagtgcatttatccccaaataaggcaccttcttggcatccccacccccaattccaaggccctagggtcccttaccttgttgctcttgctgttaggaatggtagtagtgctgaaccggccggaaaggtggggagtgtcattaaagtcagaggaagggcagatgtgggtgaggtcaaagacagttctctggcctgccctttctgtactttcaaaatgcttgagggagttggcaggaggccagaattctcgttttgtttatcagcctggattctggcttgaagaaaccatatttaggcatgaaattactgaagggtcggaaatgttactggagggcccctacacttgccagttccataggggcctaagttatttttctgatatcattactcagctttagttgtcagccctgctggaaagtggaaatagacgagggtgttttgtttttaagctatgcactattgggtattttttgtattcatttattcattagtatggttctatgagaactgcctatgaaagtaacaaagatgtccccctagatgcctggatggttcctaaacctacagcttccccaatttttttttttcgtagacttctacaaactcaagtctcaagattgcaaaaatctggtaccctctggaagcaagaggacaacaaatttaggctttctcctaaatcacttgtataatgagtgccttcacagcttagccccaaagtgctacttaggtttcccaaggtttttttctatttaaaccatatttggctcaggccccttggtgccgtcactactgtcctccacgccttcagcagccccctcacagctaaggtacatatctacctttctgcaaccgcaaccccaccccaccccacccccgcacagagatcctgtgctgccagtgtctaaagggattgcctatatttaactgcctcagtgacctaacctctttcttctcacgtgccaggtgttaaaggtgaaggaggaaacacacgtactcaagcctcagctgtttaaatgtttttactggggctcacttttctgggttgttatttattactagactggcaaagcctaactccttaggtttttatgggaagtatgcatatttttataaaaaaaaagttgtgtctaacccacatttggctgtgtttgttgcctcaaaaaaaaaaaaattgcagctgttagaacttttcctcatttgtctgctaagttgaaggccttgttgaggacagagcacaggaacagccttgactagtctgtaattattgtacaaatattttaatagcataaaataagtatattccttttattttgaaacaaaatgatcagacactgcctttcatgtgtttgttgcctgtggcactctttttaaaaaagactgttacatattaaatagtgtaccatatatataaatat

SEQ ID NO: 3158299 - DNA, 675 bp, Cricetulus griseus
ccagaagatctgctgaccagcatctggcctcctaaccttctctgtcagataccaccaagctgatccaggcaaaccctcttcttggcctgagggcaggacagagctcagggcttcaccctctcacaacctaacagtgttgctggctgagtctcacctggtttctccatccctgttgatgctccctcagatattctcaatattctcatccctggcagctgcatttagccatcatccatctcactctccctgccaagggcagtgcatgctgagaaattcttgggggattgactatgctcccaaaaagaacttcatgggtttctagagatagattcaccaaagaagattctaacctatatcatccctgttcctccccaccaaacaggagagtatttattgagtttccttctctgggcctaggttaggaacaaccagacccagttcctgatatcatcttatttccaaaagtgagagtggggagccatagtcaaaccagttggcaatatcacatgctgagttcttagggtggctctgtgaacacatgggtctaacataaatttacaggaagacagagatatttctggagaccatgctcatccctcctgaagacaaagggaaaataaatgttaggaaagggcaagttgtgtaaggacccttcacagtactactaggcagtta

SEQ ID NO: 3158300 - DNA, 382 bp, Cricetulus griseus
atgagattgtacattgaaaatttttaaagttctgttcttaaaatatcattgaggaatctccacttttagctgttagaatgttgttaaatgctatggaaatacatttagagcctgcatttaagaacagaacagcttgtaggagacagatgccacttaaaacatattgagtatgaaattcaattatatagagaacgctcataacttcactgttgcccagtgttcaatagaagatcatttgctatctgctagagttctgtcataccatattttccctactttacgctattgtgatagagaaaaatactagggaacagtagttggagctagaaaaccaactgtatattatttctctatttgctgataccaactatttcaataagtg

SEQ ID NO: 3158301 - DNA, 322 bp, Cricetulus griseus
caccctgcgaaggagtccttggtatattcgagaaacttgttgcttagagcagtcgaccatgatgaccccagcccctaagctgggcgtccttcggtagcagctactgctgtgtgtgaccttgaaggaggccctctgcatccatgtcgggtacagcttgaagctggccagtttccttgccaaagccttcgaccttggaaaaagcatcgcagttccagaccaaactcttggaaggagaagggagcgtggtccaaacctgtaacaaagagggctactgtctggctgccgggctccctttttgccacagaggagggagggctggagg

SEQ ID NO: 3158302 - DNA, 470 bp, Cricetulus griseus
  modified_base (16)..(16): a, c, t, g, unknown or other
  modified_base (24)..(24): a, c, t, g, unknown or other
  modified_base (33)..(33): a, c, t, g, unknown or other
aaaaaaataaaaaaanaaaaaaanaaaaaaaanaaaaaaaagttaaaagctacttcgagtttcctccccatttttgcttgaagacgactccccctcccttccaacgagcttccggacttggttgcacccccagcaagaaaagaagcagagctaggctttctagagaccgaaggaatcttgcccccctcttgcttcaccaccttggtgatttcttgtttgattttattttgcctcttggtcaagaaagagggggaaaatccagcgcgcccccctctccttcccacccttctttgtattccttgtctctgcagccagagatgtgcagggagcagcaggccagcctcggaaatgaacatggggacctcgtggaagccacagccgcctggttggggactcagaaggaccccggagcgcagagggtgttggggtccccgggccatccgtctggggtctgtgcaaaataaagaatt

SEQ ID NO: 3158303 - DNA, 461 bp, Cricetulus griseus
gagatgggtgccgcatttggggcaggctgggctctgcagaggaaggtcctgtatggtgggaagagagcaaaggaactggacaaaagtcgaggacagtgcccgggactggaatggcagtacggagggtccaggcaaagtagagccagaggacaggggtgctgtggcatcagggatccctgtgaggagccagggggcagagggtctgctggccaggatccaccacgatcgaggagggagccgcacagcgttgccagtcccttgccagactttcccggcctgccaccggaatggagatttcacaggagggtaccgcctgggccgctctgcctccacctctggagtccggctgccgctccataccctcggccctgcagccagcccagggttcgccctgagccagacccaccctgtgctgcctctcgcccctgccatttatttaaactaaaaaaaaaaaaaaaaaa

SEQ ID NO: 3158304 - DNA, 560 bp, Cricetulus griseus
ctgctgctggaccgaaatggacgtcaacactgctttggaagaggtgctgaagaccgccctggtccacgatggcctggcacgaggaattcatgaagctgccaaagccttaggcaagcgccaagcccatctttgcgtgcgtgcatccaactgtgataaacctatgtacatcaagttggtggaatccctttgtgctgaacacaaaatcaacctaattaaggttgatgacaacaagaaactaggggaatgggtaggcctctgcaaaactgaccgaaaggggaaaccccgaaaagtgataggctgcagttgtgtggtggttaagaactatggcgaagagtctcaggctaaagacgtcattgaagagtacttcaaatgcaagaaatgaacagcaacgacaaaagtggcttattttcctttaagttttttttttggtttttcgaaacagggtttctctatgtagctttggagcctatcctggcactccctatggagaccaggctggcctcgaacccacagagatccacctgcctctgcctcccaaggtgctgggattgaaggcgtgc

SEQ ID NO: 3158305 - DNA, 503 bp, Cricetulus griseus
aataaacttggtacctctggtggggacacagatccacctccgacacatccctcagcatctgctgcataaggtgctgcagtctcccaggttgttcacctttagtgagttccatctcctgaaaaccttactcatgtgggtttacctgcagatgaacagcaaggtccaggtgattccaatccacgagaccatgctggcgtattttagcagcttttccaagaagtgctgctttctggaacaagatgcagggcagacctggacaccactcttcctctgcctacgtctgcatggcatcaccagtggcagggatctggaagagttaaagcacattaatttcttccctgagtcctggctggtccgggttacagccaaccattatcacgcactggagagtggggcaacatggtccacctgaaagatctttctacacaagccatgaggtttgggctgctctttaggcaggaatataccttatcttctaaaagaaaaaaaaaaaaaaaaaaaaa

SEQ ID NO: 3158306 - DNA, 1485 bp, Cricetulus griseus
agaggtgccagagttccaaacagaacaggaagcatattaactatggatggttcagcgaataagaaagacttgtcaatctgtggttggacataaaatgtgcccctgtgacaaatgtgagaaagtgtttccttctatctctaaactacaaagacactatttaattcatactggacagaggccttttggctgtaatgtgtgtgggaaatctttcagacagtcagctcacttaaaaagacataaactaactcatattgaaaagattccctatagttctttttggcaagtggactttggaaatgtgaacaaacttttcattcgtccaagtgatgatgttagctataatgcttcccaacagtgcctttaccagtgcagtgtttgttgtaaatttccgatctccatccaaactagaaagacactatttaattcacgcagggcagaaaccttttgagtgttcagtctgtggcaaaacattcagacaagcacctcactggaagagacatcagctcactcactttaaagagcgaccacaagagaaagttgttctagattcagttgtgtaacacaaaactactaatgaaatgacaatagctatgtagtttgagtttcattcctcttgtaaagacactaatactatagtattattttgatctttgttgttctttcagttagtaaggatattacccctgtataggaataagacgctgatagagttcaggacatcattttttccgaagagttactgccatgatttgacaaaaatacttcatttaaccctaatccgtgagagaagtatcttagtcacagatattccttcacattggtggcagtttgttaaatcattgactaacatctaaagcaatgcaaagattaactatactgcttctaaggtgaaaggaaataggctggtgtttagcacacttaaatatagtgaaaagcctgctcttggaagtgtgggcagtggaataagtgtaagtttcgatcatggtgcaagagctgtactttgtgaggggagggaaagggaaaagctttaagccaatcgaaccttaagaaacttgggtttaaattgaggaggtgaaatgtgatggtctgagtaaataaatacccagatgaaatacagatgtgcctattttaagtagagatgttcatctaacaaggagagcacatgcttcaaggaatagctattttttttggctcatgcctttttaaagctgtttcatattgaaagttggaatattgtaaaaattttgtcaagagatgtactgtagtgctatttgaagtacctgtaacaaaatacttaccttactatcattgcaagcttctaatgggaactgtagaagtgaaaataaagtgtgaatttatgttcagataaacatgttaaatgatttgttgcatgctagaactgtacttattgttgactcaattattttgattttctggaaaaaataaactttataaatatcttttaagagaaaagaaaaaaaaaaa

SEQ ID NO: 3158307 - DNA, 369 bp, Cricetulus griseus
aagaggaagagagagaagcagaaatccacagactgaggaaccccacctgtacggtggtgctgttccctggaggtgaccagcccctcagaggagagaccccacgcccagctcatatatttattgccgtcaccctcccaaatccctccttgctggtacctaccctctatttattagccaactcatccctgctgaatgactcgctccctccaagataaggggcatagaaggacaggaccctcaggaattcagtgccttaaacaaaacgaaaaaaaaaaaaaaaaaaaaaaaaaaaaaaaaaaaaaaaaaaaaaaaaaaaaaaaaaaaaaaaaaaaaaaaaaaaaaaaaaaaaaaaaaaaaaaaaaaaaaaaa

SEQ ID NO: 3158308 - DNA, 166 bp, Cricetulus griseus
  modified_base (9)..(9): a, c, t, g, unknown or other
  modified_base (18)..(18): a, c, t, g, unknown or other
ttttttttnttttttttnttttttttttggtttgttttttgagacaaggtcttactttggaactctgactgtcctgaaactaactctgtagaccaggctagcctcaaactcagagatccaccggcctctgcctcccaagtgctgggactaaaggtgtgtgccacca

SEQ ID NO: 3158309 - DNA, 408 bp, Cricetulus griseus
tccctccatccaaggagacttgtgcaggttggatggcaggcatcccaggacatcctggccacaatgggacaccaggtcgtgatggcagagatggcgctgctggcgagaagggtgagaaaggagatgcaggtcttcttggtcccaagggtgagacaggagatgttggagtgactggagctgaagggccccgaggctttcccggaatccccggcagaaaaggggagcctggagaaggtgcttatgtgtatcgctcagcattcagtgtggggctggagaccagagtcactgtccccagtgttcccatccgctttactaagatcttctacaaccaacagaatcactatgattccagcactggaaaattctactgcaacatcccaggggtctactacttctcctaccatatca

SEQ ID NO: 3158310 - DNA, 262 bp, Cricetulus griseus
gggccgcgcctcggggctactgtccagcttccacaggtcgacgctccgagtcgccagcactccctgtcggaaccggaccgctacgcttggagatgcgctccagcctaaggagccttgccctgtgtgtcaaagacgtgaccccgaacctgcagagctgccagcggcaactcaacagcccagggactttccagtgtaaggcggacgtctccttgtcgctgtgggaggcggaatgcccttcggcctgagccctgaaccccaaccc

SEQ ID NO: 3158311 - DNA, 545 bp, Cricetulus griseus
ctcaaacagcagattctagacaccaagtcttgcctcaagaacaaaaccaaagagaatgtggacgtgcctctggtcatttgcggtaacaaaggggaccgggacttctaccgagaagtggagcagcgcgagattgaacagctggtaggcgacgaccctcagcgttgtgcctatttcgagatctcagccaagaagaacagcagcctggaccagatgttccgtgcgctctttgctatggccaagctgccgagcgagatgagccccgacttgcaccgcaaagtgtctgtgcagtactgtgacgtgctgcacaaaaaggctctgaggaacaagaagcttctgcgtgcgggcagcggcggcggcggcgaccccggagacgcctttggaatcttggcgccctttgcgcgcagacccagcgtgcacagcgacctcatgtacattcgtgaaaagaccagtgtcggcagtcaggccaaagacaaggagcgctgtgtcatcagttaggagcccccagcgtcggccacacaacctgaggacctttttgtttaaaagtc

SEQ ID NO: 3158312 - DNA, 1538 bp, Cricetulus griseus
atgttgcacctgtcattttagctgctcatcgtacaactatgaaattcttaccatgcttttaaagcaggatgtgtctttgcccaagccccatgcagttggctgtgaatgcacgctgtgttctgcaaaaaacaaaaaggatagcctcagacattccaggtttcgtcttgatatctatagatgtctggccagtccagctctaataatgttaacagaggaggatccaatcctgagagcatttgaacttagtgctgacttaaaggaactcagcctcgttgaagtggaattcaggaatgattatgaagagctagcccgtcagtgcaaaatgtttgctaaagatttgcttgcacaagcccggaattcacgtgaactggaagttatcctaaaccatacatctagtgatgagcctcttgacaaacggggactattggaagaaagaatgaatttaagtcgtctaaaacttgctatcaaatataaccagaaggagtttgtctcccagtcaaattgccagcagttcctgaacaccgtttggtttggacaaatgtcaggttaccgccgtaaacccacctgtaagaagataatgactgttttgacagttggcatcttctggccagttttgtccctatgttatttgatagctcccaaatctcaatttggcagaatcattcacacaccttttatgaaatttattattcatggagcatcatatttcacattcttgctgctcctaaatctctactcacttgtctacaatgaagacaagaaaaatacaatggggccagcccttgagagaatagactaccttctcatactgtggattattgggatgatttggtcagacattaagagactctggtatgaagggttagaagactttttagaagaatcacgtaaccagctcagctttgtcatgaattccctctacctggcaacctttgccctcaaagtggtggctcacaacaagtttcatgactttgctgaccggaaggactgggatgcattccacccacacttgaagctgctggtagccatgcttcacaaaagctttcagttgatagcaaatcatgaggataaagaatggaagtttgctcgagcaaagctgtggcttagctactttgatgacaaatgtacactgcccccgcctttcaacattattccttcaccaaagactatctgctatatgatcagtagtctcagtaagtgggtttgctctcatacatcaaaaggcaaggtcaaaacggcaaaacagtttgaaggagtggagaaacttgaaacagaagagagacgagaactaccagaaagtgatgtgctgcctagtgcatcgttacttgacatctatgagacagaagatgcagagtacagaccaggcaaccgtggagaatctcaatgaactgcgccaagatctgtcaaaatttcgaaatgaaataagggatttgcttggctttcggacttctaaatatgctatgttttatccaagaaattaatcattttctaaatcttgtagaaataattttccataacaaatctgaaagattgtattt

SEQ ID NO: 3158313 - DNA, 1207 bp, Cricetulus griseus
gaaaacattttcctgccataggaacgttcttgctgcaatcagcccctatttcagatccatgttcactagtggccttacagaaagtactcagaaagaagttcgaatcatcggtgttgaagctgaatcaatggatttagtattgaattatgcctatacctctagagttattctgacagaggccaatgttcaagccttgttcactacagctagcatcttccaaattccttccatacaagaccagtgtgctaagtatatgattagtcatttggatccacaaaattctattggggtctttatctttgctgatcattatggtcatcaggaactcggagatcgatacaaaagaaatatatccgtaaaaagtttactgtgtgtcaccaaagaacaagagtttctccagctgacgaaagaccaactcataagcatactagatagtgatgatttaaacgtagaccgggaagaacatgtttatgaaagcattataaggtggtttgaacatgaacagaatgaaagagaagtacaccttccggaaatttttgccaaatgtatacgttttcctttgatggaagatacatttatcgagaaaattccacctcagtttgcacaggccatagccaaaagctatggggaaaagggactatcaaacaccaatggctgtacgcagaggcttggaatgactgcttctgaaatgatcatatgttttgatgctgcacacaaacactcaggaaagaagccaaacagtgccttgtctagatatagtcacaggaagagtgtttaaactatgaatatatattggattttgtatgaagaactatttgtttacattacatagctgggatattttgccacttttaaaatgatttcagaaaaggtcctaggaaacatattagtgatatgtgtgggtttatgtgtagatacttaaggtacattttcatagtatgagaatattactaaaaggcacaatggctactacaggattaaaagatctaacaaatgccaattccactttaactatgtttctgcatttgaagaatgtacgtagcacttttcctatgtagtttttacacaatgaaaactgggctaggtgtaactatgttgtaggaaagaagaaattatttatgttcgtctgtgtttcttgttatcctgcaagttgatgtgtaagcgttaagttgatttcattggtgcatgaggaaagtggatgtgatct

SEQ ID NO: 3158314 - DNA, 1263 bp, Cricetulus griseus
tgggactccgagctggggctatttgtggtgttggcgcggctccaagaaggccatcacagccagtgccccctactgccctatagagaaggaagatgagcgagtccagctcaaagtccagccagcctctggcctccaagcaggagaaggacgggactgagaagcgaggccggggtaggccacgcaagcagcctccggtgagtcctgggacggcgctggtagggagtcagaaggagcccagtgaagtgccaacaccgaagagacctcggggccgaccaaagggaagcaaaaacaagggcgctgccaagacacggaaagctaccacagctccagggaggaaaccaaggggcagacccaagaaactggagaaggaggaagaggagggcatctcccaggagtcctcggaggaggagcagtgaccacgcgcagtgccgcctgctccttggccatcaaaggagcagctttcccttgggcctggaagcccggctcccaggcccctccccacccccaccgcacactaccgcaccagctgcaggctctgcccagctgcaggctctgcgactgccgcacccacgggagcaggatttggctcagcccatgtgccctccccaacacacctgccctctcccgacaaggctaacttcctcttagccgcagcctgtcctgctgcgcacctcccttagagacagtgctctctgggctccttgttttgcctgtcccttctgctctgctcttcctggcttccttgtagaggggcgccaactcacctcccccactcggactctaggctgttccccttcctccagaggggcactaaggagctagccttgcccccctccttttgctcctccctgcccccacccccaaggttctggttcatcttttcctctgttcacaaactacctctggacagttgtgttgtttttttgttgttcaatgttcattcttagatacccaccattgctgctgctaccagcgccaagagttcatcctccctttctgcctgcattctccccagacactctaggggaaaggggggctggggcgcagcaggctggttaccaaccaccccagggaagatggggccctgccccttggatgctgcagcagagtgaggaggtgggcccattttgatgggaaaagggtgtaggtccacctcccccccttgttctgtgggggaggggtggccagtatttgtcccggcctggggctccccctctggtttcctatttgcagttacttgaataaaaaaaaagtaccttttct

SEQ ID NO: 3158315 - DNA, 620 bp, Cricetulus griseus
aggaagtggtcgacggcacccgggtccggagagcccacagtgatgctggccaggcgggtgcttggggcctcacacagggcggcactaggatcggtagaggctgctcttggaggtttgaagtcaatatggggaagcagccaacatttttactctactctccctaaggatgtcacttatagggaactaaaaaacctattgaactccaaaaatattatgttaattgatgttagagaaacatgggaaattcttgagcatggaaaaatacctggatcaatcaatataccattggatgaggtaagtgaagctctacagatgaacccaagggacttcaaagagaagtaccatgaagtgaagccatccaaatctgacagtctagtgttttcttgttttgctggagtaagaagtaagcaggccatgaacacagcattatcactgggctttaacagtgctcagcactatgctggaggctggaaggaatgggtaacctatgaaatgtcagagaacaaacaagaaaattgagttttggaataagagactctgtccttgtgttcatatattcaaggacagtggatgaagcaaaagaaaactccagtcttggcatcaaaggctaatggattctg

SEQ ID NO: 3158316 - DNA, 1221 bp, Cricetulus griseus
  modified_base (1214)..(1214): a, c, t, g, unknown or other
taattgtgttttgtggcaataatgctacacaaggctccagcagcatttgggctggtttccttcctgatgcatgctggtctggagcggaatcgaattagaaagcacttgctggtatttgcattggcagcaccagccatgtccatgctgacatacttaggactaagtaagagcagtaaagaagccctttcagaggtcaatgccactggagtggccatgcttttctctgccgggacatttctttatgttgcttagtttagaggctctaccactttacccattggttttaacatggttattatcaccgtgtaagactggtgctttagcatctgtgccacatgccttgagagaaggcatgcactcaccctcttagatgctaaaggtgacggcaactgatttgaggttagagtaaggaaaataaggagttacattattacaaagtatgggattgacacatcactagtactctgataatttaagcagttgagacagcaaaagtattcaacaaaggtagtttttcctgtttgccaaaatctgcctaaatcctgttttgtcagataagtgtataatactgcattaatttatattttctgtaccatttcaaaaacactttacataaagagagagccaagactagtttctttagagcagtgggtgcagtcgtttgtatttttctatgacacctatgccagcatgcctatggtttcctttatttctctcctaattgtcactgggtcaacagctgcggaattaaactagcgagccctctgctggcttcagtgaggaacaaatgtagcagaatgggtgtggttttgtgtggaggcgtggtagccattgcaccccaaggagacctgaaggtgtgtggctggtggggaaggactggcagacatgttgtacttacttctttagatgtgctcagtccaaacacagctgctaaacacagagaatggtttcttcgctctttgtctggttgtgtcttccaataagctgggagtctgatggggtggtaacaccacagttctcctggtttggtggcctgaatggtaatctcaaatgtcctttctctggatcctttgtacacataaactcattccatggatggctgccttataattttgtctctttccactttaattgtgaatggtttaaaaatcgctgttttttgatttgttttatgatattaaatttttattagtgcacaaataaaaaaaaaaaanaaaaaaa

SEQ ID NO: 3158317 - DNA, 511 bp, Cricetulus griseus
gaggtgctgtcctttcatgatgtggctctgcacttttgtcctgacctttctcactgcttgcctgactcaggggcacccaccctcaccacccatagtggacacggttcatggcaaagtcctggggaagtatgtgagcttagaaggattcacacagcctgtggccatcttccttggagtcccctttgccaagcctcctcttggatctctgaggtttgctccaccacagtctgcagagccctggagcttcgtgaagaatgccacctcctatcctccttgctcggaatgggaatccccaatggggaaggcttgccccattggccagaatatgaccagaaggaaggctacctgcagattggagtcccaacacaggcagcctataagctgaaagacaaggaagttgccttttggactgagctcagggctaaggaagtagcaaaaacacccacccagagggaccatgttgagctctgatcaggaagtccagccagatttgaaagcctggagccaagaa

SEQ ID NO: 3158318 - DNA, 266 bp, Cricetulus griseus
ctgccctccagtcatcagtcaggatgtggggtcaaactcctgaaagtcagttatgcaggaacagcagtcagaacccttccccgtgtctcatccttagacttgaccacattgtgatgactgtaaagaacatcgaagacaccaccatgttctattccaagatcctgggcatggaggtcactactttcaagggagaccggaaggcattgtgttttggagaccaaaaatttaacttacatgaggtgggaaaggaatttgagcccaaagca

SEQ ID NO: 3158319 - DNA, 684 bp, Cricetulus griseus
attgcagaagtatgaactagcccgtgactggaccaaacggcgcatgaaggatgatcttgtgcctgagactgcaaggctcaactacactcggccaggacctaccctacacttaatccctgaattttgatatttgcttgtgtgtgtcctggatgttgttgatgccagtcttgttgctgtgacaagtagcaacctgccctgccctaaaaataccagagaagtgccaagggcagacatttcatgcagaaccagggtgcactttatgttcctgcacaggcagattttggggccttcctgtccttcctgtccctatggtggttctgaggggagagttgtttctgtgtttccctgttgggtggaacacgggccttttgccctggagacctggtttcccaggtcacccctcatacctgactgcagcgcctcctaaactttgggttcctcggttttgtttaatgcagttctcattacacaagtgcatttctggctatcacttgtaaccatagatatacatgcatatatattctatctacaaagtgttttatttgcaagatgttttgaggtgagcttgggtcctgcccgccttgtgatcatctgtccccatcttcatcccctggcccggagtggtgcggtggtgggccatcaactgtatgtattaaaattactgtatcaaataaatgtttattg

SEQ ID NO: 3158320 - DNA, 554 bp, Cricetulus griseus
gaggcctgcgggccgcatggctgcagctccgggcggtggcgggccaggccccgcggcgggcgagccgctgctgcagcggcacgactccggccagggctcgcccgagccgcgggcccacgggaagccccagcagggcttcctctccagcctcttcacccgggaccagagttgcccgctcatgctcctgaagacgctagagacgaacccttatgtcaaacttctactagatgctatgaaacactcaggctgtactgttaacaaagggagacacttttcttgcgaagactgtgatggaaacgtcagcggagggtttgacgcttcaacgtctcagattgttttgtgccagaataacatccgcaatcaggctcacatgagcagagtcgtcacccacgagctcatccacgcgttcgatcattgtcgggctcatgtccactggtttactgatatcagacatttggcgtgctcggagatccgagctgcaagcctcagtggagactgctcacttgtgaatgaaatcttcaggttgcattttggattaaagcaacaccatcaga

SEQ ID NO: 3158321 - DNA, 251 bp, Cricetulus griseus
agtgcatcgtgcggactcttcgggtcatctgcatctgtgcagaagactactgccgtgcccaagaggccaggactgaggctggatcccagccccctgctgctgccattggtgctgatgacctgctgcccatcctgtccttcgtggtgctgaggagtggtcttccccaactggtgtcagagtgtgcagccctggaggagttcattcatgaagggtacttgattggagaagaagggtactgcctgacatcactg

SEQ ID NO: 3158322 - DNA, 490 bp, Cricetulus griseus
aggaaaattcccatagaaaggcacagggaattacgtcctgaatgtgagttccttttgggcaaagatgttggtaacattggcaagtatgatgtaagggtgaagagtccagagaagctgagaggtgacaaagcaaggaaccaagaagaggaggccagactggagtcctttgagaactggccgttttatgcccatgggacatcgccacgtgttctctcagcagctggctttgtctttacaggtaagagtctgacctctccaaactggttaaattgattcagaactctccaaatcttcatgttttccacctgaaatgtgatttcttttcggattttgagtctctcatgactgtgcttgcttcctgcaaggaactcagagagatggagttttctggacgatgctttgaaaccaggccatttgtcactattttgccaaattttgtttcactgaagtatattgaattcttgagtgttcaacaatttccagtataaag

SEQ ID NO: 3158323 - DNA, 437 bp, Cricetulus griseus
ggagcctgaccaagcgctggtggtgattggtggggatgggcttagacctaacatggaccgaagacagccatcttgcaaagtgtggtgggcccgggctttccactgtggcatgggtctggtacgaactgtggaatggtgccggctgcctgacctgccagccccagggcgctttcggcatggagctgcgagcctaacaggaagtgaactctatgtgtgtgggggacaggatttctacagccacgccaacacgttggcttcaactctcaggtggagctccagtcaagaagactgggaggaaatggcacctttgtgccaggctcggagctttttcccgctggtggtgtttgatggagaacttttatgccctgggtggacgggacaatggtgttgcccttaattccgcgtaggcctataaccctgaactcaatgtctggagg

SEQ ID NO: 3158324 - DNA, 937 bp, Cricetulus griseus
atggagaagagaatgatgagcgaggacatttttctagaagaaagatagtctgtaactgggatcgatatcaggatactgaaaaagaactcaatgatgaaagtggagaatcacagcgggggacagacttcagcgtcctcctgagctctgcaggggattccttttcacagttccgatttgccgaggagaaagaatgggatggtgaaacttcatgtccaaagcagaattcagcactctatgtggatagtgagtcactggttcgagcccttcaacagctgcccctctcagtccggcttaacgttgcttcggagttgatccagaccacaattcctttagaacttcctcaggtgaaaccaaggagaaacgatgatggcaaagagctgggcatgcagttaagggggccaatctccgagctcagatctgctgctggggcaaagacagcttaagacaaagccctccagagggtttgcagaaagcccccttcccaccacagtcagtggcagaccatctggaagatgaactggacatgttgctgcatttagaatgcacccatgacagaggaagacagaatctgcccagaccagatgtctcaggaccaggagccagacagagatcagcaggtggcccaggaggaaacagttcctgaaaagccatctatgactggagagaaaaatgtggaacctgaacagacaagcacatccaaaaatgtcactgaggaagacctggaagactggctggacagcatgatttcctgaggaggggatcgaggaggggatcaagggggaaaatgtgcctgaaaaaaaaatttggttgccttctaagtaaggatgggctagtttacctgaataccccatgctaacctatactgttatttatgcttatagcagccaatgcctaccttctgttttttgatggcatctgaatacatgtatgaggactt

SEQ ID NO: 3158325 - DNA, 784 bp, Cricetulus griseus
tgccaggattgtgggaaacatcaggaagagctcctatcctaacccaacacttaagaactcacactggagagaagccctatgagtgcaatgagtgtgggaagtgcttcagcagtagcttctctctaactgtgcacaagagaatacatactggagaaaaaccgtatgaatgcagttactgtggaaaaagcttttaataatctctcagctgtgaagaagcacttaatgactcatactgggcaaaaaccctatggatgtaaggattgtgggaaatctttcaccagtaactcctacctctctgtgcacaaaagagtacataacaggtggatatgaatggtggtgagaaattactgagagaaacaagcagagctgcatcttgtaaagttgttatcgaagaagtcacttctagggtggctcatcacatgcctgggaatttactgtttgttattgtcaggagaccttcaatgacttaccatataggcctctctacatgattatatttctttataataaggcaaagaataacccttccccaaagtgttccaagaaaagccaatctaaagaattaagtatcatttatgaccttgtcttcaaaaggtatagtttcacttcttctctagtgtacacatcaaccatagaccaggcttgatacaacatggagaaaactacagaatatctgagggtcaggagacagctctctgagaaccatctgagaaacttgccatgaaattaatgaagtggctaacctggaactccatctgtacatcaggctgaccccaaactcaga

SEQ ID NO: 3158326 - DNA, 306 bp, Cricetulus griseus
aggcgccgagttgggggagcccccggccaaccggcctcgtgatcatggggaatggcatgaccaaggtacttcctggactctaccttggaaacttcattgatgccaaagacccagatcagttgggccggaataagatcacacatatcatctctatccatgaatcacctcaacctcaactgcagggtatcaagtaccttcggatctcagtggccgatgctcctgaagtacccatcaaaaagcacttcaaagaatgcatcaactttatccacagttgccgcctcaacggggtaactgccttgtacactg

SEQ ID NO: 3158327 - DNA, 774 bp, Cricetulus griseus
  modified_base (770)..(770): a, c, t, g, unknown or other
tggcctctctctggagccggctggctggggctcggggagcggggtgtgcggggctcggccgcgccttgccacctgcagcgcccgggcaggccgcggggacctgcggcagcggctcaccccggccatccttgcaggtgggagtcgagagcatctccaagcgcccaagccatggtggccaaacagcggatccggatggctaacgagaagcacagcaaaaatatcacccagaggggaaacgtagccaaaaccctgaggccacaagaagagaaatatcctgttgggccatggctgttggcactgtttgtttttgttgtctgtggctcagctatcttccagatcatacagagcataaggatgggcatgtgagaaggccagggtgttggatgctgctgccctcctgctggcaggtggaggaccacagagaccttcagtgggtctatagcaagcaaaggaaccacggtcgatagaaaagaggtccctgttgttcactccatggtggaggtccggccaaactgccttctcacaggacatccccctgcatctgtgtcctccagtggaaaggactctgctcttgttggccaattggaagccacgtgtggggtcagcagtagtgctctctgtctgtttccccgggtttcactgtggtgtgcatgtggccctgagctacccgcccaatttactatcctgccaatacagtctcttctctgtcaggaattggttttactaaaataaaatgtcttcattacaaaaccttaaaaaaaaaaaaaaanaaaa

SEQ ID NO: 3158328 - DNA, 1531 bp, Cricetulus griseus
caggaggtccgcaggctcaaacaggacaaccgcaacctgaaggagcaaaatgatgagctaaatggacagatcatcaccctcagcatccagggtgccaagagcctcttctccacgtccttctctgagtcactggctgcagagatcagctctgtctcccgagatgagctcatggaagcaatccaaaagcaggaggagatcaatttccgcctgcaggactacattgacaggattattgtggccatcctggagaccaacccatccatcctagaggtcaagtaggacatcttagccccagtttgggctggttatagactccacagcgcaccagagtgctcatgttgacatggtgccacccaagcttggccattcccacatggtatgcaagctgaggacccacaagttggacatagacatggtagttctggaaagacaggcaggtaaagatggcatatgtgggatctggtccggagccacaggctacctgttctccttgcgctgctcaagccttctcccaccagatgggcttccattcacctttggacctagggcctccaagccacacagccattctttgtccagactctcacacagtaactcgtcagctctggtcctcttgtggggctagggcagctagttcatgctgactatggaactcacttcctggactgtgcaggtgctgcttctcctcaggtgtggcctaccctggctcctggacctacgccctcctcaggctgactttactgccttgggaaaagttgacatttcccagacaatagtctaggcctctgaaacaaaatttccttctctgcttttgactttaagtccctgggtgtgccccaggagtcattttgctggtgagtaggtaggtggacaaggctctacacagacctagaggcagaggaaggtgagaccacaccataggctgtgtgtgtgtgtgtgtgtgtgtgtatgtgtgtgtgtgtgtgcatgagtgtgcacacaagtatgaatgtatgtatgcttgtgcccacacatgctgccctgcatcccttcactgcctatcccccgcccttgcgtaccttctacactacggtttaagatgttgcctcgtattgtacattttggggaaagccttgtgtgtaaatcagtgtaaacttggaggagagatttttctatcatgtagagtaggtattttttatagattgaaggttgatcaattttttaatactttccagagagaaaactatctgtgtatacatatgaaatatatatatatatatatatgtataatatatcaatactggagccctgcctttctgtgcccaggtccaagtcctgtataaggcttgtggcctgtctctgctgtctgccctgcagtgttcactgtaaacacgggtctccaggagacactgggaaacacaccaatcaccaacttgctcacagcatctgcttcagctccctgagaaatagctatttctccagggcatggaaggatgggaggccagcaggatcctgtcccatgtgtcagccacaacagattaaagctgttacc

SEQ ID NO: 3158329 - DNA, 1467 bp, Cricetulus griseus
agggcaccagagggctcctcagctgcctgccagatgtggagagagccacactgacgcttctcctggaccacctgcgcctcgtttcctccttccacacccacaaccgcatgaccccgcagaacttggcagtgtgcttcggacccgtgctgctgccagcgagacagacacccgctcgaccgcggctccgtagctcaggcccaggcgtcaccagtgccgtggacttcaagcgccacatcgaagtcctgcattacctactccagtcttggccagatacccgccgtcccccagaggtcccggacgttgcaccttatttgcggcccaaacgacagccgccgctgcacttgccactggcgggccccgaagtagtgactcgaccccgaggtcgcggaggccccgaaagtcctccaagcaaccgctacgcgggcgactggagtgtgtgtggatcctggatctggagagagaactctccaagcagatcaatgtgtgcctctgagccttcgaagcaggtgctggacttctggttatttaaggaattaacttcctggttgctaaggaccaggctctggttactggtgactgggtaccaagtcgctaagacagtgacgacctaaaaggacctgaccagagttactcaggctgagctcctggttgctaaggagttgccaagggaccagtctcccgtgctaagaatcattcccagcttctagtgccattgtttgggccctagttgcaaagaccaggctcttggcattttaagcactgatgccactggcccctcccttcgagcaccggggcttctctttgctgttggagacagtactgcttgctaggctgcctcacttgcctccctttgttggggaacgccaattactgtgagcatcaccctgggatattgagacatccctattcaaccctcttgctgctgccaaccaaaccagtattagcattgagcactacactctgtctccccctcccctgaagtatctaaggataatcatgaggttcttcgtaggggatgcagccccagacttggcctccagctgtgaaagatttactctaatcctctcttctggggaaaaccgccaagatgaacctccaacctgcaaatggagacacagtctggcccttcctttcccaagaaagcccatccccacccctgaaaaactgagcacttaacccctcccctttggagggaccccacctgaggtatcaggctaggggcacttttggtacggaaaatatttattgcctccatgcatgtgtgtgtctgtgtgaggactcgtgtgcactggcctgtctggagtgggcatgtggaactctttcagggaccatagagtgggacagtatttgccatccccaggtatccccaagcccccggtgatcaaatgggagaattaggtcccctgaggtctcccgcttctttccactccttccatctttgtggacaataaataaaccagtatacac

SEQ ID NO: 3158330 - DNA, 1257 bp, Cricetulus griseus
agcttagaaggattcacacagcctgtggccatcttccttggagtcccctttgccaagcctcctcttggatctctgaggtttgctccaccacagtctgcagagccctggagcttcgtgaagaatgccacctcctatcctcctatgcatcaacctatgatggactggctctctctgcccatgaaaacgtggtggtggtggccattcagtaccgcctgagcatctggggattcttcagcacaggggatgaacacagccgtggaaactggggtcatttggaccaggtggctgcactgcactgggttcaagacaacattgccaattttggaggggacccaggctctgtgaccatttttggagagtcagcaggaggtgaaagtgtctctgttcttatgttctctcccttggccaagaacctctttccacaggggcctatttctgactgagaaagttgctgttactgctgggtgcaaaaccaccacatctgctgtcattgttcactgcctgcgccagaagacggaggacgagctcttggaggtcatgcagaaaatgaatctgtttaaacttaatgtacaaggagacaccaaagagaaccacgcttttgtaccaactgtgcttgatggggtgctgctgccaaaggcacctgaagagatcctggctgagaagaatttcaacactgtgccctacatcgtgggaatcaacaagcaagagtttggctggcttctaccaacaatgatgggatttctacaaactgatgtaaagtgggacaagaagatggccatagctctcctgcagaagttcgctccctatttcggcatgaatgaggatgcagttccagttgcaattgagaagtatgtaagagtggacttgattgcagatgtggtatttggcgtcccatcagtgatggtatctcgtggccacagagatgctggagcccccacctacatgtatgagtttcagtaccagccaagcttcgcatcgacacatgagacccaaaaagataataggagaccatggagatgaaatctactcagtattcggagcccccattttgaaagatggagccacagaagaggagaccaacctcagcaagacgatgatgaaattctgggccaactttgctacgcaatgggaaccctaatggagaaggactgccccactggccagagtatgaccaaaaggaaggctacatgaagatcggggccacaacccagcaaacccacagactgaaagacaaagaagtggtttttggactgaact

SEQ ID NO: 3158331 - DNA, 982 bp, Cricetulus griseus
  modified_base (218)..(218): a, c, t, g, unknown or other
agtcttgctaaaaatcacagaaacaacttgttgacaaaaatgccatctgcaccaacacagtccagggacacagctgcacctgccagccgggctacgtgggaaatggcaccatctgcagagcattctgtgaggagggctgcagatatggaggtacctgtgtggctcctaacaaatgtgtctgtccttctggatttcacaggaagccattgcgagaaagntattgatgaatgtgcagagggattcgttgagtgccacaaccactcccgctgtgttaacctgccagggtggtaccactgtgagtgcagaagcggtttccatgacgatgggacctactcactgtccggggagtcctgcattgacattgatgaatgtgccttaagactcacacctgctggaatgactctgtttgagctgtgaatacacagccatctttgaaggggagtgttgtccccgttgtgtcagtgacccctgcctggctgataatattgcctatgacatcagaaaaacttgcctggacagctctggtatttcaaggctgagtggtgcagtgtggacaatggctgaatctccctgtacaacctgtaaatgcaagaatgggagagtctgctgctcggtggatctggagtgtcttgaaaataattgaagtatttaaaatggaactcatcatggaataaaaatggacaaaatgaccatccaacctgaggaggaagaggggctgattttttttttgttaaccacagtcaattaccaaagtctccatctgaggacggtgtttgggtggccttagccactttgctcatccttgctgacctagtctagatgcctgcagtgctgtgcatttcagtcaatggttgttgagtctccgtgttgtaaatcaccttcccctcatcagatcatgcggatacatttaaaggatcccatgataaatgttaatgtattttttgtttattttgtgtactaacataatagagacttgacacca

SEQ ID NO: 3158332 - DNA, 1047 bp, Cricetulus griseus
caggaagccaaccgccttgcctgctgcccgccagagtctggtgttggcattggcttgggcaggtgtgccggcacaggatggggtggccatggtgaggaacccccactctcagcttgcagctccctccccaagccaacatgaatgccgagttggagctactgtggccattgtcagtcccactgctgctgctgttgggggccacagcctggctgtgtgtccactgctcccgcccaggggtgaagagaaatgagaaaatctacgagcagaggaaccagcaagaaaatgaagagagctttactgtggctcagacctactccctggccaggccagtatggccaggatccctgatggacacagcctcagacaagtcatcggaaaggaagaacaagctgctgttctctcatctcgaaggaagcagacatgatgctgcctatgtagatcccatccccacagactactacaactggggatgttcccagaagcccccagaagatgatgactccaactcctacgagaatgtgctcatctgcaagcccactgcccctgactcaggtggcgaggaatctgaggattaccagaactcagtatgcatccgagagtggcgagaatccaggaggactgtgggtgcacaagtgtcaccatcgggaagcccagatgaggagccagattatgtgaatggggatgtggctgcggctgagaaagtctaggagagaatcaactttccttgtttggacctcaaattgcttatgaatgttgatttctgggaatgttacatgactgtttttgtagttgacttcaactgctggaaccatatttaatattgtcaatgtcagggggactttctgtctctgagagcattacacatactaactttaacaaatgagcggggtgtagggtaacctggggtctccttgttctctaagtgggctccagtttgctcagatcttccattcctgaagggaccttgtgggtcggtgatagggagacaaaagtgaccccagcaaccgtcaataaaccctgtgagtttcagagacaaaaaaaaaaaaa

SEQ ID NO: 3158333 - DNA, 460 bp, Cricetulus griseus
agggatatacatcagaagaaaccaaaagccagctggaatagttcctgagtgagattttatttctgtttgcagttgttttgaagagagatatcctctggctcaggattaaaaatgctctggtttcaaggaaatagcctgcagattgccaaatcctcctttggactcttgcgaaatctcactgcctctaacacccctctgcctgtgctgaccttattcacaaaggatccatgcccactctgtgatgaagccaaagaagtcctcaagccttataaagacaggtttattttacaggaggtggacatcacacttccagaaaattctacttggtatgaaaggtataaatttgacatccctgtattccatttgaatggccagtttctgatgatgcatcgagtaaatatctcaaagcttgaaaaacagcttctgaaacttgagcagcaggtgctgaagacaaactgat

SEQ ID NO: 3158334 - DNA, 428 bp, Cricetulus griseus
gcgaacaaaggagtctgcggcggttccctgctccgcgaaggaccgaagcttcgcgggactctgaggctccgcggctccgggtcggcttcggctcggctccaccgcgggcgccgcggcacttgccgcccagcgctgcccagggagccccctcctgaccggggctcatgatggggctgatcttcgctaaattgtggagcctttctgtaaccaagagcacaaagtaatcattgtggggctggataatgcaggggaagaccaccattctttatcagttcttaatgaatgaagtagttcatacttctccaaccataggaagcaatgttgaagaaatagttgtgaagaacaccgtccgtccccccccgtccccgtcgtgtgtgtgtgtgtgtgtgtgtgtgtgtgtgtgtgtgtgtgtgtgtgtgtgtaaacat

SEQ ID NO: 3158335 - DNA, 1543 bp, Cricetulus griseus
tcaatgtgaaggtatccgtgagagacctcttcattaaagatgacattttggcagctaccccaggactgcagttggaggaggatatcacagactcctacctacttgttagtgactttgccaatcccagggaatgttgggaaattcctatgagccgattgaatatgactgttcagttggttagtagtagtaatttgtctgtggatacagggccaattcaagtcaggactctggtagaagagatcacagaagaacaatattacatgatgaggaggtatgaaagttctctttcacaccccccacctcgccctcccaaacatccctcggcaggggaaacgaagttaaccctgctcagcttagcagaagaaagaacaagagatctgcccaaaatctcccaagagtcaccatgcagacagagtcaagaaacttcaccaagatcaaggtgacctggattcaagaacaacagttggttttcggaatgatgtgtcagatgtggagagacagaagggcaagcaggggccgttgcagtagcaagcactaacatgactgcagaattcttcaaaactgaaaaacatcaaaagtaacaagatgtgatgggagccacttggacagtgaacataaatgttgcaatggaaaaggaaacctagccttctagctgaaaaacactattccccaatggactctagaagaatctggactggccactaaaaagacaaaaataagacttaaaagttttaacacatgaagctacaaagagagacccatgatatggaatttaaattgtcttttctgattcctgaaaaccacacatgctgtttccttagttgtttaagacatccttttattttatgtactatattttccacaatgctttgaatgaatgattattagaattgcagcaaaccatttagctatccataatattcgatgaaaagaaaaggcaatataattgtaaaaagtcatataaatatagttgacagaagccaaaatgattcttaatgactagataatagaatagtacatacagttgtatgcctgtaaaattaagggcaaacacattttttataagttttcttattatgtgttaaatgcacaagaataatactactttctctctagcagcatgaagagattgaggaattttctagttaggttacatagagaatagtgagaagtcaggttttgttcatacatccgacttcttacagtgcttgattctgatctcataattaatttataaattgggagaacttatttgatgatttagtacttaagggtctctaaagataataaatcatgaggtaatattcattatataaataatctcagctagaaatctttcatataatgtgtatgttctgatttcttgccttctctcatttcagctaactgtgagcactgaatattttagtttggtatatgagcacaattgaatttgtacttttttgtaagtccatgtctttgactaacataggaaactatactatctttctttggctgcgaatcatcaaggacttcctactggaaatcatgtctaacatttcta

SEQ ID NO: 3158336 - DNA, 1138 bp, Cricetulus griseus
agaggcatgcggctgccccgcttctccagtgctttcgtgctttcactcttgatagtacagacctgcatcctagtcttcctggtctcccggcaaacaccgtcgtccccacggctggcaacagggagcgtgtgcacgtgctagtgctgtcctcgtggcgctcaggctcgtctttcttgggccaggtcttcagccaacacccagatgtcttctacctaatggagccggcttggcacgtgtgggatgccctgtcgcagggcagtgcccctacgctccacatggccgtgcgcgacttggtccgttattcctgtgcgacatggacgtctttgatgcctacctcccgtggcgccgcaacatcatctcttccagtgggccgtgagccgcgccttgtgctcgccaccggcctgcaatgcctacgctcgccgcagcatcagcagcgaggaggtgtgcacctggtgcgcgacccgcgcgcggtgctgcgctccccgagagcaggccgccaaggcgctggcccgggacaatggcatcatcctgggaaccaacggcacgtgggtggaggcagacccccggctccgtgtggtcagtgaagtgtgccgcagccatgtgcgcattgcagaggccgcattgcataagccgccacccttcctgcaagatcgctaccgcctagtgcgctacgaggatctggcccgggacccactcactcagatccgggagctctacgcctttaccggcctgaacctcacgcagaagctccagacttggatccacaacatcacacatggctcagggccaggctcacaccgtgaagccttcaagacctcatccagggatgcgctcagtgtgtcccaagcctggcgtctcacactgcctttcgacaagattcagcaggtccaggaactgtgcgctggagccctgcagctgctgggttaccgacctgtgcactctgagcttgagcagcgggacctctctctggacctcttgctgcctagaggcatggacaaattcaagtgggcttcctccaccgatgcacagccaggatcttaagagtcttagtggagagtccctgttctgacattagggcctattggagtatgataataaaagggcttggagaaaccagaggaacagtgtctgggagtgt

SEQ ID NO: 3158337 - DNA, 1063 bp, Cricetulus griseus
catggacggagtggcagacaatggcttctcggccacagtataagccatctccgcttaaaaaatccagttctcctggaactacatcatcaggatcttcccgactaccacaaccaagtactactagcaaaactgttgtaggtgtgccttcgggtaaaagcatcttcaattaacagttctttgggaaacaaacttcagaccttatctccttctcataaagcaatagcagcccctcaggcaggagctaacatcaaatctcgaaatactacaccgccaagcttggcaagaaattctgtgtcaggtgtgtttaccaacaaaagaaaaacttttactgacagttacgctgccaggccagatggagactatacatcttcaattaatggtggaaacattaaaggcattgagggacattcatctgttcacttaccaaaattctgccatgagtgtgggacaaaataccctgttgaatgggcaaagttctgctgtgaatgtggcattcgaagaatgattctgtgaacagaatctcaagagctatggggccaggctcagaatttgaaagttattgctgctttgacacccagggcacttcttttagctatgagtctttgcagtattaatatgtaattatttaaggtacataatttttgtaaaatcttacatgtttaaaattttatttctgtgtatgtatgtttataggaaattaatgcatcttaaaagaaatcaaccttcccaataaataataattgtgatactcattaattctgagcatgcaagccaagctatttctttcttaattcctcgtggttcatatagttacaaatacattggagaatgtctagtttttttctattcacattttctttagtgcttactgttgaaataccatgtatattacagaggaaatgcactgaaatgttttaaattagtggtgtacacaagcacagctacaatgtagttctgtttcacttgactccagttgtttggatcatcctcactttcactagaacagcacttactggcaggctgcttttgcagagtgcattccacagtcctatagtaatgactg

SEQ ID NO: 3158338 - DNA, 1217 bp, Cricetulus griseus
gtcactcaggccatccgcatcttttcctgaaggcagtgcgcgcgtgcgtgcactgtgcagggacggagggtccagcctccaaaccacctgaattgcatgctctataaataataggaacggcgacattctagtaacgatagtttttacactgtacttaataggaagcgtccaaaagaagaaaaatcccacaagttttccattttcttgaagtaggagaaaaatgaacagtaattatgaagatgattaataattgtgctatgggatgtgtggactgtttcgtgtgtttccctttgtgggtgggttcctacagcactcgttctagaacacaagtggatcctttttgaatgttcatggaagggccaggcgttctgtacaaccaggaccctgcagctttattaaaattaaaactgtaacatatctcttatatattaaaaaaaaaaacctttaaaagttttaaagagaaattgcattaatacagattgaagtattttattctttttttgacttgaaaattatatttcatattgcaaagatgtttacaagtattttaatttaagttcagtgaacttttttgtagctgggttaaatctttttatttttagtatggccttatggcaaagaacactgtattattttaataatcacacaattgtgacggattacaaaccataaaatgtataacgttttgagcagtattctgttgggatggagattttataggttcagacaaaatcttctagatctgcttcacccagcatattttctattcagtgatataaagcatattttattctatattattacaaaaacggaaatgtataaacatgtcaaaaggaacagttgatgctttctaacatttgtataaatagaattcagtgcaaattacagaaattctgttgcaccgctatagttttagtgtttctattttaatacatttgtttaccacttgtttatgtatatgtaggtgacgttacttgagcttaaatgtactttactgagcaaagtttaaaaaaacaaagtatattttattttatgataaagggcctttaacctcatggtcaaatactaatattatatttgctgagacaagatttgaaattgtatcaagagttttatttttctgacatttaaagttctacataataaaggtaaacttaagtaatggtgctacttcattttttaagtatttctatataaataaaacattaaagaaaaat

SEQ ID NO: 3158339 - DNA, 314 bp, Cricetulus griseus
tcaataatgtttatataaagctcatacaaaaccagtaaagggctccaaaaatgcctttatttgctcacactagtttggcgtactttttcatggaaaggaaaaaaattgattaacgtgtttacacaagaaacaagtcaaaatttattatttcttattttaacctgtgttttgtatcataatggacatgcggaatttttattttgtacttactattctttacaaggagtattgtaaattttactggcgattattattgtactattctaatgtaagatttttacacttttttcagaaataaaattcttaattttcaa

SEQ ID NO: 3158340 - DNA, 1131 bp, Cricetulus griseus
caatggcactcagggcaaagacagatgtgtggctggcaagaccctggcagtgcctgcacaagacgaggtcactgggcacaacagcagcactgccccccaacacactggggccctttgaatccataccacagtactccagaaacaggtggctgaagatgatacagatcctgagggagcagggccaggagaacctgcacctggagatgcatcaggccttccaggaactggggcccattttcaggtacagcataggaagcacacagattgtgtctgtgatgttgccacaggatgctgagaagatattccaggtagacaatacacagccctgccgcatgcccttagaaccttggatagcccacagagaacaccgtggcctgggacgtggagtgttctgctaaaatggactttcaatcctgtgtgttcaactataccatagaagccagccattttgttctttttgggaagcggctgggcctccttggctatgacctgaaccctggcagcctgaagttcatccatgccttgcattccataatgaagaccaccccacagctcatgtttttgcccagtatactgactcgcttgacaacccccctggtgtggaaagagaactttgagtcctgggatatcatctctgagtatgtcacaaaatatgtcagtgatgtgtatcaagagatgaagaggggtcgcccaaagttctggagtggtcatatcagagctgatagcagagggtggctctgccaatggatgccatccaggccaacttctctggaactcactgctggaagtgtggacacgacatcaaggcccgtggtaatgacctgctttgagctggctcgaaacccagatgtcagcaggcacttcggcaagagagcctggcagctgaggccagaattgcagcaaatcctcagagagctctaacagatctgcccctgttgcaggctgccattaaagagaccttgaggctctatcctgttgctgcctttttggagagaattatatgctcagacttagttcttcagaactaccatgtccctgctgggacggtcctccacatgagtgtctactccatgggccgaaaccctgcagtatttccaaggccggagcgctacacgccccagcgctggctgg

SEQ ID NO: 3158341 - DNA, 259 bp, Cricetulus griseus
acatggctatacggagtcactgcctcacgtggacacagtatgcctccttgagggaagagtctgtcttccgggaaagtgtggaaaatccaaattggacagagttcattcaaagaggcagaatttcaatcacaggggctggatttctcaattgtattttggaaacttttgctagtgcattcttaagacagggagcccagaagggaattagaataatggagatgctgctcaaggaacagtgtggttccccctagtggaataa

SEQ ID NO: 3158342 - DNA, 1250 bp, Cricetulus griseus
cccaggctgcggcagggaccaaagctggccccgcaggtggccggccggccgacaccatgtggcggctccgctgcaaggccaagggtggcactcacgttttgcagggactgtccagccggacccgcttacgggaacttcagggccaaatcgccgcgatcaccgggatcgcccctggcagtcagcgaatcctcgtcggctacccgcccgagtgcctggacctccgcgaccgggacgtcactctcggggacctgcccatccagtcaggtcaaatgaagagtactgttgaatggatcaaaagggatgatacttggggaggagcaattgaagatatcaattttgtctaaattctatcaatgtgaaatatgtgtggtagatacccagacagttagaattgaccgttttggggaagatgcaggatataccaaaagggttctgctcatctacgacggtatccactatgatcctcttcagcggaacttctcttgatccagatactcctcctctgaccattttctcctcaaatgatgatattgttcttgtacaagtcactggagttagcggaagaagctaaaagaagagacagtttactgatgtaaaccgcttacaccctaagatgcaatggtgtgaaggggttaaactggacaagcggaagcaagggaacatgccaaggagacaggccacaccaactttggagaggtgtgatctgttcgtaagagttggagcctactacctcacagatccagaaggctctgggtttcccaataaggatgctaacctgaagactggattctattataaaccagcacccatcggctctttaacttacagaagaaaacatcatattttaggtaatgaggaaagccttgcagaggttcactggacatatacttcggtgtctccagtagttgattccttttaataactttgaatgagttagtagtttctaaattctgaattgattcatcagatgaagatactcagaattgtcaaaacttttttatattgcaattttggtagactttataagtgtatctaacaacttctaaatgcataaaaagcaattttacagggatgtgtgtattccttgagaatgttatccaaaacaaggaatggggtcctgttggagattttctagtgtataaagtagaatgtataagggggaaaggtgcctgaagcagcttactgaagctttaaaagactgttggcctcatgttttaatgcaattcatgtgttggtatttgtcacattag

SEQ ID NO: 3158343 - DNA, 484 bp, Cricetulus griseus
gaaaaatcagacgaagatggccacctacctggcagaactgttggtccttaactatggcacacacgtagtcactagtgtggatgctggggctgcactggttcaggaggaccacataaggtcctccttcctcctggacaatcagaacagccagaacacagtaactgcctctgctgggattgccttcttaaacatcgtgaacttcaaacttgaggcggactacacttcccagaatgctttgaccaagagctatctttctaacagaaccaactcaagggtgcagagcatgggtggggttccattctacccaggcatcaccttagaaacctggcagaaaggcatcagtaaccacctggtggcaatagaccgtgaaggcttgcctctgcatttcttcatcaagcctgacaaactgcctggcttgccaggtcccttggtgaagaagttgtcgaagacagtggaaactgcagtgagacactattacactttt

SEQ ID NO: 3158344 - DNA, 550 bp, Cricetulus griseus
ctataacatgatcaccttaacttcttttgtatatttcatgcagaaaccaaggataagaagatgtaaataccttccaacaaacaaaagcattttcctgtaatataaaggatgagtgcgggaccactattcaattttttgtaaagaatgtatttataacctaacatttttctgttaattctgtaggaccagacttcaataccgtgaagttatagtaactttccaagtagttttataatagaaacattgctttcattttaaagaagatgttcaggggtattaaaacagaaatgtctgtgtactgtatattgctatttgtacatatgtacatatatgtatatttatagaagttgcatacacatgtacaaggttggcttagataaaatgtaccattttgaatggagatggtaattttatgttcacctgatggggaatgactcaaatggggcaataacaaaacatttctaaagttattttccattaaaagccatatgacgtattttgcctgttaaaattctagtttacatttggatctttagtggttacattgcca

SEQ ID NO: 3158345 - DNA, 954 bp, Cricetulus griseus
gtggctataggaatgcagaatcatccgcaggatctgccagtgcagttcacagccagtgcttgtgtcctcaacctaacgcgtgaagacctggccaagagaatgcctgttcgcctgttgtcagaggtcatctatctactcttcaaagcaatgaacgaatttcccctactaccaacagttacagaagaattgtcttctctccttaaccagttccaagattcttatggacgttccctttgacaggtttaatgctgccaagcttgttatgaggtggctgtgcaggcgtgagaaccccaagatgcaaacaatggcagtgagcatcacctccattctagccctgaagctcttacctgaggagactgagcagcttcaggaagagctcatcattaccatcaaggaacttctaacaatactcagacaaaaggtggctgagaagttaaatgatgtcaccttcttgtttactctgaaagcactttggaatcttacagatgagtctccatcggcctgcaagtactttattgagaatgaaggattggcaatcatcatccaagtcttagagacgttttccatgtctgtgatacaaagcaaagtacttggtcttttgaacaacatagctgaagtcagagagctcactcccaagctggtgacagaagacctgctgagacatatcatcagtctgctccacaacagcaacatagaagtgagctacttcgctgctggtgtgatagcccatctgacctgtgacagacagcactggctagcctgtgatgtgcagaggcgtgatcttctccaggacttgcatgcaacaatccaggattggccaagttcatggtgtaagatgtcagcattggtgacctacagatctttgaaatcattttccccactccttgacaacttctctcagccagaagttcagctctgggcactatgggccatgcatcatgtctgcagtaaaaa

SEQ ID NO: 3158346 - DNA, 482 bp, Cricetulus griseus
gggtctaatggccccctccaaaaactgttctgtgaagtatgtatttcagggtctctgaaacctttgtattctttaggtgccttatctctcaaggcccaacattttaaaatccggacccaacaccaaaaccacttactatttcctttacaagaatactgagtctggatgctacctaattctagattgagacagggacagcccatagttaccagggcagtggtactgtatttggggcttctgcactgatactcagggaagctcatcttttatattgtacgtggtccttatgtgggggcttatacttgaagttttctgaacatccctgaacaacataggactaaaattcctaattcacctaaactctggcaaatgcctacaaatctctgaaactggacgactttcccttctctgtgcaaccttggctgtctgggacttaatatgtagaccaggctggcctcaaactcagagatccgcctgcctct

SEQ ID NO: 3158347 - DNA, 195 bp, Cricetulus griseus
gatgatgaagtactgggccaactttgcaagacatgggaaccccaacagcgaagggtctaccctactggcccatgttggaccatgatgagcagtacctgcagctgaacatccagcctgctgtgggccaagccttgaaggccagaaggctgcagttctggaccaagactctagccccagaagatccaggagctaaag

SEQ ID NO: 3158348 - DNA, 429 bp, Cricetulus griseus
ctggatcgccggtgctggcggaaccgtcaccatgtcctctggctagagatctattacacccttccttggaagaggaaaagaaaaaacataagaagaaacggctggttcagagccctaattcttacttcatggatgtgaaatgtccaggttgctacaagattactacagttttcagccatgctcagacagtggttctttgtgtaggttgttcaacagtgctgtgccagcccacaggaggaaaagccaggctcacagaaggctgttcatttagaagaaagcaacactaatcatctatacatgttcctgagtttgtgttttttcacagaaagccttatcaagttcagtgactaccaagactatgtaactatgtttgattttataaagtatacaacaatgatctcctattttggtgtcagtttttcaataaag

SEQ ID NO: 3158349 - DNA, 2831 bp, Cricetulus griseus
ttccttattatttggagctagaaacctctgggttttctgaagatcctaccccttgtgtagtggctctttccagtagctaatcttaaatttgggattattcctcaggagctgcatgcaagattgttagatcaggaagactataagaacaggactcaggctgttgaagaactaaacagttgctgggaaatttaacccaagttctacccctcattctagtcttgttggtagaagactcagtagtaattagttggtaaaaggtgtattggaagtccaaattcagcaccaacaacttgcagcccaccagtgatagacactgtggaacaggatacattttcagtgaaacccagcattgaaccgccatcaggaatttatggaagagcagtccagcaaaatactccatcatatcttgatgttgaaaatgacaaagatactaaggtttctatggcaaagtctacttatgacaagatgagacaaaagagaaaagaagaaaaagagctttttgatgctaaagatggtgaaaggaaagagctgaatccctgggaacgaataaaacatacaggaactgagagattgacatctgaaagtgatgcatctcctggaatcatttcacaatataaagaaagaatatcttctgtcactcatagtccagagataatggattcactggaattacgaccgttttccaagccagaaatagcgagcatggatcaagaactcgatactgcagtaagagctttgctgcacaaggctggagaatctaacacattcataagggaagatgtggacaaggcgttgagagctatggtgaataatgtaacccctgcacgtgcagtcatttctctcatcaatggaggacaaagccatttgcacattgcagtaagaagatgtacagcacagcacttggcagatgtagtagaatttatggaacctgagcgtattttatctggaacaaaaggaataataggctagaaacgcttattgcctgctgctgctaagtttgctcaagatagctcacaagaaaccaggtattatggccgtaagatgcttttcctcatgatgggtcatcctaactttgaaaaaatgctggaaaagtatatcccgtctaaagatttaccatatattaaagaatctgttaaaaatttgcggcaaaagggtttgggagagataccactagacacgccatcagcaaaaggaaggcgatctcatactggcagtgttggacacacgaggtcatcatctgtttctcgagatgcttttagttcaaccgaaagggaagtaactgaagttcgagaagtccccagaaaaccagctcctcgaattccttagaaagtgctgagtacattaaagtcataacaggtttattaaatgacaaaagaccaacattgtgaagatctttgatgcctttaagtctcgacttcatgattctaatagcaaagtgaatttggtggctcttgaaacaatgcataaaatgattcctttacttggagacaacttgtctcctataatcaacatgctgattcctgcaattgtagataacaatctcaactccaagaatccaggcatctatactgctgccacaaatgttgttcatgcactgagtcagcatgtagataactacttacttctacaaccattttgcacaaaagctcagtttctaaatggaaaagcaaaacaagatatgacagaaaaacttgctgatattgtcatggaactttatcaaaggaagccacatgccacggaacagaaagtgctggtggttttatggcacctcttagggactatgacacatagtggctccctgcctggagctggcggaaatatacgaacagccacagctaaattgtcgaaagcactttttgcacagatgggtcagaatttattaaaccaggctgcatctcaaccaccacatatcaaaaaaagtttagaggaattgctcgatatgacagttttaaatgaattatgagtttttgatgaaatagttatgatgaacaatttacataatgacaactgaaatctttttaaagctatattttgcattttgagttgcctgcatctcatgtccagtaaattaagtcagtggctatgtttatttgcagcctatttgtgagtacagatctgtccttctagccatcacatgaaaacctgaaataattaatataagctaatgaaatccatgacgcctgggatgaactaaattttaaatgtttttgagacaaatcctgctcatttgcactattctatagaaactgcaatttgttgccccatatgtacaattagatttgtaattaaaaatatactttttattatgtaatcatgttctgctatgtctcattactctaccttgttttatgaattggaagaaaagtcttttaactatgttattccaaaataagttttgtgtgctatttgtgaataacatgtttctgaatcagtctgctaatatgattatgcagtattagcttgctattgctgctgtgttactatggtatatttgctaaacttttgggtttaatcatctgcacaattgtgaaatttaacaagttataataaagcatgatgaccaaagcttagaaaacattaaacatttgaatgcacgtttgagaaacgtgttgaatgtaactttcttattttttgtgtgcaaacactaattttttaatttctgtatgtctgtccatttataaaggtgttattttgctgcccagttgtgtaattctcaaaaatagtgccaggtcttctatagtttttttctagaattcttgggcttacgagtactgtatgcatcttaaagaagaaaaggaatgttaaaaaataaaaggatttaatttctagta

SEQ ID NO: 3158350 - DNA, 787 bp, Cricetulus griseus
tacgggacttcttacccagactactaaatggaagttggctctgcgacaacaactgaatgaggcgaaacagctagctcctccaacaggcagagtactgtacacaaatgggagcagttaccctgtaccctcctctggggagtctcccgcagcgaggaagtcgtcaaagccattctgggaggagacaaagcattgaagttttttaatatcactggtcagacgatggagagtctatgtgaagtcattggatggggatgtcaaggaggttgattctgatgaaaaccagtttgtatttgcactggctggaattgtaacaaatgttgctgccattgcatgtggccgtgaattcttggtgaattaccagtcgggtgctcttggacaccatgttgcggctcatccagtctgtggttctagaaccagaggtcttctccaaggcggccctggagttccggagcactttacccctggagcgcatcctggccatgtccaagagccgcaactcccacctgcagactgctgctcaggagctcctggaagacctccgtgccctggactgcagtgtttaagcgtgcttgaccaccaggggcttggggaaaatgccagtgccccttcccctccccaggccctttgcctttgtgttcacaactagatgtcactgtatgtcacatgttagagattgtaggccttgacaaactagagatggacatgatggataagcatcctgcatttccatcctgggagtccatacttgttagattatgttaatcttgctatagcagtgaccaaaaaa

SEQ ID NO: 3158351 - DNA, 802 bp, Cricetulus griseus
gtccgttgttctgtttgcagtgctggggcccaatccagagtcacgtgtgtctaggcctgcactccaccatttagctacatccagccccgttatcttgcttttgtaaatgctggtgcttaggttctaagaagatttggcttggtttgttcatggtgggcaagcatccattgtccaggttgagagcaaaacagcactttctacctgccccctcccaggagtgccaacacacttaagctttgtctgcaaaagcctggtttaaaaaaaaatctctgaaatgaatgatgttcaaaaatgggttggttgccatggcaacctccaggaagagatacttgttacccttcattattttctagtacttttgaatagtcccacggggcacaagccatttgaaggatgtggacggcaaccctaagctgtctctctagtgctgggtgtggctctcagggattgaactatggaatcttgagctgggagagtggggatggcctttaaaaccttgctgagtgatatttggaatgttgcccctgagtgtctgaggggagttcccaataggactgcaatggtagagagtgaagggccagagttactgtgtgaaaccggggcagaaagaaaaagctgagaccggccctgtcatgcttcccagtttgtcctgcaccctaaggtcacaccctgtcaggacttctatgtgctcacctgtccctccctgcagcttcctcagcagacaggttcttggacccaggcaccaacattccaagggacaccagccaacctgggtgagggcccaactctgtatgtcttccct

SEQ ID NO: 3158352 - DNA, 309 bp, Cricetulus griseus
ctcatctctgttcctgaagaagaaatggggcattggctatcatctaagtttacatactgaatgaaatgtgtgatccagagagtataacttcactggtcaaaaagcacatccctgatgccagactgaccacacaaagtgaagaaagactcatgtatatcttgcccctggaaagcacgaacaaatttccagacccttacagagatcttgataggtgttctaaccaaggcattgagaattatggtgtttccatgacaactctgaatgaggtgttcctgaaattagaagggaagtcaatgactgacgaatcag

SEQ ID NO: 3158353 - DNA, 366 bp, Cricetulus griseus
caggtatcagaatggtgccgagagacggtgggaaaaatctaccagatactctgaacattctagagaatcaaagagaaatcaggaccggaggagagaaaagtctccaacaagacaaaaataattctaatgacaactgagtatgccttacattcacttgcgaagtcttttttacatggatggattttatagagaattcttgtataaagtacctgtttgtatctgtaaattttaaagatgttttcttttgacatgttttataattgacacatctcaaggtctgtaaaatcatcaagaaaagggtctcaacagaggggtaagtcttatgttttgtgaataaaagaaacaaatgctcattagaaaaaaaaa

SEQ ID NO: 3158354 - DNA, 643 bp, Cricetulus griseus
  modified_base (634)..(634): a, c, t, g, unknown or other
taggaagaatcggaacctgtatgcaaagcttgttactgcatatgcttaggcgaggagtacttgaaggcccttttacacaaacgtcctgagccaggaacactaaaaacattaccatcatatatgtccatctattttgatgatgaaccaaatccagcacaaccaaaaggttcaagtccagagaagctacccgactgggtaatgggtgaactggagacaggcgaaacctaaattaagtgaatcatggcagtacctcttctggggaagacaacatgctggttgctgggaccacgagaccgctgtcaacaagttgaaggctgaatcagaaagggtgaaaatggagctgaaaaggacacatgccgctgagactgagatgaccctggagaaggccaacagcagactgaagcagatcgagaaggaatacactcagaagctttccaaatcttcccagatcatagcagagcttcagacaaccatttcctccctgaaagaggagagcagtcggcagcagcttgctgcagaaaggcggctccaggatgctatacaaaagtttgaagatgagaagcagcagctgattagagataatgaccaagcaatcaaggctttacaagatttatactaaaaaaataaaaaaaanaaaaaaaaa

SEQ ID NO: 3158355 - DNA, 705 bp, Cricetulus griseus
gcagaccgccccctggttccagcctacgccccctgccgccccgggcgcctccagcgtcacctcctgagcggcgagttcgaccagctgcgcgacttccccatctttgagagcaacttcgtgcaggtgacacggtttggagaagtcgccaacaaggttaccatgggggtggcagcctctagtccagccctggagctgccagacctgctgctgctggctggccctgacaaggagagtggacgcctacagctcctcgggctgttccctttgcaattcgtgcagctgttcgtgcacgatgagagccgccagcagctcaaggtcaagttccgcacaggtcgtgccttctacctgcagctgcgcgcgcctgcagagacccgcgaccgcgagttcggccgctgggtgcgtctgctctaccgcctgcgcttccactcgcctgcctgcgtagtgcccttcacgcatgaggacaccgctcctgaggaggaggacgaggaggaggaagaggaggaggaggaaggcgaggagggacagttgcgggccccggagcttcaagccacagaggccagactggacccgcaggtctcagaactctgggggctctgatttagacaagatccttccatatcgccaaaggaccagagatcaagccagctcacttcagagccaaagagatggaattttaaaggtaataaagatcgggctcttaagaac

SEQ ID NO: 3158356 - DNA, 1319 bp, Cricetulus griseus
cagctgaccctcaagctagtttatctccaatgtctgaaagcaccctcagcattgctatcggcagttctgttatcaatggtttgcctacttacaacgggctttcaatagatagatttggtctaaatctcccctcacctgaacatcccaatacgattgacgtgtgtaatactgttgatataaaaactgaggatctgtctgacagcctgccacctgtctgtgacacggtagccactgatttatgctccacaggtattgatatctgtagtttcagtgaagacataaacctggtgactccctcttgctgagtgttgaggaagtcctccgaagtttagaaactgttcaaatacagcaggagacttggtgctgccttccgatgccgcagtgatatttctcctgttgaaaagctgatgtgtccagctcaacctttgtgctgacataataccatttctgatcatgaaaattggctactggtgtgtatgtagcagttcttaaatcagcagtattatgaaagaaaatttccccctcattagaatgttttaagaaatctgtcttttaaaaagtgaacaaataaattctgtcagaccacaaatgttaagaagctgtttatgctttaaatatttatgagttcagccccctttctagttatctgactcacttctatgagaaaatcctaagtcctttcacttgagcaatgttctatttggtaaataaagtgacgagttttattctgaacataattgaatttgtatagttcatgactatttttaaaaaatattagtaatttaaaaattggttttatttagtaataattttggaaggtgtaaagctcggtaggattttctttagaatgctcttttgcatgtaaagcacaaactgtgtttgagttttaatgtacttcttcctattaactttatggggaagacaaacattctgttgaagggaagtctagtcagttgcttgaaaagagcacagcccaggtaacaaggactgactaggtgtagagaagcttgtgatttcaaagagttgctgctttggcagtgcttacttttaagaaaaatactgctagggaagttccagtttctactgcattcaccatctagtgagatcggatgtgttggagttgtttgatttggcacacagcatgttcaatgatggttactcgcctcataaagacatggagaagaatcctttggacacagagcagatgacacctcctgttttgtagtgtatcctggtgtcattttctgtgaatgtggtcaggtagtcgttttgttcttgtcattgggctttttaaaaaaacaaaacaaaaaaaaaaaaaa

SEQ ID NO: 3158357 - DNA, 707 bp, Cricetulus griseus
gggtcccgctgagcctggcgcggggctgcagctcgtcggccggcctagagggccccgcgcgcacgcgctcctactggcggtacctgaggcgccttgtacggggcgcgccacagccgccatacacgcgcgtgtgtcaggtcggggacccggtgctgcgcaccgtggcggcccccgtggaacccgcacagctggcggggccggagctgcagcggctggtggggcggctggtgcaggtgatgcggcggcgcggctgcgtgggcctgagtgcgccgcagctgggggtgccgctgcaagtgctggcgctcgagttccccgacgcgctcttccggaccttctcaccgcgcctgcgcgagctgcgtcagatggagccctttccgcttcacgtgctggtgaaccccagcctgagggtgctggacagccgcttggtcaccttccccgagggctgcgagagcgtcgccggtttcctggcgtgtgtgcctcgcttccaggccgtgcagatctcaggactgaacccaagaggagagccagtggtgtggtcagcaagtagggtggacagcccgaatcatccagcatgaaatggatcatttgcagggctgcttgttcattgacaaaatggacagtgggacatttaccaatctccactggatggaggtaaatgactgaagctctgttgcttgactgagggtctggaaaactggcatgcagac

SEQ ID NO: 3158358 - DNA, 1380 bp, Cricetulus griseus
tatgactgttttctgaagactatgacaccagtgagaagtgccgcacccggcatggacagaccgagtcctctggagaaggaggaagtggccttttgacagatcagctgaagatttggatcttctgaatgctagtttccaagatgaaagtaaaatcctttacacatggaccccgggcactttgctgcactatgggagagccgagctgaagacttctgaccataggcctgtcgttgccctgattgatatagatatatttgaagttgaagctgaagagagacaaaaaatttataaagaagtcattgcagtccaaggccctccagatggcacagtactggtctcaatcaaaagctctacacaaggaaataatttttttgatgatgctttgattgacgagctcctgaagcagttcgcacattttggtgaagtcattctcatcagattcgtagaagataaaatgtgggttacatgagaatggggcattagttattctttatgtgcaataagtgatcattaagtgcactgatagttatataaacactagagggtgtgggcagagctggggtttgtatatactggaaataacaaagacaccctcttattaactggagttctggtctttctctttagatgaataggagagagcaggagccatttttaaaaagtgcttaaaactactttaaaaaatagtccttactcagaaattcacataaaaatcacataaggccaacacaactatagctgacattgctgccagccactgtgctgttgacaattggtattcttgggtatttaccaaagagcttccagagttatggtggaacagttctgaaggcattacttcagcaaaaaggtctgtgtgtgtacacattatatgtatatgtttgtgtacacagagacatacatgtagacatttacatatttataaaactttcccatataagaggccaccacacatctatgatgctgctttaaggtttcagaggctatacctcacatttgctgtggattttgtcttctgcactgccggtatgtaaccgatcctgcttttattaattttgtgaagaagtacacagaatttttaacaaaaaaaaaaaaacgcaaatgctcagtgttatcaaaatactgtatgtatagaagtaatcccctgctacagccagagttgctgtaagcagtcactcccgtgagttttatattgtgcttgttggggttctaatcatttcagccatagtagcttttaaaccgcagtattactatagaagtgtgcttcaaaatgtgacttaacctgttgagattgtggctgtaacatctttgtgactagtgtgtatggtatccactccctcatagcaaactaatccatcattaagaaacccaagcagtgtg

SEQ ID NO: 3158359 - DNA, 394 bp, Cricetulus griseus
tgcccatcactatctgcatagcctattttaacaactgcctgaaccctctgttttatggctttctggggaaaaatttaagaaatattttctccagcttctgaaatacattcccccaaaggccaagtcccactcaagcctgtctacgaaaatgagcactctttcctaccgcccttccgataacatgagctcatcggccaaaaagcctgcgtcttgttttgaggtggagtgacaggtccagagtctcctggttcaagcagtgccctgacagaagccagggcagcatctgactagacggcacactaccaaaggaacattcacccctgcctaggagctaagcagaaaatgcattcaatggactgtagatgttttctaaaactctgagacaaagctttga

SEQ ID NO: 3158360 - DNA, 468 bp, Cricetulus griseus
ttttccatatgttttatacattttattctgacatcttttaaaaacaaaaagacgcacacatttgcatttatcaatgcccttttctttaaaaaagggtttcccttctatcctctaggctctgctctccgagatgttcctttgctgggagagcatcagaggtgctgtcttcaccctggcactccagctgggctgcctttcctgttagctgcataatttcttctaggacatttgtaacagacacaacatatacaggacgacttcagtttgtatttttccttggctgtttattttttttttaagtgtgtttccaggttctcatattttcttttctttgaatatattgcacattttattattagaaaaaatttttgtttcaggcaaaaagtttttctccacccaggaggtactaatgtgtattattttctaaaagaggtaagtggttgtctgtgtggccatcttcaaagggga

SEQ ID NO: 3158361 - DNA, 1108 bp, Cricetulus griseus
ctcacaaggaattaaagatgagtaagagcaaagatgatgcacctcatgaactagagagccagtttatcttgcgactgcccccagaatatgcctctactgtgaggagagccgtgcagtctggacacgttaacctgaaagacagactgaccattgagttacaccccgatgggcgtcatggaattgtcagagtggatcgagttcccttggccgcaaagttggtagatctgccgtgtgttatggaaagcttgaaaaccattgataaaaaaaccttttacaagacagcggatatctgtcagatgcttgtatccacggtagatggtgacctctaccctcctgtggaggagccagttgcccctgcagatccccaaagcaagcaagaaaaaagataaggacaaagagaaaaagtttgtttggaaccatgggattactctacctttaaaaaatgtcagaaagagaaggttccggaagacagcaaagaagaagtatattgaatctcccgatgtggagaaagaagtgaagcggttgctgagtactgatgcagaagctgtcagcactcgctgggagataattgctgaggatgaaacaaaggagacagaaaatcaaggcctcgatatatcctccccaggaatgtctggccacaggcagggccacgactccctagaacatgatgaacttcgagagatattcaatgacctcagcagcagcagcgaagatgaagaagacgtgaacgtcatcgacaccgaggaagatctggagagacagctgcaagacaagctcaacgaatccgatgaacagcaccaagaaaatgaaggaaccaaccaactggttatgggaatccagaaacagatcgataacatgaaaggcaagcttcaagagacccaagacagggcaaaacgccaggaggacctcatcatgaaagtagaaaacctggctctcaagaacaggtttcaggctgttctggatgagctcaaacaaaaggaagacagggaaaaagagcagcttagctctttgcaagaagagctagaatcacttctagagaagtgagaatgttgatttcggtccttagactggccagcttgagaaagatttattttcatagtaagatctt

SEQ ID NO: 3158362 - DNA, 424 bp, Cricetulus griseus
  modified_base (387)..(387): a, c, t, g, unknown or other
ccggggagaagcccttcgcgtgcgagttctgtgggcgcaagtttgcgcgcagcgacgagcgcaagcgccacgccaagatccacctcaagcaaaaggagaagaagtcggagaaaggggtgcgccctctgcatcctcggcgcccaccgtgtccttggcccctgtggtcaccacttgcgcctgaggctcgggcacccagatcccctcttttcccaccagtgcctcctggctggtcgcctgaaagcagcggggaaagctagccactgaggcgcaggggccgcgccctggtctcgtcctggacgtacggcccccttgcctccccttcgatgtcccccattcccacccttgcacaccggccgatggttggggctagggctggaggcactttcnccttgcttccccccccttgtccacgcgtggggcggaa

SEQ ID NO: 3158363 - DNA, 1693 bp, Cricetulus griseus
catactccctgcttataatgcacagggacgtcatttatgcagtgcgggatccatacggaaatcgtcctctgtgcatcggtcgtcttattccagtttctgatataaatgacaaagagaaaaaatcttcagaaactgaaggctgggtcgtgtcttctgaatcttgcagctttttatctattggtgcaagatattccccatgaagtcaagcctggagaaaattgtagaaaatatccagacatggtgtcagaacacttgatacaattccaaggtctgaaggagacccagtggctttttgtatctttgaatatgtttattttgcaagaccagatagtatatttgaagaccaaatggtttacaccgtaaggtaccgctgtggccagcagctggccattgaagcacctgtggaggcggacttggttagcacggttccagagtcggctacgcctgctgctcttgggtatgcagctaagtgtggactgccctatgtggaggtgctgtgtaaaaaccgatatgtgggaagaacctttattcagccaaacatgaggttaagacaactgggagttgcaaaaaaatttggtgtgttgtctgacaactttaaaggcaaaagaattgttctcatagatgattcaattgtgagaggcaatactatctcacccatcataaaactcctcaaagaatccggggcaaaagaggtgcacattcgagttgcttcaccaccaataaaatatccttgcttcatgggaataaatatacccacaaaagaagagctgatagccaataagccagaatttgaacatcttgcagaatacctcggagcaaacagtgttatatacttgtcagtggaaggactggtctcatctgtgcaacaagagatcaaattcaagaagcaaaaagtgaaaaaacttgacattacaattcaagaaaatggaaatggtctggaatgttttgagaagactggtcactgtacagcttgcctcactgggcagtatcctgtggaactggattggtagctgccaggacagagttcctccagactgaaagtaatcacagaagtggtttccatactgttactcggttggtataaagtagataccacctgctatgtatgtatacctttataagcttttgagaatttctgaggttaataaattgctatcattgaaccatgacagattttaatgacgcaggtttagaggactgaggtgatttgcttactaactcctgtttgtgtaagatttttcacatgcaaaaataattatttctttattattgccaaaatttgctgtatagtttccacaccatttagaaatatagtatttattaattgaaattattcgtctgcatttggtatacagtctcatgtgttacataatggcaggtcaagatagaatggtagtggttcaaggtcatgtgctgcagtggctgaagtgaccctgtgacaaagacacaggcaagttggcatttttacagccctggggccatttcagtgggtgtagcctcttatgttaaatgtattacccattacagcatggagggtaagcctttaggtcagttttaaaatggccttatttaaatttgatgttataaaaaggaactcagggaaggtactaaaaccaaaatctctaatttgacttttgtgtttagtttctagatcgggattaattaacttttttttttttttaccagtttcaag

SEQ ID NO: 3158364 - DNA, 1040 bp, Cricetulus griseus
cggccgaggagggggacttctctaagggtcccattcgatgtgaccgctgtggctataataccaaccggtatgatcactacacggctcacctaaagcaccacaccagggccggggataatgagcgagtctacaagtgtatcatctgcacgtacacaacagttagcgagtatcactggaggaaacacctgagaaaccatttccccagaaaagtctacacatgtagcaagtgcaactatttttcagacaggaaaaataattatgtccaacatgttcgaactcatacaggagaacgcccttataaatgtgaactttgtccttactcaagttcccagaaagactcacctaactcgacacatgcgcactcattcaggtgagaagccatttaaatgtgatcagtgcagttatgtggcttcaaatcagcacgaagtgacccggcatgcaagacaggttcacaatgggcctaaacctcttaattgccctcactgtgactacaaaacagcagatagaagcaacttcaaaaagcatgttgaactgcatgttaacccaaggcagttcaactgccctgtgtgtgactatgcagcttccaagaagtgtaatctacagtatcattttaaatctaagcatcctacgagccttaataaaacgatggatgtctcaaaagtgaaactaaagaaaaccaaaaagagggaggctgctgacttgcatagtaatgtcaccaatgaaaaaacagagacagaacaagcaaaaacaaagggggatatgtctggaaagaaaaacgagaaatccctaaaagtagagaaaaaagatgtttcaaaagagaggaaatctcctggcaatgtctcagtggtccaggtaactaccagaactcggaaatcagcgacggagactaaagcagcagagatgaaacacatagctgtacatacaggaaataattcagaaaaattcagtaaagccaagaaaaacaaaagaaagatggattctgaagcccattcctcaggtgatcccgtgaatgaggaaccagtagaaacaaaaaaaaaaaa

SEQ ID NO: 3158365 - DNA, 431 bp, Cricetulus griseus
gccaatgtggcctgttgttcaccttggatttcaacagggtgcgcttgttgcacgaaaaaggtttaatgtacctggagatctccttataaactccactgaatgcctgcatgtacgttgccggggaatagagaccagtttggcggagtgcacctttaccaggagaagaactagcggttaccagggcttggctgatgtagtgtgttacacacgggatgcagattctccatcaaatcagtccttccagtgtgtgaatgggaagcacatccctcaggagagagtctgcaatggagtcaatgaatgtggagatcaaagtgatgagctgtgttgcaaagcttgccaaggtaacgctttccttgtaagtcgggtgtttgcatcccaaaggaatataagtgcaatggtgaggtggactgcattacaggagacgatgagag

SEQ ID NO: 3158366 - DNA, 315 bp, Cricetulus griseus
caaccaacccgttattgacttgattgaagcaaaaatgggcattttggagttattggatgaagaatgtttgttgcctcatggaacagatgaaaactggcttcaaaagctgtacaacaattttgtcaacaagaactctttatttgaaaagcccagaatgtcaaacacatccttcatcatccagcactttgctgacaaggtggagtaccagtgtgaaggcttcctggagaagaacagagacactgtctatgacatgctggttgaaatcctccgagcaagcaagctgtctgctgtgcagatcatcagtctgtgccccct

SEQ ID NO: 3158367 - DNA, 1947 bp, Cricetulus griseus
  modified_base (1938)..(1938): a, c, t, g, unknown or other
gggtctgaatcgtcggctgaggcttgttggcctcgctctctggccgattctcggcccttctgcgccgtcgccgcccgcgccctcgttggcgccgccgtccgcagccctggcgctccccgcgggccccgctgaggccgtctgcgccttatgccagcgcgcaccccgcgagccggtgcgcgccgactgcggccaccgtttctgccgggcgtgcgtggtgcgcttctgggcggaggaggacgggcccttcccgtgccccgagtgtgccgacgactgctggcagcgcgccgtggagcccggccgccctccactcagccgccgtctcctggcgctcgaggaggcagctgcagcgccgacacgcgacggccctgccagcgaggccgcgctacagctgctgtgccgtgccgacggagatccgctatgctccgcctgccgcatggccgcgggcccggagccgccggagtgggagccgcgctggaggaaggcgcttcgcggcaaggagaacaaggggtccgtggaaatcatgaggaaggacttaaatgatgcccgggacctgcatggtcaggcagaatcagccgctgctgtgtggaaggggcatgttatggaccgaagaaagaaggccctgactgactacaagaagcttcgggccttctttgtggaagaggaggaacactttctgcaagaggctgaaaaggatgagggtccttcggaggatgatgagcaggctgacccagcagaacgcttccggtccttactgcaggctgtgtcagagctggagaagaagcaccggaacctgggccttagcatgctactgcagtgaagatgcttgcgcagcaggctggccccctggagcatgaggcagaaggaaccaccttccattgctggcctgcagcacccccacctacatctctcaggcctctctgcctggcgctacccttcatcctgaacaggtccccatctctgtcaacactgataacacattggtctgggatgaagcaaaaggtgccccgctttcggtcatttacatagttccatttctcagcagtgttttagttttctttggggcatgaatatggtcaggcctgttcctagtagagaccagtcctgggattcccttcccagtgtgtcccaaccctgcctgagaccagttggcaggtctgaagcccctgcttcttgtttagtcatggcacagggcctagtgtgacaatgtcactctagcatccaagaaccaaactttgcaccttccccattggtgcccttgacaggattggctcaccagacattcctcagcaaggctctggggcataccacttatagtcagcatgtgttagtgccagggaatagagatgtaggaggccctgggatttggctgggacccgacgtcttacaccctccagagggctgctccctccctttgggtcttgctgtgccagatcctgggagctgtcttatgctttgctttcctagcctctttccttctagcttgtgccccttgggtgtcactgtcatccccaaagtgctccctactgttacccacctctcacggaagggaccatctatcttccctgcagaagagcggcaggggtggcatctccaagccacctggtgcttcacttcattgtatttttggctttctcacctcatattttctctagtaggtgaatttcacaaaacttgtggcgtagcggtagcgtggttgcctgcaacattgtgtgtgtagataactagtccaagaaacaaaacccagcagagtggacagacaggtcaggggccaaagatacagacctatgtaggtttgggggttaatgatgttctgtcctcagaaggccccgcggggccttgggtgtagtgactagctccagcttgacttccaggtggtctgggttctcagtgctgaataaaatggtttgctccaacaaaaaaaaaaaaaaaaaaaaaaanaaaaaaaaa

SEQ ID NO: 3158368 - DNA, 1882 bp, Cricetulus griseus
ttctccagctccagtgtggggagttgttgctgagagttttattacctgtggatgttgctgctgacatggagaggattgaggaacaatttgctaatctgcatattgttaagcgttcctcagaaccgaaagagcccacttacctgcttgggatagacacatcaaagactgtccaagcagaaaaaggagcttggttgcggttctgtgttcaaatgcatcgataagaatatatgataaagagacactaaatgtactacgagaatttagtggctctcccggactccttaatggagtcagatttgggaattcctgtgacaatgtctattctgcaagtacagatggcactgtcaaatgttgggatgctcgagtagctagtgaaaagcctatgcagttgttcaaaggttacccctccaatagtttcatctagtttgatgtgaactgcaaagatcatatcattagtgctggtacagaaagttgatgatgatgccaggatctgtctaccagagacccacttggtgcctattcagagacgcacagtgatgacatcactcaagtacgtttccatcccagcaatcccaacatggttgtctctggttcaactgatggcctggtaaatgtgtttgatatcagcgtggataatgaagatgatgcgttggttgcgacctgtaactccatttcatcagtgagctgtattggttggtctggaagagattataaacagatttactgcatgacacacgatgagggattttgttggtgggatcttaatcatttggatactgatgaaccaaatcacatgtttgaacatccaggatgtgagagaagtaactgatggaaaggaaggtcacttggactatctgaattggtggcctgtatcatgaaaagattgacagactgtttgttattggaggaaccaacacaggaaagattcacttaatgagctgcacctcctcaggactgactcatgtgaccagccttcagggggggcatgcagccactgttcgttctttctgttggaacatgcccgaggactctttgctgactggaggagaagatgcacagttgttgctttggaaacctggagctatagacaagaaagaccttcacaaaagaaagacagcttgaaaatagcatcctctgtgcagcagcgagttcgagttcacagcagtgattcttataagagaaggaaacagcagtgatgtcctgctgggaatttgcaagctcttccggtttcaaatcacttttactacccacagcaaatgtttttaaagcttacctgcaaaaacagcaattagcggtccagacatactctataatatttttaaagcctccagctgagtataaaaatcagtgacttgacagggaaattacaagcctcattttgaaaccatctgttgagttagtaaatgttgggtttgaagaaatgtctccgaaaaggtctcttccatagataactggggagacaatgaaacggctggtttgggctgtgttttttaagctcagacttcattatgtttgaaattatcttcattgtttatgcaatatcagactgtttagtaatttgaggggcttttgcttgctcaatggaaaacaattgaggatgtcatcgcccagggtgttggcaagcttgctagtgtgcctgctggtggtgctgtggctgtttctgctgcccctggctctgcagctcctgctgctagttctgcccctgctgcagcagaggagaagaaagacgagaagaaggaagagtccgaagagtcagatgatgacatgggatttggcttgtttgattaaaaccctgctcccctgcaaataaagcctttttatgtatcttagaaaaaaaaaaaaaaaagtgtgtgtgtgtgtgtgtgtgtgtgtgtgtgtgtgt

SEQ ID NO: 3158369 - DNA, 695 bp, Cricetulus griseus
atggcatcgtgattttctctttgggatccatggtctcggagattccagagaagaaagccttggaaattgctgaggctttgggcagaattcctcagacggtcctgtggcgctacactggacctaaaccatcaaatcttgcgaagaatacaatacttgtaaaatggctaccccaaaatgatctgcttggtcatccaaagactcgggcgttcatcacacactctggttctcatggtatttatgaaggaatatgcaatggaaaatgcccttaaaaaggtcatcaatgacaagagctacaaggagaacatcatgcgtctgtccagactgcacaaggaccgtccgatagagcctctggacctggctgtgttctgggtggagtacgtgatgagacacaagggggcgccacacctgcgcccggcggcccatgaccttacctggtaccagtaccactccttggatgtgattggcttcctcctggccatcgtgttgacatctttcttcattgtctataaatgctgtgcctatggctgcaggaaatgctttgggaaaagggacgagttaagaaatcacacaaatccaagacccattgagaaagggggtgggaagtgaaggggaggtatcggtccattctccaatcagtttgaaacttgaaaacagaatcagtgttaaattattttgtttttattagggaaataatt

SEQ ID NO: 3158370 - DNA, 191 bp, Cricetulus griseus
tttgttttttccagacagggtttctctgtgtatccctaactgttctggaactcgctctgtagaccaaactggcctcaaactcagagatccgcctgcctctgcctcccaaatgctgggaataaaggtgtgtgccaccagatggttgtgagccaccatgtggtcgctgggaactgaacacaggacctctgaca

SEQ ID NO: 3158371 - DNA, 2102 bp, Cricetulus griseus
  modified_base (2051)..(2051): a, c, t, g, unknown or other
  modified_base (2081)..(2081): a, c, t, g, unknown or other
gtcaaatggaacacaactgggaagagaacacaatggaggggtgcttggtgattctatacaagttggaacagttaccagtgaagattcatgccctcagattcacattagtactccaaatacagagaacactttagagtgtaatttgtatggaaaagactttctgccacttaaagaaacttctactgaagataacacttttcagctgaaccagtgtgtaaaaccattcactttgacttcagatgtttcccagaaaatgtccacttttggaagaatcctttgtaatgcagtgactgtgggaaaactttccttaatcagttagtacttcaggcacatagtgcttctcatggtgaaaaaggatctccacaaatcagagcagtgtgcgcaagcttttactcatcctacaagccatgatgagcatgttgtaattcccactagaaaaaaaagggaaaacctttattcaaccctcacgtcttacagaacatatgagaagtcatacaggagagaaaccgtatcagtgtgaccagtgtgggaatgcctttgcatcttcttcttaccttacgtacacatttggaggactcatactggagagaagccctttgagtgtaacatatgtgggaaggcttttacacgttcctcttacctgctaggtcacatacgaactcacacaggagaaaaaccctatgaatgtaaagtatgtgggaaagcgttcagtggccgttcgtggcttacgatacacttacgaaagcatactggagagaggccctatccatgtacagaatgtgagaaagccttcgaccagctttgctcaactaactgaacatataaaaactcacactggtgagaagccctttcggtgtaaggtatgtgcaaggacctttagaaattcctcatgccttaaaacccactttcgaattcacactggaataaaaccatataaatagtaatttttgtggaaaagacttcactgcacgttcaggccttactaagcatgtgctaattcacaatggtgagaagccctatgagtgtaaggaatgtgggaaagccttcagtacatcctctggccttgtggaacacataagaattcacacaggagagaagccctttgaatgctatcagtgtgggaaagccttggctcactcttcatctcttgttggacatttaagaactcacactggagaaaaacccttcgagtgtaatcagtgtgacaaaacatttacacgatcttcttatcttcgtattcatgaactcacacgggggagaaaccatatgaatgtaaagagtgtgggaagactttccctgagcgctcatgccttactaaacacataagaacacatactgggaaaggccctatgaatgtaaggaatgtgggaaaggctttattagttttgctcaacttactgtgcacataaaaactcacagttccgagagaccttttcagtgtaaggtgtgcacaaaatcctttagaaactcctcatcccttgagactcactttcgaattcacactggagtaaaaccctataaatgcacttactgtgggaaagacttcactgctcgttcaggccttactatacatttacgaaatcatactggggagaagtcctatgcatgccaagaatgtggaaaagcctttagcacttcctcaggacttattgcacatataagaagtcacaaaggggagaaaccctttgaatgtgaccactgtgggaaagcttttgcttcttcctcttatcttaatgtgcatttgaaaattcacactggagaaaagccctttcagtgtacagtatgtgggaaaacatttacatgttcttcttaccttcccgttcacatgcgaactcacactggagagaagccttttcagtgtataatatgtggaaagtcatttttatggtcctcataccttcgagttcacatgcgaattcacactggagagaaaccctatgtatgtcagtactgtgggaaagcctttacagaacactcaggccttaataaacatttacggaaacacacaggagagaaaccgtatgaatataaggagtgtgttaacttttttntttttgagacgagggttcttgctttttttnttttttgtttgttgagacaag

SEQ ID NO: 3158372 - DNA, 362 bp, Cricetulus griseus
tgacggcgccctgcagggacagctgctggcacagcgagctggagcagtgcgtaccaaggtctcccggctggtggccgctgtagtcctactgttcgccgcctgctggggcccaatccagctgttcctggtgctccaagccctgggccccgcaggggcctggcaccctcgcagctacgccgcctacgcgctgaagatctgggctcactgcatgtcctacagcaactcggcactcaatccgctgctctatgccttcctgggcctcacacttcagacaggctttctggccacgtgtgcccttgcggcccacgacgtcagcgccgaccccacgggtctgcactctcagaccgagccccaactcacac

SEQ ID NO: 3158373 - DNA, 246 bp, Cricetulus griseus
ataaaacagggaacccccaaggccatgcctactggaccaggacccaagcagctctgcctggcactggggcccagggattcacctaccctcccgacagcagcccacagaacaatgaggagcctccaaaactttgccttacctcctccttctgccactgagtacctgctttcccctgctggacagaaggggacccacagacatcgatgacatcagagccaagatgagctgggccaacccaggttgagg

SEQ ID NO: 3158374 - DNA, 170 bp, Cricetulus griseus
cgctatggatgcagtgacctatgaggatgtgcatgtgaacttcactcatgaagagtgggctttgctggacccttcccagaagagtctctacaaagatgtgatgctggaaaccttcaggaacctcacttctataggttacaaatgggaagatgataatattgaagaacact

SEQ ID NO: 3158375 - DNA, 238 bp, Cricetulus griseus
ccgatggctgcccaggccccgtgcacaccctcatgggtagctgctgggaggcagagcctgcacgcagacctcccttccgaaaatagcagagaagctgggccgcgagctccgcagtgcaggtgccacagctccccttgggggacaggaagcagagggctcagctcttccacggagccaggaaccctgacacctgaagcagggagcaagaggacacaagtgcagggttgcagggccagga

SEQ ID NO: 3158376 - DNA, 361 bp, Cricetulus griseus
ttgtaccgacgttctgtgctgtatgatcttcgtactgtttgttattggctacattctgttaggattcttggcttggacacatggtgaccccaggagagtggcctatcctacagacagccagggacacttttgtggccagaagggaacccccaatgagaacaagaccattttgctttactttaacctgttcagatgtgccaaccttccatgattcttaggctacagtgccccactacacagatctgcgtctccaagtgccctgagagatttctaacctacttggaaatgcaatttttgacccgagaagacaaaaatcactgggaatactatcgccagttctgcaagaccacggccaggcctg

SEQ ID NO: 3158377 - DNA, 389 bp, Cricetulus griseus
ccagtgtttctgaatgtcctcgtgtctgtgggtgcaccctttccccaggaaaaagaaaggaaattcgcatgtttaatgtgacttgccctctctgtctgtgttctaacttatttataaaaggatggtggctgtattttgagtttcagctggaaacttccataaggggcagcagttgaggttgggtagtgctgggcccagctgagctggcctgagaaatggagtctacgattgtctcttttcacccacctcatccttcttcagctcccactccctaggcccaggtctcccagtggcttgttcctggggtggcaaggggccagggaaggaccaaagtgtggatgttgagaaaggcgaggaaaagggtgagagttaagcgtctgctgcctggt

SEQ ID NO: 3158378 - DNA, 492 bp, Cricetulus griseus
gagctacactctgaatcctgactacatccggaggcaggatgccacctccaccatcatcagcattgccagtaatgtggccgggcaaactctggtttgggactttgtccgaagcaactggaagacgctctttgagaattatggaggaggatctttctcctttgccaatctcatccaaggagtgaccaggcgcttctccaccgaattcgagctgcagcagctggagcagtttaaggaggagaacaaagacacaggctttggctcaggcactcgggctctggagcaagccctggagaagacgaaagccaacatcaagtgggtgaaggagaacaaggaggtggtgctccagtggttcactcaaaacagccagtagatcctggccctgagagccactcgactccgtgggacaccgacgactagctcagcagcctgttcaggctctctgtcctcagagctccagacaccagcagatccataactaaaaaaaaacagggc

SEQ ID NO: 3158379 - DNA, 155 bp, Cricetulus griseus
ttttttttttttttctttttttttttttttgtttttttgttttttgttttttcgtagacagggttttggaactcactctatagaccaggctggcctcggactcacagaaatctgcctgcctgtctcccaagggttgggattaaaggtgtgagcca

SEQ ID NO: 3158380 - DNA, 464 bp, Cricetulus griseus
ttcaactcgtacatgaaggcccgatggctatgatgtggaggcagttatggaaggccatcgaggatgtcatcatcaagacactcatctcagctcacccaagtcatcaagcacaactaccacacctgcttccccagccacacactcaacagtgcctgctttgaaattctgggttttgacatcttgttggaccgaaaactcaaaccctggctgctggaggttaaccattctccaagcttctccactgactccaagttggataaagaggtgaaggacagcctgctctatgacgcgctggtcctcatcaatctggggggctgtgacaaaaagaaagtcctggaggaagagaggaagcggggacggttcctgcagcagtgtccttctcgggagatgaggatggaagaggtcaagggtttccaggcagtgcggttacagaaaacagaggaatatgagaggaaaaactgtgg

SEQ ID NO: 3158381 - DNA, 762 bp, Cricetulus griseus
ttgacgtgattgccttgaacgaggcttaggaaatgcggacacttggtctatattgaaatcaagcataggttttatgtagaaatgaggatggaatgtgggatgaagattcagttttcattggctcattacctgtgaggccataacacagctaggtgacattaaaggtttctttgatgttatttatgtgtatgttggaaggaactaccaggtgttactttaaatcctcaatgtattgtttcattactactaatttaatatgctaaactctaggtaaagttccacattgttgagctgttctctttgaaattgaacattttaccccctccttctgtggctttaaagtcacagtttatatttgacctttattagtaattgacatgtgccaggcaactatggattggaatcgacccccaaatccagccatcattgaataaatcttatttcaaagtcaaatagtaggcatttccatcatctttttcactcaacacgagtgccaggttcactacagtagtcttgataaccagagtcactttctccatctttagaaacccacctgggaacaagaagacctcagacccgaagctactgtgtgtgtgaatgaacattcctctcaccacctacctgaatgctgtacgtctatttgattgtatattgtgtttgtgtatttatgctttgattcatagtaacttctcatgttatggaattgatttgcattgaacacaaactgtaaataaagcaaagaaatggcctagaaaaaaaaaa

SEQ ID NO: 3158382 - DNA, 889 bp, Cricetulus griseus
ggaacaggcaggtgacgttcaccaagcgcaagttcgggctgatgaagaaggcttacgagctgagcgtattgtgtgattgcgacatcgcgctgatcatcttcaacagcgcgcagcgcctcttccagtatgcgagcagcgacatggatcgggtgctgctcaagtacactgagtacagcgagccacacgagagccgcaccaacgcggatattctgcagacgctgaagaggaggggcgtgggcctggacgggcctgagccagaggtggaggaggagccagaggggcccggagagaagtcactgaggacggcgggaggcgacagaggctcagcttcgcccctgcctctgatctacccggtggccccagcgatgtcggtctcagagctgtcacaccgggtcccgctcgcccctcccggctagcgagcccggcgggccgggggaggccgcgtccgtgcacagccgcccgccccactttcggcccccgggcctgggacaccccatcttctctccgagccacctcaccggcaagactcccccacccctgtacctggcgactgatgggcggaggccggatctgcccgccggcctggttggggcccgagggggcctgggcacctcgcagaggagcctgtacagcggcctgcagagccccggcgccccgggccccgctctggggagctttgccttcctgcccccgggttccgcagattgcacccccgcagacgccgctccgcctccccctacagcccgcgccctcggcccctgacgcgggacgcgctggacccgggccggccagccctggcggagccactgcggcccgcggcctccctgcgccgcttgacccccgacggctggccgcggtagagcacagagggctcctccagcctccacag

SEQ ID NO: 3158383 - DNA, 441 bp, Cricetulus griseus
tggcctgcggatgttccctgagactggaggtaccacaggttgtgcccgtccacctccggtctctttcctgccccgcccctttcctggtgatccatatggaggacagggctcctcttttgccctggggcttccattctcccctcaggccccctttaggcctccattaccttcctccccaccactcgaagaccccttcaatccgcagaatgctgtccaccccctacctgctgagggctacaatgaggtggggccaggctatacccctggggagggggcttcggagcaggagaaatccaggggtggctacagcagcggcttcagagacaatgtacctatccagggtatcaccctggaggaagtgagtgagatcattggccgagacctgagtggcttcctgcacgtcctggagagagcctcctgcctgaaccacatgtagtcggt

SEQ ID NO: 3158384 - DNA, 624 bp, Cricetulus griseus
tctttcctgccttgtgacagtggctttggggcttttgactgtgattctcgtgggtttactgatgtgccaacggatcccatgctgtggctccaaggactctgtgtgtgcccactgccccagctgccccaacctctggatgaggaatggtagccactgttattatttttcaacagagaaaaaggattggaattctagtctggaattctgtgcagacaaaggctcacatctccttatgtttctggacgacgaggaagtgatatgccatcaggcagaggattagcagagcctcctgggggcttggcattttcctgctggtctttcttggagactatttaaataagtattatgtagccatttaaatcctagatctgggcaaatgaaatagagtttgtttaaatggctctcactgtagaaagtcaccctggctccctcatctctacctccaccatctctgtcaaagatatgtggaaaactattcctccacaaggaaggatgaaaccctgccgtgctcagtgactgtcacatggagatcaactagacagaaaaacacacacctcatgttctcactcatgcttggaagttaaacaagcttgtgccatagttgcagggagaagagcagtaggt

SEQ ID NO: 3158385 - DNA, 440 bp, Cricetulus griseus
caggccttcagcttgaaggaccgcctggcacagcatcgcaaaatccacactgagcaccgtccatatgtgtgcagtgactgtgggaaggcctttaaacagaagtcaaacctcctccgccacaaacttgttcatactggagagaggccgttctactgtgacaactgtgggaaggcctttcgtactaaagagaacctcagccaccaccagcggattcacagtggagagaagccctatacctgtggccagtgtgggaaggccttcaggtggcccaagggcttcagcatccaccagaggctgcacttgacaaagagattctatgagtgtgagcactgtgggaagggcttccgccacctgggctttttcacaaggcatcagaggactcacgggcgtggagaagtatagaggcgtctgtgggtagctgggccctccatgttctgggc

SEQ ID NO: 3158386 - DNA, 1451 bp, Cricetulus griseus
cagaaatctacttgagatacctcagccagcaacaagccagacttgatgacagtgtttcaattagtgaggcaagcgaaccaccagcttctgacgttgtcgtaggaacaagcagtggagccctccagcttttcgattgatgctggggttcctgtgaattcagacatgatcagtcaatttgtgcatgaagcgcttgctgagaccattgctgtcatgttaggtgacagagaggcaaagaagcaagggcctgttgccaaaagtgtttctggtaatacttcaacaaatgaaactaacttaccggtaagagtttgtaccccagttgctacaccacagcctactcctccatgctcaccgccacctcctcaggagcacgtgttagtgaacactccagattcttccccctgtgattcagatcaggatgtggcttcctctattaaagaaatatgtaccgaaaaaggaagtgatatacctgccatcacacttgttagtaccccaacagttaccccggttaacacacctcctccagcagaagtgctgaccccaactttgtcagaaatttccattgacaagttgaagttatcaagccctgaccttcccaagccatgggacagtggagacctgccactggatgaagagaatcctaactctcttcaaagaaaccttagataggcacatctctgaaggggagatcttacttagctgtggtcaaaacttggcctccaaggttttaggaaatggggacttgtatctgatgaacgtaaacgacagcttatccagcactctgcatgatgcccttgaaatggaagatgatcctcccagtgaaggacaggtgattaggaggcctcataaaaagcttcatgcaaatatgattctttctcttttactaaacaagaacaggaattactaatttcacagcaagcggaggacctggataacagtgtgggtgagctcagtgaaggacaaaggctcgtgctgacagcagcagaggacatcttagcaggaccgtccatctgtgtgccgcagcccactacatctgcagagccttccgatcagcaagcagaccccggggtgttattgcagctgtccgacatggcctcaggtgatatttgtgaagattcacgtgccagtcatggtccaatgagtctaagggagttggagttacagccctgtcctaatcttgtctttcccataacacacatggcaacaaaaggcaatggtgctaatttaccaggagcagctgaaggcttttctcagtaccaacaaaagcacgaaccagacattaaacaagttgaacacaagccagtacaaagtcatctaacctgtgtacgaaataaatctgacagttcactttcacaacagcaaggtggccagacagccccgctcttcactgcacacatgccacctgccagggtgtctgtgactctgccctctgcaaacctcgaggattgctctca

SEQ ID NO: 3158387 - DNA, 364 bp, Cricetulus griseus
gcaagcgccacctcttttgagaaggagctggcaggccagaaccgcacagaaccaaccatccgaaaggaaaatctgcgactgtcaggggttgtgacatcaagactcaatctatggatcagcaagacccaggattttggagaccagggccctcaggaggtacagaaagagacatcagtcaccaggagggctcaatggggaaacaagtcgaccatgtccctggatgcagaggtgtgacaagccctgccaggacagagctgcagacctgtaccccaaaggcccttcttcaatagccagcccctgccctgcagcacccctgactcttgcttcccattccctttctgcctctcagccagtctggtcaggg

SEQ ID NO: 3158388 - DNA, 342 bp, Cricetulus griseus
agaagatcatggacagaaaattttaagtgtactacagagttttagagaacagaatgttttttatgatttcaaaataatcatgaaagaagaaataattccatgtcatcgttgtgtgttggcggcatgcagtgactttttcagggctatgtttgaagtaaacatgaaagaaagagatgatgggagtgttaccattactaatttgtcctccaaagcagtaaaggcatttcttgactatgcctacaccggaaaagcaagaataacagatgataacgtagaaatgttcttccagttgtcatcgtttcttcaggttccctcttgtccaagcttgcagtgactttttaa

SEQ ID NO: 3158389 - DNA, 809 bp, Cricetulus griseus
gaggagaaggccaagatgaagccgtattgctgatgcacagagacctgcaggcgctcacagaagccatgttcaccaacctccggcagtactgctgggtgactctacagaggcagccggtggctggcaggagacaggcctcctcgattttgcctacagctccctactgagagccggctacctgaccctctatggagtggaggccttgccacgcacccatgaaagccaagcccaggaccgtgtccactcggctgacgtcttcaccaccttccgccagctggatctgttgctccccaaactggctcgaggctccttgtcaacgggggataaagaccatgcatgcagtgtcaaagggaatatgggtcccacggccttctggctccttctcttcctcctcaagaatcctgaggcccttgaggctgtccatgaagagctgaagcgcactgtctggaaagcagagcagcctgtttcacagatgatcaccctcccacagaagactctcgacaacatgcctgtgctagacagcgtgctaaatgagaccctccggctcacagctgcccccttcatcactcgtgaagtcatggcagacctggccttgcccatggcagatgggagggaattctctcttcgacgcggtgaccgcctcctcctctttcctttcctgagtccccagaaggacccagaaatctacacagagcctgaggtttttaaatacaaccgattcttgaacccagatgggtcagagaagaaagtatttttacaaagatgggaagcggctgaagaattacaccctgccgtaggggagcagggca

SEQ ID NO: 3158390 - DNA, 216 bp, Cricetulus griseus
ttggtgtggccggcggccttggtcctgcggagatgtttcagagccttatcaggaatgtctgggtccccatgaaaccctactatacccaggtttaccaggaaatttgggtaggaatggggttaatgaccttcatcctttataaaatcaggagtgctgataaaagaagtaaagctttgaaaggctccagttctgcacctgcccatggccatcattaac

SEQ ID NO: 3158391 - DNA, 361 bp, Cricetulus griseus
  modified_base (90)..(90): a, c, t, g, unknown or other
gacgcacagacgggcagcggggacccccagggccatggcggagcgcgcgggccgccgctgctgcctgggctgggacttcagcacgcagcnggttaaaattgttgctgttgatgcagagttgaatgtcttctatgaggacagtgtgcattttgacacagaccttcctgaatttggtttctctggctccaagagcccattgtcctgccctggaaggccacatcttctgcaacccagtagacgtgcagtactacatggctcttctgtgctttaaaaacggctcccttataagagagaagatccgggatgagtctgcttccggttcctggaacaagttctctaaggccctacagtccacggagat

SEQ ID NO: 3158392 - DNA, 819 bp, Cricetulus griseus
aggaaaaatacttaatgaaatgcaaagacttgtaaatgatgatccaggaagctggctgaaggccatttcactttggaaagaacttcttgaatgtgatacaaaaaagagaaaaaagtttctcaaagggaccttgggaccatccttgtggaagctgctgaagagtggccagatgtatattacatgggtgctgatgtcagcgactcacagttacttggtgcatgtgacaatctgaaggccgcaggtcttgcggacaagattgacttacttcaaggctctgttacagaactaccactgccttcacaaagtgtggatgttattatttctgacatcccatttgggaaaaagttcaagttaggaaaagacatcaaaagcattctacaagaaatggaaagagtgttgcgtgttggtggaactatggtcttgctgctcagtgaggatcaccgcaggcaccttagagactgtagaggcagcagcatcctcttgacttcccaggaaaatatcactgaccctgaaatgaagatgcttttgaatcctgacaaaagaactggtacatcagacaaggtgtcaccttcacataaagccagtagctcccagtgcccaagaagagtgttggcctgtggttcactggtgccagtggagtgcttcaaagtcagccttggaaaaacagatgcattcatatgtaaatacaagaaggcacatgcttctggactatctgcagctggatgccatgagccaggcgcccagcctgagatggcaaccctgcaagaattccccagtccccaggattccttatagccccagagctccaagtgcacagcc

SEQ ID NO: 3158393 - DNA, 935 bp, Cricetulus griseus
taatcagacgagagaaagaaaggcaaaggcaagaggaaggtgaaaatagaagaagagagtggaaagaacgttatggacacaacagagaagattccactaggaacagaaatgttcatcctgaccccaagagccaattactcagatactactaccaacgaatagaacttctccgaggatgcagtaacctttggatttttaatgcagaaacattcactgatgattctctggaacctgaatcaggaaggtatcaacctggtggacgctatctctccatgtcttccagcataatattttgaagatatctgaagtctaaagaaattcatggcccaagtaaccaatgtcatcacatcagctcagcctttatgaacatctttgtgccctacaattcctctgttctccctgtgaatattaaggataacacaaatggcattgaaaatggatcacatcttaacaaagttagcttatttttgcttgactagagtatcatctttcctgataggatttattacataccatctgaggtgtctcccttagaagtgcagttaagtggaaggattcaattcatgataagcatagaacacggttggtttcaagttaattttttcaacctacatttcccaaagaagtgaaagtgaactgagacctcagataattaccttattcacaaaattcacatcttaaaaaaggcttccttatgagacataactgaatgtaaacaactcttcttctggtctgtatacaaattaatgggattttgcatgcataattaagattattcttcaattgatagtgttagtgtctttagcatgtgtattctaatttggtgatgtgttagtcttttcattctttgtggtaactgaatctttttatggttttgatattactgctttattaaaagattttcatttcagaaaaaacattcacctttagcattt

SEQ ID NO: 3158394 - DNA, 876 bp, Cricetulus griseus
  modified_base (869)..(869): a, c, t, g, unknown or other
tcagggctatttcaaagagtgagatttacttctaattcctctcccctaaaggaatcctaaattattaattgttagaaaaactttgtatgttcaaatttatggttgatatatgtgtgtatatattatataaataaagatgtatatgtaaataatgttcattctggagtctggcacaactctagtatgtggattagagagtaaaatattatggatgatgaagtcctaaatgaaacataatatttatttatggaagcatgtacattgttaactcacaaatgaagagcaatgagcaccctgtctgacctcttggacaacgtaccccgaaatctctgctgaccagtctttatattcctcaaacagaaaacttcttaggtaacatgctgggattttagatacaggaaattctttgacacatttcaattggtgtgtagtcaagcataacaaatacttaataatggaaaggcagtaagaaaatacacttttgaaacaatttgaacatgtcttggtggttttacgacctctgaaaacccaagttcctaaaaacagtggaaatgaaagggactgcataaaaatgatgccgtttaatgattggaattaattgttacacaagctaatggtgtattttttaagaaaaaagcttgcaatatatgggagggggtattcttttctgtctatttcaaaagaagactcatttgtgttctttagggggaaccagtgccttatggaatttgtatatactgtaattattcagggttagggaacaaacaaattgtatttggtacaaaattgtgtatgacctgttttctatatttccttcaataaaattagtgtcattttccctaataaaaaaaaaaaaaaaagaaaaaaanaaaaaaa

SEQ ID NO: 3158395 - DNA, 347 bp, Cricetulus griseus
ccgacgattactgcgcgtctgtactcactgctgttccgcaggacttccaccttcgccctcaccgtcgtagtaggcgcccttttcttcgagcgcgccttcgatcagggcgcagacgcgatctacgagcacatcaaccaggggaagctatggaaacacataaagcacaactatgagaataaggaataatcccttgtgccaatggccagaaggagggcttccacctgtcacctgtttgcctggagctgggcctgccagaggatgagtttgaagttactcttcatggaccaactgtacaagcaagcggcggctccaccctacaaacagactctagcttctgctgtgtttga

SEQ ID NO: 3158396 - DNA, 1503 bp, Cricetulus griseus
gcaccatcaaaatgaggttattaattacatgcgttttgctcgttcaaaaagaggcttgagacttaaaacagtagatgcctgctttcaagacctcaaggagagcaggttggtagaggagactttcaccatggatgaagtcatggaagtcctgaacgggttgcagtctgtggttcacagtgaggtggaggtctgagctcattaatacagcctacaccaaccgtgctactcctacggcagctgttcttcaacaagctgagaagtggtacctaaagctacagacagacatctctgaacttgaaaacagagaattactagaacaaattgctgaatttgagaaggcagaatttacatcttcaagcaaaaagccaatcatagatatcacaaagcctaaacttgttccaattaatgaaggtggaacaacagaacttctaaacaaggaaattttaagacttcaacaagagaatgagaaattaaagtcaaggctgaagaccattgaaatacagactacaaatgctttggatgagaagtcaaaattggaaagaacacttcaggatttacaaattgatcaagaaaatcaacaggattttataaaggcccatgacttggatgacttggaaaacacagttgcagctcttagggatgaatttcagaaaacacttaatgaccagacagaaaaccaaaagtctttggagcagaacctagcagcagccaaacatgacctcctcagagtacaggagcagctgagcttggctgaaaaggagttagagaagaaatttcaacaaacagcagcttatcgaaacatgaaagagattctcaccaaaaagaatgaccaaatcaaggatctacggaaaagactggcaaaatatgaatctgaagattaaagactgatggttttgtctagaacctgccacacatgagcatacaagttatctccagtcacctcaggcatgtactttgaagcattttatcatattctctcctttttctaatgtttagggtttgcttgtaatgctagaattagcattcttatttgaagttctctgatccagaagaagaaaaaaaatgaaatattcttttttgttgtctcaaacacctgtctgtctagtgctccagagtctctgtgcaagtacagtgagagttcttcattgtagaaagagtttacagtgggaagaagagccatccttttgcattagtaagaagattgaaccttttaatgttagataagctggtaccatcaacactctacagttcctaaatgtaaagataaatagtaaagttactaagatttacaaattaaacctcttattttaataaggtttgtgttatggacggagaagtcatattcatcctatgctttcacagtttagaaagcagatggactcagagtacatgcagtctttagacttaattccagaattccttttgcctgtatatggattagaacgctgaactttgactcaacagaaagtcggtgactaggttccaggttggactttgggttgt

SEQ ID NO: 3158397 - DNA, 1444 bp, Cricetulus griseus
agacgtaaaaattgttatcaaaacagaagtccaggaagaggaagtggtggcaacacctgtgcatgccaccgacatagaggctcatgggactctgtttgcaccaggccaagcagcaagattctttcctagccctgtccaggaaggagcttgggaaagccaaggcagctccttccccaacccggacccagtgctgggcctgcgggagcccactcggccagagagggacattggtgagctcagtcctgccatagcacaggaggagtccccagccggggattggctcttcagtggcgtcaggtggggctggaatttccggtgtaaacctccagtgggcctgaacccgaggacggttcccgaggggctccctttctcctctcctgatagtggagataccatcttagaccccagccaggccccaagacccttcaagcagtggaggcgggggcagcgcacgggacagtagcgccctgcggtgcggggagtgtggccgctgtttcacacgccccgcacacctcatccgccaccgcatgctgcacacgggcgagcgcccctttccctgcaccgagtgtgagaagcgcttcacagagcgctccaagctcatcgaccactaccgaacgcacacgggcgtgcggcccttcacctgcacagtgtgtggcaagagcttcatccgcaaggaccacctccggaagcaccagcgcaaccacccggcagtggccaaggcacccactcatgggcagccgctcccaccactgccagttcctcccgaccccttcaaaccatggctttgggaagcagctagacaggtgtttcttttgagagaagaaataaagggctcaaaaggggacacagcctctcaccacgagtgctgtgtgttccaggaacttggaagagcatcactgagccccagcactcgtggaccatcagttgaggggaggaaagggtttgaggtcttgccctcttaagaagatttgtcccacacaaatggatcagatcatcaagagctgccttggcagctcaagctggcacacccacaccccgtgtgtttccgcgtcactaggcacttggaggtaattggaatgccaggcaactgggtaagtggctttctcaggctggcctggaatatcttcatagtgggattagagctaggtccaagtttctgtcataacagtgctgtccctccacacacagccattcccattttgttaaagtagccactggtcctcttgcccaaatgggtgatgactccctgagagggcagagaccatggtgcccattcagctccctcctgcgtacttttattagaaatagactagttaagaagattgtttctatgtactgtatattttgtacctgtttacacttctaatattgatataactgatattttggaaaacaaatgaacagaaaacatcctgttaaaaataaaacctaaccagacaaccaa

SEQ ID NO: 3158398 - DNA, 530 bp, Cricetulus griseus
agcggagcgggcagcaatgagtggggagccgggacaggtgtccgtagtgccccctcccggggaggtggaagcaggcagtggagttcacatcgtggtggagtactgtgaaccctgtggtttcgaggcgacctacctggagctggcgagcgccgtgaaggaggagtatcccggcatcgagattgagtcgcgacacggggggacaggggcctttgagattgagatcaatggacagctggtgttctccaagctggagaatggaggttttccttacgagaaagatctcatcgaggccatccgaagagccagcaatggagaacctttagagaaaatcaccaatagccgtcctccctgtgtcatcctgtgataacacacggttcttggaagcttggttctgggggtcaaacctttgtttccttgtggttcctctaggaaccccctctgccttttgccccttatttagctccatgtagctaataccctgacctctactttgcccctttgggcacaaggaggacttgacatatctatgg

SEQ ID NO: 3158399 - DNA, 906 bp, Cricetulus griseus
cacagaatgaacactgtgcattggcagaaactctaacaccagcctccacactgcgctcaacaccagcttcatggaaagctccatagagatggccacagccagcagccccagcagcacacactcgggtcaggctacagcagtgctcagcctcctcatcatgctgggcacactctggctgggctataccctctaccagttcaagaaaagcccctacctgcacccatgtgtgcgtgagatcctgtctgactgtgccctgcccatcgcggtgctcacattctccctcatcggctcctatggcttccaggaaattgagatgagcaagttcagatacaaccccagcgagagcctctttgagatggcacagatccgctctctgtccatcaaggccatcggcagcaccatgggtcttggtttcctactctccttgcttttcttcattgagccaggctggtgaagggcactgcctatcactgggacctcctgctacttgccatcatcaatacgggattgtccctattcgggctaccctggatccatgctgcctacccccactccccactgcatgtgcgggcactggccttagtggaggaacgtgtggagaatgggcacatatacgaaacgattgtgaacgttaaggagacgcggctgactgcgctgggcgccagtgtcctggtgggtctctccctgctgctgctgccctgcccactgcagtggattcccaaacctgtgctttatgggctcttcctctacatcgcgctcacctccctggatggcaaccagctcttctcacgtgtggccctgctgctcaaggagcagacatcatacccacccacacactacatccggagagtgccccaaaggaagatccactacttcacaggcctgcagattctgcagctgctactg

SEQ ID NO: 3158400 - DNA, 322 bp, Cricetulus griseus
cctgaccttcacgccctgcacagtggtgaaccagagacaccagggtacctgaaggggcactatccctcctgtcttctgtccagatcgaaggccaccctcgtctccctcccttttgcacacccattccctctcatgttccccctccgaccagggaccaagtccctggggcctgctggactcccttgtgtgtcccaaagatgagggtccagtggatgaggctgaggccatgagccccagtgctgcagcctctgagctggagccacccacagaactggactctcttttcaaaggcttggctctcactgtgcagtgggaaccctga

SEQ ID NO: 3158401 - DNA, 189 bp, Cricetulus griseus
tgaagaaagaggctgtggtggtagtctgtccagatgaatactgtctttgatggagaagccacagacccagtgactggggaaatctatgaattcaactcaaaaactggtgccaggaagtggaaagacccattaacccaactgcccaactggcctgagcccagttcccagcatggaggcgcagcggcagaa

SEQ ID NO: 3158402 - DNA, 846 bp, Cricetulus griseus
atgcgacggcctgactaactccagccatggagctggaggaagaggcgcgaacgctcgcggagtcccggcttcggccttctggggcctcggggtcgccgacgccggacgaagaggagcggccggagggcagcacagcgctggtagcgcctcccgcgggcttcgagggggacagcgcgggcgcggacgggctgtggggactgccggtggagcacgccgagcgcaggcccgagtgcagccgctgcagccggccccagaaagtgtgcttgtgtccatatctacctgtgcacccactccaaatctccacccgtttgtacataattcagcatccggcagaggaaaagcaaagtgttgcgcacagtccctctgctagcagcttgcctgccccctcgaacaaagggcacagtcaagaatggccgccgcttcagtgaagagcgagatattgaactttcaactgtttgccgggactctggtacattaatattatatccattcggatgcaaccaactagcagatgcctttctaccttagaatgtgctgctgctgcgctttccatcttggagaaaaataacaacatacaagagactttgcttcgccctcttcaagcactgtgttctttccaacttcagcatggtgctcagattcgcctcagcaaagaatatcttctgaaaaacggattatatcccaagccaatgccaaagaacaaacgcaaactcaggaagatggaactgttaataaatagtgttaaaatttagcacagctgtctctgtaatgcttgttcacctgtctttaactgacaagactttgtaaactttcccggagtttaggcttcatggaaatggctgaagt

SEQ ID NO: 3158403 - DNA, 2503 bp, Cricetulus griseus
cctgggggagacgctacgggcaaccatacttctcgtgcccaagactgagtgctgagctggccaaggttcattaatgatgggctcttctactatgaacaagacctatgggactgagaagttttgagcctgagtaagttggcagctatggctgtacccctccagtcgctgcccaagttccagcatccttcccatgagctgactgaaagaaaatggattcacacaacatgtctaccacaagtatcggaggcgctgccttaatgagcggaagcgcttgggcattggccagtctcaggagatgaatacccttttccgcttttggtccttcttcctccgggatcacttcaataaaaagatgtatgaggagttcaagcagctggcactggaggatgccaaagaaggctacagatatggtttggagtgcctttttcgatattacagttatggtctggagaagaagttccgactggacatattcaaggatttccaggaggagactgtgaaggactatgaggctggccagctctatggattagagaagttctgggccttcttgaaatattccaaagccaaaaatttggacattgaccccaaactgcaagaatacctcggcaaattccgacgtctagaagacttccgagtggacccccccatgggcgaggaaggcaaccacaagcgacacccagtggtagcaggaggcagcggtgagggcaggaaacggtgcccttcccagtcttccagcaggcctgccactgggatctgccaaccccctacgacacctactggccaggccactcgggaagatgccaaatggacaagccagcactcggacacactgactttgggaaagtgaacgctcagaagccccctggggtttgggatagaaggggtggggtgggcgaggatccatgggggtgcccagtcccgggagagtggacagaaaagggacaggcctagagttcctaggatgggcctttgtgctaagtagcagtgtacatcatttgggctattagtggtgccccctgggcgggagcctccaagttccctcttcccctcccctctccatgacttccatcactaacatcttaacggcggggaggggaaggggaagaggggagattttttatatatatatatacatatatatatatcaagttttaaattattgatagtttgtctggattaccaaaatcactcttcagcccttcttgcggctgttaggccgacctgtctcccgcctcgtcccgctcccctcaagccaactatgcagcccaccagaaggctctggcggtgcccatgggccccagaagcaccagcccctcgatcaactggggttttccatcaccgtgtcccctgctgtttcacatacccttctgccacctctgggggaaggaaaccaaaggatctcagagtggggggttggggagtttcagcctctcctgcccctccccctccccccaccccagagacgctgctcacaccagaagagactattgaaagatgattcatttttatttttaataaaatagaaagaaagaagaaagaaaaaaaaaaggtgtgtgtgtgtgtgtgtgtgtgtgtgtgtgtgtgtgtatttgttgtgacatgttaggagttgacgttgcagagtagtttacatcttcaccttctgaagacacttgaatttaggaccgatgtatctgtgacaagtatgccaggagtggcaggggccaccagagcaagccacttacttccccatcatcatcttcccatgggatccaagacctgagacagagacagcctgccaaactgaaccgccttcatcctctgcctgtccagtgttggtcatcagcctgagcccagcaagggccagattgtacgtagtctgtcctctgagcctcagagcaaatgcgctcctcaaagagaaggctgcctggaacccctgggttcagacagagctgctgagccccatgtcaaattgttaaatgtttttgttctgttgctctttcccactcctttttgatgacatttacaaaagaaagcaagctgcttggatggtctggaagcaagggaaagggcattgaagacaaggataatggagtgtaccagaggcttgggttacacttgagccccagagtacctctcttgttaagggcccatggattctccccagccccactctctcctccagctatggtgatggcagaggcagaagagaacgctcagcccagttctcacaggaaaggaaaactcatcatgggcttttcagagaaggttccaccttacgctcgtacattgtctttaccatgtgctaggatatcacattcaacaggacaaaaaaaaaatgtaaaatacttgaatgagcttgtatcataacattaatattattgagagtgtctgcttcccaggctgaagtgattcattcattattctggtcctgctctagtcctttgtaattggtggtaattattatgcttttcttttaatacaaaaaaatgtataaaaataaaacttgaaaaggacaaaa

SEQ ID NO: 3158404 - DNA, 1495 bp, Cricetulus griseus
tggtatcgcattgatgatgtggaacacgttcttaggttaaaagtatttctgctgctacctacttgatggataggttaggaaatctaccaaagataggttatgccggaagggatggtgggatgagtgacacagcgatgacatccttcctggggtcctgcctggatcttcttcagacttcactggaggctgacattagcagggatgagatgcagatgccagtcctggacactgaggatgcctggctgtccgtggatttttttttttgtataataaatcaaatttattaaatacattaactgtgctataattaatagatgctttactgttatttttcccattcagacaagcagctttattgttaaactttggtgttgtaactggttatactttgcagatttcttccttattgtagtattctagttcctaccccagtggctcctgtggggattaagtgtgttcatacagcttccatcagcacgctggagatacagcccacatccctttacaacattcagagatgtccttatacttggcccagcaacaggatgccacctggcagggagctctgggtgcttggagaaggaccccgggcctgctggactcgccagaattgggaatcagagatgtgaagaatgcagcaaaatcaattataatgtgaagtgagatttattctctattttgccaagttccaaaattgtatccacatcaggtaattgtaaaaaatgtattatcttgtaatacatatataaaaaaaaagaacaaagcaaagattctaaaatatttaaagtccaactttatttatcttccaagtgttcaaaatgtctgtttctgggatgtggtcatgttgcctgtcctaagagcaggacagagaacacactttgtgctgtgacagcctcagcaaacctacctcacagctgggtggagagaacaaactgcaaccagttctgcagcccgtagtgcctagggcagtccaagtgctgagcaaacctcgttaaaaaaggtcatctaaggtcaatgtgaagcctgctgtagtttaaatagctttttaaaataggattacttgtgatttaaagtcatggaaaactaagacttagtaacaataagcttacattgattatagcattcacttagaagttgctattgtccatttcgtgaagaaacacgtattaacagtgcactatagcaacagtgaaagccctctcacctctcagggatgggtttgctaggcagctttttctgcttagtagattagccatccttagagatcaatccagtattggattgcttgcaatctgtcaatgctactgtcaatgtaatgttaagcagtgaattctgtatataccgttattttccatgtctgttcattattgtgaacttatgtatattagtgaaataaattttcagatttcatgttatttctcgacattcatacatgtaagacaaagcgatttctcccctcttgaataataagtttgttgatattctttgtggtaca

SEQ ID NO: 3158405 - DNA, 2000 bp, Cricetulus griseus
  modified_base (29)..(29): a, c, t, g, unknown or other
gcagttactgtatctatttttatgacagnacagaaatgtatataggataatcagtttagatggctcaaaggcaataataaatagcaccatcactccaaacatgacatttactaaaacatctcaaaagtttggccagtgggctgatagccgggcaaatactgtttatggattgggattctcctctgagcatcatctttccaaatttgcagaaaagtttcaggaatttaaagaagctgctcgtcttgcaaaggagaagtcacaggagaagatggaactgaccagtacacctttcacaggaatcagcaggtggagatcttcagtctcctttaacaccagaaagcatcaatgggcaagcgggtcactgagcttgaatgtgttagtagtcaagcaaaatgctgtgcacacccacaaggcagaactaaatcagacagtccaagagctggaagagacactgaaagtgaaggaggaggaaattgaaaggttaaaacaagaaatcgataatgccagagaactccaagaacagagggactctctgactcagaaactacaggaagttgaaattcgaaataaagacctggaggggcagctgtctgacctagagcagcgcctggagaagagccagagtgagcaggaagccttccgaagtaacctgaagacgctcttagaaatcctggatgggaaaatatttgaactaacagaattgcgagataatttagccaaactactagaatgcagctaaggagagtgaaatttcagtgccaattgatgaaaatataactgtctgtcttcgtaggactgtttggggtttaggctagcaattgtttaagtattatttacagaaaatatgcagttacagttatttatatatttggcaagaaatcttttctgagtgatcaatgaattcaattttatgaaaaaatagtggttatgggggcactgtttattatacataattttaaggtgtatagctgatttcaaggaggtccacttccacctagcagccaatcagaggactgtatctaaattgtgatcgtggcagatgggtcttcactgaaaccatgtctttattcaaacttcacaaggcaatattttgaactgttaactaggcatttccagacaggaaataccttcaacaggctcttcgccggagagcaggttttagtgttgttttgatgtaattttaagactatttagcaaacatgcatttctttatatgatacatttctttcacaaagctattttaaaagcaagccaagtgctgtctgctctgcctgagtaggaatcgcatcggaatacgtatattcttgctgtacaatgcctgtgatgttgaagagggtttctttttagaattttgggatagtgatcatttaatgggaaaataactcaccaaaatgtctccacttgaattgtactgataatgtgaggcatatgtgtaattcaatatatacatatacctatatgtatatacagaaattatttttaatattttcctactgttgtgaaatttaaaattggaaattttgtgagtgttttccatgtccaatagagcctaattgtttctttttttagtaatttaacaatttcttgagggctgcacctgtaacttcccagcttgtcagtagacatgtacagtacttgggagaaggtggacacaagtgcacatataaataaaaccttcttaatgactatttcaaacattcacttacactagaggagcatttagaactcatcgcctctaagtcataggtacatttgcatattaaatttgatttttcccagagataaatatataatgtatctatatttagatcaaactgtggtaacatattgatcagaacctaatgttggggactatagcctgaacatgtggacttgcagcgacacaggaggagagcagaggtcatcccatttgtgtatacattattataactatgaaatcttgtacaaaagacaaaaactaggaaaaaaaaaagacaaaaaatacagtttttattttgaaa

SEQ ID NO: 3158406 - DNA, 1615 bp, Cricetulus griseus
caagcatgggtccccatatttctacttattgggccaccctaaagacacgacgaaccctacgcctggagcgctgccgctgcccccgccgcaggcctgccggaagtaggcgtctccctcgaagacatcctctctccattctctccatcacatccagccccaccctccgacccttcccaccagataggcccagacccaacttgggatatccaaagggaacacgacgttaggaaaccaaaggcgcgcccgaggccggaggaggcgccccggcggccgaggggaggccccgagggccggcaggcccgcctcggaggcggccgacgggaaggaggcgctgcggggcctgcgcgagggctccggggccgcgggcgcgcggacctaaactgatcctaaagcccccggttccataaaaataaaaaggtaacccccactgcatgaaggttccggatgtcatccaaactttttatcaagaaactggacacgttcagagcaatcacaaactggaatatatcgccttaaaaattcaaactgcacggagcaagcggaaactgagacgagattatatcttttcattgatctaaaagtgttgtaaataaatcgttcttgacatatctagacaggggtcaaagggtttctttgaaacattcagaactgttcgcccgcgacatttccatggctcaccctcggcatccgccagcggtattagcggtattagcagcgttccctgcccactgcaggatgagttagaaacctagtgaattcattggtgtgatgccggtttccactgccatttctgtgatcaagtcacatgtctgtacattttcagtgataggaaaaaaaaaaaggtttaaaattgtatcctagggaacagtttgccgtaagtcagaattttacaggttagctcgtagatcttaattggttttcctctaaaatatgagttttataatcaaaaggccatcatctgtttaatcgagattggcaacgctgcggttccttcctgagaagtctttcctgtcacgccaggcgcagagagataggtagctgctttgttgttagcaatgttctattttacctatcttattgtcttattttaaaacctcttcattaacacattcatcataaacaaaagcacaaacacattgagtggtttatactttgggtttaatgtcaattcctctttctcccctggactagacacccaatatagtttgccattaatttattgaatctggttttggacaatgcttctgtagtgtagctgcacgtcctggtactgtatcctcttacctttattttccgtgttacaaaaggaaaaacaaaaaaagcggagattccgcttgcataaactctaatttgcacacttcacagctactacttgtgcagtaattgctttatgtggctgtaatccataacctgtgaagacagcacatcatctaaatctcattccaaataatacttctgtgtagtgttagctgtgaatttaccctgtacagctgtatctctataaatataattccatgtattaatagtcacagaaagactgtaagtgagcaactatttttatgaaacgcacactatggataaattaacttttacagaaatcttgtttactgtatga

SEQ ID NO: 3158407 - DNA, 1110 bp, Cricetulus griseus
  modified_base (135)..(135): a, c, t, g, unknown or other
  modified_base (150)..(150): a, c, t, g, unknown or other
tggcggctgcggcggccctggcggcggccgaccctgcacccgcggtgccgcaggcagcgggcagcggtaggtccggcctcgcgcagagacctgtactggctgcgttccttcctggctggaggtattgctggggtnctgtgccaaaaaccncagttgctcctttggatcgagtaaaggtcttattacaagctcacatccaccattacaaacatttaggggtactgtctgcactgcgtgctgttccccaaaaagaaggataccttggattgtataaaggaaatggtgcaatgatgattcgaatctttccctatggtgcaatccagttcatggcatttgagcattacaaaacgttcattactacaaagctgggagtttctggtcacgtgcacagattaatggctggatccatggcagctggggagtaaactcagggtctctctcgcctatcttggtagataagcactctacctctgaactacatctccagcactctgtcattttatagtgttcttcaatcggcagacttagtttattgtagcagaatgagaaatgaatattcaagttctagtagaaacatagccagcaacaaagtagtgttcctgttatgtttcttcttagaattcttctccagttgataaaaggacatcctttccttgtcgtaagcatggcacatggagtagaactggtagaccctctgtctttagaggtagtgatttgtagaattgatgtgatttttaagacattaaatctaagctgctaatgttatttctgcttcttctttttttgcctgtaaagatttcttgtcatatcttggtaaaaattggatgcatttgtttcatttttattatctttaaaaatgaacctgtactttgtgactttaagtgtaccaggagtggggataaatctgtttataaagctcttttgtatatttttaatttctggaccatactgtagctaattattccattcaatcttaaggtaatttaaacctataaaataaatatctcagttatattatcaataaaagagaactgaaaatatttttaaagtaagaaattgcattctatgtctgttataaaatccgtaagatattaaaagtaattttttatc

SEQ ID NO: 3158408 - DNA, 397 bp, Cricetulus griseus
agaacacattctgcaaaagaaggagtttgccattttaatctctttagctgtctgggttttagtaaccttagaagtcctacccatatcccttttcataaattctgaccaatcaggcaaagacaccatctgcaaagactatgcaagttccgggaaccctaaatacaatctcatttacagtttgtgcctgactttgctgggcttcctcattcccctctctgtgatgtgctttttctattacaagatggtagtcttcctaaagaggaggagcaggcagcaggtgactgctctgccactggacaagcctctgcgcttagtggttctggcagtggcgatcttctctgtactctttacaccctaccacatcatgcgcaatgtgaggatcgcctcgcgccttgat

SEQ ID NO: 3158409 - DNA, 1522 bp, Cricetulus griseus
acttggtagtcggccgcggagcagcatgcaggcgtcgcaggacagcttccaagccgagcccggctggtacgtctctgcccagcagcccgaggaggaggcggcggctgcggaagagtggagcccgttgctaagcaacgaacctcacagccagggatccccgggtgtttcatttggtctctcagtctttaatgtgatgaatgccatcatgggaagtggcatccttggcttggcttacgtgatggctaataccggtatccttggatttagtttcttgctgctcttggttgctttactggcttcttactcagtccatctcctgcttagtatgtgcattcagacagcagtgacctcttacgaagatcttggactctttgcatttggattacctggaaaggtggtggtggcaggcacaataataattcagaatattggagctatgtcatcttaccttttaattattaaaacagagcttcctgctgctatttcagaatttttgcctggagaccacagtgggtcttggtatcttgatggacagacactactactcatcatctgtgttggcattgtgtttccgctttcactgcttcccaaaataggctttcttggctacacaagcagtttatcatttttctttatggtgttctttgctcttgtggtagtaattaaaaaatggtccatcccttgtcctgtgaccttaaagtgcatcgatggagtgttccagatttcaaatgctacagatgactgtaaaccaaagctctttcatttctccaaagagagtatttatgccctaccaaccatggccttttcatttctctgccatacctcaatattgcccatttactgtgagcttcaaagcccctcgaagaagaggatgcagaatgtaaccaatacagcaattgctttaagcttcctgctttactttgtgtctgcactctttggatacctcactttttatgacaaagtggagtcagaattactacaaggttatagtaaatacttgccacatgatgttgttgtcatggctgtgaagctatgcatactgtttgctgtgcttttgacagtccctctgatccacttccctgccagaaaagccttaatgatgatacttttctcaaattttccattttcatggattcggcattctctgaccacattagcgctcaacattatcattgttttacttgcaatatatgttcctgacattaggaatgtatttggtatagttggtgccagcacttcaacatgcttgatttttgtattcccaggattattttatctgaaacttagcagagaagattttctctcatggaaaaagcttggggctttgttcctgcttatcactggtaccttggttgggagcttcagtttagcactcatcatttttgactgggtcaacaaataaagtaattttctattacaaagaataatttacctctgtaagcaagaaggaatcgttctggaaggcattggatatgaaaaattatactcagggaaattattaccagaaaagcaagacagagca

SEQ ID NO: 3158410 - DNA, 240 bp, Cricetulus griseus
tacttcctccagccaggttggtccagctacttctccctgggcccccaacatgccccagccccaggttctctgcacagactccttagcccaccaggggtctccctgatgcccaccaggcgtacacacatggcgtccatgcatccaaacacacaatacctcgttctactttggcatcaccgtgggctggagggggctctcactccccacaacactgaggccaaaggaccccctgcccctggg

SEQ ID NO: 3158411 - DNA, 1049 bp, Cricetulus griseus
gaggtgtggtccgagagccggacacttggaatcatctctcaaacttcaacaccaaggatcacaggggacccctaggaccagcctgccccactttccaccaccctgagactacccgcccagattccaatgaccccaaccagccagccaagatagagactgactactggccatgtcccccgtcgctggccgttgtggagacagaatggaggaaacggaaggcatcccgaaagggggcagaggaagaggaggaagaggaagatgacgactctgaagaggagattaaagccatcagggagcggcagaaagaggagctcagtaaggttacttccaacctgggaaagatgattttgaaagaagagatggaaaagtccttgcccattaggaggaaaacacgactctctgccggaccggacacccgttccatacctccttgcattcgggaacatcaaagtcctcctctcttccttcctatggcaggaccgccctgagccggctacagtccacagaattcagcccatcgggaagtgaggctgggagcccaggcctgcagatctatccctatgaaatgctggtggtgaccacaaggggcgaactaagctgcctcctggtgtggaccgcatgaggcttgagaggcatttgtcagcagaggacttctctagggtctttgccatgtctcctgaggagtttggcaagctagccctgtggaagaggaatgaactcaagaagaaggcttccctcttctgacatccctgccagctcgagagtccaggctcccaggtgccctcattgccatgcattccctcctgtgctctctaaagaatgtaatttattggggcaccctctgctgctttctttctttccctgactccctgccctacctaattgcactcccctgtctcttcacatatgtgtgtgtatataattatatatatatatatatatattttgcccaggtctgggtttcctttttgcccagatcctggcactccctgtccactgtgtgtgtagattatgctgggaggggtaactgcttggaattaaaaggttgc

SEQ ID NO: 3158412 - DNA, 968 bp, Cricetulus griseus
cagttacagagatctaattagtcatgggaaaaatcaattatgaaagtttactgccaaatctgtcgaaagggagataatgaggaactgcttctactctgtgatggttgtgacaaaggctgccatacatactgccatcggcccaagattacaactattccagatggggactggttttgtccagcttgcatcgctaaggcaagcggtcagactataaaataaaaaattcatgtcaaaggaaaaagacaaacgaatccaggaaaagcaggaaagggaatgttgctggggacactgaagatgaagactcagctaacttaggtagaacagggaggcacacccaaagaatgttcacaggaaagggtgttctagtgcaatagcaattaaactctatcaaatcgcactgaatagccaacaccagagctctaacatgggaaatggttctcctttccctctcaataaatatctatttttcatttttttactttgtagtttattttttagtgaatgtattttaattttatgaatttgcgcatcacttgtgtagtaaaattgtatttcaagccagtggaaattgacgtgtatatattgttcattattgtttatattgagtcttgttttaatatgtattatgtgtatatattgtttggagacattattgtttatgccttagaaggactgtagcatttgatcggagtctaaaggtatttacagctctacagcttgtacagtaattatcctctaccaacactgtggcgtctccctaatcttggtagtgcctgcctttgaaacagggtgtaggggatagtagttttccatttttctattttgttatataattttaagccaccagggcctaaattaaagtataatcatttgtatccatgtggaataaaatcgtgacgatttcctacacacacagtattttttcatagagacacttccttcccatctgccttgcctcagaaataaat

SEQ ID NO: 3158413 - DNA, 1009 bp, Cricetulus griseus
tttttgataacagcagttgtggttttattgtgtccaacacattaataaatgaacttcgagcctgagcctgtagatgtcctgactctccttgcccagccctgggcaccagccccttctcgcctgttctggggagaaggggtggtatcggaggtggcctggctgtagtgtctaactcaggtaaggtgtgcacatcagaagctcaaggcgggcaccagaagttgtgggttatacgctcacttgatagcacaagccccagctgcaaggcctgtcagctcctaggaagctgctagtgctttgcctggttctgttcaggcatctgaggtaaggaggaggggctagaggagcggcttatcccaccttcaccaaggtgtcaggcatataaatacagagagagaatataaatataagtccagctactagaccaaaaacaacgaggagggctggacacccactatgggcaagtccacaggctgtgccacctgtgccactgagcacagagtgcactcctgccccctggtggttaaaggagaggcttgtccagcctccagggctggtaggtgtagcaccttgaagagggtgaagcaggggcagacacaggaggcccaagccaccggctttaaaaaaatcacagagctgccaaggctctaagtaatcatccaagccactctacctcaaccaatgacctctgctcccagagcaggaagagaaagtcaaacagctgggagatgggtggagatcagacagaaaatgccactcccaggagcctggcttttcccagccttcaacaagccaggggaaaggtcagggtaagggacgaggagccaaccctaaaccagcacatataactgtgcgctcataatacctggtcacttttctcaagcccaggctggtgctgtgttattggcaggaaattgagagagttggaatccctgataggagccggaccctggactgggcactttggcatgccagccctgtttcctgccccaggcagatggaagagacacta

SEQ ID NO: 3158414 - DNA, 179 bp, Cricetulus griseus
tttgtacctgaaattctggatctcactggcttggactggaacaagctgagtctggctcctcttacaatggagagctgtatttttgtattgtcatctctattatgccaagtatccctgtgttggactgtgaggtggatttatgtagtgattcagtctgcaaataaaacaaagtaaccaat

SEQ ID NO: 3158415 - DNA, 552 bp, Cricetulus griseus
  modified_base (497)..(497): a, c, t, g, unknown or other
cgtccgctgcgccggagccggtacggtctgccccgtctgcgtgtggcggcagcacagccgcgagctgcgcctggagagcatcaagtcgcagatcctgagcaaactgcggctcaaggaggggattcgagatcaacgcctttgatcccagtggcacagatctggctgtcacttcccttgggccaggagctgaggggctgcatcctttcatggagcttcgagtcctagagaacacaaaaaggtcgcggaggaacctaggcctggactgcgatgagcactcaagtgagtcccgctgctgccgatacccactcacggtggactttgaggcttttggctgggactggatcatacgcacctaaacgctacaaggccaactactgctccggccagtgcgagtacatgttcatgcaaaagtatccacacacccatttggtgcaacaggccaatccaagaggctctgctgggccctgctgcacccctaccaagatgtccccaatcanacatgctttacttcaataacaagcagcagattatctacggcaagactccctggca

SEQ ID NO: 3158416 - DNA, 271 bp, Cricetulus griseus
caggcagatttctttgctaaaatggtcttttttggagcaaatgaactggtgaaatatttccctattctcaccaggtcagctccaacttctaaatgtcgatctatcttcttgggtgtgtccgggtttttaagtgccagggaaatcagccatgaccatgaagcttgcatatgtataatatatagtttttgccataggcctgaacttcctcctagcctaaggtggtaaaaaaagatgaatggtgcatgaccctgtctcctagctggatgaggag

SEQ ID NO: 3158417 - DNA, 773 bp, Cricetulus griseus
tacaccacggcttccccaatatgagcctgaccctggtgcacttcgtggtcacctggctgggcttatacatctgccagaaatggacatctttgcccccaaaagtctgccgctctccaagatcctcctcctggccctcagcttctgtggctttgtggtcttcaccaacctttctctacagaacaacaccataggcacctatcagctggccaaggccatgactacgccggtgatcatagccatccagaccttctggtaccagaagagcttctccatccgaatacagctcacgctgatccctataactgtaggtgtaatcctaaattcttattacgatgtgaagtttcattctcttggaatggtgtttgctgcccttggtgtgttagttacatccctttatcaagtgtgggtgggagccaagcagcatgaactacaagtgaattccatgcagctgctgtactaccaggctcccatgtcctctgccatgctgctggtggctgtgcccttctttgagccagtgtttggagagggaggaatatttggcccctggtcagtttctgctttgcttatggtactgctgtctggagtcatcgctttcatggtgaacttatcaatttattggatcattgggaacacctcaccagtcacctacaacatgttcggacatttcaagttctgcatcaccctgtgcggaggatacattctgtttaaggatccactgtcagttaaccaggggcttggcatcttatgcacactgttcggcatcctcaccctac

SEQ ID NO: 3158418 - DNA, 468 bp, Cricetulus griseus
aatgtcatgatcagcactgagtgggcagctcctaatgtcttcaaagacggctttaaccctgctcacgtggaggccgggctgtacgggagccacttgcatgtgtgggactggcaacgtcatgaaatcatccagaccctacaaatgaaggatgggctcatccccctggaggtccgcttcctccatgacccagctgccacccagggcttcgtaggctgcgctctcagctccaacatccagcgcttctacaagaatgagggaggcacctggtcagtggagaaggtgatccaggtgccctccaagaaagtaaagggctggttgctgcccgaaatgccaggcttgatcactgacatcctgctgtccctggatgaccgcttcctctacttcagcaactggctgcatggggacattcggcagtatgacatctctaacccacagaagccccgccttgttgggcagatcttccttggg

SEQ ID NO: 3158419 - DNA, 1567 bp, Cricetulus griseus
tttgaatatgatttgaataaaaagaagacttacacaggtggaaccagaaaagatacgaagctctgggagagatcatcacaaaatatgtttacgagctcctggaaaaggactgccacttgcaaaaaatctctattccagtagatgccactgaaagtgaaccaaagagttttatctttatgagtgaggatgctttgacaaatccacagaaactgatggttttaattcatggtagtggtgttgtcagggcaggtcagtgggctagaaggcttattattaatgaagatctggacagtggcacacagatcccttttattaagagagctgtggatgaaggatatggagtcatagtcctgaacccaaatgaaaactatattgaagtggaaaaacaaaaaatgcgcaaacagttgtctgctgatggcacagatgagccagcagagaagcgggaaaggagagagaaagtctccaaagaaacaaagaagcgccgtgatttctttgagaagtaccgaaacccgggaaaatggttctcctgaagagcatgcagtctatgtatgggaccatttcatagccaagtctgctgcagagagtgtgttttttgttgctcacagctatggaggacttgcttttgttgaactgatgattcaacgagaagcagatgtgaaaagtaaggtgactgctgtggcattgacagactctgttcacaatgtgtggcatcaagaagctggcaaaaccatccgcgaatggatgagagagaactgttgcaactgggtttccagctcagaaccattggacacttcggtggagtccatgctgcctgactgtcccagagtctctgcaggcaccgaccgccacgagctaacttcctggaagagcttcccgtccatcttcaagttcttcgcggaagcgtcgcaagccaagagcagctcgcagaagcccaccctgacgcggcgctcgcatcggatcaagcacgaagagctgtgagctcgccgccgcccgccgcgcccgcagcctcccggcccccattagattgctttcttcctccagcacagagtcgtgatatgttcgtctaaatagtgttttgcattatttctagatgagtgcaactgtcaaagcaatatggactcagcagccgcctttcctgcgggctgagctcgggcttggcgctggggtcggcggccgacagaggctgagagcgcccggagccccgcgcctccctgcccctaacctctccggcgagccgccggtgcgagcggcgtctgcgcggtcctaccgcccgctgcagtgcggcggctactgcccagcctcaatcgtgcccgttttttttgcttccccttaaacccagcaatcttttattctagacttcaaactttaattttaaccaagtttttccctcgggtcatcctatgaactcctctcttttgtagaaagccatagtcctggaaatgccaactttaaattgagaacactaatgccatggtgcactatgtggtttggggataccaatccttctctccctgtaacgacctatttccatttcaatctgtctgctagagagctatttacaaagtta

SEQ ID NO: 3158420 - DNA, 752 bp, Cricetulus griseus
ggattgtcgaaaatttttggattcaaacgctctgggtctgactgtcgcagccctcagcagctatgatccccagatgcgcgctgccgcctactatgtcctagcagcctactactctcacctggagggagctcgcttccgggaacaggcccaggttctgtacctgttggatgttgtccgtaatggaattaaagctccgaacctgaggctcccctttaccctggctcttttcattgccaaggcagcactacagatcttgaaaccagaggagcacatgtactggaagatcagcaagttcctgctgtctcacgagaacctgaacatggacaaactgccaggcttctaccagttcttctacagctctgacttccagcaaaaactgaacaaggggacagtgctgtgaaaagtggcatcttgaggctgtacagtcaccactgcagtacccagggcctggtagggcctgcacaggatgtggcctgcgagttcagcactgtcatgctgcagttgttggtggcccagggccagatagatagtcctttccacccagtggtgcaggccctgtgccttgattgcctgaacgaaaagaatgaagccaagcgagcttcttcagcattcctggtgtctctgtacattaaggacatctggctgggggcccagcagccagacaccttcctcgctcatgtcagaatgatctgtgaggctgtaaaggacaggcctcgtggtgaggaggaggacattgttgtgctctgcaagga

SEQ ID NO: 3158421 - RNA, 19 nt, Artificial Sequence
  Description of Artificial Sequence: Synthetic oligonucleotide
acuuuauucacauugauac

SEQ ID NO: 3158422 - RNA, 19 nt, Artificial Sequence
  Description of Artificial Sequence: Synthetic oligonucleotide
acuaacuuuauucacauug

SEQ ID NO: 3158423 - RNA, 19 nt, Artificial Sequence
  Description of Artificial Sequence: Synthetic oligonucleotide
acaaaaguagauuuucccc

SEQ ID NO: 3158424 - RNA, 19 nt, Artificial Sequence
  Description of Artificial Sequence: Synthetic oligonucleotide
aaccacacuaacuuuauuc

SEQ ID NO: 3158425 - RNA, 19 nt, Artificial Sequence
  Description of Artificial Sequence: Synthetic oligonucleotide
uucacauugauacaaaagu

SEQ ID NO: 3158426 - RNA, 19 nt, Artificial Sequence
  Description of Artificial Sequence: Synthetic oligonucleotide
aauggcauucaccuccucc

SEQ ID NO: 3158427 - RNA, 19 nt, Artificial Sequence
  Description of Artificial Sequence: Synthetic oligonucleotide
ugcucauacaggcagaagg

SEQ ID NO: 3158428 - RNA, 19 nt, Artificial Sequence
  Description of Artificial Sequence: Synthetic oligonucleotide
aaaaguagauuuuccccac

SEQ ID NO: 3158429 - RNA, 19 nt, Artificial Sequence
  Description of Artificial Sequence: Synthetic oligonucleotide
caaacugguccuuagagcg

SEQ ID NO: 3158430 - RNA, 19 nt, Artificial Sequence
  Description of Artificial Sequence: Synthetic oligonucleotide
agcaaugucaaucuccuuc

SEQ ID NO: 3158431 - RNA, 19 nt, Artificial Sequence
  Description of Artificial Sequence: Synthetic oligonucleotide
augucaaucuccuucacuc

SEQ ID NO: 3158432 - RNA, 19 nt, Artificial Sequence
  Description of Artificial Sequence: Synthetic oligonucleotide
uugagaauggcauucaccu

SEQ ID NO: 3158433 - RNA, 19 nt, Artificial Sequence
  Description of Artificial Sequence: Synthetic oligonucleotide
cuuagagcggacaaggccg

SEQ ID NO: 3158434 - RNA, 19 nt, Artificial Sequence
  Description of Artificial Sequence: Synthetic oligonucleotide
uacaaaaguagauuuuccc

SEQ ID NO: 3158435 - RNA, 19 nt, Artificial Sequence
  Description of Artificial Sequence: Synthetic oligonucleotide
cacauugauacaaaaguag

SEQ ID NO: 3158436 - RNA, 19 nt, Artificial Sequence
  Description of Artificial Sequence: Synthetic oligonucleotide
gagaauggcauucaccucc

SEQ ID NO: 3158437 - RNA, 19 nt, Artificial Sequence
  Description of Artificial Sequence: Synthetic oligonucleotide
agagugggugcgcagaugc

SEQ ID NO: 3158438 - RNA, 19 nt, Artificial Sequence
  Description of Artificial Sequence: Synthetic oligonucleotide
aggcagaaggagcagaggc

SEQ ID NO: 3158439 - RNA, 19 nt, Artificial Sequence
  Description of Artificial Sequence: Synthetic oligonucleotide
uuuauucacauugauacaa

SEQ ID NO: 3158440 - RNA, 19 nt, Artificial Sequence
  Description of Artificial Sequence: Synthetic oligonucleotide
ucagcgcaaacucaaacug

SEQ ID NO: 3158441 - RNA, 19 nt, Artificial Sequence
  Description of Artificial Sequence: Synthetic oligonucleotide
auuuuccccacuuccuucc

SEQ ID NO: 3158442 - RNA, 19 nt, Artificial Sequence
  Description of Artificial Sequence: Synthetic oligonucleotide
ugccaugcgauucaguacc

SEQ ID NO: 3158443 - RNA, 19 nt, Artificial Sequence
  Description of Artificial Sequence: Synthetic oligonucleotide
ugcgcagaugcucauacag

SEQ ID NO: 3158444 - RNA, 19 nt, Artificial Sequence
  Description of Artificial Sequence: Synthetic oligonucleotide
uugauacaaaaguagauuu

SEQ ID NO: 3158445 - RNA, 19 nt, Artificial Sequence
  Description of Artificial Sequence: Synthetic oligonucleotide
guagauuuuccccacuucc

SEQ ID NO: 3158446 - RNA, 19 nt, Artificial Sequence
  Description of Artificial Sequence: Synthetic oligonucleotide
ugcacagacaaccacacua

SEQ ID NO: 3158447 - RNA, 19 nt, Artificial Sequence
  Description of Artificial Sequence: Synthetic oligonucleotide
gauacaaaaguagauuuuc

SEQ ID NO: 3158448 - RNA, 19 nt, Artificial Sequence
  Description of Artificial Sequence: Synthetic oligonucleotide
auggcauucaccuccuccg

SEQ ID NO: 3158449 - RNA, 19 nt, Artificial Sequence
  Description of Artificial Sequence: Synthetic oligonucleotide
ucauacaggcagaaggagc

SEQ ID NO: 3158450 - RNA, 19 nt, Artificial Sequence
  Description of Artificial Sequence: Synthetic oligonucleotide
ccaagaugggccaagaugg

SEQ ID NO: 3158451 - RNA, 19 nt, Artificial Sequence
  Description of Artificial Sequence: Synthetic oligonucleotide
aaugucaaucuccuucacu

SEQ ID NO: 3158452 - RNA, 19 nt, Artificial Sequence
  Description of Artificial Sequence: Synthetic oligonucleotide
cuugagaauggcauucacc

SEQ ID NO: 3158453 - RNA, 19 nt, Artificial Sequence
  Description of Artificial Sequence: Synthetic oligonucleotide
auacaaaaguagauuuucc

SEQ ID NO: 3158454 - RNA, 19 nt, Artificial Sequence
  Description of Artificial Sequence: Synthetic oligonucleotide
ucaaacugguccuuagagc

SEQ ID NO: 3158455 - RNA, 19 nt, Artificial Sequence
  Description of Artificial Sequence: Synthetic oligonucleotide
uuugccaugcgauucagua

SEQ ID NO: 3158456 - RNA, 19 nt, Artificial Sequence
  Description of Artificial Sequence: Synthetic oligonucleotide
ucacauugauacaaaagua

SEQ ID NO: 3158457 - RNA, 19 nt, Artificial Sequence
  Description of Artificial Sequence: Synthetic oligonucleotide
agcaugcccacugaggugc

SEQ ID NO: 3158458 - RNA, 19 nt, Artificial Sequence
  Description of Artificial Sequence: Synthetic oligonucleotide
cucaaacugguccuuagag

SEQ ID NO: 3158459 - RNA, 19 nt, Artificial Sequence
  Description of Artificial Sequence: Synthetic oligonucleotide
aguagauuuuccccacuuc

SEQ ID NO: 3158460 - RNA, 19 nt, Artificial Sequence
  Description of Artificial Sequence: Synthetic oligonucleotide
accacacuaacuuuauuca

SEQ ID NO: 3158461 - RNA, 19 nt, Artificial Sequence
  Description of Artificial Sequence: Synthetic oligonucleotide
uccacacugggcuggaagg

SEQ ID NO: 3158462 - RNA, 19 nt, Artificial Sequence
  Description of Artificial Sequence: Synthetic oligonucleotide
aacucaaacugguccuuag

SEQ ID NO: 3158463 - RNA, 19 nt, Artificial Sequence
  Description of Artificial Sequence: Synthetic oligonucleotide
caaaaguagauuuucccca

SEQ ID NO: 3158464 - RNA, 19 nt, Artificial Sequence
  Description of Artificial Sequence: Synthetic oligonucleotide
cuggucacggacaugcucc

SEQ ID NO: 3158465 - RNA, 19 nt, Artificial Sequence
  Description of Artificial Sequence: Synthetic oligonucleotide
gcugccaugcccaagaugg

SEQ ID NO: 3158466 - RNA, 19 nt, Artificial Sequence
  Description of Artificial Sequence: Synthetic oligonucleotide
ugcagcugcacagacaacc

SEQ ID NO: 3158467 - RNA, 19 nt, Artificial Sequence
  Description of Artificial Sequence: Synthetic oligonucleotide
ucuccuucacuccuuuugc

SEQ ID NO: 3158468 - RNA, 19 nt, Artificial Sequence
  Description of Artificial Sequence: Synthetic oligonucleotide
auucacauugauacaaaag

SEQ ID NO: 3158469 - RNA, 19 nt, Artificial Sequence
  Description of Artificial Sequence: Synthetic oligonucleotide
auugauacaaaaguagauu

SEQ ID NO: 3158470 - RNA, 19 nt, Artificial Sequence
  Description of Artificial Sequence: Synthetic oligonucleotide
agggcugaagagugggugc

SEQ ID NO: 3158471 - RNA, 19 nt, Artificial Sequence
  Description of Artificial Sequence: Synthetic oligonucleotide
cagaugcucauacaggcag

SEQ ID NO: 3158472 - RNA, 19 nt, Artificial Sequence
  Description of Artificial Sequence: Synthetic oligonucleotide
ugauacaaaaguagauuuu

SEQ ID NO: 3158473 - RNA, 19 nt, Artificial Sequence
  Description of Artificial Sequence: Synthetic oligonucleotide
uccgccacggcugucagcg

SEQ ID NO: 3158474 - RNA, 19 nt, Artificial Sequence
  Description of Artificial Sequence: Synthetic oligonucleotide
aucuccuucacuccuuuug

SEQ ID NO: 3158475 - RNA, 19 nt, Artificial Sequence
  Description of Artificial Sequence: Synthetic oligonucleotide
acggacaugcuccagggug

SEQ ID NO: 3158476 - RNA, 19 nt, Artificial Sequence
  Description of Artificial Sequence: Synthetic oligonucleotide
uagauuuuccccacuuccu

SEQ ID NO: 3158477 - RNA, 19 nt, Artificial Sequence
  Description of Artificial Sequence: Synthetic oligonucleotide
uauucacauugauacaaaa

SEQ ID NO: 3158478 - RNA, 19 nt, Artificial Sequence
  Description of Artificial Sequence: Synthetic oligonucleotide
uuagagcggacaaggccgg

SEQ ID NO: 3158479 - RNA, 19 nt, Artificial Sequence
  Description of Artificial Sequence: Synthetic oligonucleotide
auggcagguggguaagggc

SEQ ID NO: 3158480 - RNA, 19 nt, Artificial Sequence
  Description of Artificial Sequence: Synthetic oligonucleotide
ucacggacaugcuccaggg

SEQ ID NO: 3158481 - RNA, 19 nt, Artificial Sequence
  Description of Artificial Sequence: Synthetic oligonucleotide
cauacaggcagaaggagca

SEQ ID NO: 3158482 - RNA, 19 nt, Artificial Sequence
  Description of Artificial Sequence: Synthetic oligonucleotide
uuauucacauugauacaaa

SEQ ID NO: 3158483 - RNA, 19 nt, Artificial Sequence
  Description of Artificial Sequence: Synthetic oligonucleotide
uaacuuuauucacauugau

SEQ ID NO: 3158484 - RNA, 19 nt, Artificial Sequence
  Description of Artificial Sequence: Synthetic oligonucleotide
aaaguagauuuuccccacu

SEQ ID NO: 3158485 - RNA, 19 nt, Artificial Sequence
  Description of Artificial Sequence: Synthetic oligonucleotide
uuccacacugggcuggaag

SEQ ID NO: 3158486 - RNA, 19 nt, Artificial Sequence
  Description of Artificial Sequence: Synthetic oligonucleotide
guggguaagggcugaagag

SEQ ID NO: 3158487 - RNA, 19 nt, Artificial Sequence
  Description of Artificial Sequence: Synthetic oligonucleotide
agcagaggccagcaugccc

SEQ ID NO: 3158488 - RNA, 19 nt, Artificial Sequence
  Description of Artificial Sequence: Synthetic oligonucleotide
ugucagcgcaaacucaaac

SEQ ID NO: 3158489 - RNA, 19 nt, Artificial Sequence
  Description of Artificial Sequence: Synthetic oligonucleotide
cuaacuuuauucacauuga

SEQ ID NO: 3158490 - RNA, 19 nt, Artificial Sequence
  Description of Artificial Sequence: Synthetic oligonucleotide
acauugauacaaaaguaga

SEQ ID NO: 3158491 - RNA, 19 nt, Artificial Sequence
  Description of Artificial Sequence: Synthetic oligonucleotide
acacuaacuuuauucacau

SEQ ID NO: 3158492 - RNA, 19 nt, Artificial Sequence
  Description of Artificial Sequence: Synthetic oligonucleotide
uggcagguggguaagggcu

SEQ ID NO: 3158493 - RNA, 19 nt, Artificial Sequence
  Description of Artificial Sequence: Synthetic oligonucleotide
aaguagauuuuccccacuu

SEQ ID NO: 3158494 - RNA, 19 nt, Artificial Sequence
  Description of Artificial Sequence: Synthetic oligonucleotide
uggggcagggccuugagaa

SEQ ID NO: 3158495 - RNA, 19 nt, Artificial Sequence
  Description of Artificial Sequence: Synthetic oligonucleotide
ugucaaucuccuucacucc

SEQ ID NO: 3158496 - RNA, 19 nt, Artificial Sequence
  Description of Artificial Sequence: Synthetic oligonucleotide
guaagggcugaagaguggg

SEQ ID NO: 3158497 - RNA, 19 nt, Artificial Sequence
  Description of Artificial Sequence: Synthetic oligonucleotide
cacacuaacuuuauucaca

SEQ ID NO: 3158498 - RNA, 19 nt, Artificial Sequence
  Description of Artificial Sequence: Synthetic oligonucleotide
guccuuagagcggacaagg

SEQ ID NO: 3158499 - RNA, 19 nt, Artificial Sequence
  Description of Artificial Sequence: Synthetic oligonucleotide
aggagcagaggccagcaug

SEQ ID NO: 3158500 - RNA, 19 nt, Artificial Sequence
  Description of Artificial Sequence: Synthetic oligonucleotide
gaugggccaagauggcagg

SEQ ID NO: 3158501 - RNA, 19 nt, Artificial Sequence
  Description of Artificial Sequence: Synthetic oligonucleotide
aacuuuauucacauugaua

SEQ ID NO: 3158502 - RNA, 19 nt, Artificial Sequence
  Description of Artificial Sequence: Synthetic oligonucleotide
uccuucacuccuuuugcca

SEQ ID NO: 3158503 - RNA, 19 nt, Artificial Sequence
  Description of Artificial Sequence: Synthetic oligonucleotide
gauggcagguggguaaggg

SEQ ID NO: 3158504 - RNA, 19 nt, Artificial Sequence
  Description of Artificial Sequence: Synthetic oligonucleotide
gucacggacaugcuccagg

SEQ ID NO: 3158505 - RNA, 19 nt, Artificial Sequence
  Description of Artificial Sequence: Synthetic oligonucleotide
caugcgauucaguaccaug

SEQ ID NO: 3158506 - RNA, 19 nt, Artificial Sequence
  Description of Artificial Sequence: Synthetic oligonucleotide
aagggcugaagagugggug

SEQ ID NO: 3158507 - RNA, 19 nt, Artificial Sequence
  Description of Artificial Sequence: Synthetic oligonucleotide
uggaagggcugccaugccc

SEQ ID NO: 3158508 - RNA, 19 nt, Artificial Sequence
  Description of Artificial Sequence: Synthetic oligonucleotide
acuuccuuccacacugggc

SEQ ID NO: 3158509 - RNA, 19 nt, Artificial Sequence
  Description of Artificial Sequence: Synthetic oligonucleotide
cagcgcaaacucaaacugg

SEQ ID NO: 3158510 - RNA, 19 nt, Artificial Sequence
  Description of Artificial Sequence: Synthetic oligonucleotide
gauuuuccccacuuccuuc

SEQ ID NO: 3158511 - RNA, 19 nt, Artificial Sequence
  Description of Artificial Sequence: Synthetic oligonucleotide
agaaggagcagaggccagc

SEQ ID NO: 3158512 - RNA, 19 nt, Artificial Sequence
  Description of Artificial Sequence: Synthetic oligonucleotide
uucaccuccuccgccacgg

SEQ ID NO: 3158513 - RNA, 19 nt, Artificial Sequence
  Description of Artificial Sequence: Synthetic oligonucleotide
aaacugguccuuagagcgg

SEQ ID NO: 3158514 - RNA, 19 nt, Artificial Sequence
  Description of Artificial Sequence: Synthetic oligonucleotide
gacaaggccgggccgcugg

SEQ ID NO: 3158515 - RNA, 19 nt, Artificial Sequence
  Description of Artificial Sequence: Synthetic oligonucleotide
uggguaagggcugaagagu

SEQ ID NO: 3158516 - RNA, 19 nt, Artificial Sequence
  Description of Artificial Sequence: Synthetic oligonucleotide
agaugggccaagauggcag

SEQ ID NO: 3158517 - RNA, 19 nt, Artificial Sequence
  Description of Artificial Sequence: Synthetic oligonucleotide
cuuuauucacauugauaca

SEQ ID NO: 3158518 - RNA, 19 nt, Artificial Sequence
  Description of Artificial Sequence: Synthetic oligonucleotide
gaggccagcaugcccacug

SEQ ID NO: 3158519 - RNA, 19 nt, Artificial Sequence
  Description of Artificial Sequence: Synthetic oligonucleotide
ugaagagugggugcgcaga

SEQ ID NO: 3158520 - RNA, 19 nt, Artificial Sequence
  Description of Artificial Sequence: Synthetic oligonucleotide
uccuuagagcggacaaggc

SEQ ID NO: 3158521 - RNA, 19 nt, Artificial Sequence
  Description of Artificial Sequence: Synthetic oligonucleotide
aaaucgauguguuggaugg

SEQ ID NO: 3158522 - RNA, 19 nt, Artificial Sequence
  Description of Artificial Sequence: Synthetic oligonucleotide
aaguuucuggcccaguacc

SEQ ID NO: 3158523 - RNA, 19 nt, Artificial Sequence
  Description of Artificial Sequence: Synthetic oligonucleotide
uuggaaaggguaaugaagc

SEQ ID NO: 3158524 - RNA, 19 nt, Artificial Sequence
  Description of Artificial Sequence: Synthetic oligonucleotide
agcacuacggauaaaaucg

SEQ ID NO: 3158525 - RNA, 19 nt, Artificial Sequence
  Description of Artificial Sequence: Synthetic oligonucleotide
aaaguuucuggcccaguac

SEQ ID NO: 3158526 - RNA, 19 nt, Artificial Sequence
  Description of Artificial Sequence: Synthetic oligonucleotide
agagcaucgacauucugcg

SEQ ID NO: 3158527 - RNA, 19 nt, Artificial Sequence
  Description of Artificial Sequence: Synthetic oligonucleotide
ugaccugaaagucaaucgg

SEQ ID NO: 3158528 - RNA, 19 nt, Artificial Sequence
  Description of Artificial Sequence: Synthetic oligonucleotide
aaaaucgauguguuggaug

SEQ ID NO: 3158529 - RNA, 19 nt, Artificial Sequence
  Description of Artificial Sequence: Synthetic oligonucleotide
auaaguuucuuggaaaggg

SEQ ID NO: 3158530 - RNA, 19 nt, Artificial Sequence
  Description of Artificial Sequence: Synthetic oligonucleotide
uugaccugaaagucaaucg

SEQ ID NO: 3158531 - RNA, 19 nt, Artificial Sequence
  Description of Artificial Sequence: Synthetic oligonucleotide
cuuggaaaggguaaugaag

SEQ ID NO: 3158532 - RNA, 19 nt, Artificial Sequence
  Description of Artificial Sequence: Synthetic oligonucleotide
cuuggcggcacaaauaacc

SEQ ID NO: 3158533 - RNA, 19 nt, Artificial Sequence
  Description of Artificial Sequence: Synthetic oligonucleotide
cuauaaguuucuuggaaag

SEQ ID NO: 3158534 - RNA, 19 nt, Artificial Sequence
  Description of Artificial Sequence: Synthetic oligonucleotide
ugugcaugcauccauugga

SEQ ID NO: 3158535 - RNA, 19 nt, Artificial Sequence
  Description of Artificial Sequence: Synthetic oligonucleotide
ugcgucaccaaccagugca

SEQ ID NO: 3158536 - RNA, 19 nt, Artificial Sequence
  Description of Artificial Sequence: Synthetic oligonucleotide
aaugaagcgcuguaacucu

SEQ ID NO: 3158537 - RNA, 19 nt, Artificial Sequence
  Description of Artificial Sequence: Synthetic oligonucleotide
aacccaguaggucugugag

SEQ ID NO: 3158538 - RNA, 19 nt, Artificial Sequence
  Description of Artificial Sequence: Synthetic oligonucleotide
agcaucgacauucugcguc

SEQ ID NO: 3158539 - RNA, 19 nt, Artificial Sequence
  Description of Artificial Sequence: Synthetic oligonucleotide
uccauuggagcucugucag

SEQ ID NO: 3158540 - RNA, 19 nt, Artificial Sequence
  Description of Artificial Sequence: Synthetic oligonucleotide
aagucaaucggcucauucu

SEQ ID NO: 3158541 - RNA, 19 nt, Artificial Sequence
  Description of Artificial Sequence: Synthetic oligonucleotide
uauaaguuucuuggaaagg

SEQ ID NO: 3158542 - RNA, 19 nt, Artificial Sequence
  Description of Artificial Sequence: Synthetic oligonucleotide
ugagguuugucauccaaug

SEQ ID NO: 3158543 - RNA, 19 nt, Artificial Sequence
  Description of Artificial Sequence: Synthetic oligonucleotide
acaaauaacccaguagguc

SEQ ID NO: 3158544 - RNA, 19 nt, Artificial Sequence
  Description of Artificial Sequence: Synthetic oligonucleotide
uagagacccaccuuuuccg

SEQ ID NO: 3158545 - RNA, 19 nt, Artificial Sequence
  Description of Artificial Sequence: Synthetic oligonucleotide
ugggucuccggucagugcg

SEQ ID NO: 3158546 - RNA, 19 nt, Artificial Sequence
  Description of Artificial Sequence: Synthetic oligonucleotide
ucuucucaggguccaaagg

SEQ ID NO: 3158547 - RNA, 19 nt, Artificial Sequence
  Description of Artificial Sequence: Synthetic oligonucleotide
agugcgggcguagagaccc

SEQ ID NO: 3158548 - RNA, 19 nt, Artificial Sequence
  Description of Artificial Sequence: Synthetic oligonucleotide
uaacucuuugaucuucuca

SEQ ID NO: 3158549 - RNA, 19 nt, Artificial Sequence
  Description of Artificial Sequence: Synthetic oligonucleotide
acuauaaguuucuuggaaa

SEQ ID NO: 3158550 - RNA, 19 nt, Artificial Sequence
  Description of Artificial Sequence: Synthetic oligonucleotide
cagagcaucgacauucugc

SEQ ID NO: 3158551 - RNA, 19 nt, Artificial Sequence
  Description of Artificial Sequence: Synthetic oligonucleotide
acucgguggagauuccugc

SEQ ID NO: 3158552 - RNA, 19 nt, Artificial Sequence
  Description of Artificial Sequence: Synthetic oligonucleotide
uggaaaggguaaugaagcg

SEQ ID NO: 3158553 - RNA, 19 nt, Artificial Sequence
  Description of Artificial Sequence: Synthetic oligonucleotide
agucugggaucccagacuc

SEQ ID NO: 3158554 - RNA, 19 nt, Artificial Sequence
  Description of Artificial Sequence: Synthetic oligonucleotide
uccaauggcccuuuguuga

SEQ ID NO: 3158555 - RNA, 19 nt, Artificial Sequence
  Description of Artificial Sequence: Synthetic oligonucleotide
ucucaggguccaaaggagg

SEQ ID NO: 3158556 - RNA, 19 nt, Artificial Sequence
  Description of Artificial Sequence: Synthetic oligonucleotide
uccaaaggagggcuuggcg

SEQ ID NO: 3158557 - RNA, 19 nt, Artificial Sequence
  Description of Artificial Sequence: Synthetic oligonucleotide
cucuuugaucuucucaggg

SEQ ID NO: 3158558 - RNA, 19 nt, Artificial Sequence
  Description of Artificial Sequence: Synthetic oligonucleotide
auaaaaucgauguguugga

SEQ ID NO: 3158559 - RNA, 19 nt, Artificial Sequence
  Description of Artificial Sequence: Synthetic oligonucleotide
uucugcgucaccaaccagu

SEQ ID NO: 3158560 - RNA, 19 nt, Artificial Sequence
  Description of Artificial Sequence: Synthetic oligonucleotide
uaaguuucuuggaaagggu

SEQ ID NO: 3158561 - RNA, 19 nt, Artificial Sequence
  Description of Artificial Sequence: Synthetic oligonucleotide
acggauaaaaucgaugugu

SEQ ID NO: 3158562 - RNA, 19 nt, Artificial Sequence
  Description of Artificial Sequence: Synthetic oligonucleotide
uguuggaugggucuccggu

SEQ ID NO: 3158563 - RNA, 19 nt, Artificial Sequence
  Description of Artificial Sequence: Synthetic oligonucleotide
uaaugaagcgcuguaacuc

SEQ ID NO: 3158564 - RNA, 19 nt, Artificial Sequence
  Description of Artificial Sequence: Synthetic oligonucleotide
uuuuccgaccuguagucug

SEQ ID NO: 3158565 - RNA, 19 nt, Artificial Sequence
  Description of Artificial Sequence: Synthetic oligonucleotide
agcuucccaaguuucuccc

SEQ ID NO: 3158566 - RNA, 19 nt, Artificial Sequence
  Description of Artificial Sequence: Synthetic oligonucleotide
uggugagaggagaacugcg

SEQ ID NO: 3158567 - RNA, 19 nt, Artificial Sequence
  Description of Artificial Sequence: Synthetic oligonucleotide
agacccaccuuuuccgacc

SEQ ID NO: 3158568 - RNA, 19 nt, Artificial Sequence
  Description of Artificial Sequence: Synthetic oligonucleotide
ugucaucacuauaaguuuc

SEQ ID NO: 3158569 - RNA, 19 nt, Artificial Sequence
  Description of Artificial Sequence: Synthetic oligonucleotide
ucccaguugcucaaggccc

SEQ ID NO: 3158570 - RNA, 19 nt, Artificial Sequence
  Description of Artificial Sequence: Synthetic oligonucleotide
caguaggucugugagaacg

SEQ ID NO: 3158571 - RNA, 19 nt, Artificial Sequence
  Description of Artificial Sequence: Synthetic oligonucleotide
guagagacccaccuuuucc

SEQ ID NO: 3158572 - RNA, 19 nt, Artificial Sequence
  Description of Artificial Sequence: Synthetic oligonucleotide
cuuggagugcagagcaucg

SEQ ID NO: 3158573 - RNA, 19 nt, Artificial Sequence
  Description of Artificial Sequence: Synthetic oligonucleotide
uuuccgaccuguagucugg

SEQ ID NO: 3158574 - RNA, 19 nt, Artificial Sequence
  Description of Artificial Sequence: Synthetic oligonucleotide
cuuugaucuucucaggguc

SEQ ID NO: 3158575 - RNA, 19 nt, Artificial Sequence
  Description of Artificial Sequence: Synthetic oligonucleotide
ucugggaucccagacucgg

SEQ ID NO: 3158576 - RNA, 19 nt, Artificial Sequence
  Description of Artificial Sequence: Synthetic oligonucleotide
agcccacaaaguuucuggc

SEQ ID NO: 3158577 - RNA, 19 nt, Artificial Sequence
  Description of Artificial Sequence: Synthetic oligonucleotide
ugagaggagaacugcggcc

SEQ ID NO: 3158578 - RNA, 19 nt, Artificial Sequence
  Description of Artificial Sequence: Synthetic oligonucleotide
uacggauaaaaucgaugug

SEQ ID NO: 3158579 - RNA, 19 nt, Artificial Sequence
  Description of Artificial Sequence: Synthetic oligonucleotide
uuggcggcacaaauaaccc

SEQ ID NO: 3158580 - RNA, 19 nt, Artificial Sequence
  Description of Artificial Sequence: Synthetic oligonucleotide
uuguugaccugaaagucaa

SEQ ID NO: 3158581 - RNA, 19 nt, Artificial Sequence
  Description of Artificial Sequence: Synthetic oligonucleotide
gagcacuacggauaaaauc

SEQ ID NO: 3158582 - RNA, 19 nt, Artificial Sequence
  Description of Artificial Sequence: Synthetic oligonucleotide
ucaaggcccagugugcugg

SEQ ID NO: 3158583 - RNA, 19 nt, Artificial Sequence
  Description of Artificial Sequence: Synthetic oligonucleotide
aauggcccuuuguugaccu

SEQ ID NO: 3158584 - RNA, 19 nt, Artificial Sequence
  Description of Artificial Sequence: Synthetic oligonucleotide
ucugcgucaccaaccagug

SEQ ID NO: 3158585 - RNA, 19 nt, Artificial Sequence
  Description of Artificial Sequence: Synthetic oligonucleotide
ucuuggaaaggguaaugaa

SEQ ID NO: 3158586 - RNA, 19 nt, Artificial Sequence
  Description of Artificial Sequence: Synthetic oligonucleotide
acucuuugaucuucucagg

SEQ ID NO: 3158587 - RNA, 19 nt, Artificial Sequence
  Description of Artificial Sequence: Synthetic oligonucleotide
agcgcuguaacucuuugau

SEQ ID NO: 3158588 - RNA, 19 nt, Artificial Sequence
  Description of Artificial Sequence: Synthetic oligonucleotide
cagcccacaaaguuucugg

SEQ ID NO: 3158589 - RNA, 19 nt, Artificial Sequence
  Description of Artificial Sequence: Synthetic oligonucleotide
ucacuauaaguuucuugga

SEQ ID NO: 3158590 - RNA, 19 nt, Artificial Sequence
  Description of Artificial Sequence: Synthetic oligonucleotide
accuuuuccgaccuguagu

SEQ ID NO: 3158591 - RNA, 19 nt, Artificial Sequence
  Description of Artificial Sequence: Synthetic oligonucleotide
ucugugagaacgcggccug

SEQ ID NO: 3158592 - RNA, 19 nt, Artificial Sequence
  Description of Artificial Sequence: Synthetic oligonucleotide
aaauaacccaguaggucug

SEQ ID NO: 3158593 - RNA, 19 nt, Artificial Sequence
  Description of Artificial Sequence: Synthetic oligonucleotide
aguuucucccaguugcuca

SEQ ID NO: 3158594 - RNA, 19 nt, Artificial Sequence
  Description of Artificial Sequence: Synthetic oligonucleotide
uucuuggaaaggguaauga

SEQ ID NO: 3158595 - RNA, 19 nt, Artificial Sequence
  Description of Artificial Sequence: Synthetic oligonucleotide
ucgacauucugcgucacca

SEQ ID NO: 3158596 - RNA, 19 nt, Artificial Sequence
  Description of Artificial Sequence: Synthetic oligonucleotide
cuuuguugaccugaaaguc

SEQ ID NO: 3158597 - RNA, 19 nt, Artificial Sequence
  Description of Artificial Sequence: Synthetic oligonucleotide
caaauaacccaguaggucu

SEQ ID NO: 3158598 - RNA, 19 nt, Artificial Sequence
  Description of Artificial Sequence: Synthetic oligonucleotide
uuggaugggucuccgguca

SEQ ID NO: 3158599 - RNA, 19 nt, Artificial Sequence
  Description of Artificial Sequence: Synthetic oligonucleotide
cauuggagcucugucagcc

SEQ ID NO: 3158600 - RNA, 19 nt, Artificial Sequence
  Description of Artificial Sequence: Synthetic oligonucleotide
uucucccaguugcucaagg

SEQ ID NO: 3158601 - RNA, 19 nt, Artificial Sequence
  Description of Artificial Sequence: Synthetic oligonucleotide
aaguuucucccaguugcuc

SEQ ID NO: 3158602 - RNA, 19 nt, Artificial Sequence
  Description of Artificial Sequence: Synthetic oligonucleotide
cugaaagucaaucggcuca

SEQ ID NO: 3158603 - RNA, 19 nt, Artificial Sequence
  Description of Artificial Sequence: Synthetic oligonucleotide
gguaaugaagcgcuguaac

SEQ ID NO: 3158604 - RNA, 19 nt, Artificial Sequence
  Description of Artificial Sequence: Synthetic oligonucleotide
cuacggauaaaaucgaugu

SEQ ID NO: 3158605 - RNA, 19 nt, Artificial Sequence
  Description of Artificial Sequence: Synthetic oligonucleotide
ugagaacgcggccugcuga

SEQ ID NO: 3158606 - RNA, 19 nt, Artificial Sequence
  Description of Artificial Sequence: Synthetic oligonucleotide
ucagugcgggcguagagac

SEQ ID NO: 3158607 - RNA, 19 nt, Artificial Sequence
  Description of Artificial Sequence: Synthetic oligonucleotide
cucccaguugcucaaggcc

SEQ ID NO: 3158608 - RNA, 19 nt, Artificial Sequence
  Description of Artificial Sequence: Synthetic oligonucleotide
aucuucucaggguccaaag

SEQ ID NO: 3158609 - RNA, 19 nt, Artificial Sequence
  Description of Artificial Sequence: Synthetic oligonucleotide
acuacggauaaaaucgaug

SEQ ID NO: 3158610 - RNA, 19 nt, Artificial Sequence
  Description of Artificial Sequence: Synthetic oligonucleotide
uuggagcucugucagccgc

SEQ ID NO: 3158611 - RNA, 19 nt, Artificial Sequence
  Description of Artificial Sequence: Synthetic oligonucleotide
ugggaucccagacucggug

SEQ ID NO: 3158612 - RNA, 19 nt, Artificial Sequence
  Description of Artificial Sequence: Synthetic oligonucleotide
auccaauggcccuuuguug

SEQ ID NO: 3158613 - RNA, 19 nt, Artificial Sequence
  Description of Artificial Sequence: Synthetic oligonucleotide
gaccugaaagucaaucggc

SEQ ID NO: 3158614 - RNA, 19 nt, Artificial Sequence
  Description of Artificial Sequence: Synthetic oligonucleotide
aggagaacugcggccagcc

SEQ ID NO: 3158615 - RNA, 19 nt, Artificial Sequence
  Description of Artificial Sequence: Synthetic oligonucleotide
aucgacauucugcgucacc

SEQ ID NO: 3158616 - RNA, 19 nt, Artificial Sequence
  Description of Artificial Sequence: Synthetic oligonucleotide
aguaggucugugagaacgc

SEQ ID NO: 3158617 - RNA, 19 nt, Artificial Sequence
  Description of Artificial Sequence: Synthetic oligonucleotide
aaccagugcagcuucccaa

SEQ ID NO: 3158618 - RNA, 19 nt, Artificial Sequence
  Description of Artificial Sequence: Synthetic oligonucleotide
gagaacugcggccagccca

SEQ ID NO: 3158619 - RNA, 19 nt, Artificial Sequence
  Description of Artificial Sequence: Synthetic oligonucleotide
gaaaggguaaugaagcgcu

SEQ ID NO: 3158620 - RNA, 19 nt, Artificial Sequence
  Description of Artificial Sequence: Synthetic oligonucleotide
uuucuuggaaaggguaaug

SEQ ID NO: 3158621 - RNA, 19 nt, Artificial Sequence
  Description of Artificial Sequence: Synthetic oligonucleotide
uguuguacaaggaagaaag

SEQ ID NO: 3158622 - RNA, 19 nt, Artificial Sequence
  Description of Artificial Sequence: Synthetic oligonucleotide
aaaguggcaacacagagca

SEQ ID NO: 3158623 - RNA, 19 nt, Artificial Sequence
  Description of Artificial Sequence: Synthetic oligonucleotide
accaaaguccucuugaggc

SEQ ID NO: 3158624 - RNA, 19 nt, Artificial Sequence
  Description of Artificial Sequence: Synthetic oligonucleotide
agcuguuuucucuagagcc

SEQ ID NO: 3158625 - RNA, 19 nt, Artificial Sequence
  Description of Artificial Sequence: Synthetic oligonucleotide
aaggaagaaagaaucaccc

SEQ ID NO: 3158626 - RNA, 19 nt, Artificial Sequence
  Description of Artificial Sequence: Synthetic oligonucleotide
ugaacaguguuguacaagg

SEQ ID NO: 3158627 - RNA, 19 nt, Artificial Sequence
  Description of Artificial Sequence: Synthetic oligonucleotide
uccaggaagauccaguggg

SEQ ID NO: 3158628 - RNA, 19 nt, Artificial Sequence
  Description of Artificial Sequence: Synthetic oligonucleotide
ugugugauagccuggaucc

SEQ ID NO: 3158629 - RNA, 19 nt, Artificial Sequence
  Description of Artificial Sequence: Synthetic oligonucleotide
aaagucaaccagaagggcc

SEQ ID NO: 3158630 - RNA, 19 nt, Artificial Sequence
  Description of Artificial Sequence: Synthetic oligonucleotide
aaaaguggcaacacagagc

SEQ ID NO: 3158631 - RNA, 19 nt, Artificial Sequence
  Description of Artificial Sequence: Synthetic oligonucleotide
gccaaagucaaccagaagg

SEQ ID NO: 3158632 - RNA, 19 nt, Artificial Sequence
  Description of Artificial Sequence: Synthetic oligonucleotide
aagaaaaguggcaacacag

SEQ ID NO: 3158633 - RNA, 19 nt, Artificial Sequence
  Description of Artificial Sequence: Synthetic oligonucleotide
aaggugaacaguguuguac

SEQ ID NO: 3158634 - RNA, 19 nt, Artificial Sequence
  Description of Artificial Sequence: Synthetic oligonucleotide
gaaaaguggcaacacagag

SEQ ID NO: 3158635 - RNA, 19 nt, Artificial Sequence
  Description of Artificial Sequence: Synthetic oligonucleotide
uguacaaggaagaaagaau

SEQ ID NO: 3158636 - RNA, 19 nt, Artificial Sequence
  Description of Artificial Sequence: Synthetic oligonucleotide
aguuccaaggccgagaguc

SEQ ID NO: 3158637 - RNA, 19 nt, Artificial Sequence
  Description of Artificial Sequence: Synthetic oligonucleotide
ucucuagagcccuagcugg

SEQ ID NO: 3158638 - RNA, 19 nt, Artificial Sequence
  Description of Artificial Sequence: Synthetic oligonucleotide
caaggaagaaagaaucacc

SEQ ID NO: 3158639 - RNA, 19 nt, Artificial Sequence
  Description of Artificial Sequence: Synthetic oligonucleotide
uucgguaugugugauagcc

SEQ ID NO: 3158640 - RNA, 19 nt, Artificial Sequence
  Description of Artificial Sequence: Synthetic oligonucleotide
agaagggccauguggauuc

SEQ ID NO: 3158641 - RNA, 19 nt, Artificial Sequence
  Description of Artificial Sequence: Synthetic oligonucleotide
agagaagaaaaguggcaac

SEQ ID NO: 3158642 - RNA, 19 nt, Artificial Sequence
  Description of Artificial Sequence: Synthetic oligonucleotide
acaaggaagaaagaaucac

SEQ ID NO: 3158643 - RNA, 19 nt, Artificial Sequence
  Description of Artificial Sequence: Synthetic oligonucleotide
aguggcaacacagagcagg

SEQ ID NO: 3158644 - RNA, 19 nt, Artificial Sequence
  Description of Artificial Sequence: Synthetic oligonucleotide
uucuggguaaccauggcga

SEQ ID NO: 3158645 - RNA, 19 nt, Artificial Sequence
  Description of Artificial Sequence: Synthetic oligonucleotide
aggagcagggugcagaagg

SEQ ID NO: 3158646 - RNA, 19 nt, Artificial Sequence
  Description of Artificial Sequence: Synthetic oligonucleotide
auguggauuccagagaucg

SEQ ID NO: 3158647 - RNA, 19 nt, Artificial Sequence
  Description of Artificial Sequence: Synthetic oligonucleotide
caggauuacagccauggcc

SEQ ID NO: 3158648 - RNA, 19 nt, Artificial Sequence
  Description of Artificial Sequence: Synthetic oligonucleotide
aaggccuaaauguggccac

SEQ ID NO: 3158649 - RNA, 19 nt, Artificial Sequence
  Description of Artificial Sequence: Synthetic oligonucleotide
uucucuagagcccuagcug

SEQ ID NO: 3158650 - RNA, 19 nt, Artificial Sequence
  Description of Artificial Sequence: Synthetic oligonucleotide
augugugauagccuggauc

SEQ ID NO: 3158651 - RNA, 19 nt, Artificial Sequence
  Description of Artificial Sequence: Synthetic oligonucleotide
ggaagaaagaaucacccgc

SEQ ID NO: 3158652 - RNA, 19 nt, Artificial Sequence
  Description of Artificial Sequence: Synthetic oligonucleotide
ugagggcagagccagugcg

SEQ ID NO: 3158653 - RNA, 19 nt, Artificial Sequence
  Description of Artificial Sequence: Synthetic oligonucleotide
aggagcaggagguuccugc

SEQ ID NO: 3158654 - RNA, 19 nt, Artificial Sequence
  Description of Artificial Sequence: Synthetic oligonucleotide
ucaauccucaggaaguuuc

SEQ ID NO: 3158655 - RNA, 19 nt, Artificial Sequence
  Description of Artificial Sequence: Synthetic oligonucleotide
guugauagggaagagaaga

SEQ ID NO: 3158656 - RNA, 19 nt, Artificial Sequence
  Description of Artificial Sequence: Synthetic oligonucleotide
aggcuggugguguagacac

SEQ ID NO: 3158657 - RNA, 19 nt, Artificial Sequence
  Description of Artificial Sequence: Synthetic oligonucleotide
uuucucuagagcccuagcu

SEQ ID NO: 3158658 - RNA, 19 nt, Artificial Sequence
  Description of Artificial Sequence: Synthetic oligonucleotide
aggaagaaagaaucacccg

SEQ ID NO: 3158659 - RNA, 19 nt, Artificial Sequence
  Description of Artificial Sequence: Synthetic oligonucleotide
gaaagaaucacccgccaga

SEQ ID NO: 3158660 - RNA, 19 nt, Artificial Sequence
  Description of Artificial Sequence: Synthetic oligonucleotide
aagagaagaaaaguggcaa

SEQ ID NO: 3158661 - RNA, 19 nt, Artificial Sequence
  Description of Artificial Sequence: Synthetic oligonucleotide
agaucggaggagcaggagg

SEQ ID NO: 3158662 - RNA, 19 nt, Artificial Sequence
  Description of Artificial Sequence: Synthetic oligonucleotide
gaagaaagaaucacccgcc

SEQ ID NO: 3158663 - RNA, 19 nt, Artificial Sequence
  Description of Artificial Sequence: Synthetic oligonucleotide
guuucgguaugugugauag

SEQ ID NO: 3158664 - RNA, 19 nt, Artificial Sequence
  Description of Artificial Sequence: Synthetic oligonucleotide
uguugauagggaagagaag

SEQ ID NO: 3158665 - RNA, 19 nt, Artificial Sequence
  Description of Artificial Sequence: Synthetic oligonucleotide
auagccuggauccagggaa

SEQ ID NO: 3158666 - RNA, 19 nt, Artificial Sequence
  Description of Artificial Sequence: Synthetic oligonucleotide
agauggccacuacagcucc

SEQ ID NO: 3158667 - RNA, 19 nt, Artificial Sequence
  Description of Artificial Sequence: Synthetic oligonucleotide
guucuggguaaccauggcg

SEQ ID NO: 3158668 - RNA, 19 nt, Artificial Sequence
  Description of Artificial Sequence: Synthetic oligonucleotide
uggugguguagacacagug

SEQ ID NO: 3158669 - RNA, 19 nt, Artificial Sequence
  Description of Artificial Sequence: Synthetic oligonucleotide
gauuccagagaucggagga

SEQ ID NO: 3158670 - RNA, 19 nt, Artificial Sequence
  Description of Artificial Sequence: Synthetic oligonucleotide
aaaggccuaaauguggcca

SEQ ID NO: 3158671 - RNA, 19 nt, Artificial Sequence
  Description of Artificial Sequence: Synthetic oligonucleotide
uuguacaaggaagaaagaa

SEQ ID NO: 3158672 - RNA, 19 nt, Artificial Sequence
  Description of Artificial Sequence: Synthetic oligonucleotide
agaaggcuaugacugcugg

SEQ ID NO: 3158673 - RNA, 19 nt, Artificial Sequence
  Description of Artificial Sequence: Synthetic oligonucleotide
gaccaaaguccucuugagg

SEQ ID NO: 3158674 - RNA, 19 nt, Artificial Sequence
  Description of Artificial Sequence: Synthetic oligonucleotide
guacaaggaagaaagaauc

SEQ ID NO: 3158675 - RNA, 19 nt, Artificial Sequence
  Description of Artificial Sequence: Synthetic oligonucleotide
agacacagugacuccaguc

SEQ ID NO: 3158676 - RNA, 19 nt, Artificial Sequence
  Description of Artificial Sequence: Synthetic oligonucleotide
ucuugauggcagcaggcug

SEQ ID NO: 3158677 - RNA, 19 nt, Artificial Sequence
  Description of Artificial Sequence: Synthetic oligonucleotide
aagaaagaaucacccgcca

SEQ ID NO: 3158678 - RNA, 19 nt, Artificial Sequence
  Description of Artificial Sequence: Synthetic oligonucleotide
uacagcucccaccagcaug

SEQ ID NO: 3158679 - RNA, 19 nt, Artificial Sequence
  Description of Artificial Sequence: Synthetic oligonucleotide
acaguguuguacaaggaag

SEQ ID NO: 3158680 - RNA, 19 nt, Artificial Sequence
  Description of Artificial Sequence: Synthetic oligonucleotide
auuacagccauggccaaag

SEQ ID NO: 3158681 - RNA, 19 nt, Artificial Sequence
  Description of Artificial Sequence: Synthetic oligonucleotide
gggaagagaagaaaagugg

SEQ ID NO: 3158682 - RNA, 19 nt, Artificial Sequence
  Description of Artificial Sequence: Synthetic oligonucleotide
accauggcgagucuccagg

SEQ ID NO: 3158683 - RNA, 19 nt, Artificial Sequence
  Description of Artificial Sequence: Synthetic oligonucleotide
uguuggucaguucugggua

SEQ ID NO: 3158684 - RNA, 19 nt, Artificial Sequence
  Description of Artificial Sequence: Synthetic oligonucleotide
aguucuggguaaccauggc

SEQ ID NO: 3158685 - RNA, 19 nt, Artificial Sequence
  Description of Artificial Sequence: Synthetic oligonucleotide
aggauuacagccauggcca

SEQ ID NO: 3158686 - RNA, 19 nt, Artificial Sequence
  Description of Artificial Sequence: Synthetic oligonucleotide
aaucacccgccagauggcc

SEQ ID NO: 3158687 - RNA, 19 nt, Artificial Sequence
  Description of Artificial Sequence: Synthetic oligonucleotide
uucugcaggauuacagcca

SEQ ID NO: 3158688 - RNA, 19 nt, Artificial Sequence
  Description of Artificial Sequence: Synthetic oligonucleotide
aaggcuaugacugcuggau

SEQ ID NO: 3158689 - RNA, 19 nt, Artificial Sequence
  Description of Artificial Sequence: Synthetic oligonucleotide
gaaguuucgguauguguga

SEQ ID NO: 3158690 - RNA, 19 nt, Artificial Sequence
  Description of Artificial Sequence: Synthetic oligonucleotide
cagagcaggcgcuuguugg

SEQ ID NO: 3158691 - RNA, 19 nt, Artificial Sequence
  Description of Artificial Sequence: Synthetic oligonucleotide
agcucuugauggcagcagg

SEQ ID NO: 3158692 - RNA, 19 nt, Artificial Sequence
  Description of Artificial Sequence: Synthetic oligonucleotide
aauccucaggaaguuucgg

SEQ ID NO: 3158693 - RNA, 19 nt, Artificial Sequence
  Description of Artificial Sequence: Synthetic oligonucleotide
ugcuggaugcgacuggcug

SEQ ID NO: 3158694 - RNA, 19 nt, Artificial Sequence
  Description of Artificial Sequence: Synthetic oligonucleotide
ugauagccuggauccaggg

SEQ ID NO: 3158695 - RNA, 19 nt, Artificial Sequence
  Description of Artificial Sequence: Synthetic oligonucleotide
uggauuccagagaucggag

SEQ ID NO: 3158696 - RNA, 19 nt, Artificial Sequence
  Description of Artificial Sequence: Synthetic oligonucleotide
ugugauagccuggauccag

SEQ ID NO: 3158697 - RNA, 19 nt, Artificial Sequence
  Description of Artificial Sequence: Synthetic oligonucleotide
acacagugacuccagucuc

SEQ ID NO: 3158698 - RNA, 19 nt, Artificial Sequence
  Description of Artificial Sequence: Synthetic oligonucleotide
uuguuggucaguucugggu

SEQ ID NO: 3158699 - RNA, 19 nt, Artificial Sequence
  Description of Artificial Sequence: Synthetic oligonucleotide
agucuccugauccgcaggg

SEQ ID NO: 3158700 - RNA, 19 nt, Artificial Sequence
  Description of Artificial Sequence: Synthetic oligonucleotide
gugcagaaggcuaugacug

SEQ ID NO: 3158701 - RNA, 19 nt, Artificial Sequence
  Description of Artificial Sequence: Synthetic oligonucleotide
aggugaacaguguuguaca

SEQ ID NO: 3158702 - RNA, 19 nt, Artificial Sequence
  Description of Artificial Sequence: Synthetic oligonucleotide
uaugacugcuggaugcgac

SEQ ID NO: 3158703 - RNA, 19 nt, Artificial Sequence
  Description of Artificial Sequence: Synthetic oligonucleotide
uguagacacagugacucca

SEQ ID NO: 3158704 - RNA, 19 nt, Artificial Sequence
  Description of Artificial Sequence: Synthetic oligonucleotide
agugcggggaggaaaggcc

SEQ ID NO: 3158705 - RNA, 19 nt, Artificial Sequence
  Description of Artificial Sequence: Synthetic oligonucleotide
aggaaaggccuaaaugugg

SEQ ID NO: 3158706 - RNA, 19 nt, Artificial Sequence
  Description of Artificial Sequence: Synthetic oligonucleotide
agaccaaaguccucuugag

SEQ ID NO: 3158707 - RNA, 19 nt, Artificial Sequence
  Description of Artificial Sequence: Synthetic oligonucleotide
aggccgagaguccaccagc

SEQ ID NO: 3158708 - RNA, 19 nt, Artificial Sequence
  Description of Artificial Sequence: Synthetic oligonucleotide
gaagagaagaaaaguggca

SEQ ID NO: 3158709 - RNA, 19 nt, Artificial Sequence
  Description of Artificial Sequence: Synthetic oligonucleotide
gaggaaaggccuaaaugug

SEQ ID NO: 3158710 - RNA, 19 nt, Artificial Sequence
  Description of Artificial Sequence: Synthetic oligonucleotide
caauccucaggaaguuucg

SEQ ID NO: 3158711 - RNA, 19 nt, Artificial Sequence
  Description of Artificial Sequence: Synthetic oligonucleotide
uuuucucuagagcccuagc

SEQ ID NO: 3158712 - RNA, 19 nt, Artificial Sequence
  Description of Artificial Sequence: Synthetic oligonucleotide
auggcgagucuccaggaag

SEQ ID NO: 3158713 - RNA, 19 nt, Artificial Sequence
  Description of Artificial Sequence: Synthetic oligonucleotide
auguugauagggaagagaa

SEQ ID NO: 3158714 - RNA, 19 nt, Artificial Sequence
  Description of Artificial Sequence: Synthetic oligonucleotide
cuuguuggucaguucuggg

SEQ ID NO: 3158715 - RNA, 19 nt, Artificial Sequence
  Description of Artificial Sequence: Synthetic oligonucleotide
aaagaaucacccgccagau

SEQ ID NO: 3158716 - RNA, 19 nt, Artificial Sequence
  Description of Artificial Sequence: Synthetic oligonucleotide
ggaagagaagaaaaguggc

SEQ ID NO: 3158717 - RNA, 19 nt, Artificial Sequence
  Description of Artificial Sequence: Synthetic oligonucleotide
gaaaggccuaaauguggcc

SEQ ID NO: 3158718 - RNA, 19 nt, Artificial Sequence
  Description of Artificial Sequence: Synthetic oligonucleotide
ucaaccagaagggccaugu

SEQ ID NO: 3158719 - RNA, 19 nt, Artificial Sequence
  Description of Artificial Sequence: Synthetic oligonucleotide
cgagucuccaggaagaucc

SEQ ID NO: 3158720 - RNA, 19 nt, Artificial Sequence
  Description of Artificial Sequence: Synthetic oligonucleotide
acugcuggaugcgacuggc

SEQ ID NO: 3158721 - RNA, 19 nt, Artificial Sequence
  Description of Artificial Sequence: Synthetic oligonucleotide
aauacuuuggcaccuuugg

SEQ ID NO: 3158722 - RNA, 19 nt, Artificial Sequence
  Description of Artificial Sequence: Synthetic oligonucleotide
uuuccuucuaacuaagcgg

SEQ ID NO: 3158723 - RNA, 19 nt, Artificial Sequence
  Description of Artificial Sequence: Synthetic oligonucleotide
ucuuccaugaacucgagga

SEQ ID NO: 3158724 - RNA, 19 nt, Artificial Sequence
  Description of Artificial Sequence: Synthetic oligonucleotide
aacucuuuagcaguggugg

SEQ ID NO: 3158725 - RNA, 19 nt, Artificial Sequence
  Description of Artificial Sequence: Synthetic oligonucleotide
augucaauccagcagcugc

SEQ ID NO: 3158726 - RNA, 19 nt, Artificial Sequence
  Description of Artificial Sequence: Synthetic oligonucleotide
guuuccuucuaacuaagcg

SEQ ID NO: 3158727 - RNA, 19 nt, Artificial Sequence
  Description of Artificial Sequence: Synthetic oligonucleotide
uaagcggauacccaggcgc

SEQ ID NO: 3158728 - RNA, 19 nt, Artificial Sequence
  Description of Artificial Sequence: Synthetic oligonucleotide
gaggcaucaacauaugaug

SEQ ID NO: 3158729 - RNA, 19 nt, Artificial Sequence
  Description of Artificial Sequence: Synthetic oligonucleotide
ucccucauaagacuugagg

SEQ ID NO: 3158730 - RNA, 19 nt, Artificial Sequence
  Description of Artificial Sequence: Synthetic oligonucleotide
uucggugacguuccgaggg

SEQ ID NO: 3158731 - RNA, 19 nt, Artificial Sequence
  Description of Artificial Sequence: Synthetic oligonucleotide
ucuaacuaagcggauaccc

SEQ ID NO: 3158732 - RNA, 19 nt, Artificial Sequence
  Description of Artificial Sequence: Synthetic oligonucleotide
uccaugaacucgaggagcg

SEQ ID NO: 3158733 - RNA, 19 nt, Artificial Sequence
  Description of Artificial Sequence: Synthetic oligonucleotide
uuccuucuaacuaagcgga

SEQ ID NO: 3158734 - RNA, 19 nt, Artificial Sequence
  Description of Artificial Sequence: Synthetic oligonucleotide
uacucuuuggagucgcugg

SEQ ID NO: 3158735 - RNA, 19 nt, Artificial Sequence
  Description of Artificial Sequence: Synthetic oligonucleotide
uaacuaagcggauacccag

SEQ ID NO: 3158736 - RNA, 19 nt, Artificial Sequence
  Description of Artificial Sequence: Synthetic oligonucleotide
uucagcaugcgauguaggg

SEQ ID NO: 3158737 - RNA, 19 nt, Artificial Sequence
  Description of Artificial Sequence: Synthetic oligonucleotide
acuaagcggauacccaggc

SEQ ID NO: 3158738 - RNA, 19 nt, Artificial Sequence
  Description of Artificial Sequence: Synthetic oligonucleotide
ugucaauccagcagcugcg

SEQ ID NO: 3158739 - RNA, 19 nt, Artificial Sequence
  Description of Artificial Sequence: Synthetic oligonucleotide
acagaacucuuccaugaac

SEQ ID NO: 3158740 - RNA, 19 nt, Artificial Sequence
  Description of Artificial Sequence: Synthetic oligonucleotide
gaggaugucaauccagcag

SEQ ID NO: 3158741 - RNA, 19 nt, Artificial Sequence
  Description of Artificial Sequence: Synthetic oligonucleotide
uacuuuggcaccuuuggga

SEQ ID NO: 3158742 - RNA, 19 nt, Artificial Sequence
  Description of Artificial Sequence: Synthetic oligonucleotide
uggaggaaacucuuuagca

SEQ ID NO: 3158743 - RNA, 19 nt, Artificial Sequence
  Description of Artificial Sequence: Synthetic oligonucleotide
ucgugauucuuuccgaggc

SEQ ID NO: 3158744 - RNA, 19 nt, Artificial Sequence
  Description of Artificial Sequence: Synthetic oligonucleotide
ucugucucccucauaagac

SEQ ID NO: 3158745 - RNA, 19 nt, Artificial Sequence
  Description of Artificial Sequence: Synthetic oligonucleotide
aacauaugauguuuaguuu

SEQ ID NO: 3158746 - RNA, 19 nt, Artificial Sequence
  Description of Artificial Sequence: Synthetic oligonucleotide
acauaugauguuuaguuuu

SEQ ID NO: 3158747 - RNA, 19 nt, Artificial Sequence
  Description of Artificial Sequence: Synthetic oligonucleotide
ugggucuucaccuuucgug

SEQ ID NO: 3158748 - RNA, 19 nt, Artificial Sequence
  Description of Artificial Sequence: Synthetic oligonucleotide
aaugaggaugucaauccag

SEQ ID NO: 3158749 - RNA, 19 nt, Artificial Sequence
  Description of Artificial Sequence: Synthetic oligonucleotide
ugacagaacucuuccauga

SEQ ID NO: 3158750 - RNA, 19 nt, Artificial Sequence
  Description of Artificial Sequence: Synthetic oligonucleotide
ucucgacauacgaaugagg

SEQ ID NO: 3158751 - RNA, 19 nt, Artificial Sequence
  Description of Artificial Sequence: Synthetic oligonucleotide
aucaacauaugauguuuag

SEQ ID NO: 3158752 - RNA, 19 nt, Artificial Sequence
  Description of Artificial Sequence: Synthetic oligonucleotide
cuucuaacuaagcggauac

SEQ ID NO: 3158753 - RNA, 19 nt, Artificial Sequence
  Description of Artificial Sequence: Synthetic oligonucleotide
acgaaugaggaugucaauc

SEQ ID NO: 3158754 - RNA, 19 nt, Artificial Sequence
  Description of Artificial Sequence: Synthetic oligonucleotide
uggaaaguguccagccugg

SEQ ID NO: 3158755 - RNA, 19 nt, Artificial Sequence
  Description of Artificial Sequence: Synthetic oligonucleotide
uucgugauucuuuccgagg

SEQ ID NO: 3158756 - RNA, 19 nt, Artificial Sequence
  Description of Artificial Sequence: Synthetic oligonucleotide
gaacucuuccaugaacucg

SEQ ID NO: 3158757 - RNA, 19 nt, Artificial Sequence
  Description of Artificial Sequence: Synthetic oligonucleotide
ugggaugugggucuucacc

SEQ ID NO: 3158758 - RNA, 19 nt, Artificial Sequence
  Description of Artificial Sequence: Synthetic oligonucleotide
agcgacauggagcccaaac

SEQ ID NO: 3158759 - RNA, 19 nt, Artificial Sequence
  Description of Artificial Sequence: Synthetic oligonucleotide
uuccgaggcaucaacauau

SEQ ID NO: 3158760 - RNA, 19 nt, Artificial Sequence
  Description of Artificial Sequence: Synthetic oligonucleotide
auacuuuggcaccuuuggg

SEQ ID NO: 3158761 - RNA, 19 nt, Artificial Sequence
  Description of Artificial Sequence: Synthetic oligonucleotide
cagagaauacuuuggcacc

SEQ ID NO: 3158762 - RNA, 19 nt, Artificial Sequence
  Description of Artificial Sequence: Synthetic oligonucleotide
ucauggccagguuaugggg

SEQ ID NO: 3158763 - RNA, 19 nt, Artificial Sequence
  Description of Artificial Sequence: Synthetic oligonucleotide
augaggaugucaauccagc

SEQ ID NO: 3158764 - RNA, 19 nt, Artificial Sequence
  Description of Artificial Sequence: Synthetic oligonucleotide
uggaacggcagaugagugg

SEQ ID NO: 3158765 - RNA, 19 nt, Artificial Sequence
  Description of Artificial Sequence: Synthetic oligonucleotide
uucuggaaaguguccagcc

SEQ ID NO: 3158766 - RNA, 19 nt, Artificial Sequence
  Description of Artificial Sequence: Synthetic oligonucleotide
gaccagagaauacuuuggc

SEQ ID NO: 3158767 - RNA, 19 nt, Artificial Sequence
  Description of Artificial Sequence: Synthetic oligonucleotide
uaggguuucuggaaagugu

SEQ ID NO: 3158768 - RNA, 19 nt, Artificial Sequence
  Description of Artificial Sequence: Synthetic oligonucleotide
aggagcggcgaauuuuggc

SEQ ID NO: 3158769 - RNA, 19 nt, Artificial Sequence
  Description of Artificial Sequence: Synthetic oligonucleotide
cacggagcgacauggagcc

SEQ ID NO: 3158770 - RNA, 19 nt, Artificial Sequence
  Description of Artificial Sequence: Synthetic oligonucleotide
aacucuuccaugaacucga

SEQ ID NO: 3158771 - RNA, 19 nt, Artificial Sequence
  Description of Artificial Sequence: Synthetic oligonucleotide
cucgacauacgaaugagga

SEQ ID NO: 3158772 - RNA, 19 nt, Artificial Sequence
  Description of Artificial Sequence: Synthetic oligonucleotide
uuuauugcugcugggccag

SEQ ID NO: 3158773 - RNA, 19 nt, Artificial Sequence
  Description of Artificial Sequence: Synthetic oligonucleotide
cccucauaagacuugaggg

SEQ ID NO: 3158774 - RNA, 19 nt, Artificial Sequence
  Description of Artificial Sequence: Synthetic oligonucleotide
uccagccugggcuugcugg

SEQ ID NO: 3158775 - RNA, 19 nt, Artificial Sequence
  Description of Artificial Sequence: Synthetic oligonucleotide
ugggccagccaccaggugc

SEQ ID NO: 3158776 - RNA, 19 nt, Artificial Sequence
  Description of Artificial Sequence: Synthetic oligonucleotide
ggaggaaacucuuuagcag

SEQ ID NO: 3158777 - RNA, 19 nt, Artificial Sequence
  Description of Artificial Sequence: Synthetic oligonucleotide
ucuuuccgaggcaucaaca

SEQ ID NO: 3158778 - RNA, 19 nt, Artificial Sequence
  Description of Artificial Sequence: Synthetic oligonucleotide
augaguggcugcuucagca

SEQ ID NO: 3158779 - RNA, 19 nt, Artificial Sequence
  Description of Artificial Sequence: Synthetic oligonucleotide
ucaacauaugauguuuagu

SEQ ID NO: 3158780 - RNA, 19 nt, Artificial Sequence
  Description of Artificial Sequence: Synthetic oligonucleotide
ugugggucuucaccuuucg

SEQ ID NO: 3158781 - RNA, 19 nt, Artificial Sequence
  Description of Artificial Sequence: Synthetic oligonucleotide
aacuaagcggauacccagg

SEQ ID NO: 3158782 - RNA, 19 nt, Artificial Sequence
  Description of Artificial Sequence: Synthetic oligonucleotide
ccagagaauacuuuggcac

SEQ ID NO: 3158783 - RNA, 19 nt, Artificial Sequence
  Description of Artificial Sequence: Synthetic oligonucleotide
uugcuggaacggcagauga

SEQ ID NO: 3158784 - RNA, 19 nt, Artificial Sequence
  Description of Artificial Sequence: Synthetic oligonucleotide
uuuggcaccuuugggaugu

SEQ ID NO: 3158785 - RNA, 19 nt, Artificial Sequence
  Description of Artificial Sequence: Synthetic oligonucleotide
cuggaaaguguccagccug

SEQ ID NO: 3158786 - RNA, 19 nt, Artificial Sequence
  Description of Artificial Sequence: Synthetic oligonucleotide
ucuggaaaguguccagccu

SEQ ID NO: 3158787 - RNA, 19 nt, Artificial Sequence
  Description of Artificial Sequence: Synthetic oligonucleotide
ccucauaagacuugagggg

SEQ ID NO: 3158788 - RNA, 19 nt, Artificial Sequence
  Description of Artificial Sequence: Synthetic oligonucleotide
cacaugcugaccacggagc

SEQ ID NO: 3158789 - RNA, 19 nt, Artificial Sequence
  Description of Artificial Sequence: Synthetic oligonucleotide
uuccaugaacucgaggagc

SEQ ID NO: 3158790 - RNA, 19 nt, Artificial Sequence
  Description of Artificial Sequence: Synthetic oligonucleotide
augcugaccacggagcgac

SEQ ID NO: 3158791 - RNA, 19 nt, Artificial Sequence
  Description of Artificial Sequence: Synthetic oligonucleotide
accagagaauacuuuggca

SEQ ID NO: 3158792 - RNA, 19 nt, Artificial Sequence
  Description of Artificial Sequence: Synthetic oligonucleotide
aaacucuuuagcaguggug

SEQ ID NO: 3158793 - RNA, 19 nt, Artificial Sequence
  Description of Artificial Sequence: Synthetic oligonucleotide
accuuucgugauucuuucc

SEQ ID NO: 3158794 - RNA, 19 nt, Artificial Sequence
  Description of Artificial Sequence: Synthetic oligonucleotide
agggucucgacauacgaau

SEQ ID NO: 3158795 - RNA, 19 nt, Artificial Sequence
  Description of Artificial Sequence: Synthetic oligonucleotide
ugaggaugucaauccagca

SEQ ID NO: 3158796 - RNA, 19 nt, Artificial Sequence
  Description of Artificial Sequence: Synthetic oligonucleotide
uguggucauggccagguua

SEQ ID NO: 3158797 - RNA, 19 nt, Artificial Sequence
  Description of Artificial Sequence: Synthetic oligonucleotide
gaauacuuuggcaccuuug

SEQ ID NO: 3158798 - RNA, 19 nt, Artificial Sequence
  Description of Artificial Sequence: Synthetic oligonucleotide
uucuuuccgaggcaucaac

SEQ ID NO: 3158799 - RNA, 19 nt, Artificial Sequence
  Description of Artificial Sequence: Synthetic oligonucleotide
ucaccuuucgugauucuuu

SEQ ID NO: 3158800 - RNA, 19 nt, Artificial Sequence
  Description of Artificial Sequence: Synthetic oligonucleotide
gcgaauuuuggcuggcucg

SEQ ID NO: 3158801 - RNA, 19 nt, Artificial Sequence
  Description of Artificial Sequence: Synthetic oligonucleotide
uaccaguuuccuucuaacu

SEQ ID NO: 3158802 - RNA, 19 nt, Artificial Sequence
  Description of Artificial Sequence: Synthetic oligonucleotide
cuccugacagaacucuucc

SEQ ID NO: 3158803 - RNA, 19 nt, Artificial Sequence
  Description of Artificial Sequence: Synthetic oligonucleotide
cuaacuaagcggauaccca

SEQ ID NO: 3158804 - RNA, 19 nt, Artificial Sequence
  Description of Artificial Sequence: Synthetic oligonucleotide
ccuuucgugauucuuuccg

SEQ ID NO: 3158805 - RNA, 19 nt, Artificial Sequence
  Description of Artificial Sequence: Synthetic oligonucleotide
gaaugaggaugucaaucca

SEQ ID NO: 3158806 - RNA, 19 nt, Artificial Sequence
  Description of Artificial Sequence: Synthetic oligonucleotide
gaggaaacucuuuagcagu

SEQ ID NO: 3158807 - RNA, 19 nt, Artificial Sequence
  Description of Artificial Sequence: Synthetic oligonucleotide
acggcagaugaguggcugc

SEQ ID NO: 3158808 - RNA, 19 nt, Artificial Sequence
  Description of Artificial Sequence: Synthetic oligonucleotide
aguuuccuucuaacuaagc

SEQ ID NO: 3158809 - RNA, 19 nt, Artificial Sequence
  Description of Artificial Sequence: Synthetic oligonucleotide
cuccacaugcugaccacgg

SEQ ID NO: 3158810 - RNA, 19 nt, Artificial Sequence
  Description of Artificial Sequence: Synthetic oligonucleotide
uccuggaggaaacucuuua

SEQ ID NO: 3158811 - RNA, 19 nt, Artificial Sequence
  Description of Artificial Sequence: Synthetic oligonucleotide
caccacucuuuauugcugc

SEQ ID NO: 3158812 - RNA, 19 nt, Artificial Sequence
  Description of Artificial Sequence: Synthetic oligonucleotide
cuucagcaugcgauguagg

SEQ ID NO: 3158813 - RNA, 19 nt, Artificial Sequence
  Description of Artificial Sequence: Synthetic oligonucleotide
gacauggagcccaaacccc

SEQ ID NO: 3158814 - RNA, 19 nt, Artificial Sequence
  Description of Artificial Sequence: Synthetic oligonucleotide
uuugggaugugggucuuca

SEQ ID NO: 3158815 - RNA, 19 nt, Artificial Sequence
  Description of Artificial Sequence: Synthetic oligonucleotide
gggaccagagaauacuuug

SEQ ID NO: 3158816 - RNA, 19 nt, Artificial Sequence
  Description of Artificial Sequence: Synthetic oligonucleotide
auacgaaugaggaugucaa

SEQ ID NO: 3158817 - RNA, 19 nt, Artificial Sequence
  Description of Artificial Sequence: Synthetic oligonucleotide
uuuccgaggcaucaacaua

SEQ ID NO: 3158818 - RNA, 19 nt, Artificial Sequence
  Description of Artificial Sequence: Synthetic oligonucleotide
ugcuggaacggcagaugag

SEQ ID NO: 3158819 - RNA, 19 nt, Artificial Sequence
  Description of Artificial Sequence: Synthetic oligonucleotide
ugcgauguagggcucuguc

SEQ ID NO: 3158820 - RNA, 19 nt, Artificial Sequence
  Description of Artificial Sequence: Synthetic oligonucleotide
auuuuggcuggcucgcgcu

SEQ ID NO: 3158821 - RNA, 19 nt, Artificial Sequence
  Description of Artificial Sequence: Synthetic oligonucleotide
uucacuacgaagccaaagc

SEQ ID NO: 3158822 - RNA, 19 nt, Artificial Sequence
  Description of Artificial Sequence: Synthetic oligonucleotide
guucacuucgcucaggagg

SEQ ID NO: 3158823 - RNA, 19 nt, Artificial Sequence
  Description of Artificial Sequence: Synthetic oligonucleotide
uucacuucgcucaggaggg

SEQ ID NO: 3158824 - RNA, 19 nt, Artificial Sequence
  Description of Artificial Sequence: Synthetic oligonucleotide
agcagcuucacuacgaagc

SEQ ID NO: 3158825 - RNA, 19 nt, Artificial Sequence
  Description of Artificial Sequence: Synthetic oligonucleotide
acuacaguucacuucgcuc

SEQ ID NO: 3158826 - RNA, 19 nt, Artificial Sequence
  Description of Artificial Sequence: Synthetic oligonucleotide
ugcuggagacuucagaagc

SEQ ID NO: 3158827 - RNA, 19 nt, Artificial Sequence
  Description of Artificial Sequence: Synthetic oligonucleotide
accggguucacgcugcugc

SEQ ID NO: 3158828 - RNA, 19 nt, Artificial Sequence
  Description of Artificial Sequence: Synthetic oligonucleotide
ucacuacgaagccaaagcc

SEQ ID NO: 3158829 - RNA, 19 nt, Artificial Sequence
  Description of Artificial Sequence: Synthetic oligonucleotide
ucuggggucuggcacaggg

SEQ ID NO: 3158830 - RNA, 19 nt, Artificial Sequence
  Description of Artificial Sequence: Synthetic oligonucleotide
ccuacuacaguucacuucg

SEQ ID NO: 3158831 - RNA, 19 nt, Artificial Sequence
  Description of Artificial Sequence: Synthetic oligonucleotide
acuacgaagccaaagccgg

SEQ ID NO: 3158832 - RNA, 19 nt, Artificial Sequence
  Description of Artificial Sequence: Synthetic oligonucleotide
aggucgaugaagcugucag

SEQ ID NO: 3158833 - RNA, 19 nt, Artificial Sequence
  Description of Artificial Sequence: Synthetic oligonucleotide
cacuacgaagccaaagccg

SEQ ID NO: 3158834 - RNA, 19 nt, Artificial Sequence
  Description of Artificial Sequence: Synthetic oligonucleotide
uacagcaccggguucacgc

SEQ ID NO: 3158835 - RNA, 19 nt, Artificial Sequence
  Description of Artificial Sequence: Synthetic oligonucleotide
uggaggaggucgaugaagc

SEQ ID NO: 3158836 - RNA, 19 nt, Artificial Sequence
  Description of Artificial Sequence: Synthetic oligonucleotide
gagacuucagaagcggugg

SEQ ID NO: 3158837 - RNA, 19 nt, Artificial Sequence
  Description of Artificial Sequence: Synthetic oligonucleotide
caccagguucaccagaugg

SEQ ID NO: 3158838 - RNA, 19 nt, Artificial Sequence
  Description of Artificial Sequence: Synthetic oligonucleotide
agccaaagccggcugagcg

SEQ ID NO: 3158839 - RNA, 19 nt, Artificial Sequence
  Description of Artificial Sequence: Synthetic oligonucleotide
aggacaggcggguauggac

SEQ ID NO: 3158840 - RNA, 19 nt, Artificial Sequence
  Description of Artificial Sequence: Synthetic oligonucleotide
cuacaguucacuucgcuca

SEQ ID NO: 3158841 - RNA, 19 nt, Artificial Sequence
  Description of Artificial Sequence: Synthetic oligonucleotide
ucgaugaagcugucagugg

SEQ ID NO: 3158842 - RNA, 19 nt, Artificial Sequence
  Description of Artificial Sequence: Synthetic oligonucleotide
agguucaccagaugguaag

SEQ ID NO: 3158843 - RNA, 19 nt, Artificial Sequence
  Description of Artificial Sequence: Synthetic oligonucleotide
ucguccuggucccagcccg

SEQ ID NO: 3158844 - RNA, 19 nt, Artificial Sequence
  Description of Artificial Sequence: Synthetic oligonucleotide
agcgguggccuccagcagc

SEQ ID NO: 3158845 - RNA, 19 nt, Artificial Sequence
  Description of Artificial Sequence: Synthetic oligonucleotide
agcgcgaugagcacguagc

SEQ ID NO: 3158846 - RNA, 19 nt, Artificial Sequence
  Description of Artificial Sequence: Synthetic oligonucleotide
gagggguuggaggaggucg

SEQ ID NO: 3158847 - RNA, 19 nt, Artificial Sequence
  Description of Artificial Sequence: Synthetic oligonucleotide
agaagcgguggccuccagc

SEQ ID NO: 3158848 - RNA, 19 nt, Artificial Sequence
  Description of Artificial Sequence: Synthetic oligonucleotide
uggggucuggcacagggug

SEQ ID NO: 3158849 - RNA, 19 nt, Artificial Sequence
  Description of Artificial Sequence: Synthetic oligonucleotide
aaggccagcgcgaugagca

SEQ ID NO: 3158850 - RNA, 19 nt, Artificial Sequence
  Description of Artificial Sequence: Synthetic oligonucleotide
gaugaagcugucagugggg

SEQ ID NO: 3158851 - RNA, 19 nt, Artificial Sequence
  Description of Artificial Sequence: Synthetic oligonucleotide
augaagcugucaguggggc

SEQ ID NO: 3158852 - RNA, 19 nt, Artificial Sequence
  Description of Artificial Sequence: Synthetic oligonucleotide
cacgcugcugcucaggaag

SEQ ID NO: 3158853 - RNA, 19 nt, Artificial Sequence
  Description of Artificial Sequence: Synthetic oligonucleotide
agacuucagaagcgguggc

SEQ ID NO: 3158854 - RNA, 19 nt, Artificial Sequence
  Description of Artificial Sequence: Synthetic oligonucleotide
gaagcgguggccuccagca

SEQ ID NO: 3158855 - RNA, 19 nt, Artificial Sequence
  Description of Artificial Sequence: Synthetic oligonucleotide
gcgaugagcacguagcggg

SEQ ID NO: 3158856 - RNA, 19 nt, Artificial Sequence
  Description of Artificial Sequence: Synthetic oligonucleotide
uacaguucacuucgcucag

SEQ ID NO: 3158857 - RNA, 19 nt, Artificial Sequence
  Description of Artificial Sequence: Synthetic oligonucleotide
gucgaugaagcugucagug

SEQ ID NO: 3158858 - RNA, 19 nt, Artificial Sequence
  Description of Artificial Sequence: Synthetic oligonucleotide
agcuucagacgcuuccccg

SEQ ID NO: 3158859 - RNA, 19 nt, Artificial Sequence
  Description of Artificial Sequence: Synthetic oligonucleotide
agucguccuggucccagcc

SEQ ID NO: 3158860 - RNA, 19 nt, Artificial Sequence
  Description of Artificial Sequence: Synthetic oligonucleotide
uccagcagcuucacuacga

SEQ ID NO: 3158861 - RNA, 19 nt, Artificial Sequence
  Description of Artificial Sequence: Synthetic oligonucleotide
uuggaggaggucgaugaag

SEQ ID NO: 3158862 - RNA, 19 nt, Artificial Sequence
  Description of Artificial Sequence: Synthetic oligonucleotide
uacuacaguucacuucgcu

SEQ ID NO: 3158863 - RNA, 19 nt, Artificial Sequence
  Description of Artificial Sequence: Synthetic oligonucleotide
gacuucuggggucuggcac

SEQ ID NO: 3158864 - RNA, 19 nt, Artificial Sequence
  Description of Artificial Sequence: Synthetic oligonucleotide
agcgcagcaagccgccgcc

SEQ ID NO: 3158865 - RNA, 19 nt, Artificial Sequence
  Description of Artificial Sequence: Synthetic oligonucleotide
uagcgggccagcuucagac

SEQ ID NO: 3158866 - RNA, 19 nt, Artificial Sequence
  Description of Artificial Sequence: Synthetic oligonucleotide
gcggguauggacuucuggg

SEQ ID NO: 3158867 - RNA, 19 nt, Artificial Sequence
  Description of Artificial Sequence: Synthetic oligonucleotide
aaagccggcugagcgcagc

SEQ ID NO: 3158868 - RNA, 19 nt, Artificial Sequence
  Description of Artificial Sequence: Synthetic oligonucleotide
gaggaggucgaugaagcug

SEQ ID NO: 3158869 - RNA, 19 nt, Artificial Sequence
  Description of Artificial Sequence: Synthetic oligonucleotide
uggggccuggcucaggaca

SEQ ID NO: 3158870 - RNA, 19 nt, Artificial Sequence
  Description of Artificial Sequence: Synthetic oligonucleotide
uucacgcugcugcucagga

SEQ ID NO: 3158871 - RNA, 19 nt, Artificial Sequence
  Description of Artificial Sequence: Synthetic oligonucleotide
aagccaaagccggcugagc

SEQ ID NO: 3158872 - RNA, 19 nt, Artificial Sequence
  Description of Artificial Sequence: Synthetic oligonucleotide
ugucaguggggccuggcuc

SEQ ID NO: 3158873 - RNA, 19 nt, Artificial Sequence
  Description of Artificial Sequence: Synthetic oligonucleotide
cuucacuacgaagccaaag

SEQ ID NO: 3158874 - RNA, 19 nt, Artificial Sequence
  Description of Artificial Sequence: Synthetic oligonucleotide
acuucuggggucuggcaca

SEQ ID NO: 3158875 - RNA, 19 nt, Artificial Sequence
  Description of Artificial Sequence: Synthetic oligonucleotide
cuggagacuucagaagcgg

SEQ ID NO: 3158876 - RNA, 19 nt, Artificial Sequence
  Description of Artificial Sequence: Synthetic oligonucleotide
uccaccagguucaccagau

SEQ ID NO: 3158877 - RNA, 19 nt, Artificial Sequence
  Description of Artificial Sequence: Synthetic oligonucleotide
cuucagacgcuuccccgcg

SEQ ID NO: 3158878 - RNA, 19 nt, Artificial Sequence
  Description of Artificial Sequence: Synthetic oligonucleotide
aggaaggccagcgcgauga

SEQ ID NO: 3158879 - RNA, 19 nt, Artificial Sequence
  Description of Artificial Sequence: Synthetic oligonucleotide
gcuuccaccagguucacca

SEQ ID NO: 3158880 - RNA, 19 nt, Artificial Sequence
  Description of Artificial Sequence: Synthetic oligonucleotide
aguucacuucgcucaggag

SEQ ID NO: 3158881 - RNA, 19 nt, Artificial Sequence
  Description of Artificial Sequence: Synthetic oligonucleotide
gaagccaaagccggcugag

SEQ ID NO: 3158882 - RNA, 19 nt, Artificial Sequence
  Description of Artificial Sequence: Synthetic oligonucleotide
gugcuggagacuucagaag

SEQ ID NO: 3158883 - RNA, 19 nt, Artificial Sequence
  Description of Artificial Sequence: Synthetic oligonucleotide
ugaagcugucaguggggcc

SEQ ID NO: 3158884 - RNA, 19 nt, Artificial Sequence
  Description of Artificial Sequence: Synthetic oligonucleotide
uggagacuucagaagcggu

SEQ ID NO: 3158885 - RNA, 19 nt, Artificial Sequence
  Description of Artificial Sequence: Synthetic oligonucleotide
ugcugcucaggaaggccag

SEQ ID NO: 3158886 - RNA, 19 nt, Artificial Sequence
  Description of Artificial Sequence: Synthetic oligonucleotide
aggaggucgaugaagcugu

SEQ ID NO: 3158887 - RNA, 19 nt, Artificial Sequence
  Description of Artificial Sequence: Synthetic oligonucleotide
uucagaagcgguggccucc

SEQ ID NO: 3158888 - RNA, 19 nt, Artificial Sequence
  Description of Artificial Sequence: Synthetic oligonucleotide
acuucagaagcgguggccu

SEQ ID NO: 3158889 - RNA, 19 nt, Artificial Sequence
  Description of Artificial Sequence: Synthetic oligonucleotide
gguuggaggaggucgauga

SEQ ID NO: 3158890 - RNA, 19 nt, Artificial Sequence
  Description of Artificial Sequence: Synthetic oligonucleotide
cacguagcgggccagcuuc

SEQ ID NO: 3158891 - RNA, 19 nt, Artificial Sequence
  Description of Artificial Sequence: Synthetic oligonucleotide
gcucaggaaggccagcgcg

SEQ ID NO: 3158892 - RNA, 19 nt, Artificial Sequence
  Description of Artificial Sequence: Synthetic oligonucleotide
uucagacgcuuccccgcgg

SEQ ID NO: 3158893 - RNA, 19 nt, Artificial Sequence
  Description of Artificial Sequence: Synthetic oligonucleotide
cucaggagggguuggagga

SEQ ID NO: 3158894 - RNA, 19 nt, Artificial Sequence
  Description of Artificial Sequence: Synthetic oligonucleotide
gacuucagaagcgguggcc

SEQ ID NO: 3158895 - RNA, 19 nt, Artificial Sequence
  Description of Artificial Sequence: Synthetic oligonucleotide
uuccaccagguucaccaga

SEQ ID NO: 3158896 - RNA, 19 nt, Artificial Sequence
  Description of Artificial Sequence: Synthetic oligonucleotide
ugcucaggaaggccagcgc

SEQ ID NO: 3158897 - RNA, 19 nt, Artificial Sequence
  Description of Artificial Sequence: Synthetic oligonucleotide
ggugcuggagacuucagaa

SEQ ID NO: 3158898 - RNA, 19 nt, Artificial Sequence
  Description of Artificial Sequence: Synthetic oligonucleotide
gucccagcccgccagcgcg

SEQ ID NO: 3158899 - RNA, 19 nt, Artificial Sequence
  Description of Artificial Sequence: Synthetic oligonucleotide
uacgaagccaaagccggcu

SEQ ID NO: 3158900 - RNA, 19 nt, Artificial Sequence
  Description of Artificial Sequence: Synthetic oligonucleotide
ucagacgcuuccccgcgga

SEQ ID NO: 3158901 - RNA, 19 nt, Artificial Sequence
  Description of Artificial Sequence: Synthetic oligonucleotide
ucaggacaggcggguaugg

SEQ ID NO: 3158902 - RNA, 19 nt, Artificial Sequence
  Description of Artificial Sequence: Synthetic oligonucleotide
gaugagcacguagcgggcc

SEQ ID NO: 3158903 - RNA, 19 nt, Artificial Sequence
  Description of Artificial Sequence: Synthetic oligonucleotide
gacgcuuccccgcggaguc

SEQ ID NO: 3158904 - RNA, 19 nt, Artificial Sequence
  Description of Artificial Sequence: Synthetic oligonucleotide
aguggggccuggcucagga

SEQ ID NO: 3158905 - RNA, 19 nt, Artificial Sequence
  Description of Artificial Sequence: Synthetic oligonucleotide
agcuucacuacgaagccaa

SEQ ID NO: 3158906 - RNA, 19 nt, Artificial Sequence
  Description of Artificial Sequence: Synthetic oligonucleotide
gcucaggagggguuggagg

SEQ ID NO: 3158907 - RNA, 19 nt, Artificial Sequence
  Description of Artificial Sequence: Synthetic oligonucleotide
cuggcucaggacaggcggg

SEQ ID NO: 3158908 - RNA, 19 nt, Artificial Sequence
  Description of Artificial Sequence: Synthetic oligonucleotide
cuacgaagccaaagccggc

SEQ ID NO: 3158909 - RNA, 19 nt, Artificial Sequence
  Description of Artificial Sequence: Synthetic oligonucleotide
uggacuucuggggucuggc

SEQ ID NO: 3158910 - RNA, 19 nt, Artificial Sequence
  Description of Artificial Sequence: Synthetic oligonucleotide
ccuggcucaggacaggcgg

SEQ ID NO: 3158911 - RNA, 19 nt, Artificial Sequence
  Description of Artificial Sequence: Synthetic oligonucleotide
agcaccggguucacgcugc

SEQ ID NO: 3158912 - RNA, 19 nt, Artificial Sequence
  Description of Artificial Sequence: Synthetic oligonucleotide
gaagcugucaguggggccu

SEQ ID NO: 3158913 - RNA, 19 nt, Artificial Sequence
  Description of Artificial Sequence: Synthetic oligonucleotide
cgaugaagcugucaguggg

SEQ ID NO: 3158914 - RNA, 19 nt, Artificial Sequence
  Description of Artificial Sequence: Synthetic oligonucleotide
aagcgguggccuccagcag

SEQ ID NO: 3158915 - RNA, 19 nt, Artificial Sequence
  Description of Artificial Sequence: Synthetic oligonucleotide
gcagcuucacuacgaagcc

SEQ ID NO: 3158916 - RNA, 19 nt, Artificial Sequence
  Description of Artificial Sequence: Synthetic oligonucleotide
cugcucaggaaggccagcg

SEQ ID NO: 3158917 - RNA, 19 nt, Artificial Sequence
  Description of Artificial Sequence: Synthetic oligonucleotide
agcgggccagcuucagacg

SEQ ID NO: 3158918 - RNA, 19 nt, Artificial Sequence
  Description of Artificial Sequence: Synthetic oligonucleotide
acgaagccaaagccggcug

SEQ ID NO: 3158919 - RNA, 19 nt, Artificial Sequence
  Description of Artificial Sequence: Synthetic oligonucleotide
gucaguggggccuggcuca

SEQ ID NO: 3158920 - RNA, 19 nt, Artificial Sequence
  Description of Artificial Sequence: Synthetic oligonucleotide
agcaagccgccgccggcgc

SEQ ID NO: 3158921 - RNA, 19 nt, Artificial Sequence
  Description of Artificial Sequence: Synthetic oligonucleotide
uauacacacaauaaaaugg

SEQ ID NO: 3158922 - RNA, 19 nt, Artificial Sequence
  Description of Artificial Sequence: Synthetic oligonucleotide
auuggauuugccuugaugc

SEQ ID NO: 3158923 - RNA, 19 nt, Artificial Sequence
  Description of Artificial Sequence: Synthetic oligonucleotide
uccacuauuacaaauauca

SEQ ID NO: 3158924 - RNA, 19 nt, Artificial Sequence
  Description of Artificial Sequence: Synthetic oligonucleotide
aguauuuuacuucagauug

SEQ ID NO: 3158925 - RNA, 19 nt, Artificial Sequence
  Description of Artificial Sequence: Synthetic oligonucleotide
ugugauuuaauuaaagcug

SEQ ID NO: 3158926 - RNA, 19 nt, Artificial Sequence
  Description of Artificial Sequence: Synthetic oligonucleotide
uuuacaauuacucucuccc

SEQ ID NO: 3158927 - RNA, 19 nt, Artificial Sequence
  Description of Artificial Sequence: Synthetic oligonucleotide
aauauaaagcauugauggc

SEQ ID NO: 3158928 - RNA, 19 nt, Artificial Sequence
  Description of Artificial Sequence: Synthetic oligonucleotide
aacuucaacaucuugauaa

SEQ ID NO: 3158929 - RNA, 19 nt, Artificial Sequence
  Description of Artificial Sequence: Synthetic oligonucleotide
agcccuacaaaauaaauac

SEQ ID NO: 3158930 - RNA, 19 nt, Artificial Sequence
  Description of Artificial Sequence: Synthetic oligonucleotide
auauaaagcauugauggcc

SEQ ID NO: 3158931 - RNA, 19 nt, Artificial Sequence
  Description of Artificial Sequence: Synthetic oligonucleotide
uuuucuuuagagaggaaag

SEQ ID NO: 3158932 - RNA, 19 nt, Artificial Sequence
  Description of Artificial Sequence: Synthetic oligonucleotide
uucacgaguacaaugcugg

SEQ ID NO: 3158933 - RNA, 19 nt, Artificial Sequence
  Description of Artificial Sequence: Synthetic oligonucleotide
uuuagaaagauacuguuua

SEQ ID NO: 3158934 - RNA, 19 nt, Artificial Sequence
  Description of Artificial Sequence: Synthetic oligonucleotide
aaauaauugaagugccguc

SEQ ID NO: 3158935 - RNA, 19 nt, Artificial Sequence
  Description of Artificial Sequence: Synthetic oligonucleotide
aaguugaguccguaggugc

SEQ ID NO: 3158936 - RNA, 19 nt, Artificial Sequence
  Description of Artificial Sequence: Synthetic oligonucleotide
uuaaauaauugaagugccg

SEQ ID NO: 3158937 - RNA, 19 nt, Artificial Sequence
  Description of Artificial Sequence: Synthetic oligonucleotide
aaauguaacacagaucucu

SEQ ID NO: 3158938 - RNA, 19 nt, Artificial Sequence
  Description of Artificial Sequence: Synthetic oligonucleotide
aagcacauagcacacgggg

SEQ ID NO: 3158939 - RNA, 19 nt, Artificial Sequence
  Description of Artificial Sequence: Synthetic oligonucleotide
gaucauugcacacagaaga

SEQ ID NO: 3158940 - RNA, 19 nt, Artificial Sequence
  Description of Artificial Sequence: Synthetic oligonucleotide
auauacacacaauaaaaug

SEQ ID NO: 3158941 - RNA, 19 nt, Artificial Sequence
  Description of Artificial Sequence: Synthetic oligonucleotide
aaagauacuguuuaccaaa

SEQ ID NO: 3158942 - RNA, 19 nt, Artificial Sequence
  Description of Artificial Sequence: Synthetic oligonucleotide
aaucucaucucggaaaugg

SEQ ID NO: 3158943 - RNA, 19 nt, Artificial Sequence
  Description of Artificial Sequence: Synthetic oligonucleotide
gaaucuguuaauuuaauaa

SEQ ID NO: 3158944 - RNA, 19 nt, Artificial Sequence
  Description of Artificial Sequence: Synthetic oligonucleotide
uuaauaaggcaauacaaaa

SEQ ID NO: 3158945 - RNA, 19 nt, Artificial Sequence
  Description of Artificial Sequence: Synthetic oligonucleotide
uaaaucaacgucugaacag

SEQ ID NO: 3158946 - RNA, 19 nt, Artificial Sequence
  Description of Artificial Sequence: Synthetic oligonucleotide
aaucgauccauuaucaaag

SEQ ID NO: 3158947 - RNA, 19 nt, Artificial Sequence
  Description of Artificial Sequence: Synthetic oligonucleotide
aggagaacaccauaguucg

SEQ ID NO: 3158948 - RNA, 19 nt, Artificial Sequence
  Description of Artificial Sequence: Synthetic oligonucleotide
ugaggaaacguauacaccu

SEQ ID NO: 3158949 - RNA, 19 nt, Artificial Sequence
  Description of Artificial Sequence: Synthetic oligonucleotide
aaggaucuucaauauaaag

SEQ ID NO: 3158950 - RNA, 19 nt, Artificial Sequence
  Description of Artificial Sequence: Synthetic oligonucleotide
uuugccuugaugcuguuug

SEQ ID NO: 3158951 - RNA, 19 nt, Artificial Sequence
  Description of Artificial Sequence: Synthetic oligonucleotide
uuacauuuaucuaacugcu

SEQ ID NO: 3158952 - RNA, 19 nt, Artificial Sequence
  Description of Artificial Sequence: Synthetic oligonucleotide
aacaggguuacacguuugc

SEQ ID NO: 3158953 - RNA, 19 nt, Artificial Sequence
  Description of Artificial Sequence: Synthetic oligonucleotide
uguaacacagaucucugca

SEQ ID NO: 3158954 - RNA, 19 nt, Artificial Sequence
  Description of Artificial Sequence: Synthetic oligonucleotide
aggaugacaacucagauua

SEQ ID NO: 3158955 - RNA, 19 nt, Artificial Sequence
  Description of Artificial Sequence: Synthetic oligonucleotide
uuugccaugguaauacuga

SEQ ID NO: 3158956 - RNA, 19 nt, Artificial Sequence
  Description of Artificial Sequence: Synthetic oligonucleotide
aagcguacaauccauuaug

SEQ ID NO: 3158957 - RNA, 19 nt, Artificial Sequence
  Description of Artificial Sequence: Synthetic oligonucleotide
uucaugauccauuccgugg

SEQ ID NO: 3158958 - RNA, 19 nt, Artificial Sequence
  Description of Artificial Sequence: Synthetic oligonucleotide
uaacacagaucucugcagg

SEQ ID NO: 3158959 - RNA, 19 nt, Artificial Sequence
  Description of Artificial Sequence: Synthetic oligonucleotide
aacucuauuaggagaacac

SEQ ID NO: 3158960 - RNA, 19 nt, Artificial Sequence
  Description of Artificial Sequence: Synthetic oligonucleotide
aaucccuaaaagccaacag

SEQ ID NO: 3158961 - RNA, 19 nt, Artificial Sequence
  Description of Artificial Sequence: Synthetic oligonucleotide
gucacuaguagguaaauac

SEQ ID NO: 3158962 - RNA, 19 nt, Artificial Sequence
  Description of Artificial Sequence: Synthetic oligonucleotide
cuuuaaugaggucugcugc

SEQ ID NO: 3158963 - RNA, 19 nt, Artificial Sequence
  Description of Artificial Sequence: Synthetic oligonucleotide
agucuuaaaacuuccaaau

SEQ ID NO: 3158964 - RNA, 19 nt, Artificial Sequence
  Description of Artificial Sequence: Synthetic oligonucleotide
aagcuguuuacaauuacuc

SEQ ID NO: 3158965 - RNA, 19 nt, Artificial Sequence
  Description of Artificial Sequence: Synthetic oligonucleotide
uuguuucaauacuaaaacc

SEQ ID NO: 3158966 - RNA, 19 nt, Artificial Sequence
  Description of Artificial Sequence: Synthetic oligonucleotide
uaggagaacaccauaguuc

SEQ ID NO: 3158967 - RNA, 19 nt, Artificial Sequence
  Description of Artificial Sequence: Synthetic oligonucleotide
uaaauaauugaagugccgu

SEQ ID NO: 3158968 - RNA, 19 nt, Artificial Sequence
  Description of Artificial Sequence: Synthetic oligonucleotide
uauguggcgacuucauccg

SEQ ID NO: 3158969 - RNA, 19 nt, Artificial Sequence
  Description of Artificial Sequence: Synthetic oligonucleotide
auuaucuucccgcuaccac

SEQ ID NO: 3158970 - RNA, 19 nt, Artificial Sequence
  Description of Artificial Sequence: Synthetic oligonucleotide
aaugagagaugacaccaca

SEQ ID NO: 3158971 - RNA, 19 nt, Artificial Sequence
  Description of Artificial Sequence: Synthetic oligonucleotide
uguuaggaugacaacucag

SEQ ID NO: 3158972 - RNA, 19 nt, Artificial Sequence
  Description of Artificial Sequence: Synthetic oligonucleotide
gauccauuaucaaagacca

SEQ ID NO: 3158973 - RNA, 19 nt, Artificial Sequence
  Description of Artificial Sequence: Synthetic oligonucleotide
acaguaguaagcaugaacu

SEQ ID NO: 3158974 - RNA, 19 nt, Artificial Sequence
  Description of Artificial Sequence: Synthetic oligonucleotide
aauccacuauuacaaauau

SEQ ID NO: 3158975 - RNA, 19 nt, Artificial Sequence
  Description of Artificial Sequence: Synthetic oligonucleotide
acuauaagaaccaauucca

SEQ ID NO: 3158976 - RNA, 19 nt, Artificial Sequence
  Description of Artificial Sequence: Synthetic oligonucleotide
gugaaugaguguuaggaug

SEQ ID NO: 3158977 - RNA, 19 nt, Artificial Sequence
  Description of Artificial Sequence: Synthetic oligonucleotide
cuagaacucugcauaaagc

SEQ ID NO: 3158978 - RNA, 19 nt, Artificial Sequence
  Description of Artificial Sequence: Synthetic oligonucleotide
uauuggacacuaauauccc

SEQ ID NO: 3158979 - RNA, 19 nt, Artificial Sequence
  Description of Artificial Sequence: Synthetic oligonucleotide
uauuggauuugccuugaug

SEQ ID NO: 3158980 - RNA, 19 nt, Artificial Sequence
  Description of Artificial Sequence: Synthetic oligonucleotide
uuugaugacaagcguacaa

SEQ ID NO: 3158981 - RNA, 19 nt, Artificial Sequence
  Description of Artificial Sequence: Synthetic oligonucleotide
aguaucuacuaucaaggga

SEQ ID NO: 3158982 - RNA, 19 nt, Artificial Sequence
  Description of Artificial Sequence: Synthetic oligonucleotide
acucuauuaggagaacacc

SEQ ID NO: 3158983 - RNA, 19 nt, Artificial Sequence
  Description of Artificial Sequence: Synthetic oligonucleotide
cauuaaagcugauaucaac

SEQ ID NO: 3158984 - RNA, 19 nt, Artificial Sequence
  Description of Artificial Sequence: Synthetic oligonucleotide
auucacaagcccuacaaaa

SEQ ID NO: 3158985 - RNA, 19 nt, Artificial Sequence
  Description of Artificial Sequence: Synthetic oligonucleotide
acuuugaugacaagcguac

SEQ ID NO: 3158986 - RNA, 19 nt, Artificial Sequence
  Description of Artificial Sequence: Synthetic oligonucleotide
gaguaucuacuaucaaggg

SEQ ID NO: 3158987 - RNA, 19 nt, Artificial Sequence
  Description of Artificial Sequence: Synthetic oligonucleotide
aaaucaacgucugaacagu

SEQ ID NO: 3158988 - RNA, 19 nt, Artificial Sequence
  Description of Artificial Sequence: Synthetic oligonucleotide
uuauuauuacauuuaucua

SEQ ID NO: 3158989 - RNA, 19 nt, Artificial Sequence
  Description of Artificial Sequence: Synthetic oligonucleotide
gaccagagaauguucagug

SEQ ID NO: 3158990 - RNA, 19 nt, Artificial Sequence
  Description of Artificial Sequence: Synthetic oligonucleotide
uuuauaagugugauuuaau

SEQ ID NO: 3158991 - RNA, 19 nt, Artificial Sequence
  Description of Artificial Sequence: Synthetic oligonucleotide
aagaagacagcagcauugg

SEQ ID NO: 3158992 - RNA, 19 nt, Artificial Sequence
  Description of Artificial Sequence: Synthetic oligonucleotide
gaugacaagcguacaaucc

SEQ ID NO: 3158993 - RNA, 19 nt, Artificial Sequence
  Description of Artificial Sequence: Synthetic oligonucleotide
cuuaauaaggcaauacaaa

SEQ ID NO: 3158994 - RNA, 19 nt, Artificial Sequence
  Description of Artificial Sequence: Synthetic oligonucleotide
uagaaagauacuguuuacc

SEQ ID NO: 3158995 - RNA, 19 nt, Artificial Sequence
  Description of Artificial Sequence: Synthetic oligonucleotide
ugaguauuggauuugccuu

SEQ ID NO: 3158996 - RNA, 19 nt, Artificial Sequence
  Description of Artificial Sequence: Synthetic oligonucleotide
ucuacacauucacaagccc

SEQ ID NO: 3158997 - RNA, 19 nt, Artificial Sequence
  Description of Artificial Sequence: Synthetic oligonucleotide
acaagaucgaugucacuag

SEQ ID NO: 3158998 - RNA, 19 nt, Artificial Sequence
  Description of Artificial Sequence: Synthetic oligonucleotide
aauguucaguguauacacg

SEQ ID NO: 3158999 - RNA, 19 nt, Artificial Sequence
  Description of Artificial Sequence: Synthetic oligonucleotide
ucccacaguaguaagcaug

SEQ ID NO: 3159000 - RNA, 19 nt, Artificial Sequence
  Description of Artificial Sequence: Synthetic oligonucleotide
auuaaggucccucuguaau

SEQ ID NO: 3159001 - RNA, 19 nt, Artificial Sequence
  Description of Artificial Sequence: Synthetic oligonucleotide
aagaacggaagagccuugc

SEQ ID NO: 3159002 - RNA, 19 nt, Artificial Sequence
  Description of Artificial Sequence: Synthetic oligonucleotide
uuaggagaacaccauaguu

SEQ ID NO: 3159003 - RNA, 19 nt, Artificial Sequence
  Description of Artificial Sequence: Synthetic oligonucleotide
auguucaguguauacacga

SEQ ID NO: 3159004 - RNA, 19 nt, Artificial Sequence
  Description of Artificial Sequence: Synthetic oligonucleotide
guaucuacuaucaagggaa

SEQ ID NO: 3159005 - RNA, 19 nt, Artificial Sequence
  Description of Artificial Sequence: Synthetic oligonucleotide
aucccuaaaagccaacagu

SEQ ID NO: 3159006 - RNA, 19 nt, Artificial Sequence
  Description of Artificial Sequence: Synthetic oligonucleotide
uacauauauaaaggaaucu

SEQ ID NO: 3159007 - RNA, 19 nt, Artificial Sequence
  Description of Artificial Sequence: Synthetic oligonucleotide
uuagaaagauacuguuuac

SEQ ID NO: 3159008 - RNA, 19 nt, Artificial Sequence
  Description of Artificial Sequence: Synthetic oligonucleotide
agucaaaauaauaucacau

SEQ ID NO: 3159009 - RNA, 19 nt, Artificial Sequence
  Description of Artificial Sequence: Synthetic oligonucleotide
augacaagcguacaaucca

SEQ ID NO: 3159010 - RNA, 19 nt, Artificial Sequence
  Description of Artificial Sequence: Synthetic oligonucleotide
gaguauuggauuugccuug

SEQ ID NO: 3159011 - RNA, 19 nt, Artificial Sequence
  Description of Artificial Sequence: Synthetic oligonucleotide
gaucgacaauaccaaaagc

SEQ ID NO: 3159012 - RNA, 19 nt, Artificial Sequence
  Description of Artificial Sequence: Synthetic oligonucleotide
aauggucugauuggucuuc

SEQ ID NO: 3159013 - RNA, 19 nt, Artificial Sequence
  Description of Artificial Sequence: Synthetic oligonucleotide
agagaggauaaagaauggg

SEQ ID NO: 3159014 - RNA, 19 nt, Artificial Sequence
  Description of Artificial Sequence: Synthetic oligonucleotide
aauguaacacagaucucug

SEQ ID NO: 3159015 - RNA, 19 nt, Artificial Sequence
  Description of Artificial Sequence: Synthetic oligonucleotide
aacacagaucucugcaggu

SEQ ID NO: 3159016 - RNA, 19 nt, Artificial Sequence
  Description of Artificial Sequence: Synthetic oligonucleotide
aaacgucagcaguacagga

SEQ ID NO: 3159017 - RNA, 19 nt, Artificial Sequence
  Description of Artificial Sequence: Synthetic oligonucleotide
cucuauuaggagaacacca

SEQ ID NO: 3159018 - RNA, 19 nt, Artificial Sequence
  Description of Artificial Sequence: Synthetic oligonucleotide
guuuacaauuacucucucc

SEQ ID NO: 3159019 - RNA, 19 nt, Artificial Sequence
  Description of Artificial Sequence: Synthetic oligonucleotide
uaucaagggaacaccauuu

SEQ ID NO: 3159020 - RNA, 19 nt, Artificial Sequence
  Description of Artificial Sequence: Synthetic oligonucleotide
cuauaagaaccaauuccac

SEQ ID NO: 3159021 - RNA, 19 nt, Artificial Sequence
  Description of Artificial Sequence: Synthetic oligonucleotide
aauuccuuuaaucaaagac

SEQ ID NO: 3159022 - RNA, 19 nt, Artificial Sequence
  Description of Artificial Sequence: Synthetic oligonucleotide
aagaauguggaucaaccac

SEQ ID NO: 3159023 - RNA, 19 nt, Artificial Sequence
  Description of Artificial Sequence: Synthetic oligonucleotide
auauauacaauauaugcug

SEQ ID NO: 3159024 - RNA, 19 nt, Artificial Sequence
  Description of Artificial Sequence: Synthetic oligonucleotide
uacuucauuaaacagagug

SEQ ID NO: 3159025 - RNA, 19 nt, Artificial Sequence
  Description of Artificial Sequence: Synthetic oligonucleotide
ucaaagacaaucaugacaa

SEQ ID NO: 3159026 - RNA, 19 nt, Artificial Sequence
  Description of Artificial Sequence: Synthetic oligonucleotide
uggauuuacacccauaugu

SEQ ID NO: 3159027 - RNA, 19 nt, Artificial Sequence
  Description of Artificial Sequence: Synthetic oligonucleotide
uacuaaacaaucuucaucu

SEQ ID NO: 3159028 - RNA, 19 nt, Artificial Sequence
  Description of Artificial Sequence: Synthetic oligonucleotide
auuaauucaauaucauuuc

SEQ ID NO: 3159029 - RNA, 19 nt, Artificial Sequence
  Description of Artificial Sequence: Synthetic oligonucleotide
aauucuucagcuucuagug

SEQ ID NO: 3159030 - RNA, 19 nt, Artificial Sequence
  Description of Artificial Sequence: Synthetic oligonucleotide
aauucaauaucauuucugu

SEQ ID NO: 3159031 - RNA, 19 nt, Artificial Sequence
  Description of Artificial Sequence: Synthetic oligonucleotide
aacauuuaaucauacauau

SEQ ID NO: 3159032 - RNA, 19 nt, Artificial Sequence
  Description of Artificial Sequence: Synthetic oligonucleotide
cuuaacauaucaaaugagc

SEQ ID NO: 3159033 - RNA, 19 nt, Artificial Sequence
  Description of Artificial Sequence: Synthetic oligonucleotide
aacaugaaagauguuuucc

SEQ ID NO: 3159034 - RNA, 19 nt, Artificial Sequence
  Description of Artificial Sequence: Synthetic oligonucleotide
uuuuccaggagucauagac

SEQ ID NO: 3159035 - RNA, 19 nt, Artificial Sequence
  Description of Artificial Sequence: Synthetic oligonucleotide
uuaacauaucaaaugagcu

SEQ ID NO: 3159036 - RNA, 19 nt, Artificial Sequence
  Description of Artificial Sequence: Synthetic oligonucleotide
ucauuaaacagaguguugg

SEQ ID NO: 3159037 - RNA, 19 nt, Artificial Sequence
  Description of Artificial Sequence: Synthetic oligonucleotide
aacauaucuuaacauauca

SEQ ID NO: 3159038 - RNA, 19 nt, Artificial Sequence
  Description of Artificial Sequence: Synthetic oligonucleotide
ugauacuucauuaaacaga

SEQ ID NO: 3159039 - RNA, 19 nt, Artificial Sequence
  Description of Artificial Sequence: Synthetic oligonucleotide
uucuaguggauuuacaccc

SEQ ID NO: 3159040 - RNA, 19 nt, Artificial Sequence
  Description of Artificial Sequence: Synthetic oligonucleotide
agucauagacaauuaauuc

SEQ ID NO: 3159041 - RNA, 19 nt, Artificial Sequence
  Description of Artificial Sequence: Synthetic oligonucleotide
aacucagggcuauaauucc

SEQ ID NO: 3159042 - RNA, 19 nt, Artificial Sequence
  Description of Artificial Sequence: Synthetic oligonucleotide
uucuucauuaaucacuggc

SEQ ID NO: 3159043 - RNA, 19 nt, Artificial Sequence
  Description of Artificial Sequence: Synthetic oligonucleotide
aaacaugaaagauguuuuc

SEQ ID NO: 3159044 - RNA, 19 nt, Artificial Sequence
  Description of Artificial Sequence: Synthetic oligonucleotide
uguauugaacccaacagaa

SEQ ID NO: 3159045 - RNA, 19 nt, Artificial Sequence
  Description of Artificial Sequence: Synthetic oligonucleotide
uauauacaauauaugcugc

SEQ ID NO: 3159046 - RNA, 19 nt, Artificial Sequence
  Description of Artificial Sequence: Synthetic oligonucleotide
uagacaauuaauucaauau

SEQ ID NO: 3159047 - RNA, 19 nt, Artificial Sequence
  Description of Artificial Sequence: Synthetic oligonucleotide
ucauagacaauuaauucaa

SEQ ID NO: 3159048 - RNA, 19 nt, Artificial Sequence
  Description of Artificial Sequence: Synthetic oligonucleotide
aucaaagacaaucaugaca

SEQ ID NO: 3159049 - RNA, 19 nt, Artificial Sequence
  Description of Artificial Sequence: Synthetic oligonucleotide
auuaaacagaguguuggcc

SEQ ID NO: 3159050 - RNA, 19 nt, Artificial Sequence
  Description of Artificial Sequence: Synthetic oligonucleotide
ucuaaaguaugucugcaac

SEQ ID NO: 3159051 - RNA, 19 nt, Artificial Sequence
  Description of Artificial Sequence: Synthetic oligonucleotide
uguauggguuuuauuaaag

SEQ ID NO: 3159052 - RNA, 19 nt, Artificial Sequence
  Description of Artificial Sequence: Synthetic oligonucleotide
uguuggacggaguugauga

SEQ ID NO: 3159053 - RNA, 19 nt, Artificial Sequence
  Description of Artificial Sequence: Synthetic oligonucleotide
uauggguuuuauuaaaggu

SEQ ID NO: 3159054 - RNA, 19 nt, Artificial Sequence
  Description of Artificial Sequence: Synthetic oligonucleotide
uuaaacagaguguuggccu

SEQ ID NO: 3159055 - RNA, 19 nt, Artificial Sequence
  Description of Artificial Sequence: Synthetic oligonucleotide
uugauacuucauuaaacag

SEQ ID NO: 3159056 - RNA, 19 nt, Artificial Sequence
  Description of Artificial Sequence: Synthetic oligonucleotide
uggguuuuauuaaaggugu

SEQ ID NO: 3159057 - RNA, 19 nt, Artificial Sequence
  Description of Artificial Sequence: Synthetic oligonucleotide
ucuucauuaaucacuggcu

SEQ ID NO: 3159058 - RNA, 19 nt, Artificial Sequence
  Description of Artificial Sequence: Synthetic oligonucleotide
uuacuaaacaaucuucauc

SEQ ID NO: 3159059 - RNA, 19 nt, Artificial Sequence
  Description of Artificial Sequence: Synthetic oligonucleotide
ucuugauacuucauuaaac

SEQ ID NO: 3159060 - RNA, 19 nt, Artificial Sequence
  Description of Artificial Sequence: Synthetic oligonucleotide
uuauuaaagguguuuucug

SEQ ID NO: 3159061 - RNA, 19 nt, Artificial Sequence
  Description of Artificial Sequence: Synthetic oligonucleotide
auuaacuaucaaaagcuac

SEQ ID NO: 3159062 - RNA, 19 nt, Artificial Sequence
  Description of Artificial Sequence: Synthetic oligonucleotide
uaauauggcagugaauucc

SEQ ID NO: 3159063 - RNA, 19 nt, Artificial Sequence
  Description of Artificial Sequence: Synthetic oligonucleotide
uuaauucaauaucauuucu

SEQ ID NO: 3159064 - RNA, 19 nt, Artificial Sequence
  Description of Artificial Sequence: Synthetic oligonucleotide
ugaauuccuuuaaucaaag

SEQ ID NO: 3159065 - RNA, 19 nt, Artificial Sequence
  Description of Artificial Sequence: Synthetic oligonucleotide
cagaaaguggaauguaugg

SEQ ID NO: 3159066 - RNA, 19 nt, Artificial Sequence
  Description of Artificial Sequence: Synthetic oligonucleotide
gacggaguugaugagagcg

SEQ ID NO: 3159067 - RNA, 19 nt, Artificial Sequence
  Description of Artificial Sequence: Synthetic oligonucleotide
aaaucucaaaggucuucac

SEQ ID NO: 3159068 - RNA, 19 nt, Artificial Sequence
  Description of Artificial Sequence: Synthetic oligonucleotide
cuuucuucauuaaucacug

SEQ ID NO: 3159069 - RNA, 19 nt, Artificial Sequence
  Description of Artificial Sequence: Synthetic oligonucleotide
cacaaaaucaaagaaggac

SEQ ID NO: 3159070 - RNA, 19 nt, Artificial Sequence
  Description of Artificial Sequence: Synthetic oligonucleotide
uucuucagcaggcaucagg

SEQ ID NO: 3159071 - RNA, 19 nt, Artificial Sequence
  Description of Artificial Sequence: Synthetic oligonucleotide
aacauaucaaaugagcuua

SEQ ID NO: 3159072 - RNA, 19 nt, Artificial Sequence
  Description of Artificial Sequence: Synthetic oligonucleotide
uaggucagaacgcagcugc

SEQ ID NO: 3159073 - RNA, 19 nt, Artificial Sequence
  Description of Artificial Sequence: Synthetic oligonucleotide
guauggguuuuauuaaagg

SEQ ID NO: 3159074 - RNA, 19 nt, Artificial Sequence
  Description of Artificial Sequence: Synthetic oligonucleotide
auguggaucaaccacaaaa

SEQ ID NO: 3159075 - RNA, 19 nt, Artificial Sequence
  Description of Artificial Sequence: Synthetic oligonucleotide
gucauagacaauuaauuca

SEQ ID NO: 3159076 - RNA, 19 nt, Artificial Sequence
  Description of Artificial Sequence: Synthetic oligonucleotide
ugcgagguugucuugggcg

SEQ ID NO: 3159077 - RNA, 19 nt, Artificial Sequence
  Description of Artificial Sequence: Synthetic oligonucleotide
cuugauacuucauuaaaca

SEQ ID NO: 3159078 - RNA, 19 nt, Artificial Sequence
  Description of Artificial Sequence: Synthetic oligonucleotide
agaguuucaacauaucuua

SEQ ID NO: 3159079 - RNA, 19 nt, Artificial Sequence
  Description of Artificial Sequence: Synthetic oligonucleotide
acaaaaucaaagaaggaca

SEQ ID NO: 3159080 - RNA, 19 nt, Artificial Sequence
  Description of Artificial Sequence: Synthetic oligonucleotide
uguuaauuugucaccggca

SEQ ID NO: 3159081 - RNA, 19 nt, Artificial Sequence
  Description of Artificial Sequence: Synthetic oligonucleotide
uucaacauaucuuaacaua

SEQ ID NO: 3159082 - RNA, 19 nt, Artificial Sequence
  Description of Artificial Sequence: Synthetic oligonucleotide
aaucaaagaaggacauugg

SEQ ID NO: 3159083 - RNA, 19 nt, Artificial Sequence
  Description of Artificial Sequence: Synthetic oligonucleotide
ucuagaacugcuucucuug

SEQ ID NO: 3159084 - RNA, 19 nt, Artificial Sequence
  Description of Artificial Sequence: Synthetic oligonucleotide
uugacuccuaauuugugug

SEQ ID NO: 3159085 - RNA, 19 nt, Artificial Sequence
  Description of Artificial Sequence: Synthetic oligonucleotide
auuaaagguguuuucugcu

SEQ ID NO: 3159086 - RNA, 19 nt, Artificial Sequence
  Description of Artificial Sequence: Synthetic oligonucleotide
uuuuguuggacggaguuga

SEQ ID NO: 3159087 - RNA, 19 nt, Artificial Sequence
  Description of Artificial Sequence: Synthetic oligonucleotide
ucugaagccagaacaagaa

SEQ ID NO: 3159088 - RNA, 19 nt, Artificial Sequence
  Description of Artificial Sequence: Synthetic oligonucleotide
uagaguuucaacauaucuu

SEQ ID NO: 3159089 - RNA, 19 nt, Artificial Sequence
  Description of Artificial Sequence: Synthetic oligonucleotide
accggcauucaguaugucc

SEQ ID NO: 3159090 - RNA, 19 nt, Artificial Sequence
  Description of Artificial Sequence: Synthetic oligonucleotide
agaacugcuucucuugcuc

SEQ ID NO: 3159091 - RNA, 19 nt, Artificial Sequence
  Description of Artificial Sequence: Synthetic oligonucleotide
agaaaguggaauguauggg

SEQ ID NO: 3159092 - RNA, 19 nt, Artificial Sequence
  Description of Artificial Sequence: Synthetic oligonucleotide
auguauugaacccaacaga

SEQ ID NO: 3159093 - RNA, 19 nt, Artificial Sequence
  Description of Artificial Sequence: Synthetic oligonucleotide
aacugagcaggcauugccc

SEQ ID NO: 3159094 - RNA, 19 nt, Artificial Sequence
  Description of Artificial Sequence: Synthetic oligonucleotide
acaugaaagauguuuucca

SEQ ID NO: 3159095 - RNA, 19 nt, Artificial Sequence
  Description of Artificial Sequence: Synthetic oligonucleotide
cucuauuaccgguagucgg

SEQ ID NO: 3159096 - RNA, 19 nt, Artificial Sequence
  Description of Artificial Sequence: Synthetic oligonucleotide
uuaaucacuggcucuauua

SEQ ID NO: 3159097 - RNA, 19 nt, Artificial Sequence
  Description of Artificial Sequence: Synthetic oligonucleotide
ucuauuaccgguagucggu

SEQ ID NO: 3159098 - RNA, 19 nt, Artificial Sequence
  Description of Artificial Sequence: Synthetic oligonucleotide
ugaacccaacagaaagugg

SEQ ID NO: 3159099 - RNA, 19 nt, Artificial Sequence
  Description of Artificial Sequence: Synthetic oligonucleotide
uucucuaaaguaugucugc

SEQ ID NO: 3159100 - RNA, 19 nt, Artificial Sequence
  Description of Artificial Sequence: Synthetic oligonucleotide
guuuuguucaauuccguca

SEQ ID NO: 3159101 - RNA, 19 nt, Artificial Sequence
  Description of Artificial Sequence: Synthetic oligonucleotide
ucacggaugaauucuucag

SEQ ID NO: 3159102 - RNA, 19 nt, Artificial Sequence
  Description of Artificial Sequence: Synthetic oligonucleotide
augcauuucaacugagcag

SEQ ID NO: 3159103 - RNA, 19 nt, Artificial Sequence
  Description of Artificial Sequence: Synthetic oligonucleotide
uaaucacuggcucuauuac

SEQ ID NO: 3159104 - RNA, 19 nt, Artificial Sequence
  Description of Artificial Sequence: Synthetic oligonucleotide
uggacggaguugaugagag

SEQ ID NO: 3159105 - RNA, 19 nt, Artificial Sequence
  Description of Artificial Sequence: Synthetic oligonucleotide
acuuaaucgcugcuggcuc

SEQ ID NO: 3159106 - RNA, 19 nt, Artificial Sequence
  Description of Artificial Sequence: Synthetic oligonucleotide
auguuuuccacuguacggg

SEQ ID NO: 3159107 - RNA, 19 nt, Artificial Sequence
  Description of Artificial Sequence: Synthetic oligonucleotide
aauauaugcugcuucccuu

SEQ ID NO: 3159108 - RNA, 19 nt, Artificial Sequence
  Description of Artificial Sequence: Synthetic oligonucleotide
uaugcugcuucccuuucag

SEQ ID NO: 3159109 - RNA, 19 nt, Artificial Sequence
  Description of Artificial Sequence: Synthetic oligonucleotide
uaaaguaugucugcaacaa

SEQ ID NO: 3159110 - RNA, 19 nt, Artificial Sequence
  Description of Artificial Sequence: Synthetic oligonucleotide
uaacauaucaaaugagcuu

SEQ ID NO: 3159111 - RNA, 19 nt, Artificial Sequence
  Description of Artificial Sequence: Synthetic oligonucleotide
ucuguuaauuugucaccgg

SEQ ID NO: 3159112 - RNA, 19 nt, Artificial Sequence
  Description of Artificial Sequence: Synthetic oligonucleotide
uucauuaaucacuggcucu

SEQ ID NO: 3159113 - RNA, 19 nt, Artificial Sequence
  Description of Artificial Sequence: Synthetic oligonucleotide
auuucaacugagcaggcau

SEQ ID NO: 3159114 - RNA, 19 nt, Artificial Sequence
  Description of Artificial Sequence: Synthetic oligonucleotide
auauacaauauaugcugcu

SEQ ID NO: 3159115 - RNA, 19 nt, Artificial Sequence
  Description of Artificial Sequence: Synthetic oligonucleotide
aucaguucguggcuuuggc

SEQ ID NO: 3159116 - RNA, 19 nt, Artificial Sequence
  Description of Artificial Sequence: Synthetic oligonucleotide
caagucugaagccagaaca

SEQ ID NO: 3159117 - RNA, 19 nt, Artificial Sequence
  Description of Artificial Sequence: Synthetic oligonucleotide
uguuuugccugauauuuuc

SEQ ID NO: 3159118 - RNA, 19 nt, Artificial Sequence
  Description of Artificial Sequence: Synthetic oligonucleotide
gacaaguacauuaacuauc

SEQ ID NO: 3159119 - RNA, 19 nt, Artificial Sequence
  Description of Artificial Sequence: Synthetic oligonucleotide
caugaaagauguuuuccac

SEQ ID NO: 3159120 - RNA, 19 nt, Artificial Sequence
  Description of Artificial Sequence: Synthetic oligonucleotide
acuuucuucauuaaucacu

SEQ ID NO: 3159121 - RNA, 19 nt, Artificial Sequence
  Description of Artificial Sequence: Synthetic oligonucleotide
ucugguuucacaauaaaag

SEQ ID NO: 3159122 - RNA, 19 nt, Artificial Sequence
  Description of Artificial Sequence: Synthetic oligonucleotide
ucuuuaaugagguagauuc

SEQ ID NO: 3159123 - RNA, 19 nt, Artificial Sequence
  Description of Artificial Sequence: Synthetic oligonucleotide
uauauaaaucucuaagggg

SEQ ID NO: 3159124 - RNA, 19 nt, Artificial Sequence
  Description of Artificial Sequence: Synthetic oligonucleotide
auauaaaucucuaaggggc

SEQ ID NO: 3159125 - RNA, 19 nt, Artificial Sequence
  Description of Artificial Sequence: Synthetic oligonucleotide
aauaaggagaggcuuacag

SEQ ID NO: 3159126 - RNA, 19 nt, Artificial Sequence
  Description of Artificial Sequence: Synthetic oligonucleotide
cuauauaaaucucuaaggg

SEQ ID NO: 3159127 - RNA, 19 nt, Artificial Sequence
  Description of Artificial Sequence: Synthetic oligonucleotide
cuguacaaaaucuagacag

SEQ ID NO: 3159128 - RNA, 19 nt, Artificial Sequence
  Description of Artificial Sequence: Synthetic oligonucleotide
aaugagguagauuccauca

SEQ ID NO: 3159129 - RNA, 19 nt, Artificial Sequence
  Description of Artificial Sequence: Synthetic oligonucleotide
acagauguacuccuguacc

SEQ ID NO: 3159130 - RNA, 19 nt, Artificial Sequence
  Description of Artificial Sequence: Synthetic oligonucleotide
gauuccaucacccugacaa

SEQ ID NO: 3159131 - RNA, 19 nt, Artificial Sequence
  Description of Artificial Sequence: Synthetic oligonucleotide
ucuuuggcuauauaaaucu

SEQ ID NO: 3159132 - RNA, 19 nt, Artificial Sequence
  Description of Artificial Sequence: Synthetic oligonucleotide
aaaaucuagacaguccauc

SEQ ID NO: 3159133 - RNA, 19 nt, Artificial Sequence
  Description of Artificial Sequence: Synthetic oligonucleotide
uucagcaggacauacagac

SEQ ID NO: 3159134 - RNA, 19 nt, Artificial Sequence
  Description of Artificial Sequence: Synthetic oligonucleotide
uucacaauaaaagugggcu

SEQ ID NO: 3159135 - RNA, 19 nt, Artificial Sequence
  Description of Artificial Sequence: Synthetic oligonucleotide
ugguuucacaauaaaagug

SEQ ID NO: 3159136 - RNA, 19 nt, Artificial Sequence
  Description of Artificial Sequence: Synthetic oligonucleotide
acaaaaucuagacagucca

SEQ ID NO: 3159137 - RNA, 19 nt, Artificial Sequence
  Description of Artificial Sequence: Synthetic oligonucleotide
gcuauauaaaucucuaagg

SEQ ID NO: 3159138 - RNA, 19 nt, Artificial Sequence
  Description of Artificial Sequence: Synthetic oligonucleotide
aaaucuagacaguccaucu

SEQ ID NO: 3159139 - RNA, 19 nt, Artificial Sequence
  Description of Artificial Sequence: Synthetic oligonucleotide
uuuggcuauauaaaucucu

SEQ ID NO: 3159140 - RNA, 19 nt, Artificial Sequence
  Description of Artificial Sequence: Synthetic oligonucleotide
gaagacacggugcagauuc

SEQ ID NO: 3159141 - RNA, 19 nt, Artificial Sequence
  Description of Artificial Sequence: Synthetic oligonucleotide
cuugucaauaaggagaggc

SEQ ID NO: 3159142 - RNA, 19 nt, Artificial Sequence
  Description of Artificial Sequence: Synthetic oligonucleotide
cuugagcuugucaauaagg

SEQ ID NO: 3159143 - RNA, 19 nt, Artificial Sequence
  Description of Artificial Sequence: Synthetic oligonucleotide
uacaaaaucuagacagucc

SEQ ID NO: 3159144 - RNA, 19 nt, Artificial Sequence
  Description of Artificial Sequence: Synthetic oligonucleotide
acggaugucgaacuugagc

SEQ ID NO: 3159145 - RNA, 19 nt, Artificial Sequence
  Description of Artificial Sequence: Synthetic oligonucleotide
acuucagcaggacauacag

SEQ ID NO: 3159146 - RNA, 19 nt, Artificial Sequence
  Description of Artificial Sequence: Synthetic oligonucleotide
auguucagcgaguaguugg

SEQ ID NO: 3159147 - RNA, 19 nt, Artificial Sequence
  Description of Artificial Sequence: Synthetic oligonucleotide
agaacguccucuuggcugc

SEQ ID NO: 3159148 - RNA, 19 nt, Artificial Sequence
  Description of Artificial Sequence: Synthetic oligonucleotide
uugagcuugucaauaagga

SEQ ID NO: 3159149 - RNA, 19 nt, Artificial Sequence
  Description of Artificial Sequence: Synthetic oligonucleotide
uuggucaagugcaugaaga

SEQ ID NO: 3159150 - RNA, 19 nt, Artificial Sequence
  Description of Artificial Sequence: Synthetic oligonucleotide
uccaucuuuggcuauauaa

SEQ ID NO: 3159151 - RNA, 19 nt, Artificial Sequence
  Description of Artificial Sequence: Synthetic oligonucleotide
gucacugggaucuuuaaug

SEQ ID NO: 3159152 - RNA, 19 nt, Artificial Sequence
  Description of Artificial Sequence: Synthetic oligonucleotide
cuugauauggcucuguaca

SEQ ID NO: 3159153 - RNA, 19 nt, Artificial Sequence
  Description of Artificial Sequence: Synthetic oligonucleotide
uaaggagaggcuuacagau

SEQ ID NO: 3159154 - RNA, 19 nt, Artificial Sequence
  Description of Artificial Sequence: Synthetic oligonucleotide
uuuaaugagguagauucca

SEQ ID NO: 3159155 - RNA, 19 nt, Artificial Sequence
  Description of Artificial Sequence: Synthetic oligonucleotide
ucuguacaaaaucuagaca

SEQ ID NO: 3159156 - RNA, 19 nt, Artificial Sequence
  Description of Artificial Sequence: Synthetic oligonucleotide
cucuguacaaaaucuagac

SEQ ID NO: 3159157 - RNA, 19 nt, Artificial Sequence
  Description of Artificial Sequence: Synthetic oligonucleotide
ugagguagauuccaucacc

SEQ ID NO: 3159158 - RNA, 19 nt, Artificial Sequence
  Description of Artificial Sequence: Synthetic oligonucleotide
ucucuaaggggcuccaagg

SEQ ID NO: 3159159 - RNA, 19 nt, Artificial Sequence
  Description of Artificial Sequence: Synthetic oligonucleotide
uuucacaauaaaagugggc

SEQ ID NO: 3159160 - RNA, 19 nt, Artificial Sequence
  Description of Artificial Sequence: Synthetic oligonucleotide
gguuucacaauaaaagugg

SEQ ID NO: 3159161 - RNA, 19 nt, Artificial Sequence
  Description of Artificial Sequence: Synthetic oligonucleotide
gaguggaugaacuugccac

SEQ ID NO: 3159162 - RNA, 19 nt, Artificial Sequence
  Description of Artificial Sequence: Synthetic oligonucleotide
gagggucccaguuaggcgg

SEQ ID NO: 3159163 - RNA, 19 nt, Artificial Sequence
  Description of Artificial Sequence: Synthetic oligonucleotide
ggcuauauaaaucucuaag

SEQ ID NO: 3159164 - RNA, 19 nt, Artificial Sequence
  Description of Artificial Sequence: Synthetic oligonucleotide
agugcaugaagacacggug

SEQ ID NO: 3159165 - RNA, 19 nt, Artificial Sequence
  Description of Artificial Sequence: Synthetic oligonucleotide
ugagcuugucaauaaggag

SEQ ID NO: 3159166 - RNA, 19 nt, Artificial Sequence
  Description of Artificial Sequence: Synthetic oligonucleotide
cagcaggacauacagacgg

SEQ ID NO: 3159167 - RNA, 19 nt, Artificial Sequence
  Description of Artificial Sequence: Synthetic oligonucleotide
ucuggagggucccaguuag

SEQ ID NO: 3159168 - RNA, 19 nt, Artificial Sequence
  Description of Artificial Sequence: Synthetic oligonucleotide
acuccuguaccacugcugg

SEQ ID NO: 3159169 - RNA, 19 nt, Artificial Sequence
  Description of Artificial Sequence: Synthetic oligonucleotide
ucgaacuugagcuugucaa

SEQ ID NO: 3159170 - RNA, 19 nt, Artificial Sequence
  Description of Artificial Sequence: Synthetic oligonucleotide
uauaaaucucuaaggggcu

SEQ ID NO: 3159171 - RNA, 19 nt, Artificial Sequence
  Description of Artificial Sequence: Synthetic oligonucleotide
uauggcucuguacaaaauc

SEQ ID NO: 3159172 - RNA, 19 nt, Artificial Sequence
  Description of Artificial Sequence: Synthetic oligonucleotide
aggacauacagacggaugu

SEQ ID NO: 3159173 - RNA, 19 nt, Artificial Sequence
  Description of Artificial Sequence: Synthetic oligonucleotide
uagacaguccaucuuuggc

SEQ ID NO: 3159174 - RNA, 19 nt, Artificial Sequence
  Description of Artificial Sequence: Synthetic oligonucleotide
uuaggcggaggucacuggg

SEQ ID NO: 3159175 - RNA, 19 nt, Artificial Sequence
  Description of Artificial Sequence: Synthetic oligonucleotide
uguacaaaaucuagacagu

SEQ ID NO: 3159176 - RNA, 19 nt, Artificial Sequence
  Description of Artificial Sequence: Synthetic oligonucleotide
gagaacguccucuuggcug

SEQ ID NO: 3159177 - RNA, 19 nt, Artificial Sequence
  Description of Artificial Sequence: Synthetic oligonucleotide
ugcaugaagacacggugca

SEQ ID NO: 3159178 - RNA, 19 nt, Artificial Sequence
  Description of Artificial Sequence: Synthetic oligonucleotide
acugggaucuuuaaugagg

SEQ ID NO: 3159179 - RNA, 19 nt, Artificial Sequence
  Description of Artificial Sequence: Synthetic oligonucleotide
acaaccgcuaucugguuuc

SEQ ID NO: 3159180 - RNA, 19 nt, Artificial Sequence
  Description of Artificial Sequence: Synthetic oligonucleotide
uccaucacccugacaaccg

SEQ ID NO: 3159181 - RNA, 19 nt, Artificial Sequence
  Description of Artificial Sequence: Synthetic oligonucleotide
aaugcuggagaacguccuc

SEQ ID NO: 3159182 - RNA, 19 nt, Artificial Sequence
  Description of Artificial Sequence: Synthetic oligonucleotide
cuuuaaugagguagauucc

SEQ ID NO: 3159183 - RNA, 19 nt, Artificial Sequence
  Description of Artificial Sequence: Synthetic oligonucleotide
gaacuugccacuguggaug

SEQ ID NO: 3159184 - RNA, 19 nt, Artificial Sequence
  Description of Artificial Sequence: Synthetic oligonucleotide
acuguggauguucagcgag

SEQ ID NO: 3159185 - RNA, 19 nt, Artificial Sequence
  Description of Artificial Sequence: Synthetic oligonucleotide
gacauacagacggaugucg

SEQ ID NO: 3159186 - RNA, 19 nt, Artificial Sequence
  Description of Artificial Sequence: Synthetic oligonucleotide
augagguagauuccaucac

SEQ ID NO: 3159187 - RNA, 19 nt, Artificial Sequence
  Description of Artificial Sequence: Synthetic oligonucleotide
agacaguccaucuuuggcu

SEQ ID NO: 3159188 - RNA, 19 nt, Artificial Sequence
  Description of Artificial Sequence: Synthetic oligonucleotide
uugucaauaaggagaggcu

SEQ ID NO: 3159189 - RNA, 19 nt, Artificial Sequence
  Description of Artificial Sequence: Synthetic oligonucleotide
ugugcuggcacugucggag

SEQ ID NO: 3159190 - RNA, 19 nt, Artificial Sequence
  Description of Artificial Sequence: Synthetic oligonucleotide
gagcuugucaauaaggaga

SEQ ID NO: 3159191 - RNA, 19 nt, Artificial Sequence
  Description of Artificial Sequence: Synthetic oligonucleotide
ucaagugcaugaagacacg

SEQ ID NO: 3159192 - RNA, 19 nt, Artificial Sequence
  Description of Artificial Sequence: Synthetic oligonucleotide
aggcuuacagauguacucc

SEQ ID NO: 3159193 - RNA, 19 nt, Artificial Sequence
  Description of Artificial Sequence: Synthetic oligonucleotide
uacagauguacuccuguac

SEQ ID NO: 3159194 - RNA, 19 nt, Artificial Sequence
  Description of Artificial Sequence: Synthetic oligonucleotide
aggagaggcuuacagaugu

SEQ ID NO: 3159195 - RNA, 19 nt, Artificial Sequence
  Description of Artificial Sequence: Synthetic oligonucleotide
gucaagugcaugaagacac

SEQ ID NO: 3159196 - RNA, 19 nt, Artificial Sequence
  Description of Artificial Sequence: Synthetic oligonucleotide
auaaggagaggcuuacaga

SEQ ID NO: 3159197 - RNA, 19 nt, Artificial Sequence
  Description of Artificial Sequence: Synthetic oligonucleotide
cuggagaacguccucuugg

SEQ ID NO: 3159198 - RNA, 19 nt, Artificial Sequence
  Description of Artificial Sequence: Synthetic oligonucleotide
ucagcaggacauacagacg

SEQ ID NO: 3159199 - RNA, 19 nt, Artificial Sequence
  Description of Artificial Sequence: Synthetic oligonucleotide
uggauguucagcgaguagu

SEQ ID NO: 3159200 - RNA, 19 nt, Artificial Sequence
  Description of Artificial Sequence: Synthetic oligonucleotide
ucuagacaguccaucuuug

SEQ ID NO: 3159201 - RNA, 19 nt, Artificial Sequence
  Description of Artificial Sequence: Synthetic oligonucleotide
ucggaguggaugaacuugc

SEQ ID NO: 3159202 - RNA, 19 nt, Artificial Sequence
  Description of Artificial Sequence: Synthetic oligonucleotide
ucacugggaucuuuaauga

SEQ ID NO: 3159203 - RNA, 19 nt, Artificial Sequence
  Description of Artificial Sequence: Synthetic oligonucleotide
ugcuucuugauauggcucu

SEQ ID NO: 3159204 - RNA, 19 nt, Artificial Sequence
  Description of Artificial Sequence: Synthetic oligonucleotide
auacagacggaugucgaac

SEQ ID NO: 3159205 - RNA, 19 nt, Artificial Sequence
  Description of Artificial Sequence: Synthetic oligonucleotide
uaguuggucaagugcauga

SEQ ID NO: 3159206 - RNA, 19 nt, Artificial Sequence
  Description of Artificial Sequence: Synthetic oligonucleotide
guuucacaauaaaaguggg

SEQ ID NO: 3159207 - RNA, 19 nt, Artificial Sequence
  Description of Artificial Sequence: Synthetic oligonucleotide
gaugaacuugccacugugg

SEQ ID NO: 3159208 - RNA, 19 nt, Artificial Sequence
  Description of Artificial Sequence: Synthetic oligonucleotide
uuggcuauauaaaucucua

SEQ ID NO: 3159209 - RNA, 19 nt, Artificial Sequence
  Description of Artificial Sequence: Synthetic oligonucleotide
ucuaaggggcuccaaggac

SEQ ID NO: 3159210 - RNA, 19 nt, Artificial Sequence
  Description of Artificial Sequence: Synthetic oligonucleotide
augaacuugccacugugga

SEQ ID NO: 3159211 - RNA, 19 nt, Artificial Sequence
  Description of Artificial Sequence: Synthetic oligonucleotide
gaggcuuacagauguacuc

SEQ ID NO: 3159212 - RNA, 19 nt, Artificial Sequence
  Description of Artificial Sequence: Synthetic oligonucleotide
aucuuuggcuauauaaauc

SEQ ID NO: 3159213 - RNA, 19 nt, Artificial Sequence
  Description of Artificial Sequence: Synthetic oligonucleotide
gggaucuuuaaugagguag

SEQ ID NO: 3159214 - RNA, 19 nt, Artificial Sequence
  Description of Artificial Sequence: Synthetic oligonucleotide
aucucuaaggggcuccaag

SEQ ID NO: 3159215 - RNA, 19 nt, Artificial Sequence
  Description of Artificial Sequence: Synthetic oligonucleotide
uucagcgaguaguugguca

SEQ ID NO: 3159216 - RNA, 19 nt, Artificial Sequence
  Description of Artificial Sequence: Synthetic oligonucleotide
gaugucgaacuugagcuug

SEQ ID NO: 3159217 - RNA, 19 nt, Artificial Sequence
  Description of Artificial Sequence: Synthetic oligonucleotide
aaggacuucagcaggacau

SEQ ID NO: 3159218 - RNA, 19 nt, Artificial Sequence
  Description of Artificial Sequence: Synthetic oligonucleotide
acacggugcagauucuggg

SEQ ID NO: 3159219 - RNA, 19 nt, Artificial Sequence
  Description of Artificial Sequence: Synthetic oligonucleotide
ucuugauauggcucuguac

SEQ ID NO: 3159220 - RNA, 19 nt, Artificial Sequence
  Description of Artificial Sequence: Synthetic oligonucleotide
cuagacaguccaucuuugg

SEQ ID NO: 3159221 - RNA, 19 nt, Artificial Sequence
  Description of Artificial Sequence: Synthetic oligonucleotide
aaugcuaaaacacacacuc

SEQ ID NO: 3159222 - RNA, 19 nt, Artificial Sequence
  Description of Artificial Sequence: Synthetic oligonucleotide
aaaacagauacucauuuuc

SEQ ID NO: 3159223 - RNA, 19 nt, Artificial Sequence
  Description of Artificial Sequence: Synthetic oligonucleotide
acugcuaagauccagcugc

SEQ ID NO: 3159224 - RNA, 19 nt, Artificial Sequence
  Description of Artificial Sequence: Synthetic oligonucleotide
augucacuaaaauauaccc

SEQ ID NO: 3159225 - RNA, 19 nt, Artificial Sequence
  Description of Artificial Sequence: Synthetic oligonucleotide
gaugcaaacauauuucuag

SEQ ID NO: 3159226 - RNA, 19 nt, Artificial Sequence
  Description of Artificial Sequence: Synthetic oligonucleotide
aaaaccauuucccugucuc

SEQ ID NO: 3159227 - RNA, 19 nt, Artificial Sequence
  Description of Artificial Sequence: Synthetic oligonucleotide
uguuaaagaccaaagacca

SEQ ID NO: 3159228 - RNA, 19 nt, Artificial Sequence
  Description of Artificial Sequence: Synthetic oligonucleotide
ugcuaaaacacacacuccg

SEQ ID NO: 3159229 - RNA, 19 nt, Artificial Sequence
  Description of Artificial Sequence: Synthetic oligonucleotide
acaaaguaaaagcuaacac

SEQ ID NO: 3159230 - RNA, 19 nt, Artificial Sequence
  Description of Artificial Sequence: Synthetic oligonucleotide
ugauuauagaucuagacau

SEQ ID NO: 3159231 - RNA, 19 nt, Artificial Sequence
  Description of Artificial Sequence: Synthetic oligonucleotide
acuaaaauauacccugacc

SEQ ID NO: 3159232 - RNA, 19 nt, Artificial Sequence
  Description of Artificial Sequence: Synthetic oligonucleotide
aauaaugaauaauuaacuu

SEQ ID NO: 3159233 - RNA, 19 nt, Artificial Sequence
  Description of Artificial Sequence: Synthetic oligonucleotide
aaguugaccaccugugagc

SEQ ID NO: 3159234 - RNA, 19 nt, Artificial Sequence
  Description of Artificial Sequence: Synthetic oligonucleotide
uucaauuauauucugacuu

SEQ ID NO: 3159235 - RNA, 19 nt, Artificial Sequence
  Description of Artificial Sequence: Synthetic oligonucleotide
uaaaugcuaaaacacacac

SEQ ID NO: 3159236 - RNA, 19 nt, Artificial Sequence
  Description of Artificial Sequence: Synthetic oligonucleotide
uaaguuuagccccaaaugu

SEQ ID NO: 3159237 - RNA, 19 nt, Artificial Sequence
  Description of Artificial Sequence: Synthetic oligonucleotide
uagaucuagacauaggaga

SEQ ID NO: 3159238 - RNA, 19 nt, Artificial Sequence
  Description of Artificial Sequence: Synthetic oligonucleotide
cuaaaauauacccugacca

SEQ ID NO: 3159239 - RNA, 19 nt, Artificial Sequence
  Description of Artificial Sequence: Synthetic oligonucleotide
auuaaugugacuacugcac

SEQ ID NO: 3159240 - RNA, 19 nt, Artificial Sequence
  Description of Artificial Sequence: Synthetic oligonucleotide
uaaaauauacccugaccag

SEQ ID NO: 3159241 - RNA, 19 nt, Artificial Sequence
  Description of Artificial Sequence: Synthetic oligonucleotide
gaaaucaaaacagauacuc

SEQ ID NO: 3159242 - RNA, 19 nt, Artificial Sequence
  Description of Artificial Sequence: Synthetic oligonucleotide
aggaaaacaagccagcuca

SEQ ID NO: 3159243 - RNA, 19 nt, Artificial Sequence
  Description of Artificial Sequence: Synthetic oligonucleotide
agcuauaacaaucaugccu

SEQ ID NO: 3159244 - RNA, 19 nt, Artificial Sequence
  Description of Artificial Sequence: Synthetic oligonucleotide
guucucugcauuuugagcc

SEQ ID NO: 3159245 - RNA, 19 nt, Artificial Sequence
  Description of Artificial Sequence: Synthetic oligonucleotide
uuacaggacaccaaguaca

SEQ ID NO: 3159246 - RNA, 19 nt, Artificial Sequence
  Description of Artificial Sequence: Synthetic oligonucleotide
aaggaaaacaagccagcuc

SEQ ID NO: 3159247 - RNA, 19 nt, Artificial Sequence
  Description of Artificial Sequence: Synthetic oligonucleotide
aguucucugcauuuugagc

SEQ ID NO: 3159248 - RNA, 19 nt, Artificial Sequence
  Description of Artificial Sequence: Synthetic oligonucleotide
aguaguguaagaacuauuc

SEQ ID NO: 3159249 - RNA, 19 nt, Artificial Sequence
  Description of Artificial Sequence: Synthetic oligonucleotide
uauuaaugugacuacugca

SEQ ID NO: 3159250 - RNA, 19 nt, Artificial Sequence
  Description of Artificial Sequence: Synthetic oligonucleotide
auugaugcaaacauauuuc

SEQ ID NO: 3159251 - RNA, 19 nt, Artificial Sequence
  Description of Artificial Sequence: Synthetic oligonucleotide
uggucugucaccaauuugu

SEQ ID NO: 3159252 - RNA, 19 nt, Artificial Sequence
  Description of Artificial Sequence: Synthetic oligonucleotide
uuugcaguaguguaagaac

SEQ ID NO: 3159253 - RNA, 19 nt, Artificial Sequence
  Description of Artificial Sequence: Synthetic oligonucleotide
uccuaaguuacccacggga

SEQ ID NO: 3159254 - RNA, 19 nt, Artificial Sequence
  Description of Artificial Sequence: Synthetic oligonucleotide
cuaaguuuagccccaaaug

SEQ ID NO: 3159255 - RNA, 19 nt, Artificial Sequence
  Description of Artificial Sequence: Synthetic oligonucleotide
uugguuagaugaaugacuc

SEQ ID NO: 3159256 - RNA, 19 nt, Artificial Sequence
  Description of Artificial Sequence: Synthetic oligonucleotide
uuaugauccaguucagaca

SEQ ID NO: 3159257 - RNA, 19 nt, Artificial Sequence
  Description of Artificial Sequence: Synthetic oligonucleotide
ugucacuaaaauauacccu

SEQ ID NO: 3159258 - RNA, 19 nt, Artificial Sequence
  Description of Artificial Sequence: Synthetic oligonucleotide
aaucuucuauuaaugugac

SEQ ID NO: 3159259 - RNA, 19 nt, Artificial Sequence
  Description of Artificial Sequence: Synthetic oligonucleotide
aaaauauacccugaccagu

SEQ ID NO: 3159260 - RNA, 19 nt, Artificial Sequence
  Description of Artificial Sequence: Synthetic oligonucleotide
acuuacaucccauucauua

SEQ ID NO: 3159261 - RNA, 19 nt, Artificial Sequence
  Description of Artificial Sequence: Synthetic oligonucleotide
aacagcagaccuuugcagu

SEQ ID NO: 3159262 - RNA, 19 nt, Artificial Sequence
  Description of Artificial Sequence: Synthetic oligonucleotide
uaggcucucuccaaggucc

SEQ ID NO: 3159263 - RNA, 19 nt, Artificial Sequence
  Description of Artificial Sequence: Synthetic oligonucleotide
ucucaauucacagucucag

SEQ ID NO: 3159264 - RNA, 19 nt, Artificial Sequence
  Description of Artificial Sequence: Synthetic oligonucleotide
guaaguuuguccugguugc

SEQ ID NO: 3159265 - RNA, 19 nt, Artificial Sequence
  Description of Artificial Sequence: Synthetic oligonucleotide
ucaauuauauucugacuuc

SEQ ID NO: 3159266 - RNA, 19 nt, Artificial Sequence
  Description of Artificial Sequence: Synthetic oligonucleotide
aaggagacaaaugucuucu

SEQ ID NO: 3159267 - RNA, 19 nt, Artificial Sequence
  Description of Artificial Sequence: Synthetic oligonucleotide
ucuccaggcuucuaguuag

SEQ ID NO: 3159268 - RNA, 19 nt, Artificial Sequence
  Description of Artificial Sequence: Synthetic oligonucleotide
uaaguuacccacgggacag

SEQ ID NO: 3159269 - RNA, 19 nt, Artificial Sequence
  Description of Artificial Sequence: Synthetic oligonucleotide
acaaucaugccuucgucug

SEQ ID NO: 3159270 - RNA, 19 nt, Artificial Sequence
  Description of Artificial Sequence: Synthetic oligonucleotide
auauggcgcagauccaagc

SEQ ID NO: 3159271 - RNA, 19 nt, Artificial Sequence
  Description of Artificial Sequence: Synthetic oligonucleotide
cuuuguaacuucaggcagc

SEQ ID NO: 3159272 - RNA, 19 nt, Artificial Sequence
  Description of Artificial Sequence: Synthetic oligonucleotide
aggaaggucccucuguuag

SEQ ID NO: 3159273 - RNA, 19 nt, Artificial Sequence
  Description of Artificial Sequence: Synthetic oligonucleotide
aaaagucaagguuuugcuu

SEQ ID NO: 3159274 - RNA, 19 nt, Artificial Sequence
  Description of Artificial Sequence: Synthetic oligonucleotide
cucacacacacacacacac

SEQ ID NO: 3159275 - RNA, 19 nt, Artificial Sequence
  Description of Artificial Sequence: Synthetic oligonucleotide
aucaguaaguuuguccugg

SEQ ID NO: 3159276 - RNA, 19 nt, Artificial Sequence
  Description of Artificial Sequence: Synthetic oligonucleotide
aagucaaaccucauuauaa

SEQ ID NO: 3159277 - RNA, 19 nt, Artificial Sequence
  Description of Artificial Sequence: Synthetic oligonucleotide
uuuugagcccagcugcuug

SEQ ID NO: 3159278 - RNA, 19 nt, Artificial Sequence
  Description of Artificial Sequence: Synthetic oligonucleotide
uuagcacgcgugcacaagc

SEQ ID NO: 3159279 - RNA, 19 nt, Artificial Sequence
  Description of Artificial Sequence: Synthetic oligonucleotide
cugauagguacucagauaa

SEQ ID NO: 3159280 - RNA, 19 nt, Artificial Sequence
  Description of Artificial Sequence: Synthetic oligonucleotide
ucaccaauuuguuuuccug

SEQ ID NO: 3159281 - RNA, 19 nt, Artificial Sequence
  Description of Artificial Sequence: Synthetic oligonucleotide
ugaguccuucaucaguaag

SEQ ID NO: 3159282 - RNA, 19 nt, Artificial Sequence
  Description of Artificial Sequence: Synthetic oligonucleotide
auucgugacugguuccagc

SEQ ID NO: 3159283 - RNA, 19 nt, Artificial Sequence
  Description of Artificial Sequence: Synthetic oligonucleotide
caccaauuuguuuuccugc

SEQ ID NO: 3159284 - RNA, 19 nt, Artificial Sequence
  Description of Artificial Sequence: Synthetic oligonucleotide
cacacacacacacacacac

SEQ ID NO: 3159285 - RNA, 19 nt, Artificial Sequence
  Description of Artificial Sequence: Synthetic oligonucleotide
uuacaucccauucauuaau

SEQ ID NO: 3159286 - RNA, 19 nt, Artificial Sequence
  Description of Artificial Sequence: Synthetic oligonucleotide
cauacuggaguucagggca

SEQ ID NO: 3159287 - RNA, 19 nt, Artificial Sequence
  Description of Artificial Sequence: Synthetic oligonucleotide
cucucucacacacacacac

SEQ ID NO: 3159288 - RNA, 19 nt, Artificial Sequence
  Description of Artificial Sequence: Synthetic oligonucleotide
ucacuaaaauauacccuga

SEQ ID NO: 3159289 - RNA, 19 nt, Artificial Sequence
  Description of Artificial Sequence: Synthetic oligonucleotide
uuuguaacuucaggcagcc

SEQ ID NO: 3159290 - RNA, 19 nt, Artificial Sequence
  Description of Artificial Sequence: Synthetic oligonucleotide
agaucuagacauaggagag

SEQ ID NO: 3159291 - RNA, 19 nt, Artificial Sequence
  Description of Artificial Sequence: Synthetic oligonucleotide
uccaguucggugauauggc

SEQ ID NO: 3159292 - RNA, 19 nt, Artificial Sequence
  Description of Artificial Sequence: Synthetic oligonucleotide
uguuuacaccuguaggcug

SEQ ID NO: 3159293 - RNA, 19 nt, Artificial Sequence
  Description of Artificial Sequence: Synthetic oligonucleotide
uggaguucagggcagugcu

SEQ ID NO: 3159294 - RNA, 19 nt, Artificial Sequence
  Description of Artificial Sequence: Synthetic oligonucleotide
gaccuuaacacaucauuga

SEQ ID NO: 3159295 - RNA, 19 nt, Artificial Sequence
  Description of Artificial Sequence: Synthetic oligonucleotide
ugugagcacagugagucag

SEQ ID NO: 3159296 - RNA, 19 nt, Artificial Sequence
  Description of Artificial Sequence: Synthetic oligonucleotide
aaaccauuucccugucuca

SEQ ID NO: 3159297 - RNA, 19 nt, Artificial Sequence
  Description of Artificial Sequence: Synthetic oligonucleotide
uagguacucagauaacuaa

SEQ ID NO: 3159298 - RNA, 19 nt, Artificial Sequence
  Description of Artificial Sequence: Synthetic oligonucleotide
augaaugacuccuuuggaa

SEQ ID NO: 3159299 - RNA, 19 nt, Artificial Sequence
  Description of Artificial Sequence: Synthetic oligonucleotide
cucucacacacacacacac

SEQ ID NO: 3159300 - RNA, 19 nt, Artificial Sequence
  Description of Artificial Sequence: Synthetic oligonucleotide
cagucaacauacaugugug

SEQ ID NO: 3159301 - RNA, 19 nt, Artificial Sequence
  Description of Artificial Sequence: Synthetic oligonucleotide
aguccaggacacuuaaaug

SEQ ID NO: 3159302 - RNA, 19 nt, Artificial Sequence
  Description of Artificial Sequence: Synthetic oligonucleotide
aucauugaugcaaacauau

SEQ ID NO: 3159303 - RNA, 19 nt, Artificial Sequence
  Description of Artificial Sequence: Synthetic oligonucleotide
agucgcagggguuuucggg

SEQ ID NO: 3159304 - RNA, 19 nt, Artificial Sequence
  Description of Artificial Sequence: Synthetic oligonucleotide
aaaugcuaaaacacacacu

SEQ ID NO: 3159305 - RNA, 19 nt, Artificial Sequence
  Description of Artificial Sequence: Synthetic oligonucleotide
uaauuuacauucguggcuu

SEQ ID NO: 3159306 - RNA, 19 nt, Artificial Sequence
  Description of Artificial Sequence: Synthetic oligonucleotide
ggugucagaccauacugcg

SEQ ID NO: 3159307 - RNA, 19 nt, Artificial Sequence
  Description of Artificial Sequence: Synthetic oligonucleotide
ccaacuaaaauauuuauua

SEQ ID NO: 3159308 - RNA, 19 nt, Artificial Sequence
  Description of Artificial Sequence: Synthetic oligonucleotide
gcaacguucauccaaggac

SEQ ID NO: 3159309 - RNA, 19 nt, Artificial Sequence
  Description of Artificial Sequence: Synthetic oligonucleotide
gaaggagacaaaugucuuc

SEQ ID NO: 3159310 - RNA, 19 nt, Artificial Sequence
  Description of Artificial Sequence: Synthetic oligonucleotide
uacccuaaaauguauucuu

SEQ ID NO: 3159311 - RNA, 19 nt, Artificial Sequence
  Description of Artificial Sequence: Synthetic oligonucleotide
auuucccugucucaauuca

SEQ ID NO: 3159312 - RNA, 19 nt, Artificial Sequence
  Description of Artificial Sequence: Synthetic oligonucleotide
uaaagaccaaagaccacau

SEQ ID NO: 3159313 - RNA, 19 nt, Artificial Sequence
  Description of Artificial Sequence: Synthetic oligonucleotide
gaugaaugacuccuuugga

SEQ ID NO: 3159314 - RNA, 19 nt, Artificial Sequence
  Description of Artificial Sequence: Synthetic oligonucleotide
augcaaacauauuucuagu

SEQ ID NO: 3159315 - RNA, 19 nt, Artificial Sequence
  Description of Artificial Sequence: Synthetic oligonucleotide
caguguuaauguaaaacca

SEQ ID NO: 3159316 - RNA, 19 nt, Artificial Sequence
  Description of Artificial Sequence: Synthetic oligonucleotide
auagcaaguucaaaaguca

SEQ ID NO: 3159317 - RNA, 19 nt, Artificial Sequence
  Description of Artificial Sequence: Synthetic oligonucleotide
cucaucuccaggcuucuag

SEQ ID NO: 3159318 - RNA, 19 nt, Artificial Sequence
  Description of Artificial Sequence: Synthetic oligonucleotide
agcuugguuagaugaauga

SEQ ID NO: 3159319 - RNA, 19 nt, Artificial Sequence
  Description of Artificial Sequence: Synthetic oligonucleotide
augccuucgucugagaucu

SEQ ID NO: 3159320 - RNA, 19 nt, Artificial Sequence
  Description of Artificial Sequence: Synthetic oligonucleotide
gucagaaauguugaguuca

SEQ ID NO: 3159321 - RNA, 19 nt, Artificial Sequence
  Description of Artificial Sequence: Synthetic oligonucleotide
uguaguauaaauaacacuc

SEQ ID NO: 3159322 - RNA, 19 nt, Artificial Sequence
  Description of Artificial Sequence: Synthetic oligonucleotide
aguuccaucagcuuggugc

SEQ ID NO: 3159323 - RNA, 19 nt, Artificial Sequence
  Description of Artificial Sequence: Synthetic oligonucleotide
aaauaacacucuuuaaagc

SEQ ID NO: 3159324 - RNA, 19 nt, Artificial Sequence
  Description of Artificial Sequence: Synthetic oligonucleotide
ucuagaaaggacaguaucg

SEQ ID NO: 3159325 - RNA, 19 nt, Artificial Sequence
  Description of Artificial Sequence: Synthetic oligonucleotide
aaauaggagaaagaaaagg

SEQ ID NO: 3159326 - RNA, 19 nt, Artificial Sequence
  Description of Artificial Sequence: Synthetic oligonucleotide
uuaaggaagaaacuguaag

SEQ ID NO: 3159327 - RNA, 19 nt, Artificial Sequence
  Description of Artificial Sequence: Synthetic oligonucleotide
uaguguuuggaccucaucg

SEQ ID NO: 3159328 - RNA, 19 nt, Artificial Sequence
  Description of Artificial Sequence: Synthetic oligonucleotide
uuaucaaucaagauuacau

SEQ ID NO: 3159329 - RNA, 19 nt, Artificial Sequence
  Description of Artificial Sequence: Synthetic oligonucleotide
uucuguaguauaaauaaca

SEQ ID NO: 3159330 - RNA, 19 nt, Artificial Sequence
  Description of Artificial Sequence: Synthetic oligonucleotide
auaaauaacacucuuuaaa

SEQ ID NO: 3159331 - RNA, 19 nt, Artificial Sequence
  Description of Artificial Sequence: Synthetic oligonucleotide
aaggcaaauauuuuaauua

SEQ ID NO: 3159332 - RNA, 19 nt, Artificial Sequence
  Description of Artificial Sequence: Synthetic oligonucleotide
uaugugaagaauuuguuuc

SEQ ID NO: 3159333 - RNA, 19 nt, Artificial Sequence
  Description of Artificial Sequence: Synthetic oligonucleotide
auaagugcccguuuguccc

SEQ ID NO: 3159334 - RNA, 19 nt, Artificial Sequence
  Description of Artificial Sequence: Synthetic oligonucleotide
uguacauuaaauuguaguc

SEQ ID NO: 3159335 - RNA, 19 nt, Artificial Sequence
  Description of Artificial Sequence: Synthetic oligonucleotide
uagaguuugucucaggagc

SEQ ID NO: 3159336 - RNA, 19 nt, Artificial Sequence
  Description of Artificial Sequence: Synthetic oligonucleotide
ucaacuuugguaaugcaac

SEQ ID NO: 3159337 - RNA, 19 nt, Artificial Sequence
  Description of Artificial Sequence: Synthetic oligonucleotide
uguacaaccucugacagag

SEQ ID NO: 3159338 - RNA, 19 nt, Artificial Sequence
  Description of Artificial Sequence: Synthetic oligonucleotide
uuuucaagcacacaggcua

SEQ ID NO: 3159339 - RNA, 19 nt, Artificial Sequence
  Description of Artificial Sequence: Synthetic oligonucleotide
aaauauucaguaguguuug

SEQ ID NO: 3159340 - RNA, 19 nt, Artificial Sequence
  Description of Artificial Sequence: Synthetic oligonucleotide
uguauuuacacagugaaua

SEQ ID NO: 3159341 - RNA, 19 nt, Artificial Sequence
  Description of Artificial Sequence: Synthetic oligonucleotide
augcaugcacgacagaugc

SEQ ID NO: 3159342 - RNA, 19 nt, Artificial Sequence
  Description of Artificial Sequence: Synthetic oligonucleotide
agauaaacucugaauaugc

SEQ ID NO: 3159343 - RNA, 19 nt, Artificial Sequence
  Description of Artificial Sequence: Synthetic oligonucleotide
cuuuggaugugcaacagag

SEQ ID NO: 3159344 - RNA, 19 nt, Artificial Sequence
  Description of Artificial Sequence: Synthetic oligonucleotide
gaauuaucaaucaagauua

SEQ ID NO: 3159345 - RNA, 19 nt, Artificial Sequence
  Description of Artificial Sequence: Synthetic oligonucleotide
ucuguaguauaaauaacac

SEQ ID NO: 3159346 - RNA, 19 nt, Artificial Sequence
  Description of Artificial Sequence: Synthetic oligonucleotide
acaguauugcuacacauug

SEQ ID NO: 3159347 - RNA, 19 nt, Artificial Sequence
  Description of Artificial Sequence: Synthetic oligonucleotide
aaaggcaaauauuuuaauu

SEQ ID NO: 3159348 - RNA, 19 nt, Artificial Sequence
  Description of Artificial Sequence: Synthetic oligonucleotide
uaaggaagaaacuguaaga

SEQ ID NO: 3159349 - RNA, 19 nt, Artificial Sequence
  Description of Artificial Sequence: Synthetic oligonucleotide
aagagaacgaauguacaag

SEQ ID NO: 3159350 - RNA, 19 nt, Artificial Sequence
  Description of Artificial Sequence: Synthetic oligonucleotide
agcaaaguuaacucaaaug

SEQ ID NO: 3159351 - RNA, 19 nt, Artificial Sequence
  Description of Artificial Sequence: Synthetic oligonucleotide
uacgaaaagaugcaugcac

SEQ ID NO: 3159352 - RNA, 19 nt, Artificial Sequence
  Description of Artificial Sequence: Synthetic oligonucleotide
uagucuaaaggcaauucug

SEQ ID NO: 3159353 - RNA, 19 nt, Artificial Sequence
  Description of Artificial Sequence: Synthetic oligonucleotide
agcugacaaacuuggaccc

SEQ ID NO: 3159354 - RNA, 19 nt, Artificial Sequence
  Description of Artificial Sequence: Synthetic oligonucleotide
cucaaaugaacacucauuc

SEQ ID NO: 3159355 - RNA, 19 nt, Artificial Sequence
  Description of Artificial Sequence: Synthetic oligonucleotide
uaaauauucaguaguguuu

SEQ ID NO: 3159356 - RNA, 19 nt, Artificial Sequence
  Description of Artificial Sequence: Synthetic oligonucleotide
uuagucuaaaggcaauucu

SEQ ID NO: 3159357 - RNA, 19 nt, Artificial Sequence
  Description of Artificial Sequence: Synthetic oligonucleotide
uccauguuuaguuccauca

SEQ ID NO: 3159358 - RNA, 19 nt, Artificial Sequence
  Description of Artificial Sequence: Synthetic oligonucleotide
ugaacacucauucuucugu

SEQ ID NO: 3159359 - RNA, 19 nt, Artificial Sequence
  Description of Artificial Sequence: Synthetic oligonucleotide
ucaaucaagauuacaucac

SEQ ID NO: 3159360 - RNA, 19 nt, Artificial Sequence
  Description of Artificial Sequence: Synthetic oligonucleotide
uaacuaguaguaaaaucca

SEQ ID NO: 3159361 - RNA, 19 nt, Artificial Sequence
  Description of Artificial Sequence: Synthetic oligonucleotide
aaguuggguaaucuucuuc

SEQ ID NO: 3159362 - RNA, 19 nt, Artificial Sequence
  Description of Artificial Sequence: Synthetic oligonucleotide
aaggacaguaucguucagc

SEQ ID NO: 3159363 - RNA, 19 nt, Artificial Sequence
  Description of Artificial Sequence: Synthetic oligonucleotide
uaagaauggcccuuuacac

SEQ ID NO: 3159364 - RNA, 19 nt, Artificial Sequence
  Description of Artificial Sequence: Synthetic oligonucleotide
ucuacaaaacagcaaaguu

SEQ ID NO: 3159365 - RNA, 19 nt, Artificial Sequence
  Description of Artificial Sequence: Synthetic oligonucleotide
aacagaagucauuucuuca

SEQ ID NO: 3159366 - RNA, 19 nt, Artificial Sequence
  Description of Artificial Sequence: Synthetic oligonucleotide
aaugaacacucauucuucu

SEQ ID NO: 3159367 - RNA, 19 nt, Artificial Sequence
  Description of Artificial Sequence: Synthetic oligonucleotide
uagccuagcaacauaagaa

SEQ ID NO: 3159368 - RNA, 19 nt, Artificial Sequence
  Description of Artificial Sequence: Synthetic oligonucleotide
caagaggugagcaucuggg

SEQ ID NO: 3159369 - RNA, 19 nt, Artificial Sequence
  Description of Artificial Sequence: Synthetic oligonucleotide
aaguuuuagaauauaaauu

SEQ ID NO: 3159370 - RNA, 19 nt, Artificial Sequence
  Description of Artificial Sequence: Synthetic oligonucleotide
uagugcuuugccaaguuca
